United States Patent Application Publication US 2005/0244851 A1 - sequence listing, part 119

SEQ ID NO: 4642693 - DNA, 25 bp, Homo sapien
gtagggataaagtggagctggagat

SEQ ID NO: 4642694 - DNA, 25 bp, Homo sapien
tcagtagggataaagtggagctgga

SEQ ID NO: 4642695 - DNA, 25 bp, Homo sapien
agctggagatgccatcctgctttct

SEQ ID NO: 4642696 - DNA, 25 bp, Homo sapien
gaggaactagcctcttgaagaagtc

SEQ ID NO: 4642697 - DNA, 25 bp, Homo sapien
tgtacccacaagacctgcatcttat

SEQ ID NO: 4642698 - DNA, 25 bp, Homo sapien
gcatcttatcccatcagagtgtttg

SEQ ID NO: 4642699 - DNA, 25 bp, Homo sapien
tctgcattgtaatggcctccctgga

SEQ ID NO: 4642700 - DNA, 25 bp, Homo sapien
tcaagagagttaataccgggtacag

SEQ ID NO: 4642701 - DNA, 25 bp, Homo sapien
aagagtcaagagagttaataccggg

SEQ ID NO: 4642702 - DNA, 25 bp, Homo sapien
taataccgggtacaggcaattggag

SEQ ID NO: 4642703 - DNA, 25 bp, Homo sapien
agagagttaataccgggtacaggca

SEQ ID NO: 4642704 - DNA, 25 bp, Homo sapien
cagtatgttctactctgataggatt

SEQ ID NO: 4642705 - DNA, 25 bp, Homo sapien
cctttctcatatgaagtttgaatga

SEQ ID NO: 4642706 - DNA, 25 bp, Homo sapien
tcctttctcatatgaagtttgaatg

SEQ ID NO: 4642707 - DNA, 25 bp, Homo sapien
tgttctactctgataggattgacta

SEQ ID NO: 4642708 - DNA, 25 bp, Homo sapien
ggtcagggtttacttcagaggcaat

SEQ ID NO: 4642709 - DNA, 25 bp, Homo sapien
gagtcaaagcctttggagggtattg

SEQ ID NO: 4642710 - DNA, 25 bp, Homo sapien
caatgtgcaacggagagagttggca

SEQ ID NO: 4642711 - DNA, 25 bp, Homo sapien
agcctttggagggtattgaagagtc

SEQ ID NO: 4642712 - DNA, 25 bp, Homo sapien
attcgggtgcctccgctaccaagac

SEQ ID NO: 4642713 - DNA, 25 bp, Homo sapien
ccacagtctgcaagttatcgggacg

SEQ ID NO: 4642714 - DNA, 25 bp, Homo sapien
tgtcgcttccccacagcgaagggag

SEQ ID NO: 4642715 - DNA, 25 bp, Homo sapien
ccaagaccagttgcgccacagtctg

SEQ ID NO: 4642716 - DNA, 25 bp, Homo sapien
taagtgaacccagagtgatctccga

SEQ ID NO: 4642717 - DNA, 25 bp, Homo sapien
ggtgggagacctttccttccgctgc

SEQ ID NO: 4642718 - DNA, 25 bp, Homo sapien
ggagagtactcctatttaagtgaac

SEQ ID NO: 4642719 - DNA, 25 bp, Homo sapien
ttccgctgccaaactctgcaggttc

SEQ ID NO: 4642720 - DNA, 25 bp, Homo sapien
gcctaacaagttcaccgctgtttcg

SEQ ID NO: 4642721 - DNA, 25 bp, Homo sapien
cggcaccagcgccagaaatgagcag

SEQ ID NO: 4642722 - DNA, 25 bp, Homo sapien
aatgagcagaacaccaactcgcaag

SEQ ID NO: 4642723 - DNA, 25 bp, Homo sapien
cctcttgagataccagggcgcctaa

SEQ ID NO: 4642724 - DNA, 25 bp, Homo sapien
gacttggaagtgatatgatggccca

SEQ ID NO: 4642725 - DNA, 25 bp, Homo sapien
tacggccaaatgtagtcccagaact

SEQ ID NO: 4642726 - DNA, 25 bp, Homo sapien
tgatggcccaggtcatacggccaaa

SEQ ID NO: 4642727 - DNA, 25 bp, Homo sapien
caaagcaatggactggacatcagaa

SEQ ID NO: 4642728 - DNA, 25 bp, Homo sapien
catgcctgtaggcaaattatcttat

SEQ ID NO: 4642729 - DNA, 25 bp, Homo sapien
atgggctctgtacccgccagcttca

SEQ ID NO: 4642730 - DNA, 25 bp, Homo sapien
tgtgttgggaatttacatggtaaga

SEQ ID NO: 4642731 - DNA, 25 bp, Homo sapien
agaaaagctcttccctatatgatgc

SEQ ID NO: 4642732 - DNA, 25 bp, Homo sapien
agatctcatgtaaactcatagagca

SEQ ID NO: 4642733 - DNA, 25 bp, Homo sapien
agggatccatccatatgactcaaat

SEQ ID NO: 4642734 - DNA, 25 bp, Homo sapien
tgcaagccgtacataaggcacagtg

SEQ ID NO: 4642735 - DNA, 25 bp, Homo sapien
taccatggggagtgtactaagccat

SEQ ID NO: 4642736 - DNA, 25 bp, Homo sapien
gggcaagtccctagagctacactgg

SEQ ID NO: 4642737 - DNA, 25 bp, Homo sapien
gaatttgtgtgcttccgtgagggtt

SEQ ID NO: 4642738 - DNA, 25 bp, Homo sapien
gagggtttggcagggtacaggaagc

SEQ ID NO: 4642739 - DNA, 25 bp, Homo sapien
agttatgaacctgcctctgactgga

SEQ ID NO: 4642740 - DNA, 25 bp, Homo sapien
tggtggaaaccggaagtcattatgt

SEQ ID NO: 4642741 - DNA, 25 bp, Homo sapien
tcagctacagaaaagaacgagatcc

SEQ ID NO: 4642742 - DNA, 25 bp, Homo sapien
aaatgatagttatgagaggctgtga

SEQ ID NO: 4642743 - DNA, 25 bp, Homo sapien
ttgaggtgatatcctcattaccctg

SEQ ID NO: 4642744 - DNA, 25 bp, Homo sapien
gaagacttcgtgagagtgatcaact

SEQ ID NO: 4642745 - DNA, 25 bp, Homo sapien
gcagcaagagcctaagtaagtgtca

SEQ ID NO: 4642746 - DNA, 25 bp, Homo sapien
taagtgtcaggcgtttatcagcact

SEQ ID NO: 4642747 - DNA, 25 bp, Homo sapien
agggaaacgtatgtgcaaggcaata

SEQ ID NO: 4642748 - DNA, 25 bp, Homo sapien
tattaaacaagtgtcacatgtttat

SEQ ID NO: 4642749 - DNA, 25 bp, Homo sapien
ggtgataatagtatccactccatgg

SEQ ID NO: 4642750 - DNA, 25 bp, Homo sapien
atggtgataatagtatccactccat

SEQ ID NO: 4642751 - DNA, 25 bp, Homo sapien
gataatagtatccactccatggttg

SEQ ID NO: 4642752 - DNA, 25 bp, Homo sapien
gaggttctcgttggatatcctttcc

SEQ ID NO: 4642753 - DNA, 25 bp, Homo sapien
ggaggttctcgttggatatcctttc

SEQ ID NO: 4642754 - DNA, 25 bp, Homo sapien
cccttcactcaaccctctaatggct

SEQ ID NO: 4642755 - DNA, 25 bp, Homo sapien
tcaaccctctaatggcttctcatca

SEQ ID NO: 4642756 - DNA, 25 bp, Homo sapien
aaacactctcagctttaagcctctt

SEQ ID NO: 4642757 - DNA, 25 bp, Homo sapien
cactgattagcaaaacactctcagc

SEQ ID NO: 4642758 - DNA, 25 bp, Homo sapien
tagtcacatcttcactgattagcaa

SEQ ID NO: 4642759 - DNA, 25 bp, Homo sapien
cagcagctcattagtcacatcttca

SEQ ID NO: 4642760 - DNA, 25 bp, Homo sapien
caatttaactagtgtcctggctcac

SEQ ID NO: 4642761 - DNA, 25 bp, Homo sapien
tttgccctaggtaacagaaagcaag

SEQ ID NO: 4642762 - DNA, 25 bp, Homo sapien
caatcaccattagggaaggtaccta

SEQ ID NO: 4642763 - DNA, 25 bp, Homo sapien
taccttacatattcgggatactgac

SEQ ID NO: 4642764 - DNA, 25 bp, Homo sapien
cagacagcgtgcaggagtctgggca

SEQ ID NO: 4642765 - DNA, 25 bp, Homo sapien
gacagcgtgcaggagtctgggcaat

SEQ ID NO: 4642766 - DNA, 25 bp, Homo sapien
gcagacagcgtgcaggagtctgggc

SEQ ID NO: 4642767 - DNA, 25 bp, Homo sapien
cagcgtgcaggagtctgggcaatac

SEQ ID NO: 4642768 - DNA, 25 bp, Homo sapien
gaagcaaaactatttgtagaggtca

SEQ ID NO: 4642769 - DNA, 25 bp, Homo sapien
agaagcaaaactatttgtagaggtc

SEQ ID NO: 4642770 - DNA, 25 bp, Homo sapien
aagcaaaactatttgtagaggtcat

SEQ ID NO: 4642771 - DNA, 25 bp, Homo sapien
cagaagcaaaactatttgtagaggt

SEQ ID NO: 4642772 - DNA, 25 bp, Homo sapien
gtgtctgactggtccacaactctca

SEQ ID NO: 4642773 - DNA, 25 bp, Homo sapien
tctgactggtccacaactctcaaag

SEQ ID NO: 4642774 - DNA, 25 bp, Homo sapien
gactggtccacaactctcaaaggag

SEQ ID NO: 4642775 - DNA, 25 bp, Homo sapien
aagataattttgtgtctgactggtc

SEQ ID NO: 4642776 - DNA, 25 bp, Homo sapien
cctagaaggacctttagagatgaag

SEQ ID NO: 4642777 - DNA, 25 bp, Homo sapien
gggttggacggctctgcagtcacat

SEQ ID NO: 4642778 - DNA, 25 bp, Homo sapien
agaaaaggccctcaaatgctgagag

SEQ ID NO: 4642779 - DNA, 25 bp, Homo sapien
gctgagaggtatcaggcaccagaga

SEQ ID NO: 4642780 - DNA, 25 bp, Homo sapien
attgattgtatttatccattctgac

SEQ ID NO: 4642781 - DNA, 25 bp, Homo sapien
taatgtaagccatacaggtaattta

SEQ ID NO: 4642782 - DNA, 25 bp, Homo sapien
gtttatacttactgcacatctcatt

SEQ ID NO: 4642783 - DNA, 25 bp, Homo sapien
attttaatgtaagccatacaggtaa

SEQ ID NO: 4642784 - DNA, 25 bp, Homo sapien
gaaatggaacttaaccactgagccc

SEQ ID NO: 4642785 - DNA, 25 bp, Homo sapien
tatgggagctctaaggatagtatcc

SEQ ID NO: 4642786 - DNA, 25 bp, Homo sapien
taactgcgctactccagagggtacc

SEQ ID NO: 4642787 - DNA, 25 bp, Homo sapien
taagcctcatattcgataactgcgc

SEQ ID NO: 4642788 - DNA, 25 bp, Homo sapien
ccgccaccgagaatctgtcagcggg

SEQ ID NO: 4642789 - DNA, 25 bp, Homo sapien
gccgccaccgagaatctgtcagcgg

SEQ ID NO: 4642790 - DNA, 25 bp, Homo sapien
ctcagtcagggacctaggattccca

SEQ ID NO: 4642791 - DNA, 25 bp, Homo sapien
tcagggacctaggattcccattccc

SEQ ID NO: 4642792 - DNA, 25 bp, Homo sapien
caaggatggcgaaaaacactgcttc

SEQ ID NO: 4642793 - DNA, 25 bp, Homo sapien
gaataaatggagaagccgcttgggc

SEQ ID NO: 4642794 - DNA, 25 bp, Homo sapien
ttacaagaagatccggcactgctgc

SEQ ID NO: 4642795 - DNA, 25 bp, Homo sapien
tgtttgatctggtgcaagcggctgc

SEQ ID NO: 4642796 - DNA, 25 bp, Homo sapien
gggtatccaaaggaacctgacatag

SEQ ID NO: 4642797 - DNA, 25 bp, Homo sapien
cctgggtaaaacagacaaccactag

SEQ ID NO: 4642798 - DNA, 25 bp, Homo sapien
tgtatgcttcaacacacttattggg

SEQ ID NO: 4642799 - DNA, 25 bp, Homo sapien
tactacactgaattcaagggtatcc

SEQ ID NO: 4642800 - DNA, 25 bp, Homo sapien
gagtattgtttacctgagtgcgcca

SEQ ID NO: 4642801 - DNA, 25 bp, Homo sapien
gagtgcgccaaagttcaacaagcct

SEQ ID NO: 4642802 - DNA, 25 bp, Homo sapien
tcgagaatgggagcacatgaacact

SEQ ID NO: 4642803 - DNA, 25 bp, Homo sapien
tgggcaaagactgcaaggcactgtc

SEQ ID NO: 4642804 - DNA, 25 bp, Homo sapien
tcactggaaggcaatctgatacaag

SEQ ID NO: 4642805 - DNA, 25 bp, Homo sapien
ttaagggtcctaacatccagcagcc

SEQ ID NO: 4642806 - DNA, 25 bp, Homo sapien
aataaactggtctcttgctacaggt

SEQ ID NO: 4642807 - DNA, 25 bp, Homo sapien
gaactaataaatgtgaatcactgga

SEQ ID NO: 4642808 - DNA, 25 bp, Homo sapien
tcatggctgataaggtaaagccctg

SEQ ID NO: 4642809 - DNA, 25 bp, Homo sapien
gccctgaaaaaagtggtctagtcca

SEQ ID NO: 4642810 - DNA, 25 bp, Homo sapien
gctacagtgagcaatctgacacaat

SEQ ID NO: 4642811 - DNA, 25 bp, Homo sapien
ttaccaagtaagtggcactcaaggc

SEQ ID NO: 4642812 - DNA, 25 bp, Homo sapien
ggctaacatcagaaacaatcgcttc

SEQ ID NO: 4642813 - DNA, 25 bp, Homo sapien
agcacattgtgtacgaacccattca

SEQ ID NO: 4642814 - DNA, 25 bp, Homo sapien
taaaaggatagcctgctttgaagga

SEQ ID NO: 4642815 - DNA, 25 bp, Homo sapien
tgcatttgccaaaggtggacttgaa

SEQ ID NO: 4642816 - DNA, 25 bp, Homo sapien
cagacagcatactgaagacacagct

SEQ ID NO: 4642817 - DNA, 25 bp, Homo sapien
tggtcataagggaatcacaatctgg

SEQ ID NO: 4642818 - DNA, 25 bp, Homo sapien
gcaaaaactcacgttatcaggccat

SEQ ID NO: 4642819 - DNA, 25 bp, Homo sapien
tgaaaatcttggctgccacgcaatg

SEQ ID NO: 4642820 - DNA, 25 bp, Homo sapien
atctgcatttgtccatgcgggggtg

SEQ ID NO: 4642821 - DNA, 25 bp, Homo sapien
tgtgagtgatctcacatctgcattt

SEQ ID NO: 4642822 - DNA, 25 bp, Homo sapien
catttgtccatgcgggggtggtact

SEQ ID NO: 4642823 - DNA, 25 bp, Homo sapien
acatctgcatttgtccatgcggggg

SEQ ID NO: 4642824 - DNA, 25 bp, Homo sapien
gcaaaagtaggagagaagccaatcc

SEQ ID NO: 4642825 - DNA, 25 bp, Homo sapien
ggagagggccgactcattttccatg

SEQ ID NO: 4642826 - DNA, 25 bp, Homo sapien
atcccataaccgcagtgcagccaga

SEQ ID NO: 4642827 - DNA, 25 bp, Homo sapien
cagccagaggttgcgtgtcatggta

SEQ ID NO: 4642828 - DNA, 25 bp, Homo sapien
ttccctttacagaattcaccagcct

SEQ ID NO: 4642829 - DNA, 25 bp, Homo sapien
ccctttacagaattcaccagccttt

SEQ ID NO: 4642830 - DNA, 25 bp, Homo sapien
tccctttacagaattcaccagcctt

SEQ ID NO: 4642831 - DNA, 25 bp, Homo sapien
ctttacagaattcaccagccttttt

SEQ ID NO: 4642832 - DNA, 25 bp, Homo sapien
gcagcagctggctatttctggactt

SEQ ID NO: 4642833 - DNA, 25 bp, Homo sapien
taacttgtagttaagatgcagcagc

SEQ ID NO: 4642834 - DNA, 25 bp, Homo sapien
tacatgaccaaagctagaaagttcc

SEQ ID NO: 4642835 - DNA, 25 bp, Homo sapien
atgtatggagaaaagtacaaaccct

SEQ ID NO: 4642836 - DNA, 25 bp, Homo sapien
tcataaggtggagcaagcatcaggt

SEQ ID NO: 4642837 - DNA, 25 bp, Homo sapien
tttttgaggtgcaagaacaagctac

SEQ ID NO: 4642838 - DNA, 25 bp, Homo sapien
tcaagggagggatacttcaggctcg

SEQ ID NO: 4642839 - DNA, 25 bp, Homo sapien
tcaggctcgtgcagtagaggaagac

SEQ ID NO: 4642840 - DNA, 25 bp, Homo sapien
taatgacactttccccttagtgatc

SEQ ID NO: 4642841 - DNA, 25 bp, Homo sapien
ttgcttaacgtatgcaaaactcagc

SEQ ID NO: 4642842 - DNA, 25 bp, Homo sapien
gaacttgactcaggtatctaactgc

SEQ ID NO: 4642843 - DNA, 25 bp, Homo sapien
aaaactcagcagctaatgccactca

SEQ ID NO: 4642844 - DNA, 25 bp, Homo sapien
gatgaaccagacaaacccatgaagg

SEQ ID NO: 4642845 - DNA, 25 bp, Homo sapien
cccatgaaggaagtaagtcagtaaa

SEQ ID NO: 4642846 - DNA, 25 bp, Homo sapien
gatgacaagggaataagatgaacca

SEQ ID NO: 4642847 - DNA, 25 bp, Homo sapien
tgtctctgggttaggaaactgggcc

SEQ ID NO: 4642848 - DNA, 25 bp, Homo sapien
gataagaagtgcaactaagaggact

SEQ ID NO: 4642849 - DNA, 25 bp, Homo sapien
ttagctgcatccagatttccctagc

SEQ ID NO: 4642850 - DNA, 25 bp, Homo sapien
tgaacttatatagccaactgacagc

SEQ ID NO: 4642851 - DNA, 25 bp, Homo sapien
tgatggaaggtgtgcttatctcaaa

SEQ ID NO: 4642852 - DNA, 25 bp, Homo sapien
atcactattttcagtttctctaagg

SEQ ID NO: 4642853 - DNA, 25 bp, Homo sapien
tggcccaaaccgggcacctgctgcc

SEQ ID NO: 4642854 - DNA, 25 bp, Homo sapien
cctgctgcccacaggtatctccacc

SEQ ID NO: 4642855 - DNA, 25 bp, Homo sapien
gccccttcaccatcactattttcag

SEQ ID NO: 4642856 - DNA, 25 bp, Homo sapien
tggccgctcctccaccattcttccc

SEQ ID NO: 4642857 - DNA, 25 bp, Homo sapien
gccgctcctccaccattcttcccac

SEQ ID NO: 4642858 - DNA, 25 bp, Homo sapien
tctggccgctcctccaccattcttc

SEQ ID NO: 4642859 - DNA, 25 bp, Homo sapien
cctcatctctggccgctcctccacc

SEQ ID NO: 4642860 - DNA, 25 bp, Homo sapien
tgtcgagaccgttttctttgccagg

SEQ ID NO: 4642861 - DNA, 25 bp, Homo sapien
tagttagtagtgatgggtggcctac

SEQ ID NO: 4642862 - DNA, 25 bp, Homo sapien
ctgtagttagtagtgatgggtggcc

SEQ ID NO: 4642863 - DNA, 25 bp, Homo sapien
tcatctgtagttagtagtgatgggt

SEQ ID NO: 4642864 - DNA, 25 bp, Homo sapien
tagtagtgatgggtggcctactcat

SEQ ID NO: 4642865 - DNA, 25 bp, Homo sapien
ggttattcatactagtggtttgctt

SEQ ID NO: 4642866 - DNA, 25 bp, Homo sapien
tgttttaaggtcattaattgcttgc

SEQ ID NO: 4642867 - DNA, 25 bp, Homo sapien
tacctattatggttattcatactag

SEQ ID NO: 4642868 - DNA, 25 bp, Homo sapien
taattgcttgccaagtgcattatta

SEQ ID NO: 4642869 - DNA, 25 bp, Homo sapien
aggtgctgcctctccattttcagca

SEQ ID NO: 4642870 - DNA, 25 bp, Homo sapien
tgcctctccattttcagcagcagaa

SEQ ID NO: 4642871 - DNA, 25 bp, Homo sapien
tctccattttcagcagcagaagaca

SEQ ID NO: 4642872 - DNA, 25 bp, Homo sapien
gctgcctctccattttcagcagcag

SEQ ID NO: 4642873 - DNA, 25 bp, Homo sapien
gatctgaagtaataacaggctagca

SEQ ID NO: 4642874 - DNA, 25 bp, Homo sapien
ggctagcaacgtaatcatctctgtg

SEQ ID NO: 4642875 - DNA, 25 bp, Homo sapien
tgaatgaatgtacacggaatcttgg

SEQ ID NO: 4642876 - DNA, 25 bp, Homo sapien
tgtgttggtccatgcttgaatgaat

SEQ ID NO: 4642877 - DNA, 25 bp, Homo sapien
catgccacgctatggagcatggata

SEQ ID NO: 4642878 - DNA, 25 bp, Homo sapien
ccacgctatggagcatggatatttt

SEQ ID NO: 4642879 - DNA, 25 bp, Homo sapien
ggactcacatgccacgctatggagc

SEQ ID NO: 4642880 - DNA, 25 bp, Homo sapien
tcacatgccacgctatggagcatgg

SEQ ID NO: 4642881 - DNA, 25 bp, Homo sapien
tggtaccttctcatacagtgttaga

SEQ ID NO: 4642882 - DNA, 25 bp, Homo sapien
tgtcttgcacaaggatgagctcatc

SEQ ID NO: 4642883 - DNA, 25 bp, Homo sapien
gacggagagtaaggtccaatgttct

SEQ ID NO: 4642884 - DNA, 25 bp, Homo sapien
tgtctgttctcatcaatgcctgttt

SEQ ID NO: 4642885 - DNA, 25 bp, Homo sapien
tatcccaatatggagtaggtggcag

SEQ ID NO: 4642886 - DNA, 25 bp, Homo sapien
tctagtaatacctggactgccaagt

SEQ ID NO: 4642887 - DNA, 25 bp, Homo sapien
gggagccagcatcaatagtagcaat

SEQ ID NO: 4642888 - DNA, 25 bp, Homo sapien
taataaggactaccacagaaggaga

SEQ ID NO: 4642889 - DNA, 25 bp, Homo sapien
tgagttcctaatccacagggtgttt

SEQ ID NO: 4642890 - DNA, 25 bp, Homo sapien
ggccttcataaaatgactgctgcaa

SEQ ID NO: 4642891 - DNA, 25 bp, Homo sapien
tctcgaaaggagatgtaaccttctc

SEQ ID NO: 4642892 - DNA, 25 bp, Homo sapien
caatggcatttagcagtcaaccaca

SEQ ID NO: 4642893 - DNA, 25 bp, Homo sapien
tggtcccagaaagtggtcctagagg

SEQ ID NO: 4642894 - DNA, 25 bp, Homo sapien
gtcctgtttacttgaggcacccgaa

SEQ ID NO: 4642895 - DNA, 25 bp, Homo sapien
tgtgccgggccgtgaaatactttca

SEQ ID NO: 4642896 - DNA, 25 bp, Homo sapien
tcccactagccccaagagttgatgc

SEQ ID NO: 4642897 - DNA, 25 bp, Homo sapien
tatgtttctcctgttcccggaggcc

SEQ ID NO: 4642898 - DNA, 25 bp, Homo sapien
caggatcagcccttccgcaaggaaa

SEQ ID NO: 4642899 - DNA, 25 bp, Homo sapien
ggtcttcggaagagatgcactctcc

SEQ ID NO: 4642900 - DNA, 25 bp, Homo sapien
gaaagcaactaaggtcttcggaaga

SEQ ID NO: 4642901 - DNA, 25 bp, Homo sapien
ggagttttctctgctagagatggat

SEQ ID NO: 4642902 - DNA, 25 bp, Homo sapien
gagttttctctgctagagatggatc

SEQ ID NO: 4642903 - DNA, 25 bp, Homo sapien
cggagttttctctgctagagatgga

SEQ ID NO: 4642904 - DNA, 25 bp, Homo sapien
acaccatcgttaatgtcaccactgg

SEQ ID NO: 4642905 - DNA, 25 bp, Homo sapien
tgtaaacttcttggtaaagctgtac

SEQ ID NO: 4642906 - DNA, 25 bp, Homo sapien
tggggactattaacaaaaggcggca

SEQ ID NO: 4642907 - DNA, 25 bp, Homo sapien
tcaccactggtaacatggggactat

SEQ ID NO: 4642908 - DNA, 25 bp, Homo sapien
ttccagcttttcttatagtctctcc

SEQ ID NO: 4642909 - DNA, 25 bp, Homo sapien
gtcccctgaattcggtccttgatcc

SEQ ID NO: 4642910 - DNA, 25 bp, Homo sapien
agcttttcttatagtctctcctgtc

SEQ ID NO: 4642911 - DNA, 25 bp, Homo sapien
tttgctataattgcagtgtcccctg

SEQ ID NO: 4642912 - DNA, 25 bp, Homo sapien
tccaaaacaatgacgaggctgaggt

SEQ ID NO: 4642913 - DNA, 25 bp, Homo sapien
aacattagtcttaacagtcagggcc

SEQ ID NO: 4642914 - DNA, 25 bp, Homo sapien
acaggcaacaaaacatgagtgaggt

SEQ ID NO: 4642915 - DNA, 25 bp, Homo sapien
gaaaacaagggtctcaacattagtc

SEQ ID NO: 4642916 - DNA, 25 bp, Homo sapien
aaaagtcttgcataagaacatctcg

SEQ ID NO: 4642917 - DNA, 25 bp, Homo sapien
tgggtaggaacacactttccaccac

SEQ ID NO: 4642918 - DNA, 25 bp, Homo sapien
acatctcgttctggcttggaagtga

SEQ ID NO: 4642919 - DNA, 25 bp, Homo sapien
actgtgtatcctattcccagctgaa

SEQ ID NO: 4642920 - DNA, 25 bp, Homo sapien
gaactgcattgtataagacgaggct

SEQ ID NO: 4642921 - DNA, 25 bp, Homo sapien
agaccaaccagctgacagccaatct

SEQ ID NO: 4642922 - DNA, 25 bp, Homo sapien
atctgaagacagcttaaattcccca

SEQ ID NO: 4642923 - DNA, 25 bp, Homo sapien
tataagacgaggctgcaccatcttc

SEQ ID NO: 4642924 - DNA, 25 bp, Homo sapien
gagtgacacagggactaagactgcc

SEQ ID NO: 4642925 - DNA, 25 bp, Homo sapien
gcaggctgctttcagtgggctaaga

SEQ ID NO: 4642926 - DNA, 25 bp, Homo sapien
gaaaggctaggattacactcaggca

SEQ ID NO: 4642927 - DNA, 25 bp, Homo sapien
cagcccggctacacactaggagagt

SEQ ID NO: 4642928 - DNA, 25 bp, Homo sapien
gctaatggagcgtatgtcttaaatc

SEQ ID NO: 4642929 - DNA, 25 bp, Homo sapien
tcttaaatctaaagtctgggtagtg

SEQ ID NO: 4642930 - DNA, 25 bp, Homo sapien
aaagttctctgaaatatcggaatgc

SEQ ID NO: 4642931 - DNA, 25 bp, Homo sapien
tcaggcttgataccaaaaagttctc

SEQ ID NO: 4642932 - DNA, 25 bp, Homo sapien
ggcatctccctttgctgatcccagc

SEQ ID NO: 4642933 - DNA, 25 bp, Homo sapien
ttgggcatctccctttgctgatccc

SEQ ID NO: 4642934 - DNA, 25 bp, Homo sapien
gggcatctccctttgctgatcccag

SEQ ID NO: 4642935 - DNA, 25 bp, Homo sapien
ccttgggcatctccctttgctgatc

SEQ ID NO: 4642936 - DNA, 25 bp, Homo sapien
aaaaacaaggatccactggctccag

SEQ ID NO: 4642937 - DNA, 25 bp, Homo sapien
gaagaaactcagcttctttgtgctg

SEQ ID NO: 4642938 - DNA, 25 bp, Homo sapien
ggttagacagttctattagaggttc

SEQ ID NO: 4642939 - DNA, 25 bp, Homo sapien
tttgatgataaattcatcatcactg

SEQ ID NO: 4642940 - DNA, 25 bp, Homo sapien
agactgagggaactaaggctgacca

SEQ ID NO: 4642941 - DNA, 25 bp, Homo sapien
tgtgggattcaacaagtatgctctg

SEQ ID NO: 4642942 - DNA, 25 bp, Homo sapien
cagttaattattggctgagctggga

SEQ ID NO: 4642943 - DNA, 25 bp, Homo sapien
tgcagaataaagcttaccaaagaga

SEQ ID NO: 4642944 - DNA, 25 bp, Homo sapien
cgggatgctcttcgcttatacgttg

SEQ ID NO: 4642945 - DNA, 25 bp, Homo sapien
taagcgcgttgtatgtttccgtatc

SEQ ID NO: 4642946 - DNA, 25 bp, Homo sapien
caacccttcgtgcatgtcttgcagg

SEQ ID NO: 4642947 - DNA, 25 bp, Homo sapien
tctcatggagcgtggcaaaacgttg

SEQ ID NO: 4642948 - DNA, 25 bp, Homo sapien
ccagctaagtttgcatggaatggtg

SEQ ID NO: 4642949 - DNA, 25 bp, Homo sapien
gcaaacgtgctgctcatatcatagt

SEQ ID NO: 4642950 - DNA, 25 bp, Homo sapien
cctaattggcaagcttcattcctgc

SEQ ID NO: 4642951 - DNA, 25 bp, Homo sapien
cacactgatctctagggagccatta

SEQ ID NO: 4642952 - DNA, 25 bp, Homo sapien
tcctcaccttcacgtgagtttgggt

SEQ ID NO: 4642953 - DNA, 25 bp, Homo sapien
ttagaaggggtgtcagactgtcttc

SEQ ID NO: 4642954 - DNA, 25 bp, Homo sapien
tctggcagagaagtgtctcccctcc

SEQ ID NO: 4642955 - DNA, 25 bp, Homo sapien
ttcacgtgagtttgggtctggcaga

SEQ ID NO: 4642956 - DNA, 25 bp, Homo sapien
gacctttatgttccttagaacaaca

SEQ ID NO: 4642957 - DNA, 25 bp, Homo sapien
ttttgaagaatgtccaggatctgtg

SEQ ID NO: 4642958 - DNA, 25 bp, Homo sapien
ctttctgaaggcagatgtacatatt

SEQ ID NO: 4642959 - DNA, 25 bp, Homo sapien
aagcctttctgaaggcagatgtaca

SEQ ID NO: 4642960 - DNA, 25 bp, Homo sapien
tgtccaggatctgtgtcttgtacaa

SEQ ID NO: 4642961 - DNA, 25 bp, Homo sapien
agagctcagaaacggcagctctgat

SEQ ID NO: 4642962 - DNA, 25 bp, Homo sapien
tggcagtcagggaagcagtccatgg

SEQ ID NO: 4642963 - DNA, 25 bp, Homo sapien
caggtcttttcagacgcagagctca

SEQ ID NO: 4642964 - DNA, 25 bp, Homo sapien
gaataagctaggtcaagctggccct

SEQ ID NO: 4642965 - DNA, 25 bp, Homo sapien
ctgggatgagcagttttcaaatagg

SEQ ID NO: 4642966 - DNA, 25 bp, Homo sapien
tttgtagtactcaatgtcaccactc

SEQ ID NO: 4642967 - DNA, 25 bp, Homo sapien
ttgtctgtcacgtgggagccattgg

SEQ ID NO: 4642968 - DNA, 25 bp, Homo sapien
ttcaaataggacacgcatctcagct

SEQ ID NO: 4642969 - DNA, 25 bp, Homo sapien
ctcaacagggaggagaagaggggtc

SEQ ID NO: 4642970 - DNA, 25 bp, Homo sapien
acagggaggagaagaggggtccttg

SEQ ID NO: 4642971 - DNA, 25 bp, Homo sapien
cagggaggagaagaggggtccttgg

SEQ ID NO: 4642972 - DNA, 25 bp, Homo sapien
caacagggaggagaagaggggtcct

SEQ ID NO: 4642973 - DNA, 25 bp, Homo sapien
agctttcctctctgcactcccagga

SEQ ID NO: 4642974 - DNA, 25 bp, Homo sapien
ctttcctctctgcactcccaggatt

SEQ ID NO: 4642975 - DNA, 25 bp, Homo sapien
gctttcctctctgcactcccaggat

SEQ ID NO: 4642976 - DNA, 25 bp, Homo sapien
agagttgctaccatcaggccccgtg

SEQ ID NO: 4642977 - DNA, 25 bp, Homo sapien
aaagccagagttgctaccatcaggc

SEQ ID NO: 4642978 - DNA, 25 bp, Homo sapien
agccagagttgctaccatcaggccc

SEQ ID NO: 4642979 - DNA, 25 bp, Homo sapien
tcaaagccagagttgctaccatcag

SEQ ID NO: 4642980 - DNA, 25 bp, Homo sapien
tcttgtgagactcagaggccacact

SEQ ID NO: 4642981 - DNA, 25 bp, Homo sapien
taactggtacgtcagcagagagccc

SEQ ID NO: 4642982 - DNA, 25 bp, Homo sapien
cacgtccatgtgtgaggtaaaattc

SEQ ID NO: 4642983 - DNA, 25 bp, Homo sapien
agagagcccaggcataggccagctg

SEQ ID NO: 4642984 - DNA, 25 bp, Homo sapien
gagttaaaaatagagcacagagtat

SEQ ID NO: 4642985 - DNA, 25 bp, Homo sapien
gataaaatgcacgtctatacctgtt

SEQ ID NO: 4642986 - DNA, 25 bp, Homo sapien
taacttaccctttgccaatgatgag

SEQ ID NO: 4642987 - DNA, 25 bp, Homo sapien
ggattcctactaaagtacatatgag

SEQ ID NO: 4642988 - DNA, 25 bp, Homo sapien
cccaacagaaggctataatccatga

SEQ ID NO: 4642989 - DNA, 25 bp, Homo sapien
ccagtccgcttagcatcaggcacat

SEQ ID NO: 4642990 - DNA, 25 bp, Homo sapien
ttccatggctgttgagtagagaacc

SEQ ID NO: 4642991 - DNA, 25 bp, Homo sapien
tgggttctctgtgattatcccatct

SEQ ID NO: 4642992 - DNA, 25 bp, Homo sapien
tcctactttaaaactatgagcaaga

SEQ ID NO: 4642993 - DNA, 25 bp, Homo sapien
cctaggatgcaaagataactactta

SEQ ID NO: 4642994 - DNA, 25 bp, Homo sapien
tagctgctaaccgtgaagagttgga

SEQ ID NO: 4642995 - DNA, 25 bp, Homo sapien
tccctacaaaggagaataatatcgt

SEQ ID NO: 4642996 - DNA, 25 bp, Homo sapien
ttttctcccctatggcttttagctg

SEQ ID NO: 4642997 - DNA, 25 bp, Homo sapien
gaatgtcaataatgcccataaataa

SEQ ID NO: 4642998 - DNA, 25 bp, Homo sapien
tgcagaatgtcaataatgcccataa

SEQ ID NO: 4642999 - DNA, 25 bp, Homo sapien
cccctatggcttttagctggaatgc

SEQ ID NO: 4643000 - DNA, 25 bp, Homo sapien
cccatcataaacaagagctttccag

SEQ ID NO: 4643001 - DNA, 25 bp, Homo sapien
aaacaagagctttccaggaatgttc

SEQ ID NO: 4643002 - DNA, 25 bp, Homo sapien
catcataaacaagagctttccagga

SEQ ID NO: 4643003 - DNA, 25 bp, Homo sapien
cataaacaagagctttccaggaatg

SEQ ID NO: 4643004 - DNA, 25 bp, Homo sapien
ctggaattcatgaacttaagaaatc

SEQ ID NO: 4643005 - DNA, 25 bp, Homo sapien
taaaagcttggtctatgaacagaaa

SEQ ID NO: 4643006 - DNA, 25 bp, Homo sapien
tatttgtccctcgagcagtcttaga

SEQ ID NO: 4643007 - DNA, 25 bp, Homo sapien
taattggagaaggactttgggacac

SEQ ID NO: 4643008 - DNA, 25 bp, Homo sapien
caatcatgcttgctgaagcctggga

SEQ ID NO: 4643009 - DNA, 25 bp, Homo sapien
gaggacacgtccatggaagctgctt

SEQ ID NO: 4643010 - DNA, 25 bp, Homo sapien
ttcctggctaattgaggacacaatc

SEQ ID NO: 4643011 - DNA, 25 bp, Homo sapien
gtttcttagacggtgaagccttcaa

SEQ ID NO: 4643012 - DNA, 25 bp, Homo sapien
tcttcatcaaggctgctaaaacttt

SEQ ID NO: 4643013 - DNA, 25 bp, Homo sapien
ctttagggcggcgattgaattgcac

SEQ ID NO: 4643014 - DNA, 25 bp, Homo sapien
aaacagtgatggagtgctagggacc

SEQ ID NO: 4643015 - DNA, 25 bp, Homo sapien
taggcctgtcgtgtggatagtgctc

SEQ ID NO: 4643016 - DNA, 25 bp, Homo sapien
tgctcattgacgtataaggaagaag

SEQ ID NO: 4643017 - DNA, 25 bp, Homo sapien
tgtttgaatagagtgtaggcctgtc

SEQ ID NO: 4643018 - DNA, 25 bp, Homo sapien
gttggcccttagagcagaacagtgc

SEQ ID NO: 4643019 - DNA, 25 bp, Homo sapien
caccaaacagacaggaaaggccgtt

SEQ ID NO: 4643020 - DNA, 25 bp, Homo sapien
tacttttctggacctagactggccg

SEQ ID NO: 4643021 - DNA, 25 bp, Homo sapien
taacacccctggtcaagagactgga

SEQ ID NO: 4643022 - DNA, 25 bp, Homo sapien
ggttttcccctccagctgataaatg

SEQ ID NO: 4643023 - DNA, 25 bp, Homo sapien
gacatacctacaggagcaggcaggt

SEQ ID NO: 4643024 - DNA, 25 bp, Homo sapien
gccaaaattatatggtgacgaagac

SEQ ID NO: 4643025 - DNA, 25 bp, Homo sapien
ctgataaatgccaggaggaaacaga

SEQ ID NO: 4643026 - DNA, 25 bp, Homo sapien
ctgtgattaagacccgaggcccttc

SEQ ID NO: 4643027 - DNA, 25 bp, Homo sapien
tgattaagacccgaggcccttctgt

SEQ ID NO: 4643028 - DNA, 25 bp, Homo sapien
agtctgtgattaagacccgaggccc

SEQ ID NO: 4643029 - DNA, 25 bp, Homo sapien
taagtctgtgattaagacccgaggc

SEQ ID NO: 4643030 - DNA, 25 bp, Homo sapien
tggtttgttggtgaagtttgccagt

SEQ ID NO: 4643031 - DNA, 25 bp, Homo sapien
tagagtagtgtctatttattgccac

SEQ ID NO: 4643032 - DNA, 25 bp, Homo sapien
gaaatagggatattgactcctggga

SEQ ID NO: 4643033 - DNA, 25 bp, Homo sapien
cataggactaggtgggctctaaagg

SEQ ID NO: 4643034 - DNA, 25 bp, Homo sapien
taatcaataccttgccaacttaagg

SEQ ID NO: 4643035 - DNA, 25 bp, Homo sapien
tgcagcttattttagcacagataca

SEQ ID NO: 4643036 - DNA, 25 bp, Homo sapien
aacagaccactttgcctgaacagaa

SEQ ID NO: 4643037 - DNA, 25 bp, Homo sapien
ctgacagaatgacaactgctagttg

SEQ ID NO: 4643038 - DNA, 25 bp, Homo sapien
tgctctaacacaagactgcacagtg

SEQ ID NO: 4643039 - DNA, 25 bp, Homo sapien
ctagttaactaggaagcaatgccca

SEQ ID NO: 4643040 - DNA, 25 bp, Homo sapien
tctacgtgtaaatgaccagtggctt

SEQ ID NO: 4643041 - DNA, 25 bp, Homo sapien
ggctttgctaccaactacgcaggaa

SEQ ID NO: 4643042 - DNA, 25 bp, Homo sapien
ggaagtcatgcctccactttttagc

SEQ ID NO: 4643043 - DNA, 25 bp, Homo sapien
tctatatcagtgctgtagctggaag

SEQ ID NO: 4643044 - DNA, 25 bp, Homo sapien
gatgtcaccaaatttccattaaaag

SEQ ID NO: 4643045 - DNA, 25 bp, Homo sapien
acgagaacttgtatggatgtcacca

SEQ ID NO: 4643046 - DNA, 25 bp, Homo sapien
gaagatataggattttctaaaccca

SEQ ID NO: 4643047 - DNA, 25 bp, Homo sapien
gattacgtagtgatttggagtccac

SEQ ID NO: 4643048 - DNA, 25 bp, Homo sapien
taaaagtcttttctcgatgattacg

SEQ ID NO: 4643049 - DNA, 25 bp, Homo sapien
cagaagatataggattttctaaacc

SEQ ID NO: 4643050 - DNA, 25 bp, Homo sapien
gtttttgcaactagctgttctcctt

SEQ ID NO: 4643051 - DNA, 25 bp, Homo sapien
gtaaatattaaagattcctgctgac

SEQ ID NO: 4643052 - DNA, 25 bp, Homo sapien
ctaggaagtttttgcaactagctgt

SEQ ID NO: 4643053 - DNA, 25 bp, Homo sapien
gaagtttttgcaactagctgttctc

SEQ ID NO: 4643054 - DNA, 25 bp, Homo sapien
ctgtctttcccttgagattagggtt

SEQ ID NO: 4643055 - DNA, 25 bp, Homo sapien
tgtctttcccttgagattagggtta

SEQ ID NO: 4643056 - DNA, 25 bp, Homo sapien
gctgtctttcccttgagattagggt

SEQ ID NO: 4643057 - DNA, 25 bp, Homo sapien
ggtacatccactaccagcaaaccat

SEQ ID NO: 4643058 - DNA, 25 bp, Homo sapien
gaagagtgtctacaaaggtacatcc

SEQ ID NO: 4643059 - DNA, 25 bp, Homo sapien
gatgtaggagctagtcacactgaga

SEQ ID NO: 4643060 - DNA, 25 bp, Homo sapien
tctagaggctccacgaaggagggca

SEQ ID NO: 4643061 - DNA, 25 bp, Homo sapien
tcacgtggacaaagcaaacagcaga

SEQ ID NO: 4643062 - DNA, 25 bp, Homo sapien
gcagagtgaaatggtcagggtggag

SEQ ID NO: 4643063 - DNA, 25 bp, Homo sapien
tatgttagtggacttccccagtgaa

SEQ ID NO: 4643064 - DNA, 25 bp, Homo sapien
gaagttcacctgttacagatcccag

SEQ ID NO: 4643065 - DNA, 25 bp, Homo sapien
gccaaagggaaacgtctcgaagaga

SEQ ID NO: 4643066 - DNA, 25 bp, Homo sapien
gattaaacagaggatgtcgggacca

SEQ ID NO: 4643067 - DNA, 25 bp, Homo sapien
tgtcatgacaatcacagtgggcggt

SEQ ID NO: 4643068 - DNA, 25 bp, Homo sapien
tatgaggccacaaacaagaaaagca

SEQ ID NO: 4643069 - DNA, 25 bp, Homo sapien
ggtaatatttgtactgccctctggg

SEQ ID NO: 4643070 - DNA, 25 bp, Homo sapien
ggacgtgatgtctgaagctatggca

SEQ ID NO: 4643071 - DNA, 25 bp, Homo sapien
caaaatccccagcactaggtaactg

SEQ ID NO: 4643072 - DNA, 25 bp, Homo sapien
taggtaactgctaacttactttctg

SEQ ID NO: 4643073 - DNA, 25 bp, Homo sapien
tcttgatagatttgtggtgacacgc

SEQ ID NO: 4643074 - DNA, 25 bp, Homo sapien
tgtgctcattaatagttactccatt

SEQ ID NO: 4643075 - DNA, 25 bp, Homo sapien
tcacagcacaaggataagggaccaa

SEQ ID NO: 4643076 - DNA, 25 bp, Homo sapien
ttaagcagcaggtaaatcatctccc

SEQ ID NO: 4643077 - DNA, 25 bp, Homo sapien
tactagcctgccagattcagagacg

SEQ ID NO: 4643078 - DNA, 25 bp, Homo sapien
taaggagataaggagggtactagcc

SEQ ID NO: 4643079 - DNA, 25 bp, Homo sapien
gaaatatgaaatgaatatcggtgca

SEQ ID NO: 4643080 - DNA, 25 bp, Homo sapien
aagaaatatgaaatgaatatcggtg

SEQ ID NO: 4643081 - DNA, 25 bp, Homo sapien
atatgaaatgaatatcggtgcagct

SEQ ID NO: 4643082 - DNA, 25 bp, Homo sapien
aatatgaaatgaatatcggtgcagc

SEQ ID NO: 4643083 - DNA, 25 bp, Homo sapien
atgctctgatgttgccatcttgaac

SEQ ID NO: 4643084 - DNA, 25 bp, Homo sapien
taatgctctgatgttgccatcttga

SEQ ID NO: 4643085 - DNA, 25 bp, Homo sapien
aatgctctgatgttgccatcttgaa

SEQ ID NO: 4643086 - DNA, 25 bp, Homo sapien
ttaatgctctgatgttgccatcttg

SEQ ID NO: 4643087 - DNA, 25 bp, Homo sapien
acttccggactcaagagatcagtct

SEQ ID NO: 4643088 - DNA, 25 bp, Homo sapien
gaacttccggactcaagagatcagt

SEQ ID NO: 4643089 - DNA, 25 bp, Homo sapien
ttccggactcaagagatcagtctgc

SEQ ID NO: 4643090 - DNA, 25 bp, Homo sapien
ccggactcaagagatcagtctgcct

SEQ ID NO: 4643091 - DNA, 25 bp, Homo sapien
ggggaagaaaatgctattgatttca

SEQ ID NO: 4643092 - DNA, 25 bp, Homo sapien
cactggggaagaaaatgctattgat

SEQ ID NO: 4643093 - DNA, 25 bp, Homo sapien
tctgatatgaataacaggtgctcag

SEQ ID NO: 4643094 - DNA, 25 bp, Homo sapien
ttctgatatgaataacaggtgctca

SEQ ID NO: 4643095 - DNA, 25 bp, Homo sapien
aagaactaggctgaaccttctcatc

SEQ ID NO: 4643096 - DNA, 25 bp, Homo sapien
tggtttaagtatggaaccactgaag

SEQ ID NO: 4643097 - DNA, 25 bp, Homo sapien
gtttaagtatggaaccactgaagaa

SEQ ID NO: 4643098 - DNA, 25 bp, Homo sapien
gaaccactgaagaactaggctgaac

SEQ ID NO: 4643099 - DNA, 25 bp, Homo sapien
ctcccaaagcgctgggattgcaggt

SEQ ID NO: 4643100 - DNA, 25 bp, Homo sapien
tatgcatcatgcctggcgaattttt

SEQ ID NO: 4643101 - DNA, 25 bp, Homo sapien
caggtatgtgccaggtatgcatcat

SEQ ID NO: 4643102 - DNA, 25 bp, Homo sapien
tacaggtatgtgccaggtatgcatc

SEQ ID NO: 4643103 - DNA, 25 bp, Homo sapien
cttaatgcctttttccgttccagag

SEQ ID NO: 4643104 - DNA, 25 bp, Homo sapien
gtcccacatgatttgggttgcttga

SEQ ID NO: 4643105 - DNA, 25 bp, Homo sapien
tgaagagtactcatcaggtatactg

SEQ ID NO: 4643106 - DNA, 25 bp, Homo sapien
catcaggtatactgcagaatgtccc

SEQ ID NO: 4643107 - DNA, 25 bp, Homo sapien
catcaaaacgattctatggtatggg

SEQ ID NO: 4643108 - DNA, 25 bp, Homo sapien
atgattccactttatatagatgagg

SEQ ID NO: 4643109 - DNA, 25 bp, Homo sapien
cagaacaggtccttaaatagctagt

SEQ ID NO: 4643110 - DNA, 25 bp, Homo sapien
tcaggctgattacggttcactgcaa

SEQ ID NO: 4643111 - DNA, 25 bp, Homo sapien
taccagaacattaactgataacaaa

SEQ ID NO: 4643112 - DNA, 25 bp, Homo sapien
gatgaggtctgcttgcatagacaga

SEQ ID NO: 4643113 - DNA, 25 bp, Homo sapien
tatcgtaagaccttggaaagaattc

SEQ ID NO: 4643114 - DNA, 25 bp, Homo sapien
gtttagctaccagaacattaactga

SEQ ID NO: 4643115 - DNA, 25 bp, Homo sapien
gaagagtggccaactgtaagcctac

SEQ ID NO: 4643116 - DNA, 25 bp, Homo sapien
gaggctcatcgagacatgtatccag

SEQ ID NO: 4643117 - DNA, 25 bp, Homo sapien
tgaaagacgccagtcatagaggacc

SEQ ID NO: 4643118 - DNA, 25 bp, Homo sapien
tgtacgcaaatgtgcctaggagctt

SEQ ID NO: 4643119 - DNA, 25 bp, Homo sapien
ctggaaaaataaagatgaatgatgg

SEQ ID NO: 4643120 - DNA, 25 bp, Homo sapien
ggaaaaataaagatgaatgatgggc

SEQ ID NO: 4643121 - DNA, 25 bp, Homo sapien
aaaaataaagatgaatgatgggcat

SEQ ID NO: 4643122 - DNA, 25 bp, Homo sapien
gaaaaataaagatgaatgatgggca

SEQ ID NO: 4643123 - DNA, 25 bp, Homo sapien
tcagcggtcaagtagatggtcccct

SEQ ID NO: 4643124 - DNA, 25 bp, Homo sapien
tcccctcttccaaggtaaatgttga

SEQ ID NO: 4643125 - DNA, 25 bp, Homo sapien
gaagcattgtcatcctgcacttcca

SEQ ID NO: 4643126 - DNA, 25 bp, Homo sapien
taaatagacgtcaagcacagaagca

SEQ ID NO: 4643127 - DNA, 25 bp, Homo sapien
cttagaaacggaaataacagccact

SEQ ID NO: 4643128 - DNA, 25 bp, Homo sapien
tagaaacggaaataacagccactgt

SEQ ID NO: 4643129 - DNA, 25 bp, Homo sapien
aacggaaataacagccactgtgaca

SEQ ID NO: 4643130 - DNA, 25 bp, Homo sapien
gaaacggaaataacagccactgtga

SEQ ID NO: 4643131 - DNA, 25 bp, Homo sapien
tgttggttgttcctctttccacgaa

SEQ ID NO: 4643132 - DNA, 25 bp, Homo sapien
ttgcattctacatcaggcaaagaag

SEQ ID NO: 4643133 - DNA, 25 bp, Homo sapien
ctttccacgaaaaccaaattgcatt

SEQ ID NO: 4643134 - DNA, 25 bp, Homo sapien
ctcccaatacacttttcagcagaaa

SEQ ID NO: 4643135 - DNA, 25 bp, Homo sapien
tgggagttccatggctgtaggcgag

SEQ ID NO: 4643136 - DNA, 25 bp, Homo sapien
ggagttccatggctgtaggcgagga

SEQ ID NO: 4643137 - DNA, 25 bp, Homo sapien
gagttccatggctgtaggcgaggac

SEQ ID NO: 4643138 - DNA, 25 bp, Homo sapien
ctgggagttccatggctgtaggcga

SEQ ID NO: 4643139 - DNA, 25 bp, Homo sapien
cgtaggcttagtcccgtgtttcatt

SEQ ID NO: 4643140 - DNA, 25 bp, Homo sapien
tatctttgacgaaagcatcagcttt

SEQ ID NO: 4643141 - DNA, 25 bp, Homo sapien
cagtcctgaggccttattaaagcaa

SEQ ID NO: 4643142 - DNA, 25 bp, Homo sapien
cagcttttctctcggccatcgtagg

SEQ ID NO: 4643143 - DNA, 25 bp, Homo sapien
tgggatctgaaagcacagcgtcttc

SEQ ID NO: 4643144 - DNA, 25 bp, Homo sapien
ccacagtgagaagtatgcagaaacc

SEQ ID NO: 4643145 - DNA, 25 bp, Homo sapien
caccctcagggctcaagaatgtcaa

SEQ ID NO: 4643146 - DNA, 25 bp, Homo sapien
tgatctggatacatgaacgtgtctg

SEQ ID NO: 4643147 - DNA, 25 bp, Homo sapien
cccaaaattgtagtgaagaaggttg

SEQ ID NO: 4643148 - DNA, 25 bp, Homo sapien
gcacctttaattggaggcttgaaaa

SEQ ID NO: 4643149 - DNA, 25 bp, Homo sapien
tgtacctggcatgtgctagtacccc

SEQ ID NO: 4643150 - DNA, 25 bp, Homo sapien
ctctactttatagggtggtggtgag

SEQ ID NO: 4643151 - DNA, 25 bp, Homo sapien
ccccatgagtcgcaacataagttcg

SEQ ID NO: 4643152 - DNA, 25 bp, Homo sapien
cataagttcgttatttctcccaatc

SEQ ID NO: 4643153 - DNA, 25 bp, Homo sapien
gagactagattttggcatcaatttg

SEQ ID NO: 4643154 - DNA, 25 bp, Homo sapien
tctcccaatcacttgtgtctggaaa

SEQ ID NO: 4643155 - DNA, 25 bp, Homo sapien
catccatgtgcttaggtgatcacca

SEQ ID NO: 4643156 - DNA, 25 bp, Homo sapien
tcttcacagttcagcaagcaacagc

SEQ ID NO: 4643157 - DNA, 25 bp, Homo sapien
taactgtgctcacgtctcatccatg

SEQ ID NO: 4643158 - DNA, 25 bp, Homo sapien
tataatcactggatgcatgcacaat

SEQ ID NO: 4643159 - DNA, 25 bp, Homo sapien
gctctatgaacttcgctcatctgtg

SEQ ID NO: 4643160 - DNA, 25 bp, Homo sapien
ggccagagcattcacatggtgtctt

SEQ ID NO: 4643161 - DNA, 25 bp, Homo sapien
tgcctggcttcgctgaatgaaagct

SEQ ID NO: 4643162 - DNA, 25 bp, Homo sapien
gtaatgctaaatgctgcaccaggca

SEQ ID NO: 4643163 - DNA, 25 bp, Homo sapien
cttttaagaggcatgtttatacacc

SEQ ID NO: 4643164 - DNA, 25 bp, Homo sapien
cagatcaccgggaagtcaggaccct

SEQ ID NO: 4643165 - DNA, 25 bp, Homo sapien
gctagtgcagatcaccgggaagtca

SEQ ID NO: 4643166 - DNA, 25 bp, Homo sapien
ttggtcatggtgtcttttaagaggc

SEQ ID NO: 4643167 - DNA, 25 bp, Homo sapien
tggccgccggtatgggtttacagca

SEQ ID NO: 4643168 - DNA, 25 bp, Homo sapien
tgcacaaattgaggctgcttggccg

SEQ ID NO: 4643169 - DNA, 25 bp, Homo sapien
gtggcccgccgcttctaaaattcta

SEQ ID NO: 4643170 - DNA, 25 bp, Homo sapien
tgcaaagcacggagtgcaaccagga

SEQ ID NO: 4643171 - DNA, 25 bp, Homo sapien
ccaggaggccggctactgcgcggcg

SEQ ID NO: 4643172 - DNA, 25 bp, Homo sapien
caggtcgcatcgatgtcggtgcgca

SEQ ID NO: 4643173 - DNA, 25 bp, Homo sapien
cagagtggggccaactctgccggcc

SEQ ID NO: 4643174 - DNA, 25 bp, Homo sapien
ctgcgcggcgcccgagagtccacat

SEQ ID NO: 4643175 - DNA, 25 bp, Homo sapien
ccttggcatcttcaagaccctcatt

SEQ ID NO: 4643176 - DNA, 25 bp, Homo sapien
ccacagccattctttgggtttcctc

SEQ ID NO: 4643177 - DNA, 25 bp, Homo sapien
cagacggttccctcctcgtgaaaca

SEQ ID NO: 4643178 - DNA, 25 bp, Homo sapien
cattaaataccatgtcctccccttg

SEQ ID NO: 4643179 - DNA, 25 bp, Homo sapien
tcctcaaatacccaagatgtgcaag

SEQ ID NO: 4643180 - DNA, 25 bp, Homo sapien
caagggaactatggaacagacaggt

SEQ ID NO: 4643181 - DNA, 25 bp, Homo sapien
cagctggtgacagaggttgctaacc

SEQ ID NO: 4643182 - DNA, 25 bp, Homo sapien
gcttagggtcaatccaggacagtca

SEQ ID NO: 4643183 - DNA, 25 bp, Homo sapien
ccaaggacctcagctggacgtcatc

SEQ ID NO: 4643184 - DNA, 25 bp, Homo sapien
acaagagccactggggcacaagagt

SEQ ID NO: 4643185 - DNA, 25 bp, Homo sapien
ctggggagatgaaggaaataatcag

SEQ ID NO: 4643186 - DNA, 25 bp, Homo sapien
aggaaataatcagacaagagccact

SEQ ID NO: 4643187 - DNA, 25 bp, Homo sapien
tgaaggaaataatcagacaagagcc

SEQ ID NO: 4643188 - DNA, 25 bp, Homo sapien
gtgacagggtctgagttgattacca

SEQ ID NO: 4643189 - DNA, 25 bp, Homo sapien
tgagttgattaccaccagctctgct

SEQ ID NO: 4643190 - DNA, 25 bp, Homo sapien
tggacatccaggtgacagggtctga

SEQ ID NO: 4643191 - DNA, 25 bp, Homo sapien
ctggacatccaggtgacagggtctg

SEQ ID NO: 4643192 - DNA, 25 bp, Homo sapien
ctggttgaggccacgttggttcgaa

SEQ ID NO: 4643193 - DNA, 25 bp, Homo sapien
atctggttgaggccacgttggttcg

SEQ ID NO: 4643194 - DNA, 25 bp, Homo sapien
tggttgaggccacgttggttcgaac

SEQ ID NO: 4643195 - DNA, 25 bp, Homo sapien
tctggttgaggccacgttggttcga

SEQ ID NO: 4643196 - DNA, 25 bp, Homo sapien
catggcaggtcaagggtgtgcttcc

SEQ ID NO: 4643197 - DNA, 25 bp, Homo sapien
tgctacctgccggcagagttgggcc

SEQ ID NO: 4643198 - DNA, 25 bp, Homo sapien
ggctgtcttcctacacatggcaggt

SEQ ID NO: 4643199 - DNA, 25 bp, Homo sapien
aagcgggctgtcttcctacacatgg

SEQ ID NO: 4643200 - DNA, 25 bp, Homo sapien
tccagcgtttcctctgctagtcttt

SEQ ID NO: 4643201 - DNA, 25 bp, Homo sapien
gtccagcgtttcctctgctagtctt

SEQ ID NO: 4643202 - DNA, 25 bp, Homo sapien
cctttttagtggtttcagcacaact

SEQ ID NO: 4643203 - DNA, 25 bp, Homo sapien
tcagcacaactgactagcattcctt

SEQ ID NO: 4643204 - DNA, 25 bp, Homo sapien
cctgataaccactgaccacagagtg

SEQ ID NO: 4643205 - DNA, 25 bp, Homo sapien
ccacagagtggtctaagacagggtc

SEQ ID NO: 4643206 - DNA, 25 bp, Homo sapien
caggaattcatactctagggtacag

SEQ ID NO: 4643207 - DNA, 25 bp, Homo sapien
aaattagttagcacctgaaggactc

SEQ ID NO: 4643208 - DNA, 25 bp, Homo sapien
ttataacacagagggatcagtgctc

SEQ ID NO: 4643209 - DNA, 25 bp, Homo sapien
gatggcagccactgtatagctttag

SEQ ID NO: 4643210 - DNA, 25 bp, Homo sapien
gaacagatgtcctcttgggtgtatc

SEQ ID NO: 4643211 - DNA, 25 bp, Homo sapien
tggaccacttgatcagacgacacac

SEQ ID NO: 4643212 - DNA, 25 bp, Homo sapien
gggtgtatctggattactgctttca

SEQ ID NO: 4643213 - DNA, 25 bp, Homo sapien
taagaagccacttaagtctcccact

SEQ ID NO: 4643214 - DNA, 25 bp, Homo sapien
gactccacagctgcctagtgacaag

SEQ ID NO: 4643215 - DNA, 25 bp, Homo sapien
tactaggtcaagtagagcggactcc

SEQ ID NO: 4643216 - DNA, 25 bp, Homo sapien
tatctaagatgccaggactccacct

SEQ ID NO: 4643217 - DNA, 25 bp, Homo sapien
gggtgactctaacagtctccaggca

SEQ ID NO: 4643218 - DNA, 25 bp, Homo sapien
cctccttcgaggactcagggcaaga

SEQ ID NO: 4643219 - DNA, 25 bp, Homo sapien
taagacgcgagttccaggtctggtc

SEQ ID NO: 4643220 - DNA, 25 bp, Homo sapien
cagatgcgtgctcaaggtctccgca

SEQ ID NO: 4643221 - DNA, 25 bp, Homo sapien
catcactgatgagcggcgcctgtct

SEQ ID NO: 4643222 - DNA, 25 bp, Homo sapien
ataggttcctagatctccacccagt

SEQ ID NO: 4643223 - DNA, 25 bp, Homo sapien
gctgggagctgccgtcttgccgcca

SEQ ID NO: 4643224 - DNA, 25 bp, Homo sapien
gggagctgccgtcttgccgccactt

SEQ ID NO: 4643225 - DNA, 25 bp, Homo sapien
agagcttgtcctcagggcccgcttc

SEQ ID NO: 4643226 - DNA, 25 bp, Homo sapien
gagagcttgtcctcagggcccgctt

SEQ ID NO: 4643227 - DNA, 25 bp, Homo sapien
ctgtgtgggcagcaggccgggagtg

SEQ ID NO: 4643228 - DNA, 25 bp, Homo sapien
caggccgggagtggggagagccgcc

SEQ ID NO: 4643229 - DNA, 25 bp, Homo sapien
gtgtgggcagcaggccgggagtggg

SEQ ID NO: 4643230 - DNA, 25 bp, Homo sapien
agcaggccgggagtggggagagccg

SEQ ID NO: 4643231 - DNA, 25 bp, Homo sapien
ttcgcaggtacagctacacggcgct

SEQ ID NO: 4643232 - DNA, 25 bp, Homo sapien
ttccaagaagacaggcgcagaacgg

SEQ ID NO: 4643233 - DNA, 25 bp, Homo sapien
cataaccgtgtgtctggtcatgcca

SEQ ID NO: 4643234 - DNA, 25 bp, Homo sapien
tataaaaacaatgacgacggcccga

SEQ ID NO: 4643235 - DNA, 25 bp, Homo sapien
tttagccaagttgggcgggtgcagg

SEQ ID NO: 4643236 - DNA, 25 bp, Homo sapien
tctttagccaagttgggcgggtgca

SEQ ID NO: 4643237 - DNA, 25 bp, Homo sapien
tagccaagttgggcgggtgcaggct

SEQ ID NO: 4643238 - DNA, 25 bp, Homo sapien
aggctccaactgctcggcagccact

SEQ ID NO: 4643239 - DNA, 25 bp, Homo sapien
gcagcagctgagttggcatgtcgtg

SEQ ID NO: 4643240 - DNA, 25 bp, Homo sapien
cctgtggggtgttccgtctcaaaca

SEQ ID NO: 4643241 - DNA, 25 bp, Homo sapien
gaaccctgtggggtgttccgtctca

SEQ ID NO: 4643242 - DNA, 25 bp, Homo sapien
ttggcatgtcgtggcggccagcagg

SEQ ID NO: 4643243 - DNA, 25 bp, Homo sapien
ggactggcctctggcatggtcaacg

SEQ ID NO: 4643244 - DNA, 25 bp, Homo sapien
tggatctcaccttgggccgattctc

SEQ ID NO: 4643245 - DNA, 25 bp, Homo sapien
ttctgtggatctcaccttgggccga

SEQ ID NO: 4643246 - DNA, 25 bp, Homo sapien
tggtcaacgtaagaccaccaccagc

SEQ ID NO: 4643247 - DNA, 25 bp, Homo sapien
tgcctccctcctggtggccctggtg

SEQ ID NO: 4643248 - DNA, 25 bp, Homo sapien
ctgcctccctcctggtggccctggt

SEQ ID NO: 4643249 - DNA, 25 bp, Homo sapien
ctccctcctggtggccctggtggcc

SEQ ID NO: 4643250 - DNA, 25 bp, Homo sapien
cctcctggtggccctggtggcccat

SEQ ID NO: 4643251 - DNA, 25 bp, Homo sapien
gcaacctcctcagggtgcgcaaggt

SEQ ID NO: 4643252 - DNA, 25 bp, Homo sapien
gactgctgatttcacaggacctgaa

SEQ ID NO: 4643253 - DNA, 25 bp, Homo sapien
tgagtgaaccaaaccatcagggtca

SEQ ID NO: 4643254 - DNA, 25 bp, Homo sapien
tactgctatcgggttgccaggcaga

SEQ ID NO: 4643255 - DNA, 25 bp, Homo sapien
cgccgtcgtgggagtacacccagtt

SEQ ID NO: 4643256 - DNA, 25 bp, Homo sapien
agtccagtcataacgcttaggtcca

SEQ ID NO: 4643257 - DNA, 25 bp, Homo sapien
aggctttagtgagctctgcggccag

SEQ ID NO: 4643258 - DNA, 25 bp, Homo sapien
agctctgcggccagcagctcatgga

SEQ ID NO: 4643259 - DNA, 25 bp, Homo sapien
tcaagcatcttttccggaataggcc

SEQ ID NO: 4643260 - DNA, 25 bp, Homo sapien
caagcatcttttccggaataggcca

SEQ ID NO: 4643261 - DNA, 25 bp, Homo sapien
catcttttccggaataggccaagga

SEQ ID NO: 4643262 - DNA, 25 bp, Homo sapien
agcatcttttccggaataggccaag

SEQ ID NO: 4643263 - DNA, 25 bp, Homo sapien
catttggagatagaacagtgagcag

SEQ ID NO: 4643264 - DNA, 25 bp, Homo sapien
cccaatagggaattagaactagcct

SEQ ID NO: 4643265 - DNA, 25 bp, Homo sapien
tagcccaactgtcctcaaaagcagg

SEQ ID NO: 4643266 - DNA, 25 bp, Homo sapien
gagaaacagcactaggtctccctgg

SEQ ID NO: 4643267 - DNA, 25 bp, Homo sapien
cagcttgacttaatggaatgtgttt

SEQ ID NO: 4643268 - DNA, 25 bp, Homo sapien
tgagcataactttgcatgaatttta

SEQ ID NO: 4643269 - DNA, 25 bp, Homo sapien
tattttctcactggcactggcctac

SEQ ID NO: 4643270 - DNA, 25 bp, Homo sapien
ctctgtcgctcaggtacgatctcga

SEQ ID NO: 4643271 - DNA, 25 bp, Homo sapien
tgatggactggcaagaggaatccca

SEQ ID NO: 4643272 - DNA, 25 bp, Homo sapien
tacacttaagatggcagacacggga

SEQ ID NO: 4643273 - DNA, 25 bp, Homo sapien
gcactagtacttctacctggatggg

SEQ ID NO: 4643274 - DNA, 25 bp, Homo sapien
tctctgtcaacagtggcacctggag

SEQ ID NO: 4643275 - DNA, 25 bp, Homo sapien
gacacatagtcctagcctcatggaa

SEQ ID NO: 4643276 - DNA, 25 bp, Homo sapien
tgcaagatgctagggcaacagcagt

SEQ ID NO: 4643277 - DNA, 25 bp, Homo sapien
tctgagagccacgtgaaaatagcac

SEQ ID NO: 4643278 - DNA, 25 bp, Homo sapien
ggacatggaacaatcaagggcatcc

SEQ ID NO: 4643279 - DNA, 25 bp, Homo sapien
cgcgcctggctcttctaggattttt

SEQ ID NO: 4643280 - DNA, 25 bp, Homo sapien
ccgcgcctggctcttctaggatttt

SEQ ID NO: 4643281 - DNA, 25 bp, Homo sapien
tgctgagctttggagtgctaatgac

SEQ ID NO: 4643282 - DNA, 25 bp, Homo sapien
gtatatgtaccatatggtggtatat

SEQ ID NO: 4643283 - DNA, 25 bp, Homo sapien
tatatgtacacaatctaatccacca

SEQ ID NO: 4643284 - DNA, 25 bp, Homo sapien
gagcagggcaccgaataggtagttt

SEQ ID NO: 4643285 - DNA, 25 bp, Homo sapien
caatcccttccctataggtttgaag

SEQ ID NO: 4643286 - DNA, 25 bp, Homo sapien
gaaagagggattattatgggactaa

SEQ ID NO: 4643287 - DNA, 25 bp, Homo sapien
ggctgaactaagagatggagacccc

SEQ ID NO: 4643288 - DNA, 25 bp, Homo sapien
tagtctagtacaggctccttagaac

SEQ ID NO: 4643289 - DNA, 25 bp, Homo sapien
caagcaaatgtagacccgaagaagt

SEQ ID NO: 4643290 - DNA, 25 bp, Homo sapien
tctctttctagtagagggagggcac

SEQ ID NO: 4643291 - DNA, 25 bp, Homo sapien
tagtggaagacaagggttattccaa

SEQ ID NO: 4643292 - DNA, 25 bp, Homo sapien
taagtttgttcagatccattttggc

SEQ ID NO: 4643293 - DNA, 25 bp, Homo sapien
ataaaatgagttttcaggccaggtg

SEQ ID NO: 4643294 - DNA, 25 bp, Homo sapien
gcacagtccaaatcaatggcttcct

SEQ ID NO: 4643295 - DNA, 25 bp, Homo sapien
cctcctcatgggcaaccattttcaa

SEQ ID NO: 4643296 - DNA, 25 bp, Homo sapien
gggccaaggcggactgatcatctga

SEQ ID NO: 4643297 - DNA, 25 bp, Homo sapien
gagaaggttcttgtctatcccacag

SEQ ID NO: 4643298 - DNA, 25 bp, Homo sapien
ttttgcacacgcgtcccatggagag

SEQ ID NO: 4643299 - DNA, 25 bp, Homo sapien
tgataacagactgcccacaatggag

SEQ ID NO: 4643300 - DNA, 25 bp, Homo sapien
ttcacataggaagaggaggcgccag

SEQ ID NO: 4643301 - DNA, 25 bp, Homo sapien
tagaacaggtctctcctgccaaggg

SEQ ID NO: 4643302 - DNA, 25 bp, Homo sapien
caggaccctttatattcttgagtta

SEQ ID NO: 4643303 - DNA, 25 bp, Homo sapien
gagagtgcagtggttctctttaaag

SEQ ID NO: 4643304 - DNA, 25 bp, Homo sapien
tatagaggactccatagagcttttg

SEQ ID NO: 4643305 - DNA, 25 bp, Homo sapien
tccaatgagcatctagaaaggtgtt

SEQ ID NO: 4643306 - DNA, 25 bp, Homo sapien
tccttggaagatcccactagggctg

SEQ ID NO: 4643307 - DNA, 25 bp, Homo sapien
taccttgggcatggagtggtcctga

SEQ ID NO: 4643308 - DNA, 25 bp, Homo sapien
gggctgagctccatttacgttccaa

SEQ ID NO: 4643309 - DNA, 25 bp, Homo sapien
taatggccagtcttctaaatgcttg

SEQ ID NO: 4643310 - DNA, 25 bp, Homo sapien
taaatgcttgtatccaaccttagag

SEQ ID NO: 4643311 - DNA, 25 bp, Homo sapien
aacgctatctactgggagtcttcag

SEQ ID NO: 4643312 - DNA, 25 bp, Homo sapien
tcaggccaagtgtcattttcggagg

SEQ ID NO: 4643313 - DNA, 25 bp, Homo sapien
cccagtgaaaagtgagctccaggag

SEQ ID NO: 4643314 - DNA, 25 bp, Homo sapien
gcaagcaagcaaagtcccaaactag

SEQ ID NO: 4643315 - DNA, 25 bp, Homo sapien
tagatccagccaggtatagcagctc

SEQ ID NO: 4643316 - DNA, 25 bp, Homo sapien
gacactgaccacagggttatctggg

SEQ ID NO: 4643317 - DNA, 25 bp, Homo sapien
cagcctaaacattaatttattgact

SEQ ID NO: 4643318 - DNA, 25 bp, Homo sapien
gacttgatatgactaaatgttccca

SEQ ID NO: 4643319 - DNA, 25 bp, Homo sapien
aatgttcccatcaagaatgttctac

SEQ ID NO: 4643320 - DNA, 25 bp, Homo sapien
catatccacagtaaggaaaaaacaa

SEQ ID NO: 4643321 - DNA, 25 bp, Homo sapien
tattcattcagggtagtgacagtac

SEQ ID NO: 4643322 - DNA, 25 bp, Homo sapien
cccagtatgattaccacgatgcaaa

SEQ ID NO: 4643323 - DNA, 25 bp, Homo sapien
ggtcctcatggaacttgtagataac

SEQ ID NO: 4643324 - DNA, 25 bp, Homo sapien
taagccctagtgcaaactgtatttg

SEQ ID NO: 4643325 - DNA, 25 bp, Homo sapien
aagctggtacatggctattgcccat

SEQ ID NO: 4643326 - DNA, 25 bp, Homo sapien
ccattgtaaactgtcccagcttttt

SEQ ID NO: 4643327 - DNA, 25 bp, Homo sapien
aaactgtccaaatcatttgatcctg

SEQ ID NO: 4643328 - DNA, 25 bp, Homo sapien
gtaatttcaccctatcttaagacaa

SEQ ID NO: 4643329 - DNA, 25 bp, Homo sapien
aattggattgttctggaatgtgttc

SEQ ID NO: 4643330 - DNA, 25 bp, Homo sapien
attggattgttctggaatgtgttca

SEQ ID NO: 4643331 - DNA, 25 bp, Homo sapien
gaattggattgttctggaatgtgtt

SEQ ID NO: 4643332 - DNA, 25 bp, Homo sapien
gggttctctcttaatgacagtgtgg

SEQ ID NO: 4643333 - DNA, 25 bp, Homo sapien
cagtgtggggatctatggaagctat

SEQ ID NO: 4643334 - DNA, 25 bp, Homo sapien
tctatggaagctatcagggtgccca

SEQ ID NO: 4643335 - DNA, 25 bp, Homo sapien
gttctctcttaatgacagtgtgggg

SEQ ID NO: 4643336 - DNA, 25 bp, Homo sapien
taaaagcgtatgtaggatgctactg

SEQ ID NO: 4643337 - DNA, 25 bp, Homo sapien
catcaacaacttatttcaacaagag

SEQ ID NO: 4643338 - DNA, 25 bp, Homo sapien
tgtcagaaactagggtattaacaaa

SEQ ID NO: 4643339 - DNA, 25 bp, Homo sapien
ttaggttagacttctgatgataccc

SEQ ID NO: 4643340 - DNA, 25 bp, Homo sapien
cagctgctcgcagcgctactttggg

SEQ ID NO: 4643341 - DNA, 25 bp, Homo sapien
tgcacgcacgccactcagcggtggg

SEQ ID NO: 4643342 - DNA, 25 bp, Homo sapien
gcttccttgagaccggagggttctg

SEQ ID NO: 4643343 - DNA, 25 bp, Homo sapien
tgcctgggagacctttgtcactgga

SEQ ID NO: 4643344 - DNA, 25 bp, Homo sapien
ttgggcggtggcgagccagagagca

SEQ ID NO: 4643345 - DNA, 25 bp, Homo sapien
gggcggtggcgagccagagagcagc

SEQ ID NO: 4643346 - DNA, 25 bp, Homo sapien
gggagttgggcggtggcgagccaga

SEQ ID NO: 4643347 - DNA, 25 bp, Homo sapien
gagttgggcggtggcgagccagaga

SEQ ID NO: 4643348 - DNA, 25 bp, Homo sapien
tgcacttcacccaagccggagtgcg

SEQ ID NO: 4643349 - DNA, 25 bp, Homo sapien
atattattgtgattcgggctatttc

SEQ ID NO: 4643350 - DNA, 25 bp, Homo sapien
tgcgcgcgtcgctggctgcacttca

SEQ ID NO: 4643351 - DNA, 25 bp, Homo sapien
gagtgcgggaagctccccgggaatg

SEQ ID NO: 4643352 - DNA, 25 bp, Homo sapien
ccctcatgggctgagtttttcccag

SEQ ID NO: 4643353 - DNA, 25 bp, Homo sapien
cctcatgggctgagtttttcccaga

SEQ ID NO: 4643354 - DNA, 25 bp, Homo sapien
ctaccaccatcaccaggcttctcac

SEQ ID NO: 4643355 - DNA, 25 bp, Homo sapien
cctaccaccatcaccaggcttctca

SEQ ID NO: 4643356 - DNA, 25 bp, Homo sapien
gagttcatgacaagaggatatcctc

SEQ ID NO: 4643357 - DNA, 25 bp, Homo sapien
gtggagttcatgacaagaggatatc

SEQ ID NO: 4643358 - DNA, 25 bp, Homo sapien
ctcggagacaggagggtcccacacc

SEQ ID NO: 4643359 - DNA, 25 bp, Homo sapien
tcatgacaagaggatatcctcttcc

SEQ ID NO: 4643360 - DNA, 25 bp, Homo sapien
ctagacgaaggtttggctccagaca

SEQ ID NO: 4643361 - DNA, 25 bp, Homo sapien
gactctgtggcagtatagggcccta

SEQ ID NO: 4643362 - DNA, 25 bp, Homo sapien
ggtcgcctacttgctctagacgaag

SEQ ID NO: 4643363 - DNA, 25 bp, Homo sapien
gaggaactttgtcctgctacagagc

SEQ ID NO: 4643364 - DNA, 25 bp, Homo sapien
tggtacacatgatccacatactggg

SEQ ID NO: 4643365 - DNA, 25 bp, Homo sapien
caatgggccatggtacacatgatcc

SEQ ID NO: 4643366 - DNA, 25 bp, Homo sapien
gatccacatactgggtcaaccagtc

SEQ ID NO: 4643367 - DNA, 25 bp, Homo sapien
tggcccactcaatgggccatggtac

SEQ ID NO: 4643368 - DNA, 25 bp, Homo sapien
tgtccatgggtaaaggtggaccacc

SEQ ID NO: 4643369 - DNA, 25 bp, Homo sapien
tgggtaaaggtggaccacctatcat

SEQ ID NO: 4643370 - DNA, 25 bp, Homo sapien
tttgtccatgggtaaaggtggacca

SEQ ID NO: 4643371 - DNA, 25 bp, Homo sapien
tccatgggtaaaggtggaccaccta

SEQ ID NO: 4643372 - DNA, 25 bp, Homo sapien
tgtgtgatccctgccatcatgaaaa

SEQ ID NO: 4643373 - DNA, 25 bp, Homo sapien
ttaaatacctctagaacccaacatg

SEQ ID NO: 4643374 - DNA, 25 bp, Homo sapien
taaactccttgcttgggtcaatagc

SEQ ID NO: 4643375 - DNA, 25 bp, Homo sapien
aagcctgtgctttgacaagtgagga

SEQ ID NO: 4643376 - DNA, 25 bp, Homo sapien
agtggggtaataccaactgctgctt

SEQ ID NO: 4643377 - DNA, 25 bp, Homo sapien
ctgcttccagaataccgatatattt

SEQ ID NO: 4643378 - DNA, 25 bp, Homo sapien
ttaagtggggtaataccaactgctg

SEQ ID NO: 4643379 - DNA, 25 bp, Homo sapien
gcttccagaataccgatatatttct

SEQ ID NO: 4643380 - DNA, 25 bp, Homo sapien
tgccaaaggttcacgtgtcttctgc

SEQ ID NO: 4643381 - DNA, 25 bp, Homo sapien
ttgccaaaggttcacgtgtcttctg

SEQ ID NO: 4643382 - DNA, 25 bp, Homo sapien
gagatgacagtaatgtggtacttcg

SEQ ID NO: 4643383 - DNA, 25 bp, Homo sapien
gggagatgacagtaatgtggtactt

SEQ ID NO: 4643384 - DNA, 25 bp, Homo sapien
ggagatgacagtaatgtggtacttc

SEQ ID NO: 4643385 - DNA, 25 bp, Homo sapien
cagggagatgacagtaatgtggtac

SEQ ID NO: 4643386 - DNA, 25 bp, Homo sapien
caacgtgggccgtgtactggtacag

SEQ ID NO: 4643387 - DNA, 25 bp, Homo sapien
gcaacgtgggccgtgtactggtaca

SEQ ID NO: 4643388 - DNA, 25 bp, Homo sapien
ctggcaacgtgggccgtgtactggt

SEQ ID NO: 4643389 - DNA, 25 bp, Homo sapien
acgtgggccgtgtactggtacagct

SEQ ID NO: 4643390 - DNA, 25 bp, Homo sapien
ttgaaaaagagacagggtctcctta

SEQ ID NO: 4643391 - DNA, 25 bp, Homo sapien
attgaaaaagagacagggtctcctt

SEQ ID NO: 4643392 - DNA, 25 bp, Homo sapien
tgaaaaagagacagggtctccttat

SEQ ID NO: 4643393 - DNA, 25 bp, Homo sapien
gaaaaagagacagggtctccttatg

SEQ ID NO: 4643394 - DNA, 25 bp, Homo sapien
tttaaggtatctaaattgcctaaca

SEQ ID NO: 4643395 - DNA, 25 bp, Homo sapien
agccactgaccccaacctcaactca

SEQ ID NO: 4643396 - DNA, 25 bp, Homo sapien
taagcctatatgatggggtgagtca

SEQ ID NO: 4643397 - DNA, 25 bp, Homo sapien
gtcagtgataactttaaggtatcta

SEQ ID NO: 4643398 - DNA, 25 bp, Homo sapien
aaacatgcaggagtataattaaatt

SEQ ID NO: 4643399 - DNA, 25 bp, Homo sapien
taaacatgcaggagtataattaaat

SEQ ID NO: 4643400 - DNA, 25 bp, Homo sapien
aacatgcaggagtataattaaatta

SEQ ID NO: 4643401 - DNA, 25 bp, Homo sapien
ttaaacatgcaggagtataattaaa

SEQ ID NO: 4643402 - DNA, 25 bp, Homo sapien
cctggccctgtgttgttttactgtt

SEQ ID NO: 4643403 - DNA, 25 bp, Homo sapien
taaggttaggcagatggctcacgcc

SEQ ID NO: 4643404 - DNA, 25 bp, Homo sapien
tcagagtcagctatggcctgaacgg

SEQ ID NO: 4643405 - DNA, 25 bp, Homo sapien
gatgactgtagtctaggctgaccac

SEQ ID NO: 4643406 - DNA, 25 bp, Homo sapien
gatcctaaatagcttcgacactgtt

SEQ ID NO: 4643407 - DNA, 25 bp, Homo sapien
tttagaaacattcagtggatcactc

SEQ ID NO: 4643408 - DNA, 25 bp, Homo sapien
gagatgctcctcattccaatacatg

SEQ ID NO: 4643409 - DNA, 25 bp, Homo sapien
gagctgcttctaatgccatatgccc

SEQ ID NO: 4643410 - DNA, 25 bp, Homo sapien
tgggcaccaccggacagtgctctga

SEQ ID NO: 4643411 - DNA, 25 bp, Homo sapien
ggacagtgctctgacccgcagccca

SEQ ID NO: 4643412 - DNA, 25 bp, Homo sapien
gcgcagctccggaccccgcttctgc

SEQ ID NO: 4643413 - DNA, 25 bp, Homo sapien
ttcggacacaggtcccgcgtaggcg

SEQ ID NO: 4643414 - DNA, 25 bp, Homo sapien
ccaacctgacagctcccgccggggt

SEQ ID NO: 4643415 - DNA, 25 bp, Homo sapien
ggtggaaacccgcggtctcctcgca

SEQ ID NO: 4643416 - DNA, 25 bp, Homo sapien
acccgcggtctcctcgcaccggcat

SEQ ID NO: 4643417 - DNA, 25 bp, Homo sapien
aacctgacagctcccgccggggtgg

SEQ ID NO: 4643418 - DNA, 25 bp, Homo sapien
tgcttagagtcaaatcaatgaggca

SEQ ID NO: 4643419 - DNA, 25 bp, Homo sapien
tatatgggcatctactaaaaaggct

SEQ ID NO: 4643420 - DNA, 25 bp, Homo sapien
tgatgtgtttaacccactaaatggg

SEQ ID NO: 4643421 - DNA, 25 bp, Homo sapien
ccaacaactgttgggcccctgatta

SEQ ID NO: 4643422 - DNA, 25 bp, Homo sapien
cctgatctcaagctaggatgcaatt

SEQ ID NO: 4643423 - DNA, 25 bp, Homo sapien
caaagtcaactatgcttggtagcaa

SEQ ID NO: 4643424 - DNA, 25 bp, Homo sapien
caacacatgtattgggcaagacact

SEQ ID NO: 4643425 - DNA, 25 bp, Homo sapien
aggtggcacccacaactcaaagcaa

SEQ ID NO: 4643426 - DNA, 25 bp, Homo sapien
gcacagcaggaccaaaccgtcatct

SEQ ID NO: 4643427 - DNA, 25 bp, Homo sapien
agttatacagagtgtgcctgcctcc

SEQ ID NO: 4643428 - DNA, 25 bp, Homo sapien
caaggtttgaactgccctggtccac

SEQ ID NO: 4643429 - DNA, 25 bp, Homo sapien
ttgactgtgtgagggtcggcactcc

SEQ ID NO: 4643430 - DNA, 25 bp, Homo sapien
tacacagaggcagatgcgaatcctc

SEQ ID NO: 4643431 - DNA, 25 bp, Homo sapien
tgcctgtgagaaagctagaaatgcc

SEQ ID NO: 4643432 - DNA, 25 bp, Homo sapien
ggccataccaccaagtacacagagg

SEQ ID NO: 4643433 - DNA, 25 bp, Homo sapien
gaaccacagagataagccagcactg

SEQ ID NO: 4643434 - DNA, 25 bp, Homo sapien
gtgtactgttcccatatcagctctt

SEQ ID NO: 4643435 - DNA, 25 bp, Homo sapien
cttttgtagggtcacagtgtactgt

SEQ ID NO: 4643436 - DNA, 25 bp, Homo sapien
tgtactgttcccatatcagctcttc

SEQ ID NO: 4643437 - DNA, 25 bp, Homo sapien
agtgtactgttcccatatcagctct

SEQ ID NO: 4643438 - DNA, 25 bp, Homo sapien
tgacaattgacgtttctccattttc

SEQ ID NO: 4643439 - DNA, 25 bp, Homo sapien
ccacccgggagcacatcagaaatga

SEQ ID NO: 4643440 - DNA, 25 bp, Homo sapien
tgcctccggacactgcaattccaaa

SEQ ID NO: 4643441 - DNA, 25 bp, Homo sapien
tcagaaatgacaattgacgtttctc

SEQ ID NO: 4643442 - DNA, 25 bp, Homo sapien
gaactgcaaacgaatgaagcacatc

SEQ ID NO: 4643443 - DNA, 25 bp, Homo sapien
gggtgccattgaccatgaccactct

SEQ ID NO: 4643444 - DNA, 25 bp, Homo sapien
ttctgagctgctgaactgcaaacga

SEQ ID NO: 4643445 - DNA, 25 bp, Homo sapien
gaccatgaccactctgtcattttct

SEQ ID NO: 4643446 - DNA, 25 bp, Homo sapien
gctattaaggcaagctgaaagcaaa

SEQ ID NO: 4643447 - DNA, 25 bp, Homo sapien
ttctgtcaaatgcttaaaagcaagg

SEQ ID NO: 4643448 - DNA, 25 bp, Homo sapien
tgaggatccaagaacagcggtccct

SEQ ID NO: 4643449 - DNA, 25 bp, Homo sapien
cagcggtccctaggttatgtaattc

SEQ ID NO: 4643450 - DNA, 25 bp, Homo sapien
cttcgcatggttgcccagaaagaca

SEQ ID NO: 4643451 - DNA, 25 bp, Homo sapien
cataggaaatgcatgtgaagtaagt

SEQ ID NO: 4643452 - DNA, 25 bp, Homo sapien
gaaatgaactgtcatgtctgtaact

SEQ ID NO: 4643453 - DNA, 25 bp, Homo sapien
gaaaaagacatcttgagatatggac

SEQ ID NO: 4643454 - DNA, 25 bp, Homo sapien
tcgtagtcctggtcaatgctccggc

SEQ ID NO: 4643455 - DNA, 25 bp, Homo sapien
tcgtaggcccggtgataggctcgct

SEQ ID NO: 4643456 - DNA, 25 bp, Homo sapien
gctgtagccactccggaaacttctg

SEQ ID NO: 4643457 - DNA, 25 bp, Homo sapien
gatggcccaaagtcgtggtccaggc

SEQ ID NO: 4643458 - DNA, 25 bp, Homo sapien
ttagttgccagacccgttcgggtca

SEQ ID NO: 4643459 - DNA, 25 bp, Homo sapien
tcgggtcatttcctttacgaagatc

SEQ ID NO: 4643460 - DNA, 25 bp, Homo sapien
aggttgccatctttagttgccagac

SEQ ID NO: 4643461 - DNA, 25 bp, Homo sapien
gaagatctgactcccaagccggaga

SEQ ID NO: 4643462 - DNA, 25 bp, Homo sapien
gcaggcgatgaacggcagtatgcac

SEQ ID NO: 4643463 - DNA, 25 bp, Homo sapien
tgtggacatgcaggcgatgaacggc

SEQ ID NO: 4643464 - DNA, 25 bp, Homo sapien
gatgaacggcagtatgcacactacc

SEQ ID NO: 4643465 - DNA, 25 bp, Homo sapien
agtatgcacactaccgttctctgcc

SEQ ID NO: 4643466 - DNA, 25 bp, Homo sapien
tgttgatgagggtctgctggctgtc

SEQ ID NO: 4643467 - DNA, 25 bp, Homo sapien
tgtctctcaacaccactagctgtag

SEQ ID NO: 4643468 - DNA, 25 bp, Homo sapien
tttctatcaattttcgagcatccgt

SEQ ID NO: 4643469 - DNA, 25 bp, Homo sapien
tgttctcagttacagtcccattgat

SEQ ID NO: 4643470 - DNA, 25 bp, Homo sapien
gaaaatgatcggtttgactctattt

SEQ ID NO: 4643471 - DNA, 25 bp, Homo sapien
ctcacttgaggaatgataatcataa

SEQ ID NO: 4643472 - DNA, 25 bp, Homo sapien
aatactgatgacgtctctcctctgg

SEQ ID NO: 4643473 - DNA, 25 bp, Homo sapien
ctggagaaaatgatcggtttgactc

SEQ ID NO: 4643474 - DNA, 25 bp, Homo sapien
ggacaatctgctcggcgtgtcctct

SEQ ID NO: 4643475 - DNA, 25 bp, Homo sapien
gggtgtcgcacccatcctggacaat

SEQ ID NO: 4643476 - DNA, 25 bp, Homo sapien
ttgttggtctctgggacaactgtgc

SEQ ID NO: 4643477 - DNA, 25 bp, Homo sapien
gcaatatcccctgtggacttaaagg

SEQ ID NO: 4643478 - DNA, 25 bp, Homo sapien
caggactaggacgaagaaaagttct

SEQ ID NO: 4643479 - DNA, 25 bp, Homo sapien
gcttcatcttcaggactaggacgaa

SEQ ID NO: 4643480 - DNA, 25 bp, Homo sapien
catcttcaggactaggacgaagaaa

SEQ ID NO: 4643481 - DNA, 25 bp, Homo sapien
cttcaggactaggacgaagaaaagt

SEQ ID NO: 4643482 - DNA, 25 bp, Homo sapien
aaaccaccactcttctggatttcag

SEQ ID NO: 4643483 - DNA, 25 bp, Homo sapien
ctggatttcagttacagagacagag

SEQ ID NO: 4643484 - DNA, 25 bp, Homo sapien
catctaggcaaaaaccaccactctt

SEQ ID NO: 4643485 - DNA, 25 bp, Homo sapien
ccaccactcttctggatttcagtta

SEQ ID NO: 4643486 - DNA, 25 bp, Homo sapien
ccagcaacaaatatcccgacatcat

SEQ ID NO: 4643487 - DNA, 25 bp, Homo sapien
gaggtcccttcttgaatgccagcaa

SEQ ID NO: 4643488 - DNA, 25 bp, Homo sapien
atcattgccaccagccaaccggagg

SEQ ID NO: 4643489 - DNA, 25 bp, Homo sapien
cagaatctggtctccttcttgaagg

SEQ ID NO: 4643490 - DNA, 25 bp, Homo sapien
tctccttggagcctagaagccccta

SEQ ID NO: 4643491 - DNA, 25 bp, Homo sapien
ttggagcctagaagcccctaccaga

SEQ ID NO: 4643492 - DNA, 25 bp, Homo sapien
gaccccttagtttactacatatgga

SEQ ID NO: 4643493 - DNA, 25 bp, Homo sapien
ccagaccccttagtttactacatat

SEQ ID NO: 4643494 - DNA, 25 bp, Homo sapien
gcatcctcccgcactaatcctctga

SEQ ID NO: 4643495 - DNA, 25 bp, Homo sapien
ctttagggatttctaacaggtagag

SEQ ID NO: 4643496 - DNA, 25 bp, Homo sapien
ctaacaggtagagaacggcatcctc

SEQ ID NO: 4643497 - DNA, 25 bp, Homo sapien
tggtcaccatttcacctttagggat

SEQ ID NO: 4643498 - DNA, 25 bp, Homo sapien
agccagccagttgcccagcttgccg

SEQ ID NO: 4643499 - DNA, 25 bp, Homo sapien
tctcacattcaaagtggcttcttat

SEQ ID NO: 4643500 - DNA, 25 bp, Homo sapien
agcctttctccaactcgttcccaat

SEQ ID NO: 4643501 - DNA, 25 bp, Homo sapien
tgccgtcatacagtgtgtctaccac

SEQ ID NO: 4643502 - DNA, 25 bp, Homo sapien
gctgggaacttggtgctgacagaca

SEQ ID NO: 4643503 - DNA, 25 bp, Homo sapien
tgaggtcttcccgacttttcctcag

SEQ ID NO: 4643504 - DNA, 25 bp, Homo sapien
tctcgcagcaaaaccctctcataag

SEQ ID NO: 4643505 - DNA, 25 bp, Homo sapien
ctctggccacgcattctccagaaat

SEQ ID NO: 4643506 - DNA, 25 bp, Homo sapien
tttccattgctatatcagctatggg

SEQ ID NO: 4643507 - DNA, 25 bp, Homo sapien
tatggggccgaataagaccacaggt

SEQ ID NO: 4643508 - DNA, 25 bp, Homo sapien
gtttgaaaccagtcaggtaactcat

SEQ ID NO: 4643509 - DNA, 25 bp, Homo sapien
taactcattagccaatttttccatt

SEQ ID NO: 4643510 - DNA, 25 bp, Homo sapien
atttctcagatcctgcatcttttgg

SEQ ID NO: 4643511 - DNA, 25 bp, Homo sapien
tcaataatttgcctcacggtattta

SEQ ID NO: 4643512 - DNA, 25 bp, Homo sapien
taaccggaccactccagtggatttc

SEQ ID NO: 4643513 - DNA, 25 bp, Homo sapien
tgcctcacggtatttaaccggacca

SEQ ID NO: 4643514 - DNA, 25 bp, Homo sapien
ccacagctttcggagtcacatccag

SEQ ID NO: 4643515 - DNA, 25 bp, Homo sapien
tcacatccagtagtgcatgcttatc

SEQ ID NO: 4643516 - DNA, 25 bp, Homo sapien
tgtaattcaacaggtccacagcttt

SEQ ID NO: 4643517 - DNA, 25 bp, Homo sapien
cgagaacttttgttggacgttggat

SEQ ID NO: 4643518 - DNA, 25 bp, Homo sapien
catgtattgatggtgagtagagaac

SEQ ID NO: 4643519 - DNA, 25 bp, Homo sapien
ttacaagtgttatccaccatgctgg

SEQ ID NO: 4643520 - DNA, 25 bp, Homo sapien
tcactagccttatagtctcacagga

SEQ ID NO: 4643521 - DNA, 25 bp, Homo sapien
gtttggcctggctcaatcactagcc

SEQ ID NO: 4643522 - DNA, 25 bp, Homo sapien
ggtactctgcaaagattactgtgct

SEQ ID NO: 4643523 - DNA, 25 bp, Homo sapien
tatctgttgctcctaacctctgggt

SEQ ID NO: 4643524 - DNA, 25 bp, Homo sapien
taaaaattgagagcttcacagtagc

SEQ ID NO: 4643525 - DNA, 25 bp, Homo sapien
gctgtctgagataagtatggtctgc

SEQ ID NO: 4643526 - DNA, 25 bp, Homo sapien
tatggcagacgcaagaagatgtttg

SEQ ID NO: 4643527 - DNA, 25 bp, Homo sapien
taagaacatgtgttttcggccaggt

SEQ ID NO: 4643528 - DNA, 25 bp, Homo sapien
cattataggtggatgtgataaagct

SEQ ID NO: 4643529 - DNA, 25 bp, Homo sapien
tccagaggcatgtttattaaggatg

SEQ ID NO: 4643530 - DNA, 25 bp, Homo sapien
tgctgatgctgaatagtgtccttta

SEQ ID NO: 4643531 - DNA, 25 bp, Homo sapien
gctgccaaaccagctatcattggct

SEQ ID NO: 4643532 - DNA, 25 bp, Homo sapien
ccttcagagacccaaaccgcttctc

SEQ ID NO: 4643533 - DNA, 25 bp, Homo sapien
ccaaaccagctatcattggctgaat

SEQ ID NO: 4643534 - DNA, 25 bp, Homo sapien
aagtttcagaacagggactctcacc

SEQ ID NO: 4643535 - DNA, 25 bp, Homo sapien
caaacttgattagcacacatgtgag

SEQ ID NO: 4643536 - DNA, 25 bp, Homo sapien
tccttagtaagctgtggagctcagc

SEQ ID NO: 4643537 - DNA, 25 bp, Homo sapien
tgagcatcacttcaaatgggcatgg

SEQ ID NO: 4643538 - DNA, 25 bp, Homo sapien
aaaccttgatgtgctcgccagggaa

SEQ ID NO: 4643539 - DNA, 25 bp, Homo sapien
gaagcgatccaattctagaggccta

SEQ ID NO: 4643540 - DNA, 25 bp, Homo sapien
tgtgtgagctatctccccgagggag

SEQ ID NO: 4643541 - DNA, 25 bp, Homo sapien
cattcaaactcccagaacgatggca

SEQ ID NO: 4643542 - DNA, 25 bp, Homo sapien
tgatgaggcggctgtcgcaactcag

SEQ ID NO: 4643543 - DNA, 25 bp, Homo sapien
aactcagatagtccgcgcccatggc

SEQ ID NO: 4643544 - DNA, 25 bp, Homo sapien
attgtcagtgtaggcgcctccttca

SEQ ID NO: 4643545 - DNA, 25 bp, Homo sapien
tcaccgtccgtgtcttcaaagtcac

SEQ ID NO: 4643546 - DNA, 25 bp, Homo sapien
atggacgacaccagcggctcctcgg

SEQ ID NO: 4643547 - DNA, 25 bp, Homo sapien
ggagcgggtgatggacgacaccagc

SEQ ID NO: 4643548 - DNA, 25 bp, Homo sapien
ctcctcgtgctgcaccggctccgag

SEQ ID NO: 4643549 - DNA, 25 bp, Homo sapien
ctcgtgctgcaccggctccgaggag

SEQ ID NO: 4643550 - DNA, 25 bp, Homo sapien
agctgtccacgagagtgcaaggaaa

SEQ ID NO: 4643551 - DNA, 25 bp, Homo sapien
cacacagctgtccacgagagtgcaa

SEQ ID NO: 4643552 - DNA, 25 bp, Homo sapien
cagctgtccacgagagtgcaaggaa

SEQ ID NO: 4643553 - DNA, 25 bp, Homo sapien
cacagctgtccacgagagtgcaagg

SEQ ID NO: 4643554 - DNA, 25 bp, Homo sapien
gcgtggactcaaagcgagagactcc

SEQ ID NO: 4643555 - DNA, 25 bp, Homo sapien
tctgtttatccatcgcacctgaggg

SEQ ID NO: 4643556 - DNA, 25 bp, Homo sapien
taatttggacagacggcacctaaag

SEQ ID NO: 4643557 - DNA, 25 bp, Homo sapien
gactgcaaccatgccagcgtggact

SEQ ID NO: 4643558 - DNA, 25 bp, Homo sapien
agttgaggttctgagccggtgcttc

SEQ ID NO: 4643559 - DNA, 25 bp, Homo sapien
cagagcactcgactgctttggagga

SEQ ID NO: 4643560 - DNA, 25 bp, Homo sapien
aactggctgcatccaatgtagagtc

SEQ ID NO: 4643561 - DNA, 25 bp, Homo sapien
cttgagtaagtccagaagttgaggt

SEQ ID NO: 4643562 - DNA, 25 bp, Homo sapien
gttgatcgctgctagcagccctcct

SEQ ID NO: 4643563 - DNA, 25 bp, Homo sapien
tcctcatctgagctcgtggctctgg

SEQ ID NO: 4643564 - DNA, 25 bp, Homo sapien
cttgggcggctctggcttgaatgct

SEQ ID NO: 4643565 - DNA, 25 bp, Homo sapien
ctattgtccctaagttgatcgctgc

SEQ ID NO: 4643566 - DNA, 25 bp, Homo sapien
taatttgggagttcacccaacaggc

SEQ ID NO: 4643567 - DNA, 25 bp, Homo sapien
ccaacaggccaaaagataggctcta

SEQ ID NO: 4643568 - DNA, 25 bp, Homo sapien
cacagtgagtcagaaccgtaattaa

SEQ ID NO: 4643569 - DNA, 25 bp, Homo sapien
cgtaattaaacaccatctcagtgtg

SEQ ID NO: 4643570 - DNA, 25 bp, Homo sapien
ggagagcactgcttcacgctaacag

SEQ ID NO: 4643571 - DNA, 25 bp, Homo sapien
caggtgagacccatgtccagctgag

SEQ ID NO: 4643572 - DNA, 25 bp, Homo sapien
caattcaggctttgggactcgaaga

SEQ ID NO: 4643573 - DNA, 25 bp, Homo sapien
ctgcactgagggtacatgagccggc

SEQ ID NO: 4643574 - DNA, 25 bp, Homo sapien
caaaggtaggttttgctgcaacagg

SEQ ID NO: 4643575 - DNA, 25 bp, Homo sapien
gcaacaggaggaggataacctttgg

SEQ ID NO: 4643576 - DNA, 25 bp, Homo sapien
cttcagtatagaccgcccaaaggta

SEQ ID NO: 4643577 - DNA, 25 bp, Homo sapien
taacctttggtagatgccccaggag

SEQ ID NO: 4643578 - DNA, 25 bp, Homo sapien
ggccttgtgatccatcttctcaaat

SEQ ID NO: 4643579 - DNA, 25 bp, Homo sapien
ggagcattatcttgctcctcactgc

SEQ ID NO: 4643580 - DNA, 25 bp, Homo sapien
cattctctgtaacctggccttgtga

SEQ ID NO: 4643581 - DNA, 25 bp, Homo sapien
tttgcccaggactgatttgggagca

SEQ ID NO: 4643582 - DNA, 25 bp, Homo sapien
gggcaaatatactccacagaccttt

SEQ ID NO: 4643583 - DNA, 25 bp, Homo sapien
gaaaactcccacatctactgggcaa

SEQ ID NO: 4643584 - DNA, 25 bp, Homo sapien
taatgccgctgaaccgaacgtttta

SEQ ID NO: 4643585 - DNA, 25 bp, Homo sapien
gctgctgttgtgctagacctgaaag

SEQ ID NO: 4643586 - DNA, 25 bp, Homo sapien
tcaggatgcttctgggcaatttcga

SEQ ID NO: 4643587 - DNA, 25 bp, Homo sapien
caggatgcttctgggcaatttcgat

SEQ ID NO: 4643588 - DNA, 25 bp, Homo sapien
gcgtgccagggtctggcttgtgcgt

SEQ ID NO: 4643589 - DNA, 25 bp, Homo sapien
cgttttgattggaactgcatagata

SEQ ID NO: 4643590 - DNA, 25 bp, Homo sapien
ccagggtctggcttgtgcgttttga

SEQ ID NO: 4643591 - DNA, 25 bp, Homo sapien
gtgcgttttgattggaactgcatag

SEQ ID NO: 4643592 - DNA, 25 bp, Homo sapien
gtaaggcaaacagtcaatctgtggg

SEQ ID NO: 4643593 - DNA, 25 bp, Homo sapien
agtcccagtccttgagaagtccccg

SEQ ID NO: 4643594 - DNA, 25 bp, Homo sapien
tgagtaaggcaaacagtcaatctgt

SEQ ID NO: 4643595 - DNA, 25 bp, Homo sapien
ccgccttagacctgtacccactagg

SEQ ID NO: 4643596 - DNA, 25 bp, Homo sapien
cagcgaggtctctgccagtttcagt

SEQ ID NO: 4643597 - DNA, 25 bp, Homo sapien
tattctcggaagcaggaagcaatcc

SEQ ID NO: 4643598 - DNA, 25 bp, Homo sapien
ggttgactgtgttaccactcagctg

SEQ ID NO: 4643599 - DNA, 25 bp, Homo sapien
tatcactggaaaactagacttcagc

SEQ ID NO: 4643600 - DNA, 25 bp, Homo sapien
tcgtaataggtcaaatccaatgccc

SEQ ID NO: 4643601 - DNA, 25 bp, Homo sapien
tgctccaggttcgtaataggtcaaa

SEQ ID NO: 4643602 - DNA, 25 bp, Homo sapien
tggtcctgctccaggttcgtaatag

SEQ ID NO: 4643603 - DNA, 25 bp, Homo sapien
ccaggttcgtaataggtcaaatcca

SEQ ID NO: 4643604 - DNA, 25 bp, Homo sapien
gtgactgggtatcccgagcagatca

SEQ ID NO: 4643605 - DNA, 25 bp, Homo sapien
tgggtatcccgagcagatcacttac

SEQ ID NO: 4643606 - DNA, 25 bp, Homo sapien
cacagtgactgggtatcccgagcag

SEQ ID NO: 4643607 - DNA, 25 bp, Homo sapien
agcacatccatgtcctccggctgcc

SEQ ID NO: 4643608 - DNA, 25 bp, Homo sapien
tatcctgataaggtctggaaggagc

SEQ ID NO: 4643609 - DNA, 25 bp, Homo sapien
ccggtatcgggcagactggccatag

SEQ ID NO: 4643610 - DNA, 25 bp, Homo sapien
taaccgcgcttggagtgttctgaca

SEQ ID NO: 4643611 - DNA, 25 bp, Homo sapien
gccataacttcctctggtatcctga

SEQ ID NO: 4643612 - DNA, 25 bp, Homo sapien
ggagtcccaccacgtctccatggtg

SEQ ID NO: 4643613 - DNA, 25 bp, Homo sapien
ccatggtgcattctaactggagaag

SEQ ID NO: 4643614 - DNA, 25 bp, Homo sapien
tcggtccactgaagcaagtaacagg

SEQ ID NO: 4643615 - DNA, 25 bp, Homo sapien
ttctccatgaggacacacgagctgg

SEQ ID NO: 4643616 - DNA, 25 bp, Homo sapien
aatagtgttttcctcaagtatctgc

SEQ ID NO: 4643617 - DNA, 25 bp, Homo sapien
atagtgttttcctcaagtatctgct

SEQ ID NO: 4643618 - DNA, 25 bp, Homo sapien
tagtgttttcctcaagtatctgctt

SEQ ID NO: 4643619 - DNA, 25 bp, Homo sapien
aaatagtgttttcctcaagtatctg

SEQ ID NO: 4643620 - DNA, 25 bp, Homo sapien
gcagggatactgtctggataaccaa

SEQ ID NO: 4643621 - DNA, 25 bp, Homo sapien
tctggataaccaagggtatacttct

SEQ ID NO: 4643622 - DNA, 25 bp, Homo sapien
actgtctggataaccaagggtatac

SEQ ID NO: 4643623 - DNA, 25 bp, Homo sapien
ccaagggtatacttctgctgccaca

SEQ ID NO: 4643624 - DNA, 25 bp, Homo sapien
ttcttagagacagtcatgtggcaga

SEQ ID NO: 4643625 - DNA, 25 bp, Homo sapien
ataacatagaaattcttagagacag

SEQ ID NO: 4643626 - DNA, 25 bp, Homo sapien
gcagagaaccaagagctggaatgca

SEQ ID NO: 4643627 - DNA, 25 bp, Homo sapien
ggaaggcctcttgagtacttaagta

SEQ ID NO: 4643628 - DNA, 25 bp, Homo sapien
tttcttgggctgtgtggaggaatcc

SEQ ID NO: 4643629 - DNA, 25 bp, Homo sapien
catggccctagctggccaatcagag

SEQ ID NO: 4643630 - DNA, 25 bp, Homo sapien
gagtccttgcttcgaattcttcaaa

SEQ ID NO: 4643631 - DNA, 25 bp, Homo sapien
tctctggtagtgagaccttgcagtc

SEQ ID NO: 4643632 - DNA, 25 bp, Homo sapien
caagtgtaacgctctgtcctctcat

SEQ ID NO: 4643633 - DNA, 25 bp, Homo sapien
gcaagtgtaacgctctgtcctctca

SEQ ID NO: 4643634 - DNA, 25 bp, Homo sapien
ttgacttatgagctatatcaggcat

SEQ ID NO: 4643635 - DNA, 25 bp, Homo sapien
tctgtcctctcattgacttatgagc

SEQ ID NO: 4643636 - DNA, 25 bp, Homo sapien
agcatccagcatccgtaaagaaagt

SEQ ID NO: 4643637 - DNA, 25 bp, Homo sapien
catctcggtaggagcgggaatgaaa

SEQ ID NO: 4643638 - DNA, 25 bp, Homo sapien
gactgggttaccttggaagcatcca

SEQ ID NO: 4643639 - DNA, 25 bp, Homo sapien
gcgcgggagtgctttcccggcatct

SEQ ID NO: 4643640 - DNA, 25 bp, Homo sapien
cacccacgcgcactccgtgctcgcg

SEQ ID NO: 4643641 - DNA, 25 bp, Homo sapien
ggccctgggcgcaccctcactctca

SEQ ID NO: 4643642 - DNA, 25 bp, Homo sapien
accctcactctcacccacgcgcact

SEQ ID NO: 4643643 - DNA, 25 bp, Homo sapien
tggccctgggcgcaccctcactctc

SEQ ID NO: 4643644 - DNA, 25 bp, Homo sapien
agggtgcggccgggtgcggccggct

SEQ ID NO: 4643645 - DNA, 25 bp, Homo sapien
agcaggagcccgggagcaccacggg

SEQ ID NO: 4643646 - DNA, 25 bp, Homo sapien
gcaggagcccgggagcaccacgggc

SEQ ID NO: 4643647 - DNA, 25 bp, Homo sapien
gacgggggctgcagcgcgccccggg

SEQ ID NO: 4643648 - DNA, 25 bp, Homo sapien
cgcagcgaggccgcgacgggggctg

SEQ ID NO: 4643649 - DNA, 25 bp, Homo sapien
agcggcggcgactgcccggcgggag

SEQ ID NO: 4643650 - DNA, 25 bp, Homo sapien
gcagcccaagtgacagcagcgggcg

SEQ ID NO: 4643651 - DNA, 25 bp, Homo sapien
cgggcacgagttcttcacctgcggg

SEQ ID NO: 4643652 - DNA, 25 bp, Homo sapien
tcagcgacagcgccccgaagctgag

SEQ ID NO: 4643653 - DNA, 25 bp, Homo sapien
cagaacgggcacgagttcttcacct

SEQ ID NO: 4643654 - DNA, 25 bp, Homo sapien
agccggcccagaacgggcacgagtt

SEQ ID NO: 4643655 - DNA, 25 bp, Homo sapien
aacggggcgcgcgcgcggtactcac

SEQ ID NO: 4643656 - DNA, 25 bp, Homo sapien
gcgaacggggcgcgcgcgcggtact

SEQ ID NO: 4643657 - DNA, 25 bp, Homo sapien
ggcgaacggggcgcgcgcgcggtac

SEQ ID NO: 4643658 - DNA, 25 bp, Homo sapien
gaacggggcgcgcgcgcggtactca

SEQ ID NO: 4643659 - DNA, 25 bp, Homo sapien
cagaataggtggcataacgggtcta

SEQ ID NO: 4643660 - DNA, 25 bp, Homo sapien
tactggcccgtggtatttagagaaa

SEQ ID NO: 4643661 - DNA, 25 bp, Homo sapien
tatatgcaagatcattactggcccg

SEQ ID NO: 4643662 - DNA, 25 bp, Homo sapien
gaaatgcacccaccatttggctgga

SEQ ID NO: 4643663 - DNA, 25 bp, Homo sapien
ccaaatcactgatttctttctctcc

SEQ ID NO: 4643664 - DNA, 25 bp, Homo sapien
tcagttccaaatcactgatttcttt

SEQ ID NO: 4643665 - DNA, 25 bp, Homo sapien
ctttctctcctctggtgtgcccaga

SEQ ID NO: 4643666 - DNA, 25 bp, Homo sapien
tttctctcctctggtgtgcccagac

SEQ ID NO: 4643667 - DNA, 25 bp, Homo sapien
tgctcagagtgctcaaaaacacaga

SEQ ID NO: 4643668 - DNA, 25 bp, Homo sapien
ggctcagggctctcttaaggaaata

SEQ ID NO: 4643669 - DNA, 25 bp, Homo sapien
ctccagtcaaatgccaggttgtttt

SEQ ID NO: 4643670 - DNA, 25 bp, Homo sapien
tattgagtgatttaccggtgatacc

SEQ ID NO: 4643671 - DNA, 25 bp, Homo sapien
taaaatagcaatatgcctaaactgt

SEQ ID NO: 4643672 - DNA, 25 bp, Homo sapien
tacacactcacagggatgtaatttt

SEQ ID NO: 4643673 - DNA, 25 bp, Homo sapien
cttactacacacacatgtctatgtg

SEQ ID NO: 4643674 - DNA, 25 bp, Homo sapien
accctcctccatgttaacaatctag

SEQ ID NO: 4643675 - DNA, 25 bp, Homo sapien
ccttttccaagttgttaatcctatg

SEQ ID NO: 4643676 - DNA, 25 bp, Homo sapien
caagttgttaatcctatgattccag

SEQ ID NO: 4643677 - DNA, 25 bp, Homo sapien
gttgttaatcctatgattccagaga

SEQ ID NO: 4643678 - DNA, 25 bp, Homo sapien
ttccaagttgttaatcctatgattc

SEQ ID NO: 4643679 - DNA, 25 bp, Homo sapien
ttagaattcaagttccattttccca

SEQ ID NO: 4643680 - DNA, 25 bp, Homo sapien
tccttagaattcaagttccattttc

SEQ ID NO: 4643681 - DNA, 25 bp, Homo sapien
ctgttccttagaattcaagttccat

SEQ ID NO: 4643682 - DNA, 25 bp, Homo sapien
tgttccttagaattcaagttccatt

SEQ ID NO: 4643683 - DNA, 25 bp, Homo sapien
tggcatatatgagacacagctcttt

SEQ ID NO: 4643684 - DNA, 25 bp, Homo sapien
gtggcatatatgagacacagctctt

SEQ ID NO: 4643685 - DNA, 25 bp, Homo sapien
tcacatgatgccactttacctaggg

SEQ ID NO: 4643686 - DNA, 25 bp, Homo sapien
cctttagttttgtgggatcagcagc

SEQ ID NO: 4643687 - DNA, 25 bp, Homo sapien
tgatagtagtcaactgagaagccag

SEQ ID NO: 4643688 - DNA, 25 bp, Homo sapien
tcttaaaattgtgctgagggatgcc

SEQ ID NO: 4643689 - DNA, 25 bp, Homo sapien
aatggacagttagtaaaagataaca

SEQ ID NO: 4643690 - DNA, 25 bp, Homo sapien
agataacagctaaattcagacagag

SEQ ID NO: 4643691 - DNA, 25 bp, Homo sapien
taacagctaaattcagacagagttt

SEQ ID NO: 4643692 - DNA, 25 bp, Homo sapien
aaaagataacagctaaattcagaca

SEQ ID NO: 4643693 - DNA, 25 bp, Homo sapien
ctagatttaagaggacacaaaccac

SEQ ID NO: 4643694 - DNA, 25 bp, Homo sapien
cacaaaccacagagagcagcacaaa

SEQ ID NO: 4643695 - DNA, 25 bp, Homo sapien
gatttaagaggacacaaaccacaga

SEQ ID NO: 4643696 - DNA, 25 bp, Homo sapien
cagagagcagcacaaagaggtttac

SEQ ID NO: 4643697 - DNA, 25 bp, Homo sapien
ccttggcagcctaggataaatccag

SEQ ID NO: 4643698 - DNA, 25 bp, Homo sapien
gggcacgctggacacaaactgggcc

SEQ ID NO: 4643699 - DNA, 25 bp, Homo sapien
tgggccccttggcagcctaggataa

SEQ ID NO: 4643700 - DNA, 25 bp, Homo sapien
cctgggcacgctggacacaaactgg

SEQ ID NO: 4643701 - DNA, 25 bp, Homo sapien
cagtcactggtgagtttaagccctt

SEQ ID NO: 4643702 - DNA, 25 bp, Homo sapien
tcaggcaatgcctctatcagtcagg

SEQ ID NO: 4643703 - DNA, 25 bp, Homo sapien
tgaatgttgcaagtctcgccaggaa

SEQ ID NO: 4643704 - DNA, 25 bp, Homo sapien
gatgccatcttaagcactcagggaa

SEQ ID NO: 4643705 - DNA, 25 bp, Homo sapien
agaaggtgaacagcactacagggct

SEQ ID NO: 4643706 - DNA, 25 bp, Homo sapien
tgtgcacttggctggttgaaattct

SEQ ID NO: 4643707 - DNA, 25 bp, Homo sapien
tttctttgtctgtgcacttggctgg

SEQ ID NO: 4643708 - DNA, 25 bp, Homo sapien
ctacagggctgaaccggaaagagtt

SEQ ID NO: 4643709 - DNA, 25 bp, Homo sapien
tttcagcagcttaattgtttgaggg

SEQ ID NO: 4643710 - DNA, 25 bp, Homo sapien
tttgagggaggtaatagaacaggaa

SEQ ID NO: 4643711 - DNA, 25 bp, Homo sapien
tgtatttaccgtgcgggtgggaatc

SEQ ID NO: 4643712 - DNA, 25 bp, Homo sapien
gcagcttaattgtttgagggaggta

SEQ ID NO: 4643713 - DNA, 25 bp, Homo sapien
tacatatatatagtcaggctccttt

SEQ ID NO: 4643714 - DNA, 25 bp, Homo sapien
taaatgctggctattattatgaccc

SEQ ID NO: 4643715 - DNA, 25 bp, Homo sapien
ggctcgtggaaagtgcccaaataaa

SEQ ID NO: 4643716 - DNA, 25 bp, Homo sapien
taataacgctgcctccataagacaa

SEQ ID NO: 4643717 - DNA, 25 bp, Homo sapien
tgcaagcatcagaatactgtcgaga

SEQ ID NO: 4643718 - DNA, 25 bp, Homo sapien
ggcaccactaagtacttcaacaaac

SEQ ID NO: 4643719 - DNA, 25 bp, Homo sapien
caatggcaccactaagtacttcaac

SEQ ID NO: 4643720 - DNA, 25 bp, Homo sapien
tggcaccactaagtacttcaacaaa

SEQ ID NO: 4643721 - DNA, 25 bp, Homo sapien
aaacaatggcaccactaagtacttc

SEQ ID NO: 4643722 - DNA, 25 bp, Homo sapien
atatctggaggtagcggagggcagc

SEQ ID NO: 4643723 - DNA, 25 bp, Homo sapien
cagcggccaccaagcagacggtggt

SEQ ID NO: 4643724 - DNA, 25 bp, Homo sapien
ccaccaagcagacggtggtggtcag

SEQ ID NO: 4643725 - DNA, 25 bp, Homo sapien
gatctcctggttgcgaatatctgga

SEQ ID NO: 4643726 - DNA, 25 bp, Homo sapien
cacgagtaaaacgtggcaaaatagg

SEQ ID NO: 4643727 - DNA, 25 bp, Homo sapien
gggatgcgtccatgatcctccgctt

SEQ ID NO: 4643728 - DNA, 25 bp, Homo sapien
acaggcggcacaaaatcatcagggt

SEQ ID NO: 4643729 - DNA, 25 bp, Homo sapien
ggtgtgcacgagtaaaacgtggcaa

SEQ ID NO: 4643730 - DNA, 25 bp, Homo sapien
tagacgtagggttcaggtataactg

SEQ ID NO: 4643731 - DNA, 25 bp, Homo sapien
tataactgagggacgagtcagcagc

SEQ ID NO: 4643732 - DNA, 25 bp, Homo sapien
taagtctctacatgtactacaggga

SEQ ID NO: 4643733 - DNA, 25 bp, Homo sapien
gccccactggtgacctatctcaaag

SEQ ID NO: 4643734 - DNA, 25 bp, Homo sapien
gagacaaatccgaggatgcacctag

SEQ ID NO: 4643735 - DNA, 25 bp, Homo sapien
ccgaggatgcacctagatcttaaag

SEQ ID NO: 4643736 - DNA, 25 bp, Homo sapien
actcagagagacaaatccgaggatg

SEQ ID NO: 4643737 - DNA, 25 bp, Homo sapien
caaatccgaggatgcacctagatct

SEQ ID NO: 4643738 - DNA, 25 bp, Homo sapien
cgcccggctccacttgagtttgggt

SEQ ID NO: 4643739 - DNA, 25 bp, Homo sapien
tcaaccccaagcatcgcccggctcc

SEQ ID NO: 4643740 - DNA, 25 bp, Homo sapien
atcgcccggctccacttgagtttgg

SEQ ID NO: 4643741 - DNA, 25 bp, Homo sapien
ctgagcactgactcaaccccaagca

SEQ ID NO: 4643742 - DNA, 25 bp, Homo sapien
cagcagcagatacaccattgaccag

SEQ ID NO: 4643743 - DNA, 25 bp, Homo sapien
tcctcctgtactggaaaactgtacc

SEQ ID NO: 4643744 - DNA, 25 bp, Homo sapien
tacaccattgaccagagaatcctcc

SEQ ID NO: 4643745 - DNA, 25 bp, Homo sapien
ccctgtgactgggtacagggttgct

SEQ ID NO: 4643746 - DNA, 25 bp, Homo sapien
gctttcaggctacaaataggccctg

SEQ ID NO: 4643747 - DNA, 25 bp, Homo sapien
ctttcaggctacaaataggccctga

SEQ ID NO: 4643748 - DNA, 25 bp, Homo sapien
tcctggcaaggtaggtagaatcacc

SEQ ID NO: 4643749 - DNA, 25 bp, Homo sapien
tctcattgcctatcgtgggacccag

SEQ ID NO: 4643750 - DNA, 25 bp, Homo sapien
taatgcaccaccaagattgagcacc

SEQ ID NO: 4643751 - DNA, 25 bp, Homo sapien
tgcagccacatgacaacgaaggtga

SEQ ID NO: 4643752 - DNA, 25 bp, Homo sapien
gggtcctggcaaagttattatgaaa

SEQ ID NO: 4643753 - DNA, 25 bp, Homo sapien
taagaactataaatgctgagtgact

SEQ ID NO: 4643754 - DNA, 25 bp, Homo sapien
aagagagattctcccccttacagca

SEQ ID NO: 4643755 - DNA, 25 bp, Homo sapien
caggacttgccaacgggcttcattc

SEQ ID NO: 4643756 - DNA, 25 bp, Homo sapien
agttggaagcgaggcactagcacaa

SEQ ID NO: 4643757 - DNA, 25 bp, Homo sapien
ggcagaaggtgatgagctaatgcct

SEQ ID NO: 4643758 - DNA, 25 bp, Homo sapien
gcaacacatcaagcctccagttgga

SEQ ID NO: 4643759 - DNA, 25 bp, Homo sapien
aagtggagatgtttgcaggttcagc

SEQ ID NO: 4643760 - DNA, 25 bp, Homo sapien
gtaagcgaggctctcatcccttgct

SEQ ID NO: 4643761 - DNA, 25 bp, Homo sapien
tgagaaagcactccctcgttttcct

SEQ ID NO: 4643762 - DNA, 25 bp, Homo sapien
aatgagactctgcaacctgaatgaa

SEQ ID NO: 4643763 - DNA, 25 bp, Homo sapien
tatatttgtctgttcgtaagcgagg

SEQ ID NO: 4643764 - DNA, 25 bp, Homo sapien
tagaagctgctctccgacgaagtgg

SEQ ID NO: 4643765 - DNA, 25 bp, Homo sapien
ctctccataccatggtctccttggc

SEQ ID NO: 4643766 - DNA, 25 bp, Homo sapien
gctctccgacgaagtggccagagtt

SEQ ID NO: 4643767 - DNA, 25 bp, Homo sapien
aataatagaagctgctctccgacga

SEQ ID NO: 4643768 - DNA, 25 bp, Homo sapien
gtggcaggggaataacatcaggacc

SEQ ID NO: 4643769 - DNA, 25 bp, Homo sapien
ccacacctttgattcgagctccgta

SEQ ID NO: 4643770 - DNA, 25 bp, Homo sapien
ttcgagctccgtagatgtgtggcag

SEQ ID NO: 4643771 - DNA, 25 bp, Homo sapien
ctttgattcgagctccgtagatgtg

SEQ ID NO: 4643772 - DNA, 25 bp, Homo sapien
gcagcccagatccaatgggatcaca

SEQ ID NO: 4643773 - DNA, 25 bp, Homo sapien
gagtcacttgtgtgcagcccagatc

SEQ ID NO: 4643774 - DNA, 25 bp, Homo sapien
gtgcagcccagatccaatgggatca

SEQ ID NO: 4643775 - DNA, 25 bp, Homo sapien
cttgagtcacttgtgtgcagcccag

SEQ ID NO: 4643776 - DNA, 25 bp, Homo sapien
gcaggaaacacctgggagcctaaac

SEQ ID NO: 4643777 - DNA, 25 bp, Homo sapien
ggcaggaaacacctgggagcctaaa

SEQ ID NO: 4643778 - DNA, 25 bp, Homo sapien
tcttcggcaggtatgttaggaatgt

SEQ ID NO: 4643779 - DNA, 25 bp, Homo sapien
ggatgcattttcttcggcaggtatg

SEQ ID NO: 4643780 - DNA, 25 bp, Homo sapien
ctgataggacgcaccagggttgaac

SEQ ID NO: 4643781 - DNA, 25 bp, Homo sapien
acgcaccagggttgaactgggagtt

SEQ ID NO: 4643782 - DNA, 25 bp, Homo sapien
cagggtcactcttcgacctggtcct

SEQ ID NO: 4643783 - DNA, 25 bp, Homo sapien
agcacagggtcactcttcgacctgg

SEQ ID NO: 4643784 - DNA, 25 bp, Homo sapien
caagggtgggagggctctccggctt

SEQ ID NO: 4643785 - DNA, 25 bp, Homo sapien
ggtcactcttcgacctggtcctcaa

SEQ ID NO: 4643786 - DNA, 25 bp, Homo sapien
tcaaatgaccacttaaactgcaggg

SEQ ID NO: 4643787 - DNA, 25 bp, Homo sapien
ggctcctttaggcaaataagcacac

SEQ ID NO: 4643788 - DNA, 25 bp, Homo sapien
agcacacagccctgcgaagagcttg

SEQ ID NO: 4643789 - DNA, 25 bp, Homo sapien
tcagaactaggtgtgcataattgtc

SEQ ID NO: 4643790 - DNA, 25 bp, Homo sapien
caagggctcaagacaggaccttaga

SEQ ID NO: 4643791 - DNA, 25 bp, Homo sapien
tcagagacacgctcagtaccaggcg

SEQ ID NO: 4643792 - DNA, 25 bp, Homo sapien
taagttcccgttgaggctggagtcc

SEQ ID NO: 4643793 - DNA, 25 bp, Homo sapien
tctctggctcgcacatggtcagtcc

SEQ ID NO: 4643794 - DNA, 25 bp, Homo sapien
ggcgccttccacaatggagggctcc

SEQ ID NO: 4643795 - DNA, 25 bp, Homo sapien
gtcttccagaagcactcgccaaaga

SEQ ID NO: 4643796 - DNA, 25 bp, Homo sapien
gacactcgtgtgaggacagagtcag

SEQ ID NO: 4643797 - DNA, 25 bp, Homo sapien
aacctggcgccttccacaatggagg

SEQ ID NO: 4643798 - DNA, 25 bp, Homo sapien
gactgtcctctcaggcagccatatg

SEQ ID NO: 4643799 - DNA, 25 bp, Homo sapien
gattcgagactgtcctctcaggcag

SEQ ID NO: 4643800 - DNA, 25 bp, Homo sapien
accaggattcgagactgtcctctca

SEQ ID NO: 4643801 - DNA, 25 bp, Homo sapien
tcgagactgtcctctcaggcagcca

SEQ ID NO: 4643802 - DNA, 25 bp, Homo sapien
catggctgcctatatcagcaagggt

SEQ ID NO: 4643803 - DNA, 25 bp, Homo sapien
gcagccttcagcatacacaacattg

SEQ ID NO: 4643804 - DNA, 25 bp, Homo sapien
caacattggcatcttcagtctatga

SEQ ID NO: 4643805 - DNA, 25 bp, Homo sapien
aaagtacacatcattctggaagtca

SEQ ID NO: 4643806 - DNA, 25 bp, Homo sapien
tcacaccatggatatgaggtagatc

SEQ ID NO: 4643807 - DNA, 25 bp, Homo sapien
gatgctcacaccatggatatgaggt

SEQ ID NO: 4643808 - DNA, 25 bp, Homo sapien
caaacgtcctcaaggacgttgtact

SEQ ID NO: 4643809 - DNA, 25 bp, Homo sapien
actgacttgtgttatcgatgctcac

SEQ ID NO: 4643810 - DNA, 25 bp, Homo sapien
gacaaatgctgatagccatgcacat

SEQ ID NO: 4643811 - DNA, 25 bp, Homo sapien
ccaaggagcgaggatgaagtagtca

SEQ ID NO: 4643812 - DNA, 25 bp, Homo sapien
aaacaacatgtacccattggccaac

SEQ ID NO: 4643813 - DNA, 25 bp, Homo sapien
ggatatggcccgaaacacgtcattg

SEQ ID NO: 4643814 - DNA, 25 bp, Homo sapien
gatttgtaatctatcaaagaccgcg

SEQ ID NO: 4643815 - DNA, 25 bp, Homo sapien
gcatcgcgaagctctagatctcaag

SEQ ID NO: 4643816 - DNA, 25 bp, Homo sapien
gcttggtgtccatgtaggatttgta

SEQ ID NO: 4643817 - DNA, 25 bp, Homo sapien
caaagaccgcggtctgcatcgcgaa

SEQ ID NO: 4643818 - DNA, 25 bp, Homo sapien
aaaggtatagaattgtgaaagctca

SEQ ID NO: 4643819 - DNA, 25 bp, Homo sapien
ctccttctggtgttcttacctcctt

SEQ ID NO: 4643820 - DNA, 25 bp, Homo sapien
tctgtccttgtctcccgattaagaa

SEQ ID NO: 4643821 - DNA, 25 bp, Homo sapien
gaagttgactgtgctacatagtaag

SEQ ID NO: 4643822 - DNA, 25 bp, Homo sapien
taaaaactccaagatgcgaagccag

SEQ ID NO: 4643823 - DNA, 25 bp, Homo sapien
gcgaagccagctagagtcagaaata

SEQ ID NO: 4643824 - DNA, 25 bp, Homo sapien
aaggtgtgaaggtcgccgcagctct

SEQ ID NO: 4643825 - DNA, 25 bp, Homo sapien
gctgtctccgcgagggcagcttgtg

SEQ ID NO: 4643826 - DNA, 25 bp, Homo sapien
tgctgggctgcaatggggccattat

SEQ ID NO: 4643827 - DNA, 25 bp, Homo sapien
ctccccgctggtgtgaaggtgtgaa

SEQ ID NO: 4643828 - DNA, 25 bp, Homo sapien
acaggacagtctctcggatgacccc

SEQ ID NO: 4643829 - DNA, 25 bp, Homo sapien
tcacaggacagtctctcggatgacc

SEQ ID NO: 4643830 - DNA, 25 bp, Homo sapien
cggatgaccccaatgaggctgtgtg

SEQ ID NO: 4643831 - DNA, 25 bp, Homo sapien
ctcggatgaccccaatgaggctgtg

SEQ ID NO: 4643832 - DNA, 25 bp, Homo sapien
caactataaatagcagcccggcaga

SEQ ID NO: 4643833 - DNA, 25 bp, Homo sapien
tgccaaatcgcagagcagtgaaagg

SEQ ID NO: 4643834 - DNA, 25 bp, Homo sapien
tgggaaaacgtgtcctccagagtgc

SEQ ID NO: 4643835 - DNA, 25 bp, Homo sapien
tgagggtgacctgaaacaaggcttg

SEQ ID NO: 4643836 - DNA, 25 bp, Homo sapien
gctggcaatttctcattcctcggga

SEQ ID NO: 4643837 - DNA, 25 bp, Homo sapien
tgagcctttcaggtacacagggagg

SEQ ID NO: 4643838 - DNA, 25 bp, Homo sapien
ggcctcacttggagaaaccagtttg

SEQ ID NO: 4643839 - DNA, 25 bp, Homo sapien
tgaggccatctctgtgactgtcccc

SEQ ID NO: 4643840 - DNA, 25 bp, Homo sapien
tagacagtgacaagcctgaggcaag

SEQ ID NO: 4643841 - DNA, 25 bp, Homo sapien
gggacctacagccactttgccagag

SEQ ID NO: 4643842 - DNA, 25 bp, Homo sapien
gaaacagcttgcgaccagagcagaa

SEQ ID NO: 4643843 - DNA, 25 bp, Homo sapien
gatcctgcccgcactatgaaatgtt

SEQ ID NO: 4643844 - DNA, 25 bp, Homo sapien
catttgtaagtgacacactggtgtt

SEQ ID NO: 4643845 - DNA, 25 bp, Homo sapien
caagcagtctgctgtaatggaaggc

SEQ ID NO: 4643846 - DNA, 25 bp, Homo sapien
tggcctcattatcaccatttgtaag

SEQ ID NO: 4643847 - DNA, 25 bp, Homo sapien
tagttccctgccacggcagtctaga

SEQ ID NO: 4643848 - DNA, 25 bp, Homo sapien
cacggatgaactcagcgttagactt

SEQ ID NO: 4643849 - DNA, 25 bp, Homo sapien
tcatcgcacacggatgaactcagcg

SEQ ID NO: 4643850 - DNA, 25 bp, Homo sapien
gggacaggcttgtcatcgcacacgg

SEQ ID NO: 4643851 - DNA, 25 bp, Homo sapien
cagcgttagacttttgggtctcttt

SEQ ID NO: 4643852 - DNA, 25 bp, Homo sapien
gaaaacagcgccctgagaggcccat

SEQ ID NO: 4643853 - DNA, 25 bp, Homo sapien
tttgtaagggactaagatctaagtg

SEQ ID NO: 4643854 - DNA, 25 bp, Homo sapien
cagtcatctcccgtaagggaggtac

SEQ ID NO: 4643855 - DNA, 25 bp, Homo sapien
gatctaagtggacggtggaaaacag

SEQ ID NO: 4643856 - DNA, 25 bp, Homo sapien
aaaatatatctacacgtgagcctgg

SEQ ID NO: 4643857 - DNA, 25 bp, Homo sapien
acccactgaatgtacttccttgaca

SEQ ID NO: 4643858 - DNA, 25 bp, Homo sapien
agcttattgtaaagtgtcgggagaa

SEQ ID NO: 4643859 - DNA, 25 bp, Homo sapien
tgacagtctggtcactggtccctcc

SEQ ID NO: 4643860 - DNA, 25 bp, Homo sapien
cagccttgggttcatgagaggaaga

SEQ ID NO: 4643861 - DNA, 25 bp, Homo sapien
agcaggctcctaggagtgcatggca

SEQ ID NO: 4643862 - DNA, 25 bp, Homo sapien
gccaccatcagccttgggttcatga

SEQ ID NO: 4643863 - DNA, 25 bp, Homo sapien
aaagaccaatgcctggagcccactt

SEQ ID NO: 4643864 - DNA, 25 bp, Homo sapien
gagacactaaagagtcatcagccag

SEQ ID NO: 4643865 - DNA, 25 bp, Homo sapien
gatggtccgtaaagctccccaggac

SEQ ID NO: 4643866 - DNA, 25 bp, Homo sapien
ccatcacaaacgtgaggaccaggaa

SEQ ID NO: 4643867 - DNA, 25 bp, Homo sapien
tcactgtgttacaaaggagccctga

SEQ ID NO: 4643868 - DNA, 25 bp, Homo sapien
gaagtttcgtatgcactcccttgag

SEQ ID NO: 4643869 - DNA, 25 bp, Homo sapien
aatgtggtagtacccagggccagcc

SEQ ID NO: 4643870 - DNA, 25 bp, Homo sapien
cagacttcttaaaaggagctcgcgg

SEQ ID NO: 4643871 - DNA, 25 bp, Homo sapien
gggccagcccacgtcattaaggtta

SEQ ID NO: 4643872 - DNA, 25 bp, Homo sapien
tgaagacaatgccagccgcgatgta

SEQ ID NO: 4643873 - DNA, 25 bp, Homo sapien
tggcatgcatggaggactctcctct

SEQ ID NO: 4643874 - DNA, 25 bp, Homo sapien
cccaggagcagcctgtttacatctg

SEQ ID NO: 4643875 - DNA, 25 bp, Homo sapien
tgaccgcggccacacgcggtggcat

SEQ ID NO: 4643876 - DNA, 25 bp, Homo sapien
gccacactttggaacacggagtgga

SEQ ID NO: 4643877 - DNA, 25 bp, Homo sapien
tggtggctcaggcaatcgtgaccct

SEQ ID NO: 4643878 - DNA, 25 bp, Homo sapien
cgctgaattgggaaactctgaagga

SEQ ID NO: 4643879 - DNA, 25 bp, Homo sapien
aaaacagtctgctggcattaaacgc

SEQ ID NO: 4643880 - DNA, 25 bp, Homo sapien
cctggctgcacagagtcccgcagag

SEQ ID NO: 4643881 - DNA, 25 bp, Homo sapien
ttgagagtttgggatgcaccctcca

SEQ ID NO: 4643882 - DNA, 25 bp, Homo sapien
tccctctctggacagagtcccttca

SEQ ID NO: 4643883 - DNA, 25 bp, Homo sapien
tgtttctgtgacatgcaggactgcc

SEQ ID NO: 4643884 - DNA, 25 bp, Homo sapien
aaggggtgggaaggcacctgctatc

SEQ ID NO: 4643885 - DNA, 25 bp, Homo sapien
catgacttgaaaggggtgggaaggc

SEQ ID NO: 4643886 - DNA, 25 bp, Homo sapien
gggtgggaaggcacctgctatcagc

SEQ ID NO: 4643887 - DNA, 25 bp, Homo sapien
gggaaggcacctgctatcagccatt

SEQ ID NO: 4643888 - DNA, 25 bp, Homo sapien
tgcaggaaaagttacccacctctcc

SEQ ID NO: 4643889 - DNA, 25 bp, Homo sapien
cagggcctgcagctacaacagtgtg

SEQ ID NO: 4643890 - DNA, 25 bp, Homo sapien
ctcagctcttatagcagggccaggg

SEQ ID NO: 4643891 - DNA, 25 bp, Homo sapien
aacttgagcggtttcccaggcagct

SEQ ID NO: 4643892 - DNA, 25 bp, Homo sapien
gcaaactggacccactcacttgtga

SEQ ID NO: 4643893 - DNA, 25 bp, Homo sapien
tcacttgtgaactgagcaggtgctg

SEQ ID NO: 4643894 - DNA, 25 bp, Homo sapien
ttcactcgtagagggcgcaaactgg

SEQ ID NO: 4643895 - DNA, 25 bp, Homo sapien
tgctgtctctgagcgatactgtggg

SEQ ID NO: 4643896 - DNA, 25 bp, Homo sapien
tccagacacactagctacaaattct

SEQ ID NO: 4643897 - DNA, 25 bp, Homo sapien
cttgtctttaacactagctctccac

SEQ ID NO: 4643898 - DNA, 25 bp, Homo sapien
cttctgcccattttagggacttgtc

SEQ ID NO: 4643899 - DNA, 25 bp, Homo sapien
tgtatcaccctggtccagacacact

SEQ ID NO: 4643900 - DNA, 25 bp, Homo sapien
ctgagattgtagagctcacaagtgg

SEQ ID NO: 4643901 - DNA, 25 bp, Homo sapien
tcttaactgccaagatctgccactg

SEQ ID NO: 4643902 - DNA, 25 bp, Homo sapien
tagagctcacaagtggtcagccagg

SEQ ID NO: 4643903 - DNA, 25 bp, Homo sapien
aaatccagaactcatgggaacccgt

SEQ ID NO: 4643904 - DNA, 25 bp, Homo sapien
ctccccacgcatccccacacttcct

SEQ ID NO: 4643905 - DNA, 25 bp, Homo sapien
cccacgcatccccacacttcctgag

SEQ ID NO: 4643906 - DNA, 25 bp, Homo sapien
catccccacacttcctgagagaata

SEQ ID NO: 4643907 - DNA, 25 bp, Homo sapien
ccccacacttcctgagagaatacat

SEQ ID NO: 4643908 - DNA, 25 bp, Homo sapien
agccagagcctctgcaagggcagtg

SEQ ID NO: 4643909 - DNA, 25 bp, Homo sapien
tgccaaaggcaagagcacccggggt

SEQ ID NO: 4643910 - DNA, 25 bp, Homo sapien
ggaagtggtccctgatgaggttggt

SEQ ID NO: 4643911 - DNA, 25 bp, Homo sapien
aataggaggaaactcgaatgagctc

SEQ ID NO: 4643912 - DNA, 25 bp, Homo sapien
gtcccatactactctgtgaagacca

SEQ ID NO: 4643913 - DNA, 25 bp, Homo sapien
tgatccaggtcttcaacctatagat

SEQ ID NO: 4643914 - DNA, 25 bp, Homo sapien
gttggagcagatcgctgctgtgcaa

SEQ ID NO: 4643915 - DNA, 25 bp, Homo sapien
tatttgtgtggcctcggatgatgac

SEQ ID NO: 4643916 - DNA, 25 bp, Homo sapien
gatgatgacatcaccctctgttgga

SEQ ID NO: 4643917 - DNA, 25 bp, Homo sapien
tacctccaattccatgctctgtgtt

SEQ ID NO: 4643918 - DNA, 25 bp, Homo sapien
aaaggctgctcgaccactcagaaaa

SEQ ID NO: 4643919 - DNA, 25 bp, Homo sapien
tcactttgggcagtgtacctccaat

SEQ ID NO: 4643920 - DNA, 25 bp, Homo sapien
actcagaaaaggtgcttggaaaggg

SEQ ID NO: 4643921 - DNA, 25 bp, Homo sapien
agtttctggtagcaattcagagccg

SEQ ID NO: 4643922 - DNA, 25 bp, Homo sapien
tttcacaggttctataaacgtagca

SEQ ID NO: 4643923 - DNA, 25 bp, Homo sapien
ttctataaacgtagcagagtttggg

SEQ ID NO: 4643924 - DNA, 25 bp, Homo sapien
aattcagagccgagtttattttctc

SEQ ID NO: 4643925 - DNA, 25 bp, Homo sapien
caactagcatgggaggatttgccag

SEQ ID NO: 4643926 - DNA, 25 bp, Homo sapien
tcagaaatgccagaacaatgaggag

SEQ ID NO: 4643927 - DNA, 25 bp, Homo sapien
cccactgattcggattagagtaggt

SEQ ID NO: 4643928 - DNA, 25 bp, Homo sapien
tagagtaggtgcaatcggactgcca

SEQ ID NO: 4643929 - DNA, 25 bp, Homo sapien
gaagtgaccgatggacgatgaaacc

SEQ ID NO: 4643930 - DNA, 25 bp, Homo sapien
ttgtcaaccattccgaactcctggg

SEQ ID NO: 4643931 - DNA, 25 bp, Homo sapien
gatgaggcagatttgcagatcccga

SEQ ID NO: 4643932 - DNA, 25 bp, Homo sapien
cgatgaaaccaaagtggcgtaaaag

SEQ ID NO: 4643933 - DNA, 25 bp, Homo sapien
gagcggcgataagagaggaggattt

SEQ ID NO: 4643934 - DNA, 25 bp, Homo sapien
aaacacagtcttcgctgactgcttt

SEQ ID NO: 4643935 - DNA, 25 bp, Homo sapien
gtcttcgctgactgctttcttaaga

SEQ ID NO: 4643936 - DNA, 25 bp, Homo sapien
gctttcttaagagcggcgataagag

SEQ ID NO: 4643937 - DNA, 25 bp, Homo sapien
caaagtttggttagcaagcagttca

SEQ ID NO: 4643938 - DNA, 25 bp, Homo sapien
acaagttctcatgcgatgctcctgg

SEQ ID NO: 4643939 - DNA, 25 bp, Homo sapien
ctggtcccaggacgacaatttgaga

SEQ ID NO: 4643940 - DNA, 25 bp, Homo sapien
ggccaaagttcacgcacctggagga

SEQ ID NO: 4643941 - DNA, 25 bp, Homo sapien
agagcatgagctcgcagagcctcga

SEQ ID NO: 4643942 - DNA, 25 bp, Homo sapien
gacatcgaccagatagtggccgagg

SEQ ID NO: 4643943 - DNA, 25 bp, Homo sapien
gtacagcaaggagaagcgcgatgcc

SEQ ID NO: 4643944 - DNA, 25 bp, Homo sapien
cggctgcaccattacgacgagcgct

SEQ ID NO: 4643945 - DNA, 25 bp, Homo sapien
tgcagcctggccatatgagggactg

SEQ ID NO: 4643946 - DNA, 25 bp, Homo sapien
ccagcaagaatctaggcagctcttg

SEQ ID NO: 4643947 - DNA, 25 bp, Homo sapien
aggttccaagaaccagaggtgcagc

SEQ ID NO: 4643948 - DNA, 25 bp, Homo sapien
ggctttttgtcccagtctcccacat

SEQ ID NO: 4643949 - DNA, 25 bp, Homo sapien
caaatggcattggtgcaggcagcct

SEQ ID NO: 4643950 - DNA, 25 bp, Homo sapien
gagtgttcaatctagagcatgtcca

SEQ ID NO: 4643951 - DNA, 25 bp, Homo sapien
gacgacaaaaagtgcagaggcctcg

SEQ ID NO: 4643952 - DNA, 25 bp, Homo sapien
caaagtgagagcctgcaacggcctt

SEQ ID NO: 4643953 - DNA, 25 bp, Homo sapien
ctattgattgaattgatatgaatcg

SEQ ID NO: 4643954 - DNA, 25 bp, Homo sapien
tgaatcgaatttttcggatgtaaaa

SEQ ID NO: 4643955 - DNA, 25 bp, Homo sapien
cggacactttataactattgattga

SEQ ID NO: 4643956 - DNA, 25 bp, Homo sapien
ttcttcctcggacactttataacta

SEQ ID NO: 4643957 - DNA, 25 bp, Homo sapien
tcacctttcgaccactcattgatat

SEQ ID NO: 4643958 - DNA, 25 bp, Homo sapien
ccactctctcacctttcgaccactc

SEQ ID NO: 4643959 - DNA, 25 bp, Homo sapien
tctctcacctttcgaccactcattg

SEQ ID NO: 4643960 - DNA, 25 bp, Homo sapien
tctcacctttcgaccactcattgat

SEQ ID NO: 4643961 - DNA, 25 bp, Homo sapien
tgtctggagatgacgccgtttgtgg

SEQ ID NO: 4643962 - DNA, 25 bp, Homo sapien
aaaagggtgtctggagatgacgccg

SEQ ID NO: 4643963 - DNA, 25 bp, Homo sapien
agtaaattacaatgccagaaaaggg

SEQ ID NO: 4643964 - DNA, 25 bp, Homo sapien
ccgtttgtggggtgtatccatggta

SEQ ID NO: 4643965 - DNA, 25 bp, Homo sapien
taacctggatagataagaagtcctg

SEQ ID NO: 4643966 - DNA, 25 bp, Homo sapien
aagtcctgtttgtccaagagctggt

SEQ ID NO: 4643967 - DNA, 25 bp, Homo sapien
ctgtttgtccaagagctggtttgac

SEQ ID NO: 4643968 - DNA, 25 bp, Homo sapien
tcttctgatcacctgtttcatggga

SEQ ID NO: 4643969 - DNA, 25 bp, Homo sapien
cttgttgccagtatcatcaccttga

SEQ ID NO: 4643970 - DNA, 25 bp, Homo sapien
ttgttgccagtatcatcaccttgaa

SEQ ID NO: 4643971 - DNA, 25 bp, Homo sapien
aatccaagccttcaaccagttgact

SEQ ID NO: 4643972 - DNA, 25 bp, Homo sapien
acatccacttctaatctgctagttt

SEQ ID NO: 4643973 - DNA, 25 bp, Homo sapien
tagttttaggaagacctatgcagaa

SEQ ID NO: 4643974 - DNA, 25 bp, Homo sapien
caagccttcaaccagttgactgggc

SEQ ID NO: 4643975 - DNA, 25 bp, Homo sapien
gtgtgcccatgctcatatgcctctc

SEQ ID NO: 4643976 - DNA, 25 bp, Homo sapien
atgctcatatgcctctcctcttacc

SEQ ID NO: 4643977 - DNA, 25 bp, Homo sapien
catgtgtgcccatgctcatatgcct

SEQ ID NO: 4643978 - DNA, 25 bp, Homo sapien
catatgcctctcctcttaccctcat

SEQ ID NO: 4643979 - DNA, 25 bp, Homo sapien
caggctgggttcttttctggcctga

SEQ ID NO: 4643980 - DNA, 25 bp, Homo sapien
cacatcagccttggttgagtatgac

SEQ ID NO: 4643981 - DNA, 25 bp, Homo sapien
tgtttcagtgaattcactctcaggc

SEQ ID NO: 4643982 - DNA, 25 bp, Homo sapien
tctatctggttctgccctacctggt

SEQ ID NO: 4643983 - DNA, 25 bp, Homo sapien
gcttcactgtcgtccaactgtgcag

SEQ ID NO: 4643984 - DNA, 25 bp, Homo sapien
tgtgcagctccttcgtgtgaccgca

SEQ ID NO: 4643985 - DNA, 25 bp, Homo sapien
ctccatgcagagatggagtgaattt

SEQ ID NO: 4643986 - DNA, 25 bp, Homo sapien
tgcagccactttcggaccccttggg

SEQ ID NO: 4643987 - DNA, 25 bp, Homo sapien
cagtctttggagaggacccctagct

SEQ ID NO: 4643988 - DNA, 25 bp, Homo sapien
tgttcttggacgtacagaagtacag

SEQ ID NO: 4643989 - DNA, 25 bp, Homo sapien
tctatgtgctgtgattgccaaaacc

SEQ ID NO: 4643990 - DNA, 25 bp, Homo sapien
tgccatttgagccaaagatcatgtc

SEQ ID NO: 4643991 - DNA, 25 bp, Homo sapien
gaagcacagctgactgtcaatctgg

SEQ ID NO: 4643992 - DNA, 25 bp, Homo sapien
cagctgactgtcaatctggactgtc

SEQ ID NO: 4643993 - DNA, 25 bp, Homo sapien
gtcaatctggactgtcagtttccag

SEQ ID NO: 4643994 - DNA, 25 bp, Homo sapien
ctttggcttgcctgaagcacagctg

SEQ ID NO: 4643995 - DNA, 25 bp, Homo sapien
taagctagtcctgcactgggctttg

SEQ ID NO: 4643996 - DNA, 25 bp, Homo sapien
gctgcatgggccgtgtttggctcat

SEQ ID NO: 4643997 - DNA, 25 bp, Homo sapien
catagccaatggacctcaagacgaa

SEQ ID NO: 4643998 - DNA, 25 bp, Homo sapien
tttataaagtgatagagtccaggca

SEQ ID NO: 4643999 - DNA, 25 bp, Homo sapien
gggaaagcacattgaaagtagggac

SEQ ID NO: 4644000 - DNA, 25 bp, Homo sapien
ctcccaaaaagagccataggtgctg

SEQ ID NO: 4644001 - DNA, 25 bp, Homo sapien
ccctcccaaaaagagccataggtgc

SEQ ID NO: 4644002 - DNA, 25 bp, Homo sapien
cattgaaagtagggacttgaggaca

SEQ ID NO: 4644003 - DNA, 25 bp, Homo sapien
caagtataagatccttgaggctaga

SEQ ID NO: 4644004 - DNA, 25 bp, Homo sapien
tataagatccttgaggctagaactt

SEQ ID NO: 4644005 - DNA, 25 bp, Homo sapien
tctcaagtataagatccttgaggct

SEQ ID NO: 4644006 - DNA, 25 bp, Homo sapien
agtataagatccttgaggctagaac

SEQ ID NO: 4644007 - DNA, 25 bp, Homo sapien
atctcttctgtgtcctgaatcttct

SEQ ID NO: 4644008 - DNA, 25 bp, Homo sapien
cctgaatcttctttaaatattgctc

SEQ ID NO: 4644009 - DNA, 25 bp, Homo sapien
gaatcttctttaaatattgctctct

SEQ ID NO: 4644010 - DNA, 25 bp, Homo sapien
tctgtgtcctgaatcttctttaaat

SEQ ID NO: 4644011 - DNA, 25 bp, Homo sapien
taagaggtggtgtgcgggaattatc

SEQ ID NO: 4644012 - DNA, 25 bp, Homo sapien
ggaattatctgaggagcttgaacag

SEQ ID NO: 4644013 - DNA, 25 bp, Homo sapien
cgggaattatctgaggagcttgaac

SEQ ID NO: 4644014 - DNA, 25 bp, Homo sapien
tgtgcgggaattatctgaggagctt

SEQ ID NO: 4644015 - DNA, 25 bp, Homo sapien
tccttcacttaaagtagcatcagtg

SEQ ID NO: 4644016 - DNA, 25 bp, Homo sapien
ggcctgcagcaagccattttttgtg

SEQ ID NO: 4644017 - DNA, 25 bp, Homo sapien
ttgtgcatggatgcctttccttcac

SEQ ID NO: 4644018 - DNA, 25 bp, Homo sapien
taaagtagcatcagtgcttttctct

SEQ ID NO: 4644019 - DNA, 25 bp, Homo sapien
agcccgtagcagtcatggctacaca

SEQ ID NO: 4644020 - DNA, 25 bp, Homo sapien
gctgcccggttctcttcgaaaagcc

SEQ ID NO: 4644021 - DNA, 25 bp, Homo sapien
gcattgtcggaatccaaactggctg

SEQ ID NO: 4644022 - DNA, 25 bp, Homo sapien
tctactgcattgtcggaatccaaac

SEQ ID NO: 4644023 - DNA, 25 bp, Homo sapien
agggtcttgtactccctgactgtgc

SEQ ID NO: 4644024 - DNA, 25 bp, Homo sapien
cttccatcctgtgatactacttctc

SEQ ID NO: 4644025 - DNA, 25 bp, Homo sapien
cataagggtcttgtactccctgact

SEQ ID NO: 4644026 - DNA, 25 bp, Homo sapien
tgatactacttctctccttagcacc

SEQ ID NO: 4644027 - DNA, 25 bp, Homo sapien
ggttgccaccgaggagggtggaggc

SEQ ID NO: 4644028 - DNA, 25 bp, Homo sapien
accacctgggttgccaccgaggagg

SEQ ID NO: 4644029 - DNA, 25 bp, Homo sapien
cccgtcagtcccctcggggatgcag

SEQ ID NO: 4644030 - DNA, 25 bp, Homo sapien
tgccaccgaggagggtggaggcccc

SEQ ID NO: 4644031 - DNA, 25 bp, Homo sapien
caaagggtggcctctcgagttagga

SEQ ID NO: 4644032 - DNA, 25 bp, Homo sapien
ggagagaacaccctgcaggagtcga

SEQ ID NO: 4644033 - DNA, 25 bp, Homo sapien
aatctccgaatttgaagcgcaggcg

SEQ ID NO: 4644034 - DNA, 25 bp, Homo sapien
cgttgcttcgcgcagaggttggcca

SEQ ID NO: 4644035 - DNA, 25 bp, Homo sapien
tgttctagaagtaggatcagcctgt

SEQ ID NO: 4644036 - DNA, 25 bp, Homo sapien
tgtgaccatgtaccaagccagctat

SEQ ID NO: 4644037 - DNA, 25 bp, Homo sapien
gttgcgttcactaaattctgtcctg

SEQ ID NO: 4644038 - DNA, 25 bp, Homo sapien
taacaaacagccctgggattctaat

SEQ ID NO: 4644039 - DNA, 25 bp, Homo sapien
tgtgtatgctaaaagtgctcctact

SEQ ID NO: 4644040 - DNA, 25 bp, Homo sapien
tgtcttaataagcagctggctgaac

SEQ ID NO: 4644041 - DNA, 25 bp, Homo sapien
tcctcaaggtactatgcagcatact

SEQ ID NO: 4644042 - DNA, 25 bp, Homo sapien
tattggtatatccagtactatcggg

SEQ ID NO: 4644043 - DNA, 25 bp, Homo sapien
taggtatgctctgtaataagctccc

SEQ ID NO: 4644044 - DNA, 25 bp, Homo sapien
tatttattcccatcgctaggcatgg

SEQ ID NO: 4644045 - DNA, 25 bp, Homo sapien
ggttggaggcatcccatttagagga

SEQ ID NO: 4644046 - DNA, 25 bp, Homo sapien
tagattagcctgaaacctgcgtcca

SEQ ID NO: 4644047 - DNA, 25 bp, Homo sapien
gcataactggttggcttataaggca

SEQ ID NO: 4644048 - DNA, 25 bp, Homo sapien
gactttaccactgcatggaacgtga

SEQ ID NO: 4644049 - DNA, 25 bp, Homo sapien
gagactaatgggcaatgggcataac

SEQ ID NO: 4644050 - DNA, 25 bp, Homo sapien
gaagacatgtaagccccataagttg

SEQ ID NO: 4644051 - DNA, 25 bp, Homo sapien
gaagttaaatgaatagtggcataga

SEQ ID NO: 4644052 - DNA, 25 bp, Homo sapien
ttcgcacacaccgtcaatacttgag

SEQ ID NO: 4644053 - DNA, 25 bp, Homo sapien
cattaaagttagtatgacatgagag

SEQ ID NO: 4644054 - DNA, 25 bp, Homo sapien
cacttaccaggagagggtcttgaga

SEQ ID NO: 4644055 - DNA, 25 bp, Homo sapien
catggcagaggagtaggtcaacatt

SEQ ID NO: 4644056 - DNA, 25 bp, Homo sapien
gggagattctccaagtaggcagaac

SEQ ID NO: 4644057 - DNA, 25 bp, Homo sapien
catggacagtggctaacagtttgct

SEQ ID NO: 4644058 - DNA, 25 bp, Homo sapien
cagtttgcttagatagtcagggact

SEQ ID NO: 4644059 - DNA, 25 bp, Homo sapien
ctgcccggcaggaacgtaagtacca

SEQ ID NO: 4644060 - DNA, 25 bp, Homo sapien
tgaggagttccctatgcacctgtcc

SEQ ID NO: 4644061 - DNA, 25 bp, Homo sapien
gaggtacagacctctgaggagttcc

SEQ ID NO: 4644062 - DNA, 25 bp, Homo sapien
tgtcaaggctatccatgggagccct

SEQ ID NO: 4644063 - DNA, 25 bp, Homo sapien
gcttcgagtatttcttgtgatggga

SEQ ID NO: 4644064 - DNA, 25 bp, Homo sapien
aggaatacaccaacaccggcttcga

SEQ ID NO: 4644065 - DNA, 25 bp, Homo sapien
accaagtccggtggtccgatctcca

SEQ ID NO: 4644066 - DNA, 25 bp, Homo sapien
gggtcagggagcccttgcgctccac

SEQ ID NO: 4644067 - DNA, 25 bp, Homo sapien
aaccaaatgcttcttggggccaagc

SEQ ID NO: 4644068 - DNA, 25 bp, Homo sapien
caagcaagaacttacacgagggaag

SEQ ID NO: 4644069 - DNA, 25 bp, Homo sapien
catcacagtgttgctattggtcact

SEQ ID NO: 4644070 - DNA, 25 bp, Homo sapien
gggccaagcaagaacttacacgagg

SEQ ID NO: 4644071 - DNA, 25 bp, Homo sapien
tatcataacctttgggaaaagcttc

SEQ ID NO: 4644072 - DNA, 25 bp, Homo sapien
ccctctatatcataacctttgggaa

SEQ ID NO: 4644073 - DNA, 25 bp, Homo sapien
gtcgccgatatgttgaattacacag

SEQ ID NO: 4644074 - DNA, 25 bp, Homo sapien
ggattcatcggttcccagtcgccga

SEQ ID NO: 4644075 - DNA, 25 bp, Homo sapien
aatggagcaagtggatgttgactga

SEQ ID NO: 4644076 - DNA, 25 bp, Homo sapien
catgctggctgatgacccatgaggc

SEQ ID NO: 4644077 - DNA, 25 bp, Homo sapien
gggaatggagcaagtggatgttgac

SEQ ID NO: 4644078 - DNA, 25 bp, Homo sapien
ctgtgtttgtgggggaatggagcaa

SEQ ID NO: 4644079 - DNA, 25 bp, Homo sapien
tctggctacttttgtcccaagagga

SEQ ID NO: 4644080 - DNA, 25 bp, Homo sapien
tggtgactctcagataatacaaaac

SEQ ID NO: 4644081 - DNA, 25 bp, Homo sapien
tcggcctggcccactatactgggaa

SEQ ID NO: 4644082 - DNA, 25 bp, Homo sapien
gcttcttctcaattatcccacttgg

SEQ ID NO: 4644083 - DNA, 25 bp, Homo sapien
ctttcgataatcccggagctcactg

SEQ ID NO: 4644084 - DNA, 25 bp, Homo sapien
cttgctcttcatttcaacccattct

SEQ ID NO: 4644085 - DNA, 25 bp, Homo sapien
ttcgataatcccggagctcactgtt

SEQ ID NO: 4644086 - DNA, 25 bp, Homo sapien
ttgctcttcatttcaacccattctg

SEQ ID NO: 4644087 - DNA, 25 bp, Homo sapien
caaagaactctctattcctgaggaa

SEQ ID NO: 4644088 - DNA, 25 bp, Homo sapien
tagctgggcccagaataagtagaga

SEQ ID NO: 4644089 - DNA, 25 bp, Homo sapien
cctggatagtcagaaccttgggcca

SEQ ID NO: 4644090 - DNA, 25 bp, Homo sapien
catggaagcttgagacaaatgtgct

SEQ ID NO: 4644091 - DNA, 25 bp, Homo sapien
tgtctaggaaagacagctccaaaac

SEQ ID NO: 4644092 - DNA, 25 bp, Homo sapien
aaacctgtggcaggcaatccggtga

SEQ ID NO: 4644093 - DNA, 25 bp, Homo sapien
caatccggtggatgtctaggaaaga

SEQ ID NO: 4644094 - DNA, 25 bp, Homo sapien
acctgtggcaggcaatccggtgacc

SEQ ID NO: 4644095 - DNA, 25 bp, Homo sapien
tgtacagttgtagcagtttagggac

SEQ ID NO: 4644096 - DNA, 25 bp, Homo sapien
tacagttgtagcagtttagggacta

SEQ ID NO: 4644097 - DNA, 25 bp, Homo sapien
attttgtacagttgtagcagtttag

SEQ ID NO: 4644098 - DNA, 25 bp, Homo sapien
tttgtacagttgtagcagtttaggg

SEQ ID NO: 4644099 - DNA, 25 bp, Homo sapien
acatttggttaaaggcaagtcgaag

SEQ ID NO: 4644100 - DNA, 25 bp, Homo sapien
ggcattttgttgaccttggctcacc

SEQ ID NO: 4644101 - DNA, 25 bp, Homo sapien
caagtcgaagatgtcatgtaaaggg

SEQ ID NO: 4644102 - DNA, 25 bp, Homo sapien
cggttattaatgttgtgcatgtgaa

SEQ ID NO: 4644103 - DNA, 25 bp, Homo sapien
tgaatcctaagtcagcaaaggcctg

SEQ ID NO: 4644104 - DNA, 25 bp, Homo sapien
ggaaatatgaccagcccaaaaggag

SEQ ID NO: 4644105 - DNA, 25 bp, Homo sapien
gaagactgacatgtggtgcctgacg

SEQ ID NO: 4644106 - DNA, 25 bp, Homo sapien
tttgggaactgaagagaagactgac

SEQ ID NO: 4644107 - DNA, 25 bp, Homo sapien
cagtcaaatgccgtttctgtgtaac

SEQ ID NO: 4644108 - DNA, 25 bp, Homo sapien
caaatgccgtttctgtgtaacggac

SEQ ID NO: 4644109 - DNA, 25 bp, Homo sapien
tgccgtttctgtgtaacggacatta

SEQ ID NO: 4644110 - DNA, 25 bp, Homo sapien
gccgtttctgtgtaacggacattat

SEQ ID NO: 4644111 - DNA, 25 bp, Homo sapien
tccaaaataaagtcagtgggataca

SEQ ID NO: 4644112 - DNA, 25 bp, Homo sapien
ttcttcacattggtccaaaataaag

SEQ ID NO: 4644113 - DNA, 25 bp, Homo sapien
cagtgggatacaggttgagttatga

SEQ ID NO: 4644114 - DNA, 25 bp, Homo sapien
tacaggttgagttatgagaaagaga

SEQ ID NO: 4644115 - DNA, 25 bp, Homo sapien
tggggccatgacacccagcctcatt

SEQ ID NO: 4644116 - DNA, 25 bp, Homo sapien
tttgtttgatgtagtctcatttttg

SEQ ID NO: 4644117 - DNA, 25 bp, Homo sapien
tcttttgcagtgaagaagctttttt

SEQ ID NO: 4644118 - DNA, 25 bp, Homo sapien
caaagtgctggggccatgacaccca

SEQ ID NO: 4644119 - DNA, 25 bp, Homo sapien
accaattcttgccaggccctcaggt

SEQ ID NO: 4644120 - DNA, 25 bp, Homo sapien
ctgggtggtaaccaccaattcttgc

SEQ ID NO: 4644121 - DNA, 25 bp, Homo sapien
tgggtggtaaccaccaattcttgcc

SEQ ID NO: 4644122 - DNA, 25 bp, Homo sapien
tcttgccaggccctcaggttgtggt

SEQ ID NO: 4644123 - DNA, 25 bp, Homo sapien
ggctgataatcatatggtggaacat

SEQ ID NO: 4644124 - DNA, 25 bp, Homo sapien
ttctgagtacgttgtcaatgcacac

SEQ ID NO: 4644125 - DNA, 25 bp, Homo sapien
gtggctgataatcatatggtggaac

SEQ ID NO: 4644126 - DNA, 25 bp, Homo sapien
tggaacataatcttctgagtacgtt

SEQ ID NO: 4644127 - DNA, 25 bp, Homo sapien
ggcttgtgccaacaggaaggtctgc

SEQ ID NO: 4644128 - DNA, 25 bp, Homo sapien
gagtggcttgtgccaacaggaaggt

SEQ ID NO: 4644129 - DNA, 25 bp, Homo sapien
gtggcttgtgccaacaggaaggtct

SEQ ID NO: 4644130 - DNA, 25 bp, Homo sapien
gcttgtgccaacaggaaggtctgcc

SEQ ID NO: 4644131 - DNA, 25 bp, Homo sapien
tagctattagccacctggcattagc

SEQ ID NO: 4644132 - DNA, 25 bp, Homo sapien
tagccacctggcattagcacagcaa

SEQ ID NO: 4644133 - DNA, 25 bp, Homo sapien
tccccagtatgcctataaggatgct

SEQ ID NO: 4644134 - DNA, 25 bp, Homo sapien
cattaaagatagctattagccacct

SEQ ID NO: 4644135 - DNA, 25 bp, Homo sapien
gaaccatttagatccgtgaactgag

SEQ ID NO: 4644136 - DNA, 25 bp, Homo sapien
taggcccactagtcaagggatagag

SEQ ID NO: 4644137 - DNA, 25 bp, Homo sapien
aataatcatcttgacagggataagc

SEQ ID NO: 4644138 - DNA, 25 bp, Homo sapien
gaacggcattttctgtggactatgg

SEQ ID NO: 4644139 - DNA, 25 bp, Homo sapien
tcattagtcagagatgctgattcta

SEQ ID NO: 4644140 - DNA, 25 bp, Homo sapien
tttcattagtcagagatgctgattc

SEQ ID NO: 4644141 - DNA, 25 bp, Homo sapien
ttagtcagagatgctgattctatac

SEQ ID NO: 4644142 - DNA, 25 bp, Homo sapien
ctgctacatccatttttcattagtc

SEQ ID NO: 4644143 - DNA, 25 bp, Homo sapien
aaagttagcttctgatctgtacatc

SEQ ID NO: 4644144 - DNA, 25 bp, Homo sapien
ggagtgagcttccagctatctgcaa

SEQ ID NO: 4644145 - DNA, 25 bp, Homo sapien
gattcttggttgcttaggactgtgg

SEQ ID NO: 4644146 - DNA, 25 bp, Homo sapien
tactttggtttacaatggctgcctc

SEQ ID NO: 4644147 - DNA, 25 bp, Homo sapien
tgtagaccagaagacaaagtcagtc

SEQ ID NO: 4644148 - DNA, 25 bp, Homo sapien
ttgagggtgagtatggctctcccag

SEQ ID NO: 4644149 - DNA, 25 bp, Homo sapien
ggagcaaggaagtcaatctaaatcc

SEQ ID NO: 4644150 - DNA, 25 bp, Homo sapien
aaagatgtagaccagaagacaaagt

SEQ ID NO: 4644151 - DNA, 25 bp, Homo sapien
gatgatattgaagagctcctagaga

SEQ ID NO: 4644152 - DNA, 25 bp, Homo sapien
aatcttgactctgtataggcctagg

SEQ ID NO: 4644153 - DNA, 25 bp, Homo sapien
tagcaggagcttttgcagaccccaa

SEQ ID NO: 4644154 - DNA, 25 bp, Homo sapien
agacctcccagtggcacaaaatgtg

SEQ ID NO: 4644155 - DNA, 25 bp, Homo sapien
gccaaaggatgctgtattagtttgc

SEQ ID NO: 4644156 - DNA, 25 bp, Homo sapien
ccatgcaccttcaggccaaaggatg

SEQ ID NO: 4644157 - DNA, 25 bp, Homo sapien
ttcctggaatactgtcctcttccca

SEQ ID NO: 4644158 - DNA, 25 bp, Homo sapien
ggaatactgtcctcttcccatgcac

SEQ ID NO: 4644159 - DNA, 25 bp, Homo sapien
cataaggggtccgatgcaaaggtgc

SEQ ID NO: 4644160 - DNA, 25 bp, Homo sapien
gtccgatgcaaaggtgcaggactga

SEQ ID NO: 4644161 - DNA, 25 bp, Homo sapien
tgcaaaggtgcaggactgatcctcc

SEQ ID NO: 4644162 - DNA, 25 bp, Homo sapien
aggtgcaggactgatcctccactcc

SEQ ID NO: 4644163 - DNA, 25 bp, Homo sapien
ttgggcaattgacccagactgggaa

SEQ ID NO: 4644164 - DNA, 25 bp, Homo sapien
catcgctgatgggtctgggttgggc

SEQ ID NO: 4644165 - DNA, 25 bp, Homo sapien
tgaacttttctaatgccgtggccat

SEQ ID NO: 4644166 - DNA, 25 bp, Homo sapien
catagcctttcgtgcaatatgaact

SEQ ID NO: 4644167 - DNA, 25 bp, Homo sapien
taaagaatgactggacgctgagagg

SEQ ID NO: 4644168 - DNA, 25 bp, Homo sapien
cctacgtcagggatggaggaatccg

SEQ ID NO: 4644169 - DNA, 25 bp, Homo sapien
gaggaatccgatgagttctcactga

SEQ ID NO: 4644170 - DNA, 25 bp, Homo sapien
gaaaggtggaggcaacaccctgtga

SEQ ID NO: 4644171 - DNA, 25 bp, Homo sapien
tctcctttaatctatgccaagtcat

SEQ ID NO: 4644172 - DNA, 25 bp, Homo sapien
gtctcctttaatctatgccaagtca

SEQ ID NO: 4644173 - DNA, 25 bp, Homo sapien
tctgctccttgttgtaccacttcta

SEQ ID NO: 4644174 - DNA, 25 bp, Homo sapien
tgttgtaccacttctagcctggaga

SEQ ID NO: 4644175 - DNA, 25 bp, Homo sapien
ccacatagccaggtgaggcattggg

SEQ ID NO: 4644176 - DNA, 25 bp, Homo sapien
cctggagatcaccaagttcttgctt

SEQ ID NO: 4644177 - DNA, 25 bp, Homo sapien
tggctgctcctagtgaaagggatcg

SEQ ID NO: 4644178 - DNA, 25 bp, Homo sapien
atctggcatgtcagtcccgcagggc

SEQ ID NO: 4644179 - DNA, 25 bp, Homo sapien
ctggacagggaggagacaactgcac

SEQ ID NO: 4644180 - DNA, 25 bp, Homo sapien
cagccgcggtgggaactcgcttatt

SEQ ID NO: 4644181 - DNA, 25 bp, Homo sapien
gcaacgccaggaggacgccccttaa

SEQ ID NO: 4644182 - DNA, 25 bp, Homo sapien
cttgcaacgccaggaggacgcccct

SEQ ID NO: 4644183 - DNA, 25 bp, Homo sapien
ccaggaggacgccccttaacagcat

SEQ ID NO: 4644184 - DNA, 25 bp, Homo sapien
acgccaggaggacgccccttaacag

SEQ ID NO: 4644185 - DNA, 25 bp, Homo sapien
gagcgggggcgagtcgtcagagcgc

SEQ ID NO: 4644186 - DNA, 25 bp, Homo sapien
ggcgagtcgtcagagcgcccccggg

SEQ ID NO: 4644187 - DNA, 25 bp, Homo sapien
agcaggagcgggggcgagtcgtcag

SEQ ID NO: 4644188 - DNA, 25 bp, Homo sapien
gggcgagtcgtcagagcgcccccgg

SEQ ID NO: 4644189 - DNA, 25 bp, Homo sapien
cccagcatccccgggcgcctccact

SEQ ID NO: 4644190 - DNA, 25 bp, Homo sapien
ccagcatccccgggcgcctccactg

SEQ ID NO: 4644191 - DNA, 25 bp, Homo sapien
cagcatccccgggcgcctccactga

SEQ ID NO: 4644192 - DNA, 25 bp, Homo sapien
cgggcacaaagcgagtttcagttcg

SEQ ID NO: 4644193 - DNA, 25 bp, Homo sapien
gttcgagctccacccaggagccttt

SEQ ID NO: 4644194 - DNA, 25 bp, Homo sapien
gagtttcagttcgagctccacccag

SEQ ID NO: 4644195 - DNA, 25 bp, Homo sapien
ggagcctttgcaccaactcggggag

SEQ ID NO: 4644196 - DNA, 25 bp, Homo sapien
aagccgcaagtgctctcttcaaagg

SEQ ID NO: 4644197 - DNA, 25 bp, Homo sapien
caacacggagtcaaagccgcaagtg

SEQ ID NO: 4644198 - DNA, 25 bp, Homo sapien
catttaaaatccacggcagagaggc

SEQ ID NO: 4644199 - DNA, 25 bp, Homo sapien
tcctcatttaaaatccacggcagag

SEQ ID NO: 4644200 - DNA, 25 bp, Homo sapien
atcattagctgtgctccgtttctcc

SEQ ID NO: 4644201 - DNA, 25 bp, Homo sapien
cccacagcggagaacaatcattagc

SEQ ID NO: 4644202 - DNA, 25 bp, Homo sapien
gaacaatcattagctgtgctccgtt

SEQ ID NO: 4644203 - DNA, 25 bp, Homo sapien
gcggagaacaatcattagctgtgct

SEQ ID NO: 4644204 - DNA, 25 bp, Homo sapien
agacatgtctcctgaggaccagaaa

SEQ ID NO: 4644205 - DNA, 25 bp, Homo sapien
gacatgtctcctgaggaccagaaag

SEQ ID NO: 4644206 - DNA, 25 bp, Homo sapien
ttagcactgacgtcccatcacagaa

SEQ ID NO: 4644207 - DNA, 25 bp, Homo sapien
tcccatcacagaattgtggaaccat

SEQ ID NO: 4644208 - DNA, 25 bp, Homo sapien
cccatcacagaattgtggaaccatt

SEQ ID NO: 4644209 - DNA, 25 bp, Homo sapien
tagcactgacgtcccatcacagaat

SEQ ID NO: 4644210 - DNA, 25 bp, Homo sapien
ggaacaactggagcctaacctgcct

SEQ ID NO: 4644211 - DNA, 25 bp, Homo sapien
tacactgttacgtccaagttctggc

SEQ ID NO: 4644212 - DNA, 25 bp, Homo sapien
actgaagctggaacaactggagcct

SEQ ID NO: 4644213 - DNA, 25 bp, Homo sapien
gaatgaattaacttccgccagccaa

SEQ ID NO: 4644214 - DNA, 25 bp, Homo sapien
gccccatgcagatgagcataactcg

SEQ ID NO: 4644215 - DNA, 25 bp, Homo sapien
atgcaggaccaagtagccccatgca

SEQ ID NO: 4644216 - DNA, 25 bp, Homo sapien
cagatgagcataactcgtccctggc

SEQ ID NO: 4644217 - DNA, 25 bp, Homo sapien
tgcagacataatgcaggaccaagta

SEQ ID NO: 4644218 - DNA, 25 bp, Homo sapien
ctcaacctgagagcagtcacagcca

SEQ ID NO: 4644219 - DNA, 25 bp, Homo sapien
tcccagagggtgtcaaggaacatcc

SEQ ID NO: 4644220 - DNA, 25 bp, Homo sapien
aaacactgcatctttggaatctgag

SEQ ID NO: 4644221 - DNA, 25 bp, Homo sapien
gtgatactgcaagtgtaactaggtc

SEQ ID NO: 4644222 - DNA, 25 bp, Homo sapien
tcagcagggttgatagacaatgaac

SEQ ID NO: 4644223 - DNA, 25 bp, Homo sapien
gcctccagtcaagggagctcatgaa

SEQ ID NO: 4644224 - DNA, 25 bp, Homo sapien
gagagccaatgtcctagtgaaagaa

SEQ ID NO: 4644225 - DNA, 25 bp, Homo sapien
tgaatcaagtgtactgagcctccag

SEQ ID NO: 4644226 - DNA, 25 bp, Homo sapien
catgttacctgaagtttgagtacca

SEQ ID NO: 4644227 - DNA, 25 bp, Homo sapien
tgtgttatttgggatcctaaaagaa

SEQ ID NO: 4644228 - DNA, 25 bp, Homo sapien
gatgatgagagagagtgttttccat

SEQ ID NO: 4644229 - DNA, 25 bp, Homo sapien
gttttccatgttacctgaagtttga

SEQ ID NO: 4644230 - DNA, 25 bp, Homo sapien
tgtgcatttgcataaggatgcatga

SEQ ID NO: 4644231 - DNA, 25 bp, Homo sapien
tatagaaatgcaacacactgtgcat

SEQ ID NO: 4644232 - DNA, 25 bp, Homo sapien
catagagaggcaggtatagaaatgc

SEQ ID NO: 4644233 - DNA, 25 bp, Homo sapien
gcatgaaaattagggccagccactc

SEQ ID NO: 4644234 - DNA, 25 bp, Homo sapien
gaggaatatgtcaagaggaataaat

SEQ ID NO: 4644235 - DNA, 25 bp, Homo sapien
agatcatgctgacatgaaaacgatg

SEQ ID NO: 4644236 - DNA, 25 bp, Homo sapien
aaattcttcttcagccaagatcatg

SEQ ID NO: 4644237 - DNA, 25 bp, Homo sapien
ttagttgaggaatatgtcaagagga

SEQ ID NO: 4644238 - DNA, 25 bp, Homo sapien
tgtggaggaattccactaggtcctt

SEQ ID NO: 4644239 - DNA, 25 bp, Homo sapien
tctgtggaggaattccactaggtcc

SEQ ID NO: 4644240 - DNA, 25 bp, Homo sapien
cttctgaaaactgtctgtggaggaa

SEQ ID NO: 4644241 - DNA, 25 bp, Homo sapien
tgaaaactgtctgtggaggaattcc

SEQ ID NO: 4644242 - DNA, 25 bp, Homo sapien
actggacattttcgggagcacactg

SEQ ID NO: 4644243 - DNA, 25 bp, Homo sapien
tgagagggaattctcttgcctgcat

SEQ ID NO: 4644244 - DNA, 25 bp, Homo sapien
tcagcctttgtaacgtcactggaca

SEQ ID NO: 4644245 - DNA, 25 bp, Homo sapien
ctgttcctggtgagagggaattctc

SEQ ID NO: 4644246 - DNA, 25 bp, Homo sapien
gagccttgacacctagtttaatagg

SEQ ID NO: 4644247 - DNA, 25 bp, Homo sapien
cctgagccttgacacctagtttaat

SEQ ID NO: 4644248 - DNA, 25 bp, Homo sapien
gccttgacacctagtttaataggaa

SEQ ID NO: 4644249 - DNA, 25 bp, Homo sapien
tgagccttgacacctagtttaatag

SEQ ID NO: 4644250 - DNA, 25 bp, Homo sapien
tgtaaggcagtttcattgtttttga

SEQ ID NO: 4644251 - DNA, 25 bp, Homo sapien
gagaagactgagaatttgtaaggca

SEQ ID NO: 4644252 - DNA, 25 bp, Homo sapien
cacaagcttctacactctttgggag

SEQ ID NO: 4644253 - DNA, 25 bp, Homo sapien
gaagacaccaagacttcaagagaag

SEQ ID NO: 4644254 - DNA, 25 bp, Homo sapien
ctggatctattctccctagtgcctg

SEQ ID NO: 4644255 - DNA, 25 bp, Homo sapien
atctgtgactggatctattctccct

SEQ ID NO: 4644256 - DNA, 25 bp, Homo sapien
ccctatgtagaagatcttccaagta

SEQ ID NO: 4644257 - DNA, 25 bp, Homo sapien
aacttctgccccctatgtagaagat

SEQ ID NO: 4644258 - DNA, 25 bp, Homo sapien
cagagactccgaagatgtggttatc

SEQ ID NO: 4644259 - DNA, 25 bp, Homo sapien
tgaaggttccttagctgaccaaagc

SEQ ID NO: 4644260 - DNA, 25 bp, Homo sapien
tatctggtagaccaaacggaggcag

SEQ ID NO: 4644261 - DNA, 25 bp, Homo sapien
taagtcaggacttagcagcacagct

SEQ ID NO: 4644262 - DNA, 25 bp, Homo sapien
tgtcctagtacaccttctattaaaa

SEQ ID NO: 4644263 - DNA, 25 bp, Homo sapien
gatttcaaatagtgcgatgctggct

SEQ ID NO: 4644264 - DNA, 25 bp, Homo sapien
atacagtagccggttgtcatcttga

SEQ ID NO: 4644265 - DNA, 25 bp, Homo sapien
tgtgtttccctgtcctagtacacct

SEQ ID NO: 4644266 - DNA, 25 bp, Homo sapien
ggattccagcggttcacaaagccac

SEQ ID NO: 4644267 - DNA, 25 bp, Homo sapien
ggagtggacattccgaatacttcct

SEQ ID NO: 4644268 - DNA, 25 bp, Homo sapien
cacattgggattccagcggttcaca

SEQ ID NO: 4644269 - DNA, 25 bp, Homo sapien
ctcctccaacaaaccagttcacatt

SEQ ID NO: 4644270 - DNA, 25 bp, Homo sapien
tcccatcctttgatctatcttcagt

SEQ ID NO: 4644271 - DNA, 25 bp, Homo sapien
ttaggacccattcccatcctttgat

SEQ ID NO: 4644272 - DNA, 25 bp, Homo sapien
gaagttcttaggacccattcccatc

SEQ ID NO: 4644273 - DNA, 25 bp, Homo sapien
catcctttgatctatcttcagtgaa

SEQ ID NO: 4644274 - DNA, 25 bp, Homo sapien
ttctgtggaggacttctcctcaaag

SEQ ID NO: 4644275 - DNA, 25 bp, Homo sapien
tccaggtgagagcagtggtaaccca

SEQ ID NO: 4644276 - DNA, 25 bp, Homo sapien
acaagtaagtaagcccttgcccttg

SEQ ID NO: 4644277 - DNA, 25 bp, Homo sapien
aaagctgacttctcgctggtaacac

SEQ ID NO: 4644278 - DNA, 25 bp, Homo sapien
tactctgataactgggcctggagca

SEQ ID NO: 4644279 - DNA, 25 bp, Homo sapien
caagtatttggactcctagcctggg

SEQ ID NO: 4644280 - DNA, 25 bp, Homo sapien
tattggaactcaaacgcatcttaga

SEQ ID NO: 4644281 - DNA, 25 bp, Homo sapien
catgaggaaggactaggagaattac

SEQ ID NO: 4644282 - DNA, 25 bp, Homo sapien
gaaggaaactgccatgtaacctcat

SEQ ID NO: 4644283 - DNA, 25 bp, Homo sapien
ggagggggcttaagcgaaccactca

SEQ ID NO: 4644284 - DNA, 25 bp, Homo sapien
cttaagcgaaccactcatggaagag

SEQ ID NO: 4644285 - DNA, 25 bp, Homo sapien
ggaaactgccatgtaacctcatccc

SEQ ID NO: 4644286 - DNA, 25 bp, Homo sapien
gtatgccagagggaaatacccactg

SEQ ID NO: 4644287 - DNA, 25 bp, Homo sapien
actcagctgtgatgcgccctgctgg

SEQ ID NO: 4644288 - DNA, 25 bp, Homo sapien
taagactgcccttggcttggccgcg

SEQ ID NO: 4644289 - DNA, 25 bp, Homo sapien
gttgtgttgtctgctccagtgttgc

SEQ ID NO: 4644290 - DNA, 25 bp, Homo sapien
tctgctccagtgttgctggttgtct

SEQ ID NO: 4644291 - DNA, 25 bp, Homo sapien
ctaattctggattatacacaaagag

SEQ ID NO: 4644292 - DNA, 25 bp, Homo sapien
ttctggattatacacaaagagcctg

SEQ ID NO: 4644293 - DNA, 25 bp, Homo sapien
tctggattatacacaaagagcctga

SEQ ID NO: 4644294 - DNA, 25 bp, Homo sapien
aattctggattatacacaaagagcc

SEQ ID NO: 4644295 - DNA, 25 bp, Homo sapien
agatgacggacatctgagagttgtc

SEQ ID NO: 4644296 - DNA, 25 bp, Homo sapien
ctgagagttgtctttaaagggtagt

SEQ ID NO: 4644297 - DNA, 25 bp, Homo sapien
tgagagttgtctttaaagggtagta

SEQ ID NO: 4644298 - DNA, 25 bp, Homo sapien
atgacggacatctgagagttgtctt

SEQ ID NO: 4644299 - DNA, 25 bp, Homo sapien
agaggctggcctccattaggggcat

SEQ ID NO: 4644300 - DNA, 25 bp, Homo sapien
ctcttggcaggtctttgtgggctct

SEQ ID NO: 4644301 - DNA, 25 bp, Homo sapien
tggacccagaggctggcctccatta

SEQ ID NO: 4644302 - DNA, 25 bp, Homo sapien
gcaggtctttgtgggctctggaccc

SEQ ID NO: 4644303 - DNA, 25 bp, Homo sapien
ggtaaggagcactgaactcgacctc

SEQ ID NO: 4644304 - DNA, 25 bp, Homo sapien
ccctgctggatctggtaataaaatg

SEQ ID NO: 4644305 - DNA, 25 bp, Homo sapien
tgcttcacataaactgagtccacgt

SEQ ID NO: 4644306 - DNA, 25 bp, Homo sapien
gatttcctcgtaaaggccagccaca

SEQ ID NO: 4644307 - DNA, 25 bp, Homo sapien
gaaagaatacagttgaggcacagca

SEQ ID NO: 4644308 - DNA, 25 bp, Homo sapien
ctctcaggaagggtagctcaagact

SEQ ID NO: 4644309 - DNA, 25 bp, Homo sapien
gagagggtcgccaagaagtctagtt

SEQ ID NO: 4644310 - DNA, 25 bp, Homo sapien
tgttagtagtcctcccctttgtgaa

SEQ ID NO: 4644311 - DNA, 25 bp, Homo sapien
gcaaaatttacactgagccggtggg

SEQ ID NO: 4644312 - DNA, 25 bp, Homo sapien
cagcctctgtgccaatgtgttctct

SEQ ID NO: 4644313 - DNA, 25 bp, Homo sapien
tgacatttagctctcaaggcactag

SEQ ID NO: 4644314 - DNA, 25 bp, Homo sapien
gatcagcatgtgctaatcacagcct

SEQ ID NO: 4644315 - DNA, 25 bp, Homo sapien
gggaagcctagaagtttgtctttgc

SEQ ID NO: 4644316 - DNA, 25 bp, Homo sapien
cctagaagtttgtctttgccaaggg

SEQ ID NO: 4644317 - DNA, 25 bp, Homo sapien
ctccaaaatccacggggaagcctag

SEQ ID NO: 4644318 - DNA, 25 bp, Homo sapien
tggtacctaaactctccaaaatcca

SEQ ID NO: 4644319 - DNA, 25 bp, Homo sapien
cacctgtcttgtaggactgttgagg

SEQ ID NO: 4644320 - DNA, 25 bp, Homo sapien
tttttctgaaggttggttggccgca

SEQ ID NO: 4644321 - DNA, 25 bp, Homo sapien
caaatatccgagcacagagtcaggc

SEQ ID NO: 4644322 - DNA, 25 bp, Homo sapien
tatcaatcagttaacctcccagggt

SEQ ID NO: 4644323 - DNA, 25 bp, Homo sapien
acctcccttgggaccattgaaagca

SEQ ID NO: 4644324 - DNA, 25 bp, Homo sapien
cagggcaacataacctcccttggga

SEQ ID NO: 4644325 - DNA, 25 bp, Homo sapien
ccttgggaccattgaaagcaacttc

SEQ ID NO: 4644326 - DNA, 25 bp, Homo sapien
agaatgaaatatcatccagggcaac

SEQ ID NO: 4644327 - DNA, 25 bp, Homo sapien
cttagcctattagggagatgaggga

SEQ ID NO: 4644328 - DNA, 25 bp, Homo sapien
taactctaaacgcaaccagatggtg

SEQ ID NO: 4644329 - DNA, 25 bp, Homo sapien
tccgggagactggattaactctaaa

SEQ ID NO: 4644330 - DNA, 25 bp, Homo sapien
tgatatgattcctgtcttagcctat

SEQ ID NO: 4644331 - DNA, 25 bp, Homo sapien
atcttgctcaaaattgcagctggct

SEQ ID NO: 4644332 - DNA, 25 bp, Homo sapien
ctttatcttggtaaaagttgcagag

SEQ ID NO: 4644333 - DNA, 25 bp, Homo sapien
taagcctgtagtgtggtctccagcc

SEQ ID NO: 4644334 - DNA, 25 bp, Homo sapien
tggcttccacggcactgaacagaag

SEQ ID NO: 4644335 - DNA, 25 bp, Homo sapien
tagatggcataatgaaaacgcagac

SEQ ID NO: 4644336 - DNA, 25 bp, Homo sapien
tactgcaagtttcctggtagggagg

SEQ ID NO: 4644337 - DNA, 25 bp, Homo sapien
tgtaaactgctagggtgtcactcat

SEQ ID NO: 4644338 - DNA, 25 bp, Homo sapien
gggactccaacacagaccagatctt

SEQ ID NO: 4644339 - DNA, 25 bp, Homo sapien
taggcatgggcttcttaaaggtgat

SEQ ID NO: 4644340 - DNA, 25 bp, Homo sapien
tcttaaaggtgatttcagcttgcat

SEQ ID NO: 4644341 - DNA, 25 bp, Homo sapien
aggcatgggcttcttaaaggtgatt

SEQ ID NO: 4644342 - DNA, 25 bp, Homo sapien
ggtaggcatgggcttcttaaaggtg

SEQ ID NO: 4644343 - DNA, 25 bp, Homo sapien
tatgtggctgggagtagggtgtaag

SEQ ID NO: 4644344 - DNA, 25 bp, Homo sapien
ctgtatgtggctgggagtagggtgt

SEQ ID NO: 4644345 - DNA, 25 bp, Homo sapien
gctgggagtagggtgtaagggtgag

SEQ ID NO: 4644346 - DNA, 25 bp, Homo sapien
tgggagtagggtgtaagggtgaggc

SEQ ID NO: 4644347 - DNA, 25 bp, Homo sapien
tggatgttacaataccctggtgcac

SEQ ID NO: 4644348 - DNA, 25 bp, Homo sapien
tcagtatagtagatgcaccgcccaa

SEQ ID NO: 4644349 - DNA, 25 bp, Homo sapien
taatctgtggaaagttgctcggcat

SEQ ID NO: 4644350 - DNA, 25 bp, Homo sapien
gtatggtcacaggaacgtctcccag

SEQ ID NO: 4644351 - DNA, 25 bp, Homo sapien
gcaaagtgtgtctgattgcaaagtt

SEQ ID NO: 4644352 - DNA, 25 bp, Homo sapien
gagcaaagtgtgtctgattgcaaag

SEQ ID NO: 4644353 - DNA, 25 bp, Homo sapien
aaagtgtgtctgattgcaaagttca

SEQ ID NO: 4644354 - DNA, 25 bp, Homo sapien
tgagagcaaagtgtgtctgattgca

SEQ ID NO: 4644355 - DNA, 25 bp, Homo sapien
acgtccttctcacccttagccgaag

SEQ ID NO: 4644356 - DNA, 25 bp, Homo sapien
ctgccctgctctgcgctgaaaatgt

SEQ ID NO: 4644357 - DNA, 25 bp, Homo sapien
agcttctccgacatccacatctaca

SEQ ID NO: 4644358 - DNA, 25 bp, Homo sapien
gctctgcgctgaaaatgtaggcccc

SEQ ID NO: 4644359 - DNA, 25 bp, Homo sapien
gaaccagccatagtatctcctcctt

SEQ ID NO: 4644360 - DNA, 25 bp, Homo sapien
tgtcgaaccagccatagtatctcct

SEQ ID NO: 4644361 - DNA, 25 bp, Homo sapien
ttcagaactggctaatgtcgaacca

SEQ ID NO: 4644362 - DNA, 25 bp, Homo sapien
ggctaatgtcgaaccagccatagta

SEQ ID NO: 4644363 - DNA, 25 bp, Homo sapien
tgaactttttcattgctatttggat

SEQ ID NO: 4644364 - DNA, 25 bp, Homo sapien
tagggaccacactgtgatagaatac

SEQ ID NO: 4644365 - DNA, 25 bp, Homo sapien
gatggtaaacatccaaacctctcaa

SEQ ID NO: 4644366 - DNA, 25 bp, Homo sapien
tgtgatagaatacaggcctgtagct

SEQ ID NO: 4644367 - DNA, 25 bp, Homo sapien
ataaagctatgaattctgttaactg

SEQ ID NO: 4644368 - DNA, 25 bp, Homo sapien
taaagctatgaattctgttaactga

SEQ ID NO: 4644369 - DNA, 25 bp, Homo sapien
aaagctatgaattctgttaactgaa

SEQ ID NO: 4644370 - DNA, 25 bp, Homo sapien
aaataaagctatgaattctgttaac

SEQ ID NO: 4644371 - DNA, 25 bp, Homo sapien
gagcagcttcccaattgtattgtaa

SEQ ID NO: 4644372 - DNA, 25 bp, Homo sapien
gcagcttcccaattgtattgtaatg

SEQ ID NO: 4644373 - DNA, 25 bp, Homo sapien
caagcccacagtcccagaaactttt

SEQ ID NO: 4644374 - DNA, 25 bp, Homo sapien
tccagggctacaagcccacagtccc

SEQ ID NO: 4644375 - DNA, 25 bp, Homo sapien
agtagtgtgatctccctttggtcct

SEQ ID NO: 4644376 - DNA, 25 bp, Homo sapien
tgtgccagctgctccggtttctttt

SEQ ID NO: 4644377 - DNA, 25 bp, Homo sapien
aatgtacattcatcttgctcgaaag

SEQ ID NO: 4644378 - DNA, 25 bp, Homo sapien
gctcgaaagtacactctccaggtgg

SEQ ID NO: 4644379 - DNA, 25 bp, Homo sapien
caagtgcatttcattatagacacaa

SEQ ID NO: 4644380 - DNA, 25 bp, Homo sapien
tagacacaagacataattttgcaca

SEQ ID NO: 4644381 - DNA, 25 bp, Homo sapien
tcaaaatgcagtaaacgattcctag

SEQ ID NO: 4644382 - DNA, 25 bp, Homo sapien
aatgctattttagaagctttcctta

SEQ ID NO: 4644383 - DNA, 25 bp, Homo sapien
ggccaaatggacactcactagcaag

SEQ ID NO: 4644384 - DNA, 25 bp, Homo sapien
ggtcagcagtaggaccaagctgcat

SEQ ID NO: 4644385 - DNA, 25 bp, Homo sapien
ggagtgcatcactattgaggccaaa

SEQ ID NO: 4644386 - DNA, 25 bp, Homo sapien
caagctgcatatcttcttaggcagg

SEQ ID NO: 4644387 - DNA, 25 bp, Homo sapien
cgaagcaacattgtcccagaatctg

SEQ ID NO: 4644388 - DNA, 25 bp, Homo sapien
taccgaagcaacattgtcccagaat

SEQ ID NO: 4644389 - DNA, 25 bp, Homo sapien
ttaccgaagcaacattgtcccagaa

SEQ ID NO: 4644390 - DNA, 25 bp, Homo sapien
ccgaagcaacattgtcccagaatct

SEQ ID NO: 4644391 - DNA, 25 bp, Homo sapien
taacatagttctctttggttgtacc

SEQ ID NO: 4644392 - DNA, 25 bp, Homo sapien
tggttgtacctcttattagatctct

SEQ ID NO: 4644393 - DNA, 25 bp, Homo sapien
cttattagatctcttactgctatac

SEQ ID NO: 4644394 - DNA, 25 bp, Homo sapien
tgtagtagtctaccataacatagtt

SEQ ID NO: 4644395 - DNA, 25 bp, Homo sapien
agcataatgacatgaggagcaggac

SEQ ID NO: 4644396 - DNA, 25 bp, Homo sapien
tatgaagtataacccgaggcagctg

SEQ ID NO: 4644397 - DNA, 25 bp, Homo sapien
gacatggtctactagtcaagcaagc

SEQ ID NO: 4644398 - DNA, 25 bp, Homo sapien
cctaaatcctgggagtgggttcaat

SEQ ID NO: 4644399 - DNA, 25 bp, Homo sapien
cactcagatacccacaaggagagct

SEQ ID NO: 4644400 - DNA, 25 bp, Homo sapien
cacactcagatacccacaaggagag

SEQ ID NO: 4644401 - DNA, 25 bp, Homo sapien
acactcagatacccacaaggagagc

SEQ ID NO: 4644402 - DNA, 25 bp, Homo sapien
tccctcatcctggaatgcttccttc

SEQ ID NO: 4644403 - DNA, 25 bp, Homo sapien
tggaatgcttccttcctccctacca

SEQ ID NO: 4644404 - DNA, 25 bp, Homo sapien
ggaatgcttccttcctccctaccat

SEQ ID NO: 4644405 - DNA, 25 bp, Homo sapien
ctcatcctggaatgcttccttcctc

SEQ ID NO: 4644406 - DNA, 25 bp, Homo sapien
gctgccacactgtttaatggctcca

SEQ ID NO: 4644407 - DNA, 25 bp, Homo sapien
agctgccacactgtttaatggctcc

SEQ ID NO: 4644408 - DNA, 25 bp, Homo sapien
gctcccttggaattgctacatatga

SEQ ID NO: 4644409 - DNA, 25 bp, Homo sapien
ccataccatgctgtactgtagaatt

SEQ ID NO: 4644410 - DNA, 25 bp, Homo sapien
gcatcaccagttagtaagtcaggaa

SEQ ID NO: 4644411 - DNA, 25 bp, Homo sapien
aagtcaggaactatagctcccttgg

SEQ ID NO: 4644412 - DNA, 25 bp, Homo sapien
gtgtggaatggacagctagctgcat

SEQ ID NO: 4644413 - DNA, 25 bp, Homo sapien
ctgtgtggaatggacagctagctgc

SEQ ID NO: 4644414 - DNA, 25 bp, Homo sapien
tgtgtggaatggacagctagctgca

SEQ ID NO: 4644415 - DNA, 25 bp, Homo sapien
cagcaactgtgatgtgttgagacac

SEQ ID NO: 4644416 - DNA, 25 bp, Homo sapien
tcacattggtagctggaactgggcc

SEQ ID NO: 4644417 - DNA, 25 bp, Homo sapien
tgaagccctcctgatgacaatagtg

SEQ ID NO: 4644418 - DNA, 25 bp, Homo sapien
tataaggaatgacgctgccccaaag

SEQ ID NO: 4644419 - DNA, 25 bp, Homo sapien
tgttgaagccctaccccttgtgtga

SEQ ID NO: 4644420 - DNA, 25 bp, Homo sapien
agtctttttagatgcttgcttagcc

SEQ ID NO: 4644421 - DNA, 25 bp, Homo sapien
gcagtctttttagatgcttgcttag

SEQ ID NO: 4644422 - DNA, 25 bp, Homo sapien
cagtctttttagatgcttgcttagc

SEQ ID NO: 4644423 - DNA, 25 bp, Homo sapien
ttgcagtctttttagatgcttgctt

SEQ ID NO: 4644424 - DNA, 25 bp, Homo sapien
caacttggggagctgaaactttcac

SEQ ID NO: 4644425 - DNA, 25 bp, Homo sapien
ttttccaccaacttggggagctgaa

SEQ ID NO: 4644426 - DNA, 25 bp, Homo sapien
ctgaaactttcacaggcttcacaat

SEQ ID NO: 4644427 - DNA, 25 bp, Homo sapien
tgaaactttcacaggcttcacaatc

SEQ ID NO: 4644428 - DNA, 25 bp, Homo sapien
ttatttaaaaatctaatctgccagt

SEQ ID NO: 4644429 - DNA, 25 bp, Homo sapien
tttatttaaaaatctaatctgccag

SEQ ID NO: 4644430 - DNA, 25 bp, Homo sapien
aatctttatttaaaaatctaatctg

SEQ ID NO: 4644431 - DNA, 25 bp, Homo sapien
tctttatttaaaaatctaatctgcc

SEQ ID NO: 4644432 - DNA, 25 bp, Homo sapien
ttcagagtgtcaagtcaagatgatc

SEQ ID NO: 4644433 - DNA, 25 bp, Homo sapien
atatcctaaagcttccagacgttgg

SEQ ID NO: 4644434 - DNA, 25 bp, Homo sapien
taccagtattatgccactgatacag

SEQ ID NO: 4644435 - DNA, 25 bp, Homo sapien
ggttaatacctatgctacagaattg

SEQ ID NO: 4644436 - DNA, 25 bp, Homo sapien
ttttcagataaacactcagcaggcc

SEQ ID NO: 4644437 - DNA, 25 bp, Homo sapien
aaggtcaagcagtgttttccagaga

SEQ ID NO: 4644438 - DNA, 25 bp, Homo sapien
tatgggaggcctcaatgtacatgta

SEQ ID NO: 4644439 - DNA, 25 bp, Homo sapien
tattcaatcagtgctcgtagccagg

SEQ ID NO: 4644440 - DNA, 25 bp, Homo sapien
tgccaacctgagtcttagctgagta

SEQ ID NO: 4644441 - DNA, 25 bp, Homo sapien
gatgatctaatgagtggaatgcctt

SEQ ID NO: 4644442 - DNA, 25 bp, Homo sapien
taggatcaatctcaaatggcagcag

SEQ ID NO: 4644443 - DNA, 25 bp, Homo sapien
tatgcagtgcatagaaattcctagt

SEQ ID NO: 4644444 - DNA, 25 bp, Homo sapien
ggttaagggatacccacattgctgg

SEQ ID NO: 4644445 - DNA, 25 bp, Homo sapien
tatgaccgatgatacccatgtgtga

SEQ ID NO: 4644446 - DNA, 25 bp, Homo sapien
tgctaaggatccaactcgtgatggt

SEQ ID NO: 4644447 - DNA, 25 bp, Homo sapien
gctctaaggctgtcccaacaatggt

SEQ ID NO: 4644448 - DNA, 25 bp, Homo sapien
agggtcctgcctgaaatttaacatc

SEQ ID NO: 4644449 - DNA, 25 bp, Homo sapien
catcaatggcaatatcacttcttat

SEQ ID NO: 4644450 - DNA, 25 bp, Homo sapien
cagggtcctgcctgaaatttaacat

SEQ ID NO: 4644451 - DNA, 25 bp, Homo sapien
tcttattgatactcctcgaatggct

SEQ ID NO: 4644452 - DNA, 25 bp, Homo sapien
gaatatcctgatgattgttgagttg

SEQ ID NO: 4644453 - DNA, 25 bp, Homo sapien
gattgttgagttgtatcttccattt

SEQ ID NO: 4644454 - DNA, 25 bp, Homo sapien
catttaagtcctcagaatatcctga

SEQ ID NO: 4644455 - DNA, 25 bp, Homo sapien
tactcaatttcatttaagtcctcag

SEQ ID NO: 4644456 - DNA, 25 bp, Homo sapien
ggtagcattgccttgtaatacagca

SEQ ID NO: 4644457 - DNA, 25 bp, Homo sapien
ggttttcgtctagtaaatccaatgc

SEQ ID NO: 4644458 - DNA, 25 bp, Homo sapien
ttcatagcagctgttaggatacaca

SEQ ID NO: 4644459 - DNA, 25 bp, Homo sapien
tgacttacccttggacattcatgaa

SEQ ID NO: 4644460 - DNA, 25 bp, Homo sapien
ctaataaaaaggcttaagcattttg

SEQ ID NO: 4644461 - DNA, 25 bp, Homo sapien
tctgcagtgttgtagtgaagatact

SEQ ID NO: 4644462 - DNA, 25 bp, Homo sapien
tgttgtggcagagtagagattcaaa

SEQ ID NO: 4644463 - DNA, 25 bp, Homo sapien
gtgaagatactctgataaagacaaa

SEQ ID NO: 4644464 - DNA, 25 bp, Homo sapien
ggcatccctagtaggattcccagtt

SEQ ID NO: 4644465 - DNA, 25 bp, Homo sapien
atttccaaagttggcatccctagta

SEQ ID NO: 4644466 - DNA, 25 bp, Homo sapien
ccttttctgctctaagccaatatcc

SEQ ID NO: 4644467 - DNA, 25 bp, Homo sapien
agtttagcaaccttagaggcaattt

SEQ ID NO: 4644468 - DNA, 25 bp, Homo sapien
gagaaggcaatctgtgtgagaaagc

SEQ ID NO: 4644469 - DNA, 25 bp, Homo sapien
gagaaagcaatttctatttgaagca

SEQ ID NO: 4644470 - DNA, 25 bp, Homo sapien
agagaaggcaatctgtgtgagaaag

SEQ ID NO: 4644471 - DNA, 25 bp, Homo sapien
tccatgctccgtacaatgcctggag

SEQ ID NO: 4644472 - DNA, 25 bp, Homo sapien
tagcactccgaactgtgttgactgg

SEQ ID NO: 4644473 - DNA, 25 bp, Homo sapien
tccatattaaaccagaccttgcatc

SEQ ID NO: 4644474 - DNA, 25 bp, Homo sapien
tagcaccctgggcatatggccgttt

SEQ ID NO: 4644475 - DNA, 25 bp, Homo sapien
gagaagacatgaaggcatcagggac

SEQ ID NO: 4644476 - DNA, 25 bp, Homo sapien
catcagggacactgtgcgagtgggc

SEQ ID NO: 4644477 - DNA, 25 bp, Homo sapien
gacactgtgcgagtgggcactgctg

SEQ ID NO: 4644478 - DNA, 25 bp, Homo sapien
ctttccactgctctccctagactgc

SEQ ID NO: 4644479 - DNA, 25 bp, Homo sapien
agtcacagagcccaggtcttagccc

SEQ ID NO: 4644480 - DNA, 25 bp, Homo sapien
gaccaagaagtcacagagcccaggt

SEQ ID NO: 4644481 - DNA, 25 bp, Homo sapien
gaagtcacagagcccaggtcttagc

SEQ ID NO: 4644482 - DNA, 25 bp, Homo sapien
tgagaccaagaagtcacagagccca

SEQ ID NO: 4644483 - DNA, 25 bp, Homo sapien
cgagcctcagtcatgtgtggtggga

SEQ ID NO: 4644484 - DNA, 25 bp, Homo sapien
gggcacgcccgtcgttggctcttcg

SEQ ID NO: 4644485 - DNA, 25 bp, Homo sapien
caggtgagagctcccgggcacgccc

SEQ ID NO: 4644486 - DNA, 25 bp, Homo sapien
cgggaggacgtcaggccctgcttgc

SEQ ID NO: 4644487 - DNA, 25 bp, Homo sapien
aggcgcccaagcgcccatccaccca

SEQ ID NO: 4644488 - DNA, 25 bp, Homo sapien
tccgttcccaccgtccggcagccca

SEQ ID NO: 4644489 - DNA, 25 bp, Homo sapien
ctggcttcctcagcgtcccacagcg

SEQ ID NO: 4644490 - DNA, 25 bp, Homo sapien
tggcttcctcagcgtcccacagcga

SEQ ID NO: 4644491 - DNA, 25 bp, Homo sapien
ggcttggagttgacgtcttcttgct

SEQ ID NO: 4644492 - DNA, 25 bp, Homo sapien
gacgtcttcttgctcggagtcgcca

SEQ ID NO: 4644493 - DNA, 25 bp, Homo sapien
gagttgacgtcttcttgctcggagt

SEQ ID NO: 4644494 - DNA, 25 bp, Homo sapien
gggcttggagttgacgtcttcttgc

SEQ ID NO: 4644495 - DNA, 25 bp, Homo sapien
cttgctcgggacctccgacgaaggg

SEQ ID NO: 4644496 - DNA, 25 bp, Homo sapien
tagagccttccacgaaaggcccgga

SEQ ID NO: 4644497 - DNA, 25 bp, Homo sapien
gaagttctccatcgagatgcggacg

SEQ ID NO: 4644498 - DNA, 25 bp, Homo sapien
ccggacgactgcaacagcggcagct

SEQ ID NO: 4644499 - DNA, 25 bp, Homo sapien
ccgcgcgctgccggagccccggggc

SEQ ID NO: 4644500 - DNA, 25 bp, Homo sapien
ccacgcccgcgcgctgccggagccc

SEQ ID NO: 4644501 - DNA, 25 bp, Homo sapien
cacgcccgcgcgctgccggagcccc

SEQ ID NO: 4644502 - DNA, 25 bp, Homo sapien
cgcccgcgcgctgccggagccccgg

SEQ ID NO: 4644503 - DNA, 25 bp, Homo sapien
taaaccaaggcaaatggcacacaca

SEQ ID NO: 4644504 - DNA, 25 bp, Homo sapien
ggtccaggagatacttcacaaatat

SEQ ID NO: 4644505 - DNA, 25 bp, Homo sapien
gacttccctgttccattggctccaa

SEQ ID NO: 4644506 - DNA, 25 bp, Homo sapien
tggctccaacgatcatattcaagtg

SEQ ID NO: 4644507 - DNA, 25 bp, Homo sapien
aaccatgcctctagaacatcctctc

SEQ ID NO: 4644508 - DNA, 25 bp, Homo sapien
ttcaaccatgcctctagaacatcct

SEQ ID NO: 4644509 - DNA, 25 bp, Homo sapien
aatttcaaccatgcctctagaacat

SEQ ID NO: 4644510 - DNA, 25 bp, Homo sapien
caatttcaaccatgcctctagaaca

SEQ ID NO: 4644511 - DNA, 25 bp, Homo sapien
ccccacttgaatatttaaggctgca

SEQ ID NO: 4644512 - DNA, 25 bp, Homo sapien
tttgccacatcaatctcacgggtga

SEQ ID NO: 4644513 - DNA, 25 bp, Homo sapien
gagaaactggcaaagattccccact

SEQ ID NO: 4644514 - DNA, 25 bp, Homo sapien
tcacgggtgattacaagatttccag

SEQ ID NO: 4644515 - DNA, 25 bp, Homo sapien
gcacatagctatctgagccactctc

SEQ ID NO: 4644516 - DNA, 25 bp, Homo sapien
tcaaagtcaaatttaataggtaata

SEQ ID NO: 4644517 - DNA, 25 bp, Homo sapien
taataaactataacaagattttaga

SEQ ID NO: 4644518 - DNA, 25 bp, Homo sapien
aaggttctacaaatagaagcacata

SEQ ID NO: 4644519 - DNA, 25 bp, Homo sapien
ggggaccaattgacttttcagtggc

SEQ ID NO: 4644520 - DNA, 25 bp, Homo sapien
catttctgggggaccaattgacttt

SEQ ID NO: 4644521 - DNA, 25 bp, Homo sapien
tttcagtggcttcgaggagttcaat

SEQ ID NO: 4644522 - DNA, 25 bp, Homo sapien
acttttcagtggcttcgaggagttc

SEQ ID NO: 4644523 - DNA, 25 bp, Homo sapien
gcttcaagcatctcaattaaatcta

SEQ ID NO: 4644524 - DNA, 25 bp, Homo sapien
taaatgtcgcttccgttcatagaac

SEQ ID NO: 4644525 - DNA, 25 bp, Homo sapien
acccatggcctttttgcttcaagca

SEQ ID NO: 4644526 - DNA, 25 bp, Homo sapien
cgttcatagaacctctccacatctt

SEQ ID NO: 4644527 - DNA, 25 bp, Homo sapien
gacatgttacaggaatctgcccttc

SEQ ID NO: 4644528 - DNA, 25 bp, Homo sapien
tgattcgagcctccaaattgtgacg

SEQ ID NO: 4644529 - DNA, 25 bp, Homo sapien
tccttcactcggtcacgaactagtt

SEQ ID NO: 4644530 - DNA, 25 bp, Homo sapien
catattcctgacgaacattttcata

SEQ ID NO: 4644531 - DNA, 25 bp, Homo sapien
ggtacaatctagctcaagaagtcat

SEQ ID NO: 4644532 - DNA, 25 bp, Homo sapien
tagaaatcgaagagctccacataac

SEQ ID NO: 4644533 - DNA, 25 bp, Homo sapien
ttcccacatgatagtagcaaagtca

SEQ ID NO: 4644534 - DNA, 25 bp, Homo sapien
gatatggcctttctcactcagtaga

SEQ ID NO: 4644535 - DNA, 25 bp, Homo sapien
cagttgcagtaatacgcatgcatgt

SEQ ID NO: 4644536 - DNA, 25 bp, Homo sapien
gggacagctagttaaaaactcatgc

SEQ ID NO: 4644537 - DNA, 25 bp, Homo sapien
agcaaattatatggccctgcccatt

SEQ ID NO: 4644538 - DNA, 25 bp, Homo sapien
gcccattcaaatatcgagttaaccc

SEQ ID NO: 4644539 - DNA, 25 bp, Homo sapien
ctttctataacatcttgcttctgtt

SEQ ID NO: 4644540 - DNA, 25 bp, Homo sapien
cctttctataacatcttgcttctgt

SEQ ID NO: 4644541 - DNA, 25 bp, Homo sapien
tcctttctataacatcttgcttctg

SEQ ID NO: 4644542 - DNA, 25 bp, Homo sapien
cctctatcattttgcgggtattacc

SEQ ID NO: 4644543 - DNA, 25 bp, Homo sapien
tgaagattctcgcagttttccgtgg

SEQ ID NO: 4644544 - DNA, 25 bp, Homo sapien
tcctctgtcggtcaagctcttcatt

SEQ ID NO: 4644545 - DNA, 25 bp, Homo sapien
ttatcaattatttcgccttcacata

SEQ ID NO: 4644546 - DNA, 25 bp, Homo sapien
aaacgtacaatatgatcgtccacac

SEQ ID NO: 4644547 - DNA, 25 bp, Homo sapien
tttcttagccataaaacagcatcat

SEQ ID NO: 4644548 - DNA, 25 bp, Homo sapien
gcatcatacgtgtcacggaatctct

SEQ ID NO: 4644549 - DNA, 25 bp, Homo sapien
cataagattgtcaaaacgtacaata

SEQ ID NO: 4644550 - DNA, 25 bp, Homo sapien
tactaccaagatgaacaaagtttct

SEQ ID NO: 4644551 - DNA, 25 bp, Homo sapien
tcacgaatcctgaaaggatgtcttc

SEQ ID NO: 4644552 - DNA, 25 bp, Homo sapien
ttaaacagtctggatggcaaacatc

SEQ ID NO: 4644553 - DNA, 25 bp, Homo sapien
ggcaaacatcttagtaaatccatgg

SEQ ID NO: 4644554 - DNA, 25 bp, Homo sapien
ggccacacttcactagacgatttat

SEQ ID NO: 4644555 - DNA, 25 bp, Homo sapien
cccaagtgtaatacacattcacagt

SEQ ID NO: 4644556 - DNA, 25 bp, Homo sapien
cagtttatgtggttccagtagtgac

SEQ ID NO: 4644557 - DNA, 25 bp, Homo sapien
tggccagtttatgtggttccagtag

SEQ ID NO: 4644558 - DNA, 25 bp, Homo sapien
ccaagtgtaatacacattcacagtt

SEQ ID NO: 4644559 - DNA, 25 bp, Homo sapien
caaaggctcttaagtcatttgatgg

SEQ ID NO: 4644560 - DNA, 25 bp, Homo sapien
ggctcttaagtcatttgatggaata

SEQ ID NO: 4644561 - DNA, 25 bp, Homo sapien
gactttcaaatacaaaggctcttaa

SEQ ID NO: 4644562 - DNA, 25 bp, Homo sapien
atacaaaggctcttaagtcatttga

SEQ ID NO: 4644563 - DNA, 25 bp, Homo sapien
tagcttgtgctcatctcgttgtgtc

SEQ ID NO: 4644564 - DNA, 25 bp, Homo sapien
tgaaagctagccaagatgtgaatgc

SEQ ID NO: 4644565 - DNA, 25 bp, Homo sapien
taaaacggcctatctgcaaaagaca

SEQ ID NO: 4644566 - DNA, 25 bp, Homo sapien
catgctaggctaatacaggcagttc

SEQ ID NO: 4644567 - DNA, 25 bp, Homo sapien
gcagattatcttgtattggactaac

SEQ ID NO: 4644568 - DNA, 25 bp, Homo sapien
cctactggcattcgtgggatggata

SEQ ID NO: 4644569 - DNA, 25 bp, Homo sapien
gatggataagaaactcgaacacggc

SEQ ID NO: 4644570 - DNA, 25 bp, Homo sapien
tatagttaccatactcctactggca

SEQ ID NO: 4644571 - DNA, 25 bp, Homo sapien
gaaggtgctttgtctgcatatgaac

SEQ ID NO: 4644572 - DNA, 25 bp, Homo sapien
catatgaactcttgggagcaataac

SEQ ID NO: 4644573 - DNA, 25 bp, Homo sapien
ctgcatatgaactcttgggagcaat

SEQ ID NO: 4644574 - DNA, 25 bp, Homo sapien
gatcttgaaggtgctttgtctgcat

SEQ ID NO: 4644575 - DNA, 25 bp, Homo sapien
tatcatggtcctgtgcctaaatttt

SEQ ID NO: 4644576 - DNA, 25 bp, Homo sapien
taactaacccactactttagcatct

SEQ ID NO: 4644577 - DNA, 25 bp, Homo sapien
ccttatattcgacttaagagatctt

SEQ ID NO: 4644578 - DNA, 25 bp, Homo sapien
gacttgaaacatcacatcgcatcac

SEQ ID NO: 4644579 - DNA, 25 bp, Homo sapien
aaataattctctcaaataagagaaa

SEQ ID NO: 4644580 - DNA, 25 bp, Homo sapien
aggtaactcattacaggatcaggtg

SEQ ID NO: 4644581 - DNA, 25 bp, Homo sapien
gtaactcattacaggatcaggtgca

SEQ ID NO: 4644582 - DNA, 25 bp, Homo sapien
aataattctctcaaataagagaaaa

SEQ ID NO: 4644583 - DNA, 25 bp, Homo sapien
cagcacattgaactgttatcttggg

SEQ ID NO: 4644584 - DNA, 25 bp, Homo sapien
agattctcccgcctgggtcttccaa

SEQ ID NO: 4644585 - DNA, 25 bp, Homo sapien
aaaaaggcggcccatacaactagca

SEQ ID NO: 4644586 - DNA, 25 bp, Homo sapien
tacgctactatacaactctcccaag

SEQ ID NO: 4644587 - DNA, 25 bp, Homo sapien
ttcttctgctgtataaatctgtttt

SEQ ID NO: 4644588 - DNA, 25 bp, Homo sapien
ctgtataaatctgttttaatcgggt

SEQ ID NO: 4644589 - DNA, 25 bp, Homo sapien
ctgctgtataaatctgttttaatcg

SEQ ID NO: 4644590 - DNA, 25 bp, Homo sapien
tttcttctgctgtataaatctgttt

SEQ ID NO: 4644591 - DNA, 25 bp, Homo sapien
tgctctaggtccacagtgacagtga

SEQ ID NO: 4644592 - DNA, 25 bp, Homo sapien
gctctaggtccacagtgacagtgag

SEQ ID NO: 4644593 - DNA, 25 bp, Homo sapien
tgtgctccagatgtttgcttgtttc

SEQ ID NO: 4644594 - DNA, 25 bp, Homo sapien
gtgctccagatgtttgcttgtttca

SEQ ID NO: 4644595 - DNA, 25 bp, Homo sapien
ttgtctaagttcattgtctttgtgc

SEQ ID NO: 4644596 - DNA, 25 bp, Homo sapien
tctgtatccactggcaagcttgaca

SEQ ID NO: 4644597 - DNA, 25 bp, Homo sapien
gaataaagtgagcttgtcatttcaa

SEQ ID NO: 4644598 - DNA, 25 bp, Homo sapien
atatctatgtgacttgatgaaccag

SEQ ID NO: 4644599 - DNA, 25 bp, Homo sapien
gatggaatcagtgatcaatgtgatc

SEQ ID NO: 4644600 - DNA, 25 bp, Homo sapien
aatattcttgaatggggtaggaaca

SEQ ID NO: 4644601 - DNA, 25 bp, Homo sapien
gaatattcttgaatggggtaggaac

SEQ ID NO: 4644602 - DNA, 25 bp, Homo sapien
tgaatggggtaggaacatgcaaaga

SEQ ID NO: 4644603 - DNA, 25 bp, Homo sapien
ttcttgaatggggtaggaacatgca

SEQ ID NO: 4644604 - DNA, 25 bp, Homo sapien
ggcccataaccgatcaatcaatata

SEQ ID NO: 4644605 - DNA, 25 bp, Homo sapien
tcacagatattaagtgttaagatgt

SEQ ID NO: 4644606 - DNA, 25 bp, Homo sapien
cttttcagatatatagtgcctggcc

SEQ ID NO: 4644607 - DNA, 25 bp, Homo sapien
tgttaagatgtgtttggtaccaaag

SEQ ID NO: 4644608 - DNA, 25 bp, Homo sapien
agaaatcagtgttaaacataagaat

SEQ ID NO: 4644609 - DNA, 25 bp, Homo sapien
agaattgatcccaaattcttaggtc

SEQ ID NO: 4644610 - DNA, 25 bp, Homo sapien
tgttaaacataagaattgatcccaa

SEQ ID NO: 4644611 - DNA, 25 bp, Homo sapien
gaattgatcccaaattcttaggtcc

SEQ ID NO: 4644612 - DNA, 25 bp, Homo sapien
gattttggtacttgcttttcgctct

SEQ ID NO: 4644613 - DNA, 25 bp, Homo sapien
caagtttcgctttttgaacatttat

SEQ ID NO: 4644614 - DNA, 25 bp, Homo sapien
agattgcaagtatcctgttccatca

SEQ ID NO: 4644615 - DNA, 25 bp, Homo sapien
tcttcaagattgcaagtatcctgtt

SEQ ID NO: 4644616 - DNA, 25 bp, Homo sapien
gtaagacggagttgtgaagatgcgg

SEQ ID NO: 4644617 - DNA, 25 bp, Homo sapien
ctctgtaagacggagttgtgaagat

SEQ ID NO: 4644618 - DNA, 25 bp, Homo sapien
aagacggagttgtgaagatgcggcc

SEQ ID NO: 4644619 - DNA, 25 bp, Homo sapien
ctgtaagacggagttgtgaagatgc

SEQ ID NO: 4644620 - DNA, 25 bp, Homo sapien
gataccatgctagtcttgatgctgc

SEQ ID NO: 4644621 - DNA, 25 bp, Homo sapien
ctttagagatgatcaggatgctggc

SEQ ID NO: 4644622 - DNA, 25 bp, Homo sapien
gtgagccccttagatcactcctgag

SEQ ID NO: 4644623 - DNA, 25 bp, Homo sapien
gaaagtctgtattactcgtgagccc

SEQ ID NO: 4644624 - DNA, 25 bp, Homo sapien
tctgcaaaggagtatcagttagttt

SEQ ID NO: 4644625 - DNA, 25 bp, Homo sapien
tgtagctctagttctcttcagtaag

SEQ ID NO: 4644626 - DNA, 25 bp, Homo sapien
cattgtcagacttataactatagaa

SEQ ID NO: 4644627 - DNA, 25 bp, Homo sapien
cagttagtttgagagttcacagggc

SEQ ID NO: 4644628 - DNA, 25 bp, Homo sapien
tatcttctcgagtgacctttggtag

SEQ ID NO: 4644629 - DNA, 25 bp, Homo sapien
catcatcgcgaagaatggaagcttt

SEQ ID NO: 4644630 - DNA, 25 bp, Homo sapien
gaagtacagtagtccaatcacacct

SEQ ID NO: 4644631 - DNA, 25 bp, Homo sapien
tccaagcagtaagatgaggcaatca

SEQ ID NO: 4644632 - DNA, 25 bp, Homo sapien
aattcccaccagtggcgtatgacag

SEQ ID NO: 4644633 - DNA, 25 bp, Homo sapien
tggcatctaccgaaaacaaaagttg

SEQ ID NO: 4644634 - DNA, 25 bp, Homo sapien
tagctcacagggactttacaaaaac

SEQ ID NO: 4644635 - DNA, 25 bp, Homo sapien
gagggccatataaagtctctgtcac

SEQ ID NO: 4644636 - DNA, 25 bp, Homo sapien
cctgcccatggtcaaaaacgaaata

SEQ ID NO: 4644637 - DNA, 25 bp, Homo sapien
caagtggtagcaatagttcctcaga

SEQ ID NO: 4644638 - DNA, 25 bp, Homo sapien
aaatcatgtgcaggtaaatggcagc

SEQ ID NO: 4644639 - DNA, 25 bp, Homo sapien
gttagtgacattaccaaagagaggc

SEQ ID NO: 4644640 - DNA, 25 bp, Homo sapien
ggttacatacttgcctagctctttt

SEQ ID NO: 4644641 - DNA, 25 bp, Homo sapien
gctcttttcataagttccttgcatt

SEQ ID NO: 4644642 - DNA, 25 bp, Homo sapien
gcatttctgcaataatctctgtcta

SEQ ID NO: 4644643 - DNA, 25 bp, Homo sapien
tgtctggtattcttgaggaagagtc

SEQ ID NO: 4644644 - DNA, 25 bp, Homo sapien
accaataccattgatctcttaagca

SEQ ID NO: 4644645 - DNA, 25 bp, Homo sapien
gacacatcatgtttttcacggcctg

SEQ ID NO: 4644646 - DNA, 25 bp, Homo sapien
actatatatgttccaactgtaccca

SEQ ID NO: 4644647 - DNA, 25 bp, Homo sapien
cagctctcattgaaccctaattaaa

SEQ ID NO: 4644648 - DNA, 25 bp, Homo sapien
ctgaattggtagaatgggtccagaa

SEQ ID NO: 4644649 - DNA, 25 bp, Homo sapien
gttgaatttcaccacagtactatct

SEQ ID NO: 4644650 - DNA, 25 bp, Homo sapien
cctgagaatctaattactttgacag

SEQ ID NO: 4644651 - DNA, 25 bp, Homo sapien
tatactgcacttatgaagaactaaa

SEQ ID NO: 4644652 - DNA, 25 bp, Homo sapien
gaggagttgtgtccatttggaatgg

SEQ ID NO: 4644653 - DNA, 25 bp, Homo sapien
ttgtgtccatttggaatggtgggta

SEQ ID NO: 4644654 - DNA, 25 bp, Homo sapien
gtccatttggaatggtgggtacttg

SEQ ID NO: 4644655 - DNA, 25 bp, Homo sapien
aggagttgtgtccatttggaatggt

SEQ ID NO: 4644656 - DNA, 25 bp, Homo sapien
tgtactggataacactttaaggcaa

SEQ ID NO: 4644657 - DNA, 25 bp, Homo sapien
gaagtatcagttcatgctacaggag

SEQ ID NO: 4644658 - DNA, 25 bp, Homo sapien
tgctggcacacaagaatacaaagga

SEQ ID NO: 4644659 - DNA, 25 bp, Homo sapien
gctacaggagagttaagagaattca

SEQ ID NO: 4644660 - DNA, 25 bp, Homo sapien
ggattcagtcccgtgaagcaggaag

SEQ ID NO: 4644661 - DNA, 25 bp, Homo sapien
ttcagtcccgtgaagcaggaagctc

SEQ ID NO: 4644662 - DNA, 25 bp, Homo sapien
gtaggattcagtcccgtgaagcagg

SEQ ID NO: 4644663 - DNA, 25 bp, Homo sapien
tgtaggattcagtcccgtgaagcag

SEQ ID NO: 4644664 - DNA, 25 bp, Homo sapien
agttcctcagttaactgttctattt

SEQ ID NO: 4644665 - DNA, 25 bp, Homo sapien
gttcctcagttaactgttctatttc

SEQ ID NO: 4644666 - DNA, 25 bp, Homo sapien
tagttcctcagttaactgttctatt

SEQ ID NO: 4644667 - DNA, 25 bp, Homo sapien
ttagttcctcagttaactgttctat

SEQ ID NO: 4644668 - DNA, 25 bp, Homo sapien
caccagcacactgcatggaactaaa

SEQ ID NO: 4644669 - DNA, 25 bp, Homo sapien
ttcaccagcacactgcatggaacta

SEQ ID NO: 4644670 - DNA, 25 bp, Homo sapien
cagcacactgcatggaactaaaaaa

SEQ ID NO: 4644671 - DNA, 25 bp, Homo sapien
cagctcttttaaaggattaagccac

SEQ ID NO: 4644672 - DNA, 25 bp, Homo sapien
gggattaggcataagccacagcacc

SEQ ID NO: 4644673 - DNA, 25 bp, Homo sapien
gtgggattaggcataagccacagca

SEQ ID NO: 4644674 - DNA, 25 bp, Homo sapien
aagtgggattaggcataagccacag

SEQ ID NO: 4644675 - DNA, 25 bp, Homo sapien
ggattaggcataagccacagcacct

SEQ ID NO: 4644676 - DNA, 25 bp, Homo sapien
tagctcctgaagtgccatcaagtat

SEQ ID NO: 4644677 - DNA, 25 bp, Homo sapien
gaatggacatctatttagctcctga

SEQ ID NO: 4644678 - DNA, 25 bp, Homo sapien
tcaagtataacatggtagaaacact

SEQ ID NO: 4644679 - DNA, 25 bp, Homo sapien
gttgagtactacttcgaaatttgac

SEQ ID NO: 4644680 - DNA, 25 bp, Homo sapien
tttacaggcagtatttacaaccatt

SEQ ID NO: 4644681 - DNA, 25 bp, Homo sapien
acaaccatttcaaacactctccgtt

SEQ ID NO: 4644682 - DNA, 25 bp, Homo sapien
ctctccgttcattgattgggtccat

SEQ ID NO: 4644683 - DNA, 25 bp, Homo sapien
aaacactctccgttcattgattggg

SEQ ID NO: 4644684 - DNA, 25 bp, Homo sapien
tttactcacagcactagatttagca

SEQ ID NO: 4644685 - DNA, 25 bp, Homo sapien
ttactcacagcactagatttagcaa

SEQ ID NO: 4644686 - DNA, 25 bp, Homo sapien
acatatctttgaatacatatgcttt

SEQ ID NO: 4644687 - DNA, 25 bp, Homo sapien
aaaacatatctttgaatacatatgc

SEQ ID NO: 4644688 - DNA, 25 bp, Homo sapien
ccagcatatgagggccattgtagac

SEQ ID NO: 4644689 - DNA, 25 bp, Homo sapien
taagaaggttgagtgaatgtaatac

SEQ ID NO: 4644690 - DNA, 25 bp, Homo sapien
tgagtgaatgtaatacggcgccgcc

SEQ ID NO: 4644691 - DNA, 25 bp, Homo sapien
taaattccatgtgtttggttccagc

SEQ ID NO: 4644692 - DNA, 25 bp, Homo sapien
gtgaatctccttttattcagttgag

SEQ ID NO: 4644693 - DNA, 25 bp, Homo sapien
agtgaatctccttttattcagttga

SEQ ID NO: 4644694 - DNA, 25 bp, Homo sapien
gttgagccatacttataaacagaat

SEQ ID NO: 4644695 - DNA, 25 bp, Homo sapien
attcagttgagccatacttataaac

SEQ ID NO: 4644696 - DNA, 25 bp, Homo sapien
cattgtaagaaaggccctataggct

SEQ ID NO: 4644697 - DNA, 25 bp, Homo sapien
gctcagggctaccatataagtaact

SEQ ID NO: 4644698 - DNA, 25 bp, Homo sapien
tcatggtcagagtgccaagaactca

SEQ ID NO: 4644699 - DNA, 25 bp, Homo sapien
tttgcatcatctagtggccaccttg

SEQ ID NO: 4644700 - DNA, 25 bp, Homo sapien
gagactctttccaggcaaaccaatg

SEQ ID NO: 4644701 - DNA, 25 bp, Homo sapien
tattaccaacaaagcaggatttccc

SEQ ID NO: 4644702 - DNA, 25 bp, Homo sapien
tagaaaatgcttgtcaccttaaggt

SEQ ID NO: 4644703 - DNA, 25 bp, Homo sapien
tggtggaacgcaaagtaattaacga

SEQ ID NO: 4644704 - DNA, 25 bp, Homo sapien
actggaattcattaacccactcctt

SEQ ID NO: 4644705 - DNA, 25 bp, Homo sapien
gcagaaatggtcaagtgaccctctt

SEQ ID NO: 4644706 - DNA, 25 bp, Homo sapien
tgggcagcttgtcccaaatctttcc

SEQ ID NO: 4644707 - DNA, 25 bp, Homo sapien
ctccttaaatttggcagaaatggtc

SEQ ID NO: 4644708 - DNA, 25 bp, Homo sapien
gatttataggcaaacacctgagaag

SEQ ID NO: 4644709 - DNA, 25 bp, Homo sapien
ttcttttgtaatgcgaggattctgg

SEQ ID NO: 4644710 - DNA, 25 bp, Homo sapien
cctgagaagaccctgtgattctttt

SEQ ID NO: 4644711 - DNA, 25 bp, Homo sapien
aagtgtggtcgtcttcaccttctca

SEQ ID NO: 4644712 - DNA, 25 bp, Homo sapien
gcagatagatttagcacagtactca

SEQ ID NO: 4644713 - DNA, 25 bp, Homo sapien
caagatatggttcaaataggactac

SEQ ID NO: 4644714 - DNA, 25 bp, Homo sapien
taggactactagagttcattgaaca

SEQ ID NO: 4644715 - DNA, 25 bp, Homo sapien
ggctttaaggtttagctccacatca

SEQ ID NO: 4644716 - DNA, 25 bp, Homo sapien
aatgtgtaaacatagggtgcctacc

SEQ ID NO: 4644717 - DNA, 25 bp, Homo sapien
tttaacattagggactgggagcagt

SEQ ID NO: 4644718 - DNA, 25 bp, Homo sapien
tttaaaacagggagctatggtgcac

SEQ ID NO: 4644719 - DNA, 25 bp, Homo sapien
tccatacgaaataggttaggctgcc

SEQ ID NO: 4644720 - DNA, 25 bp, Homo sapien
agcttttgactctgttgggttttat

SEQ ID NO: 4644721 - DNA, 25 bp, Homo sapien
gagagagcttttgactctgttgggt

SEQ ID NO: 4644722 - DNA, 25 bp, Homo sapien
cctaatgccactaggggagagagct

SEQ ID NO: 4644723 - DNA, 25 bp, Homo sapien
tatttgaatgtgtgcataacagtaa

SEQ ID NO: 4644724 - DNA, 25 bp, Homo sapien
gcagatgttctgtttggcaccacgt

SEQ ID NO: 4644725 - DNA, 25 bp, Homo sapien
catatgtccgctgggtgagttgacc

SEQ ID NO: 4644726 - DNA, 25 bp, Homo sapien
gattctgggccctttatgcttgctg

SEQ ID NO: 4644727 - DNA, 25 bp, Homo sapien
tgagttgacctgtggcctcgcacag

SEQ ID NO: 4644728 - DNA, 25 bp, Homo sapien
agaagaggcacacttgacggcacag

SEQ ID NO: 4644729 - DNA, 25 bp, Homo sapien
gtactcccaggaaacagacgcgtga

SEQ ID NO: 4644730 - DNA, 25 bp, Homo sapien
tgatcaagcgatcgaaaaaggcgct

SEQ ID NO: 4644731 - DNA, 25 bp, Homo sapien
caacgctttgtgaggtgctgcccgt

SEQ ID NO: 4644732 - DNA, 25 bp, Homo sapien
ccattcgtttcaggactgcccacaa

SEQ ID NO: 4644733 - DNA, 25 bp, Homo sapien
ctccattcgtttcaggactgcccac

SEQ ID NO: 4644734 - DNA, 25 bp, Homo sapien
aggactgcccacaaaaaaatgggct

SEQ ID NO: 4644735 - DNA, 25 bp, Homo sapien
tccattcgtttcaggactgcccaca

SEQ ID NO: 4644736 - DNA, 25 bp, Homo sapien
taacaaggacactcctttgttgggc

SEQ ID NO: 4644737 - DNA, 25 bp, Homo sapien
tgttcttataagagggccatgtccc

SEQ ID NO: 4644738 - DNA, 25 bp, Homo sapien
tgtgcatttccacctctgaaggaag

SEQ ID NO: 4644739 - DNA, 25 bp, Homo sapien
tgttgggcaaccctactgttactgt

SEQ ID NO: 4644740 - DNA, 25 bp, Homo sapien
ctgcacacctcttccgtaatgtgta

SEQ ID NO: 4644741 - DNA, 25 bp, Homo sapien
tggtggttctgcacatgagggtaat

SEQ ID NO: 4644742 - DNA, 25 bp, Homo sapien
cctcttccgtaatgtgtattggtgg

SEQ ID NO: 4644743 - DNA, 25 bp, Homo sapien
ccgtaatgtgtattggtggttctgc

SEQ ID NO: 4644744 - DNA, 25 bp, Homo sapien
tctctctctaattcggggtcccttg

SEQ ID NO: 4644745 - DNA, 25 bp, Homo sapien
cagggttctctctctaattcggggt

SEQ ID NO: 4644746 - DNA, 25 bp, Homo sapien
tgctgctgggggacaatctttttct

SEQ ID NO: 4644747 - DNA, 25 bp, Homo sapien
gtttcagcctcgtgggagagccatc

SEQ ID NO: 4644748 - DNA, 25 bp, Homo sapien
caaagacgagctgtttatatggcag

SEQ ID NO: 4644749 - DNA, 25 bp, Homo sapien
gacgagctgtttatatggcagttcc

SEQ ID NO: 4644750 - DNA, 25 bp, Homo sapien
gagctgtttatatggcagttcccac

SEQ ID NO: 4644751 - DNA, 25 bp, Homo sapien
ctatgcaaagacgagctgtttatat

SEQ ID NO: 4644752 - DNA, 25 bp, Homo sapien
cagtggactcgggaaaaagtgtctc

SEQ ID NO: 4644753 - DNA, 25 bp, Homo sapien
taggaacgagcgcaactgactagga

SEQ ID NO: 4644754 - DNA, 25 bp, Homo sapien
gtttccatttcgaaccgcgctgcgg

SEQ ID NO: 4644755 - DNA, 25 bp, Homo sapien
tacagagtgcatacaggttagcggc

SEQ ID NO: 4644756 - DNA, 25 bp, Homo sapien
tcttcgcgtttacaagtgtcgagcg

SEQ ID NO: 4644757 - DNA, 25 bp, Homo sapien
ttcggaacgcccttgtgattggccg

SEQ ID NO: 4644758 - DNA, 25 bp, Homo sapien
aagatgtgtccagtttcactacagc

SEQ ID NO: 4644759 - DNA, 25 bp, Homo sapien
tgtcgagcgcttgctttcggaacgc

SEQ ID NO: 4644760 - DNA, 25 bp, Homo sapien
taaaaaggctatgctgtaaaaccag

SEQ ID NO: 4644761 - DNA, 25 bp, Homo sapien
aacatctgccccaaagtatgctgca

SEQ ID NO: 4644762 - DNA, 25 bp, Homo sapien
caaagatgggatgtttcaatggaag

SEQ ID NO: 4644763 - DNA, 25 bp, Homo sapien
gaggaattaagagatatgacaagca

SEQ ID NO: 4644764 - DNA, 25 bp, Homo sapien
catatgttccgtgtgcctaggtggg

SEQ ID NO: 4644765 - DNA, 25 bp, Homo sapien
cctgctttcaacaaaatgaacactg

SEQ ID NO: 4644766 - DNA, 25 bp, Homo sapien
tggaagctttatccctttagcctct

SEQ ID NO: 4644767 - DNA, 25 bp, Homo sapien
acactggtttcctccacatatgttc

SEQ ID NO: 4644768 - DNA, 25 bp, Homo sapien
atttcaaaatccaggaacatcgcca

SEQ ID NO: 4644769 - DNA, 25 bp, Homo sapien
ctgattgtatttcaaaatccaggaa

SEQ ID NO: 4644770 - DNA, 25 bp, Homo sapien
tttcaaaatccaggaacatcgccat

SEQ ID NO: 4644771 - DNA, 25 bp, Homo sapien
attgtatttcaaaatccaggaacat

SEQ ID NO: 4644772 - DNA, 25 bp, Homo sapien
gggcgttccaccagatcgggcttta

SEQ ID NO: 4644773 - DNA, 25 bp, Homo sapien
ttagctgtcattatggccacgggcg

SEQ ID NO: 4644774 - DNA, 25 bp, Homo sapien
tgcatatgcatgaacgggcggcctt

SEQ ID NO: 4644775 - DNA, 25 bp, Homo sapien
gggctgcgagctaaacttatcctcc

SEQ ID NO: 4644776 - DNA, 25 bp, Homo sapien
tctccctggacaggtggccactcgt

SEQ ID NO: 4644777 - DNA, 25 bp, Homo sapien
ggtggccactcgtgggggtggccca

SEQ ID NO: 4644778 - DNA, 25 bp, Homo sapien
ggcccagaatcctggccaaaaaaga

SEQ ID NO: 4644779 - DNA, 25 bp, Homo sapien
tccctggacaggtggccactcgtgg

SEQ ID NO: 4644780 - DNA, 25 bp, Homo sapien
ggtgtgtccctaggagcaggttttg

SEQ ID NO: 4644781 - DNA, 25 bp, Homo sapien
aaaggttttgccagactccataagg

SEQ ID NO: 4644782 - DNA, 25 bp, Homo sapien
ttccccgctgtgaagcaagctttga

SEQ ID NO: 4644783 - DNA, 25 bp, Homo sapien
tggtcggcagagaattttgggcacc

SEQ ID NO: 4644784 - DNA, 25 bp, Homo sapien
tctctcgtgaccatggagagaaaag

SEQ ID NO: 4644785 - DNA, 25 bp, Homo sapien
tggaccagaagtccccagtaatact

SEQ ID NO: 4644786 - DNA, 25 bp, Homo sapien
gaagactagacttaagcataaagca

SEQ ID NO: 4644787 - DNA, 25 bp, Homo sapien
gcataaagcaagttcatctctcgtg

SEQ ID NO: 4644788 - DNA, 25 bp, Homo sapien
tatagtattttccagatttaaactg

SEQ ID NO: 4644789 - DNA, 25 bp, Homo sapien
ttatatagtattttccagatttaaa

SEQ ID NO: 4644790 - DNA, 25 bp, Homo sapien
tagtattttccagatttaaactgaa

SEQ ID NO: 4644791 - DNA, 25 bp, Homo sapien
tatatagtattttccagatttaaac

SEQ ID NO: 4644792 - DNA, 25 bp, Homo sapien
ggcttatgcacttcctcagtaagtg

SEQ ID NO: 4644793 - DNA, 25 bp, Homo sapien
cagaactgaaatgctagagtccagg

SEQ ID NO: 4644794 - DNA, 25 bp, Homo sapien
gtttcatagaactgacatacgacag

SEQ ID NO: 4644795 - DNA, 25 bp, Homo sapien
gcctcctcatgagaacataccaggg

SEQ ID NO: 4644796 - DNA, 25 bp, Homo sapien
agattgccgagagagtgtagatttc

SEQ ID NO: 4644797 - DNA, 25 bp, Homo sapien
agccacagctgcattaaagattgcc

SEQ ID NO: 4644798 - DNA, 25 bp, Homo sapien
gtagatttctggctgacgcccccct

SEQ ID NO: 4644799 - DNA, 25 bp, Homo sapien
gctgcattaaagattgccgagagag

SEQ ID NO: 4644800 - DNA, 25 bp, Homo sapien
ccagtccgacttcacagagaaaaca

SEQ ID NO: 4644801 - DNA, 25 bp, Homo sapien
atgctaccatgctccagtccgactt

SEQ ID NO: 4644802 - DNA, 25 bp, Homo sapien
cagatgccactaggcatgaattccc

SEQ ID NO: 4644803 - DNA, 25 bp, Homo sapien
tctccaaattttcagctaggctcac

SEQ ID NO: 4644804 - DNA, 25 bp, Homo sapien
agacaaacccctgccactctactca

SEQ ID NO: 4644805 - DNA, 25 bp, Homo sapien
atcccagtgacaggcattccagaca

SEQ ID NO: 4644806 - DNA, 25 bp, Homo sapien
cactctactcatgtcctccgccata

SEQ ID NO: 4644807 - DNA, 25 bp, Homo sapien
tgtcctccgccatattccccatcac

SEQ ID NO: 4644808 - DNA, 25 bp, Homo sapien
cactggtgccagcaactataattac

SEQ ID NO: 4644809 - DNA, 25 bp, Homo sapien
tctggcctacaaagacgatgctgca

SEQ ID NO: 4644810 - DNA, 25 bp, Homo sapien
cccttccaattatggtgaatactgg

SEQ ID NO: 4644811 - DNA, 25 bp, Homo sapien
gggcctgagcagccaacactggtgc

SEQ ID NO: 4644812 - DNA, 25 bp, Homo sapien
tcaagcctctaatgactcccagaac

SEQ ID NO: 4644813 - DNA, 25 bp, Homo sapien
agctcttcaagcctctaatgactcc

SEQ ID NO: 4644814 - DNA, 25 bp, Homo sapien
gagggcctgctaaacagctcttcaa

SEQ ID NO: 4644815 - DNA, 25 bp, Homo sapien
ccaaaagagggcctgctaaacagct

SEQ ID NO: 4644816 - DNA, 25 bp, Homo sapien
gtgttgcatgtataaggtaaggcca

SEQ ID NO: 4644817 - DNA, 25 bp, Homo sapien
gacatctgggtcatccagtctttca

SEQ ID NO: 4644818 - DNA, 25 bp, Homo sapien
cttccacaaatgaaagtgttgcatg

SEQ ID NO: 4644819 - DNA, 25 bp, Homo sapien
tttcatccaagcaggccctctctcc

SEQ ID NO: 4644820 - DNA, 25 bp, Homo sapien
tattgcttttcctatggtgcatgcc

SEQ ID NO: 4644821 - DNA, 25 bp, Homo sapien
ttactcttccaacctggttccactg

SEQ ID NO: 4644822 - DNA, 25 bp, Homo sapien
acccctgcgcttaacacctgaacag

SEQ ID NO: 4644823 - DNA, 25 bp, Homo sapien
tggaggtgtgagtctcattattgct

SEQ ID NO: 4644824 - DNA, 25 bp, Homo sapien
ccttgtccaggtctctaacacctct

SEQ ID NO: 4644825 - DNA, 25 bp, Homo sapien
caggtctctaacacctctcacctgc

SEQ ID NO: 4644826 - DNA, 25 bp, Homo sapien
ttgtccaggtctctaacacctctca

SEQ ID NO: 4644827 - DNA, 25 bp, Homo sapien
caccttgtccaggtctctaacacct

SEQ ID NO: 4644828 - DNA, 25 bp, Homo sapien
ctgttaagcttggtgagggatgcat

SEQ ID NO: 4644829 - DNA, 25 bp, Homo sapien
tggtgagggatgcatgaggcaggag

SEQ ID NO: 4644830 - DNA, 25 bp, Homo sapien
taagcttggtgagggatgcatgagg

SEQ ID NO: 4644831 - DNA, 25 bp, Homo sapien
agcttggtgagggatgcatgaggca

SEQ ID NO: 4644832 - DNA, 25 bp, Homo sapien
tgaagggcggagagccaaaaagttc

SEQ ID NO: 4644833 - DNA, 25 bp, Homo sapien
aattgtaaaacaacacagcaggcaa

SEQ ID NO: 4644834 - DNA, 25 bp, Homo sapien
gcctgagcttcttcagagcattgta

SEQ ID NO: 4644835 - DNA, 25 bp, Homo sapien
aactctggtgctatttgtagctccc

SEQ ID NO: 4644836 - DNA, 25 bp, Homo sapien
ctaggccaaaatccgagagatcacc

SEQ ID NO: 4644837 - DNA, 25 bp, Homo sapien
gatcaccacgatttcaacgatttgg

SEQ ID NO: 4644838 - DNA, 25 bp, Homo sapien
tccgagagatcaccacgatttcaac

SEQ ID NO: 4644839 - DNA, 25 bp, Homo sapien
aaactcagttcacagaagagaacat

SEQ ID NO: 4644840 - DNA, 25 bp, Homo sapien
agtaaacattgttaaaaggcttgat

SEQ ID NO: 4644841 - DNA, 25 bp, Homo sapien
taaacattgttaaaaggcttgatgg

SEQ ID NO: 4644842 - DNA, 25 bp, Homo sapien
cacaacatataagtaaacattgtta

SEQ ID NO: 4644843 - DNA, 25 bp, Homo sapien
acattgttaaaaggcttgatggaaa

SEQ ID NO: 4644844 - DNA, 25 bp, Homo sapien
tccatgtcttcttatatccaatctt

SEQ ID NO: 4644845 - DNA, 25 bp, Homo sapien
tgtccatgtcttcttatatccaatc

SEQ ID NO: 4644846 - DNA, 25 bp, Homo sapien
gtccatgtcttcttatatccaatct

SEQ ID NO: 4644847 - DNA, 25 bp, Homo sapien
ccatgtcttcttatatccaatctta

SEQ ID NO: 4644848 - DNA, 25 bp, Homo sapien
gtccttcatgtcacctccatactgg

SEQ ID NO: 4644849 - DNA, 25 bp, Homo sapien
atgtcacctccatactggtcctctg

SEQ ID NO: 4644850 - DNA, 25 bp, Homo sapien
tccttcatgtcacctccatactggt

SEQ ID NO: 4644851 - DNA, 25 bp, Homo sapien
ttcatgtcacctccatactggtcct

SEQ ID NO: 4644852 - DNA, 25 bp, Homo sapien
tcagccacggtcataatctcacagc

SEQ ID NO: 4644853 - DNA, 25 bp, Homo sapien
tcattctcagccacggtcataatct

SEQ ID NO: 4644854 - DNA, 25 bp, Homo sapien
gcttctctcagttctagccatcttt

SEQ ID NO: 4644855 - DNA, 25 bp, Homo sapien
ctagccatctttgaaccttctccag

SEQ ID NO: 4644856 - DNA, 25 bp, Homo sapien
ttgacaactctgattaaatccctta

SEQ ID NO: 4644857 - DNA, 25 bp, Homo sapien
cttgacaactctgattaaatccctt

SEQ ID NO: 4644858 - DNA, 25 bp, Homo sapien
tgacaactctgattaaatcccttac

SEQ ID NO: 4644859 - DNA, 25 bp, Homo sapien
ccttgacaactctgattaaatccct

SEQ ID NO: 4644860 - DNA, 25 bp, Homo sapien
ctgggactcatcccaatctattttc

SEQ ID NO: 4644861 - DNA, 25 bp, Homo sapien
gactcatcccaatctattttctcac

SEQ ID NO: 4644862 - DNA, 25 bp, Homo sapien
attagacttagttcttggggaatca

SEQ ID NO: 4644863 - DNA, 25 bp, Homo sapien
gggactcatcccaatctattttctc

SEQ ID NO: 4644864 - DNA, 25 bp, Homo sapien
tcctcatcctgacagagaccaccag

SEQ ID NO: 4644865 - DNA, 25 bp, Homo sapien
atcctgacagagaccaccagagctg

SEQ ID NO: 4644866 - DNA, 25 bp, Homo sapien
ctcatcctgacagagaccaccagag

SEQ ID NO: 4644867 - DNA, 25 bp, Homo sapien
ctgctgttggggctctttctcctca

SEQ ID NO: 4644868 - DNA, 25 bp, Homo sapien
gttttgacaacaagtaatccatctc

SEQ ID NO: 4644869 - DNA, 25 bp, Homo sapien
tgacaacaagtaatccatctcatcc

SEQ ID NO: 4644870 - DNA, 25 bp, Homo sapien
aagtaatccatctcatccgactcac

SEQ ID NO: 4644871 - DNA, 25 bp, Homo sapien
caacaagtaatccatctcatccgac

SEQ ID NO: 4644872 - DNA, 25 bp, Homo sapien
ttgtgagcagcaagccctcgcccat

SEQ ID NO: 4644873 - DNA, 25 bp, Homo sapien
gcagcaagccctcgcccatcctcct

SEQ ID NO: 4644874 - DNA, 25 bp, Homo sapien
tgacagctgagccatggtattgtga

SEQ ID NO: 4644875 - DNA, 25 bp, Homo sapien
cagctgagccatggtattgtgagca

SEQ ID NO: 4644876 - DNA, 25 bp, Homo sapien
tggtaagttcacctgtttatctccc

SEQ ID NO: 4644877 - DNA, 25 bp, Homo sapien
caagcgttgcatttgtcctctatca

SEQ ID NO: 4644878 - DNA, 25 bp, Homo sapien
cagcaattgtccttctacgcaatac

SEQ ID NO: 4644879 - DNA, 25 bp, Homo sapien
gagagccctggtccctagcttagtg

SEQ ID NO: 4644880 - DNA, 25 bp, Homo sapien
ctagacatgaaccaggaggattttc

SEQ ID NO: 4644881 - DNA, 25 bp, Homo sapien
taagccttataatggcaggtcatct

SEQ ID NO: 4644882 - DNA, 25 bp, Homo sapien
tttctcctcagaaacctgttgtagg

SEQ ID NO: 4644883 - DNA, 25 bp, Homo sapien
aaacctgttgtaggtattgtgacaa

SEQ ID NO: 4644884 - DNA, 25 bp, Homo sapien
gggccggatccagaaaacacaaatg

SEQ ID NO: 4644885 - DNA, 25 bp, Homo sapien
gcagcattcagtcccaaaggcaata

SEQ ID NO: 4644886 - DNA, 25 bp, Homo sapien
ccatctgcacatagactgagaggct

SEQ ID NO: 4644887 - DNA, 25 bp, Homo sapien
gctgcaaattcaaacacatggaggg

SEQ ID NO: 4644888 - DNA, 25 bp, Homo sapien
tggtgaccaggtaatccagatggca

SEQ ID NO: 4644889 - DNA, 25 bp, Homo sapien
ggctagaagtccataggctttgtaa

SEQ ID NO: 4644890 - DNA, 25 bp, Homo sapien
taaagagtgtcagtgccaatcagga

SEQ ID NO: 4644891 - DNA, 25 bp, Homo sapien
aaagcaacgtgactgtttctacagg

SEQ ID NO: 4644892 - DNA, 25 bp, Homo sapien
gaagtcaaagatccagattccttct

SEQ ID NO: 4644893 - DNA, 25 bp, Homo sapien
cacaaaatagatgcctcacctccag

SEQ ID NO: 4644894 - DNA, 25 bp, Homo sapien
tcatggtcacaaaatagatgcctca

SEQ ID NO: 4644895 - DNA, 25 bp, Homo sapien
agagctcaacaatggctcattgaag

SEQ ID NO: 4644896 - DNA, 25 bp, Homo sapien
tgaaatcccatccatcaggagcaga

SEQ ID NO: 4644897 - DNA, 25 bp, Homo sapien
gcacacttttggaatggaaatgctg

SEQ ID NO: 4644898 - DNA, 25 bp, Homo sapien
tgcccatttatccactgcagttagg

SEQ ID NO: 4644899 - DNA, 25 bp, Homo sapien
gaagaacaggtgtggctatgagctc

SEQ ID NO: 4644900 - DNA, 25 bp, Homo sapien
gccagctggcactcgagcgatttaa

SEQ ID NO: 4644901 - DNA, 25 bp, Homo sapien
ttaacgcctagacgcatattccttc

SEQ ID NO: 4644902 - DNA, 25 bp, Homo sapien
tcttgaccaatgttgtggatttccc

SEQ ID NO: 4644903 - DNA, 25 bp, Homo sapien
ggttgtctgcacttcggtcttccca

SEQ ID NO: 4644904 - DNA, 25 bp, Homo sapien
gatgctcttcaactatatcgtgtta

SEQ ID NO: 4644905 - DNA, 25 bp, Homo sapien
ggaacgctggccgtccacccaggaa

SEQ ID NO: 4644906 - DNA, 25 bp, Homo sapien
caggaatggatcgtaatctcctata

SEQ ID NO: 4644907 - DNA, 25 bp, Homo sapien
actatatcgtgttagtgaagatgga

SEQ ID NO: 4644908 - DNA, 25 bp, Homo sapien
gactcccgagagcagaaatcagtag

SEQ ID NO: 4644909 - DNA, 25 bp, Homo sapien
ttcaggccgaacttaaggaggcagc

SEQ ID NO: 4644910 - DNA, 25 bp, Homo sapien
aatgtacagagaaaacttcaggccg

SEQ ID NO: 4644911 - DNA, 25 bp, Homo sapien
gattggagacacttgagacacgctg

SEQ ID NO: 4644912 - DNA, 25 bp, Homo sapien
taagtgccagatgctacctgacttg

SEQ ID NO: 4644913 - DNA, 25 bp, Homo sapien
gagtgtctaagaaggtctcagttca

SEQ ID NO: 4644914 - DNA, 25 bp, Homo sapien
tccagccggagtccacaaaggaatg

SEQ ID NO: 4644915 - DNA, 25 bp, Homo sapien
catggtgccaccaatttgaagtgtc

SEQ ID NO: 4644916 - DNA, 25 bp, Homo sapien
atttgtcttcgtctattcaggctgc

SEQ ID NO: 4644917 - DNA, 25 bp, Homo sapien
ttcatttgtcttcgtctattcaggc

SEQ ID NO: 4644918 - DNA, 25 bp, Homo sapien
gctgctacgacaaaataccatcagc

SEQ ID NO: 4644919 - DNA, 25 bp, Homo sapien
acgacaaaataccatcagcaggatg

SEQ ID NO: 4644920 - DNA, 25 bp, Homo sapien
gaggctaaggtgagcccaagagttc

SEQ ID NO: 4644921 - DNA, 25 bp, Homo sapien
gtccgcaactccctcatcatttaag

SEQ ID NO: 4644922 - DNA, 25 bp, Homo sapien
cagcagatggtatcccctgttacta

SEQ ID NO: 4644923 - DNA, 25 bp, Homo sapien
aacatgtaatcactagggccgtgac

SEQ ID NO: 4644924 - DNA, 25 bp, Homo sapien
gatgtcttacctcaagtgggccctg

SEQ ID NO: 4644925 - DNA, 25 bp, Homo sapien
gaggctaggtgtctaacccaggcaa

SEQ ID NO: 4644926 - DNA, 25 bp, Homo sapien
cagataagcagtaggagaatgggcc

SEQ ID NO: 4644927 - DNA, 25 bp, Homo sapien
tgactaacctgaacctaatcgggag

SEQ ID NO: 4644928 - DNA, 25 bp, Homo sapien
ccaggcaaggcgtaattagcaccaa

SEQ ID NO: 4644929 - DNA, 25 bp, Homo sapien
tgattagacagaatgcaatctagat

SEQ ID NO: 4644930 - DNA, 25 bp, Homo sapien
caatctagatgacctctagttccca

SEQ ID NO: 4644931 - DNA, 25 bp, Homo sapien
gatgacctctagttcccatccggca

SEQ ID NO: 4644932 - DNA, 25 bp, Homo sapien
gatctgattagacagaatgcaatct

SEQ ID NO: 4644933 - DNA, 25 bp, Homo sapien
gtgggctgcaggctacttttactct

SEQ ID NO: 4644934 - DNA, 25 bp, Homo sapien
ctacttttactctggagctaacagg

SEQ ID NO: 4644935 - DNA, 25 bp, Homo sapien
ctctggagctaacaggaagacagct

SEQ ID NO: 4644936 - DNA, 25 bp, Homo sapien
agaaacagaaattttgtcagcaggg

SEQ ID NO: 4644937 - DNA, 25 bp, Homo sapien
tgattagacagaatgcaatctagat

SEQ ID NO: 4644938 - DNA, 25 bp, Homo sapien
caatctagatgacctctagttccca

SEQ ID NO: 4644939 - DNA, 25 bp, Homo sapien
gatctgattagacagaatgcaatct

SEQ ID NO: 4644940 - DNA, 25 bp, Homo sapien
gatgacctctagttcccatccggca

SEQ ID NO: 4644941 - DNA, 25 bp, Homo sapien
ctctggagctaacaggaagacagct

SEQ ID NO: 4644942 - DNA, 25 bp, Homo sapien
gtgggctgcaggctacttttactct

SEQ ID NO: 4644943 - DNA, 25 bp, Homo sapien
agaaacagaaattttgtcagcaggg

SEQ ID NO: 4644944 - DNA, 25 bp, Homo sapien
ctacttttactctggagctaacagg

SEQ ID NO: 4644945 - DNA, 25 bp, Homo sapien
tgctctacttcgattccagtgccat

SEQ ID NO: 4644946 - DNA, 25 bp, Homo sapien
tctacttcgattccagtgccatcat

SEQ ID NO: 4644947 - DNA, 25 bp, Homo sapien
tgcctgctctacttcgattccagtg

SEQ ID NO: 4644948 - DNA, 25 bp, Homo sapien
atctgcctgctctacttcgattcca

SEQ ID NO: 4644949 - DNA, 25 bp, Homo sapien
aatgtggacattacctgaaacttct

SEQ ID NO: 4644950 - DNA, 25 bp, Homo sapien
ttttctgctagtcctccaacttttc

SEQ ID NO: 4644951 - DNA, 25 bp, Homo sapien
acttttctgctagtcctccaacttt

SEQ ID NO: 4644952 - DNA, 25 bp, Homo sapien
tgtacttttctgctagtcctccaac

SEQ ID NO: 4644953 - DNA, 25 bp, Homo sapien
ctgctagtcctccaacttttctgtt

SEQ ID NO: 4644954 - DNA, 25 bp, Homo sapien
ccaaccccagactggggcagtacat

SEQ ID NO: 4644955 - DNA, 25 bp, Homo sapien
ctctatcgccactgccaaaccacca

SEQ ID NO: 4644956 - DNA, 25 bp, Homo sapien
tcctctatcgccactgccaaaccac

SEQ ID NO: 4644957 - DNA, 25 bp, Homo sapien
cttcctctatcgccactgccaaacc

SEQ ID NO: 4644958 - DNA, 25 bp, Homo sapien
gagaaatgttgtctagcctgtcact

SEQ ID NO: 4644959 - DNA, 25 bp, Homo sapien
tttgcctgataatgctcaaccgaag

SEQ ID NO: 4644960 - DNA, 25 bp, Homo sapien
caatcagtgagcaagtacttcaccc

SEQ ID NO: 4644961 - DNA, 25 bp, Homo sapien
tcaaccgaagtgtcagactgcagag

SEQ ID NO: 4644962 - DNA, 25 bp, Homo sapien
agctccttttggtagaatggagcct

SEQ ID NO: 4644963 - DNA, 25 bp, Homo sapien
tctcccacatacagctccttttggt

SEQ ID NO: 4644964 - DNA, 25 bp, Homo sapien
ctccttttggtagaatggagccttc

SEQ ID NO: 4644965 - DNA, 25 bp, Homo sapien
ccttttggtagaatggagccttcat

SEQ ID NO: 4644966 - DNA, 25 bp, Homo sapien
ggtatcctcctgggcccacattcac

SEQ ID NO: 4644967 - DNA, 25 bp, Homo sapien
ctggtatcctcctgggcccacattc

SEQ ID NO: 4644968 - DNA, 25 bp, Homo sapien
cctggtatcctcctgggcccacatt

SEQ ID NO: 4644969 - DNA, 25 bp, Homo sapien
tggtatcctcctgggcccacattca

SEQ ID NO: 4644970 - DNA, 25 bp, Homo sapien
gaggcaagcagaggacttcctgatc

SEQ ID NO: 4644971 - DNA, 25 bp, Homo sapien
ctcctgatcatgtacccataggaca

SEQ ID NO: 4644972 - DNA, 25 bp, Homo sapien
cctgatcatgtacccataggacagg

SEQ ID NO: 4644973 - DNA, 25 bp, Homo sapien
gaggacttcctgatcgcgtacccat

SEQ ID NO: 4644974 - DNA, 25 bp, Homo sapien
ttgcttacttctggcaatccgcttc

SEQ ID NO: 4644975 - DNA, 25 bp, Homo sapien
cagctgtgtttgacataccttcttt

SEQ ID NO: 4644976 - DNA, 25 bp, Homo sapien
gctgtgtttgacataccttcttttc

SEQ ID NO: 4644977 - DNA, 25 bp, Homo sapien
ttctcttgcttacttctggcaatcc

SEQ ID NO: 4644978 - DNA, 25 bp, Homo sapien
ctattcacagggcctaggagttggg

SEQ ID NO: 4644979 - DNA, 25 bp, Homo sapien
tattcacagggcctaggagttgggt

SEQ ID NO: 4644980 - DNA, 25 bp, Homo sapien
cagggcctaggagttgggtgccttt

SEQ ID NO: 4644981 - DNA, 25 bp, Homo sapien
taggagttgggtgcctttctccctc

SEQ ID NO: 4644982 - DNA, 25 bp, Homo sapien
tatttgactgtgctctgcgactgca

SEQ ID NO: 4644983 - DNA, 25 bp, Homo sapien
aattcaggaggctggacagcccctt

SEQ ID NO: 4644984 - DNA, 25 bp, Homo sapien
tcatcaaatttagctcaaggctcac

SEQ ID NO: 4644985 - DNA, 25 bp, Homo sapien
tgccacttaggcctgaaaacataca

SEQ ID NO: 4644986 - DNA, 25 bp, Homo sapien
tacatccaaaataataccacactta

SEQ ID NO: 4644987 - DNA, 25 bp, Homo sapien
acatccaaaataataccacacttat

SEQ ID NO: 4644988 - DNA, 25 bp, Homo sapien
agttccaccaacgatgctccacgta

SEQ ID NO: 4644989 - DNA, 25 bp, Homo sapien
cccattgtaacagttccaccaacga

SEQ ID NO: 4644990 - DNA, 25 bp, Homo sapien
gaactccttgggagttcccattgta

SEQ ID NO: 4644991 - DNA, 25 bp, Homo sapien
cacgtaatatctactgaatcagtgc

SEQ ID NO: 4644992 - DNA, 25 bp, Homo sapien
tgtacaatataaagtaaaggcacaa

SEQ ID NO: 4644993 - DNA, 25 bp, Homo sapien
caaaggtggtagaagtaagcactgt

SEQ ID NO: 4644994 - DNA, 25 bp, Homo sapien
cttcaaacccttgaccctatctctt

SEQ ID NO: 4644995 - DNA, 25 bp, Homo sapien
agcactgtagacccggggttaagat

SEQ ID NO: 4644996 - DNA, 25 bp, Homo sapien
tcctggctacatgttaggtccccac

SEQ ID NO: 4644997 - DNA, 25 bp, Homo sapien
tggctacatgttaggtccccaccca

SEQ ID NO: 4644998 - DNA, 25 bp, Homo sapien
cctggctacatgttaggtccccacc

SEQ ID NO: 4644999 - DNA, 25 bp, Homo sapien
ggctacatgttaggtccccacccat

SEQ ID NO: 4645000 - DNA, 25 bp, Homo sapien
aggagagaacggacaatgacatagg

SEQ ID NO: 4645001 - DNA, 25 bp, Homo sapien
ccagaaggagagaacggacaatgac

SEQ ID NO: 4645002 - DNA, 25 bp, Homo sapien
tactgagccactctttatccaggtc

SEQ ID NO: 4645003 - DNA, 25 bp, Homo sapien
tgagccactctttatccaggtcaag

SEQ ID NO: 4645004 - DNA, 25 bp, Homo sapien
tctttctgaatcttacaattctttg

SEQ ID NO: 4645005 - DNA, 25 bp, Homo sapien
ctttctgaatcttacaattctttgc

SEQ ID NO: 4645006 - DNA, 25 bp, Homo sapien
tgaggccagatctgcagtaggcatt

SEQ ID NO: 4645007 - DNA, 25 bp, Homo sapien
gctggcactggatgacagcctgtgc

SEQ ID NO: 4645008 - DNA, 25 bp, Homo sapien
tgtcccgaaatgatcagagtggagg

SEQ ID NO: 4645009 - DNA, 25 bp, Homo sapien
catcttgctctttgagttctctgag

SEQ ID NO: 4645010 - DNA, 25 bp, Homo sapien
ccccgaggatgtatggtgatgtgca

SEQ ID NO: 4645011 - DNA, 25 bp, Homo sapien
gatctcctggaaacgactctctttg

SEQ ID NO: 4645012 - DNA, 25 bp, Homo sapien
gatgtgcagttgacagcagacaagc

SEQ ID NO: 4645013 - DNA, 25 bp, Homo sapien
ggtgcagtgttgctcttcgaaacca

SEQ ID NO: 4645014 - DNA, 25 bp, Homo sapien
tgtggttgttgatccaggagcatcc

SEQ ID NO: 4645015 - DNA, 25 bp, Homo sapien
ctttgtgacttgtggttgttgatcc

SEQ ID NO: 4645016 - DNA, 25 bp, Homo sapien
acttgtggttgttgatccaggagca

SEQ ID NO: 4645017 - DNA, 25 bp, Homo sapien
tgtgacttgtggttgttgatccagg

SEQ ID NO: 4645018 - DNA, 25 bp, Homo sapien
gattttcatattagctcacagtgca

SEQ ID NO: 4645019 - DNA, 25 bp, Homo sapien
agccatagggaatcagcaattgcca

SEQ ID NO: 4645020 - DNA, 25 bp, Homo sapien
agaagtatactaggcaattccaagc

SEQ ID NO: 4645021 - DNA, 25 bp, Homo sapien
cagggcccaaatgaaacaaagaagg

SEQ ID NO: 4645022 - DNA, 25 bp, Homo sapien
gtctccagaggaaagcttttaatat

SEQ ID NO: 4645023 - DNA, 25 bp, Homo sapien
tattttattgcactgaccaggacct

SEQ ID NO: 4645024 - DNA, 25 bp, Homo sapien
gaccttttagataatgaccttagca

SEQ ID NO: 4645025 - DNA, 25 bp, Homo sapien
cactcctgaaatgaacctgacttgg

SEQ ID NO: 4645026 - DNA, 25 bp, Homo sapien
gttttccatgctgtcgttttgcaca

SEQ ID NO: 4645027 - DNA, 25 bp, Homo sapien
tagttgacatcccaaaggtgcaaag

SEQ ID NO: 4645028 - DNA, 25 bp, Homo sapien
cttccattgaaccacctagttgaca

SEQ ID NO: 4645029 - DNA, 25 bp, Homo sapien
caaagcagttgtccggttttccatg

SEQ ID NO: 4645030 - DNA, 25 bp, Homo sapien
tttcttgattaggactcttatctgt

SEQ ID NO: 4645031 - DNA, 25 bp, Homo sapien
ggactcttatctgtggcatccatac

SEQ ID NO: 4645032 - DNA, 25 bp, Homo sapien
tctgtggcatccatacttgatagaa

SEQ ID NO: 4645033 - DNA, 25 bp, Homo sapien
gtttttcttgattaggactcttatc

SEQ ID NO: 4645034 - DNA, 25 bp, Homo sapien
tccagagatatttgaagagaggcca

SEQ ID NO: 4645035 - DNA, 25 bp, Homo sapien
gatgacctgcattccgtgggcttgg

SEQ ID NO: 4645036 - DNA, 25 bp, Homo sapien
cactgtattataaatgcatctggac

SEQ ID NO: 4645037 - DNA, 25 bp, Homo sapien
tcttctttgaagtgaggtccagaga

SEQ ID NO: 4645038 - DNA, 25 bp, Homo sapien
ggaaccggaaagaagcatctgctgc

SEQ ID NO: 4645039 - DNA, 25 bp, Homo sapien
gaaatgtgctggcaaaggagtgtga

SEQ ID NO: 4645040 - DNA, 25 bp, Homo sapien
agtgtgaggaggcagaccaggaacc

SEQ ID NO: 4645041 - DNA, 25 bp, Homo sapien
gaggcagaccaggaaccggaaagaa

SEQ ID NO: 4645042 - DNA, 25 bp, Homo sapien
agcatcaacagattctatgaacttt

SEQ ID NO: 4645043 - DNA, 25 bp, Homo sapien
gcatcaacagattctatgaacttta

SEQ ID NO: 4645044 - DNA, 25 bp, Homo sapien
tcaacagattctatgaactttatga

SEQ ID NO: 4645045 - DNA, 25 bp, Homo sapien
cagattctatgaactttatgagttc

SEQ ID NO: 4645046 - DNA, 25 bp, Homo sapien
gacttcaccaagcactgtatccatt

SEQ ID NO: 4645047 - DNA, 25 bp, Homo sapien
tgtgcagtctccgtccctggtttgg

SEQ ID NO: 4645048 - DNA, 25 bp, Homo sapien
cactgtctccgtcaagagactgact

SEQ ID NO: 4645049 - DNA, 25 bp, Homo sapien
tatccatttgattaaccttcagagc

SEQ ID NO: 4645050 - DNA, 25 bp, Homo sapien
ctttgatgatgtgaccagtatggct

SEQ ID NO: 4645051 - DNA, 25 bp, Homo sapien
gactttcccaaatggctcatgggag

SEQ ID NO: 4645052 - DNA, 25 bp, Homo sapien
gctgtgatagacatgaatcaagacc

SEQ ID NO: 4645053 - DNA, 25 bp, Homo sapien
tcaaggagcacctgcataggagcag

SEQ ID NO: 4645054 - DNA, 25 bp, Homo sapien
gctgagctgaatggtagtcctattt

SEQ ID NO: 4645055 - DNA, 25 bp, Homo sapien
aattgctgagctgaatggtagtcct

SEQ ID NO: 4645056 - DNA, 25 bp, Homo sapien
ttgctgagctgaatggtagtcctat

SEQ ID NO: 4645057 - DNA, 25 bp, Homo sapien
gaattgctgagctgaatggtagtcc

SEQ ID NO: 4645058 - DNA, 25 bp, Homo sapien
caaagaagctccatagacagcacca

SEQ ID NO: 4645059 - DNA, 25 bp, Homo sapien
gttacactgtaggagggatcttcac

SEQ ID NO: 4645060 - DNA, 25 bp, Homo sapien
tccccagctgcgcaaatgcagaggc

SEQ ID NO: 4645061 - DNA, 25 bp, Homo sapien
tccagaatgataacagccttaagag

SEQ ID NO: 4645062 - DNA, 25 bp, Homo sapien
gaatcctcttctgtgtccgctgaca

SEQ ID NO: 4645063 - DNA, 25 bp, Homo sapien
aggaatcctcttctgtgtccgctga

SEQ ID NO: 4645064 - DNA, 25 bp, Homo sapien
catgatggaatactcctcacttggc

SEQ ID NO: 4645065 - DNA, 25 bp, Homo sapien
ttcatagaggaccacaggaatcaca

SEQ ID NO: 4645066 - DNA, 25 bp, Homo sapien
aaatgtgtgggaaagatcatggcag

SEQ ID NO: 4645067 - DNA, 25 bp, Homo sapien
tgtgggaaagatcatggcagtcttg

SEQ ID NO: 4645068 - DNA, 25 bp, Homo sapien
gggaaagatcatggcagtcttgcag

SEQ ID NO: 4645069 - DNA, 25 bp, Homo sapien
tgtgtgggaaagatcatggcagtct

SEQ ID NO: 4645070 - DNA, 25 bp, Homo sapien
cactgataatccttggacctgtctc

SEQ ID NO: 4645071 - DNA, 25 bp, Homo sapien
tatgcactgataatccttggacctg

SEQ ID NO: 4645072 - DNA, 25 bp, Homo sapien
agagtcaaccatatgcactgataat

SEQ ID NO: 4645073 - DNA, 25 bp, Homo sapien
aaccatatgcactgataatccttgg

SEQ ID NO: 4645074 - DNA, 25 bp, Homo sapien
ctgggctgttaattccttgaaaaca

SEQ ID NO: 4645075 - DNA, 25 bp, Homo sapien
tgggctgttaattccttgaaaacag

SEQ ID NO: 4645076 - DNA, 25 bp, Homo sapien
cactcaggcagtgagcgtagtacct

SEQ ID NO: 4645077 - DNA, 25 bp, Homo sapien
tgttaatgtccgtgttgacccagtg

SEQ ID NO: 4645078 - DNA, 25 bp, Homo sapien
tatgaatgatcgcatcactcaggca

SEQ ID NO: 4645079 - DNA, 25 bp, Homo sapien
gctgctgtaacaaatggccaccaat

SEQ ID NO: 4645080 - DNA, 25 bp, Homo sapien
tgctccctttgggaagcctctttga

SEQ ID NO: 4645081 - DNA, 25 bp, Homo sapien
gcttctttgggggaccactcttcca

SEQ ID NO: 4645082 - DNA, 25 bp, Homo sapien
gctccctttgggaagcctctttgac

SEQ ID NO: 4645083 - DNA, 25 bp, Homo sapien
cctctttggcatggccaagtgctaa

SEQ ID NO: 4645084 - DNA, 25 bp, Homo sapien
cactgtcccactgctaaagtttgcc

SEQ ID NO: 4645085 - DNA, 25 bp, Homo sapien
taatggtcattcaactctgtcactg

SEQ ID NO: 4645086 - DNA, 25 bp, Homo sapien
gtttgcctcttctttatcccgtgtg

SEQ ID NO: 4645087 - DNA, 25 bp, Homo sapien
cccgtgtgtcctgaattgctgttgt

SEQ ID NO: 4645088 - DNA, 25 bp, Homo sapien
gagtccagggttattttgtcccatc

SEQ ID NO: 4645089 - DNA, 25 bp, Homo sapien
tttcacagtaatttgttctcttcct

SEQ ID NO: 4645090 - DNA, 25 bp, Homo sapien
tttttatagggcaatgagtccaggg

SEQ ID NO: 4645091 - DNA, 25 bp, Homo sapien
tggagaagcttacatcacaccgtga

SEQ ID NO: 4645092 - DNA, 25 bp, Homo sapien
ggaacactgccttccgtcggatgag

SEQ ID NO: 4645093 - DNA, 25 bp, Homo sapien
ttggaacactgccttccgtcggatg

SEQ ID NO: 4645094 - DNA, 25 bp, Homo sapien
ttttggaacactgccttccgtcgga

SEQ ID NO: 4645095 - DNA, 25 bp, Homo sapien
acactgccttccgtcggatgaggtg

SEQ ID NO: 4645096 - DNA, 25 bp, Homo sapien
tagaaactcataccaggtgaatgca

SEQ ID NO: 4645097 - DNA, 25 bp, Homo sapien
gagaaatccagtaacgagctccctt

SEQ ID NO: 4645098 - DNA, 25 bp, Homo sapien
aagctctggttgtgacagaagccca

SEQ ID NO: 4645099 - DNA, 25 bp, Homo sapien
taatgattcaagtcagggctctacc

SEQ ID NO: 4645100 - DNA, 25 bp, Homo sapien
tttcttcttctaatggccgagcggt

SEQ ID NO: 4645101 - DNA, 25 bp, Homo sapien
aacatgtgagtgcagtatccttttg

SEQ ID NO: 4645102 - DNA, 25 bp, Homo sapien
tctgccagtcgacacttaggttggt

SEQ ID NO: 4645103 - DNA, 25 bp, Homo sapien
tagcttacacatgtgagaactgcaa

SEQ ID NO: 4645104 - DNA, 25 bp, Homo sapien
gacctaccttatctcattgcttgtg

SEQ ID NO: 4645105 - DNA, 25 bp, Homo sapien
taaaccaatctcatgtccccgaagc

SEQ ID NO: 4645106 - DNA, 25 bp, Homo sapien
tagatttgggttctatccctgacac

SEQ ID NO: 4645107 - DNA, 25 bp, Homo sapien
cagccctgggtataatcaagagagt

SEQ ID NO: 4645108 - DNA, 25 bp, Homo sapien
tgataacccaaattatgacaacaca

SEQ ID NO: 4645109 - DNA, 25 bp, Homo sapien
gagttcagttgaatccatcatccag

SEQ ID NO: 4645110 - DNA, 25 bp, Homo sapien
gatttagttgataacccaaattatg

SEQ ID NO: 4645111 - DNA, 25 bp, Homo sapien
tctctgtagcagtgttaggaaaact

SEQ ID NO: 4645112 - DNA, 25 bp, Homo sapien
gctgaacttgcctccctaagggtga

SEQ ID NO: 4645113 - DNA, 25 bp, Homo sapien
tgtggcgccgcttctaatgaaatag

SEQ ID NO: 4645114 - DNA, 25 bp, Homo sapien
gcaaaagaaagctggctcgggcgca

SEQ ID NO: 4645115 - DNA, 25 bp, Homo sapien
acagttgagccaatcgcgggcgcaa

SEQ ID NO: 4645116 - DNA, 25 bp, Homo sapien
atcaacagcctcaggcgtgggccct

SEQ ID NO: 4645117 - DNA, 25 bp, Homo sapien
ctgggagcgctaccctgcggcgcat

SEQ ID NO: 4645118 - DNA, 25 bp, Homo sapien
cctgcactctccagagaaggcggcg

SEQ ID NO: 4645119 - DNA, 25 bp, Homo sapien
taggcttccacacgcagctcggggt

SEQ ID NO: 4645120 - DNA, 25 bp, Homo sapien
tctccacccatccagtgcgggtaac

SEQ ID NO: 4645121 - DNA, 25 bp, Homo sapien
gatgacatcatctcgggttcagcca

SEQ ID NO: 4645122 - DNA, 25 bp, Homo sapien
tctgggtgatagaccttatgtggtg

SEQ ID NO: 4645123 - DNA, 25 bp, Homo sapien
tagctgaaaagttgggctagaaatc

SEQ ID NO: 4645124 - DNA, 25 bp, Homo sapien
ggaagtgtttcctgtagcgctaaaa

SEQ ID NO: 4645125 - DNA, 25 bp, Homo sapien
ttccagaaatgtggcagattgatac

SEQ ID NO: 4645126 - DNA, 25 bp, Homo sapien
ccagaaatgtggcagattgatacat

SEQ ID NO: 4645127 - DNA, 25 bp, Homo sapien
agagttctgcatcttccagaaatgt

SEQ ID NO: 4645128 - DNA, 25 bp, Homo sapien
ctagagttctgcatcttccagaaat

SEQ ID NO: 4645129 - DNA, 25 bp, Homo sapien
tattccacggcaaaatcaaaaccag

SEQ ID NO: 4645130 - DNA, 25 bp, Homo sapien
taaaacagccatctggtggccggtc

SEQ ID NO: 4645131 - DNA, 25 bp, Homo sapien
ggccggtcagattgttaagctcagt

SEQ ID NO: 4645132 - DNA, 25 bp, Homo sapien
tgaaagtcggaaggctaaaacagcc

SEQ ID NO: 4645133 - DNA, 25 bp, Homo sapien
cttggcatcctgtggctcagagacg

SEQ ID NO: 4645134 - DNA, 25 bp, Homo sapien
tcctgtggctcagagacgggagtca

SEQ ID NO: 4645135 - DNA, 25 bp, Homo sapien
agacgggagtcagctttgctctggg

SEQ ID NO: 4645136 - DNA, 25 bp, Homo sapien
catcctgtggctcagagacgggagt

SEQ ID NO: 4645137 - DNA, 25 bp, Homo sapien
tgaaggtttcctggccttctaattc

SEQ ID NO: 4645138 - DNA, 25 bp, Homo sapien
ctgaaggtttcctggccttctaatt

SEQ ID NO: 4645139 - DNA, 25 bp, Homo sapien
ttcctggccttctaattcttctgga

SEQ ID NO: 4645140 - DNA, 25 bp, Homo sapien
gctgaaggtttcctggccttctaat

SEQ ID NO: 4645141 - DNA, 25 bp, Homo sapien
ttagtgtcagtctggatactggaga

SEQ ID NO: 4645142 - DNA, 25 bp, Homo sapien
cttagtgtcagtctggatactggag

SEQ ID NO: 4645143 - DNA, 25 bp, Homo sapien
tgccacaaagcgatgttctaactca

SEQ ID NO: 4645144 - DNA, 25 bp, Homo sapien
caaagcgatgttctaactcagcact

SEQ ID NO: 4645145 - DNA, 25 bp, Homo sapien
cacaaagcgatgttctaactcagca

SEQ ID NO: 4645146 - DNA, 25 bp, Homo sapien
gcgatgttctaactcagcactctgc

SEQ ID NO: 4645147 - DNA, 25 bp, Homo sapien
taaatcgtgggtcagctgattccat

SEQ ID NO: 4645148 - DNA, 25 bp, Homo sapien
tagcacatcgacttccacccaaaat

SEQ ID NO: 4645149 - DNA, 25 bp, Homo sapien
tacactctgttgcttcgtaaaagtc

SEQ ID NO: 4645150 - DNA, 25 bp, Homo sapien
taacaaactcttggataaatcgtgg

SEQ ID NO: 4645151 - DNA, 25 bp, Homo sapien
catctaagtagaggctgacatgctt

SEQ ID NO: 4645152 - DNA, 25 bp, Homo sapien
atctaagtagaggctgacatgctta

SEQ ID NO: 4645153 - DNA, 25 bp, Homo sapien
tctaagtagaggctgacatgcttac

SEQ ID NO: 4645154 - DNA, 25 bp, Homo sapien
atttcagatgaaaatccgcttggcc

SEQ ID NO: 4645155 - DNA, 25 bp, Homo sapien
ccattcagcagggaacgggttagct

SEQ ID NO: 4645156 - DNA, 25 bp, Homo sapien
aaaccttgcactcaaatttcagatg

SEQ ID NO: 4645157 - DNA, 25 bp, Homo sapien
cctgtgtccaccttggtacaattaa

SEQ ID NO: 4645158 - DNA, 25 bp, Homo sapien
tctgttgtaggacaaaatgctcctt

SEQ ID NO: 4645159 - DNA, 25 bp, Homo sapien
tgctccgagaagctaagggacgttt

SEQ ID NO: 4645160 - DNA, 25 bp, Homo sapien
agtaaattgttccaggtgctccgag

SEQ ID NO: 4645161 - DNA, 25 bp, Homo sapien
gaaatgtccagtaaattgttccagg

SEQ ID NO: 4645162 - DNA, 25 bp, Homo sapien
cctgtgctattgttcacatctgtgg

SEQ ID NO: 4645163 - DNA, 25 bp, Homo sapien
gaagagatgctgtataaactgagta

SEQ ID NO: 4645164 - DNA, 25 bp, Homo sapien
ttcctggacaattttctgtggcctc

SEQ ID NO: 4645165 - DNA, 25 bp, Homo sapien
gctgtataaactgagtatcctgtgt

SEQ ID NO: 4645166 - DNA, 25 bp, Homo sapien
gggctgcgtctgcctgtgccggctg

SEQ ID NO: 4645167 - DNA, 25 bp, Homo sapien
gctgcgtctgcctgtgccggctgtc

SEQ ID NO: 4645168 - DNA, 25 bp, Homo sapien
gtcctgggagcagtgtgcgggctcg

SEQ ID NO: 4645169 - DNA, 25 bp, Homo sapien
gcgtctgcctgtgccggctgtcctg

SEQ ID NO: 4645170 - DNA, 25 bp, Homo sapien
gctagggatgcatatacaaaggcca

SEQ ID NO: 4645171 - DNA, 25 bp, Homo sapien
ggcacagaatctgcaagggctcaga

SEQ ID NO: 4645172 - DNA, 25 bp, Homo sapien
gatgaatggttactactctcaagga

SEQ ID NO: 4645173 - DNA, 25 bp, Homo sapien
caggaactgtccaagtaaagggcac

SEQ ID NO: 4645174 - DNA, 25 bp, Homo sapien
cagcttctagatggtagacctggtc

SEQ ID NO: 4645175 - DNA, 25 bp, Homo sapien
gaccacttgtaacttcgtgaccagg

SEQ ID NO: 4645176 - DNA, 25 bp, Homo sapien
ggagctcaaggttggtaatttacca

SEQ ID NO: 4645177 - DNA, 25 bp, Homo sapien
taatttaccaacacagcatcaagtg

SEQ ID NO: 4645178 - DNA, 25 bp, Homo sapien
cacagatatattgttgataaattgg

SEQ ID NO: 4645179 - DNA, 25 bp, Homo sapien
ttcctggagatgactggaattccct

SEQ ID NO: 4645180 - DNA, 25 bp, Homo sapien
aaaaagatacaaattcctggagatg

SEQ ID NO: 4645181 - DNA, 25 bp, Homo sapien
gaggatgaagatcttcgtgatctaa

SEQ ID NO: 4645182 - DNA, 25 bp, Homo sapien
ccctggttcaaacagttgggtctgg

SEQ ID NO: 4645183 - DNA, 25 bp, Homo sapien
tgtccacccctggttcaaacagttg

SEQ ID NO: 4645184 - DNA, 25 bp, Homo sapien
tctaatacagttgtccacccctggt

SEQ ID NO: 4645185 - DNA, 25 bp, Homo sapien
acagttgggtctggggtgacacagc

SEQ ID NO: 4645186 - DNA, 25 bp, Homo sapien
tttttctgtgcaaaactttaagtca

SEQ ID NO: 4645187 - DNA, 25 bp, Homo sapien
aaagaggatctaaatgggccagatc

SEQ ID NO: 4645188 - DNA, 25 bp, Homo sapien
gaggatctaaatgggccagatcttc

SEQ ID NO: 4645189 - DNA, 25 bp, Homo sapien
ctgaaagaggatctaaatgggccag

SEQ ID NO: 4645190 - DNA, 25 bp, Homo sapien
atccacatcgactctcttgttctga

SEQ ID NO: 4645191 - DNA, 25 bp, Homo sapien
tatgaactacatccacatcgaccat

SEQ ID NO: 4645192 - DNA, 25 bp, Homo sapien
catcgaccatccacatcgactctct

SEQ ID NO: 4645193 - DNA, 25 bp, Homo sapien
ttatgaactacatccacatcgacca

SEQ ID NO: 4645194 - DNA, 25 bp, Homo sapien
gcacctgtagattgtcttctattat

SEQ ID NO: 4645195 - DNA, 25 bp, Homo sapien
ttggagcacctgtagattgtcttct

SEQ ID NO: 4645196 - DNA, 25 bp, Homo sapien
ggagcacctgtagattgtcttctat

SEQ ID NO: 4645197 - DNA, 25 bp, Homo sapien
gagcacctgtagattgtcttctatt

SEQ ID NO: 4645198 - DNA, 25 bp, Homo sapien
cactttggggtagcttgctcagagc

SEQ ID NO: 4645199 - DNA, 25 bp, Homo sapien
actttttgggttcacgggccatgag

SEQ ID NO: 4645200 - DNA, 25 bp, Homo sapien
gcaccacttgtcagcccactttggg

SEQ ID NO: 4645201 - DNA, 25 bp, Homo sapien
tggccttgtagggttcccggcacca

SEQ ID NO: 4645202 - DNA, 25 bp, Homo sapien
tgaaaaacttggagggtccgcactg

SEQ ID NO: 4645203 - DNA, 25 bp, Homo sapien
tccagatatagttccttttagaagt

SEQ ID NO: 4645204 - DNA, 25 bp, Homo sapien
tcaggcataaacaacttcaattttt

SEQ ID NO: 4645205 - DNA, 25 bp, Homo sapien
cagagatcctgcttatagccggcaa

SEQ ID NO: 4645206 - DNA, 25 bp, Homo sapien
agccttccagatatagttcctttta

SEQ ID NO: 4645207 - DNA, 25 bp, Homo sapien
ttgcccaaatagaattctgtttcat

SEQ ID NO: 4645208 - DNA, 25 bp, Homo sapien
cttgcccaaatagaattctgtttca

SEQ ID NO: 4645209 - DNA, 25 bp, Homo sapien
cggaatttggcacgaaccaggccac

SEQ ID NO: 4645210 - DNA, 25 bp, Homo sapien
tacttcggaatttggcacgaaccag

SEQ ID NO: 4645211 - DNA, 25 bp, Homo sapien
acgaaccaggccactgtttccatga

SEQ ID NO: 4645212 - DNA, 25 bp, Homo sapien
ggccactgtttccatgagcatgagt

SEQ ID NO: 4645213 - DNA, 25 bp, Homo sapien
gagcataaatccaagtttatttatt

SEQ ID NO: 4645214 - DNA, 25 bp, Homo sapien
gcataaatccaagtttatttattga

SEQ ID NO: 4645215 - DNA, 25 bp, Homo sapien
cataaatccaagtttatttattgac

SEQ ID NO: 4645216 - DNA, 25 bp, Homo sapien
aagagcataaatccaagtttattta

SEQ ID NO: 4645217 - DNA, 25 bp, Homo sapien
gcagcagtaacttggcccaccaaag

SEQ ID NO: 4645218 - DNA, 25 bp, Homo sapien
acattatactatttgtgccccaacc

SEQ ID NO: 4645219 - DNA, 25 bp, Homo sapien
cattgtatgccccatgttcttcaaa

SEQ ID NO: 4645220 - DNA, 25 bp, Homo sapien
tactggctcctgcattcaaggtgac

SEQ ID NO: 4645221 - DNA, 25 bp, Homo sapien
catttacaaggtcctgtcaccatca

SEQ ID NO: 4645222 - DNA, 25 bp, Homo sapien
gctcctttccatttacaaggtcctg

SEQ ID NO: 4645223 - DNA, 25 bp, Homo sapien
ctttccatttacaaggtcctgtcac

SEQ ID NO: 4645224 - DNA, 25 bp, Homo sapien
ttccatttacaaggtcctgtcacca

SEQ ID NO: 4645225 - DNA, 25 bp, Homo sapien
tgccttgcagataaagggttggttg

SEQ ID NO: 4645226 - DNA, 25 bp, Homo sapien
taacaaagaggaatttgccttgcag

SEQ ID NO: 4645227 - DNA, 25 bp, Homo sapien
ggcaaaatgtaagctgacttcttta

SEQ ID NO: 4645228 - DNA, 25 bp, Homo sapien
gggaagctccgcagatggcaaaatg

SEQ ID NO: 4645229 - DNA, 25 bp, Homo sapien
tgaagaagtccacaataacccagtt

SEQ ID NO: 4645230 - DNA, 25 bp, Homo sapien
agagcactgctctggtcaatagatg

SEQ ID NO: 4645231 - DNA, 25 bp, Homo sapien
ctgggctatagcacctcgactgtgt

SEQ ID NO: 4645232 - DNA, 25 bp, Homo sapien
cagtttctcattagaatgagcttcc

SEQ ID NO: 4645233 - DNA, 25 bp, Homo sapien
caaagatctcacagtaaccctgaat

SEQ ID NO: 4645234 - DNA, 25 bp, Homo sapien
gattggaaacatccaatatataaag

SEQ ID NO: 4645235 - DNA, 25 bp, Homo sapien
atgcatttgtagctgcaagttctac

SEQ ID NO: 4645236 - DNA, 25 bp, Homo sapien
gtatttctgtttgattagattggaa

SEQ ID NO: 4645237 - DNA, 25 bp, Homo sapien
tgccatcccattggtatcatctgca

SEQ ID NO: 4645238 - DNA, 25 bp, Homo sapien
gccatcccattggtatcatctgcaa

SEQ ID NO: 4645239 - DNA, 25 bp, Homo sapien
tcccattggtatcatctgcaaaaag

SEQ ID NO: 4645240 - DNA, 25 bp, Homo sapien
catcccattggtatcatctgcaaaa

SEQ ID NO: 4645241 - DNA, 25 bp, Homo sapien
cctagcatggcatctaacccacacc

SEQ ID NO: 4645242 - DNA, 25 bp, Homo sapien
cagctgcagtcaaatgaggagaagt

SEQ ID NO: 4645243 - DNA, 25 bp, Homo sapien
aatgaggagaagtttccaatttcac

SEQ ID NO: 4645244 - DNA, 25 bp, Homo sapien
tggaaacctggtagctaaagaaaga

SEQ ID NO: 4645245 - DNA, 25 bp, Homo sapien
ccaatttcactaactgtggaaacct

SEQ ID NO: 4645246 - DNA, 25 bp, Homo sapien
catgtataatagtggaccagaggcg

SEQ ID NO: 4645247 - DNA, 25 bp, Homo sapien
taatcccacttctcgctttcctgtg

SEQ ID NO: 4645248 - DNA, 25 bp, Homo sapien
cagaggcgatggaaggagctcaaca

SEQ ID NO: 4645249 - DNA, 25 bp, Homo sapien
ggtttgtgggtgtgagtgctgaaaa

SEQ ID NO: 4645250 - DNA, 25 bp, Homo sapien
ggctctgaacggccaggtagaaaca

SEQ ID NO: 4645251 - DNA, 25 bp, Homo sapien
gggagagaggtagttgtgagccacc

SEQ ID NO: 4645252 - DNA, 25 bp, Homo sapien
ccactagaagtagaagttgagggct

SEQ ID NO: 4645253 - DNA, 25 bp, Homo sapien
gttgagggctctgaacggccaggta

SEQ ID NO: 4645254 - DNA, 25 bp, Homo sapien
gctattaaacattccggtggctggt

SEQ ID NO: 4645255 - DNA, 25 bp, Homo sapien
gaaacaaatggtttaggcagagagc

SEQ ID NO: 4645256 - DNA, 25 bp, Homo sapien
cagagagcatttgggctattaaaca

SEQ ID NO: 4645257 - DNA, 25 bp, Homo sapien
ttaaacattccggtggctggttctg

SEQ ID NO: 4645258 - DNA, 25 bp, Homo sapien
tcttataagcctttatgaggcccaa

SEQ ID NO: 4645259 - DNA, 25 bp, Homo sapien
gcccaattttgcttgtggaatctga

SEQ ID NO: 4645260 - DNA, 25 bp, Homo sapien
aaggaagctctttgtacatactgac

SEQ ID NO: 4645261 - DNA, 25 bp, Homo sapien
ttcatccgatctggctgggaatagg

SEQ ID NO: 4645262 - DNA, 25 bp, Homo sapien
aataacaaatggctggatttcccag

SEQ ID NO: 4645263 - DNA, 25 bp, Homo sapien
ggtcaaggttagtttgttctgcaga

SEQ ID NO: 4645264 - DNA, 25 bp, Homo sapien
cacagatgtttatgagtggtgacaa

SEQ ID NO: 4645265 - DNA, 25 bp, Homo sapien
gatttcccagtcttcagagctctgg

SEQ ID NO: 4645266 - DNA, 25 bp, Homo sapien
ttcccagaactgtttcgtaactcat

SEQ ID NO: 4645267 - DNA, 25 bp, Homo sapien
ccatttctgcttagtcacacctctg

SEQ ID NO: 4645268 - DNA, 25 bp, Homo sapien
gtggcccttgttatactggaagacc

SEQ ID NO: 4645269 - DNA, 25 bp, Homo sapien
gcccttgttatactggaagaccaca

SEQ ID NO: 4645270 - DNA, 25 bp, Homo sapien
gatgctgccgtaccaagaggaaaga

SEQ ID NO: 4645271 - DNA, 25 bp, Homo sapien
ccaaaatgattacacccagggagga

SEQ ID NO: 4645272 - DNA, 25 bp, Homo sapien
tcacatgcggcaagaggcaactggc

SEQ ID NO: 4645273 - DNA, 25 bp, Homo sapien
taaaaagcatgctgtgatgcccagc

SEQ ID NO: 4645274 - DNA, 25 bp, Homo sapien
cctttaatctgtgaccattgggcaa

SEQ ID NO: 4645275 - DNA, 25 bp, Homo sapien
gttgggaccatttttgcagctttaa

SEQ ID NO: 4645276 - DNA, 25 bp, Homo sapien
tgcagagctcaactgaatatttcct

SEQ ID NO: 4645277 - DNA, 25 bp, Homo sapien
tcaaacaggaagtatattgggacaa

SEQ ID NO: 4645278 - DNA, 25 bp, Homo sapien
tgatataaccactttgagacgtgtg

SEQ ID NO: 4645279 - DNA, 25 bp, Homo sapien
aatccagtggattgcagctcttggc

SEQ ID NO: 4645280 - DNA, 25 bp, Homo sapien
ttttattgtcaattctgaacctgca

SEQ ID NO: 4645281 - DNA, 25 bp, Homo sapien
tggttacatggaaagccgatttggt

SEQ ID NO: 4645282 - DNA, 25 bp, Homo sapien
tgccgcaatgtgatgcctgtgtagc

SEQ ID NO: 4645283 - DNA, 25 bp, Homo sapien
tattgttgcatgtagtgctggctca

SEQ ID NO: 4645284 - DNA, 25 bp, Homo sapien
tagagcttaataagttgccgcaatg

SEQ ID NO: 4645285 - DNA, 25 bp, Homo sapien
tgtccggcttctttgcacagtgtta

SEQ ID NO: 4645286 - DNA, 25 bp, Homo sapien
gagagatttgatacccatgaatacc

SEQ ID NO: 4645287 - DNA, 25 bp, Homo sapien
catgaataccgcaatgagagcaggc

SEQ ID NO: 4645288 - DNA, 25 bp, Homo sapien
gattcagccgctaaaagtctcttac

SEQ ID NO: 4645289 - DNA, 25 bp, Homo sapien
tccaggtcggattgttgccatagct

SEQ ID NO: 4645290 - DNA, 25 bp, Homo sapien
gcctatgggaactgcaaggttgctc

SEQ ID NO: 4645291 - DNA, 25 bp, Homo sapien
ttgggatccaggacaagattctgca

SEQ ID NO: 4645292 - DNA, 25 bp, Homo sapien
gagatatgctccgtctgacctcaga

SEQ ID NO: 4645293 - DNA, 25 bp, Homo sapien
tgtggtgtcactctaaccatggaga

SEQ ID NO: 4645294 - DNA, 25 bp, Homo sapien
cagctttctagtgtgaatcccaaga

SEQ ID NO: 4645295 - DNA, 25 bp, Homo sapien
tcttggagagaggtgctatcagtac

SEQ ID NO: 4645296 - DNA, 25 bp, Homo sapien
ggaaacttgcgtatcactcagcttg

SEQ ID NO: 4645297 - DNA, 25 bp, Homo sapien
cattcactgtgtgcaagaaggaact

SEQ ID NO: 4645298 - DNA, 25 bp, Homo sapien
aagtacctttgtcttgcatattaac

SEQ ID NO: 4645299 - DNA, 25 bp, Homo sapien
gtaagtgataagtacctttgtcttg

SEQ ID NO: 4645300 - DNA, 25 bp, Homo sapien
aagtgataagtacctttgtcttgca

SEQ ID NO: 4645301 - DNA, 25 bp, Homo sapien
gtacctttgtcttgcatattaacat

SEQ ID NO: 4645302 - DNA, 25 bp, Homo sapien
tgggttggaagggctagattatttg

SEQ ID NO: 4645303 - DNA, 25 bp, Homo sapien
gggactgatgatatagcctaggggg

SEQ ID NO: 4645304 - DNA, 25 bp, Homo sapien
agggctagattatttgggggactga

SEQ ID NO: 4645305 - DNA, 25 bp, Homo sapien
tgatatagcctagggggcaagtgtc

SEQ ID NO: 4645306 - DNA, 25 bp, Homo sapien
taatgcattgtctttggccctctgc

SEQ ID NO: 4645307 - DNA, 25 bp, Homo sapien
tcaggacagacttcgactttggttc

SEQ ID NO: 4645308 - DNA, 25 bp, Homo sapien
ccagccagttgagaacaagggcgaa

SEQ ID NO: 4645309 - DNA, 25 bp, Homo sapien
cagctgcaaggctggtgacgcgcct

SEQ ID NO: 4645310 - DNA, 25 bp, Homo sapien
tcttgaggaacatagaggaaactgt

SEQ ID NO: 4645311 - DNA, 25 bp, Homo sapien
ttgtttggcttaggtttcacgtggc

SEQ ID NO: 4645312 - DNA, 25 bp, Homo sapien
agaatgtgtaagatggcccttttgt

SEQ ID NO: 4645313 - DNA, 25 bp, Homo sapien
ccttttgactctgtagcacccttga

SEQ ID NO: 4645314 - DNA, 25 bp, Homo sapien
tgcagtggctctatagtagtcctag

SEQ ID NO: 4645315 - DNA, 25 bp, Homo sapien
ggctctatagtagtcctagcacact

SEQ ID NO: 4645316 - DNA, 25 bp, Homo sapien
ctcggcctctaagtggatgggacta

SEQ ID NO: 4645317 - DNA, 25 bp, Homo sapien
agtcctagcacactatagtcttgaa

SEQ ID NO: 4645318 - DNA, 25 bp, Homo sapien
cgtgcgcctcctttcccggtttcat

SEQ ID NO: 4645319 - DNA, 25 bp, Homo sapien
gcctggccggctccggcgttgggca

SEQ ID NO: 4645320 - DNA, 25 bp, Homo sapien
cggcctggccggctccggcgttggg

SEQ ID NO: 4645321 - DNA, 25 bp, Homo sapien
cgggtctcgcccaccttttctgctc

SEQ ID NO: 4645322 - DNA, 25 bp, Homo sapien
ggccactgcggggacgcagacccgg

SEQ ID NO: 4645323 - DNA, 25 bp, Homo sapien
aggagatctggacccgaggacgcca

SEQ ID NO: 4645324 - DNA, 25 bp, Homo sapien
gaggacgccagggactcctctccgt

SEQ ID NO: 4645325 - DNA, 25 bp, Homo sapien
cggcaatcgagtggcttcctggcca

SEQ ID NO: 4645326 - DNA, 25 bp, Homo sapien
ccagttgagtacgagcggcagctgc

SEQ ID NO: 4645327 - DNA, 25 bp, Homo sapien
tgccccgccggcagtgcgctcgggc

SEQ ID NO: 4645328 - DNA, 25 bp, Homo sapien
ctgccccgccggcagtgcgctcggg

SEQ ID NO: 4645329 - DNA, 25 bp, Homo sapien
gcacaggctccggttcggccaggcg

SEQ ID NO: 4645330 - DNA, 25 bp, Homo sapien
tgggccggggcgtggctttcggcgc

SEQ ID NO: 4645331 - DNA, 25 bp, Homo sapien
tgccggtgtcctcagagcggcgttt

SEQ ID NO: 4645332 - DNA, 25 bp, Homo sapien
ccggtgtcctcagagcggcgttttg

SEQ ID NO: 4645333 - DNA, 25 bp, Homo sapien
gctgcttcagggccggtgccggtgt

SEQ ID NO: 4645334 - DNA, 25 bp, Homo sapien
ccggtgccggtgtcctcagagcggc

SEQ ID NO: 4645335 - DNA, 25 bp, Homo sapien
gacctcgtgcgtctgagtgatccag

SEQ ID NO: 4645336 - DNA, 25 bp, Homo sapien
gacggcccggatttggcagtcctgc

SEQ ID NO: 4645337 - DNA, 25 bp, Homo sapien
ctgtcactagctcgggacctcgtgc

SEQ ID NO: 4645338 - DNA, 25 bp, Homo sapien
ttaaatcgaggatgacgacggcccg

SEQ ID NO: 4645339 - DNA, 25 bp, Homo sapien
tggatatctggccttaaatggggct

SEQ ID NO: 4645340 - DNA, 25 bp, Homo sapien
cagattcacagtctggatatctggc

SEQ ID NO: 4645341 - DNA, 25 bp, Homo sapien
tctcagattcacagtctggatatct

SEQ ID NO: 4645342 - DNA, 25 bp, Homo sapien
ctggccttaaatggggcttccttgt

SEQ ID NO: 4645343 - DNA, 25 bp, Homo sapien
ttcataaacacatccagggatgtga

SEQ ID NO: 4645344 - DNA, 25 bp, Homo sapien
cataaacacatccagggatgtgaag

SEQ ID NO: 4645345 - DNA, 25 bp, Homo sapien
tcttcataaacacatccagggatgt

SEQ ID NO: 4645346 - DNA, 25 bp, Homo sapien
ctcttcataaacacatccagggatg

SEQ ID NO: 4645347 - DNA, 25 bp, Homo sapien
cacactgtactgagattatgggccc

SEQ ID NO: 4645348 - DNA, 25 bp, Homo sapien
ttcagtctgtcacagttgaatccct

SEQ ID NO: 4645349 - DNA, 25 bp, Homo sapien
gaatccctttagctgttcacactgt

SEQ ID NO: 4645350 - DNA, 25 bp, Homo sapien
tccaggcttggaacattctgctcct

SEQ ID NO: 4645351 - DNA, 25 bp, Homo sapien
tatatgacatgctggcacaaacacc

SEQ ID NO: 4645352 - DNA, 25 bp, Homo sapien
catgctggcacaaacacccgttgtc

SEQ ID NO: 4645353 - DNA, 25 bp, Homo sapien
cctgcagcacatgccgtgagcaact

SEQ ID NO: 4645354 - DNA, 25 bp, Homo sapien
tttccaccctccgtgcgtcagctcc

SEQ ID NO: 4645355 - DNA, 25 bp, Homo sapien
tgccccggggcaaggaagagcatgc

SEQ ID NO: 4645356 - DNA, 25 bp, Homo sapien
gccccggggcaaggaagagcatgca

SEQ ID NO: 4645357 - DNA, 25 bp, Homo sapien
aagcaaagctgcaaataggtgatgt

SEQ ID NO: 4645358 - DNA, 25 bp, Homo sapien
caacttgagccttgtgtaagcagct

SEQ ID NO: 4645359 - DNA, 25 bp, Homo sapien
gctgcaaataggtgatgtgggtccc

SEQ ID NO: 4645360 - DNA, 25 bp, Homo sapien
aacaacttgagccttgtgtaagcag

SEQ ID NO: 4645361 - DNA, 25 bp, Homo sapien
cttgtgtctgtctcttatgaggatc

SEQ ID NO: 4645362 - DNA, 25 bp, Homo sapien
tgaggatcattcctagcaacagaaa

SEQ ID NO: 4645363 - DNA, 25 bp, Homo sapien
gcttgtaaacttgcagcaccctcat

SEQ ID NO: 4645364 - DNA, 25 bp, Homo sapien
gcaccctcatcaagattatgagcat

SEQ ID NO: 4645365 - DNA, 25 bp, Homo sapien
cttctccccttttatcacattgtgt

SEQ ID NO: 4645366 - DNA, 25 bp, Homo sapien
gtgttcctcattttgactcttctcc

SEQ ID NO: 4645367 - DNA, 25 bp, Homo sapien
cacattgtgtaattcatctatttct

SEQ ID NO: 4645368 - DNA, 25 bp, Homo sapien
tatcacattgtgtaattcatctatt

SEQ ID NO: 4645369 - DNA, 25 bp, Homo sapien
ggagtaaagtcacatctcattgtag

SEQ ID NO: 4645370 - DNA, 25 bp, Homo sapien
taagattgctaattatatggtaatc

SEQ ID NO: 4645371 - DNA, 25 bp, Homo sapien
ttgatagtagctattctaactggag

SEQ ID NO: 4645372 - DNA, 25 bp, Homo sapien
tcagcaatgtgtaacggttcccttt

SEQ ID NO: 4645373 - DNA, 25 bp, Homo sapien
gtctacattaatacacgtatatatg

SEQ ID NO: 4645374 - DNA, 25 bp, Homo sapien
tattatacataactgctatatagag

SEQ ID NO: 4645375 - DNA, 25 bp, Homo sapien
ttgtctacattaatacacgtatata

SEQ ID NO: 4645376 - DNA, 25 bp, Homo sapien
actgctatatagaggttatatttac

SEQ ID NO: 4645377 - DNA, 25 bp, Homo sapien
cacgtgactcttctgggaggtcaaa

SEQ ID NO: 4645378 - DNA, 25 bp, Homo sapien
tgacgcttctgtcaatgacccggaa

SEQ ID NO: 4645379 - DNA, 25 bp, Homo sapien
ggcccgaatgtgtagtccatcaaat

SEQ ID NO: 4645380 - DNA, 25 bp, Homo sapien
tcagcagaacgcgagctcttgtgga

SEQ ID NO: 4645381 - DNA, 25 bp, Homo sapien
gcacacttttatcgaacttgtcatt

SEQ ID NO: 4645382 - DNA, 25 bp, Homo sapien
ggtctgcacacttttatcgaacttg

SEQ ID NO: 4645383 - DNA, 25 bp, Homo sapien
cgtattctggtgcttctgaggtctg

SEQ ID NO: 4645384 - DNA, 25 bp, Homo sapien
aacgagccacgttgcctttctggga

SEQ ID NO: 4645385 - DNA, 25 bp, Homo sapien
agtcaaagacggtgcaacaggcagg

SEQ ID NO: 4645386 - DNA, 25 bp, Homo sapien
tgtgatccagatgggaacgctgaac

SEQ ID NO: 4645387 - DNA, 25 bp, Homo sapien
caagactaactctgggctgcggtcc

SEQ ID NO: 4645388 - DNA, 25 bp, Homo sapien
cacacaatactagtgaggacagcct

SEQ ID NO: 4645389 - DNA, 25 bp, Homo sapien
acatcatgactagagtttgcagata

SEQ ID NO: 4645390 - DNA, 25 bp, Homo sapien
tgcagttcaactcctgctgtgtggc

SEQ ID NO: 4645391 - DNA, 25 bp, Homo sapien
cagggagacaaactcaaacatcatg

SEQ ID NO: 4645392 - DNA, 25 bp, Homo sapien
ctgcagttcaactcctgctgtgtgg

SEQ ID NO: 4645393 - DNA, 25 bp, Homo sapien
cagctctgcctgaacaattgaatac

SEQ ID NO: 4645394 - DNA, 25 bp, Homo sapien
gggagccttccagatcatatgtgga

SEQ ID NO: 4645395 - DNA, 25 bp, Homo sapien
gaacaagtacccaagatgggctggt

SEQ ID NO: 4645396 - DNA, 25 bp, Homo sapien
tggcccatgactcagtctcaggaag

SEQ ID NO: 4645397 - DNA, 25 bp, Homo sapien
ctccagcctcccgagtaggtggggt

SEQ ID NO: 4645398 - DNA, 25 bp, Homo sapien
gttacaggcgtgcaccaccacgccc

SEQ ID NO: 4645399 - DNA, 25 bp, Homo sapien
ttcatgcaattctcccactccagcc

SEQ ID NO: 4645400 - DNA, 25 bp, Homo sapien
tagaattaactaccacagtaagcca

SEQ ID NO: 4645401 - DNA, 25 bp, Homo sapien
aaattgatgacttcagtggcatgag

SEQ ID NO: 4645402 - DNA, 25 bp, Homo sapien
gaccttaataaatgtgtccctagag

SEQ ID NO: 4645403 - DNA, 25 bp, Homo sapien
tcatatgagagtcaaagaactgctc

SEQ ID NO: 4645404 - DNA, 25 bp, Homo sapien
cagggatcaggtatactgctctgcc

SEQ ID NO: 4645405 - DNA, 25 bp, Homo sapien
caagagagtctgattggacaacgga

SEQ ID NO: 4645406 - DNA, 25 bp, Homo sapien
gttaagctctaagaccaacagggat

SEQ ID NO: 4645407 - DNA, 25 bp, Homo sapien
ttgcttctaagcacaagggtttctt

SEQ ID NO: 4645408 - DNA, 25 bp, Homo sapien
gggagggtttctagcatgcgtttca

SEQ ID NO: 4645409 - DNA, 25 bp, Homo sapien
gagggcctaaatctacattatccaa

SEQ ID NO: 4645410 - DNA, 25 bp, Homo sapien
cctctcttaactgggcatgggaggg

SEQ ID NO: 4645411 - DNA, 25 bp, Homo sapien
gaaagctatttgaatcattaaggat

SEQ ID NO: 4645412 - DNA, 25 bp, Homo sapien
ttttgccctgacatatgagcgagcc

SEQ ID NO: 4645413 - DNA, 25 bp, Homo sapien
gagcgagccatagcttagctctata

SEQ ID NO: 4645414 - DNA, 25 bp, Homo sapien
taggttttagacaagcccattggct

SEQ ID NO: 4645415 - DNA, 25 bp, Homo sapien
tctgaaagagggtagcaatttctct

SEQ ID NO: 4645416 - DNA, 25 bp, Homo sapien
aatgtgctaccatgctctactaatt

SEQ ID NO: 4645417 - DNA, 25 bp, Homo sapien
ttcctcaaagataggtgcctcgctc

SEQ ID NO: 4645418 - DNA, 25 bp, Homo sapien
tgtgacctgcctaacttcagttgag

SEQ ID NO: 4645419 - DNA, 25 bp, Homo sapien
gcaggtgtaagaggacaatgaccat

SEQ ID NO: 4645420 - DNA, 25 bp, Homo sapien
tcaagagtcaactcacatcaggaag

SEQ ID NO: 4645421 - DNA, 25 bp, Homo sapien
agagtctcactatgtcactatgttg

SEQ ID NO: 4645422 - DNA, 25 bp, Homo sapien
tgttgcccaggctggcctccaaccc

SEQ ID NO: 4645423 - DNA, 25 bp, Homo sapien
cagagtctcactatgtcactatgtt

SEQ ID NO: 4645424 - DNA, 25 bp, Homo sapien
acagagtctcactatgtcactatgt

SEQ ID NO: 4645425 - DNA, 25 bp, Homo sapien
tctgtagaagagcaactgttaagcc

SEQ ID NO: 4645426 - DNA, 25 bp, Homo sapien
tgacaacctacagttaagggatggg

SEQ ID NO: 4645427 - DNA, 25 bp, Homo sapien
gatttccaggccctaccttctgaga

SEQ ID NO: 4645428 - DNA, 25 bp, Homo sapien
cagagctgaggcaaagtcatgactc

SEQ ID NO: 4645429 - DNA, 25 bp, Homo sapien
gaaattacgtttgttccacatagct

SEQ ID NO: 4645430 - DNA, 25 bp, Homo sapien
tagatctgcactgtgagctaaaata

SEQ ID NO: 4645431 - DNA, 25 bp, Homo sapien
aatgagctagtcatacaaatagccc

SEQ ID NO: 4645432 - DNA, 25 bp, Homo sapien
ccacatagctaattagagagaaatc

SEQ ID NO: 4645433 - DNA, 25 bp, Homo sapien
tatacataacaagttctggttccat

SEQ ID NO: 4645434 - DNA, 25 bp, Homo sapien
ttatagagctaaaacgagtctttac

SEQ ID NO: 4645435 - DNA, 25 bp, Homo sapien
tgtatgtactatagtctctcagagt

SEQ ID NO: 4645436 - DNA, 25 bp, Homo sapien
catttagttaacctattatctactc

SEQ ID NO: 4645437 - DNA, 25 bp, Homo sapien
tattttggcaattacttttagtgta

SEQ ID NO: 4645438 - DNA, 25 bp, Homo sapien
ttggcaattacttttagtgtatccc

SEQ ID NO: 4645439 - DNA, 25 bp, Homo sapien
cctattttggcaattacttttagtg

SEQ ID NO: 4645440 - DNA, 25 bp, Homo sapien
caattacttttagtgtatccctcat

SEQ ID NO: 4645441 - DNA, 25 bp, Homo sapien
taacacattctgcttgttaactagg

SEQ ID NO: 4645442 - DNA, 25 bp, Homo sapien
cacattctgcttgttaactaggaag

SEQ ID NO: 4645443 - DNA, 25 bp, Homo sapien
ttgtatataacacattctgcttgtt

SEQ ID NO: 4645444 - DNA, 25 bp, Homo sapien
tatataacacattctgcttgttaac

SEQ ID NO: 4645445 - DNA, 25 bp, Homo sapien
gacatagatggagagtcccagttct

SEQ ID NO: 4645446 - DNA, 25 bp, Homo sapien
ttctggacatagatggagagtccca

SEQ ID NO: 4645447 - DNA, 25 bp, Homo sapien
tggacatagatggagagtcccagtt

SEQ ID NO: 4645448 - DNA, 25 bp, Homo sapien
tctggacatagatggagagtcccag

SEQ ID NO: 4645449 - DNA, 25 bp, Homo sapien
actccatcatgaagttttgcattaa

SEQ ID NO: 4645450 - DNA, 25 bp, Homo sapien
ttctttacagcgctgacatactcca

SEQ ID NO: 4645451 - DNA, 25 bp, Homo sapien
tactccatcatgaagttttgcatta

SEQ ID NO: 4645452 - DNA, 25 bp, Homo sapien
ttacagcgctgacatactccatcat

SEQ ID NO: 4645453 - DNA, 25 bp, Homo sapien
gaacacaaggcttgccactgtatcc

SEQ ID NO: 4645454 - DNA, 25 bp, Homo sapien
caaggcttgccactgtatccggaat

SEQ ID NO: 4645455 - DNA, 25 bp, Homo sapien
cacaaggcttgccactgtatccgga

SEQ ID NO: 4645456 - DNA, 25 bp, Homo sapien
tgttaaagcttataaaggcagtgta

SEQ ID NO: 4645457 - DNA, 25 bp, Homo sapien
tgatcatatacaaatccttccagaa

SEQ ID NO: 4645458 - DNA, 25 bp, Homo sapien
tctctcgcatgctcattctcttgca

SEQ ID NO: 4645459 - DNA, 25 bp, Homo sapien
tataaacatcttgcacacacgcttg

SEQ ID NO: 4645460 - DNA, 25 bp, Homo sapien
gcagcaatggatttatcctgggaat

SEQ ID NO: 4645461 - DNA, 25 bp, Homo sapien
gtgataagaatccttcactgtcttt

SEQ ID NO: 4645462 - DNA, 25 bp, Homo sapien
tatgtgataagaatccttcactgtc

SEQ ID NO: 4645463 - DNA, 25 bp, Homo sapien
aatccttcactgtcttttgtaaaca

SEQ ID NO: 4645464 - DNA, 25 bp, Homo sapien
atccttcactgtcttttgtaaacat

SEQ ID NO: 4645465 - DNA, 25 bp, Homo sapien
cattttgcgcaaacttcaagttcac

SEQ ID NO: 4645466 - DNA, 25 bp, Homo sapien
cagcttcttctatggttggaactta

SEQ ID NO: 4645467 - DNA, 25 bp, Homo sapien
tctatggttggaacttagattattt

SEQ ID NO: 4645468 - DNA, 25 bp, Homo sapien
tcttctatggttggaacttagatta

SEQ ID NO: 4645469 - DNA, 25 bp, Homo sapien
cttctatggttggaacttagattat

SEQ ID NO: 4645470 - DNA, 25 bp, Homo sapien
gatgttaagtaatatacacaattta

SEQ ID NO: 4645471 - DNA, 25 bp, Homo sapien
ccaaaaggtggtcagaatttcacat

SEQ ID NO: 4645472 - DNA, 25 bp, Homo sapien
gagctagttcttatacaaccatcaa

SEQ ID NO: 4645473 - DNA, 25 bp, Homo sapien
tgtgcccggcagacttttaatacag

SEQ ID NO: 4645474 - DNA, 25 bp, Homo sapien
tatcaaaaggcacttaccgaggacc

SEQ ID NO: 4645475 - DNA, 25 bp, Homo sapien
gatcatttatcaaaaggcacttacc

SEQ ID NO: 4645476 - DNA, 25 bp, Homo sapien
caaaaggcacttaccgaggaccaat

SEQ ID NO: 4645477 - DNA, 25 bp, Homo sapien
tttgagatcatttatcaaaaggcac

SEQ ID NO: 4645478 - DNA, 25 bp, Homo sapien
tattcccaggtaatattttctgatg

SEQ ID NO: 4645479 - DNA, 25 bp, Homo sapien
tcaaaagtgaaatagccaataaaca

SEQ ID NO: 4645480 - DNA, 25 bp, Homo sapien
tctgatgtcagtgaaatgttatcta

SEQ ID NO: 4645481 - DNA, 25 bp, Homo sapien
taatatcacctattatcaaaagtga

SEQ ID NO: 4645482 - DNA, 25 bp, Homo sapien
cacgcccagcgggacagaacatttc

SEQ ID NO: 4645483 - DNA, 25 bp, Homo sapien
attgtgaagatagtatttctattca

SEQ ID NO: 4645484 - DNA, 25 bp, Homo sapien
atatgtttagaatactgagactttc

SEQ ID NO: 4645485 - DNA, 25 bp, Homo sapien
ccagcgggacagaacatttctttca

SEQ ID NO: 4645486 - DNA, 25 bp, Homo sapien
gcagattcccctcatatgctggata

SEQ ID NO: 4645487 - DNA, 25 bp, Homo sapien
tgctggatactcctagttgcaagag

SEQ ID NO: 4645488 - DNA, 25 bp, Homo sapien
tcttgtcagtgaggtaagtctttcc

SEQ ID NO: 4645489 - DNA, 25 bp, Homo sapien
tctgcagctcgtttggtacccctat

SEQ ID NO: 4645490 - DNA, 25 bp, Homo sapien
cacagcggtgagattcagatcattc

SEQ ID NO: 4645491 - DNA, 25 bp, Homo sapien
gaaaggcacacataacataacgtca

SEQ ID NO: 4645492 - DNA, 25 bp, Homo sapien
cataacgtcacgaaggtaaagaaat

SEQ ID NO: 4645493 - DNA, 25 bp, Homo sapien
aaatgagaacagtgtcacagcggtg

SEQ ID NO: 4645494 - DNA, 25 bp, Homo sapien
tgatcctagctaccctgaaggctga

SEQ ID NO: 4645495 - DNA, 25 bp, Homo sapien
cacctgtgatcctagctaccctgaa

SEQ ID NO: 4645496 - DNA, 25 bp, Homo sapien
acctgtgatcctagctaccctgaag

SEQ ID NO: 4645497 - DNA, 25 bp, Homo sapien
tgtgatcctagctaccctgaaggct

SEQ ID NO: 4645498 - DNA, 25 bp, Homo sapien
agccatttcagtcactatctcaggg

SEQ ID NO: 4645499 - DNA, 25 bp, Homo sapien
tgaagcaatgtaccagattacgtgt

SEQ ID NO: 4645500 - DNA, 25 bp, Homo sapien
gtcacgttggacatacccacaatag

SEQ ID NO: 4645501 - DNA, 25 bp, Homo sapien
caggcgtggcagcagatagactttc

SEQ ID NO: 4645502 - DNA, 25 bp, Homo sapien
taaaaggcagccagtctagtggtgg

SEQ ID NO: 4645503 - DNA, 25 bp, Homo sapien
catcctgagaaagcggaagcagaac

SEQ ID NO: 4645504 - DNA, 25 bp, Homo sapien
cctgctcaggaaagggtgcatctgt

SEQ ID NO: 4645505 - DNA, 25 bp, Homo sapien
taatgacacactaccctggcagctt

SEQ ID NO: 4645506 - DNA, 25 bp, Homo sapien
aaatatatatcacaattctttattc

SEQ ID NO: 4645507 - DNA, 25 bp, Homo sapien
gtaaatatatatcacaattctttat

SEQ ID NO: 4645508 - DNA, 25 bp, Homo sapien
tatatatcacaattctttattcttt

SEQ ID NO: 4645509 - DNA, 25 bp, Homo sapien
aatatatatcacaattctttattct

SEQ ID NO: 4645510 - DNA, 25 bp, Homo sapien
gaactcaagtagcagaggttacagt

SEQ ID NO: 4645511 - DNA, 25 bp, Homo sapien
ggaaacaaaatattccctggcatgt

SEQ ID NO: 4645512 - DNA, 25 bp, Homo sapien
acgcccggccttatcacttgacttt

SEQ ID NO: 4645513 - DNA, 25 bp, Homo sapien
cccggaccttactcatgattcttga

SEQ ID NO: 4645514 - DNA, 25 bp, Homo sapien
gatatgtccataaagcacctgggta

SEQ ID NO: 4645515 - DNA, 25 bp, Homo sapien
acatcctttgccttcccgacgcgat

SEQ ID NO: 4645516 - DNA, 25 bp, Homo sapien
gaggcttcccctaagcccttcagca

SEQ ID NO: 4645517 - DNA, 25 bp, Homo sapien
tgagaacgcgctaacctctggatct

SEQ ID NO: 4645518 - DNA, 25 bp, Homo sapien
tcccgacgcgattccctgagtgctt

SEQ ID NO: 4645519 - DNA, 25 bp, Homo sapien
agcgcatcccatattctagctgtct

SEQ ID NO: 4645520 - DNA, 25 bp, Homo sapien
cagcgcatcccatattctagctgtc

SEQ ID NO: 4645521 - DNA, 25 bp, Homo sapien
gagcatttgaaacgttctgttgcaa

SEQ ID NO: 4645522 - DNA, 25 bp, Homo sapien
caaagtgggcctgtttgaatctcac

SEQ ID NO: 4645523 - DNA, 25 bp, Homo sapien
ctggtagaaccaaagtgggcctgtt

SEQ ID NO: 4645524 - DNA, 25 bp, Homo sapien
aacgttctgttgcaatgatcccatc

SEQ ID NO: 4645525 - DNA, 25 bp, Homo sapien
tactctgactcttcagtgtatgttt

SEQ ID NO: 4645526 - DNA, 25 bp, Homo sapien
ctactctgactcttcagtgtatgtt

SEQ ID NO: 4645527 - DNA, 25 bp, Homo sapien
tggccactttcagggctccatattc

SEQ ID NO: 4645528 - DNA, 25 bp, Homo sapien
gggctccatattccatattgatttc

SEQ ID NO: 4645529 - DNA, 25 bp, Homo sapien
cagtggccactttcagggctccata

SEQ ID NO: 4645530 - DNA, 25 bp, Homo sapien
ggctccatattccatattgatttct

SEQ ID NO: 4645531 - DNA, 25 bp, Homo sapien
ccttctcacagattctcatctccat

SEQ ID NO: 4645532 - DNA, 25 bp, Homo sapien
gtctgtgtgtccaccgcgacaggca

SEQ ID NO: 4645533 - DNA, 25 bp, Homo sapien
gcgtctgtgtgtccaccgcgacagg

SEQ ID NO: 4645534 - DNA, 25 bp, Homo sapien
gtgcgtctgtgtgtccaccgcgaca

SEQ ID NO: 4645535 - DNA, 25 bp, Homo sapien
ggtggtgttccgcaatgtgtgcgtc

SEQ ID NO: 4645536 - DNA, 25 bp, Homo sapien
gctagattgtagaaagaccagtcat

SEQ ID NO: 4645537 - DNA, 25 bp, Homo sapien
ctcaaaagtgggaaaagctcaagta

SEQ ID NO: 4645538 - DNA, 25 bp, Homo sapien
ccttttataagaagtggagcatgaa

SEQ ID NO: 4645539 - DNA, 25 bp, Homo sapien
tccaggcaatccaatatgagtataa

SEQ ID NO: 4645540 - DNA, 25 bp, Homo sapien
tatctttcttctacccttaagctgc

SEQ ID NO: 4645541 - DNA, 25 bp, Homo sapien
ctctttggccgaagggacagactcc

SEQ ID NO: 4645542 - DNA, 25 bp, Homo sapien
tcttctacccttaagctgctggatt

SEQ ID NO: 4645543 - DNA, 25 bp, Homo sapien
caggctgccaccacgaactttgaaa

SEQ ID NO: 4645544 - DNA, 25 bp, Homo sapien
cttcagtgcagtagtaagagttgga

SEQ ID NO: 4645545 - DNA, 25 bp, Homo sapien
cctctagggagtgcattgcatgcca

SEQ ID NO: 4645546 - DNA, 25 bp, Homo sapien
tgctgataggttattggtagccttg

SEQ ID NO: 4645547 - DNA, 25 bp, Homo sapien
cagagccataaggagcagggatctt

SEQ ID NO: 4645548 - DNA, 25 bp, Homo sapien
ttttctgatcaagtgccctttctcc

SEQ ID NO: 4645549 - DNA, 25 bp, Homo sapien
actgaaatctttgcatactttctcc

SEQ ID NO: 4645550 - DNA, 25 bp, Homo sapien
gaggctttggccaaatgctaagctt

SEQ ID NO: 4645551 - DNA, 25 bp, Homo sapien
ttctcccatgtgcttctcagaaata

SEQ ID NO: 4645552 - DNA, 25 bp, Homo sapien
tcatgccgcttattccatagagact

SEQ ID NO: 4645553 - DNA, 25 bp, Homo sapien
tgccctgcaaaagacacagtcaaga

SEQ ID NO: 4645554 - DNA, 25 bp, Homo sapien
tcaggctgtcactctcaaagaaaaa

SEQ ID NO: 4645555 - DNA, 25 bp, Homo sapien
gtaaatggtatcttttcatgccgct

SEQ ID NO: 4645556 - DNA, 25 bp, Homo sapien
cagttcaagtacagaggcctgagaa

SEQ ID NO: 4645557 - DNA, 25 bp, Homo sapien
gtggctcagttcaagtacagaggcc

SEQ ID NO: 4645558 - DNA, 25 bp, Homo sapien
gcagaagaagagtgtactccagttc

SEQ ID NO: 4645559 - DNA, 25 bp, Homo sapien
ccagaggggcgctggtataagtcct

SEQ ID NO: 4645560 - DNA, 25 bp, Homo sapien
ttgcaaggactgttgagacatctcc

SEQ ID NO: 4645561 - DNA, 25 bp, Homo sapien
cttgcaaggactgttgagacatctc

SEQ ID NO: 4645562 - DNA, 25 bp, Homo sapien
tcatactcttgccagatttcttcaa

SEQ ID NO: 4645563 - DNA, 25 bp, Homo sapien
actcatactcttgccagatttcttc

SEQ ID NO: 4645564 - DNA, 25 bp, Homo sapien
tactcttgccagatttcttcaattc

SEQ ID NO: 4645565 - DNA, 25 bp, Homo sapien
tcactcatactcttgccagatttct

SEQ ID NO: 4645566 - DNA, 25 bp, Homo sapien
taacaacgtgatactgcatagacct

SEQ ID NO: 4645567 - DNA, 25 bp, Homo sapien
ctacttaacaacgtgatactgcata

SEQ ID NO: 4645568 - DNA, 25 bp, Homo sapien
cgtgatactgcatagacctaagctt

SEQ ID NO: 4645569 - DNA, 25 bp, Homo sapien
tactgcatagacctaagcttatttc

SEQ ID NO: 4645570 - DNA, 25 bp, Homo sapien
tatctttaagcccaagcctctttga

SEQ ID NO: 4645571 - DNA, 25 bp, Homo sapien
catgaagaagttactgggagctgcc

SEQ ID NO: 4645572 - DNA, 25 bp, Homo sapien
gcagctaattaaaccgaagaagcct

SEQ ID NO: 4645573 - DNA, 25 bp, Homo sapien
gaactgagtcaacttctgaagataa

SEQ ID NO: 4645574 - DNA, 25 bp, Homo sapien
ctcttcttcaaacttcggagtgctt

SEQ ID NO: 4645575 - DNA, 25 bp, Homo sapien
tcagacaatataggtttttgtaccc

SEQ ID NO: 4645576 - DNA, 25 bp, Homo sapien
caccctctctccttatagtgctggg

SEQ ID NO: 4645577 - DNA, 25 bp, Homo sapien
ttcaaacttcggagtgcttcctgtc

SEQ ID NO: 4645578 - DNA, 25 bp, Homo sapien
gctggtgacactcagatctagcctg

SEQ ID NO: 4645579 - DNA, 25 bp, Homo sapien
cacattgtacatggttttccaacag

SEQ ID NO: 4645580 - DNA, 25 bp, Homo sapien
ctacaactttcacattgtacatggt

SEQ ID NO: 4645581 - DNA, 25 bp, Homo sapien
cactcagatctagcctgcagtaaaa

SEQ ID NO: 4645582 - DNA, 25 bp, Homo sapien
gggtgggatcatcgtgttctaaacc

SEQ ID NO: 4645583 - DNA, 25 bp, Homo sapien
ctggggtgggatcatcgtgttctaa

SEQ ID NO: 4645584 - DNA, 25 bp, Homo sapien
tggggtgggatcatcgtgttctaaa

SEQ ID NO: 4645585 - DNA, 25 bp, Homo sapien
ggggtgggatcatcgtgttctaaac

SEQ ID NO: 4645586 - DNA, 25 bp, Homo sapien
acatctctggggacccctaaactgg

SEQ ID NO: 4645587 - DNA, 25 bp, Homo sapien
aacatctctggggacccctaaactg

SEQ ID NO: 4645588 - DNA, 25 bp, Homo sapien
catctctggggacccctaaactggg

SEQ ID NO: 4645589 - DNA, 25 bp, Homo sapien
gctccctacctcctcaatgccaata

SEQ ID NO: 4645590 - DNA, 25 bp, Homo sapien
ttttctcccgcgagttggctccgcg

SEQ ID NO: 4645591 - DNA, 25 bp, Homo sapien
gccaataggatttttctcccgcgag

SEQ ID NO: 4645592 - DNA, 25 bp, Homo sapien
gggcggttgccggtaccctgcaggc

SEQ ID NO: 4645593 - DNA, 25 bp, Homo sapien
gcggacacaggctccggccttgtcc

SEQ ID NO: 4645594 - DNA, 25 bp, Homo sapien
ggacacaggctccggccttgtcctg

SEQ ID NO: 4645595 - DNA, 25 bp, Homo sapien
acaggctccggccttgtcctgcccc

SEQ ID NO: 4645596 - DNA, 25 bp, Homo sapien
acacaggctccggccttgtcctgcc

SEQ ID NO: 4645597 - DNA, 25 bp, Homo sapien
cgcacgcggcggagacgcagcggga

SEQ ID NO: 4645598 - DNA, 25 bp, Homo sapien
tgctggtcgaggagggcgcacgcgg

SEQ ID NO: 4645599 - DNA, 25 bp, Homo sapien
agcgcagcgcgggtctgctggtcga

SEQ ID NO: 4645600 - DNA, 25 bp, Homo sapien
gcgggtctgctggtcgaggagggcg

SEQ ID NO: 4645601 - DNA, 25 bp, Homo sapien
ttgccgctgtcgctcacgccgagga

SEQ ID NO: 4645602 - DNA, 25 bp, Homo sapien
gtcgctcacgccgaggaggtgatcc

SEQ ID NO: 4645603 - DNA, 25 bp, Homo sapien
aacgtccctcggaagatgtgcgcca

SEQ ID NO: 4645604 - DNA, 25 bp, Homo sapien
tccaggtggagtggacgaacgtccc

SEQ ID NO: 4645605 - DNA, 25 bp, Homo sapien
gtcaacttgatctaaatagctactg

SEQ ID NO: 4645606 - DNA, 25 bp, Homo sapien
gctatcatcaaatccagtcaacttg

SEQ ID NO: 4645607 - DNA, 25 bp, Homo sapien
tctgcattactgacaataaccgctg

SEQ ID NO: 4645608 - DNA, 25 bp, Homo sapien
tagctactgattctatccacctctc

SEQ ID NO: 4645609 - DNA, 25 bp, Homo sapien
ttgcctcacaactctatcaaggtgc

SEQ ID NO: 4645610 - DNA, 25 bp, Homo sapien
ggcaaattggaataactacttcaga

SEQ ID NO: 4645611 - DNA, 25 bp, Homo sapien
gatttgtaagggatttggcagactg

SEQ ID NO: 4645612 - DNA, 25 bp, Homo sapien
tggtgtccttaccttgtctcaaggt

SEQ ID NO: 4645613 - DNA, 25 bp, Homo sapien
caaccatctgagaatgttgattaac

SEQ ID NO: 4645614 - DNA, 25 bp, Homo sapien
ccatctgagaatgttgattaactat

SEQ ID NO: 4645615 - DNA, 25 bp, Homo sapien
ttgtgttgcatcttcaagcacattg

SEQ ID NO: 4645616 - DNA, 25 bp, Homo sapien
tcttcaagcacattggctacaacca

SEQ ID NO: 4645617 - DNA, 25 bp, Homo sapien
catctgcttctatcgtcttacctgg

SEQ ID NO: 4645618 - DNA, 25 bp, Homo sapien
tacctaccaagatttccagtgacgc

SEQ ID NO: 4645619 - DNA, 25 bp, Homo sapien
ccagtgacgctgaaatgctagatta

SEQ ID NO: 4645620 - DNA, 25 bp, Homo sapien
aagaaggctgcaactaactctaagc

SEQ ID NO: 4645621 - DNA, 25 bp, Homo sapien
tatttagtccacagtttgatttaca

SEQ ID NO: 4645622 - DNA, 25 bp, Homo sapien
tagtccacagtttgatttacaaagc

SEQ ID NO: 4645623 - DNA, 25 bp, Homo sapien
tttagtccacagtttgatttacaaa

SEQ ID NO: 4645624 - DNA, 25 bp, Homo sapien
ttagtccacagtttgatttacaaag

SEQ ID NO: 4645625 - DNA, 25 bp, Homo sapien
taaagtatttagactccaacagcat

SEQ ID NO: 4645626 - DNA, 25 bp, Homo sapien
gcattattgggccagtgggcaaagt

SEQ ID NO: 4645627 - DNA, 25 bp, Homo sapien
ccaacagcatgtctataacttactc

SEQ ID NO: 4645628 - DNA, 25 bp, Homo sapien
gaatgggtctacagatcatgtggta

SEQ ID NO: 4645629 - DNA, 25 bp, Homo sapien
cagtggacacaaggtaaggctcctc

SEQ ID NO: 4645630 - DNA, 25 bp, Homo sapien
tgaagagtttatcccaggccaggca

SEQ ID NO: 4645631 - DNA, 25 bp, Homo sapien
taggtaccagttcggccacagaaga

SEQ ID NO: 4645632 - DNA, 25 bp, Homo sapien
gggctttaagggaacataggcagta

SEQ ID NO: 4645633 - DNA, 25 bp, Homo sapien
tggtcatccaaagacaagctgtgtg

SEQ ID NO: 4645634 - DNA, 25 bp, Homo sapien
aaacttagctgatgtctgcccacag

SEQ ID NO: 4645635 - DNA, 25 bp, Homo sapien
taaaaatggctaattggagaggcgg

SEQ ID NO: 4645636 - DNA, 25 bp, Homo sapien
catagcaattatgagccaccgaact

SEQ ID NO: 4645637 - DNA, 25 bp, Homo sapien
tggtggctcagttctcttatttcac

SEQ ID NO: 4645638 - DNA, 25 bp, Homo sapien
tcttatttcacacggcttgaagcac

SEQ ID NO: 4645639 - DNA, 25 bp, Homo sapien
tatttcacacggcttgaagcaccat

SEQ ID NO: 4645640 - DNA, 25 bp, Homo sapien
ttctcttatttcacacggcttgaag

SEQ ID NO: 4645641 - DNA, 25 bp, Homo sapien
tacttcaactgcttccaagccttct

SEQ ID NO: 4645642 - DNA, 25 bp, Homo sapien
cccatctcagcctctacttcaactg

SEQ ID NO: 4645643 - DNA, 25 bp, Homo sapien
atctcagcctctacttcaactgctt

SEQ ID NO: 4645644 - DNA, 25 bp, Homo sapien
catctcagcctctacttcaactgct

SEQ ID NO: 4645645 - DNA, 25 bp, Homo sapien
tccatcctccaaccgtttccaccat

SEQ ID NO: 4645646 - DNA, 25 bp, Homo sapien
ctctccatcctccaaccgtttccac

SEQ ID NO: 4645647 - DNA, 25 bp, Homo sapien
atcctccaaccgtttccaccattct

SEQ ID NO: 4645648 - DNA, 25 bp, Homo sapien
tctccatcctccaaccgtttccacc

SEQ ID NO: 4645649 - DNA, 25 bp, Homo sapien
tttcaaaagcaacctcataaagagg

SEQ ID NO: 4645650 - DNA, 25 bp, Homo sapien
caaaagcaacctcataaagaggaag

SEQ ID NO: 4645651 - DNA, 25 bp, Homo sapien
tttaatttcaaaagcaacctcataa

SEQ ID NO: 4645652 - DNA, 25 bp, Homo sapien
aatttcaaaagcaacctcataaaga

SEQ ID NO: 4645653 - DNA, 25 bp, Homo sapien
ctacttccttgtgtgcagtacttac

SEQ ID NO: 4645654 - DNA, 25 bp, Homo sapien
actacttccttgtgtgcagtactta

SEQ ID NO: 4645655 - DNA, 25 bp, Homo sapien
tactacttccttgtgtgcagtactt

SEQ ID NO: 4645656 - DNA, 25 bp, Homo sapien
cttactacttccttgtgtgcagtac

SEQ ID NO: 4645657 - DNA, 25 bp, Homo sapien
tgaaagtgactgttccattgcacaa

SEQ ID NO: 4645658 - DNA, 25 bp, Homo sapien
aagtgactgttccattgcacaaaaa

SEQ ID NO: 4645659 - DNA, 25 bp, Homo sapien
gaaagtgactgttccattgcacaaa

SEQ ID NO: 4645660 - DNA, 25 bp, Homo sapien
ttgaaagtgactgttccattgcaca

SEQ ID NO: 4645661 - DNA, 25 bp, Homo sapien
ggatgtgtgtatcaaccagcccagg

SEQ ID NO: 4645662 - DNA, 25 bp, Homo sapien
tgtgtatcaaccagcccaggcatga

SEQ ID NO: 4645663 - DNA, 25 bp, Homo sapien
gcatggatgtgtgtatcaaccagcc

SEQ ID NO: 4645664 - DNA, 25 bp, Homo sapien
tgagaggcatggatgtgtgtatcaa

SEQ ID NO: 4645665 - DNA, 25 bp, Homo sapien
ccaagagtggcaggtctatgctact

SEQ ID NO: 4645666 - DNA, 25 bp, Homo sapien
tgcaaagtcgatgttctggaatctg

SEQ ID NO: 4645667 - DNA, 25 bp, Homo sapien
acttggtcagccactccaagagtgg

SEQ ID NO: 4645668 - DNA, 25 bp, Homo sapien
ggtatatacttcttctgcaaagtcg

SEQ ID NO: 4645669 - DNA, 25 bp, Homo sapien
tccctctttgggtcaggttctagaa

SEQ ID NO: 4645670 - DNA, 25 bp, Homo sapien
tattttggcagcatagtgtctatcc

SEQ ID NO: 4645671 - DNA, 25 bp, Homo sapien
aatgttagcacttgctcggccgggc

SEQ ID NO: 4645672 - DNA, 25 bp, Homo sapien
cagcttttctagtgtcatgtggtgc

SEQ ID NO: 4645673 - DNA, 25 bp, Homo sapien
gcaaggagcagagatgagtcagtgt

SEQ ID NO: 4645674 - DNA, 25 bp, Homo sapien
ctgtaatgtcggcaaggagcagaga

SEQ ID NO: 4645675 - DNA, 25 bp, Homo sapien
caaagtaacaagctgtggttgttcc

SEQ ID NO: 4645676 - DNA, 25 bp, Homo sapien
tgaattgttgcaaagtaacaagctg

SEQ ID NO: 4645677 - DNA, 25 bp, Homo sapien
ctctcagtttccttgatcgattcct

SEQ ID NO: 4645678 - DNA, 25 bp, Homo sapien
cacaaatgcccgctgtccaaattta

SEQ ID NO: 4645679 - DNA, 25 bp, Homo sapien
ccttgatcgattcctcagtggtctc

SEQ ID NO: 4645680 - DNA, 25 bp, Homo sapien
tcaaatccatgcaaactttgcccac

SEQ ID NO: 4645681 - DNA, 25 bp, Homo sapien
ccagcctgggtgacagagtgacagt

SEQ ID NO: 4645682 - DNA, 25 bp, Homo sapien
tcttgaacacaggaggtggaggttt

SEQ ID NO: 4645683 - DNA, 25 bp, Homo sapien
cagtgagctgagatcgcgccattgc

SEQ ID NO: 4645684 - DNA, 25 bp, Homo sapien
actccagcctgggtgacagagtgac

SEQ ID NO: 4645685 - DNA, 25 bp, Homo sapien
ttcttttggagcatttctgacacaa

SEQ ID NO: 4645686 - DNA, 25 bp, Homo sapien
tcttttggagcatttctgacacaaa

SEQ ID NO: 4645687 - DNA, 25 bp, Homo sapien
gttcttttggagcatttctgacaca

SEQ ID NO: 4645688 - DNA, 25 bp, Homo sapien
cttttggagcatttctgacacaaat

SEQ ID NO: 4645689 - DNA, 25 bp, Homo sapien
taaaagcgagctctgaacaaagtta

SEQ ID NO: 4645690 - DNA, 25 bp, Homo sapien
gagataagccagtcgtacacagact

SEQ ID NO: 4645691 - DNA, 25 bp, Homo sapien
cagtgacagtccacagtgacacatc

SEQ ID NO: 4645692 - DNA, 25 bp, Homo sapien
gacacatcaggctctaggtaaatac

SEQ ID NO: 4645693 - DNA, 25 bp, Homo sapien
attctgaatgatactgcaatgaata

SEQ ID NO: 4645694 - DNA, 25 bp, Homo sapien
atatagacatatacactgcattttc

SEQ ID NO: 4645695 - DNA, 25 bp, Homo sapien
ctattctgaatgatactgcaatgaa

SEQ ID NO: 4645696 - DNA, 25 bp, Homo sapien
atagacatatacactgcattttctt

SEQ ID NO: 4645697 - DNA, 25 bp, Homo sapien
caacttccaggtgccaccagtcagc

SEQ ID NO: 4645698 - DNA, 25 bp, Homo sapien
tcagcccacgcccatcaagccctgt

SEQ ID NO: 4645699 - DNA, 25 bp, Homo sapien
cagagccaatgttgaggtggccacc

SEQ ID NO: 4645700 - DNA, 25 bp, Homo sapien
agtggccagagccaatgttgaggtg

SEQ ID NO: 4645701 - DNA, 25 bp, Homo sapien
cacatagggaccaagacagccagtg

SEQ ID NO: 4645702 - DNA, 25 bp, Homo sapien
ccatgtgaggtgtcacacacatagg

SEQ ID NO: 4645703 - DNA, 25 bp, Homo sapien
tggcaggggcataggactagacact

SEQ ID NO: 4645704 - DNA, 25 bp, Homo sapien
ggtgtcacacacatagggaccaaga

SEQ ID NO: 4645705 - DNA, 25 bp, Homo sapien
aacgtggtgtcactatgggcttcac

SEQ ID NO: 4645706 - DNA, 25 bp, Homo sapien
tcacccatcaaagtctcagagcagg

SEQ ID NO: 4645707 - DNA, 25 bp, Homo sapien
gagagggaaaaacgtggtgtcacta

SEQ ID NO: 4645708 - DNA, 25 bp, Homo sapien
gcaaatcacgggttttagcaatgtt

SEQ ID NO: 4645709 - DNA, 25 bp, Homo sapien
aacttcatcacgattttcacttata

SEQ ID NO: 4645710 - DNA, 25 bp, Homo sapien
catcacgattttcacttatatggct

SEQ ID NO: 4645711 - DNA, 25 bp, Homo sapien
tcaacttcatcacgattttcactta

SEQ ID NO: 4645712 - DNA, 25 bp, Homo sapien
cttcatcacgattttcacttatatg

SEQ ID NO: 4645713 - DNA, 25 bp, Homo sapien
accaggcccggcccagtgactacag

SEQ ID NO: 4645714 - DNA, 25 bp, Homo sapien
ccaccaggcccggcccagtgactac

SEQ ID NO: 4645715 - DNA, 25 bp, Homo sapien
ccaggcccggcccagtgactacaga

SEQ ID NO: 4645716 - DNA, 25 bp, Homo sapien
caccaggcccggcccagtgactaca

SEQ ID NO: 4645717 - DNA, 25 bp, Homo sapien
ggtagcagccgtgtgccatcactgt

SEQ ID NO: 4645718 - DNA, 25 bp, Homo sapien
gacagtgtgcgatggatgctcctcg

SEQ ID NO: 4645719 - DNA, 25 bp, Homo sapien
gaggtagcagccgtgtgccatcact

SEQ ID NO: 4645720 - DNA, 25 bp, Homo sapien
tcatggaatacgttcagttcttctg

SEQ ID NO: 4645721 - DNA, 25 bp, Homo sapien
tgcaacccaatcattcgtaatctac

SEQ ID NO: 4645722 - DNA, 25 bp, Homo sapien
tttggctgctaatctgcaacccaat

SEQ ID NO: 4645723 - DNA, 25 bp, Homo sapien
caatcattcgtaatctaccaaacaa

SEQ ID NO: 4645724 - DNA, 25 bp, Homo sapien
caaacacagaatagaggggagatcc

SEQ ID NO: 4645725 - DNA, 25 bp, Homo sapien
aagatgctgtgctcttcacgtgtcc

SEQ ID NO: 4645726 - DNA, 25 bp, Homo sapien
tcaacagcacgagtaaatgtctatc

SEQ ID NO: 4645727 - DNA, 25 bp, Homo sapien
gataaatgtcctcttacgtgttctc

SEQ ID NO: 4645728 - DNA, 25 bp, Homo sapien
cacgtgtcctctgagataaatgtcc

SEQ ID NO: 4645729 - DNA, 25 bp, Homo sapien
gggtttttaacctagcatccatgga

SEQ ID NO: 4645730 - DNA, 25 bp, Homo sapien
gcattccgtcaggtccaacagggta

SEQ ID NO: 4645731 - DNA, 25 bp, Homo sapien
gatttcctggctgacatatgggttc

SEQ ID NO: 4645732 - DNA, 25 bp, Homo sapien
aaacagtaatgggagtgactaccct

SEQ ID NO: 4645733 - DNA, 25 bp, Homo sapien
catttgggtattactgtcacagcca

SEQ ID NO: 4645734 - DNA, 25 bp, Homo sapien
cagtggtaacttccgtgatgatacg

SEQ ID NO: 4645735 - DNA, 25 bp, Homo sapien
acttcttgggcaggataactttgag

SEQ ID NO: 4645736 - DNA, 25 bp, Homo sapien
attaaactccgggagcccacagtgg

SEQ ID NO: 4645737 - DNA, 25 bp, Homo sapien
tgaacactaataacaatgacggtga

SEQ ID NO: 4645738 - DNA, 25 bp, Homo sapien
cagaacaaggagatccatgtggttc

SEQ ID NO: 4645739 - DNA, 25 bp, Homo sapien
tagagagaggagatgtcagaacaag

SEQ ID NO: 4645740 - DNA, 25 bp, Homo sapien
acggtgatgccactgaaaattgtgc

SEQ ID NO: 4645741 - DNA, 25 bp, Homo sapien
cagccctatcttgacttcatgtttc

SEQ ID NO: 4645742 - DNA, 25 bp, Homo sapien
ccctatcttgacttcatgtttcagg

SEQ ID NO: 4645743 - DNA, 25 bp, Homo sapien
caggacttctagcacatttagaaat

SEQ ID NO: 4645744 - DNA, 25 bp, Homo sapien
ttcatgtttcaggacttctagcaca

SEQ ID NO: 4645745 - DNA, 25 bp, Homo sapien
gattgcatcaagcatggaatatgaa

SEQ ID NO: 4645746 - DNA, 25 bp, Homo sapien
catcaagcatggaatatgaatagcc

SEQ ID NO: 4645747 - DNA, 25 bp, Homo sapien
ctcttctgattgcatcaagcatgga

SEQ ID NO: 4645748 - DNA, 25 bp, Homo sapien
catggaatatgaatagccaccagcc

SEQ ID NO: 4645749 - DNA, 25 bp, Homo sapien
tcctccaagagtagctagtctgaag

SEQ ID NO: 4645750 - DNA, 25 bp, Homo sapien
cttcctccaagagtagctagtctga

SEQ ID NO: 4645751 - DNA, 25 bp, Homo sapien
gcttcctccaagagtagctagtctg

SEQ ID NO: 4645752 - DNA, 25 bp, Homo sapien
tggcttcctccaagagtagctagtc

SEQ ID NO: 4645753 - DNA, 25 bp, Homo sapien
gaaggtaagaaatctgcatgctggc

SEQ ID NO: 4645754 - DNA, 25 bp, Homo sapien
acagctgtgtaagcctcactcaggc

SEQ ID NO: 4645755 - DNA, 25 bp, Homo sapien
tacagttacacgtgagaattgggaa

SEQ ID NO: 4645756 - DNA, 25 bp, Homo sapien
catggtcttggcagggatttataca

SEQ ID NO: 4645757 - DNA, 25 bp, Homo sapien
aaagtttccaatctcaccatccagc

SEQ ID NO: 4645758 - DNA, 25 bp, Homo sapien
tttggggttgatcaggatggcatca

SEQ ID NO: 4645759 - DNA, 25 bp, Homo sapien
taaaacaggtcaatgggagagtcgg

SEQ ID NO: 4645760 - DNA, 25 bp, Homo sapien
gcatcaaattccttgcccacttcaa

SEQ ID NO: 4645761 - DNA, 25 bp, Homo sapien
ctagatagaggaacttctggataac

SEQ ID NO: 4645762 - DNA, 25 bp, Homo sapien
agatagaggaacttctggataacag

SEQ ID NO: 4645763 - DNA, 25 bp, Homo sapien
gatagaggaacttctggataacagc

SEQ ID NO: 4645764 - DNA, 25 bp, Homo sapien
tagatagaggaacttctggataaca

SEQ ID NO: 4645765 - DNA, 25 bp, Homo sapien
tcctgggctcactgaacagaatggg

SEQ ID NO: 4645766 - DNA, 25 bp, Homo sapien
tgtgagtacatcaccagcacgtgtg

SEQ ID NO: 4645767 - DNA, 25 bp, Homo sapien
gattagggtctgaattctgcaccag

SEQ ID NO: 4645768 - DNA, 25 bp, Homo sapien
catggcagggcagtatgtcagatac

SEQ ID NO: 4645769 - DNA, 25 bp, Homo sapien
aaacctcttcaatatttcgatcatc

SEQ ID NO: 4645770 - DNA, 25 bp, Homo sapien
actgagctggaaaacggaaccacct

SEQ ID NO: 4645771 - DNA, 25 bp, Homo sapien
tgctttccgcccacataaacctctt

SEQ ID NO: 4645772 - DNA, 25 bp, Homo sapien
agctggaaaacggaaccacctgctt

SEQ ID NO: 4645773 - DNA, 25 bp, Homo sapien
ctgggcacaagggagatgcagaacc

SEQ ID NO: 4645774 - DNA, 25 bp, Homo sapien
cccaggagaactttgtagacgcccg

SEQ ID NO: 4645775 - DNA, 25 bp, Homo sapien
caggagaactttgtagacgcccgag

SEQ ID NO: 4645776 - DNA, 25 bp, Homo sapien
agatgcagaaccacgctaatcccag

SEQ ID NO: 4645777 - DNA, 25 bp, Homo sapien
caaggcatctttgacgtggctcagg

SEQ ID NO: 4645778 - DNA, 25 bp, Homo sapien
agtcttaccgtaggaacaccaccag

SEQ ID NO: 4645779 - DNA, 25 bp, Homo sapien
gaagatttttgctagccccgtagag

SEQ ID NO: 4645780 - DNA, 25 bp, Homo sapien
taacattcaggaacaccgcacttgg

SEQ ID NO: 4645781 - DNA, 25 bp, Homo sapien
ggaggctggtaagtgaattgtttct

SEQ ID NO: 4645782 - DNA, 25 bp, Homo sapien
aggaggctggtaagtgaattgtttc

SEQ ID NO: 4645783 - DNA, 25 bp, Homo sapien
gaggaggctggtaagtgaattgttt

SEQ ID NO: 4645784 - DNA, 25 bp, Homo sapien
aggctggtaagtgaattgtttcttt

SEQ ID NO: 4645785 - DNA, 25 bp, Homo sapien
ttcaaagtgtattccgttgaaaata

SEQ ID NO: 4645786 - DNA, 25 bp, Homo sapien
tcaaagtgtattccgttgaaaatac

SEQ ID NO: 4645787 - DNA, 25 bp, Homo sapien
aagtgtattccgttgaaaataccat

SEQ ID NO: 4645788 - DNA, 25 bp, Homo sapien
gtgtattccgttgaaaataccatgg

SEQ ID NO: 4645789 - DNA, 25 bp, Homo sapien
aatgcattgctagatctcacaccgg

SEQ ID NO: 4645790 - DNA, 25 bp, Homo sapien
ggatctctcctacgtatagcacaag

SEQ ID NO: 4645791 - DNA, 25 bp, Homo sapien
gatacaatgtgccttccagcttgcc

SEQ ID NO: 4645792 - DNA, 25 bp, Homo sapien
tgtgaacacatgcacggagaccaat

SEQ ID NO: 4645793 - DNA, 25 bp, Homo sapien
gatccacaaagtaactcctcaactc

SEQ ID NO: 4645794 - DNA, 25 bp, Homo sapien
taaatttggacaagatccacaaagt

SEQ ID NO: 4645795 - DNA, 25 bp, Homo sapien
tcactaaatttggacaagatccaca

SEQ ID NO: 4645796 - DNA, 25 bp, Homo sapien
taactcctcaactctcagtctttca

SEQ ID NO: 4645797 - DNA, 25 bp, Homo sapien
tcattggtctggttgacttccacat

SEQ ID NO: 4645798 - DNA, 25 bp, Homo sapien
acataacaggtaagctaagaataac

SEQ ID NO: 4645799 - DNA, 25 bp, Homo sapien
tcacataacaggtaagctaagaata

SEQ ID NO: 4645800 - DNA, 25 bp, Homo sapien
agaataacttctgttacccaagtca

SEQ ID NO: 4645801 - DNA, 25 bp, Homo sapien
cacataacaggtaagctaagaataa

SEQ ID NO: 4645802 - DNA, 25 bp, Homo sapien
tattcttaagagtagcgatcaggag

SEQ ID NO: 4645803 - DNA, 25 bp, Homo sapien
tcactcagcacaataacagtaagcg

SEQ ID NO: 4645804 - DNA, 25 bp, Homo sapien
cagtaagcgaatcatacaaatattg

SEQ ID NO: 4645805 - DNA, 25 bp, Homo sapien
cgatcaggagtttaacaacaaatgt

SEQ ID NO: 4645806 - DNA, 25 bp, Homo sapien
gagctgggtcaccagtgcaatccga

SEQ ID NO: 4645807 - DNA, 25 bp, Homo sapien
taagctgctcagacattgggatgaa

SEQ ID NO: 4645808 - DNA, 25 bp, Homo sapien
ccagtgcaatccgaagacttgttct

SEQ ID NO: 4645809 - DNA, 25 bp, Homo sapien
acttgttctgtaagctgctcagaca

SEQ ID NO: 4645810 - DNA, 25 bp, Homo sapien
tgagggaccttcaaagcatgctcca

SEQ ID NO: 4645811 - DNA, 25 bp, Homo sapien
cagttagagtcagctacatgcagtc

SEQ ID NO: 4645812 - DNA, 25 bp, Homo sapien
acacagcttagtttgatctggccag

SEQ ID NO: 4645813 - DNA, 25 bp, Homo sapien
ctagtctgcatgtagctgagggacc

SEQ ID NO: 4645814 - DNA, 25 bp, Homo sapien
tgctggggcaaggcctccaattggc

SEQ ID NO: 4645815 - DNA, 25 bp, Homo sapien
aataagaaggctacagaggatttta

SEQ ID NO: 4645816 - DNA, 25 bp, Homo sapien
gaaataagaaggctacagaggattt

SEQ ID NO: 4645817 - DNA, 25 bp, Homo sapien
gggaaataagaaggctacagaggat

SEQ ID NO: 4645818 - DNA, 25 bp, Homo sapien
ataagaaggctacagaggattttag

SEQ ID NO: 4645819 - DNA, 25 bp, Homo sapien
tgtaatcctatcctcagtatcttta

SEQ ID NO: 4645820 - DNA, 25 bp, Homo sapien
gaagtggaggatggcatctctggca

SEQ ID NO: 4645821 - DNA, 25 bp, Homo sapien
gtatctttacaagagaactgtcagc

SEQ ID NO: 4645822 - DNA, 25 bp, Homo sapien
gcgtgagccactacctgtaatccta

SEQ ID NO: 4645823 - DNA, 25 bp, Homo sapien
gccacatcgtagaaagacagcgctc

SEQ ID NO: 4645824 - DNA, 25 bp, Homo sapien
gcacagcggctccaggaacaactgg

SEQ ID NO: 4645825 - DNA, 25 bp, Homo sapien
cagctgtggagcagtccgcttccaa

SEQ ID NO: 4645826 - DNA, 25 bp, Homo sapien
ccatcagtgggttgggagccacatc

SEQ ID NO: 4645827 - DNA, 25 bp, Homo sapien
gcaaactctctcagcttatttgggt

SEQ ID NO: 4645828 - DNA, 25 bp, Homo sapien
caggcaaatgggaaccttggcccct

SEQ ID NO: 4645829 - DNA, 25 bp, Homo sapien
tgtccagtgactccagcaaactctc

SEQ ID NO: 4645830 - DNA, 25 bp, Homo sapien
cctgaattcaaatgtcgtatgtgtc

SEQ ID NO: 4645831 - DNA, 25 bp, Homo sapien
gcctgactgtcaatcactatcactt

SEQ ID NO: 4645832 - DNA, 25 bp, Homo sapien
caagatatcttcacttaataacagg

SEQ ID NO: 4645833 - DNA, 25 bp, Homo sapien
cacttaataacaggttgttatgagg

SEQ ID NO: 4645834 - DNA, 25 bp, Homo sapien
attaactattgcctgactgtcaatc

SEQ ID NO: 4645835 - DNA, 25 bp, Homo sapien
gaggaatggacagtctttcaggtca

SEQ ID NO: 4645836 - DNA, 25 bp, Homo sapien
accgcacaccgtgtggcttcatgga

SEQ ID NO: 4645837 - DNA, 25 bp, Homo sapien
aaggtggaatcccttcagctcaaag

SEQ ID NO: 4645838 - DNA, 25 bp, Homo sapien
gctcaaagtgcctcatgacattgcc

SEQ ID NO: 4645839 - DNA, 25 bp, Homo sapien
ttcacatcaacacactctgagagtt

SEQ ID NO: 4645840 - DNA, 25 bp, Homo sapien
tcacatcaacacactctgagagttg

SEQ ID NO: 4645841 - DNA, 25 bp, Homo sapien
cacatcaacacactctgagagttgg

SEQ ID NO: 4645842 - DNA, 25 bp, Homo sapien
cttgagcagcattggtagtggtttt

SEQ ID NO: 4645843 - DNA, 25 bp, Homo sapien
aggaggatggcctttgcctacggtc

SEQ ID NO: 4645844 - DNA, 25 bp, Homo sapien
cggtcttagcaggacaagcaaataa

SEQ ID NO: 4645845 - DNA, 25 bp, Homo sapien
cagaggcagaccctatgcttagaat

SEQ ID NO: 4645846 - DNA, 25 bp, Homo sapien
ggaagtctttagctcttcagaggca

SEQ ID NO: 4645847 - DNA, 25 bp, Homo sapien
gggaagtatatgaatcctgagcaca

SEQ ID NO: 4645848 - DNA, 25 bp, Homo sapien
tatgtggctaaccagtcaatattca

SEQ ID NO: 4645849 - DNA, 25 bp, Homo sapien
ggctggttggagattcacccaaact

SEQ ID NO: 4645850 - DNA, 25 bp, Homo sapien
gcacaagctatgtggctaaccagtc

SEQ ID NO: 4645851 - DNA, 25 bp, Homo sapien
cagggatgagtttggacggtaaatc

SEQ ID NO: 4645852 - DNA, 25 bp, Homo sapien
cctctgagtctaggatcagggtcat

SEQ ID NO: 4645853 - DNA, 25 bp, Homo sapien
ggtaaatctgagtcactgcctgatc

SEQ ID NO: 4645854 - DNA, 25 bp, Homo sapien
caggtgcctctgagtctaggatcag

SEQ ID NO: 4645855 - DNA, 25 bp, Homo sapien
ttttgtcctccagcgtcccgcagct

SEQ ID NO: 4645856 - DNA, 25 bp, Homo sapien
gctctggatttacttctagggtaac

SEQ ID NO: 4645857 - DNA, 25 bp, Homo sapien
gtcctccagcgtcccgcagctctgg

SEQ ID NO: 4645858 - DNA, 25 bp, Homo sapien
cagctctggatttacttctagggta

SEQ ID NO: 4645859 - DNA, 25 bp, Homo sapien
ccagttacaaacaggttagaggaga

SEQ ID NO: 4645860 - DNA, 25 bp, Homo sapien
ggcgacagcttgcaaaccaaaacta

SEQ ID NO: 4645861 - DNA, 25 bp, Homo sapien
ctggcgacagcttgcaaaccaaaac

SEQ ID NO: 4645862 - DNA, 25 bp, Homo sapien
cgacagcttgcaaaccaaaactatt

SEQ ID NO: 4645863 - DNA, 25 bp, Homo sapien
ctcctcagtgaccaccggccacgct

SEQ ID NO: 4645864 - DNA, 25 bp, Homo sapien
cgctgaatgaaacttgctgtcacac

SEQ ID NO: 4645865 - DNA, 25 bp, Homo sapien
tcctcatggtcgctcctcagtgacc

SEQ ID NO: 4645866 - DNA, 25 bp, Homo sapien
aatgaaacttgctgtcacactgcca

SEQ ID NO: 4645867 - DNA, 25 bp, Homo sapien
taggaggctgtactcttccccaagg

SEQ ID NO: 4645868 - DNA, 25 bp, Homo sapien
ggaggctgtactcttccccaaggtg

SEQ ID NO: 4645869 - DNA, 25 bp, Homo sapien
taataggaggctgtactcttcccca

SEQ ID NO: 4645870 - DNA, 25 bp, Homo sapien
gaggctgtactcttccccaaggtga

SEQ ID NO: 4645871 - DNA, 25 bp, Homo sapien
ggggaattttaatagcccacacagc

SEQ ID NO: 4645872 - DNA, 25 bp, Homo sapien
tcagcctgggggaattttaatagcc

SEQ ID NO: 4645873 - DNA, 25 bp, Homo sapien
tgaaacactcagcctgggggaattt

SEQ ID NO: 4645874 - DNA, 25 bp, Homo sapien
tgggggaattttaatagcccacaca

SEQ ID NO: 4645875 - DNA, 25 bp, Homo sapien
tctgctgtaagggtcgtgggctctt

SEQ ID NO: 4645876 - DNA, 25 bp, Homo sapien
cctaagtgtgtgctaattctgagtt

SEQ ID NO: 4645877 - DNA, 25 bp, Homo sapien
tcttgggaatttggtgaaagctcta

SEQ ID NO: 4645878 - DNA, 25 bp, Homo sapien
tttgcagaagacctaagtgtgtgct

SEQ ID NO: 4645879 - DNA, 25 bp, Homo sapien
catattgggaacagctgtaccaggc

SEQ ID NO: 4645880 - DNA, 25 bp, Homo sapien
ggctcctgaactacttggcacagca

SEQ ID NO: 4645881 - DNA, 25 bp, Homo sapien
aaaacccagctcattgcatgtcagg

SEQ ID NO: 4645882 - DNA, 25 bp, Homo sapien
tctcaagcctgttccttaggagccg

SEQ ID NO: 4645883 - DNA, 25 bp, Homo sapien
aacatgaatcaaaccctagtctaag

SEQ ID NO: 4645884 - DNA, 25 bp, Homo sapien
tgcctgattcaaatctcacctctgt

SEQ ID NO: 4645885 - DNA, 25 bp, Homo sapien
gaagggctggatctttgaaagcagt

SEQ ID NO: 4645886 - DNA, 25 bp, Homo sapien
aagggaactctagacagaggctgcc

SEQ ID NO: 4645887 - DNA, 25 bp, Homo sapien
ttaacacaacttgggaaagcaggtg

SEQ ID NO: 4645888 - DNA, 25 bp, Homo sapien
tgcattccaggtgcctatatccctc

SEQ ID NO: 4645889 - DNA, 25 bp, Homo sapien
atgtgttggcaggaattcactccct

SEQ ID NO: 4645890 - DNA, 25 bp, Homo sapien
cattgggtgtagtccaggatgatct

SEQ ID NO: 4645891 - DNA, 25 bp, Homo sapien
gccaagtgaatctttgtgcaaatta

SEQ ID NO: 4645892 - DNA, 25 bp, Homo sapien
tagccaagtgaatctttgtgcaaat

SEQ ID NO: 4645893 - DNA, 25 bp, Homo sapien
agccaagtgaatctttgtgcaaatt

SEQ ID NO: 4645894 - DNA, 25 bp, Homo sapien
tacacagtcatggagtcaggacccc

SEQ ID NO: 4645895 - DNA, 25 bp, Homo sapien
aaatgaactctggaagtcaagcccc

SEQ ID NO: 4645896 - DNA, 25 bp, Homo sapien
ggaatggccttttgatcccaagaga

SEQ ID NO: 4645897 - DNA, 25 bp, Homo sapien
tggaagagacgttaaagccacgctc

SEQ ID NO: 4645898 - DNA, 25 bp, Homo sapien
tgaatgcaaagttctcaatagtggt

SEQ ID NO: 4645899 - DNA, 25 bp, Homo sapien
cctggccgactcttgtctgtttgaa

SEQ ID NO: 4645900 - DNA, 25 bp, Homo sapien
aactagctagaagagtttgcatggg

SEQ ID NO: 4645901 - DNA, 25 bp, Homo sapien
caagtgaacatgcaccatgtcagtc

SEQ ID NO: 4645902 - DNA, 25 bp, Homo sapien
catattgtacttgggtgtaggactc

SEQ ID NO: 4645903 - DNA, 25 bp, Homo sapien
caacaacagggtcttgagataacct

SEQ ID NO: 4645904 - DNA, 25 bp, Homo sapien
gtatgtacacgaggcactacttctg

SEQ ID NO: 4645905 - DNA, 25 bp, Homo sapien
aatgtgtagcacagaactgcactag

SEQ ID NO: 4645906 - DNA, 25 bp, Homo sapien
caaaatgtagttcccatgtgccaaa

SEQ ID NO: 4645907 - DNA, 25 bp, Homo sapien
tatttggcgccatatataagcctgg

SEQ ID NO: 4645908 - DNA, 25 bp, Homo sapien
gcagaattggatagatacagcccta

SEQ ID NO: 4645909 - DNA, 25 bp, Homo sapien
gaggatcagaccttctttcccgtga

SEQ ID NO: 4645910 - DNA, 25 bp, Homo sapien
tatgatgtttagtgcacctgtgaaa

SEQ ID NO: 4645911 - DNA, 25 bp, Homo sapien
gatgtaatgaatttgaactgccctg

SEQ ID NO: 4645912 - DNA, 25 bp, Homo sapien
tctctgtcgatagtggatgcccatt

SEQ ID NO: 4645913 - DNA, 25 bp, Homo sapien
aattataacgtggaaaaactgagca

SEQ ID NO: 4645914 - DNA, 25 bp, Homo sapien
gaactcaaatagaaatgtgcctgtg

SEQ ID NO: 4645915 - DNA, 25 bp, Homo sapien
gcactacccttgtgcataatgggca

SEQ ID NO: 4645916 - DNA, 25 bp, Homo sapien
aatttgatagtgcaagaaatggctg

SEQ ID NO: 4645917 - DNA, 25 bp, Homo sapien
cattgtctcaagaagtacccttaac

SEQ ID NO: 4645918 - DNA, 25 bp, Homo sapien
tatggctcaggagactaaccagacc

SEQ ID NO: 4645919 - DNA, 25 bp, Homo sapien
cctgtagtgcagcagagtgaaaagt

SEQ ID NO: 4645920 - DNA, 25 bp, Homo sapien
cataaccctgagagctaacagacct

SEQ ID NO: 4645921 - DNA, 25 bp, Homo sapien
gcgtagcaattacaacggtataccg

SEQ ID NO: 4645922 - DNA, 25 bp, Homo sapien
catagggcaaacattcacacatatt

SEQ ID NO: 4645923 - DNA, 25 bp, Homo sapien
acattcacacatattttgtgcgtgg

SEQ ID NO: 4645924 - DNA, 25 bp, Homo sapien
gcatagggcaaacattcacacatat

SEQ ID NO: 4645925 - DNA, 25 bp, Homo sapien
tcacacatattttgtgcgtggtggg

SEQ ID NO: 4645926 - DNA, 25 bp, Homo sapien
gatgggaacccatgtagaagactca

SEQ ID NO: 4645927 - DNA, 25 bp, Homo sapien
taaagcaagctgtgcacatgtgatg

SEQ ID NO: 4645928 - DNA, 25 bp, Homo sapien
gaagcgccctcccatgtgatctgag

SEQ ID NO: 4645929 - DNA, 25 bp, Homo sapien
acttaggtaggttgatcgcttggcc

SEQ ID NO: 4645930 - DNA, 25 bp, Homo sapien
ctcagtggttttcggagagggccct

SEQ ID NO: 4645931 - DNA, 25 bp, Homo sapien
ccaggtgagtgggaattcatgccat

SEQ ID NO: 4645932 - DNA, 25 bp, Homo sapien
tcttttgggcttctcgacgtcgctg

SEQ ID NO: 4645933 - DNA, 25 bp, Homo sapien
gaacatataggtcacacatccccgt

SEQ ID NO: 4645934 - DNA, 25 bp, Homo sapien
gcctgtggaggcgtgaggcgacgac

SEQ ID NO: 4645935 - DNA, 25 bp, Homo sapien
cgacgacaggcgagcgcctcgagca

SEQ ID NO: 4645936 - DNA, 25 bp, Homo sapien
tcatcgtgccggcttcgcgcgcgaa

SEQ ID NO: 4645937 - DNA, 25 bp, Homo sapien
tcgagcagcgttagccgctgcggcc

SEQ ID NO: 4645938 - DNA, 25 bp, Homo sapien
agctccaccctaggggccgactgcc

SEQ ID NO: 4645939 - DNA, 25 bp, Homo sapien
gctgagggcggacaattgggttaaa

SEQ ID NO: 4645940 - DNA, 25 bp, Homo sapien
cacaggactcgctcttcccagctcc

SEQ ID NO: 4645941 - DNA, 25 bp, Homo sapien
cctccacaggactcgctcttcccag

SEQ ID NO: 4645942 - DNA, 25 bp, Homo sapien
ggctggagacaaagcgtgagaacta

SEQ ID NO: 4645943 - DNA, 25 bp, Homo sapien
caaagcgtgagaactaggatggcga

SEQ ID NO: 4645944 - DNA, 25 bp, Homo sapien
tctgggggtgaatccttacgattct

SEQ ID NO: 4645945 - DNA, 25 bp, Homo sapien
tggagacaaagcgtgagaactagga

SEQ ID NO: 4645946 - DNA, 25 bp, Homo sapien
cccttcgcggcttttgagtagaaca

SEQ ID NO: 4645947 - DNA, 25 bp, Homo sapien
tggtgctttcccagttcacgacgct

SEQ ID NO: 4645948 - DNA, 25 bp, Homo sapien
gaaattcacttggagcggtcagttg

SEQ ID NO: 4645949 - DNA, 25 bp, Homo sapien
caatttccagggatttcacaggctg

SEQ ID NO: 4645950 - DNA, 25 bp, Homo sapien
ctaactgtggcggagaactgtttga

SEQ ID NO: 4645951 - DNA, 25 bp, Homo sapien
tgggaccagtgacccaaactactta

SEQ ID NO: 4645952 - DNA, 25 bp, Homo sapien
aataaattgcagtggtcgtgggacc

SEQ ID NO: 4645953 - DNA, 25 bp, Homo sapien
caaaaggttgttatgctccaggtac

SEQ ID NO: 4645954 - DNA, 25 bp, Homo sapien
tgcgcccggccttcaccctcttctt

SEQ ID NO: 4645955 - DNA, 25 bp, Homo sapien
actgcgcccggccttcaccctcttc

SEQ ID NO: 4645956 - DNA, 25 bp, Homo sapien
ctgcgcccggccttcaccctcttct

SEQ ID NO: 4645957 - DNA, 25 bp, Homo sapien
catgcacagactcatcacagttgga

SEQ ID NO: 4645958 - DNA, 25 bp, Homo sapien
ttccacatgctaggccaccatggat

SEQ ID NO: 4645959 - DNA, 25 bp, Homo sapien
gacatgcacagactcatcacagttg

SEQ ID NO: 4645960 - DNA, 25 bp, Homo sapien
caccatggatgagggcggttttcag

SEQ ID NO: 4645961 - DNA, 25 bp, Homo sapien
tggccacaatcccctttcagctctt

SEQ ID NO: 4645962 - DNA, 25 bp, Homo sapien
ggccacaatcccctttcagctcttg

SEQ ID NO: 4645963 - DNA, 25 bp, Homo sapien
ttggccacaatcccctttcagctct

SEQ ID NO: 4645964 - DNA, 25 bp, Homo sapien
cttggccacaatcccctttcagctc

SEQ ID NO: 4645965 - DNA, 25 bp, Homo sapien
cagtgttctgagaattgggagtcat

SEQ ID NO: 4645966 - DNA, 25 bp, Homo sapien
ttattttcctctggagtttgttgaa

SEQ ID NO: 4645967 - DNA, 25 bp, Homo sapien
attttcctctggagtttgttgaaag

SEQ ID NO: 4645968 - DNA, 25 bp, Homo sapien
tgttgaaaggtttttcagtgttctg

SEQ ID NO: 4645969 - DNA, 25 bp, Homo sapien
gacatatttcaccaaaaagtgaata

SEQ ID NO: 4645970 - DNA, 25 bp, Homo sapien
gccagaaatgacacgcagagaggtc

SEQ ID NO: 4645971 - DNA, 25 bp, Homo sapien
cagagagtttgagtaatagagccag

SEQ ID NO: 4645972 - DNA, 25 bp, Homo sapien
cataattgctagagtcagagagttt

SEQ ID NO: 4645973 - DNA, 25 bp, Homo sapien
taggtatttgtgtactaaactccac

SEQ ID NO: 4645974 - DNA, 25 bp, Homo sapien
gtaaacatgaaaggctggcagctag

SEQ ID NO: 4645975 - DNA, 25 bp, Homo sapien
cttgatccctggtaaacatgaaagg

SEQ ID NO: 4645976 - DNA, 25 bp, Homo sapien
gctggcagctaggtatttgtgtact

SEQ ID NO: 4645977 - DNA, 25 bp, Homo sapien
gcagtagtgctacagagctcttcct

SEQ ID NO: 4645978 - DNA, 25 bp, Homo sapien
tctcagcgttattacagatgatggc

SEQ ID NO: 4645979 - DNA, 25 bp, Homo sapien
gatttacattcgagttcctggaggg

SEQ ID NO: 4645980 - DNA, 25 bp, Homo sapien
gctttattcagggaggtgtctatcc

SEQ ID NO: 4645981 - DNA, 25 bp, Homo sapien
gcaggcttcagactaaaacaggaca

SEQ ID NO: 4645982 - DNA, 25 bp, Homo sapien
tgcaggcttcagactaaaacaggac

SEQ ID NO: 4645983 - DNA, 25 bp, Homo sapien
tcttcttctactgcaggcttcagac

SEQ ID NO: 4645984 - DNA, 25 bp, Homo sapien
caggcttcagactaaaacaggacat

SEQ ID NO: 4645985 - DNA, 25 bp, Homo sapien
tccagacccaagatagctctaaaat

SEQ ID NO: 4645986 - DNA, 25 bp, Homo sapien
gacatccataagatcaatgtgggaa

SEQ ID NO: 4645987 - DNA, 25 bp, Homo sapien
gggaatctaaaacagagggacaatg

SEQ ID NO: 4645988 - DNA, 25 bp, Homo sapien
caactggttaagtggaagtatcaca

SEQ ID NO: 4645989 - DNA, 25 bp, Homo sapien
atctgtaaatggttaccaataagtg

SEQ ID NO: 4645990 - DNA, 25 bp, Homo sapien
ggtacttcccaatcacttgtcccag

SEQ ID NO: 4645991 - DNA, 25 bp, Homo sapien
ataacaggtgcaatgggtacttccc

SEQ ID NO: 4645992 - DNA, 25 bp, Homo sapien
caggtgcaatgggtacttcccaatc

SEQ ID NO: 4645993 - DNA, 25 bp, Homo sapien
gcaatgggtacttcccaatcacttg

SEQ ID NO: 4645994 - DNA, 25 bp, Homo sapien
gagagtgcccacatctcaaaaccca

SEQ ID NO: 4645995 - DNA, 25 bp, Homo sapien
gaccatatgcagcatcaaaggagag

SEQ ID NO: 4645996 - DNA, 25 bp, Homo sapien
gaagcaggattgatttctgaccata

SEQ ID NO: 4645997 - DNA, 25 bp, Homo sapien
gaaaaggcttctaacagattcactg

SEQ ID NO: 4645998 - DNA, 25 bp, Homo sapien
gaaagcacagattgctgggttctgc

SEQ ID NO: 4645999 - DNA, 25 bp, Homo sapien
ctggcatcattatgagggccacttt

SEQ ID NO: 4646000 - DNA, 25 bp, Homo sapien
ggagggcttgtgaaagaaagcacag

SEQ ID NO: 4646001 - DNA, 25 bp, Homo sapien
gcatcattatgagggccactttttg

SEQ ID NO: 4646002 - DNA, 25 bp, Homo sapien
tgtagacttgtggctgcaatttcag

SEQ ID NO: 4646003 - DNA, 25 bp, Homo sapien
ctgccctgaggtaatgtagtatctg

SEQ ID NO: 4646004 - DNA, 25 bp, Homo sapien
ggtaatgtagtatctggttcacttt

SEQ ID NO: 4646005 - DNA, 25 bp, Homo sapien
aactgccctgaggtaatgtagtatc

SEQ ID NO: 4646006 - DNA, 25 bp, Homo sapien
cctgaggtaatgtagtatctggttc

SEQ ID NO: 4646007 - DNA, 25 bp, Homo sapien
gccttgtcatctacaacaagctctg

SEQ ID NO: 4646008 - DNA, 25 bp, Homo sapien
tttgattggctgagtgtcatctgtg

SEQ ID NO: 4646009 - DNA, 25 bp, Homo sapien
ctgcgtttgtcagtcccagatggcc

SEQ ID NO: 4646010 - DNA, 25 bp, Homo sapien
gtgatgatccatccactgagccttg

SEQ ID NO: 4646011 - DNA, 25 bp, Homo sapien
gacaggtaatgtaccgggtcataag

SEQ ID NO: 4646012 - DNA, 25 bp, Homo sapien
gtcacgtcttacacatgcctgtgaa

SEQ ID NO: 4646013 - DNA, 25 bp, Homo sapien
gtaccgggtcataaggaggttcaga

SEQ ID NO: 4646014 - DNA, 25 bp, Homo sapien
gaggttcagagggtgtcacgtctta

SEQ ID NO: 4646015 - DNA, 25 bp, Homo sapien
ttgctccccagacctgatttcgtgg

SEQ ID NO: 4646016 - DNA, 25 bp, Homo sapien
gacctgatttcgtgggcctctctga

SEQ ID NO: 4646017 - DNA, 25 bp, Homo sapien
tccccagacctgatttcgtgggcct

SEQ ID NO: 4646018 - DNA, 25 bp, Homo sapien
ccagacctgatttcgtgggcctctc

SEQ ID NO: 4646019 - DNA, 25 bp, Homo sapien
tcttgaagatcagtgcagagaactg

SEQ ID NO: 4646020 - DNA, 25 bp, Homo sapien
aaatatgctggtctgacgttaccgg

SEQ ID NO: 4646021 - DNA, 25 bp, Homo sapien
tcctggagtgaagtcttagatgaac

SEQ ID NO: 4646022 - DNA, 25 bp, Homo sapien
aatcacaagtataaggaaatggcca

SEQ ID NO: 4646023 - DNA, 25 bp, Homo sapien
gctgcatccgactctgcaattttat

SEQ ID NO: 4646024 - DNA, 25 bp, Homo sapien
gtatgaattgtgatagattcctcaa

SEQ ID NO: 4646025 - DNA, 25 bp, Homo sapien
gatagattcctcaaaggatacaggg

SEQ ID NO: 4646026 - DNA, 25 bp, Homo sapien
gggttgctgcatccgactctgcaat

SEQ ID NO: 4646027 - DNA, 25 bp, Homo sapien
tactccattgctacagctccgatga

SEQ ID NO: 4646028 - DNA, 25 bp, Homo sapien
gaaggtatcaggaaataggtgacac

SEQ ID NO: 4646029 - DNA, 25 bp, Homo sapien
tgagtgctgtaggaactcagaatat

SEQ ID NO: 4646030 - DNA, 25 bp, Homo sapien
gaatatgacctggtcgttacagaag

SEQ ID NO: 4646031 - DNA, 25 bp, Homo sapien
gttgcacaaggcaggttttaacact

SEQ ID NO: 4646032 - DNA, 25 bp, Homo sapien
tattgggataatgagtgttttcaac

SEQ ID NO: 4646033 - DNA, 25 bp, Homo sapien
ttatctaatcatcagagattgacag

SEQ ID NO: 4646034 - DNA, 25 bp, Homo sapien
tcagagattgacagttgcacaaggc

SEQ ID NO: 4646035 - DNA, 25 bp, Homo sapien
tcttacacatagagtcagtgtttta

SEQ ID NO: 4646036 - DNA, 25 bp, Homo sapien
cttacacatagagtcagtgttttat

SEQ ID NO: 4646037 - DNA, 25 bp, Homo sapien
tcactttcaatttgtgcttcttcat

SEQ ID NO: 4646038 - DNA, 25 bp, Homo sapien
actttcaatttgtgcttcttcattc

SEQ ID NO: 4646039 - DNA, 25 bp, Homo sapien
agagcccaaaacacagcatgctggc

SEQ ID NO: 4646040 - DNA, 25 bp, Homo sapien
ggccgcatgtgaacagcacctgcat

SEQ ID NO: 4646041 - DNA, 25 bp, Homo sapien
gaaatctgtcagagggcgctgtgac

SEQ ID NO: 4646042 - DNA, 25 bp, Homo sapien
caagggcatggttccggccgcatgt

SEQ ID NO: 4646043 - DNA, 25 bp, Homo sapien
cactatcatgaggagcgcagtccct

SEQ ID NO: 4646044 - DNA, 25 bp, Homo sapien
gctgacatgcgggtagctaggaaca

SEQ ID NO: 4646045 - DNA, 25 bp, Homo sapien
ttcctactcaggacccagggtaaga

SEQ ID NO: 4646046 - DNA, 25 bp, Homo sapien
tggagtgagttttcccacaagctga

SEQ ID NO: 4646047 - DNA, 25 bp, Homo sapien
gagccaggcctgaaccgacagtaat

SEQ ID NO: 4646048 - DNA, 25 bp, Homo sapien
gctacattcttcagcaacctctggg

SEQ ID NO: 4646049 - DNA, 25 bp, Homo sapien
gctctgtgtccactgtatatgctac

SEQ ID NO: 4646050 - DNA, 25 bp, Homo sapien
tagtaattgtattatcagggctctg

SEQ ID NO: 4646051 - DNA, 25 bp, Homo sapien
gaagcagagaacaatcagcacctca

SEQ ID NO: 4646052 - DNA, 25 bp, Homo sapien
tgttgtcggcatctaaccacgtgta

SEQ ID NO: 4646053 - DNA, 25 bp, Homo sapien
agactgtgaaattagttgggccttc

SEQ ID NO: 4646054 - DNA, 25 bp, Homo sapien
ggaaacagacggttctgacatcccc

SEQ ID NO: 4646055 - DNA, 25 bp, Homo sapien
cctcccatgagaagaacagtaggaa

SEQ ID NO: 4646056 - DNA, 25 bp, Homo sapien
tcagcgacaaagctagtataggcac

SEQ ID NO: 4646057 - DNA, 25 bp, Homo sapien
tgctgaatcagcgacaaagctagta

SEQ ID NO: 4646058 - DNA, 25 bp, Homo sapien
acaaagctagtataggcacgtgaca

SEQ ID NO: 4646059 - DNA, 25 bp, Homo sapien
tgtgtatatgctgaatcagcgacaa

SEQ ID NO: 4646060 - DNA, 25 bp, Homo sapien
tgagactctacacttgaacacagcc

SEQ ID NO: 4646061 - DNA, 25 bp, Homo sapien
gaacacagcctagtattcaccagtc

SEQ ID NO: 4646062 - DNA, 25 bp, Homo sapien
tagaatgcttaacaccaaacgacca

SEQ ID NO: 4646063 - DNA, 25 bp, Homo sapien
tcatctaaaagagggagagcccaca

SEQ ID NO: 4646064 - DNA, 25 bp, Homo sapien
gattcaaaccgaggtctatctgttc

SEQ ID NO: 4646065 - DNA, 25 bp, Homo sapien
ccatttcatgtctagtaaacagtag

SEQ ID NO: 4646066 - DNA, 25 bp, Homo sapien
gctgagattcaaaccgaggtctatc

SEQ ID NO: 4646067 - DNA, 25 bp, Homo sapien
tcaaaccgaggtctatctgttccac

SEQ ID NO: 4646068 - DNA, 25 bp, Homo sapien
cacattgcaggtgagttatgagttt

SEQ ID NO: 4646069 - DNA, 25 bp, Homo sapien
ttgcaggtgagttatgagtttgagc

SEQ ID NO: 4646070 - DNA, 25 bp, Homo sapien
agtttgagcagctgtaccacctgaa

SEQ ID NO: 4646071 - DNA, 25 bp, Homo sapien
gagttatgagtttgagcagctgtac

SEQ ID NO: 4646072 - DNA, 25 bp, Homo sapien
tagggtagatgcagttaagccacac

SEQ ID NO: 4646073 - DNA, 25 bp, Homo sapien
gggtagatgcagttaagccacacat

SEQ ID NO: 4646074 - DNA, 25 bp, Homo sapien
tcttttagggtagatgcagttaagc

SEQ ID NO: 4646075 - DNA, 25 bp, Homo sapien
tttagggtagatgcagttaagccac

SEQ ID NO: 4646076 - DNA, 25 bp, Homo sapien
acaggctcaaagttgctgcccccag

SEQ ID NO: 4646077 - DNA, 25 bp, Homo sapien
gtggacagttccttccccacaggct

SEQ ID NO: 4646078 - DNA, 25 bp, Homo sapien
tccttaagcattcaccagaccactc

SEQ ID NO: 4646079 - DNA, 25 bp, Homo sapien
gatgtgaagcacagggggttttcca

SEQ ID NO: 4646080 - DNA, 25 bp, Homo sapien
caatgctaggcaccaaaacgtgctc

SEQ ID NO: 4646081 - DNA, 25 bp, Homo sapien
tcaagtgacagcttagacaatctcc

SEQ ID NO: 4646082 - DNA, 25 bp, Homo sapien
tgtgaaaggccagtacaatgctagg

SEQ ID NO: 4646083 - DNA, 25 bp, Homo sapien
ccaggatttagcaaacccaggcctc

SEQ ID NO: 4646084 - DNA, 25 bp, Homo sapien
ctgccaaccagatgaacacaggaaa

SEQ ID NO: 4646085 - DNA, 25 bp, Homo sapien
tgaacacaggaaaagtcataaaaac

SEQ ID NO: 4646086 - DNA, 25 bp, Homo sapien
aaccagatgaacacaggaaaagtca

SEQ ID NO: 4646087 - DNA, 25 bp, Homo sapien
agatgaacacaggaaaagtcataaa

SEQ ID NO: 4646088 - DNA, 25 bp, Homo sapien
gtacacacaccagaaaccctccgaa

SEQ ID NO: 4646089 - DNA, 25 bp, Homo sapien
tcatgtgtgccttccatgaagctaa

SEQ ID NO: 4646090 - DNA, 25 bp, Homo sapien
catttggcacaagggtgtgcccaca

SEQ ID NO: 4646091 - DNA, 25 bp, Homo sapien
gtttatcacatagccatgattcatg

SEQ ID NO: 4646092 - DNA, 25 bp, Homo sapien
ttgacttgggccacactaaagaagc

SEQ ID NO: 4646093 - DNA, 25 bp, Homo sapien
tgcttgaagtatttagagacctgaa

SEQ ID NO: 4646094 - DNA, 25 bp, Homo sapien
aagtactacaatccctgatggcaga

SEQ ID NO: 4646095 - DNA, 25 bp, Homo sapien
gaactttcagaacatgctctacttt

SEQ ID NO: 4646096 - DNA, 25 bp, Homo sapien
tcaagaccactacaggtacgggtat

SEQ ID NO: 4646097 - DNA, 25 bp, Homo sapien
tataacttagctactttggagaaca

SEQ ID NO: 4646098 - DNA, 25 bp, Homo sapien
aataaacttgcacctgtgtatgagg

SEQ ID NO: 4646099 - DNA, 25 bp, Homo sapien
gaatctctcatatacggctaatagg

SEQ ID NO: 4646100 - DNA, 25 bp, Homo sapien
gggtgtcctgtcagaaggtctcagt

SEQ ID NO: 4646101 - DNA, 25 bp, Homo sapien
tcctgtcagaaggtctcagtggctg

SEQ ID NO: 4646102 - DNA, 25 bp, Homo sapien
ggtgtcctgtcagaaggtctcagtg

SEQ ID NO: 4646103 - DNA, 25 bp, Homo sapien
tgtcctgtcagaaggtctcagtggc

SEQ ID NO: 4646104 - DNA, 25 bp, Homo sapien
aaagaacgagattatatcttatgtg

SEQ ID NO: 4646105 - DNA, 25 bp, Homo sapien
cgagattatatcttatgtgggaacg

SEQ ID NO: 4646106 - DNA, 25 bp, Homo sapien
tatcttatgtgggaacgtggatgga

SEQ ID NO: 4646107 - DNA, 25 bp, Homo sapien
gattatatcttatgtgggaacgtgg

SEQ ID NO: 4646108 - DNA, 25 bp, Homo sapien
tgggctacctcatgaaaacagtttt

SEQ ID NO: 4646109 - DNA, 25 bp, Homo sapien
aatcatgagattttagggcctgtgc

SEQ ID NO: 4646110 - DNA, 25 bp, Homo sapien
aacagcatacaggaggttatccagg

SEQ ID NO: 4646111 - DNA, 25 bp, Homo sapien
tacagcaatgccctgttgaaggagc

SEQ ID NO: 4646112 - DNA, 25 bp, Homo sapien
ggcagaagatcctgtagctttcttg

SEQ ID NO: 4646113 - DNA, 25 bp, Homo sapien
attttcagttgcaggaaccacctca

SEQ ID NO: 4646114 - DNA, 25 bp, Homo sapien
acttttccacccctggataacatgg

SEQ ID NO: 4646115 - DNA, 25 bp, Homo sapien
tcttgttattttcagttgcaggaac

SEQ ID NO: 4646116 - DNA, 25 bp, Homo sapien
atccaaatacttggatgaatgcaag

SEQ ID NO: 4646117 - DNA, 25 bp, Homo sapien
tccatccaaatacttggatgaatgc

SEQ ID NO: 4646118 - DNA, 25 bp, Homo sapien
gttctcgtataaggtattgataatt

SEQ ID NO: 4646119 - DNA, 25 bp, Homo sapien
tttccatccaaatacttggatgaat

SEQ ID NO: 4646120 - DNA, 25 bp, Homo sapien
gggctctccaagcaacgcttgcatc

SEQ ID NO: 4646121 - DNA, 25 bp, Homo sapien
tccaagcaacgcttgcatcataatc

SEQ ID NO: 4646122 - DNA, 25 bp, Homo sapien
ggctctccaagcaacgcttgcatca

SEQ ID NO: 4646123 - DNA, 25 bp, Homo sapien
aagcaacgcttgcatcataatctgg

SEQ ID NO: 4646124 - DNA, 25 bp, Homo sapien
ttaatgtcaaagataggaactgaga

SEQ ID NO: 4646125 - DNA, 25 bp, Homo sapien
tgtcaaagataggaactgagagaaa

SEQ ID NO: 4646126 - DNA, 25 bp, Homo sapien
aggtagaatataactaagtactgtg

SEQ ID NO: 4646127 - DNA, 25 bp, Homo sapien
gtagaatataactaagtactgtgat

SEQ ID NO: 4646128 - DNA, 25 bp, Homo sapien
tctttttcctccactttgatttgta

SEQ ID NO: 4646129 - DNA, 25 bp, Homo sapien
ttgagctttcctcagtctcgtcttc

SEQ ID NO: 4646130 - DNA, 25 bp, Homo sapien
gagctttcctcagtctcgtcttctt

SEQ ID NO: 4646131 - DNA, 25 bp, Homo sapien
gctttcctcagtctcgtcttctttt

SEQ ID NO: 4646132 - DNA, 25 bp, Homo sapien
agctctctcttcgaggtagcttatc

SEQ ID NO: 4646133 - DNA, 25 bp, Homo sapien
tcttcgaggtagcttatcttccacc

SEQ ID NO: 4646134 - DNA, 25 bp, Homo sapien
tctctcttcgaggtagcttatcttc

SEQ ID NO: 4646135 - DNA, 25 bp, Homo sapien
aggtagcttatcttccacctcctct

SEQ ID NO: 4646136 - DNA, 25 bp, Homo sapien
catttgacagtagcaattatttgtc

SEQ ID NO: 4646137 - DNA, 25 bp, Homo sapien
atttgacagtagcaattatttgtct

SEQ ID NO: 4646138 - DNA, 25 bp, Homo sapien
ctgcacgttctgtgaagtactgacc

SEQ ID NO: 4646139 - DNA, 25 bp, Homo sapien
gtgaagtactgaccacttgttctaa

SEQ ID NO: 4646140 - DNA, 25 bp, Homo sapien
tctgtgaagtactgaccacttgttc

SEQ ID NO: 4646141 - DNA, 25 bp, Homo sapien
cgttctgtgaagtactgaccacttg

SEQ ID NO: 4646142 - DNA, 25 bp, Homo sapien
gatagcagtttgaagaccatggtcc

SEQ ID NO: 4646143 - DNA, 25 bp, Homo sapien
gaagccggcattgtggcccagtagc

SEQ ID NO: 4646144 - DNA, 25 bp, Homo sapien
gatttgatttcaccaaactgcttga

SEQ ID NO: 4646145 - DNA, 25 bp, Homo sapien
cataggtctgtttttgaagccggca

SEQ ID NO: 4646146 - DNA, 25 bp, Homo sapien
tcttcggtcatcaaacagaactccc

SEQ ID NO: 4646147 - DNA, 25 bp, Homo sapien
gcataaaaatataggcacagtggta

SEQ ID NO: 4646148 - DNA, 25 bp, Homo sapien
cagtttcctgatagcggacacaata

SEQ ID NO: 4646149 - DNA, 25 bp, Homo sapien
tacatgtgcacccacccatattctg

SEQ ID NO: 4646150 - DNA, 25 bp, Homo sapien
ctagatccttcacaggtgaacctag

SEQ ID NO: 4646151 - DNA, 25 bp, Homo sapien
cttctagatccttcacaggtgaacc

SEQ ID NO: 4646152 - DNA, 25 bp, Homo sapien
tcttctagatccttcacaggtgaac

SEQ ID NO: 4646153 - DNA, 25 bp, Homo sapien
tctagatccttcacaggtgaaccta

SEQ ID NO: 4646154 - DNA, 25 bp, Homo sapien
cttggccatcatcatcttaaatgca

SEQ ID NO: 4646155 - DNA, 25 bp, Homo sapien
ttcactcacaaatttttttgcctcc

SEQ ID NO: 4646156 - DNA, 25 bp, Homo sapien
catcatcttaaatgcaaaccaccgt

SEQ ID NO: 4646157 - DNA, 25 bp, Homo sapien
catcttaaatgcaaaccaccgtttt

SEQ ID NO: 4646158 - DNA, 25 bp, Homo sapien
acaatagaaaatgcgaagtccaaga

SEQ ID NO: 4646159 - DNA, 25 bp, Homo sapien
atacaatagaaaatgcgaagtccaa

SEQ ID NO: 4646160 - DNA, 25 bp, Homo sapien
gtccaagatctaggataagacagga

SEQ ID NO: 4646161 - DNA, 25 bp, Homo sapien
gatctaggataagacaggaatttct

SEQ ID NO: 4646162 - DNA, 25 bp, Homo sapien
ttttcccatgggacacacgcagctt

SEQ ID NO: 4646163 - DNA, 25 bp, Homo sapien
tttgaagttctcaaaatcacggagg

SEQ ID NO: 4646164 - DNA, 25 bp, Homo sapien
aaaatcacggaggaattttgcccat

SEQ ID NO: 4646165 - DNA, 25 bp, Homo sapien
gggacacacgcagctttgaagttct

SEQ ID NO: 4646166 - DNA, 25 bp, Homo sapien
ttccctgtataggagagaaaaccag

SEQ ID NO: 4646167 - DNA, 25 bp, Homo sapien
tcttcacagtgacgaaagcaggcat

SEQ ID NO: 4646168 - DNA, 25 bp, Homo sapien
tggactaaggtagaacacgagagtg

SEQ ID NO: 4646169 - DNA, 25 bp, Homo sapien
tcattgtgcacaatagtgacttccc

SEQ ID NO: 4646170 - DNA, 25 bp, Homo sapien
gcctcaattttccagcgtggctttc

SEQ ID NO: 4646171 - DNA, 25 bp, Homo sapien
caattttccagcgtggctttccaaa

SEQ ID NO: 4646172 - DNA, 25 bp, Homo sapien
catttgcctcaattttccagcgtgg

SEQ ID NO: 4646173 - DNA, 25 bp, Homo sapien
tttgcctcaattttccagcgtggct

SEQ ID NO: 4646174 - DNA, 25 bp, Homo sapien
gaggaagtatgaggccactgaggag

SEQ ID NO: 4646175 - DNA, 25 bp, Homo sapien
gctaaatgtcaggataaagagaacc

SEQ ID NO: 4646176 - DNA, 25 bp, Homo sapien
gagaaccatattgactccatacatc

SEQ ID NO: 4646177 - DNA, 25 bp, Homo sapien
gcaacatgatgaggctaaatgtcag

SEQ ID NO: 4646178 - DNA, 25 bp, Homo sapien
aaggtctcaggcttgcccagggaca

SEQ ID NO: 4646179 - DNA, 25 bp, Homo sapien
gaaaaatacagcgttgctgccagga

SEQ ID NO: 4646180 - DNA, 25 bp, Homo sapien
caaagtcagcatgcagggtgtccat

SEQ ID NO: 4646181 - DNA, 25 bp, Homo sapien
aatactgagtgagcccgtcgggtag

SEQ ID NO: 4646182 - DNA, 25 bp, Homo sapien
gatgttgcttcttctgtgagatgga

SEQ ID NO: 4646183 - DNA, 25 bp, Homo sapien
gcagatgttgcttcttctgtgagat

SEQ ID NO: 4646184 - DNA, 25 bp, Homo sapien
caagcagatgttgcttcttctgtga

SEQ ID NO: 4646185 - DNA, 25 bp, Homo sapien
tgttgcttcttctgtgagatggaaa

SEQ ID NO: 4646186 - DNA, 25 bp, Homo sapien
accagcagtcaggtcaaccacattc

SEQ ID NO: 4646187 - DNA, 25 bp, Homo sapien
ccagcagtcaggtcaaccacattcc

SEQ ID NO: 4646188 - DNA, 25 bp, Homo sapien
caccagcagtcaggtcaaccacatt

SEQ ID NO: 4646189 - DNA, 25 bp, Homo sapien
ccaccagcagtcaggtcaaccacat

SEQ ID NO: 4646190 - DNA, 25 bp, Homo sapien
gtcgtacaacacaccaaagtttgct

SEQ ID NO: 4646191 - DNA, 25 bp, Homo sapien
attgaagtcgtacaacacaccaaag

SEQ ID NO: 4646192 - DNA, 25 bp, Homo sapien
ttcctaggtaaactgccatatggca

SEQ ID NO: 4646193 - DNA, 25 bp, Homo sapien
aagtttgctgccgatgcctcttcgg

SEQ ID NO: 4646194 - DNA, 25 bp, Homo sapien
caatacacttgtgtggagacactta

SEQ ID NO: 4646195 - DNA, 25 bp, Homo sapien
aatttcgatatcagcacgtgctgct

SEQ ID NO: 4646196 - DNA, 25 bp, Homo sapien
tcaatttcgatatcagcacgtgctg

SEQ ID NO: 4646197 - DNA, 25 bp, Homo sapien
ctattcaatttcgatatcagcacgt

SEQ ID NO: 4646198 - DNA, 25 bp, Homo sapien
tgctttccccatgggagcactctcc

SEQ ID NO: 4646199 - DNA, 25 bp, Homo sapien
aagccacttagcagttgtcgtgaag

SEQ ID NO: 4646200 - DNA, 25 bp, Homo sapien
acaaagccacttagcagttgtcgtg

SEQ ID NO: 4646201 - DNA, 25 bp, Homo sapien
gccacttagcagttgtcgtgaagag

SEQ ID NO: 4646202 - DNA, 25 bp, Homo sapien
acttagcagttgtcgtgaagagcaa

SEQ ID NO: 4646203 - DNA, 25 bp, Homo sapien
tgttcgtttattgtcataatagcca

SEQ ID NO: 4646204 - DNA, 25 bp, Homo sapien
taaaagagaacggaatattgtgcca

SEQ ID NO: 4646205 - DNA, 25 bp, Homo sapien
actagaaaataggagagcggcaacc

SEQ ID NO: 4646206 - DNA, 25 bp, Homo sapien
ccagaaagctgtatccaatgcacat

SEQ ID NO: 4646207 - DNA, 25 bp, Homo sapien
ccttccataactttctctagggtct

SEQ ID NO: 4646208 - DNA, 25 bp, Homo sapien
cttccataactttctctagggtctg

SEQ ID NO: 4646209 - DNA, 25 bp, Homo sapien
tccataactttctctagggtctgaa

SEQ ID NO: 4646210 - DNA, 25 bp, Homo sapien
ccataactttctctagggtctgaaa

SEQ ID NO: 4646211 - DNA, 25 bp, Homo sapien
accttccagctgaaattgaaagtgt

SEQ ID NO: 4646212 - DNA, 25 bp, Homo sapien
ccagctgaaattgaaagtgttgtca

SEQ ID NO: 4646213 - DNA, 25 bp, Homo sapien
ttcaggattgccgatcaggtagtcc

SEQ ID NO: 4646214 - DNA, 25 bp, Homo sapien
tagaattaaatttgttgtctgctgt

SEQ ID NO: 4646215 - DNA, 25 bp, Homo sapien
tcacagcccaaaagatgaggtatcc

SEQ ID NO: 4646216 - DNA, 25 bp, Homo sapien
tcaggaatctgatcaagtggacgtt

SEQ ID NO: 4646217 - DNA, 25 bp, Homo sapien
cctccaagtgttagaaacacgaaga

SEQ ID NO: 4646218 - DNA, 25 bp, Homo sapien
aaattcctgggatcgcttcacagcc

SEQ ID NO: 4646219 - DNA, 25 bp, Homo sapien
taaatgggcagatactctaaaggca

SEQ ID NO: 4646220 - DNA, 25 bp, Homo sapien
ttcattggcccctaggactcagagg

SEQ ID NO: 4646221 - DNA, 25 bp, Homo sapien
gcaagagccttggactcgaagtcaa

SEQ ID NO: 4646222 - DNA, 25 bp, Homo sapien
tttatgaacgggaacagactctagc

SEQ ID NO: 4646223 - DNA, 25 bp, Homo sapien
gaaggtggcaatttacatcagtctc

SEQ ID NO: 4646224 - DNA, 25 bp, Homo sapien
aactgattctgatatggtgatgcac

SEQ ID NO: 4646225 - DNA, 25 bp, Homo sapien
cattctcaagagaggcatgtgactg

SEQ ID NO: 4646226 - DNA, 25 bp, Homo sapien
tgtttcctggtatagtgaaggtggc

SEQ ID NO: 4646227 - DNA, 25 bp, Homo sapien
gagcaaaaatgcgtcccagtagcca

SEQ ID NO: 4646228 - DNA, 25 bp, Homo sapien
tccctaggagggacataaccatgtt

SEQ ID NO: 4646229 - DNA, 25 bp, Homo sapien
tcaaagcgatgagaggatggtagtc

SEQ ID NO: 4646230 - DNA, 25 bp, Homo sapien
tcaaacaatgttggacagaacatcc

SEQ ID NO: 4646231 - DNA, 25 bp, Homo sapien
ggtggtccagtgctattttcagaga

SEQ ID NO: 4646232 - DNA, 25 bp, Homo sapien
caaggtcctcgaggtacatctgcag

SEQ ID NO: 4646233 - DNA, 25 bp, Homo sapien
gaatgatgcattgtaggccttgatc

SEQ ID NO: 4646234 - DNA, 25 bp, Homo sapien
tggcttcccaaagggtaatattggc

SEQ ID NO: 4646235 - DNA, 25 bp, Homo sapien
aattgccatacacttctgttggtgg

SEQ ID NO: 4646236 - DNA, 25 bp, Homo sapien
ccatacacttctgttggtggcatta

SEQ ID NO: 4646237 - DNA, 25 bp, Homo sapien
ttgccatacacttctgttggtggca

SEQ ID NO: 4646238 - DNA, 25 bp, Homo sapien
ctaattgccatacacttctgttggt

SEQ ID NO: 4646239 - DNA, 25 bp, Homo sapien
gcagaagtaaaggagcaatcacatt

SEQ ID NO: 4646240 - DNA, 25 bp, Homo sapien
cagaagtaaaggagcaatcacatta

SEQ ID NO: 4646241 - DNA, 25 bp, Homo sapien
ctgcagaagtaaaggagcaatcaca

SEQ ID NO: 4646242 - DNA, 25 bp, Homo sapien
gaagtaaaggagcaatcacattatc

SEQ ID NO: 4646243 - DNA, 25 bp, Homo sapien
gctgcccacctatcaaatccattgg

SEQ ID NO: 4646244 - DNA, 25 bp, Homo sapien
ttcaaagaggaatggctctgctgcc

SEQ ID NO: 4646245 - DNA, 25 bp, Homo sapien
tcaggatatagcttcaaagaggaat

SEQ ID NO: 4646246 - DNA, 25 bp, Homo sapien
tgctgcccacctatcaaatccattg

SEQ ID NO: 4646247 - DNA, 25 bp, Homo sapien
tccaggcaatgttgagctcagattc

SEQ ID NO: 4646248 - DNA, 25 bp, Homo sapien
ttcagagtggtttggaagtcctcca

SEQ ID NO: 4646249 - DNA, 25 bp, Homo sapien
gcaaggaacatcataaaaggccacc

SEQ ID NO: 4646250 - DNA, 25 bp, Homo sapien
taactagcatcaattagaggaaggc

SEQ ID NO: 4646251 - DNA, 25 bp, Homo sapien
atctctattaaaacacacagttctg

SEQ ID NO: 4646252 - DNA, 25 bp, Homo sapien
tgagatattatctctattaaaacac

SEQ ID NO: 4646253 - DNA, 25 bp, Homo sapien
ctgttgagatattatctctattaaa

SEQ ID NO: 4646254 - DNA, 25 bp, Homo sapien
cacacagttctgtcttcaaatggtc

SEQ ID NO: 4646255 - DNA, 25 bp, Homo sapien
gcaataattgcaaaacctcacaaaa

SEQ ID NO: 4646256 - DNA, 25 bp, Homo sapien
gcaccagcaataattgcaaaacctc

SEQ ID NO: 4646257 - DNA, 25 bp, Homo sapien
ttagaaagtccccaatgaggattgt

SEQ ID NO: 4646258 - DNA, 25 bp, Homo sapien
tgtgacgtaggtggtcagaacatca

SEQ ID NO: 4646259 - DNA, 25 bp, Homo sapien
aaaggatattccctcactggtgagg

SEQ ID NO: 4646260 - DNA, 25 bp, Homo sapien
gcattacctaactgcttttggccag

SEQ ID NO: 4646261 - DNA, 25 bp, Homo sapien
gtcgttcaccgaagagcattaccta

SEQ ID NO: 4646262 - DNA, 25 bp, Homo sapien
tccgaggaggcactttcaatgaggg

SEQ ID NO: 4646263 - DNA, 25 bp, Homo sapien
gtagccattacctcactgtcgttca

SEQ ID NO: 4646264 - DNA, 25 bp, Homo sapien
tgaatatcccaactgcagatggcag

SEQ ID NO: 4646265 - DNA, 25 bp, Homo sapien
tggcagtggtttctcaactccagcc

SEQ ID NO: 4646266 - DNA, 25 bp, Homo sapien
tccctagtgggaatacagatttaat

SEQ ID NO: 4646267 - DNA, 25 bp, Homo sapien
catttctactgatgcacgcctgtct

SEQ ID NO: 4646268 - DNA, 25 bp, Homo sapien
cactgatgtcgaattcggtgtatga

SEQ ID NO: 4646269 - DNA, 25 bp, Homo sapien
gaagatcagagcgaggacgttgcca

SEQ ID NO: 4646270 - DNA, 25 bp, Homo sapien
cttggttgaagatcagagcgaggac

SEQ ID NO: 4646271 - DNA, 25 bp, Homo sapien
gaggacgttgccactgatgtcgaat

SEQ ID NO: 4646272 - DNA, 25 bp, Homo sapien
caagacggttttagcatttgcagag

SEQ ID NO: 4646273 - DNA, 25 bp, Homo sapien
tgattcacctagtcaggcacaggaa

SEQ ID NO: 4646274 - DNA, 25 bp, Homo sapien
tgtgtgacagaagcaagacggtttt

SEQ ID NO: 4646275 - DNA, 25 bp, Homo sapien
tattgattcacctagtcaggcacag

SEQ ID NO: 4646276 - DNA, 25 bp, Homo sapien
aaatcattgtaacactttagcctta

SEQ ID NO: 4646277 - DNA, 25 bp, Homo sapien
aatcattgtaacactttagccttat

SEQ ID NO: 4646278 - DNA, 25 bp, Homo sapien
aaaaatcattgtaacactttagcct

SEQ ID NO: 4646279 - DNA, 25 bp, Homo sapien
aaaatcattgtaacactttagcctt

SEQ ID NO: 4646280 - DNA, 25 bp, Homo sapien
tccccattattgtaggaattgcata

SEQ ID NO: 4646281 - DNA, 25 bp, Homo sapien
gtgggccacgactgtacaaatgaaa

SEQ ID NO: 4646282 - DNA, 25 bp, Homo sapien
ccaattgcaatgatgtgtttgtgcc

SEQ ID NO: 4646283 - DNA, 25 bp, Homo sapien
tgcttaatgacaggaggtcaaggtt

SEQ ID NO: 4646284 - DNA, 25 bp, Homo sapien
ggagggacacgatcatgtacaagac

SEQ ID NO: 4646285 - DNA, 25 bp, Homo sapien
gaacattgcagcacataacggccca

SEQ ID NO: 4646286 - DNA, 25 bp, Homo sapien
gatgagcagtagcatgcccaggtag

SEQ ID NO: 4646287 - DNA, 25 bp, Homo sapien
tacaagacaggcattgtggacagga

SEQ ID NO: 4646288 - DNA, 25 bp, Homo sapien
aagatcttcgccatccagcttggga

SEQ ID NO: 4646289 - DNA, 25 bp, Homo sapien
aaagctgtctcaagatcttcgccat

SEQ ID NO: 4646290 - DNA, 25 bp, Homo sapien
ttgggaaatcgtgctccagggtctc

SEQ ID NO: 4646291 - DNA, 25 bp, Homo sapien
tcgccatccagcttgggaaatcgtg

SEQ ID NO: 4646292 - DNA, 25 bp, Homo sapien
tatttacccactgactgagagtcgt

SEQ ID NO: 4646293 - DNA, 25 bp, Homo sapien
actgactgagagtcgtggcagctcc

SEQ ID NO: 4646294 - DNA, 25 bp, Homo sapien
actgagagtcgtggcagctccagac

SEQ ID NO: 4646295 - DNA, 25 bp, Homo sapien
tacccactgactgagagtcgtggca

SEQ ID NO: 4646296 - DNA, 25 bp, Homo sapien
gatccagattcgctgccttctggcc

SEQ ID NO: 4646297 - DNA, 25 bp, Homo sapien
agcattgagataatagatggccaaa

SEQ ID NO: 4646298 - DNA, 25 bp, Homo sapien
ctttttgagatccagattcgctgcc

SEQ ID NO: 4646299 - DNA, 25 bp, Homo sapien
gtagcattgagataatagatggcca

SEQ ID NO: 4646300 - DNA, 25 bp, Homo sapien
gccattttcttgtttcgcattttgt

SEQ ID NO: 4646301 - DNA, 25 bp, Homo sapien
ctgctcgtgcagctgccattttctt

SEQ ID NO: 4646302 - DNA, 25 bp, Homo sapien
ttacaaacataaacgtatctccaac

SEQ ID NO: 4646303 - DNA, 25 bp, Homo sapien
taaaaagctaggttgtgtaagactc

SEQ ID NO: 4646304 - DNA, 25 bp, Homo sapien
tatccaggccccaattcatatagga

SEQ ID NO: 4646305 - DNA, 25 bp, Homo sapien
gactgatgatgccttaattggccag

SEQ ID NO: 4646306 - DNA, 25 bp, Homo sapien
cacagtgcttgttctctgggcgttc

SEQ ID NO: 4646307 - DNA, 25 bp, Homo sapien
tattcagcgcctacttgtgcacagc

SEQ ID NO: 4646308 - DNA, 25 bp, Homo sapien
gagttagaagatacaacccctgctc

SEQ ID NO: 4646309 - DNA, 25 bp, Homo sapien
ttaaagtcgcacaacaaggctagtg

SEQ ID NO: 4646310 - DNA, 25 bp, Homo sapien
tacagacataagagcccaaggaatc

SEQ ID NO: 4646311 - DNA, 25 bp, Homo sapien
tcttctccatgattctggactctgg

SEQ ID NO: 4646312 - DNA, 25 bp, Homo sapien
gaaggactgtcgctgttcccagcag

SEQ ID NO: 4646313 - DNA, 25 bp, Homo sapien
cagcccttcagtaatcctagcatct

SEQ ID NO: 4646314 - DNA, 25 bp, Homo sapien
taatcctagcatctattttaggtgg

SEQ ID NO: 4646315 - DNA, 25 bp, Homo sapien
ggaagcagctatggcaaagaacagc

SEQ ID NO: 4646316 - DNA, 25 bp, Homo sapien
tagtgaagatctccacccagaagcc

SEQ ID NO: 4646317 - DNA, 25 bp, Homo sapien
tctatacttctagtcacttggtgct

SEQ ID NO: 4646318 - DNA, 25 bp, Homo sapien
cagttcatctctcacctcgaactta

SEQ ID NO: 4646319 - DNA, 25 bp, Homo sapien
catgtcctgtagcacactcagttca

SEQ ID NO: 4646320 - DNA, 25 bp, Homo sapien
catacacgttaactgcagagtaaat

SEQ ID NO: 4646321 - DNA, 25 bp, Homo sapien
cctttgtagctacttttgcaggata

SEQ ID NO: 4646322 - DNA, 25 bp, Homo sapien
aattcggatgtatgatctctctagc

SEQ ID NO: 4646323 - DNA, 25 bp, Homo sapien
tactacccatagaaaacttgacatg

SEQ ID NO: 4646324 - DNA, 25 bp, Homo sapien
tccaaaaggttgcaagagtccagtc

SEQ ID NO: 4646325 - DNA, 25 bp, Homo sapien
tatgtccaaaaggttgcaagagtcc

SEQ ID NO: 4646326 - DNA, 25 bp, Homo sapien
aaaggtatgtccaaaaggttgcaag

SEQ ID NO: 4646327 - DNA, 25 bp, Homo sapien
aaaaggttgcaagagtccagtctcc

SEQ ID NO: 4646328 - DNA, 25 bp, Homo sapien
catctgcaaatagtgcactgtctcc

SEQ ID NO: 4646329 - DNA, 25 bp, Homo sapien
tagtgcactgtctccaggtacaaat

SEQ ID NO: 4646330 - DNA, 25 bp, Homo sapien
ggtacaaattcgatgctggagcact

SEQ ID NO: 4646331 - DNA, 25 bp, Homo sapien
tgtctccaggtacaaattcgatgct

SEQ ID NO: 4646332 - DNA, 25 bp, Homo sapien
caagtgcccttttagactcttttca

SEQ ID NO: 4646333 - DNA, 25 bp, Homo sapien
tgtcctgaagacacctggccagctt

SEQ ID NO: 4646334 - DNA, 25 bp, Homo sapien
cccaaacagcaccttgattttctgg

SEQ ID NO: 4646335 - DNA, 25 bp, Homo sapien
tacacaagactgatacgatatttta

SEQ ID NO: 4646336 - DNA, 25 bp, Homo sapien
atagagaggatcaacaaagtccaaa

SEQ ID NO: 4646337 - DNA, 25 bp, Homo sapien
tagagaggatcaacaaagtccaaaa

SEQ ID NO: 4646338 - DNA, 25 bp, Homo sapien
ctcgagagaacaagtttggagtcgc

SEQ ID NO: 4646339 - DNA, 25 bp, Homo sapien
gtgataaatctttcgcggttctgga

SEQ ID NO: 4646340 - DNA, 25 bp, Homo sapien
atgggaaagtggaaactcgagagaa

SEQ ID NO: 4646341 - DNA, 25 bp, Homo sapien
tcgcttcgttcaaaatggacgtccc

SEQ ID NO: 4646342 - DNA, 25 bp, Homo sapien
ctgaagggcgagggttttaagatgg

SEQ ID NO: 4646343 - DNA, 25 bp, Homo sapien
aggaggcaactgaagggcgagggtt

SEQ ID NO: 4646344 - DNA, 25 bp, Homo sapien
agggcgagggttttaagatggtgat

SEQ ID NO: 4646345 - DNA, 25 bp, Homo sapien
actgaagggcgagggttttaagatg

SEQ ID NO: 4646346 - DNA, 25 bp, Homo sapien
gatggctggaactgagacactgact

SEQ ID NO: 4646347 - DNA, 25 bp, Homo sapien
tgagcagcctgagagaatgtgcaca

SEQ ID NO: 4646348 - DNA, 25 bp, Homo sapien
caggcctacattgttgactttcaga

SEQ ID NO: 4646349 - DNA, 25 bp, Homo sapien
tcatgtagcacagagcttgaaaggc

SEQ ID NO: 4646350 - DNA, 25 bp, Homo sapien
tgtactatacagtctagtataagtg

SEQ ID NO: 4646351 - DNA, 25 bp, Homo sapien
tagtataagtgtagaaaaaccatga

SEQ ID NO: 4646352 - DNA, 25 bp, Homo sapien
cagtctagtataagtgtagaaaaac

SEQ ID NO: 4646353 - DNA, 25 bp, Homo sapien
tttcctcttgtactatacagtctag

SEQ ID NO: 4646354 - DNA, 25 bp, Homo sapien
tagtccaggtgaaacatctgtgtga

SEQ ID NO: 4646355 - DNA, 25 bp, Homo sapien
tctgtgtgatgcagccaagtatatg

SEQ ID NO: 4646356 - DNA, 25 bp, Homo sapien
tggcttagtgtactcatgatgggat

SEQ ID NO: 4646357 - DNA, 25 bp, Homo sapien
cacttggggtcttgcactgccagac

SEQ ID NO: 4646358 - DNA, 25 bp, Homo sapien
gtttctgtttatgacgtccaccgaa

SEQ ID NO: 4646359 - DNA, 25 bp, Homo sapien
ctataaatatgttgaaccgtctggt

SEQ ID NO: 4646360 - DNA, 25 bp, Homo sapien
cagtaatgtaattcatggcactata

SEQ ID NO: 4646361 - DNA, 25 bp, Homo sapien
cgtctggtaattccatgaggagtca

SEQ ID NO: 4646362 - DNA, 25 bp, Homo sapien
tatctatgttgaatgtccttgccat

SEQ ID NO: 4646363 - DNA, 25 bp, Homo sapien
caagtttttctgctaagcaattcca

SEQ ID NO: 4646364 - DNA, 25 bp, Homo sapien
aaattccaagtttttctgctaagca

SEQ ID NO: 4646365 - DNA, 25 bp, Homo sapien
attcaaatttatgctccagcataag

SEQ ID NO: 4646366 - DNA, 25 bp, Homo sapien
attcaagtttcaaacttgcagaaag

SEQ ID NO: 4646367 - DNA, 25 bp, Homo sapien
catggcacgtgattatgagatctta

SEQ ID NO: 4646368 - DNA, 25 bp, Homo sapien
ctgagttgaggtgtaagtgtttgca

SEQ ID NO: 4646369 - DNA, 25 bp, Homo sapien
gagagactttttgggctccctacaa

SEQ ID NO: 4646370 - DNA, 25 bp, Homo sapien
gcatccctagactttttcaatttga

SEQ ID NO: 4646371 - DNA, 25 bp, Homo sapien
caatgtgtggaccttcataggatgg

SEQ ID NO: 4646372 - DNA, 25 bp, Homo sapien
ttagttgattctagccatgggcttc

SEQ ID NO: 4646373 - DNA, 25 bp, Homo sapien
gcttccatcctctgaataagggcat

SEQ ID NO: 4646374 - DNA, 25 bp, Homo sapien
tatggtgatccagatgggacaccca

SEQ ID NO: 4646375 - DNA, 25 bp, Homo sapien
cagccaggaaaggtgtatgcattcc

SEQ ID NO: 4646376 - DNA, 25 bp, Homo sapien
tttccaggaacaagagcacaagcat

SEQ ID NO: 4646377 - DNA, 25 bp, Homo sapien
ggccaacgattaacagatgctgaca

SEQ ID NO: 4646378 - DNA, 25 bp, Homo sapien
tagataacagaccttccctactggg

SEQ ID NO: 4646379 - DNA, 25 bp, Homo sapien
tggcattggactcacataagaaact

SEQ ID NO: 4646380 - DNA, 25 bp, Homo sapien
gacttactagatcaccacaaataga

SEQ ID NO: 4646381 - DNA, 25 bp, Homo sapien
cttctctagatacaatgtaggcagg

SEQ ID NO: 4646382 - DNA, 25 bp, Homo sapien
aacaacattatgattcctcttcaga

SEQ ID NO: 4646383 - DNA, 25 bp, Homo sapien
tattgggtcactttcatcttgtact

SEQ ID NO: 4646384 - DNA, 25 bp, Homo sapien
ctttcatcttgtactatctgctttg

SEQ ID NO: 4646385 - DNA, 25 bp, Homo sapien
atcttttgctattgggtcactttca

SEQ ID NO: 4646386 - DNA, 25 bp, Homo sapien
tgctattgggtcactttcatcttgt

SEQ ID NO: 4646387 - DNA, 25 bp, Homo sapien
cgtgcttcagatctagtgggtttgc

SEQ ID NO: 4646388 - DNA, 25 bp, Homo sapien
cagatctagtgggtttgctgctagt

SEQ ID NO: 4646389 - DNA, 25 bp, Homo sapien
tagtgggtttgctgctagtctctcc

SEQ ID NO: 4646390 - DNA, 25 bp, Homo sapien
atgcctgccgtgcttcagatctagt

SEQ ID NO: 4646391 - DNA, 25 bp, Homo sapien
agttttatcatgtcagataggatga

SEQ ID NO: 4646392 - DNA, 25 bp, Homo sapien
aagtatttggcttgcaatactgcca

SEQ ID NO: 4646393 - DNA, 25 bp, Homo sapien
ccaaaaccaccagtagacttctgct

SEQ ID NO: 4646394 - DNA, 25 bp, Homo sapien
gatgataaagtatttggcttgcaat

SEQ ID NO: 4646395 - DNA, 25 bp, Homo sapien
cagagggaaggcatttggagcaaag

SEQ ID NO: 4646396 - DNA, 25 bp, Homo sapien
gccaggatcgggtctgggaagctcg

SEQ ID NO: 4646397 - DNA, 25 bp, Homo sapien
gagtttggagcctgatcaagggcac

SEQ ID NO: 4646398 - DNA, 25 bp, Homo sapien
ggaagctcggagatttcactgtgag

SEQ ID NO: 4646399 - DNA, 25 bp, Homo sapien
acaaacagtctcttccatagcagca

SEQ ID NO: 4646400 - DNA, 25 bp, Homo sapien
gacagagaaggattttggcaaagct

SEQ ID NO: 4646401 - DNA, 25 bp, Homo sapien
ggaatctggtgcaggaaccaaaaga

SEQ ID NO: 4646402 - DNA, 25 bp, Homo sapien
tctggtgcaggaaccaaaagacaga

SEQ ID NO: 4646403 - DNA, 25 bp, Homo sapien
tgcccagaaatcttgtgggtcagtg

SEQ ID NO: 4646404 - DNA, 25 bp, Homo sapien
ggatgtgaggctccctaagggtggg

SEQ ID NO: 4646405 - DNA, 25 bp, Homo sapien
tgaagcacattctgttcctggtgtt

SEQ ID NO: 4646406 - DNA, 25 bp, Homo sapien
ctcagcaacattcttggaaagcact

SEQ ID NO: 4646407 - DNA, 25 bp, Homo sapien
ttgaggataaactcaggcagaggac

SEQ ID NO: 4646408 - DNA, 25 bp, Homo sapien
ccattaatgtaaggtaaggatgatc

SEQ ID NO: 4646409 - DNA, 25 bp, Homo sapien
tccattaatgtaaggtaaggatgat

SEQ ID NO: 4646410 - DNA, 25 bp, Homo sapien
ttccattccatttaccaccaagaca

SEQ ID NO: 4646411 - DNA, 25 bp, Homo sapien
ttccatttaccaccaagacaggcac

SEQ ID NO: 4646412 - DNA, 25 bp, Homo sapien
catgttaggtctgcctgcaaaatgc

SEQ ID NO: 4646413 - DNA, 25 bp, Homo sapien
aatgctccccatccttatgtagtac

SEQ ID NO: 4646414 - DNA, 25 bp, Homo sapien
ggtctgcctgcaaaatgctccccat

SEQ ID NO: 4646415 - DNA, 25 bp, Homo sapien
aaaatgtgtgcatgttaggtctgcc

SEQ ID NO: 4646416 - DNA, 25 bp, Homo sapien
tagtggagacatggtatgaaatcgg

SEQ ID NO: 4646417 - DNA, 25 bp, Homo sapien
aaggtagtggagacatggtatgaaa

SEQ ID NO: 4646418 - DNA, 25 bp, Homo sapien
catggtatgaaatcggcagggttag

SEQ ID NO: 4646419 - DNA, 25 bp, Homo sapien
agacatggtatgaaatcggcagggt

SEQ ID NO: 4646420 - DNA, 25 bp, Homo sapien
tacgtgtagtgcaataaacccattc

SEQ ID NO: 4646421 - DNA, 25 bp, Homo sapien
taaaactccagaggagcatttataa

SEQ ID NO: 4646422 - DNA, 25 bp, Homo sapien
caagatgatcttgtacgtgtagtgc

SEQ ID NO: 4646423 - DNA, 25 bp, Homo sapien
cttaccataggtagcaagatgatct

SEQ ID NO: 4646424 - DNA, 25 bp, Homo sapien
gagcatcagtaatgtctcggatatg

SEQ ID NO: 4646425 - DNA, 25 bp, Homo sapien
agctccaaagaggtcgctcacggtg

SEQ ID NO: 4646426 - DNA, 25 bp, Homo sapien
tatgatttcactgtcattcaaggtg

SEQ ID NO: 4646427 - DNA, 25 bp, Homo sapien
cattcaaggtgtctgttttggtagc

SEQ ID NO: 4646428 - DNA, 25 bp, Homo sapien
aaacgaaatttgctttaactgagag

SEQ ID NO: 4646429 - DNA, 25 bp, Homo sapien
aacgaaatttgctttaactgagaga

SEQ ID NO: 4646430 - DNA, 25 bp, Homo sapien
cgaaatttgctttaactgagagagg

SEQ ID NO: 4646431 - DNA, 25 bp, Homo sapien
acgaaatttgctttaactgagagag

SEQ ID NO: 4646432 - DNA, 25 bp, Homo sapien
gttttcctgggaatgaaatagccat

SEQ ID NO: 4646433 - DNA, 25 bp, Homo sapien
tgataaaggtgcaagttttcctggg

SEQ ID NO: 4646434 - DNA, 25 bp, Homo sapien
gatacatgttgataaaggtgcaagt

SEQ ID NO: 4646435 - DNA, 25 bp, Homo sapien
atgaaatagccattcagagtggtgt

SEQ ID NO: 4646436 - DNA, 25 bp, Homo sapien
agaactggccctgtttgtgcgtaga

SEQ ID NO: 4646437 - DNA, 25 bp, Homo sapien
atagaactggccctgtttgtgcgta

SEQ ID NO: 4646438 - DNA, 25 bp, Homo sapien
ccctgtttgtgcgtagatgtcatca

SEQ ID NO: 4646439 - DNA, 25 bp, Homo sapien
ctggccctgtttgtgcgtagatgtc

SEQ ID NO: 4646440 - DNA, 25 bp, Homo sapien
tctctatcttttgttacaggcacca

SEQ ID NO: 4646441 - DNA, 25 bp, Homo sapien
tgacaaccagtgctagcatgttttc

SEQ ID NO: 4646442 - DNA, 25 bp, Homo sapien
ccagtgctagcatgttttctgtagg

SEQ ID NO: 4646443 - DNA, 25 bp, Homo sapien
atctctatcttttgttacaggcacc

SEQ ID NO: 4646444 - DNA, 25 bp, Homo sapien
gtctaaataaactatgattatccca

SEQ ID NO: 4646445 - DNA, 25 bp, Homo sapien
tctcattgcgtgcaacatcttctcc

SEQ ID NO: 4646446 - DNA, 25 bp, Homo sapien
agacacttccggatgcccattccaa

SEQ ID NO: 4646447 - DNA, 25 bp, Homo sapien
ttcgtttagaaatctgtcaggtcta

SEQ ID NO: 4646448 - DNA, 25 bp, Homo sapien
ttggcctcatgactaacccgtatgt

SEQ ID NO: 4646449 - DNA, 25 bp, Homo sapien
tttctgaattgagtaagaaaccctc

SEQ ID NO: 4646450 - DNA, 25 bp, Homo sapien
gcttggagttggtatagttttggcc

SEQ ID NO: 4646451 - DNA, 25 bp, Homo sapien
actcagtctgagaatctaagcagat

SEQ ID NO: 4646452 - DNA, 25 bp, Homo sapien
tacccatgcatttgtgttggcaaga

SEQ ID NO: 4646453 - DNA, 25 bp, Homo sapien
tgacattttggaatgcacttgagat

SEQ ID NO: 4646454 - DNA, 25 bp, Homo sapien
caatgtttctggtggagccgatgac

SEQ ID NO: 4646455 - DNA, 25 bp, Homo sapien
tggaaagcttcctaaataccaagga

SEQ ID NO: 4646456 - DNA, 25 bp, Homo sapien
ccaggtactccacatttgcttttac

SEQ ID NO: 4646457 - DNA, 25 bp, Homo sapien
tccatgtccaggtactccacatttg

SEQ ID NO: 4646458 - DNA, 25 bp, Homo sapien
catgtccaggtactccacatttgct

SEQ ID NO: 4646459 - DNA, 25 bp, Homo sapien
agctccatgtccaggtactccacat

SEQ ID NO: 4646460 - DNA, 25 bp, Homo sapien
gatccaacttagctttcgaataaca

SEQ ID NO: 4646461 - DNA, 25 bp, Homo sapien
ttgaaaacatactgacaaatacgat

SEQ ID NO: 4646462 - DNA, 25 bp, Homo sapien
cttagctttcgaataacacttatga

SEQ ID NO: 4646463 - DNA, 25 bp, Homo sapien
tactgacaaatacgatccaacttag

SEQ ID NO: 4646464 - DNA, 25 bp, Homo sapien
ttcttctcaaccttttgaatgtatc

SEQ ID NO: 4646465 - DNA, 25 bp, Homo sapien
ttagctcatagcaaggaagaggatg

SEQ ID NO: 4646466 - DNA, 25 bp, Homo sapien
ggaagaggatgacatgggaagcatg

SEQ ID NO: 4646467 - DNA, 25 bp, Homo sapien
caaggaagaggatgacatgggaagc

SEQ ID NO: 4646468 - DNA, 25 bp, Homo sapien
agaggatgacatgggaagcatggta

SEQ ID NO: 4646469 - DNA, 25 bp, Homo sapien
tacacgtgggctctgaaatctcttt

SEQ ID NO: 4646470 - DNA, 25 bp, Homo sapien
tcaactcctcatttttacacgtggg

SEQ ID NO: 4646471 - DNA, 25 bp, Homo sapien
tcatttttacacgtgggctctgaaa

SEQ ID NO: 4646472 - DNA, 25 bp, Homo sapien
tattcatcccctggtttctcactgt

SEQ ID NO: 4646473 - DNA, 25 bp, Homo sapien
gccaatagtattgtttccagatgct

SEQ ID NO: 4646474 - DNA, 25 bp, Homo sapien
ccagtcttggagttgccaaaatatt

SEQ ID NO: 4646475 - DNA, 25 bp, Homo sapien
tcatcatgagttcaatagttgtgcc

SEQ ID NO: 4646476 - DNA, 25 bp, Homo sapien
cagatgctttcgtagcttccagtct

SEQ ID NO: 4646477 - DNA, 25 bp, Homo sapien
agtttaccatttattaacggcagct

SEQ ID NO: 4646478 - DNA, 25 bp, Homo sapien
aatagtctgctgtatgaaataatgt

SEQ ID NO: 4646479 - DNA, 25 bp, Homo sapien
cggcagcttatgaataagttcagag

SEQ ID NO: 4646480 - DNA, 25 bp, Homo sapien
ctgctgtatgaaataatgttagttc

SEQ ID NO: 4646481 - DNA, 25 bp, Homo sapien
aaatgctttattcacaaccagtgtg

SEQ ID NO: 4646482 - DNA, 25 bp, Homo sapien
gacaaggtgtgaactgaaaaggcaa

SEQ ID NO: 4646483 - DNA, 25 bp, Homo sapien
taactttccaattcagccaatctcc

SEQ ID NO: 4646484 - DNA, 25 bp, Homo sapien
taacttcatgcttacagaacatagg

SEQ ID NO: 4646485 - DNA, 25 bp, Homo sapien
ctagaagatgatgattcatcggctc

SEQ ID NO: 4646486 - DNA, 25 bp, Homo sapien
tagaagatgatgattcatcggctcc

SEQ ID NO: 4646487 - DNA, 25 bp, Homo sapien
gatgatgattcatcggctccactta

SEQ ID NO: 4646488 - DNA, 25 bp, Homo sapien
gaagatgatgattcatcggctccac

SEQ ID NO: 4646489 - DNA, 25 bp, Homo sapien
cacacctagcaaccagaagttagta

SEQ ID NO: 4646490 - DNA, 25 bp, Homo sapien
cagaagttagtaattggctgccttc

SEQ ID NO: 4646491 - DNA, 25 bp, Homo sapien
tttaaaggaagccacacctagcaac

SEQ ID NO: 4646492 - DNA, 25 bp, Homo sapien
tttatctctaccttcttgcaaagaa

SEQ ID NO: 4646493 - DNA, 25 bp, Homo sapien
catgattagcactttgaggtctgaa

SEQ ID NO: 4646494 - DNA, 25 bp, Homo sapien
taggtctagagagagctaacgtcat

SEQ ID NO: 4646495 - DNA, 25 bp, Homo sapien
cctggagctagggtgttactgtcac

SEQ ID NO: 4646496 - DNA, 25 bp, Homo sapien
ggataatgtatctgacactacccag

SEQ ID NO: 4646497 - DNA, 25 bp, Homo sapien
cacaatggcatgacttacagaaagc

SEQ ID NO: 4646498 - DNA, 25 bp, Homo sapien
aaaggtagcctcactaatgttttgc

SEQ ID NO: 4646499 - DNA, 25 bp, Homo sapien
tccaggcttttcgatagggtgttct

SEQ ID NO: 4646500 - DNA, 25 bp, Homo sapien
tcagcactggattcggtgaccttcc

SEQ ID NO: 4646501 - DNA, 25 bp, Homo sapien
cgtagcaggtttcaccccagcctta

SEQ ID NO: 4646502 - DNA, 25 bp, Homo sapien
tgtgcatagtttttcctcgaatatg

SEQ ID NO: 4646503 - DNA, 25 bp, Homo sapien
tatttttaaatgcacggccttgtgc

SEQ ID NO: 4646504 - DNA, 25 bp, Homo sapien
cattaacagtcaacttgcgcagacc

SEQ ID NO: 4646505 - DNA, 25 bp, Homo sapien
gatcagtgttcttttaatcactcac

SEQ ID NO: 4646506 - DNA, 25 bp, Homo sapien
acactccatcctgggcgacataaca

SEQ ID NO: 4646507 - DNA, 25 bp, Homo sapien
ctacactccatcctgggcgacataa

SEQ ID NO: 4646508 - DNA, 25 bp, Homo sapien
ccatcctgggcgacataacaagact

SEQ ID NO: 4646509 - DNA, 25 bp, Homo sapien
ctccatcctgggcgacataacaaga

SEQ ID NO: 4646510 - DNA, 25 bp, Homo sapien
ctagtagtggcaagaatggagacat

SEQ ID NO: 4646511 - DNA, 25 bp, Homo sapien
atggagacataaatccatccctttt

SEQ ID NO: 4646512 - DNA, 25 bp, Homo sapien
tctatctgggaaaactgagtgctat

SEQ ID NO: 4646513 - DNA, 25 bp, Homo sapien
agcagtcttcctgctagtagtggca

SEQ ID NO: 4646514 - DNA, 25 bp, Homo sapien
gccaactgcacgtattaactgaact

SEQ ID NO: 4646515 - DNA, 25 bp, Homo sapien
taagttcctacattctagcctgaag

SEQ ID NO: 4646516 - DNA, 25 bp, Homo sapien
tgcatgaaaacctgcctaagccaat

SEQ ID NO: 4646517 - DNA, 25 bp, Homo sapien
gctggttaagggctcaaagccaact

SEQ ID NO: 4646518 - DNA, 25 bp, Homo sapien
tgagctgtctaaatagtagtcctac

SEQ ID NO: 4646519 - DNA, 25 bp, Homo sapien
gattcctcaacagcatgttcagaca

SEQ ID NO: 4646520 - DNA, 25 bp, Homo sapien
gaagcctagaggtgcaattgtaaca

SEQ ID NO: 4646521 - DNA, 25 bp, Homo sapien
ggccttgctcaaggtctacactgat

SEQ ID NO: 4646522 - DNA, 25 bp, Homo sapien
tactacaagtaagcacacaggctga

SEQ ID NO: 4646523 - DNA, 25 bp, Homo sapien
tagtgtgtgctctccataggaaaac

SEQ ID NO: 4646524 - DNA, 25 bp, Homo sapien
aacttcttagagtaggccctggctg

SEQ ID NO: 4646525 - DNA, 25 bp, Homo sapien
cattagagagtagccttgcgcttac

SEQ ID NO: 4646526 - DNA, 25 bp, Homo sapien
cattttcaataaaccaggcctgctt

SEQ ID NO: 4646527 - DNA, 25 bp, Homo sapien
taaaccaggcctgcttgaggaattc

SEQ ID NO: 4646528 - DNA, 25 bp, Homo sapien
ttcaataaaccaggcctgcttgagg

SEQ ID NO: 4646529 - DNA, 25 bp, Homo sapien
ggcctgcttgaggaattctgatacc

SEQ ID NO: 4646530 - DNA, 25 bp, Homo sapien
cgctgatccgggaccacctttggat

SEQ ID NO: 4646531 - DNA, 25 bp, Homo sapien
tgatccgggaccacctttggatgac

SEQ ID NO: 4646532 - DNA, 25 bp, Homo sapien
gacatccgaggatggattgaaggta

SEQ ID NO: 4646533 - DNA, 25 bp, Homo sapien
cattatggccttatgcaaggcagcg

SEQ ID NO: 4646534 - DNA, 25 bp, Homo sapien
gatatgctgctttgatctgttgacg

SEQ ID NO: 4646535 - DNA, 25 bp, Homo sapien
tgttgacgctgtgcattgtttcgct

SEQ ID NO: 4646536 - DNA, 25 bp, Homo sapien
aatgtcaatgatggttgcttcatcc

SEQ ID NO: 4646537 - DNA, 25 bp, Homo sapien
gtttcgcttagttagaatgtcaatg

SEQ ID NO: 4646538 - DNA, 25 bp, Homo sapien
ctgtgcttccgaatccatggttaag

SEQ ID NO: 4646539 - DNA, 25 bp, Homo sapien
gaccatattctttattgacagcagc

SEQ ID NO: 4646540 - DNA, 25 bp, Homo sapien
taaagaactaggtaactgtgcttcc

SEQ ID NO: 4646541 - DNA, 25 bp, Homo sapien
gcagcaatctcgatgtttacgttca

SEQ ID NO: 4646542 - DNA, 25 bp, Homo sapien
ctttcttcagtgtttcatccagggg

SEQ ID NO: 4646543 - DNA, 25 bp, Homo sapien
tttttagcagagctaaaacaacctc

SEQ ID NO: 4646544 - DNA, 25 bp, Homo sapien
acctcctcaaggtgacctgtaaggg

SEQ ID NO: 4646545 - DNA, 25 bp, Homo sapien
tcatggcagcacgaagttcatcagc

SEQ ID NO: 4646546 - DNA, 25 bp, Homo sapien
caaattgcgctggagtttttagcag

SEQ ID NO: 4646547 - DNA, 25 bp, Homo sapien
tctctgtagaccctgttaatgtctc

SEQ ID NO: 4646548 - DNA, 25 bp, Homo sapien
agaccctgttaatgtctctgatttc

SEQ ID NO: 4646549 - DNA, 25 bp, Homo sapien
tgccaaaatctcaattagagtatct

SEQ ID NO: 4646550 - DNA, 25 bp, Homo sapien
tttctttgttagttcttgatgccaa

SEQ ID NO: 4646551 - DNA, 25 bp, Homo sapien
cactggcctatatcttggccatatg

SEQ ID NO: 4646552 - DNA, 25 bp, Homo sapien
actggcctatatcttggccatatga

SEQ ID NO: 4646553 - DNA, 25 bp, Homo sapien
tcactggcctatatcttggccatat

SEQ ID NO: 4646554 - DNA, 25 bp, Homo sapien
atcactggcctatatcttggccata

SEQ ID NO: 4646555 - DNA, 25 bp, Homo sapien
gttgaaaattcacagtgccacagtg

SEQ ID NO: 4646556 - DNA, 25 bp, Homo sapien
cacagtcataaagctttcgttaaga

SEQ ID NO: 4646557 - DNA, 25 bp, Homo sapien
caatgacttatggaacatgttgcaa

SEQ ID NO: 4646558 - DNA, 25 bp, Homo sapien
caaaatgaggtacttgcttgaatgc

SEQ ID NO: 4646559 - DNA, 25 bp, Homo sapien
atgtctttggccagatctctcttca

SEQ ID NO: 4646560 - DNA, 25 bp, Homo sapien
agagaaagcaaagcgttccgaaaat

SEQ ID NO: 4646561 - DNA, 25 bp, Homo sapien
aaagcgttccgaaaatctccagatg

SEQ ID NO: 4646562 - DNA, 25 bp, Homo sapien
tgaggttatgtctttggccagatct

SEQ ID NO: 4646563 - DNA, 25 bp, Homo sapien
ctctcaccagacatagatacccaaa

SEQ ID NO: 4646564 - DNA, 25 bp, Homo sapien
aatggactaagaaattagtctttat

SEQ ID NO: 4646565 - DNA, 25 bp, Homo sapien
aacttgaatttgttagccatcagaa

SEQ ID NO: 4646566 - DNA, 25 bp, Homo sapien
gacatagatacccaaacttgaattt

SEQ ID NO: 4646567 - DNA, 25 bp, Homo sapien
ttcacaccaaagtcctcagatcggt

SEQ ID NO: 4646568 - DNA, 25 bp, Homo sapien
cattcacaccaaagtcctcagatcg

SEQ ID NO: 4646569 - DNA, 25 bp, Homo sapien
acaccaaagtcctcagatcggtcac

SEQ ID NO: 4646570 - DNA, 25 bp, Homo sapien
ttcattcacaccaaagtcctcagat

SEQ ID NO: 4646571 - DNA, 25 bp, Homo sapien
tacctagtacaacgaaaggtcagag

SEQ ID NO: 4646572 - DNA, 25 bp, Homo sapien
taagaagccattggtctctcagaag

SEQ ID NO: 4646573 - DNA, 25 bp, Homo sapien
tagccccacttaaggtaggaagatg

SEQ ID NO: 4646574 - DNA, 25 bp, Homo sapien
gcagcagtattttgtaagcacttcc

SEQ ID NO: 4646575 - DNA, 25 bp, Homo sapien
atccttagtgaagcactgtaatgaa

SEQ ID NO: 4646576 - DNA, 25 bp, Homo sapien
tgtactggtatagcagaagtggatg

SEQ ID NO: 4646577 - DNA, 25 bp, Homo sapien
gaagcactgtaatgaattctctaga

SEQ ID NO: 4646578 - DNA, 25 bp, Homo sapien
tacatgataatgtactggtatagca

SEQ ID NO: 4646579 - DNA, 25 bp, Homo sapien
tcaataattcaaccgtaacctggac

SEQ ID NO: 4646580 - DNA, 25 bp, Homo sapien
cattctcttgggtcacactaatcca

SEQ ID NO: 4646581 - DNA, 25 bp, Homo sapien
tgctctatagtaagacaactccaag

SEQ ID NO: 4646582 - DNA, 25 bp, Homo sapien
aatccctgccctattgtcacaagcg

SEQ ID NO: 4646583 - DNA, 25 bp, Homo sapien
gaaatgatatctgcacaataatgtt

SEQ ID NO: 4646584 - DNA, 25 bp, Homo sapien
cacttcactatctgctgaaatgata

SEQ ID NO: 4646585 - DNA, 25 bp, Homo sapien
aatgatatctgcacaataatgttag

SEQ ID NO: 4646586 - DNA, 25 bp, Homo sapien
caaaagtaaacacttcactatctgc

SEQ ID NO: 4646587 - DNA, 25 bp, Homo sapien
ggtattgaacacgtttacgtctgtc

SEQ ID NO: 4646588 - DNA, 25 bp, Homo sapien
tattgaacacgtttacgtctgtccc

SEQ ID NO: 4646589 - DNA, 25 bp, Homo sapien
gatggtattgaacacgtttacgtct

SEQ ID NO: 4646590 - DNA, 25 bp, Homo sapien
aggatggtattgaacacgtttacgt

SEQ ID NO: 4646591 - DNA, 25 bp, Homo sapien
aagtagcggctgtacaaaattggac

SEQ ID NO: 4646592 - DNA, 25 bp, Homo sapien
tattagaaacggcatgtgattgaca

SEQ ID NO: 4646593 - DNA, 25 bp, Homo sapien
acaaataacaatgggtcaggaacac

SEQ ID NO: 4646594 - DNA, 25 bp, Homo sapien
ggcccagagctaaatcttgcactca

SEQ ID NO: 4646595 - DNA, 25 bp, Homo sapien
gtcacctttcaactccaggtccaga

SEQ ID NO: 4646596 - DNA, 25 bp, Homo sapien
atgtcacctttcaactccaggtcca

SEQ ID NO: 4646597 - DNA, 25 bp, Homo sapien
catgtcatgcttactgtacttggtg

SEQ ID NO: 4646598 - DNA, 25 bp, Homo sapien
gaactttgttcatgtcatgcttact

SEQ ID NO: 4646599 - DNA, 25 bp, Homo sapien
gaaacagatgcactacttctgattg

SEQ ID NO: 4646600 - DNA, 25 bp, Homo sapien
tgttcttgttaagtataggatagct

SEQ ID NO: 4646601 - DNA, 25 bp, Homo sapien
tcttttacgttgcttcaattgaaac

SEQ ID NO: 4646602 - DNA, 25 bp, Homo sapien
taaggttatagtactttgccaatct

SEQ ID NO: 4646603 - DNA, 25 bp, Homo sapien
gaacaccctatgaacaacagacact

SEQ ID NO: 4646604 - DNA, 25 bp, Homo sapien
gaagccactaggtgttcaagcctat

SEQ ID NO: 4646605 - DNA, 25 bp, Homo sapien
tgtcgagatctatggaccaacagca

SEQ ID NO: 4646606 - DNA, 25 bp, Homo sapien
agaacacccatggaacaaacgtgca

SEQ ID NO: 4646607 - DNA, 25 bp, Homo sapien
agctggtttgcttgtggcgcacttc

SEQ ID NO: 4646608 - DNA, 25 bp, Homo sapien
gctggtttgcttgtggcgcacttca

SEQ ID NO: 4646609 - DNA, 25 bp, Homo sapien
aagctggtttgcttgtggcgcactt

SEQ ID NO: 4646610 - DNA, 25 bp, Homo sapien
caaccttagaggaagtaggccacta

SEQ ID NO: 4646611 - DNA, 25 bp, Homo sapien
acaaataattcttcctctaagcagg

SEQ ID NO: 4646612 - DNA, 25 bp, Homo sapien
aaaaagcaccgaatctaacagaagt

SEQ ID NO: 4646613 - DNA, 25 bp, Homo sapien
agaaagtacatcacccttcccgtgg

SEQ ID NO: 4646614 - DNA, 25 bp, Homo sapien
ccaaagtctggagtatatgtcccac

SEQ ID NO: 4646615 - DNA, 25 bp, Homo sapien
taaccactacagagcagtacctagc

SEQ ID NO: 4646616 - DNA, 25 bp, Homo sapien
tcacactagactatggcagaaaggg

SEQ ID NO: 4646617 - DNA, 25 bp, Homo sapien
gatagaatctaatcagggcttccga

SEQ ID NO: 4646618 - DNA, 25 bp, Homo sapien
tacatcttctgatagaatgctttga

SEQ ID NO: 4646619 - DNA, 25 bp, Homo sapien
catgtcaatttcagaacgggaaacc

SEQ ID NO: 4646620 - DNA, 25 bp, Homo sapien
gatggcttggcaaagggagatacca

SEQ ID NO: 4646621 - DNA, 25 bp, Homo sapien
taatcctgatcaatgccttatggcg

SEQ ID NO: 4646622 - DNA, 25 bp, Homo sapien
tgggatggcattagaggaatcaaaa

SEQ ID NO: 4646623 - DNA, 25 bp, Homo sapien
ttgggatggcattagaggaatcaaa

SEQ ID NO: 4646624 - DNA, 25 bp, Homo sapien
tgttgggatggcattagaggaatca

SEQ ID NO: 4646625 - DNA, 25 bp, Homo sapien
gttgggatggcattagaggaatcaa

SEQ ID NO: 4646626 - DNA, 25 bp, Homo sapien
ggagatacctgattcactcaccaga

SEQ ID NO: 4646627 - DNA, 25 bp, Homo sapien
gacttagctgtagatgagattacac

SEQ ID NO: 4646628 - DNA, 25 bp, Homo sapien
tgtacccagtatttcagtagagaac

SEQ ID NO: 4646629 - DNA, 25 bp, Homo sapien
aaagcaatagccttcaagactgaga

SEQ ID NO: 4646630 - DNA, 25 bp, Homo sapien
tccacaaagagccaccaggattttc

SEQ ID NO: 4646631 - DNA, 25 bp, Homo sapien
ttcctccacaaagagccaccaggat

SEQ ID NO: 4646632 - DNA, 25 bp, Homo sapien
tctcataatctcctttggtttcatc

SEQ ID NO: 4646633 - DNA, 25 bp, Homo sapien
accaggattttctcataatctcctt

SEQ ID NO: 4646634 - DNA, 25 bp, Homo sapien
ctatatttttcagcatgtaggtagc

SEQ ID NO: 4646635 - DNA, 25 bp, Homo sapien
tgtaggtagctacactgtaatcctg

SEQ ID NO: 4646636 - DNA, 25 bp, Homo sapien
taaagtcttctgatcatagcttgag

SEQ ID NO: 4646637 - DNA, 25 bp, Homo sapien
tagcttgagaccatcaagggaatgt

SEQ ID NO: 4646638 - DNA, 25 bp, Homo sapien
tccagctctacctagtgagaaggcg

SEQ ID NO: 4646639 - DNA, 25 bp, Homo sapien
aaaagagctcgtaccatggctgatg

SEQ ID NO: 4646640 - DNA, 25 bp, Homo sapien
aaagcaagttaacaaagggcagcct

SEQ ID NO: 4646641 - DNA, 25 bp, Homo sapien
gagaaggcgctcacgggaaagtaac

SEQ ID NO: 4646642 - DNA, 25 bp, Homo sapien
tgactgcaattgcaagtgattcctg

SEQ ID NO: 4646643 - DNA, 25 bp, Homo sapien
cttcagccaccatttgactgcaatt

SEQ ID NO: 4646644 - DNA, 25 bp, Homo sapien
gccaccatttgactgcaattgcaag

SEQ ID NO: 4646645 - DNA, 25 bp, Homo sapien
tgcaattgcaagtgattcctgtagc

SEQ ID NO: 4646646 - DNA, 25 bp, Homo sapien
actgagtataatcttcagcacaatg

SEQ ID NO: 4646647 - DNA, 25 bp, Homo sapien
ccccaaaaagtattgcccaaggcag

SEQ ID NO: 4646648 - DNA, 25 bp, Homo sapien
catcccccaaaaagtattgcccaag

SEQ ID NO: 4646649 - DNA, 25 bp, Homo sapien
gtcaacatcccccaaaaagtattgc

SEQ ID NO: 4646650 - DNA, 25 bp, Homo sapien
ccaaaattccattgccacaagttga

SEQ ID NO: 4646651 - DNA, 25 bp, Homo sapien
tagccacaatcacactgctctgtag

SEQ ID NO: 4646652 - DNA, 25 bp, Homo sapien
caagttgaagattttcggtaagtca

SEQ ID NO: 4646653 - DNA, 25 bp, Homo sapien
taagttcaggctgcagaactatccg

SEQ ID NO: 4646654 - DNA, 25 bp, Homo sapien
gaaccccaggttggtttgtgtgcca

SEQ ID NO: 4646655 - DNA, 25 bp, Homo sapien
ggcagtttggtatctccagagggac

SEQ ID NO: 4646656 - DNA, 25 bp, Homo sapien
gagtccgatctttcaatccagaatg

SEQ ID NO: 4646657 - DNA, 25 bp, Homo sapien
taactcgatgcaacagagtccgatc

SEQ ID NO: 4646658 - DNA, 25 bp, Homo sapien
gaagaatagatgttcgtcatatcac

SEQ ID NO: 4646659 - DNA, 25 bp, Homo sapien
catggcctttgcaagggaaaaagta

SEQ ID NO: 4646660 - DNA, 25 bp, Homo sapien
agatgttcgtcatatcacattggac

SEQ ID NO: 4646661 - DNA, 25 bp, Homo sapien
tatcacattggacccatcccatggc

SEQ ID NO: 4646662 - DNA, 25 bp, Homo sapien
gcaaaaggcatgacagaaaggtgat

SEQ ID NO: 4646663 - DNA, 25 bp, Homo sapien
tggatttctccataatgcagataga

SEQ ID NO: 4646664 - DNA, 25 bp, Homo sapien
ccctgaagcagtagcttggaattgg

SEQ ID NO: 4646665 - DNA, 25 bp, Homo sapien
tccctgatttgttgccaagccgtca

SEQ ID NO: 4646666 - DNA, 25 bp, Homo sapien
caagagacacgctttcgttgatcaa

SEQ ID NO: 4646667 - DNA, 25 bp, Homo sapien
tttcatcaagagacacgctttcgtt

SEQ ID NO: 4646668 - DNA, 25 bp, Homo sapien
tgttttcatcaagagacacgctttc

SEQ ID NO: 4646669 - DNA, 25 bp, Homo sapien
tcatcaagagacacgctttcgttga

SEQ ID NO: 4646670 - DNA, 25 bp, Homo sapien
gactcagcagtttcctccccatccc

SEQ ID NO: 4646671 - DNA, 25 bp, Homo sapien
aggcccccatgtgcttctggtccat

SEQ ID NO: 4646672 - DNA, 25 bp, Homo sapien
cccaggcccccatgtgcttctggtc

SEQ ID NO: 4646673 - DNA, 25 bp, Homo sapien
ctggactcagcagtttcctccccat

SEQ ID NO: 4646674 - DNA, 25 bp, Homo sapien
ggctctttgagaagatctccttcag

SEQ ID NO: 4646675 - DNA, 25 bp, Homo sapien
cctttgttcaccttgtgcctcacga

SEQ ID NO: 4646676 - DNA, 25 bp, Homo sapien
ccttgtgcctcacgatgggctcttt

SEQ ID NO: 4646677 - DNA, 25 bp, Homo sapien
cgatgggctctttgagaagatctcc

SEQ ID NO: 4646678 - DNA, 25 bp, Homo sapien
gaagttcagccgaacggttgaaaga

SEQ ID NO: 4646679 - DNA, 25 bp, Homo sapien
catagaggaaggctgtgaactggtc

SEQ ID NO: 4646680 - DNA, 25 bp, Homo sapien
gactggccaagaacctcaagttgtg

SEQ ID NO: 4646681 - DNA, 25 bp, Homo sapien
tgaactggtcagttgtagactggcc

SEQ ID NO: 4646682 - DNA, 25 bp, Homo sapien
tgctggatctgcatgtaaatttgct

SEQ ID NO: 4646683 - DNA, 25 bp, Homo sapien
tctttcagggttctcaagcaagaaa

SEQ ID NO: 4646684 - DNA, 25 bp, Homo sapien
ctttcagggttctcaagcaagaaaa

SEQ ID NO: 4646685 - DNA, 25 bp, Homo sapien
tgtgaatattgttgttggcaagatc

SEQ ID NO: 4646686 - DNA, 25 bp, Homo sapien
caagatcttttgacctgatggatag

SEQ ID NO: 4646687 - DNA, 25 bp, Homo sapien
caagaacgcctcttgtaaacaggga

SEQ ID NO: 4646688 - DNA, 25 bp, Homo sapien
gaccaactgggcattaatgtgaata

SEQ ID NO: 4646689 - DNA, 25 bp, Homo sapien
gttccttatcatagattctcaaaag

SEQ ID NO: 4646690 - DNA, 25 bp, Homo sapien
tactccaaactcagcagagtctatc

SEQ ID NO: 4646691 - DNA, 25 bp, Homo sapien
tatctttacaaattgttccttatca

SEQ ID NO: 4646692 - DNA, 25 bp, Homo sapien
aaaaatatggcaattactccaaact

SEQ ID NO: 4646693 - DNA, 25 bp, Homo sapien
tcatcacccacaggaactccaaatt

SEQ ID NO: 4646694 - DNA, 25 bp, Homo sapien
ttcttcccactactttcctcatcac

SEQ ID NO: 4646695 - DNA, 25 bp, Homo sapien
atcacccacaggaactccaaattct

SEQ ID NO: 4646696 - DNA, 25 bp, Homo sapien
gcttcttcccactactttcctcatc

SEQ ID NO: 4646697 - DNA, 25 bp, Homo sapien
taaatctcataaggcaaatctaccc

SEQ ID NO: 4646698 - DNA, 25 bp, Homo sapien
cataattctataactgaccttcagg

SEQ ID NO: 4646699 - DNA, 25 bp, Homo sapien
caattctgctgactggtcaccttaa

SEQ ID NO: 4646700 - DNA, 25 bp, Homo sapien
gctccatggtttagcattatatcca

SEQ ID NO: 4646701 - DNA, 25 bp, Homo sapien
cagtcagtcccaaaaggtgggtaat

SEQ ID NO: 4646702 - DNA, 25 bp, Homo sapien
cagtcccaaaaggtgggtaatgaat

SEQ ID NO: 4646703 - DNA, 25 bp, Homo sapien
tcaaccagtcagtcccaaaaggtgg

SEQ ID NO: 4646704 - DNA, 25 bp, Homo sapien
aaaggtgggtaatgaatatctgccc

SEQ ID NO: 4646705 - DNA, 25 bp, Homo sapien
taaaggacacttaggcttcgagtct

SEQ ID NO: 4646706 - DNA, 25 bp, Homo sapien
aaggtctctatcaaagttacttggg

SEQ ID NO: 4646707 - DNA, 25 bp, Homo sapien
ggctagcctagcctgataaatacag

SEQ ID NO: 4646708 - DNA, 25 bp, Homo sapien
tacttctgtctacccctattcaagg

SEQ ID NO: 4646709 - DNA, 25 bp, Homo sapien
tccaaattttcagctctttctacca

SEQ ID NO: 4646710 - DNA, 25 bp, Homo sapien
ccaaattttcagctctttctaccat

SEQ ID NO: 4646711 - DNA, 25 bp, Homo sapien
atccaaattttcagctctttctacc

SEQ ID NO: 4646712 - DNA, 25 bp, Homo sapien
catccaaattttcagctctttctac

SEQ ID NO: 4646713 - DNA, 25 bp, Homo sapien
atatttggtgccctgtcttctaccc

SEQ ID NO: 4646714 - DNA, 25 bp, Homo sapien
aggcttactggcatatttggtgccc

SEQ ID NO: 4646715 - DNA, 25 bp, Homo sapien
caggcttactggcatatttggtgcc

SEQ ID NO: 4646716 - DNA, 25 bp, Homo sapien
tggctgattagatggctgagaaagc

SEQ ID NO: 4646717 - DNA, 25 bp, Homo sapien
gtcctcagaaggtacacttgtcaaa

SEQ ID NO: 4646718 - DNA, 25 bp, Homo sapien
tgctttcatgtgtacagacgcctgg

SEQ ID NO: 4646719 - DNA, 25 bp, Homo sapien
cattaactgtaatgccagttctgct

SEQ ID NO: 4646720 - DNA, 25 bp, Homo sapien
cagggcaatagagacaggaacatta

SEQ ID NO: 4646721 - DNA, 25 bp, Homo sapien
tctgagctttaataatacagggcaa

SEQ ID NO: 4646722 - DNA, 25 bp, Homo sapien
ccaagggagatgactttaattccac

SEQ ID NO: 4646723 - DNA, 25 bp, Homo sapien
ggaacattacacagacttcagctga

SEQ ID NO: 4646724 - DNA, 25 bp, Homo sapien
ctttcctttctctgacacaatctcc

SEQ ID NO: 4646725 - DNA, 25 bp, Homo sapien
ttcctttctctgacacaatctccat

SEQ ID NO: 4646726 - DNA, 25 bp, Homo sapien
tttcctttctctgacacaatctcca

SEQ ID NO: 4646727 - DNA, 25 bp, Homo sapien
aacagcctggtattgtcaaattgca

SEQ ID NO: 4646728 - DNA, 25 bp, Homo sapien
tctaatgcgctctttccatacaagg

SEQ ID NO: 4646729 - DNA, 25 bp, Homo sapien
atatggaagctaaaagcccctcaga

SEQ ID NO: 4646730 - DNA, 25 bp, Homo sapien
caaattgcaggtaacctggcaaggt

SEQ ID NO: 4646731 - DNA, 25 bp, Homo sapien
taggcagaaggtaaaccccatagcg

SEQ ID NO: 4646732 - DNA, 25 bp, Homo sapien
ttagcttagcaacaataggaatcca

SEQ ID NO: 4646733 - DNA, 25 bp, Homo sapien
tctataccaaagaatgccacacgta

SEQ ID NO: 4646734 - DNA, 25 bp, Homo sapien
ttaacaataaactcaacagaatggg

SEQ ID NO: 4646735 - DNA, 25 bp, Homo sapien
ctctttcattcttcactatcttctc

SEQ ID NO: 4646736 - DNA, 25 bp, Homo sapien
caacctgcaggatctgttttgcttc

SEQ ID NO: 4646737 - DNA, 25 bp, Homo sapien
cacaacctgcaggatctgttttgct

SEQ ID NO: 4646738 - DNA, 25 bp, Homo sapien
cgtggtgagcacaacctgcaggatc

SEQ ID NO: 4646739 - DNA, 25 bp, Homo sapien
tccacaggtggtccaaagtgagctg

SEQ ID NO: 4646740 - DNA, 25 bp, Homo sapien
cacacaaatttggatctcaacaggt

SEQ ID NO: 4646741 - DNA, 25 bp, Homo sapien
agtgagctgaatggatatggttctc

SEQ ID NO: 4646742 - DNA, 25 bp, Homo sapien
aatttggatctcaacaggttctctg

SEQ ID NO: 4646743 - DNA, 25 bp, Homo sapien
aataagcaaggcctaatactttcaa

SEQ ID NO: 4646744 - DNA, 25 bp, Homo sapien
cataacagtgtaacacgtggcatct

SEQ ID NO: 4646745 - DNA, 25 bp, Homo sapien
taacacgtggcatctgcttcagatg

SEQ ID NO: 4646746 - DNA, 25 bp, Homo sapien
cagtgtaacacgtggcatctgcttc

SEQ ID NO: 4646747 - DNA, 25 bp, Homo sapien
tctcattgtggagcaaaggctaaag

SEQ ID NO: 4646748 - DNA, 25 bp, Homo sapien
tgattgagagtgtaggcccactcca

SEQ ID NO: 4646749 - DNA, 25 bp, Homo sapien
tagtaaagcttttccgcagaactgg

SEQ ID NO: 4646750 - DNA, 25 bp, Homo sapien
tagatggtcttcaagtcagctacaa

SEQ ID NO: 4646751 - DNA, 25 bp, Homo sapien
agaagctactgctctaacaaatggg

SEQ ID NO: 4646752 - DNA, 25 bp, Homo sapien
tgtccactacagaatatactagagc

SEQ ID NO: 4646753 - DNA, 25 bp, Homo sapien
tattcatcttggtgcatccctgcga

SEQ ID NO: 4646754 - DNA, 25 bp, Homo sapien
gatgcaaacgccaatgtttccatgg

SEQ ID NO: 4646755 - DNA, 25 bp, Homo sapien
gaagatgttggaattacagcaccga

SEQ ID NO: 4646756 - DNA, 25 bp, Homo sapien
aataaaccagagagggacttctagc

SEQ ID NO: 4646757 - DNA, 25 bp, Homo sapien
tatttaaaggttcagggcaagagaa

SEQ ID NO: 4646758 - DNA, 25 bp, Homo sapien
taacaacatattggagatgaccaaa

SEQ ID NO: 4646759 - DNA, 25 bp, Homo sapien
ggaaatgcccatcttgcatgaatct

SEQ ID NO: 4646760 - DNA, 25 bp, Homo sapien
aaagtcagcactgtacagtctgcat

SEQ ID NO: 4646761 - DNA, 25 bp, Homo sapien
tagaacgaccttgtgaagatggcag

SEQ ID NO: 4646762 - DNA, 25 bp, Homo sapien
gatggcagataagaagcaatatcag

SEQ ID NO: 4646763 - DNA, 25 bp, Homo sapien
ggatttggaacacacgtgtagagta

SEQ ID NO: 4646764 - DNA, 25 bp, Homo sapien
gagtaacttcggctctgtatgctct

SEQ ID NO: 4646765 - DNA, 25 bp, Homo sapien
aacacacgtgtagagtaacttcggc

SEQ ID NO: 4646766 - DNA, 25 bp, Homo sapien
cgtgtagagtaacttcggctctgta

SEQ ID NO: 4646767 - DNA, 25 bp, Homo sapien
cctggtcgtgggctacaaagagtcc

SEQ ID NO: 4646768 - DNA, 25 bp, Homo sapien
ggtgcttttgaactccctggtcgtg

SEQ ID NO: 4646769 - DNA, 25 bp, Homo sapien
gaacagaaacgtcgccttttgtgga

SEQ ID NO: 4646770 - DNA, 25 bp, Homo sapien
aagtccttggctgcataaaagtcct

SEQ ID NO: 4646771 - DNA, 25 bp, Homo sapien
catcaaaagtacaggggtggtattc

SEQ ID NO: 4646772 - DNA, 25 bp, Homo sapien
cttgcttcatttgtgggtccactcc

SEQ ID NO: 4646773 - DNA, 25 bp, Homo sapien
cattacaatgcatggcagttggtcg

SEQ ID NO: 4646774 - DNA, 25 bp, Homo sapien
ggtcgatagtgtggaaaaacctcat

SEQ ID NO: 4646775 - DNA, 25 bp, Homo sapien
ttcagctgtcatgtggaagtctgca

SEQ ID NO: 4646776 - DNA, 25 bp, Homo sapien
gaagtctgcagtaggtatgagcaaa

SEQ ID NO: 4646777 - DNA, 25 bp, Homo sapien
gactcctaggtaaccgtggtcacag

SEQ ID NO: 4646778 - DNA, 25 bp, Homo sapien
aactacctgggactagcctgctctg

SEQ ID NO: 4646779 - DNA, 25 bp, Homo sapien
aacattcaccctgcatagcgatggg

SEQ ID NO: 4646780 - DNA, 25 bp, Homo sapien
ggtgcattcatgaacttagttcaac

SEQ ID NO: 4646781 - DNA, 25 bp, Homo sapien
gatggggtgcgaaaaggaaggcagc

SEQ ID NO: 4646782 - DNA, 25 bp, Homo sapien
cagggtgcattcatgaacttagttc

SEQ ID NO: 4646783 - DNA, 25 bp, Homo sapien
ggaatcagtcaaaatcctcatgggc

SEQ ID NO: 4646784 - DNA, 25 bp, Homo sapien
gctcaatggaatcagtcaaaatcct

SEQ ID NO: 4646785 - DNA, 25 bp, Homo sapien
ctgagcttgctcaatggaatcagtc

SEQ ID NO: 4646786 - DNA, 25 bp, Homo sapien
gcttgctcaatggaatcagtcaaaa

SEQ ID NO: 4646787 - DNA, 25 bp, Homo sapien
tgctttgaaggaaaggacttagctg

SEQ ID NO: 4646788 - DNA, 25 bp, Homo sapien
gatgctttgaaggaaaggacttagc

SEQ ID NO: 4646789 - DNA, 25 bp, Homo sapien
ctttgaaggaaaggacttagctgac

SEQ ID NO: 4646790 - DNA, 25 bp, Homo sapien
gctttgaaggaaaggacttagctga

SEQ ID NO: 4646791 - DNA, 25 bp, Homo sapien
tgcaatgatgctcggagacacccat

SEQ ID NO: 4646792 - DNA, 25 bp, Homo sapien
tgccaggacaagcttgcaatgatgc

SEQ ID NO: 4646793 - DNA, 25 bp, Homo sapien
ttgcaatgatgctcggagacaccca

SEQ ID NO: 4646794 - DNA, 25 bp, Homo sapien
ccaggacaagcttgcaatgatgctc

SEQ ID NO: 4646795 - DNA, 25 bp, Homo sapien
tacagagaatatagggccaagacct

SEQ ID NO: 4646796 - DNA, 25 bp, Homo sapien
ggaaaatcagaaagcctgcagttgc

SEQ ID NO: 4646797 - DNA, 25 bp, Homo sapien
tagctatgtagccagcagaagggca

SEQ ID NO: 4646798 - DNA, 25 bp, Homo sapien
tgcagttgcccattagtgagtcagt

SEQ ID NO: 4646799 - DNA, 25 bp, Homo sapien
caaatggtatgttgtacagaagcac

SEQ ID NO: 4646800 - DNA, 25 bp, Homo sapien
caaaacactcatctgggcgtcaaga

SEQ ID NO: 4646801 - DNA, 25 bp, Homo sapien
cacctggaaatatccgaagagtttg

SEQ ID NO: 4646802 - DNA, 25 bp, Homo sapien
tctcagtagagctaataactggttg

SEQ ID NO: 4646803 - DNA, 25 bp, Homo sapien
ccagcatataatgagaattatgaga

SEQ ID NO: 4646804 - DNA, 25 bp, Homo sapien
ggacaataaccagcatataatgaga

SEQ ID NO: 4646805 - DNA, 25 bp, Homo sapien
tgagaattatgagacttgaatgttc

SEQ ID NO: 4646806 - DNA, 25 bp, Homo sapien
tctaggacaataaccagcatataat

SEQ ID NO: 4646807 - DNA, 25 bp, Homo sapien
cattctgcaacttgttgagcaggga

SEQ ID NO: 4646808 - DNA, 25 bp, Homo sapien
tcattctgcaacttgttgagcaggg

SEQ ID NO: 4646809 - DNA, 25 bp, Homo sapien
cttcttgagttctacaaaggctttt

SEQ ID NO: 4646810 - DNA, 25 bp, Homo sapien
gagatcatcttcaaggttttgatgt

SEQ ID NO: 4646811 - DNA, 25 bp, Homo sapien
ttcttgagttctacaaaggctttta

SEQ ID NO: 4646812 - DNA, 25 bp, Homo sapien
tcttgagttctacaaaggcttttaa

SEQ ID NO: 4646813 - DNA, 25 bp, Homo sapien
ggcagttgcaatgggcttggtatgc

SEQ ID NO: 4646814 - DNA, 25 bp, Homo sapien
gaggagtggcagttgcaatgggctt

SEQ ID NO: 4646815 - DNA, 25 bp, Homo sapien
ccagaggagtggcagttgcaatggg

SEQ ID NO: 4646816 - DNA, 25 bp, Homo sapien
cagttgcaatgggcttggtatgcat

SEQ ID NO: 4646817 - DNA, 25 bp, Homo sapien
catcagaaaggttatagaggtctat

SEQ ID NO: 4646818 - DNA, 25 bp, Homo sapien
tggtaaactctaccgaaggacacaa

SEQ ID NO: 4646819 - DNA, 25 bp, Homo sapien
gtataactagctttatcacagtgga

SEQ ID NO: 4646820 - DNA, 25 bp, Homo sapien
tcccacttacagttttgaaagacag

SEQ ID NO: 4646821 - DNA, 25 bp, Homo sapien
cttcatgcagagcacaatctgaagc

SEQ ID NO: 4646822 - DNA, 25 bp, Homo sapien
catttacaccgaagagtttgcaaag

SEQ ID NO: 4646823 - DNA, 25 bp, Homo sapien
cttttactcataactatgcctccaa

SEQ ID NO: 4646824 - DNA, 25 bp, Homo sapien
gcgaggtcacaagctgaatcaccat

SEQ ID NO: 4646825 - DNA, 25 bp, Homo sapien
tccaatatgcgaggtcacaagctga

SEQ ID NO: 4646826 - DNA, 25 bp, Homo sapien
cataactatgcctccaatatgcgag

SEQ ID NO: 4646827 - DNA, 25 bp, Homo sapien
tggaatggaggaggaatagtcactt

SEQ ID NO: 4646828 - DNA, 25 bp, Homo sapien
tcgatggaatggaggaggaatagtc

SEQ ID NO: 4646829 - DNA, 25 bp, Homo sapien
cttaaactcccacctccattacttg

SEQ ID NO: 4646830 - DNA, 25 bp, Homo sapien
gaatagtcacttaaactcccacctc

SEQ ID NO: 4646831 - DNA, 25 bp, Homo sapien
ttggaagtgggaggaacatcgatcc

SEQ ID NO: 4646832 - DNA, 25 bp, Homo sapien
cagcgcttggactgcttgcgaacgg

SEQ ID NO: 4646833 - DNA, 25 bp, Homo sapien
aggaacatcgatccgaagttcctcc

SEQ ID NO: 4646834 - DNA, 25 bp, Homo sapien
cttggactgcttgcgaacgggcgtg

SEQ ID NO: 4646835 - DNA, 25 bp, Homo sapien
tagcttgaatagcatgccctgttta

SEQ ID NO: 4646836 - DNA, 25 bp, Homo sapien
cttagcttgaatagcatgccctgtt

SEQ ID NO: 4646837 - DNA, 25 bp, Homo sapien
tgatgctgtctgcacgattctccag

SEQ ID NO: 4646838 - DNA, 25 bp, Homo sapien
gatgctgtctgcacgattctccagg

SEQ ID NO: 4646839 - DNA, 25 bp, Homo sapien
aatttggatggtaggtcagcacgcc

SEQ ID NO: 4646840 - DNA, 25 bp, Homo sapien
tctcccaaggtcaatctctttacca

SEQ ID NO: 4646841 - DNA, 25 bp, Homo sapien
tcatgtaaatttggatggtaggtca

SEQ ID NO: 4646842 - DNA, 25 bp, Homo sapien
ttggatggtaggtcagcacgccgtt

SEQ ID NO: 4646843 - DNA, 25 bp, Homo sapien
gggagtcatccagccctgtgtctga

SEQ ID NO: 4646844 - DNA, 25 bp, Homo sapien
cagatgtggctagcagtggcctctt

SEQ ID NO: 4646845 - DNA, 25 bp, Homo sapien
tggagatgcgcgcacaggcagatgt

SEQ ID NO: 4646846 - DNA, 25 bp, Homo sapien
gctcatgtccttggttaggccattg

SEQ ID NO: 4646847 - DNA, 25 bp, Homo sapien
gtgccggacaggccatggtctttta

SEQ ID NO: 4646848 - DNA, 25 bp, Homo sapien
gccggacaggccatggtcttttaag

SEQ ID NO: 4646849 - DNA, 25 bp, Homo sapien
tgccggacaggccatggtcttttaa

SEQ ID NO: 4646850 - DNA, 25 bp, Homo sapien
agtgccggacaggccatggtctttt

SEQ ID NO: 4646851 - DNA, 25 bp, Homo sapien
ctcagcccggacttgctcttgctgc

SEQ ID NO: 4646852 - DNA, 25 bp, Homo sapien
ttggagttcccgcatgtttccgatc

SEQ ID NO: 4646853 - DNA, 25 bp, Homo sapien
tttccgatcaactgcagggccatgg

SEQ ID NO: 4646854 - DNA, 25 bp, Homo sapien
cgcatgtttccgatcaactgcaggg

SEQ ID NO: 4646855 - DNA, 25 bp, Homo sapien
ctttaggtagctaaccatccacagc

SEQ ID NO: 4646856 - DNA, 25 bp, Homo sapien
acctttaggtagctaaccatccaca

SEQ ID NO: 4646857 - DNA, 25 bp, Homo sapien
cctttaggtagctaaccatccacag

SEQ ID NO: 4646858 - DNA, 25 bp, Homo sapien
cccttgttttcctctcaatggcgtt

SEQ ID NO: 4646859 - DNA, 25 bp, Homo sapien
ggctgaatcagtactcatcttggaa

SEQ ID NO: 4646860 - DNA, 25 bp, Homo sapien
ggaaaacacagtctgcttagacaga

SEQ ID NO: 4646861 - DNA, 25 bp, Homo sapien
ttagaacattaatgcaccatgtgat

SEQ ID NO: 4646862 - DNA, 25 bp, Homo sapien
aatgccctgggattcgtactaaaat

SEQ ID NO: 4646863 - DNA, 25 bp, Homo sapien
cctgggattcgtactaaaatgctca

SEQ ID NO: 4646864 - DNA, 25 bp, Homo sapien
ctgggacactggatgtaaatgccct

SEQ ID NO: 4646865 - DNA, 25 bp, Homo sapien
gggacactggatgtaaatgccctgg

SEQ ID NO: 4646866 - DNA, 25 bp, Homo sapien
tctggtttgtggatattccttgact

SEQ ID NO: 4646867 - DNA, 25 bp, Homo sapien
gactttgctcaaatgctctaatata

SEQ ID NO: 4646868 - DNA, 25 bp, Homo sapien
tgtccatcattctggtttgtggata

SEQ ID NO: 4646869 - DNA, 25 bp, Homo sapien
tgtggatattccttgactttgctca

SEQ ID NO: 4646870 - DNA, 25 bp, Homo sapien
gatcaaggctatgcattgaaaattt

SEQ ID NO: 4646871 - DNA, 25 bp, Homo sapien
gggatcaaggctatgcattgaaaat

SEQ ID NO: 4646872 - DNA, 25 bp, Homo sapien
atcatatttcaactgttcttggcca

SEQ ID NO: 4646873 - DNA, 25 bp, Homo sapien
gcagggatcaaggctatgcattgaa

SEQ ID NO: 4646874 - DNA, 25 bp, Homo sapien
tattggcccataacaggaaataatt

SEQ ID NO: 4646875 - DNA, 25 bp, Homo sapien
catagcaacattattggcccataac

SEQ ID NO: 4646876 - DNA, 25 bp, Homo sapien
agcaacattattggcccataacagg

SEQ ID NO: 4646877 - DNA, 25 bp, Homo sapien
acattattggcccataacaggaaat

SEQ ID NO: 4646878 - DNA, 25 bp, Homo sapien
tttagttaggggcagaagtcataca

SEQ ID NO: 4646879 - DNA, 25 bp, Homo sapien
atagtagccttgaattatattatgt

SEQ ID NO: 4646880 - DNA, 25 bp, Homo sapien
aattgaataacttgggagtctcttc

SEQ ID NO: 4646881 - DNA, 25 bp, Homo sapien
tcaggtctgatctttgtcatttctt

SEQ ID NO: 4646882 - DNA, 25 bp, Homo sapien
gaattgtgatgggaagcaggcgcat

SEQ ID NO: 4646883 - DNA, 25 bp, Homo sapien
ttcagaattgtgatgggaagcaggc

SEQ ID NO: 4646884 - DNA, 25 bp, Homo sapien
cagaattgtgatgggaagcaggcgc

SEQ ID NO: 4646885 - DNA, 25 bp, Homo sapien
attcagaattgtgatgggaagcagg

SEQ ID NO: 4646886 - DNA, 25 bp, Homo sapien
tccccttccttctttaatgtgttga

SEQ ID NO: 4646887 - DNA, 25 bp, Homo sapien
cccttccttctttaatgtgttgagg

SEQ ID NO: 4646888 - DNA, 25 bp, Homo sapien
tcttcttcactgtgcctctccctct

SEQ ID NO: 4646889 - DNA, 25 bp, Homo sapien
tttcttcttcactgtgcctctccct

SEQ ID NO: 4646890 - DNA, 25 bp, Homo sapien
tgtctgaatttgtagcaactttagc

SEQ ID NO: 4646891 - DNA, 25 bp, Homo sapien
gaatttgtagcaactttagcatctg

SEQ ID NO: 4646892 - DNA, 25 bp, Homo sapien
tagcatctggaccaatctaacttga

SEQ ID NO: 4646893 - DNA, 25 bp, Homo sapien
taacttgattcacagagacaatggc

SEQ ID NO: 4646894 - DNA, 25 bp, Homo sapien
tttgtttcctttcatgtatcttcca

SEQ ID NO: 4646895 - DNA, 25 bp, Homo sapien
tgtttcctttcatgtatcttccagg

SEQ ID NO: 4646896 - DNA, 25 bp, Homo sapien
ctttcatgtatcttccaggttgcat

SEQ ID NO: 4646897 - DNA, 25 bp, Homo sapien
ttcctttcatgtatcttccaggttg

SEQ ID NO: 4646898 - DNA, 25 bp, Homo sapien
cagtgctgctaacatagaatcctcc

SEQ ID NO: 4646899 - DNA, 25 bp, Homo sapien
atgtgagacattggaacacatatgt

SEQ ID NO: 4646900 - DNA, 25 bp, Homo sapien
ctgtaatgtgagacattggaacaca

SEQ ID NO: 4646901 - DNA, 25 bp, Homo sapien
tgctcagtgctgctaacatagaatc

SEQ ID NO: 4646902 - DNA, 25 bp, Homo sapien
ctctttggaacagtttcatgggatc

SEQ ID NO: 4646903 - DNA, 25 bp, Homo sapien
ttctttgacttctgtaagccgtaac

SEQ ID NO: 4646904 - DNA, 25 bp, Homo sapien
ctttgacttctgtaagccgtaacat

SEQ ID NO: 4646905 - DNA, 25 bp, Homo sapien
ttggaacagtttcatgggatcttta

SEQ ID NO: 4646906 - DNA, 25 bp, Homo sapien
agtgatggatgagcttctgtaatct

SEQ ID NO: 4646907 - DNA, 25 bp, Homo sapien
tggatgagcttctgtaatctctgct

SEQ ID NO: 4646908 - DNA, 25 bp, Homo sapien
tctagctccatagcatcaataattt

SEQ ID NO: 4646909 - DNA, 25 bp, Homo sapien
aatctctgcttctagctccatagca

SEQ ID NO: 4646910 - DNA, 25 bp, Homo sapien
catttgaaaatgatggtgatgtcca

SEQ ID NO: 4646911 - DNA, 25 bp, Homo sapien
agaatgaagtgagaaggtctgaagt

SEQ ID NO: 4646912 - DNA, 25 bp, Homo sapien
atttgaaaatgatggtgatgtccag

SEQ ID NO: 4646913 - DNA, 25 bp, Homo sapien
ttccccaggcgtactttgctttctg

SEQ ID NO: 4646914 - DNA, 25 bp, Homo sapien
ccccaggcgtactttgctttctgtt

SEQ ID NO: 4646915 - DNA, 25 bp, Homo sapien
tcttgaggtaacaagcactcaagta

SEQ ID NO: 4646916 - DNA, 25 bp, Homo sapien
ttcttgaggtaacaagcactcaagt

SEQ ID NO: 4646917 - DNA, 25 bp, Homo sapien
tgttgacgtgtagcttctcctagtg

SEQ ID NO: 4646918 - DNA, 25 bp, Homo sapien
tattttgttgacgtgtagcttctcc

SEQ ID NO: 4646919 - DNA, 25 bp, Homo sapien
gacgtgtagcttctcctagtgttga

SEQ ID NO: 4646920 - DNA, 25 bp, Homo sapien
cttattttgttgacgtgtagcttct

SEQ ID NO: 4646921 - DNA, 25 bp, Homo sapien
ttacaacaggatcagccaccttgct

SEQ ID NO: 4646922 - DNA, 25 bp, Homo sapien
tcaataagcccttacaacaggatca

SEQ ID NO: 4646923 - DNA, 25 bp, Homo sapien
taagcccttacaacaggatcagcca

SEQ ID NO: 4646924 - DNA, 25 bp, Homo sapien
ccttacaacaggatcagccaccttg

SEQ ID NO: 4646925 - DNA, 25 bp, Homo sapien
ttcctcctcagatggtaagtacttg

SEQ ID NO: 4646926 - DNA, 25 bp, Homo sapien
taagtacttgtatggttttactaga

SEQ ID NO: 4646927 - DNA, 25 bp, Homo sapien
cttggttctacgaattcctcctcag

SEQ ID NO: 4646928 - DNA, 25 bp, Homo sapien
acttggttctacgaattcctcctca

SEQ ID NO: 4646929 - DNA, 25 bp, Homo sapien
tgcactacagtttgtaatatatact

SEQ ID NO: 4646930 - DNA, 25 bp, Homo sapien
tgttagtggttgcactacagtttgt

SEQ ID NO: 4646931 - DNA, 25 bp, Homo sapien
tggttgcactacagtttgtaatata

SEQ ID NO: 4646932 - DNA, 25 bp, Homo sapien
cttacaactgatctaagttcatttt

SEQ ID NO: 4646933 - DNA, 25 bp, Homo sapien
tcttgcatggaggaaagagcatggt

SEQ ID NO: 4646934 - DNA, 25 bp, Homo sapien
tcttcaaatgcagggctgatgacgc

SEQ ID NO: 4646935 - DNA, 25 bp, Homo sapien
tctgttcaccaagttgttgatctcc

SEQ ID NO: 4646936 - DNA, 25 bp, Homo sapien
tgatctcctatgagtagcacagtca

SEQ ID NO: 4646937 - DNA, 25 bp, Homo sapien
caaaagcctgcatgtattcttgccg

SEQ ID NO: 4646938 - DNA, 25 bp, Homo sapien
gtattcttgccgttgaagttctaca

SEQ ID NO: 4646939 - DNA, 25 bp, Homo sapien
tgtctgagtcaaaagcctgcatgta

SEQ ID NO: 4646940 - DNA, 25 bp, Homo sapien
ctgtctgtctgagtcaaaagcctgc

SEQ ID NO: 4646941 - DNA, 25 bp, Homo sapien
ttcatgactagacatccagtgcctg

SEQ ID NO: 4646942 - DNA, 25 bp, Homo sapien
tgtttttgttcatgactagacatcc

SEQ ID NO: 4646943 - DNA, 25 bp, Homo sapien
tttgttcatgactagacatccagtg

SEQ ID NO: 4646944 - DNA, 25 bp, Homo sapien
ctcaattccttcagatagtttcttc

SEQ ID NO: 4646945 - DNA, 25 bp, Homo sapien
tattctatcaggtgacttagctggg

SEQ ID NO: 4646946 - DNA, 25 bp, Homo sapien
tacttctgatctctatggactagtg

SEQ ID NO: 4646947 - DNA, 25 bp, Homo sapien
cacgaaggtcattagatttagtgct

SEQ ID NO: 4646948 - DNA, 25 bp, Homo sapien
tttgaagtctctatagtctactgcc

SEQ ID NO: 4646949 - DNA, 25 bp, Homo sapien
gtcacctgcagactagcatcagcat

SEQ ID NO: 4646950 - DNA, 25 bp, Homo sapien
cagaaaaataattggcccagagata

SEQ ID NO: 4646951 - DNA, 25 bp, Homo sapien
gctggagccttccatctatctcctg

SEQ ID NO: 4646952 - DNA, 25 bp, Homo sapien
tggcccagagatactataaatgaag

SEQ ID NO: 4646953 - DNA, 25 bp, Homo sapien
taaaatgcatgtagtgataatggct

SEQ ID NO: 4646954 - DNA, 25 bp, Homo sapien
tgcatataataggatcagtaataaa

SEQ ID NO: 4646955 - DNA, 25 bp, Homo sapien
tcatagcatatgaagggctcaaaaa

SEQ ID NO: 4646956 - DNA, 25 bp, Homo sapien
gagagaaaggtccaacatgcatata

SEQ ID NO: 4646957 - DNA, 25 bp, Homo sapien
gaaacagggactatgctttagagac

SEQ ID NO: 4646958 - DNA, 25 bp, Homo sapien
caccttgacatcttgttctggcagg

SEQ ID NO: 4646959 - DNA, 25 bp, Homo sapien
tacagacatctagagaaggtcaggg

SEQ ID NO: 4646960 - DNA, 25 bp, Homo sapien
ttttaagtaggagtgtgacacaccc

SEQ ID NO: 4646961 - DNA, 25 bp, Homo sapien
gcagaaagactggcatcatttggtg

SEQ ID NO: 4646962 - DNA, 25 bp, Homo sapien
agcagaaagactggcatcatttggt

SEQ ID NO: 4646963 - DNA, 25 bp, Homo sapien
aatatcaggagtcagggatctcaag

SEQ ID NO: 4646964 - DNA, 25 bp, Homo sapien
tcaaatatcaggagtcagggatctc

SEQ ID NO: 4646965 - DNA, 25 bp, Homo sapien
gtgaagttacagtctgcttgctgac

SEQ ID NO: 4646966 - DNA, 25 bp, Homo sapien
gggttgttaataggcagtgattctt

SEQ ID NO: 4646967 - DNA, 25 bp, Homo sapien
gcttgctgactgctaattaaaacaa

SEQ ID NO: 4646968 - DNA, 25 bp, Homo sapien
ggcagtgattcttcaatgctccttc

SEQ ID NO: 4646969 - DNA, 25 bp, Homo sapien
gccatcaattccttggatgagtaaa

SEQ ID NO: 4646970 - DNA, 25 bp, Homo sapien
tgaggatattttaaacgtaaggagc

SEQ ID NO: 4646971 - DNA, 25 bp, Homo sapien
taaaatgtagctttcctggatagaa

SEQ ID NO: 4646972 - DNA, 25 bp, Homo sapien
taaacgtaaggagccatcaattcct

SEQ ID NO: 4646973 - DNA, 25 bp, Homo sapien
agctcaaataggctgtgccctgtag

SEQ ID NO: 4646974 - DNA, 25 bp, Homo sapien
ggagctcaaataggctgtgccctgt

SEQ ID NO: 4646975 - DNA, 25 bp, Homo sapien
caggagctcaaataggctgtgccct

SEQ ID NO: 4646976 - DNA, 25 bp, Homo sapien
ctcaaataggctgtgccctgtagca

SEQ ID NO: 4646977 - DNA, 25 bp, Homo sapien
taatgcaaagcataggagtcttcct

SEQ ID NO: 4646978 - DNA, 25 bp, Homo sapien
tgtcataattatcagctggaagctc

SEQ ID NO: 4646979 - DNA, 25 bp, Homo sapien
aagggaatcaagagcgacaacaaaa

SEQ ID NO: 4646980 - DNA, 25 bp, Homo sapien
ggttttcccagcaaatacatatgca

SEQ ID NO: 4646981 - DNA, 25 bp, Homo sapien
gacttttctgatatgcgatggctat

SEQ ID NO: 4646982 - DNA, 25 bp, Homo sapien
tatgcgatggctatgacaatttgtc

SEQ ID NO: 4646983 - DNA, 25 bp, Homo sapien
ggctatgacaatttgtcctgagtta

SEQ ID NO: 4646984 - DNA, 25 bp, Homo sapien
agtcacacatagaccactggactgt

SEQ ID NO: 4646985 - DNA, 25 bp, Homo sapien
cattaatttgtgaaagcaggccaat

SEQ ID NO: 4646986 - DNA, 25 bp, Homo sapien
ctatgaaacttcttttctgcatata

SEQ ID NO: 4646987 - DNA, 25 bp, Homo sapien
tcccatctgggatactaaaatgcat

SEQ ID NO: 4646988 - DNA, 25 bp, Homo sapien
ttctgcatatacacactgcctcaaa

SEQ ID NO: 4646989 - DNA, 25 bp, Homo sapien
tatgcaaaagcatgactagaagcag

SEQ ID NO: 4646990 - DNA, 25 bp, Homo sapien
atgactagaagcaggttccttctgg

SEQ ID NO: 4646991 - DNA, 25 bp, Homo sapien
gttccttctgggtgattgaagtgtt

SEQ ID NO: 4646992 - DNA, 25 bp, Homo sapien
tgattgaagtgttgcaatactccat

SEQ ID NO: 4646993 - DNA, 25 bp, Homo sapien
atgtctttggaaaaaggcaccccag

SEQ ID NO: 4646994 - DNA, 25 bp, Homo sapien
atgttgcatttgtcataatatgtca

SEQ ID NO: 4646995 - DNA, 25 bp, Homo sapien
tgtcaaattatttacatgtctttgg

SEQ ID NO: 4646996 - DNA, 25 bp, Homo sapien
gttgcatttgtcataatatgtcaaa

SEQ ID NO: 4646997 - DNA, 25 bp, Homo sapien
ctaagaacttcataggtctctgtta

SEQ ID NO: 4646998 - DNA, 25 bp, Homo sapien
tttaatccttactgctctgtgacca

SEQ ID NO: 4646999 - DNA, 25 bp, Homo sapien
ttagaggaatgccaatgattgcaat

SEQ ID NO: 4647000 - DNA, 25 bp, Homo sapien
ttcctcttggcagttatgtagtatc

SEQ ID NO: 4647001 - DNA, 25 bp, Homo sapien
tcttccacgctgattccaggctttg

SEQ ID NO: 4647002 - DNA, 25 bp, Homo sapien
aacggagacggcacttgccattcgg

SEQ ID NO: 4647003 - DNA, 25 bp, Homo sapien
taaataattccaacggagacggcac

SEQ ID NO: 4647004 - DNA, 25 bp, Homo sapien
attcggattcttccacgctgattcc

SEQ ID NO: 4647005 - DNA, 25 bp, Homo sapien
tcaatgactaatggcaccatccctg

SEQ ID NO: 4647006 - DNA, 25 bp, Homo sapien
tagctgacttctctacgtgcaagca

SEQ ID NO: 4647007 - DNA, 25 bp, Homo sapien
cattataaaccagactgccctggga

SEQ ID NO: 4647008 - DNA, 25 bp, Homo sapien
tttgatggcaataaagtctcctgac

SEQ ID NO: 4647009 - DNA, 25 bp, Homo sapien
aacagcagatgatggtcctttacct

SEQ ID NO: 4647010 - DNA, 25 bp, Homo sapien
gatgatggtcctttaccttcgaaca

SEQ ID NO: 4647011 - DNA, 25 bp, Homo sapien
tgagagcccattggaaacagcagat

SEQ ID NO: 4647012 - DNA, 25 bp, Homo sapien
tggaaacagcagatgatggtccttt

SEQ ID NO: 4647013 - DNA, 25 bp, Homo sapien
cacaggtacctgtccagttgcacat

SEQ ID NO: 4647014 - DNA, 25 bp, Homo sapien
tcaatcctccagatttcctgagatt

SEQ ID NO: 4647015 - DNA, 25 bp, Homo sapien
gatttcagcatccttaacaaagcac

SEQ ID NO: 4647016 - DNA, 25 bp, Homo sapien
caaggagcatgtagttaccctgctg

SEQ ID NO: 4647017 - DNA, 25 bp, Homo sapien
cagcagcagggatagttgtttccca

SEQ ID NO: 4647018 - DNA, 25 bp, Homo sapien
ggaatgttctgtgcgtgcttgcctg

SEQ ID NO: 4647019 - DNA, 25 bp, Homo sapien
cagaaacatccagggagctagctgc

SEQ ID NO: 4647020 - DNA, 25 bp, Homo sapien
cagttgtgggcatgcgcgtacttcc

SEQ ID NO: 4647021 - DNA, 25 bp, Homo sapien
atggaagcttgacttctttctccct

SEQ ID NO: 4647022 - DNA, 25 bp, Homo sapien
gggatgatggaagcttgacttcttt

SEQ ID NO: 4647023 - DNA, 25 bp, Homo sapien
ggatgatggaagcttgacttctttc

SEQ ID NO: 4647024 - DNA, 25 bp, Homo sapien
gatggaagcttgacttctttctccc

SEQ ID NO: 4647025 - DNA, 25 bp, Homo sapien
aacaaaggctctgcatgagagagca

SEQ ID NO: 4647026 - DNA, 25 bp, Homo sapien
aggctctgcatgagagagcaatgac

SEQ ID NO: 4647027 - DNA, 25 bp, Homo sapien
caaaggctctgcatgagagagcaat

SEQ ID NO: 4647028 - DNA, 25 bp, Homo sapien
aataaacaaaggctctgcatgagag

SEQ ID NO: 4647029 - DNA, 25 bp, Homo sapien
cccaggtaggaagttgacccaagtg

SEQ ID NO: 4647030 - DNA, 25 bp, Homo sapien
ttcacgaagcacttcaggactcatt

SEQ ID NO: 4647031 - DNA, 25 bp, Homo sapien
caaggctcttgtgtaagcatctctt

SEQ ID NO: 4647032 - DNA, 25 bp, Homo sapien
caagtgagttccttgactcttgaga

SEQ ID NO: 4647033 - DNA, 25 bp, Homo sapien
caatttaacagcttaattaccaggt

SEQ ID NO: 4647034 - DNA, 25 bp, Homo sapien
aaatgattatcttcagcttagcagt

SEQ ID NO: 4647035 - DNA, 25 bp, Homo sapien
tcccaatttaacagcttaattacca

SEQ ID NO: 4647036 - DNA, 25 bp, Homo sapien
tgattatcttcagcttagcagtagt

SEQ ID NO: 4647037 - DNA, 25 bp, Homo sapien
gctgcataagtcaagaaaccagaag

SEQ ID NO: 4647038 - DNA, 25 bp, Homo sapien
cattttcagtgctgcataagtcaag

SEQ ID NO: 4647039 - DNA, 25 bp, Homo sapien
tgaggccactccttgagagctcaag

SEQ ID NO: 4647040 - DNA, 25 bp, Homo sapien
catctccaattgggcagcaattgct

SEQ ID NO: 4647041 - DNA, 25 bp, Homo sapien
tccttgatgaatcaaaatttgcttc

SEQ ID NO: 4647042 - DNA, 25 bp, Homo sapien
cttccttgatgaatcaaaatttgct

SEQ ID NO: 4647043 - DNA, 25 bp, Homo sapien
ttccttgatgaatcaaaatttgctt

SEQ ID NO: 4647044 - DNA, 25 bp, Homo sapien
aagagaatcccccttcaatgcactc

SEQ ID NO: 4647045 - DNA, 25 bp, Homo sapien
tctgcatcaagagaatcccccttca

SEQ ID NO: 4647046 - DNA, 25 bp, Homo sapien
gagtaatgaggataagatttccttc

SEQ ID NO: 4647047 - DNA, 25 bp, Homo sapien
tttgcttaaatgtggagtaatgagg

SEQ ID NO: 4647048 - DNA, 25 bp, Homo sapien
tcatgttcttaaagctgctaagcta

SEQ ID NO: 4647049 - DNA, 25 bp, Homo sapien
agctagagtcaccttgctcctcata

SEQ ID NO: 4647050 - DNA, 25 bp, Homo sapien
taaagctgctaagctagagtcacct

SEQ ID NO: 4647051 - DNA, 25 bp, Homo sapien
gctcctcatactgagttgctggagg

SEQ ID NO: 4647052 - DNA, 25 bp, Homo sapien
ttagatagcccagatcttcatgttt

SEQ ID NO: 4647053 - DNA, 25 bp, Homo sapien
attagatagcccagatcttcatgtt

SEQ ID NO: 4647054 - DNA, 25 bp, Homo sapien
gattagatagcccagatcttcatgt

SEQ ID NO: 4647055 - DNA, 25 bp, Homo sapien
tagatagcccagatcttcatgttta

SEQ ID NO: 4647056 - DNA, 25 bp, Homo sapien
tagatttgtgccacttgggacctgc

SEQ ID NO: 4647057 - DNA, 25 bp, Homo sapien
cccctagatttgtgccacttgggac

SEQ ID NO: 4647058 - DNA, 25 bp, Homo sapien
catccacacgaagggctccccctag

SEQ ID NO: 4647059 - DNA, 25 bp, Homo sapien
acacgaagggctccccctagatttg

SEQ ID NO: 4647060 - DNA, 25 bp, Homo sapien
cttcagacccctataacgagaattg

SEQ ID NO: 4647061 - DNA, 25 bp, Homo sapien
ccctataacgagaattggaagcaga

SEQ ID NO: 4647062 - DNA, 25 bp, Homo sapien
ctacttgatatcagtgattgccagt

SEQ ID NO: 4647063 - DNA, 25 bp, Homo sapien
cagatttataatcaaagggatgttc

SEQ ID NO: 4647064 - DNA, 25 bp, Homo sapien
atgtctgcgcggtcagtactggcat

SEQ ID NO: 4647065 - DNA, 25 bp, Homo sapien
gaaatgtctgcgcggtcagtactgg

SEQ ID NO: 4647066 - DNA, 25 bp, Homo sapien
ctttgaaatgtctgcgcggtcagta

SEQ ID NO: 4647067 - DNA, 25 bp, Homo sapien
tttgaaatgtctgcgcggtcagtac

SEQ ID NO: 4647068 - DNA, 25 bp, Homo sapien
gacaccagcttcctgaccataatgt

SEQ ID NO: 4647069 - DNA, 25 bp, Homo sapien
caatttgagagaatcgtctctttcc

SEQ ID NO: 4647070 - DNA, 25 bp, Homo sapien
actgtgactgtaccagctgtttgtt

SEQ ID NO: 4647071 - DNA, 25 bp, Homo sapien
ttttgattataggatggtagacacc

SEQ ID NO: 4647072 - DNA, 25 bp, Homo sapien
cagtattccaactatcaaaggtagg

SEQ ID NO: 4647073 - DNA, 25 bp, Homo sapien
tagaggtaagcatccaaaggtttat

SEQ ID NO: 4647074 - DNA, 25 bp, Homo sapien
tcttcagtacgttgcttttgatcct

SEQ ID NO: 4647075 - DNA, 25 bp, Homo sapien
tggtggtgagatgcctgccagtatt

SEQ ID NO: 4647076 - DNA, 25 bp, Homo sapien
tcctggtccgtgataaaacttgaag

SEQ ID NO: 4647077 - DNA, 25 bp, Homo sapien
tgtttcttggtagtccatctggaga

SEQ ID NO: 4647078 - DNA, 25 bp, Homo sapien
gatcctctgaatttatgccttgcca

SEQ ID NO: 4647079 - DNA, 25 bp, Homo sapien
gatgcaactgccaaacaatcagctt

SEQ ID NO: 4647080 - DNA, 25 bp, Homo sapien
gcaatcttattagaagtggtgggag

SEQ ID NO: 4647081 - DNA, 25 bp, Homo sapien
ttataggcaatcttattagaagtgg

SEQ ID NO: 4647082 - DNA, 25 bp, Homo sapien
gggtgggtactgtttataggcaatc

SEQ ID NO: 4647083 - DNA, 25 bp, Homo sapien
gggtactgtttataggcaatcttat

SEQ ID NO: 4647084 - DNA, 25 bp, Homo sapien
tacatgcatgaggagctaaggctga

SEQ ID NO: 4647085 - DNA, 25 bp, Homo sapien
gagaaccactgaccgccatcttctg

SEQ ID NO: 4647086 - DNA, 25 bp, Homo sapien
catcttctgtcacacgcatgcggta

SEQ ID NO: 4647087 - DNA, 25 bp, Homo sapien
gtgctccacactgagaggtacatgc

SEQ ID NO: 4647088 - DNA, 25 bp, Homo sapien
gaatcacttagatctcgagttccat

SEQ ID NO: 4647089 - DNA, 25 bp, Homo sapien
tgcagaggcttcattgtgtgttggg

SEQ ID NO: 4647090 - DNA, 25 bp, Homo sapien
tcacttagaatcacttagatctcga

SEQ ID NO: 4647091 - DNA, 25 bp, Homo sapien
gatctcgagttccatcacagctctg

SEQ ID NO: 4647092 - DNA, 25 bp, Homo sapien
gtccagtgtctatcaaatgctgtac

SEQ ID NO: 4647093 - DNA, 25 bp, Homo sapien
gctgtactggtatccttattgtaac

SEQ ID NO: 4647094 - DNA, 25 bp, Homo sapien
tgggattttgttagtcagtgccagc

SEQ ID NO: 4647095 - DNA, 25 bp, Homo sapien
ccttattgtaactcacagaggccat

SEQ ID NO: 4647096 - DNA, 25 bp, Homo sapien
tgaatcggcaggcacaagaagcctg

SEQ ID NO: 4647097 - DNA, 25 bp, Homo sapien
ttgagtctgttcaatgtgtctttga

SEQ ID NO: 4647098 - DNA, 25 bp, Homo sapien
gatgaactcttcttgtgtgaatcgg

SEQ ID NO: 4647099 - DNA, 25 bp, Homo sapien
gccctgttggaaggaccggcatcta

SEQ ID NO: 4647100 - DNA, 25 bp, Homo sapien
ctgtaataataaagccacgatattt

SEQ ID NO: 4647101 - DNA, 25 bp, Homo sapien
tcttcagattgttgcttggagtcat

SEQ ID NO: 4647102 - DNA, 25 bp, Homo sapien
tgtggccgatcatgacagacaatag

SEQ ID NO: 4647103 - DNA, 25 bp, Homo sapien
gatattttggtatacaactactttg

SEQ ID NO: 4647104 - DNA, 25 bp, Homo sapien
tttctgcactaaaaagagacgttcc

SEQ ID NO: 4647105 - DNA, 25 bp, Homo sapien
cctggttgacttggccatgtcggac

SEQ ID NO: 4647106 - DNA, 25 bp, Homo sapien
tggtctcaacactcctaaagggaag

SEQ ID NO: 4647107 - DNA, 25 bp, Homo sapien
gctgcccagaaggagtcaaagtagt

SEQ ID NO: 4647108 - DNA, 25 bp, Homo sapien
ggtcactgtgaatcaatacttattc

SEQ ID NO: 4647109 - DNA, 25 bp, Homo sapien
tcaaagacttaataaggacaacgtg

SEQ ID NO: 4647110 - DNA, 25 bp, Homo sapien
ttattgaaagcagaccagaagtcca

SEQ ID NO: 4647111 - DNA, 25 bp, Homo sapien
cacatagttgtaggaaaaaccttag

SEQ ID NO: 4647112 - DNA, 25 bp, Homo sapien
ctattattagctacaattaaaacca

SEQ ID NO: 4647113 - DNA, 25 bp, Homo sapien
gcttcccgtctcttgatgaaattga

SEQ ID NO: 4647114 - DNA, 25 bp, Homo sapien
gaatatctattattagctacaatta

SEQ ID NO: 4647115 - DNA, 25 bp, Homo sapien
ccttagcttcccgtctcttgatgaa

SEQ ID NO: 4647116 - DNA, 25 bp, Homo sapien
gtttccctgaattgtcactgagtat

SEQ ID NO: 4647117 - DNA, 25 bp, Homo sapien
tctctttacaccttactacctggtc

SEQ ID NO: 4647118 - DNA, 25 bp, Homo sapien
tttccctgaattgtcactgagtatt

SEQ ID NO: 4647119 - DNA, 25 bp, Homo sapien
tctttacaccttactacctggtcca

SEQ ID NO: 4647120 - DNA, 25 bp, Homo sapien
cccctcaggttgagctgtaccacag

SEQ ID NO: 4647121 - DNA, 25 bp, Homo sapien
cattagcacccctcaggttgagctg

SEQ ID NO: 4647122 - DNA, 25 bp, Homo sapien
tgtttttctgacacattagcacccc

SEQ ID NO: 4647123 - DNA, 25 bp, Homo sapien
agctgtaccacagaataggaatgac

SEQ ID NO: 4647124 - DNA, 25 bp, Homo sapien
gacatctgtgcctgttagcggatcc

SEQ ID NO: 4647125 - DNA, 25 bp, Homo sapien
gatggcagagcatgtgcgttttcac

SEQ ID NO: 4647126 - DNA, 25 bp, Homo sapien
caatgtgaattttcactgttcagtt

SEQ ID NO: 4647127 - DNA, 25 bp, Homo sapien
ttaacagttttgatgttggtggtga

SEQ ID NO: 4647128 - DNA, 25 bp, Homo sapien
cctttaggcggacgccgtggctgca

SEQ ID NO: 4647129 - DNA, 25 bp, Homo sapien
accatccctttaggcggacgccgtg

SEQ ID NO: 4647130 - DNA, 25 bp, Homo sapien
tccctttaggcggacgccgtggctg

SEQ ID NO: 4647131 - DNA, 25 bp, Homo sapien
catccctttaggcggacgccgtggc

SEQ ID NO: 4647132 - DNA, 25 bp, Homo sapien
gagagcccaaaaatcccgctcagca

SEQ ID NO: 4647133 - DNA, 25 bp, Homo sapien
ctcagcacgagtgaagaaggtggtc

SEQ ID NO: 4647134 - DNA, 25 bp, Homo sapien
ccgctccgcgtagtcatgaagctgc

SEQ ID NO: 4647135 - DNA, 25 bp, Homo sapien
cgcgtagtcatgaagctgctcccag

SEQ ID NO: 4647136 - DNA, 25 bp, Homo sapien
caaactgctcctgtccagaggcatc

SEQ ID NO: 4647137 - DNA, 25 bp, Homo sapien
gaaagacatcaacaccttcccgcaa

SEQ ID NO: 4647138 - DNA, 25 bp, Homo sapien
cacccgagagcgacaagcaaaaaag

SEQ ID NO: 4647139 - DNA, 25 bp, Homo sapien
gcaactcaaggactggtaagaacca

SEQ ID NO: 4647140 - DNA, 25 bp, Homo sapien
gactgtgagcagtgtggcctttcca

SEQ ID NO: 4647141 - DNA, 25 bp, Homo sapien
cttagtgggcctcgtaacctggcga

SEQ ID NO: 4647142 - DNA, 25 bp, Homo sapien
ttatctgacaaaagagccggagccc

SEQ ID NO: 4647143 - DNA, 25 bp, Homo sapien
tgctactccagcgaagggacatgcc

SEQ ID NO: 4647144 - DNA, 25 bp, Homo sapien
ggagctggccgttactaactttctg

SEQ ID NO: 4647145 - DNA, 25 bp, Homo sapien
tgcacagatccccatgtcaagcgga

SEQ ID NO: 4647146 - DNA, 25 bp, Homo sapien
acccgcctggctcttcagtaaaaga

SEQ ID NO: 4647147 - DNA, 25 bp, Homo sapien
tagaccacctctctccgggtctggg

SEQ ID NO: 4647148 - DNA, 25 bp, Homo sapien
gcttagtagccctgcacgagcgaaa

SEQ ID NO: 4647149 - DNA, 25 bp, Homo sapien
gaccgggcgtctcttactaagccaa

SEQ ID NO: 4647150 - DNA, 25 bp, Homo sapien
gctgaggtggcgcatagtttacgac

SEQ ID NO: 4647151 - DNA, 25 bp, Homo sapien
tcagaaagtatgaacccagccacag

SEQ ID NO: 4647152 - DNA, 25 bp, Homo sapien
tagagtaagcaactgcgctgtgtcc

SEQ ID NO: 4647153 - DNA, 25 bp, Homo sapien
gatgaaaggctttgtgcgccaccaa

SEQ ID NO: 4647154 - DNA, 25 bp, Homo sapien
tattgattgcgacgacatctgtgcc

SEQ ID NO: 4647155 - DNA, 25 bp, Homo sapien
caaggacgtcaaagatcagggactc

SEQ ID NO: 4647156 - DNA, 25 bp, Homo sapien
caactctgtcagatagttcccttta

SEQ ID NO: 4647157 - DNA, 25 bp, Homo sapien
gtggcagccagaacttatctttggt

SEQ ID NO: 4647158 - DNA, 25 bp, Homo sapien
caactggaagggtattaatgctgtc

SEQ ID NO: 4647159 - DNA, 25 bp, Homo sapien
taaggatacagtacaattttggtgg

SEQ ID NO: 4647160 - DNA, 25 bp, Homo sapien
aaagaggtgacttgcgcaggctgca

SEQ ID NO: 4647161 - DNA, 25 bp, Homo sapien
cattcagaaatgaggatcgtggcgg

SEQ ID NO: 4647162 - DNA, 25 bp, Homo sapien
gaaagtactcttgagacaaccacag

SEQ ID NO: 4647163 - DNA, 25 bp, Homo sapien
taaatgcccattcggtagaaagaca

SEQ ID NO: 4647164 - DNA, 25 bp, Homo sapien
tgtgtagcagttagcaaagtgggcc

SEQ ID NO: 4647165 - DNA, 25 bp, Homo sapien
aatgatcaacgggactagtgggcac

SEQ ID NO: 4647166 - DNA, 25 bp, Homo sapien
tagtgggcacagcttgtcaggcatg

SEQ ID NO: 4647167 - DNA, 25 bp, Homo sapien
catcgtctgcgaaatccttaagggc

SEQ ID NO: 4647168 - DNA, 25 bp, Homo sapien
taacaagactttggcctggcacact

SEQ ID NO: 4647169 - DNA, 25 bp, Homo sapien
gagtagctccgaaaccccatttgga

SEQ ID NO: 4647170 - DNA, 25 bp, Homo sapien
gacacttgagacgttgatgcctgag

SEQ ID NO: 4647171 - DNA, 25 bp, Homo sapien
aagcctgggctcgtttgtagtgaca

SEQ ID NO: 4647172 - DNA, 25 bp, Homo sapien
tttgatttggctgtgcacatggacc

SEQ ID NO: 4647173 - DNA, 25 bp, Homo sapien
cacccattgttggtaggcagctttg

SEQ ID NO: 4647174 - DNA, 25 bp, Homo sapien
aatggcataaaaccccaagcttggt

SEQ ID NO: 4647175 - DNA, 25 bp, Homo sapien
taaacggatctcgtaatagaactgc

SEQ ID NO: 4647176 - DNA, 25 bp, Homo sapien
aatgtcctgacatagccactttggg

SEQ ID NO: 4647177 - DNA, 25 bp, Homo sapien
tacagtgatagatctgttctttgcc

SEQ ID NO: 4647178 - DNA, 25 bp, Homo sapien
tatattagggtagcttggcagctgc

SEQ ID NO: 4647179 - DNA, 25 bp, Homo sapien
gcagaaagatcagtcagatacagtg

SEQ ID NO: 4647180 - DNA, 25 bp, Homo sapien
ctgactggttacagagcccgctgat

SEQ ID NO: 4647181 - DNA, 25 bp, Homo sapien
gccagtcttgtgatgcgctgtcaca

SEQ ID NO: 4647182 - DNA, 25 bp, Homo sapien
gatgcgctgtcacaacttatgcgtg

SEQ ID NO: 4647183 - DNA, 25 bp, Homo sapien
cacaacttatgcgtgactgactggt

SEQ ID NO: 4647184 - DNA, 25 bp, Homo sapien
taaaggctctacgaaaggtccatca

SEQ ID NO: 4647185 - DNA, 25 bp, Homo sapien
gagcactgcaagtctccaaaaagac

SEQ ID NO: 4647186 - DNA, 25 bp, Homo sapien
aaacactgctgatcacttacactgg

SEQ ID NO: 4647187 - DNA, 25 bp, Homo sapien
taattgacctgggaacttctttctc

SEQ ID NO: 4647188 - DNA, 25 bp, Homo sapien
caaggtctcatgtcaaccctgatct

SEQ ID NO: 4647189 - DNA, 25 bp, Homo sapien
ttaaagccagacaatcctccaaggt

SEQ ID NO: 4647190 - DNA, 25 bp, Homo sapien
gctttatctagatcatccccactga

SEQ ID NO: 4647191 - DNA, 25 bp, Homo sapien
tctgaagatgattccctaaaccctg

SEQ ID NO: 4647192 - DNA, 25 bp, Homo sapien
ttcctagtggtctatctgccacttc

SEQ ID NO: 4647193 - DNA, 25 bp, Homo sapien
cagttcctagtggtctatctgccac

SEQ ID NO: 4647194 - DNA, 25 bp, Homo sapien
tctcagttcctagtggtctatctgc

SEQ ID NO: 4647195 - DNA, 25 bp, Homo sapien
tcagttcctagtggtctatctgcca

SEQ ID NO: 4647196 - DNA, 25 bp, Homo sapien
caagaagtagtgaattccatgggat

SEQ ID NO: 4647197 - DNA, 25 bp, Homo sapien
gagaagctacaatactaacagctaa

SEQ ID NO: 4647198 - DNA, 25 bp, Homo sapien
aagctcatttccagtgtagggtttg

SEQ ID NO: 4647199 - DNA, 25 bp, Homo sapien
tttgtgcagcaaacctagattatgc

SEQ ID NO: 4647200 - DNA, 25 bp, Homo sapien
tgcagccggctgacaagcagtctta

SEQ ID NO: 4647201 - DNA, 25 bp, Homo sapien
tcacagaaagcaactgagcagtacg

SEQ ID NO: 4647202 - DNA, 25 bp, Homo sapien
gagcagtacgcatatttcaaaagtt

SEQ ID NO: 4647203 - DNA, 25 bp, Homo sapien
agcagtcttaaacaatgtggctgag

SEQ ID NO: 4647204 - DNA, 25 bp, Homo sapien
tgatgctaagctggatcaccccaag

SEQ ID NO: 4647205 - DNA, 25 bp, Homo sapien
gaaagagcccaggtgcttcggtgaa

SEQ ID NO: 4647206 - DNA, 25 bp, Homo sapien
caaatacatggcactaggagtcagg

SEQ ID NO: 4647207 - DNA, 25 bp, Homo sapien
tgatgattggacctaacctgggctt

SEQ ID NO: 4647208 - DNA, 25 bp, Homo sapien
gctatgctgaacagccttgtcgagg

SEQ ID NO: 4647209 - DNA, 25 bp, Homo sapien
cagccttgtcgagggcaacacagtg

SEQ ID NO: 4647210 - DNA, 25 bp, Homo sapien
gctgaacagccttgtcgagggcaac

SEQ ID NO: 4647211 - DNA, 25 bp, Homo sapien
tcatatgctatgctgaacagccttg

SEQ ID NO: 4647212 - DNA, 25 bp, Homo sapien
tgctcgagctcaactgaatatcctt

SEQ ID NO: 4647213 - DNA, 25 bp, Homo sapien
gaatatcctttcaaaccgtaggcac

SEQ ID NO: 4647214 - DNA, 25 bp, Homo sapien
ccatcctgctcgagctcaactgaat

SEQ ID NO: 4647215 - DNA, 25 bp, Homo sapien
tttcaaaccgtaggcacacaggctg

SEQ ID NO: 4647216 - DNA, 25 bp, Homo sapien
tgatctttaaagtccaaaggtcctg

SEQ ID NO: 4647217 - DNA, 25 bp, Homo sapien
tgtgcaaagtcaaaggtgaaaccat

SEQ ID NO: 4647218 - DNA, 25 bp, Homo sapien
catctctttggtaggaaaatgtcat

SEQ ID NO: 4647219 - DNA, 25 bp, Homo sapien
ttattatcctgtctagcctgagtga

SEQ ID NO: 4647220 - DNA, 25 bp, Homo sapien
catacaaaaaggtaatacatgtgct

SEQ ID NO: 4647221 - DNA, 25 bp, Homo sapien
tacaactgttttcctcagaggatta

SEQ ID NO: 4647222 - DNA, 25 bp, Homo sapien
tactatttcatgtactaatggccca

SEQ ID NO: 4647223 - DNA, 25 bp, Homo sapien
tagctgactaaacaagattccattg

SEQ ID NO: 4647224 - DNA, 25 bp, Homo sapien
agtggctccacagctagtagtttct

SEQ ID NO: 4647225 - DNA, 25 bp, Homo sapien
ctgaaatgtttaaagttcgtcccat

SEQ ID NO: 4647226 - DNA, 25 bp, Homo sapien
tctgaaatgtttaaagttcgtccca

SEQ ID NO: 4647227 - DNA, 25 bp, Homo sapien
ggctccacagctagtagtttctaaa

SEQ ID NO: 4647228 - DNA, 25 bp, Homo sapien
tttggcttggggagacagtgcgtga

SEQ ID NO: 4647229 - DNA, 25 bp, Homo sapien
tgaaggttgccttctaaggtttgtg

SEQ ID NO: 4647230 - DNA, 25 bp, Homo sapien
ttgtgatgtttcctctaagcacaat

SEQ ID NO: 4647231 - DNA, 25 bp, Homo sapien
tctaagcacaatgagggcaatgatg

SEQ ID NO: 4647232 - DNA, 25 bp, Homo sapien
tctgagagccacgactgggcatatg

SEQ ID NO: 4647233 - DNA, 25 bp, Homo sapien
ctctctgagagccacgactgggcat

SEQ ID NO: 4647234 - DNA, 25 bp, Homo sapien
tgcaaaagcccagacatgatgagtg

SEQ ID NO: 4647235 - DNA, 25 bp, Homo sapien
gagagccacgactgggcatatgcat

SEQ ID NO: 4647236 - DNA, 25 bp, Homo sapien
gatccgttcacgtggaagggaataa

SEQ ID NO: 4647237 - DNA, 25 bp, Homo sapien
gaacatagtaccagcttgcactgat

SEQ ID NO: 4647238 - DNA, 25 bp, Homo sapien
tccatatacaagaacatagtaccag

SEQ ID NO: 4647239 - DNA, 25 bp, Homo sapien
aatagttaggacgatggcactcaac

SEQ ID NO: 4647240 - DNA, 25 bp, Homo sapien
aggagcaatttggtggctaccatgg

SEQ ID NO: 4647241 - DNA, 25 bp, Homo sapien
gacagacaccgggtcacttccttgc

SEQ ID NO: 4647242 - DNA, 25 bp, Homo sapien
cagacaccgggtcacttccttgcta

SEQ ID NO: 4647243 - DNA, 25 bp, Homo sapien
atttggtggctaccatggtggacac

SEQ ID NO: 4647244 - DNA, 25 bp, Homo sapien
ctggtactcttcaataatcctgttt

SEQ ID NO: 4647245 - DNA, 25 bp, Homo sapien
ggtactcttcaataatcctgtttat

SEQ ID NO: 4647246 - DNA, 25 bp, Homo sapien
ttcaccttgactataagctccttag

SEQ ID NO: 4647247 - DNA, 25 bp, Homo sapien
tataagctccttaggcataaaaccc

SEQ ID NO: 4647248 - DNA, 25 bp, Homo sapien
tttgacgtagcaattaaaagtctaa

SEQ ID NO: 4647249 - DNA, 25 bp, Homo sapien
aatatgatacttttcactggggagg

SEQ ID NO: 4647250 - DNA, 25 bp, Homo sapien
atgatacttttcactggggaggtct

SEQ ID NO: 4647251 - DNA, 25 bp, Homo sapien
ttgacgtagcaattaaaagtctaac

SEQ ID NO: 4647252 - DNA, 25 bp, Homo sapien
agtggcgtcagctttagttttgagc

SEQ ID NO: 4647253 - DNA, 25 bp, Homo sapien
cagtggcgtcagctttagttttgag

SEQ ID NO: 4647254 - DNA, 25 bp, Homo sapien
tggcgtcagctttagttttgagctg

SEQ ID NO: 4647255 - DNA, 25 bp, Homo sapien
gtggcgtcagctttagttttgagct

SEQ ID NO: 4647256 - DNA, 25 bp, Homo sapien
catttacccctgaagtgtttgctca

SEQ ID NO: 4647257 - DNA, 25 bp, Homo sapien
atttacccctgaagtgtttgctcac

SEQ ID NO: 4647258 - DNA, 25 bp, Homo sapien
acatttacccctgaagtgtttgctc

SEQ ID NO: 4647259 - DNA, 25 bp, Homo sapien
tttacccctgaagtgtttgctcact

SEQ ID NO: 4647260 - DNA, 25 bp, Homo sapien
tcgccacaaattttgcatggtatca

SEQ ID NO: 4647261 - DNA, 25 bp, Homo sapien
tagtggatcccagaggacttatcgc

SEQ ID NO: 4647262 - DNA, 25 bp, Homo sapien
acatgtgatgactccgtagtggatc

SEQ ID NO: 4647263 - DNA, 25 bp, Homo sapien
ggacttatcgccacaaattttgcat

SEQ ID NO: 4647264 - DNA, 25 bp, Homo sapien
caccgcatcttgtgaggtacacaga

SEQ ID NO: 4647265 - DNA, 25 bp, Homo sapien
aacgtgtcaccgcatcttgtgaggt

SEQ ID NO: 4647266 - DNA, 25 bp, Homo sapien
tgtcaccgcatcttgtgaggtacac

SEQ ID NO: 4647267 - DNA, 25 bp, Homo sapien
aaaaacgtgtcaccgcatcttgtga

SEQ ID NO: 4647268 - DNA, 25 bp, Homo sapien
tttgctacattttctgcagtgaaca

SEQ ID NO: 4647269 - DNA, 25 bp, Homo sapien
ttgctacattttctgcagtgaacat

SEQ ID NO: 4647270 - DNA, 25 bp, Homo sapien
gaacattaatgtatacatttgctac

SEQ ID NO: 4647271 - DNA, 25 bp, Homo sapien
acagagaacattaatgtatacattt

SEQ ID NO: 4647272 - DNA, 25 bp, Homo sapien
ctagggcaagacacttctgcagtcg

SEQ ID NO: 4647273 - DNA, 25 bp, Homo sapien
tctgttcgttctgtcaattaaacag

SEQ ID NO: 4647274 - DNA, 25 bp, Homo sapien
tctgcagtcggcagtgttggcaacg

SEQ ID NO: 4647275 - DNA, 25 bp, Homo sapien
gaataagaagcattgttctgctggc

SEQ ID NO: 4647276 - DNA, 25 bp, Homo sapien
catccatttgaaagggcttaagtaa

SEQ ID NO: 4647277 - DNA, 25 bp, Homo sapien
tagactccagcaaagcatccatttg

SEQ ID NO: 4647278 - DNA, 25 bp, Homo sapien
cagcaaagcatccatttgaaagggc

SEQ ID NO: 4647279 - DNA, 25 bp, Homo sapien
ttaaatagactccagcaaagcatcc

SEQ ID NO: 4647280 - DNA, 25 bp, Homo sapien
cagagcctgatgttttagtgggaac

SEQ ID NO: 4647281 - DNA, 25 bp, Homo sapien
aggattcagggccactcactgtatg

SEQ ID NO: 4647282 - DNA, 25 bp, Homo sapien
ccaatgtcagcagggaaagaattac

SEQ ID NO: 4647283 - DNA, 25 bp, Homo sapien
gaatttcactagagggagtgcgacc

SEQ ID NO: 4647284 - DNA, 25 bp, Homo sapien
ttcacataagatgtgcttaggaggc

SEQ ID NO: 4647285 - DNA, 25 bp, Homo sapien
taaatttcacataagatgtgcttag

SEQ ID NO: 4647286 - DNA, 25 bp, Homo sapien
ttaggaggcatttttgaagatgtcc

SEQ ID NO: 4647287 - DNA, 25 bp, Homo sapien
ccacacccccgtgaccatttctcct

SEQ ID NO: 4647288 - DNA, 25 bp, Homo sapien
ggtttatgcccacagtgagaaataa

SEQ ID NO: 4647289 - DNA, 25 bp, Homo sapien
gtcctggtttatgcccacagtgaga

SEQ ID NO: 4647290 - DNA, 25 bp, Homo sapien
ctgtcctggtttatgcccacagtga

SEQ ID NO: 4647291 - DNA, 25 bp, Homo sapien
ctggtttatgcccacagtgagaaat

SEQ ID NO: 4647292 - DNA, 25 bp, Homo sapien
gcttcttggacatcctcccaaactt

SEQ ID NO: 4647293 - DNA, 25 bp, Homo sapien
cttcttggacatcctcccaaacttc

SEQ ID NO: 4647294 - DNA, 25 bp, Homo sapien
tgccgctgttcctgcagccgctgct

SEQ ID NO: 4647295 - DNA, 25 bp, Homo sapien
tgctgccgctgttcctgcagccgct

SEQ ID NO: 4647296 - DNA, 25 bp, Homo sapien
gctgctgccgctgttcctgcagccg

SEQ ID NO: 4647297 - DNA, 25 bp, Homo sapien
ctgctgctgccgctgttcctgcagc

SEQ ID NO: 4647298 - DNA, 25 bp, Homo sapien
taataaccctcagacttgggcaggt

SEQ ID NO: 4647299 - DNA, 25 bp, Homo sapien
taagtgccgctggtctcgttgttca

SEQ ID NO: 4647300 - DNA, 25 bp, Homo sapien
tcgttgttcaggttgctcaggccgt

SEQ ID NO: 4647301 - DNA, 25 bp, Homo sapien
caggtcaatgacgtgcccgttggca

SEQ ID NO: 4647302 - DNA, 25 bp, Homo sapien
ccaaggtaaattcaaagcaaaatct

SEQ ID NO: 4647303 - DNA, 25 bp, Homo sapien
ccactgggaggagacttccacttac

SEQ ID NO: 4647304 - DNA, 25 bp, Homo sapien
tcaaaaaaagccactgggaggagac

SEQ ID NO: 4647305 - DNA, 25 bp, Homo sapien
ggtaaattcaaagcaaaatctcaaa

SEQ ID NO: 4647306 - DNA, 25 bp, Homo sapien
tttgaatagcatcaactttgaatac

SEQ ID NO: 4647307 - DNA, 25 bp, Homo sapien
aactttgaatacatgccgaaatttc

SEQ ID NO: 4647308 - DNA, 25 bp, Homo sapien
ttgaatagcatcaactttgaataca

SEQ ID NO: 4647309 - DNA, 25 bp, Homo sapien
actttgaatacatgccgaaatttcc

SEQ ID NO: 4647310 - DNA, 25 bp, Homo sapien
gctttgtcaacaatgttactcactg

SEQ ID NO: 4647311 - DNA, 25 bp, Homo sapien
gaaagtcattacaggtgctttgtca

SEQ ID NO: 4647312 - DNA, 25 bp, Homo sapien
tctcagctgtgaaagtcattacagg

SEQ ID NO: 4647313 - DNA, 25 bp, Homo sapien
caggtgctttgtcaacaatgttact

SEQ ID NO: 4647314 - DNA, 25 bp, Homo sapien
gtaggcagcaaacaccaaacctgtg

SEQ ID NO: 4647315 - DNA, 25 bp, Homo sapien
gaaagctccagtttgtagtgcctag

SEQ ID NO: 4647316 - DNA, 25 bp, Homo sapien
tgacagcgtgcatactctgaaagct

SEQ ID NO: 4647317 - DNA, 25 bp, Homo sapien
gccattggtgggaggaaatacagta

SEQ ID NO: 4647318 - DNA, 25 bp, Homo sapien
aaatgggacttaatgatgttctgtg

SEQ ID NO: 4647319 - DNA, 25 bp, Homo sapien
tccaaatgggacttaatgatgttct

SEQ ID NO: 4647320 - DNA, 25 bp, Homo sapien
caaatgggacttaatgatgttctgt

SEQ ID NO: 4647321 - DNA, 25 bp, Homo sapien
tcataggtgtgggtctgccacgcca

SEQ ID NO: 4647322 - DNA, 25 bp, Homo sapien
cttcataggtgtgggtctgccacgc

SEQ ID NO: 4647323 - DNA, 25 bp, Homo sapien
taggtgtgggtctgccacgccagct

SEQ ID NO: 4647324 - DNA, 25 bp, Homo sapien
ttcttcataggtgtgggtctgccac

SEQ ID NO: 4647325 - DNA, 25 bp, Homo sapien
tttgtaattggggatctctatccca

SEQ ID NO: 4647326 - DNA, 25 bp, Homo sapien
taataatgaaaatatgggatgagtt

SEQ ID NO: 4647327 - DNA, 25 bp, Homo sapien
gaaaatatgggatgagttgtcctgt

SEQ ID NO: 4647328 - DNA, 25 bp, Homo sapien
gtgtaataatgaaaatatgggatga

SEQ ID NO: 4647329 - DNA, 25 bp, Homo sapien
cacgtattggatggcgtgagtgatc

SEQ ID NO: 4647330 - DNA, 25 bp, Homo sapien
tgcaaactccaccacgtattggatg

SEQ ID NO: 4647331 - DNA, 25 bp, Homo sapien
agtgatctggatggcacattgttgc

SEQ ID NO: 4647332 - DNA, 25 bp, Homo sapien
gcctgttatccgctttgcaaactcc

SEQ ID NO: 4647333 - DNA, 25 bp, Homo sapien
ctcactaaaaccacttccaagcaac

SEQ ID NO: 4647334 - DNA, 25 bp, Homo sapien
tctcactaaaaccacttccaagcaa

SEQ ID NO: 4647335 - DNA, 25 bp, Homo sapien
tttaatgggttgaaggcacggcaca

SEQ ID NO: 4647336 - DNA, 25 bp, Homo sapien
gtttaatgggttgaaggcacggcac

SEQ ID NO: 4647337 - DNA, 25 bp, Homo sapien
ttaatgggttgaaggcacggcacat

SEQ ID NO: 4647338 - DNA, 25 bp, Homo sapien
ttgtttaatgggttgaaggcacggc

SEQ ID NO: 4647339 - DNA, 25 bp, Homo sapien
taaggctttgaacatttgcattcct

SEQ ID NO: 4647340 - DNA, 25 bp, Homo sapien
ctaaggctttgaacatttgcattcc

SEQ ID NO: 4647341 - DNA, 25 bp, Homo sapien
gatgagaacaaagcgatctcctcct

SEQ ID NO: 4647342 - DNA, 25 bp, Homo sapien
agaacagcagatgagaacaaagcga

SEQ ID NO: 4647343 - DNA, 25 bp, Homo sapien
cagcagatgagaacaaagcgatctc

SEQ ID NO: 4647344 - DNA, 25 bp, Homo sapien
agaacaaagcgatctcctcctcggt

SEQ ID NO: 4647345 - DNA, 25 bp, Homo sapien
tctggactttccttggttctataag

SEQ ID NO: 4647346 - DNA, 25 bp, Homo sapien
tttccttggttctataagccaggct

SEQ ID NO: 4647347 - DNA, 25 bp, Homo sapien
gattcttctgaatcacatgttgaag

SEQ ID NO: 4647348 - DNA, 25 bp, Homo sapien
caggtgattcttctgaatcacatgt

SEQ ID NO: 4647349 - DNA, 25 bp, Homo sapien
gtggtggtggctctgtgatctgtgg

SEQ ID NO: 4647350 - DNA, 25 bp, Homo sapien
tggtggctctgtgatctgtggacct

SEQ ID NO: 4647351 - DNA, 25 bp, Homo sapien
gtggctctgtgatctgtggacctac

SEQ ID NO: 4647352 - DNA, 25 bp, Homo sapien
ggtggtggctctgtgatctgtggac

SEQ ID NO: 4647353 - DNA, 25 bp, Homo sapien
ggagcgacttaatctgaagccacag

SEQ ID NO: 4647354 - DNA, 25 bp, Homo sapien
tacctactggcgatttcaccggagc

SEQ ID NO: 4647355 - DNA, 25 bp, Homo sapien
tattcagagttgaacaggtcagcgg

SEQ ID NO: 4647356 - DNA, 25 bp, Homo sapien
cacgacacagaaagcagaggtatcc

SEQ ID NO: 4647357 - DNA, 25 bp, Homo sapien
cctctaacctgatgtctgttaacac

SEQ ID NO: 4647358 - DNA, 25 bp, Homo sapien
tggagattgcccttgcaagatgaag

SEQ ID NO: 4647359 - DNA, 25 bp, Homo sapien
tatgagccctgtacctctaacctga

SEQ ID NO: 4647360 - DNA, 25 bp, Homo sapien
taatttcaggaagtaggcatgtaga

SEQ ID NO: 4647361 - DNA, 25 bp, Homo sapien
gaattgaaggcatggtactcgctga

SEQ ID NO: 4647362 - DNA, 25 bp, Homo sapien
tcaaagttcaaagtcagcacaggct

SEQ ID NO: 4647363 - DNA, 25 bp, Homo sapien
catagatgcccaaagtagtgctggc

SEQ ID NO: 4647364 - DNA, 25 bp, Homo sapien
cacactggactggacgttggaaggc

SEQ ID NO: 4647365 - DNA, 25 bp, Homo sapien
aagctgaaggtaatgctcaggttcc

SEQ ID NO: 4647366 - DNA, 25 bp, Homo sapien
gaaagctgaaggtaatgctcaggtt

SEQ ID NO: 4647367 - DNA, 25 bp, Homo sapien
gctgaaggtaatgctcaggttcctc

SEQ ID NO: 4647368 - DNA, 25 bp, Homo sapien
tgaaggtaatgctcaggttcctcac

SEQ ID NO: 4647369 - DNA, 25 bp, Homo sapien
acatcatctgggtagtggctcctca

SEQ ID NO: 4647370 - DNA, 25 bp, Homo sapien
taatccccatagcagaagtagacag

SEQ ID NO: 4647371 - DNA, 25 bp, Homo sapien
ggttcaagcagaaaactatcccagg

SEQ ID NO: 4647372 - DNA, 25 bp, Homo sapien
ttaatattatgtactgcagccaggg

SEQ ID NO: 4647373 - DNA, 25 bp, Homo sapien
caagacacccagtcggctgtggaaa

SEQ ID NO: 4647374 - DNA, 25 bp, Homo sapien
catgctcttggaataggctgactgc

SEQ ID NO: 4647375 - DNA, 25 bp, Homo sapien
agaaggcgaagagctctcccagcgt

SEQ ID NO: 4647376 - DNA, 25 bp, Homo sapien
tcagatcgcttcagcaaacagcaca

SEQ ID NO: 4647377 - DNA, 25 bp, Homo sapien
gctctcaaccaagctccaaaagtgg

SEQ ID NO: 4647378 - DNA, 25 bp, Homo sapien
caaggccatgcttttcagtcgaagg

SEQ ID NO: 4647379 - DNA, 25 bp, Homo sapien
tgtcagatgacgattataacagtcc

SEQ ID NO: 4647380 - DNA, 25 bp, Homo sapien
tctgctcctttagtgacagggtggt

SEQ ID NO: 4647381 - DNA, 25 bp, Homo sapien
catgatagctcatatggctgactaa

SEQ ID NO: 4647382 - DNA, 25 bp, Homo sapien
tcatcaccagttaggctcatcatgt

SEQ ID NO: 4647383 - DNA, 25 bp, Homo sapien
ggctgactaaagacacacttgaaat

SEQ ID NO: 4647384 - DNA, 25 bp, Homo sapien
taaacaaaacctatctcatcaccag

SEQ ID NO: 4647385 - DNA, 25 bp, Homo sapien
aactgccgtgatggttggtatcttg

SEQ ID NO: 4647386 - DNA, 25 bp, Homo sapien
tgcaagttgcaaactgccgtgatgg

SEQ ID NO: 4647387 - DNA, 25 bp, Homo sapien
cagcttctccccgtgcaagttgcaa

SEQ ID NO: 4647388 - DNA, 25 bp, Homo sapien
gccgtgatggttggtatcttggcta

SEQ ID NO: 4647389 - DNA, 25 bp, Homo sapien
ctatctctggatgagattgcttaaa

SEQ ID NO: 4647390 - DNA, 25 bp, Homo sapien
gattaaagagctccttgtataacgg

SEQ ID NO: 4647391 - DNA, 25 bp, Homo sapien
cggaggaaacagtgtattcactatc

SEQ ID NO: 4647392 - DNA, 25 bp, Homo sapien
catttgcagccggtggcacagtcag

SEQ ID NO: 4647393 - DNA, 25 bp, Homo sapien
taactctgagttggtaccgtcctgc

SEQ ID NO: 4647394 - DNA, 25 bp, Homo sapien
taacagaggtataggcctccaggac

SEQ ID NO: 4647395 - DNA, 25 bp, Homo sapien
tgactgaacctccattgctagtagg

SEQ ID NO: 4647396 - DNA, 25 bp, Homo sapien
gaccttgcaatgttatctgtggcct

SEQ ID NO: 4647397 - DNA, 25 bp, Homo sapien
tcataggagatcttcgaagggcagc

SEQ ID NO: 4647398 - DNA, 25 bp, Homo sapien
tatgaagcacgaagtgagaagccca

SEQ ID NO: 4647399 - DNA, 25 bp, Homo sapien
aaagaattgagtccctgtagcagca

SEQ ID NO: 4647400 - DNA, 25 bp, Homo sapien
tatacaaagagctagcaggagtgac

SEQ ID NO: 4647401 - DNA, 25 bp, Homo sapien
tccatggcctgaattgactgcaaat

SEQ ID NO: 4647402 - DNA, 25 bp, Homo sapien
gcagagtttcactacagatgcacac

SEQ ID NO: 4647403 - DNA, 25 bp, Homo sapien
acttcgtctaaagcagatggtaggc

SEQ ID NO: 4647404 - DNA, 25 bp, Homo sapien
tgttagggcacagacgtccatggcc

SEQ ID NO: 4647405 - DNA, 25 bp, Homo sapien
tgctttaaaccagaggctgcaagct

SEQ ID NO: 4647406 - DNA, 25 bp, Homo sapien
tgcactaagctctgaatcaactgcc

SEQ ID NO: 4647407 - DNA, 25 bp, Homo sapien
gctgcaagctgacgatctatgggcc

SEQ ID NO: 4647408 - DNA, 25 bp, Homo sapien
ctggccccagatgcgattttgcttt

SEQ ID NO: 4647409 - DNA, 25 bp, Homo sapien
gacaagttggagtgtcttttataag

SEQ ID NO: 4647410 - DNA, 25 bp, Homo sapien
gaataaaagtcatgcatttgccttt

SEQ ID NO: 4647411 - DNA, 25 bp, Homo sapien
taatatcgtccagggttgaatctga

SEQ ID NO: 4647412 - DNA, 25 bp, Homo sapien
gacctcctgttatatcctctagttg

SEQ ID NO: 4647413 - DNA, 25 bp, Homo sapien
catctgctgcataggaatccatggt

SEQ ID NO: 4647414 - DNA, 25 bp, Homo sapien
cattcacatcggaggaatttcagca

SEQ ID NO: 4647415 - DNA, 25 bp, Homo sapien
agtcacgcaggaggcaaagattact

SEQ ID NO: 4647416 - DNA, 25 bp, Homo sapien
caatggaggactacatgatcacgac

SEQ ID NO: 4647417 - DNA, 25 bp, Homo sapien
ttgtgacagaggcacgcgaatgctt

SEQ ID NO: 4647418 - DNA, 25 bp, Homo sapien
gccaccaactactgccagaagagta

SEQ ID NO: 4647419 - DNA, 25 bp, Homo sapien
gttgaatacaaggatcatgctgccc

SEQ ID NO: 4647420 - DNA, 25 bp, Homo sapien
gctcattcaattccggtaacccttg

SEQ ID NO: 4647421 - DNA, 25 bp, Homo sapien
cactttacaagcgtaggctggagct

SEQ ID NO: 4647422 - DNA, 25 bp, Homo sapien
ttaatcagatgaagcagacggtact

SEQ ID NO: 4647423 - DNA, 25 bp, Homo sapien
cgcagtaggttagtgggcacagcca

SEQ ID NO: 4647424 - DNA, 25 bp, Homo sapien
taatgagatgcaaactgtacccctc

SEQ ID NO: 4647425 - DNA, 25 bp, Homo sapien
ccttctcattgcttatggtgaaaag

SEQ ID NO: 4647426 - DNA, 25 bp, Homo sapien
tccattgccaatgggccatcacttt

SEQ ID NO: 4647427 - DNA, 25 bp, Homo sapien
cattctttcaatgtccattgccaat

SEQ ID NO: 4647428 - DNA, 25 bp, Homo sapien
tttccttctcattgcttatggtgaa

SEQ ID NO: 4647429 - DNA, 25 bp, Homo sapien
taggaggcctctatggcatctagaa

SEQ ID NO: 4647430 - DNA, 25 bp, Homo sapien
aaataccctcttcacataggaggcc

SEQ ID NO: 4647431 - DNA, 25 bp, Homo sapien
gagacacagtaatctttgcaaagag

SEQ ID NO: 4647432 - DNA, 25 bp, Homo sapien
ggagtcagctttctacccagtaaaa

SEQ ID NO: 4647433 - DNA, 25 bp, Homo sapien
ctagatgataccaggtggtagctca

SEQ ID NO: 4647434 - DNA, 25 bp, Homo sapien
tcagtatggctcacagctcgggtag

SEQ ID NO: 4647435 - DNA, 25 bp, Homo sapien
cttgtcctgccatttggtgagtctc

SEQ ID NO: 4647436 - DNA, 25 bp, Homo sapien
ccacttggagctgtaaaggaattct

SEQ ID NO: 4647437 - DNA, 25 bp, Homo sapien
gcaatgtgtgagcaaggtacaaagt

SEQ ID NO: 4647438 - DNA, 25 bp, Homo sapien
cattgatcaaatgtctgggctcttt

SEQ ID NO: 4647439 - DNA, 25 bp, Homo sapien
tttcctgtgcagtttattgagagca

SEQ ID NO: 4647440 - DNA, 25 bp, Homo sapien
gagcaatcgggcaggcatttgttct

SEQ ID NO: 4647441 - DNA, 25 bp, Homo sapien
caaccacctggcaggcctttgttga

SEQ ID NO: 4647442 - DNA, 25 bp, Homo sapien
cttcccagtggtcattttggtcaaa

SEQ ID NO: 4647443 - DNA, 25 bp, Homo sapien
cagatgcatgcttgagctccaacca

SEQ ID NO: 4647444 - DNA, 25 bp, Homo sapien
cacatctgtgaaatacatgcttccc

SEQ ID NO: 4647445 - DNA, 25 bp, Homo sapien
tgaacaatcagacaattgaactgat

SEQ ID NO: 4647446 - DNA, 25 bp, Homo sapien
gccactcctggagtttcattgctgc

SEQ ID NO: 4647447 - DNA, 25 bp, Homo sapien
gactttgccactcctggagtttcat

SEQ ID NO: 4647448 - DNA, 25 bp, Homo sapien
ggagtttcattgctgcgaacctggg

SEQ ID NO: 4647449 - DNA, 25 bp, Homo sapien
tcccttttattttctcataattcat

SEQ ID NO: 4647450 - DNA, 25 bp, Homo sapien
ttcccttttattttctcataattca

SEQ ID NO: 4647451 - DNA, 25 bp, Homo sapien
ctccatgtcttcttgcaccaggcat

SEQ ID NO: 4647452 - DNA, 25 bp, Homo sapien
cttgcaccaggcatcttcaaaatct

SEQ ID NO: 4647453 - DNA, 25 bp, Homo sapien
cttttcgactagctctccatgtctt

SEQ ID NO: 4647454 - DNA, 25 bp, Homo sapien
gacaacctccctccaagacttctgg

SEQ ID NO: 4647455 - DNA, 25 bp, Homo sapien
ggtcatgcctcaggacgttaatggc

SEQ ID NO: 4647456 - DNA, 25 bp, Homo sapien
ctggaaatggatgggagctgttatt

SEQ ID NO: 4647457 - DNA, 25 bp, Homo sapien
cataccacagaggtggcgaggtccc

SEQ ID NO: 4647458 - DNA, 25 bp, Homo sapien
tgaaatgagatgataacttcccaga

SEQ ID NO: 4647459 - DNA, 25 bp, Homo sapien
ttgcccttatcacccttggtgagaa

SEQ ID NO: 4647460 - DNA, 25 bp, Homo sapien
gaataccagagtacagtccttcact

SEQ ID NO: 4647461 - DNA, 25 bp, Homo sapien
cccagaaactgcgtagaaataatca

SEQ ID NO: 4647462 - DNA, 25 bp, Homo sapien
cagtcatccctcttgtatgctgggc

SEQ ID NO: 4647463 - DNA, 25 bp, Homo sapien
gagcagagttccctattcccctggc

SEQ ID NO: 4647464 - DNA, 25 bp, Homo sapien
tcaggtcctatgaagaaagatacgg

SEQ ID NO: 4647465 - DNA, 25 bp, Homo sapien
cctaaggtgaagcactcctggcagc

SEQ ID NO: 4647466 - DNA, 25 bp, Homo sapien
ttccacacgaagatgcttggatgag

SEQ ID NO: 4647467 - DNA, 25 bp, Homo sapien
tccatcctcaagttccacacgaaga

SEQ ID NO: 4647468 - DNA, 25 bp, Homo sapien
gatgagtcagctgggaatattgttc

SEQ ID NO: 4647469 - DNA, 25 bp, Homo sapien
ggaatattgttcttgtgtacctcat

SEQ ID NO: 4647470 - DNA, 25 bp, Homo sapien
ctggaagggcagcctgcattcttga

SEQ ID NO: 4647471 - DNA, 25 bp, Homo sapien
cctgcattcttgaagacacaagtac

SEQ ID NO: 4647472 - DNA, 25 bp, Homo sapien
tggaagggcagcctgcattcttgaa

SEQ ID NO: 4647473 - DNA, 25 bp, Homo sapien
cattcttgaagacacaagtactaca

SEQ ID NO: 4647474 - DNA, 25 bp, Homo sapien
tcaacatcctccgatactgtccttt

SEQ ID NO: 4647475 - DNA, 25 bp, Homo sapien
ccttttcccaggtctgattcattcc

SEQ ID NO: 4647476 - DNA, 25 bp, Homo sapien
ttttcccaggtctgattcattccta

SEQ ID NO: 4647477 - DNA, 25 bp, Homo sapien
aacatcctccgatactgtccttttc

SEQ ID NO: 4647478 - DNA, 25 bp, Homo sapien
tcattcaccgtcattcgcagagcct

SEQ ID NO: 4647479 - DNA, 25 bp, Homo sapien
cgcagagcctgactctctgactgca

SEQ ID NO: 4647480 - DNA, 25 bp, Homo sapien
accgtcattcgcagagcctgactct

SEQ ID NO: 4647481 - DNA, 25 bp, Homo sapien
cattcgcagagcctgactctctgac

SEQ ID NO: 4647482 - DNA, 25 bp, Homo sapien
tcttcagacaaattgggattgatgt

SEQ ID NO: 4647483 - DNA, 25 bp, Homo sapien
tcctgtagggttttagtaagatctg

SEQ ID NO: 4647484 - DNA, 25 bp, Homo sapien
tgaatgagagtataaccactgagct

SEQ ID NO: 4647485 - DNA, 25 bp, Homo sapien
ccatcatgcaatgtagaaagttcag

SEQ ID NO: 4647486 - DNA, 25 bp, Homo sapien
gatggtcgtcttctgcgactgagcg

SEQ ID NO: 4647487 - DNA, 25 bp, Homo sapien
tcgtcttctgcgactgagcgacaga

SEQ ID NO: 4647488 - DNA, 25 bp, Homo sapien
gactgagcgacagagcgtgcagctt

SEQ ID NO: 4647489 - DNA, 25 bp, Homo sapien
ctgcgactgagcgacagagcgtgca

SEQ ID NO: 4647490 - DNA, 25 bp, Homo sapien
acattctcctcgaaaatcacatggg

SEQ ID NO: 4647491 - DNA, 25 bp, Homo sapien
ggtctaggtctatagctttcttaag

SEQ ID NO: 4647492 - DNA, 25 bp, Homo sapien
aattccagagcatgacaatgtctac

SEQ ID NO: 4647493 - DNA, 25 bp, Homo sapien
cacatgggggtgtctctaggtctag

SEQ ID NO: 4647494 - DNA, 25 bp, Homo sapien
gagatcaggcaagcttatggttttt

SEQ ID NO: 4647495 - DNA, 25 bp, Homo sapien
atagagatcaggcaagcttatggtt

SEQ ID NO: 4647496 - DNA, 25 bp, Homo sapien
caggcaagcttatggtttttatcat

SEQ ID NO: 4647497 - DNA, 25 bp, Homo sapien
gatcaggcaagcttatggtttttat

SEQ ID NO: 4647498 - DNA, 25 bp, Homo sapien
ttggtcaccgcgtttgcagcagcag

SEQ ID NO: 4647499 - DNA, 25 bp, Homo sapien
aatagtcacagaggacaccttcatg

SEQ ID NO: 4647500 - DNA, 25 bp, Homo sapien
ttcctccttggtcaccgcgtttgca

SEQ ID NO: 4647501 - DNA, 25 bp, Homo sapien
gctgaatagtcacagaggacacctt

SEQ ID NO: 4647502 - DNA, 25 bp, Homo sapien
gataacctactaccatcagagcagc

SEQ ID NO: 4647503 - DNA, 25 bp, Homo sapien
tgataacctactaccatcagagcag

SEQ ID NO: 4647504 - DNA, 25 bp, Homo sapien
taacctactaccatcagagcagcct

SEQ ID NO: 4647505 - DNA, 25 bp, Homo sapien
ctgataacctactaccatcagagca

SEQ ID NO: 4647506 - DNA, 25 bp, Homo sapien
ccttgtcaataagtgactgtaatat

SEQ ID NO: 4647507 - DNA, 25 bp, Homo sapien
ggactatattgcaatacttaaaaat

SEQ ID NO: 4647508 - DNA, 25 bp, Homo sapien
taaaaagtagttccgctacattgca

SEQ ID NO: 4647509 - DNA, 25 bp, Homo sapien
aatcctaaatctccttgtcaataag

SEQ ID NO: 4647510 - DNA, 25 bp, Homo sapien
cccagatggggtggcggtcgagcag

SEQ ID NO: 4647511 - DNA, 25 bp, Homo sapien
agatggggtggcggtcgagcagaga

SEQ ID NO: 4647512 - DNA, 25 bp, Homo sapien
tggggtggcggtcgagcagagacac

SEQ ID NO: 4647513 - DNA, 25 bp, Homo sapien
acttccccgatggggcggctgccgg

SEQ ID NO: 4647514 - DNA, 25 bp, Homo sapien
gagacatgtaaattggctaagggcc

SEQ ID NO: 4647515 - DNA, 25 bp, Homo sapien
tgcatgccatttacctttccaaggg

SEQ ID NO: 4647516 - DNA, 25 bp, Homo sapien
gctaagggccttcgacaagaatttc

SEQ ID NO: 4647517 - DNA, 25 bp, Homo sapien
gctgcatgcgcatacgggactgtaa

SEQ ID NO: 4647518 - DNA, 25 bp, Homo sapien
attttaatatgtgtgctaccgaagt

SEQ ID NO: 4647519 - DNA, 25 bp, Homo sapien
ttaatatgtgtgctaccgaagtgag

SEQ ID NO: 4647520 - DNA, 25 bp, Homo sapien
atatgtgtgctaccgaagtgagcgc

SEQ ID NO: 4647521 - DNA, 25 bp, Homo sapien
aatatgtgtgctaccgaagtgagcg

SEQ ID NO: 4647522 - DNA, 25 bp, Homo sapien
tggacaagatccactgagctttttt

SEQ ID NO: 4647523 - DNA, 25 bp, Homo sapien
ttgtagcatattttctggcccagtg

SEQ ID NO: 4647524 - DNA, 25 bp, Homo sapien
ttaggattggtgcatgttggacaag

SEQ ID NO: 4647525 - DNA, 25 bp, Homo sapien
tgataatgaggtaccacagctggat

SEQ ID NO: 4647526 - DNA, 25 bp, Homo sapien
agtgttccccgtgcaggagtcccgg

SEQ ID NO: 4647527 - DNA, 25 bp, Homo sapien
tccaccgctggcatatggcgcaaca

SEQ ID NO: 4647528 - DNA, 25 bp, Homo sapien
ggacttgcaacctcaggagtccccg

SEQ ID NO: 4647529 - DNA, 25 bp, Homo sapien
tgacagcgccggttacggtaaacac

SEQ ID NO: 4647530 - DNA, 25 bp, Homo sapien
agggagaggagttcggaggtggctt

SEQ ID NO: 4647531 - DNA, 25 bp, Homo sapien
gatgcggccatagcggaggtggtgt

SEQ ID NO: 4647532 - DNA, 25 bp, Homo sapien
aggaggcagctctgattccgctccg

SEQ ID NO: 4647533 - DNA, 25 bp, Homo sapien
ggtgtcagagcggaaacctagcggg

SEQ ID NO: 4647534 - DNA, 25 bp, Homo sapien
ttctgcctccacagttaaaagctca

SEQ ID NO: 4647535 - DNA, 25 bp, Homo sapien
taggcagttaggtaactgaagccga

SEQ ID NO: 4647536 - DNA, 25 bp, Homo sapien
cagttaaaagctcagacagggcttt

SEQ ID NO: 4647537 - DNA, 25 bp, Homo sapien
tattgtgacagatccactgggctgt

SEQ ID NO: 4647538 - DNA, 25 bp, Homo sapien
gcgtttacagcccaaataagagtgt

SEQ ID NO: 4647539 - DNA, 25 bp, Homo sapien
ataagagtgtttgtcttctaatctc

SEQ ID NO: 4647540 - DNA, 25 bp, Homo sapien
tctatgtcatttagatagcgtttac

SEQ ID NO: 4647541 - DNA, 25 bp, Homo sapien
ctgcttatcttgatgatgagttgca

SEQ ID NO: 4647542 - DNA, 25 bp, Homo sapien
gaacccaattccttatggaccacaa

SEQ ID NO: 4647543 - DNA, 25 bp, Homo sapien
gaaccagacctgatattaaatgctc

SEQ ID NO: 4647544 - DNA, 25 bp, Homo sapien
tcaatgggatgcaaagtcaccactg

SEQ ID NO: 4647545 - DNA, 25 bp, Homo sapien
tgagcttgacacagcagtgacttgg

SEQ ID NO: 4647546 - DNA, 25 bp, Homo sapien
ctcccttgaggggagttgctctgcc

SEQ ID NO: 4647547 - DNA, 25 bp, Homo sapien
cccttgaggggagttgctctgccat

SEQ ID NO: 4647548 - DNA, 25 bp, Homo sapien
aagtccttgccacagtgactctctc

SEQ ID NO: 4647549 - DNA, 25 bp, Homo sapien
ccatgctcccttgaggggagttgct

SEQ ID NO: 4647550 - DNA, 25 bp, Homo sapien
gacctcgcttgtcctttattgctga

SEQ ID NO: 4647551 - DNA, 25 bp, Homo sapien
ggcagccctctttgtcactggcatc

SEQ ID NO: 4647552 - DNA, 25 bp, Homo sapien
ggccaggtcttctggtaagacccta

SEQ ID NO: 4647553 - DNA, 25 bp, Homo sapien
gtaagaccctaaggctggtgacctg

SEQ ID NO: 4647554 - DNA, 25 bp, Homo sapien
cacagagactaccagaatttgaata

SEQ ID NO: 4647555 - DNA, 25 bp, Homo sapien
cagaatttgaatagattgcaaggaa

SEQ ID NO: 4647556 - DNA, 25 bp, Homo sapien
tgacacagagactaccagaatttga

SEQ ID NO: 4647557 - DNA, 25 bp, Homo sapien
ccagaatttgaatagattgcaagga

SEQ ID NO: 4647558 - DNA, 25 bp, Homo sapien
agggtatcctgccgcccagcggctg

SEQ ID NO: 4647559 - DNA, 25 bp, Homo sapien
tcctgctcttcttatccatgttggc

SEQ ID NO: 4647560 - DNA, 25 bp, Homo sapien
ctttgtctcccttacaccgctcctc

SEQ ID NO: 4647561 - DNA, 25 bp, Homo sapien
ttcttatccatgttggcctagtggg

SEQ ID NO: 4647562 - DNA, 25 bp, Homo sapien
ggaagctgataaacctgatggagtc

SEQ ID NO: 4647563 - DNA, 25 bp, Homo sapien
gaattttgggtgtgtgcaggtaggt

SEQ ID NO: 4647564 - DNA, 25 bp, Homo sapien
tctgttggaggaattttgggtgtgt

SEQ ID NO: 4647565 - DNA, 25 bp, Homo sapien
tgcaggtaggtggaagctgataaac

SEQ ID NO: 4647566 - DNA, 25 bp, Homo sapien
tcccaagttctccgcctgaagagaa

SEQ ID NO: 4647567 - DNA, 25 bp, Homo sapien
gttctccgcctgaagagaaggaagc

SEQ ID NO: 4647568 - DNA, 25 bp, Homo sapien
gcaccagggatgcacgcttcctcag

SEQ ID NO: 4647569 - DNA, 25 bp, Homo sapien
accagggatgcacgcttcctcagca

SEQ ID NO: 4647570 - DNA, 25 bp, Homo sapien
agatttggtttgtgggtcactctcc

SEQ ID NO: 4647571 - DNA, 25 bp, Homo sapien
tttggtttgtgggtcactctcctgt

SEQ ID NO: 4647572 - DNA, 25 bp, Homo sapien
gatttggtttgtgggtcactctcct

SEQ ID NO: 4647573 - DNA, 25 bp, Homo sapien
ttggtttgtgggtcactctcctgtg

SEQ ID NO: 4647574 - DNA, 25 bp, Homo sapien
cctggatgcttttagtggtctcttg

SEQ ID NO: 4647575 - DNA, 25 bp, Homo sapien
cgttcacagacagaacgggaaggtt

SEQ ID NO: 4647576 - DNA, 25 bp, Homo sapien
ggaaggttggtcctggatggctgcc

SEQ ID NO: 4647577 - DNA, 25 bp, Homo sapien
ggctgcctggtcctggatgctttta

SEQ ID NO: 4647578 - DNA, 25 bp, Homo sapien
ggttttgcaattgagtaactggttc

SEQ ID NO: 4647579 - DNA, 25 bp, Homo sapien
caaagtcttgtactgccacttccta

SEQ ID NO: 4647580 - DNA, 25 bp, Homo sapien
ggtaaatgccattgagagggaaaga

SEQ ID NO: 4647581 - DNA, 25 bp, Homo sapien
tgtggtcagacatggttcaaagtct

SEQ ID NO: 4647582 - DNA, 25 bp, Homo sapien
ttgaggaaagcccagtaacactcct

SEQ ID NO: 4647583 - DNA, 25 bp, Homo sapien
cagttcaatacagtaaatgcctggt

SEQ ID NO: 4647584 - DNA, 25 bp, Homo sapien
gattttatacctgattaccaaggga

SEQ ID NO: 4647585 - DNA, 25 bp, Homo sapien
tagatttgttctggaggcgcttctc

SEQ ID NO: 4647586 - DNA, 25 bp, Homo sapien
tactccactcatgcataggcttgtc

SEQ ID NO: 4647587 - DNA, 25 bp, Homo sapien
taagagttctctagtagcctgaaac

SEQ ID NO: 4647588 - DNA, 25 bp, Homo sapien
gcagtaggcaaagcgtaagagttct

SEQ ID NO: 4647589 - DNA, 25 bp, Homo sapien
gcctgaaacggtgatgcttgcttag

SEQ ID NO: 4647590 - DNA, 25 bp, Homo sapien
ttccggtcgcgagggcgctcgggag

SEQ ID NO: 4647591 - DNA, 25 bp, Homo sapien
tctgcgggccgcttgatcgggtctt

SEQ ID NO: 4647592 - DNA, 25 bp, Homo sapien
atagtagtaagaccaccgccacact

SEQ ID NO: 4647593 - DNA, 25 bp, Homo sapien
actcctgaggaaacaaggtcacgcc

SEQ ID NO: 4647594 - DNA, 25 bp, Homo sapien
cgcgctataacgaacatagtagtaa

SEQ ID NO: 4647595 - DNA, 25 bp, Homo sapien
taaatttcctatagaagggtctaga

SEQ ID NO: 4647596 - DNA, 25 bp, Homo sapien
acgcccccgtggtcactgactggag

SEQ ID NO: 4647597 - DNA, 25 bp, Homo sapien
ccaggatagtctggaactctattat

SEQ ID NO: 4647598 - DNA, 25 bp, Homo sapien
tgtcttaatctcatggagacgcccc

SEQ ID NO: 4647599 - DNA, 25 bp, Homo sapien
cttgctccggaaatgagggagagac

SEQ ID NO: 4647600 - DNA, 25 bp, Homo sapien
ttgctccggaaatgagggagagacg

SEQ ID NO: 4647601 - DNA, 25 bp, Homo sapien
ccttttagctaggaccatgggactt

SEQ ID NO: 4647602 - DNA, 25 bp, Homo sapien
cagccgtaccgccttttagctagga

SEQ ID NO: 4647603 - DNA, 25 bp, Homo sapien
taccgccttttagctaggaccatgg

SEQ ID NO: 4647604 - DNA, 25 bp, Homo sapien
gcagtcacagccgtaccgcctttta

SEQ ID NO: 4647605 - DNA, 25 bp, Homo sapien
tgtgtccctcaatacttagcagatg

SEQ ID NO: 4647606 - DNA, 25 bp, Homo sapien
tatgaaatgggaggagatagtccac

SEQ ID NO: 4647607 - DNA, 25 bp, Homo sapien
taatctcagtaatgtgctggtcgca

SEQ ID NO: 4647608 - DNA, 25 bp, Homo sapien
gaccttttccgtgtacagtgatggg

SEQ ID NO: 4647609 - DNA, 25 bp, Homo sapien
acaggccggtaaaatatattcaagt

SEQ ID NO: 4647610 - DNA, 25 bp, Homo sapien
tcttttggccacaataaactgaaca

SEQ ID NO: 4647611 - DNA, 25 bp, Homo sapien
tgaaagcatactcatcatggatcac

SEQ ID NO: 4647612 - DNA, 25 bp, Homo sapien
taaatttaatagcatcacaggccgg

SEQ ID NO: 4647613 - DNA, 25 bp, Homo sapien
tttattggggattgttcatgagaaa

SEQ ID NO: 4647614 - DNA, 25 bp, Homo sapien
ttgcaagaactcagtatcctgagaa

SEQ ID NO: 4647615 - DNA, 25 bp, Homo sapien
catgagaaatcgcactttggatttc

SEQ ID NO: 4647616 - DNA, 25 bp, Homo sapien
tcttgcaagaactcagtatcctgag

SEQ ID NO: 4647617 - DNA, 25 bp, Homo sapien
ggtgagagaccataagtttaattct

SEQ ID NO: 4647618 - DNA, 25 bp, Homo sapien
aggtgagagaccataagtttaattc

SEQ ID NO: 4647619 - DNA, 25 bp, Homo sapien
tagactgcatcctggtggtgatccc

SEQ ID NO: 4647620 - DNA, 25 bp, Homo sapien
tatagacaccatacctcctagaggc

SEQ ID NO: 4647621 - DNA, 25 bp, Homo sapien
aactctgagactgggacaacctgta

SEQ ID NO: 4647622 - DNA, 25 bp, Homo sapien
gaacagatgatgaaggtagtcctcc

SEQ ID NO: 4647623 - DNA, 25 bp, Homo sapien
ttttctgctgcaattatagggcctg

SEQ ID NO: 4647624 - DNA, 25 bp, Homo sapien
gatttttcaggtctccgtgcatggg

SEQ ID NO: 4647625 - DNA, 25 bp, Homo sapien
ccagtccatggtgagaaatatcagt

SEQ ID NO: 4647626 - DNA, 25 bp, Homo sapien
cgtgcatgggttatggagattttcc

SEQ ID NO: 4647627 - DNA, 25 bp, Homo sapien
agagcccaagttcacctacgcgtgg

SEQ ID NO: 4647628 - DNA, 25 bp, Homo sapien
gatgctgtaggacgtattttcccaa

SEQ ID NO: 4647629 - DNA, 25 bp, Homo sapien
tggtacaatcgtccactgctgggct

SEQ ID NO: 4647630 - DNA, 25 bp, Homo sapien
aagagcagtttaagatttccaccca

SEQ ID NO: 4647631 - DNA, 25 bp, Homo sapien
tccccttcgtagtgtacctggatgg

SEQ ID NO: 4647632 - DNA, 25 bp, Homo sapien
ttaagttatggtcctgggtgccttg

SEQ ID NO: 4647633 - DNA, 25 bp, Homo sapien
ggtgccttggttaaacctattggca

SEQ ID NO: 4647634 - DNA, 25 bp, Homo sapien
tgacctattatagctggctagcatc

SEQ ID NO: 4647635 - DNA, 25 bp, Homo sapien
catagaaatataggccgtaaaaggc

SEQ ID NO: 4647636 - DNA, 25 bp, Homo sapien
agtaaacactgacagagctaagagg

SEQ ID NO: 4647637 - DNA, 25 bp, Homo sapien
gacacaaatccacaatcggtgtggg

SEQ ID NO: 4647638 - DNA, 25 bp, Homo sapien
gaaatgagttacttcgacaggaaga

SEQ ID NO: 4647639 - DNA, 25 bp, Homo sapien
cagtggttggcactcagtggtagca

SEQ ID NO: 4647640 - DNA, 25 bp, Homo sapien
gaactgtttgacagtcctgagcaca

SEQ ID NO: 4647641 - DNA, 25 bp, Homo sapien
ccagtgcggcgggaatgtggataat

SEQ ID NO: 4647642 - DNA, 25 bp, Homo sapien
gagcacaccccagtggttggcactc

SEQ ID NO: 4647643 - DNA, 25 bp, Homo sapien
cccaccaggcttttttctgcataac

SEQ ID NO: 4647644 - DNA, 25 bp, Homo sapien
ttgcccctggctacacggcctaggt

SEQ ID NO: 4647645 - DNA, 25 bp, Homo sapien
tcatagaaactggagcattgctggg

SEQ ID NO: 4647646 - DNA, 25 bp, Homo sapien
gagtgtggacacagatcatagaaac

SEQ ID NO: 4647647 - DNA, 25 bp, Homo sapien
cctgccgaggaggacgtgtactcat

SEQ ID NO: 4647648 - DNA, 25 bp, Homo sapien
acagagctgataggtggcctgccga

SEQ ID NO: 4647649 - DNA, 25 bp, Homo sapien
cttggttgcgccctgaaagccttgc

SEQ ID NO: 4647650 - DNA, 25 bp, Homo sapien
gaggtgtttccagagggtttctgtg

SEQ ID NO: 4647651 - DNA, 25 bp, Homo sapien
tgtttgggaggactcgaactggcgc

SEQ ID NO: 4647652 - DNA, 25 bp, Homo sapien
ctgtgtttgggaggactcgaactgg

SEQ ID NO: 4647653 - DNA, 25 bp, Homo sapien
tttgggaggactcgaactggcgcca

SEQ ID NO: 4647654 - DNA, 25 bp, Homo sapien
tgtgtttgggaggactcgaactggc

SEQ ID NO: 4647655 - DNA, 25 bp, Homo sapien
tccctctaacccaggaggagcgtgg

SEQ ID NO: 4647656 - DNA, 25 bp, Homo sapien
atccctctaacccaggaggagcgtg

SEQ ID NO: 4647657 - DNA, 25 bp, Homo sapien
cgggtagcggcgcactgggtacagg

SEQ ID NO: 4647658 - DNA, 25 bp, Homo sapien
aggcgcgcgcttggctgtcgcctct

SEQ ID NO: 4647659 - DNA, 25 bp, Homo sapien
gcgctcccgatagggaagggccgga

SEQ ID NO: 4647660 - DNA, 25 bp, Homo sapien
ccgcctagccgagcgctaattggct

SEQ ID NO: 4647661 - DNA, 25 bp, Homo sapien
ttggctcccgggctggcagcttcgc

SEQ ID NO: 4647662 - DNA, 25 bp, Homo sapien
cgacgaggaagtggaccccgcctag

SEQ ID NO: 4647663 - DNA, 25 bp, Homo sapien
cgggaagagcggacgcaggcagagc

SEQ ID NO: 4647664 - DNA, 25 bp, Homo sapien
gaagagcggacgcaggcagagcggc

SEQ ID NO: 4647665 - DNA, 25 bp, Homo sapien
agagcggacgcaggcagagcggctc

SEQ ID NO: 4647666 - DNA, 25 bp, Homo sapien
gggaagagcggacgcaggcagagcg

SEQ ID NO: 4647667 - DNA, 25 bp, Homo sapien
cgccgaaaagcccaccgcttgcccg

SEQ ID NO: 4647668 - DNA, 25 bp, Homo sapien
tgcaaatcctaaagaccccgccgaa

SEQ ID NO: 4647669 - DNA, 25 bp, Homo sapien
ttttgtctggcttacaaccgtgcgc

SEQ ID NO: 4647670 - DNA, 25 bp, Homo sapien
gcttacaaccgtgcgcctcctagga

SEQ ID NO: 4647671 - DNA, 25 bp, Homo sapien
actggtttgggtggcggcttcgaca

SEQ ID NO: 4647672 - DNA, 25 bp, Homo sapien
tttgactggtttgggtggcggcttc

SEQ ID NO: 4647673 - DNA, 25 bp, Homo sapien
ctggtttgggtggcggcttcgacat

SEQ ID NO: 4647674 - DNA, 25 bp, Homo sapien
tgactggtttgggtggcggcttcga

SEQ ID NO: 4647675 - DNA, 25 bp, Homo sapien
tacgtacatgattatcaaataaagg

SEQ ID NO: 4647676 - DNA, 25 bp, Homo sapien
atcaaataaagggacttcatactcc

SEQ ID NO: 4647677 - DNA, 25 bp, Homo sapien
attatcaaataaagggacttcatac

SEQ ID NO: 4647678 - DNA, 25 bp, Homo sapien
caaataaagggacttcatactccaa

SEQ ID NO: 4647679 - DNA, 25 bp, Homo sapien
caaccaaatgtaaatagtgattatc

SEQ ID NO: 4647680 - DNA, 25 bp, Homo sapien
tatctgtagatacatacgtcttccc

SEQ ID NO: 4647681 - DNA, 25 bp, Homo sapien
catccacttgtaaatatgggatact

SEQ ID NO: 4647682 - DNA, 25 bp, Homo sapien
aacaaaatgaatgagatcagccatc

SEQ ID NO: 4647683 - DNA, 25 bp, Homo sapien
atttcagcttcggataggcccaggt

SEQ ID NO: 4647684 - DNA, 25 bp, Homo sapien
tttcagcttcggataggcccaggtt

SEQ ID NO: 4647685 - DNA, 25 bp, Homo sapien
ttcagcttcggataggcccaggttc

SEQ ID NO: 4647686 - DNA, 25 bp, Homo sapien
tctggacttatgaaaagcctttgct

SEQ ID NO: 4647687 - DNA, 25 bp, Homo sapien
taattcctccatatgtttctatcca

SEQ ID NO: 4647688 - DNA, 25 bp, Homo sapien
atgtttctatccacatgctgctgag

SEQ ID NO: 4647689 - DNA, 25 bp, Homo sapien
tgggaagtggatcattgaaaatggc

SEQ ID NO: 4647690 - DNA, 25 bp, Homo sapien
tttatgaacatgggcacatggacaa

SEQ ID NO: 4647691 - DNA, 25 bp, Homo sapien
tatgaacatgggcacatggacaagg

SEQ ID NO: 4647692 - DNA, 25 bp, Homo sapien
ttatgaacatgggcacatggacaag

SEQ ID NO: 4647693 - DNA, 25 bp, Homo sapien
tgagagtcgagattgtttacgggaa

SEQ ID NO: 4647694 - DNA, 25 bp, Homo sapien
ccggtcctgagagtcgagattgttt

SEQ ID NO: 4647695 - DNA, 25 bp, Homo sapien
agggctccgcctagacagcccaggt

SEQ ID NO: 4647696 - DNA, 25 bp, Homo sapien
acctgacgccctgactccactccag

SEQ ID NO: 4647697 - DNA, 25 bp, Homo sapien
ctctttttgcaagtaacaagtcaga

SEQ ID NO: 4647698 - DNA, 25 bp, Homo sapien
gatctgcagctcctaacctgcttct

SEQ ID NO: 4647699 - DNA, 25 bp, Homo sapien
agatctgcagctcctaacctgcttc

SEQ ID NO: 4647700 - DNA, 25 bp, Homo sapien
tgcaagtaacaagtcagacaaacag

SEQ ID NO: 4647701 - DNA, 25 bp, Homo sapien
aacaaggtctgtagaaaaagcaaga

SEQ ID NO: 4647702 - DNA, 25 bp, Homo sapien
gatgttcttgcgctagctctgccag

SEQ ID NO: 4647703 - DNA, 25 bp, Homo sapien
gacgctgccagcacattagtaagct

SEQ ID NO: 4647704 - DNA, 25 bp, Homo sapien
aatggattccccagaattactagca

SEQ ID NO: 4647705 - DNA, 25 bp, Homo sapien
gagttggagaacagctggccgacac

SEQ ID NO: 4647706 - DNA, 25 bp, Homo sapien
ataaatctgaaacctggccgggcat

SEQ ID NO: 4647707 - DNA, 25 bp, Homo sapien
tggagaacagctggccgacacggtg

SEQ ID NO: 4647708 - DNA, 25 bp, Homo sapien
ttggagaacagctggccgacacggt

SEQ ID NO: 4647709 - DNA, 25 bp, Homo sapien
tgggttcaaacgtatacagggctct

SEQ ID NO: 4647710 - DNA, 25 bp, Homo sapien
ggttcaaacgtatacagggctctga

SEQ ID NO: 4647711 - DNA, 25 bp, Homo sapien
tctgggttcaaacgtatacagggct

SEQ ID NO: 4647712 - DNA, 25 bp, Homo sapien
tcaaacgtatacagggctctgaaga

SEQ ID NO: 4647713 - DNA, 25 bp, Homo sapien
gagaagtctgacatctacaagccaa

SEQ ID NO: 4647714 - DNA, 25 bp, Homo sapien
cgtgcccagcgactcacatctttat

SEQ ID NO: 4647715 - DNA, 25 bp, Homo sapien
cagaggaaagaccataagaagacat

SEQ ID NO: 4647716 - DNA, 25 bp, Homo sapien
cagcgactcacatctttataagaag

SEQ ID NO: 4647717 - DNA, 25 bp, Homo sapien
tcagggtcatgcaaccaatcaggac

SEQ ID NO: 4647718 - DNA, 25 bp, Homo sapien
agggtcatgcaaccaatcaggacac

SEQ ID NO: 4647719 - DNA, 25 bp, Homo sapien
cagggtcatgcaaccaatcaggaca

SEQ ID NO: 4647720 - DNA, 25 bp, Homo sapien
tctcagggtcatgcaaccaatcagg

SEQ ID NO: 4647721 - DNA, 25 bp, Homo sapien
ggagaaatatagaggcaacagggct

SEQ ID NO: 4647722 - DNA, 25 bp, Homo sapien
gactgtagcctataatccttgggac

SEQ ID NO: 4647723 - DNA, 25 bp, Homo sapien
caacagggcttgaagtggtcattac

SEQ ID NO: 4647724 - DNA, 25 bp, Homo sapien
tacctgaattgaacggagctgaaca

SEQ ID NO: 4647725 - DNA, 25 bp, Homo sapien
actttgtaagtaagtagggtgatgc

SEQ ID NO: 4647726 - DNA, 25 bp, Homo sapien
gactttgtaagtaagtagggtgatg

SEQ ID NO: 4647727 - DNA, 25 bp, Homo sapien
atcaccttcctcaaagtataattca

SEQ ID NO: 4647728 - DNA, 25 bp, Homo sapien
ggaggtgcctttccaccaattggta

SEQ ID NO: 4647729 - DNA, 25 bp, Homo sapien
ttggaattagtccagtcctgccttt

SEQ ID NO: 4647730 - DNA, 25 bp, Homo sapien
tgcctttccaccaattggtatcgct

SEQ ID NO: 4647731 - DNA, 25 bp, Homo sapien
tgcttggaattagtccagtcctgcc

SEQ ID NO: 4647732 - DNA, 25 bp, Homo sapien
catgcaatggattgtcaatggattc

SEQ ID NO: 4647733 - DNA, 25 bp, Homo sapien
tgctgcttcatgcaatggattgtca

SEQ ID NO: 4647734 - DNA, 25 bp, Homo sapien
tgcttcatgcaatggattgtcaatg

SEQ ID NO: 4647735 - DNA, 25 bp, Homo sapien
cttcatgcaatggattgtcaatgga

SEQ ID NO: 4647736 - DNA, 25 bp, Homo sapien
tcaaagctaattgaaatccgtgcct

SEQ ID NO: 4647737 - DNA, 25 bp, Homo sapien
caaagggaactttctaggatggcag

SEQ ID NO: 4647738 - DNA, 25 bp, Homo sapien
tacgtgggtgtatgcacttgtcaaa

SEQ ID NO: 4647739 - DNA, 25 bp, Homo sapien
tagatgttgggacagactgtaaggc

SEQ ID NO: 4647740 - DNA, 25 bp, Homo sapien
tcattgaggctttacaaaaactccc

SEQ ID NO: 4647741 - DNA, 25 bp, Homo sapien
taggatgtgtggcaacaacgcctgc

SEQ ID NO: 4647742 - DNA, 25 bp, Homo sapien
taaataacctactcaaagctgctgc

SEQ ID NO: 4647743 - DNA, 25 bp, Homo sapien
tgccagtaacatccctccagtcatg

SEQ ID NO: 4647744 - DNA, 25 bp, Homo sapien
ggaaagtattaacatcaatgtttct

SEQ ID NO: 4647745 - DNA, 25 bp, Homo sapien
catcaatgtttctaatgataagtta

SEQ ID NO: 4647746 - DNA, 25 bp, Homo sapien
tctaatgataagttaatgggaatag

SEQ ID NO: 4647747 - DNA, 25 bp, Homo sapien
tgtttctaatgataagttaatggga

SEQ ID NO: 4647748 - DNA, 25 bp, Homo sapien
ttgtctaagccattaacacccactc

SEQ ID NO: 4647749 - DNA, 25 bp, Homo sapien
tggttcagttcaatatttggttgag

SEQ ID NO: 4647750 - DNA, 25 bp, Homo sapien
tcagttcaatatttggttgagtaaa

SEQ ID NO: 4647751 - DNA, 25 bp, Homo sapien
cagttcaatatttggttgagtaaat

SEQ ID NO: 4647752 - DNA, 25 bp, Homo sapien
gttcagttcaatatttggttgagta

SEQ ID NO: 4647753 - DNA, 25 bp, Homo sapien
gatatctgcataacccttccaggca

SEQ ID NO: 4647754 - DNA, 25 bp, Homo sapien
gcaaagctgtatctcccaacttgtt

SEQ ID NO: 4647755 - DNA, 25 bp, Homo sapien
cagaagcaactggacgatatctgca

SEQ ID NO: 4647756 - DNA, 25 bp, Homo sapien
gcatgcaaagctgtatctcccaact

SEQ ID NO: 4647757 - DNA, 25 bp, Homo sapien
gcattggtagccatgtcgaaggcca

SEQ ID NO: 4647758 - DNA, 25 bp, Homo sapien
agatgcacaggcagcattggtagcc

SEQ ID NO: 4647759 - DNA, 25 bp, Homo sapien
catgtcgaaggccagcttcttctca

SEQ ID NO: 4647760 - DNA, 25 bp, Homo sapien
gagagatgcacaggcagcattggta

SEQ ID NO: 4647761 - DNA, 25 bp, Homo sapien
gtctgccaggccctaagattacctc

SEQ ID NO: 4647762 - DNA, 25 bp, Homo sapien
gctgacaattaactctatggccaaa

SEQ ID NO: 4647763 - DNA, 25 bp, Homo sapien
gccctgttctacgaaggctgcagaa

SEQ ID NO: 4647764 - DNA, 25 bp, Homo sapien
tcaggaaggtagactaaacacactt

SEQ ID NO: 4647765 - DNA, 25 bp, Homo sapien
agtgcagactctgactgagtggtca

SEQ ID NO: 4647766 - DNA, 25 bp, Homo sapien
gagaggatgatttgccacagtgcag

SEQ ID NO: 4647767 - DNA, 25 bp, Homo sapien
tgagtggtcatcaaaagacaggcac

SEQ ID NO: 4647768 - DNA, 25 bp, Homo sapien
ctaagctaaagcctgagagacaaat

SEQ ID NO: 4647769 - DNA, 25 bp, Homo sapien
gacagcatcacgtgaaagggtctga

SEQ ID NO: 4647770 - DNA, 25 bp, Homo sapien
tattatacatatgaccggttccaag

SEQ ID NO: 4647771 - DNA, 25 bp, Homo sapien
tgagattcaacttaaagaggcctcc

SEQ ID NO: 4647772 - DNA, 25 bp, Homo sapien
tagtcatgtcataaagcaagcatcc

SEQ ID NO: 4647773 - DNA, 25 bp, Homo sapien
ggcattgcttaatgttcgaactgca

SEQ ID NO: 4647774 - DNA, 25 bp, Homo sapien
tcatcatcgagatagtcctcggcat

SEQ ID NO: 4647775 - DNA, 25 bp, Homo sapien
tcatcgagatagtcctcggcattgc

SEQ ID NO: 4647776 - DNA, 25 bp, Homo sapien
gatagtcctcggcattgcttaatgt

SEQ ID NO: 4647777 - DNA, 25 bp, Homo sapien
tacacgttctactcaaacacagtgc

SEQ ID NO: 4647778 - DNA, 25 bp, Homo sapien
caaaggtgggaacaattcatttaca

SEQ ID NO: 4647779 - DNA, 25 bp, Homo sapien
tagatctcaaagctccagaaaggaa

SEQ ID NO: 4647780 - DNA, 25 bp, Homo sapien
tgtgccaagaatccagtcacttact

SEQ ID NO: 4647781 - DNA, 25 bp, Homo sapien
gctttacttacttaacgacaatgag

SEQ ID NO: 4647782 - DNA, 25 bp, Homo sapien
gacaatgagtgataccacagaaacg

SEQ ID NO: 4647783 - DNA, 25 bp, Homo sapien
gagtgataccacagaaacggacaaa

SEQ ID NO: 4647784 - DNA, 25 bp, Homo sapien
tacttaacgacaatgagtgatacca

SEQ ID NO: 4647785 - DNA, 25 bp, Homo sapien
tgatcaaagctaacacaagaagttg

SEQ ID NO: 4647786 - DNA, 25 bp, Homo sapien
catggttcctgactactccatatgg

SEQ ID NO: 4647787 - DNA, 25 bp, Homo sapien
tatgaactagatccatactgtgaga

SEQ ID NO: 4647788 - DNA, 25 bp, Homo sapien
gaagttgaactaaaatgtggctctc

SEQ ID NO: 4647789 - DNA, 25 bp, Homo sapien
tagggccgggattctaggcaaattc

SEQ ID NO: 4647790 - DNA, 25 bp, Homo sapien
tctgggtatcgtttctcaaggctcc

SEQ ID NO: 4647791 - DNA, 25 bp, Homo sapien
tcactagtggtacagattctcttct

SEQ ID NO: 4647792 - DNA, 25 bp, Homo sapien
cacagagtgaaaaaccaaacagtca

SEQ ID NO: 4647793 - DNA, 25 bp, Homo sapien
gagaaagctcagattagccaggctg

SEQ ID NO: 4647794 - DNA, 25 bp, Homo sapien
cactagaaaggagttcaggccacag

SEQ ID NO: 4647795 - DNA, 25 bp, Homo sapien
gctcctgggcctacaactaaacaag

SEQ ID NO: 4647796 - DNA, 25 bp, Homo sapien
aatttccagtggagtttcagccaca

SEQ ID NO: 4647797 - DNA, 25 bp, Homo sapien
cacagtctgagtcaatagggaaggc

SEQ ID NO: 4647798 - DNA, 25 bp, Homo sapien
ggctatacaatcttttcctgcaata

SEQ ID NO: 4647799 - DNA, 25 bp, Homo sapien
gatgtaaatgttaggttccacagcc

SEQ ID NO: 4647800 - DNA, 25 bp, Homo sapien
tttgcaaacaggaataccagaatct

SEQ ID NO: 4647801 - DNA, 25 bp, Homo sapien
tagtaactaagagaccataaaaatc

SEQ ID NO: 4647802 - DNA, 25 bp, Homo sapien
gggattataaactctacaatggcat

SEQ ID NO: 4647803 - DNA, 25 bp, Homo sapien
aatcaggacacaagacattcaactc

SEQ ID NO: 4647804 - DNA, 25 bp, Homo sapien
tctgtaataggacagactccacggg

SEQ ID NO: 4647805 - DNA, 25 bp, Homo sapien
acatgaaatggccttgtgttctcat

SEQ ID NO: 4647806 - DNA, 25 bp, Homo sapien
ttgtgttctcattcagttgaagtaa

SEQ ID NO: 4647807 - DNA, 25 bp, Homo sapien
caaagattgaggacatgaaatggcc

SEQ ID NO: 4647808 - DNA, 25 bp, Homo sapien
gcatatcaacaaagattgaggacat

SEQ ID NO: 4647809 - DNA, 25 bp, Homo sapien
ggcattaccaataccagctcacgtt

SEQ ID NO: 4647810 - DNA, 25 bp, Homo sapien
cgttcctctccttattcggaaagag

SEQ ID NO: 4647811 - DNA, 25 bp, Homo sapien
tcatttagattgtacgacccaaccc

SEQ ID NO: 4647812 - DNA, 25 bp, Homo sapien
cctaacaagtctgagtgtgggaatg

SEQ ID NO: 4647813 - DNA, 25 bp, Homo sapien
caaaatactataatggaggacatga

SEQ ID NO: 4647814 - DNA, 25 bp, Homo sapien
gcgcccggccataaactccatgtta

SEQ ID NO: 4647815 - DNA, 25 bp, Homo sapien
tagcaaccataagattcctaggaat

SEQ ID NO: 4647816 - DNA, 25 bp, Homo sapien
tatgacaataaatcaccaagattgc

SEQ ID NO: 4647817 - DNA, 25 bp, Homo sapien
taaggctagtaaaaatcgagaattg

SEQ ID NO: 4647818 - DNA, 25 bp, Homo sapien
tgtacagggcaataatgatcataca

SEQ ID NO: 4647819 - DNA, 25 bp, Homo sapien
tatttgtctgggtgtaatacataca

SEQ ID NO: 4647820 - DNA, 25 bp, Homo sapien
gatcatacatctacaacctaagatg

SEQ ID NO: 4647821 - DNA, 25 bp, Homo sapien
cattctttttatgaggaggcagcct

SEQ ID NO: 4647822 - DNA, 25 bp, Homo sapien
tgatgaagcatacgtcctggccaga

SEQ ID NO: 4647823 - DNA, 25 bp, Homo sapien
tactgacagaacctaaaaggcagcc

SEQ ID NO: 4647824 - DNA, 25 bp, Homo sapien
catggaaatgcctaagaggtgctac

SEQ ID NO: 4647825 - DNA, 25 bp, Homo sapien
tatgtgtgccaccaaagcgagcact

SEQ ID NO: 4647826 - DNA, 25 bp, Homo sapien
tgcctggcccactcactaactgttt

SEQ ID NO: 4647827 - DNA, 25 bp, Homo sapien
ctgttttaagtcaaagtactgatac

SEQ ID NO: 4647828 - DNA, 25 bp, Homo sapien
ctggcccactcactaactgttttaa

SEQ ID NO: 4647829 - DNA, 25 bp, Homo sapien
ctaactgttttaagtcaaagtactg

SEQ ID NO: 4647830 - DNA, 25 bp, Homo sapien
caatggatctattccttgttcgcat

SEQ ID NO: 4647831 - DNA, 25 bp, Homo sapien
tcaatggatctattccttgttcgca

SEQ ID NO: 4647832 - DNA, 25 bp, Homo sapien
ttcaatggatctattccttgttcgc

SEQ ID NO: 4647833 - DNA, 25 bp, Homo sapien
gttcaatggatctattccttgttcg

SEQ ID NO: 4647834 - DNA, 25 bp, Homo sapien
gcttgacaaaagctccactctaggt

SEQ ID NO: 4647835 - DNA, 25 bp, Homo sapien
tacccacagcataggtcagagcatt

SEQ ID NO: 4647836 - DNA, 25 bp, Homo sapien
tcagcctccagtcaagggatacagt

SEQ ID NO: 4647837 - DNA, 25 bp, Homo sapien
cactctaggtggatgtggctaccat

SEQ ID NO: 4647838 - DNA, 25 bp, Homo sapien
ggaataagaacacaggaacaagagg

SEQ ID NO: 4647839 - DNA, 25 bp, Homo sapien
aggtttctcactgtggaataagaac

SEQ ID NO: 4647840 - DNA, 25 bp, Homo sapien
gtggaataagaacacaggaacaaga

SEQ ID NO: 4647841 - DNA, 25 bp, Homo sapien
gtttctcactgtggaataagaacac

SEQ ID NO: 4647842 - DNA, 25 bp, Homo sapien
tataggagcaaccagaaattaataa

SEQ ID NO: 4647843 - DNA, 25 bp, Homo sapien
gtattacctatataagatgggtggc

SEQ ID NO: 4647844 - DNA, 25 bp, Homo sapien
acctatataagatgggtggcaacag

SEQ ID NO: 4647845 - DNA, 25 bp, Homo sapien
aacaaatataggagcaaccagaaat

SEQ ID NO: 4647846 - DNA, 25 bp, Homo sapien
cctaggacgatctcaagcttggttg

SEQ ID NO: 4647847 - DNA, 25 bp, Homo sapien
cagcaatctgaagtagacctaggac

SEQ ID NO: 4647848 - DNA, 25 bp, Homo sapien
ggtgtgaaattctcattgccagcac

SEQ ID NO: 4647849 - DNA, 25 bp, Homo sapien
gcttgagtaggcagctttccccgga

SEQ ID NO: 4647850 - DNA, 25 bp, Homo sapien
taaggcaagtatttagaccatttgc

SEQ ID NO: 4647851 - DNA, 25 bp, Homo sapien
cctcctgaaggcagccgaaggttcg

SEQ ID NO: 4647852 - DNA, 25 bp, Homo sapien
gagtttataagtgtcaaaacaagtg

SEQ ID NO: 4647853 - DNA, 25 bp, Homo sapien
tgatacaagaacagcaacccctatt

SEQ ID NO: 4647854 - DNA, 25 bp, Homo sapien
tataagactttattcaaggactggg

SEQ ID NO: 4647855 - DNA, 25 bp, Homo sapien
tacaagtccactactttcttcccaa

SEQ ID NO: 4647856 - DNA, 25 bp, Homo sapien
agtataagactttattcaaggactg

SEQ ID NO: 4647857 - DNA, 25 bp, Homo sapien
ttcccaaagtataagactttattca

SEQ ID NO: 4647858 - DNA, 25 bp, Homo sapien
gataaggggtctaaatatactttgc

SEQ ID NO: 4647859 - DNA, 25 bp, Homo sapien
tgagagtctacttctttgataaggg

SEQ ID NO: 4647860 - DNA, 25 bp, Homo sapien
aaatatactttgcaaacacgtggcc

SEQ ID NO: 4647861 - DNA, 25 bp, Homo sapien
ggcccatgatgagagtctacttctt

SEQ ID NO: 4647862 - DNA, 25 bp, Homo sapien
gggtcatctaacagcattctttcca

SEQ ID NO: 4647863 - DNA, 25 bp, Homo sapien
taccagaaagggtcatctaacagca

SEQ ID NO: 4647864 - DNA, 25 bp, Homo sapien
gcattggacacagaactagggaacg

SEQ ID NO: 4647865 - DNA, 25 bp, Homo sapien
agtgaatgatggctcctttaggaga

SEQ ID NO: 4647866 - DNA, 25 bp, Homo sapien
tcctgctggaatttcaaagacctta

SEQ ID NO: 4647867 - DNA, 25 bp, Homo sapien
ctgctggaatttcaaagaccttact

SEQ ID NO: 4647868 - DNA, 25 bp, Homo sapien
gctggaatttcaaagaccttacttc

SEQ ID NO: 4647869 - DNA, 25 bp, Homo sapien
cttcctgctggaatttcaaagacct

SEQ ID NO: 4647870 - DNA, 25 bp, Homo sapien
ctcctgattattccagtattcaatc

SEQ ID NO: 4647871 - DNA, 25 bp, Homo sapien
ccaactctctcctgattattccagt

SEQ ID NO: 4647872 - DNA, 25 bp, Homo sapien
actctctcctgattattccagtatt

SEQ ID NO: 4647873 - DNA, 25 bp, Homo sapien
tcctgattattccagtattcaatca

SEQ ID NO: 4647874 - DNA, 25 bp, Homo sapien
tattttccctgctaatcaatagcaa

SEQ ID NO: 4647875 - DNA, 25 bp, Homo sapien
cctgctaatcaatagcaacccagag

SEQ ID NO: 4647876 - DNA, 25 bp, Homo sapien
atagcaacccagagtgaattctcaa

SEQ ID NO: 4647877 - DNA, 25 bp, Homo sapien
ttgctttgtctcttcttcgttcttc

SEQ ID NO: 4647878 - DNA, 25 bp, Homo sapien
ggatccatactctccttaagggctt

SEQ ID NO: 4647879 - DNA, 25 bp, Homo sapien
gggaaaatgcctaaccccaatcagc

SEQ ID NO: 4647880 - DNA, 25 bp, Homo sapien
ccaatcagcaacagcccgactatgg

SEQ ID NO: 4647881 - DNA, 25 bp, Homo sapien
tccagaggctttcctgtggcagtgg

SEQ ID NO: 4647882 - DNA, 25 bp, Homo sapien
gccctgggaatgtgcacgcttactt

SEQ ID NO: 4647883 - DNA, 25 bp, Homo sapien
tgacggtgtgcaactgatatcctgg

SEQ ID NO: 4647884 - DNA, 25 bp, Homo sapien
ttcgccaaatatcctggccctggga

SEQ ID NO: 4647885 - DNA, 25 bp, Homo sapien
caactgcagtttctgccggcagcaa

SEQ ID NO: 4647886 - DNA, 25 bp, Homo sapien
ttgtgatggcgtcgctgccgataat

SEQ ID NO: 4647887 - DNA, 25 bp, Homo sapien
gcgtcgctgccgataattttgcaaa

SEQ ID NO: 4647888 - DNA, 25 bp, Homo sapien
cgctgccgataattttgcaaacata

SEQ ID NO: 4647889 - DNA, 25 bp, Homo sapien
gacagttgtgatggcgtcgctgccg

SEQ ID NO: 4647890 - DNA, 25 bp, Homo sapien
gaattcaattcattggagtgctgcc

SEQ ID NO: 4647891 - DNA, 25 bp, Homo sapien
ccaccacagatactactgaattcaa

SEQ ID NO: 4647892 - DNA, 25 bp, Homo sapien
agtgacaagttacattcctgccatc

SEQ ID NO: 4647893 - DNA, 25 bp, Homo sapien
gtgctgccatgcagcttcaaccctg

SEQ ID NO: 4647894 - DNA, 25 bp, Homo sapien
tgagcaaatacaatccctgtccaga

SEQ ID NO: 4647895 - DNA, 25 bp, Homo sapien
gaagattttgagttgattagcagga

SEQ ID NO: 4647896 - DNA, 25 bp, Homo sapien
gtttgatctcaatctcacggactga

SEQ ID NO: 4647897 - DNA, 25 bp, Homo sapien
tctggcttctgatagtctgtgtgac

SEQ ID NO: 4647898 - DNA, 25 bp, Homo sapien
tgttgtatcaaatagtgccgctgga

SEQ ID NO: 4647899 - DNA, 25 bp, Homo sapien
tgacattgtagaccaagcaccaagg

SEQ ID NO: 4647900 - DNA, 25 bp, Homo sapien
cattgccacgggttcaaagatccca

SEQ ID NO: 4647901 - DNA, 25 bp, Homo sapien
ccgggagcaagatagtcaggccaat

SEQ ID NO: 4647902 - DNA, 25 bp, Homo sapien
tcataagcaacaagacgctttttcg

SEQ ID NO: 4647903 - DNA, 25 bp, Homo sapien
tgccagaatcttgcatgggctgctc

SEQ ID NO: 4647904 - DNA, 25 bp, Homo sapien
ttttccttctagtgccagaatcttg

SEQ ID NO: 4647905 - DNA, 25 bp, Homo sapien
tctagtgccagaatcttgcatgggc

SEQ ID NO: 4647906 - DNA, 25 bp, Homo sapien
tgaatcctcacagatacaaggaggt

SEQ ID NO: 4647907 - DNA, 25 bp, Homo sapien
actgaatcctcacagatacaaggag

SEQ ID NO: 4647908 - DNA, 25 bp, Homo sapien
tactgaatcctcacagatacaagga

SEQ ID NO: 4647909 - DNA, 25 bp, Homo sapien
ctgaatcctcacagatacaaggagg

SEQ ID NO: 4647910 - DNA, 25 bp, Homo sapien
tctgattcaagcacaatgtcgcacg

SEQ ID NO: 4647911 - DNA, 25 bp, Homo sapien
tgtcgcacgatagaaacttaaacct

SEQ ID NO: 4647912 - DNA, 25 bp, Homo sapien
cataggattggcctttgacaaaaca

SEQ ID NO: 4647913 - DNA, 25 bp, Homo sapien
caaatccaggtttgatccaagggaa

SEQ ID NO: 4647914 - DNA, 25 bp, Homo sapien
tactaaatgagcaaaagttggaaac

SEQ ID NO: 4647915 - DNA, 25 bp, Homo sapien
tttcaaaagaagacttacctatggc

SEQ ID NO: 4647916 - DNA, 25 bp, Homo sapien
taaacaaattagatatcgaaggaac

SEQ ID NO: 4647917 - DNA, 25 bp, Homo sapien
ggcaaggatgctaatatctagcatc

SEQ ID NO: 4647918 - DNA, 25 bp, Homo sapien
gaactgagcaagcttcatacccaga

SEQ ID NO: 4647919 - DNA, 25 bp, Homo sapien
cagagtctattgaatccccatgaga

SEQ ID NO: 4647920 - DNA, 25 bp, Homo sapien
tccagcagatgtactatgaaaagcc

SEQ ID NO: 4647921 - DNA, 25 bp, Homo sapien
acatatgttctcgtctcactggcca

SEQ ID NO: 4647922 - DNA, 25 bp, Homo sapien
cttcaggacaatggcttttaagaca

SEQ ID NO: 4647923 - DNA, 25 bp, Homo sapien
tcttcaggacaatggcttttaagac

SEQ ID NO: 4647924 - DNA, 25 bp, Homo sapien
atcccacaagtactgggagagaact

SEQ ID NO: 4647925 - DNA, 25 bp, Homo sapien
tgtctgctttagcccatggacttgg

SEQ ID NO: 4647926 - DNA, 25 bp, Homo sapien
gacatcctaggagtgtcattagtac

SEQ ID NO: 4647927 - DNA, 25 bp, Homo sapien
gagacatcctaggagtgtcattagt

SEQ ID NO: 4647928 - DNA, 25 bp, Homo sapien
aaatattcataaagggagctggggt

SEQ ID NO: 4647929 - DNA, 25 bp, Homo sapien
caaaatattcataaagggagctggg

SEQ ID NO: 4647930 - DNA, 25 bp, Homo sapien
tccaaaatattcataaagggagctg

SEQ ID NO: 4647931 - DNA, 25 bp, Homo sapien
tattcataaagggagctggggttac

SEQ ID NO: 4647932 - DNA, 25 bp, Homo sapien
tccttccaatgtccgcgtggagtct

SEQ ID NO: 4647933 - DNA, 25 bp, Homo sapien
ccttccaatgtccgcgtggagtctg

SEQ ID NO: 4647934 - DNA, 25 bp, Homo sapien
tccaatgtccgcgtggagtctgtgt

SEQ ID NO: 4647935 - DNA, 25 bp, Homo sapien
tatttactatgatgccacccgtgat

SEQ ID NO: 4647936 - DNA, 25 bp, Homo sapien
gatgccacccgtgattaaagaagaa

SEQ ID NO: 4647937 - DNA, 25 bp, Homo sapien
tactatgatgccacccgtgattaaa

SEQ ID NO: 4647938 - DNA, 25 bp, Homo sapien
cttttcataccagatgcttgtattt

SEQ ID NO: 4647939 - DNA, 25 bp, Homo sapien
ctggccttctgggagacataccagg

SEQ ID NO: 4647940 - DNA, 25 bp, Homo sapien
ttcattgtcaaccagaaagacttcc

SEQ ID NO: 4647941 - DNA, 25 bp, Homo sapien
acataccaggaaccttagggcacca

SEQ ID NO: 4647942 - DNA, 25 bp, Homo sapien
cattgtcaaccagaaagacttcctc

SEQ ID NO: 4647943 - DNA, 25 bp, Homo sapien
gggcagatccatcagggccagtccc

SEQ ID NO: 4647944 - DNA, 25 bp, Homo sapien
gggcaaggggagaacccaggccaga

SEQ ID NO: 4647945 - DNA, 25 bp, Homo sapien
ggcaaggggagaacccaggccagaa

SEQ ID NO: 4647946 - DNA, 25 bp, Homo sapien
gcaaggggagaacccaggccagaaa

SEQ ID NO: 4647947 - DNA, 25 bp, Homo sapien
tcctttctccatcatagattagggc

SEQ ID NO: 4647948 - DNA, 25 bp, Homo sapien
atatccggccctggtactacagacc

SEQ ID NO: 4647949 - DNA, 25 bp, Homo sapien
ttcacagagactttcccactccaca

SEQ ID NO: 4647950 - DNA, 25 bp, Homo sapien
catagattagggctttggaataccc

SEQ ID NO: 4647951 - DNA, 25 bp, Homo sapien
ttgttgacaagcagacaccacaggt

SEQ ID NO: 4647952 - DNA, 25 bp, Homo sapien
tcacttgttgacaagcagacaccac

SEQ ID NO: 4647953 - DNA, 25 bp, Homo sapien
accacaggtatccaaacctgcggga

SEQ ID NO: 4647954 - DNA, 25 bp, Homo sapien
tgagagtcacttgttgacaagcaga

SEQ ID NO: 4647955 - DNA, 25 bp, Homo sapien
tccttttgtagtgggcttgtttata

SEQ ID NO: 4647956 - DNA, 25 bp, Homo sapien
tgaattatagtgtgaaggtctcccc

SEQ ID NO: 4647957 - DNA, 25 bp, Homo sapien
tttataaagcctaagctgtttgtgt

SEQ ID NO: 4647958 - DNA, 25 bp, Homo sapien
ggtctccccatgtggcattcctttt

SEQ ID NO: 4647959 - DNA, 25 bp, Homo sapien
ccagcagaatgcacatgctcatctg

SEQ ID NO: 4647960 - DNA, 25 bp, Homo sapien
ggcttccggataggcagagttgcca

SEQ ID NO: 4647961 - DNA, 25 bp, Homo sapien
tgtgttagaaaaggccccagcaaca

SEQ ID NO: 4647962 - DNA, 25 bp, Homo sapien
ttaacactgagaggaggcttccgga

SEQ ID NO: 4647963 - DNA, 25 bp, Homo sapien
ctgcagcttgatcaaacaccctgat

SEQ ID NO: 4647964 - DNA, 25 bp, Homo sapien
tgatttgctgcaaccattccaagat

SEQ ID NO: 4647965 - DNA, 25 bp, Homo sapien
caaatgtgtcataattaatccgaat

SEQ ID NO: 4647966 - DNA, 25 bp, Homo sapien
gaattctaaaatagcttagcaccaa

SEQ ID NO: 4647967 - DNA, 25 bp, Homo sapien
tcccaccacaccagattcactctta

SEQ ID NO: 4647968 - DNA, 25 bp, Homo sapien
accatgattccaaaacgctgctgat

SEQ ID NO: 4647969 - DNA, 25 bp, Homo sapien
cccaccacaccagattcactcttac

SEQ ID NO: 4647970 - DNA, 25 bp, Homo sapien
atgattccaaaacgctgctgatagg

SEQ ID NO: 4647971 - DNA, 25 bp, Homo sapien
tcacattgactatcagggtggaaga

SEQ ID NO: 4647972 - DNA, 25 bp, Homo sapien
gtcatgcattggaacaaaatctcct

SEQ ID NO: 4647973 - DNA, 25 bp, Homo sapien
gactatcagggtggaagaaaacaac

SEQ ID NO: 4647974 - DNA, 25 bp, Homo sapien
aaacaacaggtcatgcattggaaca

SEQ ID NO: 4647975 - DNA, 25 bp, Homo sapien
ccctttgttaatgaaggtgccctgg

SEQ ID NO: 4647976 - DNA, 25 bp, Homo sapien
tgttttgcctagaatccagatctcc

SEQ ID NO: 4647977 - DNA, 25 bp, Homo sapien
gactcatcacctgagctaagcaaag

SEQ ID NO: 4647978 - DNA, 25 bp, Homo sapien
tgagctaagcaaagctgacgccttc

SEQ ID NO: 4647979 - DNA, 25 bp, Homo sapien
ctacctctatgaggtttgaccatct

SEQ ID NO: 4647980 - DNA, 25 bp, Homo sapien
aggaaagatcctcctatgcagactc

SEQ ID NO: 4647981 - DNA, 25 bp, Homo sapien
ctctatgaggtttgaccatcttcct

SEQ ID NO: 4647982 - DNA, 25 bp, Homo sapien
gaaagatcctcctatgcagactctg

SEQ ID NO: 4647983 - DNA, 25 bp, Homo sapien
ttcacagaagaatagctcaagtccc

SEQ ID NO: 4647984 - DNA, 25 bp, Homo sapien
gctgttaccttagggagttcacaaa

SEQ ID NO: 4647985 - DNA, 25 bp, Homo sapien
gaagggaatcgctttggatcctctg

SEQ ID NO: 4647986 - DNA, 25 bp, Homo sapien
ggtgcactgcttcagggtgtaaaaa

SEQ ID NO: 4647987 - DNA, 25 bp, Homo sapien
gatcattagatttggaactaaccag

SEQ ID NO: 4647988 - DNA, 25 bp, Homo sapien
ctggttgcctctggtggttgcaaca

SEQ ID NO: 4647989 - DNA, 25 bp, Homo sapien
gcaacagggaatctcacacatggct

SEQ ID NO: 4647990 - DNA, 25 bp, Homo sapien
aactaaccagttcctgtccaggaag

SEQ ID NO: 4647991 - DNA, 25 bp, Homo sapien
tggtaattctgctacccttccgttg

SEQ ID NO: 4647992 - DNA, 25 bp, Homo sapien
tctgctacccttccgttgggaacta

SEQ ID NO: 4647993 - DNA, 25 bp, Homo sapien
catgctggctcctccacaaagacac

SEQ ID NO: 4647994 - DNA, 25 bp, Homo sapien
ggctcctccacaaagacacaacccg

SEQ ID NO: 4647995 - DNA, 25 bp, Homo sapien
tccacaaagacacaacccgtttcca

SEQ ID NO: 4647996 - DNA, 25 bp, Homo sapien
atgctggctcctccacaaagacaca

SEQ ID NO: 4647997 - DNA, 25 bp, Homo sapien
tgatccagaaagggtggggaaaaca

SEQ ID NO: 4647998 - DNA, 25 bp, Homo sapien
tgtgatccagaaagggtggggaaaa

SEQ ID NO: 4647999 - DNA, 25 bp, Homo sapien
ctgtgatccagaaagggtggggaaa

SEQ ID NO: 4648000 - DNA, 25 bp, Homo sapien
ctcctccacctaagaggcttcagag

SEQ ID NO: 4648001 - DNA, 25 bp, Homo sapien
tcctccacctaagaggcttcagagc

SEQ ID NO: 4648002 - DNA, 25 bp, Homo sapien
ctagcgttctatgagaaagtcctgg

SEQ ID NO: 4648003 - DNA, 25 bp, Homo sapien
aaagtcctggtcagacttggacagc

SEQ ID NO: 4648004 - DNA, 25 bp, Homo sapien
ggtcagacttggacagccaccccaa

SEQ ID NO: 4648005 - DNA, 25 bp, Homo sapien
gggaagcagctagtgctgtcaccca

SEQ ID NO: 4648006 - DNA, 25 bp, Homo sapien
catcctgtgcttttccgctctattt

SEQ ID NO: 4648007 - DNA, 25 bp, Homo sapien
atcctgtgcttttccgctctatttc

SEQ ID NO: 4648008 - DNA, 25 bp, Homo sapien
cctgtgcttttccgctctatttcat

SEQ ID NO: 4648009 - DNA, 25 bp, Homo sapien
tgtgcttttccgctctatttcattt

SEQ ID NO: 4648010 - DNA, 25 bp, Homo sapien
ccagtggactgcagagattggaact

SEQ ID NO: 4648011 - DNA, 25 bp, Homo sapien
ctaagacaagaagggccagtggact

SEQ ID NO: 4648012 - DNA, 25 bp, Homo sapien
tctttccagggttattaagcaagcc

SEQ ID NO: 4648013 - DNA, 25 bp, Homo sapien
caaagatgtataagtatgaggcagc

SEQ ID NO: 4648014 - DNA, 25 bp, Homo sapien
tgcattctgggtgattgaactgagc

SEQ ID NO: 4648015 - DNA, 25 bp, Homo sapien
ccacaaagctggagtaggacactga

SEQ ID NO: 4648016 - DNA, 25 bp, Homo sapien
caattcctgggttctgccacaaagc

SEQ ID NO: 4648017 - DNA, 25 bp, Homo sapien
tcttctgtccaaatttgcctcacca

SEQ ID NO: 4648018 - DNA, 25 bp, Homo sapien
gcccatgtgattctagtccctaaag

SEQ ID NO: 4648019 - DNA, 25 bp, Homo sapien
tttgatcatgtaggccttttcagcc

SEQ ID NO: 4648020 - DNA, 25 bp, Homo sapien
agccttagtgcctccaaaatttatg

SEQ ID NO: 4648021 - DNA, 25 bp, Homo sapien
cagattgagatttgctagacagtcc

SEQ ID NO: 4648022 - DNA, 25 bp, Homo sapien
ctaagtggaagccaatgctgatatt

SEQ ID NO: 4648023 - DNA, 25 bp, Homo sapien
cctgctccatgaccttccaattctt

SEQ ID NO: 4648024 - DNA, 25 bp, Homo sapien
gggtactaggactggtatccctaca

SEQ ID NO: 4648025 - DNA, 25 bp, Homo sapien
tggcaagggcccaaaacacataaag

SEQ ID NO: 4648026 - DNA, 25 bp, Homo sapien
tgtccatcgcagactatcatagtaa

SEQ ID NO: 4648027 - DNA, 25 bp, Homo sapien
ccattattaaatcccaattgatagg

SEQ ID NO: 4648028 - DNA, 25 bp, Homo sapien
tcccaattgatagggcaaggtgtta

SEQ ID NO: 4648029 - DNA, 25 bp, Homo sapien
tatgacacggattcccctgttccat

SEQ ID NO: 4648030 - DNA, 25 bp, Homo sapien
tgaagttagagcatgccacctgttt

SEQ ID NO: 4648031 - DNA, 25 bp, Homo sapien
ggttagccctgttggctgtggccca

SEQ ID NO: 4648032 - DNA, 25 bp, Homo sapien
cccctggtttgctgttgaagttaga

SEQ ID NO: 4648033 - DNA, 25 bp, Homo sapien
ctgtggttcaccaatcttgagaggt

SEQ ID NO: 4648034 - DNA, 25 bp, Homo sapien
tgccatgtcagcatttgaaattttc

SEQ ID NO: 4648035 - DNA, 25 bp, Homo sapien
attttctctccaccaaggaatatat

SEQ ID NO: 4648036 - DNA, 25 bp, Homo sapien
tgaaattttctctccaccaaggaat

SEQ ID NO: 4648037 - DNA, 25 bp, Homo sapien
ctgccatgtcagcatttgaaatttt

SEQ ID NO: 4648038 - DNA, 25 bp, Homo sapien
ggtcacatttatgaactgatgcaga

SEQ ID NO: 4648039 - DNA, 25 bp, Homo sapien
tgctctccactaccttcggcatatt

SEQ ID NO: 4648040 - DNA, 25 bp, Homo sapien
tggcagctgacaaatcctatcttgg

SEQ ID NO: 4648041 - DNA, 25 bp, Homo sapien
tgttgagggctcatgaaggtcacat

SEQ ID NO: 4648042 - DNA, 25 bp, Homo sapien
cacagcagtttgtgatacaaagata

SEQ ID NO: 4648043 - DNA, 25 bp, Homo sapien
gattttctgactctcgttcacagca

SEQ ID NO: 4648044 - DNA, 25 bp, Homo sapien
cccgatgaggtgtgcaatcaagcct

SEQ ID NO: 4648045 - DNA, 25 bp, Homo sapien
gcctttttctcgatttgtaactaca

SEQ ID NO: 4648046 - DNA, 25 bp, Homo sapien
aaaaggtttgagagaagtgcatctc

SEQ ID NO: 4648047 - DNA, 25 bp, Homo sapien
ttgcaaaaaggtttgagagaagtgc

SEQ ID NO: 4648048 - DNA, 25 bp, Homo sapien
tagtatgccaacattgcaaaaaggt

SEQ ID NO: 4648049 - DNA, 25 bp, Homo sapien
ccaacattgcaaaaaggtttgagag

SEQ ID NO: 4648050 - DNA, 25 bp, Homo sapien
atgttcccattgcagtccacgtcgt

SEQ ID NO: 4648051 - DNA, 25 bp, Homo sapien
cacgtgctggcctaggtgctttcgc

SEQ ID NO: 4648052 - DNA, 25 bp, Homo sapien
tcagccagaagtccacacgtgctgg

SEQ ID NO: 4648053 - DNA, 25 bp, Homo sapien
ccacgtcgtcagtcttctggaggtt

SEQ ID NO: 4648054 - DNA, 25 bp, Homo sapien
tttttgaactagcaagtgtagccca

SEQ ID NO: 4648055 - DNA, 25 bp, Homo sapien
tcaggttttctaggacataagcatg

SEQ ID NO: 4648056 - DNA, 25 bp, Homo sapien
tgtagcccattgacgtttattgtga

SEQ ID NO: 4648057 - DNA, 25 bp, Homo sapien
gaaacagtagctagattgtgttcac

SEQ ID NO: 4648058 - DNA, 25 bp, Homo sapien
cataaaggtcaagcccctttccttg

SEQ ID NO: 4648059 - DNA, 25 bp, Homo sapien
tgatctcatatccataaaggtcaag

SEQ ID NO: 4648060 - DNA, 25 bp, Homo sapien
ccagatagtagatatgactgatctc

SEQ ID NO: 4648061 - DNA, 25 bp, Homo sapien
cagctctgagtctacttccatgtgg

SEQ ID NO: 4648062 - DNA, 25 bp, Homo sapien
tttgagcagtaaggagagtaaggaa

SEQ ID NO: 4648063 - DNA, 25 bp, Homo sapien
gtaccaggtgtttgagcagtaagga

SEQ ID NO: 4648064 - DNA, 25 bp, Homo sapien
cagctgtaccaggtgtttgagcagt

SEQ ID NO: 4648065 - DNA, 25 bp, Homo sapien
accaggtgtttgagcagtaaggaga

SEQ ID NO: 4648066 - DNA, 25 bp, Homo sapien
gacccctccatcattcggtggcaat

SEQ ID NO: 4648067 - DNA, 25 bp, Homo sapien
ttaacctcggatgcttgtttccatg

SEQ ID NO: 4648068 - DNA, 25 bp, Homo sapien
tgaattatcacagccactttgtaga

SEQ ID NO: 4648069 - DNA, 25 bp, Homo sapien
ttgtagaccaagttgcacagatgtc

SEQ ID NO: 4648070 - DNA, 25 bp, Homo sapien
ggttgttaaccagacagagatagct

SEQ ID NO: 4648071 - DNA, 25 bp, Homo sapien
tgacacactagctccccagtaatgg

SEQ ID NO: 4648072 - DNA, 25 bp, Homo sapien
tgaggccaattgactaaacccaact

SEQ ID NO: 4648073 - DNA, 25 bp, Homo sapien
agctgagcattggacccctgaaatc

SEQ ID NO: 4648074 - DNA, 25 bp, Homo sapien
gccaaatgaccactctctagaatgc

SEQ ID NO: 4648075 - DNA, 25 bp, Homo sapien
aaatgttctatttcaatagatgagc

SEQ ID NO: 4648076 - DNA, 25 bp, Homo sapien
agtgggtggattaagcctatttcca

SEQ ID NO: 4648077 - DNA, 25 bp, Homo sapien
tctagaatgcttcccagggtcagtg

SEQ ID NO: 4648078 - DNA, 25 bp, Homo sapien
gctcatgctggagtcaatctctgca

SEQ ID NO: 4648079 - DNA, 25 bp, Homo sapien
gacgtagcccattctggcaggtgct

SEQ ID NO: 4648080 - DNA, 25 bp, Homo sapien
tggtagcctagtgagtgaaactgtc

SEQ ID NO: 4648081 - DNA, 25 bp, Homo sapien
gcatcagtgctactagagagtggta

SEQ ID NO: 4648082 - DNA, 25 bp, Homo sapien
gaggactattagctgaacccagatg

SEQ ID NO: 4648083 - DNA, 25 bp, Homo sapien
tgtcatatccaatacaaacagcaaa

SEQ ID NO: 4648084 - DNA, 25 bp, Homo sapien
catgtcatatccaatacaaacagca

SEQ ID NO: 4648085 - DNA, 25 bp, Homo sapien
aaagctacacagaggactattagct

SEQ ID NO: 4648086 - DNA, 25 bp, Homo sapien
cttgaaccaagaggttagccttctt

SEQ ID NO: 4648087 - DNA, 25 bp, Homo sapien
acgtcagatgccaaaacccagccag

SEQ ID NO: 4648088 - DNA, 25 bp, Homo sapien
atgctgagaccttttataccaacgt

SEQ ID NO: 4648089 - DNA, 25 bp, Homo sapien
caagaggttagccttcttaagaaag

SEQ ID NO: 4648090 - DNA, 25 bp, Homo sapien
gttttccatttatcacccagacatc

SEQ ID NO: 4648091 - DNA, 25 bp, Homo sapien
agccccagggctacctcagggtcct

SEQ ID NO: 4648092 - DNA, 25 bp, Homo sapien
gggtgaagcatttgcaagttttcca

SEQ ID NO: 4648093 - DNA, 25 bp, Homo sapien
cagggtcctggccaaacttcacttt

SEQ ID NO: 4648094 - DNA, 25 bp, Homo sapien
gaaagtagatcgtttggcgactcat

SEQ ID NO: 4648095 - DNA, 25 bp, Homo sapien
tcaggaaagtagatcgtttggcgac

SEQ ID NO: 4648096 - DNA, 25 bp, Homo sapien
gcgactcattgtcgccaacaggtaa

SEQ ID NO: 4648097 - DNA, 25 bp, Homo sapien
agatcgtttggcgactcattgtcgc

SEQ ID NO: 4648098 - DNA, 25 bp, Homo sapien
catgttctctgcatgtttaatgata

SEQ ID NO: 4648099 - DNA, 25 bp, Homo sapien
tctctgctaaatggagtctgggtgg

SEQ ID NO: 4648100 - DNA, 25 bp, Homo sapien
aattctcctgtgttagtcatgttct

SEQ ID NO: 4648101 - DNA, 25 bp, Homo sapien
cattgggcctagaatgcagcaattc

SEQ ID NO: 4648102 - DNA, 25 bp, Homo sapien
taacaagtttgaaggatgccgtacg

SEQ ID NO: 4648103 - DNA, 25 bp, Homo sapien
aaatggagaggaatcactgcacccg

SEQ ID NO: 4648104 - DNA, 25 bp, Homo sapien
gaagggttgccactacataaggtac

SEQ ID NO: 4648105 - DNA, 25 bp, Homo sapien
tgtctcaccgtgatccacagaaggg

SEQ ID NO: 4648106 - DNA, 25 bp, Homo sapien
gactttaaaagtattcactatatcc

SEQ ID NO: 4648107 - DNA, 25 bp, Homo sapien
acagggtgatttactgtgacaagaa

SEQ ID NO: 4648108 - DNA, 25 bp, Homo sapien
gacaagaaaaattatcccgtatgaa

SEQ ID NO: 4648109 - DNA, 25 bp, Homo sapien
tatatccctaactgtcctcctttct

SEQ ID NO: 4648110 - DNA, 25 bp, Homo sapien
ctccgcagttgggtttcgcccggct

SEQ ID NO: 4648111 - DNA, 25 bp, Homo sapien
taagggcgcgcacaactaacttctc

SEQ ID NO: 4648112 - DNA, 25 bp, Homo sapien
tcgctggctggttccgcgcactaag

SEQ ID NO: 4648113 - DNA, 25 bp, Homo sapien
agcagagcagcgagccttacgccgg

SEQ ID NO: 4648114 - DNA, 25 bp, Homo sapien
ccgagcagcgccagcacgcacagca

SEQ ID NO: 4648115 - DNA, 25 bp, Homo sapien
gcacagcaggtccaaacgtcccggg

SEQ ID NO: 4648116 - DNA, 25 bp, Homo sapien
tgtagacgcgcgtccgacacacggg

SEQ ID NO: 4648117 - DNA, 25 bp, Homo sapien
tggttggtgtagacgcgcgtccgac

SEQ ID NO: 4648118 - DNA, 25 bp, Homo sapien
tccgtacttgctggcgatacggttg

SEQ ID NO: 4648119 - DNA, 25 bp, Homo sapien
tgaatccgtacttgctggcgatacg

SEQ ID NO: 4648120 - DNA, 25 bp, Homo sapien
ttgctggcgatacggttggcctccg

SEQ ID NO: 4648121 - DNA, 25 bp, Homo sapien
gttgatgaatccgtacttgctggcg

SEQ ID NO: 4648122 - DNA, 25 bp, Homo sapien
gctgggctagcctgtagttcgttac

SEQ ID NO: 4648123 - DNA, 25 bp, Homo sapien
agggctgggctagcctgtagttcgt

SEQ ID NO: 4648124 - DNA, 25 bp, Homo sapien
cgagggctgggctagcctgtagttc

SEQ ID NO: 4648125 - DNA, 25 bp, Homo sapien
ggccgagggctgggctagcctgtag

SEQ ID NO: 4648126 - DNA, 25 bp, Homo sapien
aaaggtccagccgtctctgaagcca

SEQ ID NO: 4648127 - DNA, 25 bp, Homo sapien
cagattactagtgctactcgacttt

SEQ ID NO: 4648128 - DNA, 25 bp, Homo sapien
gtgctactcgacttttcaggtcaaa

SEQ ID NO: 4648129 - DNA, 25 bp, Homo sapien
gggcactctggatttttcccgagac

SEQ ID NO: 4648130 - DNA, 25 bp, Homo sapien
tcaaaactatacctttactgtggtg

SEQ ID NO: 4648131 - DNA, 25 bp, Homo sapien
caaaactatacctttactgtggtga

SEQ ID NO: 4648132 - DNA, 25 bp, Homo sapien
tggtgaaaatttactaccttactca

SEQ ID NO: 4648133 - DNA, 25 bp, Homo sapien
tgtctgtctttatcccttaagttgg

SEQ ID NO: 4648134 - DNA, 25 bp, Homo sapien
tatgggagttgaaagcaatcatcca

SEQ ID NO: 4648135 - DNA, 25 bp, Homo sapien
taaaccaaatatgggagttgaaagc

SEQ ID NO: 4648136 - DNA, 25 bp, Homo sapien
catgtgtctgtctttatcccttaag

SEQ ID NO: 4648137 - DNA, 25 bp, Homo sapien
tttggcaaattggtccgtgagcacc

SEQ ID NO: 4648138 - DNA, 25 bp, Homo sapien
gccatcctagtgagtgtaaaccagt

SEQ ID NO: 4648139 - DNA, 25 bp, Homo sapien
ggctggatctagaagggtgactcaa

SEQ ID NO: 4648140 - DNA, 25 bp, Homo sapien
catcccgtgatgagtcaaagaatgc

SEQ ID NO: 4648141 - DNA, 25 bp, Homo sapien
caaatcactgcatgttgcttcaatt

SEQ ID NO: 4648142 - DNA, 25 bp, Homo sapien
aatcactgcatgttgcttcaattct

SEQ ID NO: 4648143 - DNA, 25 bp, Homo sapien
aaatcactgcatgttgcttcaattc

SEQ ID NO: 4648144 - DNA, 25 bp, Homo sapien
tgctcagccagctcaatccaagagg

SEQ ID NO: 4648145 - DNA, 25 bp, Homo sapien
caccaagagtgttgatgaagcaaca

SEQ ID NO: 4648146 - DNA, 25 bp, Homo sapien
gcaagcacattatcgtctatcctga

SEQ ID NO: 4648147 - DNA, 25 bp, Homo sapien
aacattcaacaaagggtgcaagcac

SEQ ID NO: 4648148 - DNA, 25 bp, Homo sapien
ctgaaaagtccgaaacttccacttg

SEQ ID NO: 4648149 - DNA, 25 bp, Homo sapien
caatactcaaaactgaaaagtccga

SEQ ID NO: 4648150 - DNA, 25 bp, Homo sapien
cgtcctgctatggtagaagtggtag

SEQ ID NO: 4648151 - DNA, 25 bp, Homo sapien
tttaatcgtcctgctatggtagaag

SEQ ID NO: 4648152 - DNA, 25 bp, Homo sapien
cttttaatcgtcctgctatggtaga

SEQ ID NO: 4648153 - DNA, 25 bp, Homo sapien
aatcgtcctgctatggtagaagtgg

SEQ ID NO: 4648154 - DNA, 25 bp, Homo sapien
cattgaaatgaaactgtgggtccct

SEQ ID NO: 4648155 - DNA, 25 bp, Homo sapien
ccattgaaatgaaactgtgggtccc

SEQ ID NO: 4648156 - DNA, 25 bp, Homo sapien
tccattgaaatgaaactgtgggtcc

SEQ ID NO: 4648157 - DNA, 25 bp, Homo sapien
tgggtccctctgctcgagataactg

SEQ ID NO: 4648158 - DNA, 25 bp, Homo sapien
taaaacgggagaacctaggcatagc

SEQ ID NO: 4648159 - DNA, 25 bp, Homo sapien
tagttgtcggctattagtttgtccc

SEQ ID NO: 4648160 - DNA, 25 bp, Homo sapien
agctgctccacttctctaaaacggg

SEQ ID NO: 4648161 - DNA, 25 bp, Homo sapien
gcatgcttgcttctaggctctccca

SEQ ID NO: 4648162 - DNA, 25 bp, Homo sapien
ccgaagaaaacacagccaccctcat

SEQ ID NO: 4648163 - DNA, 25 bp, Homo sapien
taggtgtcagtgaaaaaccggataa

SEQ ID NO: 4648164 - DNA, 25 bp, Homo sapien
tgcaagacctgagcctgttatgttt

SEQ ID NO: 4648165 - DNA, 25 bp, Homo sapien
agccttcgctccacaacttgcaaga

SEQ ID NO: 4648166 - DNA, 25 bp, Homo sapien
tgaaaaaccggataaagcagaagag

SEQ ID NO: 4648167 - DNA, 25 bp, Homo sapien
attctcttatattgcaagaaacacg

SEQ ID NO: 4648168 - DNA, 25 bp, Homo sapien
taggcttgccaactcatatgcttac

SEQ ID NO: 4648169 - DNA, 25 bp, Homo sapien
aaaatttgttctactgttgttgtcg

SEQ ID NO: 4648170 - DNA, 25 bp, Homo sapien
gaagaacctctgttaagtacaatgt

SEQ ID NO: 4648171 - DNA, 25 bp, Homo sapien
tatgcttacttagctttgcgaaagg

SEQ ID NO: 4648172 - DNA, 25 bp, Homo sapien
attgccattgtaacaactacaatta

SEQ ID NO: 4648173 - DNA, 25 bp, Homo sapien
gtaacaactacaattatgagtaaat

SEQ ID NO: 4648174 - DNA, 25 bp, Homo sapien
cattgtaacaactacaattatgagt

SEQ ID NO: 4648175 - DNA, 25 bp, Homo sapien
tgccattgtaacaactacaattatg

SEQ ID NO: 4648176 - DNA, 25 bp, Homo sapien
ccgctcttagatccttggtgaaaca

SEQ ID NO: 4648177 - DNA, 25 bp, Homo sapien
tctcaggtaagaaaggaggatccat

SEQ ID NO: 4648178 - DNA, 25 bp, Homo sapien
catttgcccgctcttagatccttgg

SEQ ID NO: 4648179 - DNA, 25 bp, Homo sapien
ggaggatccatttgcccgctcttag

SEQ ID NO: 4648180 - DNA, 25 bp, Homo sapien
gctcaaagtcattgttctttcctct

SEQ ID NO: 4648181 - DNA, 25 bp, Homo sapien
aggctcaaagtcattgttctttcct

SEQ ID NO: 4648182 - DNA, 25 bp, Homo sapien
gagatctgagatttaaggctcaaag

SEQ ID NO: 4648183 - DNA, 25 bp, Homo sapien
ctgagatctgagatttaaggctcaa

SEQ ID NO: 4648184 - DNA, 25 bp, Homo sapien
tgcacctgccgagttgccaggcctg

SEQ ID NO: 4648185 - DNA, 25 bp, Homo sapien
gcctggtgtgaagccaagcgctttc

SEQ ID NO: 4648186 - DNA, 25 bp, Homo sapien
ctggtgtgaagccaagcgctttctc

SEQ ID NO: 4648187 - DNA, 25 bp, Homo sapien
caggcctggtgtgaagccaagcgct

SEQ ID NO: 4648188 - DNA, 25 bp, Homo sapien
ctcaacatccagctggctccaggat

SEQ ID NO: 4648189 - DNA, 25 bp, Homo sapien
ccaggatgaatctgccaagactctc

SEQ ID NO: 4648190 - DNA, 25 bp, Homo sapien
ggctccaggatgaatctgccaagac

SEQ ID NO: 4648191 - DNA, 25 bp, Homo sapien
caacatccagctggctccaggatga

SEQ ID NO: 4648192 - DNA, 25 bp, Homo sapien
cttatgaagcaagaggggaccagct

SEQ ID NO: 4648193 - DNA, 25 bp, Homo sapien
ctgggtgtgcgcagaggcccattca

SEQ ID NO: 4648194 - DNA, 25 bp, Homo sapien
catttcaatttccgccagccacttg

SEQ ID NO: 4648195 - DNA, 25 bp, Homo sapien
cacttctgtgggtcccatttcaatt

SEQ ID NO: 4648196 - DNA, 25 bp, Homo sapien
tgaacacaaatgttcccgaggacac

SEQ ID NO: 4648197 - DNA, 25 bp, Homo sapien
cagtgaacacaaatgttcccgagga

SEQ ID NO: 4648198 - DNA, 25 bp, Homo sapien
cttctctatagcaattccagtgaac

SEQ ID NO: 4648199 - DNA, 25 bp, Homo sapien
acaaatgttcccgaggacaccaagg

SEQ ID NO: 4648200 - DNA, 25 bp, Homo sapien
ggcaggccatgaggtttccccattg

SEQ ID NO: 4648201 - DNA, 25 bp, Homo sapien
tgaggtttccccattgtagtggact

SEQ ID NO: 4648202 - DNA, 25 bp, Homo sapien
aatgaagacgagaaccatcctcagc

SEQ ID NO: 4648203 - DNA, 25 bp, Homo sapien
ttatggagtaattagcagtagcctt

SEQ ID NO: 4648204 - DNA, 25 bp, Homo sapien
aatggtttgagcctgtaagttcaga

SEQ ID NO: 4648205 - DNA, 25 bp, Homo sapien
gtaagaggcattctcaatactctgg

SEQ ID NO: 4648206 - DNA, 25 bp, Homo sapien
cagagctgggtaccaggagttttca

SEQ ID NO: 4648207 - DNA, 25 bp, Homo sapien
tattgtttctaaatttccacggctc

SEQ ID NO: 4648208 - DNA, 25 bp, Homo sapien
ctgaaagagggatcaagcaaggccc

SEQ ID NO: 4648209 - DNA, 25 bp, Homo sapien
tgcccagatctggaggtagtaccct

SEQ ID NO: 4648210 - DNA, 25 bp, Homo sapien
cagtattgcattcgccctccagtgg

SEQ ID NO: 4648211 - DNA, 25 bp, Homo sapien
catctggtcgactaactgtgggctc

SEQ ID NO: 4648212 - DNA, 25 bp, Homo sapien
tctgggatcaaaacgctccaggatc

SEQ ID NO: 4648213 - DNA, 25 bp, Homo sapien
tgacttagagtatgcatcaattttt

SEQ ID NO: 4648214 - DNA, 25 bp, Homo sapien
cattctgggatcaaaacgctccagg

SEQ ID NO: 4648215 - DNA, 25 bp, Homo sapien
taaaaacattctgggatcaaaacgc

SEQ ID NO: 4648216 - DNA, 25 bp, Homo sapien
tgaagtcataatccctctttgtccg

SEQ ID NO: 4648217 - DNA, 25 bp, Homo sapien
tgtccgcttttttaccacttgctgt

SEQ ID NO: 4648218 - DNA, 25 bp, Homo sapien
cattgaaataggtagactgggcacg

SEQ ID NO: 4648219 - DNA, 25 bp, Homo sapien
cacatgctgggccacttgggatcat

SEQ ID NO: 4648220 - DNA, 25 bp, Homo sapien
tgaccaagtgtgctttaaaatgccc

SEQ ID NO: 4648221 - DNA, 25 bp, Homo sapien
caaagacgtggccaaatcctcacga

SEQ ID NO: 4648222 - DNA, 25 bp, Homo sapien
tcagcatcaattggaaactcgccag

SEQ ID NO: 4648223 - DNA, 25 bp, Homo sapien
cactgtatcagctgggtaccttaaa

SEQ ID NO: 4648224 - DNA, 25 bp, Homo sapien
taataagtcattcaaattcccacct

SEQ ID NO: 4648225 - DNA, 25 bp, Homo sapien
tttgaactaggagacttaataagtc

SEQ ID NO: 4648226 - DNA, 25 bp, Homo sapien
cggagaatcactaaatcagaaggcc

SEQ ID NO: 4648227 - DNA, 25 bp, Homo sapien
cagaagtcatattaaagcaacggag

SEQ ID NO: 4648228 - DNA, 25 bp, Homo sapien
catccaccactcttcatattggtca

SEQ ID NO: 4648229 - DNA, 25 bp, Homo sapien
atccaccactcttcatattggtcat

SEQ ID NO: 4648230 - DNA, 25 bp, Homo sapien
ccatccaccactcttcatattggtc

SEQ ID NO: 4648231 - DNA, 25 bp, Homo sapien
actggcagggatgtgtattgtcact

SEQ ID NO: 4648232 - DNA, 25 bp, Homo sapien
gcagggatgtgtattgtcactgcag

SEQ ID NO: 4648233 - DNA, 25 bp, Homo sapien
gtcagactggcagggatgtgtattg

SEQ ID NO: 4648234 - DNA, 25 bp, Homo sapien
tcagactggcagggatgtgtattgt

SEQ ID NO: 4648235 - DNA, 25 bp, Homo sapien
aattccgtcatccaggatagtgacc

SEQ ID NO: 4648236 - DNA, 25 bp, Homo sapien
tctggatgggttctctcaattccgt

SEQ ID NO: 4648237 - DNA, 25 bp, Homo sapien
acaatgttctttcccgtgtagcctc

SEQ ID NO: 4648238 - DNA, 25 bp, Homo sapien
gttctttcccgtgtagcctctcttc

SEQ ID NO: 4648239 - DNA, 25 bp, Homo sapien
gcatcataacgaggcattgggtcca

SEQ ID NO: 4648240 - DNA, 25 bp, Homo sapien
ttgcttgcatcataacgaggcattg

SEQ ID NO: 4648241 - DNA, 25 bp, Homo sapien
tcacgtcgcaacttgccagagcatc

SEQ ID NO: 4648242 - DNA, 25 bp, Homo sapien
ttgggtccaagtcattcccattcac

SEQ ID NO: 4648243 - DNA, 25 bp, Homo sapien
tttgaacaggacacagttgaagaaa

SEQ ID NO: 4648244 - DNA, 25 bp, Homo sapien
gagattccttatggaacgcagttcc

SEQ ID NO: 4648245 - DNA, 25 bp, Homo sapien
caattgaataaagtatactcctgtg

SEQ ID NO: 4648246 - DNA, 25 bp, Homo sapien
gaaaacttgcctcaaaccttgccta

SEQ ID NO: 4648247 - DNA, 25 bp, Homo sapien
tagaataccccagatgagcacgact

SEQ ID NO: 4648248 - DNA, 25 bp, Homo sapien
caccctagaataccccagatgagca

SEQ ID NO: 4648249 - DNA, 25 bp, Homo sapien
cagatgagcacgactgtcatgattc

SEQ ID NO: 4648250 - DNA, 25 bp, Homo sapien
ttaggatgggtcaaagcaggacacc

SEQ ID NO: 4648251 - DNA, 25 bp, Homo sapien
tataagcaaggccagcacgtgacat

SEQ ID NO: 4648252 - DNA, 25 bp, Homo sapien
tcctataagcaaggccagcacgtga

SEQ ID NO: 4648253 - DNA, 25 bp, Homo sapien
ctcctataagcaaggccagcacgtg

SEQ ID NO: 4648254 - DNA, 25 bp, Homo sapien
cctataagcaaggccagcacgtgac

SEQ ID NO: 4648255 - DNA, 25 bp, Homo sapien
cagctctcagttggcatggggtagc

SEQ ID NO: 4648256 - DNA, 25 bp, Homo sapien
accaatcaccaactggtgaaaacaa

SEQ ID NO: 4648257 - DNA, 25 bp, Homo sapien
tacagctctcagttggcatggggta

SEQ ID NO: 4648258 - DNA, 25 bp, Homo sapien
atcaccaactggtgaaaacaaggta

SEQ ID NO: 4648259 - DNA, 25 bp, Homo sapien
acacaggggcagtccatggctggaa

SEQ ID NO: 4648260 - DNA, 25 bp, Homo sapien
ctgttttggctaggtgtgatatcac

SEQ ID NO: 4648261 - DNA, 25 bp, Homo sapien
agagacacaggggcagtccatggct

SEQ ID NO: 4648262 - DNA, 25 bp, Homo sapien
tgttttggctaggtgtgatatcaca

SEQ ID NO: 4648263 - DNA, 25 bp, Homo sapien
taagctctcttgcatatgcccacaa

SEQ ID NO: 4648264 - DNA, 25 bp, Homo sapien
cataattgatctacagaccaatgac

SEQ ID NO: 4648265 - DNA, 25 bp, Homo sapien
tgacttaaagatcatgcctgccttg

SEQ ID NO: 4648266 - DNA, 25 bp, Homo sapien
tgtcattactgtcaaagccctagta

SEQ ID NO: 4648267 - DNA, 25 bp, Homo sapien
tccgatcttggcgttgaaagcaatt

SEQ ID NO: 4648268 - DNA, 25 bp, Homo sapien
actgtgcagtgcgaattgtttgcag

SEQ ID NO: 4648269 - DNA, 25 bp, Homo sapien
agcaattccgactgtgcagtgcgaa

SEQ ID NO: 4648270 - DNA, 25 bp, Homo sapien
ttggcgttgaaagcaattccgactg

SEQ ID NO: 4648271 - DNA, 25 bp, Homo sapien
cagccaaagagctaactggcgcatt

SEQ ID NO: 4648272 - DNA, 25 bp, Homo sapien
taactggcgcatttctacatccacg

SEQ ID NO: 4648273 - DNA, 25 bp, Homo sapien
ggcgcatttctacatccacgtgagt

SEQ ID NO: 4648274 - DNA, 25 bp, Homo sapien
catccacgtgagttggtttcccata

SEQ ID NO: 4648275 - DNA, 25 bp, Homo sapien
gattttgcttcaaccatgtccgtga

SEQ ID NO: 4648276 - DNA, 25 bp, Homo sapien
tctaacgccgttttcaaaggcttgc

SEQ ID NO: 4648277 - DNA, 25 bp, Homo sapien
gtgacatctccgtccagcattcgca

SEQ ID NO: 4648278 - DNA, 25 bp, Homo sapien
ggcgctgtaaatgtgcacgtgctgg

SEQ ID NO: 4648279 - DNA, 25 bp, Homo sapien
tcttcatatgagaatcatcacccat

SEQ ID NO: 4648280 - DNA, 25 bp, Homo sapien
gactgcagctggaaacccatagatt

SEQ ID NO: 4648281 - DNA, 25 bp, Homo sapien
catccagttctctagactgcagctg

SEQ ID NO: 4648282 - DNA, 25 bp, Homo sapien
catccacacagtataagcctccatg

SEQ ID NO: 4648283 - DNA, 25 bp, Homo sapien
gaatttaagcactgtaacatacctc

SEQ ID NO: 4648284 - DNA, 25 bp, Homo sapien
agctcttagttcactggcagaacag

SEQ ID NO: 4648285 - DNA, 25 bp, Homo sapien
cgctacctggagagtgttaaatatc

SEQ ID NO: 4648286 - DNA, 25 bp, Homo sapien
tatgcaatgtattcacgctacctgg

SEQ ID NO: 4648287 - DNA, 25 bp, Homo sapien
tggagcacgtctacattataaggag

SEQ ID NO: 4648288 - DNA, 25 bp, Homo sapien
caggttagggccagatcaataatgg

SEQ ID NO: 4648289 - DNA, 25 bp, Homo sapien
aaagacattacttctggtggagctc

SEQ ID NO: 4648290 - DNA, 25 bp, Homo sapien
tacttggttgtagcgatcaggagct

SEQ ID NO: 4648291 - DNA, 25 bp, Homo sapien
gctgctctctaggaactcgcaattt

SEQ ID NO: 4648292 - DNA, 25 bp, Homo sapien
gagctggatatttaacaaccctgtg

SEQ ID NO: 4648293 - DNA, 25 bp, Homo sapien
tgcactgtctaggttttgcaaagcc

SEQ ID NO: 4648294 - DNA, 25 bp, Homo sapien
gacgtgaaccttttttagctggcgc

SEQ ID NO: 4648295 - DNA, 25 bp, Homo sapien
ctgacccactcgacaggagctgcta

SEQ ID NO: 4648296 - DNA, 25 bp, Homo sapien
ctcgacaggagctgctatcgcacag

SEQ ID NO: 4648297 - DNA, 25 bp, Homo sapien
cactcgacaggagctgctatcgcac

SEQ ID NO: 4648298 - DNA, 25 bp, Homo sapien
acccactcgacaggagctgctatcg

SEQ ID NO: 4648299 - DNA, 25 bp, Homo sapien
cccaatctcctcgtcttacattcca

SEQ ID NO: 4648300 - DNA, 25 bp, Homo sapien
tctcctcgtcttacattccagtttc

SEQ ID NO: 4648301 - DNA, 25 bp, Homo sapien
ccagcataccccactggccaaacct

SEQ ID NO: 4648302 - DNA, 25 bp, Homo sapien
agcataccccactggccaaacctca

SEQ ID NO: 4648303 - DNA, 25 bp, Homo sapien
tgggcaaaaagagggctagtggtta

SEQ ID NO: 4648304 - DNA, 25 bp, Homo sapien
cttttgggcaaaaagagggctagtg

SEQ ID NO: 4648305 - DNA, 25 bp, Homo sapien
agagggctagtggttattgtaccct

SEQ ID NO: 4648306 - DNA, 25 bp, Homo sapien
caaaaagagggctagtggttattgt

SEQ ID NO: 4648307 - DNA, 25 bp, Homo sapien
tccccgctgctgtaggttgtggcca

SEQ ID NO: 4648308 - DNA, 25 bp, Homo sapien
gtggccagcgtggatgaacactctt

SEQ ID NO: 4648309 - DNA, 25 bp, Homo sapien
tcacaggagcagtggtctttgctcc

SEQ ID NO: 4648310 - DNA, 25 bp, Homo sapien
ttatcgtaggactccccgctgctgt

SEQ ID NO: 4648311 - DNA, 25 bp, Homo sapien
tgctaaacgggagatcccatacagc

SEQ ID NO: 4648312 - DNA, 25 bp, Homo sapien
ctagagtgcaggatatgttgctaaa

SEQ ID NO: 4648313 - DNA, 25 bp, Homo sapien
gggagatcccatacagcttctgtgc

SEQ ID NO: 4648314 - DNA, 25 bp, Homo sapien
gatatgttgctaaacgggagatccc

SEQ ID NO: 4648315 - DNA, 25 bp, Homo sapien
gaaacagagcagctccctgtcttcc

SEQ ID NO: 4648316 - DNA, 25 bp, Homo sapien
tcttcctgcagctatataaacaact

SEQ ID NO: 4648317 - DNA, 25 bp, Homo sapien
aaacagagcagctccctgtcttcct

SEQ ID NO: 4648318 - DNA, 25 bp, Homo sapien
tgtcttcctgcagctatataaacaa

SEQ ID NO: 4648319 - DNA, 25 bp, Homo sapien
tgttgttgagacggccttgcctgca

SEQ ID NO: 4648320 - DNA, 25 bp, Homo sapien
cagaagtagcttgtttccaggtgtc

SEQ ID NO: 4648321 - DNA, 25 bp, Homo sapien
tgtccagatctgctgttgttgagac

SEQ ID NO: 4648322 - DNA, 25 bp, Homo sapien
gttgttgagacggccttgcctgcat

SEQ ID NO: 4648323 - DNA, 25 bp, Homo sapien
ttgtccgtgcaacgctgcctcagat

SEQ ID NO: 4648324 - DNA, 25 bp, Homo sapien
caacgctgcctcagatctgtagtga

SEQ ID NO: 4648325 - DNA, 25 bp, Homo sapien
aggctgacgtcccagtgtggttgtc

SEQ ID NO: 4648326 - DNA, 25 bp, Homo sapien
cgtcccagtgtggttgtccgtgcaa

SEQ ID NO: 4648327 - DNA, 25 bp, Homo sapien
cgtggaatcggagctgcctagtcat

SEQ ID NO: 4648328 - DNA, 25 bp, Homo sapien
catagaatttgactatactgaacag

SEQ ID NO: 4648329 - DNA, 25 bp, Homo sapien
ggcatattctattctgcagagccag

SEQ ID NO: 4648330 - DNA, 25 bp, Homo sapien
tgatataaatgggttgtcctcgtcc

SEQ ID NO: 4648331 - DNA, 25 bp, Homo sapien
tttgggtctggttacaattatttca

SEQ ID NO: 4648332 - DNA, 25 bp, Homo sapien
tggtaactgctctttgggtctggtt

SEQ ID NO: 4648333 - DNA, 25 bp, Homo sapien
cagaaggcccgtggtaactgctctt

SEQ ID NO: 4648334 - DNA, 25 bp, Homo sapien
gcagaaggcccgtggtaactgctct

SEQ ID NO: 4648335 - DNA, 25 bp, Homo sapien
caggtgtcacagacttattgcgttt

SEQ ID NO: 4648336 - DNA, 25 bp, Homo sapien
tcactgtctgatgtactacagtctt

SEQ ID NO: 4648337 - DNA, 25 bp, Homo sapien
gaatcttttgggtcacagacaggat

SEQ ID NO: 4648338 - DNA, 25 bp, Homo sapien
tagggatgatactaccaggtgtcac

SEQ ID NO: 4648339 - DNA, 25 bp, Homo sapien
gaagctcgctacgacattcttccaa

SEQ ID NO: 4648340 - DNA, 25 bp, Homo sapien
ctctccaggaagctcgctacgacat

SEQ ID NO: 4648341 - DNA, 25 bp, Homo sapien
caagttgttcgcaaaggtttccaat

SEQ ID NO: 4648342 - DNA, 25 bp, Homo sapien
ctcgctacgacattcttccaagttg

SEQ ID NO: 4648343 - DNA, 25 bp, Homo sapien
ccatgttggccgggacgatcgtgat

SEQ ID NO: 4648344 - DNA, 25 bp, Homo sapien
tgttggccgggacgatcgtgatctc

SEQ ID NO: 4648345 - DNA, 25 bp, Homo sapien
tggccgggacgatcgtgatctcctg

SEQ ID NO: 4648346 - DNA, 25 bp, Homo sapien
catgttggccgggacgatcgtgatc

SEQ ID NO: 4648347 - DNA, 25 bp, Homo sapien
ttagcgttcaaatgtcccgcacggg

SEQ ID NO: 4648348 - DNA, 25 bp, Homo sapien
gggaagtcctgacaataacatgctg

SEQ ID NO: 4648349 - DNA, 25 bp, Homo sapien
ttccagtcattagcgttcaaatgtc

SEQ ID NO: 4648350 - DNA, 25 bp, Homo sapien
tgctgtacgtctctccaggtcagaa

SEQ ID NO: 4648351 - DNA, 25 bp, Homo sapien
ggtgcactggccttggaagtcatgc

SEQ ID NO: 4648352 - DNA, 25 bp, Homo sapien
tgccaaaggctagcaagatgtgagc

SEQ ID NO: 4648353 - DNA, 25 bp, Homo sapien
agatggattctgcaaagcaactgcc

SEQ ID NO: 4648354 - DNA, 25 bp, Homo sapien
tggtcacagcaagttagagccctct

SEQ ID NO: 4648355 - DNA, 25 bp, Homo sapien
ccagaactgtccacctaacaaccat

SEQ ID NO: 4648356 - DNA, 25 bp, Homo sapien
ctgtggaaagcgagagactggtcag

SEQ ID NO: 4648357 - DNA, 25 bp, Homo sapien
gtggaaagcgagagactggtcagct

SEQ ID NO: 4648358 - DNA, 25 bp, Homo sapien
tgtggaaagcgagagactggtcagc

SEQ ID NO: 4648359 - DNA, 25 bp, Homo sapien
gaacggtggtccacttctctgcctc

SEQ ID NO: 4648360 - DNA, 25 bp, Homo sapien
gcgtccatcagtccaaatccataaa

SEQ ID NO: 4648361 - DNA, 25 bp, Homo sapien
cacacacgtgctgccggggaacggt

SEQ ID NO: 4648362 - DNA, 25 bp, Homo sapien
ttgatttgtcggtctgtgctctcca

SEQ ID NO: 4648363 - DNA, 25 bp, Homo sapien
ggcattgtcatgctgtttgccggca

SEQ ID NO: 4648364 - DNA, 25 bp, Homo sapien
gggcattgtcatgctgtttgccggc

SEQ ID NO: 4648365 - DNA, 25 bp, Homo sapien
gctgtttgccggcagcaagcattac

SEQ ID NO: 4648366 - DNA, 25 bp, Homo sapien
gaagctttgtagatggagcgcactg

SEQ ID NO: 4648367 - DNA, 25 bp, Homo sapien
cactgcactgttagggcggattgtc

SEQ ID NO: 4648368 - DNA, 25 bp, Homo sapien
tgttggccaaaagctgagacctagt

SEQ ID NO: 4648369 - DNA, 25 bp, Homo sapien
tggtgatgcgcacaacgacgtgctc

SEQ ID NO: 4648370 - DNA, 25 bp, Homo sapien
ctggtgggcagagaccactgctgta

SEQ ID NO: 4648371 - DNA, 25 bp, Homo sapien
tggtgggcagagaccactgctgtac

SEQ ID NO: 4648372 - DNA, 25 bp, Homo sapien
tcccttctacctaaggaatagccga

SEQ ID NO: 4648373 - DNA, 25 bp, Homo sapien
gaatagccgagtgtcgctgtgacta

SEQ ID NO: 4648374 - DNA, 25 bp, Homo sapien
ctgctggttcccaggttaggtgaaa

SEQ ID NO: 4648375 - DNA, 25 bp, Homo sapien
ctggttcccaggttaggtgaaagca

SEQ ID NO: 4648376 - DNA, 25 bp, Homo sapien
actcccagtttttgaatccttccat

SEQ ID NO: 4648377 - DNA, 25 bp, Homo sapien
acttcaaggacccagtcaccagcag

SEQ ID NO: 4648378 - DNA, 25 bp, Homo sapien
aacttcaaggacccagtcaccagca

SEQ ID NO: 4648379 - DNA, 25 bp, Homo sapien
cactttcggaaattcattggttggt

SEQ ID NO: 4648380 - DNA, 25 bp, Homo sapien
gggtcttcaactcggctatagcgga

SEQ ID NO: 4648381 - DNA, 25 bp, Homo sapien
ggtgccgtagaggaccaaagaccat

SEQ ID NO: 4648382 - DNA, 25 bp, Homo sapien
tgcataatcctctgtgccatagtcg

SEQ ID NO: 4648383 - DNA, 25 bp, Homo sapien
tgtaagcgaacaatatgtcccagat

SEQ ID NO: 4648384 - DNA, 25 bp, Homo sapien
tgggatgatgcatgagctgcctctt

SEQ ID NO: 4648385 - DNA, 25 bp, Homo sapien
tggtacaatcgcaatatggactatt

SEQ ID NO: 4648386 - DNA, 25 bp, Homo sapien
atatgagtgcactgatatacacaca

SEQ ID NO: 4648387 - DNA, 25 bp, Homo sapien
gaatacctctgaaatactgtggcca

SEQ ID NO: 4648388 - DNA, 25 bp, Homo sapien
tttaacgcctggaccaaatgacctg

SEQ ID NO: 4648389 - DNA, 25 bp, Homo sapien
tgtaaattctagtcatggcctggtc

SEQ ID NO: 4648390 - DNA, 25 bp, Homo sapien
gcttaaaggattccagacctgggat

SEQ ID NO: 4648391 - DNA, 25 bp, Homo sapien
tggtcctggcccgtcacagccaacc

SEQ ID NO: 4648392 - DNA, 25 bp, Homo sapien
ttttcagcttgtagtagtagtgcaa

SEQ ID NO: 4648393 - DNA, 25 bp, Homo sapien
tagtagtgcaaacagtcattgcagt

SEQ ID NO: 4648394 - DNA, 25 bp, Homo sapien
tcactgcactcagggtcgcagggac

SEQ ID NO: 4648395 - DNA, 25 bp, Homo sapien
ggggatgtgacttggcacctctctt

SEQ ID NO: 4648396 - DNA, 25 bp, Homo sapien
gtggggatgtgacttggcacctctc

SEQ ID NO: 4648397 - DNA, 25 bp, Homo sapien
tggggatgtgacttggcacctctct

SEQ ID NO: 4648398 - DNA, 25 bp, Homo sapien
ctggagtatggaggaaccgtgtggc

SEQ ID NO: 4648399 - DNA, 25 bp, Homo sapien
ggaattcttaacacgtctgggtctg

SEQ ID NO: 4648400 - DNA, 25 bp, Homo sapien
tatgcttagtgagttttcgcctgaa

SEQ ID NO: 4648401 - DNA, 25 bp, Homo sapien
agcaggaattcttaacacgtctggg

SEQ ID NO: 4648402 - DNA, 25 bp, Homo sapien
agcgtcatgagcaaaccagtcccca

SEQ ID NO: 4648403 - DNA, 25 bp, Homo sapien
gcgtcatgagcaaaccagtccccag

SEQ ID NO: 4648404 - DNA, 25 bp, Homo sapien
aacaataagaaagaaggcagcgtca

SEQ ID NO: 4648405 - DNA, 25 bp, Homo sapien
aataagaaagaaggcagcgtcatga

SEQ ID NO: 4648406 - DNA, 25 bp, Homo sapien
ggtatcctgatatgacccatcaggg

SEQ ID NO: 4648407 - DNA, 25 bp, Homo sapien
caggacatgcattggtcaccatggc

SEQ ID NO: 4648408 - DNA, 25 bp, Homo sapien
ggcagtgagtaacacagctgttggt

SEQ ID NO: 4648409 - DNA, 25 bp, Homo sapien
cttcttgtcggcgtggtagtggcca

SEQ ID NO: 4648410 - DNA, 25 bp, Homo sapien
tttcactgcatttccggcaaagatt

SEQ ID NO: 4648411 - DNA, 25 bp, Homo sapien
ctgcatttccggcaaagatttttct

SEQ ID NO: 4648412 - DNA, 25 bp, Homo sapien
ggaattcagtacatgtcttgcagtt

SEQ ID NO: 4648413 - DNA, 25 bp, Homo sapien
ttctgtacagttatggaattcagta

SEQ ID NO: 4648414 - DNA, 25 bp, Homo sapien
gcctccttaatttgttagactgatg

SEQ ID NO: 4648415 - DNA, 25 bp, Homo sapien
gatgaggccaaaacgtaatgactcc

SEQ ID NO: 4648416 - DNA, 25 bp, Homo sapien
tataaagggagcttcaaacagactg

SEQ ID NO: 4648417 - DNA, 25 bp, Homo sapien
tatgtaacagatacagtttccctca

SEQ ID NO: 4648418 - DNA, 25 bp, Homo sapien
gaaataccgtccatcttcacaggag

SEQ ID NO: 4648419 - DNA, 25 bp, Homo sapien
caagtggcgcagaagcggtggcagg

SEQ ID NO: 4648420 - DNA, 25 bp, Homo sapien
ctggcagtcctggccgttgaaatac

SEQ ID NO: 4648421 - DNA, 25 bp, Homo sapien
tcctggccgttgaaataccgtccat

SEQ ID NO: 4648422 - DNA, 25 bp, Homo sapien
tttctcaatgaggataggatgctga

SEQ ID NO: 4648423 - DNA, 25 bp, Homo sapien
tacacacacaattatcaaacgagaa

SEQ ID NO: 4648424 - DNA, 25 bp, Homo sapien
gatgctgatgactgcttgactttca

SEQ ID NO: 4648425 - DNA, 25 bp, Homo sapien
taaaagtatcaagtgggttgcatga

SEQ ID NO: 4648426 - DNA, 25 bp, Homo sapien
tgtgcagttaatgcacccatcagct

SEQ ID NO: 4648427 - DNA, 25 bp, Homo sapien
catgaagtagccctctgtgcagtta

SEQ ID NO: 4648428 - DNA, 25 bp, Homo sapien
tagctgatactacagctctgcacgc

SEQ ID NO: 4648429 - DNA, 25 bp, Homo sapien
aggatttgtatccattctctgaaga

SEQ ID NO: 4648430 - DNA, 25 bp, Homo sapien
gacactgtgattttaaagggtatgg

SEQ ID NO: 4648431 - DNA, 25 bp, Homo sapien
caacaattgctaggttaggtgacac

SEQ ID NO: 4648432 - DNA, 25 bp, Homo sapien
ttttaaagggtatggagcatgtact

SEQ ID NO: 4648433 - DNA, 25 bp, Homo sapien
tctttcctcacaacaattgctaggt

SEQ ID NO: 4648434 - DNA, 25 bp, Homo sapien
gagatacccactagggcagcttgta

SEQ ID NO: 4648435 - DNA, 25 bp, Homo sapien
acagttcttgaatcctgggccattg

SEQ ID NO: 4648436 - DNA, 25 bp, Homo sapien
tgggccattgcacgtcaaacaactg

SEQ ID NO: 4648437 - DNA, 25 bp, Homo sapien
cccatttgacacattcctaagtcta

SEQ ID NO: 4648438 - DNA, 25 bp, Homo sapien
gcctcacaggcttaatgaaagattc

SEQ ID NO: 4648439 - DNA, 25 bp, Homo sapien
gcatggcgctataatgttgcataca

SEQ ID NO: 4648440 - DNA, 25 bp, Homo sapien
gaaaatattacttcctagcctcaca

SEQ ID NO: 4648441 - DNA, 25 bp, Homo sapien
cagtaaaactactttgcatggcgct

SEQ ID NO: 4648442 - DNA, 25 bp, Homo sapien
tgtacacacatggaagaaggttgtg

SEQ ID NO: 4648443 - DNA, 25 bp, Homo sapien
cattcaggagtagtcaacaggagga

SEQ ID NO: 4648444 - DNA, 25 bp, Homo sapien
ggagagacattgcagtccaatggta

SEQ ID NO: 4648445 - DNA, 25 bp, Homo sapien
aaagtgatttcagtcaaccgcattg

SEQ ID NO: 4648446 - DNA, 25 bp, Homo sapien
ccttccgcccaggactcttccgttg

SEQ ID NO: 4648447 - DNA, 25 bp, Homo sapien
gaaccttccgttggcacagattgtt

SEQ ID NO: 4648448 - DNA, 25 bp, Homo sapien
tgttgaagaaccttccgttggcaca

SEQ ID NO: 4648449 - DNA, 25 bp, Homo sapien
ttccgttggcacagattgttctttt

SEQ ID NO: 4648450 - DNA, 25 bp, Homo sapien
gaataatctataagtctacaggaac

SEQ ID NO: 4648451 - DNA, 25 bp, Homo sapien
taatctataagtctacaggaacaaa

SEQ ID NO: 4648452 - DNA, 25 bp, Homo sapien
atggaataatctataagtctacagg

SEQ ID NO: 4648453 - DNA, 25 bp, Homo sapien
tggaataatctataagtctacagga

SEQ ID NO: 4648454 - DNA, 25 bp, Homo sapien
taggatgttcctaatgccctcaggt

SEQ ID NO: 4648455 - DNA, 25 bp, Homo sapien
cactgtgaaataccatggcaaacga

SEQ ID NO: 4648456 - DNA, 25 bp, Homo sapien
cccaatggtggactcaagcatgcaa

SEQ ID NO: 4648457 - DNA, 25 bp, Homo sapien
tatgctctcgcgatgttttggaaag

SEQ ID NO: 4648458 - DNA, 25 bp, Homo sapien
cccatttggcgaactgcgtgtaaaa

SEQ ID NO: 4648459 - DNA, 25 bp, Homo sapien
acagagcaatcccatttggcgaact

SEQ ID NO: 4648460 - DNA, 25 bp, Homo sapien
gcgaactgcgtgtaaaataacccaa

SEQ ID NO: 4648461 - DNA, 25 bp, Homo sapien
ccaatttgactatacagagcaatcc

SEQ ID NO: 4648462 - DNA, 25 bp, Homo sapien
catctcagcattcagtggaccagca

SEQ ID NO: 4648463 - DNA, 25 bp, Homo sapien
gaactaaaagggtacaatcatgcca

SEQ ID NO: 4648464 - DNA, 25 bp, Homo sapien
gacctcttgggaacttttgactcca

SEQ ID NO: 4648465 - DNA, 25 bp, Homo sapien
gcaccattgaaaaaagttgcccggc

SEQ ID NO: 4648466 - DNA, 25 bp, Homo sapien
cgtgcacctgcatggtcagtgggaa

SEQ ID NO: 4648467 - DNA, 25 bp, Homo sapien
taaaccagtatttccgcgacgtgca

SEQ ID NO: 4648468 - DNA, 25 bp, Homo sapien
gaaatggaatgcacgctggtagacc

SEQ ID NO: 4648469 - DNA, 25 bp, Homo sapien
tgtaaaactgtatgctgtacccagg

SEQ ID NO: 4648470 - DNA, 25 bp, Homo sapien
taacagcttttacactgcctacctc

SEQ ID NO: 4648471 - DNA, 25 bp, Homo sapien
ttctagacatccagccaatgccgac

SEQ ID NO: 4648472 - DNA, 25 bp, Homo sapien
tcagcaaattgaacaaagccacctt

SEQ ID NO: 4648473 - DNA, 25 bp, Homo sapien
ccgactttacgcaagatgtcagcaa

SEQ ID NO: 4648474 - DNA, 25 bp, Homo sapien
cattggtaatgttcttcccgctctc

SEQ ID NO: 4648475 - DNA, 25 bp, Homo sapien
taactggagcaagttcattggtaat

SEQ ID NO: 4648476 - DNA, 25 bp, Homo sapien
gcaccttgtatgcagcaagttcact

SEQ ID NO: 4648477 - DNA, 25 bp, Homo sapien
cagcaagttcactggtaactggagc

SEQ ID NO: 4648478 - DNA, 25 bp, Homo sapien
gagatcagcagtgtgacaagcctct

SEQ ID NO: 4648479 - DNA, 25 bp, Homo sapien
cttattcagcggaaaataatgaatc

SEQ ID NO: 4648480 - DNA, 25 bp, Homo sapien
aaatgaagggtagcttattcagcgg

SEQ ID NO: 4648481 - DNA, 25 bp, Homo sapien
aatgaatctggtagaagagatcagc

SEQ ID NO: 4648482 - DNA, 25 bp, Homo sapien
tgtaagtcccttggaggtagagaac

SEQ ID NO: 4648483 - DNA, 25 bp, Homo sapien
caggtcacattctggtccgctgaaa

SEQ ID NO: 4648484 - DNA, 25 bp, Homo sapien
tattgctcaataactgaatctggac

SEQ ID NO: 4648485 - DNA, 25 bp, Homo sapien
cgctgaaacgtagtgaggctgcata

SEQ ID NO: 4648486 - DNA, 25 bp, Homo sapien
tgggaacagcataggcgggtcttca

SEQ ID NO: 4648487 - DNA, 25 bp, Homo sapien
gagggccctctatggtctgcgaatg

SEQ ID NO: 4648488 - DNA, 25 bp, Homo sapien
ccagctctggatcatcgtgttttac

SEQ ID NO: 4648489 - DNA, 25 bp, Homo sapien
tatggtctgcgaatgtctcgccacc

SEQ ID NO: 4648490 - DNA, 25 bp, Homo sapien
actgaagaaaccagattccaaggac

SEQ ID NO: 4648491 - DNA, 25 bp, Homo sapien
gaactgaagaaaccagattccaagg

SEQ ID NO: 4648492 - DNA, 25 bp, Homo sapien
cttcattgcacaatgaagctgaatg

SEQ ID NO: 4648493 - DNA, 25 bp, Homo sapien
aactgaagaaaccagattccaagga

SEQ ID NO: 4648494 - DNA, 25 bp, Homo sapien
ttggcacatgaggcctcacaggtct

SEQ ID NO: 4648495 - DNA, 25 bp, Homo sapien
acttggcacatgaggcctcacaggt

SEQ ID NO: 4648496 - DNA, 25 bp, Homo sapien
cttggcacatgaggcctcacaggtc

SEQ ID NO: 4648497 - DNA, 25 bp, Homo sapien
tggcacatgaggcctcacaggtctg

SEQ ID NO: 4648498 - DNA, 25 bp, Homo sapien
cttgtcatggggcaggtagtgcagt

SEQ ID NO: 4648499 - DNA, 25 bp, Homo sapien
tgtcatggggcaggtagtgcagtct

SEQ ID NO: 4648500 - DNA, 25 bp, Homo sapien
ttgtcatggggcaggtagtgcagtc

SEQ ID NO: 4648501 - DNA, 25 bp, Homo sapien
aatatctgtggagtgggaaagagtt

SEQ ID NO: 4648502 - DNA, 25 bp, Homo sapien
tcacaccaccgggagatcctgagaa

SEQ ID NO: 4648503 - DNA, 25 bp, Homo sapien
gctgtgcccagaccaaggagaatat

SEQ ID NO: 4648504 - DNA, 25 bp, Homo sapien
ggtgctgctaagatggtgagcacct

SEQ ID NO: 4648505 - DNA, 25 bp, Homo sapien
gctcccgtgggcataatgctgccat

SEQ ID NO: 4648506 - DNA, 25 bp, Homo sapien
atcaattgtgaggttcactgagcac

SEQ ID NO: 4648507 - DNA, 25 bp, Homo sapien
tgagcacatagcatacgcaagctcc

SEQ ID NO: 4648508 - DNA, 25 bp, Homo sapien
atccaggcctgggacatctgagtgg

SEQ ID NO: 4648509 - DNA, 25 bp, Homo sapien
ccatgaggggcagttcgaaacacag

SEQ ID NO: 4648510 - DNA, 25 bp, Homo sapien
ccacaggaggtgcagtgggtagggc

SEQ ID NO: 4648511 - DNA, 25 bp, Homo sapien
tgctccacaggaggtgcagtgggta

SEQ ID NO: 4648512 - DNA, 25 bp, Homo sapien
gggcagttcgaaacacagcggccat

SEQ ID NO: 4648513 - DNA, 25 bp, Homo sapien
gcaccgagtctacacccgaataagg

SEQ ID NO: 4648514 - DNA, 25 bp, Homo sapien
tcttttccagggcaccgagtctaca

SEQ ID NO: 4648515 - DNA, 25 bp, Homo sapien
tcatgcttctacgtccttctctctc

SEQ ID NO: 4648516 - DNA, 25 bp, Homo sapien
cacccgaataaggtgaacaagcttt

SEQ ID NO: 4648517 - DNA, 25 bp, Homo sapien
tgcttctctgatctgggataggatt

SEQ ID NO: 4648518 - DNA, 25 bp, Homo sapien
taggatttctaccatgcatttggtc

SEQ ID NO: 4648519 - DNA, 25 bp, Homo sapien
tgtaacatatgaggacaaacctcct

SEQ ID NO: 4648520 - DNA, 25 bp, Homo sapien
taattccttgaacatgagtatcatg

SEQ ID NO: 4648521 - DNA, 25 bp, Homo sapien
gagaaagtggaccagcatgatgata

SEQ ID NO: 4648522 - DNA, 25 bp, Homo sapien
aggtgagaaagtggaccagcatgat

SEQ ID NO: 4648523 - DNA, 25 bp, Homo sapien
agtggaccagcatgatgatattgga

SEQ ID NO: 4648524 - DNA, 25 bp, Homo sapien
gaaagtggaccagcatgatgatatt

SEQ ID NO: 4648525 - DNA, 25 bp, Homo sapien
tgttcccctcagtggcatagtggcc

SEQ ID NO: 4648526 - DNA, 25 bp, Homo sapien
gacatgcacgctgtggcaaagctca

SEQ ID NO: 4648527 - DNA, 25 bp, Homo sapien
tacaggaagtgctctcggccatagt

SEQ ID NO: 4648528 - DNA, 25 bp, Homo sapien
gaagtagcccttcatgcatcttgtg

SEQ ID NO: 4648529 - DNA, 25 bp, Homo sapien
cttcttcacaagggacacattcttc

SEQ ID NO: 4648530 - DNA, 25 bp, Homo sapien
tcatagtctgggtcttggacttcac

SEQ ID NO: 4648531 - DNA, 25 bp, Homo sapien
ccttcttcacaagggacacattctt

SEQ ID NO: 4648532 - DNA, 25 bp, Homo sapien
ttcttcacaagggacacattcttca

SEQ ID NO: 4648533 - DNA, 25 bp, Homo sapien
tgaagaaagcctacttaagacgttg

SEQ ID NO: 4648534 - DNA, 25 bp, Homo sapien
ttgtattgaagaaagcctacttaag

SEQ ID NO: 4648535 - DNA, 25 bp, Homo sapien
aagcctacttaagacgttgatggtg

SEQ ID NO: 4648536 - DNA, 25 bp, Homo sapien
tcactgaggctgacagcaatgacaa

SEQ ID NO: 4648537 - DNA, 25 bp, Homo sapien
ggagaatgaggccaatgcgaacacc

SEQ ID NO: 4648538 - DNA, 25 bp, Homo sapien
tggtctcatctttagctgggtcagc

SEQ ID NO: 4648539 - DNA, 25 bp, Homo sapien
ggtcagtgtctgctgtggagtccat

SEQ ID NO: 4648540 - DNA, 25 bp, Homo sapien
tgcgaacacctagtgaccatggttt

SEQ ID NO: 4648541 - DNA, 25 bp, Homo sapien
tttcccacagagcacgaaggtcctt

SEQ ID NO: 4648542 - DNA, 25 bp, Homo sapien
gcacgaaggtcctttgtagaggtaa

SEQ ID NO: 4648543 - DNA, 25 bp, Homo sapien
cagagcacgaaggtcctttgtagag

SEQ ID NO: 4648544 - DNA, 25 bp, Homo sapien
ccacagagcacgaaggtcctttgta

SEQ ID NO: 4648545 - DNA, 25 bp, Homo sapien
tatgtgtgtagggagagccttcaaa

SEQ ID NO: 4648546 - DNA, 25 bp, Homo sapien
tacaatacttagctcagagtcaggg

SEQ ID NO: 4648547 - DNA, 25 bp, Homo sapien
ccccttgagggaactgtagaatgag

SEQ ID NO: 4648548 - DNA, 25 bp, Homo sapien
tagagagagctgaatctacagagat

SEQ ID NO: 4648549 - DNA, 25 bp, Homo sapien
taccccatagcgcaagatgtacatg

SEQ ID NO: 4648550 - DNA, 25 bp, Homo sapien
taataccccatagcgcaagatgtac

SEQ ID NO: 4648551 - DNA, 25 bp, Homo sapien
ctgtaataccccatagcgcaagatg

SEQ ID NO: 4648552 - DNA, 25 bp, Homo sapien
accccatagcgcaagatgtacatgt

SEQ ID NO: 4648553 - DNA, 25 bp, Homo sapien
agccttcgctctggttaaggacgca

SEQ ID NO: 4648554 - DNA, 25 bp, Homo sapien
gtatattattaaggtctgcccaaga

SEQ ID NO: 4648555 - DNA, 25 bp, Homo sapien
catgcagacgtttgcaaacagctta

SEQ ID NO: 4648556 - DNA, 25 bp, Homo sapien
taaggacgcagtatccatgcagacg

SEQ ID NO: 4648557 - DNA, 25 bp, Homo sapien
ggtgggtcgccttctcttgtcacca

SEQ ID NO: 4648558 - DNA, 25 bp, Homo sapien
ggacaggtgggtcgccttctcttgt

SEQ ID NO: 4648559 - DNA, 25 bp, Homo sapien
ttttggacaggtgggtcgccttctc

SEQ ID NO: 4648560 - DNA, 25 bp, Homo sapien
caggtgggtcgccttctcttgtcac

SEQ ID NO: 4648561 - DNA, 25 bp, Homo sapien
ggtcttctcaggacaggttttataa

SEQ ID NO: 4648562 - DNA, 25 bp, Homo sapien
ggttttataacaatggtgatcaaac

SEQ ID NO: 4648563 - DNA, 25 bp, Homo sapien
ttcacaccagtaacacccattctgg

SEQ ID NO: 4648564 - DNA, 25 bp, Homo sapien
cagttactatcacacgccttgcatt

SEQ ID NO: 4648565 - DNA, 25 bp, Homo sapien
tagagggttaagagcatcgaataca

SEQ ID NO: 4648566 - DNA, 25 bp, Homo sapien
aagagcatcgaatacagaatccttg

SEQ ID NO: 4648567 - DNA, 25 bp, Homo sapien
gccattagagggttaagagcatcga

SEQ ID NO: 4648568 - DNA, 25 bp, Homo sapien
cattggccattagagggttaagagc

SEQ ID NO: 4648569 - DNA, 25 bp, Homo sapien
ttcgcatgctcggtggcaggactca

SEQ ID NO: 4648570 - DNA, 25 bp, Homo sapien
cagggcctgtgcaggtttcgcatgc

SEQ ID NO: 4648571 - DNA, 25 bp, Homo sapien
tgcactcgtcatgaccagggcctgt

SEQ ID NO: 4648572 - DNA, 25 bp, Homo sapien
ccatagaatccaggaccacatttcc

SEQ ID NO: 4648573 - DNA, 25 bp, Homo sapien
ctgggtcttggtggcatgcacgcac

SEQ ID NO: 4648574 - DNA, 25 bp, Homo sapien
tcctgggtcttggtggcatgcacgc

SEQ ID NO: 4648575 - DNA, 25 bp, Homo sapien
ccagaatttgccctcctcctgggtc

SEQ ID NO: 4648576 - DNA, 25 bp, Homo sapien
cctcctgggtcttggtggcatgcac

SEQ ID NO: 4648577 - DNA, 25 bp, Homo sapien
gcctcgaaatcaaatgaagagcagc

SEQ ID NO: 4648578 - DNA, 25 bp, Homo sapien
tgcctcgaaatcaaatgaagagcag

SEQ ID NO: 4648579 - DNA, 25 bp, Homo sapien
cttgcctcgaaatcaaatgaagagc

SEQ ID NO: 4648580 - DNA, 25 bp, Homo sapien
ttgcctcgaaatcaaatgaagagca

SEQ ID NO: 4648581 - DNA, 25 bp, Homo sapien
tctcggctctgtctctgaaataggg

SEQ ID NO: 4648582 - DNA, 25 bp, Homo sapien
tgtaaaactgccgtagtagacagca

SEQ ID NO: 4648583 - DNA, 25 bp, Homo sapien
cgtgttctccgtggcctttggctgc

SEQ ID NO: 4648584 - DNA, 25 bp, Homo sapien
gttgcctttgcaccgaagtgaccct

SEQ ID NO: 4648585 - DNA, 25 bp, Homo sapien
ctagaaacacagcaccagaccattt

SEQ ID NO: 4648586 - DNA, 25 bp, Homo sapien
tcatctggacgccagataaaataca

SEQ ID NO: 4648587 - DNA, 25 bp, Homo sapien
ttggctccctggaccgtgtcatcat

SEQ ID NO: 4648588 - DNA, 25 bp, Homo sapien
ttcagctagaaacacagcaccagac

SEQ ID NO: 4648589 - DNA, 25 bp, Homo sapien
gaggcagtttcatgttttcacttta

SEQ ID NO: 4648590 - DNA, 25 bp, Homo sapien
ttaaaatgactttgtgtgaggcagt

SEQ ID NO: 4648591 - DNA, 25 bp, Homo sapien
gtttcatgttttcactttacagaga

SEQ ID NO: 4648592 - DNA, 25 bp, Homo sapien
aatgactttgtgtgaggcagtttca

SEQ ID NO: 4648593 - DNA, 25 bp, Homo sapien
cattatctggtgcctttttttccag

SEQ ID NO: 4648594 - DNA, 25 bp, Homo sapien
ggctcttcaccacagataggtttgc

SEQ ID NO: 4648595 - DNA, 25 bp, Homo sapien
gcaggctcttcaccacagataggtt

SEQ ID NO: 4648596 - DNA, 25 bp, Homo sapien
tttgaactttccaccttcgtcgctc

SEQ ID NO: 4648597 - DNA, 25 bp, Homo sapien
gatttgaactttccaccttcgtcgc

SEQ ID NO: 4648598 - DNA, 25 bp, Homo sapien
ctttgggacatgaagtgcacagagt

SEQ ID NO: 4648599 - DNA, 25 bp, Homo sapien
gaagtgcacagagttgcagatccat

SEQ ID NO: 4648600 - DNA, 25 bp, Homo sapien
tgggacatgaagtgcacagagttgc

SEQ ID NO: 4648601 - DNA, 25 bp, Homo sapien
catgaagtgcacagagttgcagatc

SEQ ID NO: 4648602 - DNA, 25 bp, Homo sapien
cttacggaaggccatgtgccttggg

SEQ ID NO: 4648603 - DNA, 25 bp, Homo sapien
tcccactccttacggaaggccatgt

SEQ ID NO: 4648604 - DNA, 25 bp, Homo sapien
atggcacaggcctccgtacagttct

SEQ ID NO: 4648605 - DNA, 25 bp, Homo sapien
ttttttgcaaagatcggctccagag

SEQ ID NO: 4648606 - DNA, 25 bp, Homo sapien
cttctaatcgaatgaaaatttgatg

SEQ ID NO: 4648607 - DNA, 25 bp, Homo sapien
tcgaatgaaaatttgatggattcat

SEQ ID NO: 4648608 - DNA, 25 bp, Homo sapien
tctaatcgaatgaaaatttgatgga

SEQ ID NO: 4648609 - DNA, 25 bp, Homo sapien
aatcgaatgaaaatttgatggattc

SEQ ID NO: 4648610 - DNA, 25 bp, Homo sapien
tctcatggatgcagtcctgacacat

SEQ ID NO: 4648611 - DNA, 25 bp, Homo sapien
tatgccgtcttctgcataagagccc

SEQ ID NO: 4648612 - DNA, 25 bp, Homo sapien
tggcctccttcacaagaatggcagt

SEQ ID NO: 4648613 - DNA, 25 bp, Homo sapien
tggcacactccgtggtgcaggacgt

SEQ ID NO: 4648614 - DNA, 25 bp, Homo sapien
acatatcatcgtgcaggaagaactc

SEQ ID NO: 4648615 - DNA, 25 bp, Homo sapien
ggtggcacatatcatcgtgcaggaa

SEQ ID NO: 4648616 - DNA, 25 bp, Homo sapien
ggcacatatcatcgtgcaggaagaa

SEQ ID NO: 4648617 - DNA, 25 bp, Homo sapien
cacatatcatcgtgcaggaagaact

SEQ ID NO: 4648618 - DNA, 25 bp, Homo sapien
gcactccagacagtctttatggcag

SEQ ID NO: 4648619 - DNA, 25 bp, Homo sapien
aggacccaggaactctcaagacaga

SEQ ID NO: 4648620 - DNA, 25 bp, Homo sapien
tcaagacagagctcgcagtcgtcgg

SEQ ID NO: 4648621 - DNA, 25 bp, Homo sapien
gcacagtccatcatagaggacccag

SEQ ID NO: 4648622 - DNA, 25 bp, Homo sapien
gagggtgagcacttctcgttggcca

SEQ ID NO: 4648623 - DNA, 25 bp, Homo sapien
tcatcccagtactcggagggtgagc

SEQ ID NO: 4648624 - DNA, 25 bp, Homo sapien
tgatcaggcctttctgacaggtggt

SEQ ID NO: 4648625 - DNA, 25 bp, Homo sapien
tcccacgagggttcatgatcaggcc

SEQ ID NO: 4648626 - DNA, 25 bp, Homo sapien
catggggcatgtttgacactggtcc

SEQ ID NO: 4648627 - DNA, 25 bp, Homo sapien
gcacttaacatggcagggcttgcac

SEQ ID NO: 4648628 - DNA, 25 bp, Homo sapien
atgtttgacactggtcctccgccgg

SEQ ID NO: 4648629 - DNA, 25 bp, Homo sapien
cgccggccccatgcagtggaagcac

SEQ ID NO: 4648630 - DNA, 25 bp, Homo sapien
gaaacacaaagctgtcctcggagaa

SEQ ID NO: 4648631 - DNA, 25 bp, Homo sapien
aaacacaaagctgtcctcggagaag

SEQ ID NO: 4648632 - DNA, 25 bp, Homo sapien
ggaaacacaaagctgtcctcggaga

SEQ ID NO: 4648633 - DNA, 25 bp, Homo sapien
ggacatcgagcatgacacatgtctc

SEQ ID NO: 4648634 - DNA, 25 bp, Homo sapien
atcgagcatgacacatgtctcccct

SEQ ID NO: 4648635 - DNA, 25 bp, Homo sapien
aatgtctatttggacatcgagcatg

SEQ ID NO: 4648636 - DNA, 25 bp, Homo sapien
gaaaaaatgtctatttggacatcga

SEQ ID NO: 4648637 - DNA, 25 bp, Homo sapien
cggttgctgtcctcatcggcataat

SEQ ID NO: 4648638 - DNA, 25 bp, Homo sapien
gcccggtcggcaggagtggcactgc

SEQ ID NO: 4648639 - DNA, 25 bp, Homo sapien
gcaggcactcttttcctagctggaa

SEQ ID NO: 4648640 - DNA, 25 bp, Homo sapien
ttcctagctggaaccagcccggtcg

SEQ ID NO: 4648641 - DNA, 25 bp, Homo sapien
tagctggaaccagcccggtcggcag

SEQ ID NO: 4648642 - DNA, 25 bp, Homo sapien
aaaatctatcgcaagacaggcagtc

SEQ ID NO: 4648643 - DNA, 25 bp, Homo sapien
tctacatagtaatggtctgggcagg

SEQ ID NO: 4648644 - DNA, 25 bp, Homo sapien
ggatggcatctctcacaggtctgtg

SEQ ID NO: 4648645 - DNA, 25 bp, Homo sapien
tgcattgatcacaagtcggatggca

SEQ ID NO: 4648646 - DNA, 25 bp, Homo sapien
tgtgggggcaagattgagagttggg

SEQ ID NO: 4648647 - DNA, 25 bp, Homo sapien
agattgagagttggggtgacctgct

SEQ ID NO: 4648648 - DNA, 25 bp, Homo sapien
ctggtgtgggggcaagattgagagt

SEQ ID NO: 4648649 - DNA, 25 bp, Homo sapien
ggcaagattgagagttggggtgacc

SEQ ID NO: 4648650 - DNA, 25 bp, Homo sapien
cactctggcattagtataccagatg

SEQ ID NO: 4648651 - DNA, 25 bp, Homo sapien
atcactctggcattagtataccaga

SEQ ID NO: 4648652 - DNA, 25 bp, Homo sapien
ttatggcaagatgtagagaaaaatg

SEQ ID NO: 4648653 - DNA, 25 bp, Homo sapien
ctctggcattagtataccagatgac

SEQ ID NO: 4648654 - DNA, 25 bp, Homo sapien
aagacagtccgaggtgcagatccct

SEQ ID NO: 4648655 - DNA, 25 bp, Homo sapien
agatccctcccatgaggtggtaact

SEQ ID NO: 4648656 - DNA, 25 bp, Homo sapien
ccacacacaggataaacaattcaac

SEQ ID NO: 4648657 - DNA, 25 bp, Homo sapien
gataaacaattcaacgctccttttc

SEQ ID NO: 4648658 - DNA, 25 bp, Homo sapien
cccgcagaataatataggttgtggc

SEQ ID NO: 4648659 - DNA, 25 bp, Homo sapien
gctgtgtagctcaagtagttaaatc

SEQ ID NO: 4648660 - DNA, 25 bp, Homo sapien
ggattattgtggtctgcccgcagaa

SEQ ID NO: 4648661 - DNA, 25 bp, Homo sapien
ttactggattattgtggtctgcccg

SEQ ID NO: 4648662 - DNA, 25 bp, Homo sapien
ggtcccttgcattccatgcagctct

SEQ ID NO: 4648663 - DNA, 25 bp, Homo sapien
tggtgtcctggcagtcacagcactc

SEQ ID NO: 4648664 - DNA, 25 bp, Homo sapien
ccatgcagctctcgtggcatttttc

SEQ ID NO: 4648665 - DNA, 25 bp, Homo sapien
gtcctggcagtcacagcactcctgg

SEQ ID NO: 4648666 - DNA, 25 bp, Homo sapien
ctcgtaggtcagtcaccaggtgtcc

SEQ ID NO: 4648667 - DNA, 25 bp, Homo sapien
cctagcctatgtctgatgaagccaa

SEQ ID NO: 4648668 - DNA, 25 bp, Homo sapien
cccgtgagaatcctagcctatgtct

SEQ ID NO: 4648669 - DNA, 25 bp, Homo sapien
gcctatgtctgatgaagccaataaa

SEQ ID NO: 4648670 - DNA, 25 bp, Homo sapien
gatgaagccaataaatccttctaga

SEQ ID NO: 4648671 - DNA, 25 bp, Homo sapien
tgctcagttgcaggcctaaccttgc

SEQ ID NO: 4648672 - DNA, 25 bp, Homo sapien
ccttgcttgttcgaaggatgcattc

SEQ ID NO: 4648673 - DNA, 25 bp, Homo sapien
gaggaggtgatgaacagagctgtct

SEQ ID NO: 4648674 - DNA, 25 bp, Homo sapien
agctgtcttgaaatgctcagttgca

SEQ ID NO: 4648675 - DNA, 25 bp, Homo sapien
gctggctggactcggccacgagatt

SEQ ID NO: 4648676 - DNA, 25 bp, Homo sapien
ttcatagccggcctttgctgctggc

SEQ ID NO: 4648677 - DNA, 25 bp, Homo sapien
taaatttccggtagactgtgccatc

SEQ ID NO: 4648678 - DNA, 25 bp, Homo sapien
gagatttcttccacactaccacagc

SEQ ID NO: 4648679 - DNA, 25 bp, Homo sapien
aaatcatgagagtgcagttcctgga

SEQ ID NO: 4648680 - DNA, 25 bp, Homo sapien
cctggagtcaattgataagagccct

SEQ ID NO: 4648681 - DNA, 25 bp, Homo sapien
tgatgtctcccaggcgaaaagtacc

SEQ ID NO: 4648682 - DNA, 25 bp, Homo sapien
gaaaaactcacacatcagcctggtg

SEQ ID NO: 4648683 - DNA, 25 bp, Homo sapien
cttttcattgcaggccacacagagg

SEQ ID NO: 4648684 - DNA, 25 bp, Homo sapien
aaagccatctaagaatgacgttgca

SEQ ID NO: 4648685 - DNA, 25 bp, Homo sapien
tctattaactggaacctcccatgct

SEQ ID NO: 4648686 - DNA, 25 bp, Homo sapien
tgtcaaacctcaatacacaagcatg

SEQ ID NO: 4648687 - DNA, 25 bp, Homo sapien
tcttagggtcattggttcctcggaa

SEQ ID NO: 4648688 - DNA, 25 bp, Homo sapien
tgtttagctggcactgagccaatgt

SEQ ID NO: 4648689 - DNA, 25 bp, Homo sapien
gagccaatgtctttggatgctggtg

SEQ ID NO: 4648690 - DNA, 25 bp, Homo sapien
tattgaaatcgaagtgtgggtatag

SEQ ID NO: 4648691 - DNA, 25 bp, Homo sapien
caatcaacaacacagggcctcatgc

SEQ ID NO: 4648692 - DNA, 25 bp, Homo sapien
gcagtagctgatgcattttgcaagc

SEQ ID NO: 4648693 - DNA, 25 bp, Homo sapien
tctaaattctttgatccacttgtgg

SEQ ID NO: 4648694 - DNA, 25 bp, Homo sapien
gtgccctgtggccaatcaacaacac

SEQ ID NO: 4648695 - DNA, 25 bp, Homo sapien
ttgtgtgtcctcctgaatcattcat

SEQ ID NO: 4648696 - DNA, 25 bp, Homo sapien
tgttgtgtgtcctcctgaatcattc

SEQ ID NO: 4648697 - DNA, 25 bp, Homo sapien
gttgtgtgtcctcctgaatcattca

SEQ ID NO: 4648698 - DNA, 25 bp, Homo sapien
gaatttgctcttgtagacatcctct

SEQ ID NO: 4648699 - DNA, 25 bp, Homo sapien
gaggaaagaacagcagcatcggaga

SEQ ID NO: 4648700 - DNA, 25 bp, Homo sapien
gcagcatcggagactttttctgtaa

SEQ ID NO: 4648701 - DNA, 25 bp, Homo sapien
ctagtacatttgagatgtggaggaa

SEQ ID NO: 4648702 - DNA, 25 bp, Homo sapien
caatcacagggcatcactactaaag

SEQ ID NO: 4648703 - DNA, 25 bp, Homo sapien
tagttctacaacaaagggccttgcc

SEQ ID NO: 4648704 - DNA, 25 bp, Homo sapien
tatagataggtctgggttcccttgc

SEQ ID NO: 4648705 - DNA, 25 bp, Homo sapien
ggatcccctgtgttttatgcctgca

SEQ ID NO: 4648706 - DNA, 25 bp, Homo sapien
taatggtaaatattcttgttcttca

SEQ ID NO: 4648707 - DNA, 25 bp, Homo sapien
ttaatggtaaatattcttgttcttc

SEQ ID NO: 4648708 - DNA, 25 bp, Homo sapien
aatggtaaatattcttgttcttcaa

SEQ ID NO: 4648709 - DNA, 25 bp, Homo sapien
tgcagtcacatcattgtaccacctt

SEQ ID NO: 4648710 - DNA, 25 bp, Homo sapien
tggacttcccctgcctatctgtttg

SEQ ID NO: 4648711 - DNA, 25 bp, Homo sapien
tgtatagagctgcttcaattctgag

SEQ ID NO: 4648712 - DNA, 25 bp, Homo sapien
tgatagtttatcataaacctgcggg

SEQ ID NO: 4648713 - DNA, 25 bp, Homo sapien
ttcggccgcggctccaagcagctgg

SEQ ID NO: 4648714 - DNA, 25 bp, Homo sapien
gaggcacctgccttacttctgccgg

SEQ ID NO: 4648715 - DNA, 25 bp, Homo sapien
ttccccgagcggactgcattatgag

SEQ ID NO: 4648716 - DNA, 25 bp, Homo sapien
ggtatttgttgggtcggcggcgtca

SEQ ID NO: 4648717 - DNA, 25 bp, Homo sapien
agccgagcgggctcgaggcgttcgg

SEQ ID NO: 4648718 - DNA, 25 bp, Homo sapien
gaagccgagcgggctcgaggcgttc

SEQ ID NO: 4648719 - DNA, 25 bp, Homo sapien
aagccgagcgggctcgaggcgttcg

SEQ ID NO: 4648720 - DNA, 25 bp, Homo sapien
ggaagccgagcgggctcgaggcgtt

SEQ ID NO: 4648721 - DNA, 25 bp, Homo sapien
atatattaataactccagaacgtgg

SEQ ID NO: 4648722 - DNA, 25 bp, Homo sapien
agagctacttccctaggagcgtgcg

SEQ ID NO: 4648723 - DNA, 25 bp, Homo sapien
cttcgagacgttaagaggatgcacc

SEQ ID NO: 4648724 - DNA, 25 bp, Homo sapien
tgcgtatttacagttccgagggtac

SEQ ID NO: 4648725 - DNA, 25 bp, Homo sapien
tagaaagagactacacggtctgcac

SEQ ID NO: 4648726 - DNA, 25 bp, Homo sapien
ctactgggaatacaggcgtgagcca

SEQ ID NO: 4648727 - DNA, 25 bp, Homo sapien
tcccgcgtcggcctctcaaactact

SEQ ID NO: 4648728 - DNA, 25 bp, Homo sapien
tcctcccgcgtcggcctctcaaact

SEQ ID NO: 4648729 - DNA, 25 bp, Homo sapien
ctcccgcgtcggcctctcaaactac

SEQ ID NO: 4648730 - DNA, 25 bp, Homo sapien
tccgtatagataagtaactgaccat

SEQ ID NO: 4648731 - DNA, 25 bp, Homo sapien
gaatgcagcactcttattaaggacg

SEQ ID NO: 4648732 - DNA, 25 bp, Homo sapien
gagagaatcctgtacacaccttgct

SEQ ID NO: 4648733 - DNA, 25 bp, Homo sapien
gagagacatcctccctatattagaa

SEQ ID NO: 4648734 - DNA, 25 bp, Homo sapien
ccagaacaacgccgtatgggcccct

SEQ ID NO: 4648735 - DNA, 25 bp, Homo sapien
ggaatccagaacaacgccgtatggg

SEQ ID NO: 4648736 - DNA, 25 bp, Homo sapien
gaatccagaacaacgccgtatgggc

SEQ ID NO: 4648737 - DNA, 25 bp, Homo sapien
atccagaacaacgccgtatgggccc

SEQ ID NO: 4648738 - DNA, 25 bp, Homo sapien
ctcctccttcatttgcaggacatca

SEQ ID NO: 4648739 - DNA, 25 bp, Homo sapien
ttgcaggacatcaagggctccggac

SEQ ID NO: 4648740 - DNA, 25 bp, Homo sapien
tgctgcaaggaacttaaggacatcc

SEQ ID NO: 4648741 - DNA, 25 bp, Homo sapien
gaacttaaggacatcctcctccttc

SEQ ID NO: 4648742 - DNA, 25 bp, Homo sapien
ggcaacaatagcactagctgccagc

SEQ ID NO: 4648743 - DNA, 25 bp, Homo sapien
tgatatagatgccattacttttcct

SEQ ID NO: 4648744 - DNA, 25 bp, Homo sapien
tatgatatagatgccattacttttc

SEQ ID NO: 4648745 - DNA, 25 bp, Homo sapien
acaagaagccatggctcccggaagg

SEQ ID NO: 4648746 - DNA, 25 bp, Homo sapien
gcaatgtccacatagcgcataggag

SEQ ID NO: 4648747 - DNA, 25 bp, Homo sapien
tggcaatgtccacatagcgcatagg

SEQ ID NO: 4648748 - DNA, 25 bp, Homo sapien
catagcgcataggagaatctgtgtt

SEQ ID NO: 4648749 - DNA, 25 bp, Homo sapien
aatgtccacatagcgcataggagaa

SEQ ID NO: 4648750 - DNA, 25 bp, Homo sapien
cacatgcgcagaacttcccgagcca

SEQ ID NO: 4648751 - DNA, 25 bp, Homo sapien
ctacacatgcgcagaacttcccgag

SEQ ID NO: 4648752 - DNA, 25 bp, Homo sapien
tgcgcagaacttcccgagccagcat

SEQ ID NO: 4648753 - DNA, 25 bp, Homo sapien
atgcgcagaacttcccgagccagca

SEQ ID NO: 4648754 - DNA, 25 bp, Homo sapien
tcccacgggtggtcataggaaatcg

SEQ ID NO: 4648755 - DNA, 25 bp, Homo sapien
ccacgggtggtcataggaaatcgtg

SEQ ID NO: 4648756 - DNA, 25 bp, Homo sapien
cctcccacgggtggtcataggaaat

SEQ ID NO: 4648757 - DNA, 25 bp, Homo sapien
gacctcccacgggtggtcataggaa

SEQ ID NO: 4648758 - DNA, 25 bp, Homo sapien
gcgctccagtcttcagtagggaact

SEQ ID NO: 4648759 - DNA, 25 bp, Homo sapien
cacagagggcacctgtacaccttca

SEQ ID NO: 4648760 - DNA, 25 bp, Homo sapien
agggcacctgtacaccttcagacca

SEQ ID NO: 4648761 - DNA, 25 bp, Homo sapien
cgctccagtcttcagtagggaactg

SEQ ID NO: 4648762 - DNA, 25 bp, Homo sapien
aagaccagtcagtggttgctcctac

SEQ ID NO: 4648763 - DNA, 25 bp, Homo sapien
ttaagaccagtcagtggttgctcct

SEQ ID NO: 4648764 - DNA, 25 bp, Homo sapien
taagaccagtcagtggttgctccta

SEQ ID NO: 4648765 - DNA, 25 bp, Homo sapien
atgttgcttaagagcctatgcaaga

SEQ ID NO: 4648766 - DNA, 25 bp, Homo sapien
ccatgttgcttaagagcctatgcaa

SEQ ID NO: 4648767 - DNA, 25 bp, Homo sapien
ttattttccatcaaccatttttcca

SEQ ID NO: 4648768 - DNA, 25 bp, Homo sapien
ccatcaaccatttttccatgttgct

SEQ ID NO: 4648769 - DNA, 25 bp, Homo sapien
aatcagggaaatgtagattgatgtc

SEQ ID NO: 4648770 - DNA, 25 bp, Homo sapien
cagggaaatgtagattgatgtcacc

SEQ ID NO: 4648771 - DNA, 25 bp, Homo sapien
tataaatcagggaaatgtagattga

SEQ ID NO: 4648772 - DNA, 25 bp, Homo sapien
taaatcagggaaatgtagattgatg

SEQ ID NO: 4648773 - DNA, 25 bp, Homo sapien
tcatagtgaaaaggaccggaatctg

SEQ ID NO: 4648774 - DNA, 25 bp, Homo sapien
catggtaccactgtaacccaggttt

SEQ ID NO: 4648775 - DNA, 25 bp, Homo sapien
gaccggaatctgatgaggacacact

SEQ ID NO: 4648776 - DNA, 25 bp, Homo sapien
aggacacactggaaacatggtacca

SEQ ID NO: 4648777 - DNA, 25 bp, Homo sapien
cagccccacacagggcagggggaca

SEQ ID NO: 4648778 - DNA, 25 bp, Homo sapien
gccccacacagggcagggggacaca

SEQ ID NO: 4648779 - DNA, 25 bp, Homo sapien
tcagccccacacagggcagggggac

SEQ ID NO: 4648780 - DNA, 25 bp, Homo sapien
ccccacacagggcagggggacacac

SEQ ID NO: 4648781 - DNA, 25 bp, Homo sapien
tgcggcttctccctccttaacagtt

SEQ ID NO: 4648782 - DNA, 25 bp, Homo sapien
agcaggactgtggaaggtgacactg

SEQ ID NO: 4648783 - DNA, 25 bp, Homo sapien
actgtggaaggtgacactgcggctt

SEQ ID NO: 4648784 - DNA, 25 bp, Homo sapien
gaaggtgacactgcggcttctccct

SEQ ID NO: 4648785 - DNA, 25 bp, Homo sapien
acccattaagagtctctgacctttt

SEQ ID NO: 4648786 - DNA, 25 bp, Homo sapien
tacccattaagagtctctgaccttt

SEQ ID NO: 4648787 - DNA, 25 bp, Homo sapien
tccagttgtctgcattacccattaa

SEQ ID NO: 4648788 - DNA, 25 bp, Homo sapien
cagttgtctgcattacccattaaga

SEQ ID NO: 4648789 - DNA, 25 bp, Homo sapien
gagtcacactgtgcgaattgccatg

SEQ ID NO: 4648790 - DNA, 25 bp, Homo sapien
tctcattcattgactgtgggccttc

SEQ ID NO: 4648791 - DNA, 25 bp, Homo sapien
cattgatccgtatcacaagtgagtg

SEQ ID NO: 4648792 - DNA, 25 bp, Homo sapien
ggtcagttaagtccttctcagatga

SEQ ID NO: 4648793 - DNA, 25 bp, Homo sapien
gacacagggattgtggactgacatg

SEQ ID NO: 4648794 - DNA, 25 bp, Homo sapien
actggacacagggattgtggactga

SEQ ID NO: 4648795 - DNA, 25 bp, Homo sapien
agggtcagggcgtactggacacagg

SEQ ID NO: 4648796 - DNA, 25 bp, Homo sapien
tggacacagggattgtggactgaca

SEQ ID NO: 4648797 - DNA, 25 bp, Homo sapien
tatagtgacagaaaggagagcagtt

SEQ ID NO: 4648798 - DNA, 25 bp, Homo sapien
taaaccatgcctcaataagattttt

SEQ ID NO: 4648799 - DNA, 25 bp, Homo sapien
tcagaagtcatggaactatacacct

SEQ ID NO: 4648800 - DNA, 25 bp, Homo sapien
tgtggtaataattgcctgggttagt

SEQ ID NO: 4648801 - DNA, 25 bp, Homo sapien
taaatttagcatttctgtccaaaag

SEQ ID NO: 4648802 - DNA, 25 bp, Homo sapien
tagtaaatttagcatttctgtccaa

SEQ ID NO: 4648803 - DNA, 25 bp, Homo sapien
catgtacagtgagcagatgcccatc

SEQ ID NO: 4648804 - DNA, 25 bp, Homo sapien
cagggtgtttaccagcaaaaacaag

SEQ ID NO: 4648805 - DNA, 25 bp, Homo sapien
tggagtgggcgtctgaccccggagt

SEQ ID NO: 4648806 - DNA, 25 bp, Homo sapien
agtgggcgtctgaccccggagtctc

SEQ ID NO: 4648807 - DNA, 25 bp, Homo sapien
ctggagtgggcgtctgaccccggag

SEQ ID NO: 4648808 - DNA, 25 bp, Homo sapien
gagtgggcgtctgaccccggagtct

SEQ ID NO: 4648809 - DNA, 25 bp, Homo sapien
cgccgctccattccggtcccgggcg

SEQ ID NO: 4648810 - DNA, 25 bp, Homo sapien
tgagcggacggaaaatgaaggtgga

SEQ ID NO: 4648811 - DNA, 25 bp, Homo sapien
cgctccattccggtcccgggcgcac

SEQ ID NO: 4648812 - DNA, 25 bp, Homo sapien
gctccattccggtcccgggcgcacc

SEQ ID NO: 4648813 - DNA, 25 bp, Homo sapien
gacacggggcaccggcgtcccagcc

SEQ ID NO: 4648814 - DNA, 25 bp, Homo sapien
tcaggggacacggggcaccggcgtc

SEQ ID NO: 4648815 - DNA, 25 bp, Homo sapien
ggacacggggcaccggcgtcccagc

SEQ ID NO: 4648816 - DNA, 25 bp, Homo sapien
gggtgcctgtgctgcgcagaaagcg

SEQ ID NO: 4648817 - DNA, 25 bp, Homo sapien
gtccgtgccctagccgggatctgca

SEQ ID NO: 4648818 - DNA, 25 bp, Homo sapien
ctcatccacgctgggagacgggaag

SEQ ID NO: 4648819 - DNA, 25 bp, Homo sapien
tcggcctaggcggtccgtgccctag

SEQ ID NO: 4648820 - DNA, 25 bp, Homo sapien
tttagtagagacaccatcttggcca

SEQ ID NO: 4648821 - DNA, 25 bp, Homo sapien
cactgcgcccggccctctttgtgtt

SEQ ID NO: 4648822 - DNA, 25 bp, Homo sapien
ttttagtagagacaccatcttggcc

SEQ ID NO: 4648823 - DNA, 25 bp, Homo sapien
agccactgcgcccggccctctttgt

SEQ ID NO: 4648824 - DNA, 25 bp, Homo sapien
tgccacaattgagaaaggctggtct

SEQ ID NO: 4648825 - DNA, 25 bp, Homo sapien
taagacagggagttagacatttgac

SEQ ID NO: 4648826 - DNA, 25 bp, Homo sapien
taaaggtgtttcaaggcgtcagatg

SEQ ID NO: 4648827 - DNA, 25 bp, Homo sapien
tacagacagtctccacaagaaacac

SEQ ID NO: 4648828 - DNA, 25 bp, Homo sapien
agtacacctatcacccgctcaggga

SEQ ID NO: 4648829 - DNA, 25 bp, Homo sapien
tctcacagtatgcttgatggccagg

SEQ ID NO: 4648830 - DNA, 25 bp, Homo sapien
gaaatgcagtatctcagtacaccta

SEQ ID NO: 4648831 - DNA, 25 bp, Homo sapien
gcatggcaaaggacgacaaagcttc

SEQ ID NO: 4648832 - DNA, 25 bp, Homo sapien
tacatggcatatctatacagttaca

SEQ ID NO: 4648833 - DNA, 25 bp, Homo sapien
ctatgtatctactactgttaccagg

SEQ ID NO: 4648834 - DNA, 25 bp, Homo sapien
tacatttacacttgacttagagtca

SEQ ID NO: 4648835 - DNA, 25 bp, Homo sapien
tgcaaaatttcttagtatagaccct

SEQ ID NO: 4648836 - DNA, 25 bp, Homo sapien
aaatccattgacaatctaacttcac

SEQ ID NO: 4648837 - DNA, 25 bp, Homo sapien
gccaactgggataaaatggtgacag

SEQ ID NO: 4648838 - DNA, 25 bp, Homo sapien
ttcacttacacatcctctgcgttca

SEQ ID NO: 4648839 - DNA, 25 bp, Homo sapien
aaaattgccaactgggataaaatgg

SEQ ID NO: 4648840 - DNA, 25 bp, Homo sapien
agctcttaaagatgatgcatctgga

SEQ ID NO: 4648841 - DNA, 25 bp, Homo sapien
tcttaaagatgatgcatctggagtt

SEQ ID NO: 4648842 - DNA, 25 bp, Homo sapien
tgcggaccctcccggtgagtattac

SEQ ID NO: 4648843 - DNA, 25 bp, Homo sapien
ttaaagatgatgcatctggagtttg

SEQ ID NO: 4648844 - DNA, 25 bp, Homo sapien
aaggcctgcctaatccaacaactga

SEQ ID NO: 4648845 - DNA, 25 bp, Homo sapien
tataattttaagtagatcgcataac

SEQ ID NO: 4648846 - DNA, 25 bp, Homo sapien
ggacactggtcctttcctggaagag

SEQ ID NO: 4648847 - DNA, 25 bp, Homo sapien
gaagaggagacttccttgaggacac

SEQ ID NO: 4648848 - DNA, 25 bp, Homo sapien
tctatgtttgtggattgctaaagat

SEQ ID NO: 4648849 - DNA, 25 bp, Homo sapien
tttgaaagaaaactctagcagcatt

SEQ ID NO: 4648850 - DNA, 25 bp, Homo sapien
ggtgaactaatcctacatatttgct

SEQ ID NO: 4648851 - DNA, 25 bp, Homo sapien
tttccttctctctagtcttacttat

SEQ ID NO: 4648852 - DNA, 25 bp, Homo sapien
tgtccgggcatccagcgataatgat

SEQ ID NO: 4648853 - DNA, 25 bp, Homo sapien
gatgtgctgcacgagtctttaaaga

SEQ ID NO: 4648854 - DNA, 25 bp, Homo sapien
cacttagtgctgattccaggtgaca

SEQ ID NO: 4648855 - DNA, 25 bp, Homo sapien
taaaagtaaggaaagtctgaatcac

SEQ ID NO: 4648856 - DNA, 25 bp, Homo sapien
actgtgccagaattaccaccccttg

SEQ ID NO: 4648857 - DNA, 25 bp, Homo sapien
ttgatgagtttctgacactgtgcca

SEQ ID NO: 4648858 - DNA, 25 bp, Homo sapien
taatgtccattagctggtgtcagca

SEQ ID NO: 4648859 - DNA, 25 bp, Homo sapien
tgaggtgcaaaaccatagttggacg

SEQ ID NO: 4648860 - DNA, 25 bp, Homo sapien
gctgcaacggcatcttgaaatgaag

SEQ ID NO: 4648861 - DNA, 25 bp, Homo sapien
tggccttgaaggttgtcagtttgca

SEQ ID NO: 4648862 - DNA, 25 bp, Homo sapien
gaagggcagtcttctatgctccaag

SEQ ID NO: 4648863 - DNA, 25 bp, Homo sapien
caatgattttccctccgtcgtggcc

SEQ ID NO: 4648864 - DNA, 25 bp, Homo sapien
gattagggataaaacaagaaccata

SEQ ID NO: 4648865 - DNA, 25 bp, Homo sapien
gtctccttcgcagcaacgtcctcag

SEQ ID NO: 4648866 - DNA, 25 bp, Homo sapien
ggagaaggtgattagggataaaaca

SEQ ID NO: 4648867 - DNA, 25 bp, Homo sapien
ccataaagtagtatttggtgggata

SEQ ID NO: 4648868 - DNA, 25 bp, Homo sapien
tagggagcacccttggaaacatcac

SEQ ID NO: 4648869 - DNA, 25 bp, Homo sapien
ttatatagtcgtcaggtgtccaccg

SEQ ID NO: 4648870 - DNA, 25 bp, Homo sapien
tactaaaacaggaagcgatgcccat

SEQ ID NO: 4648871 - DNA, 25 bp, Homo sapien
caagtggtgtttgcgcagcatccag

SEQ ID NO: 4648872 - DNA, 25 bp, Homo sapien
tgagcactttgaacaggctgacttt

SEQ ID NO: 4648873 - DNA, 25 bp, Homo sapien
tgctctggcctcaaggctaccttta

SEQ ID NO: 4648874 - DNA, 25 bp, Homo sapien
aagatctactagagtccctgcccca

SEQ ID NO: 4648875 - DNA, 25 bp, Homo sapien
gctgactttatgcatcggcctcttc

SEQ ID NO: 4648876 - DNA, 25 bp, Homo sapien
taagctccctgagatgacatacgga

SEQ ID NO: 4648877 - DNA, 25 bp, Homo sapien
tcgtatataaattctgccgcaggca

SEQ ID NO: 4648878 - DNA, 25 bp, Homo sapien
caacaggccatgtggaatgactgca

SEQ ID NO: 4648879 - DNA, 25 bp, Homo sapien
caatcctgggaggttggacacaagt

SEQ ID NO: 4648880 - DNA, 25 bp, Homo sapien
ggtgatatgaactgattctaactgc

SEQ ID NO: 4648881 - DNA, 25 bp, Homo sapien
tgtcgcaccctcattcaaaagagta

SEQ ID NO: 4648882 - DNA, 25 bp, Homo sapien
tctgaatggatgattttaatggtga

SEQ ID NO: 4648883 - DNA, 25 bp, Homo sapien
gattctaactgcattctgtcgcacc

SEQ ID NO: 4648884 - DNA, 25 bp, Homo sapien
ctatgttagtatgagggagttgtgg

SEQ ID NO: 4648885 - DNA, 25 bp, Homo sapien
tatgttagtatgagggagttgtggg

SEQ ID NO: 4648886 - DNA, 25 bp, Homo sapien
tggggagtgactataaagggtacaa

SEQ ID NO: 4648887 - DNA, 25 bp, Homo sapien
gagttgtggggagtgactataaagg

SEQ ID NO: 4648888 - DNA, 25 bp, Homo sapien
tatgaattgttacatcctttgttca

SEQ ID NO: 4648889 - DNA, 25 bp, Homo sapien
cttctatgaattgttacatcctttg

SEQ ID NO: 4648890 - DNA, 25 bp, Homo sapien
tctatgaattgttacatcctttgtt

SEQ ID NO: 4648891 - DNA, 25 bp, Homo sapien
gtacttctatgaattgttacatcct

SEQ ID NO: 4648892 - DNA, 25 bp, Homo sapien
cacaagtaagttcaatggcctattt

SEQ ID NO: 4648893 - DNA, 25 bp, Homo sapien
gagtggacatttatgtaaggccgtg

SEQ ID NO: 4648894 - DNA, 25 bp, Homo sapien
tgattaattctgtctaggatactgt

SEQ ID NO: 4648895 - DNA, 25 bp, Homo sapien
aaagatctcataggctaggcgcagt

SEQ ID NO: 4648896 - DNA, 25 bp, Homo sapien
tgtgggcacaagtccagatagatca

SEQ ID NO: 4648897 - DNA, 25 bp, Homo sapien
tgccagttctaacacaggggaccca

SEQ ID NO: 4648898 - DNA, 25 bp, Homo sapien
tggaaaagcgagtgaaagaacaatg

SEQ ID NO: 4648899 - DNA, 25 bp, Homo sapien
tgtctcggttttgaatggaaaagcg

SEQ ID NO: 4648900 - DNA, 25 bp, Homo sapien
tgtcagctctcaatgagctctttgt

SEQ ID NO: 4648901 - DNA, 25 bp, Homo sapien
caaggcaccgacttttgaacactcc

SEQ ID NO: 4648902 - DNA, 25 bp, Homo sapien
tatgaacgatgattacagcaagggc

SEQ ID NO: 4648903 - DNA, 25 bp, Homo sapien
gccaagcctgctgatacccaaggca

SEQ ID NO: 4648904 - DNA, 25 bp, Homo sapien
caggttttgaaactgactgaccaag

SEQ ID NO: 4648905 - DNA, 25 bp, Homo sapien
taccatcccaatgaaaagctttgca

SEQ ID NO: 4648906 - DNA, 25 bp, Homo sapien
cctcaaggatagctttggaaaacag

SEQ ID NO: 4648907 - DNA, 25 bp, Homo sapien
aaaattgcaccaccctgacacagtg

SEQ ID NO: 4648908 - DNA, 25 bp, Homo sapien
aaccgaggctccgcggcgatgcccc

SEQ ID NO: 4648909 - DNA, 25 bp, Homo sapien
gaggctccgcggcgatgccccatct

SEQ ID NO: 4648910 - DNA, 25 bp, Homo sapien
ccgaggctccgcggcgatgccccat

SEQ ID NO: 4648911 - DNA, 25 bp, Homo sapien
ccaaccgaggctccgcggcgatgcc

SEQ ID NO: 4648912 - DNA, 25 bp, Homo sapien
gcgccaggttccccacgaacgtgcg

SEQ ID NO: 4648913 - DNA, 25 bp, Homo sapien
caggttccccacgaacgtgcgttgc

SEQ ID NO: 4648914 - DNA, 25 bp, Homo sapien
ctacgaatggtttagcgccaggttc

SEQ ID NO: 4648915 - DNA, 25 bp, Homo sapien
tccccacgaacgtgcgttgcgtgac

SEQ ID NO: 4648916 - DNA, 25 bp, Homo sapien
cgcatcgaacgagctgctctgctaa

SEQ ID NO: 4648917 - DNA, 25 bp, Homo sapien
tagatcgcatcgaacgagctgctct

SEQ ID NO: 4648918 - DNA, 25 bp, Homo sapien
aatagatcgcatcgaacgagctgct

SEQ ID NO: 4648919 - DNA, 25 bp, Homo sapien
gatcgcatcgaacgagctgctctgc

SEQ ID NO: 4648920 - DNA, 25 bp, Homo sapien
cagaagtagtggtcgtttccatttc

SEQ ID NO: 4648921 - DNA, 25 bp, Homo sapien
ttcctctgcagattgcaaaaaggga

SEQ ID NO: 4648922 - DNA, 25 bp, Homo sapien
ttgaaaagatacagaagtagtggtc

SEQ ID NO: 4648923 - DNA, 25 bp, Homo sapien
tctgcagattgcaaaaagggagaca

SEQ ID NO: 4648924 - DNA, 25 bp, Homo sapien
gggtcatgagtgagtggatccacac

SEQ ID NO: 4648925 - DNA, 25 bp, Homo sapien
aagcccagattgtctcatttccctc

SEQ ID NO: 4648926 - DNA, 25 bp, Homo sapien
gttgtccatgagttgacaaagccca

SEQ ID NO: 4648927 - DNA, 25 bp, Homo sapien
aagaagacgtggaaggttgtccatg

SEQ ID NO: 4648928 - DNA, 25 bp, Homo sapien
cattgattctctggccaaggtgcta

SEQ ID NO: 4648929 - DNA, 25 bp, Homo sapien
tgctatcgagtagcccggtgaccca

SEQ ID NO: 4648930 - DNA, 25 bp, Homo sapien
tcaagttcgaaaagctaagtcctgc

SEQ ID NO: 4648931 - DNA, 25 bp, Homo sapien
cattggtttcagtcgctgcctcagg

SEQ ID NO: 4648932 - DNA, 25 bp, Homo sapien
agatgtagccctcgttcacctcaga

SEQ ID NO: 4648933 - DNA, 25 bp, Homo sapien
atgggtttgggatagagatatgaca

SEQ ID NO: 4648934 - DNA, 25 bp, Homo sapien
gagatgtagccctcgttcacctcag

SEQ ID NO: 4648935 - DNA, 25 bp, Homo sapien
gagatatgacatattccatttctca

SEQ ID NO: 4648936 - DNA, 25 bp, Homo sapien
gagtcctagccacaaaatcactgct

SEQ ID NO: 4648937 - DNA, 25 bp, Homo sapien
cactgcttaggttgcaattgccaaa

SEQ ID NO: 4648938 - DNA, 25 bp, Homo sapien
actctgggaaccattcttagtctcc

SEQ ID NO: 4648939 - DNA, 25 bp, Homo sapien
tgttggctgaagtccgtgcctcact

SEQ ID NO: 4648940 - DNA, 25 bp, Homo sapien
tgtcttgcttcttattcctacgtag

SEQ ID NO: 4648941 - DNA, 25 bp, Homo sapien
cttgcttcttattcctacgtagggc

SEQ ID NO: 4648942 - DNA, 25 bp, Homo sapien
tcttgcttcttattcctacgtaggg

SEQ ID NO: 4648943 - DNA, 25 bp, Homo sapien
gtcttgcttcttattcctacgtagg

SEQ ID NO: 4648944 - DNA, 25 bp, Homo sapien
cagttgaggtaaatggtaggattca

SEQ ID NO: 4648945 - DNA, 25 bp, Homo sapien
tcagctgtatggagtggtaagtgtc

SEQ ID NO: 4648946 - DNA, 25 bp, Homo sapien
ctgtatggagtggtaagtgtcctgt

SEQ ID NO: 4648947 - DNA, 25 bp, Homo sapien
tgttttctgggcatactcagttgag

SEQ ID NO: 4648948 - DNA, 25 bp, Homo sapien
catcacctcaatttcatgttttgca

SEQ ID NO: 4648949 - DNA, 25 bp, Homo sapien
ttgcaaatttcaaatggatacgagc

SEQ ID NO: 4648950 - DNA, 25 bp, Homo sapien
caaatttcaaatggatacgagccat

SEQ ID NO: 4648951 - DNA, 25 bp, Homo sapien
ttcatcacctcaatttcatgttttg

SEQ ID NO: 4648952 - DNA, 25 bp, Homo sapien
tcatttggttctcctacataagcaa

SEQ ID NO: 4648953 - DNA, 25 bp, Homo sapien
gcaatatcgggcgtgaacacaggat

SEQ ID NO: 4648954 - DNA, 25 bp, Homo sapien
caggatactgactgggcttccggtg

SEQ ID NO: 4648955 - DNA, 25 bp, Homo sapien
aacacaggatactgactgggcttcc

SEQ ID NO: 4648956 - DNA, 25 bp, Homo sapien
gaacaatccttgctgtgacacgacc

SEQ ID NO: 4648957 - DNA, 25 bp, Homo sapien
ttcataaactaagagtacccaggga

SEQ ID NO: 4648958 - DNA, 25 bp, Homo sapien
aaaacaggacctctaaattgcttgc

SEQ ID NO: 4648959 - DNA, 25 bp, Homo sapien
gaaaggtgctttggactattcatca

SEQ ID NO: 4648960 - DNA, 25 bp, Homo sapien
gatccttacgtgactgactccttct

SEQ ID NO: 4648961 - DNA, 25 bp, Homo sapien
gggaagagaatttaatcaggacgat

SEQ ID NO: 4648962 - DNA, 25 bp, Homo sapien
tacatgctgtgttacaagaaacctg

SEQ ID NO: 4648963 - DNA, 25 bp, Homo sapien
gaaatcagagcttgccaatttcttg

SEQ ID NO: 4648964 - DNA, 25 bp, Homo sapien
gatggttctggcttaaggtatcttg

SEQ ID NO: 4648965 - DNA, 25 bp, Homo sapien
caagagtgtattagctagatggttc

SEQ ID NO: 4648966 - DNA, 25 bp, Homo sapien
taaggtatcttgttaagttgccatc

SEQ ID NO: 4648967 - DNA, 25 bp, Homo sapien
cccagtgtttgtaataggaattcaa

SEQ ID NO: 4648968 - DNA, 25 bp, Homo sapien
tgagaaaccgtgctgggagacaaac

SEQ ID NO: 4648969 - DNA, 25 bp, Homo sapien
tatgttagcatcaggtttcagggcc

SEQ ID NO: 4648970 - DNA, 25 bp, Homo sapien
tattcgtggaaccaatcactctggc

SEQ ID NO: 4648971 - DNA, 25 bp, Homo sapien
gacatcaagctgtagtgcacctggg

SEQ ID NO: 4648972 - DNA, 25 bp, Homo sapien
ggaatacttgctgacgtcggagaca

SEQ ID NO: 4648973 - DNA, 25 bp, Homo sapien
gggtactgctgtcatctaatgggca

SEQ ID NO: 4648974 - DNA, 25 bp, Homo sapien
gccggttctgaaccagcagggaata

SEQ ID NO: 4648975 - DNA, 25 bp, Homo sapien
aagtcagtgcaggattgggtaaccc

SEQ ID NO: 4648976 - DNA, 25 bp, Homo sapien
gaaaaggccaccctgaaaggcatag

SEQ ID NO: 4648977 - DNA, 25 bp, Homo sapien
catagtgacctagtgtgagggacac

SEQ ID NO: 4648978 - DNA, 25 bp, Homo sapien
gaatagtgcgtagcccaagaacagg

SEQ ID NO: 4648979 - DNA, 25 bp, Homo sapien
tgaggaactcacaaggaatagtgcg

SEQ ID NO: 4648980 - DNA, 25 bp, Homo sapien
ccactgcaccccagcctgggcgaca

SEQ ID NO: 4648981 - DNA, 25 bp, Homo sapien
aaggcggagcttgcagtgagccgag

SEQ ID NO: 4648982 - DNA, 25 bp, Homo sapien
gagaagggcgtgaacccagaaggcg

SEQ ID NO: 4648983 - DNA, 25 bp, Homo sapien
atcgcaccactgcaccccagcctgg

SEQ ID NO: 4648984 - DNA, 25 bp, Homo sapien
gggattcctccagcttctcaaacac

SEQ ID NO: 4648985 - DNA, 25 bp, Homo sapien
ctgaagagggattcctccagcttct

SEQ ID NO: 4648986 - DNA, 25 bp, Homo sapien
tcctccagcttctcaaacacagcca

SEQ ID NO: 4648987 - DNA, 25 bp, Homo sapien
gaagagggattcctccagcttctca

SEQ ID NO: 4648988 - DNA, 25 bp, Homo sapien
gattattcccatggtagttgctctc

SEQ ID NO: 4648989 - DNA, 25 bp, Homo sapien
tctctctgcgcacatttctgcaacc

SEQ ID NO: 4648990 - DNA, 25 bp, Homo sapien
ggattattcccatggtagttgctct

SEQ ID NO: 4648991 - DNA, 25 bp, Homo sapien
tagttgctctctctgcgcacatttc

SEQ ID NO: 4648992 - DNA, 25 bp, Homo sapien
tgactctggagctcaatctcatgtg

SEQ ID NO: 4648993 - DNA, 25 bp, Homo sapien
gagctcaatctcatgtggtcgtgta

SEQ ID NO: 4648994 - DNA, 25 bp, Homo sapien
tcatgtggtcgtgtatgtagggacc

SEQ ID NO: 4648995 - DNA, 25 bp, Homo sapien
atgtagggacctccgcctccataca

SEQ ID NO: 4648996 - DNA, 25 bp, Homo sapien
cacatcgtttgacacaggacttgag

SEQ ID NO: 4648997 - DNA, 25 bp, Homo sapien
gtcttcacatcgtttgacacaggac

SEQ ID NO: 4648998 - DNA, 25 bp, Homo sapien
ttcacatcgtttgacacaggacttg

SEQ ID NO: 4648999 - DNA, 25 bp, Homo sapien
tcttcacatcgtttgacacaggact

SEQ ID NO: 4649000 - DNA, 25 bp, Homo sapien
tatccaccaacgtggcttttaatct

SEQ ID NO: 4649001 - DNA, 25 bp, Homo sapien
aggcaaggaagctaaatagacgaca

SEQ ID NO: 4649002 - DNA, 25 bp, Homo sapien
gaagctaaatagacgacaccagatc

SEQ ID NO: 4649003 - DNA, 25 bp, Homo sapien
tcttctgcagtatccaccaacgtgg

SEQ ID NO: 4649004 - DNA, 25 bp, Homo sapien
atcttcctggtctccctcggctgca

SEQ ID NO: 4649005 - DNA, 25 bp, Homo sapien
tcttcctggtctccctcggctgcag

SEQ ID NO: 4649006 - DNA, 25 bp, Homo sapien
caaagcatacgggttaaaggttgca

SEQ ID NO: 4649007 - DNA, 25 bp, Homo sapien
catatggtgataatgggacaaagca

SEQ ID NO: 4649008 - DNA, 25 bp, Homo sapien
ggttaaaggttgcaggaaccatggc

SEQ ID NO: 4649009 - DNA, 25 bp, Homo sapien
atggcttggcaattagcgatgtaaa

SEQ ID NO: 4649010 - DNA, 25 bp, Homo sapien
ttctttgctgcactgagtactcaga

SEQ ID NO: 4649011 - DNA, 25 bp, Homo sapien
tcgatggtgatccagccctgtgtca

SEQ ID NO: 4649012 - DNA, 25 bp, Homo sapien
cactgaggagactcacagcggacta

SEQ ID NO: 4649013 - DNA, 25 bp, Homo sapien
gcggactagctcttcacttatttat

SEQ ID NO: 4649014 - DNA, 25 bp, Homo sapien
gcttcctgtgtgtgtggatatttaa

SEQ ID NO: 4649015 - DNA, 25 bp, Homo sapien
cttagacattatattgtcatcttgc

SEQ ID NO: 4649016 - DNA, 25 bp, Homo sapien
ggtaaagtcagcagcctttcttatt

SEQ ID NO: 4649017 - DNA, 25 bp, Homo sapien
tgtgcaaaaacatgtcactacttag

SEQ ID NO: 4649018 - DNA, 25 bp, Homo sapien
cacagggcgaggctcatcgatgacc

SEQ ID NO: 4649019 - DNA, 25 bp, Homo sapien
agggcgaggctcatcgatgacccaa

SEQ ID NO: 4649020 - DNA, 25 bp, Homo sapien
aggcacagggcgaggctcatcgatg

SEQ ID NO: 4649021 - DNA, 25 bp, Homo sapien
cgaggctcatcgatgacccaagatg

SEQ ID NO: 4649022 - DNA, 25 bp, Homo sapien
tataagatactatgaggttccctgc

SEQ ID NO: 4649023 - DNA, 25 bp, Homo sapien
aacgcacagtttaggcagcagggcc

SEQ ID NO: 4649024 - DNA, 25 bp, Homo sapien
taatatgtgtcaagaggagagccag

SEQ ID NO: 4649025 - DNA, 25 bp, Homo sapien
tattaggcagcaacacgaagggtct

SEQ ID NO: 4649026 - DNA, 25 bp, Homo sapien
tgaatattgctgctgatccaccaag

SEQ ID NO: 4649027 - DNA, 25 bp, Homo sapien
catgtgccagtagtcgtctctgttt

SEQ ID NO: 4649028 - DNA, 25 bp, Homo sapien
cttgctccttggtcgactcctaatg

SEQ ID NO: 4649029 - DNA, 25 bp, Homo sapien
gactcctaatggagggccttctagg

SEQ ID NO: 4649030 - DNA, 25 bp, Homo sapien
gggttgcacatttatctgaggatct

SEQ ID NO: 4649031 - DNA, 25 bp, Homo sapien
agctcctctaagaagaatcccctgc

SEQ ID NO: 4649032 - DNA, 25 bp, Homo sapien
agcccctccatatctgatgcatcat

SEQ ID NO: 4649033 - DNA, 25 bp, Homo sapien
atctgatgcatcattagggaccacc

SEQ ID NO: 4649034 - DNA, 25 bp, Homo sapien
tgaggctcgctgtagaggtgaattc

SEQ ID NO: 4649035 - DNA, 25 bp, Homo sapien
gagtagggcgcaatgtcttcctttt

SEQ ID NO: 4649036 - DNA, 25 bp, Homo sapien
tgtagaggtgaattctatatccaga

SEQ ID NO: 4649037 - DNA, 25 bp, Homo sapien
ccagaggagtagggcgcaatgtctt

SEQ ID NO: 4649038 - DNA, 25 bp, Homo sapien
gctgcatagtctggactttcgtgca

SEQ ID NO: 4649039 - DNA, 25 bp, Homo sapien
aacatagggttctcgtttagcaaat

SEQ ID NO: 4649040 - DNA, 25 bp, Homo sapien
ttgcaaagataaggagaggccatta

SEQ ID NO: 4649041 - DNA, 25 bp, Homo sapien
tcttgtagtcctagtctttctgcca

SEQ ID NO: 4649042 - DNA, 25 bp, Homo sapien
ttctggttttctttggagacaccat

SEQ ID NO: 4649043 - DNA, 25 bp, Homo sapien
tctttctggttttctttggagacac

SEQ ID NO: 4649044 - DNA, 25 bp, Homo sapien
tggttcaaaggccaccttctttctg

SEQ ID NO: 4649045 - DNA, 25 bp, Homo sapien
ttctttctggttttctttggagaca

SEQ ID NO: 4649046 - DNA, 25 bp, Homo sapien
tcttctgggaggaagacaccctggt

SEQ ID NO: 4649047 - DNA, 25 bp, Homo sapien
ggaagacaccctggttgacttggag

SEQ ID NO: 4649048 - DNA, 25 bp, Homo sapien
gggctgggccctttccgcatcaccc

SEQ ID NO: 4649049 - DNA, 25 bp, Homo sapien
ctttccgcatcaccctgcagccagt

SEQ ID NO: 4649050 - DNA, 25 bp, Homo sapien
aatgcacacggcctgaacagtttat

SEQ ID NO: 4649051 - DNA, 25 bp, Homo sapien
gaatttgttcacactgatgcctgtc

SEQ ID NO: 4649052 - DNA, 25 bp, Homo sapien
tctcctctctttctcgaataacaga

SEQ ID NO: 4649053 - DNA, 25 bp, Homo sapien
aaatttctcataattacatcattac

SEQ ID NO: 4649054 - DNA, 25 bp, Homo sapien
tcagagcattagactccccaacatg

SEQ ID NO: 4649055 - DNA, 25 bp, Homo sapien
taaatggtttgaccagcaaccctct

SEQ ID NO: 4649056 - DNA, 25 bp, Homo sapien
gcatgtcttctttccatcggtaaca

SEQ ID NO: 4649057 - DNA, 25 bp, Homo sapien
tgtcaagacaacttagtaaagctcc

SEQ ID NO: 4649058 - DNA, 25 bp, Homo sapien
tccgcatctctaccgcttagggtca

SEQ ID NO: 4649059 - DNA, 25 bp, Homo sapien
cctgctaagtccagattccgcatct

SEQ ID NO: 4649060 - DNA, 25 bp, Homo sapien
cagattccgcatctctaccgcttag

SEQ ID NO: 4649061 - DNA, 25 bp, Homo sapien
tgctaaatccccacttcctgctaag

SEQ ID NO: 4649062 - DNA, 25 bp, Homo sapien
tctgtggtcctctctaagcaacttt

SEQ ID NO: 4649063 - DNA, 25 bp, Homo sapien
taaggattcaagagctctctggaca

SEQ ID NO: 4649064 - DNA, 25 bp, Homo sapien
ccacatctcttagtgaatagtcaac

SEQ ID NO: 4649065 - DNA, 25 bp, Homo sapien
tagtgaatagtcaacagagcttctc

SEQ ID NO: 4649066 - DNA, 25 bp, Homo sapien
gatctatggccagggcaaaaaccac

SEQ ID NO: 4649067 - DNA, 25 bp, Homo sapien
gacatttctaccagcttttccaagg

SEQ ID NO: 4649068 - DNA, 25 bp, Homo sapien
tggagtcacgtatacaaaagcttgg

SEQ ID NO: 4649069 - DNA, 25 bp, Homo sapien
agatggattcttggacgactcgagg

SEQ ID NO: 4649070 - DNA, 25 bp, Homo sapien
actatggggtatgattctctcatcc

SEQ ID NO: 4649071 - DNA, 25 bp, Homo sapien
atccttcattggctacagtataaag

SEQ ID NO: 4649072 - DNA, 25 bp, Homo sapien
tttgtttttcatgcgacacctcctg

SEQ ID NO: 4649073 - DNA, 25 bp, Homo sapien
cctcctggtcaaactatggggtatg

SEQ ID NO: 4649074 - DNA, 25 bp, Homo sapien
gacaggacacgtgcctggctgctcc

SEQ ID NO: 4649075 - DNA, 25 bp, Homo sapien
ctgccacgggtatgtctgagaggac

SEQ ID NO: 4649076 - DNA, 25 bp, Homo sapien
aaatgtcacagcatgtggacagatc

SEQ ID NO: 4649077 - DNA, 25 bp, Homo sapien
caagaaggggcaaatcccgttctgt

SEQ ID NO: 4649078 - DNA, 25 bp, Homo sapien
gcattttgatcctctttacattcct

SEQ ID NO: 4649079 - DNA, 25 bp, Homo sapien
gcagaagcattttgatcctctttac

SEQ ID NO: 4649080 - DNA, 25 bp, Homo sapien
tctgtaacaagtggtcagtggtgct

SEQ ID NO: 4649081 - DNA, 25 bp, Homo sapien
aagagaaaagtgcatgttggcttcc

SEQ ID NO: 4649082 - DNA, 25 bp, Homo sapien
gaatgagggaagaatacttggatct

SEQ ID NO: 4649083 - DNA, 25 bp, Homo sapien
aatgagggaagaatacttggatctg

SEQ ID NO: 4649084 - DNA, 25 bp, Homo sapien
ggaagaatacttggatctggataaa

SEQ ID NO: 4649085 - DNA, 25 bp, Homo sapien
aagaatacttggatctggataaagg

SEQ ID NO: 4649086 - DNA, 25 bp, Homo sapien
agtccaggggatgcatctgctactt

SEQ ID NO: 4649087 - DNA, 25 bp, Homo sapien
agtaggtattagttgatatgtggac

SEQ ID NO: 4649088 - DNA, 25 bp, Homo sapien
gtccaggggatgcatctgctacttc

SEQ ID NO: 4649089 - DNA, 25 bp, Homo sapien
taggtattagttgatatgtggactt

SEQ ID NO: 4649090 - DNA, 25 bp, Homo sapien
gaggccgcagcacggccctgcgatt

SEQ ID NO: 4649091 - DNA, 25 bp, Homo sapien
ggttgcagcagctttcggcgcgcca

SEQ ID NO: 4649092 - DNA, 25 bp, Homo sapien
ctcgcacttctgggcgctgtccatg

SEQ ID NO: 4649093 - DNA, 25 bp, Homo sapien
gattggcggaggagcccctcgccat

SEQ ID NO: 4649094 - DNA, 25 bp, Homo sapien
tattttggggtatcacacctgaagc

SEQ ID NO: 4649095 - DNA, 25 bp, Homo sapien
tctgcgagaccacaggtctgtgtgc

SEQ ID NO: 4649096 - DNA, 25 bp, Homo sapien
acctgaagcctctgcgagaccacag

SEQ ID NO: 4649097 - DNA, 25 bp, Homo sapien
tcagagacgccttcctacttctgct

SEQ ID NO: 4649098 - DNA, 25 bp, Homo sapien
gtgccttgttgggatgttctgtccc

SEQ ID NO: 4649099 - DNA, 25 bp, Homo sapien
tccagcgttgggctggcagtttagt

SEQ ID NO: 4649100 - DNA, 25 bp, Homo sapien
ctggcagtttagtggagttgcacat

SEQ ID NO: 4649101 - DNA, 25 bp, Homo sapien
ttctgtccctgtttgtatccagcgt

SEQ ID NO: 4649102 - DNA, 25 bp, Homo sapien
gtttcaccatcttgaggtcaggttt

SEQ ID NO: 4649103 - DNA, 25 bp, Homo sapien
caccatcttgaggtcaggtttcaaa

SEQ ID NO: 4649104 - DNA, 25 bp, Homo sapien
ccatcttgaggtcaggtttcaaact

SEQ ID NO: 4649105 - DNA, 25 bp, Homo sapien
ttcaccatcttgaggtcaggtttca

SEQ ID NO: 4649106 - DNA, 25 bp, Homo sapien
gggcactgttcaatccactgtagca

SEQ ID NO: 4649107 - DNA, 25 bp, Homo sapien
ccaggggcactgttcaatccactgt

SEQ ID NO: 4649108 - DNA, 25 bp, Homo sapien
aggggcactgttcaatccactgtag

SEQ ID NO: 4649109 - DNA, 25 bp, Homo sapien
cactgttcaatccactgtagcatgg

SEQ ID NO: 4649110 - DNA, 25 bp, Homo sapien
gtccctggattttatccacatcacc

SEQ ID NO: 4649111 - DNA, 25 bp, Homo sapien
ctcctgcccttgcagccaaagccag

SEQ ID NO: 4649112 - DNA, 25 bp, Homo sapien
ctccttgtccctggattttatccac

SEQ ID NO: 4649113 - DNA, 25 bp, Homo sapien
gccaaagccagtccttctccttgtc

SEQ ID NO: 4649114 - DNA, 25 bp, Homo sapien
ttctttatccttatgtgattgggag

SEQ ID NO: 4649115 - DNA, 25 bp, Homo sapien
ctttatccttatgtgattgggagaa

SEQ ID NO: 4649116 - DNA, 25 bp, Homo sapien
tgttctttatccttatgtgattggg

SEQ ID NO: 4649117 - DNA, 25 bp, Homo sapien
ttcttgttctttatccttatgtgat

SEQ ID NO: 4649118 - DNA, 25 bp, Homo sapien
ctgtctgtggaataaaacctcaggg

SEQ ID NO: 4649119 - DNA, 25 bp, Homo sapien
tgccctagcctatgaccctgagttt

SEQ ID NO: 4649120 - DNA, 25 bp, Homo sapien
cacttgctacatgttgctggtcaga

SEQ ID NO: 4649121 - DNA, 25 bp, Homo sapien
ggaaagcgttcctccagcgctgtag

SEQ ID NO: 4649122 - DNA, 25 bp, Homo sapien
gaggctatatgcataccaaaacgtt

SEQ ID NO: 4649123 - DNA, 25 bp, Homo sapien
gcagtaggccatcctagggaaccta

SEQ ID NO: 4649124 - DNA, 25 bp, Homo sapien
tgtggaacactttaagactgagccc

SEQ ID NO: 4649125 - DNA, 25 bp, Homo sapien
gatttttctagtccagcagtaggcc

SEQ ID NO: 4649126 - DNA, 25 bp, Homo sapien
caggaagggagccagacaggggcac

SEQ ID NO: 4649127 - DNA, 25 bp, Homo sapien
catgactggatgtggggaagctgcc

SEQ ID NO: 4649128 - DNA, 25 bp, Homo sapien
tgtggggaagctgccaaggggccca

SEQ ID NO: 4649129 - DNA, 25 bp, Homo sapien
caatcaagtccttgacttgggggag

SEQ ID NO: 4649130 - DNA, 25 bp, Homo sapien
taaagaatcgtcaggtccttggcac

SEQ ID NO: 4649131 - DNA, 25 bp, Homo sapien
gcactaaagaatcgtcaggtccttg

SEQ ID NO: 4649132 - DNA, 25 bp, Homo sapien
catggcactaaagaatcgtcaggtc

SEQ ID NO: 4649133 - DNA, 25 bp, Homo sapien
actaaagaatcgtcaggtccttggc

SEQ ID NO: 4649134 - DNA, 25 bp, Homo sapien
tatgctaattgctaccggagttttg

SEQ ID NO: 4649135 - DNA, 25 bp, Homo sapien
tgatctctccctgtgacgaagtccc

SEQ ID NO: 4649136 - DNA, 25 bp, Homo sapien
ctttctggcaaaacaagatgtctca

SEQ ID NO: 4649137 - DNA, 25 bp, Homo sapien
tagaagccaagatccagatactagg

SEQ ID NO: 4649138 - DNA, 25 bp, Homo sapien
tcttgccaatggctgctatagcagt

SEQ ID NO: 4649139 - DNA, 25 bp, Homo sapien
gactggtcagcaaatgtgcattgca

SEQ ID NO: 4649140 - DNA, 25 bp, Homo sapien
cagtaacaggggactggtcagcaaa

SEQ ID NO: 4649141 - DNA, 25 bp, Homo sapien
aggctgtcttgccaatggctgctat

SEQ ID NO: 4649142 - DNA, 25 bp, Homo sapien
ttctgcaccagggttcccattgagg

SEQ ID NO: 4649143 - DNA, 25 bp, Homo sapien
tgctgacagtgccaccaccccgcac

SEQ ID NO: 4649144 - DNA, 25 bp, Homo sapien
cctcaacttcccagtggtccctgct

SEQ ID NO: 4649145 - DNA, 25 bp, Homo sapien
gttatttttgatgtcctcatcctca

SEQ ID NO: 4649146 - DNA, 25 bp, Homo sapien
gtggtccctgctgacagtgccacca

SEQ ID NO: 4649147 - DNA, 25 bp, Homo sapien
aagcacagttggtgaactggtaacc

SEQ ID NO: 4649148 - DNA, 25 bp, Homo sapien
tgtttttcaccgtaaagcacagttg

SEQ ID NO: 4649149 - DNA, 25 bp, Homo sapien
caccgtaaagcacagttggtgaact

SEQ ID NO: 4649150 - DNA, 25 bp, Homo sapien
cacagttggtgaactggtaaccttt

SEQ ID NO: 4649151 - DNA, 25 bp, Homo sapien
cctgccaggtcatctgtcatggtgg

SEQ ID NO: 4649152 - DNA, 25 bp, Homo sapien
aacctgccaggtcatctgtcatggt

SEQ ID NO: 4649153 - DNA, 25 bp, Homo sapien
taacctgccaggtcatctgtcatgg

SEQ ID NO: 4649154 - DNA, 25 bp, Homo sapien
cataacctgccaggtcatctgtcat

SEQ ID NO: 4649155 - DNA, 25 bp, Homo sapien
aaaaaggaagcttttgctgagactc

SEQ ID NO: 4649156 - DNA, 25 bp, Homo sapien
agttgtaaaaaggaagcttttgctg

SEQ ID NO: 4649157 - DNA, 25 bp, Homo sapien
gtaaaaaggaagcttttgctgagac

SEQ ID NO: 4649158 - DNA, 25 bp, Homo sapien
ttgtaaaaaggaagcttttgctgag

SEQ ID NO: 4649159 - DNA, 25 bp, Homo sapien
catcactccattggcgcttccttca

SEQ ID NO: 4649160 - DNA, 25 bp, Homo sapien
tcatcactccattggcgcttccttc

SEQ ID NO: 4649161 - DNA, 25 bp, Homo sapien
tcactccattggcgcttccttcatg

SEQ ID NO: 4649162 - DNA, 25 bp, Homo sapien
actccattggcgcttccttcatggg

SEQ ID NO: 4649163 - DNA, 25 bp, Homo sapien
ttaggactgctctgatggaaaatga

SEQ ID NO: 4649164 - DNA, 25 bp, Homo sapien
tgcaccaaggcgaaacagaccattt

SEQ ID NO: 4649165 - DNA, 25 bp, Homo sapien
cagaccatttaaatcaattaggact

SEQ ID NO: 4649166 - DNA, 25 bp, Homo sapien
atgtgatcatgcgtgcaccaaggcg

SEQ ID NO: 4649167 - DNA, 25 bp, Homo sapien
cgcgcaggctcagggttgccgtgcc

SEQ ID NO: 4649168 - DNA, 25 bp, Homo sapien
gcgggcgagactggctgggttgtct

SEQ ID NO: 4649169 - DNA, 25 bp, Homo sapien
gggttgccgtgccagcgtcgctcca

SEQ ID NO: 4649170 - DNA, 25 bp, Homo sapien
tctgagccgtaggtgtgcgagtttg

SEQ ID NO: 4649171 - DNA, 25 bp, Homo sapien
cacaagttaccgatagggctaggac

SEQ ID NO: 4649172 - DNA, 25 bp, Homo sapien
gaggaacacaagttaccgatagggc

SEQ ID NO: 4649173 - DNA, 25 bp, Homo sapien
cgatagggctaggacgacgtacagc

SEQ ID NO: 4649174 - DNA, 25 bp, Homo sapien
gccttcccacggcttctgcggacag

SEQ ID NO: 4649175 - DNA, 25 bp, Homo sapien
acaaaacagtctcggaggctgagcg

SEQ ID NO: 4649176 - DNA, 25 bp, Homo sapien
ctgggacaaaacagtctcggaggct

SEQ ID NO: 4649177 - DNA, 25 bp, Homo sapien
aacagtctcggaggctgagcgaagc

SEQ ID NO: 4649178 - DNA, 25 bp, Homo sapien
aggctgagcgaagcgccccgagcct

SEQ ID NO: 4649179 - DNA, 25 bp, Homo sapien
gcttggccagtgtcttcggcctcgg

SEQ ID NO: 4649180 - DNA, 25 bp, Homo sapien
ttcggcctcggcgagccaggttcca

SEQ ID NO: 4649181 - DNA, 25 bp, Homo sapien
cacaacctcaggttcagcgccaggg

SEQ ID NO: 4649182 - DNA, 25 bp, Homo sapien
tgggtgagctcgctacagcccgcag

SEQ ID NO: 4649183 - DNA, 25 bp, Homo sapien
cacaaaaaatgagccaggccctcac

SEQ ID NO: 4649184 - DNA, 25 bp, Homo sapien
gcacaaaaaatgagccaggccctca

SEQ ID NO: 4649185 - DNA, 25 bp, Homo sapien
gagcacaaaaaatgagccaggccct

SEQ ID NO: 4649186 - DNA, 25 bp, Homo sapien
ctgagcacaaaaaatgagccaggcc

SEQ ID NO: 4649187 - DNA, 25 bp, Homo sapien
gaattccaaggacgctcacagtttg

SEQ ID NO: 4649188 - DNA, 25 bp, Homo sapien
acacttaagggctctccggacttcg

SEQ ID NO: 4649189 - DNA, 25 bp, Homo sapien
aaatcttgggcgcataacgcgaacc

SEQ ID NO: 4649190 - DNA, 25 bp, Homo sapien
ccttccgcgggttgctggaacagca

SEQ ID NO: 4649191 - DNA, 25 bp, Homo sapien
tctcctgccttctccgaattgcctg

SEQ ID NO: 4649192 - DNA, 25 bp, Homo sapien
tccgcactccgttcctggggcctgg

SEQ ID NO: 4649193 - DNA, 25 bp, Homo sapien
tcctgccttctccgaattgcctggt

SEQ ID NO: 4649194 - DNA, 25 bp, Homo sapien
ctccgcactccgttcctggggcctg

SEQ ID NO: 4649195 - DNA, 25 bp, Homo sapien
tttggtcgctgtacgagctcttccc

SEQ ID NO: 4649196 - DNA, 25 bp, Homo sapien
agcgctgtgtgtgctcgcggtagta

SEQ ID NO: 4649197 - DNA, 25 bp, Homo sapien
cggcccgcactggaccacagaatct

SEQ ID NO: 4649198 - DNA, 25 bp, Homo sapien
cgggcctccgcggaatcttgatgaa

SEQ ID NO: 4649199 - DNA, 25 bp, Homo sapien
gcccggcgcgctcttggtgcttccc

SEQ ID NO: 4649200 - DNA, 25 bp, Homo sapien
agtgagtatggtcggcgcgcagcac

SEQ ID NO: 4649201 - DNA, 25 bp, Homo sapien
tcccgcgtgcaagtgagtatggtcg

SEQ ID NO: 4649202 - DNA, 25 bp, Homo sapien
tcttggtgcttcccgcgtgcaagtg

SEQ ID NO: 4649203 - DNA, 25 bp, Homo sapien
tggaaatagtgtaccatgtgcggcg

SEQ ID NO: 4649204 - DNA, 25 bp, Homo sapien
cagtaggcggttgctgatggaaata

SEQ ID NO: 4649205 - DNA, 25 bp, Homo sapien
tgggaactgagacaggcgtcccacg

SEQ ID NO: 4649206 - DNA, 25 bp, Homo sapien
gcccagcccgtagggtgggaactga

SEQ ID NO: 4649207 - DNA, 25 bp, Homo sapien
tcaatggcaaaggggtgcttgaagc

SEQ ID NO: 4649208 - DNA, 25 bp, Homo sapien
ctcaatggcaaaggggtgcttgaag

SEQ ID NO: 4649209 - DNA, 25 bp, Homo sapien
gcggccacacggagctgacgacgtt

SEQ ID NO: 4649210 - DNA, 25 bp, Homo sapien
cgcccttgtagtcccggccaataat

SEQ ID NO: 4649211 - DNA, 25 bp, Homo sapien
acgacgttgccaagctggccgggca

SEQ ID NO: 4649212 - DNA, 25 bp, Homo sapien
ccaggtggtgcatgacggacgccaa

SEQ ID NO: 4649213 - DNA, 25 bp, Homo sapien
ctgcggcggccgcggcggcggccac

SEQ ID NO: 4649214 - DNA, 25 bp, Homo sapien
ccggctgcggctgcggcggccgcgg

SEQ ID NO: 4649215 - DNA, 25 bp, Homo sapien
ggctgcggcggccgcggcggcggcc

SEQ ID NO: 4649216 - DNA, 25 bp, Homo sapien
ggctgcggctgcggcggccgcggcg

SEQ ID NO: 4649217 - DNA, 25 bp, Homo sapien
ccggaggctgctgcgaagccgcggg

SEQ ID NO: 4649218 - DNA, 25 bp, Homo sapien
ctgcagcgcggacacgggcggcagc

SEQ ID NO: 4649219 - DNA, 25 bp, Homo sapien
ggacagtgagccccggctgcagcgc

SEQ ID NO: 4649220 - DNA, 25 bp, Homo sapien
caggctctggcttgccgagtggcac

SEQ ID NO: 4649221 - DNA, 25 bp, Homo sapien
actagcaccgagtgcaaggagccgc

SEQ ID NO: 4649222 - DNA, 25 bp, Homo sapien
agcagagaggcaacgggcgaggccg

SEQ ID NO: 4649223 - DNA, 25 bp, Homo sapien
ctaggagtgcactagcaccgagtgc

SEQ ID NO: 4649224 - DNA, 25 bp, Homo sapien
aaggagccgcccttgctttcggccg

SEQ ID NO: 4649225 - DNA, 25 bp, Homo sapien
tgtacaacatagtataaacacagac

SEQ ID NO: 4649226 - DNA, 25 bp, Homo sapien
ctttcattaatctgattgtacaaca

SEQ ID NO: 4649227 - DNA, 25 bp, Homo sapien
tctgattgtacaacatagtataaac

SEQ ID NO: 4649228 - DNA, 25 bp, Homo sapien
cattaatctgattgtacaacatagt

SEQ ID NO: 4649229 - DNA, 25 bp, Homo sapien
taattcgcctgaaagacataagcgc

SEQ ID NO: 4649230 - DNA, 25 bp, Homo sapien
taagcgctcaaacagcacacggaat

SEQ ID NO: 4649231 - DNA, 25 bp, Homo sapien
ggcaagagcgacaaggcaagtttct

SEQ ID NO: 4649232 - DNA, 25 bp, Homo sapien
cagccgcagcgtgcaaaggtgactg

SEQ ID NO: 4649233 - DNA, 25 bp, Homo sapien
tgttgcgggtttttgctaattcagt

SEQ ID NO: 4649234 - DNA, 25 bp, Homo sapien
tgcgggtttttgctaattcagtctc

SEQ ID NO: 4649235 - DNA, 25 bp, Homo sapien
gtttttgctaattcagtctctacca

SEQ ID NO: 4649236 - DNA, 25 bp, Homo sapien
cgggtttttgctaattcagtctcta

SEQ ID NO: 4649237 - DNA, 25 bp, Homo sapien
tttcacccaccaagaactctgcggt

SEQ ID NO: 4649238 - DNA, 25 bp, Homo sapien
ttgcctagttgatgcggcagcggca

SEQ ID NO: 4649239 - DNA, 25 bp, Homo sapien
ctccgtccaggaccgcagacttaag

SEQ ID NO: 4649240 - DNA, 25 bp, Homo sapien
ggtgtcggcgcgcaacaggtcttct

SEQ ID NO: 4649241 - DNA, 25 bp, Homo sapien
ctgtgaaaaccaaaccaaaccactg

SEQ ID NO: 4649242 - DNA, 25 bp, Homo sapien
tccagtctccacttcgttcacagct

SEQ ID NO: 4649243 - DNA, 25 bp, Homo sapien
tctccacttcgttcacagcttcctt

SEQ ID NO: 4649244 - DNA, 25 bp, Homo sapien
ctttgtgaaccaaggttcccttctg

SEQ ID NO: 4649245 - DNA, 25 bp, Homo sapien
tgaaccaaggttcccttctggatga

SEQ ID NO: 4649246 - DNA, 25 bp, Homo sapien
gaagttgaaggggaatagggtcatg

SEQ ID NO: 4649247 - DNA, 25 bp, Homo sapien
gaatagggtcatgggcaaaggtagt

SEQ ID NO: 4649248 - DNA, 25 bp, Homo sapien
tgaaggggaatagggtcatgggcaa

SEQ ID NO: 4649249 - DNA, 25 bp, Homo sapien
gttgaaggggaatagggtcatgggc

SEQ ID NO: 4649250 - DNA, 25 bp, Homo sapien
taacctctttgaatccctgcggcaa

SEQ ID NO: 4649251 - DNA, 25 bp, Homo sapien
gactcgatcctgcatcaagatccag

SEQ ID NO: 4649252 - DNA, 25 bp, Homo sapien
tatcggaagagcatgtagcctgcca

SEQ ID NO: 4649253 - DNA, 25 bp, Homo sapien
cctgcggcaatgactcgatcctgca

SEQ ID NO: 4649254 - DNA, 25 bp, Homo sapien
aattgttgaagtcagattcctcccc

SEQ ID NO: 4649255 - DNA, 25 bp, Homo sapien
atactggaaagatccaccgggcacg

SEQ ID NO: 4649256 - DNA, 25 bp, Homo sapien
tgaggtccagcaacccttaaatgtt

SEQ ID NO: 4649257 - DNA, 25 bp, Homo sapien
gaaatgtgaagctcctcatgtatta

SEQ ID NO: 4649258 - DNA, 25 bp, Homo sapien
tgtcctatggtttgtaaaggagtca

SEQ ID NO: 4649259 - DNA, 25 bp, Homo sapien
actcctgtcctatggtttgtaaagg

SEQ ID NO: 4649260 - DNA, 25 bp, Homo sapien
gcctactcctgtcctatggtttgta

SEQ ID NO: 4649261 - DNA, 25 bp, Homo sapien
cctatggtttgtaaaggagtcacca

SEQ ID NO: 4649262 - DNA, 25 bp, Homo sapien
gacacttcagacattggctccagaa

SEQ ID NO: 4649263 - DNA, 25 bp, Homo sapien
actcttgcctatccaccaggttcca

SEQ ID NO: 4649264 - DNA, 25 bp, Homo sapien
ccacggtcaccttcccaatattcat

SEQ ID NO: 4649265 - DNA, 25 bp, Homo sapien
gagacgtcctgctcctactgttcca

SEQ ID NO: 4649266 - DNA, 25 bp, Homo sapien
tagagagcaaatttggtcttcccaa

SEQ ID NO: 4649267 - DNA, 25 bp, Homo sapien
ttagagagcaaatttggtcttccca

SEQ ID NO: 4649268 - DNA, 25 bp, Homo sapien
tagatcttccatgatggtgcattct

SEQ ID NO: 4649269 - DNA, 25 bp, Homo sapien
gatggtgcattcttcctgtccggct

SEQ ID NO: 4649270 - DNA, 25 bp, Homo sapien
tcagtataggggactaccctcaggg

SEQ ID NO: 4649271 - DNA, 25 bp, Homo sapien
tgtcatgaacgtgctcagtataggg

SEQ ID NO: 4649272 - DNA, 25 bp, Homo sapien
ccctcaggggaggacggccagtcat

SEQ ID NO: 4649273 - DNA, 25 bp, Homo sapien
ctgtagaaatgtcatgaacgtgctc

SEQ ID NO: 4649274 - DNA, 25 bp, Homo sapien
tggtcctccaactgtctggtagaaa

SEQ ID NO: 4649275 - DNA, 25 bp, Homo sapien
gctcctcaaagactttcggtggtcc

SEQ ID NO: 4649276 - DNA, 25 bp, Homo sapien
aagactttcggtggtcctccaactg

SEQ ID NO: 4649277 - DNA, 25 bp, Homo sapien
ccaagtatggattttggggcaagct

SEQ ID NO: 4649278 - DNA, 25 bp, Homo sapien
tggcattccaaatactaccctgttg

SEQ ID NO: 4649279 - DNA, 25 bp, Homo sapien
cagcttgtgtgagtgccagctgcag

SEQ ID NO: 4649280 - DNA, 25 bp, Homo sapien
tgtcacagcttgtgtgagtgccagc

SEQ ID NO: 4649281 - DNA, 25 bp, Homo sapien
tattaaatgacctgcattggcatga

SEQ ID NO: 4649282 - DNA, 25 bp, Homo sapien
gacaggtactgtagcttcctcacta

SEQ ID NO: 4649283 - DNA, 25 bp, Homo sapien
aagtagaatgacaggtactgtagct

SEQ ID NO: 4649284 - DNA, 25 bp, Homo sapien
tagaatgacaggtactgtagcttcc

SEQ ID NO: 4649285 - DNA, 25 bp, Homo sapien
gaatgacaggtactgtagcttcctc

SEQ ID NO: 4649286 - DNA, 25 bp, Homo sapien
gcttgctcctcaacaatgctgacgt

SEQ ID NO: 4649287 - DNA, 25 bp, Homo sapien
cagggtgtagactctggtgacagaa

SEQ ID NO: 4649288 - DNA, 25 bp, Homo sapien
gagcctatctcctgccccttgtttg

SEQ ID NO: 4649289 - DNA, 25 bp, Homo sapien
tgctgacgtctctggcactgagcct

SEQ ID NO: 4649290 - DNA, 25 bp, Homo sapien
ggatggagttacatagtccctgccc

SEQ ID NO: 4649291 - DNA, 25 bp, Homo sapien
gagttaacttcctgctgcgagtcga

SEQ ID NO: 4649292 - DNA, 25 bp, Homo sapien
tacggagctgtctttcattccaaag

SEQ ID NO: 4649293 - DNA, 25 bp, Homo sapien
cgcttccacgcgtatgacagggctc

SEQ ID NO: 4649294 - DNA, 25 bp, Homo sapien
agcccagcgagagacggaggcggtc

SEQ ID NO: 4649295 - DNA, 25 bp, Homo sapien
gtgggcacggcagccggcccgtgcg

SEQ ID NO: 4649296 - DNA, 25 bp, Homo sapien
aggcggtcgctctcacgacgcgtgc

SEQ ID NO: 4649297 - DNA, 25 bp, Homo sapien
ctcgaggtaattcggttcaccggct

SEQ ID NO: 4649298 - DNA, 25 bp, Homo sapien
ccacgaccaccgactcgaaaaccat

SEQ ID NO: 4649299 - DNA, 25 bp, Homo sapien
tgggacgtgtccaagtccaccacat

SEQ ID NO: 4649300 - DNA, 25 bp, Homo sapien
caagaaccggttcaacacgtccacg

SEQ ID NO: 4649301 - DNA, 25 bp, Homo sapien
cacgtccacgaccaccgactcgaaa

SEQ ID NO: 4649302 - DNA, 25 bp, Homo sapien
ttgttatccgccgaacccaggcgag

SEQ ID NO: 4649303 - DNA, 25 bp, Homo sapien
tccgccgaacccaggcgagagagag

SEQ ID NO: 4649304 - DNA, 25 bp, Homo sapien
agagcagaaagcaccacgggtgaag

SEQ ID NO: 4649305 - DNA, 25 bp, Homo sapien
aacccaggcgagagagagccggcgt

SEQ ID NO: 4649306 - DNA, 25 bp, Homo sapien
gaacagaactatcttgcccatggca

SEQ ID NO: 4649307 - DNA, 25 bp, Homo sapien
tgagctgagccttggtacccagaaa

SEQ ID NO: 4649308 - DNA, 25 bp, Homo sapien
caattgcaatggacgctgatgccca

SEQ ID NO: 4649309 - DNA, 25 bp, Homo sapien
tagaatcctagctgaaggaggctcc

SEQ ID NO: 4649310 - DNA, 25 bp, Homo sapien
ttgaagattcttgagggccacagct

SEQ ID NO: 4649311 - DNA, 25 bp, Homo sapien
tttgaagattcttgagggccacagc

SEQ ID NO: 4649312 - DNA, 25 bp, Homo sapien
tgaagattcttgagggccacagctc

SEQ ID NO: 4649313 - DNA, 25 bp, Homo sapien
atgtgaccaactttaactttaaatg

SEQ ID NO: 4649314 - DNA, 25 bp, Homo sapien
tacacagatgtaattccaaaaacct

SEQ ID NO: 4649315 - DNA, 25 bp, Homo sapien
gatcaatacccaataatagcaaggg

SEQ ID NO: 4649316 - DNA, 25 bp, Homo sapien
gtagactcctagtagaaaatttggc

SEQ ID NO: 4649317 - DNA, 25 bp, Homo sapien
taattctgcattctaaacgagggaa

SEQ ID NO: 4649318 - DNA, 25 bp, Homo sapien
tttcttccaatacggcttcaacagg

SEQ ID NO: 4649319 - DNA, 25 bp, Homo sapien
cttccaatacggcttcaacaggttg

SEQ ID NO: 4649320 - DNA, 25 bp, Homo sapien
tacggcttcaacaggttgagtataa

SEQ ID NO: 4649321 - DNA, 25 bp, Homo sapien
cttcaacaggttgagtataaaggtt

SEQ ID NO: 4649322 - DNA, 25 bp, Homo sapien
ttgcttccatgagttgtttctcttc

SEQ ID NO: 4649323 - DNA, 25 bp, Homo sapien
ctttgcttccatgagttgtttctct

SEQ ID NO: 4649324 - DNA, 25 bp, Homo sapien
ttcaggacaccgcttccaataatga

SEQ ID NO: 4649325 - DNA, 25 bp, Homo sapien
cagcgtatttacatgccaaggcaaa

SEQ ID NO: 4649326 - DNA, 25 bp, Homo sapien
tctccaaaagggtgaagaattgata

SEQ ID NO: 4649327 - DNA, 25 bp, Homo sapien
gaaaaagaggttgcagtaatggaac

SEQ ID NO: 4649328 - DNA, 25 bp, Homo sapien
gtgtcctgtttttccggcagatgtt

SEQ ID NO: 4649329 - DNA, 25 bp, Homo sapien
tcctgtttttccggcagatgttgtt

SEQ ID NO: 4649330 - DNA, 25 bp, Homo sapien
tgtcctgtttttccggcagatgttg

SEQ ID NO: 4649331 - DNA, 25 bp, Homo sapien
gtcctgtttttccggcagatgttgt

SEQ ID NO: 4649332 - DNA, 25 bp, Homo sapien
gaagattttttatgatctgtgtaac

SEQ ID NO: 4649333 - DNA, 25 bp, Homo sapien
gattttttatgatctgtgtaactaa

SEQ ID NO: 4649334 - DNA, 25 bp, Homo sapien
catcttcataacgaatatggatact

SEQ ID NO: 4649335 - DNA, 25 bp, Homo sapien
taacgaatatggatactggaaattt

SEQ ID NO: 4649336 - DNA, 25 bp, Homo sapien
ataccaaatgacagcggtttgtccc

SEQ ID NO: 4649337 - DNA, 25 bp, Homo sapien
gacagcggtttgtcccgatttgtga

SEQ ID NO: 4649338 - DNA, 25 bp, Homo sapien
tcagattttgaagggaaataccaaa

SEQ ID NO: 4649339 - DNA, 25 bp, Homo sapien
tgcatgctcagattttgaagggaaa

SEQ ID NO: 4649340 - DNA, 25 bp, Homo sapien
tatcacggttaccaaagatcttcac

SEQ ID NO: 4649341 - DNA, 25 bp, Homo sapien
gaaatcttacacaaaacccaataga

SEQ ID NO: 4649342 - DNA, 25 bp, Homo sapien
caacactggaaagtgcaaaaaggaa

SEQ ID NO: 4649343 - DNA, 25 bp, Homo sapien
aaagaaactgtggagtctctctgag

SEQ ID NO: 4649344 - DNA, 25 bp, Homo sapien
ttcatcatgtaaacatggaacccag

SEQ ID NO: 4649345 - DNA, 25 bp, Homo sapien
aataggcaaacaggttatccaatcg

SEQ ID NO: 4649346 - DNA, 25 bp, Homo sapien
attccaataggcaaacaggttatcc

SEQ ID NO: 4649347 - DNA, 25 bp, Homo sapien
caaggagttatcataatcactaaga

SEQ ID NO: 4649348 - DNA, 25 bp, Homo sapien
ggcaaacaggttatccaatcggatt

SEQ ID NO: 4649349 - DNA, 25 bp, Homo sapien
tcataaccttctggaacaatatttt

SEQ ID NO: 4649350 - DNA, 25 bp, Homo sapien
tgacaatgccattcttcaagtcgtc

SEQ ID NO: 4649351 - DNA, 25 bp, Homo sapien
cataaccttctggaacaatattttc

SEQ ID NO: 4649352 - DNA, 25 bp, Homo sapien
aaccttctggaacaatattttcatt

SEQ ID NO: 4649353 - DNA, 25 bp, Homo sapien
cagtacatggcagctagatgcagcc

SEQ ID NO: 4649354 - DNA, 25 bp, Homo sapien
tcagcaccggccttatgcagtacat

SEQ ID NO: 4649355 - DNA, 25 bp, Homo sapien
gaaagagttatgctgcctggttcca

SEQ ID NO: 4649356 - DNA, 25 bp, Homo sapien
gaagtaccaacaggttttgctggca

SEQ ID NO: 4649357 - DNA, 25 bp, Homo sapien
aaattcaattgctatgttatgtaac

SEQ ID NO: 4649358 - DNA, 25 bp, Homo sapien
cggcgattcatcacaagtttggcat

SEQ ID NO: 4649359 - DNA, 25 bp, Homo sapien
aagtcaaaatcagatcggcgattca

SEQ ID NO: 4649360 - DNA, 25 bp, Homo sapien
tatgtaactcaatttccaagtttat

SEQ ID NO: 4649361 - DNA, 25 bp, Homo sapien
tctggcatggtggtgaagaggcaca

SEQ ID NO: 4649362 - DNA, 25 bp, Homo sapien
gaagaggcacatcaggtttgaactt

SEQ ID NO: 4649363 - DNA, 25 bp, Homo sapien
gtgccatcatatcaactgattcaag

SEQ ID NO: 4649364 - DNA, 25 bp, Homo sapien
tgaacttcctatatggcagattttg

SEQ ID NO: 4649365 - DNA, 25 bp, Homo sapien
caaagacacgagaagttcaccaggt

SEQ ID NO: 4649366 - DNA, 25 bp, Homo sapien
gaacgccatgtatagcataagccca

SEQ ID NO: 4649367 - DNA, 25 bp, Homo sapien
caccaggtggcttcttacttgttaa

SEQ ID NO: 4649368 - DNA, 25 bp, Homo sapien
tccatgaccacatccataacctggg

SEQ ID NO: 4649369 - DNA, 25 bp, Homo sapien
tagttatattaaagacatccaaggt

SEQ ID NO: 4649370 - DNA, 25 bp, Homo sapien
tcaacttctgccgtctgtctagcta

SEQ ID NO: 4649371 - DNA, 25 bp, Homo sapien
acttctgccgtctgtctagctatag

SEQ ID NO: 4649372 - DNA, 25 bp, Homo sapien
gccgtctgtctagctatagttatat

SEQ ID NO: 4649373 - DNA, 25 bp, Homo sapien
tttgttctgaccaagaccatagcca

SEQ ID NO: 4649374 - DNA, 25 bp, Homo sapien
catagccagctaaaccaccctttat

SEQ ID NO: 4649375 - DNA, 25 bp, Homo sapien
tatcctctggatcttttactccttc

SEQ ID NO: 4649376 - DNA, 25 bp, Homo sapien
aaccaccctttattatcctctggat

SEQ ID NO: 4649377 - DNA, 25 bp, Homo sapien
tgtttcactatagccaattgcttca

SEQ ID NO: 4649378 - DNA, 25 bp, Homo sapien
aactgctgtttcactatagccaatt

SEQ ID NO: 4649379 - DNA, 25 bp, Homo sapien
gccaattgcttcatagagtaaagct

SEQ ID NO: 4649380 - DNA, 25 bp, Homo sapien
cactatagccaattgcttcatagag

SEQ ID NO: 4649381 - DNA, 25 bp, Homo sapien
ggtctttgcacaattaaggtgctaa

SEQ ID NO: 4649382 - DNA, 25 bp, Homo sapien
tcttagaacaatagacatacttttc

SEQ ID NO: 4649383 - DNA, 25 bp, Homo sapien
tattacaatatctaccagctcaggt

SEQ ID NO: 4649384 - DNA, 25 bp, Homo sapien
ggtgctaaattcttctattacaata

SEQ ID NO: 4649385 - DNA, 25 bp, Homo sapien
tttctgaattatctggtaagccagt

SEQ ID NO: 4649386 - DNA, 25 bp, Homo sapien
ttctatgatacacctctgagaaaca

SEQ ID NO: 4649387 - DNA, 25 bp, Homo sapien
ctaaaggttcagcttctatgataca

SEQ ID NO: 4649388 - DNA, 25 bp, Homo sapien
ggtaagccagtaatatgaaatgaat

SEQ ID NO: 4649389 - DNA, 25 bp, Homo sapien
ctgtcttactgcgaaattcttccag

SEQ ID NO: 4649390 - DNA, 25 bp, Homo sapien
aggtctgaagaattccactatacta

SEQ ID NO: 4649391 - DNA, 25 bp, Homo sapien
ctgttgctgtcttactgcgaaattc

SEQ ID NO: 4649392 - DNA, 25 bp, Homo sapien
aattccactatactattcactgtcc

SEQ ID NO: 4649393 - DNA, 25 bp, Homo sapien
aatagaggtccaagtatcctaagca

SEQ ID NO: 4649394 - DNA, 25 bp, Homo sapien
aacgagaggccagtttttgtcataa

SEQ ID NO: 4649395 - DNA, 25 bp, Homo sapien
aatctggaacgcattctaagaaagg

SEQ ID NO: 4649396 - DNA, 25 bp, Homo sapien
tccctgaggctgatatatcaaaatc

SEQ ID NO: 4649397 - DNA, 25 bp, Homo sapien
actgttagaacaaggtgacaaaagg

SEQ ID NO: 4649398 - DNA, 25 bp, Homo sapien
caaactgacagatctattagaaata

SEQ ID NO: 4649399 - DNA, 25 bp, Homo sapien
agaaaaatctacattgataatgagg

SEQ ID NO: 4649400 - DNA, 25 bp, Homo sapien
ccccgtctctattatgattttgcca

SEQ ID NO: 4649401 - DNA, 25 bp, Homo sapien
tctgaatgtctatagtggatttcca

SEQ ID NO: 4649402 - DNA, 25 bp, Homo sapien
gaagtagcctgatcttatgctttgg

SEQ ID NO: 4649403 - DNA, 25 bp, Homo sapien
caaagaatacaggaataaatgcaaa

SEQ ID NO: 4649404 - DNA, 25 bp, Homo sapien
taaactaggaatggaattcccagat

SEQ ID NO: 4649405 - DNA, 25 bp, Homo sapien
gaccaaggtccaaaagaagcagatt

SEQ ID NO: 4649406 - DNA, 25 bp, Homo sapien
ttgtgggacaataatatatgaagcc

SEQ ID NO: 4649407 - DNA, 25 bp, Homo sapien
tgaagccttcaaattaattttgaga

SEQ ID NO: 4649408 - DNA, 25 bp, Homo sapien
gaagcagatttgatgtaggactaaa

SEQ ID NO: 4649409 - DNA, 25 bp, Homo sapien
tggtaattcagaacgacttttactc

SEQ ID NO: 4649410 - DNA, 25 bp, Homo sapien
attcagaacgacttttactcgtcac

SEQ ID NO: 4649411 - DNA, 25 bp, Homo sapien
aattcagaacgacttttactcgtca

SEQ ID NO: 4649412 - DNA, 25 bp, Homo sapien
taattcagaacgacttttactcgtc

SEQ ID NO: 4649413 - DNA, 25 bp, Homo sapien
tgaatcataagctctatccattatc

SEQ ID NO: 4649414 - DNA, 25 bp, Homo sapien
tatccattatctctttaagattggc

SEQ ID NO: 4649415 - DNA, 25 bp, Homo sapien
tctctttaagattggcctcaccttg

SEQ ID NO: 4649416 - DNA, 25 bp, Homo sapien
aagattggcctcaccttgtttcaca

SEQ ID NO: 4649417 - DNA, 25 bp, Homo sapien
ctaagtacagaaaatagttcatatt

SEQ ID NO: 4649418 - DNA, 25 bp, Homo sapien
cagaaaatagttcatatttaacgta

SEQ ID NO: 4649419 - DNA, 25 bp, Homo sapien
agtacagaaaatagttcatatttaa

SEQ ID NO: 4649420 - DNA, 25 bp, Homo sapien
tacagaaaatagttcatatttaacg

SEQ ID NO: 4649421 - DNA, 25 bp, Homo sapien
ccaaaatatgctgggtagatacact

SEQ ID NO: 4649422 - DNA, 25 bp, Homo sapien
ccttagacagttccaaattgaagtg

SEQ ID NO: 4649423 - DNA, 25 bp, Homo sapien
tgggcatccttacatccatgaaaac

SEQ ID NO: 4649424 - DNA, 25 bp, Homo sapien
tgaagtgcatgggtaccaaaatatg

SEQ ID NO: 4649425 - DNA, 25 bp, Homo sapien
caatcaattccataatcccttgtag

SEQ ID NO: 4649426 - DNA, 25 bp, Homo sapien
gaatgatttgacaggggcagatact

SEQ ID NO: 4649427 - DNA, 25 bp, Homo sapien
gatacttcagttactggttcaggtt

SEQ ID NO: 4649428 - DNA, 25 bp, Homo sapien
agttttttatctgagattcgtaaag

SEQ ID NO: 4649429 - DNA, 25 bp, Homo sapien
tccacagaactacaaactactatca

SEQ ID NO: 4649430 - DNA, 25 bp, Homo sapien
tgattccacagaactacaaactact

SEQ ID NO: 4649431 - DNA, 25 bp, Homo sapien
caaaatacatagactgctagccaga

SEQ ID NO: 4649432 - DNA, 25 bp, Homo sapien
tcaaaaatatcagtgaatccaggtg

SEQ ID NO: 4649433 - DNA, 25 bp, Homo sapien
ggtctatgcttcaagttaaattccg

SEQ ID NO: 4649434 - DNA, 25 bp, Homo sapien
caatgtcttccaaacagcagaaaaa

SEQ ID NO: 4649435 - DNA, 25 bp, Homo sapien
tgtcatggcaacaccttgacatggt

SEQ ID NO: 4649436 - DNA, 25 bp, Homo sapien
taaggtatctttacctactgcaagg

SEQ ID NO: 4649437 - DNA, 25 bp, Homo sapien
atcttcagaaacagatggaagttcc

SEQ ID NO: 4649438 - DNA, 25 bp, Homo sapien
tacgccactcgaaaacatgtctttt

SEQ ID NO: 4649439 - DNA, 25 bp, Homo sapien
tacagaagaccaaaatacgccactc

SEQ ID NO: 4649440 - DNA, 25 bp, Homo sapien
ggaagatgactcttactcccaagac

SEQ ID NO: 4649441 - DNA, 25 bp, Homo sapien
ctctgaagacagatcctaagtttcc

SEQ ID NO: 4649442 - DNA, 25 bp, Homo sapien
ggttcttccaagggactacatggtg

SEQ ID NO: 4649443 - DNA, 25 bp, Homo sapien
tctggttcgaatacttttaactcca

SEQ ID NO: 4649444 - DNA, 25 bp, Homo sapien
gttcttccaagggactacatggtgc

SEQ ID NO: 4649445 - DNA, 25 bp, Homo sapien
gaatttctaccacagatagttcaca

SEQ ID NO: 4649446 - DNA, 25 bp, Homo sapien
tccaacaaggtgataaaactcgatc

SEQ ID NO: 4649447 - DNA, 25 bp, Homo sapien
tttctgcacccaatcctaaaacaag

SEQ ID NO: 4649448 - DNA, 25 bp, Homo sapien
aaggcatttgctttcaaatcgtatg

SEQ ID NO: 4649449 - DNA, 25 bp, Homo sapien
atacccttctaaacctagataggag

SEQ ID NO: 4649450 - DNA, 25 bp, Homo sapien
tcatacccttctaaacctagatagg

SEQ ID NO: 4649451 - DNA, 25 bp, Homo sapien
cttctaaacctagataggaggtaag

SEQ ID NO: 4649452 - DNA, 25 bp, Homo sapien
gtctcatacccttctaaacctagat

SEQ ID NO: 4649453 - DNA, 25 bp, Homo sapien
cagcgttaacaggtcttccattgtg

SEQ ID NO: 4649454 - DNA, 25 bp, Homo sapien
tattccagcgttaacaggtcttcca

SEQ ID NO: 4649455 - DNA, 25 bp, Homo sapien
ttccattgtgttatccagggttgta

SEQ ID NO: 4649456 - DNA, 25 bp, Homo sapien
ctttacatattccagcgttaacagg

SEQ ID NO: 4649457 - DNA, 25 bp, Homo sapien
tttcaagtcgggtacattcttttca

SEQ ID NO: 4649458 - DNA, 25 bp, Homo sapien
tcaagtcgggtacattcttttcagc

SEQ ID NO: 4649459 - DNA, 25 bp, Homo sapien
cttaatcaattgtaaaacattgtta

SEQ ID NO: 4649460 - DNA, 25 bp, Homo sapien
ttcaagtcgggtacattcttttcag

SEQ ID NO: 4649461 - DNA, 25 bp, Homo sapien
tcagtgtgtaaatgaatatccaaag

SEQ ID NO: 4649462 - DNA, 25 bp, Homo sapien
cagtgtgtaaatgaatatccaaaga

SEQ ID NO: 4649463 - DNA, 25 bp, Homo sapien
ctgattgcggaaggatattatgaag

SEQ ID NO: 4649464 - DNA, 25 bp, Homo sapien
tgcggaaggatattatgaagataat

SEQ ID NO: 4649465 - DNA, 25 bp, Homo sapien
attttttaatgacatctcctttgtc

SEQ ID NO: 4649466 - DNA, 25 bp, Homo sapien
ttgtcttcagtctctgtagtggaca

SEQ ID NO: 4649467 - DNA, 25 bp, Homo sapien
ttcagtctctgtagtggacactggg

SEQ ID NO: 4649468 - DNA, 25 bp, Homo sapien
tttttaatgacatctcctttgtctt

SEQ ID NO: 4649469 - DNA, 25 bp, Homo sapien
cccagctgacaatactcaaattttg

SEQ ID NO: 4649470 - DNA, 25 bp, Homo sapien
taaactgggtctacagacaaacacc

SEQ ID NO: 4649471 - DNA, 25 bp, Homo sapien
tagctcaaagatcgctgcaaccttg

SEQ ID NO: 4649472 - DNA, 25 bp, Homo sapien
tagtcatatttgtctaatctaaaat

SEQ ID NO: 4649473 - DNA, 25 bp, Homo sapien
aaatctgcaaagtaatgatatcttc

SEQ ID NO: 4649474 - DNA, 25 bp, Homo sapien
taaagatctgtaaacacgataattc

SEQ ID NO: 4649475 - DNA, 25 bp, Homo sapien
tgtaaacacgataattctgctaaaa

SEQ ID NO: 4649476 - DNA, 25 bp, Homo sapien
aaatgttacatttctgatcttgaat

SEQ ID NO: 4649477 - DNA, 25 bp, Homo sapien
ttctgaaggcctcataatcatctca

SEQ ID NO: 4649478 - DNA, 25 bp, Homo sapien
tttctgaaggcctcataatcatctc

SEQ ID NO: 4649479 - DNA, 25 bp, Homo sapien
tccttagctttgcgtttatttcagt

SEQ ID NO: 4649480 - DNA, 25 bp, Homo sapien
tattccttagctttgcgtttatttc

SEQ ID NO: 4649481 - DNA, 25 bp, Homo sapien
gaggcatccccgtttccagacataa

SEQ ID NO: 4649482 - DNA, 25 bp, Homo sapien
taaattgttccacttcagagcatca

SEQ ID NO: 4649483 - DNA, 25 bp, Homo sapien
tatgagatgccctataaaagcaagg

SEQ ID NO: 4649484 - DNA, 25 bp, Homo sapien
gggactcctgctatgcatgatatga

SEQ ID NO: 4649485 - DNA, 25 bp, Homo sapien
tatagaaatttcgtgacaaaaacta

SEQ ID NO: 4649486 - DNA, 25 bp, Homo sapien
cagaaccagcagttgcatccatgta

SEQ ID NO: 4649487 - DNA, 25 bp, Homo sapien
aaaactacttcaatgcaaccaacta

SEQ ID NO: 4649488 - DNA, 25 bp, Homo sapien
taaattaacctgaatgtcaaccaca

SEQ ID NO: 4649489 - DNA, 25 bp, Homo sapien
gctttgatgttaatatccagtgcca

SEQ ID NO: 4649490 - DNA, 25 bp, Homo sapien
gaaactggagactgcgggatgacca

SEQ ID NO: 4649491 - DNA, 25 bp, Homo sapien
ccaaggcttgtttagctgcctgaaa

SEQ ID NO: 4649492 - DNA, 25 bp, Homo sapien
gcgagttcttttacaccagtagcag

SEQ ID NO: 4649493 - DNA, 25 bp, Homo sapien
ggtatgcatcattaataaatcgaga

SEQ ID NO: 4649494 - DNA, 25 bp, Homo sapien
gtatgcatcattaataaatcgagat

SEQ ID NO: 4649495 - DNA, 25 bp, Homo sapien
tggtatgcatcattaataaatcgag

SEQ ID NO: 4649496 - DNA, 25 bp, Homo sapien
ctggtatgcatcattaataaatcga

SEQ ID NO: 4649497 - DNA, 25 bp, Homo sapien
cacaacctcaagatttaatggcagg

SEQ ID NO: 4649498 - DNA, 25 bp, Homo sapien
taaatttcgttcaaccacaacctca

SEQ ID NO: 4649499 - DNA, 25 bp, Homo sapien
caaccacaacctcaagatttaatgg

SEQ ID NO: 4649500 - DNA, 25 bp, Homo sapien
cccagcataaatttcgttcaaccac

SEQ ID NO: 4649501 - DNA, 25 bp, Homo sapien
cctagagggttggcctcaaaaggca

SEQ ID NO: 4649502 - DNA, 25 bp, Homo sapien
tcaaaaggcagctgggcacttgcag

SEQ ID NO: 4649503 - DNA, 25 bp, Homo sapien
ccaggacattctgtatggattctac

SEQ ID NO: 4649504 - DNA, 25 bp, Homo sapien
cacttgcagattgttggcagcatca

SEQ ID NO: 4649505 - DNA, 25 bp, Homo sapien
ttatatcttcttgactaagaatgaa

SEQ ID NO: 4649506 - DNA, 25 bp, Homo sapien
gttatatcttcttgactaagaatga

SEQ ID NO: 4649507 - DNA, 25 bp, Homo sapien
cactagtggcactgtattggtcttt

SEQ ID NO: 4649508 - DNA, 25 bp, Homo sapien
aggtgaggcactaccatctttttca

SEQ ID NO: 4649509 - DNA, 25 bp, Homo sapien
ctcctgaatggtgtgaagcattagt

SEQ ID NO: 4649510 - DNA, 25 bp, Homo sapien
ttagtagtaactccactagtggcac

SEQ ID NO: 4649511 - DNA, 25 bp, Homo sapien
taaggcacgtgaatgtacttctacc

SEQ ID NO: 4649512 - DNA, 25 bp, Homo sapien
tagtgttgtcttaactagtaaggca

SEQ ID NO: 4649513 - DNA, 25 bp, Homo sapien
cacgtgaatgtacttctaccacagc

SEQ ID NO: 4649514 - DNA, 25 bp, Homo sapien
taactagtaaggcacgtgaatgtac

SEQ ID NO: 4649515 - DNA, 25 bp, Homo sapien
gtttaggacctggactatacagcac

SEQ ID NO: 4649516 - DNA, 25 bp, Homo sapien
ttaggacctggactatacagcacca

SEQ ID NO: 4649517 - DNA, 25 bp, Homo sapien
ctgtttaggacctggactatacagc

SEQ ID NO: 4649518 - DNA, 25 bp, Homo sapien
taggacctggactatacagcaccat

SEQ ID NO: 4649519 - DNA, 25 bp, Homo sapien
catgaggtcttttatcatctaaaat

SEQ ID NO: 4649520 - DNA, 25 bp, Homo sapien
aaatgttgagccatctgtatacatt

SEQ ID NO: 4649521 - DNA, 25 bp, Homo sapien
cagagaaggatcacgaacatctgta

SEQ ID NO: 4649522 - DNA, 25 bp, Homo sapien
agtttcagagaaggatcacgaacat

SEQ ID NO: 4649523 - DNA, 25 bp, Homo sapien
tacatttcttgaaagaccgcatcag

SEQ ID NO: 4649524 - DNA, 25 bp, Homo sapien
ttagcagtccatgtttgcacactgg

SEQ ID NO: 4649525 - DNA, 25 bp, Homo sapien
tgtaggcctcaagaaagacatttgc

SEQ ID NO: 4649526 - DNA, 25 bp, Homo sapien
actggtttctacagcagtgcctgtg

SEQ ID NO: 4649527 - DNA, 25 bp, Homo sapien
acattaatttcccacttcactgatt

SEQ ID NO: 4649528 - DNA, 25 bp, Homo sapien
cattaatttcccacttcactgattc

SEQ ID NO: 4649529 - DNA, 25 bp, Homo sapien
atgactaaagcaggagcatcatttt

SEQ ID NO: 4649530 - DNA, 25 bp, Homo sapien
attgtgttgtaatgactaaagcagg

SEQ ID NO: 4649531 - DNA, 25 bp, Homo sapien
acattgtgttgtaatgactaaagca

SEQ ID NO: 4649532 - DNA, 25 bp, Homo sapien
cattgtgttgtaatgactaaagcag

SEQ ID NO: 4649533 - DNA, 25 bp, Homo sapien
ttgactggaagaaacgggcaggctc

SEQ ID NO: 4649534 - DNA, 25 bp, Homo sapien
tgactggaagaaacgggcaggctct

SEQ ID NO: 4649535 - DNA, 25 bp, Homo sapien
cttgactggaagaaacgggcaggct

SEQ ID NO: 4649536 - DNA, 25 bp, Homo sapien
gactggaagaaacgggcaggctctc

SEQ ID NO: 4649537 - DNA, 25 bp, Homo sapien
tactgacatatcgatcacttgtgga

SEQ ID NO: 4649538 - DNA, 25 bp, Homo sapien
cagggattttactgacatatcgatc

SEQ ID NO: 4649539 - DNA, 25 bp, Homo sapien
gatcacttgtggatctgtacctttc

SEQ ID NO: 4649540 - DNA, 25 bp, Homo sapien
cctttctgagtagtttgataaaaca

SEQ ID NO: 4649541 - DNA, 25 bp, Homo sapien
cactttcaaacatactacgtcaaga

SEQ ID NO: 4649542 - DNA, 25 bp, Homo sapien
ttcaaacatactacgtcaagaaata

SEQ ID NO: 4649543 - DNA, 25 bp, Homo sapien
aattaataagtctatacaaaacact

SEQ ID NO: 4649544 - DNA, 25 bp, Homo sapien
caaaacactttcaaacatactacgt

SEQ ID NO: 4649545 - DNA, 25 bp, Homo sapien
ccctgaaaaacgtgactttgccaga

SEQ ID NO: 4649546 - DNA, 25 bp, Homo sapien
tatcatctcgcctttgggtaccaat

SEQ ID NO: 4649547 - DNA, 25 bp, Homo sapien
gaagaagccgtttcttctgggatgg

SEQ ID NO: 4649548 - DNA, 25 bp, Homo sapien
tcccataaatgtgcagtagaagaag

SEQ ID NO: 4649549 - DNA, 25 bp, Homo sapien
cttgataccaagattccatggtcta

SEQ ID NO: 4649550 - DNA, 25 bp, Homo sapien
tgataccaagattccatggtctaaa

SEQ ID NO: 4649551 - DNA, 25 bp, Homo sapien
caagattccatggtctaaaatcctc

SEQ ID NO: 4649552 - DNA, 25 bp, Homo sapien
ccatggtctaaaatcctcagtctga

SEQ ID NO: 4649553 - DNA, 25 bp, Homo sapien
aattgtttaacattacaagaccaca

SEQ ID NO: 4649554 - DNA, 25 bp, Homo sapien
gacagttttatattctggcactttg

SEQ ID NO: 4649555 - DNA, 25 bp, Homo sapien
gaccacatttggataatgtaatgtt

SEQ ID NO: 4649556 - DNA, 25 bp, Homo sapien
ggatctgactcaacaatggccattt

SEQ ID NO: 4649557 - DNA, 25 bp, Homo sapien
gcttaggctggtcattgcattgaaa

SEQ ID NO: 4649558 - DNA, 25 bp, Homo sapien
ggtgctagatcctttacgaagtcag

SEQ ID NO: 4649559 - DNA, 25 bp, Homo sapien
cgaagtcagctgaagatccagtggc

SEQ ID NO: 4649560 - DNA, 25 bp, Homo sapien
gaatcacttggcgaaacagaaatag

SEQ ID NO: 4649561 - DNA, 25 bp, Homo sapien
gggagcgaattgtgaccttcttact

SEQ ID NO: 4649562 - DNA, 25 bp, Homo sapien
caaacaatagatctttcaacgccag

SEQ ID NO: 4649563 - DNA, 25 bp, Homo sapien
tcttacagtgtacagacgtcgtccc

SEQ ID NO: 4649564 - DNA, 25 bp, Homo sapien
ccttctactgtatcaatttgacaaa

SEQ ID NO: 4649565 - DNA, 25 bp, Homo sapien
gaagctgagaataactagtagttga

SEQ ID NO: 4649566 - DNA, 25 bp, Homo sapien
caaagtctgatattgcttcctttgt

SEQ ID NO: 4649567 - DNA, 25 bp, Homo sapien
cggaatgagcataagcttgaaaagt

SEQ ID NO: 4649568 - DNA, 25 bp, Homo sapien
caaaagtctggaaaacggaatgagc

SEQ ID NO: 4649569 - DNA, 25 bp, Homo sapien
cggtaagatcctaatggtatgttga

SEQ ID NO: 4649570 - DNA, 25 bp, Homo sapien
tatccccttcgtaaacagacagtgg

SEQ ID NO: 4649571 - DNA, 25 bp, Homo sapien
cattttcaggtgaggcagttcccaa

SEQ ID NO: 4649572 - DNA, 25 bp, Homo sapien
gaggcagttcccaataaggtatccc

SEQ ID NO: 4649573 - DNA, 25 bp, Homo sapien
tgagaaatgattccttagaagggtt

SEQ ID NO: 4649574 - DNA, 25 bp, Homo sapien
gcattatgtatggtaaatcccaacc

SEQ ID NO: 4649575 - DNA, 25 bp, Homo sapien
aagaagatttcggagcaggataggt

SEQ ID NO: 4649576 - DNA, 25 bp, Homo sapien
tatggtaaatcccaaccatcttctg

SEQ ID NO: 4649577 - DNA, 25 bp, Homo sapien
tggcagacagaatgtgatcactaac

SEQ ID NO: 4649578 - DNA, 25 bp, Homo sapien
ttcaagacaagccatagtgagtccc

SEQ ID NO: 4649579 - DNA, 25 bp, Homo sapien
cagagctaggatgcaatttcaaatc

SEQ ID NO: 4649580 - DNA, 25 bp, Homo sapien
gtaaacggctgggtgtactggctca

SEQ ID NO: 4649581 - DNA, 25 bp, Homo sapien
tgtagcctggctttacccaactgtg

SEQ ID NO: 4649582 - DNA, 25 bp, Homo sapien
caactgtgcagtacaaatctgggct

SEQ ID NO: 4649583 - DNA, 25 bp, Homo sapien
tccaatcgtgattgagatagtcaag

SEQ ID NO: 4649584 - DNA, 25 bp, Homo sapien
tgctgattaggctttatgtgatatt

SEQ ID NO: 4649585 - DNA, 25 bp, Homo sapien
ggactatgaaatgccacaactgtct

SEQ ID NO: 4649586 - DNA, 25 bp, Homo sapien
taacatgcggccagttttattgacc

SEQ ID NO: 4649587 - DNA, 25 bp, Homo sapien
tattgaccatccaataaggactatg

SEQ ID NO: 4649588 - DNA, 25 bp, Homo sapien
gatgctttcgatgaattccgtctgc

SEQ ID NO: 4649589 - DNA, 25 bp, Homo sapien
ccaacagtatcaattgaaaactgat

SEQ ID NO: 4649590 - DNA, 25 bp, Homo sapien
caattgaaaactgattggacaactc

SEQ ID NO: 4649591 - DNA, 25 bp, Homo sapien
gattggacaactcactatcagttac

SEQ ID NO: 4649592 - DNA, 25 bp, Homo sapien
cactatcagttaccataagttgaac

SEQ ID NO: 4649593 - DNA, 25 bp, Homo sapien
caagagagagccatttatcatttcc

SEQ ID NO: 4649594 - DNA, 25 bp, Homo sapien
aaaggggtaaatgtcacaattctag

SEQ ID NO: 4649595 - DNA, 25 bp, Homo sapien
tcagccactgatatatggtatttgc

SEQ ID NO: 4649596 - DNA, 25 bp, Homo sapien
tgtcacaattctagtaatgttaaaa

SEQ ID NO: 4649597 - DNA, 25 bp, Homo sapien
tattccatcaacctctgtcagtcat

SEQ ID NO: 4649598 - DNA, 25 bp, Homo sapien
tcccaacaaggacggttttgtatgc

SEQ ID NO: 4649599 - DNA, 25 bp, Homo sapien
tctggcttaccctactctctgaaag

SEQ ID NO: 4649600 - DNA, 25 bp, Homo sapien
tagagacactgatggtatttacctt

SEQ ID NO: 4649601 - DNA, 25 bp, Homo sapien
tcaacgtgagtgatctggaaaccaa

SEQ ID NO: 4649602 - DNA, 25 bp, Homo sapien
gagactgctcatgtgtgatacctga

SEQ ID NO: 4649603 - DNA, 25 bp, Homo sapien
tgaactgctggcgagaaaagagact

SEQ ID NO: 4649604 - DNA, 25 bp, Homo sapien
tataacctgactttgcgcacagcca

SEQ ID NO: 4649605 - DNA, 25 bp, Homo sapien
tagaagcatactcaggccaaaaggg

SEQ ID NO: 4649606 - DNA, 25 bp, Homo sapien
tcgttatctagacgcaatagaatac

SEQ ID NO: 4649607 - DNA, 25 bp, Homo sapien
tcgacttgaataagaagtttactag

SEQ ID NO: 4649608 - DNA, 25 bp, Homo sapien
ggatcttcactcctttcgacttgaa

SEQ ID NO: 4649609 - DNA, 25 bp, Homo sapien
ttaagaggaatgtagctgctccatc

SEQ ID NO: 4649610 - DNA, 25 bp, Homo sapien
taactgtagaatgctcggccaaatt

SEQ ID NO: 4649611 - DNA, 25 bp, Homo sapien
gaacaagttcattctttgtgtgatt

SEQ ID NO: 4649612 - DNA, 25 bp, Homo sapien
tcacttctgctataatacctccaag

SEQ ID NO: 4649613 - DNA, 25 bp, Homo sapien
tgacacagtagcaaaaatacgcgtt

SEQ ID NO: 4649614 - DNA, 25 bp, Homo sapien
tgcaagtacacgaagagattaaaaa

SEQ ID NO: 4649615 - DNA, 25 bp, Homo sapien
gaaaatacatgttctacttaggaaa

SEQ ID NO: 4649616 - DNA, 25 bp, Homo sapien
cactgagatctgtgatcgttctgat

SEQ ID NO: 4649617 - DNA, 25 bp, Homo sapien
ttcagccttctagagcccaccggat

SEQ ID NO: 4649618 - DNA, 25 bp, Homo sapien
ccttctgtgttacttcaccatggct

SEQ ID NO: 4649619 - DNA, 25 bp, Homo sapien
ggctttttctacatctccacttcag

SEQ ID NO: 4649620 - DNA, 25 bp, Homo sapien
cccaccggatcagcccatgtataaa

SEQ ID NO: 4649621 - DNA, 25 bp, Homo sapien
aataatgcgttgtaaaccttcaaag

SEQ ID NO: 4649622 - DNA, 25 bp, Homo sapien
ccccaaatctataggcatcatcata

SEQ ID NO: 4649623 - DNA, 25 bp, Homo sapien
tgcttcgtgtaattgttgacaagag

SEQ ID NO: 4649624 - DNA, 25 bp, Homo sapien
tatataggctacttcttgcttcgtg

SEQ ID NO: 4649625 - DNA, 25 bp, Homo sapien
gaaactacatcaaggagggatctgt

SEQ ID NO: 4649626 - DNA, 25 bp, Homo sapien
cagatgacaggtgtgacagaagaca

SEQ ID NO: 4649627 - DNA, 25 bp, Homo sapien
gagcctcaaggcatttagccaatgt

SEQ ID NO: 4649628 - DNA, 25 bp, Homo sapien
tatggcattatggaggtcactggta

SEQ ID NO: 4649629 - DNA, 25 bp, Homo sapien
ttcaggtagagaggccagctaaagc

SEQ ID NO: 4649630 - DNA, 25 bp, Homo sapien
taaagcattgtagaccactgtagac

SEQ ID NO: 4649631 - DNA, 25 bp, Homo sapien
gggtcttcaatattagagtggtcaa

SEQ ID NO: 4649632 - DNA, 25 bp, Homo sapien
ttttggcaaccttaaatgagctgag

SEQ ID NO: 4649633 - DNA, 25 bp, Homo sapien
ggagaagattcagtatattccttaa

SEQ ID NO: 4649634 - DNA, 25 bp, Homo sapien
aactgaataaccttatcttctgaag

SEQ ID NO: 4649635 - DNA, 25 bp, Homo sapien
cggaacattagtgtccaactgaata

SEQ ID NO: 4649636 - DNA, 25 bp, Homo sapien
tctctaacttctcagtgtgctttac

SEQ ID NO: 4649637 - DNA, 25 bp, Homo sapien
tatacaaggtatgtatgacaggatt

SEQ ID NO: 4649638 - DNA, 25 bp, Homo sapien
tatagataaacacctctttaaaaca

SEQ ID NO: 4649639 - DNA, 25 bp, Homo sapien
ttcactagtgattcaccaaactacg

SEQ ID NO: 4649640 - DNA, 25 bp, Homo sapien
gtgattcaccaaactacgacaggca

SEQ ID NO: 4649641 - DNA, 25 bp, Homo sapien
ttatgaccagtaggggttaggcgaa

SEQ ID NO: 4649642 - DNA, 25 bp, Homo sapien
tgttatattccacttttaatgctgg

SEQ ID NO: 4649643 - DNA, 25 bp, Homo sapien
agagctattacatgcggctgcagaa

SEQ ID NO: 4649644 - DNA, 25 bp, Homo sapien
gatgtgcagatgtgttatattccac

SEQ ID NO: 4649645 - DNA, 25 bp, Homo sapien
catggtgaccgactttggaggttta

SEQ ID NO: 4649646 - DNA, 25 bp, Homo sapien
gaatccatggtgaccgactttggag

SEQ ID NO: 4649647 - DNA, 25 bp, Homo sapien
ctgaatccatggtgaccgactttgg

SEQ ID NO: 4649648 - DNA, 25 bp, Homo sapien
tggaggtttaacaggataaaacaca

SEQ ID NO: 4649649 - DNA, 25 bp, Homo sapien
tcaaatagctaatacaactgctttt

SEQ ID NO: 4649650 - DNA, 25 bp, Homo sapien
aggttataaatataattactcccat

SEQ ID NO: 4649651 - DNA, 25 bp, Homo sapien
cagatctcatgacaatactgacatc

SEQ ID NO: 4649652 - DNA, 25 bp, Homo sapien
gcagatctcatgacaatactgacat

SEQ ID NO: 4649653 - DNA, 25 bp, Homo sapien
cctcagcttctgtcataaggtctgt

SEQ ID NO: 4649654 - DNA, 25 bp, Homo sapien
tgttaaagcatagataaacccaaga

SEQ ID NO: 4649655 - DNA, 25 bp, Homo sapien
aacccaagatctaacctgagatcca

SEQ ID NO: 4649656 - DNA, 25 bp, Homo sapien
ttcttgaatcaatactttgaaatac

SEQ ID NO: 4649657 - DNA, 25 bp, Homo sapien
ctaatgaggctgttttatattcttc

SEQ ID NO: 4649658 - DNA, 25 bp, Homo sapien
tcttctctgccggaactcagtgaaa

SEQ ID NO: 4649659 - DNA, 25 bp, Homo sapien
atctgtcagtgtggcaccaatactc

SEQ ID NO: 4649660 - DNA, 25 bp, Homo sapien
tgtggcaccaatactcttcagcaaa

SEQ ID NO: 4649661 - DNA, 25 bp, Homo sapien
tcagtgtggcaccaatactcttcag

SEQ ID NO: 4649662 - DNA, 25 bp, Homo sapien
tatggaactgatagttgagttcaaa

SEQ ID NO: 4649663 - DNA, 25 bp, Homo sapien
ttatgacttcagactgtagatcgga

SEQ ID NO: 4649664 - DNA, 25 bp, Homo sapien
ctgttttgaatagtgtcttatgact

SEQ ID NO: 4649665 - DNA, 25 bp, Homo sapien
ctgtagatcggatgttgtatggaac

SEQ ID NO: 4649666 - DNA, 25 bp, Homo sapien
caagaatgagtacatacatctgctt

SEQ ID NO: 4649667 - DNA, 25 bp, Homo sapien
aaattctctaattaagccaaatgga

SEQ ID NO: 4649668 - DNA, 25 bp, Homo sapien
ctggtaaggttcataaaaaaatgct

SEQ ID NO: 4649669 - DNA, 25 bp, Homo sapien
aaaaaaatgcttctacaccttcaga

SEQ ID NO: 4649670 - DNA, 25 bp, Homo sapien
tagtgccattccttccacaaactct

SEQ ID NO: 4649671 - DNA, 25 bp, Homo sapien
acagctccaccaactagtgccttaa

SEQ ID NO: 4649672 - DNA, 25 bp, Homo sapien
ctagtgccttaagtcctagtgccat

SEQ ID NO: 4649673 - DNA, 25 bp, Homo sapien
attccttccacaaactcttcaggac

SEQ ID NO: 4649674 - DNA, 25 bp, Homo sapien
aaaccagctggttgcttattcatgg

SEQ ID NO: 4649675 - DNA, 25 bp, Homo sapien
caccggtgattttggaggcagcacc

SEQ ID NO: 4649676 - DNA, 25 bp, Homo sapien
tcttcatccatggtcatagctgcta

SEQ ID NO: 4649677 - DNA, 25 bp, Homo sapien
tctcttctgttggtagtcttcatcc

SEQ ID NO: 4649678 - DNA, 25 bp, Homo sapien
caattcctgttatgccactaacaaa

SEQ ID NO: 4649679 - DNA, 25 bp, Homo sapien
ggttttgtaacaattcctgttatgc

SEQ ID NO: 4649680 - DNA, 25 bp, Homo sapien
taacaattcctgttatgccactaac

SEQ ID NO: 4649681 - DNA, 25 bp, Homo sapien
tttgtaacaattcctgttatgccac

SEQ ID NO: 4649682 - DNA, 25 bp, Homo sapien
aagagtttttgacaattgcatccaa

SEQ ID NO: 4649683 - DNA, 25 bp, Homo sapien
aaaaagagtttttgacaattgcatc

SEQ ID NO: 4649684 - DNA, 25 bp, Homo sapien
aaacagaatcaacttagaaagactt

SEQ ID NO: 4649685 - DNA, 25 bp, Homo sapien
gaaaaaagagtttttgacaattgca

SEQ ID NO: 4649686 - DNA, 25 bp, Homo sapien
tactgctagccatgtctatgatgcc

SEQ ID NO: 4649687 - DNA, 25 bp, Homo sapien
ttggccttgctaccgctcctactaa

SEQ ID NO: 4649688 - DNA, 25 bp, Homo sapien
agttggccttgctaccgctcctact

SEQ ID NO: 4649689 - DNA, 25 bp, Homo sapien
ccctgaaatgtactgctagccatgt

SEQ ID NO: 4649690 - DNA, 25 bp, Homo sapien
tctaaatgccgaaaccagaaacacc

SEQ ID NO: 4649691 - DNA, 25 bp, Homo sapien
gcttctctgatgactacgactcaac

SEQ ID NO: 4649692 - DNA, 25 bp, Homo sapien
tgtgccctcaatccctaaaggtaat

SEQ ID NO: 4649693 - DNA, 25 bp, Homo sapien
aatactggcttaagaggaatagctc

SEQ ID NO: 4649694 - DNA, 25 bp, Homo sapien
attatccctcctgtctggtctgtgg

SEQ ID NO: 4649695 - DNA, 25 bp, Homo sapien
agaccttgatgcctaaaaggctggg

SEQ ID NO: 4649696 - DNA, 25 bp, Homo sapien
cacatgcatgggcatatacatatga

SEQ ID NO: 4649697 - DNA, 25 bp, Homo sapien
catgcatgggcatatacatatgaat

SEQ ID NO: 4649698 - DNA, 25 bp, Homo sapien
cctgtacggtctgataactccatct

SEQ ID NO: 4649699 - DNA, 25 bp, Homo sapien
catccctcaacctgtacggtctgat

SEQ ID NO: 4649700 - DNA, 25 bp, Homo sapien
cattgaagaaccgaggaggtcgcag

SEQ ID NO: 4649701 - DNA, 25 bp, Homo sapien
ggtcgcagactctccacttcagaag

SEQ ID NO: 4649702 - DNA, 25 bp, Homo sapien
cagctgtacgtagtttgtaaatttt

SEQ ID NO: 4649703 - DNA, 25 bp, Homo sapien
gactaaaatctactgttggctttca

SEQ ID NO: 4649704 - DNA, 25 bp, Homo sapien
tcacttgcaaagtcatgcattaact

SEQ ID NO: 4649705 - DNA, 25 bp, Homo sapien
ctgaaacagctgtacgtagtttgta

SEQ ID NO: 4649706 - DNA, 25 bp, Homo sapien
aatccagtgcagaactaagaacacc

SEQ ID NO: 4649707 - DNA, 25 bp, Homo sapien
taagtaagtaccaccaatgacgagg

SEQ ID NO: 4649708 - DNA, 25 bp, Homo sapien
acaaatctagcaaatccagtgcaga

SEQ ID NO: 4649709 - DNA, 25 bp, Homo sapien
gacgaggatacataaggtacaaagg

SEQ ID NO: 4649710 - DNA, 25 bp, Homo sapien
tccaagagtaattcacaatagcagt

SEQ ID NO: 4649711 - DNA, 25 bp, Homo sapien
gaaacaacatgacactggtatagcc

SEQ ID NO: 4649712 - DNA, 25 bp, Homo sapien
ctagttacctacagcataatccagg

SEQ ID NO: 4649713 - DNA, 25 bp, Homo sapien
tgagtatctgcaagcctacataaca

SEQ ID NO: 4649714 - DNA, 25 bp, Homo sapien
ccttgtgggtatcataacgtgctca

SEQ ID NO: 4649715 - DNA, 25 bp, Homo sapien
ccaaggtacttggtgaatccctaca

SEQ ID NO: 4649716 - DNA, 25 bp, Homo sapien
taataggcaactttgaccagcagga

SEQ ID NO: 4649717 - DNA, 25 bp, Homo sapien
caagtaatggctgacaagtgctgtg

SEQ ID NO: 4649718 - DNA, 25 bp, Homo sapien
tcatcactactgctactgtgagtca

SEQ ID NO: 4649719 - DNA, 25 bp, Homo sapien
taatggtttagatctgactcatcat

SEQ ID NO: 4649720 - DNA, 25 bp, Homo sapien
tgagtcataatccactccctgtaga

SEQ ID NO: 4649721 - DNA, 25 bp, Homo sapien
tccactccctgtagaattgaatttt

SEQ ID NO: 4649722 - DNA, 25 bp, Homo sapien
gcccagaaaatttacagagaccatt

SEQ ID NO: 4649723 - DNA, 25 bp, Homo sapien
tctataatatgttggatgccctccc

SEQ ID NO: 4649724 - DNA, 25 bp, Homo sapien
tgccctccctactttggatgtaaga

SEQ ID NO: 4649725 - DNA, 25 bp, Homo sapien
tacctccctataaatggacatatgg

SEQ ID NO: 4649726 - DNA, 25 bp, Homo sapien
tacaaaggccttgtgactagcaaag

SEQ ID NO: 4649727 - DNA, 25 bp, Homo sapien
tgaaattaagtgtcacaggccaagc

SEQ ID NO: 4649728 - DNA, 25 bp, Homo sapien
tggtttccaataaagcaatgactat

SEQ ID NO: 4649729 - DNA, 25 bp, Homo sapien
gaggagtgggtgcacaacaaataca

SEQ ID NO: 4649730 - DNA, 25 bp, Homo sapien
tctcatctctaagggctaaaaactg

SEQ ID NO: 4649731 - DNA, 25 bp, Homo sapien
gcacatctcatctctaagggctaaa

SEQ ID NO: 4649732 - DNA, 25 bp, Homo sapien
atgatgaaactctaagaccacacaa

SEQ ID NO: 4649733 - DNA, 25 bp, Homo sapien
gaccacacaagcaatgtttactagt

SEQ ID NO: 4649734 - DNA, 25 bp, Homo sapien
gaaaaacaagggcaattacactgtc

SEQ ID NO: 4649735 - DNA, 25 bp, Homo sapien
tacactgtcaaagagcagatctcgg

SEQ ID NO: 4649736 - DNA, 25 bp, Homo sapien
ccaggtaatcactccttcagggaag

SEQ ID NO: 4649737 - DNA, 25 bp, Homo sapien
tatgttattcaagcgtcaggtagac

SEQ ID NO: 4649738 - DNA, 25 bp, Homo sapien
gattcaaagacaacatagataaatt

SEQ ID NO: 4649739 - DNA, 25 bp, Homo sapien
ttaagaacacactatactacaccca

SEQ ID NO: 4649740 - DNA, 25 bp, Homo sapien
gctgtcaacattcagacacaatgaa

SEQ ID NO: 4649741 - DNA, 25 bp, Homo sapien
ccacaggacaacaactcagctgtca

SEQ ID NO: 4649742 - DNA, 25 bp, Homo sapien
tactctggtgatctgactgctatag

SEQ ID NO: 4649743 - DNA, 25 bp, Homo sapien
taaagggaaagaccacgtcggctga

SEQ ID NO: 4649744 - DNA, 25 bp, Homo sapien
gtcggctgacggcagttatcttcca

SEQ ID NO: 4649745 - DNA, 25 bp, Homo sapien
cttccaattgctattaaggcagtgt

SEQ ID NO: 4649746 - DNA, 25 bp, Homo sapien
tagggaaagttactaggtagagctc

SEQ ID NO: 4649747 - DNA, 25 bp, Homo sapien
ggtagagctctatcacatcagtaga

SEQ ID NO: 4649748 - DNA, 25 bp, Homo sapien
tctttgtgtccaaggtaactaggga

SEQ ID NO: 4649749 - DNA, 25 bp, Homo sapien
cagtagagaaatcatgagttgagtc

SEQ ID NO: 4649750 - DNA, 25 bp, Homo sapien
tgaagatccgacattacagggttgg

SEQ ID NO: 4649751 - DNA, 25 bp, Homo sapien
taggtgtctctgattcctaatgttc

SEQ ID NO: 4649752 - DNA, 25 bp, Homo sapien
ctaacgtggcatgtgttttatgccc

SEQ ID NO: 4649753 - DNA, 25 bp, Homo sapien
tacagccttgcatataccggctaaa

SEQ ID NO: 4649754 - DNA, 25 bp, Homo sapien
atatagttttttaacgacgtgattg

SEQ ID NO: 4649755 - DNA, 25 bp, Homo sapien
atataatgatgactaagaacttgca

SEQ ID NO: 4649756 - DNA, 25 bp, Homo sapien
taatgatgactaagaacttgcataa

SEQ ID NO: 4649757 - DNA, 25 bp, Homo sapien
tatataatgatgactaagaacttgc

SEQ ID NO: 4649758 - DNA, 25 bp, Homo sapien
tataatgatgactaagaacttgcat

SEQ ID NO: 4649759 - DNA, 25 bp, Homo sapien
ttatggctgccaaccgtatcctttg

SEQ ID NO: 4649760 - DNA, 25 bp, Homo sapien
tcctttgttattagagtgactgtat

SEQ ID NO: 4649761 - DNA, 25 bp, Homo sapien
agcgtcaaagataactcatcgcaca

SEQ ID NO: 4649762 - DNA, 25 bp, Homo sapien
tgaataaacgtcaaagcgtcaaaga

SEQ ID NO: 4649763 - DNA, 25 bp, Homo sapien
tcttattgatcatgacatgggtaaa

SEQ ID NO: 4649764 - DNA, 25 bp, Homo sapien
cgtctggttatcattagcatatctg

SEQ ID NO: 4649765 - DNA, 25 bp, Homo sapien
tggttatcattagcatatctgtctt

SEQ ID NO: 4649766 - DNA, 25 bp, Homo sapien
ctgtcttattgatcatgacatgggt

SEQ ID NO: 4649767 - DNA, 25 bp, Homo sapien
acacgtgagttgtccaaatgttccc

SEQ ID NO: 4649768 - DNA, 25 bp, Homo sapien
tcaaaactatactgccactcacacg

SEQ ID NO: 4649769 - DNA, 25 bp, Homo sapien
tgcttcaatgcgcaatcttctccca

SEQ ID NO: 4649770 - DNA, 25 bp, Homo sapien
aacaatgaatggctctttggtaaat

SEQ ID NO: 4649771 - DNA, 25 bp, Homo sapien
caggaaagcagtatggactgcagca

SEQ ID NO: 4649772 - DNA, 25 bp, Homo sapien
tagcaggtataagggaaaaccacac

SEQ ID NO: 4649773 - DNA, 25 bp, Homo sapien
gactgcagcacaggctaatagccac

SEQ ID NO: 4649774 - DNA, 25 bp, Homo sapien
tcctttaagcctgggtaagatagca

SEQ ID NO: 4649775 - DNA, 25 bp, Homo sapien
aactctctggcatgaaatacagact

SEQ ID NO: 4649776 - DNA, 25 bp, Homo sapien
ttttccaaactctctggcatgaaat

SEQ ID NO: 4649777 - DNA, 25 bp, Homo sapien
caaactctctggcatgaaatacaga

SEQ ID NO: 4649778 - DNA, 25 bp, Homo sapien
atttttccaaactctctggcatgaa

SEQ ID NO: 4649779 - DNA, 25 bp, Homo sapien
agtgagcagctcctatttaaataaa

SEQ ID NO: 4649780 - DNA, 25 bp, Homo sapien
aagtgagcagctcctatttaaataa

SEQ ID NO: 4649781 - DNA, 25 bp, Homo sapien
tgagcagctcctatttaaataaaag

SEQ ID NO: 4649782 - DNA, 25 bp, Homo sapien
agcagctcctatttaaataaaagat

SEQ ID NO: 4649783 - DNA, 25 bp, Homo sapien
tattagacttgctggcggtccatca

SEQ ID NO: 4649784 - DNA, 25 bp, Homo sapien
acttgctggcggtccatcaattttg

SEQ ID NO: 4649785 - DNA, 25 bp, Homo sapien
tctttattagacttgctggcggtcc

SEQ ID NO: 4649786 - DNA, 25 bp, Homo sapien
gacttgctggcggtccatcaatttt

SEQ ID NO: 4649787 - DNA, 25 bp, Homo sapien
ggtagtagaagcaacattcttgagc

SEQ ID NO: 4649788 - DNA, 25 bp, Homo sapien
tacttacacacaattccagagaggg

SEQ ID NO: 4649789 - DNA, 25 bp, Homo sapien
gagcattttaggtgctctcacaata

SEQ ID NO: 4649790 - DNA, 25 bp, Homo sapien
tgaaatgagccagcctgaaagaaaa

SEQ ID NO: 4649791 - DNA, 25 bp, Homo sapien
tcttgcttcttgtagctttgtgagg

SEQ ID NO: 4649792 - DNA, 25 bp, Homo sapien
cttcttgtagctttgtgaggatcca

SEQ ID NO: 4649793 - DNA, 25 bp, Homo sapien
ggctcggagaaggttctcttgcttc

SEQ ID NO: 4649794 - DNA, 25 bp, Homo sapien
tcagaggctcggagaaggttctctt

SEQ ID NO: 4649795 - DNA, 25 bp, Homo sapien
tacagggtacttgaaatcatttctg

SEQ ID NO: 4649796 - DNA, 25 bp, Homo sapien
acatagctgttttacctgattctgg

SEQ ID NO: 4649797 - DNA, 25 bp, Homo sapien
agcatccagaatacagggtacttga

SEQ ID NO: 4649798 - DNA, 25 bp, Homo sapien
gtagtctaggagctgtaatcactta

SEQ ID NO: 4649799 - DNA, 25 bp, Homo sapien
taacttggtggcacatacaacatgc

SEQ ID NO: 4649800 - DNA, 25 bp, Homo sapien
tcaatctattggcaacgggacaggt

SEQ ID NO: 4649801 - DNA, 25 bp, Homo sapien
aaagttctcttgataccactgaggc

SEQ ID NO: 4649802 - DNA, 25 bp, Homo sapien
caaagcgagggtttaaggagcctga

SEQ ID NO: 4649803 - DNA, 25 bp, Homo sapien
aaaactggaggagcttagcgacaga

SEQ ID NO: 4649804 - DNA, 25 bp, Homo sapien
gagagaaatcaatagcatttagtag

SEQ ID NO: 4649805 - DNA, 25 bp, Homo sapien
gtcaacatggaaacacactttcatg

SEQ ID NO: 4649806 - DNA, 25 bp, Homo sapien
aaacaaaggtcaacatggaaacaca

SEQ ID NO: 4649807 - DNA, 25 bp, Homo sapien
tcatagaccagaagacatgctgtgc

SEQ ID NO: 4649808 - DNA, 25 bp, Homo sapien
tatgatgtagctcttaaaactgtgg

SEQ ID NO: 4649809 - DNA, 25 bp, Homo sapien
catgctgtgctggaattaagggcct

SEQ ID NO: 4649810 - DNA, 25 bp, Homo sapien
aactgtgggtccctctagtctagag

SEQ ID NO: 4649811 - DNA, 25 bp, Homo sapien
gatggtgcagattcaacggactcaa

SEQ ID NO: 4649812 - DNA, 25 bp, Homo sapien
tgaacaccggaggtatgacggcata

SEQ ID NO: 4649813 - DNA, 25 bp, Homo sapien
tattttggccctaccagaatgtgcc

SEQ ID NO: 4649814 - DNA, 25 bp, Homo sapien
gaggttgcccgatacacagcagaga

SEQ ID NO: 4649815 - DNA, 25 bp, Homo sapien
gaattatttgtgacgttcctcagga

SEQ ID NO: 4649816 - DNA, 25 bp, Homo sapien
ggaccagtatctcagcccaaagtgc

SEQ ID NO: 4649817 - DNA, 25 bp, Homo sapien
ccccaatgcgtactgagtggcagaa

SEQ ID NO: 4649818 - DNA, 25 bp, Homo sapien
gattagtaaggtgcacaagggacca

SEQ ID NO: 4649819 - DNA, 25 bp, Homo sapien
gtgggaagtactagttggctcatcc

SEQ ID NO: 4649820 - DNA, 25 bp, Homo sapien
gctcagcattcgtgtggggctctgt

SEQ ID NO: 4649821 - DNA, 25 bp, Homo sapien
tactagttggctcatcccttcactc

SEQ ID NO: 4649822 - DNA, 25 bp, Homo sapien
cctctagtgggaagtactagttggc

SEQ ID NO: 4649823 - DNA, 25 bp, Homo sapien
gagggtttaggcactttccagagca

SEQ ID NO: 4649824 - DNA, 25 bp, Homo sapien
cagcgaaaagggaagatgtagcccc

SEQ ID NO: 4649825 - DNA, 25 bp, Homo sapien
caggaagccatgttcgtggcagcga

SEQ ID NO: 4649826 - DNA, 25 bp, Homo sapien
tgaaatgcgatgtagcaaaggctgg

SEQ ID NO: 4649827 - DNA, 25 bp, Homo sapien
ttttgacaggaaataggagacttgg

SEQ ID NO: 4649828 - DNA, 25 bp, Homo sapien
gagacttggttaaatgtctgtgtaa

SEQ ID NO: 4649829 - DNA, 25 bp, Homo sapien
gagagacactttgcactgaccccaa

SEQ ID NO: 4649830 - DNA, 25 bp, Homo sapien
ctgtgctcgtctggttgctcggttg

SEQ ID NO: 4649831 - DNA, 25 bp, Homo sapien
tgggcaatgcggttcttccttgtga

SEQ ID NO: 4649832 - DNA, 25 bp, Homo sapien
ttttgaagagatcggatgctgcacg

SEQ ID NO: 4649833 - DNA, 25 bp, Homo sapien
tgtaagaaacggtgaagactttgga

SEQ ID NO: 4649834 - DNA, 25 bp, Homo sapien
ggaaccaccaaatccaaagcttcag

SEQ ID NO: 4649835 - DNA, 25 bp, Homo sapien
tgtgcagaaaactattcctctgggc

SEQ ID NO: 4649836 - DNA, 25 bp, Homo sapien
tagaagagcacttgccaggcaagat

SEQ ID NO: 4649837 - DNA, 25 bp, Homo sapien
tcctctgggctttacaacatgtgta

SEQ ID NO: 4649838 - DNA, 25 bp, Homo sapien
tggagagttgcacaggcagccaact

SEQ ID NO: 4649839 - DNA, 25 bp, Homo sapien
cttcatattagctctgaaacagact

SEQ ID NO: 4649840 - DNA, 25 bp, Homo sapien
cgtcgttctggctgaaactttgtaa

SEQ ID NO: 4649841 - DNA, 25 bp, Homo sapien
acttcaagataaaacctagctacgt

SEQ ID NO: 4649842 - DNA, 25 bp, Homo sapien
taaaacctagctacgtcgttctggc

SEQ ID NO: 4649843 - DNA, 25 bp, Homo sapien
tgtgtccttgtgtgcaagggaaatc

SEQ ID NO: 4649844 - DNA, 25 bp, Homo sapien
ctgctttctcacactccggtagggc

SEQ ID NO: 4649845 - DNA, 25 bp, Homo sapien
gctttctcacactccggtagggcat

SEQ ID NO: 4649846 - DNA, 25 bp, Homo sapien
gggaaatcagctgccctcttggctg

SEQ ID NO: 4649847 - DNA, 25 bp, Homo sapien
gaagaagcgggtccctaagacagtc

SEQ ID NO: 4649848 - DNA, 25 bp, Homo sapien
taatggctgatagaggaagaagcgg

SEQ ID NO: 4649849 - DNA, 25 bp, Homo sapien
ccacagtgccatctagaggaaagac

SEQ ID NO: 4649850 - DNA, 25 bp, Homo sapien
agacagtcgcctctgctccacagtg

SEQ ID NO: 4649851 - DNA, 25 bp, Homo sapien
gacgtctgtgatcccactgggttga

SEQ ID NO: 4649852 - DNA, 25 bp, Homo sapien
gaaggcccatcattcagtgactgat

SEQ ID NO: 4649853 - DNA, 25 bp, Homo sapien
ggaactgtctcccttagataaattg

SEQ ID NO: 4649854 - DNA, 25 bp, Homo sapien
gaaggctggatatctgccacttatc

SEQ ID NO: 4649855 - DNA, 25 bp, Homo sapien
gccaccccctgcagccctccgcggg

SEQ ID NO: 4649856 - DNA, 25 bp, Homo sapien
cccctgcagccctccgcgggggcct

SEQ ID NO: 4649857 - DNA, 25 bp, Homo sapien
ctccgcgggggcctggtgagagcct

SEQ ID NO: 4649858 - DNA, 25 bp, Homo sapien
agcgcggatgccaccccctgcagcc

SEQ ID NO: 4649859 - DNA, 25 bp, Homo sapien
tgaaaatgtcgtgtttccggataaa

SEQ ID NO: 4649860 - DNA, 25 bp, Homo sapien
tacttctcggtagtcaagagaagcc

SEQ ID NO: 4649861 - DNA, 25 bp, Homo sapien
tggtattccagcaacctgccctgag

SEQ ID NO: 4649862 - DNA, 25 bp, Homo sapien
gctgcccgagtctggctgaacacat

SEQ ID NO: 4649863 - DNA, 25 bp, Homo sapien
tcagagcttagtgatctgacacccc

SEQ ID NO: 4649864 - DNA, 25 bp, Homo sapien
cctaatctgtgctgccaacccaagt

SEQ ID NO: 4649865 - DNA, 25 bp, Homo sapien
cattcgcagcagaggatcaagatca

SEQ ID NO: 4649866 - DNA, 25 bp, Homo sapien
gaaatggtgcccttcgcattcgcag

SEQ ID NO: 4649867 - DNA, 25 bp, Homo sapien
actgattccaagctttttatgagca

SEQ ID NO: 4649868 - DNA, 25 bp, Homo sapien
gtgacatccactgattccaagcttt

SEQ ID NO: 4649869 - DNA, 25 bp, Homo sapien
gtttcactgcagaagtgggccactg

SEQ ID NO: 4649870 - DNA, 25 bp, Homo sapien
tggtgtagtggcatgggtgttctat

SEQ ID NO: 4649871 - DNA, 25 bp, Homo sapien
tgtgcttcacacagttaccgtgcag

SEQ ID NO: 4649872 - DNA, 25 bp, Homo sapien
tgcaggacctgggataacaaagatg

SEQ ID NO: 4649873 - DNA, 25 bp, Homo sapien
tttatgatcgtcacaaggctccagg

SEQ ID NO: 4649874 - DNA, 25 bp, Homo sapien
ttgctcacgcaacatgtccagccag

SEQ ID NO: 4649875 - DNA, 25 bp, Homo sapien
gaatgcaatacttcatttattctct

SEQ ID NO: 4649876 - DNA, 25 bp, Homo sapien
cctaagatagggcacatgctaagtc

SEQ ID NO: 4649877 - DNA, 25 bp, Homo sapien
gccctccctcttgcaaaacaattta

SEQ ID NO: 4649878 - DNA, 25 bp, Homo sapien
tggatgaatgataggtctcataaga

SEQ ID NO: 4649879 - DNA, 25 bp, Homo sapien
aaaattatgtatgcacgtgtccatc

SEQ ID NO: 4649880 - DNA, 25 bp, Homo sapien
gccttccaaacataccaaggtacag

SEQ ID NO: 4649881 - DNA, 25 bp, Homo sapien
tgatgtcactatgagtccaagcaga

SEQ ID NO: 4649882 - DNA, 25 bp, Homo sapien
tgcttcctcagcatcactcatacgg

SEQ ID NO: 4649883 - DNA, 25 bp, Homo sapien
tatccatccctccagttttgaacgc

SEQ ID NO: 4649884 - DNA, 25 bp, Homo sapien
tagggctgaacctaataccttccag

SEQ ID NO: 4649885 - DNA, 25 bp, Homo sapien
tgagcccagattccatagcatgcaa

SEQ ID NO: 4649886 - DNA, 25 bp, Homo sapien
caaagttctccttaattggccccag

SEQ ID NO: 4649887 - DNA, 25 bp, Homo sapien
tcaacctgatctttccctgggagga

SEQ ID NO: 4649888 - DNA, 25 bp, Homo sapien
ccaccactgttagtgagtgccagga

SEQ ID NO: 4649889 - DNA, 25 bp, Homo sapien
ttcaaatgtcctatgccccacggtg

SEQ ID NO: 4649890 - DNA, 25 bp, Homo sapien
agtccttcacctgatggtgagtagc

SEQ ID NO: 4649891 - DNA, 25 bp, Homo sapien
ggtgagtagcataccaatccttcaa

SEQ ID NO: 4649892 - DNA, 25 bp, Homo sapien
cttgcagttagatgggagagccctc

SEQ ID NO: 4649893 - DNA, 25 bp, Homo sapien
cacagccctggaccttgcagttaga

SEQ ID NO: 4649894 - DNA, 25 bp, Homo sapien
taaacagggcattgtagggcaaagc

SEQ ID NO: 4649895 - DNA, 25 bp, Homo sapien
cactcctatatctgggctacagaag

SEQ ID NO: 4649896 - DNA, 25 bp, Homo sapien
gactgttggtctagtgtggtcacca

SEQ ID NO: 4649897 - DNA, 25 bp, Homo sapien
ggctggaaacaggatatctgactgt

SEQ ID NO: 4649898 - DNA, 25 bp, Homo sapien
ggagtgtccatttccggcccagatc

SEQ ID NO: 4649899 - DNA, 25 bp, Homo sapien
ctaggatctagaggaattatggctg

SEQ ID NO: 4649900 - DNA, 25 bp, Homo sapien
gtgggcaccgttgatcacccatgag

SEQ ID NO: 4649901 - DNA, 25 bp, Homo sapien
gcaccgttgatcacccatgaggact

SEQ ID NO: 4649902 - DNA, 25 bp, Homo sapien
tgtgcattacaactgccctgcagtg

SEQ ID NO: 4649903 - DNA, 25 bp, Homo sapien
gatcagcccataaagactgatgtgc

SEQ ID NO: 4649904 - DNA, 25 bp, Homo sapien
actgctgagatggaaacttaacaaa

SEQ ID NO: 4649905 - DNA, 25 bp, Homo sapien
tctggtttgtatagtctcaagcaag

SEQ ID NO: 4649906 - DNA, 25 bp, Homo sapien
gatcgcgtttataagggcccttgaa

SEQ ID NO: 4649907 - DNA, 25 bp, Homo sapien
actggaggccactttgcttccctgt

SEQ ID NO: 4649908 - DNA, 25 bp, Homo sapien
tgggctctgtgttaagggaaatcaa

SEQ ID NO: 4649909 - DNA, 25 bp, Homo sapien
agagaaaggtccaaactgcaccagg

SEQ ID NO: 4649910 - DNA, 25 bp, Homo sapien
ggctctggctgttcacacgtctgag

SEQ ID NO: 4649911 - DNA, 25 bp, Homo sapien
gttcttttcaaccacgatcctcact

SEQ ID NO: 4649912 - DNA, 25 bp, Homo sapien
gaagaacctgtgtcctccaatgtgt

SEQ ID NO: 4649913 - DNA, 25 bp, Homo sapien
gctgatgatacctcttttttggcac

SEQ ID NO: 4649914 - DNA, 25 bp, Homo sapien
cttccaggtgcgtcctcaccctctt

SEQ ID NO: 4649915 - DNA, 25 bp, Homo sapien
ttgcagtgaagaacctgtgtcctcc

SEQ ID NO: 4649916 - DNA, 25 bp, Homo sapien
gtcctgaacaggctacctttttcac

SEQ ID NO: 4649917 - DNA, 25 bp, Homo sapien
gctgtgtcctgaacaggctaccttt

SEQ ID NO: 4649918 - DNA, 25 bp, Homo sapien
tgtgtcctgaacaggctaccttttt

SEQ ID NO: 4649919 - DNA, 25 bp, Homo sapien
ctgctgtgtcctgaacaggctacct

SEQ ID NO: 4649920 - DNA, 25 bp, Homo sapien
ggaagaagctgcagcgcattctctc

SEQ ID NO: 4649921 - DNA, 25 bp, Homo sapien
gctacatagaaagcgtaatttcctt

SEQ ID NO: 4649922 - DNA, 25 bp, Homo sapien
tgcctgccttctcctactgttgcta

SEQ ID NO: 4649923 - DNA, 25 bp, Homo sapien
ttctctcaaggtctcatcaatggcg

SEQ ID NO: 4649924 - DNA, 25 bp, Homo sapien
gattggttctaactggaggctctga

SEQ ID NO: 4649925 - DNA, 25 bp, Homo sapien
tcatgctaaagggccaaaaccaagg

SEQ ID NO: 4649926 - DNA, 25 bp, Homo sapien
tctgagagaatctgttgtcggcttc

SEQ ID NO: 4649927 - DNA, 25 bp, Homo sapien
aatccttgccgtccgttggcttgta

SEQ ID NO: 4649928 - DNA, 25 bp, Homo sapien
taataatgaatgtttgaatactgct

SEQ ID NO: 4649929 - DNA, 25 bp, Homo sapien
tgaatactgctttctacaattaatg

SEQ ID NO: 4649930 - DNA, 25 bp, Homo sapien
caggtatcacccttatcacttatca

SEQ ID NO: 4649931 - DNA, 25 bp, Homo sapien
ttccgcaggtatcacccttatcact

SEQ ID NO: 4649932 - DNA, 25 bp, Homo sapien
cttgtcttccaaatgcattgagttt

SEQ ID NO: 4649933 - DNA, 25 bp, Homo sapien
tttccaaaccattgcatttgcttct

SEQ ID NO: 4649934 - DNA, 25 bp, Homo sapien
cttccaaatgcattgagttttccaa

SEQ ID NO: 4649935 - DNA, 25 bp, Homo sapien
gagttttccaaaccattgcatttgc

SEQ ID NO: 4649936 - DNA, 25 bp, Homo sapien
tggttgaggaagaagttaaagtgat

SEQ ID NO: 4649937 - DNA, 25 bp, Homo sapien
ggaagaagttaaagtgatgctgcca

SEQ ID NO: 4649938 - DNA, 25 bp, Homo sapien
agaagttaaagtgatgctgccacat

SEQ ID NO: 4649939 - DNA, 25 bp, Homo sapien
gtggttgaggaagaagttaaagtga

SEQ ID NO: 4649940 - DNA, 25 bp, Homo sapien
catattaaatgggaagggatctctg

SEQ ID NO: 4649941 - DNA, 25 bp, Homo sapien
tattaaatgggaagggatctctggg

SEQ ID NO: 4649942 - DNA, 25 bp, Homo sapien
aatgggaagggatctctgggtccac

SEQ ID NO: 4649943 - DNA, 25 bp, Homo sapien
taaatgggaagggatctctgggtcc

SEQ ID NO: 4649944 - DNA, 25 bp, Homo sapien
ggagcccgggtatatccaagaactg

SEQ ID NO: 4649945 - DNA, 25 bp, Homo sapien
tctctccctgtctcttgcatagtct

SEQ ID NO: 4649946 - DNA, 25 bp, Homo sapien
tagtcttagggagaggtactaagga

SEQ ID NO: 4649947 - DNA, 25 bp, Homo sapien
gaaggagcccgggtatatccaagaa

SEQ ID NO: 4649948 - DNA, 25 bp, Homo sapien
aaatggtgctttctttgtgaataaa

SEQ ID NO: 4649949 - DNA, 25 bp, Homo sapien
ttaaatggtgctttctttgtgaata

SEQ ID NO: 4649950 - DNA, 25 bp, Homo sapien
taaatggtgctttctttgtgaataa

SEQ ID NO: 4649951 - DNA, 25 bp, Homo sapien
aatggtgctttctttgtgaataaac

SEQ ID NO: 4649952 - DNA, 25 bp, Homo sapien
ttgcttccaaatcagcttatctccc

SEQ ID NO: 4649953 - DNA, 25 bp, Homo sapien
cgtcaatgtaaattgtacctattcg

SEQ ID NO: 4649954 - DNA, 25 bp, Homo sapien
gcttccaaatcagcttatctcccat

SEQ ID NO: 4649955 - DNA, 25 bp, Homo sapien
cctattcgggttgtatctttatcaa

SEQ ID NO: 4649956 - DNA, 25 bp, Homo sapien
ttgcatctttccacccaaggattgg

SEQ ID NO: 4649957 - DNA, 25 bp, Homo sapien
tgcatctttccacccaaggattggt

SEQ ID NO: 4649958 - DNA, 25 bp, Homo sapien
atctttccacccaaggattggtcat

SEQ ID NO: 4649959 - DNA, 25 bp, Homo sapien
gtttgcatctttccacccaaggatt

SEQ ID NO: 4649960 - DNA, 25 bp, Homo sapien
ccacaggcaatggagaactttctct

SEQ ID NO: 4649961 - DNA, 25 bp, Homo sapien
caggcaatggagaactttctctctg

SEQ ID NO: 4649962 - DNA, 25 bp, Homo sapien
accatgtgccttgattccacaggca

SEQ ID NO: 4649963 - DNA, 25 bp, Homo sapien
ctaaaccatgtgccttgattccaca

SEQ ID NO: 4649964 - DNA, 25 bp, Homo sapien
aatccaggtggtctgatgccagagc

SEQ ID NO: 4649965 - DNA, 25 bp, Homo sapien
tatcctatggcaagattgactggcc

SEQ ID NO: 4649966 - DNA, 25 bp, Homo sapien
cagagccttggttcttaatcacagt

SEQ ID NO: 4649967 - DNA, 25 bp, Homo sapien
tattttagaatcttcaacgggccag

SEQ ID NO: 4649968 - DNA, 25 bp, Homo sapien
accatcttctgcaccctggtgtcac

SEQ ID NO: 4649969 - DNA, 25 bp, Homo sapien
acttatattcacagcagagctgcaa

SEQ ID NO: 4649970 - DNA, 25 bp, Homo sapien
gtcatgtcattagaggatgaaattt

SEQ ID NO: 4649971 - DNA, 25 bp, Homo sapien
gtcattagaggatgaaatttttgag

SEQ ID NO: 4649972 - DNA, 25 bp, Homo sapien
ctaagtcatgtcattagaggatgaa

SEQ ID NO: 4649973 - DNA, 25 bp, Homo sapien
catgtcattagaggatgaaattttt

SEQ ID NO: 4649974 - DNA, 25 bp, Homo sapien
agatcaattactagtacagtatcca

SEQ ID NO: 4649975 - DNA, 25 bp, Homo sapien
aattcagatcaattactagtacagt

SEQ ID NO: 4649976 - DNA, 25 bp, Homo sapien
ctaattcagatcaattactagtaca

SEQ ID NO: 4649977 - DNA, 25 bp, Homo sapien
tcagatcaattactagtacagtatc

SEQ ID NO: 4649978 - DNA, 25 bp, Homo sapien
agtgcagggattccttcccaagggc

SEQ ID NO: 4649979 - DNA, 25 bp, Homo sapien
tgagttggagaaggacagttcacaa

SEQ ID NO: 4649980 - DNA, 25 bp, Homo sapien
cacagtgcagggattccttcccaag

SEQ ID NO: 4649981 - DNA, 25 bp, Homo sapien
ttggagaaggacagttcacaaatag

SEQ ID NO: 4649982 - DNA, 25 bp, Homo sapien
cgcctggggacacccctaggcccag

SEQ ID NO: 4649983 - DNA, 25 bp, Homo sapien
aggagatcctactctcccccgagca

SEQ ID NO: 4649984 - DNA, 25 bp, Homo sapien
gtctgcgcccccgactgctgtccgg

SEQ ID NO: 4649985 - DNA, 25 bp, Homo sapien
gagcaccgacgttccaactcgtctg

SEQ ID NO: 4649986 - DNA, 25 bp, Homo sapien
cttagagccacaaacgctagcggga

SEQ ID NO: 4649987 - DNA, 25 bp, Homo sapien
gccagccaggtcctttgcctccaac

SEQ ID NO: 4649988 - DNA, 25 bp, Homo sapien
tagtctgcggtcactgctgaggttt

SEQ ID NO: 4649989 - DNA, 25 bp, Homo sapien
tccactcagtcttagtctgcggtca

SEQ ID NO: 4649990 - DNA, 25 bp, Homo sapien
ttcacttccaggcgccttcggcttg

SEQ ID NO: 4649991 - DNA, 25 bp, Homo sapien
agaagggcaagtccagcagacgcca

SEQ ID NO: 4649992 - DNA, 25 bp, Homo sapien
ctggcggccagacgcgcagattaca

SEQ ID NO: 4649993 - DNA, 25 bp, Homo sapien
ctgcaggttcaagatgctccgcctc

SEQ ID NO: 4649994 - DNA, 25 bp, Homo sapien
tcttataactgaacccagcggcggc

SEQ ID NO: 4649995 - DNA, 25 bp, Homo sapien
gcaggtgtctttcccatcataaaat

SEQ ID NO: 4649996 - DNA, 25 bp, Homo sapien
tccggagaccgagaggatatttacc

SEQ ID NO: 4649997 - DNA, 25 bp, Homo sapien
aggcaaattgccgagctgaccaagg

SEQ ID NO: 4649998 - DNA, 25 bp, Homo sapien
tcgcaaggcggctgttaggcttcag

SEQ ID NO: 4649999 - DNA, 25 bp, Homo sapien
gctactaggaacgtatcagcccttt

SEQ ID NO: 4650000 - DNA, 25 bp, Homo sapien
tcagtgcggacacaatcgcaaggcg

SEQ ID NO: 4650001 - DNA, 25 bp, Homo sapien
ggaaacttgccaggtgctactagga

SEQ ID NO: 4650002 - DNA, 25 bp, Homo sapien
gcatatggcctatactgacttgaga

SEQ ID NO: 4650003 - DNA, 25 bp, Homo sapien
tgctgtggccaataggatcccctct

SEQ ID NO: 4650004 - DNA, 25 bp, Homo sapien
tgcagccagatagcatcgcgatacc

SEQ ID NO: 4650005 - DNA, 25 bp, Homo sapien
tagaggaagcgctagctaattgcct

SEQ ID NO: 4650006 - DNA, 25 bp, Homo sapien
taagtgaggtctggacgtaggcagt

SEQ ID NO: 4650007 - DNA, 25 bp, Homo sapien
agttgggagcttctttggactcctt

SEQ ID NO: 4650008 - DNA, 25 bp, Homo sapien
tggactccttctgtacagctatcct

SEQ ID NO: 4650009 - DNA, 25 bp, Homo sapien
cctcagcgtgtggtttgatgcttca

SEQ ID NO: 4650010 - DNA, 25 bp, Homo sapien
cctctgttcaggaatgtgggatctc

SEQ ID NO: 4650011 - DNA, 25 bp, Homo sapien
caagtgcttactcctaatgcagtca

SEQ ID NO: 4650012 - DNA, 25 bp, Homo sapien
aatagggctgaatgtggatcccgtg

SEQ ID NO: 4650013 - DNA, 25 bp, Homo sapien
ggatctcatagtccaaatagggctg

SEQ ID NO: 4650014 - DNA, 25 bp, Homo sapien
cttcttgctgtgaacattgaacaaa

SEQ ID NO: 4650015 - DNA, 25 bp, Homo sapien
cttgctgtgaacattgaacaaaatt

SEQ ID NO: 4650016 - DNA, 25 bp, Homo sapien
ttcttgctgtgaacattgaacaaaa

SEQ ID NO: 4650017 - DNA, 25 bp, Homo sapien
tcttgctgtgaacattgaacaaaat

SEQ ID NO: 4650018 - DNA, 25 bp, Homo sapien
ccatcagttagacaggcactggcat

SEQ ID NO: 4650019 - DNA, 25 bp, Homo sapien
taaagggcttgccagagaggaagat

SEQ ID NO: 4650020 - DNA, 25 bp, Homo sapien
cattgtaaagggcttgccagagagg

SEQ ID NO: 4650021 - DNA, 25 bp, Homo sapien
aggtagccatcagttagacaggcac

SEQ ID NO: 4650022 - DNA, 25 bp, Homo sapien
tgtattgtctctcggaatcagtcat

SEQ ID NO: 4650023 - DNA, 25 bp, Homo sapien
gacatattgtttctaccctgtattg

SEQ ID NO: 4650024 - DNA, 25 bp, Homo sapien
taccctgtattgtctctcggaatca

SEQ ID NO: 4650025 - DNA, 25 bp, Homo sapien
gtttctaccctgtattgtctctcgg

SEQ ID NO: 4650026 - DNA, 25 bp, Homo sapien
cagtttgctccgtgtgcttttatgt

SEQ ID NO: 4650027 - DNA, 25 bp, Homo sapien
ctaggcctgtcccacagagatagac

SEQ ID NO: 4650028 - DNA, 25 bp, Homo sapien
ccacagagatagactgcttaaaggg

SEQ ID NO: 4650029 - DNA, 25 bp, Homo sapien
gccctggggactctccatctgtttc

SEQ ID NO: 4650030 - DNA, 25 bp, Homo sapien
ttacaaggagctatatccagtctgt

SEQ ID NO: 4650031 - DNA, 25 bp, Homo sapien
caaggagctatatccagtctgtttt

SEQ ID NO: 4650032 - DNA, 25 bp, Homo sapien
agctatatccagtctgttttaaggg

SEQ ID NO: 4650033 - DNA, 25 bp, Homo sapien
tatccagtctgttttaagggagtcc

SEQ ID NO: 4650034 - DNA, 25 bp, Homo sapien
tgtgcctcatatctgaaacaaaggg

SEQ ID NO: 4650035 - DNA, 25 bp, Homo sapien
tcttcagcataccaaggcaagcagc

SEQ ID NO: 4650036 - DNA, 25 bp, Homo sapien
tttttggtagattaactagcaggcc

SEQ ID NO: 4650037 - DNA, 25 bp, Homo sapien
tgattgcaagcgttataagcgtgtg

SEQ ID NO: 4650038 - DNA, 25 bp, Homo sapien
gttttaacagctagagaccactgct

SEQ ID NO: 4650039 - DNA, 25 bp, Homo sapien
cactgcttgcctgaaagggcgttct

SEQ ID NO: 4650040 - DNA, 25 bp, Homo sapien
tcatacagagcggtactagcgtcgt

SEQ ID NO: 4650041 - DNA, 25 bp, Homo sapien
cagactgcctgtaggtatagtgcaa

SEQ ID NO: 4650042 - DNA, 25 bp, Homo sapien
gatacagtcaggacacatcgttcga

SEQ ID NO: 4650043 - DNA, 25 bp, Homo sapien
tactaatttattgccgtcctggact

SEQ ID NO: 4650044 - DNA, 25 bp, Homo sapien
gacaccatcctccagttgaacctga

SEQ ID NO: 4650045 - DNA, 25 bp, Homo sapien
cagacaccgagaatatccgctttgt

SEQ ID NO: 4650046 - DNA, 25 bp, Homo sapien
tatcagtgtggtctaggcgagtctg

SEQ ID NO: 4650047 - DNA, 25 bp, Homo sapien
ctatcagtgtggtctaggcgagtct

SEQ ID NO: 4650048 - DNA, 25 bp, Homo sapien
cagtgtggtctaggcgagtctgaca

SEQ ID NO: 4650049 - DNA, 25 bp, Homo sapien
gtggtctaggcgagtctgacatttc

SEQ ID NO: 4650050 - DNA, 25 bp, Homo sapien
gaagctctcttatgtgtccactgaa

SEQ ID NO: 4650051 - DNA, 25 bp, Homo sapien
caaactagggataggacatcctgtg

SEQ ID NO: 4650052 - DNA, 25 bp, Homo sapien
gtccactgaaccgttggcaaactag

SEQ ID NO: 4650053 - DNA, 25 bp, Homo sapien
gtgatgatgcattgcatgcttgtct

SEQ ID NO: 4650054 - DNA, 25 bp, Homo sapien
agagagtatgttcagatttttcaaa

SEQ ID NO: 4650055 - DNA, 25 bp, Homo sapien
tttcaaattcttcaacatttggtaa

SEQ ID NO: 4650056 - DNA, 25 bp, Homo sapien
ttcaaattcttcaacatttggtaag

SEQ ID NO: 4650057 - DNA, 25 bp, Homo sapien
ctgagagagtatgttcagatttttc

SEQ ID NO: 4650058 - DNA, 25 bp, Homo sapien
gtctctccttgatccccagtctctc

SEQ ID NO: 4650059 - DNA, 25 bp, Homo sapien
tcctacaacacactctgatttgcag

SEQ ID NO: 4650060 - DNA, 25 bp, Homo sapien
tcctacacttttctcctacaacaca

SEQ ID NO: 4650061 - DNA, 25 bp, Homo sapien
cagttcactttacaagggcctgaca

SEQ ID NO: 4650062 - DNA, 25 bp, Homo sapien
tacatcagagagcaacgagaaggtg

SEQ ID NO: 4650063 - DNA, 25 bp, Homo sapien
tgctttggccatcagacattacatc

SEQ ID NO: 4650064 - DNA, 25 bp, Homo sapien
gccacgagatgatagcacagaataa

SEQ ID NO: 4650065 - DNA, 25 bp, Homo sapien
gatctctcttgagctgttagtggca

SEQ ID NO: 4650066 - DNA, 25 bp, Homo sapien
gaaagtggacaagtgcaataaagga

SEQ ID NO: 4650067 - DNA, 25 bp, Homo sapien
caataaaggaagctgacatccaaac

SEQ ID NO: 4650068 - DNA, 25 bp, Homo sapien
tggccaagtcactgttcatcaactg

SEQ ID NO: 4650069 - DNA, 25 bp, Homo sapien
acactttgctcctgcgaacaactct

SEQ ID NO: 4650070 - DNA, 25 bp, Homo sapien
gagaggtttattgtccctgccctcc

SEQ ID NO: 4650071 - DNA, 25 bp, Homo sapien
gaaaccaaagctgagaggtttattg

SEQ ID NO: 4650072 - DNA, 25 bp, Homo sapien
ctgccctccttaacttgtcagtcat

SEQ ID NO: 4650073 - DNA, 25 bp, Homo sapien
gccctccttaacttgtcagtcattc

SEQ ID NO: 4650074 - DNA, 25 bp, Homo sapien
atttttcaagcagacagtaaacatt

SEQ ID NO: 4650075 - DNA, 25 bp, Homo sapien
agtcaacgtagtgacactgattttt

SEQ ID NO: 4650076 - DNA, 25 bp, Homo sapien
taagtcaacgtagtgacactgattt

SEQ ID NO: 4650077 - DNA, 25 bp, Homo sapien
gatttttcaagcagacagtaaacat

SEQ ID NO: 4650078 - DNA, 25 bp, Homo sapien
aaggagctgattgtgtctgatttgt

SEQ ID NO: 4650079 - DNA, 25 bp, Homo sapien
ccaccccacagtccttcactataga

SEQ ID NO: 4650080 - DNA, 25 bp, Homo sapien
gcttgaatgatcttccatcccaccc

SEQ ID NO: 4650081 - DNA, 25 bp, Homo sapien
gagctgattgtgtctgatttgtatg

SEQ ID NO: 4650082 - DNA, 25 bp, Homo sapien
ggtctttcaacgttgtctgctttct

SEQ ID NO: 4650083 - DNA, 25 bp, Homo sapien
ttccctcaggtctttcaacgttgtc

SEQ ID NO: 4650084 - DNA, 25 bp, Homo sapien
gtctatgattctgtactggtgactg

SEQ ID NO: 4650085 - DNA, 25 bp, Homo sapien
ggtgactgtgggacaactctccctc

SEQ ID NO: 4650086 - DNA, 25 bp, Homo sapien
ggaagctgagagttagaccaggagc

SEQ ID NO: 4650087 - DNA, 25 bp, Homo sapien
gaagctgagagttagaccaggagca

SEQ ID NO: 4650088 - DNA, 25 bp, Homo sapien
gctgagagttagaccaggagcagca

SEQ ID NO: 4650089 - DNA, 25 bp, Homo sapien
aagctgagagttagaccaggagcag

SEQ ID NO: 4650090 - DNA, 25 bp, Homo sapien
tcctggttcctggatgcctcatgta

SEQ ID NO: 4650091 - DNA, 25 bp, Homo sapien
gtagtgtgagcacttctcagtgcaa

SEQ ID NO: 4650092 - DNA, 25 bp, Homo sapien
gcatgcagtcaaataatgtgatgga

SEQ ID NO: 4650093 - DNA, 25 bp, Homo sapien
gggctgccttcatcaaatgaaggca

SEQ ID NO: 4650094 - DNA, 25 bp, Homo sapien
ctggcggcagtgaagagtgaagacc

SEQ ID NO: 4650095 - DNA, 25 bp, Homo sapien
agaaaatgccaaaactatggaaagg

SEQ ID NO: 4650096 - DNA, 25 bp, Homo sapien
ggattgagaacctggcggcagtgaa

SEQ ID NO: 4650097 - DNA, 25 bp, Homo sapien
gaaaatgccaaaactatggaaagga

SEQ ID NO: 4650098 - DNA, 25 bp, Homo sapien
tctaagactactgctaaccgagagg

SEQ ID NO: 4650099 - DNA, 25 bp, Homo sapien
gagaaatctttatgatgccaacacc

SEQ ID NO: 4650100 - DNA, 25 bp, Homo sapien
ggaacatcttcagtagcccagtcta

SEQ ID NO: 4650101 - DNA, 25 bp, Homo sapien
gactcctgagtggtttagcagtgtt

SEQ ID NO: 4650102 - DNA, 25 bp, Homo sapien
tgtgtgtataaaccagagttaactg

SEQ ID NO: 4650103 - DNA, 25 bp, Homo sapien
gagttaactggacccacatttcagg

SEQ ID NO: 4650104 - DNA, 25 bp, Homo sapien
gttttggcaccacctatacatcagt

SEQ ID NO: 4650105 - DNA, 25 bp, Homo sapien
tacttcaaagggagtagaatcagtt

SEQ ID NO: 4650106 - DNA, 25 bp, Homo sapien
accatggcgttagggtagtggcacc

SEQ ID NO: 4650107 - DNA, 25 bp, Homo sapien
caagagattggcctagatttgcctg

SEQ ID NO: 4650108 - DNA, 25 bp, Homo sapien
gcatctggttgttgtgtcccataag

SEQ ID NO: 4650109 - DNA, 25 bp, Homo sapien
cacttgtttacccatggtggatgaa

SEQ ID NO: 4650110 - DNA, 25 bp, Homo sapien
aaaatattgtttccacatacagaac

SEQ ID NO: 4650111 - DNA, 25 bp, Homo sapien
aacaagatagtctgttgtaattgac

SEQ ID NO: 4650112 - DNA, 25 bp, Homo sapien
tctgtgcacaatgttcaaaataaac

SEQ ID NO: 4650113 - DNA, 25 bp, Homo sapien
tatttcacattcgacatttggacaa

SEQ ID NO: 4650114 - DNA, 25 bp, Homo sapien
ttgggcatcccttcagacagagcag

SEQ ID NO: 4650115 - DNA, 25 bp, Homo sapien
taagacccactttggtaggacctca

SEQ ID NO: 4650116 - DNA, 25 bp, Homo sapien
gatatttgtgtctaagagcttccac

SEQ ID NO: 4650117 - DNA, 25 bp, Homo sapien
tacttctgggtaggtgtgacattcc

SEQ ID NO: 4650118 - DNA, 25 bp, Homo sapien
cctcgttcaagttatggcccacatg

SEQ ID NO: 4650119 - DNA, 25 bp, Homo sapien
ctccagttcttggagcctcgttcaa

SEQ ID NO: 4650120 - DNA, 25 bp, Homo sapien
gagcctcgttcaagttatggcccac

SEQ ID NO: 4650121 - DNA, 25 bp, Homo sapien
tcttggagcctcgttcaagttatgg

SEQ ID NO: 4650122 - DNA, 25 bp, Homo sapien
ctgtgtccctttcatctctctccag

SEQ ID NO: 4650123 - DNA, 25 bp, Homo sapien
gtgtccctttcatctctctccagtg

SEQ ID NO: 4650124 - DNA, 25 bp, Homo sapien
tccctttcatctctctccagtgctc

SEQ ID NO: 4650125 - DNA, 25 bp, Homo sapien
tgtccctttcatctctctccagtgc

SEQ ID NO: 4650126 - DNA, 25 bp, Homo sapien
agctagggttagaggaaagctagaa

SEQ ID NO: 4650127 - DNA, 25 bp, Homo sapien
atcctttcctaataatagctagggt

SEQ ID NO: 4650128 - DNA, 25 bp, Homo sapien
tttcctaataatagctagggttaga

SEQ ID NO: 4650129 - DNA, 25 bp, Homo sapien
tagggttagaggaaagctagaatag

SEQ ID NO: 4650130 - DNA, 25 bp, Homo sapien
gcctaccaggattgcccacgtttct

SEQ ID NO: 4650131 - DNA, 25 bp, Homo sapien
ttggacccattgcacacccataagg

SEQ ID NO: 4650132 - DNA, 25 bp, Homo sapien
tcttcttggcctaccaggattgccc

SEQ ID NO: 4650133 - DNA, 25 bp, Homo sapien
gattgcccacgtttctttggaccca

SEQ ID NO: 4650134 - DNA, 25 bp, Homo sapien
ccacaggacgtggtctttaaaggag

SEQ ID NO: 4650135 - DNA, 25 bp, Homo sapien
cattcccatcgtgtttttcgtggca

SEQ ID NO: 4650136 - DNA, 25 bp, Homo sapien
tggtctttaaaggagtcatttcctc

SEQ ID NO: 4650137 - DNA, 25 bp, Homo sapien
gtagcaaattgtaaggcagcactct

SEQ ID NO: 4650138 - DNA, 25 bp, Homo sapien
tgcttgttaagagagttgcacccta

SEQ ID NO: 4650139 - DNA, 25 bp, Homo sapien
tattcaagtgggcttatgagtcccc

SEQ ID NO: 4650140 - DNA, 25 bp, Homo sapien
tgaattgctgcctcagagatgccag

SEQ ID NO: 4650141 - DNA, 25 bp, Homo sapien
tggccaggaatctgtatcccagcag

SEQ ID NO: 4650142 - DNA, 25 bp, Homo sapien
ctgtcccagtgattgggttcttttc

SEQ ID NO: 4650143 - DNA, 25 bp, Homo sapien
gtgattgggttcttttcagtgccct

SEQ ID NO: 4650144 - DNA, 25 bp, Homo sapien
cagtgattgggttcttttcagtgcc

SEQ ID NO: 4650145 - DNA, 25 bp, Homo sapien
gtcccagtgattgggttcttttcag

SEQ ID NO: 4650146 - DNA, 25 bp, Homo sapien
ccttttcaatcctgtggctagtgga

SEQ ID NO: 4650147 - DNA, 25 bp, Homo sapien
gactggaggagccaaccttttcaat

SEQ ID NO: 4650148 - DNA, 25 bp, Homo sapien
aagaggatgtaaattcaccttgctg

SEQ ID NO: 4650149 - DNA, 25 bp, Homo sapien
gaggatgtaaattcaccttgctgtg

SEQ ID NO: 4650150 - DNA, 25 bp, Homo sapien
gagcgatcacgtagtcccaaagtta

SEQ ID NO: 4650151 - DNA, 25 bp, Homo sapien
cccaaagttagcagggatgctttcg

SEQ ID NO: 4650152 - DNA, 25 bp, Homo sapien
ggacataaaacagtaggaggagaaa

SEQ ID NO: 4650153 - DNA, 25 bp, Homo sapien
gaaagagcactgagcgatcacgtag

SEQ ID NO: 4650154 - DNA, 25 bp, Homo sapien
tcctagcactggaaactgtagccag

SEQ ID NO: 4650155 - DNA, 25 bp, Homo sapien
gcacttgccaactcagtacttcata

SEQ ID NO: 4650156 - DNA, 25 bp, Homo sapien
gcagaattcatcaagtatggttgct

SEQ ID NO: 4650157 - DNA, 25 bp, Homo sapien
tagtaaccattgactcagtgaaagc

SEQ ID NO: 4650158 - DNA, 25 bp, Homo sapien
cattgtagctgggatgctcaggcaa

SEQ ID NO: 4650159 - DNA, 25 bp, Homo sapien
gagtagcacagtgagcactctttga

SEQ ID NO: 4650160 - DNA, 25 bp, Homo sapien
tggctccagtgagtagcacagtgag

SEQ ID NO: 4650161 - DNA, 25 bp, Homo sapien
cacagtgagcactctttgagagtcc

SEQ ID NO: 4650162 - DNA, 25 bp, Homo sapien
tgctcctggccaagcattcatattt

SEQ ID NO: 4650163 - DNA, 25 bp, Homo sapien
aatgtgaccattaatactgaacacc

SEQ ID NO: 4650164 - DNA, 25 bp, Homo sapien
caaaattggctctactgaggtcagg

SEQ ID NO: 4650165 - DNA, 25 bp, Homo sapien
tgtttaggatacacagaggaatact

SEQ ID NO: 4650166 - DNA, 25 bp, Homo sapien
tttgtggaatcctggtgccagttct

SEQ ID NO: 4650167 - DNA, 25 bp, Homo sapien
ctttgtggaatcctggtgccagttc

SEQ ID NO: 4650168 - DNA, 25 bp, Homo sapien
gctttgtggaatcctggtgccagtt

SEQ ID NO: 4650169 - DNA, 25 bp, Homo sapien
ttggtaacaacaatagacttattgg

SEQ ID NO: 4650170 - DNA, 25 bp, Homo sapien
aagttaaatgctcagatagtttccc

SEQ ID NO: 4650171 - DNA, 25 bp, Homo sapien
gggtgctaactcttttagacatggc

SEQ ID NO: 4650172 - DNA, 25 bp, Homo sapien
caatagacttattggtatggaaatc

SEQ ID NO: 4650173 - DNA, 25 bp, Homo sapien
cctgagcttgagtagagtttaggcc

SEQ ID NO: 4650174 - DNA, 25 bp, Homo sapien
taggcctctgtcagggtactcctgc

SEQ ID NO: 4650175 - DNA, 25 bp, Homo sapien
agagtttaggcctctgtcagggtac

SEQ ID NO: 4650176 - DNA, 25 bp, Homo sapien
ccttgagcttgctgacttcctgagc

SEQ ID NO: 4650177 - DNA, 25 bp, Homo sapien
ttccagtttgttcttggagttttgc

SEQ ID NO: 4650178 - DNA, 25 bp, Homo sapien
ttagaattccagtttgttcttggag

SEQ ID NO: 4650179 - DNA, 25 bp, Homo sapien
gagttttgcttgcatcctcattttc

SEQ ID NO: 4650180 - DNA, 25 bp, Homo sapien
tgttcttggagttttgcttgcatcc

SEQ ID NO: 4650181 - DNA, 25 bp, Homo sapien
cactcttgtaagatagaacatcata

SEQ ID NO: 4650182 - DNA, 25 bp, Homo sapien
aattcactcttgtaagatagaacat

SEQ ID NO: 4650183 - DNA, 25 bp, Homo sapien
tatatatattctgaacactgtccat

SEQ ID NO: 4650184 - DNA, 25 bp, Homo sapien
ttaaagatcactcgcagcaccgagg

SEQ ID NO: 4650185 - DNA, 25 bp, Homo sapien
tccttgctggttacaaaaagccctg

SEQ ID NO: 4650186 - DNA, 25 bp, Homo sapien
ccttgctggttacaaaaagccctgg

SEQ ID NO: 4650187 - DNA, 25 bp, Homo sapien
cagtccttgctggttacaaaaagcc

SEQ ID NO: 4650188 - DNA, 25 bp, Homo sapien
agggcaggccagggagaagctgcat

SEQ ID NO: 4650189 - DNA, 25 bp, Homo sapien
gagggcaggccagggagaagctgca

SEQ ID NO: 4650190 - DNA, 25 bp, Homo sapien
ctgagggcaggccagggagaagctg

SEQ ID NO: 4650191 - DNA, 25 bp, Homo sapien
tgagggcaggccagggagaagctgc

SEQ ID NO: 4650192 - DNA, 25 bp, Homo sapien
gagcccagtgctgaagggcaagccg

SEQ ID NO: 4650193 - DNA, 25 bp, Homo sapien
agttttgcccaggtcctgctttgga

SEQ ID NO: 4650194 - DNA, 25 bp, Homo sapien
gctttggaggctcatcagcccatgg

SEQ ID NO: 4650195 - DNA, 25 bp, Homo sapien
caggtcctgctttggaggctcatca

SEQ ID NO: 4650196 - DNA, 25 bp, Homo sapien
tgtcaaccagatagagcctgcctgg

SEQ ID NO: 4650197 - DNA, 25 bp, Homo sapien
aggagaatcacttgcctgcctgtca

SEQ ID NO: 4650198 - DNA, 25 bp, Homo sapien
ggagaatcacttgcctgcctgtcaa

SEQ ID NO: 4650199 - DNA, 25 bp, Homo sapien
gcctgcctgtcaaccagatagagcc

SEQ ID NO: 4650200 - DNA, 25 bp, Homo sapien
gatctgggtcaatataaccataacc

SEQ ID NO: 4650201 - DNA, 25 bp, Homo sapien
ccatgacggccatgtaaaaatagca

SEQ ID NO: 4650202 - DNA, 25 bp, Homo sapien
ttaattcgtaatcccaaggcatgcc

SEQ ID NO: 4650203 - DNA, 25 bp, Homo sapien
aaaaatacagaagagtgcacacaac

SEQ ID NO: 4650204 - DNA, 25 bp, Homo sapien
gaatgtaggacacaaatcgcatcct

SEQ ID NO: 4650205 - DNA, 25 bp, Homo sapien
gaactttctaggtgtacgagagtgc

SEQ ID NO: 4650206 - DNA, 25 bp, Homo sapien
tagtctccatgtcgatgcagtgaac

SEQ ID NO: 4650207 - DNA, 25 bp, Homo sapien
cattagcagaagacggtcagtcatg

SEQ ID NO: 4650208 - DNA, 25 bp, Homo sapien
ttttgttgcacgtctgttcctgtca

SEQ ID NO: 4650209 - DNA, 25 bp, Homo sapien
ttgttgcacgtctgttcctgtcact

SEQ ID NO: 4650210 - DNA, 25 bp, Homo sapien
taccattttgttgcacgtctgttcc

SEQ ID NO: 4650211 - DNA, 25 bp, Homo sapien
tctgttaccattttgttgcacgtct

SEQ ID NO: 4650212 - DNA, 25 bp, Homo sapien
cagccacaacctgcctgttctatct

SEQ ID NO: 4650213 - DNA, 25 bp, Homo sapien
cttccagtagtgctaaaggtgctcc

SEQ ID NO: 4650214 - DNA, 25 bp, Homo sapien
actgcagcacagactacagccacaa

SEQ ID NO: 4650215 - DNA, 25 bp, Homo sapien
cattttctcggattcccaggttcaa

SEQ ID NO: 4650216 - DNA, 25 bp, Homo sapien
gtattgccattagccagatatccta

SEQ ID NO: 4650217 - DNA, 25 bp, Homo sapien
aatcagtagattttgaacaggtatc

SEQ ID NO: 4650218 - DNA, 25 bp, Homo sapien
caggtatcattcgttcatactgcct

SEQ ID NO: 4650219 - DNA, 25 bp, Homo sapien
aaataagaagtcactggctaggcac

SEQ ID NO: 4650220 - DNA, 25 bp, Homo sapien
agctctcgtcctccacttaaagtag

SEQ ID NO: 4650221 - DNA, 25 bp, Homo sapien
tgttctgtgaactattccaggaatg

SEQ ID NO: 4650222 - DNA, 25 bp, Homo sapien
tagcaaggcatgctagcattttctg

SEQ ID NO: 4650223 - DNA, 25 bp, Homo sapien
tctgcgtcagttaacttcccatcta

SEQ ID NO: 4650224 - DNA, 25 bp, Homo sapien
ttctggacacatcagacttcacaaa

SEQ ID NO: 4650225 - DNA, 25 bp, Homo sapien
ctggacacatcagacttcacaaaat

SEQ ID NO: 4650226 - DNA, 25 bp, Homo sapien
ttgcagtatccactagcagcatggt

SEQ ID NO: 4650227 - DNA, 25 bp, Homo sapien
cagtatccactagcagcatggtggt

SEQ ID NO: 4650228 - DNA, 25 bp, Homo sapien
ccaggttttgcacgttggtttgtgg

SEQ ID NO: 4650229 - DNA, 25 bp, Homo sapien
gactagtgctaagacgtaatgtgct

SEQ ID NO: 4650230 - DNA, 25 bp, Homo sapien
gtggagcacgactgctgggtcatac

SEQ ID NO: 4650231 - DNA, 25 bp, Homo sapien
cactgactgactagtgctaagacgt

SEQ ID NO: 4650232 - DNA, 25 bp, Homo sapien
ttctgcattgcctatttgaagagac

SEQ ID NO: 4650233 - DNA, 25 bp, Homo sapien
tctgcattgcctatttgaagagact

SEQ ID NO: 4650234 - DNA, 25 bp, Homo sapien
tattctgcattgcctatttgaagag

SEQ ID NO: 4650235 - DNA, 25 bp, Homo sapien
ctgcattgcctatttgaagagactg

SEQ ID NO: 4650236 - DNA, 25 bp, Homo sapien
tctgtgtcctccttcatccgtgtcc

SEQ ID NO: 4650237 - DNA, 25 bp, Homo sapien
ttcttgcatgcacaggcctaggctg

SEQ ID NO: 4650238 - DNA, 25 bp, Homo sapien
ttaggacgctgtgttaattcttgca

SEQ ID NO: 4650239 - DNA, 25 bp, Homo sapien
tcttccatccctaccgctaggtccc

SEQ ID NO: 4650240 - DNA, 25 bp, Homo sapien
gcctctgagccttgtgttgccacca

SEQ ID NO: 4650241 - DNA, 25 bp, Homo sapien
tctgcccctaaggactgaagttcca

SEQ ID NO: 4650242 - DNA, 25 bp, Homo sapien
tgtggaatactgctgtgacaatctg

SEQ ID NO: 4650243 - DNA, 25 bp, Homo sapien
tcagccccaggagtattccaaagcc

SEQ ID NO: 4650244 - DNA, 25 bp, Homo sapien
caggaattgatgttgaccgtggcag

SEQ ID NO: 4650245 - DNA, 25 bp, Homo sapien
tcaagaagcgatttggtagtcacag

SEQ ID NO: 4650246 - DNA, 25 bp, Homo sapien
tctctgctgtagtgaggcattgctg

SEQ ID NO: 4650247 - DNA, 25 bp, Homo sapien
cgaacctagggcaatgaaagacctg

SEQ ID NO: 4650248 - DNA, 25 bp, Homo sapien
ctggattagcaataacagacctggg

SEQ ID NO: 4650249 - DNA, 25 bp, Homo sapien
tctgggagcagaatcaccttgccac

SEQ ID NO: 4650250 - DNA, 25 bp, Homo sapien
ccttgccacaggaggtgatttccca

SEQ ID NO: 4650251 - DNA, 25 bp, Homo sapien
taaattggctgtcgcatcaggctaa

SEQ ID NO: 4650252 - DNA, 25 bp, Homo sapien
ctttgaaaagccataggtgcctctc

SEQ ID NO: 4650253 - DNA, 25 bp, Homo sapien
gcagatgtgatgcaggtttgcaatg

SEQ ID NO: 4650254 - DNA, 25 bp, Homo sapien
cctttgaaaagccataggtgcctct

SEQ ID NO: 4650255 - DNA, 25 bp, Homo sapien
tgcctgtgggttgaacaatggtagc

SEQ ID NO: 4650256 - DNA, 25 bp, Homo sapien
tttgaccttgggaagtgtggatagt

SEQ ID NO: 4650257 - DNA, 25 bp, Homo sapien
ttgctgtatgaacactctgaatgcc

SEQ ID NO: 4650258 - DNA, 25 bp, Homo sapien
gggaaatttcgactttgctgtatga

SEQ ID NO: 4650259 - DNA, 25 bp, Homo sapien
tagtctgaggagtggctgagcttca

SEQ ID NO: 4650260 - DNA, 25 bp, Homo sapien
agtggctgagcttcagggcactgac

SEQ ID NO: 4650261 - DNA, 25 bp, Homo sapien
ctagtctgaggagtggctgagcttc

SEQ ID NO: 4650262 - DNA, 25 bp, Homo sapien
aggagtggctgagcttcagggcact

SEQ ID NO: 4650263 - DNA, 25 bp, Homo sapien
cacaccttctgcatgactggacttt

SEQ ID NO: 4650264 - DNA, 25 bp, Homo sapien
ggactttgccttcagcgtcttcaca

SEQ ID NO: 4650265 - DNA, 25 bp, Homo sapien
ctgtgccgtggccttccacaccttc

SEQ ID NO: 4650266 - DNA, 25 bp, Homo sapien
ctctgacttgccctgctgtgccgtg

SEQ ID NO: 4650267 - DNA, 25 bp, Homo sapien
atgccagaaaatgagctgctcagcc

SEQ ID NO: 4650268 - DNA, 25 bp, Homo sapien
agatctgctagtgatgctgatttta

SEQ ID NO: 4650269 - DNA, 25 bp, Homo sapien
tgatgccaaaggcaagactagatct

SEQ ID NO: 4650270 - DNA, 25 bp, Homo sapien
ccaaaggcaagactagatctgctag

SEQ ID NO: 4650271 - DNA, 25 bp, Homo sapien
tgaagactttttttgatgcctttcc

SEQ ID NO: 4650272 - DNA, 25 bp, Homo sapien
agactttttttgatgcctttcctca

SEQ ID NO: 4650273 - DNA, 25 bp, Homo sapien
actgatgtgtttcttcaggttctgc

SEQ ID NO: 4650274 - DNA, 25 bp, Homo sapien
gactgatgtgtttcttcaggttctg

SEQ ID NO: 4650275 - DNA, 25 bp, Homo sapien
gcatgtatcatcagacaagctttct

SEQ ID NO: 4650276 - DNA, 25 bp, Homo sapien
cagatgtggttattttaggggcaac

SEQ ID NO: 4650277 - DNA, 25 bp, Homo sapien
atcttctgcatgtatcatcagacaa

SEQ ID NO: 4650278 - DNA, 25 bp, Homo sapien
tctgcatgtatcatcagacaagctt

SEQ ID NO: 4650279 - DNA, 25 bp, Homo sapien
ctgaagttaatgggagaggccactg

SEQ ID NO: 4650280 - DNA, 25 bp, Homo sapien
tgaagttaatgggagaggccactgt

SEQ ID NO: 4650281 - DNA, 25 bp, Homo sapien
tacagttttctaggtcatcctttga

SEQ ID NO: 4650282 - DNA, 25 bp, Homo sapien
gacattgtttggctctgtaccaagg

SEQ ID NO: 4650283 - DNA, 25 bp, Homo sapien
ggttagggaatatcacagagaatgt

SEQ ID NO: 4650284 - DNA, 25 bp, Homo sapien
catcctttgaaaagtcagctgactt

SEQ ID NO: 4650285 - DNA, 25 bp, Homo sapien
gaattctggtgagaaactttggaga

SEQ ID NO: 4650286 - DNA, 25 bp, Homo sapien
ttttcattccttgagggatttctgt

SEQ ID NO: 4650287 - DNA, 25 bp, Homo sapien
tttggagatagctagtgctctctca

SEQ ID NO: 4650288 - DNA, 25 bp, Homo sapien
ctttttggacattctcctttatatt

SEQ ID NO: 4650289 - DNA, 25 bp, Homo sapien
ttggtccatttgtattacttctggt

SEQ ID NO: 4650290 - DNA, 25 bp, Homo sapien
gataggtccgttgctattattaatg

SEQ ID NO: 4650291 - DNA, 25 bp, Homo sapien
ttctggttgataggtccgttgctat

SEQ ID NO: 4650292 - DNA, 25 bp, Homo sapien
catttgtattacttctggttgatag

SEQ ID NO: 4650293 - DNA, 25 bp, Homo sapien
tcttgtagtaatgagtcccatgcat

SEQ ID NO: 4650294 - DNA, 25 bp, Homo sapien
cacttcttgtagtaatgagtcccat

SEQ ID NO: 4650295 - DNA, 25 bp, Homo sapien
ttcttgtagtaatgagtcccatgca

SEQ ID NO: 4650296 - DNA, 25 bp, Homo sapien
cttcttgtagtaatgagtcccatgc

SEQ ID NO: 4650297 - DNA, 25 bp, Homo sapien
aggtgagcatagaactctcatgaag

SEQ ID NO: 4650298 - DNA, 25 bp, Homo sapien
ttcccagaggtggttaaataggtga

SEQ ID NO: 4650299 - DNA, 25 bp, Homo sapien
ggttaaataggtgagcatagaactc

SEQ ID NO: 4650300 - DNA, 25 bp, Homo sapien
cccagaggtggttaaataggtgagc

SEQ ID NO: 4650301 - DNA, 25 bp, Homo sapien
agtaagtgtagacgccttggtggaa

SEQ ID NO: 4650302 - DNA, 25 bp, Homo sapien
aatgggagtagtttgtgttgcatgt

SEQ ID NO: 4650303 - DNA, 25 bp, Homo sapien
gagtagtttgtgttgcatgtactca

SEQ ID NO: 4650304 - DNA, 25 bp, Homo sapien
gagatgagcaagtaagtgtagacgc

SEQ ID NO: 4650305 - DNA, 25 bp, Homo sapien
gcagagggtgttgttgccaataggg

SEQ ID NO: 4650306 - DNA, 25 bp, Homo sapien
agaacagacatagggtaaagtagag

SEQ ID NO: 4650307 - DNA, 25 bp, Homo sapien
agtagagtaatagggagtcccgtgg

SEQ ID NO: 4650308 - DNA, 25 bp, Homo sapien
catttgcagttgaatgagtgccagg

SEQ ID NO: 4650309 - DNA, 25 bp, Homo sapien
cattgggctttaagcgttgcttctc

SEQ ID NO: 4650310 - DNA, 25 bp, Homo sapien
tgtgactgaagccaaacacaacatt

SEQ ID NO: 4650311 - DNA, 25 bp, Homo sapien
tgcttctctttagtgtatgtgtgac

SEQ ID NO: 4650312 - DNA, 25 bp, Homo sapien
caaacacaacattgctttccctttg

SEQ ID NO: 4650313 - DNA, 25 bp, Homo sapien
gcatgggtctcttgcttcctgcagg

SEQ ID NO: 4650314 - DNA, 25 bp, Homo sapien
tcagcatgggtctcttgcttcctgc

SEQ ID NO: 4650315 - DNA, 25 bp, Homo sapien
tgcttcctgcaggaagggcgatatc

SEQ ID NO: 4650316 - DNA, 25 bp, Homo sapien
ttgcttcctgcaggaagggcgatat

SEQ ID NO: 4650317 - DNA, 25 bp, Homo sapien
cagtgatgggctctactaggaggca

SEQ ID NO: 4650318 - DNA, 25 bp, Homo sapien
gctccttcgggttggcctggctctt

SEQ ID NO: 4650319 - DNA, 25 bp, Homo sapien
ggatgaagggtctaagcttgctgct

SEQ ID NO: 4650320 - DNA, 25 bp, Homo sapien
gcattgccaggtctggtgggctcct

SEQ ID NO: 4650321 - DNA, 25 bp, Homo sapien
tcccggagctcgtcccggacgcgcg

SEQ ID NO: 4650322 - DNA, 25 bp, Homo sapien
ggcgtctgagcgaggccgggcgcgg

SEQ ID NO: 4650323 - DNA, 25 bp, Homo sapien
ggcgcggcggccttctctcacgcgc

SEQ ID NO: 4650324 - DNA, 25 bp, Homo sapien
gtcggcccagactatccgctcccac

SEQ ID NO: 4650325 - DNA, 25 bp, Homo sapien
gcgtaggggagcctcgcaggcggcg

SEQ ID NO: 4650326 - DNA, 25 bp, Homo sapien
aggcgcacggcgtaggggagcctcg

SEQ ID NO: 4650327 - DNA, 25 bp, Homo sapien
acaccccggtgaatgagctctcgcc

SEQ ID NO: 4650328 - DNA, 25 bp, Homo sapien
gtgaatgagctctcgccgccaggcg

SEQ ID NO: 4650329 - DNA, 25 bp, Homo sapien
gccctggcacgcaacggcggccgcc

SEQ ID NO: 4650330 - DNA, 25 bp, Homo sapien
gacggcagccgcaggtcggctgcgg

SEQ ID NO: 4650331 - DNA, 25 bp, Homo sapien
ccgggggcggccgtgactgctgcgc

SEQ ID NO: 4650332 - DNA, 25 bp, Homo sapien
cgggctgcgcgtcggcggccgggtc

SEQ ID NO: 4650333 - DNA, 25 bp, Homo sapien
ttttctaagactgcaccggtgtcag

SEQ ID NO: 4650334 - DNA, 25 bp, Homo sapien
tagaaataggaacgggaaacacaga

SEQ ID NO: 4650335 - DNA, 25 bp, Homo sapien
gaacagcttcgcctgtgaatctccc

SEQ ID NO: 4650336 - DNA, 25 bp, Homo sapien
cgtgagagtttctaaccgaatggcg

SEQ ID NO: 4650337 - DNA, 25 bp, Homo sapien
ggatcagcaggttgcaccagggaca

SEQ ID NO: 4650338 - DNA, 25 bp, Homo sapien
tctggatcagcaggttgcaccaggg

SEQ ID NO: 4650339 - DNA, 25 bp, Homo sapien
cgtgaaaaagcggttctcttcataa

SEQ ID NO: 4650340 - DNA, 25 bp, Homo sapien
cacttcagagaacacatgaaacgtg

SEQ ID NO: 4650341 - DNA, 25 bp, Homo sapien
caggactggctgactctagccctat

SEQ ID NO: 4650342 - DNA, 25 bp, Homo sapien
caaatagcacatggggccatttggt

SEQ ID NO: 4650343 - DNA, 25 bp, Homo sapien
ccatttggtgcccagtgcaggtatg

SEQ ID NO: 4650344 - DNA, 25 bp, Homo sapien
tccagctcccatgaccaattcagga

SEQ ID NO: 4650345 - DNA, 25 bp, Homo sapien
tggttgtaatgcatatcttcaatgc

SEQ ID NO: 4650346 - DNA, 25 bp, Homo sapien
tctccaaacccctctgtaaggtagc

SEQ ID NO: 4650347 - DNA, 25 bp, Homo sapien
tcttcaatgctgttgctatgttgta

SEQ ID NO: 4650348 - DNA, 25 bp, Homo sapien
attcttctattgcaatacactgtag

SEQ ID NO: 4650349 - DNA, 25 bp, Homo sapien
gcttcctcgaggaccagctcaaaaa

SEQ ID NO: 4650350 - DNA, 25 bp, Homo sapien
aaggcttgctcaagcagtagggtga

SEQ ID NO: 4650351 - DNA, 25 bp, Homo sapien
tcaccattgtgaacttgaacagtcc

SEQ ID NO: 4650352 - DNA, 25 bp, Homo sapien
tgatagtttccagcgggcttcctcg

SEQ ID NO: 4650353 - DNA, 25 bp, Homo sapien
tcatggaaagcagactaattccagc

SEQ ID NO: 4650354 - DNA, 25 bp, Homo sapien
tggaaagcagactaattccagcttc

SEQ ID NO: 4650355 - DNA, 25 bp, Homo sapien
ggaaagcagactaattccagcttcc

SEQ ID NO: 4650356 - DNA, 25 bp, Homo sapien
ttctcatggaaagcagactaattcc

SEQ ID NO: 4650357 - DNA, 25 bp, Homo sapien
ccataaagatctgcagagcaggtta

SEQ ID NO: 4650358 - DNA, 25 bp, Homo sapien
gcaggttatctgaaccagccctaag

SEQ ID NO: 4650359 - DNA, 25 bp, Homo sapien
cagccctaagcacatgtctgtggat

SEQ ID NO: 4650360 - DNA, 25 bp, Homo sapien
tgatacatcaaagcaatggtccctg

SEQ ID NO: 4650361 - DNA, 25 bp, Homo sapien
cttgtacacccttgacagaagaaca

SEQ ID NO: 4650362 - DNA, 25 bp, Homo sapien
caagggagtacagctacttgtacac

SEQ ID NO: 4650363 - DNA, 25 bp, Homo sapien
tcccagggctttggttaggatgcac

SEQ ID NO: 4650364 - DNA, 25 bp, Homo sapien
gaaggatctgatcaatcccagggct

SEQ ID NO: 4650365 - DNA, 25 bp, Homo sapien
taaatgaactaatatggacccctct

SEQ ID NO: 4650366 - DNA, 25 bp, Homo sapien
tacaatatgatgtgaatggccacca

SEQ ID NO: 4650367 - DNA, 25 bp, Homo sapien
agtttctagaggctacaagcaccca

SEQ ID NO: 4650368 - DNA, 25 bp, Homo sapien
aaaagagcacttgaccctatgagcc

SEQ ID NO: 4650369 - DNA, 25 bp, Homo sapien
tagcgtctaggattggaagcaccag

SEQ ID NO: 4650370 - DNA, 25 bp, Homo sapien
acatagcgtctaggattggaagcac

SEQ ID NO: 4650371 - DNA, 25 bp, Homo sapien
tctaggattggaagcaccagttgcc

SEQ ID NO: 4650372 - DNA, 25 bp, Homo sapien
gattggaagcaccagttgccggcat

SEQ ID NO: 4650373 - DNA, 25 bp, Homo sapien
gaggcagtggtcttcatacagtgcc

SEQ ID NO: 4650374 - DNA, 25 bp, Homo sapien
cagtggtcttcatacagtgccctgg

SEQ ID NO: 4650375 - DNA, 25 bp, Homo sapien
gcagtggtcttcatacagtgccctg

SEQ ID NO: 4650376 - DNA, 25 bp, Homo sapien
cagaactgatcggtcccctttcccg

SEQ ID NO: 4650377 - DNA, 25 bp, Homo sapien
atcagaactgatcggtcccctttcc

SEQ ID NO: 4650378 - DNA, 25 bp, Homo sapien
aatcagaactgatcggtcccctttc

SEQ ID NO: 4650379 - DNA, 25 bp, Homo sapien
caaatcagaactgatcggtcccctt

SEQ ID NO: 4650380 - DNA, 25 bp, Homo sapien
caggtcattgaaggccttgaaccag

SEQ ID NO: 4650381 - DNA, 25 bp, Homo sapien
ttcttccatcaggtcattgaaggcc

SEQ ID NO: 4650382 - DNA, 25 bp, Homo sapien
tgcttttgtgtattcttccatcagg

SEQ ID NO: 4650383 - DNA, 25 bp, Homo sapien
ccatcaggtcattgaaggccttgaa

SEQ ID NO: 4650384 - DNA, 25 bp, Homo sapien
tccatgctccatggcttcttggaag

SEQ ID NO: 4650385 - DNA, 25 bp, Homo sapien
tctgttccatgctccatggcttctt

SEQ ID NO: 4650386 - DNA, 25 bp, Homo sapien
tgaggttctgttccatgctccatgg

SEQ ID NO: 4650387 - DNA, 25 bp, Homo sapien
tgctccatggcttcttggaagtgac

SEQ ID NO: 4650388 - DNA, 25 bp, Homo sapien
tttggccaggtcctgggtcttcgtg

SEQ ID NO: 4650389 - DNA, 25 bp, Homo sapien
tgttgggggctttggccaggtcctg

SEQ ID NO: 4650390 - DNA, 25 bp, Homo sapien
tggccaggtcctgggtcttcgtgta

SEQ ID NO: 4650391 - DNA, 25 bp, Homo sapien
ccaggtcctgggtcttcgtgtagag

SEQ ID NO: 4650392 - DNA, 25 bp, Homo sapien
atccttgacgttggtcaccttcaca

SEQ ID NO: 4650393 - DNA, 25 bp, Homo sapien
cttgacgttggtcaccttcacaggg

SEQ ID NO: 4650394 - DNA, 25 bp, Homo sapien
gacgttggtcaccttcacagggacc

SEQ ID NO: 4650395 - DNA, 25 bp, Homo sapien
tggtgggtggtgccatccttgacgt

SEQ ID NO: 4650396 - DNA, 25 bp, Homo sapien
cttcgtttaggtacatgaaaaggag

SEQ ID NO: 4650397 - DNA, 25 bp, Homo sapien
ttaggtacatgaaaaggaggtacca

SEQ ID NO: 4650398 - DNA, 25 bp, Homo sapien
aggtacatgaaaaggaggtaccaag

SEQ ID NO: 4650399 - DNA, 25 bp, Homo sapien
tacatgaaaaggaggtaccaaggta

SEQ ID NO: 4650400 - DNA, 25 bp, Homo sapien
ttgggacttcattccaatgaagcgg

SEQ ID NO: 4650401 - DNA, 25 bp, Homo sapien
aagcggttctccacgatgtcagtat

SEQ ID NO: 4650402 - DNA, 25 bp, Homo sapien
cttgggacttcattccaatgaagcg

SEQ ID NO: 4650403 - DNA, 25 bp, Homo sapien
ctccacgatgtcagtatggctacac

SEQ ID NO: 4650404 - DNA, 25 bp, Homo sapien
tgagcgtggtaaaggatggtgcctg

SEQ ID NO: 4650405 - DNA, 25 bp, Homo sapien
ctaaatgagcgtggtaaaggatggt

SEQ ID NO: 4650406 - DNA, 25 bp, Homo sapien
aaatgagcgtggtaaaggatggtgc

SEQ ID NO: 4650407 - DNA, 25 bp, Homo sapien
aatgagcgtggtaaaggatggtgcc

SEQ ID NO: 4650408 - DNA, 25 bp, Homo sapien
tttcccttctactcgctcctggaac

SEQ ID NO: 4650409 - DNA, 25 bp, Homo sapien
acactctggtctgtgccagaaaccg

SEQ ID NO: 4650410 - DNA, 25 bp, Homo sapien
aattcacactctggtctgtgccaga

SEQ ID NO: 4650411 - DNA, 25 bp, Homo sapien
cctggaacttggcaatgcagtggcg

SEQ ID NO: 4650412 - DNA, 25 bp, Homo sapien
tcaccagcaactggctgtagagaga

SEQ ID NO: 4650413 - DNA, 25 bp, Homo sapien
ctcaccagcaactggctgtagagag

SEQ ID NO: 4650414 - DNA, 25 bp, Homo sapien
gctcaccagcaactggctgtagaga

SEQ ID NO: 4650415 - DNA, 25 bp, Homo sapien
cgatgatattccctcagcgtgaggg

SEQ ID NO: 4650416 - DNA, 25 bp, Homo sapien
agacgatgatattccctcagcgtga

SEQ ID NO: 4650417 - DNA, 25 bp, Homo sapien
attggctcataatcatcctgcactt

SEQ ID NO: 4650418 - DNA, 25 bp, Homo sapien
gatgaacctgatggcatcaattggc

SEQ ID NO: 4650419 - DNA, 25 bp, Homo sapien
actttgtacagatgtaaagaggagg

SEQ ID NO: 4650420 - DNA, 25 bp, Homo sapien
ccctgtatgagtggaggatatccca

SEQ ID NO: 4650421 - DNA, 25 bp, Homo sapien
gagtggaggatatcccactgtccat

SEQ ID NO: 4650422 - DNA, 25 bp, Homo sapien
ctgtccatggaccttaatctgtttg

SEQ ID NO: 4650423 - DNA, 25 bp, Homo sapien
tccatggaccttaatctgtttgcca

SEQ ID NO: 4650424 - DNA, 25 bp, Homo sapien
tgctatgttctttgactgccaacag

SEQ ID NO: 4650425 - DNA, 25 bp, Homo sapien
tcccaagaaaacattgagtgtctgc

SEQ ID NO: 4650426 - DNA, 25 bp, Homo sapien
tgccaacagcaaggcggtctcgatt

SEQ ID NO: 4650427 - DNA, 25 bp, Homo sapien
cggtctcgattataccatctgctga

SEQ ID NO: 4650428 - DNA, 25 bp, Homo sapien
ttctcataggaagttgagagttgct

SEQ ID NO: 4650429 - DNA, 25 bp, Homo sapien
gctctcatgggttttgtcatcaatc

SEQ ID NO: 4650430 - DNA, 25 bp, Homo sapien
agagttgctcagctctcatgggttt

SEQ ID NO: 4650431 - DNA, 25 bp, Homo sapien
ctcataggaagttgagagttgctca

SEQ ID NO: 4650432 - DNA, 25 bp, Homo sapien
ccaaggctcttgttgtagtattcac

SEQ ID NO: 4650433 - DNA, 25 bp, Homo sapien
actacaactatttctgagtttggga

SEQ ID NO: 4650434 - DNA, 25 bp, Homo sapien
tccaaggctcttgttgtagtattca

SEQ ID NO: 4650435 - DNA, 25 bp, Homo sapien
tctcttaactacaactatttctgag

SEQ ID NO: 4650436 - DNA, 25 bp, Homo sapien
tgttgaggtatctagcactccaaca

SEQ ID NO: 4650437 - DNA, 25 bp, Homo sapien
gttgaggtatctagcactccaacat

SEQ ID NO: 4650438 - DNA, 25 bp, Homo sapien
ttgaggtatctagcactccaacatc

SEQ ID NO: 4650439 - DNA, 25 bp, Homo sapien
tgctacacagggaaggtgtctctga

SEQ ID NO: 4650440 - DNA, 25 bp, Homo sapien
agagcccttccgtaacctcggcact

SEQ ID NO: 4650441 - DNA, 25 bp, Homo sapien
cctcatgaaggtaaaaactgctaca

SEQ ID NO: 4650442 - DNA, 25 bp, Homo sapien
gaaagtctgggcctcatgaaggtaa

SEQ ID NO: 4650443 - DNA, 25 bp, Homo sapien
ttggaaatagggtctgcctgaatga

SEQ ID NO: 4650444 - DNA, 25 bp, Homo sapien
ctgtaaaaggattgtttggaaatag

SEQ ID NO: 4650445 - DNA, 25 bp, Homo sapien
aagcctagaggctgtaaacaaaatt

SEQ ID NO: 4650446 - DNA, 25 bp, Homo sapien
gatgcaagtaaacaattctgggcca

SEQ ID NO: 4650447 - DNA, 25 bp, Homo sapien
tgcaggaaatgaaatgagagagcgc

SEQ ID NO: 4650448 - DNA, 25 bp, Homo sapien
caggaaatgaaatgagagagcgcga

SEQ ID NO: 4650449 - DNA, 25 bp, Homo sapien
gaaatgaaatgagagagcgcgaaga

SEQ ID NO: 4650450 - DNA, 25 bp, Homo sapien
aagaggggggtgcagcaggcaacat

SEQ ID NO: 4650451 - DNA, 25 bp, Homo sapien
gccattggacataagtctcctccac

SEQ ID NO: 4650452 - DNA, 25 bp, Homo sapien
atgaacccggcctagacgccattgg

SEQ ID NO: 4650453 - DNA, 25 bp, Homo sapien
agtacttgtccgagtagtagatggc

SEQ ID NO: 4650454 - DNA, 25 bp, Homo sapien
cttcagacatcagatgagtttcagg

SEQ ID NO: 4650455 - DNA, 25 bp, Homo sapien
aagacgcaaggccagagccccaagc

SEQ ID NO: 4650456 - DNA, 25 bp, Homo sapien
aagcagttggcgcccgcctcatagt

SEQ ID NO: 4650457 - DNA, 25 bp, Homo sapien
ccaagaacgctgagtcgcaacccgg

SEQ ID NO: 4650458 - DNA, 25 bp, Homo sapien
gctcaggagcggtgattcggtcgga

SEQ ID NO: 4650459 - DNA, 25 bp, Homo sapien
tattgatcttgagggtgctcagcag

SEQ ID NO: 4650460 - DNA, 25 bp, Homo sapien
gcagcgcgcacaggtactcgtagtg

SEQ ID NO: 4650461 - DNA, 25 bp, Homo sapien
ggcgcagcttcacggagtcgatcat

SEQ ID NO: 4650462 - DNA, 25 bp, Homo sapien
ggaagaagctcttgatggagaccaa

SEQ ID NO: 4650463 - DNA, 25 bp, Homo sapien
cccacttcgccgcaccgactgaggg

SEQ ID NO: 4650464 - DNA, 25 bp, Homo sapien
ccgcaccgactgaggggccctggag

SEQ ID NO: 4650465 - DNA, 25 bp, Homo sapien
aaaacccacttcgccgcaccgactg

SEQ ID NO: 4650466 - DNA, 25 bp, Homo sapien
ttcgccgcaccgactgaggggccct

SEQ ID NO: 4650467 - DNA, 25 bp, Homo sapien
cagaattagtccatttagctccagg

SEQ ID NO: 4650468 - DNA, 25 bp, Homo sapien
tcttatcgcaggaacacgacttctg

SEQ ID NO: 4650469 - DNA, 25 bp, Homo sapien
gcacacttgatatacttaaacagcc

SEQ ID NO: 4650470 - DNA, 25 bp, Homo sapien
tttacacaactggaaggtcacatct

SEQ ID NO: 4650471 - DNA, 25 bp, Homo sapien
gagacaggtgcaccaaagaagccga

SEQ ID NO: 4650472 - DNA, 25 bp, Homo sapien
tctccaattggacaatttgcaagag

SEQ ID NO: 4650473 - DNA, 25 bp, Homo sapien
cctccatctccaattggacaatttg

SEQ ID NO: 4650474 - DNA, 25 bp, Homo sapien
ccaaagaagccgatttattcaatcc

SEQ ID NO: 4650475 - DNA, 25 bp, Homo sapien
tccctgccatgtcagattacatcct

SEQ ID NO: 4650476 - DNA, 25 bp, Homo sapien
tcagattacatcctgtgaagttgac

SEQ ID NO: 4650477 - DNA, 25 bp, Homo sapien
gactgtcttaagagtgatagagctc

SEQ ID NO: 4650478 - DNA, 25 bp, Homo sapien
ctttaagatcttggccatgtgatct

SEQ ID NO: 4650479 - DNA, 25 bp, Homo sapien
tctgcaaaagcacatgcacctaggt

SEQ ID NO: 4650480 - DNA, 25 bp, Homo sapien
taagccagccatacagtcaagatca

SEQ ID NO: 4650481 - DNA, 25 bp, Homo sapien
cagtgtgatacgtcttaagccagcc

SEQ ID NO: 4650482 - DNA, 25 bp, Homo sapien
caagatcaggtctcctatagcgaag

SEQ ID NO: 4650483 - DNA, 25 bp, Homo sapien
gaggccgcactgttgcaggtcaaga

SEQ ID NO: 4650484 - DNA, 25 bp, Homo sapien
cagagttgtattggtttcaagggcc

SEQ ID NO: 4650485 - DNA, 25 bp, Homo sapien
tatatccagaacgaccagagttgta

SEQ ID NO: 4650486 - DNA, 25 bp, Homo sapien
tttgctccttcattggtgaggccgc

SEQ ID NO: 4650487 - DNA, 25 bp, Homo sapien
tttgataactgctttcatcatagaa

SEQ ID NO: 4650488 - DNA, 25 bp, Homo sapien
ttgataactgctttcatcatagaat

SEQ ID NO: 4650489 - DNA, 25 bp, Homo sapien
agaaaagcaattaaataagaattct

SEQ ID NO: 4650490 - DNA, 25 bp, Homo sapien
caattaaataagaattctttctgga

SEQ ID NO: 4650491 - DNA, 25 bp, Homo sapien
aagcaattaaataagaattctttct

SEQ ID NO: 4650492 - DNA, 25 bp, Homo sapien
cagaagaaaagcaattaaataagaa

SEQ ID NO: 4650493 - DNA, 25 bp, Homo sapien
gatcatttatgagggctacatctta

SEQ ID NO: 4650494 - DNA, 25 bp, Homo sapien
tggaaattgttaagatactctatgt

SEQ ID NO: 4650495 - DNA, 25 bp, Homo sapien
aacactatatttcagttacagatca

SEQ ID NO: 4650496 - DNA, 25 bp, Homo sapien
ggtttgcaatcagcagttctgggac

SEQ ID NO: 4650497 - DNA, 25 bp, Homo sapien
tagaattatagttctccttttctgt

SEQ ID NO: 4650498 - DNA, 25 bp, Homo sapien
ttttcctttgtgaccacttcctaga

SEQ ID NO: 4650499 - DNA, 25 bp, Homo sapien
atggttccttcactgatggagaagt

SEQ ID NO: 4650500 - DNA, 25 bp, Homo sapien
ggttccttcactgatggagaagtta

SEQ ID NO: 4650501 - DNA, 25 bp, Homo sapien
aggtggaagaggtgcgggcgcataa

SEQ ID NO: 4650502 - DNA, 25 bp, Homo sapien
tgcacgttctgcagtacgccacggc

SEQ ID NO: 4650503 - DNA, 25 bp, Homo sapien
agtacgccacggcaagaaaccagac

SEQ ID NO: 4650504 - DNA, 25 bp, Homo sapien
aggtgcgggcgcataatattcttta

SEQ ID NO: 4650505 - DNA, 25 bp, Homo sapien
aatagctatcacctaggtaactggc

SEQ ID NO: 4650506 - DNA, 25 bp, Homo sapien
gaacggctttgggataagactctga

SEQ ID NO: 4650507 - DNA, 25 bp, Homo sapien
caactccttgtgaccaagatgggac

SEQ ID NO: 4650508 - DNA, 25 bp, Homo sapien
taaaatgagttaggccagttggctg

SEQ ID NO: 4650509 - DNA, 25 bp, Homo sapien
tatatcacgtgttttgattaatggg

SEQ ID NO: 4650510 - DNA, 25 bp, Homo sapien
ctgcaactgattacatatatcacgt

SEQ ID NO: 4650511 - DNA, 25 bp, Homo sapien
tatcacgtgttttgattaatgggaa

SEQ ID NO: 4650512 - DNA, 25 bp, Homo sapien
tgattacatatatcacgtgttttga

SEQ ID NO: 4650513 - DNA, 25 bp, Homo sapien
cacgcctatactgtggcaccgggag

SEQ ID NO: 4650514 - DNA, 25 bp, Homo sapien
gatagctccatgtgtcgggtgagaa

SEQ ID NO: 4650515 - DNA, 25 bp, Homo sapien
caacagctgatttgtggacccagag

SEQ ID NO: 4650516 - DNA, 25 bp, Homo sapien
tcctagacggtagaatgagatgcac

SEQ ID NO: 4650517 - DNA, 25 bp, Homo sapien
tttcacataaaccaagcaaggaggc

SEQ ID NO: 4650518 - DNA, 25 bp, Homo sapien
taaacactagaatggcctgtaatcc

SEQ ID NO: 4650519 - DNA, 25 bp, Homo sapien
gaaaaaattcatccgtggaggcctc

SEQ ID NO: 4650520 - DNA, 25 bp, Homo sapien
gcaggagtactgcttaaggtcagaa

SEQ ID NO: 4650521 - DNA, 25 bp, Homo sapien
acttcagaggatgaaggactctcta

SEQ ID NO: 4650522 - DNA, 25 bp, Homo sapien
caggcacttcatgaacactctctga

SEQ ID NO: 4650523 - DNA, 25 bp, Homo sapien
ctctctactgtcacagtcacaggaa

SEQ ID NO: 4650524 - DNA, 25 bp, Homo sapien
gtaatgcttcttgttctatactagt

SEQ ID NO: 4650525 - DNA, 25 bp, Homo sapien
caaccttaagccttatcactctttc

SEQ ID NO: 4650526 - DNA, 25 bp, Homo sapien
ctttaactgctttaggcactcctcc

SEQ ID NO: 4650527 - DNA, 25 bp, Homo sapien
ctcactgactcgtttatcaacctta

SEQ ID NO: 4650528 - DNA, 25 bp, Homo sapien
cgtttatcaaccttaagccttatca

SEQ ID NO: 4650529 - DNA, 25 bp, Homo sapien
cagcatctttaaggagatccaagaa

SEQ ID NO: 4650530 - DNA, 25 bp, Homo sapien
tgtcaatgactgtgcatgaagggct

SEQ ID NO: 4650531 - DNA, 25 bp, Homo sapien
tcaatgactgtgcatgaagggcttc

SEQ ID NO: 4650532 - DNA, 25 bp, Homo sapien
ccagcatctttaaggagatccaaga

SEQ ID NO: 4650533 - DNA, 25 bp, Homo sapien
gaaaatctgactgatctatcccagc

SEQ ID NO: 4650534 - DNA, 25 bp, Homo sapien
ggtttttcatcttcaagcgccttct

SEQ ID NO: 4650535 - DNA, 25 bp, Homo sapien
ttactaacagtagaagtcatctggg

SEQ ID NO: 4650536 - DNA, 25 bp, Homo sapien
gatattttgcatttgccctagggca

SEQ ID NO: 4650537 - DNA, 25 bp, Homo sapien
cattagtgttccttcattgtaagct

SEQ ID NO: 4650538 - DNA, 25 bp, Homo sapien
tcattagtgttccttcattgtaagc

SEQ ID NO: 4650539 - DNA, 25 bp, Homo sapien
ttagtgttccttcattgtaagctga

SEQ ID NO: 4650540 - DNA, 25 bp, Homo sapien
cttcattagtgttccttcattgtaa

SEQ ID NO: 4650541 - DNA, 25 bp, Homo sapien
gcaaaggaattctagcatcacctgt

SEQ ID NO: 4650542 - DNA, 25 bp, Homo sapien
ggttgttgctggaagttcctaagcc

SEQ ID NO: 4650543 - DNA, 25 bp, Homo sapien
tcgcatctggtgaaggagaacacat

SEQ ID NO: 4650544 - DNA, 25 bp, Homo sapien
taagccctctggagtagaaactggg

SEQ ID NO: 4650545 - DNA, 25 bp, Homo sapien
ctgaagaagatctgctatttctgga

SEQ ID NO: 4650546 - DNA, 25 bp, Homo sapien
tgaagaagatctgctatttctggac

SEQ ID NO: 4650547 - DNA, 25 bp, Homo sapien
tctgaagaagatctgctatttctgg

SEQ ID NO: 4650548 - DNA, 25 bp, Homo sapien
cagggtgttgcttatcagagtgttt

SEQ ID NO: 4650549 - DNA, 25 bp, Homo sapien
gggtgttgcttatcagagtgttttt

SEQ ID NO: 4650550 - DNA, 25 bp, Homo sapien
gaatgcaggtcctttccagggtgtt

SEQ ID NO: 4650551 - DNA, 25 bp, Homo sapien
ttccagggtgttgcttatcagagtg

SEQ ID NO: 4650552 - DNA, 25 bp, Homo sapien
ttcagaatgttctagtggactggat

SEQ ID NO: 4650553 - DNA, 25 bp, Homo sapien
gatagagaatggatgctttcttgaa

SEQ ID NO: 4650554 - DNA, 25 bp, Homo sapien
tctagtggactggatttacttttat

SEQ ID NO: 4650555 - DNA, 25 bp, Homo sapien
tggatgaaacagtcactattctatt

SEQ ID NO: 4650556 - DNA, 25 bp, Homo sapien
catagtttcaaaagatttagtcata

SEQ ID NO: 4650557 - DNA, 25 bp, Homo sapien
acatagtttcaaaagatttagtcat

SEQ ID NO: 4650558 - DNA, 25 bp, Homo sapien
aacatagtttcaaaagatttagtca

SEQ ID NO: 4650559 - DNA, 25 bp, Homo sapien
tagtttcaaaagatttagtcatatg

SEQ ID NO: 4650560 - DNA, 25 bp, Homo sapien
tagttagagagatcatgtgggcagc

SEQ ID NO: 4650561 - DNA, 25 bp, Homo sapien
gctgtgtagtccatcttctgagtgt

SEQ ID NO: 4650562 - DNA, 25 bp, Homo sapien
tataaacggaagtggcaggtcatca

SEQ ID NO: 4650563 - DNA, 25 bp, Homo sapien
cggcatggtggtacattgcagctac

SEQ ID NO: 4650564 - DNA, 25 bp, Homo sapien
tcttggtcactatgaatggagctgc

SEQ ID NO: 4650565 - DNA, 25 bp, Homo sapien
gcttcttgttataactggctggcca

SEQ ID NO: 4650566 - DNA, 25 bp, Homo sapien
tatcctgatctactgatgggcaaga

SEQ ID NO: 4650567 - DNA, 25 bp, Homo sapien
cagaatgtagccttccgagactggc

SEQ ID NO: 4650568 - DNA, 25 bp, Homo sapien
gactcttttctagggtgcacacacg

SEQ ID NO: 4650569 - DNA, 25 bp, Homo sapien
caggagtgcgtggttactgtgcaac

SEQ ID NO: 4650570 - DNA, 25 bp, Homo sapien
tcattagatcaaaggctggagacat

SEQ ID NO: 4650571 - DNA, 25 bp, Homo sapien
gactatgccatgtaggcgactccaa

SEQ ID NO: 4650572 - DNA, 25 bp, Homo sapien
taaggaactcaattcttaggtaaga

SEQ ID NO: 4650573 - DNA, 25 bp, Homo sapien
tttgccttgtgctacttgaagccct

SEQ ID NO: 4650574 - DNA, 25 bp, Homo sapien
caagtgaatcaatacctctcaggcc

SEQ ID NO: 4650575 - DNA, 25 bp, Homo sapien
tgtctcctatctggttacaataagg

SEQ ID NO: 4650576 - DNA, 25 bp, Homo sapien
ctgcctcgtccacgtgggaccgtga

SEQ ID NO: 4650577 - DNA, 25 bp, Homo sapien
cacgtgggaccgtgaagtccttgga

SEQ ID NO: 4650578 - DNA, 25 bp, Homo sapien
cgtccacgtgggaccgtgaagtcct

SEQ ID NO: 4650579 - DNA, 25 bp, Homo sapien
cctcgtccacgtgggaccgtgaagt

SEQ ID NO: 4650580 - DNA, 25 bp, Homo sapien
tcatttagcaatggtggtagactct

SEQ ID NO: 4650581 - DNA, 25 bp, Homo sapien
agctgcagtcccctgcagaagaacc

SEQ ID NO: 4650582 - DNA, 25 bp, Homo sapien
aaaatgccactcaagatcttgggca

SEQ ID NO: 4650583 - DNA, 25 bp, Homo sapien
ctgagtccatgacttatgaacttaa

SEQ ID NO: 4650584 - DNA, 25 bp, Homo sapien
tctatcccagagctttagcaaaaag

SEQ ID NO: 4650585 - DNA, 25 bp, Homo sapien
tcactgcctgttggccacgattggt

SEQ ID NO: 4650586 - DNA, 25 bp, Homo sapien
tcttccctccacatgaatgcgggct

SEQ ID NO: 4650587 - DNA, 25 bp, Homo sapien
tttcagcctcaggattcgagcttcc

SEQ ID NO: 4650588 - DNA, 25 bp, Homo sapien
gatatccaactccaaccagcttggg

SEQ ID NO: 4650589 - DNA, 25 bp, Homo sapien
taaggctgcacttctaggtcaaccc

SEQ ID NO: 4650590 - DNA, 25 bp, Homo sapien
cctataggaatgctgggtggcctga

SEQ ID NO: 4650591 - DNA, 25 bp, Homo sapien
gtagcatcaccacagcacaatgcgg

SEQ ID NO: 4650592 - DNA, 25 bp, Homo sapien
ggcttatgtcttgtatagaaaggca

SEQ ID NO: 4650593 - DNA, 25 bp, Homo sapien
gcatttctgtaaccatcaaaacgaa

SEQ ID NO: 4650594 - DNA, 25 bp, Homo sapien
tgaggcatatccaagcagggtgtgt

SEQ ID NO: 4650595 - DNA, 25 bp, Homo sapien
gacgtaagaatacgcctcatatgaa

SEQ ID NO: 4650596 - DNA, 25 bp, Homo sapien
gagtcatacagaatgattgatcccg

SEQ ID NO: 4650597 - DNA, 25 bp, Homo sapien
tatgcggagtcatacagaatgattg

SEQ ID NO: 4650598 - DNA, 25 bp, Homo sapien
tacagaatgattgatcccgggaggc

SEQ ID NO: 4650599 - DNA, 25 bp, Homo sapien
ctcttgtatgcggagtcatacagaa

SEQ ID NO: 4650600 - DNA, 25 bp, Homo sapien
tgctgccctttttgtagttggagct

SEQ ID NO: 4650601 - DNA, 25 bp, Homo sapien
tagttggagctaaagatccttttcc

SEQ ID NO: 4650602 - DNA, 25 bp, Homo sapien
cttatcattattcccagagaacgtg

SEQ ID NO: 4650603 - DNA, 25 bp, Homo sapien
tcattattcccagagaacgtgagga

SEQ ID NO: 4650604 - DNA, 25 bp, Homo sapien
attgtctcatctgctaagacatccc

SEQ ID NO: 4650605 - DNA, 25 bp, Homo sapien
tcatctgctaagacatcccctgcag

SEQ ID NO: 4650606 - DNA, 25 bp, Homo sapien
cggtggctattgtctcatctgctaa

SEQ ID NO: 4650607 - DNA, 25 bp, Homo sapien
cccactaggggcacaggaatttggg

SEQ ID NO: 4650608 - DNA, 25 bp, Homo sapien
cgggcgtcagataccccagtggaga

SEQ ID NO: 4650609 - DNA, 25 bp, Homo sapien
tctttgtatttgcacgtgggtcctg

SEQ ID NO: 4650610 - DNA, 25 bp, Homo sapien
gaaccaccagtcactaatctaccaa

SEQ ID NO: 4650611 - DNA, 25 bp, Homo sapien
cccccaaggttggaagcgcaggatg

SEQ ID NO: 4650612 - DNA, 25 bp, Homo sapien
tcttggctgaaagggcagttgccga

SEQ ID NO: 4650613 - DNA, 25 bp, Homo sapien
ccttgagcccgcaatctggccggtt

SEQ ID NO: 4650614 - DNA, 25 bp, Homo sapien
agcccgcaatctggccggttccagt

SEQ ID NO: 4650615 - DNA, 25 bp, Homo sapien
agttgccgagcagatttgtagcccc

SEQ ID NO: 4650616 - DNA, 25 bp, Homo sapien
tcctcctcgcgtttactgtttcaac

SEQ ID NO: 4650617 - DNA, 25 bp, Homo sapien
tggttcgcgcgaaggagctcacatc

SEQ ID NO: 4650618 - DNA, 25 bp, Homo sapien
tgagccgagtcgaagcagttgctcc

SEQ ID NO: 4650619 - DNA, 25 bp, Homo sapien
cattggtcgcgcttctgagccgagt

SEQ ID NO: 4650620 - DNA, 25 bp, Homo sapien
accgaacgcgtgaacggctggcgtt

SEQ ID NO: 4650621 - DNA, 25 bp, Homo sapien
ctggccgctgcggtgagagtctgca

SEQ ID NO: 4650622 - DNA, 25 bp, Homo sapien
gccttgttcctgcgccgagtcggcg

SEQ ID NO: 4650623 - DNA, 25 bp, Homo sapien
gccagggcggtgagtcagccaagga

SEQ ID NO: 4650624 - DNA, 25 bp, Homo sapien
ttggcgggaccaggcccaaagttga

SEQ ID NO: 4650625 - DNA, 25 bp, Homo sapien
aggcccaaagttgaccacctgcctg

SEQ ID NO: 4650626 - DNA, 25 bp, Homo sapien
gcccaaagttgaccacctgcctggg

SEQ ID NO: 4650627 - DNA, 25 bp, Homo sapien
agcttggcgggaccaggcccaaagt

SEQ ID NO: 4650628 - DNA, 25 bp, Homo sapien
cggccagctgagtcgtgcactgcct

SEQ ID NO: 4650629 - DNA, 25 bp, Homo sapien
gggcgtctgcaggtgcgtggcaccg

SEQ ID NO: 4650630 - DNA, 25 bp, Homo sapien
aggagatggcacagcccgggcgtct

SEQ ID NO: 4650631 - DNA, 25 bp, Homo sapien
cgaagcccgcttgccggagctgctg

SEQ ID NO: 4650632 - DNA, 25 bp, Homo sapien
cagcaagatctgattgtggcccggg

SEQ ID NO: 4650633 - DNA, 25 bp, Homo sapien
ttactccagaacgaaatgaacaggg

SEQ ID NO: 4650634 - DNA, 25 bp, Homo sapien
gaacagggaattgggttaagcagcc

SEQ ID NO: 4650635 - DNA, 25 bp, Homo sapien
tggcccgggagagaattcaatcact

SEQ ID NO: 4650636 - DNA, 25 bp, Homo sapien
gtccacaaagccagcgattatgcaa

SEQ ID NO: 4650637 - DNA, 25 bp, Homo sapien
ctgacgaggggacaaggaagggtct

SEQ ID NO: 4650638 - DNA, 25 bp, Homo sapien
ggaagggtctacagtgaggtcccca

SEQ ID NO: 4650639 - DNA, 25 bp, Homo sapien
caaggaagggtctacagtgaggtcc

SEQ ID NO: 4650640 - DNA, 25 bp, Homo sapien
ggacaaggaagggtctacagtgagg

SEQ ID NO: 4650641 - DNA, 25 bp, Homo sapien
taattccttttgtatctctaacaac

SEQ ID NO: 4650642 - DNA, 25 bp, Homo sapien
ccaactcctttgtagtctaataatt

SEQ ID NO: 4650643 - DNA, 25 bp, Homo sapien
aacactaatgccaactcctttgtag

SEQ ID NO: 4650644 - DNA, 25 bp, Homo sapien
ctttgtagtctaataattccttttg

SEQ ID NO: 4650645 - DNA, 25 bp, Homo sapien
agcaattcccgcacaagattctctg

SEQ ID NO: 4650646 - DNA, 25 bp, Homo sapien
cttggcaaaatctgatgacctgtga

SEQ ID NO: 4650647 - DNA, 25 bp, Homo sapien
gcaaaatctgatgacctgtgactca

SEQ ID NO: 4650648 - DNA, 25 bp, Homo sapien
tctctgtattgttaataatcttggc

SEQ ID NO: 4650649 - DNA, 25 bp, Homo sapien
agaaaaatcaccttatagttgtctg

SEQ ID NO: 4650650 - DNA, 25 bp, Homo sapien
gaaaaatcaccttatagttgtctgg

SEQ ID NO: 4650651 - DNA, 25 bp, Homo sapien
acatgtcacaaaccagtactgctcc

SEQ ID NO: 4650652 - DNA, 25 bp, Homo sapien
ttgtattccaggaccgaggggcact

SEQ ID NO: 4650653 - DNA, 25 bp, Homo sapien
agcaggtcatcacggacaatcacca

SEQ ID NO: 4650654 - DNA, 25 bp, Homo sapien
ttctgggcaccagcaaaaatcacac

SEQ ID NO: 4650655 - DNA, 25 bp, Homo sapien
cccagcaggtcatcacggacaatca

SEQ ID NO: 4650656 - DNA, 25 bp, Homo sapien
atggaggcgtgttgtacaaggagct

SEQ ID NO: 4650657 - DNA, 25 bp, Homo sapien
ctgaaacatggaggcgtgttgtaca

SEQ ID NO: 4650658 - DNA, 25 bp, Homo sapien
ggcgtgttgtacaaggagctgtttc

SEQ ID NO: 4650659 - DNA, 25 bp, Homo sapien
gaggcgtgttgtacaaggagctgtt

SEQ ID NO: 4650660 - DNA, 25 bp, Homo sapien
gttggtctggctggtctcgatttcc

SEQ ID NO: 4650661 - DNA, 25 bp, Homo sapien
ttggtctggctggtctcgatttcct

SEQ ID NO: 4650662 - DNA, 25 bp, Homo sapien
caacgatttgaaggcagttttatcc

SEQ ID NO: 4650663 - DNA, 25 bp, Homo sapien
tcccagggcctatggtcattagact

SEQ ID NO: 4650664 - DNA, 25 bp, Homo sapien
agttttatccagcacaattaaatca

SEQ ID NO: 4650665 - DNA, 25 bp, Homo sapien
tatccagcacaattaaatcaaagtt

SEQ ID NO: 4650666 - DNA, 25 bp, Homo sapien
tgtgctcacactcgccgcccatgat

SEQ ID NO: 4650667 - DNA, 25 bp, Homo sapien
ctgaacccctagctgactgctgtgc

SEQ ID NO: 4650668 - DNA, 25 bp, Homo sapien
agtaccgacgcctgaacccctagct

SEQ ID NO: 4650669 - DNA, 25 bp, Homo sapien
cgccgcccatgatctctggctttct

SEQ ID NO: 4650670 - DNA, 25 bp, Homo sapien
gtgaccaagcttcccttttgcctga

SEQ ID NO: 4650671 - DNA, 25 bp, Homo sapien
cagggtttcaaagctgacatgggcc

SEQ ID NO: 4650672 - DNA, 25 bp, Homo sapien
caacaatacttccaggtgaccaagc

SEQ ID NO: 4650673 - DNA, 25 bp, Homo sapien
catgtgattgaatccaagcagagcc

SEQ ID NO: 4650674 - DNA, 25 bp, Homo sapien
ttggaaggctagaagcccacgctgt

SEQ ID NO: 4650675 - DNA, 25 bp, Homo sapien
ttttaatccactccagaaccaagcc

SEQ ID NO: 4650676 - DNA, 25 bp, Homo sapien
cgtagaatccttgagaattatcaat

SEQ ID NO: 4650677 - DNA, 25 bp, Homo sapien
tcaataatctcataaattgtttgag

SEQ ID NO: 4650678 - DNA, 25 bp, Homo sapien
ggagctaagcttctccatggccgcg

SEQ ID NO: 4650679 - DNA, 25 bp, Homo sapien
taacaggagtccttaaattgacaca

SEQ ID NO: 4650680 - DNA, 25 bp, Homo sapien
cacactcaccagtattttaatgtct

SEQ ID NO: 4650681 - DNA, 25 bp, Homo sapien
agaaacatcaccacccactgggaca

SEQ ID NO: 4650682 - DNA, 25 bp, Homo sapien
ccccagggcgatgtctttggtgtga

SEQ ID NO: 4650683 - DNA, 25 bp, Homo sapien
ttcccacaagaggtggctaccctaa

SEQ ID NO: 4650684 - DNA, 25 bp, Homo sapien
ggctaccctaatggtctgctgtgca

SEQ ID NO: 4650685 - DNA, 25 bp, Homo sapien
cctgaagatcattttagatatacac

SEQ ID NO: 4650686 - DNA, 25 bp, Homo sapien
ctaatggtctgctgtgcattcctga

SEQ ID NO: 4650687 - DNA, 25 bp, Homo sapien
gtaaatgaggaaccccaggaggtca

SEQ ID NO: 4650688 - DNA, 25 bp, Homo sapien
ggatgagagttccagacagtcccct

SEQ ID NO: 4650689 - DNA, 25 bp, Homo sapien
ggtcagacaggaacgcagtgttccc

SEQ ID NO: 4650690 - DNA, 25 bp, Homo sapien
agacagtcccctcggagacacgctg

SEQ ID NO: 4650691 - DNA, 25 bp, Homo sapien
tgaatgggttgagggccgaggtagg

SEQ ID NO: 4650692 - DNA, 25 bp, Homo sapien
gagttaacaccaaatttcagaggtg

SEQ ID NO: 4650693 - DNA, 25 bp, Homo sapien
ggtctgttgtttgaatgggttgagg

SEQ ID NO: 4650694 - DNA, 25 bp, Homo sapien
taacaccaaatttcagaggtgacca

SEQ ID NO: 4650695 - DNA, 25 bp, Homo sapien
tatcttccaagagcccaatattggc

SEQ ID NO: 4650696 - DNA, 25 bp, Homo sapien
cacaggcacatggattatggaataa

SEQ ID NO: 4650697 - DNA, 25 bp, Homo sapien
tgtgggctggatctagcccctgctc

SEQ ID NO: 4650698 - DNA, 25 bp, Homo sapien
taaacatgggtgaccccgtcaagca

SEQ ID NO: 4650699 - DNA, 25 bp, Homo sapien
catgctatgggtttgcactgaacgc

SEQ ID NO: 4650700 - DNA, 25 bp, Homo sapien
gctatgggtttgcactgaacgcaaa

SEQ ID NO: 4650701 - DNA, 25 bp, Homo sapien
tcatgctatgggtttgcactgaacg

SEQ ID NO: 4650702 - DNA, 25 bp, Homo sapien
tgctatgggtttgcactgaacgcaa

SEQ ID NO: 4650703 - DNA, 25 bp, Homo sapien
ggagtaatccacaacaaaatgcggt

SEQ ID NO: 4650704 - DNA, 25 bp, Homo sapien
aaactgggaacgcacagacctgctg

SEQ ID NO: 4650705 - DNA, 25 bp, Homo sapien
tttaggaagctacatgggaacaacc

SEQ ID NO: 4650706 - DNA, 25 bp, Homo sapien
gccctgaagctactgtgcatgtgaa

SEQ ID NO: 4650707 - DNA, 25 bp, Homo sapien
caaggcatggttccaacagatgaga

SEQ ID NO: 4650708 - DNA, 25 bp, Homo sapien
cagataaggaattcagcagcggcaa

SEQ ID NO: 4650709 - DNA, 25 bp, Homo sapien
tacgtaggaagtgctgtaacagcca

SEQ ID NO: 4650710 - DNA, 25 bp, Homo sapien
gctccggagggaatcacaattatac

SEQ ID NO: 4650711 - DNA, 25 bp, Homo sapien
gattaagggaaattaactgcttcca

SEQ ID NO: 4650712 - DNA, 25 bp, Homo sapien
gaagatatcacaaagcaataatgtc

SEQ ID NO: 4650713 - DNA, 25 bp, Homo sapien
tatttatgcactacccatgggagag

SEQ ID NO: 4650714 - DNA, 25 bp, Homo sapien
cctgcaatttacccatcctatcatg

SEQ ID NO: 4650715 - DNA, 25 bp, Homo sapien
taagcatccgtatttacagttcctc

SEQ ID NO: 4650716 - DNA, 25 bp, Homo sapien
tgccctttcaaggacaacatattga

SEQ ID NO: 4650717 - DNA, 25 bp, Homo sapien
gccctttcaaggacaacatattgag

SEQ ID NO: 4650718 - DNA, 25 bp, Homo sapien
agagaggcccggatgcctcccacag

SEQ ID NO: 4650719 - DNA, 25 bp, Homo sapien
aaggcggccagcttctgaacgtctt

SEQ ID NO: 4650720 - DNA, 25 bp, Homo sapien
tcatagctgatgcatctccaaaaat

SEQ ID NO: 4650721 - DNA, 25 bp, Homo sapien
gaacgtcttcaattgtgacagcatt

SEQ ID NO: 4650722 - DNA, 25 bp, Homo sapien
ggtgacattaggtcccaccagcttt

SEQ ID NO: 4650723 - DNA, 25 bp, Homo sapien
gagaccccacagatgtgtagattca

SEQ ID NO: 4650724 - DNA, 25 bp, Homo sapien
tgtagattcagcacctagagggccc

SEQ ID NO: 4650725 - DNA, 25 bp, Homo sapien
gatctacagtttgcccttcgcctgg

SEQ ID NO: 4650726 - DNA, 25 bp, Homo sapien
cactctcgtagtcatacattacaaa

SEQ ID NO: 4650727 - DNA, 25 bp, Homo sapien
tttcagcaaagtatcactctcgtag

SEQ ID NO: 4650728 - DNA, 25 bp, Homo sapien
acagtagagaacaaaggatagggta

SEQ ID NO: 4650729 - DNA, 25 bp, Homo sapien
cagtagagaacaaaggatagggtaa

SEQ ID NO: 4650730 - DNA, 25 bp, Homo sapien
cttgactttgtggtacaggccaatg

SEQ ID NO: 4650731 - DNA, 25 bp, Homo sapien
ttgactttgtggtacaggccaatgc

SEQ ID NO: 4650732 - DNA, 25 bp, Homo sapien
gactttgtggtacaggccaatgctc

SEQ ID NO: 4650733 - DNA, 25 bp, Homo sapien
tgactttgtggtacaggccaatgct

SEQ ID NO: 4650734 - DNA, 25 bp, Homo sapien
gagcctgatgaactgaggtccccag

SEQ ID NO: 4650735 - DNA, 25 bp, Homo sapien
aggatactctgtcccgctcttcaga

SEQ ID NO: 4650736 - DNA, 25 bp, Homo sapien
aagacaaggaaagccggttcatctc

SEQ ID NO: 4650737 - DNA, 25 bp, Homo sapien
tcttggaggcaatgtggaaggcaaa

SEQ ID NO: 4650738 - DNA, 25 bp, Homo sapien
ttcccagtgttataaactgaattgt

SEQ ID NO: 4650739 - DNA, 25 bp, Homo sapien
cacgtccagcctatgttagattatt

SEQ ID NO: 4650740 - DNA, 25 bp, Homo sapien
ccacgtccagcctatgttagattat

SEQ ID NO: 4650741 - DNA, 25 bp, Homo sapien
ccagtgttataaactgaattgtgtc

SEQ ID NO: 4650742 - DNA, 25 bp, Homo sapien
aataaggtagatgcaaaactgggcc

SEQ ID NO: 4650743 - DNA, 25 bp, Homo sapien
tgggcctgagctcttaccttgaatc

SEQ ID NO: 4650744 - DNA, 25 bp, Homo sapien
tgacatgctcttaggtggaccacca

SEQ ID NO: 4650745 - DNA, 25 bp, Homo sapien
cctaatttgggagcctgttgtatga

SEQ ID NO: 4650746 - DNA, 25 bp, Homo sapien
tcttccaaacgccatgaaacatcac

SEQ ID NO: 4650747 - DNA, 25 bp, Homo sapien
tccaaacgccatgaaacatcactca

SEQ ID NO: 4650748 - DNA, 25 bp, Homo sapien
gcatcttccaaacgccatgaaacat

SEQ ID NO: 4650749 - DNA, 25 bp, Homo sapien
aagggcatcttccaaacgccatgaa

SEQ ID NO: 4650750 - DNA, 25 bp, Homo sapien
ccacagagttatggcagaggtctct

SEQ ID NO: 4650751 - DNA, 25 bp, Homo sapien
tatcccatctcagtcgttcccaatt

SEQ ID NO: 4650752 - DNA, 25 bp, Homo sapien
gttcccaatttatggaccacagagt

SEQ ID NO: 4650753 - DNA, 25 bp, Homo sapien
gagcaaggaagaactcgctcccata

SEQ ID NO: 4650754 - DNA, 25 bp, Homo sapien
gcctccatgtggagacgccctgata

SEQ ID NO: 4650755 - DNA, 25 bp, Homo sapien
tccatgtggagacgccctgatacca

SEQ ID NO: 4650756 - DNA, 25 bp, Homo sapien
gtggagacgccctgataccaaagca

SEQ ID NO: 4650757 - DNA, 25 bp, Homo sapien
ggagcctccatgtggagacgccctg

SEQ ID NO: 4650758 - DNA, 25 bp, Homo sapien
gaactttggcagtgacctactaacc

SEQ ID NO: 4650759 - DNA, 25 bp, Homo sapien
tgtgacaaacccacccctaatgacg

SEQ ID NO: 4650760 - DNA, 25 bp, Homo sapien
tctgagaccccaacattaatgcact

SEQ ID NO: 4650761 - DNA, 25 bp, Homo sapien
tttgtccattaagcagcactcactg

SEQ ID NO: 4650762 - DNA, 25 bp, Homo sapien
gcaagggcatactctaggtcaggct

SEQ ID NO: 4650763 - DNA, 25 bp, Homo sapien
gatgtgagtcgtttccaggccaaag

SEQ ID NO: 4650764 - DNA, 25 bp, Homo sapien
tgccatgaggtcgaagcagccttta

SEQ ID NO: 4650765 - DNA, 25 bp, Homo sapien
cagactgacggccaacattaggtaa

SEQ ID NO: 4650766 - DNA, 25 bp, Homo sapien
caaatcctaatactgggtgctgagg

SEQ ID NO: 4650767 - DNA, 25 bp, Homo sapien
tacaggcgttcaaaagctggcttgc

SEQ ID NO: 4650768 - DNA, 25 bp, Homo sapien
tctgaagtgcgtgaaatacaggcgt

SEQ ID NO: 4650769 - DNA, 25 bp, Homo sapien
gtttacaacgagaaccatgatttgc

SEQ ID NO: 4650770 - DNA, 25 bp, Homo sapien
ccaagcgaacacactggcaagtgga

SEQ ID NO: 4650771 - DNA, 25 bp, Homo sapien
cactggcaagtggaagcacacacag

SEQ ID NO: 4650772 - DNA, 25 bp, Homo sapien
ccccaagcgaacacactggcaagtg

SEQ ID NO: 4650773 - DNA, 25 bp, Homo sapien
cgaacacactggcaagtggaagcac

SEQ ID NO: 4650774 - DNA, 25 bp, Homo sapien
catttcaatagcccctaaggttcgg

SEQ ID NO: 4650775 - DNA, 25 bp, Homo sapien
ggcatttcaatagcccctaaggttc

SEQ ID NO: 4650776 - DNA, 25 bp, Homo sapien
aggcatttcaatagcccctaaggtt

SEQ ID NO: 4650777 - DNA, 25 bp, Homo sapien
caggcatttcaatagcccctaaggt

SEQ ID NO: 4650778 - DNA, 25 bp, Homo sapien
tccactatggaaatccaactcctga

SEQ ID NO: 4650779 - DNA, 25 bp, Homo sapien
catccactatggaaatccaactcct

SEQ ID NO: 4650780 - DNA, 25 bp, Homo sapien
atccactatggaaatccaactcctg

SEQ ID NO: 4650781 - DNA, 25 bp, Homo sapien
actctcagacctaagtgtgatgtga

SEQ ID NO: 4650782 - DNA, 25 bp, Homo sapien
cccactctcagacctaagtgtgatg

SEQ ID NO: 4650783 - DNA, 25 bp, Homo sapien
ctcagacctaagtgtgatgtgatcc

SEQ ID NO: 4650784 - DNA, 25 bp, Homo sapien
tctcagacctaagtgtgatgtgatc

SEQ ID NO: 4650785 - DNA, 25 bp, Homo sapien
acttctcaggattgctgcggagagc

SEQ ID NO: 4650786 - DNA, 25 bp, Homo sapien
tcacttctcaggattgctgcggaga

SEQ ID NO: 4650787 - DNA, 25 bp, Homo sapien
cacttctcaggattgctgcggagag

SEQ ID NO: 4650788 - DNA, 25 bp, Homo sapien
ggaaaagacacccaacgtcgatgac

SEQ ID NO: 4650789 - DNA, 25 bp, Homo sapien
gatagtggtgaatcgggcagatgca

SEQ ID NO: 4650790 - DNA, 25 bp, Homo sapien
agacacccaacgtcgatgaccagca

SEQ ID NO: 4650791 - DNA, 25 bp, Homo sapien
atatttatcagccagagtggtgtgg

SEQ ID NO: 4650792 - DNA, 25 bp, Homo sapien
tggatctgatggtcccagcatttcc

SEQ ID NO: 4650793 - DNA, 25 bp, Homo sapien
gcatttccttcagtctctaaggtct

SEQ ID NO: 4650794 - DNA, 25 bp, Homo sapien
tgaacctaagggattgttggatctg

SEQ ID NO: 4650795 - DNA, 25 bp, Homo sapien
gttttgccaataagatagatccctg

SEQ ID NO: 4650796 - DNA, 25 bp, Homo sapien
cataggaagaagtcaaaatatcgac

SEQ ID NO: 4650797 - DNA, 25 bp, Homo sapien
gacattaatcggagtttggaagaag

SEQ ID NO: 4650798 - DNA, 25 bp, Homo sapien
gtaatgtctagcttaaggccttatt

SEQ ID NO: 4650799 - DNA, 25 bp, Homo sapien
tatcagcactgtagaagtaatgtct

SEQ ID NO: 4650800 - DNA, 25 bp, Homo sapien
gataaacagactggcccagacccag

SEQ ID NO: 4650801 - DNA, 25 bp, Homo sapien
agagtgagtaaggcactggataaac

SEQ ID NO: 4650802 - DNA, 25 bp, Homo sapien
gtgaccatctctcctgaccacatgg

SEQ ID NO: 4650803 - DNA, 25 bp, Homo sapien
accatctctcctgaccacatggagg

SEQ ID NO: 4650804 - DNA, 25 bp, Homo sapien
agtgaccatctctcctgaccacatg

SEQ ID NO: 4650805 - DNA, 25 bp, Homo sapien
tacatcatcagcgattggtgtggga

SEQ ID NO: 4650806 - DNA, 25 bp, Homo sapien
catctaagttattaaacgggaccat

SEQ ID NO: 4650807 - DNA, 25 bp, Homo sapien
gatcctcactgtataaacaatctga

SEQ ID NO: 4650808 - DNA, 25 bp, Homo sapien
tgggtgtgtgatattagcatgatcc

SEQ ID NO: 4650809 - DNA, 25 bp, Homo sapien
attttggaatttgggtgttgctcca

SEQ ID NO: 4650810 - DNA, 25 bp, Homo sapien
cgatctgttcggacataaaaggctt

SEQ ID NO: 4650811 - DNA, 25 bp, Homo sapien
cattctcctatcagagagggcctgc

SEQ ID NO: 4650812 - DNA, 25 bp, Homo sapien
gctccatttgggctttcggattcga

SEQ ID NO: 4650813 - DNA, 25 bp, Homo sapien
cttcaaccacgttggtttccttcat

SEQ ID NO: 4650814 - DNA, 25 bp, Homo sapien
ttcaaccacgttggtttccttcatg

SEQ ID NO: 4650815 - DNA, 25 bp, Homo sapien
tcaaccacgttggtttccttcatgc

SEQ ID NO: 4650816 - DNA, 25 bp, Homo sapien
tatcccaaaccagtgtaacagtccc

SEQ ID NO: 4650817 - DNA, 25 bp, Homo sapien
ccaaaggatgatacagacagagagg

SEQ ID NO: 4650818 - DNA, 25 bp, Homo sapien
gatttggaaccgtcatgacatgtgg

SEQ ID NO: 4650819 - DNA, 25 bp, Homo sapien
taaaggacctgatattccattccga

SEQ ID NO: 4650820 - DNA, 25 bp, Homo sapien
agttcgcgttcttaaatttcactgg

SEQ ID NO: 4650821 - DNA, 25 bp, Homo sapien
cgcatcttgctgatttgatagctgc

SEQ ID NO: 4650822 - DNA, 25 bp, Homo sapien
ggagacctgcatatcaagtcgcatc

SEQ ID NO: 4650823 - DNA, 25 bp, Homo sapien
tttacgcagcccagcggaaggcaat

SEQ ID NO: 4650824 - DNA, 25 bp, Homo sapien
aaacttccaagagtggcacgggcag

SEQ ID NO: 4650825 - DNA, 25 bp, Homo sapien
tccatagagtttgcattcagtatct

SEQ ID NO: 4650826 - DNA, 25 bp, Homo sapien
gaaggttcagggaatagcactactc

SEQ ID NO: 4650827 - DNA, 25 bp, Homo sapien
tatcttgggaatcagaaaacttcca

SEQ ID NO: 4650828 - DNA, 25 bp, Homo sapien
ctgtgagcctctcttatgcatccag

SEQ ID NO: 4650829 - DNA, 25 bp, Homo sapien
tcctgaatgaaagtaggcccaccct

SEQ ID NO: 4650830 - DNA, 25 bp, Homo sapien
ccctatttgcttaggtgatctgaag

SEQ ID NO: 4650831 - DNA, 25 bp, Homo sapien
ccggcctataacagtccaatctaat

SEQ ID NO: 4650832 - DNA, 25 bp, Homo sapien
ggcacttctgatttgctgaaaacaa

SEQ ID NO: 4650833 - DNA, 25 bp, Homo sapien
cattgtgttgctcaagggtacactg

SEQ ID NO: 4650834 - DNA, 25 bp, Homo sapien
aggcacttctgatttgctgaaaaca

SEQ ID NO: 4650835 - DNA, 25 bp, Homo sapien
gagtagagcattgtgttgctcaagg

SEQ ID NO: 4650836 - DNA, 25 bp, Homo sapien
gcaccacgtcatatgactgcctgag

SEQ ID NO: 4650837 - DNA, 25 bp, Homo sapien
cctgagtacaaacactatatttcta

SEQ ID NO: 4650838 - DNA, 25 bp, Homo sapien
ctataaggccatgagctcaggcacc

SEQ ID NO: 4650839 - DNA, 25 bp, Homo sapien
accacgtcatatgactgcctgagta

SEQ ID NO: 4650840 - DNA, 25 bp, Homo sapien
tagaggagtcatgattatgatggtg

SEQ ID NO: 4650841 - DNA, 25 bp, Homo sapien
attttcagtgtatgttcatgctaca

SEQ ID NO: 4650842 - DNA, 25 bp, Homo sapien
ataccaagcttaagaccttaccact

SEQ ID NO: 4650843 - DNA, 25 bp, Homo sapien
aaattaaactcccatcatgagaaat

SEQ ID NO: 4650844 - DNA, 25 bp, Homo sapien
tgtggaaggaatgctggcaccagca

SEQ ID NO: 4650845 - DNA, 25 bp, Homo sapien
atgttgtggaaggaatgctggcacc

SEQ ID NO: 4650846 - DNA, 25 bp, Homo sapien
tgtgggctgaactaggagggtttat

SEQ ID NO: 4650847 - DNA, 25 bp, Homo sapien
aggagtgtgggctgaactaggaggg

SEQ ID NO: 4650848 - DNA, 25 bp, Homo sapien
cttctgagtgaggcaaagtatccat

SEQ ID NO: 4650849 - DNA, 25 bp, Homo sapien
ctgagtgaggcaaagtatccatcat

SEQ ID NO: 4650850 - DNA, 25 bp, Homo sapien
gaatcttcatcatgctcactcttgc

SEQ ID NO: 4650851 - DNA, 25 bp, Homo sapien
cagaatcttcatcatgctcactctt

SEQ ID NO: 4650852 - DNA, 25 bp, Homo sapien
tgaactgtggaaggtcatcatgtgc

SEQ ID NO: 4650853 - DNA, 25 bp, Homo sapien
aagtggattgcacagattgggtctc

SEQ ID NO: 4650854 - DNA, 25 bp, Homo sapien
tcagcatcgagggaagttttctact

SEQ ID NO: 4650855 - DNA, 25 bp, Homo sapien
tgggtctcagcctaaccaagtgatg

SEQ ID NO: 4650856 - DNA, 25 bp, Homo sapien
tcagtgtccctcttaggagaaaacc

SEQ ID NO: 4650857 - DNA, 25 bp, Homo sapien
cctgtatcctggtgtacggtacgat

SEQ ID NO: 4650858 - DNA, 25 bp, Homo sapien
cataaaaaccatttcggttctgatg

SEQ ID NO: 4650859 - DNA, 25 bp, Homo sapien
gtgatgcaggaaatgatcagtgtcc

SEQ ID NO: 4650860 - DNA, 25 bp, Homo sapien
gatgattttggcatcctcgcaggac

SEQ ID NO: 4650861 - DNA, 25 bp, Homo sapien
acggagcacttggacgcccttaata

SEQ ID NO: 4650862 - DNA, 25 bp, Homo sapien
tcgcaggactctacccaaaaaggca

SEQ ID NO: 4650863 - DNA, 25 bp, Homo sapien
tgtgcatcagatatgaggctcctct

SEQ ID NO: 4650864 - DNA, 25 bp, Homo sapien
gttgtacattccgtgggccataagg

SEQ ID NO: 4650865 - DNA, 25 bp, Homo sapien
atgagcaccatcaaggacaggcagc

SEQ ID NO: 4650866 - DNA, 25 bp, Homo sapien
taaggtcttttgacagcaggcgatg

SEQ ID NO: 4650867 - DNA, 25 bp, Homo sapien
atctgactgggagccacctgggcta

SEQ ID NO: 4650868 - DNA, 25 bp, Homo sapien
cacactcaaatcatggttagtagtc

SEQ ID NO: 4650869 - DNA, 25 bp, Homo sapien
aacaaattgccaaagtttcagtagc

SEQ ID NO: 4650870 - DNA, 25 bp, Homo sapien
gtaagccctacatttcacactcaaa

SEQ ID NO: 4650871 - DNA, 25 bp, Homo sapien
tcatagcttcaacagaagttattgc

SEQ ID NO: 4650872 - DNA, 25 bp, Homo sapien
ccagagtcaggaacaatattcaggg

SEQ ID NO: 4650873 - DNA, 25 bp, Homo sapien
gggatggtgtagaatgaattctgac

SEQ ID NO: 4650874 - DNA, 25 bp, Homo sapien
caaatattgatgaagtacctaaata

SEQ ID NO: 4650875 - DNA, 25 bp, Homo sapien
tacttattgctagtatctttgtcat

SEQ ID NO: 4650876 - DNA, 25 bp, Homo sapien
gaccatgtcatgattgtgcagtgat

SEQ ID NO: 4650877 - DNA, 25 bp, Homo sapien
tgatggatcttagcataaattggcc

SEQ ID NO: 4650878 - DNA, 25 bp, Homo sapien
gatttgcagcccgataatgaccatg

SEQ ID NO: 4650879 - DNA, 25 bp, Homo sapien
caaatgccccaacacacttgatgga

SEQ ID NO: 4650880 - DNA, 25 bp, Homo sapien
gatagccacgatcctttctgcaaaa

SEQ ID NO: 4650881 - DNA, 25 bp, Homo sapien
tccactaatttaaacgacttgaggc

SEQ ID NO: 4650882 - DNA, 25 bp, Homo sapien
tctgcaaaatgcacagcacattctt

SEQ ID NO: 4650883 - DNA, 25 bp, Homo sapien
cacatgtgtcgtaaagtggcgattt

SEQ ID NO: 4650884 - DNA, 25 bp, Homo sapien
gatatgtctaacgtatttagcttaa

SEQ ID NO: 4650885 - DNA, 25 bp, Homo sapien
cttaaaatgaaacggatggcatttc

SEQ ID NO: 4650886 - DNA, 25 bp, Homo sapien
gcacagactccactgatatgtctaa

SEQ ID NO: 4650887 - DNA, 25 bp, Homo sapien
tttagcttaaaatgaaacggatggc

SEQ ID NO: 4650888 - DNA, 25 bp, Homo sapien
gatttgacacagcatggactcttct

SEQ ID NO: 4650889 - DNA, 25 bp, Homo sapien
gacacagcatggactcttctttccc

SEQ ID NO: 4650890 - DNA, 25 bp, Homo sapien
tttgacacagcatggactcttcttt

SEQ ID NO: 4650891 - DNA, 25 bp, Homo sapien
ggatttgacacagcatggactcttc

SEQ ID NO: 4650892 - DNA, 25 bp, Homo sapien
agatttagctcagaaatctctggac

SEQ ID NO: 4650893 - DNA, 25 bp, Homo sapien
ttagctcagaaatctctggactcat

SEQ ID NO: 4650894 - DNA, 25 bp, Homo sapien
ctgagatttagctcagaaatctctg

SEQ ID NO: 4650895 - DNA, 25 bp, Homo sapien
tttagctcagaaatctctggactca

SEQ ID NO: 4650896 - DNA, 25 bp, Homo sapien
taaatcatggctctgtctggcctgc

SEQ ID NO: 4650897 - DNA, 25 bp, Homo sapien
gggcctgcggcaaatgaaacaaatt

SEQ ID NO: 4650898 - DNA, 25 bp, Homo sapien
aatttgcatcgttacgggcctgcgg

SEQ ID NO: 4650899 - DNA, 25 bp, Homo sapien
acaaattgccataaaatgttgggaa

SEQ ID NO: 4650900 - DNA, 25 bp, Homo sapien
tagtatagtcacgaccagactctcg

SEQ ID NO: 4650901 - DNA, 25 bp, Homo sapien
gcaactaagagcaatgatctttccc

SEQ ID NO: 4650902 - DNA, 25 bp, Homo sapien
tcagctggaattttgtctgcaaagc

SEQ ID NO: 4650903 - DNA, 25 bp, Homo sapien
tgagaaaaggccctataatagaaac

SEQ ID NO: 4650904 - DNA, 25 bp, Homo sapien
ggaattatgggagtaaaacgcaaga

SEQ ID NO: 4650905 - DNA, 25 bp, Homo sapien
ccagtggggcaaattctaaagctcc

SEQ ID NO: 4650906 - DNA, 25 bp, Homo sapien
ggagtaaaacgcaagatgagatttg

SEQ ID NO: 4650907 - DNA, 25 bp, Homo sapien
aatccagtggggcaaattctaaagc

SEQ ID NO: 4650908 - DNA, 25 bp, Homo sapien
taaggataaggttatgaagccacaa

SEQ ID NO: 4650909 - DNA, 25 bp, Homo sapien
aagccacaagtacaactgggcattt

SEQ ID NO: 4650910 - DNA, 25 bp, Homo sapien
tggctcacggccttacagatcttgg

SEQ ID NO: 4650911 - DNA, 25 bp, Homo sapien
gacttagcttaaggataaggttatg

SEQ ID NO: 4650912 - DNA, 25 bp, Homo sapien
ccaactcgaattgtgttcccaagag

SEQ ID NO: 4650913 - DNA, 25 bp, Homo sapien
tgagaggctaagaatcttccataca

SEQ ID NO: 4650914 - DNA, 25 bp, Homo sapien
gaggctaagaatcttccatacagac

SEQ ID NO: 4650915 - DNA, 25 bp, Homo sapien
gtcttttgccaactcgaattgtgtt

SEQ ID NO: 4650916 - DNA, 25 bp, Homo sapien
tgatccctgatacagttagcctgtg

SEQ ID NO: 4650917 - DNA, 25 bp, Homo sapien
tggtaattcattcaacccatctatg

SEQ ID NO: 4650918 - DNA, 25 bp, Homo sapien
tttccagtctgtatgtgcctttcac

SEQ ID NO: 4650919 - DNA, 25 bp, Homo sapien
ttaagtatagctacccctgaacact

SEQ ID NO: 4650920 - DNA, 25 bp, Homo sapien
cctctgtctttaaatttacagtcta

SEQ ID NO: 4650921 - DNA, 25 bp, Homo sapien
ataaaaaggccttgacctctgtctt

SEQ ID NO: 4650922 - DNA, 25 bp, Homo sapien
tgtctttaaatttacagtctaatgt

SEQ ID NO: 4650923 - DNA, 25 bp, Homo sapien
taaatttacagtctaatgtttactc

SEQ ID NO: 4650924 - DNA, 25 bp, Homo sapien
tttgaatttataactcaacatgaga

SEQ ID NO: 4650925 - DNA, 25 bp, Homo sapien
tgctcctttgaatttataactcaac

SEQ ID NO: 4650926 - DNA, 25 bp, Homo sapien
agctccggcaggactgaagctgctc

SEQ ID NO: 4650927 - DNA, 25 bp, Homo sapien
aagctccggcaggactgaagctgct

SEQ ID NO: 4650928 - DNA, 25 bp, Homo sapien
accttaatcaactggtctcaatctc

SEQ ID NO: 4650929 - DNA, 25 bp, Homo sapien
taaacaccttaatcaactggtctca

SEQ ID NO: 4650930 - DNA, 25 bp, Homo sapien
acaccttaatcaactggtctcaatc

SEQ ID NO: 4650931 - DNA, 25 bp, Homo sapien
agctaaacaccttaatcaactggtc

SEQ ID NO: 4650932 - DNA, 25 bp, Homo sapien
taaggactgcaagactctattctgc

SEQ ID NO: 4650933 - DNA, 25 bp, Homo sapien
ctgcatcaattgaacacaaatcaac

SEQ ID NO: 4650934 - DNA, 25 bp, Homo sapien
caattgaacacaaatcaaccacttt

SEQ ID NO: 4650935 - DNA, 25 bp, Homo sapien
catcaattgaacacaaatcaaccac

SEQ ID NO: 4650936 - DNA, 25 bp, Homo sapien
ttttaacaaacataatgctgggcta

SEQ ID NO: 4650937 - DNA, 25 bp, Homo sapien
tgagtaacattttacacctaccaaa

SEQ ID NO: 4650938 - DNA, 25 bp, Homo sapien
accgtacccggccatgagtaacatt

SEQ ID NO: 4650939 - DNA, 25 bp, Homo sapien
gaatgcaatgacatagtctcagctc

SEQ ID NO: 4650940 - DNA, 25 bp, Homo sapien
agcaggaaattctggcttatactct

SEQ ID NO: 4650941 - DNA, 25 bp, Homo sapien
tatactctgcttgatgaagcttcat

SEQ ID NO: 4650942 - DNA, 25 bp, Homo sapien
tctggcttatactctgcttgatgaa

SEQ ID NO: 4650943 - DNA, 25 bp, Homo sapien
gaaattctggcttatactctgcttg

SEQ ID NO: 4650944 - DNA, 25 bp, Homo sapien
ccttaggtgtagaagcaatagggag

SEQ ID NO: 4650945 - DNA, 25 bp, Homo sapien
gcttccaaggcctccttaggtgtag

SEQ ID NO: 4650946 - DNA, 25 bp, Homo sapien
ccaacagctatctgggctatcgctt

SEQ ID NO: 4650947 - DNA, 25 bp, Homo sapien
tggtgacggctgtgttgcctctgca

SEQ ID NO: 4650948 - DNA, 25 bp, Homo sapien
taaagttcttttgaggagcttggca

SEQ ID NO: 4650949 - DNA, 25 bp, Homo sapien
gacctgtaaagttcttttgaggagc

SEQ ID NO: 4650950 - DNA, 25 bp, Homo sapien
tgctgtcagactacttctgtcactg

SEQ ID NO: 4650951 - DNA, 25 bp, Homo sapien
gctgattcgactattatggcaggaa

SEQ ID NO: 4650952 - DNA, 25 bp, Homo sapien
ggttactgcaaacttgtggatacac

SEQ ID NO: 4650953 - DNA, 25 bp, Homo sapien
caatgtggttactgcaaacttgtgg

SEQ ID NO: 4650954 - DNA, 25 bp, Homo sapien
ttccccagcaatgtggttactgcaa

SEQ ID NO: 4650955 - DNA, 25 bp, Homo sapien
actgcaaacttgtggatacactgaa

SEQ ID NO: 4650956 - DNA, 25 bp, Homo sapien
ccagaaggatcccaaagagcttcac

SEQ ID NO: 4650957 - DNA, 25 bp, Homo sapien
gtgtaacttcgattctgccagcagt

SEQ ID NO: 4650958 - DNA, 25 bp, Homo sapien
ttctgccagcagtcatcattataat

SEQ ID NO: 4650959 - DNA, 25 bp, Homo sapien
ataagtgaggtttataaaagattct

SEQ ID NO: 4650960 - DNA, 25 bp, Homo sapien
actccttagtagctgtccacggtga

SEQ ID NO: 4650961 - DNA, 25 bp, Homo sapien
tggatagaaaactggacggtgaccc

SEQ ID NO: 4650962 - DNA, 25 bp, Homo sapien
caccgtcaccatagaagcactcatt

SEQ ID NO: 4650963 - DNA, 25 bp, Homo sapien
tggcacaggttttgctccacgctgc

SEQ ID NO: 4650964 - DNA, 25 bp, Homo sapien
gcttttctccaaggcatataacaaa

SEQ ID NO: 4650965 - DNA, 25 bp, Homo sapien
tccaaggcatataacaaatttatcc

SEQ ID NO: 4650966 - DNA, 25 bp, Homo sapien
actgaaatggacataggcctcaatg

SEQ ID NO: 4650967 - DNA, 25 bp, Homo sapien
ctgaaatggacataggcctcaatgt

SEQ ID NO: 4650968 - DNA, 25 bp, Homo sapien
cctcccacaattgctcatctggcct

SEQ ID NO: 4650969 - DNA, 25 bp, Homo sapien
ctcctcccacaattgctcatctggc

SEQ ID NO: 4650970 - DNA, 25 bp, Homo sapien
tcctcctcccacaattgctcatctg

SEQ ID NO: 4650971 - DNA, 25 bp, Homo sapien
tcctcccacaattgctcatctggcc

SEQ ID NO: 4650972 - DNA, 25 bp, Homo sapien
cacaaagatcagctggaattgccac

SEQ ID NO: 4650973 - DNA, 25 bp, Homo sapien
cagacatcctctgcagatcatccag

SEQ ID NO: 4650974 - DNA, 25 bp, Homo sapien
tccagtccaccctgaaaatcagcaa

SEQ ID NO: 4650975 - DNA, 25 bp, Homo sapien
ctgtaatggctttgtgcttcagaca

SEQ ID NO: 4650976 - DNA, 25 bp, Homo sapien
ctccaaatctagagggatcagagac

SEQ ID NO: 4650977 - DNA, 25 bp, Homo sapien
tccaaatctagagggatcagagacc

SEQ ID NO: 4650978 - DNA, 25 bp, Homo sapien
ttgttatcaagcatggagcctgtcc

SEQ ID NO: 4650979 - DNA, 25 bp, Homo sapien
cacatttgttatcaagcatggagcc

SEQ ID NO: 4650980 - DNA, 25 bp, Homo sapien
catttgttatcaagcatggagcctg

SEQ ID NO: 4650981 - DNA, 25 bp, Homo sapien
cagccacatttgttatcaagcatgg

SEQ ID NO: 4650982 - DNA, 25 bp, Homo sapien
gcagctgtcccattaaggaatgaac

SEQ ID NO: 4650983 - DNA, 25 bp, Homo sapien
tgcagctgtcccattaaggaatgaa

SEQ ID NO: 4650984 - DNA, 25 bp, Homo sapien
ttaaggaatgaacacattccaaaga

SEQ ID NO: 4650985 - DNA, 25 bp, Homo sapien
attaaggaatgaacacattccaaag

SEQ ID NO: 4650986 - DNA, 25 bp, Homo sapien
aattcacttctgcttgcctgcttgg

SEQ ID NO: 4650987 - DNA, 25 bp, Homo sapien
aaattcacttctgcttgcctgcttg

SEQ ID NO: 4650988 - DNA, 25 bp, Homo sapien
taaattcacttctgcttgcctgctt

SEQ ID NO: 4650989 - DNA, 25 bp, Homo sapien
ataaattcacttctgcttgcctgct

SEQ ID NO: 4650990 - DNA, 25 bp, Homo sapien
tgccggccgccacatacggtgggtt

SEQ ID NO: 4650991 - DNA, 25 bp, Homo sapien
cggatgtgtcagagccaatcacagg

SEQ ID NO: 4650992 - DNA, 25 bp, Homo sapien
gggtcccgtggtgactgccggccgc

SEQ ID NO: 4650993 - DNA, 25 bp, Homo sapien
gaataagagccctttcggtcggatg

SEQ ID NO: 4650994 - DNA, 25 bp, Homo sapien
atccagctggcatctataatggata

SEQ ID NO: 4650995 - DNA, 25 bp, Homo sapien
tggcatctataatggatatcctggg

SEQ ID NO: 4650996 - DNA, 25 bp, Homo sapien
atgttgaaaagtggtcattagaggc

SEQ ID NO: 4650997 - DNA, 25 bp, Homo sapien
ttgaaaagtggtcattagaggcaaa

SEQ ID NO: 4650998 - DNA, 25 bp, Homo sapien
tgaaaccaggagtcagacgtaccgc

SEQ ID NO: 4650999 - DNA, 25 bp, Homo sapien
aaccaggagtcagacgtaccgccat

SEQ ID NO: 4651000 - DNA, 25 bp, Homo sapien
ttgaaaccaggagtcagacgtaccg

SEQ ID NO: 4651001 - DNA, 25 bp, Homo sapien
ttttcatgggtatattcttcaaaga

SEQ ID NO: 4651002 - DNA, 25 bp, Homo sapien
gccctggtttcctaatgatttcctg

SEQ ID NO: 4651003 - DNA, 25 bp, Homo sapien
ctggtttcctaatgatttcctgaca

SEQ ID NO: 4651004 - DNA, 25 bp, Homo sapien
cctggtttcctaatgatttcctgac

SEQ ID NO: 4651005 - DNA, 25 bp, Homo sapien
gagccctggtttcctaatgatttcc

SEQ ID NO: 4651006 - DNA, 25 bp, Homo sapien
caaaagtccatagtctgtgacgcaa

SEQ ID NO: 4651007 - DNA, 25 bp, Homo sapien
tagtctgtgacgcaaagctgctttg

SEQ ID NO: 4651008 - DNA, 25 bp, Homo sapien
tccttgccccatgacattaaaaagc

SEQ ID NO: 4651009 - DNA, 25 bp, Homo sapien
catttaggatactcatgtccttgcc

SEQ ID NO: 4651010 - DNA, 25 bp, Homo sapien
taagcttcagataaggctccaaatg

SEQ ID NO: 4651011 - DNA, 25 bp, Homo sapien
tttaagcttcagataaggctccaaa

SEQ ID NO: 4651012 - DNA, 25 bp, Homo sapien
ctttttaagcttcagataaggctcc

SEQ ID NO: 4651013 - DNA, 25 bp, Homo sapien
tttttaagcttcagataaggctcca

SEQ ID NO: 4651014 - DNA, 25 bp, Homo sapien
caagtggcaatctctaatagggtca

SEQ ID NO: 4651015 - DNA, 25 bp, Homo sapien
catagagtgctgagggataaaagct

SEQ ID NO: 4651016 - DNA, 25 bp, Homo sapien
ggtatccagcttaatacagcctctg

SEQ ID NO: 4651017 - DNA, 25 bp, Homo sapien
tcacaaatcgttaggctgaagtacc

SEQ ID NO: 4651018 - DNA, 25 bp, Homo sapien
cacttcagaagctagacaggactca

SEQ ID NO: 4651019 - DNA, 25 bp, Homo sapien
tgacatactagacccaagcacaggg

SEQ ID NO: 4651020 - DNA, 25 bp, Homo sapien
ttctacagctctggcgaaaggtcca

SEQ ID NO: 4651021 - DNA, 25 bp, Homo sapien
cccagtagagagtgtcaatcagccc

SEQ ID NO: 4651022 - DNA, 25 bp, Homo sapien
tacatagtgttatttgaccaagtgt

SEQ ID NO: 4651023 - DNA, 25 bp, Homo sapien
catagtgttatttgaccaagtgtaa

SEQ ID NO: 4651024 - DNA, 25 bp, Homo sapien
acatagtgttatttgaccaagtgta

SEQ ID NO: 4651025 - DNA, 25 bp, Homo sapien
gtacatagtgttatttgaccaagtg

SEQ ID NO: 4651026 - DNA, 25 bp, Homo sapien
ggctccgatcatccttccataggaa

SEQ ID NO: 4651027 - DNA, 25 bp, Homo sapien
tggttccttatcaccatgaccttgg

SEQ ID NO: 4651028 - DNA, 25 bp, Homo sapien
tgacaggctgttcactcagccatgg

SEQ ID NO: 4651029 - DNA, 25 bp, Homo sapien
tccataggaagtcatagtcaggagc

SEQ ID NO: 4651030 - DNA, 25 bp, Homo sapien
ggagtatccgatttattattaatct

SEQ ID NO: 4651031 - DNA, 25 bp, Homo sapien
ccaggagtatccgatttattattaa

SEQ ID NO: 4651032 - DNA, 25 bp, Homo sapien
gccaggagtatccgatttattatta

SEQ ID NO: 4651033 - DNA, 25 bp, Homo sapien
caggagtatccgatttattattaat

SEQ ID NO: 4651034 - DNA, 25 bp, Homo sapien
ggcagctcaggagtgttatacaagt

SEQ ID NO: 4651035 - DNA, 25 bp, Homo sapien
gagctcattcccatggaaggtgaca

SEQ ID NO: 4651036 - DNA, 25 bp, Homo sapien
tatacaagtggagctcattcccatg

SEQ ID NO: 4651037 - DNA, 25 bp, Homo sapien
ctcaggagtgttatacaagtggagc

SEQ ID NO: 4651038 - DNA, 25 bp, Homo sapien
tcttcatcatatgatggcccacagt

SEQ ID NO: 4651039 - DNA, 25 bp, Homo sapien
tactgaaggatcaggtattcctagt

SEQ ID NO: 4651040 - DNA, 25 bp, Homo sapien
gacctgacaatccaatatcttatct

SEQ ID NO: 4651041 - DNA, 25 bp, Homo sapien
ggcccacagtccattactgaaggat

SEQ ID NO: 4651042 - DNA, 25 bp, Homo sapien
caaagtcccctagttctctttactg

SEQ ID NO: 4651043 - DNA, 25 bp, Homo sapien
aatgaataagtacaaagtcccctag

SEQ ID NO: 4651044 - DNA, 25 bp, Homo sapien
atgaataagtacaaagtcccctagt

SEQ ID NO: 4651045 - DNA, 25 bp, Homo sapien
ctcagagtcatggactagatcaaat

SEQ ID NO: 4651046 - DNA, 25 bp, Homo sapien
tcatacagagtaaagtgggtccagt

SEQ ID NO: 4651047 - DNA, 25 bp, Homo sapien
tgaagacatttggtgcctcagagtc

SEQ ID NO: 4651048 - DNA, 25 bp, Homo sapien
cacagcgatgcctttttgacctcaa

SEQ ID NO: 4651049 - DNA, 25 bp, Homo sapien
ttatagccagataatggtggctaac

SEQ ID NO: 4651050 - DNA, 25 bp, Homo sapien
ccagataatggtggctaaccgtcta

SEQ ID NO: 4651051 - DNA, 25 bp, Homo sapien
gccagataatggtggctaaccgtct

SEQ ID NO: 4651052 - DNA, 25 bp, Homo sapien
tagccagataatggtggctaaccgt

SEQ ID NO: 4651053 - DNA, 25 bp, Homo sapien
ctttctgattgtaactcatgacatt

SEQ ID NO: 4651054 - DNA, 25 bp, Homo sapien
cctttctgattgtaactcatgacat

SEQ ID NO: 4651055 - DNA, 25 bp, Homo sapien
gcctcattatctcgcccagatgttt

SEQ ID NO: 4651056 - DNA, 25 bp, Homo sapien
cctccagcagcttgggagtctcatt

SEQ ID NO: 4651057 - DNA, 25 bp, Homo sapien
ctcctccagcagcttgggagtctca

SEQ ID NO: 4651058 - DNA, 25 bp, Homo sapien
tttcccagcctcattatctcgccca

SEQ ID NO: 4651059 - DNA, 25 bp, Homo sapien
gcaggcccaaggtagtacgggtcca

SEQ ID NO: 4651060 - DNA, 25 bp, Homo sapien
tctggacaacagctgtggataaagt

SEQ ID NO: 4651061 - DNA, 25 bp, Homo sapien
tccagatggaacttgaagttaggcc

SEQ ID NO: 4651062 - DNA, 25 bp, Homo sapien
ctaaggggggctgtccataagtcca

SEQ ID NO: 4651063 - DNA, 25 bp, Homo sapien
ggtctggtatacacggtccacctct

SEQ ID NO: 4651064 - DNA, 25 bp, Homo sapien
cattgcaaaggtctggtatacacgg

SEQ ID NO: 4651065 - DNA, 25 bp, Homo sapien
tggtatacacggtccacctctacct

SEQ ID NO: 4651066 - DNA, 25 bp, Homo sapien
caaaggtctggtatacacggtccac

SEQ ID NO: 4651067 - DNA, 25 bp, Homo sapien
tcaccaaattggtggaaggtcacca

SEQ ID NO: 4651068 - DNA, 25 bp, Homo sapien
tgtaaagtctgtcgttgaatttgcc

SEQ ID NO: 4651069 - DNA, 25 bp, Homo sapien
gtcgttgaatttgccttcactctca

SEQ ID NO: 4651070 - DNA, 25 bp, Homo sapien
tgctgacttcattaatgatgtaaag

SEQ ID NO: 4651071 - DNA, 25 bp, Homo sapien
tgtggacactgagtgcagtaatggt

SEQ ID NO: 4651072 - DNA, 25 bp, Homo sapien
ctgtggacactgagtgcagtaatgg

SEQ ID NO: 4651073 - DNA, 25 bp, Homo sapien
atggggccagtaattcagaattaat

SEQ ID NO: 4651074 - DNA, 25 bp, Homo sapien
tgaagaagcaggcagttatggggcc

SEQ ID NO: 4651075 - DNA, 25 bp, Homo sapien
agagaactctgctcgtggagtcaca

SEQ ID NO: 4651076 - DNA, 25 bp, Homo sapien
cgggaggaacgttatcaggcgccaa

SEQ ID NO: 4651077 - DNA, 25 bp, Homo sapien
gctcgtggagtcacatattctgttt

SEQ ID NO: 4651078 - DNA, 25 bp, Homo sapien
ggaacgttatcaggcgccaaaagcc

SEQ ID NO: 4651079 - DNA, 25 bp, Homo sapien
ctggtgctactggcatgtgcaactg

SEQ ID NO: 4651080 - DNA, 25 bp, Homo sapien
gctggtgctactggcatgtgcaact

SEQ ID NO: 4651081 - DNA, 25 bp, Homo sapien
ctttccaggaggacaatatgccatt

SEQ ID NO: 4651082 - DNA, 25 bp, Homo sapien
aagtatcaaagagaggtgtgacgta

SEQ ID NO: 4651083 - DNA, 25 bp, Homo sapien
ttttagcttcagaagtatcaaagag

SEQ ID NO: 4651084 - DNA, 25 bp, Homo sapien
ccaggaggacaatatgccattaaaa

SEQ ID NO: 4651085 - DNA, 25 bp, Homo sapien
gaagtgccaatagtggattgaaaac

SEQ ID NO: 4651086 - DNA, 25 bp, Homo sapien
tcctggttatggcagaagtcatgtg

SEQ ID NO: 4651087 - DNA, 25 bp, Homo sapien
ccattctggcagcttattttcctgg

SEQ ID NO: 4651088 - DNA, 25 bp, Homo sapien
gtgttttgcaatcagaagtgccaat

SEQ ID NO: 4651089 - DNA, 25 bp, Homo sapien
tgagttaattctcagggcatagcaa

SEQ ID NO: 4651090 - DNA, 25 bp, Homo sapien
gagtagaaaattcaccttcagggac

SEQ ID NO: 4651091 - DNA, 25 bp, Homo sapien
tctgcccagaagggaaatgattttg

SEQ ID NO: 4651092 - DNA, 25 bp, Homo sapien
ttcagggactgacaggatattgaca

SEQ ID NO: 4651093 - DNA, 25 bp, Homo sapien
atttctatctcagaattttcaaatc

SEQ ID NO: 4651094 - DNA, 25 bp, Homo sapien
tttctatctcagaattttcaaatct

SEQ ID NO: 4651095 - DNA, 25 bp, Homo sapien
aacaattctgaaatttctatctcag

SEQ ID NO: 4651096 - DNA, 25 bp, Homo sapien
tttaaacaattctgaaatttctatc

SEQ ID NO: 4651097 - DNA, 25 bp, Homo sapien
aaggtgggaagagatggggagcaaa

SEQ ID NO: 4651098 - DNA, 25 bp, Homo sapien
taagtagaaggtgggaagagatggg

SEQ ID NO: 4651099 - DNA, 25 bp, Homo sapien
gtgggaagagatggggagcaaagac

SEQ ID NO: 4651100 - DNA, 25 bp, Homo sapien
ttaagtagaaggtgggaagagatgg

SEQ ID NO: 4651101 - DNA, 25 bp, Homo sapien
gaatctgatcacttcacagtccata

SEQ ID NO: 4651102 - DNA, 25 bp, Homo sapien
cataagctttaaagattttgagtca

SEQ ID NO: 4651103 - DNA, 25 bp, Homo sapien
tcaagtgaatctgatcacttcacag

SEQ ID NO: 4651104 - DNA, 25 bp, Homo sapien
cttcacagtccataagctttaaaga

SEQ ID NO: 4651105 - DNA, 25 bp, Homo sapien
tcaagaccactgagtacctgagggc

SEQ ID NO: 4651106 - DNA, 25 bp, Homo sapien
cttgtgagtcgtcggcaaagcctga

SEQ ID NO: 4651107 - DNA, 25 bp, Homo sapien
gaagaagagaccctagatcagagac

SEQ ID NO: 4651108 - DNA, 25 bp, Homo sapien
cagagtttccatgagcaaaagagcc

SEQ ID NO: 4651109 - DNA, 25 bp, Homo sapien
accgcatatactgacactgcctgac

SEQ ID NO: 4651110 - DNA, 25 bp, Homo sapien
catgcttgggatagaatcggaactc

SEQ ID NO: 4651111 - DNA, 25 bp, Homo sapien
gcagtcatagccaataacatgcttg

SEQ ID NO: 4651112 - DNA, 25 bp, Homo sapien
ttcatgcttcctggttccgtctgct

SEQ ID NO: 4651113 - DNA, 25 bp, Homo sapien
tgagatgcagactctgcacaatttg

SEQ ID NO: 4651114 - DNA, 25 bp, Homo sapien
taaaatggcattcatacaaactagc

SEQ ID NO: 4651115 - DNA, 25 bp, Homo sapien
tgttagctgctttcactagtaaaat

SEQ ID NO: 4651116 - DNA, 25 bp, Homo sapien
catttgtgttatcgcatgtatgaaa

SEQ ID NO: 4651117 - DNA, 25 bp, Homo sapien
tatctctgtggtaagtcgggctgtc

SEQ ID NO: 4651118 - DNA, 25 bp, Homo sapien
tcgggctgtccaacagacaaggctc

SEQ ID NO: 4651119 - DNA, 25 bp, Homo sapien
tagtagagttgaggcttgacccagt

SEQ ID NO: 4651120 - DNA, 25 bp, Homo sapien
tcgaatacaacaaagctggaggcgc

SEQ ID NO: 4651121 - DNA, 25 bp, Homo sapien
ctcaaaggagggcttgctgaaagta

SEQ ID NO: 4651122 - DNA, 25 bp, Homo sapien
ttactcaaaggagggcttgctgaaa

SEQ ID NO: 4651123 - DNA, 25 bp, Homo sapien
aaggagggcttgctgaaagtaagaa

SEQ ID NO: 4651124 - DNA, 25 bp, Homo sapien
agggcttgctgaaagtaagaaattc

SEQ ID NO: 4651125 - DNA, 25 bp, Homo sapien
ggcaacatcaacagacagcttcaga

SEQ ID NO: 4651126 - DNA, 25 bp, Homo sapien
gaaattgtagatgttgctaccaaac

SEQ ID NO: 4651127 - DNA, 25 bp, Homo sapien
cacacgactgtgtactgtcataagt

SEQ ID NO: 4651128 - DNA, 25 bp, Homo sapien
taccaaacgtacaacacacgactgt

SEQ ID NO: 4651129 - DNA, 25 bp, Homo sapien
ccgcgcctggcctgtttaggtttct

SEQ ID NO: 4651130 - DNA, 25 bp, Homo sapien
caggtgcctgcaccgcgcccggcta

SEQ ID NO: 4651131 - DNA, 25 bp, Homo sapien
attacaggtgcctgcaccgcgcccg

SEQ ID NO: 4651132 - DNA, 25 bp, Homo sapien
cgccatcttggctaggctggtgtca

SEQ ID NO: 4651133 - DNA, 25 bp, Homo sapien
ctagaatggtcgatacacaaaagtc

SEQ ID NO: 4651134 - DNA, 25 bp, Homo sapien
cattttacaccatccgttaccaggg

SEQ ID NO: 4651135 - DNA, 25 bp, Homo sapien
gtgagccctatacatctaacaggtg

SEQ ID NO: 4651136 - DNA, 25 bp, Homo sapien
caatcactctgatggagcggtgcaa

SEQ ID NO: 4651137 - DNA, 25 bp, Homo sapien
gataagaatagaagagcaaatcaat

SEQ ID NO: 4651138 - DNA, 25 bp, Homo sapien
taagaatagaagagcaaatcaatac

SEQ ID NO: 4651139 - DNA, 25 bp, Homo sapien
agaatagaagagcaaatcaatacca

SEQ ID NO: 4651140 - DNA, 25 bp, Homo sapien
cagataagaatagaagagcaaatca

SEQ ID NO: 4651141 - DNA, 25 bp, Homo sapien
accctgctctgaggtactttgacac

SEQ ID NO: 4651142 - DNA, 25 bp, Homo sapien
gtgaatatgatcctgggtcctctca

SEQ ID NO: 4651143 - DNA, 25 bp, Homo sapien
ctgtgaatatgatcctgggtcctct

SEQ ID NO: 4651144 - DNA, 25 bp, Homo sapien
gctctgaggtactttgacacggcaa

SEQ ID NO: 4651145 - DNA, 25 bp, Homo sapien
ctcctccttacaacagttcctttct

SEQ ID NO: 4651146 - DNA, 25 bp, Homo sapien
gtctttagaaagtgtaccctgcatg

SEQ ID NO: 4651147 - DNA, 25 bp, Homo sapien
gtgtaccctgcatgatagtgcacat

SEQ ID NO: 4651148 - DNA, 25 bp, Homo sapien
gatgtaggagtcttcctgtctttag

SEQ ID NO: 4651149 - DNA, 25 bp, Homo sapien
gtaggagtcttcctgtctttagaaa

SEQ ID NO: 4651150 - DNA, 25 bp, Homo sapien
caccagagcatgctgcattgagacc

SEQ ID NO: 4651151 - DNA, 25 bp, Homo sapien
tccaccagagcatgctgcattgaga

SEQ ID NO: 4651152 - DNA, 25 bp, Homo sapien
catccaccagagcatgctgcattga

SEQ ID NO: 4651153 - DNA, 25 bp, Homo sapien
ccatgacacatccaccagagcatgc

SEQ ID NO: 4651154 - DNA, 25 bp, Homo sapien
cagtcttcctgcagatggtattccc

SEQ ID NO: 4651155 - DNA, 25 bp, Homo sapien
cataagtcgaccctgagagttctaa

SEQ ID NO: 4651156 - DNA, 25 bp, Homo sapien
tacagagatagcgtcacataagtcg

SEQ ID NO: 4651157 - DNA, 25 bp, Homo sapien
tggtattccctgctatcgaggccat

SEQ ID NO: 4651158 - DNA, 25 bp, Homo sapien
tctaggattgagtgaaccattggcc

SEQ ID NO: 4651159 - DNA, 25 bp, Homo sapien
ccataaatagcggaaggactctgca

SEQ ID NO: 4651160 - DNA, 25 bp, Homo sapien
tcctgaattgcatcttagcctaacg

SEQ ID NO: 4651161 - DNA, 25 bp, Homo sapien
taaaagttcatcactctgaccaaag

SEQ ID NO: 4651162 - DNA, 25 bp, Homo sapien
gattacgtggtcttgtgaacccaca

SEQ ID NO: 4651163 - DNA, 25 bp, Homo sapien
tatccagaataagagtggcagtctc

SEQ ID NO: 4651164 - DNA, 25 bp, Homo sapien
gaaatggccatgctagctctagaac

SEQ ID NO: 4651165 - DNA, 25 bp, Homo sapien
tgctgagattcctgtcgccatcaag

SEQ ID NO: 4651166 - DNA, 25 bp, Homo sapien
cataaaaggctgtggacatgccaag

SEQ ID NO: 4651167 - DNA, 25 bp, Homo sapien
tgatatttgactagaaggcccagct

SEQ ID NO: 4651168 - DNA, 25 bp, Homo sapien
ggttgtccttctagaacactcccag

SEQ ID NO: 4651169 - DNA, 25 bp, Homo sapien
tatcttgggttgctcccagctgaag

SEQ ID NO: 4651170 - DNA, 25 bp, Homo sapien
gtagccctggagcttgaaaataact

SEQ ID NO: 4651171 - DNA, 25 bp, Homo sapien
ggtagccctggagcttgaaaataac

SEQ ID NO: 4651172 - DNA, 25 bp, Homo sapien
ctgttctgtaggatggagataggta

SEQ ID NO: 4651173 - DNA, 25 bp, Homo sapien
ctgtaggatggagataggtagccct

SEQ ID NO: 4651174 - DNA, 25 bp, Homo sapien
tgccgtagggccatatttgagggtt

SEQ ID NO: 4651175 - DNA, 25 bp, Homo sapien
acagttttcttgtgacacctcttcc

SEQ ID NO: 4651176 - DNA, 25 bp, Homo sapien
cattatacataaggacaagaaatcc

SEQ ID NO: 4651177 - DNA, 25 bp, Homo sapien
tgagggttgattggttctataagac

SEQ ID NO: 4651178 - DNA, 25 bp, Homo sapien
cacatcctattgactgcctggagtt

SEQ ID NO: 4651179 - DNA, 25 bp, Homo sapien
cctccaatcctcatgtataatcctg

SEQ ID NO: 4651180 - DNA, 25 bp, Homo sapien
tcttgattgtattggatgttatcac

SEQ ID NO: 4651181 - DNA, 25 bp, Homo sapien
taatcctgtgctcaactcaaatgtt

SEQ ID NO: 4651182 - DNA, 25 bp, Homo sapien
caagatgctaaattagccaagaaga

SEQ ID NO: 4651183 - DNA, 25 bp, Homo sapien
caagcaagatgctaaattagccaag

SEQ ID NO: 4651184 - DNA, 25 bp, Homo sapien
ctatctcatacaagcaagatgctaa

SEQ ID NO: 4651185 - DNA, 25 bp, Homo sapien
catacaagcaagatgctaaattagc

SEQ ID NO: 4651186 - DNA, 25 bp, Homo sapien
ttattagaagtaatgatatcgtgtc

SEQ ID NO: 4651187 - DNA, 25 bp, Homo sapien
gtattgtcctaggagacacaatctc

SEQ ID NO: 4651188 - DNA, 25 bp, Homo sapien
gtcctaggagacacaatctcattta

SEQ ID NO: 4651189 - DNA, 25 bp, Homo sapien
acatttattagaagtaatgatatcg

SEQ ID NO: 4651190 - DNA, 25 bp, Homo sapien
tttccttgatggcaaaggcacgttc

SEQ ID NO: 4651191 - DNA, 25 bp, Homo sapien
tggcaacgagcactatgggcactgc

SEQ ID NO: 4651192 - DNA, 25 bp, Homo sapien
catctggtgtggcaacgagcactat

SEQ ID NO: 4651193 - DNA, 25 bp, Homo sapien
caattttctctgtataaccacagtc

SEQ ID NO: 4651194 - DNA, 25 bp, Homo sapien
tcaagcctagcaggttttctctcca

SEQ ID NO: 4651195 - DNA, 25 bp, Homo sapien
caagtaacatgttggcctgaactga

SEQ ID NO: 4651196 - DNA, 25 bp, Homo sapien
gaagatgtcagttgataatacgtct

SEQ ID NO: 4651197 - DNA, 25 bp, Homo sapien
ttctctccacaggaattctgaagat

SEQ ID NO: 4651198 - DNA, 25 bp, Homo sapien
tgatacatcctttcacatagcaccg

SEQ ID NO: 4651199 - DNA, 25 bp, Homo sapien
tgcgtagtaaatcgtaattgccacc

SEQ ID NO: 4651200 - DNA, 25 bp, Homo sapien
cgctttgaggttgcaaatctgtcac

SEQ ID NO: 4651201 - DNA, 25 bp, Homo sapien
tgtgcacgggatgtcgcaaccgcct

SEQ ID NO: 4651202 - DNA, 25 bp, Homo sapien
gataggttaccccttgtatagtaca

SEQ ID NO: 4651203 - DNA, 25 bp, Homo sapien
gcctatggtctttctagagtcaact

SEQ ID NO: 4651204 - DNA, 25 bp, Homo sapien
gctgtacttaatgggccaaggtctg

SEQ ID NO: 4651205 - DNA, 25 bp, Homo sapien
ccaaggtctgtgttcgctttccaag

SEQ ID NO: 4651206 - DNA, 25 bp, Homo sapien
actcaaagggagtcagtacagggcc

SEQ ID NO: 4651207 - DNA, 25 bp, Homo sapien
caaatgtcatgcaaatggtgcacca

SEQ ID NO: 4651208 - DNA, 25 bp, Homo sapien
accctggcttggcattcatgatgat

SEQ ID NO: 4651209 - DNA, 25 bp, Homo sapien
gaagagactcaaagggagtcagtac

SEQ ID NO: 4651210 - DNA, 25 bp, Homo sapien
catttttcctctacgatgaagtgca

SEQ ID NO: 4651211 - DNA, 25 bp, Homo sapien
gcaaatgaagactaggcctgccacc

SEQ ID NO: 4651212 - DNA, 25 bp, Homo sapien
taaatgaagatgtagcctgtgacca

SEQ ID NO: 4651213 - DNA, 25 bp, Homo sapien
cgattcgttctaggaagttagtgca

SEQ ID NO: 4651214 - DNA, 25 bp, Homo sapien
cttttgcaactaccacactctggtg

SEQ ID NO: 4651215 - DNA, 25 bp, Homo sapien
tctgagtgacagtcccttttgcaac

SEQ ID NO: 4651216 - DNA, 25 bp, Homo sapien
taaaagcccactctctgagtgacag

SEQ ID NO: 4651217 - DNA, 25 bp, Homo sapien
ttacaaagcgtaaaagcccactctc

SEQ ID NO: 4651218 - DNA, 25 bp, Homo sapien
ttcagattcccctaagtgcattttc

SEQ ID NO: 4651219 - DNA, 25 bp, Homo sapien
cgacaattcagattcccctaagtgc

SEQ ID NO: 4651220 - DNA, 25 bp, Homo sapien
agattcccctaagtgcattttcggg

SEQ ID NO: 4651221 - DNA, 25 bp, Homo sapien
tgcattttcggggagcccttctcac

SEQ ID NO: 4651222 - DNA, 25 bp, Homo sapien
tagacgatacgctaactgggttttc

SEQ ID NO: 4651223 - DNA, 25 bp, Homo sapien
tcgtaccaacatataagcttgctga

SEQ ID NO: 4651224 - DNA, 25 bp, Homo sapien
tctgtgcctgttgtttagacgatac

SEQ ID NO: 4651225 - DNA, 25 bp, Homo sapien
gcttgctgatttatattagcacaca

SEQ ID NO: 4651226 - DNA, 25 bp, Homo sapien
tcccaagccagattgtgaaaatctt

SEQ ID NO: 4651227 - DNA, 25 bp, Homo sapien
taagacttttatatccctatcaagc

SEQ ID NO: 4651228 - DNA, 25 bp, Homo sapien
gaattttccgatcatttcctgtgca

SEQ ID NO: 4651229 - DNA, 25 bp, Homo sapien
ttcctgtgcatcaataacagctccc

SEQ ID NO: 4651230 - DNA, 25 bp, Homo sapien
caagctaactctgtaaatcttgtta

SEQ ID NO: 4651231 - DNA, 25 bp, Homo sapien
tcttgttagaagagtaaatcctgct

SEQ ID NO: 4651232 - DNA, 25 bp, Homo sapien
tcttctaagcttttcacaaagatca

SEQ ID NO: 4651233 - DNA, 25 bp, Homo sapien
aggaagcaaacccaagctaactctg

SEQ ID NO: 4651234 - DNA, 25 bp, Homo sapien
cttcagagctgtttcgtgcactctc

SEQ ID NO: 4651235 - DNA, 25 bp, Homo sapien
tgcacaggaatatacagcaggattt

SEQ ID NO: 4651236 - DNA, 25 bp, Homo sapien
tctcctgcacaggaatatacagcag

SEQ ID NO: 4651237 - DNA, 25 bp, Homo sapien
gctgtttcgtgcactctctcctgca

SEQ ID NO: 4651238 - DNA, 25 bp, Homo sapien
tcactgacgagtgcattcctcaaag

SEQ ID NO: 4651239 - DNA, 25 bp, Homo sapien
ttatagtatcagagtagtaattcat

SEQ ID NO: 4651240 - DNA, 25 bp, Homo sapien
agttttatagtatcagagtagtaat

SEQ ID NO: 4651241 - DNA, 25 bp, Homo sapien
gagcactcgctgcagttttatagta

SEQ ID NO: 4651242 - DNA, 25 bp, Homo sapien
cttgtggagaaggtatatttgagaa

SEQ ID NO: 4651243 - DNA, 25 bp, Homo sapien
gaaaatccatctccatcaccataac

SEQ ID NO: 4651244 - DNA, 25 bp, Homo sapien
atcaccataacctttgcttcacctg

SEQ ID NO: 4651245 - DNA, 25 bp, Homo sapien
ctgctgtccttactgtagaagaggt

SEQ ID NO: 4651246 - DNA, 25 bp, Homo sapien
aatgtgcttgacagagtgtcttcaa

SEQ ID NO: 4651247 - DNA, 25 bp, Homo sapien
gagtcacagcatctcgataatgtgc

SEQ ID NO: 4651248 - DNA, 25 bp, Homo sapien
gcatctcgataatgtgcttgacaga

SEQ ID NO: 4651249 - DNA, 25 bp, Homo sapien
cgataatgtgcttgacagagtgtct

SEQ ID NO: 4651250 - DNA, 25 bp, Homo sapien
ttcctgtgttagttaagtgcccacc

SEQ ID NO: 4651251 - DNA, 25 bp, Homo sapien
tcctgtgttagttaagtgcccaccc

SEQ ID NO: 4651252 - DNA, 25 bp, Homo sapien
cctgtgttagttaagtgcccaccca

SEQ ID NO: 4651253 - DNA, 25 bp, Homo sapien
ctgtgttagttaagtgcccacccac

SEQ ID NO: 4651254 - DNA, 25 bp, Homo sapien
gggccctggtgtattttatctcgca

SEQ ID NO: 4651255 - DNA, 25 bp, Homo sapien
ctgggccctggtgtattttatctcg

SEQ ID NO: 4651256 - DNA, 25 bp, Homo sapien
ccctggtgtattttatctcgcagga

SEQ ID NO: 4651257 - DNA, 25 bp, Homo sapien
ggtgtattttatctcgcaggaagaa

SEQ ID NO: 4651258 - DNA, 25 bp, Homo sapien
aacactatagacatagctgaatccc

SEQ ID NO: 4651259 - DNA, 25 bp, Homo sapien
gattgaacgcatccaaatcttcata

SEQ ID NO: 4651260 - DNA, 25 bp, Homo sapien
cataaattgtcaacacatacataac

SEQ ID NO: 4651261 - DNA, 25 bp, Homo sapien
ttcctgaagattgaacgcatccaaa

SEQ ID NO: 4651262 - DNA, 25 bp, Homo sapien
tatctggataattgcatacttcaaa

SEQ ID NO: 4651263 - DNA, 25 bp, Homo sapien
gaattatctggataattgcatactt

SEQ ID NO: 4651264 - DNA, 25 bp, Homo sapien
tgcatacttcaaatgactcccaaat

SEQ ID NO: 4651265 - DNA, 25 bp, Homo sapien
ggataattgcatacttcaaatgact

SEQ ID NO: 4651266 - DNA, 25 bp, Homo sapien
tgctgactgacttatattcctcaat

SEQ ID NO: 4651267 - DNA, 25 bp, Homo sapien
gccctctggcaattggttatgaaat

SEQ ID NO: 4651268 - DNA, 25 bp, Homo sapien
ttactcaagaaaatcccagttgctg

SEQ ID NO: 4651269 - DNA, 25 bp, Homo sapien
tcctgatataatattgccctctggc

SEQ ID NO: 4651270 - DNA, 25 bp, Homo sapien
tactatagctagagcttcaggggtc

SEQ ID NO: 4651271 - DNA, 25 bp, Homo sapien
ttactatagctagagcttcaggggt

SEQ ID NO: 4651272 - DNA, 25 bp, Homo sapien
tatagctagagcttcaggggtcaac

SEQ ID NO: 4651273 - DNA, 25 bp, Homo sapien
tagctagagcttcaggggtcaacat

SEQ ID NO: 4651274 - DNA, 25 bp, Homo sapien
tctgtttcctgtctcgtcagcaaga

SEQ ID NO: 4651275 - DNA, 25 bp, Homo sapien
ctcgtcagcaagaagtcgggaattg

SEQ ID NO: 4651276 - DNA, 25 bp, Homo sapien
tgtaatgtagggcacgtgggccagt

SEQ ID NO: 4651277 - DNA, 25 bp, Homo sapien
gggcacgtgggccagtgccttcatc

SEQ ID NO: 4651278 - DNA, 25 bp, Homo sapien
aatctgtctagacatttttcatctc

SEQ ID NO: 4651279 - DNA, 25 bp, Homo sapien
tacttagagaatctgtctagacatt

SEQ ID NO: 4651280 - DNA, 25 bp, Homo sapien
ttcgtacttagagaatctgtctaga

SEQ ID NO: 4651281 - DNA, 25 bp, Homo sapien
atctgtctagacatttttcatctct

SEQ ID NO: 4651282 - DNA, 25 bp, Homo sapien
tatatagggtgaagggtaactttgc

SEQ ID NO: 4651283 - DNA, 25 bp, Homo sapien
gaagggtaactttgctttatagaca

SEQ ID NO: 4651284 - DNA, 25 bp, Homo sapien
gaactcgcatctatatagggtgaag

SEQ ID NO: 4651285 - DNA, 25 bp, Homo sapien
gtatatggagaactcgcatctatat

SEQ ID NO: 4651286 - DNA, 25 bp, Homo sapien
ctagtcatcatccaagtaacgtttc

SEQ ID NO: 4651287 - DNA, 25 bp, Homo sapien
ccatttccgtagtcacagtgtgtgt

SEQ ID NO: 4651288 - DNA, 25 bp, Homo sapien
cggagcggggccatttccgtagtca

SEQ ID NO: 4651289 - DNA, 25 bp, Homo sapien
catccaagtaacgtttcttccggag

SEQ ID NO: 4651290 - DNA, 25 bp, Homo sapien
agcctccggtaacggcgtgaccctg

SEQ ID NO: 4651291 - DNA, 25 bp, Homo sapien
tgaagcctccggtaacggcgtgacc

SEQ ID NO: 4651292 - DNA, 25 bp, Homo sapien
ccggtaacggcgtgaccctgtgtgt

SEQ ID NO: 4651293 - DNA, 25 bp, Homo sapien
cctccggtaacggcgtgaccctgtg

SEQ ID NO: 4651294 - DNA, 25 bp, Homo sapien
cagctagtttaaggaggccacacaa

SEQ ID NO: 4651295 - DNA, 25 bp, Homo sapien
cataacagctagtttaaggaggcca

SEQ ID NO: 4651296 - DNA, 25 bp, Homo sapien
taacagctagtttaaggaggccaca

SEQ ID NO: 4651297 - DNA, 25 bp, Homo sapien
ctagtttaaggaggccacacaaaca

SEQ ID NO: 4651298 - DNA, 25 bp, Homo sapien
ggagccctaattaacgcgagtacat

SEQ ID NO: 4651299 - DNA, 25 bp, Homo sapien
taattaacgcgagtacatcagtcat

SEQ ID NO: 4651300 - DNA, 25 bp, Homo sapien
cctaattaacgcgagtacatcagtc

SEQ ID NO: 4651301 - DNA, 25 bp, Homo sapien
ctgactggagccctaattaacgcga

SEQ ID NO: 4651302 - DNA, 25 bp, Homo sapien
tccttcctcctctccattcatccac

SEQ ID NO: 4651303 - DNA, 25 bp, Homo sapien
gcttccttcctcctctccattcatc

SEQ ID NO: 4651304 - DNA, 25 bp, Homo sapien
agcttccttcctcctctccattcat

SEQ ID NO: 4651305 - DNA, 25 bp, Homo sapien
caaacacagcttccttcctcctctc

SEQ ID NO: 4651306 - DNA, 25 bp, Homo sapien
ccaaacttctgcaatctttgttaca

SEQ ID NO: 4651307 - DNA, 25 bp, Homo sapien
tctgcaatctttgttacaattgccc

SEQ ID NO: 4651308 - DNA, 25 bp, Homo sapien
tgcaatctttgttacaattgccctc

SEQ ID NO: 4651309 - DNA, 25 bp, Homo sapien
caatctttgttacaattgccctcat

SEQ ID NO: 4651310 - DNA, 25 bp, Homo sapien
tatgacactgagaaggaagatagaa

SEQ ID NO: 4651311 - DNA, 25 bp, Homo sapien
tacctgatgggtataatggtctaca

SEQ ID NO: 4651312 - DNA, 25 bp, Homo sapien
caatctcttgactggggacttgtaa

SEQ ID NO: 4651313 - DNA, 25 bp, Homo sapien
ggtctacattttgattatgacactg

SEQ ID NO: 4651314 - DNA, 25 bp, Homo sapien
aattggcaacacagatatattgagg

SEQ ID NO: 4651315 - DNA, 25 bp, Homo sapien
ttttgagtggatcatggattccagg

SEQ ID NO: 4651316 - DNA, 25 bp, Homo sapien
tgaggaggatgacgaactgggaatt

SEQ ID NO: 4651317 - DNA, 25 bp, Homo sapien
ttcagtggcatagtaagtggagttg

SEQ ID NO: 4651318 - DNA, 25 bp, Homo sapien
caactttgatagaaaggagagatcc

SEQ ID NO: 4651319 - DNA, 25 bp, Homo sapien
gcatgaagggcccattggcaacacc

SEQ ID NO: 4651320 - DNA, 25 bp, Homo sapien
taggtggaactgaatcactagaggg

SEQ ID NO: 4651321 - DNA, 25 bp, Homo sapien
tatccatcaggaagggtggacttag

SEQ ID NO: 4651322 - DNA, 25 bp, Homo sapien
gctttgacatccttctctcggtgaa

SEQ ID NO: 4651323 - DNA, 25 bp, Homo sapien
tgggaaccaactggctttgacatcc

SEQ ID NO: 4651324 - DNA, 25 bp, Homo sapien
ttggagacagtcttagcttctccat

SEQ ID NO: 4651325 - DNA, 25 bp, Homo sapien
tctctcggtgaacccaagaagtttg

SEQ ID NO: 4651326 - DNA, 25 bp, Homo sapien
atccatcccccagtccaatctgccc

SEQ ID NO: 4651327 - DNA, 25 bp, Homo sapien
ttatccatcccccagtccaatctgc

SEQ ID NO: 4651328 - DNA, 25 bp, Homo sapien
ccccagtccaatctgccctggattc

SEQ ID NO: 4651329 - DNA, 25 bp, Homo sapien
cccccagtccaatctgccctggatt

SEQ ID NO: 4651330 - DNA, 25 bp, Homo sapien
tctattgccttctgtgaacgctttt

SEQ ID NO: 4651331 - DNA, 25 bp, Homo sapien
ttgccttctgtgaacgcttttccat

SEQ ID NO: 4651332 - DNA, 25 bp, Homo sapien
ttccagtgtggctccatttgacctt

SEQ ID NO: 4651333 - DNA, 25 bp, Homo sapien
tttcctttctattgccttctgtgaa

SEQ ID NO: 4651334 - DNA, 25 bp, Homo sapien
tgtaaagtagcgtgcaacttctctg

SEQ ID NO: 4651335 - DNA, 25 bp, Homo sapien
caagatttacttcacacccaagagg

SEQ ID NO: 4651336 - DNA, 25 bp, Homo sapien
gataatgggaaatgcctccgggttc

SEQ ID NO: 4651337 - DNA, 25 bp, Homo sapien
tcagcgtctacaagaaagattgcag

SEQ ID NO: 4651338 - DNA, 25 bp, Homo sapien
tgtggggggcaccattgatgttcac

SEQ ID NO: 4651339 - DNA, 25 bp, Homo sapien
ctgagagatgattgtggggggcacc

SEQ ID NO: 4651340 - DNA, 25 bp, Homo sapien
cattgatgttcacttgctgatgcat

SEQ ID NO: 4651341 - DNA, 25 bp, Homo sapien
ggcaccattgatgttcacttgctga

SEQ ID NO: 4651342 - DNA, 25 bp, Homo sapien
tgaaggtgcttgcttggaaacacac

SEQ ID NO: 4651343 - DNA, 25 bp, Homo sapien
agcaactgcagtggccagagactta

SEQ ID NO: 4651344 - DNA, 25 bp, Homo sapien
tgcagtggccagagacttattactt

SEQ ID NO: 4651345 - DNA, 25 bp, Homo sapien
ttcagcaactgcagtggccagagac

SEQ ID NO: 4651346 - DNA, 25 bp, Homo sapien
gccagagacttattacttccttcat

SEQ ID NO: 4651347 - DNA, 25 bp, Homo sapien
tgagaaatgccggaaagcaaagtta

SEQ ID NO: 4651348 - DNA, 25 bp, Homo sapien
tgtgcactcgggctggtgcattttt

SEQ ID NO: 4651349 - DNA, 25 bp, Homo sapien
tgcatgtctgtataactgcctcctt

SEQ ID NO: 4651350 - DNA, 25 bp, Homo sapien
ttttcacatttctgattccatagcc

SEQ ID NO: 4651351 - DNA, 25 bp, Homo sapien
catgttgtaacaaagcttcttggaa

SEQ ID NO: 4651352 - DNA, 25 bp, Homo sapien
catgatttgtatctaactgcaacac

SEQ ID NO: 4651353 - DNA, 25 bp, Homo sapien
tgatggcagtacacacgtggaaagt

SEQ ID NO: 4651354 - DNA, 25 bp, Homo sapien
cgtggaaagtatttgccgtgactaa

SEQ ID NO: 4651355 - DNA, 25 bp, Homo sapien
ctttcctgcctacatccagaatgaa

SEQ ID NO: 4651356 - DNA, 25 bp, Homo sapien
atgcaaccaaagcatctgaacaagt

SEQ ID NO: 4651357 - DNA, 25 bp, Homo sapien
ggaagacaatgagcactgtataaat

SEQ ID NO: 4651358 - DNA, 25 bp, Homo sapien
caaccaaagcatctgaacaagtgaa

SEQ ID NO: 4651359 - DNA, 25 bp, Homo sapien
ccaaagcatctgaacaagtgaaatc

SEQ ID NO: 4651360 - DNA, 25 bp, Homo sapien
gctgccccagaaccaggataatggc

SEQ ID NO: 4651361 - DNA, 25 bp, Homo sapien
ccaaagctggtggttgctgccccag

SEQ ID NO: 4651362 - DNA, 25 bp, Homo sapien
ccaggataatggctgcagtgtgcac

SEQ ID NO: 4651363 - DNA, 25 bp, Homo sapien
gcttgccaagtccaaacaatgctgc

SEQ ID NO: 4651364 - DNA, 25 bp, Homo sapien
ggccatgtaccagacctcaggctag

SEQ ID NO: 4651365 - DNA, 25 bp, Homo sapien
tcaggctagggcaccagataaacat

SEQ ID NO: 4651366 - DNA, 25 bp, Homo sapien
cagggatagggccatcttttgcaaa

SEQ ID NO: 4651367 - DNA, 25 bp, Homo sapien
caaatgtcccctgtagttgggtgga

SEQ ID NO: 4651368 - DNA, 25 bp, Homo sapien
tgtctggacctgcattggggtcctc

SEQ ID NO: 4651369 - DNA, 25 bp, Homo sapien
gacacattgtctggacctgcattgg

SEQ ID NO: 4651370 - DNA, 25 bp, Homo sapien
cattgtctggacctgcattggggtc

SEQ ID NO: 4651371 - DNA, 25 bp, Homo sapien
acacattgtctggacctgcattggg

SEQ ID NO: 4651372 - DNA, 25 bp, Homo sapien
cattaggaagttctcctgtttcctt

SEQ ID NO: 4651373 - DNA, 25 bp, Homo sapien
aggaagttctcctgtttccttagtg

SEQ ID NO: 4651374 - DNA, 25 bp, Homo sapien
ctcattaggaagttctcctgtttcc

SEQ ID NO: 4651375 - DNA, 25 bp, Homo sapien
gctcattaggaagttctcctgtttc

SEQ ID NO: 4651376 - DNA, 25 bp, Homo sapien
catagcatgaatgaactctagaata

SEQ ID NO: 4651377 - DNA, 25 bp, Homo sapien
tctagaatatccaaggagggtctgg

SEQ ID NO: 4651378 - DNA, 25 bp, Homo sapien
gaggtagaaagtggacctcctccat

SEQ ID NO: 4651379 - DNA, 25 bp, Homo sapien
ggtctggaaagctcaaggagagtta

SEQ ID NO: 4651380 - DNA, 25 bp, Homo sapien
cctattaatcgctggtgagaaacac

SEQ ID NO: 4651381 - DNA, 25 bp, Homo sapien
cttcagcactggagtattgtagcca

SEQ ID NO: 4651382 - DNA, 25 bp, Homo sapien
tgtaacaaacagattcaccagccct

SEQ ID NO: 4651383 - DNA, 25 bp, Homo sapien
cacttcttggagtaaggcacagggc

SEQ ID NO: 4651384 - DNA, 25 bp, Homo sapien
acatcaattttacgcgccgctggag

SEQ ID NO: 4651385 - DNA, 25 bp, Homo sapien
gcataattttccgtgtgaacgcgac

SEQ ID NO: 4651386 - DNA, 25 bp, Homo sapien
gtccccgttcttgtttagagccaga

SEQ ID NO: 4651387 - DNA, 25 bp, Homo sapien
gccagaaatggagtcgcgagatgct

SEQ ID NO: 4651388 - DNA, 25 bp, Homo sapien
ttaatgaccccgaagaggaggcggc

SEQ ID NO: 4651389 - DNA, 25 bp, Homo sapien
cgatttagttggctgcgctcggcag

SEQ ID NO: 4651390 - DNA, 25 bp, Homo sapien
gaccctgcctgagaatacggccaga

SEQ ID NO: 4651391 - DNA, 25 bp, Homo sapien
aataaaagagtgaaacgcttgcggc

SEQ ID NO: 4651392 - DNA, 25 bp, Homo sapien
aggagggaggcggccgccaccctct

SEQ ID NO: 4651393 - DNA, 25 bp, Homo sapien
agggaggcggccgccaccctctcgg

SEQ ID NO: 4651394 - DNA, 25 bp, Homo sapien
ggcgtcgggctgcggtcaggccggg

SEQ ID NO: 4651395 - DNA, 25 bp, Homo sapien
gaggagggaggcggccgccaccctc

SEQ ID NO: 4651396 - DNA, 25 bp, Homo sapien
aactcttccttaatccgatcacagg

SEQ ID NO: 4651397 - DNA, 25 bp, Homo sapien
cgatcacaggattcggaaattgtaa

SEQ ID NO: 4651398 - DNA, 25 bp, Homo sapien
ggtattgagcctgtaaaaactgaaa

SEQ ID NO: 4651399 - DNA, 25 bp, Homo sapien
tttaaagggttgagcaggctgatgc

SEQ ID NO: 4651400 - DNA, 25 bp, Homo sapien
tcaagtccggagtaataaagaacca

SEQ ID NO: 4651401 - DNA, 25 bp, Homo sapien
taaatcaatatcgaaagtttggcct

SEQ ID NO: 4651402 - DNA, 25 bp, Homo sapien
ttctcccggccccaataaatcaata

SEQ ID NO: 4651403 - DNA, 25 bp, Homo sapien
gaaagtttggcctcagcgttttcca

SEQ ID NO: 4651404 - DNA, 25 bp, Homo sapien
taatgactgcacatacaagcacaaa

SEQ ID NO: 4651405 - DNA, 25 bp, Homo sapien
agacaagttgaataccaccacccag

SEQ ID NO: 4651406 - DNA, 25 bp, Homo sapien
caagcatgtcttatgaatgatatct

SEQ ID NO: 4651407 - DNA, 25 bp, Homo sapien
caaagtgtcaatcgggttcagtggt

SEQ ID NO: 4651408 - DNA, 25 bp, Homo sapien
atgacataatgccgctgcatctctg

SEQ ID NO: 4651409 - DNA, 25 bp, Homo sapien
tgacataatgccgctgcatctctgt

SEQ ID NO: 4651410 - DNA, 25 bp, Homo sapien
tattccaaactaataggcactttga

SEQ ID NO: 4651411 - DNA, 25 bp, Homo sapien
ttttggtattccaaactaataggca

SEQ ID NO: 4651412 - DNA, 25 bp, Homo sapien
tggtattccaaactaataggcactt

SEQ ID NO: 4651413 - DNA, 25 bp, Homo sapien
aaactaataggcactttgaatctgt

SEQ ID NO: 4651414 - DNA, 25 bp, Homo sapien
tatattcaacccataggacatttca

SEQ ID NO: 4651415 - DNA, 25 bp, Homo sapien
tgcttgtgcatttctatattcaacc

SEQ ID NO: 4651416 - DNA, 25 bp, Homo sapien
gtgcatttctatattcaacccatag

SEQ ID NO: 4651417 - DNA, 25 bp, Homo sapien
tattcaacccataggacatttcata

SEQ ID NO: 4651418 - DNA, 25 bp, Homo sapien
taagacccaactaagtagcctcagg

SEQ ID NO: 4651419 - DNA, 25 bp, Homo sapien
gggaccagtacaaggattttacatc

SEQ ID NO: 4651420 - DNA, 25 bp, Homo sapien
cacaagacaagtttgcaatgcccaa

SEQ ID NO: 4651421 - DNA, 25 bp, Homo sapien
tcacatcaagccaacgaaggcgcca

SEQ ID NO: 4651422 - DNA, 25 bp, Homo sapien
ccgatcttgagaactaggcccaatt

SEQ ID NO: 4651423 - DNA, 25 bp, Homo sapien
ttacaagggtatccagcgagtacat

SEQ ID NO: 4651424 - DNA, 25 bp, Homo sapien
aattatgccgcagggcaacttccct

SEQ ID NO: 4651425 - DNA, 25 bp, Homo sapien
tgctttccattacaagggtatccag

SEQ ID NO: 4651426 - DNA, 25 bp, Homo sapien
tgaacccttcgagacacaaatctaa

SEQ ID NO: 4651427 - DNA, 25 bp, Homo sapien
gttgaacccttcgagacacaaatct

SEQ ID NO: 4651428 - DNA, 25 bp, Homo sapien
tgttgaacccttcgagacacaaatc

SEQ ID NO: 4651429 - DNA, 25 bp, Homo sapien
gaacccttcgagacacaaatctaat

SEQ ID NO: 4651430 - DNA, 25 bp, Homo sapien
gggtatcagatacaatgcaaatcca

SEQ ID NO: 4651431 - DNA, 25 bp, Homo sapien
aaaatagagctgttccttgtaagtc

SEQ ID NO: 4651432 - DNA, 25 bp, Homo sapien
taaacaagcagtattggcaatccac

SEQ ID NO: 4651433 - DNA, 25 bp, Homo sapien
ggcaatccacttggtactagagggt

SEQ ID NO: 4651434 - DNA, 25 bp, Homo sapien
ggcagcagtcggcctcttcaagtca

SEQ ID NO: 4651435 - DNA, 25 bp, Homo sapien
cagcagtcggcctcttcaagtcaat

SEQ ID NO: 4651436 - DNA, 25 bp, Homo sapien
gcagtcggcctcttcaagtcaattt

SEQ ID NO: 4651437 - DNA, 25 bp, Homo sapien
gtcggcctcttcaagtcaatttctt

SEQ ID NO: 4651438 - DNA, 25 bp, Homo sapien
ccatgcttcggcagttttgctttat

SEQ ID NO: 4651439 - DNA, 25 bp, Homo sapien
gtctcgctgctccaccatgcttcgg

SEQ ID NO: 4651440 - DNA, 25 bp, Homo sapien
attgctgagggcccgtctcgctgct

SEQ ID NO: 4651441 - DNA, 25 bp, Homo sapien
ctgtcgagcatggtaaattaatagc

SEQ ID NO: 4651442 - DNA, 25 bp, Homo sapien
ggccaatccagtctattctctgtac

SEQ ID NO: 4651443 - DNA, 25 bp, Homo sapien
ccgagccttttatctgccctggaca

SEQ ID NO: 4651444 - DNA, 25 bp, Homo sapien
ttacacattaactgcagcctgcttt

SEQ ID NO: 4651445 - DNA, 25 bp, Homo sapien
ctccagcagatgaagtagatgccga

SEQ ID NO: 4651446 - DNA, 25 bp, Homo sapien
tcctccagatctgcttcccgtgcag

SEQ ID NO: 4651447 - DNA, 25 bp, Homo sapien
ttcatcctccagatctgcttcccgt

SEQ ID NO: 4651448 - DNA, 25 bp, Homo sapien
tcatcctccagatctgcttcccgtg

SEQ ID NO: 4651449 - DNA, 25 bp, Homo sapien
aatttcatcctccagatctgcttcc

SEQ ID NO: 4651450 - DNA, 25 bp, Homo sapien
gaactagcagactatgtggcttcac

SEQ ID NO: 4651451 - DNA, 25 bp, Homo sapien
taagtatctatgagacattcaaggc

SEQ ID NO: 4651452 - DNA, 25 bp, Homo sapien
ggcttcactagattagacaaccagg

SEQ ID NO: 4651453 - DNA, 25 bp, Homo sapien
ccagcaagcccagataagagaacag

SEQ ID NO: 4651454 - DNA, 25 bp, Homo sapien
gcatcacgtgttgagcagcaggcaa

SEQ ID NO: 4651455 - DNA, 25 bp, Homo sapien
caacacagttagagccaggcttggg

SEQ ID NO: 4651456 - DNA, 25 bp, Homo sapien
gacggcatcactaggtccacaggaa

SEQ ID NO: 4651457 - DNA, 25 bp, Homo sapien
caaggtccaagagttgctgcagcat

SEQ ID NO: 4651458 - DNA, 25 bp, Homo sapien
ttcagggttgctacagccttcaatt

SEQ ID NO: 4651459 - DNA, 25 bp, Homo sapien
tccattcagggttgctacagccttc

SEQ ID NO: 4651460 - DNA, 25 bp, Homo sapien
cattcagggttgctacagccttcaa

SEQ ID NO: 4651461 - DNA, 25 bp, Homo sapien
agctccattcagggttgctacagcc

SEQ ID NO: 4651462 - DNA, 25 bp, Homo sapien
gtcacataacaagggagtctgtctg

SEQ ID NO: 4651463 - DNA, 25 bp, Homo sapien
ggtacaccattaataggcagtaata

SEQ ID NO: 4651464 - DNA, 25 bp, Homo sapien
tcttagaggcgctaggatttttgga

SEQ ID NO: 4651465 - DNA, 25 bp, Homo sapien
agctgcattagtcacataacaaggg

SEQ ID NO: 4651466 - DNA, 25 bp, Homo sapien
caaatactaacgcacacaataccaa

SEQ ID NO: 4651467 - DNA, 25 bp, Homo sapien
agaaagctgtaactcaatcactagg

SEQ ID NO: 4651468 - DNA, 25 bp, Homo sapien
tcaatcactaggttaaaaagtaaca

SEQ ID NO: 4651469 - DNA, 25 bp, Homo sapien
ctgaatttaactacattccctgaaa

SEQ ID NO: 4651470 - DNA, 25 bp, Homo sapien
gagcaagtacattcacagatagccc

SEQ ID NO: 4651471 - DNA, 25 bp, Homo sapien
taatcagggctctaatctgctatcc

SEQ ID NO: 4651472 - DNA, 25 bp, Homo sapien
tatccatcaggctacgccagtactg

SEQ ID NO: 4651473 - DNA, 25 bp, Homo sapien
tatggacactgctaaactattgcct

SEQ ID NO: 4651474 - DNA, 25 bp, Homo sapien
ccattaaaggatgtaggttattgct

SEQ ID NO: 4651475 - DNA, 25 bp, Homo sapien
tgaaactgagtctaatataatggcg

SEQ ID NO: 4651476 - DNA, 25 bp, Homo sapien
ttttccagcacagccattaaaggat

SEQ ID NO: 4651477 - DNA, 25 bp, Homo sapien
actgagtctaatataatggcgtggg

SEQ ID NO: 4651478 - DNA, 25 bp, Homo sapien
tagccatcctttaagaatgcttaag

SEQ ID NO: 4651479 - DNA, 25 bp, Homo sapien
gatttaatttactgcactggcccca

SEQ ID NO: 4651480 - DNA, 25 bp, Homo sapien
ctgatttaatttactgcactggccc

SEQ ID NO: 4651481 - DNA, 25 bp, Homo sapien
atttagccatcctttaagaatgctt

SEQ ID NO: 4651482 - DNA, 25 bp, Homo sapien
atagcattcagcctcttgacaatct

SEQ ID NO: 4651483 - DNA, 25 bp, Homo sapien
gcattcagcctcttgacaatctctg

SEQ ID NO: 4651484 - DNA, 25 bp, Homo sapien
ggacaggaaaggaatgacttgtgca

SEQ ID NO: 4651485 - DNA, 25 bp, Homo sapien
ggaatgacttgtgcacagatagcat

SEQ ID NO: 4651486 - DNA, 25 bp, Homo sapien
gaaaaatacaactgtaccctggaga

SEQ ID NO: 4651487 - DNA, 25 bp, Homo sapien
tgaggtccttttacactgtcacgaa

SEQ ID NO: 4651488 - DNA, 25 bp, Homo sapien
gtggctgagccaagatttagtcctg

SEQ ID NO: 4651489 - DNA, 25 bp, Homo sapien
tgttaaagcagccaaacattcagtg

SEQ ID NO: 4651490 - DNA, 25 bp, Homo sapien
acagcctgcaccacttgttgctggt

SEQ ID NO: 4651491 - DNA, 25 bp, Homo sapien
tgcttggcccgttccacagcctgca

SEQ ID NO: 4651492 - DNA, 25 bp, Homo sapien
tggtcacctgcttggcccgttccac

SEQ ID NO: 4651493 - DNA, 25 bp, Homo sapien
cccaatgatggcgttcagttctgcc

SEQ ID NO: 4651494 - DNA, 25 bp, Homo sapien
tccaaagtttctaaggcagccatca

SEQ ID NO: 4651495 - DNA, 25 bp, Homo sapien
gagttgaagtgactgcccaaatcca

SEQ ID NO: 4651496 - DNA, 25 bp, Homo sapien
accaggtcattttaacgtcagggca

SEQ ID NO: 4651497 - DNA, 25 bp, Homo sapien
tggcctaggttagcaacacaagctg

SEQ ID NO: 4651498 - DNA, 25 bp, Homo sapien
cataaaatagagctccaaatacccc

SEQ ID NO: 4651499 - DNA, 25 bp, Homo sapien
tggcgccctcaacatcagcagtgat

SEQ ID NO: 4651500 - DNA, 25 bp, Homo sapien
tcagattgattatcaggcgaccctt

SEQ ID NO: 4651501 - DNA, 25 bp, Homo sapien
aagctacaatcagactatggcgccc

SEQ ID NO: 4651502 - DNA, 25 bp, Homo sapien
agtgcttgacagttaaccactgtca

SEQ ID NO: 4651503 - DNA, 25 bp, Homo sapien
accactgtcaataaccctttagttg

SEQ ID NO: 4651504 - DNA, 25 bp, Homo sapien
gttgcctgtttggtgtgagactgtc

SEQ ID NO: 4651505 - DNA, 25 bp, Homo sapien
ctaagtgcttgacagttaaccactg

SEQ ID NO: 4651506 - DNA, 25 bp, Homo sapien
gatagggtcacttgcccacagttct

SEQ ID NO: 4651507 - DNA, 25 bp, Homo sapien
ggatagggtcacttgcccacagttc

SEQ ID NO: 4651508 - DNA, 25 bp, Homo sapien
cctggaatgctttagccttgatagc

SEQ ID NO: 4651509 - DNA, 25 bp, Homo sapien
tggatagggtcacttgcccacagtt

SEQ ID NO: 4651510 - DNA, 25 bp, Homo sapien
tgctgcccaattaggaccctttctc

SEQ ID NO: 4651511 - DNA, 25 bp, Homo sapien
ctgcccaattaggaccctttctcaa

SEQ ID NO: 4651512 - DNA, 25 bp, Homo sapien
gctgcccaattaggaccctttctca

SEQ ID NO: 4651513 - DNA, 25 bp, Homo sapien
ctgctgcccaattaggaccctttct

SEQ ID NO: 4651514 - DNA, 25 bp, Homo sapien
catctttatccacctttgacccaca

SEQ ID NO: 4651515 - DNA, 25 bp, Homo sapien
tccaaactttgacacccccattcta

SEQ ID NO: 4651516 - DNA, 25 bp, Homo sapien
ccatctttatccacctttgacccac

SEQ ID NO: 4651517 - DNA, 25 bp, Homo sapien
ctttaatgatccaggtgtgtcactt

SEQ ID NO: 4651518 - DNA, 25 bp, Homo sapien
aatgatccaggtgtgtcacttttat

SEQ ID NO: 4651519 - DNA, 25 bp, Homo sapien
tttaatgatccaggtgtgtcacttt

SEQ ID NO: 4651520 - DNA, 25 bp, Homo sapien
taatgatccaggtgtgtcactttta

SEQ ID NO: 4651521 - DNA, 25 bp, Homo sapien
tagcggccgactctgtgttgtgaca

SEQ ID NO: 4651522 - DNA, 25 bp, Homo sapien
aactctgctacaggaaccgcggtgg

SEQ ID NO: 4651523 - DNA, 25 bp, Homo sapien
tgtgatgcatgcaccagtaactgcg

SEQ ID NO: 4651524 - DNA, 25 bp, Homo sapien
gctggaatgggtgtgcttgacctca

SEQ ID NO: 4651525 - DNA, 25 bp, Homo sapien
aacacagatattgaatttgccccca

SEQ ID NO: 4651526 - DNA, 25 bp, Homo sapien
agatattgaatttgcccccatatcc

SEQ ID NO: 4651527 - DNA, 25 bp, Homo sapien
cacagatattgaatttgcccccata

SEQ ID NO: 4651528 - DNA, 25 bp, Homo sapien
aaacacagatattgaatttgccccc

SEQ ID NO: 4651529 - DNA, 25 bp, Homo sapien
accatgtccatgtgataaatgctgg

SEQ ID NO: 4651530 - DNA, 25 bp, Homo sapien
gagtcagaggtacggggagaccatg

SEQ ID NO: 4651531 - DNA, 25 bp, Homo sapien
tcagaggtacggggagaccatgtcc

SEQ ID NO: 4651532 - DNA, 25 bp, Homo sapien
gggagaccatgtccatgtgataaat

SEQ ID NO: 4651533 - DNA, 25 bp, Homo sapien
agaagcccggcactgctaccgatgg

SEQ ID NO: 4651534 - DNA, 25 bp, Homo sapien
ctcatctttaattggaagatgggac

SEQ ID NO: 4651535 - DNA, 25 bp, Homo sapien
aagatgggactgacctcctagagca

SEQ ID NO: 4651536 - DNA, 25 bp, Homo sapien
actgctaccgatgggtggaatggca

SEQ ID NO: 4651537 - DNA, 25 bp, Homo sapien
cttccagtggaaatcctttgtttag

SEQ ID NO: 4651538 - DNA, 25 bp, Homo sapien
ccagtggaaatcctttgtttagtca

SEQ ID NO: 4651539 - DNA, 25 bp, Homo sapien
tccagtggaaatcctttgtttagtc

SEQ ID NO: 4651540 - DNA, 25 bp, Homo sapien
tactaccagcagattccgaattttc

SEQ ID NO: 4651541 - DNA, 25 bp, Homo sapien
cattacatgcaacactaattactac

SEQ ID NO: 4651542 - DNA, 25 bp, Homo sapien
tctgcacattagaggcttttagagg

SEQ ID NO: 4651543 - DNA, 25 bp, Homo sapien
ggctgtataagattgcccacatcct

SEQ ID NO: 4651544 - DNA, 25 bp, Homo sapien
gaactggaacctccatcaagtggga

SEQ ID NO: 4651545 - DNA, 25 bp, Homo sapien
tacataagatggtgagaacactccc

SEQ ID NO: 4651546 - DNA, 25 bp, Homo sapien
tactgttgggcacatggagtcactg

SEQ ID NO: 4651547 - DNA, 25 bp, Homo sapien
gaactggagagtgctatgaggaacc

SEQ ID NO: 4651548 - DNA, 25 bp, Homo sapien
gagaaagaacacacggagacaatca

SEQ ID NO: 4651549 - DNA, 25 bp, Homo sapien
aatgtcacgactctcagagcagtag

SEQ ID NO: 4651550 - DNA, 25 bp, Homo sapien
cattcagattcacaggagaaagaac

SEQ ID NO: 4651551 - DNA, 25 bp, Homo sapien
gatcaagtgttaatctaaagggaag

SEQ ID NO: 4651552 - DNA, 25 bp, Homo sapien
catgacccgagttagttcccagtga

SEQ ID NO: 4651553 - DNA, 25 bp, Homo sapien
cctctgtaggaggaaacgctgttct

SEQ ID NO: 4651554 - DNA, 25 bp, Homo sapien
gtaactagatgggtcaataccacca

SEQ ID NO: 4651555 - DNA, 25 bp, Homo sapien
caataggcaggatacgcatttcgga

SEQ ID NO: 4651556 - DNA, 25 bp, Homo sapien
gaaaatcctgacctcttctcactgg

SEQ ID NO: 4651557 - DNA, 25 bp, Homo sapien
tggtcactgctctctaggattaaga

SEQ ID NO: 4651558 - DNA, 25 bp, Homo sapien
gaacttcagatctaggcctttacca

SEQ ID NO: 4651559 - DNA, 25 bp, Homo sapien
tcacatgaagtactggaacaagcac

SEQ ID NO: 4651560 - DNA, 25 bp, Homo sapien
ctccaatttcatccattatgagcag

SEQ ID NO: 4651561 - DNA, 25 bp, Homo sapien
caacactagcatggcaggtgaatgt

SEQ ID NO: 4651562 - DNA, 25 bp, Homo sapien
caatttcatccattatgagcagcaa

SEQ ID NO: 4651563 - DNA, 25 bp, Homo sapien
cagtagaagcacacaacactagcat

SEQ ID NO: 4651564 - DNA, 25 bp, Homo sapien
ggctctctgcaaaaacggtaaactg

SEQ ID NO: 4651565 - DNA, 25 bp, Homo sapien
gacaagcatctgttgggtatactcc

SEQ ID NO: 4651566 - DNA, 25 bp, Homo sapien
gacacgaaaataaaagaggctctct

SEQ ID NO: 4651567 - DNA, 25 bp, Homo sapien
cactcgttgagctcgtcagggtagt

SEQ ID NO: 4651568 - DNA, 25 bp, Homo sapien
gctgactctatacatccagaggtag

SEQ ID NO: 4651569 - DNA, 25 bp, Homo sapien
tctcacaaaaacaggtcatgcagga

SEQ ID NO: 4651570 - DNA, 25 bp, Homo sapien
tcacaaaaacaggtcatgcaggaag

SEQ ID NO: 4651571 - DNA, 25 bp, Homo sapien
ctctatacatccagaggtagaaaac

SEQ ID NO: 4651572 - DNA, 25 bp, Homo sapien
tgaaccgcctcaaatatggcctcat

SEQ ID NO: 4651573 - DNA, 25 bp, Homo sapien
gtctggcggttggtaagaatgaacc

SEQ ID NO: 4651574 - DNA, 25 bp, Homo sapien
caaaggtctggcggttggtaagaat

SEQ ID NO: 4651575 - DNA, 25 bp, Homo sapien
gttggtaagaatgaaccgcctcaaa

SEQ ID NO: 4651576 - DNA, 25 bp, Homo sapien
tcaagaattctcaagcacagctgac

SEQ ID NO: 4651577 - DNA, 25 bp, Homo sapien
cagatagcagattctgaactggtag

SEQ ID NO: 4651578 - DNA, 25 bp, Homo sapien
aagaggaggatacatctgttggata

SEQ ID NO: 4651579 - DNA, 25 bp, Homo sapien
caaagtgaaatggtcttgaaccgcc

SEQ ID NO: 4651580 - DNA, 25 bp, Homo sapien
aacacgcacgggactgtgtgatgac

SEQ ID NO: 4651581 - DNA, 25 bp, Homo sapien
ttgataaatgtgtagaatctcttac

SEQ ID NO: 4651582 - DNA, 25 bp, Homo sapien
tactcttccttctaaagttccatag

SEQ ID NO: 4651583 - DNA, 25 bp, Homo sapien
ccttctaaagttccatagtttgata

SEQ ID NO: 4651584 - DNA, 25 bp, Homo sapien
gtagaatctcttacaccacccactt

SEQ ID NO: 4651585 - DNA, 25 bp, Homo sapien
gcttctgctacaacaatgtatgtga

SEQ ID NO: 4651586 - DNA, 25 bp, Homo sapien
tgtgaagagctctttaccatatgaa

SEQ ID NO: 4651587 - DNA, 25 bp, Homo sapien
cttcgcttctgctacaacaatgtat

SEQ ID NO: 4651588 - DNA, 25 bp, Homo sapien
gctcttcatcaaaatctaacaaata

SEQ ID NO: 4651589 - DNA, 25 bp, Homo sapien
tttgcaataagatacaggttcttag

SEQ ID NO: 4651590 - DNA, 25 bp, Homo sapien
gagtgactcacttcacacaaatgtg

SEQ ID NO: 4651591 - DNA, 25 bp, Homo sapien
caagtttgtcaatataatgatgcca

SEQ ID NO: 4651592 - DNA, 25 bp, Homo sapien
gacattaggatataaatgagtgact

SEQ ID NO: 4651593 - DNA, 25 bp, Homo sapien
tattctttagaatggcgctgacaga

SEQ ID NO: 4651594 - DNA, 25 bp, Homo sapien
ggttaccatgtcagacaacacaggt

SEQ ID NO: 4651595 - DNA, 25 bp, Homo sapien
taactgattggtcttaagggccttc

SEQ ID NO: 4651596 - DNA, 25 bp, Homo sapien
taaggtcgctaatcaggaactctgg

SEQ ID NO: 4651597 - DNA, 25 bp, Homo sapien
agagtgttaactccacagattctca

SEQ ID NO: 4651598 - DNA, 25 bp, Homo sapien
gtatgcaaatatactctatacaatg

SEQ ID NO: 4651599 - DNA, 25 bp, Homo sapien
tattcttatgtattctgtatgcaaa

SEQ ID NO: 4651600 - DNA, 25 bp, Homo sapien
ctatacaatgtctgagggtaataca

SEQ ID NO: 4651601 - DNA, 25 bp, Homo sapien
ggaataaagctattggctccacccc

SEQ ID NO: 4651602 - DNA, 25 bp, Homo sapien
cattgaacacagttactttagctga

SEQ ID NO: 4651603 - DNA, 25 bp, Homo sapien
tcctggaataaagctattggctcca

SEQ ID NO: 4651604 - DNA, 25 bp, Homo sapien
ctgacaaactgagctgctgggacat

SEQ ID NO: 4651605 - DNA, 25 bp, Homo sapien
tctggaatcaaattggacttggcac

SEQ ID NO: 4651606 - DNA, 25 bp, Homo sapien
gaatcaaattggacttggcacagac

SEQ ID NO: 4651607 - DNA, 25 bp, Homo sapien
agtccaccattctgccacaggaatg

SEQ ID NO: 4651608 - DNA, 25 bp, Homo sapien
tggcacagactctcatcatgaatct

SEQ ID NO: 4651609 - DNA, 25 bp, Homo sapien
tgaccactgaaaccatgcatgcaat

SEQ ID NO: 4651610 - DNA, 25 bp, Homo sapien
tcccctgggctctgtgtattttcgt

SEQ ID NO: 4651611 - DNA, 25 bp, Homo sapien
catcatgagcagaagggaactgccc

SEQ ID NO: 4651612 - DNA, 25 bp, Homo sapien
caagccatgagacttgggtcaacac

SEQ ID NO: 4651613 - DNA, 25 bp, Homo sapien
cctagacctatcaaacgttcagcct

SEQ ID NO: 4651614 - DNA, 25 bp, Homo sapien
caaacgttcagccttaaacttagtg

SEQ ID NO: 4651615 - DNA, 25 bp, Homo sapien
tatgaatactctagccctagaccta

SEQ ID NO: 4651616 - DNA, 25 bp, Homo sapien
gttttatatgaatactctagcccta

SEQ ID NO: 4651617 - DNA, 25 bp, Homo sapien
tcaccactggaacgtctctgtctgg

SEQ ID NO: 4651618 - DNA, 25 bp, Homo sapien
caagtgtgaatgaccctaacccagg

SEQ ID NO: 4651619 - DNA, 25 bp, Homo sapien
tcttgggaccacacttaggctcagc

SEQ ID NO: 4651620 - DNA, 25 bp, Homo sapien
caagagacgtgggtgacaagacctg

SEQ ID NO: 4651621 - DNA, 25 bp, Homo sapien
tctggaaacctaggaatgccactgg

SEQ ID NO: 4651622 - DNA, 25 bp, Homo sapien
ggaaacctaggaatgccactggggc

SEQ ID NO: 4651623 - DNA, 25 bp, Homo sapien
ctggaaacctaggaatgccactggg

SEQ ID NO: 4651624 - DNA, 25 bp, Homo sapien
aaacctaggaatgccactggggcca

SEQ ID NO: 4651625 - DNA, 25 bp, Homo sapien
tcctatagttttcatgaacccacac

SEQ ID NO: 4651626 - DNA, 25 bp, Homo sapien
cacctgcagaaatgcgtattattcc

SEQ ID NO: 4651627 - DNA, 25 bp, Homo sapien
gcgccatatgttagggcctggaaga

SEQ ID NO: 4651628 - DNA, 25 bp, Homo sapien
aaagtttgctggctaatgggaagcc

SEQ ID NO: 4651629 - DNA, 25 bp, Homo sapien
ccaaagatggcagtcatgtgacata

SEQ ID NO: 4651630 - DNA, 25 bp, Homo sapien
tgcttctcagcacctcggaaactgg

SEQ ID NO: 4651631 - DNA, 25 bp, Homo sapien
tagtctgcggagtttctgtgcttct

SEQ ID NO: 4651632 - DNA, 25 bp, Homo sapien
ctctctgaggagtagtctgcggagt

SEQ ID NO: 4651633 - DNA, 25 bp, Homo sapien
tcagcacctcggaaactggctgatg

SEQ ID NO: 4651634 - DNA, 25 bp, Homo sapien
gtcaaccaccaagttgtcatcactt

SEQ ID NO: 4651635 - DNA, 25 bp, Homo sapien
ctcattggaaacgtcaaccaccaag

SEQ ID NO: 4651636 - DNA, 25 bp, Homo sapien
aacgtcaaccaccaagttgtcatca

SEQ ID NO: 4651637 - DNA, 25 bp, Homo sapien
tggaaacgtcaaccaccaagttgtc

SEQ ID NO: 4651638 - DNA, 25 bp, Homo sapien
tgcaatagaggctggactaatcggg

SEQ ID NO: 4651639 - DNA, 25 bp, Homo sapien
gggagtactgctggaagatgcaata

SEQ ID NO: 4651640 - DNA, 25 bp, Homo sapien
ctttcttgagcaggcgtgtcttgtc

SEQ ID NO: 4651641 - DNA, 25 bp, Homo sapien
gctaagttctttggatttggaggag

SEQ ID NO: 4651642 - DNA, 25 bp, Homo sapien
tcagagagatggtaaggagctgctt

SEQ ID NO: 4651643 - DNA, 25 bp, Homo sapien
cagagagatggtaaggagctgctta

SEQ ID NO: 4651644 - DNA, 25 bp, Homo sapien
agagagatggtaaggagctgcttac

SEQ ID NO: 4651645 - DNA, 25 bp, Homo sapien
tcatcaccaacaagttagtaaactt

SEQ ID NO: 4651646 - DNA, 25 bp, Homo sapien
caacaagttagtaaacttattctgc

SEQ ID NO: 4651647 - DNA, 25 bp, Homo sapien
taaacactcatcaccaacaagttag

SEQ ID NO: 4651648 - DNA, 25 bp, Homo sapien
gttagtaaacttattctgctctaca

SEQ ID NO: 4651649 - DNA, 25 bp, Homo sapien
caggcgacaaaaccatctctgtaac

SEQ ID NO: 4651650 - DNA, 25 bp, Homo sapien
tgtgcattgttcatcttcgctaaga

SEQ ID NO: 4651651 - DNA, 25 bp, Homo sapien
tctctgtaaccccaatgtgcattgt

SEQ ID NO: 4651652 - DNA, 25 bp, Homo sapien
tcttcgctaagacgtgtttcactca

SEQ ID NO: 4651653 - DNA, 25 bp, Homo sapien
tatcctgatgggtgagcagttcatt

SEQ ID NO: 4651654 - DNA, 25 bp, Homo sapien
gaatagggtgcagggagattatcct

SEQ ID NO: 4651655 - DNA, 25 bp, Homo sapien
aaacaacaccaacaatctagcccgt

SEQ ID NO: 4651656 - DNA, 25 bp, Homo sapien
tattgccgtcatatgtagcttggta

SEQ ID NO: 4651657 - DNA, 25 bp, Homo sapien
gcagattgttcatgtcacaagaggc

SEQ ID NO: 4651658 - DNA, 25 bp, Homo sapien
aaagagttccttgagacagcagacc

SEQ ID NO: 4651659 - DNA, 25 bp, Homo sapien
cagcagacctaatatttgggaagac

SEQ ID NO: 4651660 - DNA, 25 bp, Homo sapien
ggatgtcctaactgtggccacttgc

SEQ ID NO: 4651661 - DNA, 25 bp, Homo sapien
ggtgggcgcatcagttcgtggagta

SEQ ID NO: 4651662 - DNA, 25 bp, Homo sapien
tcaatccgggagtagagttactgcc

SEQ ID NO: 4651663 - DNA, 25 bp, Homo sapien
ggttttccaggtacaggcctcaatc

SEQ ID NO: 4651664 - DNA, 25 bp, Homo sapien
tattggactttgagacgggagtagt

SEQ ID NO: 4651665 - DNA, 25 bp, Homo sapien
cactggtgatctcccataggcagca

SEQ ID NO: 4651666 - DNA, 25 bp, Homo sapien
ggtcagctctccgttcattccagca

SEQ ID NO: 4651667 - DNA, 25 bp, Homo sapien
ggatatggacaaggtactgccattg

SEQ ID NO: 4651668 - DNA, 25 bp, Homo sapien
gggcacaatcccaaatggagttgga

SEQ ID NO: 4651669 - DNA, 25 bp, Homo sapien
tgctggcacacgcatgtgatggtgt

SEQ ID NO: 4651670 - DNA, 25 bp, Homo sapien
tgtgatggtgtggatcaaatcccac

SEQ ID NO: 4651671 - DNA, 25 bp, Homo sapien
gaatgcctgtcaggtttggaggtat

SEQ ID NO: 4651672 - DNA, 25 bp, Homo sapien
tcaggtttggaggtattgctggcac

SEQ ID NO: 4651673 - DNA, 25 bp, Homo sapien
aactgatgaagggaagtcagcccaa

SEQ ID NO: 4651674 - DNA, 25 bp, Homo sapien
cttacaccccttgcccctcgaagca

SEQ ID NO: 4651675 - DNA, 25 bp, Homo sapien
tccacagtggtttaactggtccaaa

SEQ ID NO: 4651676 - DNA, 25 bp, Homo sapien
gaagggaagtcagcccaagactcag

SEQ ID NO: 4651677 - DNA, 25 bp, Homo sapien
gaaatagaacgtggagcactctggc

SEQ ID NO: 4651678 - DNA, 25 bp, Homo sapien
gcctctgggtagtggaagactctca

SEQ ID NO: 4651679 - DNA, 25 bp, Homo sapien
tagtccaatggcacgagcctgaaag

SEQ ID NO: 4651680 - DNA, 25 bp, Homo sapien
tcaaccaggattatggcagcctctg

SEQ ID NO: 4651681 - DNA, 25 bp, Homo sapien
tgctcccagaaaaaatgacgcatgc

SEQ ID NO: 4651682 - DNA, 25 bp, Homo sapien
gaatgctcccagaaaaaatgacgca

SEQ ID NO: 4651683 - DNA, 25 bp, Homo sapien
ctcccagaaaaaatgacgcatgcat

SEQ ID NO: 4651684 - DNA, 25 bp, Homo sapien
ctgaatgctcccagaaaaaatgacg

SEQ ID NO: 4651685 - DNA, 25 bp, Homo sapien
ctaaaatgcaacttaagtaagagcg

SEQ ID NO: 4651686 - DNA, 25 bp, Homo sapien
gcaacttaagtaagagcgtctcccc

SEQ ID NO: 4651687 - DNA, 25 bp, Homo sapien
aatgcaacttaagtaagagcgtctc

SEQ ID NO: 4651688 - DNA, 25 bp, Homo sapien
aaaatgcaacttaagtaagagcgtc

SEQ ID NO: 4651689 - DNA, 25 bp, Homo sapien
ggaaagccctcaggtggtaaaagca

SEQ ID NO: 4651690 - DNA, 25 bp, Homo sapien
tgtgagtatctcttggcagttccat

SEQ ID NO: 4651691 - DNA, 25 bp, Homo sapien
ctgtgagtatctcttggcagttcca

SEQ ID NO: 4651692 - DNA, 25 bp, Homo sapien
aagtgcagtagccacctttcaggga

SEQ ID NO: 4651693 - DNA, 25 bp, Homo sapien
tctcctttggatgaatcagaggcct

SEQ ID NO: 4651694 - DNA, 25 bp, Homo sapien
tagatcaattcattcccggcaaggg

SEQ ID NO: 4651695 - DNA, 25 bp, Homo sapien
taaatgagataaccaccgtcaagtg

SEQ ID NO: 4651696 - DNA, 25 bp, Homo sapien
catctgcgctaacatggaaggagta

SEQ ID NO: 4651697 - DNA, 25 bp, Homo sapien
tgcgctaacatggaaggagtatgct

SEQ ID NO: 4651698 - DNA, 25 bp, Homo sapien
catctgaccatctgcgctaacatgg

SEQ ID NO: 4651699 - DNA, 25 bp, Homo sapien
aggctgcatctgaccatctgcgcta

SEQ ID NO: 4651700 - DNA, 25 bp, Homo sapien
caggaacggatgtagttatccctgt

SEQ ID NO: 4651701 - DNA, 25 bp, Homo sapien
gcttcccctccaacaattagggtgc

SEQ ID NO: 4651702 - DNA, 25 bp, Homo sapien
caacaattagggtgcgaccatcagg

SEQ ID NO: 4651703 - DNA, 25 bp, Homo sapien
catcagggagcaatctgcaggaacg

SEQ ID NO: 4651704 - DNA, 25 bp, Homo sapien
tactggcccaggaatcactcatggc

SEQ ID NO: 4651705 - DNA, 25 bp, Homo sapien
catggcaaaacgtaccaaggtcacc

SEQ ID NO: 4651706 - DNA, 25 bp, Homo sapien
cctgccagtgagcagcaatgtgtct

SEQ ID NO: 4651707 - DNA, 25 bp, Homo sapien
tcaagtaaggcacctggaaagacac

SEQ ID NO: 4651708 - DNA, 25 bp, Homo sapien
ttagaaatgtcaatacagctggctc

SEQ ID NO: 4651709 - DNA, 25 bp, Homo sapien
tagaaatgtcaatacagctggctcc

SEQ ID NO: 4651710 - DNA, 25 bp, Homo sapien
tgggcaaacttgagcgacagcacac

SEQ ID NO: 4651711 - DNA, 25 bp, Homo sapien
caagccactctccagttgggcagta

SEQ ID NO: 4651712 - DNA, 25 bp, Homo sapien
cagcacacagctctcatgaagatgt

SEQ ID NO: 4651713 - DNA, 25 bp, Homo sapien
tggcttggtgacatgcaaaacttcc

SEQ ID NO: 4651714 - DNA, 25 bp, Homo sapien
cagaaggttgtcctttccagtgctt

SEQ ID NO: 4651715 - DNA, 25 bp, Homo sapien
tactggccccataaggtgttctcca

SEQ ID NO: 4651716 - DNA, 25 bp, Homo sapien
tgttctccaggcattcagaaggttg

SEQ ID NO: 4651717 - DNA, 25 bp, Homo sapien
ggaatatactggccccataaggtgt

SEQ ID NO: 4651718 - DNA, 25 bp, Homo sapien
gtcacagctaagcaccgatgaggat

SEQ ID NO: 4651719 - DNA, 25 bp, Homo sapien
gagccagtgacaatgtatttgtcgt

SEQ ID NO: 4651720 - DNA, 25 bp, Homo sapien
aatgtatttgtcgtccacggagatg

SEQ ID NO: 4651721 - DNA, 25 bp, Homo sapien
taagcaccgatgaggattctttgga

SEQ ID NO: 4651722 - DNA, 25 bp, Homo sapien
taatgactattcacaattcaatagc

SEQ ID NO: 4651723 - DNA, 25 bp, Homo sapien
tgaaatccttggttttagatgcggg

SEQ ID NO: 4651724 - DNA, 25 bp, Homo sapien
tcaatagcaagtgggaagtgaggtt

SEQ ID NO: 4651725 - DNA, 25 bp, Homo sapien
cagagcaaagtgctaccaggaggag

SEQ ID NO: 4651726 - DNA, 25 bp, Homo sapien
tgttaagtatgcttattccatgttc

SEQ ID NO: 4651727 - DNA, 25 bp, Homo sapien
gtcagtcattgttagaaagccttct

SEQ ID NO: 4651728 - DNA, 25 bp, Homo sapien
ttagtcagtcattgttagaaagcct

SEQ ID NO: 4651729 - DNA, 25 bp, Homo sapien
tccatgttcttccaagtagacagct

SEQ ID NO: 4651730 - DNA, 25 bp, Homo sapien
tccagaagggagtaagttctctctt

SEQ ID NO: 4651731 - DNA, 25 bp, Homo sapien
gctcccaaagagcatgccacaaaat

SEQ ID NO: 4651732 - DNA, 25 bp, Homo sapien
ggttaacgttgtctaaatagatcca

SEQ ID NO: 4651733 - DNA, 25 bp, Homo sapien
gatccaaatgagtatgagttggcct

SEQ ID NO: 4651734 - DNA, 25 bp, Homo sapien
aaagaaagcaagtcctcatcccagg

SEQ ID NO: 4651735 - DNA, 25 bp, Homo sapien
tcagggacatccaactaagacatgg

SEQ ID NO: 4651736 - DNA, 25 bp, Homo sapien
ttaacttgcacagcagtgggagtcc

SEQ ID NO: 4651737 - DNA, 25 bp, Homo sapien
cacaatgtttctggcacaatggcac

SEQ ID NO: 4651738 - DNA, 25 bp, Homo sapien
tgtcatcaagacaaagaattagaaa

SEQ ID NO: 4651739 - DNA, 25 bp, Homo sapien
actaatgtcatcaagacaaagaatt

SEQ ID NO: 4651740 - DNA, 25 bp, Homo sapien
ttaatatataggagtggcacagcca

SEQ ID NO: 4651741 - DNA, 25 bp, Homo sapien
ttttaatatataggagtggcacagc

SEQ ID NO: 4651742 - DNA, 25 bp, Homo sapien
tatgccaactgaatttagctaaatc

SEQ ID NO: 4651743 - DNA, 25 bp, Homo sapien
tagattcagtgacgcagctaccaag

SEQ ID NO: 4651744 - DNA, 25 bp, Homo sapien
gctaccaagttcctatcttctgcca

SEQ ID NO: 4651745 - DNA, 25 bp, Homo sapien
cctcaagaaagtgacctatcagtag

SEQ ID NO: 4651746 - DNA, 25 bp, Homo sapien
aggtgggcttttcctcataggagga

SEQ ID NO: 4651747 - DNA, 25 bp, Homo sapien
tcagtgtaagctttcggatttctta

SEQ ID NO: 4651748 - DNA, 25 bp, Homo sapien
aagctttcggatttcttatatggcc

SEQ ID NO: 4651749 - DNA, 25 bp, Homo sapien
tgtaagctttcggatttcttatatg

SEQ ID NO: 4651750 - DNA, 25 bp, Homo sapien
cagtgtaagctttcggatttcttat

SEQ ID NO: 4651751 - DNA, 25 bp, Homo sapien
ctggtgtgtggacttggatgcctgc

SEQ ID NO: 4651752 - DNA, 25 bp, Homo sapien
tggtgtgtggacttggatgcctgcc

SEQ ID NO: 4651753 - DNA, 25 bp, Homo sapien
ggtaaaagatttgccagtccctgcc

SEQ ID NO: 4651754 - DNA, 25 bp, Homo sapien
tgtatggtctgtatctgtgcgtgcc

SEQ ID NO: 4651755 - DNA, 25 bp, Homo sapien
ggagataataaacctaatccagggc

SEQ ID NO: 4651756 - DNA, 25 bp, Homo sapien
tctgacggcggttcacaatggcaca

SEQ ID NO: 4651757 - DNA, 25 bp, Homo sapien
tttcttaaaagctgatatccaatgt

SEQ ID NO: 4651758 - DNA, 25 bp, Homo sapien
gtatgatagtcagcactgagttagc

SEQ ID NO: 4651759 - DNA, 25 bp, Homo sapien
ttcttaaaagctgatatccaatgtt

SEQ ID NO: 4651760 - DNA, 25 bp, Homo sapien
accaatctgtatgatagtcagcact

SEQ ID NO: 4651761 - DNA, 25 bp, Homo sapien
gctgcactttggacctcatctgaag

SEQ ID NO: 4651762 - DNA, 25 bp, Homo sapien
gctgtcttccaagtgggatgattat

SEQ ID NO: 4651763 - DNA, 25 bp, Homo sapien
tattcagtcatcccattccatggct

SEQ ID NO: 4651764 - DNA, 25 bp, Homo sapien
gattatgttctgctgcactttggac

SEQ ID NO: 4651765 - DNA, 25 bp, Homo sapien
cagattgcattgaagtgatgacagc

SEQ ID NO: 4651766 - DNA, 25 bp, Homo sapien
ttcattatattccagcatgtcggct

SEQ ID NO: 4651767 - DNA, 25 bp, Homo sapien
tgatgacagctacaagacagccaac

SEQ ID NO: 4651768 - DNA, 25 bp, Homo sapien
gacagccaacgaggaatatggccat

SEQ ID NO: 4651769 - DNA, 25 bp, Homo sapien
taggcgagccaagttttcatgtact

SEQ ID NO: 4651770 - DNA, 25 bp, Homo sapien
gtaggcgagccaagttttcatgtac

SEQ ID NO: 4651771 - DNA, 25 bp, Homo sapien
tgtaggcgagccaagttttcatgta

SEQ ID NO: 4651772 - DNA, 25 bp, Homo sapien
actgtaggcgagccaagttttcatg

SEQ ID NO: 4651773 - DNA, 25 bp, Homo sapien
ggcagggtccattgacacaaagatt

SEQ ID NO: 4651774 - DNA, 25 bp, Homo sapien
attgtcaagggcctccacagtcaag

SEQ ID NO: 4651775 - DNA, 25 bp, Homo sapien
ttgacacaaagattgtcaagggcct

SEQ ID NO: 4651776 - DNA, 25 bp, Homo sapien
agcatcaaagactgccagagtcagg

SEQ ID NO: 4651777 - DNA, 25 bp, Homo sapien
ggtgatcaatggtcttgtggaacat

SEQ ID NO: 4651778 - DNA, 25 bp, Homo sapien
tggtactgttcatgtcatggccatg

SEQ ID NO: 4651779 - DNA, 25 bp, Homo sapien
aatatggtactgttcatgtcatggc

SEQ ID NO: 4651780 - DNA, 25 bp, Homo sapien
ggccatggtgatcaatggtcttgtg

SEQ ID NO: 4651781 - DNA, 25 bp, Homo sapien
ctttagtggcaaaatgggggatgga

SEQ ID NO: 4651782 - DNA, 25 bp, Homo sapien
gcaaaatgggggatggaaggattgt

SEQ ID NO: 4651783 - DNA, 25 bp, Homo sapien
gatggaaggattgtagaattgagct

SEQ ID NO: 4651784 - DNA, 25 bp, Homo sapien
gggatggaaggattgtagaattgag

SEQ ID NO: 4651785 - DNA, 25 bp, Homo sapien
attttctgacctgaagaaggaccaa

SEQ ID NO: 4651786 - DNA, 25 bp, Homo sapien
gccagaccagcgcatttgcctaaag

SEQ ID NO: 4651787 - DNA, 25 bp, Homo sapien
gggatgtctggctggcaagaactct

SEQ ID NO: 4651788 - DNA, 25 bp, Homo sapien
caacatggtcccgttagctgggctt

SEQ ID NO: 4651789 - DNA, 25 bp, Homo sapien
agttcatgaccaatttgacacttca

SEQ ID NO: 4651790 - DNA, 25 bp, Homo sapien
aagttcatgaccaatttgacacttc

SEQ ID NO: 4651791 - DNA, 25 bp, Homo sapien
tgataatcggcattaggcaaaacta

SEQ ID NO: 4651792 - DNA, 25 bp, Homo sapien
ctactcacagtctgaaattcaatct

SEQ ID NO: 4651793 - DNA, 25 bp, Homo sapien
tttactactcacagtctgaaattca

SEQ ID NO: 4651794 - DNA, 25 bp, Homo sapien
tctcagttggaattaggtgataatc

SEQ ID NO: 4651795 - DNA, 25 bp, Homo sapien
ctagggccaggacacgatcctcaga

SEQ ID NO: 4651796 - DNA, 25 bp, Homo sapien
gagaatttgggaacacctggccatc

SEQ ID NO: 4651797 - DNA, 25 bp, Homo sapien
tcagagtcttgtcgggtattgggca

SEQ ID NO: 4651798 - DNA, 25 bp, Homo sapien
ccttggctgatcatatgcttgacca

SEQ ID NO: 4651799 - DNA, 25 bp, Homo sapien
acttgcagtgactgtggatttcttc

SEQ ID NO: 4651800 - DNA, 25 bp, Homo sapien
ttctggctgacataacctccccaaa

SEQ ID NO: 4651801 - DNA, 25 bp, Homo sapien
cccaaacttgcagtgactgtggatt

SEQ ID NO: 4651802 - DNA, 25 bp, Homo sapien
tctgctcccaaacttgcagtgactg

SEQ ID NO: 4651803 - DNA, 25 bp, Homo sapien
tcaattggaacaattttccttcatg

SEQ ID NO: 4651804 - DNA, 25 bp, Homo sapien
aattggaacaattttccttcatgaa

SEQ ID NO: 4651805 - DNA, 25 bp, Homo sapien
catgaagttcaacatactgccatat

SEQ ID NO: 4651806 - DNA, 25 bp, Homo sapien
gttcaacatactgccatatgctcct

SEQ ID NO: 4651807 - DNA, 25 bp, Homo sapien
aagaatcagaatatgagaattcaaa

SEQ ID NO: 4651808 - DNA, 25 bp, Homo sapien
gaatcagaatatgagaattcaaatt

SEQ ID NO: 4651809 - DNA, 25 bp, Homo sapien
agaaagaatcagaatatgagaattc

SEQ ID NO: 4651810 - DNA, 25 bp, Homo sapien
gaaagaatcagaatatgagaattca

SEQ ID NO: 4651811 - DNA, 25 bp, Homo sapien
cgaggcccccggacttactctcagc

SEQ ID NO: 4651812 - DNA, 25 bp, Homo sapien
taatggagcgcagtttcgaggcccc

SEQ ID NO: 4651813 - DNA, 25 bp, Homo sapien
ctattgtgtaatggagcgcagtttc

SEQ ID NO: 4651814 - DNA, 25 bp, Homo sapien
ttcgaggcccccggacttactctca

SEQ ID NO: 4651815 - DNA, 25 bp, Homo sapien
taagcacatgcactcctaggatgag

SEQ ID NO: 4651816 - DNA, 25 bp, Homo sapien
tctccacgataaggaggcacacagg

SEQ ID NO: 4651817 - DNA, 25 bp, Homo sapien
tctaagaaaatgtagggcagggacc

SEQ ID NO: 4651818 - DNA, 25 bp, Homo sapien
tctctgggtactttgcacggtggca

SEQ ID NO: 4651819 - DNA, 25 bp, Homo sapien
gaacatcacagccttaggtgggaaa

SEQ ID NO: 4651820 - DNA, 25 bp, Homo sapien
cattaggtggaacccaaaatatggg

SEQ ID NO: 4651821 - DNA, 25 bp, Homo sapien
gctgtgcactgccatcaatttggga

SEQ ID NO: 4651822 - DNA, 25 bp, Homo sapien
ggtagccggctcagccaagtcaagg

SEQ ID NO: 4651823 - DNA, 25 bp, Homo sapien
gaagtgtaggtggccaggcacaggg

SEQ ID NO: 4651824 - DNA, 25 bp, Homo sapien
ggaagtgtaggtggccaggcacagg

SEQ ID NO: 4651825 - DNA, 25 bp, Homo sapien
gcttttcaataagggtggtatccac

SEQ ID NO: 4651826 - DNA, 25 bp, Homo sapien
cttcttccgtgagacagaggcagac

SEQ ID NO: 4651827 - DNA, 25 bp, Homo sapien
gcactgctgtcaatggtaggaatgg

SEQ ID NO: 4651828 - DNA, 25 bp, Homo sapien
cccaatgtgagtggagccgtggctc

SEQ ID NO: 4651829 - DNA, 25 bp, Homo sapien
tgagcagtggctccctgatttacag

SEQ ID NO: 4651830 - DNA, 25 bp, Homo sapien
aaaaccattgaggagagaggctttc

SEQ ID NO: 4651831 - DNA, 25 bp, Homo sapien
gaaaaccattgaggagagaggcttt

SEQ ID NO: 4651832 - DNA, 25 bp, Homo sapien
aaaccattgaggagagaggctttcc

SEQ ID NO: 4651833 - DNA, 25 bp, Homo sapien
tcaatggtaggaaggaaagatgatg

SEQ ID NO: 4651834 - DNA, 25 bp, Homo sapien
taggaaggaaagatgatgttgcaga

SEQ ID NO: 4651835 - DNA, 25 bp, Homo sapien
caatggtaggaaggaaagatgatgt

SEQ ID NO: 4651836 - DNA, 25 bp, Homo sapien
aggaaagatgatgttgcagaggtac

SEQ ID NO: 4651837 - DNA, 25 bp, Homo sapien
ggtggagatgtgaactgaggcagtg

SEQ ID NO: 4651838 - DNA, 25 bp, Homo sapien
ccccagataagacaggatgcacttc

SEQ ID NO: 4651839 - DNA, 25 bp, Homo sapien
gagatgtgaactgaggcagtgtttc

SEQ ID NO: 4651840 - DNA, 25 bp, Homo sapien
agcagagagccccagataagacagg

SEQ ID NO: 4651841 - DNA, 25 bp, Homo sapien
gtggctcccggatgtataacgtgat

SEQ ID NO: 4651842 - DNA, 25 bp, Homo sapien
tagaagttacagttggtcctacgac

SEQ ID NO: 4651843 - DNA, 25 bp, Homo sapien
gatcggtcccatgactgactgtgca

SEQ ID NO: 4651844 - DNA, 25 bp, Homo sapien
cacagtgctgctgccaatggtagga

SEQ ID NO: 4651845 - DNA, 25 bp, Homo sapien
aagaacaccttaggcctataactgg

SEQ ID NO: 4651846 - DNA, 25 bp, Homo sapien
agaataaaagaacggtctgacttat

SEQ ID NO: 4651847 - DNA, 25 bp, Homo sapien
aacaccttaggcctataactggtgc

SEQ ID NO: 4651848 - DNA, 25 bp, Homo sapien
gctgcaagaacaccttaggcctata

SEQ ID NO: 4651849 - DNA, 25 bp, Homo sapien
aaaatatggtaatgtcacactggtg

SEQ ID NO: 4651850 - DNA, 25 bp, Homo sapien
gtcacactggtgagatctgctgcca

SEQ ID NO: 4651851 - DNA, 25 bp, Homo sapien
tcacactggtgagatctgctgccat

SEQ ID NO: 4651852 - DNA, 25 bp, Homo sapien
tgtcaaccgatgcagttactgtctc

SEQ ID NO: 4651853 - DNA, 25 bp, Homo sapien
ctagagtagaattgtcaaccgatgc

SEQ ID NO: 4651854 - DNA, 25 bp, Homo sapien
gagtagaattgtcaaccgatgcagt

SEQ ID NO: 4651855 - DNA, 25 bp, Homo sapien
gaattgtcaaccgatgcagttactg

SEQ ID NO: 4651856 - DNA, 25 bp, Homo sapien
caggtggaccgaccatggactgatg

SEQ ID NO: 4651857 - DNA, 25 bp, Homo sapien
tgctgtgacggcacatgaaggcctc

SEQ ID NO: 4651858 - DNA, 25 bp, Homo sapien
tgaaggcctctcattatagctatgg

SEQ ID NO: 4651859 - DNA, 25 bp, Homo sapien
aacacctgggttctggagtggtgca

SEQ ID NO: 4651860 - DNA, 25 bp, Homo sapien
cacagtgagactcagggctgattct

SEQ ID NO: 4651861 - DNA, 25 bp, Homo sapien
agcgcaggccatagtggcctctgca

SEQ ID NO: 4651862 - DNA, 25 bp, Homo sapien
catggggcaccctgagcggcaggtg

SEQ ID NO: 4651863 - DNA, 25 bp, Homo sapien
agcagcgcaggccatagtggcctct

SEQ ID NO: 4651864 - DNA, 25 bp, Homo sapien
tcccctgacatagatgtgttccatc

SEQ ID NO: 4651865 - DNA, 25 bp, Homo sapien
ctgcaagcaggcatgtggaagctgc

SEQ ID NO: 4651866 - DNA, 25 bp, Homo sapien
ccacctgccagaagccttctctggg

SEQ ID NO: 4651867 - DNA, 25 bp, Homo sapien
agctcatttctagccacctgccaga

SEQ ID NO: 4651868 - DNA, 25 bp, Homo sapien
ggccctcaatctcttaatggtctgg

SEQ ID NO: 4651869 - DNA, 25 bp, Homo sapien
ggatgccgcagcttccctgctagag

SEQ ID NO: 4651870 - DNA, 25 bp, Homo sapien
tagagtccttgctaaccttggcctt

SEQ ID NO: 4651871 - DNA, 25 bp, Homo sapien
caccacagggtgtctttgtgccact

SEQ ID NO: 4651872 - DNA, 25 bp, Homo sapien
aagtagccttgtgcaaactccatca

SEQ ID NO: 4651873 - DNA, 25 bp, Homo sapien
tgaaagtagccttgtgcaaactcca

SEQ ID NO: 4651874 - DNA, 25 bp, Homo sapien
gaaagtagccttgtgcaaactccat

SEQ ID NO: 4651875 - DNA, 25 bp, Homo sapien
aaagtagccttgtgcaaactccatc

SEQ ID NO: 4651876 - DNA, 25 bp, Homo sapien
gagtgctcctggctgtagtcagtac

SEQ ID NO: 4651877 - DNA, 25 bp, Homo sapien
tgtcctgggagtgctcctggctgta

SEQ ID NO: 4651878 - DNA, 25 bp, Homo sapien
tcctgggagtgctcctggctgtagt

SEQ ID NO: 4651879 - DNA, 25 bp, Homo sapien
tgggagtgctcctggctgtagtcag

SEQ ID NO: 4651880 - DNA, 25 bp, Homo sapien
tggggacggattatgaacaagctgt

SEQ ID NO: 4651881 - DNA, 25 bp, Homo sapien
ctttgatggggacggattatgaaca

SEQ ID NO: 4651882 - DNA, 25 bp, Homo sapien
ttgatggggacggattatgaacaag

SEQ ID NO: 4651883 - DNA, 25 bp, Homo sapien
gatggggacggattatgaacaagct

SEQ ID NO: 4651884 - DNA, 25 bp, Homo sapien
agcagaagaggggattttgaagtgt

SEQ ID NO: 4651885 - DNA, 25 bp, Homo sapien
cagaagaggggattttgaagtgtaa

SEQ ID NO: 4651886 - DNA, 25 bp, Homo sapien
ctggcagtgaaaggagagcagaaga

SEQ ID NO: 4651887 - DNA, 25 bp, Homo sapien
ggagagcagaagaggggattttgaa

SEQ ID NO: 4651888 - DNA, 25 bp, Homo sapien
tgccaaagcaagagatgtcagcaat

SEQ ID NO: 4651889 - DNA, 25 bp, Homo sapien
gatctaagagatctgggtctttaaa

SEQ ID NO: 4651890 - DNA, 25 bp, Homo sapien
gagttgcaggtctttgccaaacaga

SEQ ID NO: 4651891 - DNA, 25 bp, Homo sapien
caagagatgtcagcaatgagttgca

SEQ ID NO: 4651892 - DNA, 25 bp, Homo sapien
tgtcttgcaaaggattgccaacctt

SEQ ID NO: 4651893 - DNA, 25 bp, Homo sapien
tgaaccatgagaggatgcaagttac

SEQ ID NO: 4651894 - DNA, 25 bp, Homo sapien
agccccttttgcagatggaaaccct

SEQ ID NO: 4651895 - DNA, 25 bp, Homo sapien
tatatagacagaaacccgaggaaca

SEQ ID NO: 4651896 - DNA, 25 bp, Homo sapien
tggattagagcccaaacatacggcc

SEQ ID NO: 4651897 - DNA, 25 bp, Homo sapien
gcctgctgaagcatagtagacctgc

SEQ ID NO: 4651898 - DNA, 25 bp, Homo sapien
tgacacatatcaggaggcaactgct

SEQ ID NO: 4651899 - DNA, 25 bp, Homo sapien
ggtacgaatgcatacactgccctgg

SEQ ID NO: 4651900 - DNA, 25 bp, Homo sapien
ccaagctggtcccataatcagtgtc

SEQ ID NO: 4651901 - DNA, 25 bp, Homo sapien
ccataatcagtgtcagcaactgaca

SEQ ID NO: 4651902 - DNA, 25 bp, Homo sapien
tggtcccataatcagtgtcagcaac

SEQ ID NO: 4651903 - DNA, 25 bp, Homo sapien
cagtgtcagcaactgacacaaagac

SEQ ID NO: 4651904 - DNA, 25 bp, Homo sapien
ggcatccacatggtacacgtcttac

SEQ ID NO: 4651905 - DNA, 25 bp, Homo sapien
tgaggcatccacatggtacacgtct

SEQ ID NO: 4651906 - DNA, 25 bp, Homo sapien
cagcatgaggcatccacatggtaca

SEQ ID NO: 4651907 - DNA, 25 bp, Homo sapien
gcatgaggcatccacatggtacacg

SEQ ID NO: 4651908 - DNA, 25 bp, Homo sapien
cccatatatgtgatagaattgtcca

SEQ ID NO: 4651909 - DNA, 25 bp, Homo sapien
actctaggtgcttggctgtaatatt

SEQ ID NO: 4651910 - DNA, 25 bp, Homo sapien
atggagataggccaactctaggtgc

SEQ ID NO: 4651911 - DNA, 25 bp, Homo sapien
taggccaactctaggtgcttggctg

SEQ ID NO: 4651912 - DNA, 25 bp, Homo sapien
gatacagtcaccataccaggtgaag

SEQ ID NO: 4651913 - DNA, 25 bp, Homo sapien
taatccacagtacaaccctctttgg

SEQ ID NO: 4651914 - DNA, 25 bp, Homo sapien
tgcagaccagtaaacaaaggctcaa

SEQ ID NO: 4651915 - DNA, 25 bp, Homo sapien
taataattttgctaggtattccatc

SEQ ID NO: 4651916 - DNA, 25 bp, Homo sapien
ccttcccagggtaaatgtctctgga

SEQ ID NO: 4651917 - DNA, 25 bp, Homo sapien
gagcacctctattcttacactgtgg

SEQ ID NO: 4651918 - DNA, 25 bp, Homo sapien
gttgacaactcaaacctactagagc

SEQ ID NO: 4651919 - DNA, 25 bp, Homo sapien
ggacaagagtggacatccttcccag

SEQ ID NO: 4651920 - DNA, 25 bp, Homo sapien
tacacacgagtgagttgtatgctct

SEQ ID NO: 4651921 - DNA, 25 bp, Homo sapien
tgggtacgtgcagcaaacaagtggt

SEQ ID NO: 4651922 - DNA, 25 bp, Homo sapien
gcggtttattcttgatgccctggaa

SEQ ID NO: 4651923 - DNA, 25 bp, Homo sapien
taaaaaaggacactagcaaatctct

SEQ ID NO: 4651924 - DNA, 25 bp, Homo sapien
accgggcaccaggttaggcgatttg

SEQ ID NO: 4651925 - DNA, 25 bp, Homo sapien
ggcaccaggttaggcgatttgccct

SEQ ID NO: 4651926 - DNA, 25 bp, Homo sapien
catgtaaccgggcaccaggttaggc

SEQ ID NO: 4651927 - DNA, 25 bp, Homo sapien
caggttaggcgatttgccctgctcc

SEQ ID NO: 4651928 - DNA, 25 bp, Homo sapien
tcttttccattctgtacatatccat

SEQ ID NO: 4651929 - DNA, 25 bp, Homo sapien
cgctcttttccattctgtacatatc

SEQ ID NO: 4651930 - DNA, 25 bp, Homo sapien
ctgtccgctcttttccattctgtac

SEQ ID NO: 4651931 - DNA, 25 bp, Homo sapien
tccgctcttttccattctgtacata

SEQ ID NO: 4651932 - DNA, 25 bp, Homo sapien
tagcaggcctcgtgcgtagtcattt

SEQ ID NO: 4651933 - DNA, 25 bp, Homo sapien
tgaggagacagtcgccttcggactc

SEQ ID NO: 4651934 - DNA, 25 bp, Homo sapien
ttcggactcctggactagcatcgcg

SEQ ID NO: 4651935 - DNA, 25 bp, Homo sapien
gatggaagaaagagtcgctctccta

SEQ ID NO: 4651936 - DNA, 25 bp, Homo sapien
tccctttcattaggtacagcagcat

SEQ ID NO: 4651937 - DNA, 25 bp, Homo sapien
gacaaccacttggtagttctattta

SEQ ID NO: 4651938 - DNA, 25 bp, Homo sapien
aaactctccactatgccaggtccag

SEQ ID NO: 4651939 - DNA, 25 bp, Homo sapien
tcttacttggatgttcccataggaa

SEQ ID NO: 4651940 - DNA, 25 bp, Homo sapien
tttgcaaagggctgaccaaactcac

SEQ ID NO: 4651941 - DNA, 25 bp, Homo sapien
ggctgaccaaactcacagctgctga

SEQ ID NO: 4651942 - DNA, 25 bp, Homo sapien
tgcaaagggctgaccaaactcacag

SEQ ID NO: 4651943 - DNA, 25 bp, Homo sapien
aagggctgaccaaactcacagctgc

SEQ ID NO: 4651944 - DNA, 25 bp, Homo sapien
gaaaagccgttgctaagcatttcta

SEQ ID NO: 4651945 - DNA, 25 bp, Homo sapien
agccccagggttcattaaaaatatg

SEQ ID NO: 4651946 - DNA, 25 bp, Homo sapien
cagttgctctattttcaaggatgga

SEQ ID NO: 4651947 - DNA, 25 bp, Homo sapien
gctaagctcattaagtgcaattttt

SEQ ID NO: 4651948 - DNA, 25 bp, Homo sapien
gagcttgccgctccggcccgcttgg

SEQ ID NO: 4651949 - DNA, 25 bp, Homo sapien
gtaatcaatccccagagcttgccgc

SEQ ID NO: 4651950 - DNA, 25 bp, Homo sapien
caatcttctgagtaatcaatcccca

SEQ ID NO: 4651951 - DNA, 25 bp, Homo sapien
ctccggcccgcttggctgagataca

SEQ ID NO: 4651952 - DNA, 25 bp, Homo sapien
ttttggctttaatgtcaagccacac

SEQ ID NO: 4651953 - DNA, 25 bp, Homo sapien
tgttctaggctaagctgctcggcca

SEQ ID NO: 4651954 - DNA, 25 bp, Homo sapien
aactggtggtgtccattcaatagcc

SEQ ID NO: 4651955 - DNA, 25 bp, Homo sapien
tcaatagccaaacaccattcctgaa

SEQ ID NO: 4651956 - DNA, 25 bp, Homo sapien
tctgtggcaatgaaccatagaggcc

SEQ ID NO: 4651957 - DNA, 25 bp, Homo sapien
ctccaaggcagatggaaatagcatc

SEQ ID NO: 4651958 - DNA, 25 bp, Homo sapien
tataggagccataactcagtttctg

SEQ ID NO: 4651959 - DNA, 25 bp, Homo sapien
gcctcctgtcagaataaataaccca

SEQ ID NO: 4651960 - DNA, 25 bp, Homo sapien
tatagagacctagaaatacatacag

SEQ ID NO: 4651961 - DNA, 25 bp, Homo sapien
tgctgccagtgcatatttaacatga

SEQ ID NO: 4651962 - DNA, 25 bp, Homo sapien
tagtcttacatatgtagccagagac

SEQ ID NO: 4651963 - DNA, 25 bp, Homo sapien
catacagaacgccagaaaaacgtgc

SEQ ID NO: 4651964 - DNA, 25 bp, Homo sapien
tactcctttcctctaacatgatagc

SEQ ID NO: 4651965 - DNA, 25 bp, Homo sapien
tctgtctccatgtgctcttgaaaat

SEQ ID NO: 4651966 - DNA, 25 bp, Homo sapien
catgatagcttttactccaaatagc

SEQ ID NO: 4651967 - DNA, 25 bp, Homo sapien
taaatgggcaaagcaaacttcttct

SEQ ID NO: 4651968 - DNA, 25 bp, Homo sapien
tccaaggaatcagtttggaggctcc

SEQ ID NO: 4651969 - DNA, 25 bp, Homo sapien
cagtgcagcccatagttccctggca

SEQ ID NO: 4651970 - DNA, 25 bp, Homo sapien
gtaggtttatcatcaccaggactcc

SEQ ID NO: 4651971 - DNA, 25 bp, Homo sapien
catgataccaagagggtgcccagca

SEQ ID NO: 4651972 - DNA, 25 bp, Homo sapien
gatcttacttgagcaaacataagtt

SEQ ID NO: 4651973 - DNA, 25 bp, Homo sapien
tcttacttgagcaaacataagttta

SEQ ID NO: 4651974 - DNA, 25 bp, Homo sapien
ctgatcttacttgagcaaacataag

SEQ ID NO: 4651975 - DNA, 25 bp, Homo sapien
actgatcttacttgagcaaacataa

SEQ ID NO: 4651976 - DNA, 25 bp, Homo sapien
tgctggcaaaggattagatgttagt

SEQ ID NO: 4651977 - DNA, 25 bp, Homo sapien
gcaaaggattagatgttagtttgtg

SEQ ID NO: 4651978 - DNA, 25 bp, Homo sapien
ctggcaaaggattagatgttagttt

SEQ ID NO: 4651979 - DNA, 25 bp, Homo sapien
aaggattagatgttagtttgtgttg

SEQ ID NO: 4651980 - DNA, 25 bp, Homo sapien
gaagaacatttctgtctgtcaataa

SEQ ID NO: 4651981 - DNA, 25 bp, Homo sapien
taagaggtcagaacaaatgtaagca

SEQ ID NO: 4651982 - DNA, 25 bp, Homo sapien
gtaagcaaccaagtttgttttgctg

SEQ ID NO: 4651983 - DNA, 25 bp, Homo sapien
gaggtcagaacaaatgtaagcaacc

SEQ ID NO: 4651984 - DNA, 25 bp, Homo sapien
ttttattctcatcaactgacacttc

SEQ ID NO: 4651985 - DNA, 25 bp, Homo sapien
tcctctggggattcatgaaaagcct

SEQ ID NO: 4651986 - DNA, 25 bp, Homo sapien
gcatacacgtatccactactgctga

SEQ ID NO: 4651987 - DNA, 25 bp, Homo sapien
tgaacacggcatttctgaatgtcct

SEQ ID NO: 4651988 - DNA, 25 bp, Homo sapien
acagccaagccaactcagtcagctc

SEQ ID NO: 4651989 - DNA, 25 bp, Homo sapien
atgtacagccaagccaactcagtca

SEQ ID NO: 4651990 - DNA, 25 bp, Homo sapien
tacagccaagccaactcagtcagct

SEQ ID NO: 4651991 - DNA, 25 bp, Homo sapien
gtacagccaagccaactcagtcagc

SEQ ID NO: 4651992 - DNA, 25 bp, Homo sapien
tgagcaccagggatcagggtcttcc

SEQ ID NO: 4651993 - DNA, 25 bp, Homo sapien
gagcaccagggatcagggtcttcct

SEQ ID NO: 4651994 - DNA, 25 bp, Homo sapien
agcaccagggatcagggtcttcctc

SEQ ID NO: 4651995 - DNA, 25 bp, Homo sapien
gttgcaaggtaaaacaatctcaggg

SEQ ID NO: 4651996 - DNA, 25 bp, Homo sapien
agatcttttcatcgcattcctggag

SEQ ID NO: 4651997 - DNA, 25 bp, Homo sapien
taaaacaatctcagggtatcattga

SEQ ID NO: 4651998 - DNA, 25 bp, Homo sapien
gagagtgttgcaaggtaaaacaatc

SEQ ID NO: 4651999 - DNA, 25 bp, Homo sapien
caagacaagtcaatcaacaggggct

SEQ ID NO: 4652000 - DNA, 25 bp, Homo sapien
ctcctgctgtgactcactcaagata

SEQ ID NO: 4652001 - DNA, 25 bp, Homo sapien
agctccagcacgtatctcctgctgt

SEQ ID NO: 4652002 - DNA, 25 bp, Homo sapien
cgtatctcctgctgtgactcactca

SEQ ID NO: 4652003 - DNA, 25 bp, Homo sapien
ccagcacgtatctcctgctgtgact

SEQ ID NO: 4652004 - DNA, 25 bp, Homo sapien
tcatctgtaggctgctctccttctc

SEQ ID NO: 4652005 - DNA, 25 bp, Homo sapien
ctttgaccaacagcagtcctagaac

SEQ ID NO: 4652006 - DNA, 25 bp, Homo sapien
cctttgaccaacagcagtcctagaa

SEQ ID NO: 4652007 - DNA, 25 bp, Homo sapien
aaatcaaaatctctcagaaggattt

SEQ ID NO: 4652008 - DNA, 25 bp, Homo sapien
tattgactcttgacactctctaaag

SEQ ID NO: 4652009 - DNA, 25 bp, Homo sapien
ctgacagtgctgagctattgactct

SEQ ID NO: 4652010 - DNA, 25 bp, Homo sapien
ggaatcaactgccaagcatgcctta

SEQ ID NO: 4652011 - DNA, 25 bp, Homo sapien
taactctccggagtgctgacagtgc

SEQ ID NO: 4652012 - DNA, 25 bp, Homo sapien
cacaaaaatgacctctaattcacaa

SEQ ID NO: 4652013 - DNA, 25 bp, Homo sapien
gtaggcccatgcagatgccaatcaa

SEQ ID NO: 4652014 - DNA, 25 bp, Homo sapien
atgatgaacacaggccagtaggccc

SEQ ID NO: 4652015 - DNA, 25 bp, Homo sapien
aaagctgaaggaaggtctgctcccc

SEQ ID NO: 4652016 - DNA, 25 bp, Homo sapien
tggtaatgaaactattgaggacttc

SEQ ID NO: 4652017 - DNA, 25 bp, Homo sapien
cacagtcagatttcttggaggcaag

SEQ ID NO: 4652018 - DNA, 25 bp, Homo sapien
taaaaattagcagatctgtgtggga

SEQ ID NO: 4652019 - DNA, 25 bp, Homo sapien
cagtttgtgacattatgttcgcaca

SEQ ID NO: 4652020 - DNA, 25 bp, Homo sapien
tcatagttatatcaaaggcaaagag

SEQ ID NO: 4652021 - DNA, 25 bp, Homo sapien
tgttgtcacttgaagattttcagtc

SEQ ID NO: 4652022 - DNA, 25 bp, Homo sapien
cagtcatagttatatcaaaggcaaa

SEQ ID NO: 4652023 - DNA, 25 bp, Homo sapien
ttttcagtcatagttatatcaaagg

SEQ ID NO: 4652024 - DNA, 25 bp, Homo sapien
agatatggatcacagttgccttcaa

SEQ ID NO: 4652025 - DNA, 25 bp, Homo sapien
cttcaaagctttgagaaatctgtgg

SEQ ID NO: 4652026 - DNA, 25 bp, Homo sapien
acatggtaataccagaaaggcagga

SEQ ID NO: 4652027 - DNA, 25 bp, Homo sapien
tcaaagctttgagaaatctgtggaa

SEQ ID NO: 4652028 - DNA, 25 bp, Homo sapien
tcttcaaaagtcaagggacattacg

SEQ ID NO: 4652029 - DNA, 25 bp, Homo sapien
cagcatttaagatgaactctcttag

SEQ ID NO: 4652030 - DNA, 25 bp, Homo sapien
gtcaccatgctacacattagctcta

SEQ ID NO: 4652031 - DNA, 25 bp, Homo sapien
tatccatcacctaacaaggctacca

SEQ ID NO: 4652032 - DNA, 25 bp, Homo sapien
ggcattattaatcttgttgtgaaga

SEQ ID NO: 4652033 - DNA, 25 bp, Homo sapien
cctgatatttccacagttgtttaaa

SEQ ID NO: 4652034 - DNA, 25 bp, Homo sapien
gaagatgggaacatagaacgatgca

SEQ ID NO: 4652035 - DNA, 25 bp, Homo sapien
gaacatagaacgatgcatgcggcca

SEQ ID NO: 4652036 - DNA, 25 bp, Homo sapien
taattcagatgaaatacaccctgga

SEQ ID NO: 4652037 - DNA, 25 bp, Homo sapien
aattcagatgaaatacaccctggat

SEQ ID NO: 4652038 - DNA, 25 bp, Homo sapien
ctgcctatatcttctcgctcatctg

SEQ ID NO: 4652039 - DNA, 25 bp, Homo sapien
ctcgctcatctgcatatcgtgccat

SEQ ID NO: 4652040 - DNA, 25 bp, Homo sapien
aggctcctctgcctatatcttctcg

SEQ ID NO: 4652041 - DNA, 25 bp, Homo sapien
ttctcgctcatctgcatatcgtgcc

SEQ ID NO: 4652042 - DNA, 25 bp, Homo sapien
tatctctcaatcagcaaccatggtg

SEQ ID NO: 4652043 - DNA, 25 bp, Homo sapien
tcagcaaccatggtggcagcactac

SEQ ID NO: 4652044 - DNA, 25 bp, Homo sapien
ccgtttgtttcccttatctctcaat

SEQ ID NO: 4652045 - DNA, 25 bp, Homo sapien
ttcccttatctctcaatcagcaacc

SEQ ID NO: 4652046 - DNA, 25 bp, Homo sapien
ctggtgaagataacgacgttgagat

SEQ ID NO: 4652047 - DNA, 25 bp, Homo sapien
gaagataacgacgttgagatgtcag

SEQ ID NO: 4652048 - DNA, 25 bp, Homo sapien
gataacgacgttgagatgtcagtct

SEQ ID NO: 4652049 - DNA, 25 bp, Homo sapien
gtgaagataacgacgttgagatgtc

SEQ ID NO: 4652050 - DNA, 25 bp, Homo sapien
cacatgctttgggtgtagccacacc

SEQ ID NO: 4652051 - DNA, 25 bp, Homo sapien
agatacggtcccacatgctttgggt

SEQ ID NO: 4652052 - DNA, 25 bp, Homo sapien
cggtcccacatgctttgggtgtagc

SEQ ID NO: 4652053 - DNA, 25 bp, Homo sapien
tcccacatgctttgggtgtagccac

SEQ ID NO: 4652054 - DNA, 25 bp, Homo sapien
ccctgtctggaagcgaactgagaaa

SEQ ID NO: 4652055 - DNA, 25 bp, Homo sapien
tgcaatccacagcagcaacgtgtcc

SEQ ID NO: 4652056 - DNA, 25 bp, Homo sapien
tcaacactgagccttactgctatgt

SEQ ID NO: 4652057 - DNA, 25 bp, Homo sapien
agttcacttcaaatgggcctctaaa

SEQ ID NO: 4652058 - DNA, 25 bp, Homo sapien
tatacgatatggtaaattaatcccc

SEQ ID NO: 4652059 - DNA, 25 bp, Homo sapien
cttagaacatcggaaacaggacaaa

SEQ ID NO: 4652060 - DNA, 25 bp, Homo sapien
cacagtcttccagggctatacgata

SEQ ID NO: 4652061 - DNA, 25 bp, Homo sapien
agcagcggtgcacctcacataatta

SEQ ID NO: 4652062 - DNA, 25 bp, Homo sapien
cacactttctcctactctcaaaatc

SEQ ID NO: 4652063 - DNA, 25 bp, Homo sapien
ttacagcatccgcaaacccacactt

SEQ ID NO: 4652064 - DNA, 25 bp, Homo sapien
acagcatccgcaaacccacactttc

SEQ ID NO: 4652065 - DNA, 25 bp, Homo sapien
cccacactttctcctactctcaaaa

SEQ ID NO: 4652066 - DNA, 25 bp, Homo sapien
gaaatcgcctgagtgagtctggccc

SEQ ID NO: 4652067 - DNA, 25 bp, Homo sapien
ctgaggataactcgggcagctccct

SEQ ID NO: 4652068 - DNA, 25 bp, Homo sapien
ttctggctcaaaactgattccccgg

SEQ ID NO: 4652069 - DNA, 25 bp, Homo sapien
ccaacttggaataggttctggctca

SEQ ID NO: 4652070 - DNA, 25 bp, Homo sapien
ccacagcctcccgatttagcccttg

SEQ ID NO: 4652071 - DNA, 25 bp, Homo sapien
agaagagggagccacccggagcctg

SEQ ID NO: 4652072 - DNA, 25 bp, Homo sapien
tctccacagcctcccgatttagccc

SEQ ID NO: 4652073 - DNA, 25 bp, Homo sapien
cagcctcccgatttagcccttgcat

SEQ ID NO: 4652074 - DNA, 25 bp, Homo sapien
taaatggtccaaaattccctgctgc

SEQ ID NO: 4652075 - DNA, 25 bp, Homo sapien
tctactatttgcacctatgtatgtg

SEQ ID NO: 4652076 - DNA, 25 bp, Homo sapien
gacattgcacttcttaaatggtcca

SEQ ID NO: 4652077 - DNA, 25 bp, Homo sapien
tatgtatgtgctcaaagacattgca

SEQ ID NO: 4652078 - DNA, 25 bp, Homo sapien
caggaggacctcactgcatcacatc

SEQ ID NO: 4652079 - DNA, 25 bp, Homo sapien
gaatgctccttacagccaggggcag

SEQ ID NO: 4652080 - DNA, 25 bp, Homo sapien
ggaggacctcactgcatcacatcgc

SEQ ID NO: 4652081 - DNA, 25 bp, Homo sapien
tgggaatgctccttacagccagggg

SEQ ID NO: 4652082 - DNA, 25 bp, Homo sapien
aggtattttagttatctcactcagg

SEQ ID NO: 4652083 - DNA, 25 bp, Homo sapien
gtattttagttatctcactcagggc

SEQ ID NO: 4652084 - DNA, 25 bp, Homo sapien
attttagttatctcactcagggcat

SEQ ID NO: 4652085 - DNA, 25 bp, Homo sapien
agaggtattttagttatctcactca

SEQ ID NO: 4652086 - DNA, 25 bp, Homo sapien
gcagcgtgggaacttagagtgggac

SEQ ID NO: 4652087 - DNA, 25 bp, Homo sapien
gggattggggcagcgtgggaactta

SEQ ID NO: 4652088 - DNA, 25 bp, Homo sapien
gcttcaagcgggattggggcagcgt

SEQ ID NO: 4652089 - DNA, 25 bp, Homo sapien
cagcgtgggaacttagagtgggaca

SEQ ID NO: 4652090 - DNA, 25 bp, Homo sapien
tgcttagaagtgactcacttttatt

SEQ ID NO: 4652091 - DNA, 25 bp, Homo sapien
gggtgaacccacatccacgataata

SEQ ID NO: 4652092 - DNA, 25 bp, Homo sapien
gacatatgtcatagtgataaaagtg

SEQ ID NO: 4652093 - DNA, 25 bp, Homo sapien
tttgttgccctatcccatggcagaa

SEQ ID NO: 4652094 - DNA, 25 bp, Homo sapien
ttaattttaattagcactgtgattt

SEQ ID NO: 4652095 - DNA, 25 bp, Homo sapien
tagattttgtccgtacttgcttaat

SEQ ID NO: 4652096 - DNA, 25 bp, Homo sapien
aagtctagattttgtccgtacttgc

SEQ ID NO: 4652097 - DNA, 25 bp, Homo sapien
aggaagtctagattttgtccgtact

SEQ ID NO: 4652098 - DNA, 25 bp, Homo sapien
gctgagtttgtaagtagaacaatgt

SEQ ID NO: 4652099 - DNA, 25 bp, Homo sapien
caggggggtgcccatagaagatcta

SEQ ID NO: 4652100 - DNA, 25 bp, Homo sapien
cactgggaatcttgacttgctgagt

SEQ ID NO: 4652101 - DNA, 25 bp, Homo sapien
ttgcccaaggatatgagtccatgag

SEQ ID NO: 4652102 - DNA, 25 bp, Homo sapien
agcagcctgagctacggccatcctt

SEQ ID NO: 4652103 - DNA, 25 bp, Homo sapien
tttggagcaactgcttgcccggacc

SEQ ID NO: 4652104 - DNA, 25 bp, Homo sapien
cttcctgtgtagagatcctgatgca

SEQ ID NO: 4652105 - DNA, 25 bp, Homo sapien
gatagtggtggattgaggccttctc

SEQ ID NO: 4652106 - DNA, 25 bp, Homo sapien
gattaaagtcacttgctgtaatccc

SEQ ID NO: 4652107 - DNA, 25 bp, Homo sapien
agagatttctactggaccgatacgg

SEQ ID NO: 4652108 - DNA, 25 bp, Homo sapien
gaactaagaccttgattaaagtcac

SEQ ID NO: 4652109 - DNA, 25 bp, Homo sapien
tggaccgatacggtggcaaagcagc

SEQ ID NO: 4652110 - DNA, 25 bp, Homo sapien
tagtgaacaatttcctgtggcctca

SEQ ID NO: 4652111 - DNA, 25 bp, Homo sapien
ctagtgaacaatttcctgtggcctc

SEQ ID NO: 4652112 - DNA, 25 bp, Homo sapien
agtgaacaatttcctgtggcctcac

SEQ ID NO: 4652113 - DNA, 25 bp, Homo sapien
ggaagggttactgtgggcaaattca

SEQ ID NO: 4652114 - DNA, 25 bp, Homo sapien
tcaacgtaaaagcttggcaatgtgc

SEQ ID NO: 4652115 - DNA, 25 bp, Homo sapien
ggcaatgtgcattctgaacagcaga

SEQ ID NO: 4652116 - DNA, 25 bp, Homo sapien
caatgcagagtaaagtgtaatgggc

SEQ ID NO: 4652117 - DNA, 25 bp, Homo sapien
tatatagactagcatgcattcacca

SEQ ID NO: 4652118 - DNA, 25 bp, Homo sapien
caatatacgtaagttcttcatttgc

SEQ ID NO: 4652119 - DNA, 25 bp, Homo sapien
gaaaaatatatagactagcatgcat

SEQ ID NO: 4652120 - DNA, 25 bp, Homo sapien
gcatgcattcaccaatatacgtaag

SEQ ID NO: 4652121 - DNA, 25 bp, Homo sapien
cccagtagatgctcctggccctttt

SEQ ID NO: 4652122 - DNA, 25 bp, Homo sapien
cctgctgcagactagactcatcaac

SEQ ID NO: 4652123 - DNA, 25 bp, Homo sapien
gctgcagactagactcatcaaccac

SEQ ID NO: 4652124 - DNA, 25 bp, Homo sapien
tgctgcagactagactcatcaacca

SEQ ID NO: 4652125 - DNA, 25 bp, Homo sapien
tccctgctgcagactagactcatca

SEQ ID NO: 4652126 - DNA, 25 bp, Homo sapien
acatcttattatttgccgacatagg

SEQ ID NO: 4652127 - DNA, 25 bp, Homo sapien
gaaaagcctgccttacacctgccag

SEQ ID NO: 4652128 - DNA, 25 bp, Homo sapien
acctgtacttagtgttcccagaaca

SEQ ID NO: 4652129 - DNA, 25 bp, Homo sapien
cgacataggtgaaaagcctgcctta

SEQ ID NO: 4652130 - DNA, 25 bp, Homo sapien
tccatgtgcactcaataagagtgtg

SEQ ID NO: 4652131 - DNA, 25 bp, Homo sapien
tatctgatatatcaacctccttaaa

SEQ ID NO: 4652132 - DNA, 25 bp, Homo sapien
gctgttgggtaaaaagttctgtata

SEQ ID NO: 4652133 - DNA, 25 bp, Homo sapien
gtaacctaacatgtaacctgtcatg

SEQ ID NO: 4652134 - DNA, 25 bp, Homo sapien
tttacatgccttgtccaatccacca

SEQ ID NO: 4652135 - DNA, 25 bp, Homo sapien
tctaggtattctatagaccaaataa

SEQ ID NO: 4652136 - DNA, 25 bp, Homo sapien
tactatcatagaagtgtgactaatg

SEQ ID NO: 4652137 - DNA, 25 bp, Homo sapien
ccttcagagtctaattagacaaatg

SEQ ID NO: 4652138 - DNA, 25 bp, Homo sapien
tgggagcactcacatcacggaaatg

SEQ ID NO: 4652139 - DNA, 25 bp, Homo sapien
cagaggaggacaaatgatagtgcac

SEQ ID NO: 4652140 - DNA, 25 bp, Homo sapien
tatgagaagtgctactgagcatccc

SEQ ID NO: 4652141 - DNA, 25 bp, Homo sapien
tggattgtggagcatactgaagact

SEQ ID NO: 4652142 - DNA, 25 bp, Homo sapien
tggcatcctgtacagtagtcagact

SEQ ID NO: 4652143 - DNA, 25 bp, Homo sapien
tcctaggtatctggcatcctgtaca

SEQ ID NO: 4652144 - DNA, 25 bp, Homo sapien
tgactccttcctaggtatctggcat

SEQ ID NO: 4652145 - DNA, 25 bp, Homo sapien
tacagtagtcagactggagctccat

SEQ ID NO: 4652146 - DNA, 25 bp, Homo sapien
gatagacaggatttaaattaggctc

SEQ ID NO: 4652147 - DNA, 25 bp, Homo sapien
tcccgcgtggctgctactctgaatg

SEQ ID NO: 4652148 - DNA, 25 bp, Homo sapien
attgaccgaagccagccatgaacca

SEQ ID NO: 4652149 - DNA, 25 bp, Homo sapien
tgacaggtcagaaataggctggatt

SEQ ID NO: 4652150 - DNA, 25 bp, Homo sapien
tagagaggcattgacctctaaatgt

SEQ ID NO: 4652151 - DNA, 25 bp, Homo sapien
atgggtgctgtattttagagaggca

SEQ ID NO: 4652152 - DNA, 25 bp, Homo sapien
taaatgtttccggagcactagacac

SEQ ID NO: 4652153 - DNA, 25 bp, Homo sapien
tttcttggtgctgtagcatgtgatg

SEQ ID NO: 4652154 - DNA, 25 bp, Homo sapien
tagagtggcaaaaccttagcaggac

SEQ ID NO: 4652155 - DNA, 25 bp, Homo sapien
aaggcatctgttgtgtatggagtca

SEQ ID NO: 4652156 - DNA, 25 bp, Homo sapien
catctctgccgaaagacagcctggt

SEQ ID NO: 4652157 - DNA, 25 bp, Homo sapien
gtcagggtatgagacagaagcccca

SEQ ID NO: 4652158 - DNA, 25 bp, Homo sapien
cgatgattctacctttggattcaca

SEQ ID NO: 4652159 - DNA, 25 bp, Homo sapien
ctgaactcataaacaggtgcccaaa

SEQ ID NO: 4652160 - DNA, 25 bp, Homo sapien
agtgcaaactccacccatgttaaca

SEQ ID NO: 4652161 - DNA, 25 bp, Homo sapien
cctgcctcagctggatgcttattga

SEQ ID NO: 4652162 - DNA, 25 bp, Homo sapien
cattctcagatttgagtcttccttc

SEQ ID NO: 4652163 - DNA, 25 bp, Homo sapien
ttgtccctgacacttgtaatgcttc

SEQ ID NO: 4652164 - DNA, 25 bp, Homo sapien
cattgtccctgacacttgtaatgct

SEQ ID NO: 4652165 - DNA, 25 bp, Homo sapien
attctcagatttgagtcttccttct

SEQ ID NO: 4652166 - DNA, 25 bp, Homo sapien
cgccagggtattaatccagtagtaa

SEQ ID NO: 4652167 - DNA, 25 bp, Homo sapien
ccagtagtaagttctaatgtgctca

SEQ ID NO: 4652168 - DNA, 25 bp, Homo sapien
tcaagaaatcgccagggtattaatc

SEQ ID NO: 4652169 - DNA, 25 bp, Homo sapien
tgtgctcattatggactggatgtac

SEQ ID NO: 4652170 - DNA, 25 bp, Homo sapien
tgttttgaatcagcaaatgccgcaa

SEQ ID NO: 4652171 - DNA, 25 bp, Homo sapien
ggcttgtcagcctcttagttggtgc

SEQ ID NO: 4652172 - DNA, 25 bp, Homo sapien
tagacctatgagactacctaagggc

SEQ ID NO: 4652173 - DNA, 25 bp, Homo sapien
gatccctcgttggactctaagctta

SEQ ID NO: 4652174 - DNA, 25 bp, Homo sapien
cccatgccagagtacagttgcgcaa

SEQ ID NO: 4652175 - DNA, 25 bp, Homo sapien
acaactcaactaattcttccagctc

SEQ ID NO: 4652176 - DNA, 25 bp, Homo sapien
tcacccatgccagagtacagttgcg

SEQ ID NO: 4652177 - DNA, 25 bp, Homo sapien
ttcttccagctctatcatgccaacg

SEQ ID NO: 4652178 - DNA, 25 bp, Homo sapien
aatgcattggtgtaatgttggtata

SEQ ID NO: 4652179 - DNA, 25 bp, Homo sapien
ttttaatgcattggtgtaatgttgg

SEQ ID NO: 4652180 - DNA, 25 bp, Homo sapien
cattggtgtaatgttggtatagtat

SEQ ID NO: 4652181 - DNA, 25 bp, Homo sapien
aaatatgtcgctaaatttttaatgc

SEQ ID NO: 4652182 - DNA, 25 bp, Homo sapien
tgtaggtgcacttaatacttttttc

SEQ ID NO: 4652183 - DNA, 25 bp, Homo sapien
tgaataaacgttctatcccaatctc

SEQ ID NO: 4652184 - DNA, 25 bp, Homo sapien
aacgttctatcccaatctctctcta

SEQ ID NO: 4652185 - DNA, 25 bp, Homo sapien
tagatcttgtaggtgcacttaatac

SEQ ID NO: 4652186 - DNA, 25 bp, Homo sapien
ttgaggttactatgagtctttcaaa

SEQ ID NO: 4652187 - DNA, 25 bp, Homo sapien
gaggttactatgagtctttcaaata

SEQ ID NO: 4652188 - DNA, 25 bp, Homo sapien
gtccttataggtgaaggatgtttct

SEQ ID NO: 4652189 - DNA, 25 bp, Homo sapien
aagcaacagattattaagtctttct

SEQ ID NO: 4652190 - DNA, 25 bp, Homo sapien
aaagaagtaaataacgccagggcag

SEQ ID NO: 4652191 - DNA, 25 bp, Homo sapien
tgaaatgggtgacagcaacaagccc

SEQ ID NO: 4652192 - DNA, 25 bp, Homo sapien
tgtagattatagaaacctccctgtg

SEQ ID NO: 4652193 - DNA, 25 bp, Homo sapien
tagtgagccaagcaaagatgaagca

SEQ ID NO: 4652194 - DNA, 25 bp, Homo sapien
tagcattctgctacgtctccactag

SEQ ID NO: 4652195 - DNA, 25 bp, Homo sapien
taaggtatttcacaacccagaagaa

SEQ ID NO: 4652196 - DNA, 25 bp, Homo sapien
gagttacaattatacccagatctgg

SEQ ID NO: 4652197 - DNA, 25 bp, Homo sapien
ggaagagctcatgcccactctgtaa

SEQ ID NO: 4652198 - DNA, 25 bp, Homo sapien
agtcctgaagcctccgtgtgaagtc

SEQ ID NO: 4652199 - DNA, 25 bp, Homo sapien
gtgaagtctgagcatcaaggatgac

SEQ ID NO: 4652200 - DNA, 25 bp, Homo sapien
gaagtctgagcatcaaggatgacaa

SEQ ID NO: 4652201 - DNA, 25 bp, Homo sapien
gaagcctccgtgtgaagtctgagca

SEQ ID NO: 4652202 - DNA, 25 bp, Homo sapien
gcctatattcctcaatgagtcctta

SEQ ID NO: 4652203 - DNA, 25 bp, Homo sapien
tatctttcccaattgtgtgtattaa

SEQ ID NO: 4652204 - DNA, 25 bp, Homo sapien
tccccttgcctatattcctcaatga

SEQ ID NO: 4652205 - DNA, 25 bp, Homo sapien
tattcctcaatgagtccttatcttt

SEQ ID NO: 4652206 - DNA, 25 bp, Homo sapien
ttccattgtcggaggcccttgtgct

SEQ ID NO: 4652207 - DNA, 25 bp, Homo sapien
aagtatctggcatgcaccgctccag

SEQ ID NO: 4652208 - DNA, 25 bp, Homo sapien
tggttgtggctacaaacaccagcaa

SEQ ID NO: 4652209 - DNA, 25 bp, Homo sapien
caggtgttgcaccaagaggaggcac

SEQ ID NO: 4652210 - DNA, 25 bp, Homo sapien
cagcagtccagcatttaaagccttg

SEQ ID NO: 4652211 - DNA, 25 bp, Homo sapien
aaagccttgaattcctgtccgttca

SEQ ID NO: 4652212 - DNA, 25 bp, Homo sapien
taaagccttgaattcctgtccgttc

SEQ ID NO: 4652213 - DNA, 25 bp, Homo sapien
cctgctgaggattttgccagcagtc

SEQ ID NO: 4652214 - DNA, 25 bp, Homo sapien
gaaacttttacagctgaacatgaca

SEQ ID NO: 4652215 - DNA, 25 bp, Homo sapien
tgactgccacagcatttgatctgaa

SEQ ID NO: 4652216 - DNA, 25 bp, Homo sapien
tgatctgaattgcattgctaagttc

SEQ ID NO: 4652217 - DNA, 25 bp, Homo sapien
aacatgacatctggcttgcatgcct

SEQ ID NO: 4652218 - DNA, 25 bp, Homo sapien
tgacctgcgtctgggaatgctttct

SEQ ID NO: 4652219 - DNA, 25 bp, Homo sapien
ttgaacttgacctgcgtctgggaat

SEQ ID NO: 4652220 - DNA, 25 bp, Homo sapien
cttgacctgcgtctgggaatgcttt

SEQ ID NO: 4652221 - DNA, 25 bp, Homo sapien
aacttgacctgcgtctgggaatgct

SEQ ID NO: 4652222 - DNA, 25 bp, Homo sapien
tgagagaatacccatatcaactttc

SEQ ID NO: 4652223 - DNA, 25 bp, Homo sapien
gagagaatacccatatcaactttca

SEQ ID NO: 4652224 - DNA, 25 bp, Homo sapien
ctgagagaatacccatatcaacttt

SEQ ID NO: 4652225 - DNA, 25 bp, Homo sapien
tgcaaactcttcggtcctcctcttg

SEQ ID NO: 4652226 - DNA, 25 bp, Homo sapien
ctgcaaactcttcggtcctcctctt

SEQ ID NO: 4652227 - DNA, 25 bp, Homo sapien
caaactcttcggtcctcctcttgtg

SEQ ID NO: 4652228 - DNA, 25 bp, Homo sapien
gcaaactcttcggtcctcctcttgt

SEQ ID NO: 4652229 - DNA, 25 bp, Homo sapien
tgggagctgccatcataatgacact

SEQ ID NO: 4652230 - DNA, 25 bp, Homo sapien
cagcaggaactcagttggatgatgc

SEQ ID NO: 4652231 - DNA, 25 bp, Homo sapien
gagtgggactggtgttcctctcagt

SEQ ID NO: 4652232 - DNA, 25 bp, Homo sapien
tgacacttcgcagcaggaactcagt

SEQ ID NO: 4652233 - DNA, 25 bp, Homo sapien
gccagtaataataggagtcccaagg

SEQ ID NO: 4652234 - DNA, 25 bp, Homo sapien
taataataggagtcccaagggacac

SEQ ID NO: 4652235 - DNA, 25 bp, Homo sapien
taataggagtcccaagggacacaga

SEQ ID NO: 4652236 - DNA, 25 bp, Homo sapien
atctgccagtaataataggagtccc

SEQ ID NO: 4652237 - DNA, 25 bp, Homo sapien
caattcaaatctcagggaaccagaa

SEQ ID NO: 4652238 - DNA, 25 bp, Homo sapien
acaggacagcatttattaacactgc

SEQ ID NO: 4652239 - DNA, 25 bp, Homo sapien
taacaatacagttttggcatctcat

SEQ ID NO: 4652240 - DNA, 25 bp, Homo sapien
ccagaagtaatcaagctagacctaa

SEQ ID NO: 4652241 - DNA, 25 bp, Homo sapien
ttacactatcaaaacgttcttctac

SEQ ID NO: 4652242 - DNA, 25 bp, Homo sapien
tcatatgcactgtatgtactctggg

SEQ ID NO: 4652243 - DNA, 25 bp, Homo sapien
aagggctctgatgttattttaataa

SEQ ID NO: 4652244 - DNA, 25 bp, Homo sapien
tatcaaaacgttcttctactatcat

SEQ ID NO: 4652245 - DNA, 25 bp, Homo sapien
aaccaggttattctgagtttaggca

SEQ ID NO: 4652246 - DNA, 25 bp, Homo sapien
cagaaccattgccacgaaaacttaa

SEQ ID NO: 4652247 - DNA, 25 bp, Homo sapien
tacacctttagactccaatttgtga

SEQ ID NO: 4652248 - DNA, 25 bp, Homo sapien
tgctataggaaagattgcctaacaa

SEQ ID NO: 4652249 - DNA, 25 bp, Homo sapien
gcctgaagtgattttgtcaaccagt

SEQ ID NO: 4652250 - DNA, 25 bp, Homo sapien
tcagagtgtgtattgcaaacagcgg

SEQ ID NO: 4652251 - DNA, 25 bp, Homo sapien
ctttcatttgcaacaacctctgggc

SEQ ID NO: 4652252 - DNA, 25 bp, Homo sapien
gattttgtcaaccagttttccaaca

SEQ ID NO: 4652253 - DNA, 25 bp, Homo sapien
caagagacaggatctagaccttaat

SEQ ID NO: 4652254 - DNA, 25 bp, Homo sapien
agaccttaatctactgcctgctata

SEQ ID NO: 4652255 - DNA, 25 bp, Homo sapien
gtagggacctttctatccaaatgtc

SEQ ID NO: 4652256 - DNA, 25 bp, Homo sapien
cccatagctaaattcccagagatca

SEQ ID NO: 4652257 - DNA, 25 bp, Homo sapien
gctgtaaatctatgccgtccacgtg

SEQ ID NO: 4652258 - DNA, 25 bp, Homo sapien
taaagtagatctccaggtcaagcac

SEQ ID NO: 4652259 - DNA, 25 bp, Homo sapien
tcacacagtgactgaaaggtggtca

SEQ ID NO: 4652260 - DNA, 25 bp, Homo sapien
gagagagagacctgtttgccaaagt

SEQ ID NO: 4652261 - DNA, 25 bp, Homo sapien
ggttgcctcatgatgatctgctggt

SEQ ID NO: 4652262 - DNA, 25 bp, Homo sapien
gtacccttctccgatatatatcttg

SEQ ID NO: 4652263 - DNA, 25 bp, Homo sapien
tatgatggtacccttctccgatata

SEQ ID NO: 4652264 - DNA, 25 bp, Homo sapien
tcatattgcaatctgggttgcctca

SEQ ID NO: 4652265 - DNA, 25 bp, Homo sapien
tgtcattgtcaagagcagtagtcca

SEQ ID NO: 4652266 - DNA, 25 bp, Homo sapien
cacaagaaaaccagagaagagtcag

SEQ ID NO: 4652267 - DNA, 25 bp, Homo sapien
gatttattcacaagaaaaccagaga

SEQ ID NO: 4652268 - DNA, 25 bp, Homo sapien
gagtcagatcctttgctgtcattgt

SEQ ID NO: 4652269 - DNA, 25 bp, Homo sapien
ttggtgtgacaagctaaagagagca

SEQ ID NO: 4652270 - DNA, 25 bp, Homo sapien
tacagttcgtctgtcgaagggaaag

SEQ ID NO: 4652271 - DNA, 25 bp, Homo sapien
tatgggatcagcttacaagaaaacc

SEQ ID NO: 4652272 - DNA, 25 bp, Homo sapien
aagcagtctttggtctctatcacta

SEQ ID NO: 4652273 - DNA, 25 bp, Homo sapien
aaaaggccttgacctctgtctttag

SEQ ID NO: 4652274 - DNA, 25 bp, Homo sapien
tgtctttagatttatagtctaatgc

SEQ ID NO: 4652275 - DNA, 25 bp, Homo sapien
aaaggccttgacctctgtctttaga

SEQ ID NO: 4652276 - DNA, 25 bp, Homo sapien
ttagatttatagtctaatgcttact

SEQ ID NO: 4652277 - DNA, 25 bp, Homo sapien
aagctcctgcaggactgaagatgct

SEQ ID NO: 4652278 - DNA, 25 bp, Homo sapien
attcaacatgagaaatcacctcagg

SEQ ID NO: 4652279 - DNA, 25 bp, Homo sapien
caattcaacatgagaaatcacctca

SEQ ID NO: 4652280 - DNA, 25 bp, Homo sapien
ctcctgcaggactgaagatgctcct

SEQ ID NO: 4652281 - DNA, 25 bp, Homo sapien
caaacccacgaaaatgcagttaaca

SEQ ID NO: 4652282 - DNA, 25 bp, Homo sapien
gattgatggaattcaaacccacgaa

SEQ ID NO: 4652283 - DNA, 25 bp, Homo sapien
ggaattcaaacccacgaaaatgcag

SEQ ID NO: 4652284 - DNA, 25 bp, Homo sapien
ttcaaacccacgaaaatgcagttaa

SEQ ID NO: 4652285 - DNA, 25 bp, Homo sapien
taaggactgcaagactctgttctgc

SEQ ID NO: 4652286 - DNA, 25 bp, Homo sapien
tctgttctgcatcaattgaacacaa

SEQ ID NO: 4652287 - DNA, 25 bp, Homo sapien
caattgaacacaaatcaaccacttt

SEQ ID NO: 4652288 - DNA, 25 bp, Homo sapien
caagactctgttctgcatcaattga

SEQ ID NO: 4652289 - DNA, 25 bp, Homo sapien
gagttatgactgatgctgtctaggt

SEQ ID NO: 4652290 - DNA, 25 bp, Homo sapien
gctgtctaggtgttctgaaaatttc

SEQ ID NO: 4652291 - DNA, 25 bp, Homo sapien
tttccagactcaaagtgttcagaat

SEQ ID NO: 4652292 - DNA, 25 bp, Homo sapien
aaatttccagactcaaagtgttcag

SEQ ID NO: 4652293 - DNA, 25 bp, Homo sapien
tctccaacttcagccctatccagtc

SEQ ID NO: 4652294 - DNA, 25 bp, Homo sapien
tttctccaacttcagccctatccag

SEQ ID NO: 4652295 - DNA, 25 bp, Homo sapien
ccaacttcagccctatccagtcttc

SEQ ID NO: 4652296 - DNA, 25 bp, Homo sapien
tccaacttcagccctatccagtctt

SEQ ID NO: 4652297 - DNA, 25 bp, Homo sapien
gaatgcacaggcaaacccgaaagag

SEQ ID NO: 4652298 - DNA, 25 bp, Homo sapien
gggccatcccaacagatctcataga

SEQ ID NO: 4652299 - DNA, 25 bp, Homo sapien
caaacatagcaatatttcagaggca

SEQ ID NO: 4652300 - DNA, 25 bp, Homo sapien
taaaactggctgaccactcaaggag

SEQ ID NO: 4652301 - DNA, 25 bp, Homo sapien
cattcatttagttccgaaagcagca

SEQ ID NO: 4652302 - DNA, 25 bp, Homo sapien
gacattcatggagctctcagaccca

SEQ ID NO: 4652303 - DNA, 25 bp, Homo sapien
gacccagctctagtattctcagtaa

SEQ ID NO: 4652304 - DNA, 25 bp, Homo sapien
tgtttcagatgagcgtattcccaag

SEQ ID NO: 4652305 - DNA, 25 bp, Homo sapien
tcacccacgtccgtatgtctcagtg

SEQ ID NO: 4652306 - DNA, 25 bp, Homo sapien
acagcttgaattctatgacaccatc

SEQ ID NO: 4652307 - DNA, 25 bp, Homo sapien
catgttgatcaaaatgccgttgtga

SEQ ID NO: 4652308 - DNA, 25 bp, Homo sapien
ttttccttctgtggcaaacagcttg

SEQ ID NO: 4652309 - DNA, 25 bp, Homo sapien
tatccacagcaacaaagtacaaggg

SEQ ID NO: 4652310 - DNA, 25 bp, Homo sapien
tctgatagatgggtgagagtactgc

SEQ ID NO: 4652311 - DNA, 25 bp, Homo sapien
ggttattccgtataatgctgcagag

SEQ ID NO: 4652312 - DNA, 25 bp, Homo sapien
ctgaaattcattgtgaggacctggc

SEQ ID NO: 4652313 - DNA, 25 bp, Homo sapien
gacaatggtcatatcctgcaggaac

SEQ ID NO: 4652314 - DNA, 25 bp, Homo sapien
agtgttaaattccacaacttgcaga

SEQ ID NO: 4652315 - DNA, 25 bp, Homo sapien
acacaattatgtgccctaatagggc

SEQ ID NO: 4652316 - DNA, 25 bp, Homo sapien
caggaacatctcatgcgatgagtat

SEQ ID NO: 4652317 - DNA, 25 bp, Homo sapien
ttgggcagctggatgtaaagtgggc

SEQ ID NO: 4652318 - DNA, 25 bp, Homo sapien
cagctggatgtaaagtgggcagagc

SEQ ID NO: 4652319 - DNA, 25 bp, Homo sapien
gcatttgggcagctggatgtaaagt

SEQ ID NO: 4652320 - DNA, 25 bp, Homo sapien
cttgtaacccttgcatttgggcagc

SEQ ID NO: 4652321 - DNA, 25 bp, Homo sapien
ctaaatactttgatgccgctctcca

SEQ ID NO: 4652322 - DNA, 25 bp, Homo sapien
actttgatgccgctctccaccttca

SEQ ID NO: 4652323 - DNA, 25 bp, Homo sapien
tttgatgccgctctccaccttcact

SEQ ID NO: 4652324 - DNA, 25 bp, Homo sapien
aaatactttgatgccgctctccacc

SEQ ID NO: 4652325 - DNA, 25 bp, Homo sapien
gggcacactctatgtgaaggcactg

SEQ ID NO: 4652326 - DNA, 25 bp, Homo sapien
ctatcgggcacactctatgtgaagg

SEQ ID NO: 4652327 - DNA, 25 bp, Homo sapien
gcacactctatgtgaaggcactggc

SEQ ID NO: 4652328 - DNA, 25 bp, Homo sapien
tcgggcacactctatgtgaaggcac

SEQ ID NO: 4652329 - DNA, 25 bp, Homo sapien
tgttatgtaaatctggattcaaccg

SEQ ID NO: 4652330 - DNA, 25 bp, Homo sapien
tttgttatgtaaatctggattcaac

SEQ ID NO: 4652331 - DNA, 25 bp, Homo sapien
ttatgtaaatctggattcaaccgca

SEQ ID NO: 4652332 - DNA, 25 bp, Homo sapien
tatgtaaatctggattcaaccgcat

SEQ ID NO: 4652333 - DNA, 25 bp, Homo sapien
ctgggaatgatcttatgttgatcct

SEQ ID NO: 4652334 - DNA, 25 bp, Homo sapien
catcaatcctagagtaaagtttcct

SEQ ID NO: 4652335 - DNA, 25 bp, Homo sapien
tcttatgttgatcctatctgactct

SEQ ID NO: 4652336 - DNA, 25 bp, Homo sapien
gtcccatcaatcctagagtaaagtt

SEQ ID NO: 4652337 - DNA, 25 bp, Homo sapien
ccttggttgcccaaattatatgtac

SEQ ID NO: 4652338 - DNA, 25 bp, Homo sapien
gaagttttgttacaagatgacaggc

SEQ ID NO: 4652339 - DNA, 25 bp, Homo sapien
taaatccatttcctaccttggttgc

SEQ ID NO: 4652340 - DNA, 25 bp, Homo sapien
ttaagttgcaagaaagtggaacact

SEQ ID NO: 4652341 - DNA, 25 bp, Homo sapien
cccagtcctctgataaggagagtga

SEQ ID NO: 4652342 - DNA, 25 bp, Homo sapien
tcctctgataaggagagtgagacta

SEQ ID NO: 4652343 - DNA, 25 bp, Homo sapien
cagtcctctgataaggagagtgaga

SEQ ID NO: 4652344 - DNA, 25 bp, Homo sapien
ccccagtcctctgataaggagagtg

SEQ ID NO: 4652345 - DNA, 25 bp, Homo sapien
ttgtttctttagtgtggctactgct

SEQ ID NO: 4652346 - DNA, 25 bp, Homo sapien
gaaatcagggactggaagcctgtct

SEQ ID NO: 4652347 - DNA, 25 bp, Homo sapien
tctttagtgtggctactgcttttct

SEQ ID NO: 4652348 - DNA, 25 bp, Homo sapien
caggaaggcattgaaatcagggact

SEQ ID NO: 4652349 - DNA, 25 bp, Homo sapien
gaactgtgcagacctctttgggtga

SEQ ID NO: 4652350 - DNA, 25 bp, Homo sapien
taagtgcctacttcctatgcgtgcc

SEQ ID NO: 4652351 - DNA, 25 bp, Homo sapien
aattccccagggtagcagcgttcct

SEQ ID NO: 4652352 - DNA, 25 bp, Homo sapien
tccaagattactagaaggccaaggg

SEQ ID NO: 4652353 - DNA, 25 bp, Homo sapien
ttacaacacatcattgctacgactg

SEQ ID NO: 4652354 - DNA, 25 bp, Homo sapien
aacactgcggctgaatgattggtct

SEQ ID NO: 4652355 - DNA, 25 bp, Homo sapien
tgattcgtccagtacagccactgac

SEQ ID NO: 4652356 - DNA, 25 bp, Homo sapien
gattggtctcaacgtctagaagctg

SEQ ID NO: 4652357 - DNA, 25 bp, Homo sapien
tgggccagaggtatcctccagggaa

SEQ ID NO: 4652358 - DNA, 25 bp, Homo sapien
tatcctccagggaaaggatcagacc

SEQ ID NO: 4652359 - DNA, 25 bp, Homo sapien
ggatcagacctgcttgaaagcacat

SEQ ID NO: 4652360 - DNA, 25 bp, Homo sapien
tccagggaaaggatcagacctgctt

SEQ ID NO: 4652361 - DNA, 25 bp, Homo sapien
tttgctctttgagaagtagcattcc

SEQ ID NO: 4652362 - DNA, 25 bp, Homo sapien
gattgacatgaacatgcccctcttt

SEQ ID NO: 4652363 - DNA, 25 bp, Homo sapien
gttggagattttcataggaatgttc

SEQ ID NO: 4652364 - DNA, 25 bp, Homo sapien
ctatgcgattgacatgaacatgccc

SEQ ID NO: 4652365 - DNA, 25 bp, Homo sapien
tgagagtgagatattaaattcgtcc

SEQ ID NO: 4652366 - DNA, 25 bp, Homo sapien
aaattcgtccttagatctttcatgc

SEQ ID NO: 4652367 - DNA, 25 bp, Homo sapien
caatgttacagctctttggaactcc

SEQ ID NO: 4652368 - DNA, 25 bp, Homo sapien
cagtacccaagacctgagagtgaga

SEQ ID NO: 4652369 - DNA, 25 bp, Homo sapien
tatgcagaaattgtgcggaaacacc

SEQ ID NO: 4652370 - DNA, 25 bp, Homo sapien
ccattcacatggtaattcctttgta

SEQ ID NO: 4652371 - DNA, 25 bp, Homo sapien
aaaaatgcaaggcagcatatgcaga

SEQ ID NO: 4652372 - DNA, 25 bp, Homo sapien
gaataacttcttttcaggtggtgca

SEQ ID NO: 4652373 - DNA, 25 bp, Homo sapien
tctcacgctggtttatgtttgtcat

SEQ ID NO: 4652374 - DNA, 25 bp, Homo sapien
ctgctttctcacgctggtttatgtt

SEQ ID NO: 4652375 - DNA, 25 bp, Homo sapien
tttctcacgctggtttatgtttgtc

SEQ ID NO: 4652376 - DNA, 25 bp, Homo sapien
gctttctcacgctggtttatgtttg

SEQ ID NO: 4652377 - DNA, 25 bp, Homo sapien
tatttctgctaggagtgctgctgaa

SEQ ID NO: 4652378 - DNA, 25 bp, Homo sapien
ccgccaccgcactagaccctgggtt

SEQ ID NO: 4652379 - DNA, 25 bp, Homo sapien
tctctgtaacgagggatcagggcac

SEQ ID NO: 4652380 - DNA, 25 bp, Homo sapien
ccactgtgccatttagcagcttctc

SEQ ID NO: 4652381 - DNA, 25 bp, Homo sapien
tgtgaacaatgccagaattcgaccc

SEQ ID NO: 4652382 - DNA, 25 bp, Homo sapien
tatgtctcccatggtgaagcactgt

SEQ ID NO: 4652383 - DNA, 25 bp, Homo sapien
acaaggataactgtccaccagggac

SEQ ID NO: 4652384 - DNA, 25 bp, Homo sapien
caccagggaccaagctaagattggt

SEQ ID NO: 4652385 - DNA, 25 bp, Homo sapien
tggatcattaaagtgatagaccttg

SEQ ID NO: 4652386 - DNA, 25 bp, Homo sapien
gatcattaaagtgatagaccttgtt

SEQ ID NO: 4652387 - DNA, 25 bp, Homo sapien
catttggatcattaaagtgatagac

SEQ ID NO: 4652388 - DNA, 25 bp, Homo sapien
cattaaagtgatagaccttgtttaa

SEQ ID NO: 4652389 - DNA, 25 bp, Homo sapien
caacttagagccaaatccaaattac

SEQ ID NO: 4652390 - DNA, 25 bp, Homo sapien
tcaacttagagccaaatccaaatta

SEQ ID NO: 4652391 - DNA, 25 bp, Homo sapien
aaatgcacaattagagggtccctga

SEQ ID NO: 4652392 - DNA, 25 bp, Homo sapien
tcctcctgatgcaaacaaatgcaca

SEQ ID NO: 4652393 - DNA, 25 bp, Homo sapien
attccttgttccatcctcctgatgc

SEQ ID NO: 4652394 - DNA, 25 bp, Homo sapien
tgcacaattagagggtccctgatga

SEQ ID NO: 4652395 - DNA, 25 bp, Homo sapien
gcttttagtattggcaatgagttgt

SEQ ID NO: 4652396 - DNA, 25 bp, Homo sapien
ttatatatcgtacaattcaaccatt

SEQ ID NO: 4652397 - DNA, 25 bp, Homo sapien
gaatttaatagcttttagtattggc

SEQ ID NO: 4652398 - DNA, 25 bp, Homo sapien
taatagcttttagtattggcaatga

SEQ ID NO: 4652399 - DNA, 25 bp, Homo sapien
tacctgctgatctttgctaaatatt

SEQ ID NO: 4652400 - DNA, 25 bp, Homo sapien
cccctttatctgaaattaatatgct

SEQ ID NO: 4652401 - DNA, 25 bp, Homo sapien
ctttaatttacctgctgatctttgc

SEQ ID NO: 4652402 - DNA, 25 bp, Homo sapien
aattaatatgcttatccccactcat

SEQ ID NO: 4652403 - DNA, 25 bp, Homo sapien
gatggatgcttcaaaaaatctacct

SEQ ID NO: 4652404 - DNA, 25 bp, Homo sapien
tgatggtttgcaccattttattaat

SEQ ID NO: 4652405 - DNA, 25 bp, Homo sapien
tattcaaatgttgtcgctcttagtc

SEQ ID NO: 4652406 - DNA, 25 bp, Homo sapien
cttttctatagaaactatggttctg

SEQ ID NO: 4652407 - DNA, 25 bp, Homo sapien
aatcatggatattgtgtttaggttg

SEQ ID NO: 4652408 - DNA, 25 bp, Homo sapien
catggatattgtgtttaggttgtaa

SEQ ID NO: 4652409 - DNA, 25 bp, Homo sapien
catctgttccatcaacacaatcatg

SEQ ID NO: 4652410 - DNA, 25 bp, Homo sapien
ccatcaacacaatcatggatattgt

SEQ ID NO: 4652411 - DNA, 25 bp, Homo sapien
tgtttctttcttgcactctgcaggg

SEQ ID NO: 4652412 - DNA, 25 bp, Homo sapien
tttcttgcactctgcagggacaaac

SEQ ID NO: 4652413 - DNA, 25 bp, Homo sapien
tgcagggacaaaccatcccctcagc

SEQ ID NO: 4652414 - DNA, 25 bp, Homo sapien
tctttcttgcactctgcagggacaa

SEQ ID NO: 4652415 - DNA, 25 bp, Homo sapien
cctgataatagcagaaggctgctgt

SEQ ID NO: 4652416 - DNA, 25 bp, Homo sapien
tgaagcatataccaatgtgttgtgc

SEQ ID NO: 4652417 - DNA, 25 bp, Homo sapien
gcagcaggtgaagcatataccaatg

SEQ ID NO: 4652418 - DNA, 25 bp, Homo sapien
gcttttgtaacaatggtcgcctgat

SEQ ID NO: 4652419 - DNA, 25 bp, Homo sapien
gctgtttggatgaagctctgttccc

SEQ ID NO: 4652420 - DNA, 25 bp, Homo sapien
gtgaatgtcttatcagataagctgt

SEQ ID NO: 4652421 - DNA, 25 bp, Homo sapien
gggtaacacatcaaggacaatagca

SEQ ID NO: 4652422 - DNA, 25 bp, Homo sapien
gagaggtgtaactaatgtgttcagc

SEQ ID NO: 4652423 - DNA, 25 bp, Homo sapien
caaccagaggtgcatttcgagtcat

SEQ ID NO: 4652424 - DNA, 25 bp, Homo sapien
tatctaagccaaccagaggtgcatt

SEQ ID NO: 4652425 - DNA, 25 bp, Homo sapien
tcagctatctaagccaaccagaggt

SEQ ID NO: 4652426 - DNA, 25 bp, Homo sapien
tttcgagtcatgtctgtaaaaatta

SEQ ID NO: 4652427 - DNA, 25 bp, Homo sapien
ggaagatactctggttctcccatag

SEQ ID NO: 4652428 - DNA, 25 bp, Homo sapien
gatactctggttctcccatagttta

SEQ ID NO: 4652429 - DNA, 25 bp, Homo sapien
aagatactctggttctcccatagtt

SEQ ID NO: 4652430 - DNA, 25 bp, Homo sapien
tactctggttctcccatagtttata

SEQ ID NO: 4652431 - DNA, 25 bp, Homo sapien
gccaacaatcttgtttctccagctc

SEQ ID NO: 4652432 - DNA, 25 bp, Homo sapien
atgccaacaatcttgtttctccagc

SEQ ID NO: 4652433 - DNA, 25 bp, Homo sapien
tgccaacaatcttgtttctccagct

SEQ ID NO: 4652434 - DNA, 25 bp, Homo sapien
aatgccaacaatcttgtttctccag

SEQ ID NO: 4652435 - DNA, 25 bp, Homo sapien
gttggccttctcttctattttgaag

SEQ ID NO: 4652436 - DNA, 25 bp, Homo sapien
tgttggccttctcttctattttgaa

SEQ ID NO: 4652437 - DNA, 25 bp, Homo sapien
tttgttggccttctcttctattttg

SEQ ID NO: 4652438 - DNA, 25 bp, Homo sapien
ttggccttctcttctattttgaagt

SEQ ID NO: 4652439 - DNA, 25 bp, Homo sapien
ctgcttggctctctggtctaccttt

SEQ ID NO: 4652440 - DNA, 25 bp, Homo sapien
gcttggctctctggtctacctttaa

SEQ ID NO: 4652441 - DNA, 25 bp, Homo sapien
ttggctctctggtctacctttaaca

SEQ ID NO: 4652442 - DNA, 25 bp, Homo sapien
tggctctctggtctacctttaacat

SEQ ID NO: 4652443 - DNA, 25 bp, Homo sapien
agcgtggaaagcactggttgcactt

SEQ ID NO: 4652444 - DNA, 25 bp, Homo sapien
cagcgtggaaagcactggttgcact

SEQ ID NO: 4652445 - DNA, 25 bp, Homo sapien
ccagggtgaagcagcgtggaaagca

SEQ ID NO: 4652446 - DNA, 25 bp, Homo sapien
cagggtgaagcagcgtggaaagcac

SEQ ID NO: 4652447 - DNA, 25 bp, Homo sapien
ccattgagttaagctgggctgagta

SEQ ID NO: 4652448 - DNA, 25 bp, Homo sapien
aactggctatgcagaagatctgagc

SEQ ID NO: 4652449 - DNA, 25 bp, Homo sapien
ggatggctttagcagactgtctttg

SEQ ID NO: 4652450 - DNA, 25 bp, Homo sapien
ggctgagtagccttaaagaagggca

SEQ ID NO: 4652451 - DNA, 25 bp, Homo sapien
gaaattaacatgtcacctaggcctg

SEQ ID NO: 4652452 - DNA, 25 bp, Homo sapien
ccctgtgggcagttcacaacatgga

SEQ ID NO: 4652453 - DNA, 25 bp, Homo sapien
ctgctcagggtctcaataggatgaa

SEQ ID NO: 4652454 - DNA, 25 bp, Homo sapien
cctgaggttctcatctgggcttgga

SEQ ID NO: 4652455 - DNA, 25 bp, Homo sapien
tctttatctgcggtaacactcatta

SEQ ID NO: 4652456 - DNA, 25 bp, Homo sapien
tgtctgcacgtttgccaatatcagg

SEQ ID NO: 4652457 - DNA, 25 bp, Homo sapien
gaaaacagtgttgcatgtctgcacg

SEQ ID NO: 4652458 - DNA, 25 bp, Homo sapien
tttgccaatatcaggctttctcttg

SEQ ID NO: 4652459 - DNA, 25 bp, Homo sapien
tcccctgagtccttggcatttctgg

SEQ ID NO: 4652460 - DNA, 25 bp, Homo sapien
tttctggcccttctgaacacgatgg

SEQ ID NO: 4652461 - DNA, 25 bp, Homo sapien
cacgttggcctctacacagtaagcg

SEQ ID NO: 4652462 - DNA, 25 bp, Homo sapien
agcgtccccaggtgccggagtttga

SEQ ID NO: 4652463 - DNA, 25 bp, Homo sapien
ccttctacagtggtatggcagcatc

SEQ ID NO: 4652464 - DNA, 25 bp, Homo sapien
tctctgggctgtgacaacgttgaag

SEQ ID NO: 4652465 - DNA, 25 bp, Homo sapien
tcagagtcttgtggttgggaatcag

SEQ ID NO: 4652466 - DNA, 25 bp, Homo sapien
tgaatttctgaactaaccaggagga

SEQ ID NO: 4652467 - DNA, 25 bp, Homo sapien
agaccactgattgctttactcataa

SEQ ID NO: 4652468 - DNA, 25 bp, Homo sapien
cagatggaaaaactgttcggagatt

SEQ ID NO: 4652469 - DNA, 25 bp, Homo sapien
tcccaaacagaattgatgtcacaga

SEQ ID NO: 4652470 - DNA, 25 bp, Homo sapien
agatttcaaccccagaccactgatt

SEQ ID NO: 4652471 - DNA, 25 bp, Homo sapien
cttagagcacgcactggccaggtga

SEQ ID NO: 4652472 - DNA, 25 bp, Homo sapien
ggcagagcaaacactccggctaaca

SEQ ID NO: 4652473 - DNA, 25 bp, Homo sapien
gaatgaatgctttgacctggaggaa

SEQ ID NO: 4652474 - DNA, 25 bp, Homo sapien
tggcttgtctgtactctgtgaggca

SEQ ID NO: 4652475 - DNA, 25 bp, Homo sapien
ttttgtgtttcgaagacacggcttc

SEQ ID NO: 4652476 - DNA, 25 bp, Homo sapien
gtttcgaagacacggcttcttagtg

SEQ ID NO: 4652477 - DNA, 25 bp, Homo sapien
gaagacacggcttcttagtggccat

SEQ ID NO: 4652478 - DNA, 25 bp, Homo sapien
ttcatttttgtgtttcgaagacacg

SEQ ID NO: 4652479 - DNA, 25 bp, Homo sapien
ttggtgggcttatttaaaatggcat

SEQ ID NO: 4652480 - DNA, 25 bp, Homo sapien
gtgggcttatttaaaatggcattca

SEQ ID NO: 4652481 - DNA, 25 bp, Homo sapien
gttggtgggcttatttaaaatggca

SEQ ID NO: 4652482 - DNA, 25 bp, Homo sapien
ggtgggcttatttaaaatggcattc

SEQ ID NO: 4652483 - DNA, 25 bp, Homo sapien
gcattaatgtacagaaccagagagg

SEQ ID NO: 4652484 - DNA, 25 bp, Homo sapien
ccagagaggcggaagcaatgtttga

SEQ ID NO: 4652485 - DNA, 25 bp, Homo sapien
gatttctaaggcctgccactgtggc

SEQ ID NO: 4652486 - DNA, 25 bp, Homo sapien
agctgggattgttaatagtcttctc

SEQ ID NO: 4652487 - DNA, 25 bp, Homo sapien
tttgtcaagatatcatcactatcac

SEQ ID NO: 4652488 - DNA, 25 bp, Homo sapien
atcaaaatgctgcattgaatcatct

SEQ ID NO: 4652489 - DNA, 25 bp, Homo sapien
agatatcatcactatcacatctatc

SEQ ID NO: 4652490 - DNA, 25 bp, Homo sapien
tcaaaatgctgcattgaatcatctg

SEQ ID NO: 4652491 - DNA, 25 bp, Homo sapien
acgtggccgactacgctgcctctga

SEQ ID NO: 4652492 - DNA, 25 bp, Homo sapien
gcggccgcccgtaattaaatagcat

SEQ ID NO: 4652493 - DNA, 25 bp, Homo sapien
gctcaagctggtgcagaatctgttt

SEQ ID NO: 4652494 - DNA, 25 bp, Homo sapien
tttgctgagggcaatgatctgttcc

SEQ ID NO: 4652495 - DNA, 25 bp, Homo sapien
gaaggactataagcaggctctggtg

SEQ ID NO: 4652496 - DNA, 25 bp, Homo sapien
aagggctgcagttcattcagtcgac

SEQ ID NO: 4652497 - DNA, 25 bp, Homo sapien
ttccgcaaggcacgcgctctcaatg

SEQ ID NO: 4652498 - DNA, 25 bp, Homo sapien
agcaagaagaatatgaggcctttct

SEQ ID NO: 4652499 - DNA, 25 bp, Homo sapien
tctcaatgaactgggacgccacaag

SEQ ID NO: 4652500 - DNA, 25 bp, Homo sapien
gcatgtcaatagggccgcctgctac

SEQ ID NO: 4652501 - DNA, 25 bp, Homo sapien
gcataccatttatcgggctcggcgc

SEQ ID NO: 4652502 - DNA, 25 bp, Homo sapien
ctcttcccactttgaccatgatttc

SEQ ID NO: 4652503 - DNA, 25 bp, Homo sapien
tagctgtagctgtacgtcagtgttt

SEQ ID NO: 4652504 - DNA, 25 bp, Homo sapien
caccatgaagggcaaatagaaggct

SEQ ID NO: 4652505 - DNA, 25 bp, Homo sapien
tacgtcagtgtttcaggcttttgtc

SEQ ID NO: 4652506 - DNA, 25 bp, Homo sapien
caatgtctcacgtaaaaggccaaag

SEQ ID NO: 4652507 - DNA, 25 bp, Homo sapien
ggttgggctccatctatcattctac

SEQ ID NO: 4652508 - DNA, 25 bp, Homo sapien
tgtgaaaatcatgagtcagtgcagc

SEQ ID NO: 4652509 - DNA, 25 bp, Homo sapien
tcagtgcagctaggtctggtttgag

SEQ ID NO: 4652510 - DNA, 25 bp, Homo sapien
cactctcctgcgtctatttgtattc

SEQ ID NO: 4652511 - DNA, 25 bp, Homo sapien
cttcatttgaatgggaatccttagc

SEQ ID NO: 4652512 - DNA, 25 bp, Homo sapien
gggaatccttagcatggccctgaca

SEQ ID NO: 4652513 - DNA, 25 bp, Homo sapien
gattgtccgcggctgcttcatttga

SEQ ID NO: 4652514 - DNA, 25 bp, Homo sapien
tacatggctgagcaaatcatatttg

SEQ ID NO: 4652515 - DNA, 25 bp, Homo sapien
atgaatctacctaaacattgagagc

SEQ ID NO: 4652516 - DNA, 25 bp, Homo sapien
atttatggggagcattagcaaagcc

SEQ ID NO: 4652517 - DNA, 25 bp, Homo sapien
cattgagagcatcttaggtaattta

SEQ ID NO: 4652518 - DNA, 25 bp, Homo sapien
gttcttcatcagagttttggcggga

SEQ ID NO: 4652519 - DNA, 25 bp, Homo sapien
cttcatcagagttttggcgggagat

SEQ ID NO: 4652520 - DNA, 25 bp, Homo sapien
ttcttcatcagagttttggcgggag

SEQ ID NO: 4652521 - DNA, 25 bp, Homo sapien
ctgttcttcatcagagttttggcgg

SEQ ID NO: 4652522 - DNA, 25 bp, Homo sapien
cttttcaacaggcagcaactgaaat

SEQ ID NO: 4652523 - DNA, 25 bp, Homo sapien
gatcttccaccttttcaacaggcag

SEQ ID NO: 4652524 - DNA, 25 bp, Homo sapien
catgagaagtgtttggcccaagatc

SEQ ID NO: 4652525 - DNA, 25 bp, Homo sapien
gaacacaggcatgagaagtgtttgg

SEQ ID NO: 4652526 - DNA, 25 bp, Homo sapien
tgtttgacattctggagattgaatc

SEQ ID NO: 4652527 - DNA, 25 bp, Homo sapien
cacgtgaggtggccttgtttgacat

SEQ ID NO: 4652528 - DNA, 25 bp, Homo sapien
acgtgaggtggccttgtttgacatt

SEQ ID NO: 4652529 - DNA, 25 bp, Homo sapien
tcacgtgaggtggccttgtttgaca

SEQ ID NO: 4652530 - DNA, 25 bp, Homo sapien
ccagaagaacggtggttctcaacaa

SEQ ID NO: 4652531 - DNA, 25 bp, Homo sapien
tgtcaagatgccagaagaacggtgg

SEQ ID NO: 4652532 - DNA, 25 bp, Homo sapien
gatgccagaagaacggtggttctca

SEQ ID NO: 4652533 - DNA, 25 bp, Homo sapien
cggtggttctcaacaattttggcca

SEQ ID NO: 4652534 - DNA, 25 bp, Homo sapien
tctcttttagggcactggctccgag

SEQ ID NO: 4652535 - DNA, 25 bp, Homo sapien
tcagtatcttgagcctcataacttc

SEQ ID NO: 4652536 - DNA, 25 bp, Homo sapien
gggtcagctgaaaatgaaagacgat

SEQ ID NO: 4652537 - DNA, 25 bp, Homo sapien
tgaggtgttcactaccaattctctg

SEQ ID NO: 4652538 - DNA, 25 bp, Homo sapien
tcagtacgtttattgttcttattga

SEQ ID NO: 4652539 - DNA, 25 bp, Homo sapien
tgcattctgcttcagttggctctac

SEQ ID NO: 4652540 - DNA, 25 bp, Homo sapien
cagttggctctacatttggtgtgat

SEQ ID NO: 4652541 - DNA, 25 bp, Homo sapien
gatttgatcagtacgtttattgttc

SEQ ID NO: 4652542 - DNA, 25 bp, Homo sapien
gtgaggggcaaaactgggcatttcc

SEQ ID NO: 4652543 - DNA, 25 bp, Homo sapien
ggaggtccgataataagtccagtgg

SEQ ID NO: 4652544 - DNA, 25 bp, Homo sapien
tccgataataagtccagtggtccac

SEQ ID NO: 4652545 - DNA, 25 bp, Homo sapien
ttgagcaaggaggtccgataataag

SEQ ID NO: 4652546 - DNA, 25 bp, Homo sapien
tggggtgtgcctgggatggccagag

SEQ ID NO: 4652547 - DNA, 25 bp, Homo sapien
tgttggctggggtgtgcctgggatg

SEQ ID NO: 4652548 - DNA, 25 bp, Homo sapien
ggtgtgcctgggatggccagagcca

SEQ ID NO: 4652549 - DNA, 25 bp, Homo sapien
gctggggtgtgcctgggatggccag

SEQ ID NO: 4652550 - DNA, 25 bp, Homo sapien
tgctttagcagcctacggtccttct

SEQ ID NO: 4652551 - DNA, 25 bp, Homo sapien
agcctacggtccttctgcatcaggg

SEQ ID NO: 4652552 - DNA, 25 bp, Homo sapien
gggctttcgatgttgacggtataat

SEQ ID NO: 4652553 - DNA, 25 bp, Homo sapien
atgttgacggtataatgtgtgggta

SEQ ID NO: 4652554 - DNA, 25 bp, Homo sapien
tgaagaagtcagcttacattcattg

SEQ ID NO: 4652555 - DNA, 25 bp, Homo sapien
aagaagtcagcttacattcattgcc

SEQ ID NO: 4652556 - DNA, 25 bp, Homo sapien
gaagtcagcttacattcattgcctc

SEQ ID NO: 4652557 - DNA, 25 bp, Homo sapien
catgaagaagtcagcttacattcat

SEQ ID NO: 4652558 - DNA, 25 bp, Homo sapien
gggaatatccataaagatataccac

SEQ ID NO: 4652559 - DNA, 25 bp, Homo sapien
tagttcagggttctcttcaccacaa

SEQ ID NO: 4652560 - DNA, 25 bp, Homo sapien
tatccataaagatataccaccttcc

SEQ ID NO: 4652561 - DNA, 25 bp, Homo sapien
ttagttcagggttctcttcaccaca

SEQ ID NO: 4652562 - DNA, 25 bp, Homo sapien
tgtcttcagctggagtgtgagagag

SEQ ID NO: 4652563 - DNA, 25 bp, Homo sapien
tgcctaaattaatctccatactcat

SEQ ID NO: 4652564 - DNA, 25 bp, Homo sapien
aatgtgtagcttgtggttgcctaaa

SEQ ID NO: 4652565 - DNA, 25 bp, Homo sapien
tgcaaatgaattccctacactgtca

SEQ ID NO: 4652566 - DNA, 25 bp, Homo sapien
gctgccttagcctgggctgatgcta

SEQ ID NO: 4652567 - DNA, 25 bp, Homo sapien
ttgcagagggttcaagctggctctt

SEQ ID NO: 4652568 - DNA, 25 bp, Homo sapien
tcccttccactagctagctgctgtc

SEQ ID NO: 4652569 - DNA, 25 bp, Homo sapien
agaattttagaggttccttgctgcc

SEQ ID NO: 4652570 - DNA, 25 bp, Homo sapien
gaatagtttgctaatttctgtgtcc

SEQ ID NO: 4652571 - DNA, 25 bp, Homo sapien
aagttaggagtgaaacaaaaatgat

SEQ ID NO: 4652572 - DNA, 25 bp, Homo sapien
agatgggaatagtttgctaatttct

SEQ ID NO: 4652573 - DNA, 25 bp, Homo sapien
ctctccctggggaaattatccacag

SEQ ID NO: 4652574 - DNA, 25 bp, Homo sapien
gcagtgtattgattcctgggaaagg

SEQ ID NO: 4652575 - DNA, 25 bp, Homo sapien
gtaaatagcccagataactcatttt

SEQ ID NO: 4652576 - DNA, 25 bp, Homo sapien
tgcctttggtaaatagcccagataa

SEQ ID NO: 4652577 - DNA, 25 bp, Homo sapien
aacaacagactcttatgagcggtgg

SEQ ID NO: 4652578 - DNA, 25 bp, Homo sapien
cctccaatcagctgaaaaggattaa

SEQ ID NO: 4652579 - DNA, 25 bp, Homo sapien
ttctaaagtaatgttccaattgagc

SEQ ID NO: 4652580 - DNA, 25 bp, Homo sapien
tgtaatcattccctccaatcagctg

SEQ ID NO: 4652581 - DNA, 25 bp, Homo sapien
aagattgctgcctattaaagatggg

SEQ ID NO: 4652582 - DNA, 25 bp, Homo sapien
cagcagtgatctacagcttcagcac

SEQ ID NO: 4652583 - DNA, 25 bp, Homo sapien
agcagtgatctacagcttcagcacc

SEQ ID NO: 4652584 - DNA, 25 bp, Homo sapien
atcacaggcagctagacgtgggagc

SEQ ID NO: 4652585 - DNA, 25 bp, Homo sapien
tagatcacaggcagctagacgtggg

SEQ ID NO: 4652586 - DNA, 25 bp, Homo sapien
caggcagctagacgtgggagcttcc

SEQ ID NO: 4652587 - DNA, 25 bp, Homo sapien
ctaaatagatcacaggcagctagac

SEQ ID NO: 4652588 - DNA, 25 bp, Homo sapien
gcggcattcatcacttaaacgtaat

SEQ ID NO: 4652589 - DNA, 25 bp, Homo sapien
cgtaatatatttataatcagggcca

SEQ ID NO: 4652590 - DNA, 25 bp, Homo sapien
ttccttctgaatgcggcattcatca

SEQ ID NO: 4652591 - DNA, 25 bp, Homo sapien
aacgtaatatatttataatcagggc

SEQ ID NO: 4652592 - DNA, 25 bp, Homo sapien
atcaaaccatggcattgttcatctg

SEQ ID NO: 4652593 - DNA, 25 bp, Homo sapien
tactagttctgtggtgagtgggtca

SEQ ID NO: 4652594 - DNA, 25 bp, Homo sapien
gtgatcaaaattaaatgctagggca

SEQ ID NO: 4652595 - DNA, 25 bp, Homo sapien
gatgtgggtacactctaatgtcaaa

SEQ ID NO: 4652596 - DNA, 25 bp, Homo sapien
ggatcaagagactgacccaaatgga

SEQ ID NO: 4652597 - DNA, 25 bp, Homo sapien
gatttgggccagaggaaaaatgcca

SEQ ID NO: 4652598 - DNA, 25 bp, Homo sapien
ggtgattcttatccaagatcaggga

SEQ ID NO: 4652599 - DNA, 25 bp, Homo sapien
ttgatgtcaacatggatccaaggga

SEQ ID NO: 4652600 - DNA, 25 bp, Homo sapien
tgtctggatcctcctgcagaaatcc

SEQ ID NO: 4652601 - DNA, 25 bp, Homo sapien
ataatgcttgataaacgactgagag

SEQ ID NO: 4652602 - DNA, 25 bp, Homo sapien
tcctgtctggatcctcctgcagaaa

SEQ ID NO: 4652603 - DNA, 25 bp, Homo sapien
tgataaacgactgagagagcactgc

SEQ ID NO: 4652604 - DNA, 25 bp, Homo sapien
tcaggaaccgcacctaactcacttt

SEQ ID NO: 4652605 - DNA, 25 bp, Homo sapien
gaatgtcaaattcctggaggtcagg

SEQ ID NO: 4652606 - DNA, 25 bp, Homo sapien
tctgcccattgccataggagaaact

SEQ ID NO: 4652607 - DNA, 25 bp, Homo sapien
gcctcacattttggccgttgtgtgc

SEQ ID NO: 4652608 - DNA, 25 bp, Homo sapien
aagaacctggtgccgatcagatcca

SEQ ID NO: 4652609 - DNA, 25 bp, Homo sapien
acctggtgccgatcagatccatgat

SEQ ID NO: 4652610 - DNA, 25 bp, Homo sapien
agatccatcccttccacacagttca

SEQ ID NO: 4652611 - DNA, 25 bp, Homo sapien
agcaccaatgcctttatcatggagc

SEQ ID NO: 4652612 - DNA, 25 bp, Homo sapien
agctggatactctttcttgcagagg

SEQ ID NO: 4652613 - DNA, 25 bp, Homo sapien
ccagaatctctagagatgaggtcca

SEQ ID NO: 4652614 - DNA, 25 bp, Homo sapien
gtagcattagcatcacgtaggaact

SEQ ID NO: 4652615 - DNA, 25 bp, Homo sapien
agtactccaggtatagccctctgag

SEQ ID NO: 4652616 - DNA, 25 bp, Homo sapien
cttgaagacagatagaaagaaggta

SEQ ID NO: 4652617 - DNA, 25 bp, Homo sapien
ttgaagacagatagaaagaaggtaa

SEQ ID NO: 4652618 - DNA, 25 bp, Homo sapien
agacagatagaaagaaggtaaagcc

SEQ ID NO: 4652619 - DNA, 25 bp, Homo sapien
cagatagaaagaaggtaaagcccat

SEQ ID NO: 4652620 - DNA, 25 bp, Homo sapien
ggcagaaccaagactaagatccagg

SEQ ID NO: 4652621 - DNA, 25 bp, Homo sapien
aatttccatgtctgcgaggtctccg

SEQ ID NO: 4652622 - DNA, 25 bp, Homo sapien
gatccaggtgctatgacttccgatg

SEQ ID NO: 4652623 - DNA, 25 bp, Homo sapien
ggtaatcctccatgttagggcagta

SEQ ID NO: 4652624 - DNA, 25 bp, Homo sapien
ctcttctttattatgatcaattctc

SEQ ID NO: 4652625 - DNA, 25 bp, Homo sapien
acctccatccccgaagacagtaggg

SEQ ID NO: 4652626 - DNA, 25 bp, Homo sapien
tgaggtgccagttcctccggaaacg

SEQ ID NO: 4652627 - DNA, 25 bp, Homo sapien
catccccgaagacagtagggctcat

SEQ ID NO: 4652628 - DNA, 25 bp, Homo sapien
gtctgctcatgtttggtttgtgctg

SEQ ID NO: 4652629 - DNA, 25 bp, Homo sapien
gctcatgtttggtttgtgctgaacc

SEQ ID NO: 4652630 - DNA, 25 bp, Homo sapien
gttggatttagaaatgtgtctgctc

SEQ ID NO: 4652631 - DNA, 25 bp, Homo sapien
caacagattgtgtaagcagcatgac

SEQ ID NO: 4652632 - DNA, 25 bp, Homo sapien
gctcaagaatgtagtgacagaggta

SEQ ID NO: 4652633 - DNA, 25 bp, Homo sapien
ctaatcttgtagctcaagaatgtag

SEQ ID NO: 4652634 - DNA, 25 bp, Homo sapien
tgtagctcaagaatgtagtgacaga

SEQ ID NO: 4652635 - DNA, 25 bp, Homo sapien
caagaatgtagtgacagaggtagtc

SEQ ID NO: 4652636 - DNA, 25 bp, Homo sapien
tcggcttcagaacagcacccagtga

SEQ ID NO: 4652637 - DNA, 25 bp, Homo sapien
gggtctctcactcggcttcagaaca

SEQ ID NO: 4652638 - DNA, 25 bp, Homo sapien
agtcactgagcatacagctgtacaa

SEQ ID NO: 4652639 - DNA, 25 bp, Homo sapien
tacagctgtacaacacgggtctctc

SEQ ID NO: 4652640 - DNA, 25 bp, Homo sapien
gccagtgctggtcataatggctgag

SEQ ID NO: 4652641 - DNA, 25 bp, Homo sapien
cctgtataaggtgctctgccagtgc

SEQ ID NO: 4652642 - DNA, 25 bp, Homo sapien
gtcataatggctgaggttagtaagc

SEQ ID NO: 4652643 - DNA, 25 bp, Homo sapien
taccctcttcataagcgctgcttcc

SEQ ID NO: 4652644 - DNA, 25 bp, Homo sapien
cctgctgcaaaggcttatttgtctc

SEQ ID NO: 4652645 - DNA, 25 bp, Homo sapien
ctgctgcaaaggcttatttgtctcc

SEQ ID NO: 4652646 - DNA, 25 bp, Homo sapien
tggattctgcatgaccacaaactca

SEQ ID NO: 4652647 - DNA, 25 bp, Homo sapien
attctgcatgaccacaaactcagag

SEQ ID NO: 4652648 - DNA, 25 bp, Homo sapien
ggattctgcatgaccacaaactcag

SEQ ID NO: 4652649 - DNA, 25 bp, Homo sapien
tctggattctgcatgaccacaaact

SEQ ID NO: 4652650 - DNA, 25 bp, Homo sapien
atgaaggccaagccactcccaggga

SEQ ID NO: 4652651 - DNA, 25 bp, Homo sapien
gactggatatgacacaactgtggaa

SEQ ID NO: 4652652 - DNA, 25 bp, Homo sapien
gagtgactggatatgacacaactgt

SEQ ID NO: 4652653 - DNA, 25 bp, Homo sapien
cactaattgtgcttgcccgtgagtg

SEQ ID NO: 4652654 - DNA, 25 bp, Homo sapien
acccgcacttggcagtaccactaat

SEQ ID NO: 4652655 - DNA, 25 bp, Homo sapien
agaatttttctcgatggtcaccccg

SEQ ID NO: 4652656 - DNA, 25 bp, Homo sapien
aactcattgatttttgcggcagact

SEQ ID NO: 4652657 - DNA, 25 bp, Homo sapien
gttatgctccctttagcaagctggg

SEQ ID NO: 4652658 - DNA, 25 bp, Homo sapien
tgatttttgcggcagactgagtcct

SEQ ID NO: 4652659 - DNA, 25 bp, Homo sapien
gcaagtcttccagctagatcaggca

SEQ ID NO: 4652660 - DNA, 25 bp, Homo sapien
tctgtaactggggtaccgcttggaa

SEQ ID NO: 4652661 - DNA, 25 bp, Homo sapien
tttgggcgttcagaacagccccctg

SEQ ID NO: 4652662 - DNA, 25 bp, Homo sapien
ccattcaggaccacatggagttctg

SEQ ID NO: 4652663 - DNA, 25 bp, Homo sapien
tagatgggttttagcctttccagcc

SEQ ID NO: 4652664 - DNA, 25 bp, Homo sapien
ttagatgggttttagcctttccagc

SEQ ID NO: 4652665 - DNA, 25 bp, Homo sapien
gcaaactcccgtgtctctctaggtg

SEQ ID NO: 4652666 - DNA, 25 bp, Homo sapien
cagctgacagcaaactcccgtgtct

SEQ ID NO: 4652667 - DNA, 25 bp, Homo sapien
tatctaatgtcaatttccatggaaa

SEQ ID NO: 4652668 - DNA, 25 bp, Homo sapien
tcagaaaggccgctgacagccggcc

SEQ ID NO: 4652669 - DNA, 25 bp, Homo sapien
gattgaggaacggaatctgccgact

SEQ ID NO: 4652670 - DNA, 25 bp, Homo sapien
tcactttccgtcctttgtagagcag

SEQ ID NO: 4652671 - DNA, 25 bp, Homo sapien
ggatcacgccttgcccaagtgtgag

SEQ ID NO: 4652672 - DNA, 25 bp, Homo sapien
tctacaaagaggaggcgacaagtcc

SEQ ID NO: 4652673 - DNA, 25 bp, Homo sapien
gatcaacaccctcaaccacggggag

SEQ ID NO: 4652674 - DNA, 25 bp, Homo sapien
ccgacgccctcatcggacccggaat

SEQ ID NO: 4652675 - DNA, 25 bp, Homo sapien
ggcatgctcgccagatcaacaccct

SEQ ID NO: 4652676 - DNA, 25 bp, Homo sapien
gcagacggtcagatgcagcctgtcc

SEQ ID NO: 4652677 - DNA, 25 bp, Homo sapien
gcttcatgagccctaaagagcttga

SEQ ID NO: 4652678 - DNA, 25 bp, Homo sapien
cagagtgccaagtccgtaggcagcg

SEQ ID NO: 4652679 - DNA, 25 bp, Homo sapien
tatagctaacaatttcacatccaga

SEQ ID NO: 4652680 - DNA, 25 bp, Homo sapien
cgaatgaaggtttttgacacgatca

SEQ ID NO: 4652681 - DNA, 25 bp, Homo sapien
tgcttttgctgtatgcatgaatggg

SEQ ID NO: 4652682 - DNA, 25 bp, Homo sapien
tcccaaggggaatcagcatggcagc

SEQ ID NO: 4652683 - DNA, 25 bp, Homo sapien
ctgctggtggtttcagggttcgaac

SEQ ID NO: 4652684 - DNA, 25 bp, Homo sapien
caaacacttttcctgcggggaggag

SEQ ID NO: 4652685 - DNA, 25 bp, Homo sapien
cacagatgacttagtcaagtcctga

SEQ ID NO: 4652686 - DNA, 25 bp, Homo sapien
aaggaggtataaatgtaagtgctgt

SEQ ID NO: 4652687 - DNA, 25 bp, Homo sapien
ggacaacaaactctgtgtcctcatc

SEQ ID NO: 4652688 - DNA, 25 bp, Homo sapien
caagtcctgacctaatggcttttta

SEQ ID NO: 4652689 - DNA, 25 bp, Homo sapien
tataatctttttatcatttcctcac

SEQ ID NO: 4652690 - DNA, 25 bp, Homo sapien
ctataatctttttatcatttcctca

SEQ ID NO: 4652691 - DNA, 25 bp, Homo sapien
tcactgccattaggcctgttggtga

SEQ ID NO: 4652692 - DNA, 25 bp, Homo sapien
ttaggcttgattcttcttgacgtgc

SEQ ID NO: 4652693 - DNA, 25 bp, Homo sapien
cttttgcagatgtaggacaggcatt

SEQ ID NO: 4652694 - DNA, 25 bp, Homo sapien
gatggtactcatgcagtctaagcgt

SEQ ID NO: 4652695 - DNA, 25 bp, Homo sapien
ggtacagctgcaccctttttgcata

SEQ ID NO: 4652696 - DNA, 25 bp, Homo sapien
aaagcaaggtcatgcacgggcttcc

SEQ ID NO: 4652697 - DNA, 25 bp, Homo sapien
gctggctaaagcaaggtcatgcacg

SEQ ID NO: 4652698 - DNA, 25 bp, Homo sapien
ctgcctcgctggctaaagcaaggtc

SEQ ID NO: 4652699 - DNA, 25 bp, Homo sapien
tagcttgagtgggtggctgtgatca

SEQ ID NO: 4652700 - DNA, 25 bp, Homo sapien
cttgagtgggtggctgtgatcaaat

SEQ ID NO: 4652701 - DNA, 25 bp, Homo sapien
aggtagcttgagtgggtggctgtga

SEQ ID NO: 4652702 - DNA, 25 bp, Homo sapien
cttgaggtagcttgagtgggtggct

SEQ ID NO: 4652703 - DNA, 25 bp, Homo sapien
ggatagctcttgaatgcagatttat

SEQ ID NO: 4652704 - DNA, 25 bp, Homo sapien
agatttggtttgtggatagctcttg

SEQ ID NO: 4652705 - DNA, 25 bp, Homo sapien
tattgttgttgccttacacagtatt

SEQ ID NO: 4652706 - DNA, 25 bp, Homo sapien
gcagatttattgttgttgccttaca

SEQ ID NO: 4652707 - DNA, 25 bp, Homo sapien
aagctgttaagaaactgtatggaag

SEQ ID NO: 4652708 - DNA, 25 bp, Homo sapien
taggtagaaagctgttaagaaactg

SEQ ID NO: 4652709 - DNA, 25 bp, Homo sapien
tgttaagaaactgtatggaagcttt

SEQ ID NO: 4652710 - DNA, 25 bp, Homo sapien
gctgttaagaaactgtatggaagct

SEQ ID NO: 4652711 - DNA, 25 bp, Homo sapien
agtcgtgttctcgtaatgcttccca

SEQ ID NO: 4652712 - DNA, 25 bp, Homo sapien
ttcccatcttgttgtgttgagaagg

SEQ ID NO: 4652713 - DNA, 25 bp, Homo sapien
cagtatttagtaggagtcgtgttct

SEQ ID NO: 4652714 - DNA, 25 bp, Homo sapien
ggtacggcaaagaaatgtgtcacag

SEQ ID NO: 4652715 - DNA, 25 bp, Homo sapien
gcagctgcgttgctttgcaggcagg

SEQ ID NO: 4652716 - DNA, 25 bp, Homo sapien
gccctgtttgggctgtatggccttt

SEQ ID NO: 4652717 - DNA, 25 bp, Homo sapien
ccctgtttgggctgtatggcctttc

SEQ ID NO: 4652718 - DNA, 25 bp, Homo sapien
agcagctgcgttgctttgcaggcag

SEQ ID NO: 4652719 - DNA, 25 bp, Homo sapien
agcagatatcctgaaggaggcctct

SEQ ID NO: 4652720 - DNA, 25 bp, Homo sapien
gagctattggtgagcaaggcactgt

SEQ ID NO: 4652721 - DNA, 25 bp, Homo sapien
gatgggagaaatcttaagactctga

SEQ ID NO: 4652722 - DNA, 25 bp, Homo sapien
cttttcatgagctattggtgagcaa

SEQ ID NO: 4652723 - DNA, 25 bp, Homo sapien
caagagcctctgcattaagaacata

SEQ ID NO: 4652724 - DNA, 25 bp, Homo sapien
taagaacataaacaattaagggcac

SEQ ID NO: 4652725 - DNA, 25 bp, Homo sapien
ggcacttgagttgctctgctgagag

SEQ ID NO: 4652726 - DNA, 25 bp, Homo sapien
gctgcgaagataggagagctttctc

SEQ ID NO: 4652727 - DNA, 25 bp, Homo sapien
tgctctcaaacaagctccaaagttg

SEQ ID NO: 4652728 - DNA, 25 bp, Homo sapien
agctccaaagttggccgccttctga

SEQ ID NO: 4652729 - DNA, 25 bp, Homo sapien
gtgtgctgagaagctccgcgttcat

SEQ ID NO: 4652730 - DNA, 25 bp, Homo sapien
ggccgccttctgatctgggtgtgct

SEQ ID NO: 4652731 - DNA, 25 bp, Homo sapien
cttataagtacagtggccagccagt

SEQ ID NO: 4652732 - DNA, 25 bp, Homo sapien
gccagtgtattgacacgcacagaca

SEQ ID NO: 4652733 - DNA, 25 bp, Homo sapien
ccagtgtattgacacgcacagacac

SEQ ID NO: 4652734 - DNA, 25 bp, Homo sapien
ggttgctcctcaggagcatagtctt

SEQ ID NO: 4652735 - DNA, 25 bp, Homo sapien
cattgaggaccccagtgtgtggaac

SEQ ID NO: 4652736 - DNA, 25 bp, Homo sapien
atgctgtggccttccggttgctcct

SEQ ID NO: 4652737 - DNA, 25 bp, Homo sapien
ggaaccaggcccttcaatgctgtgg

SEQ ID NO: 4652738 - DNA, 25 bp, Homo sapien
tcccttttgccggtttgcactgttc

SEQ ID NO: 4652739 - DNA, 25 bp, Homo sapien
tcttcccgggccgcctcttctcttg

SEQ ID NO: 4652740 - DNA, 25 bp, Homo sapien
ttcccgggccgcctcttctcttgtc

SEQ ID NO: 4652741 - DNA, 25 bp, Homo sapien
ttttgccggtttgcactgttccagg

SEQ ID NO: 4652742 - DNA, 25 bp, Homo sapien
caagttcactatcccggagtccctg

SEQ ID NO: 4652743 - DNA, 25 bp, Homo sapien
tcctgcaggcgcagtatcacaggtg

SEQ ID NO: 4652744 - DNA, 25 bp, Homo sapien
gccatgcgagtggtcgcgggcgtcc

SEQ ID NO: 4652745 - DNA, 25 bp, Homo sapien
acaggtgcgtgtccggccgcgccat

SEQ ID NO: 4652746 - DNA, 25 bp, Homo sapien
cggagaacaccgagtgctggtcgca

SEQ ID NO: 4652747 - DNA, 25 bp, Homo sapien
cattgggcacttgcgggactgctct

SEQ ID NO: 4652748 - DNA, 25 bp, Homo sapien
gggtttgtgcaaccgcggagaacac

SEQ ID NO: 4652749 - DNA, 25 bp, Homo sapien
gccctttgcggagaagcacacgaag

SEQ ID NO: 4652750 - DNA, 25 bp, Homo sapien
gaggagacggcggagatggaagcga

SEQ ID NO: 4652751 - DNA, 25 bp, Homo sapien
acggcggagatggaagcgagaggag

SEQ ID NO: 4652752 - DNA, 25 bp, Homo sapien
agaacgccccgtccggcgctgcgct

SEQ ID NO: 4652753 - DNA, 25 bp, Homo sapien
gctgcgctgccatacgctccgggga

SEQ ID NO: 4652754 - DNA, 25 bp, Homo sapien
ttcctcaccaagcccgggaggacgc

SEQ ID NO: 4652755 - DNA, 25 bp, Homo sapien
cgcgaatcgccgcttcccattggct

SEQ ID NO: 4652756 - DNA, 25 bp, Homo sapien
atcagtgccaatctccgcgaatcgc

SEQ ID NO: 4652757 - DNA, 25 bp, Homo sapien
cgaatcgccgcttcccattggctgg

SEQ ID NO: 4652758 - DNA, 25 bp, Homo sapien
tacgcatttccaactaagtgcacag

SEQ ID NO: 4652759 - DNA, 25 bp, Homo sapien
gaggacatcacagtcgtctttgctg

SEQ ID NO: 4652760 - DNA, 25 bp, Homo sapien
tctcgtacatccgtaaaaaggcagc

SEQ ID NO: 4652761 - DNA, 25 bp, Homo sapien
gatttttgctaactcgagccctcag

SEQ ID NO: 4652762 - DNA, 25 bp, Homo sapien
tacttgtccaagatgtgcccttatg

SEQ ID NO: 4652763 - DNA, 25 bp, Homo sapien
aaaacgtctcatctgcggacacgcg

SEQ ID NO: 4652764 - DNA, 25 bp, Homo sapien
cataaatgcggcaatactgacggtt

SEQ ID NO: 4652765 - DNA, 25 bp, Homo sapien
cgccaaacgggacaggacgatcttt

SEQ ID NO: 4652766 - DNA, 25 bp, Homo sapien
catattgtgtgaaaccgcaagagat

SEQ ID NO: 4652767 - DNA, 25 bp, Homo sapien
gctgcatggatctgctactgatttt

SEQ ID NO: 4652768 - DNA, 25 bp, Homo sapien
aggttttactgctgcatggatctgc

SEQ ID NO: 4652769 - DNA, 25 bp, Homo sapien
ccgcaagagattctttggaagtgat

SEQ ID NO: 4652770 - DNA, 25 bp, Homo sapien
ttaatttagttggtttcctgcaatc

SEQ ID NO: 4652771 - DNA, 25 bp, Homo sapien
atttagttggtttcctgcaatctct

SEQ ID NO: 4652772 - DNA, 25 bp, Homo sapien
taatttagttggtttcctgcaatct

SEQ ID NO: 4652773 - DNA, 25 bp, Homo sapien
aatttagttggtttcctgcaatctc

SEQ ID NO: 4652774 - DNA, 25 bp, Homo sapien
gaaaggccctctgcttgaactactt

SEQ ID NO: 4652775 - DNA, 25 bp, Homo sapien
gaactacttcaaagaaactaatcat

SEQ ID NO: 4652776 - DNA, 25 bp, Homo sapien
ctggtagacagggaaagctctggca

SEQ ID NO: 4652777 - DNA, 25 bp, Homo sapien
tcatcgagccccaaaatactgttct

SEQ ID NO: 4652778 - DNA, 25 bp, Homo sapien
acagtgcccggccatcttacccatt

SEQ ID NO: 4652779 - DNA, 25 bp, Homo sapien
tttcaagcatacagttcggtgccac

SEQ ID NO: 4652780 - DNA, 25 bp, Homo sapien
ctctgcctccctggcgtgagcgatt

SEQ ID NO: 4652781 - DNA, 25 bp, Homo sapien
gtgcatttaccttgttgtgcaacca

SEQ ID NO: 4652782 - DNA, 25 bp, Homo sapien
caccaccaccatcactaccttccca

SEQ ID NO: 4652783 - DNA, 25 bp, Homo sapien
accaccaccatcactaccttcccac

SEQ ID NO: 4652784 - DNA, 25 bp, Homo sapien
ccaccaccaccatcactaccttccc

SEQ ID NO: 4652785 - DNA, 25 bp, Homo sapien
tagtgtcagtcgctaatattaaagc

SEQ ID NO: 4652786 - DNA, 25 bp, Homo sapien
aggtacagccagtctactgttgggc

SEQ ID NO: 4652787 - DNA, 25 bp, Homo sapien
gtcctcaaatatgagagcttcagag

SEQ ID NO: 4652788 - DNA, 25 bp, Homo sapien
ctctgttgggactgtattcctttgc

SEQ ID NO: 4652789 - DNA, 25 bp, Homo sapien
gcttcctctgtcctcgatgtcaaag

SEQ ID NO: 4652790 - DNA, 25 bp, Homo sapien
tgaaacaggttaaaaacacagtgaa

SEQ ID NO: 4652791 - DNA, 25 bp, Homo sapien
tacatcctatagagcaaattcctgc

SEQ ID NO: 4652792 - DNA, 25 bp, Homo sapien
agttttagtggttgcattttacatc

SEQ ID NO: 4652793 - DNA, 25 bp, Homo sapien
cacagtgaaagcctctgctattaca

SEQ ID NO: 4652794 - DNA, 25 bp, Homo sapien
cgttgattacgacccagtagcttgt

SEQ ID NO: 4652795 - DNA, 25 bp, Homo sapien
tgcctttgcacctccaagatgatag

SEQ ID NO: 4652796 - DNA, 25 bp, Homo sapien
tcctgggatgcgagtaatcaagccc

SEQ ID NO: 4652797 - DNA, 25 bp, Homo sapien
caagccctgctgatttgaatgtacc

SEQ ID NO: 4652798 - DNA, 25 bp, Homo sapien
cttttgagttctcatccaaaaaaat

SEQ ID NO: 4652799 - DNA, 25 bp, Homo sapien
cactgcgtccggctgtgcttttgag

SEQ ID NO: 4652800 - DNA, 25 bp, Homo sapien
gcttttgagttctcatccaaaaaaa

SEQ ID NO: 4652801 - DNA, 25 bp, Homo sapien
tgcttttgagttctcatccaaaaaa

SEQ ID NO: 4652802 - DNA, 25 bp, Homo sapien
caaatgttgtagcagaagattaagc

SEQ ID NO: 4652803 - DNA, 25 bp, Homo sapien
gctagaggtgcgaatctttgcttat

SEQ ID NO: 4652804 - DNA, 25 bp, Homo sapien
cagaagattaagctccccggaggct

SEQ ID NO: 4652805 - DNA, 25 bp, Homo sapien
taatggtcaaagtaacgctgagatc

SEQ ID NO: 4652806 - DNA, 25 bp, Homo sapien
gggaatatggtttcaggcgagaggg

SEQ ID NO: 4652807 - DNA, 25 bp, Homo sapien
tgagggggaatatggtttcaggcga

SEQ ID NO: 4652808 - DNA, 25 bp, Homo sapien
aatatggtttcaggcgagagggtca

SEQ ID NO: 4652809 - DNA, 25 bp, Homo sapien
atggtttcaggcgagagggtcacct

SEQ ID NO: 4652810 - DNA, 25 bp, Homo sapien
taaaactgagcaatgcaggcccaac

SEQ ID NO: 4652811 - DNA, 25 bp, Homo sapien
gaggaggcaacactaacgctggcgt

SEQ ID NO: 4652812 - DNA, 25 bp, Homo sapien
gattcttggtgcaaacagggcagag

SEQ ID NO: 4652813 - DNA, 25 bp, Homo sapien
gaagcccaaggttgagccatgttga

SEQ ID NO: 4652814 - DNA, 25 bp, Homo sapien
gccatatactatgggaggccctagg

SEQ ID NO: 4652815 - DNA, 25 bp, Homo sapien
agagcttcacttcaccctaggtcca

SEQ ID NO: 4652816 - DNA, 25 bp, Homo sapien
ggtgtaaagacctagctacctcaca

SEQ ID NO: 4652817 - DNA, 25 bp, Homo sapien
gcagagctgcatcactcatggtcat

SEQ ID NO: 4652818 - DNA, 25 bp, Homo sapien
ccagatctccaccaccagatttgtc

SEQ ID NO: 4652819 - DNA, 25 bp, Homo sapien
cagatctccaccaccagatttgtcc

SEQ ID NO: 4652820 - DNA, 25 bp, Homo sapien
agatctccaccaccagatttgtcca

SEQ ID NO: 4652821 - DNA, 25 bp, Homo sapien
gatctccaccaccagatttgtccat

SEQ ID NO: 4652822 - DNA, 25 bp, Homo sapien
cccaagttctataattcatgatcag

SEQ ID NO: 4652823 - DNA, 25 bp, Homo sapien
gcaattagtgtccttgaatcccaag

SEQ ID NO: 4652824 - DNA, 25 bp, Homo sapien
tgctgtgacctccaaccgagcttag

SEQ ID NO: 4652825 - DNA, 25 bp, Homo sapien
ccctgcagggttgcatgggcaatta

SEQ ID NO: 4652826 - DNA, 25 bp, Homo sapien
ttaaatgaggattttgtttcacaaa

SEQ ID NO: 4652827 - DNA, 25 bp, Homo sapien
gtctgcaaactattcaaccactaac

SEQ ID NO: 4652828 - DNA, 25 bp, Homo sapien
caaccaaaatatgtcaagattagta

SEQ ID NO: 4652829 - DNA, 25 bp, Homo sapien
cactataccaagaatgtggtgccaa

SEQ ID NO: 4652830 - DNA, 25 bp, Homo sapien
ggaagccacatcatacctcttaata

SEQ ID NO: 4652831 - DNA, 25 bp, Homo sapien
gaatatgcattggtgtaagtgttaa

SEQ ID NO: 4652832 - DNA, 25 bp, Homo sapien
ggtgggcagtgaggagaatacaaag

SEQ ID NO: 4652833 - DNA, 25 bp, Homo sapien
tgttaatcatggatgaaggaagcca

SEQ ID NO: 4652834 - DNA, 25 bp, Homo sapien
taaccattgagggactcgcatcctt

SEQ ID NO: 4652835 - DNA, 25 bp, Homo sapien
cagcagggactcgtcagatttttat

SEQ ID NO: 4652836 - DNA, 25 bp, Homo sapien
tattcctggtaaaagccgacatcat

SEQ ID NO: 4652837 - DNA, 25 bp, Homo sapien
aaggtatgccgagcccaaagtaatc

SEQ ID NO: 4652838 - DNA, 25 bp, Homo sapien
caaggctagagcgaatttgacaaac

SEQ ID NO: 4652839 - DNA, 25 bp, Homo sapien
ttgatacacttcagcaccaacaggc

SEQ ID NO: 4652840 - DNA, 25 bp, Homo sapien
tcacgtgacccgaatattaatgggc

SEQ ID NO: 4652841 - DNA, 25 bp, Homo sapien
gcttgatgagcacttgacagaactt

SEQ ID NO: 4652842 - DNA, 25 bp, Homo sapien
ctggctcggtgcttacatctcttca

SEQ ID NO: 4652843 - DNA, 25 bp, Homo sapien
gctggctcggtgcttacatctcttc

SEQ ID NO: 4652844 - DNA, 25 bp, Homo sapien
gaaaatgaattccaccgcgcaacac

SEQ ID NO: 4652845 - DNA, 25 bp, Homo sapien
aaatggtgtgactggacttgggcca

SEQ ID NO: 4652846 - DNA, 25 bp, Homo sapien
ttgtatcttcaaaatggtgtgactg

SEQ ID NO: 4652847 - DNA, 25 bp, Homo sapien
aaatgaattccaccgcgcaacacag

SEQ ID NO: 4652848 - DNA, 25 bp, Homo sapien
tctgatccgatgcactgagcgtgct

SEQ ID NO: 4652849 - DNA, 25 bp, Homo sapien
cgtttcatgcggaaagctggcaggc

SEQ ID NO: 4652850 - DNA, 25 bp, Homo sapien
tctgtcaacaactccgcggtctgat

SEQ ID NO: 4652851 - DNA, 25 bp, Homo sapien
tacaattggcagagacacaaacggt

SEQ ID NO: 4652852 - DNA, 25 bp, Homo sapien
ggaggaggccggaatgctccttcaa

SEQ ID NO: 4652853 - DNA, 25 bp, Homo sapien
cctggcaaacatcatccacgttgac

SEQ ID NO: 4652854 - DNA, 25 bp, Homo sapien
gacaaaaggataaacagagggagga

SEQ ID NO: 4652855 - DNA, 25 bp, Homo sapien
gaggccggaatgctccttcaatgct

SEQ ID NO: 4652856 - DNA, 25 bp, Homo sapien
tgcagtgccttcgggagcaagttta

SEQ ID NO: 4652857 - DNA, 25 bp, Homo sapien
cacacctgttaaacctggcaaaggg

SEQ ID NO: 4652858 - DNA, 25 bp, Homo sapien
ttatagagtgtcacacctgttaaac

SEQ ID NO: 4652859 - DNA, 25 bp, Homo sapien
gcaagtttatagagtgtcacacctg

SEQ ID NO: 4652860 - DNA, 25 bp, Homo sapien
ggatttatcttatttgggattggac

SEQ ID NO: 4652861 - DNA, 25 bp, Homo sapien
aatctctgacccctggacttcagct

SEQ ID NO: 4652862 - DNA, 25 bp, Homo sapien
tgaaaaactgtgtcaatcaccccaa

SEQ ID NO: 4652863 - DNA, 25 bp, Homo sapien
agatgaagatcggagaatctctgac

SEQ ID NO: 4652864 - DNA, 25 bp, Homo sapien
tgttttgggtgacactgattatttc

SEQ ID NO: 4652865 - DNA, 25 bp, Homo sapien
tgggtgacactgattatttcagctc

SEQ ID NO: 4652866 - DNA, 25 bp, Homo sapien
tatttcagctctgtacaagattcca

SEQ ID NO: 4652867 - DNA, 25 bp, Homo sapien
aagattccacacgtcagcttatggg

SEQ ID NO: 4652868 - DNA, 25 bp, Homo sapien
gacagttatttgatcactaaccact

SEQ ID NO: 4652869 - DNA, 25 bp, Homo sapien
aaagcatccgagtgtgagctgccta

SEQ ID NO: 4652870 - DNA, 25 bp, Homo sapien
tcacagtactgacttgaataaaagg

SEQ ID NO: 4652871 - DNA, 25 bp, Homo sapien
gagcagccgtattgatttccacatt

SEQ ID NO: 4652872 - DNA, 25 bp, Homo sapien
cagcctctgggtttcagcacaggca

SEQ ID NO: 4652873 - DNA, 25 bp, Homo sapien
cctctgggtttcagcacaggcattc

SEQ ID NO: 4652874 - DNA, 25 bp, Homo sapien
cagatggaatgttggggtcatcacc

SEQ ID NO: 4652875 - DNA, 25 bp, Homo sapien
gcacaggcattcagatggaatgttg

SEQ ID NO: 4652876 - DNA, 25 bp, Homo sapien
tgccttttacccgtccagctgtctc

SEQ ID NO: 4652877 - DNA, 25 bp, Homo sapien
cctaccctgacactctgtttcccaa

SEQ ID NO: 4652878 - DNA, 25 bp, Homo sapien
gcatggaagagtcatagacggtttc

SEQ ID NO: 4652879 - DNA, 25 bp, Homo sapien
tgggccctctaggtccctctgtcct

SEQ ID NO: 4652880 - DNA, 25 bp, Homo sapien
aaacagaggatattctccatggttt

SEQ ID NO: 4652881 - DNA, 25 bp, Homo sapien
ccatggtttgaatagcatggcttcc

SEQ ID NO: 4652882 - DNA, 25 bp, Homo sapien
ttctccatggtttgaatagcatggc

SEQ ID NO: 4652883 - DNA, 25 bp, Homo sapien
tgtttagaaaacagaggatattctc

SEQ ID NO: 4652884 - DNA, 25 bp, Homo sapien
tccatccaaacaaggtgagtcaggg

SEQ ID NO: 4652885 - DNA, 25 bp, Homo sapien
gatgcagttgtggtcaatatccatc

SEQ ID NO: 4652886 - DNA, 25 bp, Homo sapien
aacccactcaagtagatgcagttgt

SEQ ID NO: 4652887 - DNA, 25 bp, Homo sapien
caagggttgacaaacacagcatcaa

SEQ ID NO: 4652888 - DNA, 25 bp, Homo sapien
ttctcctcctggctctgccctgatg

SEQ ID NO: 4652889 - DNA, 25 bp, Homo sapien
tttctcctcctggctctgccctgat

SEQ ID NO: 4652890 - DNA, 25 bp, Homo sapien
ctttctcctcctggctctgccctga

SEQ ID NO: 4652891 - DNA, 25 bp, Homo sapien
tcaggtccatcactaagtcttgccc

SEQ ID NO: 4652892 - DNA, 25 bp, Homo sapien
tgagcggtgtctcaggtcttatcgc

SEQ ID NO: 4652893 - DNA, 25 bp, Homo sapien
ttggctgcctattgggcaacactca

SEQ ID NO: 4652894 - DNA, 25 bp, Homo sapien
ctcagatagagcaggtcgacattac

SEQ ID NO: 4652895 - DNA, 25 bp, Homo sapien
gaggaatctgagcatcaaggaagtc

SEQ ID NO: 4652896 - DNA, 25 bp, Homo sapien
tcacatacattaccccatgtgatgc

SEQ ID NO: 4652897 - DNA, 25 bp, Homo sapien
gtcaaccagtagtccttcctcgata

SEQ ID NO: 4652898 - DNA, 25 bp, Homo sapien
aaccaccacgtgaaacatagacatc

SEQ ID NO: 4652899 - DNA, 25 bp, Homo sapien
gaaaagggcaaatagtcattgataa

SEQ ID NO: 4652900 - DNA, 25 bp, Homo sapien
tgtatgtggcatcattagtaaagtc

SEQ ID NO: 4652901 - DNA, 25 bp, Homo sapien
gggatattaaactctgatagtccca

SEQ ID NO: 4652902 - DNA, 25 bp, Homo sapien
tgatagtcccaagaatcagtagaaa

SEQ ID NO: 4652903 - DNA, 25 bp, Homo sapien
aggcacatggctcatacagaagtca

SEQ ID NO: 4652904 - DNA, 25 bp, Homo sapien
ggcacatggctcatacagaagtcac

SEQ ID NO: 4652905 - DNA, 25 bp, Homo sapien
tcctcttcggcttctctctggaaac

SEQ ID NO: 4652906 - DNA, 25 bp, Homo sapien
tagaaagcaacttcctttcctcttc

SEQ ID NO: 4652907 - DNA, 25 bp, Homo sapien
tttcctcttcggcttctctctggaa

SEQ ID NO: 4652908 - DNA, 25 bp, Homo sapien
cttttcagaatagaaagcaacttcc

SEQ ID NO: 4652909 - DNA, 25 bp, Homo sapien
aactatagcaggctacaaggaatcc

SEQ ID NO: 4652910 - DNA, 25 bp, Homo sapien
tcaattcacatacccattcctgtgg

SEQ ID NO: 4652911 - DNA, 25 bp, Homo sapien
gtagcctctccccagtgcattcaat

SEQ ID NO: 4652912 - DNA, 25 bp, Homo sapien
acccatgacctcactatgcactctg

SEQ ID NO: 4652913 - DNA, 25 bp, Homo sapien
aaggcttaggctgcggggacaatat

SEQ ID NO: 4652914 - DNA, 25 bp, Homo sapien
gggtctgggcataacagtcgatgaa

SEQ ID NO: 4652915 - DNA, 25 bp, Homo sapien
gtggtatcatgatgctgacccaggg

SEQ ID NO: 4652916 - DNA, 25 bp, Homo sapien
taggctgcggggacaatattaggtc

SEQ ID NO: 4652917 - DNA, 25 bp, Homo sapien
tatggggaacttggaatccaaggga

SEQ ID NO: 4652918 - DNA, 25 bp, Homo sapien
ctatggggaacttggaatccaaggg

SEQ ID NO: 4652919 - DNA, 25 bp, Homo sapien
tctatggggaacttggaatccaagg

SEQ ID NO: 4652920 - DNA, 25 bp, Homo sapien
gaacttggaatccaagggagaaaca

SEQ ID NO: 4652921 - DNA, 25 bp, Homo sapien
tactgtgggacttgctttagactga

SEQ ID NO: 4652922 - DNA, 25 bp, Homo sapien
ctctctgaatgtgatgcggtgggaa

SEQ ID NO: 4652923 - DNA, 25 bp, Homo sapien
ggtggttcgtgatgccaagcacatg

SEQ ID NO: 4652924 - DNA, 25 bp, Homo sapien
tcctccagtggtaaagcagatgggt

SEQ ID NO: 4652925 - DNA, 25 bp, Homo sapien
gcagggcatgaatgtcaatgcctct

SEQ ID NO: 4652926 - DNA, 25 bp, Homo sapien
aatgtcaatgcctctgattgttggg

SEQ ID NO: 4652927 - DNA, 25 bp, Homo sapien
tgttggggcacatgtggatgatcca

SEQ ID NO: 4652928 - DNA, 25 bp, Homo sapien
gcatgaatgtcaatgcctctgattg

SEQ ID NO: 4652929 - DNA, 25 bp, Homo sapien
taataggctctgtgaggttgaccac

SEQ ID NO: 4652930 - DNA, 25 bp, Homo sapien
gcttatctgcaattgaggctaacat

SEQ ID NO: 4652931 - DNA, 25 bp, Homo sapien
aagggaggttgccaagtcttgctta

SEQ ID NO: 4652932 - DNA, 25 bp, Homo sapien
ggttgaccacagagtgccctcctat

SEQ ID NO: 4652933 - DNA, 25 bp, Homo sapien
aatccacacacctaaacagaaatag

SEQ ID NO: 4652934 - DNA, 25 bp, Homo sapien
gccacgttggacaagaatagtagga

SEQ ID NO: 4652935 - DNA, 25 bp, Homo sapien
aggaatggccacgttggacaagaat

SEQ ID NO: 4652936 - DNA, 25 bp, Homo sapien
ctgggattggagattgatattgagc

SEQ ID NO: 4652937 - DNA, 25 bp, Homo sapien
ataagagaccgtgcctcatcctggg

SEQ ID NO: 4652938 - DNA, 25 bp, Homo sapien
cctgcactttctgcaacacgttcta

SEQ ID NO: 4652939 - DNA, 25 bp, Homo sapien
ctttctgcaacacgttctactccag

SEQ ID NO: 4652940 - DNA, 25 bp, Homo sapien
atggcataagagaccgtgcctcatc

SEQ ID NO: 4652941 - DNA, 25 bp, Homo sapien
ggaacatggaccttgaaagactttc

SEQ ID NO: 4652942 - DNA, 25 bp, Homo sapien
tctcagagttagacctcagatcctc

SEQ ID NO: 4652943 - DNA, 25 bp, Homo sapien
gagtttctaggtctctctcagagtt

SEQ ID NO: 4652944 - DNA, 25 bp, Homo sapien
ggctgtatccctgataattccccac

SEQ ID NO: 4652945 - DNA, 25 bp, Homo sapien
ccctgagtcattccctgacagatgc

SEQ ID NO: 4652946 - DNA, 25 bp, Homo sapien
ggcattcgaccctcattgattttct

SEQ ID NO: 4652947 - DNA, 25 bp, Homo sapien
gacttcgtctatgatgctgtatgtg

SEQ ID NO: 4652948 - DNA, 25 bp, Homo sapien
tctctataaggtcatggtcaatatc

SEQ ID NO: 4652949 - DNA, 25 bp, Homo sapien
tctgtctctataaggtcatggtcaa

SEQ ID NO: 4652950 - DNA, 25 bp, Homo sapien
tgctgtgccacacggattcctctga

SEQ ID NO: 4652951 - DNA, 25 bp, Homo sapien
cttgttatgaacagggaggctcttt

SEQ ID NO: 4652952 - DNA, 25 bp, Homo sapien
tctgtaagacatgcgtagggaccct

SEQ ID NO: 4652953 - DNA, 25 bp, Homo sapien
cctccattgggtcttaaagggctca

SEQ ID NO: 4652954 - DNA, 25 bp, Homo sapien
ttcttctaggaactccccagtgtct

SEQ ID NO: 4652955 - DNA, 25 bp, Homo sapien
ttagggacaggtgatatctatccca

SEQ ID NO: 4652956 - DNA, 25 bp, Homo sapien
gatatctatcccatggctatgcccc

SEQ ID NO: 4652957 - DNA, 25 bp, Homo sapien
tcttctaggaactccccagtgtctt

SEQ ID NO: 4652958 - DNA, 25 bp, Homo sapien
gcttgttggctgcaagatttggtac

SEQ ID NO: 4652959 - DNA, 25 bp, Homo sapien
gatttggtacatgtcactttgcggg

SEQ ID NO: 4652960 - DNA, 25 bp, Homo sapien
cagggtgacttgacgctgacaagtg

SEQ ID NO: 4652961 - DNA, 25 bp, Homo sapien
gggctgtctgtccttgtctatgatc

SEQ ID NO: 4652962 - DNA, 25 bp, Homo sapien
ttgccactaattgggacagctggac

SEQ ID NO: 4652963 - DNA, 25 bp, Homo sapien
cattttgtgtccagttagtaaaggc

SEQ ID NO: 4652964 - DNA, 25 bp, Homo sapien
ctgaacacagtgcttttgccactaa

SEQ ID NO: 4652965 - DNA, 25 bp, Homo sapien
tagtaaaggcacatcactgaacaca

SEQ ID NO: 4652966 - DNA, 25 bp, Homo sapien
atcaagattctcaacaagtagtgaa

SEQ ID NO: 4652967 - DNA, 25 bp, Homo sapien
attagaacatttattagggagaatc

SEQ ID NO: 4652968 - DNA, 25 bp, Homo sapien
ttagaacatttattagggagaatca

SEQ ID NO: 4652969 - DNA, 25 bp, Homo sapien
ggagaatcaagattctcaacaagta

SEQ ID NO: 4652970 - DNA, 25 bp, Homo sapien
ggtctgaatagctcagctgcctgaa

SEQ ID NO: 4652971 - DNA, 25 bp, Homo sapien
tgaatagctcagctgcctgaagcaa

SEQ ID NO: 4652972 - DNA, 25 bp, Homo sapien
tctgaatagctcagctgcctgaagc

SEQ ID NO: 4652973 - DNA, 25 bp, Homo sapien
aatagctcagctgcctgaagcaact

SEQ ID NO: 4652974 - DNA, 25 bp, Homo sapien
cccaacccactcaagcagatgaagt

SEQ ID NO: 4652975 - DNA, 25 bp, Homo sapien
caaccccaacccactcaagcagatg

SEQ ID NO: 4652976 - DNA, 25 bp, Homo sapien
accccaacccactcaagcagatgaa

SEQ ID NO: 4652977 - DNA, 25 bp, Homo sapien
ccaacccactcaagcagatgaagtt

SEQ ID NO: 4652978 - DNA, 25 bp, Homo sapien
tgggtgatgaatacagggtcaatac

SEQ ID NO: 4652979 - DNA, 25 bp, Homo sapien
cattatttttttcggtgggtgatga

SEQ ID NO: 4652980 - DNA, 25 bp, Homo sapien
tcattatttttttcggtgggtgatg

SEQ ID NO: 4652981 - DNA, 25 bp, Homo sapien
gtgatgaatacagggtcaataccat

SEQ ID NO: 4652982 - DNA, 25 bp, Homo sapien
tttcttttcctcctggctctgccct

SEQ ID NO: 4652983 - DNA, 25 bp, Homo sapien
ttttcctcctggctctgccctgatg

SEQ ID NO: 4652984 - DNA, 25 bp, Homo sapien
tcttttcctcctggctctgccctga

SEQ ID NO: 4652985 - DNA, 25 bp, Homo sapien
atgtcacgctttttcttttcctcct

SEQ ID NO: 4652986 - DNA, 25 bp, Homo sapien
gctcagatagaataggctgacatta

SEQ ID NO: 4652987 - DNA, 25 bp, Homo sapien
aagctcagatagaataggctgacat

SEQ ID NO: 4652988 - DNA, 25 bp, Homo sapien
ctcagatagaataggctgacattac

SEQ ID NO: 4652989 - DNA, 25 bp, Homo sapien
gaagctcagatagaataggctgaca

SEQ ID NO: 4652990 - DNA, 25 bp, Homo sapien
gaagtaactctgtggaagacccttg

SEQ ID NO: 4652991 - DNA, 25 bp, Homo sapien
acagaagtaactctgtggaagaccc

SEQ ID NO: 4652992 - DNA, 25 bp, Homo sapien
taactctgtggaagacccttgggat

SEQ ID NO: 4652993 - DNA, 25 bp, Homo sapien
agtaactctgtggaagacccttggg

SEQ ID NO: 4652994 - DNA, 25 bp, Homo sapien
ttctgcttccttctgcaaacttttc

SEQ ID NO: 4652995 - DNA, 25 bp, Homo sapien
tcagaaaagaatgtagctttctttc

SEQ ID NO: 4652996 - DNA, 25 bp, Homo sapien
aaaagaatgtagctttctttcctct

SEQ ID NO: 4652997 - DNA, 25 bp, Homo sapien
cttttcagaaaagaatgtagctttc

SEQ ID NO: 4652998 - DNA, 25 bp, Homo sapien
aatcagtgcgattcacggcctggga

SEQ ID NO: 4652999 - DNA, 25 bp, Homo sapien
gccacctagagataacatttccgga

SEQ ID NO: 4653000 - DNA, 25 bp, Homo sapien
cagggtctgggcataacagtcgacg

SEQ ID NO: 4653001 - DNA, 25 bp, Homo sapien
tgcaatcttccggtggtaaagcaga

SEQ ID NO: 4653002 - DNA, 25 bp, Homo sapien
ctctccaggagtgccggaatgtcat

SEQ ID NO: 4653003 - DNA, 25 bp, Homo sapien
tagaggttgggtactaggcaagaac

SEQ ID NO: 4653004 - DNA, 25 bp, Homo sapien
tggaggaacggccatgttggacaaa

SEQ ID NO: 4653005 - DNA, 25 bp, Homo sapien
agagactcgctgtgcaaagatggga

SEQ ID NO: 4653006 - DNA, 25 bp, Homo sapien
cataagagaccgtgcctcattctgg

SEQ ID NO: 4653007 - DNA, 25 bp, Homo sapien
tgcaacacgttccactccagatgat

SEQ ID NO: 4653008 - DNA, 25 bp, Homo sapien
ctaatcaggaatagaggactaggtg

SEQ ID NO: 4653009 - DNA, 25 bp, Homo sapien
ttcacctgagtgagatgtagggact

SEQ ID NO: 4653010 - DNA, 25 bp, Homo sapien
tttgttctgaggacgtagcaatgac

SEQ ID NO: 4653011 - DNA, 25 bp, Homo sapien
gatgggaacatggaccttgaaggac

SEQ ID NO: 4653012 - DNA, 25 bp, Homo sapien
ggaccatgaatgctctctgacacag

SEQ ID NO: 4653013 - DNA, 25 bp, Homo sapien
gatgagcctctttcgaatgtgttgc

SEQ ID NO: 4653014 - DNA, 25 bp, Homo sapien
catatttgagctcctctcgtggaag

SEQ ID NO: 4653015 - DNA, 25 bp, Homo sapien
tctgaagatgtctccggatcatgca

SEQ ID NO: 4653016 - DNA, 25 bp, Homo sapien
cttctagggaagcttgatgcggact

SEQ ID NO: 4653017 - DNA, 25 bp, Homo sapien
tcttgctcaaatgtactgtcagggc

SEQ ID NO: 4653018 - DNA, 25 bp, Homo sapien
gttggaactaaggaaggacatctcc

SEQ ID NO: 4653019 - DNA, 25 bp, Homo sapien
tgtttgttggaactaaggaaggaca

SEQ ID NO: 4653020 - DNA, 25 bp, Homo sapien
tatgggcttcatatggaaagattta

SEQ ID NO: 4653021 - DNA, 25 bp, Homo sapien
tttaatatgggcttcatatggaaag

SEQ ID NO: 4653022 - DNA, 25 bp, Homo sapien
ttgcggggaaggccccacagcatcc

SEQ ID NO: 4653023 - DNA, 25 bp, Homo sapien
cttgcggggaaggccccacagcatc

SEQ ID NO: 4653024 - DNA, 25 bp, Homo sapien
tgaagatttctatgggttcacggat

SEQ ID NO: 4653025 - DNA, 25 bp, Homo sapien
tgatttgaagatttctatgggttca

SEQ ID NO: 4653026 - DNA, 25 bp, Homo sapien
ggaaatatcctcttctgatttgaag

SEQ ID NO: 4653027 - DNA, 25 bp, Homo sapien
aaggaattggaaatatcctcttctg

SEQ ID NO: 4653028 - DNA, 25 bp, Homo sapien
agggtcccctgcttttcttgatcaa

SEQ ID NO: 4653029 - DNA, 25 bp, Homo sapien
tccagcttgcagtatgggcagctct

SEQ ID NO: 4653030 - DNA, 25 bp, Homo sapien
cagcgaattctcttctgagggtccc

SEQ ID NO: 4653031 - DNA, 25 bp, Homo sapien
taagatcctcgtcagtatcagcgaa

SEQ ID NO: 4653032 - DNA, 25 bp, Homo sapien
cctccattgggtcttaaagggctca

SEQ ID NO: 4653033 - DNA, 25 bp, Homo sapien
tctgtaagacatgcgtagggaccct

SEQ ID NO: 4653034 - DNA, 25 bp, Homo sapien
caagtggacatgcagcacctgggaa

SEQ ID NO: 4653035 - DNA, 25 bp, Homo sapien
caagtcctgattcgagatgccctgg

SEQ ID NO: 4653036 - DNA, 25 bp, Homo sapien
ttagggacaggtgatatctatccca

SEQ ID NO: 4653037 - DNA, 25 bp, Homo sapien
gatatctatcccatggctatgcccc

SEQ ID NO: 4653038 - DNA, 25 bp, Homo sapien
ttcttctaggaactccccagtgtct

SEQ ID NO: 4653039 - DNA, 25 bp, Homo sapien
tcttctaggaactccccagtgtctt

SEQ ID NO: 4653040 - DNA, 25 bp, Homo sapien
gatttggtacatgtcactttgcggg

SEQ ID NO: 4653041 - DNA, 25 bp, Homo sapien
gcttgttggctgcaagatttggtac

SEQ ID NO: 4653042 - DNA, 25 bp, Homo sapien
cagggtgacttgacgctgacaagtg

SEQ ID NO: 4653043 - DNA, 25 bp, Homo sapien
gggctgtctgtccttgtctatgatc

SEQ ID NO: 4653044 - DNA, 25 bp, Homo sapien
ttgccactaattgggacagctggac

SEQ ID NO: 4653045 - DNA, 25 bp, Homo sapien
cattttgtgtccagttagtaaaggc

SEQ ID NO: 4653046 - DNA, 25 bp, Homo sapien
gaatcaagattctcaacaagtagtg

SEQ ID NO: 4653047 - DNA, 25 bp, Homo sapien
tagtaaaggcacatcactgaacaca

SEQ ID NO: 4653048 - DNA, 25 bp, Homo sapien
tatacattaagggaagatcttgcat

SEQ ID NO: 4653049 - DNA, 25 bp, Homo sapien
acatccatcctgaggtgcaccgtat

SEQ ID NO: 4653050 - DNA, 25 bp, Homo sapien
tatattccactaaccccatgaagat

SEQ ID NO: 4653051 - DNA, 25 bp, Homo sapien
caggtgttctacacaatatttatta

SEQ ID NO: 4653052 - DNA, 25 bp, Homo sapien
cccaacccactcaagcagatgaagt

SEQ ID NO: 4653053 - DNA, 25 bp, Homo sapien
ccaacccactcaagcagatgaagtt

SEQ ID NO: 4653054 - DNA, 25 bp, Homo sapien
caaccccaacccactcaagcagatg

SEQ ID NO: 4653055 - DNA, 25 bp, Homo sapien
accccaacccactcaagcagatgaa

SEQ ID NO: 4653056 - DNA, 25 bp, Homo sapien
gggtgatgaatacagggtcaatacc

SEQ ID NO: 4653057 - DNA, 25 bp, Homo sapien
tgggtgatgaatacagggtcaatac

SEQ ID NO: 4653058 - DNA, 25 bp, Homo sapien
ggtgatgaatacagggtcaatacca

SEQ ID NO: 4653059 - DNA, 25 bp, Homo sapien
gtgatgaatacagggtcaataccat

SEQ ID NO: 4653060 - DNA, 25 bp, Homo sapien
atgtcacgctttttcttttcctcct

SEQ ID NO: 4653061 - DNA, 25 bp, Homo sapien
tttcttttcctcctggctctgccct

SEQ ID NO: 4653062 - DNA, 25 bp, Homo sapien
ttttcctcctggctctgccctgatg

SEQ ID NO: 4653063 - DNA, 25 bp, Homo sapien
tcttttcctcctggctctgccctga

SEQ ID NO: 4653064 - DNA, 25 bp, Homo sapien
tgttacatgcaatgaaggtagaggc

SEQ ID NO: 4653065 - DNA, 25 bp, Homo sapien
ccagaacagcatgttacatgcaatg

SEQ ID NO: 4653066 - DNA, 25 bp, Homo sapien
acagaagtaactctgtggaagaccc

SEQ ID NO: 4653067 - DNA, 25 bp, Homo sapien
taactctgtggaagacccttgggat

SEQ ID NO: 4653068 - DNA, 25 bp, Homo sapien
ttctgcttccttctgcaaacttttc

SEQ ID NO: 4653069 - DNA, 25 bp, Homo sapien
tcagaaaagaatgtagctttctttc

SEQ ID NO: 4653070 - DNA, 25 bp, Homo sapien
aaaagaatgtagctttctttcctct

SEQ ID NO: 4653071 - DNA, 25 bp, Homo sapien
cttttcagaaaagaatgtagctttc

SEQ ID NO: 4653072 - DNA, 25 bp, Homo sapien
aatcagtgcgattcacggcctggga

SEQ ID NO: 4653073 - DNA, 25 bp, Homo sapien
gccacctagagataacatttccgga

SEQ ID NO: 4653074 - DNA, 25 bp, Homo sapien
tgcaatcttccggtggtaaagcaga

SEQ ID NO: 4653075 - DNA, 25 bp, Homo sapien
cagggtctgggcataacagtcgacg

SEQ ID NO: 4653076 - DNA, 25 bp, Homo sapien
ctctccaggagtgccggaatgtcat

SEQ ID NO: 4653077 - DNA, 25 bp, Homo sapien
tagaggttgggtactaggcaagaac

SEQ ID NO: 4653078 - DNA, 25 bp, Homo sapien
tggaggaacggccatgttggacaaa

SEQ ID NO: 4653079 - DNA, 25 bp, Homo sapien
tgaggttaacatattccgtgaggaa

SEQ ID NO: 4653080 - DNA, 25 bp, Homo sapien
agagactcgctgtgcaaagatggga

SEQ ID NO: 4653081 - DNA, 25 bp, Homo sapien
cataagagaccgtgcctcattctgg

SEQ ID NO: 4653082 - DNA, 25 bp, Homo sapien
tgcaacacgttccactccagatgat

SEQ ID NO: 4653083 - DNA, 25 bp, Homo sapien
ctaatcaggaatagaggactaggtg

SEQ ID NO: 4653084 - DNA, 25 bp, Homo sapien
ttcacctgagtgagatgtagggact

SEQ ID NO: 4653085 - DNA, 25 bp, Homo sapien
gatgggaacatggaccttgaaggac

SEQ ID NO: 4653086 - DNA, 25 bp, Homo sapien
gttgctctagtttcttccttacctc

SEQ ID NO: 4653087 - DNA, 25 bp, Homo sapien
atgggaacatggaccttgaaggact

SEQ ID NO: 4653088 - DNA, 25 bp, Homo sapien
tgggaacatggaccttgaaggactt

SEQ ID NO: 4653089 - DNA, 25 bp, Homo sapien
gagactcatggattctgcggggcag

SEQ ID NO: 4653090 - DNA, 25 bp, Homo sapien
gactcatggattctgcggggcaggc

SEQ ID NO: 4653091 - DNA, 25 bp, Homo sapien
actcatggattctgcggggcaggcc

SEQ ID NO: 4653092 - DNA, 25 bp, Homo sapien
caggccccatctgcgctggatgagc

SEQ ID NO: 4653093 - DNA, 25 bp, Homo sapien
tgacacagatagctctgaaattttg

SEQ ID NO: 4653094 - DNA, 25 bp, Homo sapien
ggaccatgaatgctctctgacacag

SEQ ID NO: 4653095 - DNA, 25 bp, Homo sapien
tatttaatggaccatgaatgctctc

SEQ ID NO: 4653096 - DNA, 25 bp, Homo sapien
tttgttctgaggacgtagcaatgac

SEQ ID NO: 4653097 - DNA, 25 bp, Homo sapien
tctgaagatgtctccggatcatgca

SEQ ID NO: 4653098 - DNA, 25 bp, Homo sapien
tcttgctcaaatgtactgtcagggc

SEQ ID NO: 4653099 - DNA, 25 bp, Homo sapien
catatttgagctcctctcgtggaag

SEQ ID NO: 4653100 - DNA, 25 bp, Homo sapien
cttctagggaagcttgatgcggact

SEQ ID NO: 4653101 - DNA, 25 bp, Homo sapien
ttcacggatcttgcggggaaggccc

SEQ ID NO: 4653102 - DNA, 25 bp, Homo sapien
tgtttgttggaactaaggaaggaca

SEQ ID NO: 4653103 - DNA, 25 bp, Homo sapien
tatgggcttcatatggaaagattta

SEQ ID NO: 4653104 - DNA, 25 bp, Homo sapien
gttggaactaaggaaggacatctcc

SEQ ID NO: 4653105 - DNA, 25 bp, Homo sapien
agtgcttcgtctacaagacttagag

SEQ ID NO: 4653106 - DNA, 25 bp, Homo sapien
ccttgaaaagtgcttcgtctacaag

SEQ ID NO: 4653107 - DNA, 25 bp, Homo sapien
gatgattaaggacagggactgagct

SEQ ID NO: 4653108 - DNA, 25 bp, Homo sapien
tctacaagacttagagaccccatct

SEQ ID NO: 4653109 - DNA, 25 bp, Homo sapien
agggtcccctgcttttcttgatcaa

SEQ ID NO: 4653110 - DNA, 25 bp, Homo sapien
tccagcttgcagtatgggcagctct

SEQ ID NO: 4653111 - DNA, 25 bp, Homo sapien
cagcgaattctcttctgagggtccc

SEQ ID NO: 4653112 - DNA, 25 bp, Homo sapien
taagatcctcgtcagtatcagcgaa

SEQ ID NO: 4653113 - DNA, 25 bp, Homo sapien
tggctatgcttcctctggaccaact

SEQ ID NO: 4653114 - DNA, 25 bp, Homo sapien
gatatgatgatttaggagtttgagg

SEQ ID NO: 4653115 - DNA, 25 bp, Homo sapien
aactttaactggctcaacatctgat

SEQ ID NO: 4653116 - DNA, 25 bp, Homo sapien
tggctctgaggttggctatgcttcc

SEQ ID NO: 4653117 - DNA, 25 bp, Homo sapien
tgatgggtttattagactgctgcaa

SEQ ID NO: 4653118 - DNA, 25 bp, Homo sapien
gatttgctcccaagcgactcccttg

SEQ ID NO: 4653119 - DNA, 25 bp, Homo sapien
tcttcatcaatgttccgaaaaggtt

SEQ ID NO: 4653120 - DNA, 25 bp, Homo sapien
taagacatgcgtagggaccctgggc

SEQ ID NO: 4653121 - DNA, 25 bp, Homo sapien
tgcagttctggcacattctgagatt

SEQ ID NO: 4653122 - DNA, 25 bp, Homo sapien
aatagtcccagtaaagacagctcta

SEQ ID NO: 4653123 - DNA, 25 bp, Homo sapien
tctgagatttcccaagctgcactgg

SEQ ID NO: 4653124 - DNA, 25 bp, Homo sapien
gaccggaggcaccaggttgacttca

SEQ ID NO: 4653125 - DNA, 25 bp, Homo sapien
ggtttaccagtgatgacagctttgc

SEQ ID NO: 4653126 - DNA, 25 bp, Homo sapien
tttaccagtgatgacagctttgcct

SEQ ID NO: 4653127 - DNA, 25 bp, Homo sapien
ccagtgatgacagctttgcctgtct

SEQ ID NO: 4653128 - DNA, 25 bp, Homo sapien
taccagtgatgacagctttgcctgt

SEQ ID NO: 4653129 - DNA, 25 bp, Homo sapien
ttctcctcttggctctgccttgatg

SEQ ID NO: 4653130 - DNA, 25 bp, Homo sapien
tttctttctcctcttggctctgcct

SEQ ID NO: 4653131 - DNA, 25 bp, Homo sapien
ctttctcctcttggctctgccttga

SEQ ID NO: 4653132 - DNA, 25 bp, Homo sapien
tctttctcctcttggctctgccttg

SEQ ID NO: 4653133 - DNA, 25 bp, Homo sapien
gatggtattgtaatgctggcccaga

SEQ ID NO: 4653134 - DNA, 25 bp, Homo sapien
gggtctggacataatagttgccgaa

SEQ ID NO: 4653135 - DNA, 25 bp, Homo sapien
tagttgccgaaaatggatggtattg

SEQ ID NO: 4653136 - DNA, 25 bp, Homo sapien
ccgaaaatggatggtattgtaatgc

SEQ ID NO: 4653137 - DNA, 25 bp, Homo sapien
gaagccaaaggggacgcagagggag

SEQ ID NO: 4653138 - DNA, 25 bp, Homo sapien
ctgtggaagccaaaggggacgcaga

SEQ ID NO: 4653139 - DNA, 25 bp, Homo sapien
aagccaaaggggacgcagagggagc

SEQ ID NO: 4653140 - DNA, 25 bp, Homo sapien
caaaggggacgcagagggagcagca

SEQ ID NO: 4653141 - DNA, 25 bp, Homo sapien
gtgaatgatgacttggtcacaaaag

SEQ ID NO: 4653142 - DNA, 25 bp, Homo sapien
cagagatcaaagtgaatgatgactt

SEQ ID NO: 4653143 - DNA, 25 bp, Homo sapien
caaagtgaatgatgacttggtcaca

SEQ ID NO: 4653144 - DNA, 25 bp, Homo sapien
tggaagggcagagatcaaagtgaat

SEQ ID NO: 4653145 - DNA, 25 bp, Homo sapien
cagaggagccagtattagatcttct

SEQ ID NO: 4653146 - DNA, 25 bp, Homo sapien
cactcagcggtgagggtgaaaatga

SEQ ID NO: 4653147 - DNA, 25 bp, Homo sapien
aggccttgggttggaaatcagtatc

SEQ ID NO: 4653148 - DNA, 25 bp, Homo sapien
gatcacaatcacgtaaatcagtggg

SEQ ID NO: 4653149 - DNA, 25 bp, Homo sapien
gagcatccctcgagagaccttgaaa

SEQ ID NO: 4653150 - DNA, 25 bp, Homo sapien
gcaaggtattgttagccagccatga

SEQ ID NO: 4653151 - DNA, 25 bp, Homo sapien
cagagggtgattgtctcaaggctcc

SEQ ID NO: 4653152 - DNA, 25 bp, Homo sapien
tccttattggtatgggaactcccac

SEQ ID NO: 4653153 - DNA, 25 bp, Homo sapien
tggacacgttggacatagaaaaatg

SEQ ID NO: 4653154 - DNA, 25 bp, Homo sapien
ctggacacgttggacatagaaaaat

SEQ ID NO: 4653155 - DNA, 25 bp, Homo sapien
gacacgttggacatagaaaaatgtt

SEQ ID NO: 4653156 - DNA, 25 bp, Homo sapien
ggacacgttggacatagaaaaatgt

SEQ ID NO: 4653157 - DNA, 25 bp, Homo sapien
tgttcatcactgaggagcttcccaa

SEQ ID NO: 4653158 - DNA, 25 bp, Homo sapien
cactggttgtcaagatatgattaga

SEQ ID NO: 4653159 - DNA, 25 bp, Homo sapien
ctttacttgtattcgtgttcatcac

SEQ ID NO: 4653160 - DNA, 25 bp, Homo sapien
gctgtcctttaaagtctgatgattt

SEQ ID NO: 4653161 - DNA, 25 bp, Homo sapien
taatttcctgtccttgccaagatgg

SEQ ID NO: 4653162 - DNA, 25 bp, Homo sapien
tgttcctaatcccaagtcctcgctc

SEQ ID NO: 4653163 - DNA, 25 bp, Homo sapien
agtcctcgctcccacattctcttgc

SEQ ID NO: 4653164 - DNA, 25 bp, Homo sapien
tcttgctttgggtcccaaaaggctc

SEQ ID NO: 4653165 - DNA, 25 bp, Homo sapien
ccttgccactgttcagagggaagcc

SEQ ID NO: 4653166 - DNA, 25 bp, Homo sapien
taccttcaactaggtcttggtgctg

SEQ ID NO: 4653167 - DNA, 25 bp, Homo sapien
tcaatccactgaagaaaatgcctca

SEQ ID NO: 4653168 - DNA, 25 bp, Homo sapien
gctcaagagcttcacgagtcctcat

SEQ ID NO: 4653169 - DNA, 25 bp, Homo sapien
ttcttcctgaacgtctaagctttgg

SEQ ID NO: 4653170 - DNA, 25 bp, Homo sapien
cattcttcctgaacgtctaagcttt

SEQ ID NO: 4653171 - DNA, 25 bp, Homo sapien
tcttcctgaacgtctaagctttggt

SEQ ID NO: 4653172 - DNA, 25 bp, Homo sapien
ttcctgaacgtctaagctttggtca

SEQ ID NO: 4653173 - DNA, 25 bp, Homo sapien
tctgaaaaatcccatgttgtaactg

SEQ ID NO: 4653174 - DNA, 25 bp, Homo sapien
tcaaagccaggcagccaatgcaaag

SEQ ID NO: 4653175 - DNA, 25 bp, Homo sapien
cagggccaaccctactagcagatat

SEQ ID NO: 4653176 - DNA, 25 bp, Homo sapien
tgtgtggaccagcattttgacatct

SEQ ID NO: 4653177 - DNA, 25 bp, Homo sapien
aaagcacttgttgacgcctctgaaa

SEQ ID NO: 4653178 - DNA, 25 bp, Homo sapien
gttgacgcctctgaaaaacagcgtg

SEQ ID NO: 4653179 - DNA, 25 bp, Homo sapien
ttcccagccacggttcctaccagac

SEQ ID NO: 4653180 - DNA, 25 bp, Homo sapien
cggttcctaccagacacacttctgg

SEQ ID NO: 4653181 - DNA, 25 bp, Homo sapien
ctgcctgaagcaactgagcactgag

SEQ ID NO: 4653182 - DNA, 25 bp, Homo sapien
atacagggtcaataccacgtagaac

SEQ ID NO: 4653183 - DNA, 25 bp, Homo sapien
gggtcgatatccaaccaatgtgagt

SEQ ID NO: 4653184 - DNA, 25 bp, Homo sapien
gaatacagggtcaataccacgtaga

SEQ ID NO: 4653185 - DNA, 25 bp, Homo sapien
gttggggtcgatatccaaccaatgt

SEQ ID NO: 4653186 - DNA, 25 bp, Homo sapien
ttctcctcttggctctgccctgatg

SEQ ID NO: 4653187 - DNA, 25 bp, Homo sapien
tccttctcctcttggctctgccctg

SEQ ID NO: 4653188 - DNA, 25 bp, Homo sapien
tttccttctcctcttggctctgccc

SEQ ID NO: 4653189 - DNA, 25 bp, Homo sapien
ctttgaatgtcccacctttccttct

SEQ ID NO: 4653190 - DNA, 25 bp, Homo sapien
ctaagaaatcatgggactgagtcat

SEQ ID NO: 4653191 - DNA, 25 bp, Homo sapien
cctcctggatatctcagttggccac

SEQ ID NO: 4653192 - DNA, 25 bp, Homo sapien
tcaaaaccaccacgtgaaacacaga

SEQ ID NO: 4653193 - DNA, 25 bp, Homo sapien
tcactttgtcctgcccgtaaatggg

SEQ ID NO: 4653194 - DNA, 25 bp, Homo sapien
cagtggttacctccaggaggaatcc

SEQ ID NO: 4653195 - DNA, 25 bp, Homo sapien
cttctctctggaaacttttccagtc

SEQ ID NO: 4653196 - DNA, 25 bp, Homo sapien
cttttcagaagagaaagcagcttcc

SEQ ID NO: 4653197 - DNA, 25 bp, Homo sapien
gaagagaaagcagcttcctttcctc

SEQ ID NO: 4653198 - DNA, 25 bp, Homo sapien
tctctggaaacttttccagtctggg

SEQ ID NO: 4653199 - DNA, 25 bp, Homo sapien
gatgacgagcacaagaatcaatggg

SEQ ID NO: 4653200 - DNA, 25 bp, Homo sapien
tgagatgttaacaggctctatgagg

SEQ ID NO: 4653201 - DNA, 25 bp, Homo sapien
ctgaagatgcaaggtgtgaatggtc

SEQ ID NO: 4653202 - DNA, 25 bp, Homo sapien
gggattcatggcctgcgaaatatct

SEQ ID NO: 4653203 - DNA, 25 bp, Homo sapien
tttgaaccacagagggtaagcccca

SEQ ID NO: 4653204 - DNA, 25 bp, Homo sapien
gaatggccacgttggacaagaacag

SEQ ID NO: 4653205 - DNA, 25 bp, Homo sapien
ttcaaagcatttagagtgtggaggc

SEQ ID NO: 4653206 - DNA, 25 bp, Homo sapien
cacactccacagatcctaatcagga

SEQ ID NO: 4653207 - DNA, 25 bp, Homo sapien
tctcagagttagacctcagatcctt

SEQ ID NO: 4653208 - DNA, 25 bp, Homo sapien
agagatatttaacggtccatgaatt

SEQ ID NO: 4653209 - DNA, 25 bp, Homo sapien
gaagtctccggaccatgcaacaggt

SEQ ID NO: 4653210 - DNA, 25 bp, Homo sapien
ccaggaatgatggagatcggaacat

SEQ ID NO: 4653211 - DNA, 25 bp, Homo sapien
tatcaacgcagtggtcctcactcac

SEQ ID NO: 4653212 - DNA, 25 bp, Homo sapien
cagcatcctcatacggaaagtttta

SEQ ID NO: 4653213 - DNA, 25 bp, Homo sapien
catacggaaagttttaatatgggct

SEQ ID NO: 4653214 - DNA, 25 bp, Homo sapien
tcctgggaagtatcaacgcagtggt

SEQ ID NO: 4653215 - DNA, 25 bp, Homo sapien
ttgaaaagtgcttcgactacgggac

SEQ ID NO: 4653216 - DNA, 25 bp, Homo sapien
cttcttggacgacaggtgaggagac

SEQ ID NO: 4653217 - DNA, 25 bp, Homo sapien
aaaggtccgctttcgatttgaagat

SEQ ID NO: 4653218 - DNA, 25 bp, Homo sapien
tggaggccccgtctttggaatctgt

SEQ ID NO: 4653219 - DNA, 25 bp, Homo sapien
tggggaatgagcttgttgaatctaa

SEQ ID NO: 4653220 - DNA, 25 bp, Homo sapien
ggtgaagtgacaaggtaagaatgac

SEQ ID NO: 4653221 - DNA, 25 bp, Homo sapien
gttgacaggtgaagtgacaaggtaa

SEQ ID NO: 4653222 - DNA, 25 bp, Homo sapien
gttgaatctaatttttcgctttgaa

SEQ ID NO: 4653223 - DNA, 25 bp, Homo sapien
ggctgcaagatttggtacgtgtcac

SEQ ID NO: 4653224 - DNA, 25 bp, Homo sapien
tgtccccactcgagatgccctggga

SEQ ID NO: 4653225 - DNA, 25 bp, Homo sapien
ccttgtaggataattctggccaaca

SEQ ID NO: 4653226 - DNA, 25 bp, Homo sapien
aaggcagctcttataactcgaccaa

SEQ ID NO: 4653227 - DNA, 25 bp, Homo sapien
gcttttagcactggttgggacggct

SEQ ID NO: 4653228 - DNA, 25 bp, Homo sapien
catcactaaacacagggcttttagc

SEQ ID NO: 4653229 - DNA, 25 bp, Homo sapien
cactggttgggacggctggacacac

SEQ ID NO: 4653230 - DNA, 25 bp, Homo sapien
tcaagattctcaacaaggagtgaat

SEQ ID NO: 4653231 - DNA, 25 bp, Homo sapien
gtcttcagatatggaagggctgcct

SEQ ID NO: 4653232 - DNA, 25 bp, Homo sapien
cctgtcttcagatatggaagggctg

SEQ ID NO: 4653233 - DNA, 25 bp, Homo sapien
cttcaccctgtcttcagatatggaa

SEQ ID NO: 4653234 - DNA, 25 bp, Homo sapien
tcaccctgtcttcagatatggaagg

SEQ ID NO: 4653235 - DNA, 25 bp, Homo sapien
agcccgaggtacacttctgccaaaa

SEQ ID NO: 4653236 - DNA, 25 bp, Homo sapien
tctgcagcatcctggtaagcctcaa

SEQ ID NO: 4653237 - DNA, 25 bp, Homo sapien
aagcctcaaggggatggtgcctaga

SEQ ID NO: 4653238 - DNA, 25 bp, Homo sapien
agaacagcccgaggtacacttctgc

SEQ ID NO: 4653239 - DNA, 25 bp, Homo sapien
tatggagtatactgatgccatcagt

SEQ ID NO: 4653240 - DNA, 25 bp, Homo sapien
gagtatactgatgccatcagttttt

SEQ ID NO: 4653241 - DNA, 25 bp, Homo sapien
gcaaatgaagctatggagtatactg

SEQ ID NO: 4653242 - DNA, 25 bp, Homo sapien
tggagtatactgatgccatcagttt

SEQ ID NO: 4653243 - DNA, 25 bp, Homo sapien
gatgtgtatactagcagcccaaacc

SEQ ID NO: 4653244 - DNA, 25 bp, Homo sapien
gataaacaatggatgcacatggaca

SEQ ID NO: 4653245 - DNA, 25 bp, Homo sapien
ttgggaacaacattcactgcttggg

SEQ ID NO: 4653246 - DNA, 25 bp, Homo sapien
tgaccattacacaacatatccatgc

SEQ ID NO: 4653247 - DNA, 25 bp, Homo sapien
cacagggccttcgataatgtgcatt

SEQ ID NO: 4653248 - DNA, 25 bp, Homo sapien
cagggccttcgataatgtgcattgc

SEQ ID NO: 4653249 - DNA, 25 bp, Homo sapien
ggccttcgataatgtgcattgcacc

SEQ ID NO: 4653250 - DNA, 25 bp, Homo sapien
gtccacagggccttcgataatgtgc

SEQ ID NO: 4653251 - DNA, 25 bp, Homo sapien
caggcccatggagagctcaggctgc

SEQ ID NO: 4653252 - DNA, 25 bp, Homo sapien
tcctgggctggaggttgtgccctct

SEQ ID NO: 4653253 - DNA, 25 bp, Homo sapien
ctcctgggctggaggttgtgccctc

SEQ ID NO: 4653254 - DNA, 25 bp, Homo sapien
aggctgcatcatggggctgtccctc

SEQ ID NO: 4653255 - DNA, 25 bp, Homo sapien
aatgaccctgctaggaggtcagacc

SEQ ID NO: 4653256 - DNA, 25 bp, Homo sapien
cgtcccatcgcagggctggacattc

SEQ ID NO: 4653257 - DNA, 25 bp, Homo sapien
agatgaatgaatgaccctgctagga

SEQ ID NO: 4653258 - DNA, 25 bp, Homo sapien
ccctgtaagggctgtaggggtatca

SEQ ID NO: 4653259 - DNA, 25 bp, Homo sapien
ggccaaaaatacctggtgcctccag

SEQ ID NO: 4653260 - DNA, 25 bp, Homo sapien
gaggtatctaatttggtcagtcaca

SEQ ID NO: 4653261 - DNA, 25 bp, Homo sapien
gcactgtcttcttcggggaggtatc

SEQ ID NO: 4653262 - DNA, 25 bp, Homo sapien
tcagcatgggccaaaaatacctggt

SEQ ID NO: 4653263 - DNA, 25 bp, Homo sapien
tcgctgccgccgcaatgggcaaaac

SEQ ID NO: 4653264 - DNA, 25 bp, Homo sapien
cctggccttaggtgtctcgtgtctg

SEQ ID NO: 4653265 - DNA, 25 bp, Homo sapien
catgagcctggccttaggtgtctcg

SEQ ID NO: 4653266 - DNA, 25 bp, Homo sapien
caaaactgcggactctccgggttcg

SEQ ID NO: 4653267 - DNA, 25 bp, Homo sapien
gcagccctgcaggcctacaacttgt

SEQ ID NO: 4653268 - DNA, 25 bp, Homo sapien
gaatcagcatcttgccaaacctttg

SEQ ID NO: 4653269 - DNA, 25 bp, Homo sapien
tgaacgcagccctgcaggcctacaa

SEQ ID NO: 4653270 - DNA, 25 bp, Homo sapien
ggcctacaacttgtggaatggggca

SEQ ID NO: 4653271 - DNA, 25 bp, Homo sapien
ctaaaatgccctgaatgttgatttc

SEQ ID NO: 4653272 - DNA, 25 bp, Homo sapien
cagagtcatgggaagagaatatttc

SEQ ID NO: 4653273 - DNA, 25 bp, Homo sapien
atttcatctccagttatagcctgag

SEQ ID NO: 4653274 - DNA, 25 bp, Homo sapien
ttcctatagctaaaatgccctgaat

SEQ ID NO: 4653275 - DNA, 25 bp, Homo sapien
tcttgatcagttatgtcgactctca

SEQ ID NO: 4653276 - DNA, 25 bp, Homo sapien
tctcaaaaatggtcggatgcaatga

SEQ ID NO: 4653277 - DNA, 25 bp, Homo sapien
caatgatttgaaaaaagcatgcatt

SEQ ID NO: 4653278 - DNA, 25 bp, Homo sapien
tttcattaagggatttgcaaccttc

SEQ ID NO: 4653279 - DNA, 25 bp, Homo sapien
agaaatgaaatccatcaggtgcctt

SEQ ID NO: 4653280 - DNA, 25 bp, Homo sapien
ttctctgcttgcgtggacctgctcc

SEQ ID NO: 4653281 - DNA, 25 bp, Homo sapien
aagagataagggccatagaatagaa

SEQ ID NO: 4653282 - DNA, 25 bp, Homo sapien
tctgcttgcgtggacctgctccttc

SEQ ID NO: 4653283 - DNA, 25 bp, Homo sapien
tgctttctctgcttgcgtggacctg

SEQ ID NO: 4653284 - DNA, 25 bp, Homo sapien
gtgcgctggcctgcacagatctgct

SEQ ID NO: 4653285 - DNA, 25 bp, Homo sapien
cagatctgcttctgcaccagcataa

SEQ ID NO: 4653286 - DNA, 25 bp, Homo sapien
agatctgcttctgcaccagcataat

SEQ ID NO: 4653287 - DNA, 25 bp, Homo sapien
ctggtgcgctggcctgcacagatct

SEQ ID NO: 4653288 - DNA, 25 bp, Homo sapien
gcacttaacacccaggccaacgtgg

SEQ ID NO: 4653289 - DNA, 25 bp, Homo sapien
taacacccaggccaacgtggccatt

SEQ ID NO: 4653290 - DNA, 25 bp, Homo sapien
gtccctgatggcaacaaatgccttg

SEQ ID NO: 4653291 - DNA, 25 bp, Homo sapien
attgtagtccctgatggcaacaaat

SEQ ID NO: 4653292 - DNA, 25 bp, Homo sapien
atcttattcctccagtagcctttgt

SEQ ID NO: 4653293 - DNA, 25 bp, Homo sapien
cctccagtagcctttgtgcacggga

SEQ ID NO: 4653294 - DNA, 25 bp, Homo sapien
tccagtagcctttgtgcacgggaac

SEQ ID NO: 4653295 - DNA, 25 bp, Homo sapien
tattcctccagtagcctttgtgcac

SEQ ID NO: 4653296 - DNA, 25 bp, Homo sapien
tgggcacaccagcacagagccacag

SEQ ID NO: 4653297 - DNA, 25 bp, Homo sapien
ctgggcacaccagcacagagccaca

SEQ ID NO: 4653298 - DNA, 25 bp, Homo sapien
ggcacaccagcacagagccacagcg

SEQ ID NO: 4653299 - DNA, 25 bp, Homo sapien
cacaccagcacagagccacagcggc

SEQ ID NO: 4653300 - DNA, 25 bp, Homo sapien
tgtttggtagctgtaagtcttagag

SEQ ID NO: 4653301 - DNA, 25 bp, Homo sapien
ggtgcagtccctggctgaggggtag

SEQ ID NO: 4653302 - DNA, 25 bp, Homo sapien
gaggtgcagtccctggctgaggggt

SEQ ID NO: 4653303 - DNA, 25 bp, Homo sapien
tgggcatgggggcaaagacgatgcc

SEQ ID NO: 4653304 - DNA, 25 bp, Homo sapien
tgtaaaaaccctgtgttgtagccat

SEQ ID NO: 4653305 - DNA, 25 bp, Homo sapien
catagctggagcctggatcttctgc

SEQ ID NO: 4653306 - DNA, 25 bp, Homo sapien
tagctggagcctggatcttctgcac

SEQ ID NO: 4653307 - DNA, 25 bp, Homo sapien
tagccatagctggagcctggatctt

SEQ ID NO: 4653308 - DNA, 25 bp, Homo sapien
agaagtctgtgggtcaccctttctt

SEQ ID NO: 4653309 - DNA, 25 bp, Homo sapien
aagtctgtgggtcaccctttcttct

SEQ ID NO: 4653310 - DNA, 25 bp, Homo sapien
tttctagaagtgtgttctaaaagaa

SEQ ID NO: 4653311 - DNA, 25 bp, Homo sapien
ttgtttagcctacccacaactggca

SEQ ID NO: 4653312 - DNA, 25 bp, Homo sapien
tgtgtgagcacaaccacacaagtct

SEQ ID NO: 4653313 - DNA, 25 bp, Homo sapien
tctgtgtgagcacaaccacacaagt

SEQ ID NO: 4653314 - DNA, 25 bp, Homo sapien
acacaagtctgtctagccagtccat

SEQ ID NO: 4653315 - DNA, 25 bp, Homo sapien
gtgtgagcacaaccacacaagtctg

SEQ ID NO: 4653316 - DNA, 25 bp, Homo sapien
atctccttattgttcccacataacc

SEQ ID NO: 4653317 - DNA, 25 bp, Homo sapien
acacagcccctcaaatgtgtctgtt

SEQ ID NO: 4653318 - DNA, 25 bp, Homo sapien
cttattgttcccacataaccaatca

SEQ ID NO: 4653319 - DNA, 25 bp, Homo sapien
cacagcccctcaaatgtgtctgttt

SEQ ID NO: 4653320 - DNA, 25 bp, Homo sapien
actctccacatgtgtccagcctgct

SEQ ID NO: 4653321 - DNA, 25 bp, Homo sapien
tgttcatgggcttctcaccaactct

SEQ ID NO: 4653322 - DNA, 25 bp, Homo sapien
tacaccaataagtggctgccccatg

SEQ ID NO: 4653323 - DNA, 25 bp, Homo sapien
tgaatacccatactctagacctaag

SEQ ID NO: 4653324 - DNA, 25 bp, Homo sapien
tagacctaagctctgtggctacact

SEQ ID NO: 4653325 - DNA, 25 bp, Homo sapien
agcccagcttgtgcccctacaccaa

SEQ ID NO: 4653326 - DNA, 25 bp, Homo sapien
cgtgacacttcaggaatagaggcat

SEQ ID NO: 4653327 - DNA, 25 bp, Homo sapien
gacacttcaggaatagaggcatcac

SEQ ID NO: 4653328 - DNA, 25 bp, Homo sapien
cacaatcgtgacacttcaggaatag

SEQ ID NO: 4653329 - DNA, 25 bp, Homo sapien
gggagaagtggctgcaaccccttcc

SEQ ID NO: 4653330 - DNA, 25 bp, Homo sapien
tcatggatgtacatcagggatattg

SEQ ID NO: 4653331 - DNA, 25 bp, Homo sapien
attttatcgaaagccttttcctgca

SEQ ID NO: 4653332 - DNA, 25 bp, Homo sapien
gaggattttctcatggatgtacatc

SEQ ID NO: 4653333 - DNA, 25 bp, Homo sapien
ttttatcgaaagccttttcctgcat

SEQ ID NO: 4653334 - DNA, 25 bp, Homo sapien
ctaagatcaaatgaggctttattct

SEQ ID NO: 4653335 - DNA, 25 bp, Homo sapien
tctaagatcaaatgaggctttattc

SEQ ID NO: 4653336 - DNA, 25 bp, Homo sapien
cactgctatccatgatgatagttac

SEQ ID NO: 4653337 - DNA, 25 bp, Homo sapien
ctgcactgctatccatgatgatagt

SEQ ID NO: 4653338 - DNA, 25 bp, Homo sapien
ctctctgcactgctatccatgatga

SEQ ID NO: 4653339 - DNA, 25 bp, Homo sapien
tctctgcactgctatccatgatgat

SEQ ID NO: 4653340 - DNA, 25 bp, Homo sapien
cctattatctagtgtcaaatgcttg

SEQ ID NO: 4653341 - DNA, 25 bp, Homo sapien
tgcattttatatcatcgtgacctag

SEQ ID NO: 4653342 - DNA, 25 bp, Homo sapien
tcctgagaagatgtagcagggcttg

SEQ ID NO: 4653343 - DNA, 25 bp, Homo sapien
cactgcctgtgacatatgagatagt

SEQ ID NO: 4653344 - DNA, 25 bp, Homo sapien
ctggctggcttcctgtttattcaca

SEQ ID NO: 4653345 - DNA, 25 bp, Homo sapien
cttcctgtttattcacagaattttc

SEQ ID NO: 4653346 - DNA, 25 bp, Homo sapien
cctgtttattcacagaattttcttg

SEQ ID NO: 4653347 - DNA, 25 bp, Homo sapien
tggcttcctgtttattcacagaatt

SEQ ID NO: 4653348 - DNA, 25 bp, Homo sapien
gggagacacaagtcttaggggacac

SEQ ID NO: 4653349 - DNA, 25 bp, Homo sapien
ctggggagacacaagtcttagggga

SEQ ID NO: 4653350 - DNA, 25 bp, Homo sapien
tggggagacacaagtcttaggggac

SEQ ID NO: 4653351 - DNA, 25 bp, Homo sapien
gagacacaagtcttaggggacacac

SEQ ID NO: 4653352 - DNA, 25 bp, Homo sapien
cttgactatcctgggtatgaaacca

SEQ ID NO: 4653353 - DNA, 25 bp, Homo sapien
tggctggttaacagcttgactatcc

SEQ ID NO: 4653354 - DNA, 25 bp, Homo sapien
taacagcttgactatcctgggtatg

SEQ ID NO: 4653355 - DNA, 25 bp, Homo sapien
gttgtttgtggctggttaacagctt

SEQ ID NO: 4653356 - DNA, 25 bp, Homo sapien
tgattgagctgtgaattgctctccc

SEQ ID NO: 4653357 - DNA, 25 bp, Homo sapien
tccccgaggtattgaaatattcatc

SEQ ID NO: 4653358 - DNA, 25 bp, Homo sapien
taaatattaatggaagatgtagtgg

SEQ ID NO: 4653359 - DNA, 25 bp, Homo sapien
cttaaaacagcttgaatgattgagc

SEQ ID NO: 4653360 - DNA, 25 bp, Homo sapien
attcttggcatttagagaaggcatc

SEQ ID NO: 4653361 - DNA, 25 bp, Homo sapien
tcattctgagaactgcctgctgaaa

SEQ ID NO: 4653362 - DNA, 25 bp, Homo sapien
tcttggcatttagagaaggcatctt

SEQ ID NO: 4653363 - DNA, 25 bp, Homo sapien
cttggcatttagagaaggcatcttt

SEQ ID NO: 4653364 - DNA, 25 bp, Homo sapien
tgtcatgattaatgtgtgacagctg

SEQ ID NO: 4653365 - DNA, 25 bp, Homo sapien
ttaaaccatgcgtgatatgctcgct

SEQ ID NO: 4653366 - DNA, 25 bp, Homo sapien
cagctgtgccactgttttgtcacaa

SEQ ID NO: 4653367 - DNA, 25 bp, Homo sapien
ggtaattatgctatttgtcactgtc

SEQ ID NO: 4653368 - DNA, 25 bp, Homo sapien
tattatctcaaatggcaggtggaca

SEQ ID NO: 4653369 - DNA, 25 bp, Homo sapien
gaatgcctacaaaccactcagagaa

SEQ ID NO: 4653370 - DNA, 25 bp, Homo sapien
gaaaatgtgaactcacagccccagg

SEQ ID NO: 4653371 - DNA, 25 bp, Homo sapien
tatcgacaaatgacacgggactcct

SEQ ID NO: 4653372 - DNA, 25 bp, Homo sapien
aggatagtttgggtggcttgcaacc

SEQ ID NO: 4653373 - DNA, 25 bp, Homo sapien
gatagtttgggtggcttgcaaccac

SEQ ID NO: 4653374 - DNA, 25 bp, Homo sapien
tacttcaataaccaaggatagtttg

SEQ ID NO: 4653375 - DNA, 25 bp, Homo sapien
cttcaataaccaaggatagtttggg

SEQ ID NO: 4653376 - DNA, 25 bp, Homo sapien
tggataaccacccttgtttcccaca

SEQ ID NO: 4653377 - DNA, 25 bp, Homo sapien
ctagacatggtttccaatatctcaa

SEQ ID NO: 4653378 - DNA, 25 bp, Homo sapien
catggtttccaatatctcaatgagc

SEQ ID NO: 4653379 - DNA, 25 bp, Homo sapien
ccaatatctcaatgagcacactgga

SEQ ID NO: 4653380 - DNA, 25 bp, Homo sapien
ggtttccaatatctcaatgagcaca

SEQ ID NO: 4653381 - DNA, 25 bp, Homo sapien
gaatgtatcaaaatagaggtctaat

SEQ ID NO: 4653382 - DNA, 25 bp, Homo sapien
atcagaccatgactagtacttagga

SEQ ID NO: 4653383 - DNA, 25 bp, Homo sapien
aatagaggtctaatcaggctgagaa

SEQ ID NO: 4653384 - DNA, 25 bp, Homo sapien
gaccatgactagtacttaggatagc

SEQ ID NO: 4653385 - DNA, 25 bp, Homo sapien
acaatagcgcttgagttatcagttg

SEQ ID NO: 4653386 - DNA, 25 bp, Homo sapien
aatagcgcttgagttatcagttgca

SEQ ID NO: 4653387 - DNA, 25 bp, Homo sapien
tagcgcttgagttatcagttgcaga

SEQ ID NO: 4653388 - DNA, 25 bp, Homo sapien
caatagcgcttgagttatcagttgc

SEQ ID NO: 4653389 - DNA, 25 bp, Homo sapien
ctgacagtctcatctaaatctggta

SEQ ID NO: 4653390 - DNA, 25 bp, Homo sapien
tgcagtggatctgccatcctacata

SEQ ID NO: 4653391 - DNA, 25 bp, Homo sapien
gctgctgcctgtggacactgcgagc

SEQ ID NO: 4653392 - DNA, 25 bp, Homo sapien
catcctacatatctaataaactccc

SEQ ID NO: 4653393 - DNA, 25 bp, Homo sapien
ccaggagtcactgtgaaactcccca

SEQ ID NO: 4653394 - DNA, 25 bp, Homo sapien
gaggcatcttttgttatcttcacaa

SEQ ID NO: 4653395 - DNA, 25 bp, Homo sapien
tttgtggttgacctgcaccatattt

SEQ ID NO: 4653396 - DNA, 25 bp, Homo sapien
taaatttgggaaggctgattagaaa

SEQ ID NO: 4653397 - DNA, 25 bp, Homo sapien
agcttctccaaaagccgtggcagtt

SEQ ID NO: 4653398 - DNA, 25 bp, Homo sapien
ggttctgtctgtaactccactctta

SEQ ID NO: 4653399 - DNA, 25 bp, Homo sapien
tttgccagcaaaagtggttctgtct

SEQ ID NO: 4653400 - DNA, 25 bp, Homo sapien
tccaaaagccgtggcagttttgcca

SEQ ID NO: 4653401 - DNA, 25 bp, Homo sapien
ccaggacccgtgctaacaggaagag

SEQ ID NO: 4653402 - DNA, 25 bp, Homo sapien
caggacccgtgctaacaggaagagt

SEQ ID NO: 4653403 - DNA, 25 bp, Homo sapien
ctgctgccatagattatgacttctc

SEQ ID NO: 4653404 - DNA, 25 bp, Homo sapien
cccatagctgctgccatagattatg

SEQ ID NO: 4653405 - DNA, 25 bp, Homo sapien
ctgccatagattatgacttctcctt

SEQ ID NO: 4653406 - DNA, 25 bp, Homo sapien
tcccatagctgctgccatagattat

SEQ ID NO: 4653407 - DNA, 25 bp, Homo sapien
gaaacgatgttgtagttgagagcag

SEQ ID NO: 4653408 - DNA, 25 bp, Homo sapien
tctggttgccactcttcaatcagtt

SEQ ID NO: 4653409 - DNA, 25 bp, Homo sapien
cctgaaacgatgttgtagttgagag

SEQ ID NO: 4653410 - DNA, 25 bp, Homo sapien
ggttctggttgccactcttcaatca

SEQ ID NO: 4653411 - DNA, 25 bp, Homo sapien
ccttgattctcgttttccaaaggca

SEQ ID NO: 4653412 - DNA, 25 bp, Homo sapien
cacccttgattctcgttttccaaag

SEQ ID NO: 4653413 - DNA, 25 bp, Homo sapien
ttgattctcgttttccaaaggcaaa

SEQ ID NO: 4653414 - DNA, 25 bp, Homo sapien
tctcacccttgattctcgttttcca

SEQ ID NO: 4653415 - DNA, 25 bp, Homo sapien
acatggggattcttcagcttcaatg

SEQ ID NO: 4653416 - DNA, 25 bp, Homo sapien
tgctgtcaacatggggattcttcag

SEQ ID NO: 4653417 - DNA, 25 bp, Homo sapien
ttcatccacaccttaagccctcagc

SEQ ID NO: 4653418 - DNA, 25 bp, Homo sapien
tgtcaacatggggattcttcagctt

SEQ ID NO: 4653419 - DNA, 25 bp, Homo sapien
caaagtggtccgcagtacatgaatg

SEQ ID NO: 4653420 - DNA, 25 bp, Homo sapien
gcagcttgctgtacacatctgtaaa

SEQ ID NO: 4653421 - DNA, 25 bp, Homo sapien
cacagcacggaaaggacttaaggga

SEQ ID NO: 4653422 - DNA, 25 bp, Homo sapien
tttagcacctgaacaatgatagcac

SEQ ID NO: 4653423 - DNA, 25 bp, Homo sapien
ttatcaaaccaaatatgtcggccct

SEQ ID NO: 4653424 - DNA, 25 bp, Homo sapien
tactggcttgctatagtgattggaa

SEQ ID NO: 4653425 - DNA, 25 bp, Homo sapien
ctatagtgattggaacctaagtgcc

SEQ ID NO: 4653426 - DNA, 25 bp, Homo sapien
tatgtcggcccttttgaatactggc

SEQ ID NO: 4653427 - DNA, 25 bp, Homo sapien
gcgttgttccttcataagacatctg

SEQ ID NO: 4653428 - DNA, 25 bp, Homo sapien
gagcagggagcacggctttagtcca

SEQ ID NO: 4653429 - DNA, 25 bp, Homo sapien
ggctttagtccaacacagtaaatta

SEQ ID NO: 4653430 - DNA, 25 bp, Homo sapien
ttatgtttgtaatgagggccttgca

SEQ ID NO: 4653431 - DNA, 25 bp, Homo sapien
gggaagctctaagagttgaaaccca

SEQ ID NO: 4653432 - DNA, 25 bp, Homo sapien
ttcaggagcatagctacgagctggg

SEQ ID NO: 4653433 - DNA, 25 bp, Homo sapien
tagctacgagctgggaagctctaag

SEQ ID NO: 4653434 - DNA, 25 bp, Homo sapien
gagcatagctacgagctgggaagct

SEQ ID NO: 4653435 - DNA, 25 bp, Homo sapien
gccgagtgagtacaagggtagaaga

SEQ ID NO: 4653436 - DNA, 25 bp, Homo sapien
tctgactttgtctcacagaggtcct

SEQ ID NO: 4653437 - DNA, 25 bp, Homo sapien
gagccgagtgagtacaagggtagaa

SEQ ID NO: 4653438 - DNA, 25 bp, Homo sapien
tagagagccgagtgagtacaagggt

SEQ ID NO: 4653439 - DNA, 25 bp, Homo sapien
caacatgagggatacagatagcttc

SEQ ID NO: 4653440 - DNA, 25 bp, Homo sapien
tagcagcgtggccttaaaccctgaa

SEQ ID NO: 4653441 - DNA, 25 bp, Homo sapien
gtgctcctgtcttcaacatgaggga

SEQ ID NO: 4653442 - DNA, 25 bp, Homo sapien
tctttactgttgtagggaaattcac

SEQ ID NO: 4653443 - DNA, 25 bp, Homo sapien
caaagccttgccctgatctgcaatg

SEQ ID NO: 4653444 - DNA, 25 bp, Homo sapien
gactgtttatctggacccttaatca

SEQ ID NO: 4653445 - DNA, 25 bp, Homo sapien
taggctcacctcagttccagactgt

SEQ ID NO: 4653446 - DNA, 25 bp, Homo sapien
gatctgcaatgactaggctcacctc

SEQ ID NO: 4653447 - DNA, 25 bp, Homo sapien
aagcttcggatattgacaccctcca

SEQ ID NO: 4653448 - DNA, 25 bp, Homo sapien
gctgaagcttcggatattgacaccc

SEQ ID NO: 4653449 - DNA, 25 bp, Homo sapien
ccagctgaagcttcggatattgaca

SEQ ID NO: 4653450 - DNA, 25 bp, Homo sapien
aaccagctgaagcttcggatattga

SEQ ID NO: 4653451 - DNA, 25 bp, Homo sapien
tcaccccttgaaaaaggctatggcc

SEQ ID NO: 4653452 - DNA, 25 bp, Homo sapien
taagctaaagccactaccagatatg

SEQ ID NO: 4653453 - DNA, 25 bp, Homo sapien
ccattcacaagagggtaaagatgcc

SEQ ID NO: 4653454 - DNA, 25 bp, Homo sapien
tacagatggcaagccaatggctcct

SEQ ID NO: 4653455 - DNA, 25 bp, Homo sapien
tccaaagtctgcgaagggccaactg

SEQ ID NO: 4653456 - DNA, 25 bp, Homo sapien
ggatactgcagttgcttacacagct

SEQ ID NO: 4653457 - DNA, 25 bp, Homo sapien
caattgtgaagccatcggagtgtgt

SEQ ID NO: 4653458 - DNA, 25 bp, Homo sapien
tgggttaacttgtcagtcctccagg

SEQ ID NO: 4653459 - DNA, 25 bp, Homo sapien
tgatgatctctagattcggggtgca

SEQ ID NO: 4653460 - DNA, 25 bp, Homo sapien
cttgctcttgatgatctctagattc

SEQ ID NO: 4653461 - DNA, 25 bp, Homo sapien
gctcttgatgatctctagattcggg

SEQ ID NO: 4653462 - DNA, 25 bp, Homo sapien
gatgatctctagattcggggtgcat

SEQ ID NO: 4653463 - DNA, 25 bp, Homo sapien
gatggaacagatgggcttagcatga

SEQ ID NO: 4653464 - DNA, 25 bp, Homo sapien
ccatcaaaggactgtctgatggaac

SEQ ID NO: 4653465 - DNA, 25 bp, Homo sapien
tccatcaaaggactgtctgatggaa

SEQ ID NO: 4653466 - DNA, 25 bp, Homo sapien
agcacacactccagattgcattctc

SEQ ID NO: 4653467 - DNA, 25 bp, Homo sapien
tcattctgacagcacacactccaga

SEQ ID NO: 4653468 - DNA, 25 bp, Homo sapien
ctgacagcacacactccagattgca

SEQ ID NO: 4653469 - DNA, 25 bp, Homo sapien
cacactccagattgcattctccttt

SEQ ID NO: 4653470 - DNA, 25 bp, Homo sapien
aagaccttgtcagatgtgggcagcc

SEQ ID NO: 4653471 - DNA, 25 bp, Homo sapien
gagctctgccgcaggatgctgaaga

SEQ ID NO: 4653472 - DNA, 25 bp, Homo sapien
taaggcaacccttgacctgagagct

SEQ ID NO: 4653473 - DNA, 25 bp, Homo sapien
tcagcagcagtggaccgaagttgag

SEQ ID NO: 4653474 - DNA, 25 bp, Homo sapien
caggttgctgaagtaatgcccagct

SEQ ID NO: 4653475 - DNA, 25 bp, Homo sapien
gcagtagagagtgagcctggaattt

SEQ ID NO: 4653476 - DNA, 25 bp, Homo sapien
cagtagagagtgagcctggaatttg

SEQ ID NO: 4653477 - DNA, 25 bp, Homo sapien
agtagagagtgagcctggaatttgc

SEQ ID NO: 4653478 - DNA, 25 bp, Homo sapien
tcaaatacacgctcatcagtataat

SEQ ID NO: 4653479 - DNA, 25 bp, Homo sapien
tttttcaaatacacgctcatcagta

SEQ ID NO: 4653480 - DNA, 25 bp, Homo sapien
caaatacacgctcatcagtataatt

SEQ ID NO: 4653481 - DNA, 25 bp, Homo sapien
tttcaaatacacgctcatcagtata

SEQ ID NO: 4653482 - DNA, 25 bp, Homo sapien
tgtcatcttctggttgtacagtaca

SEQ ID NO: 4653483 - DNA, 25 bp, Homo sapien
ctgtcatcttctggttgtacagtac

SEQ ID NO: 4653484 - DNA, 25 bp, Homo sapien
aactgtcatcttctggttgtacagt

SEQ ID NO: 4653485 - DNA, 25 bp, Homo sapien
gaactgtcatcttctggttgtacag

SEQ ID NO: 4653486 - DNA, 25 bp, Homo sapien
gcaatactgttctgtagaactttat

SEQ ID NO: 4653487 - DNA, 25 bp, Homo sapien
tggggagctgtttcctactcctctg

SEQ ID NO: 4653488 - DNA, 25 bp, Homo sapien
agaactttattgctctcactgtggc

SEQ ID NO: 4653489 - DNA, 25 bp, Homo sapien
gaaaagccacttgggaaaactgtgc

SEQ ID NO: 4653490 - DNA, 25 bp, Homo sapien
ctgcttcaaactccaccatagcttc

SEQ ID NO: 4653491 - DNA, 25 bp, Homo sapien
tgcctatgagtagcgggccttccag

SEQ ID NO: 4653492 - DNA, 25 bp, Homo sapien
taaaaagagggcatgatattcccca

SEQ ID NO: 4653493 - DNA, 25 bp, Homo sapien
caacatttcggcactagggcaagtc

SEQ ID NO: 4653494 - DNA, 25 bp, Homo sapien
tctgatggagtcagcagcaatgcaa

SEQ ID NO: 4653495 - DNA, 25 bp, Homo sapien
gtgacgtcgctaacagggtcattgc

SEQ ID NO: 4653496 - DNA, 25 bp, Homo sapien
tcagacaggtggtaaaggtgacgtc

SEQ ID NO: 4653497 - DNA, 25 bp, Homo sapien
ggatatgcaaaggtgtcagtcagac

SEQ ID NO: 4653498 - DNA, 25 bp, Homo sapien
acccctggcccagtggatatgcaaa

SEQ ID NO: 4653499 - DNA, 25 bp, Homo sapien
gctcaatatttactctagctggcag

SEQ ID NO: 4653500 - DNA, 25 bp, Homo sapien
gcagtatattcacccagagtctggg

SEQ ID NO: 4653501 - DNA, 25 bp, Homo sapien
tagctggcagggcagtatattcacc

SEQ ID NO: 4653502 - DNA, 25 bp, Homo sapien
cttgataaaacttaaagtgctcaat

SEQ ID NO: 4653503 - DNA, 25 bp, Homo sapien
tattaatagcataagcagtcaatgt

SEQ ID NO: 4653504 - DNA, 25 bp, Homo sapien
gatattaatagcataagcagtcaat

SEQ ID NO: 4653505 - DNA, 25 bp, Homo sapien
atattaatagcataagcagtcaatg

SEQ ID NO: 4653506 - DNA, 25 bp, Homo sapien
gcttctatgccagtagacctggcag

SEQ ID NO: 4653507 - DNA, 25 bp, Homo sapien
tccaagagacctagaaaccttttca

SEQ ID NO: 4653508 - DNA, 25 bp, Homo sapien
gacctggcagtgctaaatccaagag

SEQ ID NO: 4653509 - DNA, 25 bp, Homo sapien
gccacagatgaaagtacccttgcta

SEQ ID NO: 4653510 - DNA, 25 bp, Homo sapien
agtgcggggtagcagagtaggcctg

SEQ ID NO: 4653511 - DNA, 25 bp, Homo sapien
ggtagcagagtaggcctgagagccc

SEQ ID NO: 4653512 - DNA, 25 bp, Homo sapien
agcagagtaggcctgagagcccact

SEQ ID NO: 4653513 - DNA, 25 bp, Homo sapien
agagtaggcctgagagcccactcat

SEQ ID NO: 4653514 - DNA, 25 bp, Homo sapien
agctagcggtgtctgcaaattttcc

SEQ ID NO: 4653515 - DNA, 25 bp, Homo sapien
gatgtccaccagtttgctaagagaa

SEQ ID NO: 4653516 - DNA, 25 bp, Homo sapien
cctgagagagctagcggtgtctgca

SEQ ID NO: 4653517 - DNA, 25 bp, Homo sapien
caactctctaaagaagatgatgtcc

SEQ ID NO: 4653518 - DNA, 25 bp, Homo sapien
ctgcctgctgctgagcaggggcatt

SEQ ID NO: 4653519 - DNA, 25 bp, Homo sapien
tctgcctgctgctgagcaggggcat

SEQ ID NO: 4653520 - DNA, 25 bp, Homo sapien
gtctgcctgctgctgagcaggggca

SEQ ID NO: 4653521 - DNA, 25 bp, Homo sapien
tgcctgctgctgagcaggggcattc

SEQ ID NO: 4653522 - DNA, 25 bp, Homo sapien
gaatagaagggttatgtgtacaaaa

SEQ ID NO: 4653523 - DNA, 25 bp, Homo sapien
ctgagtgaagaatagaagggttatg

SEQ ID NO: 4653524 - DNA, 25 bp, Homo sapien
tgagtgaagaatagaagggttatgt

SEQ ID NO: 4653525 - DNA, 25 bp, Homo sapien
tgaagaatagaagggttatgtgtac

SEQ ID NO: 4653526 - DNA, 25 bp, Homo sapien
atggccacagaaattgctgctgaca

SEQ ID NO: 4653527 - DNA, 25 bp, Homo sapien
ctttgtgagaagcgtatggccacag

SEQ ID NO: 4653528 - DNA, 25 bp, Homo sapien
ggccacagaaattgctgctgacact

SEQ ID NO: 4653529 - DNA, 25 bp, Homo sapien
gtgagaagcgtatggccacagaaat

SEQ ID NO: 4653530 - DNA, 25 bp, Homo sapien
tgaagtagataatgacagcaaacct

SEQ ID NO: 4653531 - DNA, 25 bp, Homo sapien
cattgaagtagataatgacagcaaa

SEQ ID NO: 4653532 - DNA, 25 bp, Homo sapien
gaagtagataatgacagcaaacctc

SEQ ID NO: 4653533 - DNA, 25 bp, Homo sapien
gttcattgaagtagataatgacagc

SEQ ID NO: 4653534 - DNA, 25 bp, Homo sapien
tgcctgcttagacccatcccattag

SEQ ID NO: 4653535 - DNA, 25 bp, Homo sapien
gccttgggagccataagtgacatcc

SEQ ID NO: 4653536 - DNA, 25 bp, Homo sapien
cctttggcaattctctgggtgacaa

SEQ ID NO: 4653537 - DNA, 25 bp, Homo sapien
gggataaaaaggtcagccattggcc

SEQ ID NO: 4653538 - DNA, 25 bp, Homo sapien
aaacgaaatcatccagttgtgcaat

SEQ ID NO: 4653539 - DNA, 25 bp, Homo sapien
tgcctgtgtagctggaaaaaacgaa

SEQ ID NO: 4653540 - DNA, 25 bp, Homo sapien
ttagctaatggtgctgggatctgag

SEQ ID NO: 4653541 - DNA, 25 bp, Homo sapien
tagctaatggtgctgggatctgagt

SEQ ID NO: 4653542 - DNA, 25 bp, Homo sapien
tcgtcccgtagactttgctgagcca

SEQ ID NO: 4653543 - DNA, 25 bp, Homo sapien
ccatggtggccgctcgtcccgtaga

SEQ ID NO: 4653544 - DNA, 25 bp, Homo sapien
cagcatattgctggtgcatcttcca

SEQ ID NO: 4653545 - DNA, 25 bp, Homo sapien
cttccacctgtatctgccagcatat

SEQ ID NO: 4653546 - DNA, 25 bp, Homo sapien
ctctttgatggcctggtcactgagc

SEQ ID NO: 4653547 - DNA, 25 bp, Homo sapien
ccacatggggagtggaaagccatct

SEQ ID NO: 4653548 - DNA, 25 bp, Homo sapien
gatcttggcagcctctttgatggcc

SEQ ID NO: 4653549 - DNA, 25 bp, Homo sapien
gtgagagaatacagcctgtctgatc

SEQ ID NO: 4653550 - DNA, 25 bp, Homo sapien
agacagacaagtagagtaatgatca

SEQ ID NO: 4653551 - DNA, 25 bp, Homo sapien
caagacacttttagtggtctctaaa

SEQ ID NO: 4653552 - DNA, 25 bp, Homo sapien
cagacaagtagagtaatgatcatct

SEQ ID NO: 4653553 - DNA, 25 bp, Homo sapien
ttacaagacacttttagtggtctct

SEQ ID NO: 4653554 - DNA, 25 bp, Homo sapien
tgggtcaccttggactccacagtcc

SEQ ID NO: 4653555 - DNA, 25 bp, Homo sapien
gggtcaccttggactccacagtccc

SEQ ID NO: 4653556 - DNA, 25 bp, Homo sapien
ggtcaccttggactccacagtccct

SEQ ID NO: 4653557 - DNA, 25 bp, Homo sapien
ctgggtcaccttggactccacagtc

SEQ ID NO: 4653558 - DNA, 25 bp, Homo sapien
tctgatttccaactacggcaggtac

SEQ ID NO: 4653559 - DNA, 25 bp, Homo sapien
tggcctctgatttccaactacggca

SEQ ID NO: 4653560 - DNA, 25 bp, Homo sapien
gatttccaactacggcaggtacaaa

SEQ ID NO: 4653561 - DNA, 25 bp, Homo sapien
caactacggcaggtacaaacaattc

SEQ ID NO: 4653562 - DNA, 25 bp, Homo sapien
cagacacattgtaggtcccaatcta

SEQ ID NO: 4653563 - DNA, 25 bp, Homo sapien
cattgtaggtcccaatctacatcct

SEQ ID NO: 4653564 - DNA, 25 bp, Homo sapien
gacacattgtaggtcccaatctaca

SEQ ID NO: 4653565 - DNA, 25 bp, Homo sapien
taggtcccaatctacatcctttgga

SEQ ID NO: 4653566 - DNA, 25 bp, Homo sapien
aaagtgaagaggagtcaccaatttt

SEQ ID NO: 4653567 - DNA, 25 bp, Homo sapien
aagtgaagaggagtcaccaatttta

SEQ ID NO: 4653568 - DNA, 25 bp, Homo sapien
tatgagctccaatccctctaattcc

SEQ ID NO: 4653569 - DNA, 25 bp, Homo sapien
aggaaatggtgtagagtcagcttgc

SEQ ID NO: 4653570 - DNA, 25 bp, Homo sapien
tggtgtagagtcagcttgctcaatc

SEQ ID NO: 4653571 - DNA, 25 bp, Homo sapien
cttgctcaatccctgcattatgagc

SEQ ID NO: 4653572 - DNA, 25 bp, Homo sapien
ggctccctttcaaagtacaggatgg

SEQ ID NO: 4653573 - DNA, 25 bp, Homo sapien
gaatatcatccttagcccctatctg

SEQ ID NO: 4653574 - DNA, 25 bp, Homo sapien
ccatcctcctgtttgtgagctctct

SEQ ID NO: 4653575 - DNA, 25 bp, Homo sapien
tggatcccagatcccctgattcttg

SEQ ID NO: 4653576 - DNA, 25 bp, Homo sapien
tagatggagaacatccagttgctgt

SEQ ID NO: 4653577 - DNA, 25 bp, Homo sapien
atctgtgagggcaggcctagggaag

SEQ ID NO: 4653578 - DNA, 25 bp, Homo sapien
ggtctttccacactggggcgtagta

SEQ ID NO: 4653579 - DNA, 25 bp, Homo sapien
gtctgcctgcaacatcagtatgata

SEQ ID NO: 4653580 - DNA, 25 bp, Homo sapien
caggtgacactcttggtatggagga

SEQ ID NO: 4653581 - DNA, 25 bp, Homo sapien
cagttgcaagtctccctggtggagg

SEQ ID NO: 4653582 - DNA, 25 bp, Homo sapien
gccatgaccaggctagcttgataaa

SEQ ID NO: 4653583 - DNA, 25 bp, Homo sapien
aacctgcagtctgtgcgcccagttg

SEQ ID NO: 4653584 - DNA, 25 bp, Homo sapien
gaagtgaaaaatactcctcttgatc

SEQ ID NO: 4653585 - DNA, 25 bp, Homo sapien
tgcagaaacggttgttccttctctc

SEQ ID NO: 4653586 - DNA, 25 bp, Homo sapien
ggtgtattcgctaactcctgtcctg

SEQ ID NO: 4653587 - DNA, 25 bp, Homo sapien
cacctaaggacaccctgaagtgaaa

SEQ ID NO: 4653588 - DNA, 25 bp, Homo sapien
ggatgttagtatgcatggtggacct

SEQ ID NO: 4653589 - DNA, 25 bp, Homo sapien
tgggccttttattacttgattgcaa

SEQ ID NO: 4653590 - DNA, 25 bp, Homo sapien
cctttgtcagctgtactggatgtta

SEQ ID NO: 4653591 - DNA, 25 bp, Homo sapien
ataacgagcaaacaatgccaaggtt

SEQ ID NO: 4653592 - DNA, 25 bp, Homo sapien
ttgccaaatgggcacaagcatctgg

SEQ ID NO: 4653593 - DNA, 25 bp, Homo sapien
tggtgcaagagaggtgaacgacatc

SEQ ID NO: 4653594 - DNA, 25 bp, Homo sapien
tatgcgactgtctgacattgacagc

SEQ ID NO: 4653595 - DNA, 25 bp, Homo sapien
cagcatcatgacctttctgcctggg

SEQ ID NO: 4653596 - DNA, 25 bp, Homo sapien
ataacacatttcattaatgcgttca

SEQ ID NO: 4653597 - DNA, 25 bp, Homo sapien
taacacatttcattaatgcgttcat

SEQ ID NO: 4653598 - DNA, 25 bp, Homo sapien
tttgatagctagtggttttcagcag

SEQ ID NO: 4653599 - DNA, 25 bp, Homo sapien
cagcgtgaggtagattgttaatgtc

SEQ ID NO: 4653600 - DNA, 25 bp, Homo sapien
tcacatgagtgacgcttcagtgata

SEQ ID NO: 4653601 - DNA, 25 bp, Homo sapien
tactgaggcggaactgagggttcat

SEQ ID NO: 4653602 - DNA, 25 bp, Homo sapien
cttgtgaaagcaaatggctttgcag

SEQ ID NO: 4653603 - DNA, 25 bp, Homo sapien
ccagtcttgtgaaagcaaatggctt

SEQ ID NO: 4653604 - DNA, 25 bp, Homo sapien
gaaagcaaatggctttgcagcagct

SEQ ID NO: 4653605 - DNA, 25 bp, Homo sapien
cctccagtcttgtgaaagcaaatgg

SEQ ID NO: 4653606 - DNA, 25 bp, Homo sapien
cagtgtggctggttgcacagtggtc

SEQ ID NO: 4653607 - DNA, 25 bp, Homo sapien
gctcatttgaagtcgctctgacaac

SEQ ID NO: 4653608 - DNA, 25 bp, Homo sapien
gaagagtttggctgtgctcatttga

SEQ ID NO: 4653609 - DNA, 25 bp, Homo sapien
cagtggtcggcctctcagcgctgaa

SEQ ID NO: 4653610 - DNA, 25 bp, Homo sapien
cagtagttgttcctggataaatagt

SEQ ID NO: 4653611 - DNA, 25 bp, Homo sapien
cacagtagttgttcctggataaata

SEQ ID NO: 4653612 - DNA, 25 bp, Homo sapien
ccacagtagttgttcctggataaat

SEQ ID NO: 4653613 - DNA, 25 bp, Homo sapien
tagttgttcctggataaatagtaat

SEQ ID NO: 4653614 - DNA, 25 bp, Homo sapien
cacttatctttgcttccagaaatct

SEQ ID NO: 4653615 - DNA, 25 bp, Homo sapien
tatctttgcttccagaaatctcagc

SEQ ID NO: 4653616 - DNA, 25 bp, Homo sapien
tctcagccattttcttggatccttt

SEQ ID NO: 4653617 - DNA, 25 bp, Homo sapien
ttggatccttttttattctcactca

SEQ ID NO: 4653618 - DNA, 25 bp, Homo sapien
aggagggcacaatagcagctttcgg

SEQ ID NO: 4653619 - DNA, 25 bp, Homo sapien
gggcacaatagcagctttcgggttg

SEQ ID NO: 4653620 - DNA, 25 bp, Homo sapien
cacaatagcagctttcgggttgcag

SEQ ID NO: 4653621 - DNA, 25 bp, Homo sapien
tgctgacacctgatattccaggggc

SEQ ID NO: 4653622 - DNA, 25 bp, Homo sapien
tagagtggcagcagatacaagcaat

SEQ ID NO: 4653623 - DNA, 25 bp, Homo sapien
gcagatacaagcaatgaccttcaca

SEQ ID NO: 4653624 - DNA, 25 bp, Homo sapien
ccttcacaaaatcacctttctgaga

SEQ ID NO: 4653625 - DNA, 25 bp, Homo sapien
taaagaaagtctttagagtggcagc

SEQ ID NO: 4653626 - DNA, 25 bp, Homo sapien
caccgattggtaatgtcaaatttag

SEQ ID NO: 4653627 - DNA, 25 bp, Homo sapien
taggagtggctgcaattttaaaagt

SEQ ID NO: 4653628 - DNA, 25 bp, Homo sapien
tttaaaagtagctgcccaccgattg

SEQ ID NO: 4653629 - DNA, 25 bp, Homo sapien
gtaaaataactaggagtggctgcaa

SEQ ID NO: 4653630 - DNA, 25 bp, Homo sapien
tatgaactttagaggagatgaaaaa

SEQ ID NO: 4653631 - DNA, 25 bp, Homo sapien
aggtcagaccatttcctttatgaac

SEQ ID NO: 4653632 - DNA, 25 bp, Homo sapien
ttgtgccagtgaacgtactcaggtg

SEQ ID NO: 4653633 - DNA, 25 bp, Homo sapien
tggatctcatcctctaaattcaagg

SEQ ID NO: 4653634 - DNA, 25 bp, Homo sapien
ggcctccatggctatatacacctgt

SEQ ID NO: 4653635 - DNA, 25 bp, Homo sapien
tacacctgttacactttcaatgagg

SEQ ID NO: 4653636 - DNA, 25 bp, Homo sapien
caatgaggaaactgattgcaggaaa

SEQ ID NO: 4653637 - DNA, 25 bp, Homo sapien
aacagcagtcaagggcaggtggcct

SEQ ID NO: 4653638 - DNA, 25 bp, Homo sapien
tttagaaagactatagtttctatag

SEQ ID NO: 4653639 - DNA, 25 bp, Homo sapien
tgttttagaaagactatagtttcta

SEQ ID NO: 4653640 - DNA, 25 bp, Homo sapien
tagaaagactatagtttctataggg

SEQ ID NO: 4653641 - DNA, 25 bp, Homo sapien
gaaagactatagtttctatagggtc

SEQ ID NO: 4653642 - DNA, 25 bp, Homo sapien
tcagggagcgtttactcctggtgga

SEQ ID NO: 4653643 - DNA, 25 bp, Homo sapien
ctgcttggcctctggtgagatctca

SEQ ID NO: 4653644 - DNA, 25 bp, Homo sapien
tctgcttggcctctggtgagatctc

SEQ ID NO: 4653645 - DNA, 25 bp, Homo sapien
gagatctcagggagcgtttactcct

SEQ ID NO: 4653646 - DNA, 25 bp, Homo sapien
tgtggagaagcggagcgctgggctc

SEQ ID NO: 4653647 - DNA, 25 bp, Homo sapien
tctgtgcggttagcttctgacgcgc

SEQ ID NO: 4653648 - DNA, 25 bp, Homo sapien
tgacgcgcgcgccagcacgttctgt

SEQ ID NO: 4653649 - DNA, 25 bp, Homo sapien
ccagcacgttctgtggagaagcgga

SEQ ID NO: 4653650 - DNA, 25 bp, Homo sapien
gaactgacatacacactaagtgatg

SEQ ID NO: 4653651 - DNA, 25 bp, Homo sapien
gaccgtggctttcccctgagtatat

SEQ ID NO: 4653652 - DNA, 25 bp, Homo sapien
ctaagtgatgtatttatgagtggca

SEQ ID NO: 4653653 - DNA, 25 bp, Homo sapien
gggttattcaaaaacattcctgctg

SEQ ID NO: 4653654 - DNA, 25 bp, Homo sapien
gatctttcgaaaagtcatgctgaca

SEQ ID NO: 4653655 - DNA, 25 bp, Homo sapien
taagtctgtggaaagctcacggaaa

SEQ ID NO: 4653656 - DNA, 25 bp, Homo sapien
cactgtctaacacgaggtctcctca

SEQ ID NO: 4653657 - DNA, 25 bp, Homo sapien
gacaatcatgggcaagctctcctta

SEQ ID NO: 4653658 - DNA, 25 bp, Homo sapien
gcaggttaaagtggtattgctcatt

SEQ ID NO: 4653659 - DNA, 25 bp, Homo sapien
caatttatgatgtaggagcaaagga

SEQ ID NO: 4653660 - DNA, 25 bp, Homo sapien
gaagttgggccaatttatgatgtag

SEQ ID NO: 4653661 - DNA, 25 bp, Homo sapien
tcattcccgttatgggaagttgggc

SEQ ID NO: 4653662 - DNA, 25 bp, Homo sapien
tcttacagggtggattacaataggt

SEQ ID NO: 4653663 - DNA, 25 bp, Homo sapien
gaagcactctcgtacctgaaggaaa

SEQ ID NO: 4653664 - DNA, 25 bp, Homo sapien
tgaacctactagtgggtgcctcagt

SEQ ID NO: 4653665 - DNA, 25 bp, Homo sapien
tcaatggcatttcggatctttctgg

SEQ ID NO: 4653666 - DNA, 25 bp, Homo sapien
tgcagctataggactgaggtaccca

SEQ ID NO: 4653667 - DNA, 25 bp, Homo sapien
agtgactccagcgactgagacggga

SEQ ID NO: 4653668 - DNA, 25 bp, Homo sapien
tatataatatgaaacagcgaccagg

SEQ ID NO: 4653669 - DNA, 25 bp, Homo sapien
tgggaaccagcgtgccattgtagaa

SEQ ID NO: 4653670 - DNA, 25 bp, Homo sapien
tgctgaagaaacttaagtaggatcc

SEQ ID NO: 4653671 - DNA, 25 bp, Homo sapien
tagtttccagtgcaacaacctgtca

SEQ ID NO: 4653672 - DNA, 25 bp, Homo sapien
tgcaaccagccttttgtcagagttt

SEQ ID NO: 4653673 - DNA, 25 bp, Homo sapien
ggatccttcttagtatcctcacagt

SEQ ID NO: 4653674 - DNA, 25 bp, Homo sapien
gctaggaacttcctcaagagaaaat

SEQ ID NO: 4653675 - DNA, 25 bp, Homo sapien
gatgcttcttagatgggtcataaaa

SEQ ID NO: 4653676 - DNA, 25 bp, Homo sapien
gactgatgctaccaagggttgacaa

SEQ ID NO: 4653677 - DNA, 25 bp, Homo sapien
gaaaagggatatctttgcaactctg

SEQ ID NO: 4653678 - DNA, 25 bp, Homo sapien
tgttgttgttagattgaagattctc

SEQ ID NO: 4653679 - DNA, 25 bp, Homo sapien
gttgttagattgaagattctccatc

SEQ ID NO: 4653680 - DNA, 25 bp, Homo sapien
tgttagattgaagattctccatctc

SEQ ID NO: 4653681 - DNA, 25 bp, Homo sapien
ttagattgaagattctccatctctg

SEQ ID NO: 4653682 - DNA, 25 bp, Homo sapien
tgtgacacagtgtccttaactggac

SEQ ID NO: 4653683 - DNA, 25 bp, Homo sapien
tcagcactaatctgcgagccctcag

SEQ ID NO: 4653684 - DNA, 25 bp, Homo sapien
taacagtcatgagcttggtggaaat

SEQ ID NO: 4653685 - DNA, 25 bp, Homo sapien
cctgtcctcaagtaacagtcatgag

SEQ ID NO: 4653686 - DNA, 25 bp, Homo sapien
cccgaatatcaggagtgtccccaag

SEQ ID NO: 4653687 - DNA, 25 bp, Homo sapien
tgcagaccccgaatatcaggagtgt

SEQ ID NO: 4653688 - DNA, 25 bp, Homo sapien
tctgaggcctgcctagtcaggaacc

SEQ ID NO: 4653689 - DNA, 25 bp, Homo sapien
gaaaatttataagaggtaactgtgc

SEQ ID NO: 4653690 - DNA, 25 bp, Homo sapien
agctttacactctgcagtgtgtgtg

SEQ ID NO: 4653691 - DNA, 25 bp, Homo sapien
tttacactctgcagtgtgtgtgacc

SEQ ID NO: 4653692 - DNA, 25 bp, Homo sapien
tgccttgggtatttgacttcaaatg

SEQ ID NO: 4653693 - DNA, 25 bp, Homo sapien
gtgaccatatcaagcaaaaggctgc

SEQ ID NO: 4653694 - DNA, 25 bp, Homo sapien
ggtttgggctccttgcgaatgattc

SEQ ID NO: 4653695 - DNA, 25 bp, Homo sapien
tgggctccttgcgaatgattctgag

SEQ ID NO: 4653696 - DNA, 25 bp, Homo sapien
agggtttgggctccttgcgaatgat

SEQ ID NO: 4653697 - DNA, 25 bp, Homo sapien
tttgggctccttgcgaatgattctg

SEQ ID NO: 4653698 - DNA, 25 bp, Homo sapien
gggtctgatccttactcaaagccac

SEQ ID NO: 4653699 - DNA, 25 bp, Homo sapien
agattttttaaagctcgggtctgat

SEQ ID NO: 4653700 - DNA, 25 bp, Homo sapien
gagtaccatggtgcagtgttgcagc

SEQ ID NO: 4653701 - DNA, 25 bp, Homo sapien
tgggttcaagccctcattgtggcct

SEQ ID NO: 4653702 - DNA, 25 bp, Homo sapien
gcgaagcttgtggagttttatcttt

SEQ ID NO: 4653703 - DNA, 25 bp, Homo sapien
tatatggctaggcgaagcttgtgga

SEQ ID NO: 4653704 - DNA, 25 bp, Homo sapien
tcttaaggctcccttggtactgagg

SEQ ID NO: 4653705 - DNA, 25 bp, Homo sapien
cttaaggctcccttggtactgagga

SEQ ID NO: 4653706 - DNA, 25 bp, Homo sapien
gattggccaatagcttgcattgaca

SEQ ID NO: 4653707 - DNA, 25 bp, Homo sapien
ttagtgattggccaatagcttgcat

SEQ ID NO: 4653708 - DNA, 25 bp, Homo sapien
ggccaatagcttgcattgacaagaa

SEQ ID NO: 4653709 - DNA, 25 bp, Homo sapien
tagcttgcattgacaagaacgtcat

SEQ ID NO: 4653710 - DNA, 25 bp, Homo sapien
tgcctgatgaaatatggatttgcat

SEQ ID NO: 4653711 - DNA, 25 bp, Homo sapien
tagagatgccgatttctcacagtgg

SEQ ID NO: 4653712 - DNA, 25 bp, Homo sapien
gctcaggttgcacaagtgtgttatc

SEQ ID NO: 4653713 - DNA, 25 bp, Homo sapien
ttttcccttctgttgcgcaaggagc

SEQ ID NO: 4653714 - DNA, 25 bp, Homo sapien
gagatgtatttgaccccatagccat

SEQ ID NO: 4653715 - DNA, 25 bp, Homo sapien
tgtccagagggccataactggagat

SEQ ID NO: 4653716 - DNA, 25 bp, Homo sapien
cataactggagatgtatttgacccc

SEQ ID NO: 4653717 - DNA, 25 bp, Homo sapien
cagagggccataactggagatgtat

SEQ ID NO: 4653718 - DNA, 25 bp, Homo sapien
catactgtatttggcctcaggcaat

SEQ ID NO: 4653719 - DNA, 25 bp, Homo sapien
tctccatttcttcgctttgctctcc

SEQ ID NO: 4653720 - DNA, 25 bp, Homo sapien
tttcatactgtatttggcctcaggc

SEQ ID NO: 4653721 - DNA, 25 bp, Homo sapien
tgggatccttttaaccagtgttggc

SEQ ID NO: 4653722 - DNA, 25 bp, Homo sapien
tcacgtactcgctgttattaagacc

SEQ ID NO: 4653723 - DNA, 25 bp, Homo sapien
actcgctgttattaagacctctagg

SEQ ID NO: 4653724 - DNA, 25 bp, Homo sapien
cgggcctctggcttcatcacgtact

SEQ ID NO: 4653725 - DNA, 25 bp, Homo sapien
tggcttcatcacgtactcgctgtta

SEQ ID NO: 4653726 - DNA, 25 bp, Homo sapien
tccaactgcaactccggcgtcgccc

SEQ ID NO: 4653727 - DNA, 25 bp, Homo sapien
tttgtattcccgcagcctccaactg

SEQ ID NO: 4653728 - DNA, 25 bp, Homo sapien
cgggcagcccgacccagccaacctg

SEQ ID NO: 4653729 - DNA, 25 bp, Homo sapien
tccgcccatccgccgcgatttccat

SEQ ID NO: 4653730 - DNA, 25 bp, Homo sapien
caaggctaacgcttggctccatcaa

SEQ ID NO: 4653731 - DNA, 25 bp, Homo sapien
catcaatcctgaagtcccacctgat

SEQ ID NO: 4653732 - DNA, 25 bp, Homo sapien
tcaggtgaggctcatagttactcag

SEQ ID NO: 4653733 - DNA, 25 bp, Homo sapien
ttgcccaatgaaagataaagctcgg

SEQ ID NO: 4653734 - DNA, 25 bp, Homo sapien
ctatgcagatacgacaggtcctgat

SEQ ID NO: 4653735 - DNA, 25 bp, Homo sapien
tagtcattgaagctatggcgatccc

SEQ ID NO: 4653736 - DNA, 25 bp, Homo sapien
tagcgcagaagcgagtcctctctca

SEQ ID NO: 4653737 - DNA, 25 bp, Homo sapien
cgacaggtcctgattttatagtcat

SEQ ID NO: 4653738 - DNA, 25 bp, Homo sapien
agtgattcctattccagtggccgcc

SEQ ID NO: 4653739 - DNA, 25 bp, Homo sapien
gtgattcctattccagtggccgcca

SEQ ID NO: 4653740 - DNA, 25 bp, Homo sapien
tgattcctattccagtggccgccat

SEQ ID NO: 4653741 - DNA, 25 bp, Homo sapien
cagtgattcctattccagtggccgc

SEQ ID NO: 4653742 - DNA, 25 bp, Homo sapien
aggaaggcccaagctagggcagtag

SEQ ID NO: 4653743 - DNA, 25 bp, Homo sapien
gggtggcagagctatctgaaggagg

SEQ ID NO: 4653744 - DNA, 25 bp, Homo sapien
aaggcccaagctagggcagtagtgg

SEQ ID NO: 4653745 - DNA, 25 bp, Homo sapien
ggtggcagagctatctgaaggaggg

SEQ ID NO: 4653746 - DNA, 25 bp, Homo sapien
gactcaaagcacaaatgtcctgaga

SEQ ID NO: 4653747 - DNA, 25 bp, Homo sapien
agagatggtccagagttgcagagac

SEQ ID NO: 4653748 - DNA, 25 bp, Homo sapien
gagagacagttacccggcagtcagt

SEQ ID NO: 4653749 - DNA, 25 bp, Homo sapien
tggtccagagttgcagagactcaaa

SEQ ID NO: 4653750 - DNA, 25 bp, Homo sapien
ggatgctttctggagatcaggttgt

SEQ ID NO: 4653751 - DNA, 25 bp, Homo sapien
agctggcaccggattcctgctgcag

SEQ ID NO: 4653752 - DNA, 25 bp, Homo sapien
caggtcagctggcaccggattcctg

SEQ ID NO: 4653753 - DNA, 25 bp, Homo sapien
gatgctttctggagatcaggttgtt

SEQ ID NO: 4653754 - DNA, 25 bp, Homo sapien
tacgtttaggttcatagtcaaagaa

SEQ ID NO: 4653755 - DNA, 25 bp, Homo sapien
ctctttcttacgtttaggttcatag

SEQ ID NO: 4653756 - DNA, 25 bp, Homo sapien
attatgactcgtttttagggagtca

SEQ ID NO: 4653757 - DNA, 25 bp, Homo sapien
taggttcatagtcaaagaaaggctg

SEQ ID NO: 4653758 - DNA, 25 bp, Homo sapien
tggtttgaatcaactcccatcctct

SEQ ID NO: 4653759 - DNA, 25 bp, Homo sapien
tagtgttctgatttaagcatccgtc

SEQ ID NO: 4653760 - DNA, 25 bp, Homo sapien
ggtttgaatcaactcccatcctctc

SEQ ID NO: 4653761 - DNA, 25 bp, Homo sapien
gtctcttggaatttccttggtttga

SEQ ID NO: 4653762 - DNA, 25 bp, Homo sapien
cagaacctgcccgtggtgagctcag

SEQ ID NO: 4653763 - DNA, 25 bp, Homo sapien
tccatgcagtaaacagacccagcag

SEQ ID NO: 4653764 - DNA, 25 bp, Homo sapien
ttttctcttggacctgcatctgggc

SEQ ID NO: 4653765 - DNA, 25 bp, Homo sapien
ggtgagctcagccaagacttggctc

SEQ ID NO: 4653766 - DNA, 25 bp, Homo sapien
tattcagcagtccttagaagtacag

SEQ ID NO: 4653767 - DNA, 25 bp, Homo sapien
ttcagcagtccttagaagtacaggc

SEQ ID NO: 4653768 - DNA, 25 bp, Homo sapien
attcagcagtccttagaagtacagg

SEQ ID NO: 4653769 - DNA, 25 bp, Homo sapien
catgttactgtgattggagccttac

SEQ ID NO: 4653770 - DNA, 25 bp, Homo sapien
aaagtatgtatttgtctgtgcttga

SEQ ID NO: 4653771 - DNA, 25 bp, Homo sapien
tatttataaacacaactcggggtga

SEQ ID NO: 4653772 - DNA, 25 bp, Homo sapien
ttcattgaaatactagagatatggg

SEQ ID NO: 4653773 - DNA, 25 bp, Homo sapien
tcagacaggccaaagggagatttcc

SEQ ID NO: 4653774 - DNA, 25 bp, Homo sapien
tgccatgcaaatgagccccggttaa

SEQ ID NO: 4653775 - DNA, 25 bp, Homo sapien
tcctcttgaaaggtagacacccctg

SEQ ID NO: 4653776 - DNA, 25 bp, Homo sapien
cagaatgtagtggttgcatggcacc

SEQ ID NO: 4653777 - DNA, 25 bp, Homo sapien
tttcccaaggtaataggcatggccg

SEQ ID NO: 4653778 - DNA, 25 bp, Homo sapien
aattgcattcagcaggcttctgtag

SEQ ID NO: 4653779 - DNA, 25 bp, Homo sapien
cccagtatcctcaccattttgcaga

SEQ ID NO: 4653780 - DNA, 25 bp, Homo sapien
aaatgcctattccatgtcaggaacc

SEQ ID NO: 4653781 - DNA, 25 bp, Homo sapien
gactctacaaggtgatgctgggccc

SEQ ID NO: 4653782 - DNA, 25 bp, Homo sapien
ggaaatcataagaggaacagtgtct

SEQ ID NO: 4653783 - DNA, 25 bp, Homo sapien
tcttagagctactgagaacagtggt

SEQ ID NO: 4653784 - DNA, 25 bp, Homo sapien
tggttgattacctggccatatggtc

SEQ ID NO: 4653785 - DNA, 25 bp, Homo sapien
tgcagtgagctatggatgggccact

SEQ ID NO: 4653786 - DNA, 25 bp, Homo sapien
ggctgcagtgagctatggatgggcc

SEQ ID NO: 4653787 - DNA, 25 bp, Homo sapien
atcactttgaagcccaggaggtcga

SEQ ID NO: 4653788 - DNA, 25 bp, Homo sapien
tgagctatggatgggccactgaact

SEQ ID NO: 4653789 - DNA, 25 bp, Homo sapien
cttttccttgctgcaccaggtaaat

SEQ ID NO: 4653790 - DNA, 25 bp, Homo sapien
gctgcaccaggtaaattgatactga

SEQ ID NO: 4653791 - DNA, 25 bp, Homo sapien
gatttctcaagtggctcctcctcta

SEQ ID NO: 4653792 - DNA, 25 bp, Homo sapien
ttctcgtgctggttcccttgctctg

SEQ ID NO: 4653793 - DNA, 25 bp, Homo sapien
tttaattagccaataattgtgcctc

SEQ ID NO: 4653794 - DNA, 25 bp, Homo sapien
aaatatggagaacaaaattaaagct

SEQ ID NO: 4653795 - DNA, 25 bp, Homo sapien
gttgagaaatatggagaacaaaatt

SEQ ID NO: 4653796 - DNA, 25 bp, Homo sapien
tatggagaacaaaattaaagcttca

SEQ ID NO: 4653797 - DNA, 25 bp, Homo sapien
ctgttgagaaatatggagaacaaaa

SEQ ID NO: 4653798 - DNA, 25 bp, Homo sapien
ctctagcttcttgattacatgacag

SEQ ID NO: 4653799 - DNA, 25 bp, Homo sapien
gccctgtttcttaataccatctgca

SEQ ID NO: 4653800 - DNA, 25 bp, Homo sapien
agcaacacaaggagcccacagttcc

SEQ ID NO: 4653801 - DNA, 25 bp, Homo sapien
tgacagcaacacaaggagcccacag

SEQ ID NO: 4653802 - DNA, 25 bp, Homo sapien
gcaaccaggacagcatttatttata

SEQ ID NO: 4653803 - DNA, 25 bp, Homo sapien
tattctcctgggattagggtttgcc

SEQ ID NO: 4653804 - DNA, 25 bp, Homo sapien
aagcaatactagaccaagtgtggtg

SEQ ID NO: 4653805 - DNA, 25 bp, Homo sapien
tgccagaagtcaagcatgctctctt

SEQ ID NO: 4653806 - DNA, 25 bp, Homo sapien
gcttgctgattgacagtccacgtgg

SEQ ID NO: 4653807 - DNA, 25 bp, Homo sapien
tctggggctagaccgggcttctgac

SEQ ID NO: 4653808 - DNA, 25 bp, Homo sapien
gggacgtgcccctgcttgctgattg

SEQ ID NO: 4653809 - DNA, 25 bp, Homo sapien
tgcccctgcttgctgattgacagtc

SEQ ID NO: 4653810 - DNA, 25 bp, Homo sapien
gaatgactcacttgataatcggaac

SEQ ID NO: 4653811 - DNA, 25 bp, Homo sapien
ttctcagtacctgcctagcaccttg

SEQ ID NO: 4653812 - DNA, 25 bp, Homo sapien
cataggctggaaattttgttattaa

SEQ ID NO: 4653813 - DNA, 25 bp, Homo sapien
aaaatagagcatcccttgtgatctg

SEQ ID NO: 4653814 - DNA, 25 bp, Homo sapien
gagccctcacttcctttagaggcat

SEQ ID NO: 4653815 - DNA, 25 bp, Homo sapien
ttgaaagagccctcacttcctttag

SEQ ID NO: 4653816 - DNA, 25 bp, Homo sapien
gaaagagccctcacttcctttagag

SEQ ID NO: 4653817 - DNA, 25 bp, Homo sapien
aaagagccctcacttcctttagagg

SEQ ID NO: 4653818 - DNA, 25 bp, Homo sapien
taataacagctagcttaaaaggtaa

SEQ ID NO: 4653819 - DNA, 25 bp, Homo sapien
ttgaaaattaataacagctagctta

SEQ ID NO: 4653820 - DNA, 25 bp, Homo sapien
gacaaatggtgccatcttcttttta

SEQ ID NO: 4653821 - DNA, 25 bp, Homo sapien
cagtaatgagattccttggacaaat

SEQ ID NO: 4653822 - DNA, 25 bp, Homo sapien
gggaagacattttgcttggcactta

SEQ ID NO: 4653823 - DNA, 25 bp, Homo sapien
gcttggcacttagataaatagacac

SEQ ID NO: 4653824 - DNA, 25 bp, Homo sapien
ggatttgagccagaggagagtgttg

SEQ ID NO: 4653825 - DNA, 25 bp, Homo sapien
gataaatagacactctcactacttc

SEQ ID NO: 4653826 - DNA, 25 bp, Homo sapien
aggatgtttagtagcttccatggct

SEQ ID NO: 4653827 - DNA, 25 bp, Homo sapien
gtagatgccagaaggaccccactgg

SEQ ID NO: 4653828 - DNA, 25 bp, Homo sapien
gatgccagaaggaccccactggtct

SEQ ID NO: 4653829 - DNA, 25 bp, Homo sapien
gaccccactggtcttgacaaccaaa

SEQ ID NO: 4653830 - DNA, 25 bp, Homo sapien
tgtgctagagccaaacttaaagagg

SEQ ID NO: 4653831 - DNA, 25 bp, Homo sapien
gtagaccacacttaccatgtccaag

SEQ ID NO: 4653832 - DNA, 25 bp, Homo sapien
tacaagttgtacaccctgtagacca

SEQ ID NO: 4653833 - DNA, 25 bp, Homo sapien
gatcacagaggcgatgacaaagttc

SEQ ID NO: 4653834 - DNA, 25 bp, Homo sapien
actctgtaagttccatgccaaatga

SEQ ID NO: 4653835 - DNA, 25 bp, Homo sapien
cttcaactgggctacaagagatgat

SEQ ID NO: 4653836 - DNA, 25 bp, Homo sapien
aagatgggatcttagaagacactac

SEQ ID NO: 4653837 - DNA, 25 bp, Homo sapien
gaagggacatctcacaactggaatt

SEQ ID NO: 4653838 - DNA, 25 bp, Homo sapien
gcagcaaagtgccctaacaaccacg

SEQ ID NO: 4653839 - DNA, 25 bp, Homo sapien
caaagtgccctaacaaccacgaact

SEQ ID NO: 4653840 - DNA, 25 bp, Homo sapien
agcaaagtgccctaacaaccacgaa

SEQ ID NO: 4653841 - DNA, 25 bp, Homo sapien
cagcaaagtgccctaacaaccacga

SEQ ID NO: 4653842 - DNA, 25 bp, Homo sapien
caatgcacagtgagttcttcgtggc

SEQ ID NO: 4653843 - DNA, 25 bp, Homo sapien
tcttcgtggcatagtcagtgacctc

SEQ ID NO: 4653844 - DNA, 25 bp, Homo sapien
gacccttgttccctcacttgggcaa

SEQ ID NO: 4653845 - DNA, 25 bp, Homo sapien
cactgggtcatggtgacacagaagc

SEQ ID NO: 4653846 - DNA, 25 bp, Homo sapien
ggctttgccggcttcacgtgtcgct

SEQ ID NO: 4653847 - DNA, 25 bp, Homo sapien
cggctttgccggcttcacgtgtcgc

SEQ ID NO: 4653848 - DNA, 25 bp, Homo sapien
gctttgccggcttcacgtgtcgctt

SEQ ID NO: 4653849 - DNA, 25 bp, Homo sapien
ctggaagggccagagctaaggccaa

SEQ ID NO: 4653850 - DNA, 25 bp, Homo sapien
tggaagggccagagctaaggccaaa

SEQ ID NO: 4653851 - DNA, 25 bp, Homo sapien
gcttcttttgagtcactttgagggt

SEQ ID NO: 4653852 - DNA, 25 bp, Homo sapien
tgggttcaagccgatgatagtggct

SEQ ID NO: 4653853 - DNA, 25 bp, Homo sapien
gccgatgatagtggcttcctcctgg

SEQ ID NO: 4653854 - DNA, 25 bp, Homo sapien
tttgggaagcagtactgagactgag

SEQ ID NO: 4653855 - DNA, 25 bp, Homo sapien
acccgcagccagaaagacgcacagt

SEQ ID NO: 4653856 - DNA, 25 bp, Homo sapien
ggaacccgcagccagaaagacgcac

SEQ ID NO: 4653857 - DNA, 25 bp, Homo sapien
gattcgtgggaatgctctgaggcaa

SEQ ID NO: 4653858 - DNA, 25 bp, Homo sapien
gcaaatcagatcacctgcagatact

SEQ ID NO: 4653859 - DNA, 25 bp, Homo sapien
tccccagtgtgcttttaggacgcaa

SEQ ID NO: 4653860 - DNA, 25 bp, Homo sapien
gggcctctgcttgcgaattccccag

SEQ ID NO: 4653861 - DNA, 25 bp, Homo sapien
tgcttgcgaattccccagtgtgctt

SEQ ID NO: 4653862 - DNA, 25 bp, Homo sapien
taggacgcaaatgcgctgctggttg

SEQ ID NO: 4653863 - DNA, 25 bp, Homo sapien
tatagccgtctgagatttgcctgaa

SEQ ID NO: 4653864 - DNA, 25 bp, Homo sapien
ctccattatcccataaccatccttg

SEQ ID NO: 4653865 - DNA, 25 bp, Homo sapien
cattatcccataaccatccttgttc

SEQ ID NO: 4653866 - DNA, 25 bp, Homo sapien
ttatagccgtctgagatttgcctga

SEQ ID NO: 4653867 - DNA, 25 bp, Homo sapien
caccacctcaaggtctttgtgtgcc

SEQ ID NO: 4653868 - DNA, 25 bp, Homo sapien
caccaccacctcaaggtctttgtgt

SEQ ID NO: 4653869 - DNA, 25 bp, Homo sapien
acctcaaggtctttgtgtgcctcct

SEQ ID NO: 4653870 - DNA, 25 bp, Homo sapien
ccacctcaaggtctttgtgtgcctc

SEQ ID NO: 4653871 - DNA, 25 bp, Homo sapien
tggcttctcgggcaagtgtcaggta

SEQ ID NO: 4653872 - DNA, 25 bp, Homo sapien
gatgtaacatctaggttgcctttgg

SEQ ID NO: 4653873 - DNA, 25 bp, Homo sapien
caggctttgtggtctttcagggaaa

SEQ ID NO: 4653874 - DNA, 25 bp, Homo sapien
gccttggagcttcatcataaaggga

SEQ ID NO: 4653875 - DNA, 25 bp, Homo sapien
ggcttcgcggtcatctatatttgca

SEQ ID NO: 4653876 - DNA, 25 bp, Homo sapien
ctttagatgttagccctgaaagggc

SEQ ID NO: 4653877 - DNA, 25 bp, Homo sapien
caagaccttgtttaccacctcgcag

SEQ ID NO: 4653878 - DNA, 25 bp, Homo sapien
cacctcgcaggacagtgctaggact

SEQ ID NO: 4653879 - DNA, 25 bp, Homo sapien
cttggagtgaaaggactgtaaatcc

SEQ ID NO: 4653880 - DNA, 25 bp, Homo sapien
gtgaaaggactgtaaatcccatagt

SEQ ID NO: 4653881 - DNA, 25 bp, Homo sapien
aggactgtaaatcccatagttccct

SEQ ID NO: 4653882 - DNA, 25 bp, Homo sapien
ggagtgaaaggactgtaaatcccat

SEQ ID NO: 4653883 - DNA, 25 bp, Homo sapien
caggagcctctgcaaaaacagagtt

SEQ ID NO: 4653884 - DNA, 25 bp, Homo sapien
aaacagagttgctcaagatcccatg

SEQ ID NO: 4653885 - DNA, 25 bp, Homo sapien
atgttcacaggagcctctgcaaaaa

SEQ ID NO: 4653886 - DNA, 25 bp, Homo sapien
ttccaagccagtggggtcccggtga

SEQ ID NO: 4653887 - DNA, 25 bp, Homo sapien
tctgctcggcagacacttctgattt

SEQ ID NO: 4653888 - DNA, 25 bp, Homo sapien
tttgaaaaggccgagcctgctcagc

SEQ ID NO: 4653889 - DNA, 25 bp, Homo sapien
gaggctgataagatctgctcggcag

SEQ ID NO: 4653890 - DNA, 25 bp, Homo sapien
cctgctcagctttggaggctgataa

SEQ ID NO: 4653891 - DNA, 25 bp, Homo sapien
tccgtttgaaacagagcttgggcag

SEQ ID NO: 4653892 - DNA, 25 bp, Homo sapien
ccatggctgtcctcgtgcgggagct

SEQ ID NO: 4653893 - DNA, 25 bp, Homo sapien
tgcagctagtgatgacggtggccat

SEQ ID NO: 4653894 - DNA, 25 bp, Homo sapien
tatggattgagtccgtttcctggct

SEQ ID NO: 4653895 - DNA, 25 bp, Homo sapien
ctctgattttacacccatttttagc

SEQ ID NO: 4653896 - DNA, 25 bp, Homo sapien
agaggggctctgattttacacccat

SEQ ID NO: 4653897 - DNA, 25 bp, Homo sapien
tgagaggggctctgattttacaccc

SEQ ID NO: 4653898 - DNA, 25 bp, Homo sapien
ggctctgattttacacccattttta

SEQ ID NO: 4653899 - DNA, 25 bp, Homo sapien
ttctgcatggattgtgtccgagggt

SEQ ID NO: 4653900 - DNA, 25 bp, Homo sapien
ttccagttcacgtgtttctgcatgg

SEQ ID NO: 4653901 - DNA, 25 bp, Homo sapien
ggtgcctgtggtagcagcttaactc

SEQ ID NO: 4653902 - DNA, 25 bp, Homo sapien
tctgctctggtaattagtgatgaaa

SEQ ID NO: 4653903 - DNA, 25 bp, Homo sapien
aggaaaactgtgacagaccggttgg

SEQ ID NO: 4653904 - DNA, 25 bp, Homo sapien
ccatcagtttcacacttgatccagg

SEQ ID NO: 4653905 - DNA, 25 bp, Homo sapien
tccagggaatgctcaggaaaactgt

SEQ ID NO: 4653906 - DNA, 25 bp, Homo sapien
tgtgacagaccggttggttggaaaa

SEQ ID NO: 4653907 - DNA, 25 bp, Homo sapien
gatcctgcactaatggaaaccgtgg

SEQ ID NO: 4653908 - DNA, 25 bp, Homo sapien
gaaaccgtggttgagaactgagtaa

SEQ ID NO: 4653909 - DNA, 25 bp, Homo sapien
gaggcttgtgaaacgcaagaatcca

SEQ ID NO: 4653910 - DNA, 25 bp, Homo sapien
ccataagtgtgcttcttgattgaca

SEQ ID NO: 4653911 - DNA, 25 bp, Homo sapien
tgtggcatagttcagctcactctcc

SEQ ID NO: 4653912 - DNA, 25 bp, Homo sapien
ttttgtggcatagttcagctcactc

SEQ ID NO: 4653913 - DNA, 25 bp, Homo sapien
ttgtggcatagttcagctcactctc

SEQ ID NO: 4653914 - DNA, 25 bp, Homo sapien
tggcatagttcagctcactctccca

SEQ ID NO: 4653915 - DNA, 25 bp, Homo sapien
tctgaataatgtaggaggtatgagt

SEQ ID NO: 4653916 - DNA, 25 bp, Homo sapien
gtgtaaatcctctgacacccacgtc

SEQ ID NO: 4653917 - DNA, 25 bp, Homo sapien
tgaagccaactggtcccctttttgc

SEQ ID NO: 4653918 - DNA, 25 bp, Homo sapien
gtttatagtgtctgattccttgaag

SEQ ID NO: 4653919 - DNA, 25 bp, Homo sapien
taaaaccagtatgagttgcaaagcc

SEQ ID NO: 4653920 - DNA, 25 bp, Homo sapien
tcgtctgagagttggtattcacacc

SEQ ID NO: 4653921 - DNA, 25 bp, Homo sapien
gcagtagcgcaggacaataaaacca

SEQ ID NO: 4653922 - DNA, 25 bp, Homo sapien
ttcatactagttggagcagtagcgc

SEQ ID NO: 4653923 - DNA, 25 bp, Homo sapien
gctgggaatgtgcaaccatccctct

SEQ ID NO: 4653924 - DNA, 25 bp, Homo sapien
ccaccttgtgcctgttagtctgtgc

SEQ ID NO: 4653925 - DNA, 25 bp, Homo sapien
agcttctctgtttaccaccttgtgc

SEQ ID NO: 4653926 - DNA, 25 bp, Homo sapien
tgtttaccaccttgtgcctgttagt

SEQ ID NO: 4653927 - DNA, 25 bp, Homo sapien
cttgcaatgccgtgttttaagtcca

SEQ ID NO: 4653928 - DNA, 25 bp, Homo sapien
gccgtgttttaagtccattgcttcc

SEQ ID NO: 4653929 - DNA, 25 bp, Homo sapien
ctaggcatccagagggccggatgtg

SEQ ID NO: 4653930 - DNA, 25 bp, Homo sapien
gggaagactcttgcaatgccgtgtt

SEQ ID NO: 4653931 - DNA, 25 bp, Homo sapien
taaaagtcccggagggcctgaggca

SEQ ID NO: 4653932 - DNA, 25 bp, Homo sapien
aaaaccttggaatgtgcgtggactg

SEQ ID NO: 4653933 - DNA, 25 bp, Homo sapien
tgaggcagtggtgacattttctgtg

SEQ ID NO: 4653934 - DNA, 25 bp, Homo sapien
tcattgaaatgcacacataaaacct

SEQ ID NO: 4653935 - DNA, 25 bp, Homo sapien
tcctctccactcagcaatgtgctgc

SEQ ID NO: 4653936 - DNA, 25 bp, Homo sapien
tcaaccttgggatccgttcagtcgg

SEQ ID NO: 4653937 - DNA, 25 bp, Homo sapien
cattggccgaaacaagtctcatggc

SEQ ID NO: 4653938 - DNA, 25 bp, Homo sapien
taccatgaccaccacagtagaggga

SEQ ID NO: 4653939 - DNA, 25 bp, Homo sapien
ggtacttagtctctcggtcagcagg

SEQ ID NO: 4653940 - DNA, 25 bp, Homo sapien
atcggtggccgggtcgctgccaatt

SEQ ID NO: 4653941 - DNA, 25 bp, Homo sapien
ctgtgcttcaggctgtcatcggtgg

SEQ ID NO: 4653942 - DNA, 25 bp, Homo sapien
tgcttcaggctgtcatcggtggccg

SEQ ID NO: 4653943 - DNA, 25 bp, Homo sapien
tgccaattctgactgcaggtcccct

SEQ ID NO: 4653944 - DNA, 25 bp, Homo sapien
tgaggccttaccgctgctctgctgg

SEQ ID NO: 4653945 - DNA, 25 bp, Homo sapien
ggctctgctgccacggaactatatt

SEQ ID NO: 4653946 - DNA, 25 bp, Homo sapien
gggtagtcctcatggaatcatagct

SEQ ID NO: 4653947 - DNA, 25 bp, Homo sapien
ttgccaaggctaccacttgcccggt

SEQ ID NO: 4653948 - DNA, 25 bp, Homo sapien
tgaatcttcataggagcttctgaga

SEQ ID NO: 4653949 - DNA, 25 bp, Homo sapien
tggcaaactgtgcaatgccacagac

SEQ ID NO: 4653950 - DNA, 25 bp, Homo sapien
tagagctgagatacctctgcatctg

SEQ ID NO: 4653951 - DNA, 25 bp, Homo sapien
cacagacatcagaagggcctgagca

SEQ ID NO: 4653952 - DNA, 25 bp, Homo sapien
tccaggctgccacgtggggactctg

SEQ ID NO: 4653953 - DNA, 25 bp, Homo sapien
ccacgtggggactctgctattccaa

SEQ ID NO: 4653954 - DNA, 25 bp, Homo sapien
gtggggactctgctattccaaagag

SEQ ID NO: 4653955 - DNA, 25 bp, Homo sapien
tctttgttccaggctgccacgtggg

SEQ ID NO: 4653956 - DNA, 25 bp, Homo sapien
tccgtgagtgcaggccctcggtgtc

SEQ ID NO: 4653957 - DNA, 25 bp, Homo sapien
tagtgtgtttctcacactgctccga

SEQ ID NO: 4653958 - DNA, 25 bp, Homo sapien
tgctccgactttgagttactccgtg

SEQ ID NO: 4653959 - DNA, 25 bp, Homo sapien
ggcacttggcttgcagcacggtatt

SEQ ID NO: 4653960 - DNA, 25 bp, Homo sapien
cattttatccattcagaaagctcac

SEQ ID NO: 4653961 - DNA, 25 bp, Homo sapien
ggccacagttatttgttcccccatc

SEQ ID NO: 4653962 - DNA, 25 bp, Homo sapien
gccacagttatttgttcccccatca

SEQ ID NO: 4653963 - DNA, 25 bp, Homo sapien
aggccacagttatttgttcccccat

SEQ ID NO: 4653964 - DNA, 25 bp, Homo sapien
tgctgtgcctacgttgtaacaaggt

SEQ ID NO: 4653965 - DNA, 25 bp, Homo sapien
catgggcttgagcacccaatcacca

SEQ ID NO: 4653966 - DNA, 25 bp, Homo sapien
acacctcacacatgggcttgagcac

SEQ ID NO: 4653967 - DNA, 25 bp, Homo sapien
gatgctgtgcctacgttgtaacaag

SEQ ID NO: 4653968 - DNA, 25 bp, Homo sapien
tggcttttgagtttgtagatgtact

SEQ ID NO: 4653969 - DNA, 25 bp, Homo sapien
aatgaccattatgcctgtatcttga

SEQ ID NO: 4653970 - DNA, 25 bp, Homo sapien
gagtttgtagatgtactcttcttgt

SEQ ID NO: 4653971 - DNA, 25 bp, Homo sapien
accattatgcctgtatcttgatttg

SEQ ID NO: 4653972 - DNA, 25 bp, Homo sapien
tttatttgcttggcgatggactgtc

SEQ ID NO: 4653973 - DNA, 25 bp, Homo sapien
tatttgcttggcgatggactgtctc

SEQ ID NO: 4653974 - DNA, 25 bp, Homo sapien
tgcttggcgatggactgtctccagc

SEQ ID NO: 4653975 - DNA, 25 bp, Homo sapien
ctttgatttgggtggctttatttgc

SEQ ID NO: 4653976 - DNA, 25 bp, Homo sapien
cggattctttggctcagattggttg

SEQ ID NO: 4653977 - DNA, 25 bp, Homo sapien
gcccggattctttggctcagattgg

SEQ ID NO: 4653978 - DNA, 25 bp, Homo sapien
tttggctcagattggttgtctggtg

SEQ ID NO: 4653979 - DNA, 25 bp, Homo sapien
gattctttggctcagattggttgtc

SEQ ID NO: 4653980 - DNA, 25 bp, Homo sapien
cttccacttcttatatggctcctgg

SEQ ID NO: 4653981 - DNA, 25 bp, Homo sapien
tctaaacttccacttcttatatggc

SEQ ID NO: 4653982 - DNA, 25 bp, Homo sapien
tcctgggggagagtgtaggctcagt

SEQ ID NO: 4653983 - DNA, 25 bp, Homo sapien
gggagagtgtaggctcagtgttcat

SEQ ID NO: 4653984 - DNA, 25 bp, Homo sapien
tggaattttgatttgggttcatctg

SEQ ID NO: 4653985 - DNA, 25 bp, Homo sapien
gagcgtaactcaggtttgttgtctg

SEQ ID NO: 4653986 - DNA, 25 bp, Homo sapien
tgttgtctgtatgggctttcccagc

SEQ ID NO: 4653987 - DNA, 25 bp, Homo sapien
gccaatgaaatgagcgtaactcagg

SEQ ID NO: 4653988 - DNA, 25 bp, Homo sapien
ttccagacggtaatttctctctgtc

SEQ ID NO: 4653989 - DNA, 25 bp, Homo sapien
tagtgattccagacggtaatttctc

SEQ ID NO: 4653990 - DNA, 25 bp, Homo sapien
aacacttagtgattccagacggtaa

SEQ ID NO: 4653991 - DNA, 25 bp, Homo sapien
cacttagtgattccagacggtaatt

SEQ ID NO: 4653992 - DNA, 25 bp, Homo sapien
acctgagtcatgtctgggtcatggg

SEQ ID NO: 4653993 - DNA, 25 bp, Homo sapien
ggttgacctgagtcatgtctgggtc

SEQ ID NO: 4653994 - DNA, 25 bp, Homo sapien
tgacctgagtcatgtctgggtcatg

SEQ ID NO: 4653995 - DNA, 25 bp, Homo sapien
gttgacctgagtcatgtctgggtca

SEQ ID NO: 4653996 - DNA, 25 bp, Homo sapien
taatgataacttgggtgacaccatt

SEQ ID NO: 4653997 - DNA, 25 bp, Homo sapien
gataacttgggtgacaccattaata

SEQ ID NO: 4653998 - DNA, 25 bp, Homo sapien
cttgggtgacaccattaatattctc

SEQ ID NO: 4653999 - DNA, 25 bp, Homo sapien
ataatgataacttgggtgacaccat

SEQ ID NO: 4654000 - DNA, 25 bp, Homo sapien
cccaggtggtcgaaaggcttgtggc

SEQ ID NO: 4654001 - DNA, 25 bp, Homo sapien
ctcccaggtggtcgaaaggcttgtg

SEQ ID NO: 4654002 - DNA, 25 bp, Homo sapien
caggtggtcgaaaggcttgtggcct

SEQ ID NO: 4654003 - DNA, 25 bp, Homo sapien
ctctcccaggtggtcgaaaggcttg

SEQ ID NO: 4654004 - DNA, 25 bp, Homo sapien
aaggacagggtcaccaaaacctgtg

SEQ ID NO: 4654005 - DNA, 25 bp, Homo sapien
ttgctgatgtggcagaatcttccag

SEQ ID NO: 4654006 - DNA, 25 bp, Homo sapien
tggatggctcatcacagacttgaag

SEQ ID NO: 4654007 - DNA, 25 bp, Homo sapien
tttttccatcgtgctggccctgtga

SEQ ID NO: 4654008 - DNA, 25 bp, Homo sapien
tggagccagtgcttcgtggaagaca

SEQ ID NO: 4654009 - DNA, 25 bp, Homo sapien
cactggggccctcttcataggtatc

SEQ ID NO: 4654010 - DNA, 25 bp, Homo sapien
tcggagcttcccaaaagtatctggc

SEQ ID NO: 4654011 - DNA, 25 bp, Homo sapien
tgtaaggtttcagtggagccagtgc

SEQ ID NO: 4654012 - DNA, 25 bp, Homo sapien
tccttcttgcacgaatgagttgtgc

SEQ ID NO: 4654013 - DNA, 25 bp, Homo sapien
ctggactcatctggcccacttggct

SEQ ID NO: 4654014 - DNA, 25 bp, Homo sapien
ggcccttctgatccaatgtctaatt

SEQ ID NO: 4654015 - DNA, 25 bp, Homo sapien
tgtggccctggagtgttggcccttc

SEQ ID NO: 4654016 - DNA, 25 bp, Homo sapien
agttgtaaatactactgtactcaga

SEQ ID NO: 4654017 - DNA, 25 bp, Homo sapien
ttagttgtaaatactactgtactca

SEQ ID NO: 4654018 - DNA, 25 bp, Homo sapien
aatactactgtactcagaccagaca

SEQ ID NO: 4654019 - DNA, 25 bp, Homo sapien
gtaaatactactgtactcagaccag

SEQ ID NO: 4654020 - DNA, 25 bp, Homo sapien
ctccgattaaggctacaggttggtt

SEQ ID NO: 4654021 - DNA, 25 bp, Homo sapien
tgaactggaaggctccgattaaggc

SEQ ID NO: 4654022 - DNA, 25 bp, Homo sapien
ttaaggctacaggttggttgggcat

SEQ ID NO: 4654023 - DNA, 25 bp, Homo sapien
ctaagctgaactggaaggctccgat

SEQ ID NO: 4654024 - DNA, 25 bp, Homo sapien
gtggagtcttagacacgcagtaggt

SEQ ID NO: 4654025 - DNA, 25 bp, Homo sapien
ccagacatatcctgggaggtgtagg

SEQ ID NO: 4654026 - DNA, 25 bp, Homo sapien
tcttagacacgcagtaggtgagggt

SEQ ID NO: 4654027 - DNA, 25 bp, Homo sapien
tggagtgaagggaaagtccccagac

SEQ ID NO: 4654028 - DNA, 25 bp, Homo sapien
taaaatgtttgagagggcgaggagg

SEQ ID NO: 4654029 - DNA, 25 bp, Homo sapien
gaggactcaaggagtagttaaaatg

SEQ ID NO: 4654030 - DNA, 25 bp, Homo sapien
actcaaggagtagttaaaatgtttg

SEQ ID NO: 4654031 - DNA, 25 bp, Homo sapien
agctggagaggactcaaggagtagt

SEQ ID NO: 4654032 - DNA, 25 bp, Homo sapien
tgatgttgcagtcagtggcgagctt

SEQ ID NO: 4654033 - DNA, 25 bp, Homo sapien
gggatgatttcaacttgaggcagca

SEQ ID NO: 4654034 - DNA, 25 bp, Homo sapien
agtcagtggcgagcttcagtcccag

SEQ ID NO: 4654035 - DNA, 25 bp, Homo sapien
ttaagggatgatttcaacttgaggc

SEQ ID NO: 4654036 - DNA, 25 bp, Homo sapien
ttctttatctccctttggcttcacg

SEQ ID NO: 4654037 - DNA, 25 bp, Homo sapien
ctttggcttctttatctccctttgg

SEQ ID NO: 4654038 - DNA, 25 bp, Homo sapien
tctttatctccctttggcttcacgt

SEQ ID NO: 4654039 - DNA, 25 bp, Homo sapien
ttatctccctttggcttcacgttca

SEQ ID NO: 4654040 - DNA, 25 bp, Homo sapien
cctggtacttggaagatgtgcctct

SEQ ID NO: 4654041 - DNA, 25 bp, Homo sapien
caggtctctgagtcccctggtactt

SEQ ID NO: 4654042 - DNA, 25 bp, Homo sapien
ctgagtcccctggtacttggaagat

SEQ ID NO: 4654043 - DNA, 25 bp, Homo sapien
tcccctggtacttggaagatgtgcc

SEQ ID NO: 4654044 - DNA, 25 bp, Homo sapien
tgttggggctcctgaacactcagtg

SEQ ID NO: 4654045 - DNA, 25 bp, Homo sapien
cttgtgacagcctgactcttgtcac

SEQ ID NO: 4654046 - DNA, 25 bp, Homo sapien
tcagtgctgggtggttttctcttct

SEQ ID NO: 4654047 - DNA, 25 bp, Homo sapien
actcttgtcactcagtgttggggct

SEQ ID NO: 4654048 - DNA, 25 bp, Homo sapien
gtttagacttggtgcagctacttgt

SEQ ID NO: 4654049 - DNA, 25 bp, Homo sapien
ttggtgcagctacttgtaacaggct

SEQ ID NO: 4654050 - DNA, 25 bp, Homo sapien
ctacttgtaacaggctggaaacagc

SEQ ID NO: 4654051 - DNA, 25 bp, Homo sapien
tccatgagatatctcgacatgtttc

SEQ ID NO: 4654052 - DNA, 25 bp, Homo sapien
gctggtactgctgtgaatgttcctt

SEQ ID NO: 4654053 - DNA, 25 bp, Homo sapien
tctgcacacggggtttctggaaagc

SEQ ID NO: 4654054 - DNA, 25 bp, Homo sapien
tctggaaagcagctggtactgctgt

SEQ ID NO: 4654055 - DNA, 25 bp, Homo sapien
gggagcagagtcacattctgcagaa

SEQ ID NO: 4654056 - DNA, 25 bp, Homo sapien
caagctcggctccttcccgtcgcct

SEQ ID NO: 4654057 - DNA, 25 bp, Homo sapien
aagctcggctccttcccgtcgcctt

SEQ ID NO: 4654058 - DNA, 25 bp, Homo sapien
gcctacccggcgctcgaggggcgga

SEQ ID NO: 4654059 - DNA, 25 bp, Homo sapien
agccgctctcgccccggccggggca

SEQ ID NO: 4654060 - DNA, 25 bp, Homo sapien
ccatcaccagcagcgcgcccggcgc

SEQ ID NO: 4654061 - DNA, 25 bp, Homo sapien
caccagcagcgcgcccggcgccgcc

SEQ ID NO: 4654062 - DNA, 25 bp, Homo sapien
ccagcagcgcgcccggcgccgccat

SEQ ID NO: 4654063 - DNA, 25 bp, Homo sapien
gcccatcaccagcagcgcgcccggc

SEQ ID NO: 4654064 - DNA, 25 bp, Homo sapien
ggttagcacactgggctacctctgt

SEQ ID NO: 4654065 - DNA, 25 bp, Homo sapien
ggagccaccctccatattaacgctg

SEQ ID NO: 4654066 - DNA, 25 bp, Homo sapien
tctgataaagggcacagttagactt

SEQ ID NO: 4654067 - DNA, 25 bp, Homo sapien
tttgctgcctgtggtcgaatggtac

SEQ ID NO: 4654068 - DNA, 25 bp, Homo sapien
aattactcaggcctaaaatcttgaa

SEQ ID NO: 4654069 - DNA, 25 bp, Homo sapien
cactggatgactaattggctcgtcc

SEQ ID NO: 4654070 - DNA, 25 bp, Homo sapien
caaatcagtttgtggcgactccctc

SEQ ID NO: 4654071 - DNA, 25 bp, Homo sapien
tgtcttcttacacccaacatccagt

SEQ ID NO: 4654072 - DNA, 25 bp, Homo sapien
aagctatcagagaggtgttagacac

SEQ ID NO: 4654073 - DNA, 25 bp, Homo sapien
taaccaaaggttgcgagagcagtga

SEQ ID NO: 4654074 - DNA, 25 bp, Homo sapien
cattctattgaaggctgcgcaggga

SEQ ID NO: 4654075 - DNA, 25 bp, Homo sapien
gagacatgcagcctacggatgagta

SEQ ID NO: 4654076 - DNA, 25 bp, Homo sapien
tggaggccagcagacaatgacccat

SEQ ID NO: 4654077 - DNA, 25 bp, Homo sapien
taacggtaagctcactgacacatgg

SEQ ID NO: 4654078 - DNA, 25 bp, Homo sapien
gaatcaccggcacttgttaagactg

SEQ ID NO: 4654079 - DNA, 25 bp, Homo sapien
aaatgactgagtgctcccagccaag

SEQ ID NO: 4654080 - DNA, 25 bp, Homo sapien
cagtgatgcccgtgaccgtggagtc

SEQ ID NO: 4654081 - DNA, 25 bp, Homo sapien
tccttctgtgcaaggatgtctggga

SEQ ID NO: 4654082 - DNA, 25 bp, Homo sapien
ggacacagatgttcccgttactgcc

SEQ ID NO: 4654083 - DNA, 25 bp, Homo sapien
cgttactgccctgcccaatgtgtgg

SEQ ID NO: 4654084 - DNA, 25 bp, Homo sapien
tgccagcagggcgcccacggtggat

SEQ ID NO: 4654085 - DNA, 25 bp, Homo sapien
gatgccagcagggcgcccacggtgg

SEQ ID NO: 4654086 - DNA, 25 bp, Homo sapien
ctcagatgccagcagggcgcccacg

SEQ ID NO: 4654087 - DNA, 25 bp, Homo sapien
cagatgccagcagggcgcccacggt

SEQ ID NO: 4654088 - DNA, 25 bp, Homo sapien
ccagtggggttcaaagccatgtgga

SEQ ID NO: 4654089 - DNA, 25 bp, Homo sapien
aatgggacaagcactcggaaggcat

SEQ ID NO: 4654090 - DNA, 25 bp, Homo sapien
tacagtaggcgcgtgcaaccatgcc

SEQ ID NO: 4654091 - DNA, 25 bp, Homo sapien
atgtggaagtgtctgtacaaagcag

SEQ ID NO: 4654092 - DNA, 25 bp, Homo sapien
catcttccttcgattttcctccggg

SEQ ID NO: 4654093 - DNA, 25 bp, Homo sapien
tgagcggtatgccttttcccatctt

SEQ ID NO: 4654094 - DNA, 25 bp, Homo sapien
ttcctccgggtgataatcatcagca

SEQ ID NO: 4654095 - DNA, 25 bp, Homo sapien
ggtcattgagcggtatgccttttcc

SEQ ID NO: 4654096 - DNA, 25 bp, Homo sapien
tacaaaggccccatgggagaagcat

SEQ ID NO: 4654097 - DNA, 25 bp, Homo sapien
gaggcgcatggctcctaaagaggct

SEQ ID NO: 4654098 - DNA, 25 bp, Homo sapien
cagtgttggtctgcggccagttcca

SEQ ID NO: 4654099 - DNA, 25 bp, Homo sapien
gaccatcagttgttgagctgccaca

SEQ ID NO: 4654100 - DNA, 25 bp, Homo sapien
gaatgtttctagactggcactgtcc

SEQ ID NO: 4654101 - DNA, 25 bp, Homo sapien
gcaatgatgttctatagctgtgctg

SEQ ID NO: 4654102 - DNA, 25 bp, Homo sapien
gggagactcactgactggtggcttt

SEQ ID NO: 4654103 - DNA, 25 bp, Homo sapien
gttgaagactattcaggtgcccctg

SEQ ID NO: 4654104 - DNA, 25 bp, Homo sapien
tcttggcctatggaaacatcttgag

SEQ ID NO: 4654105 - DNA, 25 bp, Homo sapien
tgaaatcagaatgtcatgaggctag

SEQ ID NO: 4654106 - DNA, 25 bp, Homo sapien
gcacaatgaatgctctacgaagagt

SEQ ID NO: 4654107 - DNA, 25 bp, Homo sapien
gatagtccctacacgcaaagatggg

SEQ ID NO: 4654108 - DNA, 25 bp, Homo sapien
ttttgctgattctctctcatagtgg

SEQ ID NO: 4654109 - DNA, 25 bp, Homo sapien
cattagtgtttttgctgattctctc

SEQ ID NO: 4654110 - DNA, 25 bp, Homo sapien
ctgattctctctcatagtggtccat

SEQ ID NO: 4654111 - DNA, 25 bp, Homo sapien
ttgctgattctctctcatagtggtc

SEQ ID NO: 4654112 - DNA, 25 bp, Homo sapien
gtcatgcaagttacagagccatgga

SEQ ID NO: 4654113 - DNA, 25 bp, Homo sapien
aatgtcatgcaagttacagagccat

SEQ ID NO: 4654114 - DNA, 25 bp, Homo sapien
aaatgtcatgcaagttacagagcca

SEQ ID NO: 4654115 - DNA, 25 bp, Homo sapien
tgtcatgcaagttacagagccatgg

SEQ ID NO: 4654116 - DNA, 25 bp, Homo sapien
tttgagtaagcgtccagagatgacc

SEQ ID NO: 4654117 - DNA, 25 bp, Homo sapien
tcttcagggctgaacaggctagaac

SEQ ID NO: 4654118 - DNA, 25 bp, Homo sapien
caggagctgcatctcagcctgcttt

SEQ ID NO: 4654119 - DNA, 25 bp, Homo sapien
caaactgggactgcaataattcagg

SEQ ID NO: 4654120 - DNA, 25 bp, Homo sapien
aattgtagcaattatctctgaaaca

SEQ ID NO: 4654121 - DNA, 25 bp, Homo sapien
agggtttccataattgtagcaatta

SEQ ID NO: 4654122 - DNA, 25 bp, Homo sapien
ttttagggtttccataattgtagca

SEQ ID NO: 4654123 - DNA, 25 bp, Homo sapien
caattatctctgaaacatttttgtc

SEQ ID NO: 4654124 - DNA, 25 bp, Homo sapien
ttatttgtgcaaatacaggcatgag

SEQ ID NO: 4654125 - DNA, 25 bp, Homo sapien
aacgatttccagcattgattacaga

SEQ ID NO: 4654126 - DNA, 25 bp, Homo sapien
tagaatctagtatgggcaaggcggc

SEQ ID NO: 4654127 - DNA, 25 bp, Homo sapien
tttgggatggcacaatgatttatgc

SEQ ID NO: 4654128 - DNA, 25 bp, Homo sapien
taagtccccatggtcaagggccttg

SEQ ID NO: 4654129 - DNA, 25 bp, Homo sapien
tggtgccagagaatacgcgatgcct

SEQ ID NO: 4654130 - DNA, 25 bp, Homo sapien
ttctgtcccaggactctagctggtg

SEQ ID NO: 4654131 - DNA, 25 bp, Homo sapien
aactggaaccacctgacagccaggg

SEQ ID NO: 4654132 - DNA, 25 bp, Homo sapien
caaatggtggtattcagtgtgggat

SEQ ID NO: 4654133 - DNA, 25 bp, Homo sapien
taagaggccaggttacccaccagtc

SEQ ID NO: 4654134 - DNA, 25 bp, Homo sapien
caaaggttacggtggaggcataagt

SEQ ID NO: 4654135 - DNA, 25 bp, Homo sapien
aaacttctgtactggcaaatggtgg

SEQ ID NO: 4654136 - DNA, 25 bp, Homo sapien
tctggaaacatactgcaataggctc

SEQ ID NO: 4654137 - DNA, 25 bp, Homo sapien
cccagcaaaagtgccggttagtcag

SEQ ID NO: 4654138 - DNA, 25 bp, Homo sapien
tctcccataggtagtttaacaggca

SEQ ID NO: 4654139 - DNA, 25 bp, Homo sapien
tgtagtataccccaaagtgcatttg

SEQ ID NO: 4654140 - DNA, 25 bp, Homo sapien
acttgattatcccaagtacctccag

SEQ ID NO: 4654141 - DNA, 25 bp, Homo sapien
tcttagggaggaatggaaacttgat

SEQ ID NO: 4654142 - DNA, 25 bp, Homo sapien
cctgcggtagcttgtgttacatata

SEQ ID NO: 4654143 - DNA, 25 bp, Homo sapien
aaagatgatcgccagtttaaacctg

SEQ ID NO: 4654144 - DNA, 25 bp, Homo sapien
aaccaccattctcattgagagagaa

SEQ ID NO: 4654145 - DNA, 25 bp, Homo sapien
tgtttgaacacttgccccatagatg

SEQ ID NO: 4654146 - DNA, 25 bp, Homo sapien
tattgcatgtcattatcataaccac

SEQ ID NO: 4654147 - DNA, 25 bp, Homo sapien
tccctcttgtggacagtatcttccc

SEQ ID NO: 4654148 - DNA, 25 bp, Homo sapien
catagagcctatagtactgtgtgta

SEQ ID NO: 4654149 - DNA, 25 bp, Homo sapien
aaaaaatgcttctgggccggatgcg

SEQ ID NO: 4654150 - DNA, 25 bp, Homo sapien
tattcactgttgaaggtcacctggg

SEQ ID NO: 4654151 - DNA, 25 bp, Homo sapien
cacctgggctgtttgcagttagtta

SEQ ID NO: 4654152 - DNA, 25 bp, Homo sapien
gaagcagtgaggtgtgtaacatcaa

SEQ ID NO: 4654153 - DNA, 25 bp, Homo sapien
tgaagatcgcaaacaacgtgaacag

SEQ ID NO: 4654154 - DNA, 25 bp, Homo sapien
aaatgtacctatcagtttccccagg

SEQ ID NO: 4654155 - DNA, 25 bp, Homo sapien
tgagagaaacttttaccaccaacag

SEQ ID NO: 4654156 - DNA, 25 bp, Homo sapien
aggaattcgccgtgcccgagaatag

SEQ ID NO: 4654157 - DNA, 25 bp, Homo sapien
ccgagaatagctccgtccagcaggt

SEQ ID NO: 4654158 - DNA, 25 bp, Homo sapien
gggcgtcgtcccaaattagatcaca

SEQ ID NO: 4654159 - DNA, 25 bp, Homo sapien
tccgcggagcccaaaatcatgaaag

SEQ ID NO: 4654160 - DNA, 25 bp, Homo sapien
cgttgctactgaggcggcgtgctct

SEQ ID NO: 4654161 - DNA, 25 bp, Homo sapien
gcggcgtgctctgcattcttcgctg

SEQ ID NO: 4654162 - DNA, 25 bp, Homo sapien
tacggtggccctgcgcccgttgcta

SEQ ID NO: 4654163 - DNA, 25 bp, Homo sapien
cctgcgcccgttgctactgaggcgg

SEQ ID NO: 4654164 - DNA, 25 bp, Homo sapien
gcagaggccactgtcaatacaggtt

SEQ ID NO: 4654165 - DNA, 25 bp, Homo sapien
cagctgtcatcgtagcagcagaggc

SEQ ID NO: 4654166 - DNA, 25 bp, Homo sapien
catgaagcaatgactccgcaggatt

SEQ ID NO: 4654167 - DNA, 25 bp, Homo sapien
tgactgatcgtctgaccaaaccggg

SEQ ID NO: 4654168 - DNA, 25 bp, Homo sapien
caacttcaggtgtagttataagagg

SEQ ID NO: 4654169 - DNA, 25 bp, Homo sapien
ttcaggtgtagttataagaggatca

SEQ ID NO: 4654170 - DNA, 25 bp, Homo sapien
cttcaggtgtagttataagaggatc

SEQ ID NO: 4654171 - DNA, 25 bp, Homo sapien
tcagcaacttcaggtgtagttataa

SEQ ID NO: 4654172 - DNA, 25 bp, Homo sapien
tgctttgtgattcagcgaactattg

SEQ ID NO: 4654173 - DNA, 25 bp, Homo sapien
cccaattcgttcaatttcccaagtg

SEQ ID NO: 4654174 - DNA, 25 bp, Homo sapien
tccatgctttgtgattcagcgaact

SEQ ID NO: 4654175 - DNA, 25 bp, Homo sapien
ttgtgattcagcgaactattggaaa

SEQ ID NO: 4654176 - DNA, 25 bp, Homo sapien
aagaggctgctatgtctccttacct

SEQ ID NO: 4654177 - DNA, 25 bp, Homo sapien
agggtacacaggactctatttttgc

SEQ ID NO: 4654178 - DNA, 25 bp, Homo sapien
gcgaaaaaacgaatagagccccagc

SEQ ID NO: 4654179 - DNA, 25 bp, Homo sapien
tatggtacaaccagtaaggtctgta

SEQ ID NO: 4654180 - DNA, 25 bp, Homo sapien
gctgtgcaactgctaaactatgcag

SEQ ID NO: 4654181 - DNA, 25 bp, Homo sapien
tctgaatccgaccagtgtaggtgat

SEQ ID NO: 4654182 - DNA, 25 bp, Homo sapien
ccagcagaattcagtggttgtctac

SEQ ID NO: 4654183 - DNA, 25 bp, Homo sapien
aagcaactagctccctaatggtcta

SEQ ID NO: 4654184 - DNA, 25 bp, Homo sapien
aagttggtgggtatcattatcatcc

SEQ ID NO: 4654185 - DNA, 25 bp, Homo sapien
tcattcacctagagaaaactactac

SEQ ID NO: 4654186 - DNA, 25 bp, Homo sapien
taacaactaactatgaagttggtgg

SEQ ID NO: 4654187 - DNA, 25 bp, Homo sapien
gtagaaactgttagatggaccactt

SEQ ID NO: 4654188 - DNA, 25 bp, Homo sapien
tcatttttaatagattacagagccc

SEQ ID NO: 4654189 - DNA, 25 bp, Homo sapien
gagcccttgtcagcataggctttat

SEQ ID NO: 4654190 - DNA, 25 bp, Homo sapien
agctttattcaaggttcatttcatt

SEQ ID NO: 4654191 - DNA, 25 bp, Homo sapien
tttttctataccccatagcattttg

SEQ ID NO: 4654192 - DNA, 25 bp, Homo sapien
ctaagaaatctattttgggctggat

SEQ ID NO: 4654193 - DNA, 25 bp, Homo sapien
ggaccatacctttaatcccagtgct

SEQ ID NO: 4654194 - DNA, 25 bp, Homo sapien
aagaaatctattttgggctggatgc

SEQ ID NO: 4654195 - DNA, 25 bp, Homo sapien
ggctggatgcagtggaccatacctt

SEQ ID NO: 4654196 - DNA, 25 bp, Homo sapien
ctggctaattttgtacttttagtag

SEQ ID NO: 4654197 - DNA, 25 bp, Homo sapien
caatctcggttcaccacaacccccg

SEQ ID NO: 4654198 - DNA, 25 bp, Homo sapien
cgcaatctcggttcaccacaacccc

SEQ ID NO: 4654199 - DNA, 25 bp, Homo sapien
tggctaattttgtacttttagtaga

SEQ ID NO: 4654200 - DNA, 25 bp, Homo sapien
attattcttgacagaagtattttaa

SEQ ID NO: 4654201 - DNA, 25 bp, Homo sapien
tattcttgacagaagtattttaaaa

SEQ ID NO: 4654202 - DNA, 25 bp, Homo sapien
tcttgacagaagtattttaaaagaa

SEQ ID NO: 4654203 - DNA, 25 bp, Homo sapien
ttcttgacagaagtattttaaaaga

SEQ ID NO: 4654204 - DNA, 25 bp, Homo sapien
tgcgaataagtttcggagcatcggt

SEQ ID NO: 4654205 - DNA, 25 bp, Homo sapien
catcggttaacagcctatgggtgaa

SEQ ID NO: 4654206 - DNA, 25 bp, Homo sapien
tatgtactttgcgaataagtttcgg

SEQ ID NO: 4654207 - DNA, 25 bp, Homo sapien
taggtttcgcccagcgcaatttctt

SEQ ID NO: 4654208 - DNA, 25 bp, Homo sapien
tcgacatgtcccatacacgtgggaa

SEQ ID NO: 4654209 - DNA, 25 bp, Homo sapien
caggtcagtgggtagctctccttca

SEQ ID NO: 4654210 - DNA, 25 bp, Homo sapien
ggatggatccctagactaaacttga

SEQ ID NO: 4654211 - DNA, 25 bp, Homo sapien
tactctcaaagtaaacgccttggcc

SEQ ID NO: 4654212 - DNA, 25 bp, Homo sapien
ctgccagtgtaaggaacattttgtc

SEQ ID NO: 4654213 - DNA, 25 bp, Homo sapien
ttccccttagtttgcaagtatctgc

SEQ ID NO: 4654214 - DNA, 25 bp, Homo sapien
aaacattcagaaggaagctcattcc

SEQ ID NO: 4654215 - DNA, 25 bp, Homo sapien
agtatctgccagtgtaaggaacatt

SEQ ID NO: 4654216 - DNA, 25 bp, Homo sapien
tgtagttgcacttcactgtctatcc

SEQ ID NO: 4654217 - DNA, 25 bp, Homo sapien
catttgcgggctgtagttgcacttc

SEQ ID NO: 4654218 - DNA, 25 bp, Homo sapien
gaggggctggattaatattattcat

SEQ ID NO: 4654219 - DNA, 25 bp, Homo sapien
attcattttcatttgcgggctgtag

SEQ ID NO: 4654220 - DNA, 25 bp, Homo sapien
atccaggattccaatagctctaaga

SEQ ID NO: 4654221 - DNA, 25 bp, Homo sapien
tcatttcccacaatgatccaggatt

SEQ ID NO: 4654222 - DNA, 25 bp, Homo sapien
catttcccacaatgatccaggattc

SEQ ID NO: 4654223 - DNA, 25 bp, Homo sapien
gattccaatagctctaagacagatg

SEQ ID NO: 4654224 - DNA, 25 bp, Homo sapien
aactgtgtcgaaaagaattacgtca

SEQ ID NO: 4654225 - DNA, 25 bp, Homo sapien
tccgccttggaactatcattgcgac

SEQ ID NO: 4654226 - DNA, 25 bp, Homo sapien
tcattgcgacgttccagtcttggag

SEQ ID NO: 4654227 - DNA, 25 bp, Homo sapien
cattggatcaatggctgctgattcc

SEQ ID NO: 4654228 - DNA, 25 bp, Homo sapien
tcagaagaattaaaatgggcatcca

SEQ ID NO: 4654229 - DNA, 25 bp, Homo sapien
ttcagaagaattaaaatgggcatcc

SEQ ID NO: 4654230 - DNA, 25 bp, Homo sapien
cagaagaattaaaatgggcatccag

SEQ ID NO: 4654231 - DNA, 25 bp, Homo sapien
gaagaattaaaatgggcatccagac

SEQ ID NO: 4654232 - DNA, 25 bp, Homo sapien
gaagactgcctacaagaattatatt

SEQ ID NO: 4654233 - DNA, 25 bp, Homo sapien
cagtgggttttgatagaagactgcc

SEQ ID NO: 4654234 - DNA, 25 bp, Homo sapien
tatgaacctacattctctctacttg

SEQ ID NO: 4654235 - DNA, 25 bp, Homo sapien
tagagtcaaaagatctgggttggaa

SEQ ID NO: 4654236 - DNA, 25 bp, Homo sapien
ttgtctaaagtagaaccacatgaga

SEQ ID NO: 4654237 - DNA, 25 bp, Homo sapien
tcaattattgattgtctgccatgtg

SEQ ID NO: 4654238 - DNA, 25 bp, Homo sapien
aatcgttgtctaaagtagaaccaca

SEQ ID NO: 4654239 - DNA, 25 bp, Homo sapien
aattattgattgtctgccatgtgcc

SEQ ID NO: 4654240 - DNA, 25 bp, Homo sapien
tctttggaactggaggtgctgtatg

SEQ ID NO: 4654241 - DNA, 25 bp, Homo sapien
tatctggtaaacttggttccttgag

SEQ ID NO: 4654242 - DNA, 25 bp, Homo sapien
tcagatgtagtgagttcacctggca

SEQ ID NO: 4654243 - DNA, 25 bp, Homo sapien
gaagtaagtcagtattctttggaac

SEQ ID NO: 4654244 - DNA, 25 bp, Homo sapien
gaatgtgcagctccagaccagtaca

SEQ ID NO: 4654245 - DNA, 25 bp, Homo sapien
aatgtgcagctccagaccagtacag

SEQ ID NO: 4654246 - DNA, 25 bp, Homo sapien
aatggtgcaattgctttggataacc

SEQ ID NO: 4654247 - DNA, 25 bp, Homo sapien
taaacttacggatactatgtgaccc

SEQ ID NO: 4654248 - DNA, 25 bp, Homo sapien
ggagaaattgggaccttcatacact

SEQ ID NO: 4654249 - DNA, 25 bp, Homo sapien
cactacttgattctggttgtaaacc

SEQ ID NO: 4654250 - DNA, 25 bp, Homo sapien
gcagacttaaagaaacgggaggcca

SEQ ID NO: 4654251 - DNA, 25 bp, Homo sapien
ccaagaattagaggagctggaagca

SEQ ID NO: 4654252 - DNA, 25 bp, Homo sapien
cagacttaaagaaacgggaggccat

SEQ ID NO: 4654253 - DNA, 25 bp, Homo sapien
tataccagccatgtggatagacggg

SEQ ID NO: 4654254 - DNA, 25 bp, Homo sapien
gctgtgatggaactgtgcaccacta

SEQ ID NO: 4654255 - DNA, 25 bp, Homo sapien
tcttcgtcaggctaaaaaatcctag

SEQ ID NO: 4654256 - DNA, 25 bp, Homo sapien
gagatagatacgtagggcagccacc

SEQ ID NO: 4654257 - DNA, 25 bp, Homo sapien
aatttctgcaactaagtcagctgac

SEQ ID NO: 4654258 - DNA, 25 bp, Homo sapien
tattttatccattgtcccagtgcca

SEQ ID NO: 4654259 - DNA, 25 bp, Homo sapien
aatcacttgcccatgaatgtgaggg

SEQ ID NO: 4654260 - DNA, 25 bp, Homo sapien
ggtcataaagagttactcctgtctt

SEQ ID NO: 4654261 - DNA, 25 bp, Homo sapien
caccgagcgctttgttttatcgcag

SEQ ID NO: 4654262 - DNA, 25 bp, Homo sapien
cctgtgttcgtctcgtgtcgctgca

SEQ ID NO: 4654263 - DNA, 25 bp, Homo sapien
caggcgtctttttcccaccgtagag

SEQ ID NO: 4654264 - DNA, 25 bp, Homo sapien
ccgtagaggttgaaacttgggcgca

SEQ ID NO: 4654265 - DNA, 25 bp, Homo sapien
gcgacaacaaaagacgcggacggcg

SEQ ID NO: 4654266 - DNA, 25 bp, Homo sapien
aggacgcggcatccaggagaggacg

SEQ ID NO: 4654267 - DNA, 25 bp, Homo sapien
cggttgccaggagaactcgcgacaa

SEQ ID NO: 4654268 - DNA, 25 bp, Homo sapien
tgtggcagagcgaagctgaggagtc

SEQ ID NO: 4654269 - DNA, 25 bp, Homo sapien
cacaactcggatttgcaggcaagcc

SEQ ID NO: 4654270 - DNA, 25 bp, Homo sapien
tggtgggacacaactcggatttgca

SEQ ID NO: 4654271 - DNA, 25 bp, Homo sapien
ctcacagaccggtcccagcgcgttg

SEQ ID NO: 4654272 - DNA, 25 bp, Homo sapien
ctcggatttgcaggcaagcccaggg

SEQ ID NO: 4654273 - DNA, 25 bp, Homo sapien
cgaacccgtagaaagatgcttgcgc

SEQ ID NO: 4654274 - DNA, 25 bp, Homo sapien
cccaaatacgcggtaggctgaggct

SEQ ID NO: 4654275 - DNA, 25 bp, Homo sapien
aactaatcatgccttatgtgactaa

SEQ ID NO: 4654276 - DNA, 25 bp, Homo sapien
cccctgtggacatgtagttgacgga

SEQ ID NO: 4654277 - DNA, 25 bp, Homo sapien
aaaaaattcctgacatcgctatgta

SEQ ID NO: 4654278 - DNA, 25 bp, Homo sapien
gctctcatatggagacaggcaagag

SEQ ID NO: 4654279 - DNA, 25 bp, Homo sapien
gattattacttatgggactatgccc

SEQ ID NO: 4654280 - DNA, 25 bp, Homo sapien
aaggaattccgtttcatcgcatacg

SEQ ID NO: 4654281 - DNA, 25 bp, Homo sapien
gaaatcagagggtgctcgctttggt

SEQ ID NO: 4654282 - DNA, 25 bp, Homo sapien
gaaatactctgatgacctactgaag

SEQ ID NO: 4654283 - DNA, 25 bp, Homo sapien
tacaaacgagcccaaatccttgtag

SEQ ID NO: 4654284 - DNA, 25 bp, Homo sapien
ttacctcaggttcttgctcatcttg

SEQ ID NO: 4654285 - DNA, 25 bp, Homo sapien
catctccagtatcaccatgtttgct

SEQ ID NO: 4654286 - DNA, 25 bp, Homo sapien
aataactagtgcctcgtactacgcg

SEQ ID NO: 4654287 - DNA, 25 bp, Homo sapien
tactacgcgacagtgaccctggatc

SEQ ID NO: 4654288 - DNA, 25 bp, Homo sapien
cagacgtttccatgcctttagtaga

SEQ ID NO: 4654289 - DNA, 25 bp, Homo sapien
tgcgcagaagttaatgcacctggtg

SEQ ID NO: 4654290 - DNA, 25 bp, Homo sapien
aacatacagtgggtactggtccctg

SEQ ID NO: 4654291 - DNA, 25 bp, Homo sapien
ccttttggtcggagcaggacgagca

SEQ ID NO: 4654292 - DNA, 25 bp, Homo sapien
ggtgttcgtgacagacacgctcaac

SEQ ID NO: 4654293 - DNA, 25 bp, Homo sapien
ggtggaaagcccttcatgagctgaa

SEQ ID NO: 4654294 - DNA, 25 bp, Homo sapien
cctatgaagcagaggaatgttggct

SEQ ID NO: 4654295 - DNA, 25 bp, Homo sapien
caaatcgggcacacatcaaatctag

SEQ ID NO: 4654296 - DNA, 25 bp, Homo sapien
caatcaacccttgttcaaatcgggc

SEQ ID NO: 4654297 - DNA, 25 bp, Homo sapien
cctatgtccaacaagagatgcactt

SEQ ID NO: 4654298 - DNA, 25 bp, Homo sapien
gaccacaaagcaaggtgttcacaat

SEQ ID NO: 4654299 - DNA, 25 bp, Homo sapien
gagatgcacttatatgtccaacaga

SEQ ID NO: 4654300 - DNA, 25 bp, Homo sapien
tctgttggacatataagtgcatctc

SEQ ID NO: 4654301 - DNA, 25 bp, Homo sapien
gatgctagatttgatgtgtgcccga

SEQ ID NO: 4654302 - DNA, 25 bp, Homo sapien
tattgtgaacaccttgctttgtggt

SEQ ID NO: 4654303 - DNA, 25 bp, Homo sapien
tgtgtgcccgatttgaacaagggtt

SEQ ID NO: 4654304 - DNA, 25 bp, Homo sapien
aagtgcatctcttgttggacatagg

SEQ ID NO: 4654305 - DNA, 25 bp, Homo sapien
gccaacattcctctgcttcataggt

SEQ ID NO: 4654306 - DNA, 25 bp, Homo sapien
gaatttttgctcgtaacatcttaat

SEQ ID NO: 4654307 - DNA, 25 bp, Homo sapien
taatcaacatcaagacaatttcaat

SEQ ID NO: 4654308 - DNA, 25 bp, Homo sapien
tgcattagaatccttcaacatctgc

SEQ ID NO: 4654309 - DNA, 25 bp, Homo sapien
tgcatactgcttcacactataaaag

SEQ ID NO: 4654310 - DNA, 25 bp, Homo sapien
ccagaatactgcttcacactataaa

SEQ ID NO: 4654311 - DNA, 25 bp, Homo sapien
aagtgcgaattagaatttttgctcg

SEQ ID NO: 4654312 - DNA, 25 bp, Homo sapien
tttatagtgtgaagcagtattctgg

SEQ ID NO: 4654313 - DNA, 25 bp, Homo sapien
cagatgttgaaggattctaatgcaa

SEQ ID NO: 4654314 - DNA, 25 bp, Homo sapien
cttttatagtgtgaagcagtatgca

SEQ ID NO: 4654315 - DNA, 25 bp, Homo sapien
tgttacgagcaaaaattctaattcg

SEQ ID NO: 4654316 - DNA, 25 bp, Homo sapien
gttgattaagatgttacgagcaaaa

SEQ ID NO: 4654317 - DNA, 25 bp, Homo sapien
gagcaaaaattctaattcgcacttt

SEQ ID NO: 4654318 - DNA, 25 bp, Homo sapien
ttctaacatcatcatcaaacaaaat

SEQ ID NO: 4654319 - DNA, 25 bp, Homo sapien
attttgtttgatgatgatgttagaa

SEQ ID NO: 4654320 - DNA, 25 bp, Homo sapien
cctttatagtgttggtactgtggag

SEQ ID NO: 4654321 - DNA, 25 bp, Homo sapien
gatgaatcaacagcctcaactcgca

SEQ ID NO: 4654322 - DNA, 25 bp, Homo sapien
gcctcaactcgcagtcaaagtcact

SEQ ID NO: 4654323 - DNA, 25 bp, Homo sapien
caactcgcagtcaaagtcacttcct

SEQ ID NO: 4654324 - DNA, 25 bp, Homo sapien
tctgatgaatcaacagcctcaactc

SEQ ID NO: 4654325 - DNA, 25 bp, Homo sapien
gcagtcaaagtcacttcctttatag

SEQ ID NO: 4654326 - DNA, 25 bp, Homo sapien
gagttgaggctgttgattcatcaga

SEQ ID NO: 4654327 - DNA, 25 bp, Homo sapien
gaagtgactttgactgcgagttgag

SEQ ID NO: 4654328 - DNA, 25 bp, Homo sapien
cctccacagtaccaacactataaag

SEQ ID NO: 4654329 - DNA, 25 bp, Homo sapien
cacagtaccaacactataaaggaag

SEQ ID NO: 4654330 - DNA, 25 bp, Homo sapien
tgcgagttgaggctgttgattcatc

SEQ ID NO: 4654331 - DNA, 25 bp, Homo sapien
tataaaggaagtgactttgactgcg

SEQ ID NO: 4654332 - DNA, 25 bp, Homo sapien
ataaaattagtggatcgtttgggtg

SEQ ID NO: 4654333 - DNA, 25 bp, Homo sapien
ttgatttacaatgcggcaaatatgc

SEQ ID NO: 4654334 - DNA, 25 bp, Homo sapien
ccatcgaaataaaattagtggatcg

SEQ ID NO: 4654335 - DNA, 25 bp, Homo sapien
ctgtgctccttccatcgaaataaaa

SEQ ID NO: 4654336 - DNA, 25 bp, Homo sapien
ccttccatcgaaataaaattagtgg

SEQ ID NO: 4654337 - DNA, 25 bp, Homo sapien
tacaatgcggcaaatatgcaacact

SEQ ID NO: 4654338 - DNA, 25 bp, Homo sapien
cgatccactaattttatttcgatgg

SEQ ID NO: 4654339 - DNA, 25 bp, Homo sapien
ttttatttcgatggaaggagcacag

SEQ ID NO: 4654340 - DNA, 25 bp, Homo sapien
aagtgttgcatatttgccgcattgt

SEQ ID NO: 4654341 - DNA, 25 bp, Homo sapien
cactaattttatttcgatggaagga

SEQ ID NO: 4654342 - DNA, 25 bp, Homo sapien
cacccaaacgatccactaattttat

SEQ ID NO: 4654343 - DNA, 25 bp, Homo sapien
gcatatttgccgcattgtaaatcaa

SEQ ID NO: 4654344 - DNA, 25 bp, Homo sapien
gcataaactgttgggacataccgct

SEQ ID NO: 4654345 - DNA, 25 bp, Homo sapien
tgggactgaaacactggcattgtac

SEQ ID NO: 4654346 - DNA, 25 bp, Homo sapien
tgaggcataaactgttgggacatac

SEQ ID NO: 4654347 - DNA, 25 bp, Homo sapien
gaaacactggcattgtactgcattg

SEQ ID NO: 4654348 - DNA, 25 bp, Homo sapien
cactggcattgtactgcattggtca

SEQ ID NO: 4654349 - DNA, 25 bp, Homo sapien
aaactgttgggacataccgctcggg

SEQ ID NO: 4654350 - DNA, 25 bp, Homo sapien
gtacaatgccagtgtttcagtccca

SEQ ID NO: 4654351 - DNA, 25 bp, Homo sapien
tggccccgagcggtatgtcccaaca

SEQ ID NO: 4654352 - DNA, 25 bp, Homo sapien
aatgaccaatgcagtacaatgccag

SEQ ID NO: 4654353 - DNA, 25 bp, Homo sapien
gtatgtcccaacagtttatgcctca

SEQ ID NO: 4654354 - DNA, 25 bp, Homo sapien
ccgagcggtatgtcccaacagttta

SEQ ID NO: 4654355 - DNA, 25 bp, Homo sapien
tgaccaatgcagtacaatgccagtg

SEQ ID NO: 4654356 - DNA, 25 bp, Homo sapien
tcagaagttgtcaagtatggtaccc

SEQ ID NO: 4654357 - DNA, 25 bp, Homo sapien
tatggtacccgtttggcaacgagca

SEQ ID NO: 4654358 - DNA, 25 bp, Homo sapien
cagggttttcacatgggcgttcagg

SEQ ID NO: 4654359 - DNA, 25 bp, Homo sapien
ggccaacgtcatggtgggcaacgca

SEQ ID NO: 4654360 - DNA, 25 bp, Homo sapien
tgggcatgggcattcaatcagaagt

SEQ ID NO: 4654361 - DNA, 25 bp, Homo sapien
catttttgggcatagccaaccaggg

SEQ ID NO: 4654362 - DNA, 25 bp, Homo sapien
gaaaaccctggttggctatgcccaa

SEQ ID NO: 4654363 - DNA, 25 bp, Homo sapien
caaaaatgtgctcgttgccaaacgg

SEQ ID NO: 4654364 - DNA, 25 bp, Homo sapien
tgcgttgcccaccatgacgttggcc

SEQ ID NO: 4654365 - DNA, 25 bp, Homo sapien
gccaaacgggtaccatacttgacaa

SEQ ID NO: 4654366 - DNA, 25 bp, Homo sapien
gacaacttctgattgaatgcccatg

SEQ ID NO: 4654367 - DNA, 25 bp, Homo sapien
tgaacgcccatgtgaaaaccctggt

SEQ ID NO: 4654368 - DNA, 25 bp, Homo sapien
cagtacatgggcaacggagatatat

SEQ ID NO: 4654369 - DNA, 25 bp, Homo sapien
gtacatgggcaacggagatatatgg

SEQ ID NO: 4654370 - DNA, 25 bp, Homo sapien
gtaagtcgatccagtacatgggcaa

SEQ ID NO: 4654371 - DNA, 25 bp, Homo sapien
tcgatccagtacatgggcaacggag

SEQ ID NO: 4654372 - DNA, 25 bp, Homo sapien
ccagtacatgggcaacggagatata

SEQ ID NO: 4654373 - DNA, 25 bp, Homo sapien
aagtcgatccagtacatgggcaacg

SEQ ID NO: 4654374 - DNA, 25 bp, Homo sapien
ccatatatctccgttgcccatgtac

SEQ ID NO: 4654375 - DNA, 25 bp, Homo sapien
tatatctccgttgcccatgtactgg

SEQ ID NO: 4654376 - DNA, 25 bp, Homo sapien
atatatctccgttgcccatgtactg

SEQ ID NO: 4654377 - DNA, 25 bp, Homo sapien
tccgttgcccatgtactggatcgac

SEQ ID NO: 4654378 - DNA, 25 bp, Homo sapien
cgttgcccatgtactggatcgactt

SEQ ID NO: 4654379 - DNA, 25 bp, Homo sapien
ttgcccatgtactggatcgacttac

SEQ ID NO: 4654380 - DNA, 25 bp, Homo sapien
acaaagatctgcgaccaagagagaa

SEQ ID NO: 4654381 - DNA, 25 bp, Homo sapien
ggttttgaaatgcattcctagatcc

SEQ ID NO: 4654382 - DNA, 25 bp, Homo sapien
ttacagtaatcaagaggaacataca

SEQ ID NO: 4654383 - DNA, 25 bp, Homo sapien
aaagatctgcgaccaagagagaaat

SEQ ID NO: 4654384 - DNA, 25 bp, Homo sapien
tgtcaaataagtactcgacacaaag

SEQ ID NO: 4654385 - DNA, 25 bp, Homo sapien
taatcaagaggaacatacaaagatc

SEQ ID NO: 4654386 - DNA, 25 bp, Homo sapien
ggatctaggaatgcatttcaaaacc

SEQ ID NO: 4654387 - DNA, 25 bp, Homo sapien
ctttgtgtcgagtacttatttgaca

SEQ ID NO: 4654388 - DNA, 25 bp, Homo sapien
gatctttgtatgttcctcttgatta

SEQ ID NO: 4654389 - DNA, 25 bp, Homo sapien
ttctctcttggtcgcagatctttgt

SEQ ID NO: 4654390 - DNA, 25 bp, Homo sapien
atttctctcttggtcgcagatcttt

SEQ ID NO: 4654391 - DNA, 25 bp, Homo sapien
tgtatgttcctcttgattactgtaa

SEQ ID NO: 4654392 - DNA, 25 bp, Homo sapien
taccgttggtcgacttattgctctc

SEQ ID NO: 4654393 - DNA, 25 bp, Homo sapien
gaaggttggctagacagcaaagagc

SEQ ID NO: 4654394 - DNA, 25 bp, Homo sapien
tgacaagcggcctctactagaaggt

SEQ ID NO: 4654395 - DNA, 25 bp, Homo sapien
gagccaacaagcgaggcacatttat

SEQ ID NO: 4654396 - DNA, 25 bp, Homo sapien
gacaactgaaacgacatccttccgg

SEQ ID NO: 4654397 - DNA, 25 bp, Homo sapien
tccggcccagcacgcaatttctgag

SEQ ID NO: 4654398 - DNA, 25 bp, Homo sapien
cgtttcagttgtcgttaggagagca

SEQ ID NO: 4654399 - DNA, 25 bp, Homo sapien
ccggaaggatgtcgtttcagttgtc

SEQ ID NO: 4654400 - DNA, 25 bp, Homo sapien
gagagcaataagtcgaccaacggta

SEQ ID NO: 4654401 - DNA, 25 bp, Homo sapien
cataaatgtgcctcgcttgttggct

SEQ ID NO: 4654402 - DNA, 25 bp, Homo sapien
tagccaaccttctagtagaggccgc

SEQ ID NO: 4654403 - DNA, 25 bp, Homo sapien
ctcagaaattgcgtgctgggccgga

SEQ ID NO: 4654404 - DNA, 25 bp, Homo sapien
gatacacgctcagggaaatggcgga

SEQ ID NO: 4654405 - DNA, 25 bp, Homo sapien
aagtctctaggaccacaacgcggac

SEQ ID NO: 4654406 - DNA, 25 bp, Homo sapien
actgcccgagacaaagccatcgagg

SEQ ID NO: 4654407 - DNA, 25 bp, Homo sapien
cagctcatcctagaggcacatgcct

SEQ ID NO: 4654408 - DNA, 25 bp, Homo sapien
tccacgaggtccctagttcccagtg

SEQ ID NO: 4654409 - DNA, 25 bp, Homo sapien
acaacgcggactgcggatacacgct

SEQ ID NO: 4654410 - DNA, 25 bp, Homo sapien
gccatttccctgagcgtgtatccgc

SEQ ID NO: 4654411 - DNA, 25 bp, Homo sapien
tggcactgggaactagggacctcgt

SEQ ID NO: 4654412 - DNA, 25 bp, Homo sapien
cgtgtatccgcagtccgcgttgtgg

SEQ ID NO: 4654413 - DNA, 25 bp, Homo sapien
tccgcgttgtggtcctagagacttg

SEQ ID NO: 4654414 - DNA, 25 bp, Homo sapien
cctcgatggctttgtctcgggcagt

SEQ ID NO: 4654415 - DNA, 25 bp, Homo sapien
gaggcatgtgcctctaggatgagct

SEQ ID NO: 4654416 - DNA, 25 bp, Homo sapien
actgccgtccctccgctgccgcgcc

SEQ ID NO: 4654417 - DNA, 25 bp, Homo sapien
gtccctccgctgccgcgccgcctca

SEQ ID NO: 4654418 - DNA, 25 bp, Homo sapien
ccgtccctccgctgccgcgccgcct

SEQ ID NO: 4654419 - DNA, 25 bp, Homo sapien
gccgtccctccgctgccgcgccgcc

SEQ ID NO: 4654420 - DNA, 25 bp, Homo sapien
ctccgctgccgcgccgcctcagccg

SEQ ID NO: 4654421 - DNA, 25 bp, Homo sapien
cgtccctccgctgccgcgccgcctc

SEQ ID NO: 4654422 - DNA, 25 bp, Homo sapien
ggcggcgcggcagcggagggacggc

SEQ ID NO: 4654423 - DNA, 25 bp, Homo sapien
tgaggcggcgcggcagcggagggac

SEQ ID NO: 4654424 - DNA, 25 bp, Homo sapien
gaggcggcgcggcagcggagggacg

SEQ ID NO: 4654425 - DNA, 25 bp, Homo sapien
cggctgaggcggcgcggcagcggag

SEQ ID NO: 4654426 - DNA, 25 bp, Homo sapien
aggcggcgcggcagcggagggacgg

SEQ ID NO: 4654427 - DNA, 25 bp, Homo sapien
ctgaggcggcgcggcagcggaggga

SEQ ID NO: 4654428 - DNA, 25 bp, Homo sapien
ccgaggccacgtcaatcaaggcgac

SEQ ID NO: 4654429 - DNA, 25 bp, Homo sapien
ttacccgaatcagcaatacccaagc

SEQ ID NO: 4654430 - DNA, 25 bp, Homo sapien
ggaggccactaagggctcgagaaaa

SEQ ID NO: 4654431 - DNA, 25 bp, Homo sapien
tgggaaaagtaaacgcagcctttca

SEQ ID NO: 4654432 - DNA, 25 bp, Homo sapien
caagctccaataactccaattacct

SEQ ID NO: 4654433 - DNA, 25 bp, Homo sapien
cacgtcaatcaaggcgacggaggag

SEQ ID NO: 4654434 - DNA, 25 bp, Homo sapien
tcgccttgattgacgtggcctcggg

SEQ ID NO: 4654435 - DNA, 25 bp, Homo sapien
tcctccgtcgccttgattgacgtgg

SEQ ID NO: 4654436 - DNA, 25 bp, Homo sapien
tgaaaggctgcgtttacttttccca

SEQ ID NO: 4654437 - DNA, 25 bp, Homo sapien
gcttgggtattgctgattcgggtaa

SEQ ID NO: 4654438 - DNA, 25 bp, Homo sapien
taattggagttattggagcttgggt

SEQ ID NO: 4654439 - DNA, 25 bp, Homo sapien
ttttctcgagcccttagtggcctcc

SEQ ID NO: 4654440 - DNA, 25 bp, Homo sapien
gccgcgaacaagtgggacacaggca

SEQ ID NO: 4654441 - DNA, 25 bp, Homo sapien
ccgcgaacaagtgggacacaggcaa

SEQ ID NO: 4654442 - DNA, 25 bp, Homo sapien
cgcgaacaagtgggacacaggcaag

SEQ ID NO: 4654443 - DNA, 25 bp, Homo sapien
cttgcctgtgtcccacttgttcgcg

SEQ ID NO: 4654444 - DNA, 25 bp, Homo sapien
ttgcctgtgtcccacttgttcgcgg

SEQ ID NO: 4654445 - DNA, 25 bp, Homo sapien
tgcctgtgtcccacttgttcgcggc

SEQ ID NO: 4654446 - DNA, 25 bp, Homo sapien
aagtgggacacaggcaagacgtcga

SEQ ID NO: 4654447 - DNA, 25 bp, Homo sapien
gccgcgaacaagtgggacacaggca

SEQ ID NO: 4654448 - DNA, 25 bp, Homo sapien
gaacaagtgggacacaggcaagacg

SEQ ID NO: 4654449 - DNA, 25 bp, Homo sapien
ccgcgaacaagtgggacacaggcaa

SEQ ID NO: 4654450 - DNA, 25 bp, Homo sapien
cgcgaacaagtgggacacaggcaag

SEQ ID NO: 4654451 - DNA, 25 bp, Homo sapien
caagtgggacacaggcaagacgtcg

SEQ ID NO: 4654452 - DNA, 25 bp, Homo sapien
gacgtcttgcctgtgtcccacttgt

SEQ ID NO: 4654453 - DNA, 25 bp, Homo sapien
cttgcctgtgtcccacttgttcgcg

SEQ ID NO: 4654454 - DNA, 25 bp, Homo sapien
gtcttgcctgtgtcccacttgttcg

SEQ ID NO: 4654455 - DNA, 25 bp, Homo sapien
ttgcctgtgtcccacttgttcgcgg

SEQ ID NO: 4654456 - DNA, 25 bp, Homo sapien
tgcctgtgtcccacttgttcgcggc

SEQ ID NO: 4654457 - DNA, 25 bp, Homo sapien
tcgacgtcttgcctgtgtcccactt

SEQ ID NO: 4654458 - DNA, 25 bp, Homo sapien
aaacagaggataatggcgtctgcag

SEQ ID NO: 4654459 - DNA, 25 bp, Homo sapien
gagaaacagaggataatggcgtctg

SEQ ID NO: 4654460 - DNA, 25 bp, Homo sapien
atggcgtctgcagtgctgtcgcctg

SEQ ID NO: 4654461 - DNA, 25 bp, Homo sapien
ctcctttctcgttcgcgcactcact

SEQ ID NO: 4654462 - DNA, 25 bp, Homo sapien
gataatggcgtctgcagtgctgtcg

SEQ ID NO: 4654463 - DNA, 25 bp, Homo sapien
taatggcgtctgcagtgctgtcgcc

SEQ ID NO: 4654464 - DNA, 25 bp, Homo sapien
agtgagtgcgcgaacgagaaaggag

SEQ ID NO: 4654465 - DNA, 25 bp, Homo sapien
aggaggagggcgctccaggcgacag

SEQ ID NO: 4654466 - DNA, 25 bp, Homo sapien
tgcgcgaacgagaaaggaggagggc

SEQ ID NO: 4654467 - DNA, 25 bp, Homo sapien
gcagacgccattatcctctgtttct

SEQ ID NO: 4654468 - DNA, 25 bp, Homo sapien
caggcgacagcactgcagacgccat

SEQ ID NO: 4654469 - DNA, 25 bp, Homo sapien
gacagcactgcagacgccattatcc

SEQ ID NO: 4654470 - DNA, 25 bp, Homo sapien
ctcttcccgcccgatttgccgcgcg

SEQ ID NO: 4654471 - DNA, 25 bp, Homo sapien
ccgcggcgcgctcccagttcctttt

SEQ ID NO: 4654472 - DNA, 25 bp, Homo sapien
ttcccgcccgatttgccgcgcgctc

SEQ ID NO: 4654473 - DNA, 25 bp, Homo sapien
ctgtaaggacaggaaccgccgcggc

SEQ ID NO: 4654474 - DNA, 25 bp, Homo sapien
tcccgcattttcctcgcgcaacatc

SEQ ID NO: 4654475 - DNA, 25 bp, Homo sapien
tcgcgcaacatcggtccctgggcag

SEQ ID NO: 4654476 - DNA, 25 bp, Homo sapien
caacatcggtccctgggcagcgcaa

SEQ ID NO: 4654477 - DNA, 25 bp, Homo sapien
ttttcctcgcgcaacatcggtccct

SEQ ID NO: 4654478 - DNA, 25 bp, Homo sapien
ggcttcgggcacgagtgtgggctgt

SEQ ID NO: 4654479 - DNA, 25 bp, Homo sapien
tcgggcacgagtgtgggctgtgaaa

SEQ ID NO: 4654480 - DNA, 25 bp, Homo sapien
gaaaacacgggcataagtctgggcc

SEQ ID NO: 4654481 - DNA, 25 bp, Homo sapien
acgggcataagtctgggccgagcac

SEQ ID NO: 4654482 - DNA, 25 bp, Homo sapien
tggaggtctgcaacgtattcagcga

SEQ ID NO: 4654483 - DNA, 25 bp, Homo sapien
caaggcaggcgctttgaatggaacg

SEQ ID NO: 4654484 - DNA, 25 bp, Homo sapien
gagaagttctccagtactcccaggc

SEQ ID NO: 4654485 - DNA, 25 bp, Homo sapien
gaaagtctcagaaccgagagccctg

SEQ ID NO: 4654486 - DNA, 25 bp, Homo sapien
ttatcaagaaaatgatgactgcaac

SEQ ID NO: 4654487 - DNA, 25 bp, Homo sapien
agtgagatgtgatcatgcctctgct

SEQ ID NO: 4654488 - DNA, 25 bp, Homo sapien
tctgctctccagcttgggcgataga

SEQ ID NO: 4654489 - DNA, 25 bp, Homo sapien
gcctctgctctccagcttgggcgat

SEQ ID NO: 4654490 - DNA, 25 bp, Homo sapien
gtgagatgtgatcatgcctctgctc

SEQ ID NO: 4654491 - DNA, 25 bp, Homo sapien
ccctgattcacgatgtcgaatattt

SEQ ID NO: 4654492 - DNA, 25 bp, Homo sapien
cgatgtcgaatattttttcatgtac

SEQ ID NO: 4654493 - DNA, 25 bp, Homo sapien
tgcatttccctgattcacgatgtcg

SEQ ID NO: 4654494 - DNA, 25 bp, Homo sapien
tcacgatgtcgaatattttttcatg

SEQ ID NO: 4654495 - DNA, 25 bp, Homo sapien
caagagaaatatcctgaatatccaa

SEQ ID NO: 4654496 - DNA, 25 bp, Homo sapien
gacaaaagttcaggagcaacctggg

SEQ ID NO: 4654497 - DNA, 25 bp, Homo sapien
caaatatcgtccaggcgcagtagct

SEQ ID NO: 4654498 - DNA, 25 bp, Homo sapien
taaaacgtctgttctatgaaagaca

SEQ ID NO: 4654499 - DNA, 25 bp, Homo sapien
tacagcactgttggctgtgtaagtt

SEQ ID NO: 4654500 - DNA, 25 bp, Homo sapien
cactgttggctgtgtaagttcaatg

SEQ ID NO: 4654501 - DNA, 25 bp, Homo sapien
ctgcacaagcaacggacaaaacagt

SEQ ID NO: 4654502 - DNA, 25 bp, Homo sapien
ccttcaaataaggttgccaactgca

SEQ ID NO: 4654503 - DNA, 25 bp, Homo sapien
taaacatcactgcaatcagaccagt

SEQ ID NO: 4654504 - DNA, 25 bp, Homo sapien
actggaaatggagaaggaataaaga

SEQ ID NO: 4654505 - DNA, 25 bp, Homo sapien
aggctactcaagtaaagcactggaa

SEQ ID NO: 4654506 - DNA, 25 bp, Homo sapien
aagcactggaaatggagaaggaata

SEQ ID NO: 4654507 - DNA, 25 bp, Homo sapien
gcattgctcacattaacgatacaga

SEQ ID NO: 4654508 - DNA, 25 bp, Homo sapien
caatcgaaatgtccactgatagaag

SEQ ID NO: 4654509 - DNA, 25 bp, Homo sapien
gaagtaaatcctatcatatgccaca

SEQ ID NO: 4654510 - DNA, 25 bp, Homo sapien
tccacgtttgttgcagcattgctca

SEQ ID NO: 4654511 - DNA, 25 bp, Homo sapien
ggaaaaacgatactctcttcagcaa

SEQ ID NO: 4654512 - DNA, 25 bp, Homo sapien
tgccaagactccacaatggaaaaac

SEQ ID NO: 4654513 - DNA, 25 bp, Homo sapien
ggaagtatctggtcaatctttgaca

SEQ ID NO: 4654514 - DNA, 25 bp, Homo sapien
tgatcccaggaagtatctggtcaat

SEQ ID NO: 4654515 - DNA, 25 bp, Homo sapien
cacaggatttgatgacagaatttgg

SEQ ID NO: 4654516 - DNA, 25 bp, Homo sapien
ttggaactggttgttagtggattac

SEQ ID NO: 4654517 - DNA, 25 bp, Homo sapien
tttgatgacagaatttggaactggt

SEQ ID NO: 4654518 - DNA, 25 bp, Homo sapien
tggttgttagtggattacttgaaac

SEQ ID NO: 4654519 - DNA, 25 bp, Homo sapien
ttttaaataaaagaaataatatgca

SEQ ID NO: 4654520 - DNA, 25 bp, Homo sapien
tttaaataaaagaaataatatgcat

SEQ ID NO: 4654521 - DNA, 25 bp, Homo sapien
cttaatgcaatactagtcacattca

SEQ ID NO: 4654522 - DNA, 25 bp, Homo sapien
ttaatgcaatactagtcacattcat

SEQ ID NO: 4654523 - DNA, 25 bp, Homo sapien
taatacaagcttccagccacatcgg

SEQ ID NO: 4654524 - DNA, 25 bp, Homo sapien
gctgcagcatcaacattcgtgaagg

SEQ ID NO: 4654525 - DNA, 25 bp, Homo sapien
ccatcgggtaaaagaggatgctcca

SEQ ID NO: 4654526 - DNA, 25 bp, Homo sapien
gaggtactttaacatgccatgcagc

SEQ ID NO: 4654527 - DNA, 25 bp, Homo sapien
tcaataagagaacaccaagacggaa

SEQ ID NO: 4654528 - DNA, 25 bp, Homo sapien
cagaaggacctaatgcaggatctag

SEQ ID NO: 4654529 - DNA, 25 bp, Homo sapien
tgaaactacaagatcaggttcccct

SEQ ID NO: 4654530 - DNA, 25 bp, Homo sapien
gccaagagttcttcatcagaaggac

SEQ ID NO: 4654531 - DNA, 25 bp, Homo sapien
gaaaatctctctatacttcgatcgg

SEQ ID NO: 4654532 - DNA, 25 bp, Homo sapien
aaagtcaatggttgcaattccttag

SEQ ID NO: 4654533 - DNA, 25 bp, Homo sapien
aggcctcctccagtgaaaagtcatc

SEQ ID NO: 4654534 - DNA, 25 bp, Homo sapien
gtatagataggtttgatggttcctc

SEQ ID NO: 4654535 - DNA, 25 bp, Homo sapien
ctaagggtacattacaatgaactga

SEQ ID NO: 4654536 - DNA, 25 bp, Homo sapien
taaaatcatgggctaagggtacatt

SEQ ID NO: 4654537 - DNA, 25 bp, Homo sapien
gggctaagggtacattacaatgaac

SEQ ID NO: 4654538 - DNA, 25 bp, Homo sapien
aatcatgggctaagggtacattaca

SEQ ID NO: 4654539 - DNA, 25 bp, Homo sapien
aatggctatctgaactgctggtttg

SEQ ID NO: 4654540 - DNA, 25 bp, Homo sapien
taaggaatggctatctgaactgctg

SEQ ID NO: 4654541 - DNA, 25 bp, Homo sapien
tttaaggaatggctatctgaactgc

SEQ ID NO: 4654542 - DNA, 25 bp, Homo sapien
ggaatggctatctgaactgctggtt

SEQ ID NO: 4654543 - DNA, 25 bp, Homo sapien
tccttttctgtacatagttgaccac

SEQ ID NO: 4654544 - DNA, 25 bp, Homo sapien
tcattagaaatttgtgaattccttt

SEQ ID NO: 4654545 - DNA, 25 bp, Homo sapien
aattccttttctgtacatagttgac

SEQ ID NO: 4654546 - DNA, 25 bp, Homo sapien
tgtgaattccttttctgtacatagt

SEQ ID NO: 4654547 - DNA, 25 bp, Homo sapien
tccatggcaatagaaagattaatgc

SEQ ID NO: 4654548 - DNA, 25 bp, Homo sapien
ggtggagaatacaaatccatggcaa

SEQ ID NO: 4654549 - DNA, 25 bp, Homo sapien
ctagatatgcagtaccatcagacac

SEQ ID NO: 4654550 - DNA, 25 bp, Homo sapien
gagagatttccagttaaggttacaa

SEQ ID NO: 4654551 - DNA, 25 bp, Homo sapien
taaccgcttctttagattctcaagg

SEQ ID NO: 4654552 - DNA, 25 bp, Homo sapien
tctggtactgagaaccctatcaagc

SEQ ID NO: 4654553 - DNA, 25 bp, Homo sapien
gccagtaccattgctttagacaagg

SEQ ID NO: 4654554 - DNA, 25 bp, Homo sapien
gaacttttggtattgaagaggatcc

SEQ ID NO: 4654555 - DNA, 25 bp, Homo sapien
gtaaactttggaggccatgacggca

SEQ ID NO: 4654556 - DNA, 25 bp, Homo sapien
aatagtgggtcaccatattcctcca

SEQ ID NO: 4654557 - DNA, 25 bp, Homo sapien
tatgacaagctcaggcatgttcagg

SEQ ID NO: 4654558 - DNA, 25 bp, Homo sapien
tagcaatcatcttatgtgacgtgac

SEQ ID NO: 4654559 - DNA, 25 bp, Homo sapien
tggaagaatggtaaacagtccctct

SEQ ID NO: 4654560 - DNA, 25 bp, Homo sapien
ccaaaggaaggcttatatgtacagc

SEQ ID NO: 4654561 - DNA, 25 bp, Homo sapien
gacacctaaagacatagataaatgc

SEQ ID NO: 4654562 - DNA, 25 bp, Homo sapien
caactttataacagcacagtggaag

SEQ ID NO: 4654563 - DNA, 25 bp, Homo sapien
tggactttctggtaaccaacttgat

SEQ ID NO: 4654564 - DNA, 25 bp, Homo sapien
cctggaggctcatcaaatctaatta

SEQ ID NO: 4654565 - DNA, 25 bp, Homo sapien
cagatgtattcaagagaggctcctt

SEQ ID NO: 4654566 - DNA, 25 bp, Homo sapien
taaagcaaacaattcagtgaaggag

SEQ ID NO: 4654567 - DNA, 25 bp, Homo sapien
tcagcatactgggtcaatgtggcca

SEQ ID NO: 4654568 - DNA, 25 bp, Homo sapien
ttcagcatactgggtcaatgtggcc

SEQ ID NO: 4654569 - DNA, 25 bp, Homo sapien
cagcatactgggtcaatgtggccat

SEQ ID NO: 4654570 - DNA, 25 bp, Homo sapien
cttcagcatactgggtcaatgtggc

SEQ ID NO: 4654571 - DNA, 25 bp, Homo sapien
tctatcaccttcaacatcagggcag

SEQ ID NO: 4654572 - DNA, 25 bp, Homo sapien
ctatcaccttcaacatcagggcagc

SEQ ID NO: 4654573 - DNA, 25 bp, Homo sapien
aagccaatgccaaacatagcgtcaa

SEQ ID NO: 4654574 - DNA, 25 bp, Homo sapien
agcaaagctacccagaatctgaagt

SEQ ID NO: 4654575 - DNA, 25 bp, Homo sapien
tagcgtcaatcttccagccagctgc

SEQ ID NO: 4654576 - DNA, 25 bp, Homo sapien
cagggaagatttttggctacgcata

SEQ ID NO: 4654577 - DNA, 25 bp, Homo sapien
gtgcctggcgctgggctacagtaca

SEQ ID NO: 4654578 - DNA, 25 bp, Homo sapien
catatgttatgttcttttttagtcc

SEQ ID NO: 4654579 - DNA, 25 bp, Homo sapien
agtattccatatgttatgttctttt

SEQ ID NO: 4654580 - DNA, 25 bp, Homo sapien
tacagtacaggttttcagtattcca

SEQ ID NO: 4654581 - DNA, 25 bp, Homo sapien
gggttcccctcccatattatgttgc

SEQ ID NO: 4654582 - DNA, 25 bp, Homo sapien
tattctttaaaatctgccaagaagg

SEQ ID NO: 4654583 - DNA, 25 bp, Homo sapien
tgtctaattgaagaaacaaggactt

SEQ ID NO: 4654584 - DNA, 25 bp, Homo sapien
cacacatcatccttctgggcattta

SEQ ID NO: 4654585 - DNA, 25 bp, Homo sapien
tcagagaagctgtggtcccatgagg

SEQ ID NO: 4654586 - DNA, 25 bp, Homo sapien
ccagatgcgggtgcaattatgagac

SEQ ID NO: 4654587 - DNA, 25 bp, Homo sapien
caatctccacgctatcatgtcctgg

SEQ ID NO: 4654588 - DNA, 25 bp, Homo sapien
tcctccattcgtggcagtagtggcg

SEQ ID NO: 4654589 - DNA, 25 bp, Homo sapien
ttagcataacgacctccagttgcat

SEQ ID NO: 4654590 - DNA, 25 bp, Homo sapien
acttagcataacgacctccagttgc

SEQ ID NO: 4654591 - DNA, 25 bp, Homo sapien
agcataacgacctccagttgcatcc

SEQ ID NO: 4654592 - DNA, 25 bp, Homo sapien
cacttagcataacgacctccagttg

SEQ ID NO: 4654593 - DNA, 25 bp, Homo sapien
tttagcacccccttcagccttcctc

SEQ ID NO: 4654594 - DNA, 25 bp, Homo sapien
ttggctttgtctcctttagcacccc

SEQ ID NO: 4654595 - DNA, 25 bp, Homo sapien
ctttagcacccccttcagccttcct

SEQ ID NO: 4654596 - DNA, 25 bp, Homo sapien
ttgtctcctttagcacccccttcag

SEQ ID NO: 4654597 - DNA, 25 bp, Homo sapien
ctttctgggcctgctctgtttggca

SEQ ID NO: 4654598 - DNA, 25 bp, Homo sapien
ttctgggcctgctctgtttggcatc

SEQ ID NO: 4654599 - DNA, 25 bp, Homo sapien
gctttctgggcctgctctgtttggc

SEQ ID NO: 4654600 - DNA, 25 bp, Homo sapien
ctgggcctgctctgtttggcatctc

SEQ ID NO: 4654601 - DNA, 25 bp, Homo sapien
agaaactttagaggtttagagtgag

SEQ ID NO: 4654602 - DNA, 25 bp, Homo sapien
cagagaaactttagaggtttagagt

SEQ ID NO: 4654603 - DNA, 25 bp, Homo sapien
tctgaacagagaaactttagaggtt

SEQ ID NO: 4654604 - DNA, 25 bp, Homo sapien
tgaacagagaaactttagaggttta

SEQ ID NO: 4654605 - DNA, 25 bp, Homo sapien
aatcattaacaatatacaacaattt

SEQ ID NO: 4654606 - DNA, 25 bp, Homo sapien
ttcttccatggactaccaaaagttg

SEQ ID NO: 4654607 - DNA, 25 bp, Homo sapien
cattaacaatatacaacaattttca

SEQ ID NO: 4654608 - DNA, 25 bp, Homo sapien
cttcttccatggactaccaaaagtt

SEQ ID NO: 4654609 - DNA, 25 bp, Homo sapien
tttcttcttcggcttatgtctgtca

SEQ ID NO: 4654610 - DNA, 25 bp, Homo sapien
ccttgctctggtaaggctatttcca

SEQ ID NO: 4654611 - DNA, 25 bp, Homo sapien
tgaaccttaccaggcacccattttg

SEQ ID NO: 4654612 - DNA, 25 bp, Homo sapien
gcagagaatgtcacgctgatgtcaa

SEQ ID NO: 4654613 - DNA, 25 bp, Homo sapien
tttaagagggtcactgcggtcttca

SEQ ID NO: 4654614 - DNA, 25 bp, Homo sapien
gataaactcttctgtgtgttagcta

SEQ ID NO: 4654615 - DNA, 25 bp, Homo sapien
tatttcactccggttttcataggcc

SEQ ID NO: 4654616 - DNA, 25 bp, Homo sapien
aaaatgatcttccaagaaattagga

SEQ ID NO: 4654617 - DNA, 25 bp, Homo sapien
gtgttagctatattcttggctccat

SEQ ID NO: 4654618 - DNA, 25 bp, Homo sapien
tcttcagcagctatagccaagctcc

SEQ ID NO: 4654619 - DNA, 25 bp, Homo sapien
gcatcttcagcagctatagccaagc

SEQ ID NO: 4654620 - DNA, 25 bp, Homo sapien
catggcaagttggacacagacaaag

SEQ ID NO: 4654621 - DNA, 25 bp, Homo sapien
tttcatttctcctaaaccccatggc

SEQ ID NO: 4654622 - DNA, 25 bp, Homo sapien
gtctcaaattctaggcctcagttga

SEQ ID NO: 4654623 - DNA, 25 bp, Homo sapien
aaattctaggcctcagttgatccac

SEQ ID NO: 4654624 - DNA, 25 bp, Homo sapien
tcaaattctaggcctcagttgatcc

SEQ ID NO: 4654625 - DNA, 25 bp, Homo sapien
caccacgccccgccatgttggcgag

SEQ ID NO: 4654626 - DNA, 25 bp, Homo sapien
tcttcttgacaaagtagtgatgtga

SEQ ID NO: 4654627 - DNA, 25 bp, Homo sapien
gacaaagtagtgatgtgaactgaca

SEQ ID NO: 4654628 - DNA, 25 bp, Homo sapien
tttagatactgcgattgtttctgca

SEQ ID NO: 4654629 - DNA, 25 bp, Homo sapien
gacaacatttagatactgcgattgt

SEQ ID NO: 4654630 - DNA, 25 bp, Homo sapien
aaaagcctcaagtatagcatcttca

SEQ ID NO: 4654631 - DNA, 25 bp, Homo sapien
aagcctcaagtatagcatcttcagt

SEQ ID NO: 4654632 - DNA, 25 bp, Homo sapien
acaaaaagcctcaagtatagcatct

SEQ ID NO: 4654633 - DNA, 25 bp, Homo sapien
caaaaagcctcaagtatagcatctt

SEQ ID NO: 4654634 - DNA, 25 bp, Homo sapien
ctgctcccgcggaattgcgctcagg

SEQ ID NO: 4654635 - DNA, 25 bp, Homo sapien
cctcactgtccgcaacattaaaaga

SEQ ID NO: 4654636 - DNA, 25 bp, Homo sapien
gcgtcccggtggcaggtctctttct

SEQ ID NO: 4654637 - DNA, 25 bp, Homo sapien
aagggatcccctcgtgaatggcgtc

SEQ ID NO: 4654638 - DNA, 25 bp, Homo sapien
ggttaacactgtccataagcaaatt

SEQ ID NO: 4654639 - DNA, 25 bp, Homo sapien
ttgcccctgtttggttaacactgtc

SEQ ID NO: 4654640 - DNA, 25 bp, Homo sapien
tgtttggttaacactgtccataagc

SEQ ID NO: 4654641 - DNA, 25 bp, Homo sapien
ccctgtttggttaacactgtccata

SEQ ID NO: 4654642 - DNA, 25 bp, Homo sapien
tgattagtgtgtgccctaagaggct

SEQ ID NO: 4654643 - DNA, 25 bp, Homo sapien
ttaccattttccctcacatgtgtgt

SEQ ID NO: 4654644 - DNA, 25 bp, Homo sapien
aatggacattggcacttgctcagca

SEQ ID NO: 4654645 - DNA, 25 bp, Homo sapien
tctctgtaagacctgagaaacatga

SEQ ID NO: 4654646 - DNA, 25 bp, Homo sapien
caccccagtgttttcatacattgaa

SEQ ID NO: 4654647 - DNA, 25 bp, Homo sapien
agtcaattcgcaccgtgcctgccgg

SEQ ID NO: 4654648 - DNA, 25 bp, Homo sapien
tcgagccgacggaagaagacatttg

SEQ ID NO: 4654649 - DNA, 25 bp, Homo sapien
tctgcggctcctttgcagccataaa

SEQ ID NO: 4654650 - DNA, 25 bp, Homo sapien
tgcgaagggcggataaatacaggtt

SEQ ID NO: 4654651 - DNA, 25 bp, Homo sapien
tcagaaaacaaaacgcttgcgattg

SEQ ID NO: 4654652 - DNA, 25 bp, Homo sapien
cgaaaatgcgcagggcgctcgctct

SEQ ID NO: 4654653 - DNA, 25 bp, Homo sapien
gcatcttttaaagcgctttcagaaa

SEQ ID NO: 4654654 - DNA, 25 bp, Homo sapien
caggtatggccccaggctttgtctt

SEQ ID NO: 4654655 - DNA, 25 bp, Homo sapien
ccatttttggctcccgtgccctctt

SEQ ID NO: 4654656 - DNA, 25 bp, Homo sapien
gctactggcacacccgtcaggtatg

SEQ ID NO: 4654657 - DNA, 25 bp, Homo sapien
tcttcacattgcctatacttctacc

SEQ ID NO: 4654658 - DNA, 25 bp, Homo sapien
tggctcagcagccccttacagcaca

SEQ ID NO: 4654659 - DNA, 25 bp, Homo sapien
ggctcagcagccccttacagcacac

SEQ ID NO: 4654660 - DNA, 25 bp, Homo sapien
ctggctcagcagccccttacagcac

SEQ ID NO: 4654661 - DNA, 25 bp, Homo sapien
gggaaataggcccacagcagtcact

SEQ ID NO: 4654662 - DNA, 25 bp, Homo sapien
gaactgctcaggtgcaactccttga

SEQ ID NO: 4654663 - DNA, 25 bp, Homo sapien
aaagtccatgacctcatcgcctgag

SEQ ID NO: 4654664 - DNA, 25 bp, Homo sapien
cagagctttacaatgagtgtgccac

SEQ ID NO: 4654665 - DNA, 25 bp, Homo sapien
acaaagaaatgcagcgttgccgtct

SEQ ID NO: 4654666 - DNA, 25 bp, Homo sapien
aaatgcagcgttgccgtcttcgaac

SEQ ID NO: 4654667 - DNA, 25 bp, Homo sapien
tcctgaaggccattgcgtgtccaga

SEQ ID NO: 4654668 - DNA, 25 bp, Homo sapien
gtgtccagattaacaagacaatgag

SEQ ID NO: 4654669 - DNA, 25 bp, Homo sapien
gaagtagggaatggaaatggcaact

SEQ ID NO: 4654670 - DNA, 25 bp, Homo sapien
tggttagataagaccttagggagag

SEQ ID NO: 4654671 - DNA, 25 bp, Homo sapien
gatgtcataaaccaaccgggctaac

SEQ ID NO: 4654672 - DNA, 25 bp, Homo sapien
catgaaaagagatgaggagagttga

SEQ ID NO: 4654673 - DNA, 25 bp, Homo sapien
tgggatccttccaaactgccgtcta

SEQ ID NO: 4654674 - DNA, 25 bp, Homo sapien
tgccgtctacctcagtgactttctc

SEQ ID NO: 4654675 - DNA, 25 bp, Homo sapien
ttccaaactgccgtctacctcagtg

SEQ ID NO: 4654676 - DNA, 25 bp, Homo sapien
agcaagaggttccattccaagctgg

SEQ ID NO: 4654677 - DNA, 25 bp, Homo sapien
gcagcttctagcaggcaaatcagga

SEQ ID NO: 4654678 - DNA, 25 bp, Homo sapien
gctacctcgtccagagaggattttc

SEQ ID NO: 4654679 - DNA, 25 bp, Homo sapien
tgtcccagctttaatacatcaagag

SEQ ID NO: 4654680 - DNA, 25 bp, Homo sapien
taatagctgtacaagtcaggctacc

SEQ ID NO: 4654681 - DNA, 25 bp, Homo sapien
tctgacctccaacccagtttgttca

SEQ ID NO: 4654682 - DNA, 25 bp, Homo sapien
tttcaaagtttccatctgacctcca

SEQ ID NO: 4654683 - DNA, 25 bp, Homo sapien
ccatctgacctccaacccagtttgt

SEQ ID NO: 4654684 - DNA, 25 bp, Homo sapien
gtttcaaagtttccatctgacctcc

SEQ ID NO: 4654685 - DNA, 25 bp, Homo sapien
tggaggggttgatatcttgacttcc

SEQ ID NO: 4654686 - DNA, 25 bp, Homo sapien
gagcctgtagacgtggccttctttg

SEQ ID NO: 4654687 - DNA, 25 bp, Homo sapien
gatttttcatggagattctgtgttc

SEQ ID NO: 4654688 - DNA, 25 bp, Homo sapien
tgatatgctccacttcagcacagag

SEQ ID NO: 4654689 - DNA, 25 bp, Homo sapien
cttttacacctagaatgtttttctg

SEQ ID NO: 4654690 - DNA, 25 bp, Homo sapien
ttacacctagaatgtttttctgccc

SEQ ID NO: 4654691 - DNA, 25 bp, Homo sapien
ctcgaatgtattccttttacaccta

SEQ ID NO: 4654692 - DNA, 25 bp, Homo sapien
tgtttttctgcccttcagacttcat

SEQ ID NO: 4654693 - DNA, 25 bp, Homo sapien
ggacatcataagggacatttagaaa

SEQ ID NO: 4654694 - DNA, 25 bp, Homo sapien
catcataagggacatttagaaactg

SEQ ID NO: 4654695 - DNA, 25 bp, Homo sapien
gacatcataagggacatttagaaac

SEQ ID NO: 4654696 - DNA, 25 bp, Homo sapien
atcataagggacatttagaaactgt

SEQ ID NO: 4654697 - DNA, 25 bp, Homo sapien
tcccacccgaacagaacacaaaatg

SEQ ID NO: 4654698 - DNA, 25 bp, Homo sapien
ggatagccagtcattccgaataatt

SEQ ID NO: 4654699 - DNA, 25 bp, Homo sapien
tccgaataattctagtcccacccga

SEQ ID NO: 4654700 - DNA, 25 bp, Homo sapien
ggtgcgtggatatcttcaggatagc

SEQ ID NO: 4654701 - DNA, 25 bp, Homo sapien
catttggaaagcgaaagtcaactgc

SEQ ID NO: 4654702 - DNA, 25 bp, Homo sapien
tgtttccaagacatttggaaagcga

SEQ ID NO: 4654703 - DNA, 25 bp, Homo sapien
acatttggaaagcgaaagtcaactg

SEQ ID NO: 4654704 - DNA, 25 bp, Homo sapien
gacatttggaaagcgaaagtcaact

SEQ ID NO: 4654705 - DNA, 25 bp, Homo sapien
caggaaaccgtagagtggaagttgg

SEQ ID NO: 4654706 - DNA, 25 bp, Homo sapien
tcccagagtccaaacagcttcgtac

SEQ ID NO: 4654707 - DNA, 25 bp, Homo sapien
tgaatatactaatgtcccagaatct

SEQ ID NO: 4654708 - DNA, 25 bp, Homo sapien
ctgccatgaatatactaatgtccca

SEQ ID NO: 4654709 - DNA, 25 bp, Homo sapien
tcctgtttctctcaagccaccaact

SEQ ID NO: 4654710 - DNA, 25 bp, Homo sapien
agaatatcctgtgttgtctcgctaa

SEQ ID NO: 4654711 - DNA, 25 bp, Homo sapien
gagatttggaatctggaggtggctc

SEQ ID NO: 4654712 - DNA, 25 bp, Homo sapien
gatttggaatctggaggtggctcca

SEQ ID NO: 4654713 - DNA, 25 bp, Homo sapien
gctccagaatatcctgtgttgtctc

SEQ ID NO: 4654714 - DNA, 25 bp, Homo sapien
gatagtctccccagcaactggctgg

SEQ ID NO: 4654715 - DNA, 25 bp, Homo sapien
gacagcgaccagaaatgaatggcaa

SEQ ID NO: 4654716 - DNA, 25 bp, Homo sapien
gcctctgctgaggtgtatagcacag

SEQ ID NO: 4654717 - DNA, 25 bp, Homo sapien
tgaatggcaaggaaacgcacagatc

SEQ ID NO: 4654718 - DNA, 25 bp, Homo sapien
agggcaaccagagcaccgtgcggtc

SEQ ID NO: 4654719 - DNA, 25 bp, Homo sapien
tcttcacagggatttagaaaattgt

SEQ ID NO: 4654720 - DNA, 25 bp, Homo sapien
tctcaaaagggaataacagggcaac

SEQ ID NO: 4654721 - DNA, 25 bp, Homo sapien
tcactgatggttgaataggatttga

SEQ ID NO: 4654722 - DNA, 25 bp, Homo sapien
aagtctgtctggtttgcatatctca

SEQ ID NO: 4654723 - DNA, 25 bp, Homo sapien
ggctaccatattggtcagagcagat

SEQ ID NO: 4654724 - DNA, 25 bp, Homo sapien
tggtgtcctggttcatcatacccca

SEQ ID NO: 4654725 - DNA, 25 bp, Homo sapien
cagattcataggatgatttcccagg

SEQ ID NO: 4654726 - DNA, 25 bp, Homo sapien
caagaactgctatgatgtcccaaag

SEQ ID NO: 4654727 - DNA, 25 bp, Homo sapien
tccttgaggagaacacgtggatcat

SEQ ID NO: 4654728 - DNA, 25 bp, Homo sapien
cgtggatcataccaaaaccagggtt

SEQ ID NO: 4654729 - DNA, 25 bp, Homo sapien
gaatacagctataaacggccgctcc

SEQ ID NO: 4654730 - DNA, 25 bp, Homo sapien
caccagcactgttgccaagggtcct

SEQ ID NO: 4654731 - DNA, 25 bp, Homo sapien
tgaatccatcgacctttaactgcaa

SEQ ID NO: 4654732 - DNA, 25 bp, Homo sapien
caagggtcctggtgaagtcatccca

SEQ ID NO: 4654733 - DNA, 25 bp, Homo sapien
aagggctgctgcacattgttgaatc

SEQ ID NO: 4654734 - DNA, 25 bp, Homo sapien
tcacagttgctttggcatttgaaca

SEQ ID NO: 4654735 - DNA, 25 bp, Homo sapien
catatacctgctgcctaaatgtgag

SEQ ID NO: 4654736 - DNA, 25 bp, Homo sapien
gccatatggcaaaagttggtcacag

SEQ ID NO: 4654737 - DNA, 25 bp, Homo sapien
gaacatagggatcccaaggagtttc

SEQ ID NO: 4654738 - DNA, 25 bp, Homo sapien
gacttccccaagtcaactaggagag

SEQ ID NO: 4654739 - DNA, 25 bp, Homo sapien
gctttaagatgatcaatgtggccaa

SEQ ID NO: 4654740 - DNA, 25 bp, Homo sapien
gctccagtccatacgaatgcagtta

SEQ ID NO: 4654741 - DNA, 25 bp, Homo sapien
tacaactccgtaaggtaggagacgc

SEQ ID NO: 4654742 - DNA, 25 bp, Homo sapien
agcatgagccatggcaccaggcctc

SEQ ID NO: 4654743 - DNA, 25 bp, Homo sapien
atgagccatggcaccaggcctccca

SEQ ID NO: 4654744 - DNA, 25 bp, Homo sapien
cgattctcccatttgagcctcccga

SEQ ID NO: 4654745 - DNA, 25 bp, Homo sapien
aagcatgagccatggcaccaggcct

SEQ ID NO: 4654746 - DNA, 25 bp, Homo sapien
caaccattctggtgggtgtgtagca

SEQ ID NO: 4654747 - DNA, 25 bp, Homo sapien
agggacactgttatccatgccaggg

SEQ ID NO: 4654748 - DNA, 25 bp, Homo sapien
gaattgctaggccactggaataaac

SEQ ID NO: 4654749 - DNA, 25 bp, Homo sapien
tttgcatgcctatcagcagagtgag

SEQ ID NO: 4654750 - DNA, 25 bp, Homo sapien
gagaccagaggacttggcaaccttt

SEQ ID NO: 4654751 - DNA, 25 bp, Homo sapien
tgtaacactgagctagggaatgaac

SEQ ID NO: 4654752 - DNA, 25 bp, Homo sapien
tataacacagcaatcctctagagag

SEQ ID NO: 4654753 - DNA, 25 bp, Homo sapien
gaaccagggttcatgctttctctca

SEQ ID NO: 4654754 - DNA, 25 bp, Homo sapien
tgtctgggttggcatgaacaagaga

SEQ ID NO: 4654755 - DNA, 25 bp, Homo sapien
gacctccactggtgattgtctgggt

SEQ ID NO: 4654756 - DNA, 25 bp, Homo sapien
tccatgtccactgtgaagcccttca

SEQ ID NO: 4654757 - DNA, 25 bp, Homo sapien
agggctagagcccaacacaatcagg

SEQ ID NO: 4654758 - DNA, 25 bp, Homo sapien
ctgcccgctaaagcactcatatgag

SEQ ID NO: 4654759 - DNA, 25 bp, Homo sapien
gcccgctaaagcactcatatgagaa

SEQ ID NO: 4654760 - DNA, 25 bp, Homo sapien
tgcccgctaaagcactcatatgaga

SEQ ID NO: 4654761 - DNA, 25 bp, Homo sapien
ccgctaaagcactcatatgagaaga

SEQ ID NO: 4654762 - DNA, 25 bp, Homo sapien
ttggacttcccagaacagtggacag

SEQ ID NO: 4654763 - DNA, 25 bp, Homo sapien
agtggacagcagtgttccctcccaa

SEQ ID NO: 4654764 - DNA, 25 bp, Homo sapien
ccagaggatgtcgggccttggactt

SEQ ID NO: 4654765 - DNA, 25 bp, Homo sapien
cagaggatgtcgggccttggacttc

SEQ ID NO: 4654766 - DNA, 25 bp, Homo sapien
cagagaagttatgcttaatgaggaa

SEQ ID NO: 4654767 - DNA, 25 bp, Homo sapien
ggtacagagaagttatgcttaatga

SEQ ID NO: 4654768 - DNA, 25 bp, Homo sapien
aatgaggaagtcatagcgtcccaag

SEQ ID NO: 4654769 - DNA, 25 bp, Homo sapien
aagtcatagcgtcccaaggtcaggg

SEQ ID NO: 4654770 - DNA, 25 bp, Homo sapien
agtttccaaagttgagggtggctat

SEQ ID NO: 4654771 - DNA, 25 bp, Homo sapien
caaagttgagggtggctataatgag

SEQ ID NO: 4654772 - DNA, 25 bp, Homo sapien
tggtccagggcctaggacacctgtc

SEQ ID NO: 4654773 - DNA, 25 bp, Homo sapien
taggacacctgtcaagtttccaaag

SEQ ID NO: 4654774 - DNA, 25 bp, Homo sapien
acactgacacgatggccttttgcat

SEQ ID NO: 4654775 - DNA, 25 bp, Homo sapien
ctgacactgacacgatggccttttg

SEQ ID NO: 4654776 - DNA, 25 bp, Homo sapien
gacactgacacgatggccttttgca

SEQ ID NO: 4654777 - DNA, 25 bp, Homo sapien
tgacactgacacgatggccttttgc

SEQ ID NO: 4654778 - DNA, 25 bp, Homo sapien
ccaagggctatgataggaagttcac

SEQ ID NO: 4654779 - DNA, 25 bp, Homo sapien
gggtctgaggcaacaacttcacaga

SEQ ID NO: 4654780 - DNA, 25 bp, Homo sapien
gacctagggctgtgacttacaaacc

SEQ ID NO: 4654781 - DNA, 25 bp, Homo sapien
gttcacaggagctaccaacctctgg

SEQ ID NO: 4654782 - DNA, 25 bp, Homo sapien
ttccaaaggccaacagtgaggtccg

SEQ ID NO: 4654783 - DNA, 25 bp, Homo sapien
cagaacacaaatatagcctagggcc

SEQ ID NO: 4654784 - DNA, 25 bp, Homo sapien
atggcagggcttcccaacaggtcag

SEQ ID NO: 4654785 - DNA, 25 bp, Homo sapien
tgttcagtttccgagatggcagggc

SEQ ID NO: 4654786 - DNA, 25 bp, Homo sapien
attcttgtcacctggcaatgtcacc

SEQ ID NO: 4654787 - DNA, 25 bp, Homo sapien
ggcaatgtcaccactctgaataaaa

SEQ ID NO: 4654788 - DNA, 25 bp, Homo sapien
tgatgcttgctcaacatacttggca

SEQ ID NO: 4654789 - DNA, 25 bp, Homo sapien
tggaccaaacggtcacctcaggcat

SEQ ID NO: 4654790 - DNA, 25 bp, Homo sapien
ggaaatatgaatgagtccatggaca

SEQ ID NO: 4654791 - DNA, 25 bp, Homo sapien
gtcaaagtctttggcacatagttcc

SEQ ID NO: 4654792 - DNA, 25 bp, Homo sapien
cacatctctcactgtcaaagtcttt

SEQ ID NO: 4654793 - DNA, 25 bp, Homo sapien
gaaatatgaatgagtccatggacag

SEQ ID NO: 4654794 - DNA, 25 bp, Homo sapien
tggttaatactatcctctcggtcct

SEQ ID NO: 4654795 - DNA, 25 bp, Homo sapien
gctctgcaaacatctagatggttaa

SEQ ID NO: 4654796 - DNA, 25 bp, Homo sapien
tgcaccttcaaacatgttgaccgag

SEQ ID NO: 4654797 - DNA, 25 bp, Homo sapien
cagggatgtatgcactgctctgcaa

SEQ ID NO: 4654798 - DNA, 25 bp, Homo sapien
ggacagaacaaacactttagtgccc

SEQ ID NO: 4654799 - DNA, 25 bp, Homo sapien
gacagaacaaacactttagtgccca

SEQ ID NO: 4654800 - DNA, 25 bp, Homo sapien
aggccttctcaacagacaccgtggc

SEQ ID NO: 4654801 - DNA, 25 bp, Homo sapien
ggagaggtctccaagactcctccat

SEQ ID NO: 4654802 - DNA, 25 bp, Homo sapien
tgttgatgacagtcaggagaatgtc

SEQ ID NO: 4654803 - DNA, 25 bp, Homo sapien
tcacttgttgatgacagtcaggaga

SEQ ID NO: 4654804 - DNA, 25 bp, Homo sapien
tgatgacagtcaggagaatgtccag

SEQ ID NO: 4654805 - DNA, 25 bp, Homo sapien
cacttgttgatgacagtcaggagaa

SEQ ID NO: 4654806 - DNA, 25 bp, Homo sapien
gccttgctactaaaagattaactga

SEQ ID NO: 4654807 - DNA, 25 bp, Homo sapien
caaacaccgttcatttctggactgg

SEQ ID NO: 4654808 - DNA, 25 bp, Homo sapien
gatagtctcttaaggtcattaacag

SEQ ID NO: 4654809 - DNA, 25 bp, Homo sapien
gccagcattataactcgccaaagtt

SEQ ID NO: 4654810 - DNA, 25 bp, Homo sapien
atacttttagcataattcgatttgg

SEQ ID NO: 4654811 - DNA, 25 bp, Homo sapien
gcttaaaggcaaattccatatttat

SEQ ID NO: 4654812 - DNA, 25 bp, Homo sapien
gcataattcgatttggaacactgca

SEQ ID NO: 4654813 - DNA, 25 bp, Homo sapien
tttgcttaaaggcaaattccatatt

SEQ ID NO: 4654814 - DNA, 25 bp, Homo sapien
caggaggggaccatcccacgctgtg

SEQ ID NO: 4654815 - DNA, 25 bp, Homo sapien
atcccacgctgtggggaagcgttgc

SEQ ID NO: 4654816 - DNA, 25 bp, Homo sapien
tggggaagcgttgctggtcctccat

SEQ ID NO: 4654817 - DNA, 25 bp, Homo sapien
atctcaggaggggaccatcccacgc

SEQ ID NO: 4654818 - DNA, 25 bp, Homo sapien
gctgaacaaacaatgaaggggctgt

SEQ ID NO: 4654819 - DNA, 25 bp, Homo sapien
gcagggctatctgcagatgcagcag

SEQ ID NO: 4654820 - DNA, 25 bp, Homo sapien
ccttctggtttgaggctgtttctca

SEQ ID NO: 4654821 - DNA, 25 bp, Homo sapien
cctctccttctggtttgaggctgtt

SEQ ID NO: 4654822 - DNA, 25 bp, Homo sapien
atgtttctctaaggcttgccgccat

SEQ ID NO: 4654823 - DNA, 25 bp, Homo sapien
gctctacatcaagctcactgactgg

SEQ ID NO: 4654824 - DNA, 25 bp, Homo sapien
cagctgtgggggctctacatcaagc

SEQ ID NO: 4654825 - DNA, 25 bp, Homo sapien
ctggacttgttgtgcctgtatctcc

SEQ ID NO: 4654826 - DNA, 25 bp, Homo sapien
aggcatttgtctagccagctgtggg

SEQ ID NO: 4654827 - DNA, 25 bp, Homo sapien
cctaggaaatgacccaaggctgctt

SEQ ID NO: 4654828 - DNA, 25 bp, Homo sapien
gctgcagaacatttctaagtcactc

SEQ ID NO: 4654829 - DNA, 25 bp, Homo sapien
agacaatcttcaattcctgcgtatt

SEQ ID NO: 4654830 - DNA, 25 bp, Homo sapien
gaacatttctaagtcactcctagga

SEQ ID NO: 4654831 - DNA, 25 bp, Homo sapien
aattgagctgcaaacatcatgctgc

SEQ ID NO: 4654832 - DNA, 25 bp, Homo sapien
tagcccgatatgagggaggactttc

SEQ ID NO: 4654833 - DNA, 25 bp, Homo sapien
taatgtagaagaaccactaggccca

SEQ ID NO: 4654834 - DNA, 25 bp, Homo sapien
gattccttctaacctgaggctgtgc

SEQ ID NO: 4654835 - DNA, 25 bp, Homo sapien
gagcctgtggtggataaaactcgca

SEQ ID NO: 4654836 - DNA, 25 bp, Homo sapien
catttgaacacggtgtgtggagcct

SEQ ID NO: 4654837 - DNA, 25 bp, Homo sapien
tacactctaactacatgtgcatagt

SEQ ID NO: 4654838 - DNA, 25 bp, Homo sapien
ttcacaatgagtccacggcacagca

SEQ ID NO: 4654839 - DNA, 25 bp, Homo sapien
catcttcatccacatagcctctctc

SEQ ID NO: 4654840 - DNA, 25 bp, Homo sapien
atcttcatccacatagcctctctct

SEQ ID NO: 4654841 - DNA, 25 bp, Homo sapien
ctcttcaggcaatattgcctccact

SEQ ID NO: 4654842 - DNA, 25 bp, Homo sapien
tcctgactccaggacatgacttatg

SEQ ID NO: 4654843 - DNA, 25 bp, Homo sapien
cctgactccaggacatgacttatgc

SEQ ID NO: 4654844 - DNA, 25 bp, Homo sapien
ggcaatattgcctccactcctgact

SEQ ID NO: 4654845 - DNA, 25 bp, Homo sapien
cctgataagatatggtaggcacatt

SEQ ID NO: 4654846 - DNA, 25 bp, Homo sapien
cattatctaccacttcatctctggt

SEQ ID NO: 4654847 - DNA, 25 bp, Homo sapien
caaggattcggaaggcttttaagat

SEQ ID NO: 4654848 - DNA, 25 bp, Homo sapien
cttcatatcagaagcaaggattcgg

SEQ ID NO: 4654849 - DNA, 25 bp, Homo sapien
cagcagcagccttctagcctccttt

SEQ ID NO: 4654850 - DNA, 25 bp, Homo sapien
tgtttttgacacaatcttagggctg

SEQ ID NO: 4654851 - DNA, 25 bp, Homo sapien
tttgacacaatcttagggctggcca

SEQ ID NO: 4654852 - DNA, 25 bp, Homo sapien
tttttgacacaatcttagggctggc

SEQ ID NO: 4654853 - DNA, 25 bp, Homo sapien
tctgataggccctggggcgcttcca

SEQ ID NO: 4654854 - DNA, 25 bp, Homo sapien
tatgtttggtaatttccgccaagac

SEQ ID NO: 4654855 - DNA, 25 bp, Homo sapien
cagcctgtctaaagtatgtttggta

SEQ ID NO: 4654856 - DNA, 25 bp, Homo sapien
tccgccaagacctgcatctgatagg

SEQ ID NO: 4654857 - DNA, 25 bp, Homo sapien
ggaaggaacagaatctacaagcatg

SEQ ID NO: 4654858 - DNA, 25 bp, Homo sapien
tctagagtccttcccgtcagtggaa

SEQ ID NO: 4654859 - DNA, 25 bp, Homo sapien
tttgcgttgcctcttcccctttaga

SEQ ID NO: 4654860 - DNA, 25 bp, Homo sapien
cctttagatccggtgttatcctatt

SEQ ID NO: 4654861 - DNA, 25 bp, Homo sapien
cccttttgcggctcggaatctgttt

SEQ ID NO: 4654862 - DNA, 25 bp, Homo sapien
ggtgacaaaccgtaactattctgcg

SEQ ID NO: 4654863 - DNA, 25 bp, Homo sapien
tgacacttccgagggctctggtgcc

SEQ ID NO: 4654864 - DNA, 25 bp, Homo sapien
tcactagggacaaattaggcgatcc

SEQ ID NO: 4654865 - DNA, 25 bp, Homo sapien
tgcccggagcacgatatgcatccag

SEQ ID NO: 4654866 - DNA, 25 bp, Homo sapien
gtgtgctagggtgtgcgcgaacgcg

SEQ ID NO: 4654867 - DNA, 25 bp, Homo sapien
ggtgtgcgcgaacgcgtgccctgcg

SEQ ID NO: 4654868 - DNA, 25 bp, Homo sapien
gcgctgcccggagcacgatatgcat

SEQ ID NO: 4654869 - DNA, 25 bp, Homo sapien
gatgaaccgttcctccgttcgacgc

SEQ ID NO: 4654870 - DNA, 25 bp, Homo sapien
tcccggtccctaattcacaccacag

SEQ ID NO: 4654871 - DNA, 25 bp, Homo sapien
tctcttctacaatcgcggtagaggc

SEQ ID NO: 4654872 - DNA, 25 bp, Homo sapien
ctctaagatgaaccgttcctccgtt

SEQ ID NO: 4654873 - DNA, 25 bp, Homo sapien
ggggaatctgggggcgagcagggag

SEQ ID NO: 4654874 - DNA, 25 bp, Homo sapien
gggaatctgggggcgagcagggagg

SEQ ID NO: 4654875 - DNA, 25 bp, Homo sapien
cacacgctcatacacacacaaaccc

SEQ ID NO: 4654876 - DNA, 25 bp, Homo sapien
aaatccaaaaacacacacacgctca

SEQ ID NO: 4654877 - DNA, 25 bp, Homo sapien
tccaaaaacacacacacgctcatac

SEQ ID NO: 4654878 - DNA, 25 bp, Homo sapien
ctgaaatccaaaaacacacacacgc

SEQ ID NO: 4654879 - DNA, 25 bp, Homo sapien
tctgctactgctggcgaagtgacgt

SEQ ID NO: 4654880 - DNA, 25 bp, Homo sapien
gcgtagagcgcgagcgaagcagcca

SEQ ID NO: 4654881 - DNA, 25 bp, Homo sapien
cctgctccaacccaattccgggagc

SEQ ID NO: 4654882 - DNA, 25 bp, Homo sapien
gaagtgacgtgagggctgacgcaga

SEQ ID NO: 4654883 - DNA, 25 bp, Homo sapien
cccagggggagacagtgagggccga

SEQ ID NO: 4654884 - DNA, 25 bp, Homo sapien
cgagggcactatctgcgctgctcac

SEQ ID NO: 4654885 - DNA, 25 bp, Homo sapien
ccgaggcgaccgagggcactatctg

SEQ ID NO: 4654886 - DNA, 25 bp, Homo sapien
agtgagggccgaggcgaccgagggc

SEQ ID NO: 4654887 - DNA, 25 bp, Homo sapien
cgcgtaagactgagcgtaggacccc

SEQ ID NO: 4654888 - DNA, 25 bp, Homo sapien
agctccggcccaggaatcaacttgc

SEQ ID NO: 4654889 - DNA, 25 bp, Homo sapien
caggattccatggtacaggccgggc

SEQ ID NO: 4654890 - DNA, 25 bp, Homo sapien
tgaggacaaacagacacgcgtaaga

SEQ ID NO: 4654891 - DNA, 25 bp, Homo sapien
cgtgccgagtccagcttatcagagg

SEQ ID NO: 4654892 - DNA, 25 bp, Homo sapien
cggcatagcgaaccgctttacaggg

SEQ ID NO: 4654893 - DNA, 25 bp, Homo sapien
gcgcagattccttgttagatgcgaa

SEQ ID NO: 4654894 - DNA, 25 bp, Homo sapien
taactcctcggtgcttgttgcgggc

SEQ ID NO: 4654895 - DNA, 25 bp, Homo sapien
gtgccagcccgagtgcctgtccccg

SEQ ID NO: 4654896 - DNA, 25 bp, Homo sapien
cagtgccagcccgagtgcctgtccc

SEQ ID NO: 4654897 - DNA, 25 bp, Homo sapien
cagcccgagtgcctgtccccgcgct

SEQ ID NO: 4654898 - DNA, 25 bp, Homo sapien
ccgagtgcctgtccccgcgctgcac

SEQ ID NO: 4654899 - DNA, 25 bp, Homo sapien
tgggacaggcgaaagcggccctcca

SEQ ID NO: 4654900 - DNA, 25 bp, Homo sapien
catgccaccttatccaggacgacat

SEQ ID NO: 4654901 - DNA, 25 bp, Homo sapien
tgcatttgcaggacgtgggacaggc

SEQ ID NO: 4654902 - DNA, 25 bp, Homo sapien
gccatggcgggtccatgccacctta

SEQ ID NO: 4654903 - DNA, 25 bp, Homo sapien
gtcgctgcaccagatccgagaggca

SEQ ID NO: 4654904 - DNA, 25 bp, Homo sapien
gctccaatctcggaaatgccacgat

SEQ ID NO: 4654905 - DNA, 25 bp, Homo sapien
ggagaagggtcgctgcaccagatcc

SEQ ID NO: 4654906 - DNA, 25 bp, Homo sapien
gtgatgttctcaggatctacactgt

SEQ ID NO: 4654907 - DNA, 25 bp, Homo sapien
tagtgtggcttatgtaaccgtgctc

SEQ ID NO: 4654908 - DNA, 25 bp, Homo sapien
caagctgatgtctgtaaatacctac

SEQ ID NO: 4654909 - DNA, 25 bp, Homo sapien
tccacacagttgtgccaagctgatg

SEQ ID NO: 4654910 - DNA, 25 bp, Homo sapien
ctaaactccacactagggaactggg

SEQ ID NO: 4654911 - DNA, 25 bp, Homo sapien
tgaacctacaagaaactctctagag

SEQ ID NO: 4654912 - DNA, 25 bp, Homo sapien
gagaaggcacccagttatatgggac

SEQ ID NO: 4654913 - DNA, 25 bp, Homo sapien
taaagttagccagagggataaggcc

SEQ ID NO: 4654914 - DNA, 25 bp, Homo sapien
ccccagagagcaaagtaagtggtga

SEQ ID NO: 4654915 - DNA, 25 bp, Homo sapien
gtgaccttggactcatcagaccagt

SEQ ID NO: 4654916 - DNA, 25 bp, Homo sapien
tctgaggttccgattctaagtgacc

SEQ ID NO: 4654917 - DNA, 25 bp, Homo sapien
gaccgaggcttcagggaacttcaga

SEQ ID NO: 4654918 - DNA, 25 bp, Homo sapien
tttgagggagttcagagcagacact

SEQ ID NO: 4654919 - DNA, 25 bp, Homo sapien
cacaatgctgttaatgagtcggcct

SEQ ID NO: 4654920 - DNA, 25 bp, Homo sapien
aattaggcggtctgtttgagaacac

SEQ ID NO: 4654921 - DNA, 25 bp, Homo sapien
tttggatgctaggagaaggagcttc

SEQ ID NO: 4654922 - DNA, 25 bp, Homo sapien
gaaggagcttctagttcccacaatg

SEQ ID NO: 4654923 - DNA, 25 bp, Homo sapien
tagccatgttaaacttgtctcccca

SEQ ID NO: 4654924 - DNA, 25 bp, Homo sapien
tcagtagctcatgcacttttcaatt

SEQ ID NO: 4654925 - DNA, 25 bp, Homo sapien
tttcttcctatatgaagataagatg

SEQ ID NO: 4654926 - DNA, 25 bp, Homo sapien
ctctcacagagatgagtttgcacag

SEQ ID NO: 4654927 - DNA, 25 bp, Homo sapien
gggcaacaggtttcatttcactctg

SEQ ID NO: 4654928 - DNA, 25 bp, Homo sapien
agcacccccgactgtggcaaagact

SEQ ID NO: 4654929 - DNA, 25 bp, Homo sapien
acttacataagcacccccgactgtg

SEQ ID NO: 4654930 - DNA, 25 bp, Homo sapien
tcatcgaaagggctgcgggtttctc

SEQ ID NO: 4654931 - DNA, 25 bp, Homo sapien
catcttcatactcagatagggtagc

SEQ ID NO: 4654932 - DNA, 25 bp, Homo sapien
catactcagatagggtagcttccac

SEQ ID NO: 4654933 - DNA, 25 bp, Homo sapien
catttgtctaagttctggggcagtc

SEQ ID NO: 4654934 - DNA, 25 bp, Homo sapien
tgcagctcatcttcatactcagata

SEQ ID NO: 4654935 - DNA, 25 bp, Homo sapien
tactggctatatgacctgagacaag

SEQ ID NO: 4654936 - DNA, 25 bp, Homo sapien
attagaacagcccaaatactccggg

SEQ ID NO: 4654937 - DNA, 25 bp, Homo sapien
gagacaagtccctacgcctcagttt

SEQ ID NO: 4654938 - DNA, 25 bp, Homo sapien
taacgacagtaactgcctcctaggg

SEQ ID NO: 4654939 - DNA, 25 bp, Homo sapien
tccagatgatatctatcaatctatc

SEQ ID NO: 4654940 - DNA, 25 bp, Homo sapien
ctccagatgatatctatcaatctat

SEQ ID NO: 4654941 - DNA, 25 bp, Homo sapien
ttagggcacccaaactgatcctcca

SEQ ID NO: 4654942 - DNA, 25 bp, Homo sapien
tagggcacccaaactgatcctccac

SEQ ID NO: 4654943 - DNA, 25 bp, Homo sapien
cctccacctggagtttatcaccgtc

SEQ ID NO: 4654944 - DNA, 25 bp, Homo sapien
gatcctccacctggagtttatcacc

SEQ ID NO: 4654945 - DNA, 25 bp, Homo sapien
gagagccacagagatgctgctgtca

SEQ ID NO: 4654946 - DNA, 25 bp, Homo sapien
tgagagccacagagatgctgctgtc

SEQ ID NO: 4654947 - DNA, 25 bp, Homo sapien
ggtgagagccacagagatgctgctg

SEQ ID NO: 4654948 - DNA, 25 bp, Homo sapien
agagccacagagatgctgctgtcat

SEQ ID NO: 4654949 - DNA, 25 bp, Homo sapien
caggtttcatggtcaataacccttg

SEQ ID NO: 4654950 - DNA, 25 bp, Homo sapien
tggtcaataacccttgcactgggtt

SEQ ID NO: 4654951 - DNA, 25 bp, Homo sapien
caataacccttgcactgggtttcat

SEQ ID NO: 4654952 - DNA, 25 bp, Homo sapien
tcatggtcaataacccttgcactgg

SEQ ID NO: 4654953 - DNA, 25 bp, Homo sapien
caacatcatcttcgttgatgatttc

SEQ ID NO: 4654954 - DNA, 25 bp, Homo sapien
agtcccacataagcttcaacatcat

SEQ ID NO: 4654955 - DNA, 25 bp, Homo sapien
tctcagtcccacataagcttcaaca

SEQ ID NO: 4654956 - DNA, 25 bp, Homo sapien
ttcaacatcatcttcgttgatgatt

SEQ ID NO: 4654957 - DNA, 25 bp, Homo sapien
gaaatgctttatgagccacaaattt

SEQ ID NO: 4654958 - DNA, 25 bp, Homo sapien
aaatgctttatgagccacaaatttt

SEQ ID NO: 4654959 - DNA, 25 bp, Homo sapien
cagaaatgctttatgagccacaaat

SEQ ID NO: 4654960 - DNA, 25 bp, Homo sapien
atgctttatgagccacaaattttaa

SEQ ID NO: 4654961 - DNA, 25 bp, Homo sapien
caaggtgacggaaatgtttcctaga

SEQ ID NO: 4654962 - DNA, 25 bp, Homo sapien
aatgtttcctagacaaactcgtcag

SEQ ID NO: 4654963 - DNA, 25 bp, Homo sapien
agacaaactcgtcagtttgtttcgg

SEQ ID NO: 4654964 - DNA, 25 bp, Homo sapien
agttcagacaagtcaaggtgacgga

SEQ ID NO: 4654965 - DNA, 25 bp, Homo sapien
tacaaatcctgagtgtctggactgg

SEQ ID NO: 4654966 - DNA, 25 bp, Homo sapien
tgtaaatggattgcccaccaggatc

SEQ ID NO: 4654967 - DNA, 25 bp, Homo sapien
tagcctcttggagagtcttgatcca

SEQ ID NO: 4654968 - DNA, 25 bp, Homo sapien
gatccacataatgtcacaggagcat

SEQ ID NO: 4654969 - DNA, 25 bp, Homo sapien
ttgccattcggtgcccttttaaatg

SEQ ID NO: 4654970 - DNA, 25 bp, Homo sapien
ctctgattttgccattcggtgccct

SEQ ID NO: 4654971 - DNA, 25 bp, Homo sapien
gattttgccattcggtgccctttta

SEQ ID NO: 4654972 - DNA, 25 bp, Homo sapien
ctgattttgccattcggtgcccttt

SEQ ID NO: 4654973 - DNA, 25 bp, Homo sapien
tcagactggaataagatttgtacag

SEQ ID NO: 4654974 - DNA, 25 bp, Homo sapien
ttattagtgaaatcagactggaata

SEQ ID NO: 4654975 - DNA, 25 bp, Homo sapien
attaggaaccggatcacctgccaca

SEQ ID NO: 4654976 - DNA, 25 bp, Homo sapien
ttaggtgcggccagatttgcagatg

SEQ ID NO: 4654977 - DNA, 25 bp, Homo sapien
ttcctccacagtgaggttaggtgcg

SEQ ID NO: 4654978 - DNA, 25 bp, Homo sapien
gccacactacaggataatgtgatag

SEQ ID NO: 4654979 - DNA, 25 bp, Homo sapien
tgttagttatccttaaggagccctg

SEQ ID NO: 4654980 - DNA, 25 bp, Homo sapien
cagtgaggttgacagaatcttgatc

SEQ ID NO: 4654981 - DNA, 25 bp, Homo sapien
aagattttccgccacacaagagatc

SEQ ID NO: 4654982 - DNA, 25 bp, Homo sapien
tgcttcccactgtcatcggatgaaa

SEQ ID NO: 4654983 - DNA, 25 bp, Homo sapien
cagccgtggtactccgtgtgattgg

SEQ ID NO: 4654984 - DNA, 25 bp, Homo sapien
tcttggctattagagtgtagtcccc

SEQ ID NO: 4654985 - DNA, 25 bp, Homo sapien
tttggactcattcaatattgccccg

SEQ ID NO: 4654986 - DNA, 25 bp, Homo sapien
cgttatagaaccactgaagcgctgg

SEQ ID NO: 4654987 - DNA, 25 bp, Homo sapien
tgtgcccagagtagacccctgatgc

SEQ ID NO: 4654988 - DNA, 25 bp, Homo sapien
tcagcccgggtaagcaaaacagtcc

SEQ ID NO: 4654989 - DNA, 25 bp, Homo sapien
taggtaagaacactccactgaagga

SEQ ID NO: 4654990 - DNA, 25 bp, Homo sapien
gaagcactattaccactcctaggaa

SEQ ID NO: 4654991 - DNA, 25 bp, Homo sapien
tgataaggctgtgaacgctctatac

SEQ ID NO: 4654992 - DNA, 25 bp, Homo sapien
cccaagagtttcaaagggccactgg

SEQ ID NO: 4654993 - DNA, 25 bp, Homo sapien
gcagcaaccatagccaagcagctaa

SEQ ID NO: 4654994 - DNA, 25 bp, Homo sapien
caagctagggatttactgcagcaac

SEQ ID NO: 4654995 - DNA, 25 bp, Homo sapien
gcactctcaagatacattacacggg

SEQ ID NO: 4654996 - DNA, 25 bp, Homo sapien
tgaagatctgctagcacctgtcctt

SEQ ID NO: 4654997 - DNA, 25 bp, Homo sapien
gctgggccgctctcttttaatgcct

SEQ ID NO: 4654998 - DNA, 25 bp, Homo sapien
gctgtcttgaggtcgaacttcccca

SEQ ID NO: 4654999 - DNA, 25 bp, Homo sapien
tatgttctctgcaaacggatggctc

SEQ ID NO: 4655000 - DNA, 25 bp, Homo sapien
tctgcaaacggatggctcagaggac

SEQ ID NO: 4655001 - DNA, 25 bp, Homo sapien
tgaattatgttctctgcaaacggat

SEQ ID NO: 4655002 - DNA, 25 bp, Homo sapien
aacggatggctcagaggacaaggcc

SEQ ID NO: 4655003 - DNA, 25 bp, Homo sapien
taggaagcgcaagtcactgactccc

SEQ ID NO: 4655004 - DNA, 25 bp, Homo sapien
gactcccactgcttgtgtgaatgag

SEQ ID NO: 4655005 - DNA, 25 bp, Homo sapien
caggagctcccgaattaggaagcgc

SEQ ID NO: 4655006 - DNA, 25 bp, Homo sapien
tcctgaatgagtgggccatacagac

SEQ ID NO: 4655007 - DNA, 25 bp, Homo sapien
ccagatgtcatgaatctttcgataa

SEQ ID NO: 4655008 - DNA, 25 bp, Homo sapien
atccagatgtcatgaatctttcgat

SEQ ID NO: 4655009 - DNA, 25 bp, Homo sapien
gatgtcatgaatctttcgataaaac

SEQ ID NO: 4655010 - DNA, 25 bp, Homo sapien
tgtcatgaatctttcgataaaacag

SEQ ID NO: 4655011 - DNA, 25 bp, Homo sapien
tgtgagagaagggcctgtggtcacc

SEQ ID NO: 4655012 - DNA, 25 bp, Homo sapien
tgagagaagggcctgtggtcaccat

SEQ ID NO: 4655013 - DNA, 25 bp, Homo sapien
catgtgagagaagggcctgtggtca

SEQ ID NO: 4655014 - DNA, 25 bp, Homo sapien
cgcatgtgagagaagggcctgtggt

SEQ ID NO: 4655015 - DNA, 25 bp, Homo sapien
aattacatcaggataatttgggttt

SEQ ID NO: 4655016 - DNA, 25 bp, Homo sapien
cttcataaattacatcaggataatt

SEQ ID NO: 4655017 - DNA, 25 bp, Homo sapien
ttacatcaggataatttgggtttgc

SEQ ID NO: 4655018 - DNA, 25 bp, Homo sapien
acatcaggataatttgggtttgcac

SEQ ID NO: 4655019 - DNA, 25 bp, Homo sapien
tctgttcgtggtgtccccgatgtca

SEQ ID NO: 4655020 - DNA, 25 bp, Homo sapien
gagatgttcccgaccggttttatca

SEQ ID NO: 4655021 - DNA, 25 bp, Homo sapien
tcagtgacgtctgtggaagggattt

SEQ ID NO: 4655022 - DNA, 25 bp, Homo sapien
gatgtcattcgctgcagttccataa

SEQ ID NO: 4655023 - DNA, 25 bp, Homo sapien
caggacaccttgcttttaccagtca

SEQ ID NO: 4655024 - DNA, 25 bp, Homo sapien
taggagtcctagatccctgcgttca

SEQ ID NO: 4655025 - DNA, 25 bp, Homo sapien
tcatgacagctagaagagatgcttc

SEQ ID NO: 4655026 - DNA, 25 bp, Homo sapien
cattagacagtaatgcctgccctgg

SEQ ID NO: 4655027 - DNA, 25 bp, Homo sapien
tgtcttgccaacttaagcagaaaca

SEQ ID NO: 4655028 - DNA, 25 bp, Homo sapien
tgccaaacttggagtgtcttgccaa

SEQ ID NO: 4655029 - DNA, 25 bp, Homo sapien
gtgtcttgccaacttaagcagaaac

SEQ ID NO: 4655030 - DNA, 25 bp, Homo sapien
ctttcatgccaaacttggagtgtct

SEQ ID NO: 4655031 - DNA, 25 bp, Homo sapien
tccacataagaagctaaataaacac

SEQ ID NO: 4655032 - DNA, 25 bp, Homo sapien
gatccacataagaagctaaataaac

SEQ ID NO: 4655033 - DNA, 25 bp, Homo sapien
aattagcattagtcataagccaaaa

SEQ ID NO: 4655034 - DNA, 25 bp, Homo sapien
ttagtggtaattagcattagtcata

SEQ ID NO: 4655035 - DNA, 25 bp, Homo sapien
aaagcataccactgaagatttggga

SEQ ID NO: 4655036 - DNA, 25 bp, Homo sapien
aagtgggtagtgctgagtaatcaac

SEQ ID NO: 4655037 - DNA, 25 bp, Homo sapien
tcaaatgtacagcagcatagacctt

SEQ ID NO: 4655038 - DNA, 25 bp, Homo sapien
tctcccgggacaactgttctcatgg

SEQ ID NO: 4655039 - DNA, 25 bp, Homo sapien
tgcttcataacactgttgtttaaat

SEQ ID NO: 4655040 - DNA, 25 bp, Homo sapien
tattttgcttcataacactgttgtt

SEQ ID NO: 4655041 - DNA, 25 bp, Homo sapien
ttttgcttcataacactgttgttta

SEQ ID NO: 4655042 - DNA, 25 bp, Homo sapien
ttattttgcttcataacactgttgt

SEQ ID NO: 4655043 - DNA, 25 bp, Homo sapien
ttgaaacagtcaacactcgaaataa

SEQ ID NO: 4655044 - DNA, 25 bp, Homo sapien
tatattctcgagttttccattacag

SEQ ID NO: 4655045 - DNA, 25 bp, Homo sapien
tatcagcagcattgaactgtcattt

SEQ ID NO: 4655046 - DNA, 25 bp, Homo sapien
aacactcgaaataaaccacgcattg

SEQ ID NO: 4655047 - DNA, 25 bp, Homo sapien
cattctaatttttcgacggcatttt

SEQ ID NO: 4655048 - DNA, 25 bp, Homo sapien
aaaaacaagagtgcattcaattgtt

SEQ ID NO: 4655049 - DNA, 25 bp, Homo sapien
aaacaagagtgcattcaattgttac

SEQ ID NO: 4655050 - DNA, 25 bp, Homo sapien
aaaacaagagtgcattcaattgtta

SEQ ID NO: 4655051 - DNA, 25 bp, Homo sapien
taagtgtccccagctttgagaaaca

SEQ ID NO: 4655052 - DNA, 25 bp, Homo sapien
tgacacgctcaagcagtgaacatgg

SEQ ID NO: 4655053 - DNA, 25 bp, Homo sapien
ttgagaaacatagcattacccaggg

SEQ ID NO: 4655054 - DNA, 25 bp, Homo sapien
taaaatgttagtccctgagcacctc

SEQ ID NO: 4655055 - DNA, 25 bp, Homo sapien
gatagggacattgcacggtgtccgt

SEQ ID NO: 4655056 - DNA, 25 bp, Homo sapien
agggacattgcacggtgtccgtgaa

SEQ ID NO: 4655057 - DNA, 25 bp, Homo sapien
cagaagatagggacattgcacggtg

SEQ ID NO: 4655058 - DNA, 25 bp, Homo sapien
aagatagggacattgcacggtgtcc

SEQ ID NO: 4655059 - DNA, 25 bp, Homo sapien
gcctcggtgttttccgctggtggac

SEQ ID NO: 4655060 - DNA, 25 bp, Homo sapien
cctcggtgttttccgctggtggaca

SEQ ID NO: 4655061 - DNA, 25 bp, Homo sapien
aggcaaaggctctggacaattggct

SEQ ID NO: 4655062 - DNA, 25 bp, Homo sapien
aaggctctggacaattggctctggg

SEQ ID NO: 4655063 - DNA, 25 bp, Homo sapien
tcctacatcttggtgagtaacagca

SEQ ID NO: 4655064 - DNA, 25 bp, Homo sapien
gactctgcatccctcctacatcttg

SEQ ID NO: 4655065 - DNA, 25 bp, Homo sapien
ctcctacatcttggtgagtaacagc

SEQ ID NO: 4655066 - DNA, 25 bp, Homo sapien
actctgcatccctcctacatcttgg

SEQ ID NO: 4655067 - DNA, 25 bp, Homo sapien
tggagaacagccactgtgctaaagc

SEQ ID NO: 4655068 - DNA, 25 bp, Homo sapien
agccactgtgctaaagcctgaccca

SEQ ID NO: 4655069 - DNA, 25 bp, Homo sapien
tccccttgattgatgtgaagatgga

SEQ ID NO: 4655070 - DNA, 25 bp, Homo sapien
tgtttttccccttgattgatgtgaa

SEQ ID NO: 4655071 - DNA, 25 bp, Homo sapien
ccgcatatctgcttctgacgctgct

SEQ ID NO: 4655072 - DNA, 25 bp, Homo sapien
gaggacattaacagcccactgctcc

SEQ ID NO: 4655073 - DNA, 25 bp, Homo sapien
caagtgaggacattaacagcccact

SEQ ID NO: 4655074 - DNA, 25 bp, Homo sapien
ctcccagaccaaggtagggccgcat

SEQ ID NO: 4655075 - DNA, 25 bp, Homo sapien
tattttgacaatgtgacattctgaa

SEQ ID NO: 4655076 - DNA, 25 bp, Homo sapien
gcatttgtagcattccgatggtgca

SEQ ID NO: 4655077 - DNA, 25 bp, Homo sapien
gcagccaaacgagctgtctagctta

SEQ ID NO: 4655078 - DNA, 25 bp, Homo sapien
tctagcttatgagcctgaaatatag

SEQ ID NO: 4655079 - DNA, 25 bp, Homo sapien
atccagtgggatcttatgaaacaaa

SEQ ID NO: 4655080 - DNA, 25 bp, Homo sapien
catccagtgggatcttatgaaacaa

SEQ ID NO: 4655081 - DNA, 25 bp, Homo sapien
cccatccagtgggatcttatgaaac

SEQ ID NO: 4655082 - DNA, 25 bp, Homo sapien
tacccatccagtgggatcttatgaa

SEQ ID NO: 4655083 - DNA, 25 bp, Homo sapien
ttctctgtcttttcctttatttcag

SEQ ID NO: 4655084 - DNA, 25 bp, Homo sapien
tttctctgtcttttcctttatttca

SEQ ID NO: 4655085 - DNA, 25 bp, Homo sapien
gataagcagcacttcccgggataag

SEQ ID NO: 4655086 - DNA, 25 bp, Homo sapien
tcacagctcacagtatatgcaggct

SEQ ID NO: 4655087 - DNA, 25 bp, Homo sapien
tgtccagtagggtcaaaaagcacac

SEQ ID NO: 4655088 - DNA, 25 bp, Homo sapien
tgaggtgctgcttagctgcctgaga

SEQ ID NO: 4655089 - DNA, 25 bp, Homo sapien
gaggaaaacttgagaactggcggca

SEQ ID NO: 4655090 - DNA, 25 bp, Homo sapien
gaaactgtcatttagccgcgaacaa

SEQ ID NO: 4655091 - DNA, 25 bp, Homo sapien
tagacagctagcaccaaaacaggcg

SEQ ID NO: 4655092 - DNA, 25 bp, Homo sapien
tgcaacgggaagacagaaggatacc

SEQ ID NO: 4655093 - DNA, 25 bp, Homo sapien
tgctgaccaccccttctgttgatta

SEQ ID NO: 4655094 - DNA, 25 bp, Homo sapien
gaccaccccttctgttgattatcca

SEQ ID NO: 4655095 - DNA, 25 bp, Homo sapien
ctgtgctgaccaccccttctgttga

SEQ ID NO: 4655096 - DNA, 25 bp, Homo sapien
atcctgtgatcacctgtgctgacca

SEQ ID NO: 4655097 - DNA, 25 bp, Homo sapien
caaagggtcatgcacagatgggcac

SEQ ID NO: 4655098 - DNA, 25 bp, Homo sapien
gatatgtaggtgaattcaagctccc

SEQ ID NO: 4655099 - DNA, 25 bp, Homo sapien
gatgtcttgcacagggccagatact

SEQ ID NO: 4655100 - DNA, 25 bp, Homo sapien
tgattgatgaatggcgacacctact

SEQ ID NO: 4655101 - DNA, 25 bp, Homo sapien
tcacgctgctgttacccatgcggct

SEQ ID NO: 4655102 - DNA, 25 bp, Homo sapien
ttacccatgcggctatcttcagcaa

SEQ ID NO: 4655103 - DNA, 25 bp, Homo sapien
gctgctgttacccatgcggctatct

SEQ ID NO: 4655104 - DNA, 25 bp, Homo sapien
cagcctcacgctgctgttacccatg

SEQ ID NO: 4655105 - DNA, 25 bp, Homo sapien
agtccttcatccgtacctctaataa

SEQ ID NO: 4655106 - DNA, 25 bp, Homo sapien
gtgctggcagactcctcacacgctg

SEQ ID NO: 4655107 - DNA, 25 bp, Homo sapien
acccaaagccctgtagtttcagagc

SEQ ID NO: 4655108 - DNA, 25 bp, Homo sapien
aacatcgtatttctgaaagtagagc

SEQ ID NO: 4655109 - DNA, 25 bp, Homo sapien
gctcagagatagacaaccgtaggaa

SEQ ID NO: 4655110 - DNA, 25 bp, Homo sapien
ataagatacaacagcatcaagcagg

SEQ ID NO: 4655111 - DNA, 25 bp, Homo sapien
ggtaggtactcaatagatgtctcaa

SEQ ID NO: 4655112 - DNA, 25 bp, Homo sapien
gaacattcattagtcgtgtctccca

SEQ ID NO: 4655113 - DNA, 25 bp, Homo sapien
tactttcccaaatccaaaccatgag

SEQ ID NO: 4655114 - DNA, 25 bp, Homo sapien
ctttcccaaatccaaaccatgagaa

SEQ ID NO: 4655115 - DNA, 25 bp, Homo sapien
actttcccaaatccaaaccatgaga

SEQ ID NO: 4655116 - DNA, 25 bp, Homo sapien
ttactttcccaaatccaaaccatga

SEQ ID NO: 4655117 - DNA, 25 bp, Homo sapien
gtgtctgaaatttgcccctagggag

SEQ ID NO: 4655118 - DNA, 25 bp, Homo sapien
gagcttcatgttctaactttgccaa

SEQ ID NO: 4655119 - DNA, 25 bp, Homo sapien
cttggaatccatggagctagcgaga

SEQ ID NO: 4655120 - DNA, 25 bp, Homo sapien
tcttggcaaagtgactatgatcagc

SEQ ID NO: 4655121 - DNA, 25 bp, Homo sapien
ccctcacacttaactattttagtga

SEQ ID NO: 4655122 - DNA, 25 bp, Homo sapien
ctcacacttaactattttagtgaga

SEQ ID NO: 4655123 - DNA, 25 bp, Homo sapien
tccctcacacttaactattttagtg

SEQ ID NO: 4655124 - DNA, 25 bp, Homo sapien
cctcacacttaactattttagtgag

SEQ ID NO: 4655125 - DNA, 25 bp, Homo sapien
ccaccttccgaagaagatggagtgt

SEQ ID NO: 4655126 - DNA, 25 bp, Homo sapien
tgagctgactgttggtgatgccaaa

SEQ ID NO: 4655127 - DNA, 25 bp, Homo sapien
tgggctggcagagtcatcatcattg

SEQ ID NO: 4655128 - DNA, 25 bp, Homo sapien
catcattgctgataacggaggctgg

SEQ ID NO: 4655129 - DNA, 25 bp, Homo sapien
gtcatccctatcaggggctctgata

SEQ ID NO: 4655130 - DNA, 25 bp, Homo sapien
ggctctgataaacactctggttgat

SEQ ID NO: 4655131 - DNA, 25 bp, Homo sapien
tctgataaacactctggttgataca

SEQ ID NO: 4655132 - DNA, 25 bp, Homo sapien
cctgttccccgccagtcatccctat

SEQ ID NO: 4655133 - DNA, 25 bp, Homo sapien
aattccataagcaacaaactaaagg

SEQ ID NO: 4655134 - DNA, 25 bp, Homo sapien
ccataagcaacaaactaaaggatct

SEQ ID NO: 4655135 - DNA, 25 bp, Homo sapien
ggagaattccataagcaacaaacta

SEQ ID NO: 4655136 - DNA, 25 bp, Homo sapien
ccggagaattccataagcaacaaac

SEQ ID NO: 4655137 - DNA, 25 bp, Homo sapien
aatgcatcataggcctggttcgggt

SEQ ID NO: 4655138 - DNA, 25 bp, Homo sapien
gtgtcaatgtcaaagtactctattc

SEQ ID NO: 4655139 - DNA, 25 bp, Homo sapien
gcctggttcgggtggtgactgaggt

SEQ ID NO: 4655140 - DNA, 25 bp, Homo sapien
ggtgtcaatgtcaaagtactctatt

SEQ ID NO: 4655141 - DNA, 25 bp, Homo sapien
tcaggcggtcttgggggaacctctg

SEQ ID NO: 4655142 - DNA, 25 bp, Homo sapien
caggcggtcttgggggaacctctgg

SEQ ID NO: 4655143 - DNA, 25 bp, Homo sapien
ttcctgcagtgacacaggagcctcc

SEQ ID NO: 4655144 - DNA, 25 bp, Homo sapien
cgtcaagatgttgtctggccagaat

SEQ ID NO: 4655145 - DNA, 25 bp, Homo sapien
tgcagataaccatagaactcttctc

SEQ ID NO: 4655146 - DNA, 25 bp, Homo sapien
tcctccatcaggcatggatttagcc

SEQ ID NO: 4655147 - DNA, 25 bp, Homo sapien
caagtcatgtgttaggtccgctccc

SEQ ID NO: 4655148 - DNA, 25 bp, Homo sapien
gatgtagtgcccattagccagcagg

SEQ ID NO: 4655149 - DNA, 25 bp, Homo sapien
taatagctggagaagtatggcacac

SEQ ID NO: 4655150 - DNA, 25 bp, Homo sapien
tctatagtgtttgctccgacgggag

SEQ ID NO: 4655151 - DNA, 25 bp, Homo sapien
caaagaacaccggatgcagttccca

SEQ ID NO: 4655152 - DNA, 25 bp, Homo sapien
tataaagacccgctgaaattgtgtt

SEQ ID NO: 4655153 - DNA, 25 bp, Homo sapien
acaggcctctggtctttcaggtttc

SEQ ID NO: 4655154 - DNA, 25 bp, Homo sapien
tatgtttcagggtctcgatctcgtg

SEQ ID NO: 4655155 - DNA, 25 bp, Homo sapien
ccctgcacgtccacatctacactgc

SEQ ID NO: 4655156 - DNA, 25 bp, Homo sapien
agaactgactcctgggataattctt

SEQ ID NO: 4655157 - DNA, 25 bp, Homo sapien
ttctgggcagtcagaactgactcct

SEQ ID NO: 4655158 - DNA, 25 bp, Homo sapien
gccctgcacgtccacatctacactg

SEQ ID NO: 4655159 - DNA, 25 bp, Homo sapien
caaggagttcaccaatgctccggcc

SEQ ID NO: 4655160 - DNA, 25 bp, Homo sapien
caatgctccggccaaagtgagtaat

SEQ ID NO: 4655161 - DNA, 25 bp, Homo sapien
ccaaagtgagtaatgagggacacat

SEQ ID NO: 4655162 - DNA, 25 bp, Homo sapien
gacacatgcacgaccaggcagagca

SEQ ID NO: 4655163 - DNA, 25 bp, Homo sapien
ttgacatttccttgaccacaactgt

SEQ ID NO: 4655164 - DNA, 25 bp, Homo sapien
tgacatttccttgaccacaactgta

SEQ ID NO: 4655165 - DNA, 25 bp, Homo sapien
gttgacatttccttgaccacaactg

SEQ ID NO: 4655166 - DNA, 25 bp, Homo sapien
catagagtagaagaattctcacctc

SEQ ID NO: 4655167 - DNA, 25 bp, Homo sapien
gaaacatagagtagaagaattctca

SEQ ID NO: 4655168 - DNA, 25 bp, Homo sapien
aacatagagtagaagaattctcacc

SEQ ID NO: 4655169 - DNA, 25 bp, Homo sapien
acatagagtagaagaattctcacct

SEQ ID NO: 4655170 - DNA, 25 bp, Homo sapien
tgaagtgaagggcaatgtaagtcct

SEQ ID NO: 4655171 - DNA, 25 bp, Homo sapien
gagatttttcaacggatttctggaa

SEQ ID NO: 4655172 - DNA, 25 bp, Homo sapien
tggatgagatttttcaacggatttc

SEQ ID NO: 4655173 - DNA, 25 bp, Homo sapien
ctaatggatgagatttttcaacgga

SEQ ID NO: 4655174 - DNA, 25 bp, Homo sapien
ttttgcctgtcaaaagtccgcagct

SEQ ID NO: 4655175 - DNA, 25 bp, Homo sapien
tcagcaagactcttgtgggaggtgc

SEQ ID NO: 4655176 - DNA, 25 bp, Homo sapien
cagtcagatctgtgacccctaatgg

SEQ ID NO: 4655177 - DNA, 25 bp, Homo sapien
cccctaatggtacagaggatgtcac

SEQ ID NO: 4655178 - DNA, 25 bp, Homo sapien
gaagccagtgagggcatagcactag

SEQ ID NO: 4655179 - DNA, 25 bp, Homo sapien
agattcatctggctggactaaaact

SEQ ID NO: 4655180 - DNA, 25 bp, Homo sapien
gagattcatctggctggactaaaac

SEQ ID NO: 4655181 - DNA, 25 bp, Homo sapien
tgtggtcctaaatgcagagcctgcc

SEQ ID NO: 4655182 - DNA, 25 bp, Homo sapien
taaagatcatcgagactggctccct

SEQ ID NO: 4655183 - DNA, 25 bp, Homo sapien
gataatggcctgtactgggagttcc

SEQ ID NO: 4655184 - DNA, 25 bp, Homo sapien
gctccctcgggtttgacagatcagt

SEQ ID NO: 4655185 - DNA, 25 bp, Homo sapien
cagaagctcattggctgcaaggtgg

SEQ ID NO: 4655186 - DNA, 25 bp, Homo sapien
tcagaagctcattggctgcaaggtg

SEQ ID NO: 4655187 - DNA, 25 bp, Homo sapien
agaagctcattggctgcaaggtgga

SEQ ID NO: 4655188 - DNA, 25 bp, Homo sapien
aagctcattggctgcaaggtggaaa

SEQ ID NO: 4655189 - DNA, 25 bp, Homo sapien
cacagtgaaccgaagaagctgggtg

SEQ ID NO: 4655190 - DNA, 25 bp, Homo sapien
cctctgtgcacagtgaaccgaagaa

SEQ ID NO: 4655191 - DNA, 25 bp, Homo sapien
gtctctcctctgtgcacagtgaacc

SEQ ID NO: 4655192 - DNA, 25 bp, Homo sapien
tgaaccgaagaagctgggtgtccat

SEQ ID NO: 4655193 - DNA, 25 bp, Homo sapien
tcgcctagctcccttttcagaacaa

SEQ ID NO: 4655194 - DNA, 25 bp, Homo sapien
ttatgtcgcttgatgtgctgaacaa

SEQ ID NO: 4655195 - DNA, 25 bp, Homo sapien
caggacagaggttatagcattcagc

SEQ ID NO: 4655196 - DNA, 25 bp, Homo sapien
gcattcagctaggaacacttttcca

SEQ ID NO: 4655197 - DNA, 25 bp, Homo sapien
ccatcttgtgacacctgcagagtct

SEQ ID NO: 4655198 - DNA, 25 bp, Homo sapien
ttacattcaaagagtccatcttgtg

SEQ ID NO: 4655199 - DNA, 25 bp, Homo sapien
gagtccatcttgtgacacctgcaga

SEQ ID NO: 4655200 - DNA, 25 bp, Homo sapien
caaagagtccatcttgtgacacctg

SEQ ID NO: 4655201 - DNA, 25 bp, Homo sapien
tttgaatacactttcaataggccta

SEQ ID NO: 4655202 - DNA, 25 bp, Homo sapien
cctttggatagtctttgaatacact

SEQ ID NO: 4655203 - DNA, 25 bp, Homo sapien
atacactttcaataggcctaaagcc

SEQ ID NO: 4655204 - DNA, 25 bp, Homo sapien
ctcctttggatagtctttgaataca

SEQ ID NO: 4655205 - DNA, 25 bp, Homo sapien
actgtctgctttgtagtttcatttc

SEQ ID NO: 4655206 - DNA, 25 bp, Homo sapien
aagatactcttaagggagagggctc

SEQ ID NO: 4655207 - DNA, 25 bp, Homo sapien
agatactcttaagggagagggctcc

SEQ ID NO: 4655208 - DNA, 25 bp, Homo sapien
tctcgaaacccatgcatccacgtta

SEQ ID NO: 4655209 - DNA, 25 bp, Homo sapien
tccacgttaggaactgtctgcagct

SEQ ID NO: 4655210 - DNA, 25 bp, Homo sapien
tcaatcccttgacactcctctcgaa

SEQ ID NO: 4655211 - DNA, 25 bp, Homo sapien
agctgccccgatgacaacaggccat

SEQ ID NO: 4655212 - DNA, 25 bp, Homo sapien
cacgcagacgccatagaacttgacg

SEQ ID NO: 4655213 - DNA, 25 bp, Homo sapien
aggttggtcaggagctcggcctcac

SEQ ID NO: 4655214 - DNA, 25 bp, Homo sapien
gtccttgcgtgcattgtcactggca

SEQ ID NO: 4655215 - DNA, 25 bp, Homo sapien
tcggcctcacggtggaagtccttgc

SEQ ID NO: 4655216 - DNA, 25 bp, Homo sapien
cctcctttctctggcatatgctggt

SEQ ID NO: 4655217 - DNA, 25 bp, Homo sapien
tcaaataagatgcttcgagaaaggt

SEQ ID NO: 4655218 - DNA, 25 bp, Homo sapien
aagatgcttcgagaaaggtccaggg

SEQ ID NO: 4655219 - DNA, 25 bp, Homo sapien
cattatcaaataagatgcttcgaga

SEQ ID NO: 4655220 - DNA, 25 bp, Homo sapien
tgtagatcctctgaactactggcct

SEQ ID NO: 4655221 - DNA, 25 bp, Homo sapien
taggataaagtccaagcacctgccc

SEQ ID NO: 4655222 - DNA, 25 bp, Homo sapien
cgcataatctggagtcttcaatcaa

SEQ ID NO: 4655223 - DNA, 25 bp, Homo sapien
caaaacttctcagttgaagctgtcc

SEQ ID NO: 4655224 - DNA, 25 bp, Homo sapien
tgcatcttatcaaactcagctctcc

SEQ ID NO: 4655225 - DNA, 25 bp, Homo sapien
ctcttaccgaggcagctggtttacc

SEQ ID NO: 4655226 - DNA, 25 bp, Homo sapien
gaccctaccagggtgatcaccaact

SEQ ID NO: 4655227 - DNA, 25 bp, Homo sapien
tccttgtgatttctcttaccgaggc

SEQ ID NO: 4655228 - DNA, 25 bp, Homo sapien
gagtttagcaggttctgaaaccaag

SEQ ID NO: 4655229 - DNA, 25 bp, Homo sapien
gcatggcaaacctcttgttcccaga

SEQ ID NO: 4655230 - DNA, 25 bp, Homo sapien
gagaactagacttttggcatggcaa

SEQ ID NO: 4655231 - DNA, 25 bp, Homo sapien
agagtttagcaggttctgaaaccaa

SEQ ID NO: 4655232 - DNA, 25 bp, Homo sapien
gccaaatcgcggtgcacgaagtgct

SEQ ID NO: 4655233 - DNA, 25 bp, Homo sapien
tgctgggacgccaggtagaccatgc

SEQ ID NO: 4655234 - DNA, 25 bp, Homo sapien
tctgcgactgcgtcagttccgtggg

SEQ ID NO: 4655235 - DNA, 25 bp, Homo sapien
aaagtccccgattttcaccagcaag

SEQ ID NO: 4655236 - DNA, 25 bp, Homo sapien
caagctaaaccgctttcaaccaaga

SEQ ID NO: 4655237 - DNA, 25 bp, Homo sapien
accaagatggcgcttggagggaact

SEQ ID NO: 4655238 - DNA, 25 bp, Homo sapien
gctttcaaccaagatggcgcttgga

SEQ ID NO: 4655239 - DNA, 25 bp, Homo sapien
taaaccgctttcaaccaagatggcg

SEQ ID NO: 4655240 - DNA, 25 bp, Homo sapien
gcttttcttcggagaatcatccatg

SEQ ID NO: 4655241 - DNA, 25 bp, Homo sapien
tgcccccatcaaggaagggagaact

SEQ ID NO: 4655242 - DNA, 25 bp, Homo sapien
gcaaagcttttcttcggagaatcat

SEQ ID NO: 4655243 - DNA, 25 bp, Homo sapien
cctgcccccatcaaggaagggagaa

SEQ ID NO: 4655244 - DNA, 25 bp, Homo sapien
cagctgatgggtgagagaccctgct

SEQ ID NO: 4655245 - DNA, 25 bp, Homo sapien
ggtgagagaccctgctctaggcaaa

SEQ ID NO: 4655246 - DNA, 25 bp, Homo sapien
tgatgggtgagagaccctgctctag

SEQ ID NO: 4655247 - DNA, 25 bp, Homo sapien
aataagtacagaggtgaagatgttg

SEQ ID NO: 4655248 - DNA, 25 bp, Homo sapien
aaggctggtgctgtcgtaaggctgt

SEQ ID NO: 4655249 - DNA, 25 bp, Homo sapien
gtcatgttctccacccccttatgag

SEQ ID NO: 4655250 - DNA, 25 bp, Homo sapien
atagctgggctccgccgtcaaagga

SEQ ID NO: 4655251 - DNA, 25 bp, Homo sapien
gggctccgccgtcaaaggagcccag

SEQ ID NO: 4655252 - DNA, 25 bp, Homo sapien
acacaaaggcgaggcatgagcctca

SEQ ID NO: 4655253 - DNA, 25 bp, Homo sapien
cttccgctgcagtatctctgtcatc

SEQ ID NO: 4655254 - DNA, 25 bp, Homo sapien
tccgctgcagtatctctgtcatcac

SEQ ID NO: 4655255 - DNA, 25 bp, Homo sapien
ctgcacacaaaggcgaggcatgagc

SEQ ID NO: 4655256 - DNA, 25 bp, Homo sapien
tccaaaacccaggaagatttctgtg

SEQ ID NO: 4655257 - DNA, 25 bp, Homo sapien
atttcaaactggagaacagcccatt

SEQ ID NO: 4655258 - DNA, 25 bp, Homo sapien
cactatttcaaactggagaacagcc

SEQ ID NO: 4655259 - DNA, 25 bp, Homo sapien
aaactggagaacagcccattctcca

SEQ ID NO: 4655260 - DNA, 25 bp, Homo sapien
aatcactatttcaaactggagaaca

SEQ ID NO: 4655261 - DNA, 25 bp, Homo sapien
cctgtgcaacttgacttgtgatgac

SEQ ID NO: 4655262 - DNA, 25 bp, Homo sapien
caatgtgatggcaaaagtgagaccc

SEQ ID NO: 4655263 - DNA, 25 bp, Homo sapien
aataacgtcacatccttaaggtcac

SEQ ID NO: 4655264 - DNA, 25 bp, Homo sapien
taaggtcacccaagtcattgcaagt

SEQ ID NO: 4655265 - DNA, 25 bp, Homo sapien
ataagccactcctggtagcctcagc

SEQ ID NO: 4655266 - DNA, 25 bp, Homo sapien
catttgatgtagtcagataagccac

SEQ ID NO: 4655267 - DNA, 25 bp, Homo sapien
aacctgcctgttgtgcagttgccca

SEQ ID NO: 4655268 - DNA, 25 bp, Homo sapien
aagtggcctggcatcgcctgccatc

SEQ ID NO: 4655269 - DNA, 25 bp, Homo sapien
catttttgacacaaagactctgtga

SEQ ID NO: 4655270 - DNA, 25 bp, Homo sapien
tttttcctctgatgtcatttttgac

SEQ ID NO: 4655271 - DNA, 25 bp, Homo sapien
ttcctctgatgtcatttttgacaca

SEQ ID NO: 4655272 - DNA, 25 bp, Homo sapien
atttttgacacaaagactctgtgac

SEQ ID NO: 4655273 - DNA, 25 bp, Homo sapien
gggcctggcactgagagacttcatc

SEQ ID NO: 4655274 - DNA, 25 bp, Homo sapien
cactggacagataaactcgcataga

SEQ ID NO: 4655275 - DNA, 25 bp, Homo sapien
gggatgcaccctgctaatgtgccac

SEQ ID NO: 4655276 - DNA, 25 bp, Homo sapien
cttccacggttgagaaccgaccagg

SEQ ID NO: 4655277 - DNA, 25 bp, Homo sapien
ttggagatggagagcttccacggtt

SEQ ID NO: 4655278 - DNA, 25 bp, Homo sapien
tagacactggctttacaaggactgt

SEQ ID NO: 4655279 - DNA, 25 bp, Homo sapien
gaatgtgaacaaagccccaggtgac

SEQ ID NO: 4655280 - DNA, 25 bp, Homo sapien
ccaggtgactctgcatacgggccgt

SEQ ID NO: 4655281 - DNA, 25 bp, Homo sapien
tacgggccgtactgcattgaaacag

SEQ ID NO: 4655282 - DNA, 25 bp, Homo sapien
caccaaaagtacgttcagtgggaga

SEQ ID NO: 4655283 - DNA, 25 bp, Homo sapien
ggataaaacagacgctcaaatggac

SEQ ID NO: 4655284 - DNA, 25 bp, Homo sapien
gagcgggcttggtgtttaacctcat

SEQ ID NO: 4655285 - DNA, 25 bp, Homo sapien
tcaaatggacttaatgagcgggctt

SEQ ID NO: 4655286 - DNA, 25 bp, Homo sapien
tgaggactctgagcatcttatgcat

SEQ ID NO: 4655287 - DNA, 25 bp, Homo sapien
ttgaggactctgagcatcttatgca

SEQ ID NO: 4655288 - DNA, 25 bp, Homo sapien
tggagccattggtcttttgatagaa

SEQ ID NO: 4655289 - DNA, 25 bp, Homo sapien
gaaaccaaataagggcttcaagaga

SEQ ID NO: 4655290 - DNA, 25 bp, Homo sapien
cttgtgtgtactgcaaaggaagcac

SEQ ID NO: 4655291 - DNA, 25 bp, Homo sapien
gctgggacctcattgtgcatttgag

SEQ ID NO: 4655292 - DNA, 25 bp, Homo sapien
aacttctgccccaattatggcacgg

SEQ ID NO: 4655293 - DNA, 25 bp, Homo sapien
atggcacgggccctataatggccca

SEQ ID NO: 4655294 - DNA, 25 bp, Homo sapien
gccagcgcagcatctcacagctgga

SEQ ID NO: 4655295 - DNA, 25 bp, Homo sapien
tataatggcccactaccttagatcc

SEQ ID NO: 4655296 - DNA, 25 bp, Homo sapien
ttcagaaattctggccttcaggtga

SEQ ID NO: 4655297 - DNA, 25 bp, Homo sapien
tattcagaaattctggccttcaggt

SEQ ID NO: 4655298 - DNA, 25 bp, Homo sapien
attcagaaattctggccttcaggtg

SEQ ID NO: 4655299 - DNA, 25 bp, Homo sapien
gaggacagctgtgaagtccccttcc

SEQ ID NO: 4655300 - DNA, 25 bp, Homo sapien
tgatgctccataataggatactagg

SEQ ID NO: 4655301 - DNA, 25 bp, Homo sapien
ttccccgcatacctctgatgctcca

SEQ ID NO: 4655302 - DNA, 25 bp, Homo sapien
aggacagctgtgaagtccccttccc

SEQ ID NO: 4655303 - DNA, 25 bp, Homo sapien
aaaccaccttccaagtaatgaggca

SEQ ID NO: 4655304 - DNA, 25 bp, Homo sapien
caggcaaaggtgtggctaaaaacca

SEQ ID NO: 4655305 - DNA, 25 bp, Homo sapien
gggaatagtgcctgactaccagtaa

SEQ ID NO: 4655306 - DNA, 25 bp, Homo sapien
catgaatggccattaggtcattaac

SEQ ID NO: 4655307 - DNA, 25 bp, Homo sapien
cagtagggggtaagcttgtgcttaa

SEQ ID NO: 4655308 - DNA, 25 bp, Homo sapien
ggcagtagggggtaagcttgtgctt

SEQ ID NO: 4655309 - DNA, 25 bp, Homo sapien
ttgcatttctatcacccagggcagt

SEQ ID NO: 4655310 - DNA, 25 bp, Homo sapien
atttctatcacccagggcagtaggg

SEQ ID NO: 4655311 - DNA, 25 bp, Homo sapien
ttataaagtaaaatgccgccaagag

SEQ ID NO: 4655312 - DNA, 25 bp, Homo sapien
gatgcaaacctcgagccttcatggg

SEQ ID NO: 4655313 - DNA, 25 bp, Homo sapien
gaagaggaacccaaactgagcatta

SEQ ID NO: 4655314 - DNA, 25 bp, Homo sapien
tctgcatccacgcatgtgagctcac

SEQ ID NO: 4655315 - DNA, 25 bp, Homo sapien
gctgaacacttgaacggtcacttca

SEQ ID NO: 4655316 - DNA, 25 bp, Homo sapien
gaagtatatatgctgatggctagtt

SEQ ID NO: 4655317 - DNA, 25 bp, Homo sapien
ttgtgaaaggcttttatccatttgc

SEQ ID NO: 4655318 - DNA, 25 bp, Homo sapien
ctgcaaccatcgaataacaagaagt

SEQ ID NO: 4655319 - DNA, 25 bp, Homo sapien
gccctacttgcagaatgaccatcct

SEQ ID NO: 4655320 - DNA, 25 bp, Homo sapien
tgagaccttcatggtcaagacatgg

SEQ ID NO: 4655321 - DNA, 25 bp, Homo sapien
gcacagagtccagccttctagtagg

SEQ ID NO: 4655322 - DNA, 25 bp, Homo sapien
aactcagcaggccacctactggagc

SEQ ID NO: 4655323 - DNA, 25 bp, Homo sapien
gggcacactgaaagccacgttggct

SEQ ID NO: 4655324 - DNA, 25 bp, Homo sapien
tgttgacacctaggccaagctgcca

SEQ ID NO: 4655325 - DNA, 25 bp, Homo sapien
tgtttcaccttagcacagctcaagg

SEQ ID NO: 4655326 - DNA, 25 bp, Homo sapien
tgctgagcagcggtataaacagttg

SEQ ID NO: 4655327 - DNA, 25 bp, Homo sapien
gaggaagaaagctgcccttatggta

SEQ ID NO: 4655328 - DNA, 25 bp, Homo sapien
aaggcggtcaccctttgactcctga

SEQ ID NO: 4655329 - DNA, 25 bp, Homo sapien
tcacatcactgctaaggcggtcacc

SEQ ID NO: 4655330 - DNA, 25 bp, Homo sapien
tgaggaagaaagctgcccttatggt

SEQ ID NO: 4655331 - DNA, 25 bp, Homo sapien
atagtactctccatatcatctgtga

SEQ ID NO: 4655332 - DNA, 25 bp, Homo sapien
aatagtactctccatatcatctgtg

SEQ ID NO: 4655333 - DNA, 25 bp, Homo sapien
tagtactctccatatcatctgtgat

SEQ ID NO: 4655334 - DNA, 25 bp, Homo sapien
aaatagtactctccatatcatctgt

SEQ ID NO: 4655335 - DNA, 25 bp, Homo sapien
gatagcaatcgcattagtacaggca

SEQ ID NO: 4655336 - DNA, 25 bp, Homo sapien
tgtgcatgatgctgattcaaacccc

SEQ ID NO: 4655337 - DNA, 25 bp, Homo sapien
tgctacacagtatgcctgacagctg

SEQ ID NO: 4655338 - DNA, 25 bp, Homo sapien
ccaggtttgtcagggatgcccgatt

SEQ ID NO: 4655339 - DNA, 25 bp, Homo sapien
tcctgtacatgatgctctctggagg

SEQ ID NO: 4655340 - DNA, 25 bp, Homo sapien
cgctttccgtcgtgaatttcctgta

SEQ ID NO: 4655341 - DNA, 25 bp, Homo sapien
aatttcctgtacatgatgctctctg

SEQ ID NO: 4655342 - DNA, 25 bp, Homo sapien
aggctccagacgtcgctttccgtcg

SEQ ID NO: 4655343 - DNA, 25 bp, Homo sapien
gaatggtcccaaacctcacactgga

SEQ ID NO: 4655344 - DNA, 25 bp, Homo sapien
tctgaaaaagatgtacggtgcctga

SEQ ID NO: 4655345 - DNA, 25 bp, Homo sapien
tatatccatttgtccaagccactct

SEQ ID NO: 4655346 - DNA, 25 bp, Homo sapien
tggagctcccacatgttgtggtttt

SEQ ID NO: 4655347 - DNA, 25 bp, Homo sapien
tcatgtggggctctcgctgccagca

SEQ ID NO: 4655348 - DNA, 25 bp, Homo sapien
caggtagaccggagatgccttggcc

SEQ ID NO: 4655349 - DNA, 25 bp, Homo sapien
ttctgaaggagggtatggatgccct

SEQ ID NO: 4655350 - DNA, 25 bp, Homo sapien
caggactcggccctgagtgatacac

SEQ ID NO: 4655351 - DNA, 25 bp, Homo sapien
tatgcgccatcttgtgtctcacgga

SEQ ID NO: 4655352 - DNA, 25 bp, Homo sapien
ttcctaagtagggactgacaccagc

SEQ ID NO: 4655353 - DNA, 25 bp, Homo sapien
gacaaaactggaatgggatgctccc

SEQ ID NO: 4655354 - DNA, 25 bp, Homo sapien
gaccccgaaatgagctctggacatg

SEQ ID NO: 4655355 - DNA, 25 bp, Homo sapien
gaacctttgacttgagcagcagtga

SEQ ID NO: 4655356 - DNA, 25 bp, Homo sapien
gatgtagtcctacccacgtggagta

SEQ ID NO: 4655357 - DNA, 25 bp, Homo sapien
tacaagctatcacaacctcagaggc

SEQ ID NO: 4655358 - DNA, 25 bp, Homo sapien
tggaagcactaacagcaacatgacg

SEQ ID NO: 4655359 - DNA, 25 bp, Homo sapien
gaagctgtaagaaagcagggagccc

SEQ ID NO: 4655360 - DNA, 25 bp, Homo sapien
gagagcacatctagcgattagcagc

SEQ ID NO: 4655361 - DNA, 25 bp, Homo sapien
tgggaaaacacaactctcgctgaag

SEQ ID NO: 4655362 - DNA, 25 bp, Homo sapien
ggtcttgcaatcaacccaggaatga

SEQ ID NO: 4655363 - DNA, 25 bp, Homo sapien
gagcttcgcaggaaatttatttcct

SEQ ID NO: 4655364 - DNA, 25 bp, Homo sapien
ggagcttcgcaggaaatttatttcc

SEQ ID NO: 4655365 - DNA, 25 bp, Homo sapien
agttccagctttttccacgatgagg

SEQ ID NO: 4655366 - DNA, 25 bp, Homo sapien
gattgaatgccttaagcactggacc

SEQ ID NO: 4655367 - DNA, 25 bp, Homo sapien
catgatcataggctgggtccaaggc

SEQ ID NO: 4655368 - DNA, 25 bp, Homo sapien
cagaattgatggctggagaactacc

SEQ ID NO: 4655369 - DNA, 25 bp, Homo sapien
tacccagtagaagccaaataatgca

SEQ ID NO: 4655370 - DNA, 25 bp, Homo sapien
ggcctcttgatcatgcagcaactcg

SEQ ID NO: 4655371 - DNA, 25 bp, Homo sapien
gataaaatcatcaacctcagtaggc

SEQ ID NO: 4655372 - DNA, 25 bp, Homo sapien
gagatcatgctttactcctgggtat

SEQ ID NO: 4655373 - DNA, 25 bp, Homo sapien
taatacattaacgtttccatagtaa

SEQ ID NO: 4655374 - DNA, 25 bp, Homo sapien
atacattaacgtttccatagtaaat

SEQ ID NO: 4655375 - DNA, 25 bp, Homo sapien
ttaatacattaacgtttccatagta

SEQ ID NO: 4655376 - DNA, 25 bp, Homo sapien
ttgatggtgaaacccagatttagca

SEQ ID NO: 4655377 - DNA, 25 bp, Homo sapien
gagagttttgaggacataaacttaa

SEQ ID NO: 4655378 - DNA, 25 bp, Homo sapien
gtccccagaagtctgaatgttttga

SEQ ID NO: 4655379 - DNA, 25 bp, Homo sapien
ggtcctagttttccagagatcaggg

SEQ ID NO: 4655380 - DNA, 25 bp, Homo sapien
ttccacgccaccttgtgctgctggg

SEQ ID NO: 4655381 - DNA, 25 bp, Homo sapien
attccacgccaccttgtgctgctgg

SEQ ID NO: 4655382 - DNA, 25 bp, Homo sapien
ttctgctctccattccacgccacct

SEQ ID NO: 4655383 - DNA, 25 bp, Homo sapien
gctctccattccacgccaccttgtg

SEQ ID NO: 4655384 - DNA, 25 bp, Homo sapien
gcacaggtagccacgtatgttcacc

SEQ ID NO: 4655385 - DNA, 25 bp, Homo sapien
taattacctgaaggacagctctaca

SEQ ID NO: 4655386 - DNA, 25 bp, Homo sapien
caagggcttaggtgatgtactggca

SEQ ID NO: 4655387 - DNA, 25 bp, Homo sapien
tcctgggcgtgcgtccttaaccttg

SEQ ID NO: 4655388 - DNA, 25 bp, Homo sapien
tttagcagatgcctcgaggtacttg

SEQ ID NO: 4655389 - DNA, 25 bp, Homo sapien
ggtctcaactaaatgcttttcaatc

SEQ ID NO: 4655390 - DNA, 25 bp, Homo sapien
atgcctcgaggtacttgacagcaca

SEQ ID NO: 4655391 - DNA, 25 bp, Homo sapien
ttatgaaccctggaaggtctcaact

SEQ ID NO: 4655392 - DNA, 25 bp, Homo sapien
caggtacctgctagaagcacacggt

SEQ ID NO: 4655393 - DNA, 25 bp, Homo sapien
cacggtataatgagaagttggccac

SEQ ID NO: 4655394 - DNA, 25 bp, Homo sapien
tatttcgagtttcaccagcagtctg

SEQ ID NO: 4655395 - DNA, 25 bp, Homo sapien
caaagagtgtttgattgaccacggt

SEQ ID NO: 4655396 - DNA, 25 bp, Homo sapien
cctgaattttctggatgtgccacac

SEQ ID NO: 4655397 - DNA, 25 bp, Homo sapien
tcccctgaaagaataggcggctgaa

SEQ ID NO: 4655398 - DNA, 25 bp, Homo sapien
cctatagctgagtttgggaaaagca

SEQ ID NO: 4655399 - DNA, 25 bp, Homo sapien
tttttcctgatgaagcggcctcact

SEQ ID NO: 4655400 - DNA, 25 bp, Homo sapien
caagcctgagtgtgtcggtccatgc

SEQ ID NO: 4655401 - DNA, 25 bp, Homo sapien
ggtccatgcgcaatggagacttcag

SEQ ID NO: 4655402 - DNA, 25 bp, Homo sapien
ttttcccaaacaggaactggccatg

SEQ ID NO: 4655403 - DNA, 25 bp, Homo sapien
catggccggccaaatgcagggaatt

SEQ ID NO: 4655404 - DNA, 25 bp, Homo sapien
gcttatttacaccaaacctgtacac

SEQ ID NO: 4655405 - DNA, 25 bp, Homo sapien
cttatttacaccaaacctgtacaca

SEQ ID NO: 4655406 - DNA, 25 bp, Homo sapien
tatttgcaaggtgtccggagcctgg

SEQ ID NO: 4655407 - DNA, 25 bp, Homo sapien
tatggaatggccagtcacaagactt

SEQ ID NO: 4655408 - DNA, 25 bp, Homo sapien
gaccacctgcgctatgctaaatgaa

SEQ ID NO: 4655409 - DNA, 25 bp, Homo sapien
ggtgtaggtaaacattccggtgagc

SEQ ID NO: 4655410 - DNA, 25 bp, Homo sapien
gtaatactggctgttcttgcttatt

SEQ ID NO: 4655411 - DNA, 25 bp, Homo sapien
taatactggctgttcttgcttattg

SEQ ID NO: 4655412 - DNA, 25 bp, Homo sapien
aatactggctgttcttgcttattga

SEQ ID NO: 4655413 - DNA, 25 bp, Homo sapien
agatctgagcaaacagcatccctgt

SEQ ID NO: 4655414 - DNA, 25 bp, Homo sapien
tgagatctgagcaaacagcatccct

SEQ ID NO: 4655415 - DNA, 25 bp, Homo sapien
catgagatctgagcaaacagcatcc

SEQ ID NO: 4655416 - DNA, 25 bp, Homo sapien
gagatctgagcaaacagcatccctg

SEQ ID NO: 4655417 - DNA, 25 bp, Homo sapien
actcaatgaaacattgtacaaaaag

SEQ ID NO: 4655418 - DNA, 25 bp, Homo sapien
ggaggactcaatgaaacattgtaca

SEQ ID NO: 4655419 - DNA, 25 bp, Homo sapien
tcaatgaaacattgtacaaaaagcc

SEQ ID NO: 4655420 - DNA, 25 bp, Homo sapien
ggactcaatgaaacattgtacaaaa

SEQ ID NO: 4655421 - DNA, 25 bp, Homo sapien
gcctgtacttgtccaaagacagcag

SEQ ID NO: 4655422 - DNA, 25 bp, Homo sapien
tgtacttgtccaaagacagcagctg

SEQ ID NO: 4655423 - DNA, 25 bp, Homo sapien
cttgtccaaagacagcagctgaggc

SEQ ID NO: 4655424 - DNA, 25 bp, Homo sapien
ctgtacttgtccaaagacagcagct

SEQ ID NO: 4655425 - DNA, 25 bp, Homo sapien
aggtgacacagccattggcaagttg

SEQ ID NO: 4655426 - DNA, 25 bp, Homo sapien
ggtgacacagccattggcaagttgc

SEQ ID NO: 4655427 - DNA, 25 bp, Homo sapien
gtcgtagcactattaatcttcttat

SEQ ID NO: 4655428 - DNA, 25 bp, Homo sapien
tgaagctggttgcaatcgcctgtta

SEQ ID NO: 4655429 - DNA, 25 bp, Homo sapien
gcctgttaaaatcatgatcccatta

SEQ ID NO: 4655430 - DNA, 25 bp, Homo sapien
tcatgatcccattagtcgtagcact

SEQ ID NO: 4655431 - DNA, 25 bp, Homo sapien
caatgcgatggttactgaagaggaa

SEQ ID NO: 4655432 - DNA, 25 bp, Homo sapien
cactccaggtagcaacagtgcttca

SEQ ID NO: 4655433 - DNA, 25 bp, Homo sapien
gaactaggccagcactccaggtagc

SEQ ID NO: 4655434 - DNA, 25 bp, Homo sapien
gaatctgaagttgcactaagtggag

SEQ ID NO: 4655435 - DNA, 25 bp, Homo sapien
tccgaagaccgttcttttgcttcca

SEQ ID NO: 4655436 - DNA, 25 bp, Homo sapien
agggctctacatccatccatggcag

SEQ ID NO: 4655437 - DNA, 25 bp, Homo sapien
tccatccatggcagcgcatgaatgt

SEQ ID NO: 4655438 - DNA, 25 bp, Homo sapien
ttacaagggctctacatccatccat

SEQ ID NO: 4655439 - DNA, 25 bp, Homo sapien
catggcagcgcatgaatgtaattag

SEQ ID NO: 4655440 - DNA, 25 bp, Homo sapien
gactcctttgccaggctaccgagga

SEQ ID NO: 4655441 - DNA, 25 bp, Homo sapien
tcttcaagagccacttgactccttt

SEQ ID NO: 4655442 - DNA, 25 bp, Homo sapien
gagccacttgactcctttgccaggc

SEQ ID NO: 4655443 - DNA, 25 bp, Homo sapien
ctcagagggttcttcaagagccact

SEQ ID NO: 4655444 - DNA, 25 bp, Homo sapien
cagtgaggaccctctgcttcctcat

SEQ ID NO: 4655445 - DNA, 25 bp, Homo sapien
ccagtgaggaccctctgcttcctca

SEQ ID NO: 4655446 - DNA, 25 bp, Homo sapien
gagaaaaacagaatgcaaccttgga

SEQ ID NO: 4655447 - DNA, 25 bp, Homo sapien
tttgtggtccaattgagatctctca

SEQ ID NO: 4655448 - DNA, 25 bp, Homo sapien
gtaatcacccttttccgttgatgaa

SEQ ID NO: 4655449 - DNA, 25 bp, Homo sapien
ggtgtgctccattcattgtcctgag

SEQ ID NO: 4655450 - DNA, 25 bp, Homo sapien
tttggggtgctcttcaatgagctgt

SEQ ID NO: 4655451 - DNA, 25 bp, Homo sapien
tcacatgggccttccactgaagcca

SEQ ID NO: 4655452 - DNA, 25 bp, Homo sapien
atgagatcacatgggccttccactg

SEQ ID NO: 4655453 - DNA, 25 bp, Homo sapien
atgagctgtatcctttaatgagatc

SEQ ID NO: 4655454 - DNA, 25 bp, Homo sapien
gacagactttctccagcagggagga

SEQ ID NO: 4655455 - DNA, 25 bp, Homo sapien
ttaaaggtgatcatagagaggactc

SEQ ID NO: 4655456 - DNA, 25 bp, Homo sapien
gacttacctgactcttgtgacgaag

SEQ ID NO: 4655457 - DNA, 25 bp, Homo sapien
cagttgcagtgctccctttggaggg

SEQ ID NO: 4655458 - DNA, 25 bp, Homo sapien
acagcactcatggtcaaggcaacag

SEQ ID NO: 4655459 - DNA, 25 bp, Homo sapien
gtcagccaaatccttgacttgcagt

SEQ ID NO: 4655460 - DNA, 25 bp, Homo sapien
aaggcaacagtcctatacaagtcag

SEQ ID NO: 4655461 - DNA, 25 bp, Homo sapien
gtcctatacaagtcagccaaatcct

SEQ ID NO: 4655462 - DNA, 25 bp, Homo sapien
tgagagaagagtaggggtgaggtgg

SEQ ID NO: 4655463 - DNA, 25 bp, Homo sapien
agagaagagtaggggtgaggtggtg

SEQ ID NO: 4655464 - DNA, 25 bp, Homo sapien
ctgagagaagagtaggggtgaggtg

SEQ ID NO: 4655465 - DNA, 25 bp, Homo sapien
agaagagtaggggtgaggtggtggg

SEQ ID NO: 4655466 - DNA, 25 bp, Homo sapien
tcttctgttctgcacggttggcttg

SEQ ID NO: 4655467 - DNA, 25 bp, Homo sapien
catcatgtataggaccagcaatgtc

SEQ ID NO: 4655468 - DNA, 25 bp, Homo sapien
tcatgtataggaccagcaatgtcaa

SEQ ID NO: 4655469 - DNA, 25 bp, Homo sapien
tggcttgttgtgtgcacaaggccct

SEQ ID NO: 4655470 - DNA, 25 bp, Homo sapien
ctgtctgggtgtcctgatgtcaggt

SEQ ID NO: 4655471 - DNA, 25 bp, Homo sapien
ttaacaacgtaacagctgagaacat

SEQ ID NO: 4655472 - DNA, 25 bp, Homo sapien
cagcagatgagagttctgctctgtc

SEQ ID NO: 4655473 - DNA, 25 bp, Homo sapien
cagctgagaacatggttgattggag

SEQ ID NO: 4655474 - DNA, 25 bp, Homo sapien
tgggcccaagtgtggagtccttgcc

SEQ ID NO: 4655475 - DNA, 25 bp, Homo sapien
ctgggcccaagtgtggagtccttgc

SEQ ID NO: 4655476 - DNA, 25 bp, Homo sapien
gggcccaagtgtggagtccttgcct

SEQ ID NO: 4655477 - DNA, 25 bp, Homo sapien
ctccgtacatcacctgggtacccac

SEQ ID NO: 4655478 - DNA, 25 bp, Homo sapien
agggcttcttcgttcagtcgtagaa

SEQ ID NO: 4655479 - DNA, 25 bp, Homo sapien
cagggcttcttcgttcagtcgtaga

SEQ ID NO: 4655480 - DNA, 25 bp, Homo sapien
ttcagggcttcttcgttcagtcgta

SEQ ID NO: 4655481 - DNA, 25 bp, Homo sapien
tcagggcttcttcgttcagtcgtag

SEQ ID NO: 4655482 - DNA, 25 bp, Homo sapien
tggctctgctctctacgctcatctc

SEQ ID NO: 4655483 - DNA, 25 bp, Homo sapien
gctctctacgctcatctcattcctg

SEQ ID NO: 4655484 - DNA, 25 bp, Homo sapien
aaaaccctggctctgctctctacgc

SEQ ID NO: 4655485 - DNA, 25 bp, Homo sapien
aaaccctggctctgctctctacgct

SEQ ID NO: 4655486 - DNA, 25 bp, Homo sapien
ggccgcacatgcagaagctctagtt

SEQ ID NO: 4655487 - DNA, 25 bp, Homo sapien
tagcctgttaccctcatgtgccggg

SEQ ID NO: 4655488 - DNA, 25 bp, Homo sapien
cagacccagccagcgtatatgaagt

SEQ ID NO: 4655489 - DNA, 25 bp, Homo sapien
aattctaggaattcaaacgcagacc

SEQ ID NO: 4655490 - DNA, 25 bp, Homo sapien
gaatatttcttatggggttgacagc

SEQ ID NO: 4655491 - DNA, 25 bp, Homo sapien
ttgacagctgatgcaggaagaggtg

SEQ ID NO: 4655492 - DNA, 25 bp, Homo sapien
gggttgacagctgatgcaggaagag

SEQ ID NO: 4655493 - DNA, 25 bp, Homo sapien
tgggaatatttcttatggggttgac

SEQ ID NO: 4655494 - DNA, 25 bp, Homo sapien
gtgtgtgtattgctcctctctgact

SEQ ID NO: 4655495 - DNA, 25 bp, Homo sapien
tcccggagtccaaattacttgtagc

SEQ ID NO: 4655496 - DNA, 25 bp, Homo sapien
aattacttgtagctgatcctccagg

SEQ ID NO: 4655497 - DNA, 25 bp, Homo sapien
tgcagtgtaaaccaagatttgaagc

SEQ ID NO: 4655498 - DNA, 25 bp, Homo sapien
tggtgcagtgtaaaccaagatttga

SEQ ID NO: 4655499 - DNA, 25 bp, Homo sapien
gtctgaagatagatcaggagtgctt

SEQ ID NO: 4655500 - DNA, 25 bp, Homo sapien
gcttggccacttgtaccacagctgt

SEQ ID NO: 4655501 - DNA, 25 bp, Homo sapien
agggcactggtgctctagcttgccc

SEQ ID NO: 4655502 - DNA, 25 bp, Homo sapien
ggcactggtgctctagcttgccctt

SEQ ID NO: 4655503 - DNA, 25 bp, Homo sapien
tgagaggtgttgtgcgtttccagct

SEQ ID NO: 4655504 - DNA, 25 bp, Homo sapien
gtgttgtgcgtttccagcttcgtca

SEQ ID NO: 4655505 - DNA, 25 bp, Homo sapien
cagcttcgtcatagagccagctggg

SEQ ID NO: 4655506 - DNA, 25 bp, Homo sapien
gctggggtacgcacgttcccttgaa

SEQ ID NO: 4655507 - DNA, 25 bp, Homo sapien
cctaagatgtatgtttggttgagat

SEQ ID NO: 4655508 - DNA, 25 bp, Homo sapien
tggttgagatggaagtttaagaatc

SEQ ID NO: 4655509 - DNA, 25 bp, Homo sapien
tagtaactggtagatgactcataac

SEQ ID NO: 4655510 - DNA, 25 bp, Homo sapien
aatcgatccttaaagatgatggttc

SEQ ID NO: 4655511 - DNA, 25 bp, Homo sapien
tacatgctccaatatatagccccag

SEQ ID NO: 4655512 - DNA, 25 bp, Homo sapien
tcagctgtcatgctacagaggccac

SEQ ID NO: 4655513 - DNA, 25 bp, Homo sapien
taaggatgcccttaaggaggaagcc

SEQ ID NO: 4655514 - DNA, 25 bp, Homo sapien
aaggtcagatgatcacaggccagcc

SEQ ID NO: 4655515 - DNA, 25 bp, Homo sapien
gtgggtgatactctgtaaatactgt

SEQ ID NO: 4655516 - DNA, 25 bp, Homo sapien
tgatactctgtaaatactgtccccc

SEQ ID NO: 4655517 - DNA, 25 bp, Homo sapien
ggtgatactctgtaaatactgtccc

SEQ ID NO: 4655518 - DNA, 25 bp, Homo sapien
gggtgatactctgtaaatactgtcc

SEQ ID NO: 4655519 - DNA, 25 bp, Homo sapien
ctgcaaaacatctgtaagatgatga

SEQ ID NO: 4655520 - DNA, 25 bp, Homo sapien
ctggcacaaggttggtgctctgcaa

SEQ ID NO: 4655521 - DNA, 25 bp, Homo sapien
gcacaaggttggtgctctgcaaaac

SEQ ID NO: 4655522 - DNA, 25 bp, Homo sapien
caaaacatctgtaagatgatgaaat

SEQ ID NO: 4655523 - DNA, 25 bp, Homo sapien
ctgttgaatagctgacgacaaaggc

SEQ ID NO: 4655524 - DNA, 25 bp, Homo sapien
gatctgttgaatagctgacgacaaa

SEQ ID NO: 4655525 - DNA, 25 bp, Homo sapien
taagatctgttgaatagctgacgac

SEQ ID NO: 4655526 - DNA, 25 bp, Homo sapien
ctagtataagatctgttgaatagct

SEQ ID NO: 4655527 - DNA, 25 bp, Homo sapien
ttctgcatcatttagctttgttggg

SEQ ID NO: 4655528 - DNA, 25 bp, Homo sapien
ctgtttgtgaatgatggcttctgca

SEQ ID NO: 4655529 - DNA, 25 bp, Homo sapien
gcatcatttagctttgttggggaga

SEQ ID NO: 4655530 - DNA, 25 bp, Homo sapien
tttgtgaatgatggcttctgcatca

SEQ ID NO: 4655531 - DNA, 25 bp, Homo sapien
tcatggataagcgtaggtgtctgcc

SEQ ID NO: 4655532 - DNA, 25 bp, Homo sapien
gggctgcaggccgaaacgcccaaac

SEQ ID NO: 4655533 - DNA, 25 bp, Homo sapien
catggataagcgtaggtgtctgcct

SEQ ID NO: 4655534 - DNA, 25 bp, Homo sapien
cgcccaaactgctgccagaagacat

SEQ ID NO: 4655535 - DNA, 25 bp, Homo sapien
ccagccaccccggatgtggatgtgt

SEQ ID NO: 4655536 - DNA, 25 bp, Homo sapien
agccaccccggatgtggatgtgtga

SEQ ID NO: 4655537 - DNA, 25 bp, Homo sapien
tattcccagccaccccggatgtgga

SEQ ID NO: 4655538 - DNA, 25 bp, Homo sapien
caccccggatgtggatgtgtgagaa

SEQ ID NO: 4655539 - DNA, 25 bp, Homo sapien
tctccttcttggatttgtttcttgt

SEQ ID NO: 4655540 - DNA, 25 bp, Homo sapien
ctacatctctccttcttggatttgt

SEQ ID NO: 4655541 - DNA, 25 bp, Homo sapien
tctctccttcttggatttgtttctt

SEQ ID NO: 4655542 - DNA, 25 bp, Homo sapien
catctctccttcttggatttgtttc

SEQ ID NO: 4655543 - DNA, 25 bp, Homo sapien
aatctgtcgaagattcttctagggc

SEQ ID NO: 4655544 - DNA, 25 bp, Homo sapien
tcttcaagataaccttgacaagaga

SEQ ID NO: 4655545 - DNA, 25 bp, Homo sapien
aatgttctgataatctgtcgaagat

SEQ ID NO: 4655546 - DNA, 25 bp, Homo sapien
taaccttgacaagagatgaattctt

SEQ ID NO: 4655547 - DNA, 25 bp, Homo sapien
ttctttttgtggtcttccctccaga

SEQ ID NO: 4655548 - DNA, 25 bp, Homo sapien
tctttttgtggtcttccctccagat

SEQ ID NO: 4655549 - DNA, 25 bp, Homo sapien
tgtggtcttccctccagatcatcct

SEQ ID NO: 4655550 - DNA, 25 bp, Homo sapien
ttttgtggtcttccctccagatcat

SEQ ID NO: 4655551 - DNA, 25 bp, Homo sapien
attacagcagaaagtactaatgcca

SEQ ID NO: 4655552 - DNA, 25 bp, Homo sapien
caattacagcagaaagtactaatgc

SEQ ID NO: 4655553 - DNA, 25 bp, Homo sapien
aattacagcagaaagtactaatgcc

SEQ ID NO: 4655554 - DNA, 25 bp, Homo sapien
tacctgaaactcttggcttgtcgga

SEQ ID NO: 4655555 - DNA, 25 bp, Homo sapien
tggcttgtcggatctgcacttcttg

SEQ ID NO: 4655556 - DNA, 25 bp, Homo sapien
gcttgtcggatctgcacttcttgtt

SEQ ID NO: 4655557 - DNA, 25 bp, Homo sapien
aactcttggcttgtcggatctgcac

SEQ ID NO: 4655558 - DNA, 25 bp, Homo sapien
tgccatgtcacgtcgggtgctgcca

SEQ ID NO: 4655559 - DNA, 25 bp, Homo sapien
tctcgtattttcttccctgttgtag

SEQ ID NO: 4655560 - DNA, 25 bp, Homo sapien
tgcttttgccatgtcacgtcgggtg

SEQ ID NO: 4655561 - DNA, 25 bp, Homo sapien
ttggcgggcaaacagtccatagctc

SEQ ID NO: 4655562 - DNA, 25 bp, Homo sapien
tatcccttccagtaatagggagaca

SEQ ID NO: 4655563 - DNA, 25 bp, Homo sapien
tcccttccagtaatagggagacaaa

SEQ ID NO: 4655564 - DNA, 25 bp, Homo sapien
ttatcccttccagtaatagggagac

SEQ ID NO: 4655565 - DNA, 25 bp, Homo sapien
atcccttccagtaatagggagacaa

SEQ ID NO: 4655566 - DNA, 25 bp, Homo sapien
gaataaggtagggaggcagctcttc

SEQ ID NO: 4655567 - DNA, 25 bp, Homo sapien
ccttgtttctgagttgttactgatt

SEQ ID NO: 4655568 - DNA, 25 bp, Homo sapien
cttcaaaaggcgagtcaattttcca

SEQ ID NO: 4655569 - DNA, 25 bp, Homo sapien
gaagttagaaagacccaaggctata

SEQ ID NO: 4655570 - DNA, 25 bp, Homo sapien
gagctgccatcttgtcgagttcttc

SEQ ID NO: 4655571 - DNA, 25 bp, Homo sapien
gctgccatcttgtcgagttcttcag

SEQ ID NO: 4655572 - DNA, 25 bp, Homo sapien
gcgctggactcccatgggggtgaca

SEQ ID NO: 4655573 - DNA, 25 bp, Homo sapien
caggaggcgctggactcccatgggg

SEQ ID NO: 4655574 - DNA, 25 bp, Homo sapien
agaccgtctcctgggccagggggag

SEQ ID NO: 4655575 - DNA, 25 bp, Homo sapien
gtctcctgggccagggggagaggag

SEQ ID NO: 4655576 - DNA, 25 bp, Homo sapien
accgtctcctgggccagggggagag

SEQ ID NO: 4655577 - DNA, 25 bp, Homo sapien
cctgggccagggggagaggaggcat

SEQ ID NO: 4655578 - DNA, 25 bp, Homo sapien
accacccagggtatccatagggtcg

SEQ ID NO: 4655579 - DNA, 25 bp, Homo sapien
ccaccacagcaatgcatgcccagac

SEQ ID NO: 4655580 - DNA, 25 bp, Homo sapien
cacctaggtcccgatgggaagaact

SEQ ID NO: 4655581 - DNA, 25 bp, Homo sapien
gatcagtcactcgaggaagttcagg

SEQ ID NO: 4655582 - DNA, 25 bp, Homo sapien
ccttggatcagtcactcgaggaagt

SEQ ID NO: 4655583 - DNA, 25 bp, Homo sapien
gctcttttcagttcacctaggtccc

SEQ ID NO: 4655584 - DNA, 25 bp, Homo sapien
tcagatttcttagtcaggcagctct

SEQ ID NO: 4655585 - DNA, 25 bp, Homo sapien
ctcagatttcttagtcaggcagctc

SEQ ID NO: 4655586 - DNA, 25 bp, Homo sapien
cagatttcttagtcaggcagctctg

SEQ ID NO: 4655587 - DNA, 25 bp, Homo sapien
tctcagatttcttagtcaggcagct

SEQ ID NO: 4655588 - DNA, 25 bp, Homo sapien
aagatgaacttaagtcaccatcgtc

SEQ ID NO: 4655589 - DNA, 25 bp, Homo sapien
ggaaccaccatgtcctgatttcatg

SEQ ID NO: 4655590 - DNA, 25 bp, Homo sapien
gctgtgcgttctgtactcctttgga

SEQ ID NO: 4655591 - DNA, 25 bp, Homo sapien
catttgaaagatgaacttaagtcac

SEQ ID NO: 4655592 - DNA, 25 bp, Homo sapien
gagaggctcgctcgctgatcaacat

SEQ ID NO: 4655593 - DNA, 25 bp, Homo sapien
gaggctcgctcgctgatcaacattt

SEQ ID NO: 4655594 - DNA, 25 bp, Homo sapien
ggctcgctcgctgatcaacattttg

SEQ ID NO: 4655595 - DNA, 25 bp, Homo sapien
tcgctcgctgatcaacattttgaac

SEQ ID NO: 4655596 - DNA, 25 bp, Homo sapien
gaggtcccatcatgcattctcggtg

SEQ ID NO: 4655597 - DNA, 25 bp, Homo sapien
ctctggtcaaggtcccggtagtagg

SEQ ID NO: 4655598 - DNA, 25 bp, Homo sapien
tgtaaagtctctggtcaaggtcccg

SEQ ID NO: 4655599 - DNA, 25 bp, Homo sapien
tctcggtgtagttcaggcacagcag

SEQ ID NO: 4655600 - DNA, 25 bp, Homo sapien
cttctgagcccctatgggctgtggg

SEQ ID NO: 4655601 - DNA, 25 bp, Homo sapien
acttctgagcccctatgggctgtgg

SEQ ID NO: 4655602 - DNA, 25 bp, Homo sapien
tggacccaagccctcccatcatgac

SEQ ID NO: 4655603 - DNA, 25 bp, Homo sapien
cctgtagtggaatagctagatcaca

SEQ ID NO: 4655604 - DNA, 25 bp, Homo sapien
tcattcacattgtaagctgtatcag

SEQ ID NO: 4655605 - DNA, 25 bp, Homo sapien
gtttttcattgtgcaggtatatcgc

SEQ ID NO: 4655606 - DNA, 25 bp, Homo sapien
tattacagataaaggtgctatggtc

SEQ ID NO: 4655607 - DNA, 25 bp, Homo sapien
tgtcaactccctggcatttttgtct

SEQ ID NO: 4655608 - DNA, 25 bp, Homo sapien
gctcaccaacccttgtccatcattg

SEQ ID NO: 4655609 - DNA, 25 bp, Homo sapien
atgcagcatcgctcaccaacccttg

SEQ ID NO: 4655610 - DNA, 25 bp, Homo sapien
gcttgtgggttgctcctgaagtgtc

SEQ ID NO: 4655611 - DNA, 25 bp, Homo sapien
ggcaccttgtcctgaatactgccct

SEQ ID NO: 4655612 - DNA, 25 bp, Homo sapien
tgggaagttccccatgtgtccggta

SEQ ID NO: 4655613 - DNA, 25 bp, Homo sapien
ggcactgcatggcaccttgtcctga

SEQ ID NO: 4655614 - DNA, 25 bp, Homo sapien
acactgagagtcagatagagccaga

SEQ ID NO: 4655615 - DNA, 25 bp, Homo sapien
taggccagcacagccagtggtgttc

SEQ ID NO: 4655616 - DNA, 25 bp, Homo sapien
ggccagcacagccagtggtgttcac

SEQ ID NO: 4655617 - DNA, 25 bp, Homo sapien
ctaggccagcacagccagtggtgtt

SEQ ID NO: 4655618 - DNA, 25 bp, Homo sapien
aggccagcacagccagtggtgttca

SEQ ID NO: 4655619 - DNA, 25 bp, Homo sapien
ctctgattgcacaggcaaggttcct

SEQ ID NO: 4655620 - DNA, 25 bp, Homo sapien
cacaggcaaggttcctattttgttc

SEQ ID NO: 4655621 - DNA, 25 bp, Homo sapien
gattgcacaggcaaggttcctattt

SEQ ID NO: 4655622 - DNA, 25 bp, Homo sapien
tgcacaggcaaggttcctattttgt

SEQ ID NO: 4655623 - DNA, 25 bp, Homo sapien
ggaggaggccactctttggtctctg

SEQ ID NO: 4655624 - DNA, 25 bp, Homo sapien
tctccctctggaggaggccactctt

SEQ ID NO: 4655625 - DNA, 25 bp, Homo sapien
tcctctccctctggaggaggccact

SEQ ID NO: 4655626 - DNA, 25 bp, Homo sapien
atctgcccagctcattcctctccct

SEQ ID NO: 4655627 - DNA, 25 bp, Homo sapien
gctgccaggagtacgccactggtgg

SEQ ID NO: 4655628 - DNA, 25 bp, Homo sapien
cagctgccaggagtacgccactggt

SEQ ID NO: 4655629 - DNA, 25 bp, Homo sapien
gggctgacagtttgatgggtttaat

SEQ ID NO: 4655630 - DNA, 25 bp, Homo sapien
ggggctgacagtttgatgggtttaa

SEQ ID NO: 4655631 - DNA, 25 bp, Homo sapien
ctctgtcacatctattatgttcttg

SEQ ID NO: 4655632 - DNA, 25 bp, Homo sapien
tatgttcttgtgaggttctttccct

SEQ ID NO: 4655633 - DNA, 25 bp, Homo sapien
ccacagtcacgtctgtgtgttttgt

SEQ ID NO: 4655634 - DNA, 25 bp, Homo sapien
aaatccctcagatccgacttgctgt

SEQ ID NO: 4655635 - DNA, 25 bp, Homo sapien
ggaaggtgcccctgaacctgagtag

SEQ ID NO: 4655636 - DNA, 25 bp, Homo sapien
aggtgcccctgaacctgagtaggtg

SEQ ID NO: 4655637 - DNA, 25 bp, Homo sapien
tgcccctgaacctgagtaggtggct

SEQ ID NO: 4655638 - DNA, 25 bp, Homo sapien
cccctgaacctgagtaggtggctgc

SEQ ID NO: 4655639 - DNA, 25 bp, Homo sapien
tctgcaatgggtgttcgggaaataa

SEQ ID NO: 4655640 - DNA, 25 bp, Homo sapien
tggcactaggaatacgaagcaagag

SEQ ID NO: 4655641 - DNA, 25 bp, Homo sapien
gcaagagtgaaacgcagcttctgct

SEQ ID NO: 4655642 - DNA, 25 bp, Homo sapien
ggaactgtttctatgctcggcacca

SEQ ID NO: 4655643 - DNA, 25 bp, Homo sapien
ggagcaccataggcccaagctcttc

SEQ ID NO: 4655644 - DNA, 25 bp, Homo sapien
ggcagcttccaagcggccagggaat

SEQ ID NO: 4655645 - DNA, 25 bp, Homo sapien
actttgaattgtgggatccctccat

SEQ ID NO: 4655646 - DNA, 25 bp, Homo sapien
ttagccaatccccacgctagggcag

SEQ ID NO: 4655647 - DNA, 25 bp, Homo sapien
ttctgtgcttaggatatcgaaagcg

SEQ ID NO: 4655648 - DNA, 25 bp, Homo sapien
tcgaaagcgaagtgggattaattct

SEQ ID NO: 4655649 - DNA, 25 bp, Homo sapien
cagctttgcaacacttgatcctctt

SEQ ID NO: 4655650 - DNA, 25 bp, Homo sapien
taaacaacatcccactactaagcag

SEQ ID NO: 4655651 - DNA, 25 bp, Homo sapien
gtctcccttgttggccgtgtgtcta

SEQ ID NO: 4655652 - DNA, 25 bp, Homo sapien
gtctcaaactgcatgggttgccagg

SEQ ID NO: 4655653 - DNA, 25 bp, Homo sapien
tgctggagaacgtctcccttgttgg

SEQ ID NO: 4655654 - DNA, 25 bp, Homo sapien
gtctgggcccagtctcaaactgcat

SEQ ID NO: 4655655 - DNA, 25 bp, Homo sapien
cagataagcgctggagggaaaccca

SEQ ID NO: 4655656 - DNA, 25 bp, Homo sapien
tgcttagaatgtgtttggcgtgtga

SEQ ID NO: 4655657 - DNA, 25 bp, Homo sapien
ggtccttaggaaatccatcctcctg

SEQ ID NO: 4655658 - DNA, 25 bp, Homo sapien
ccccagcaggcttgcattcagtgca

SEQ ID NO: 4655659 - DNA, 25 bp, Homo sapien
gggagcagcatcagggcagcagatg

SEQ ID NO: 4655660 - DNA, 25 bp, Homo sapien
ctgggagcagcatcagggcagcaga

SEQ ID NO: 4655661 - DNA, 25 bp, Homo sapien
agcagcatcagggcagcagatgtga

SEQ ID NO: 4655662 - DNA, 25 bp, Homo sapien
cagcatcagggcagcagatgtgaca

SEQ ID NO: 4655663 - DNA, 25 bp, Homo sapien
tggagtcgcatagagctctccctct

SEQ ID NO: 4655664 - DNA, 25 bp, Homo sapien
gagtcgcatagagctctccctctca

SEQ ID NO: 4655665 - DNA, 25 bp, Homo sapien
gtcgcatagagctctccctctcacg

SEQ ID NO: 4655666 - DNA, 25 bp, Homo sapien
ctggagtcgcatagagctctccctc

SEQ ID NO: 4655667 - DNA, 25 bp, Homo sapien
gactgaccacgagatctgtggctct

SEQ ID NO: 4655668 - DNA, 25 bp, Homo sapien
tagcgactgaccacgagatctgtgg

SEQ ID NO: 4655669 - DNA, 25 bp, Homo sapien
taggtagcgactgaccacgagatct

SEQ ID NO: 4655670 - DNA, 25 bp, Homo sapien
tgcttaggtagcgactgaccacgag

SEQ ID NO: 4655671 - DNA, 25 bp, Homo sapien
ccagggtgcttcagcaaacgagagg

SEQ ID NO: 4655672 - DNA, 25 bp, Homo sapien
tgcccagggtgcttcagcaaacgag

SEQ ID NO: 4655673 - DNA, 25 bp, Homo sapien
acctgcccagggtgcttcagcaaac

SEQ ID NO: 4655674 - DNA, 25 bp, Homo sapien
gggacctgcccagggtgcttcagca

SEQ ID NO: 4655675 - DNA, 25 bp, Homo sapien
cagtttctagaacagcgatgctgac

SEQ ID NO: 4655676 - DNA, 25 bp, Homo sapien
tgggtgcagcatctatccatgtatg

SEQ ID NO: 4655677 - DNA, 25 bp, Homo sapien
ttgtgcggcccactcatcatgctag

SEQ ID NO: 4655678 - DNA, 25 bp, Homo sapien
tgatgtcagaatagaccttcctcct

SEQ ID NO: 4655679 - DNA, 25 bp, Homo sapien
tgtcagggtcgcagtcctgacccac

SEQ ID NO: 4655680 - DNA, 25 bp, Homo sapien
gaaggagcccatttcagtctgaagc

SEQ ID NO: 4655681 - DNA, 25 bp, Homo sapien
ctgacatcctggcacatctgtagaa

SEQ ID NO: 4655682 - DNA, 25 bp, Homo sapien
gacatcctggcacatctgtagaact

SEQ ID NO: 4655683 - DNA, 25 bp, Homo sapien
tggacgatggattcagtccatcggg

SEQ ID NO: 4655684 - DNA, 25 bp, Homo sapien
gacgatggattcagtccatcgggtg

SEQ ID NO: 4655685 - DNA, 25 bp, Homo sapien
ttggacgatggattcagtccatcgg

SEQ ID NO: 4655686 - DNA, 25 bp, Homo sapien
cttggacgatggattcagtccatcg

SEQ ID NO: 4655687 - DNA, 25 bp, Homo sapien
gtgacaacgtttggccagtgtctct

SEQ ID NO: 4655688 - DNA, 25 bp, Homo sapien
atggcagtcaccttctatggaaaaa

SEQ ID NO: 4655689 - DNA, 25 bp, Homo sapien
tttgcaccagtgacaacgtttggcc

SEQ ID NO: 4655690 - DNA, 25 bp, Homo sapien
ggcagtcaccttctatggaaaaagc

SEQ ID NO: 4655691 - DNA, 25 bp, Homo sapien
gaaactggaccaatgcatctgttcc

SEQ ID NO: 4655692 - DNA, 25 bp, Homo sapien
aaactggaccaatgcatctgttcct

SEQ ID NO: 4655693 - DNA, 25 bp, Homo sapien
atgaaactggaccaatgcatctgtt

SEQ ID NO: 4655694 - DNA, 25 bp, Homo sapien
gcataagcagctgatgaaactggac

SEQ ID NO: 4655695 - DNA, 25 bp, Homo sapien
caaggccagcatttctcggaagggg

SEQ ID NO: 4655696 - DNA, 25 bp, Homo sapien
tccttctcggggcaaggccagcatt

SEQ ID NO: 4655697 - DNA, 25 bp, Homo sapien
tgatttgaagatgcatccttctcgg

SEQ ID NO: 4655698 - DNA, 25 bp, Homo sapien
gggctcacatgtctgttctttggag

SEQ ID NO: 4655699 - DNA, 25 bp, Homo sapien
tctcgggagccggcctgtgcacagc

SEQ ID NO: 4655700 - DNA, 25 bp, Homo sapien
gtgcacagcacaacgtggagccagc

SEQ ID NO: 4655701 - DNA, 25 bp, Homo sapien
cacagcacaacgtggagccagcctg

SEQ ID NO: 4655702 - DNA, 25 bp, Homo sapien
cagcacaacgtggagccagcctgtc

SEQ ID NO: 4655703 - DNA, 25 bp, Homo sapien
tgaagattagggagaggcaggcttc

SEQ ID NO: 4655704 - DNA, 25 bp, Homo sapien
caggcttcttctaaagtgtgagtcc

SEQ ID NO: 4655705 - DNA, 25 bp, Homo sapien
aagtgtgagtcccttggtcaagagg

SEQ ID NO: 4655706 - DNA, 25 bp, Homo sapien
ttctaaagtgtgagtcccttggtca

SEQ ID NO: 4655707 - DNA, 25 bp, Homo sapien
gatggaatgaatatgtttagtattt

SEQ ID NO: 4655708 - DNA, 25 bp, Homo sapien
tcggggatggaatgaatatgtttag

SEQ ID NO: 4655709 - DNA, 25 bp, Homo sapien
gggatggaatgaatatgtttagtat

SEQ ID NO: 4655710 - DNA, 25 bp, Homo sapien
cggggatggaatgaatatgtttagt

SEQ ID NO: 4655711 - DNA, 25 bp, Homo sapien
tgtgaaatatggtttcataattaat

SEQ ID NO: 4655712 - DNA, 25 bp, Homo sapien
ctgtgaaatatggtttcataattaa

SEQ ID NO: 4655713 - DNA, 25 bp, Homo sapien
gtgaaatatggtttcataattaata

SEQ ID NO: 4655714 - DNA, 25 bp, Homo sapien
tccagtgaaggacggactgctgttc

SEQ ID NO: 4655715 - DNA, 25 bp, Homo sapien
cacacagctcgcctgggtaagtctc

SEQ ID NO: 4655716 - DNA, 25 bp, Homo sapien
ccagtgaagtgtgccgaagtgagtt

SEQ ID NO: 4655717 - DNA, 25 bp, Homo sapien
tcctggtgctccgtcgataaaggag

SEQ ID NO: 4655718 - DNA, 25 bp, Homo sapien
agttttcctcctcggtagatctgca

SEQ ID NO: 4655719 - DNA, 25 bp, Homo sapien
gtcattaaaggcctctgctctgtag

SEQ ID NO: 4655720 - DNA, 25 bp, Homo sapien
tttggctttaggctatggcttaggt

SEQ ID NO: 4655721 - DNA, 25 bp, Homo sapien
taggctatggcttaggttttctggg

SEQ ID NO: 4655722 - DNA, 25 bp, Homo sapien
catgaggtgagctgacaacggcagc

SEQ ID NO: 4655723 - DNA, 25 bp, Homo sapien
ggtgatcgatcatctcagaatggtg

SEQ ID NO: 4655724 - DNA, 25 bp, Homo sapien
gtgataatttacactccagctggtg

SEQ ID NO: 4655725 - DNA, 25 bp, Homo sapien
tataattgcagtcttcgcaacaccc

SEQ ID NO: 4655726 - DNA, 25 bp, Homo sapien
tcccctcagatcttaaggacagaga

SEQ ID NO: 4655727 - DNA, 25 bp, Homo sapien
tgctgtcaacatcctcccctcagat

SEQ ID NO: 4655728 - DNA, 25 bp, Homo sapien
tgagtaccgtgcacctcacttggcc

SEQ ID NO: 4655729 - DNA, 25 bp, Homo sapien
tcacttggccgaaatggtggcccca

SEQ ID NO: 4655730 - DNA, 25 bp, Homo sapien
gctgaatccgccttgctcttgtgga

SEQ ID NO: 4655731 - DNA, 25 bp, Homo sapien
agtgcttttgcacgggctgcctgct

SEQ ID NO: 4655732 - DNA, 25 bp, Homo sapien
tcttgtggatcttggcggtgcctgc

SEQ ID NO: 4655733 - DNA, 25 bp, Homo sapien
cctctgggccgtcacccagcaagtg

SEQ ID NO: 4655734 - DNA, 25 bp, Homo sapien
gacactcatgatcagacccggtttc

SEQ ID NO: 4655735 - DNA, 25 bp, Homo sapien
tagggagatacaaggaccccggaga

SEQ ID NO: 4655736 - DNA, 25 bp, Homo sapien
accccggagaagacttggtacagtg

SEQ ID NO: 4655737 - DNA, 25 bp, Homo sapien
caatagggagatacaaggaccccgg

SEQ ID NO: 4655738 - DNA, 25 bp, Homo sapien
ggtggaggagtccacatgcccgtgg

SEQ ID NO: 4655739 - DNA, 25 bp, Homo sapien
tggaggagtccacatgcccgtggct

SEQ ID NO: 4655740 - DNA, 25 bp, Homo sapien
tttggtgaatcccttccatgtggaa

SEQ ID NO: 4655741 - DNA, 25 bp, Homo sapien
tctgattatttggtgaatcccttcc

SEQ ID NO: 4655742 - DNA, 25 bp, Homo sapien
gtgcttaactggctgccttgggttc

SEQ ID NO: 4655743 - DNA, 25 bp, Homo sapien
tggtgtaacagaggatccgcaggcc

SEQ ID NO: 4655744 - DNA, 25 bp, Homo sapien
cattcagggctacagcgcatgcctt

SEQ ID NO: 4655745 - DNA, 25 bp, Homo sapien
tattgtaatgtgctccaaggcagag

SEQ ID NO: 4655746 - DNA, 25 bp, Homo sapien
cacacagtaagaaggatatggttcc

SEQ ID NO: 4655747 - DNA, 25 bp, Homo sapien
ttatgtttgatgtggcagccctgac

SEQ ID NO: 4655748 - DNA, 25 bp, Homo sapien
gggagccccacatgtggtgcgcagc

SEQ ID NO: 4655749 - DNA, 25 bp, Homo sapien
acgggagccccacatgtggtgcgca

SEQ ID NO: 4655750 - DNA, 25 bp, Homo sapien
agacgggagccccacatgtggtgcg

SEQ ID NO: 4655751 - DNA, 25 bp, Homo sapien
gagccccacatgtggtgcgcagcat

SEQ ID NO: 4655752 - DNA, 25 bp, Homo sapien
cagtgtcacattgctggctatagct

SEQ ID NO: 4655753 - DNA, 25 bp, Homo sapien
ctgatggccccagtgtcacattgct

SEQ ID NO: 4655754 - DNA, 25 bp, Homo sapien
cacattgctggctatagctatgggc

SEQ ID NO: 4655755 - DNA, 25 bp, Homo sapien
tatagctatgggcattgataacttc

SEQ ID NO: 4655756 - DNA, 25 bp, Homo sapien
ggatcttcaaaatgtagctctctct

SEQ ID NO: 4655757 - DNA, 25 bp, Homo sapien
tagtgcaatcacttatagaatccca

SEQ ID NO: 4655758 - DNA, 25 bp, Homo sapien
agtggatcttcaaaatgtagctctc

SEQ ID NO: 4655759 - DNA, 25 bp, Homo sapien
ttatagaatcccaaagtggatcttc

SEQ ID NO: 4655760 - DNA, 25 bp, Homo sapien
gagcaggatccactttgataagtcg

SEQ ID NO: 4655761 - DNA, 25 bp, Homo sapien
ctatcacattggttgatctcgccaa

SEQ ID NO: 4655762 - DNA, 25 bp, Homo sapien
caaaggaagtgtatggcctgctggc

SEQ ID NO: 4655763 - DNA, 25 bp, Homo sapien
tgggcatcgagcagttccttagctg

SEQ ID NO: 4655764 - DNA, 25 bp, Homo sapien
atttacatcatagtcttgggaggga

SEQ ID NO: 4655765 - DNA, 25 bp, Homo sapien
tatttacatcatagtcttgggaggg

SEQ ID NO: 4655766 - DNA, 25 bp, Homo sapien
ttatttacatcatagtcttgggagg

SEQ ID NO: 4655767 - DNA, 25 bp, Homo sapien
gtgaagagcgatcagcattgagtcc

SEQ ID NO: 4655768 - DNA, 25 bp, Homo sapien
aggctggacaagttgtggaggtgtg

SEQ ID NO: 4655769 - DNA, 25 bp, Homo sapien
gtgcaggtggttggccttgcgccgg

SEQ ID NO: 4655770 - DNA, 25 bp, Homo sapien
acaacatccttagggagggaatgaa

SEQ ID NO: 4655771 - DNA, 25 bp, Homo sapien
tccacaacatccttagggagggaat

SEQ ID NO: 4655772 - DNA, 25 bp, Homo sapien
cccctccccagctgacatgccttta

SEQ ID NO: 4655773 - DNA, 25 bp, Homo sapien
tggcaggtactgctgccccccagtg

SEQ ID NO: 4655774 - DNA, 25 bp, Homo sapien
ggtactgctgccccccagtgtggac

SEQ ID NO: 4655775 - DNA, 25 bp, Homo sapien
ccctccccagctgacatgcctttaa

SEQ ID NO: 4655776 - DNA, 25 bp, Homo sapien
catggaccatgaggttatgtgtgtg

SEQ ID NO: 4655777 - DNA, 25 bp, Homo sapien
ctgagtgggtaacaaaggtggtcat

SEQ ID NO: 4655778 - DNA, 25 bp, Homo sapien
tgtgtgatagtggatagagccctca

SEQ ID NO: 4655779 - DNA, 25 bp, Homo sapien
tgaaggacacaaggaccaactgctg

SEQ ID NO: 4655780 - DNA, 25 bp, Homo sapien
cacataacccgtatcacatgacgtt

SEQ ID NO: 4655781 - DNA, 25 bp, Homo sapien
acgttctttgaaacctggctggcac

SEQ ID NO: 4655782 - DNA, 25 bp, Homo sapien
aatcccacataacccgtatcacatg

SEQ ID NO: 4655783 - DNA, 25 bp, Homo sapien
ccgtatcacatgacgttctttgaaa

SEQ ID NO: 4655784 - DNA, 25 bp, Homo sapien
ctacaataccaatcccagctcttag

SEQ ID NO: 4655785 - DNA, 25 bp, Homo sapien
tccttgactacaataccaatcccag

SEQ ID NO: 4655786 - DNA, 25 bp, Homo sapien
cagctcttagcggatgcagaagaaa

SEQ ID NO: 4655787 - DNA, 25 bp, Homo sapien
ttgatgtcctctccctttcgtttct

SEQ ID NO: 4655788 - DNA, 25 bp, Homo sapien
gcggcagtctgtggactgatactgc

SEQ ID NO: 4655789 - DNA, 25 bp, Homo sapien
ggcggcagtctgtggactgatactg

SEQ ID NO: 4655790 - DNA, 25 bp, Homo sapien
cggcagtctgtggactgatactgct

SEQ ID NO: 4655791 - DNA, 25 bp, Homo sapien
gtcatggagttttagccttggcctc

SEQ ID NO: 4655792 - DNA, 25 bp, Homo sapien
gctgcagtcttggaaacagtgacta

SEQ ID NO: 4655793 - DNA, 25 bp, Homo sapien
cctaaggctggcgttcaggttccag

SEQ ID NO: 4655794 - DNA, 25 bp, Homo sapien
gttccagcctgtcccatacagcagg

SEQ ID NO: 4655795 - DNA, 25 bp, Homo sapien
aatgagacacaaatgccctggcttc

SEQ ID NO: 4655796 - DNA, 25 bp, Homo sapien
gactcactggtgctgtgtttagcca

SEQ ID NO: 4655797 - DNA, 25 bp, Homo sapien
cgttcggccctgcacatattgagct

SEQ ID NO: 4655798 - DNA, 25 bp, Homo sapien
tgagctcctactatgcgcttggtga

SEQ ID NO: 4655799 - DNA, 25 bp, Homo sapien
gcaagtggttctcgatcgcaggcat

SEQ ID NO: 4655800 - DNA, 25 bp, Homo sapien
cctcgagtctgtggcgtgggccgtg

SEQ ID NO: 4655801 - DNA, 25 bp, Homo sapien
tgggccgtgcaagtggttctcgatc

SEQ ID NO: 4655802 - DNA, 25 bp, Homo sapien
tcgatcgcaggcatgttttatccat

SEQ ID NO: 4655803 - DNA, 25 bp, Homo sapien
gaggagaccgcaggctggtggtggt

SEQ ID NO: 4655804 - DNA, 25 bp, Homo sapien
ttcctctccagggatcgttgggaga

SEQ ID NO: 4655805 - DNA, 25 bp, Homo sapien
agccatgctgcctcttcattgatgg

SEQ ID NO: 4655806 - DNA, 25 bp, Homo sapien
ctgcctcttcattgatggccctggg

SEQ ID NO: 4655807 - DNA, 25 bp, Homo sapien
cgtccttggcctttgatatttggta

SEQ ID NO: 4655808 - DNA, 25 bp, Homo sapien
cccacgtccttggcctttgatattt

SEQ ID NO: 4655809 - DNA, 25 bp, Homo sapien
tatttggtaggggcccagcaccctg

SEQ ID NO: 4655810 - DNA, 25 bp, Homo sapien
aagatactggtttcttttgggctgc

SEQ ID NO: 4655811 - DNA, 25 bp, Homo sapien
tggctgaatcctgagtggggtcgta

SEQ ID NO: 4655812 - DNA, 25 bp, Homo sapien
tgaatcctgagtggggtcgtagaaa

SEQ ID NO: 4655813 - DNA, 25 bp, Homo sapien
cctgagtggggtcgtagaaagatct

SEQ ID NO: 4655814 - DNA, 25 bp, Homo sapien
gttggctgaatcctgagtggggtcg

SEQ ID NO: 4655815 - DNA, 25 bp, Homo sapien
ctgtgtggccttcttacggcagtcc

SEQ ID NO: 4655816 - DNA, 25 bp, Homo sapien
gtggccttcttacggcagtccacag

SEQ ID NO: 4655817 - DNA, 25 bp, Homo sapien
tcctgtgctggtcccaggccatccc

SEQ ID NO: 4655818 - DNA, 25 bp, Homo sapien
ccttcttacggcagtccacagggaa

SEQ ID NO: 4655819 - DNA, 25 bp, Homo sapien
tgctgggcctcatcctggttcatcg

SEQ ID NO: 4655820 - DNA, 25 bp, Homo sapien
gcctcaagttgggtcagcacctgct

SEQ ID NO: 4655821 - DNA, 25 bp, Homo sapien
gaaaagtgtgctcatggcctgtaga

SEQ ID NO: 4655822 - DNA, 25 bp, Homo sapien
aatgggagcgcacctgggttctgct

SEQ ID NO: 4655823 - DNA, 25 bp, Homo sapien
gatggaactaggagaccacttacct

SEQ ID NO: 4655824 - DNA, 25 bp, Homo sapien
aatatggaatcagtagggcacaggc

SEQ ID NO: 4655825 - DNA, 25 bp, Homo sapien
tcatggtaccttgcaatgtgtgcca

SEQ ID NO: 4655826 - DNA, 25 bp, Homo sapien
tagtgcccaaattaaccatgtaagc

SEQ ID NO: 4655827 - DNA, 25 bp, Homo sapien
gataggtctgaactcttttactcac

SEQ ID NO: 4655828 - DNA, 25 bp, Homo sapien
ctccatatctccagacactagctgg

SEQ ID NO: 4655829 - DNA, 25 bp, Homo sapien
cagctagaatgtgagtccacaagga

SEQ ID NO: 4655830 - DNA, 25 bp, Homo sapien
actagctgggtgttctgcaattcag

SEQ ID NO: 4655831 - DNA, 25 bp, Homo sapien
cacccggcccaacttatgtatgttt

SEQ ID NO: 4655832 - DNA, 25 bp, Homo sapien
aagggcatataaaacgtggaaatgg

SEQ ID NO: 4655833 - DNA, 25 bp, Homo sapien
tgactgcatagaagggcatataaaa

SEQ ID NO: 4655834 - DNA, 25 bp, Homo sapien
tagctcattacacacaggatacatg

SEQ ID NO: 4655835 - DNA, 25 bp, Homo sapien
tgcatagaagggcatataaaacgtg

SEQ ID NO: 4655836 - DNA, 25 bp, Homo sapien
tatgctttcctctataatcaggcag

SEQ ID NO: 4655837 - DNA, 25 bp, Homo sapien
ctatgctttcctctataatcaggca

SEQ ID NO: 4655838 - DNA, 25 bp, Homo sapien
gacctcttcatacattgttgtagaa

SEQ ID NO: 4655839 - DNA, 25 bp, Homo sapien
ctgggacctcttcatacattgttgt

SEQ ID NO: 4655840 - DNA, 25 bp, Homo sapien
aacctctggtctaattgtgaaattg

SEQ ID NO: 4655841 - DNA, 25 bp, Homo sapien
tctggtctaattgtgaaattgcttc

SEQ ID NO: 4655842 - DNA, 25 bp, Homo sapien
ggaaacctctggtctaattgtgaaa

SEQ ID NO: 4655843 - DNA, 25 bp, Homo sapien
cctctggtctaattgtgaaattgct

SEQ ID NO: 4655844 - DNA, 25 bp, Homo sapien
aaatgaagtggataggcttaaaact

SEQ ID NO: 4655845 - DNA, 25 bp, Homo sapien
atgaagtggataggcttaaaactac

SEQ ID NO: 4655846 - DNA, 25 bp, Homo sapien
gaaatgaagtggataggcttaaaac

SEQ ID NO: 4655847 - DNA, 25 bp, Homo sapien
tgaagtggataggcttaaaactacc

SEQ ID NO: 4655848 - DNA, 25 bp, Homo sapien
tctaatatgacttgctctttttccc

SEQ ID NO: 4655849 - DNA, 25 bp, Homo sapien
aggcagagttctaatatgacttgct

SEQ ID NO: 4655850 - DNA, 25 bp, Homo sapien
cagagttctaatatgacttgctctt

SEQ ID NO: 4655851 - DNA, 25 bp, Homo sapien
gagttctaatatgacttgctctttt

SEQ ID NO: 4655852 - DNA, 25 bp, Homo sapien
tgtttacaacttgtcgccttgagcg

SEQ ID NO: 4655853 - DNA, 25 bp, Homo sapien
gcacgtttgcttcctctcgctgggt

SEQ ID NO: 4655854 - DNA, 25 bp, Homo sapien
gacatcggcgatgggcacgtttgct

SEQ ID NO: 4655855 - DNA, 25 bp, Homo sapien
actgagcgccagcaaggtgggattt

SEQ ID NO: 4655856 - DNA, 25 bp, Homo sapien
tgaggggaacgcactcggtcttgag

SEQ ID NO: 4655857 - DNA, 25 bp, Homo sapien
ctgacgggttgtgtaacgcatgtta

SEQ ID NO: 4655858 - DNA, 25 bp, Homo sapien
catgttacacatgtgacgcgtgagg

SEQ ID NO: 4655859 - DNA, 25 bp, Homo sapien
ggctttgactgggtctggaaaacgc

SEQ ID NO: 4655860 - DNA, 25 bp, Homo sapien
ctcagctttcggttttagaccttct

SEQ ID NO: 4655861 - DNA, 25 bp, Homo sapien
ctggagatggtctatacttccaaac

SEQ ID NO: 4655862 - DNA, 25 bp, Homo sapien
gatggtctatacttccaaacgaacc

SEQ ID NO: 4655863 - DNA, 25 bp, Homo sapien
ttttcaagttacatgcatcaaggtc

SEQ ID NO: 4655864 - DNA, 25 bp, Homo sapien
ggaaacgctaaatagaattgacaaa

SEQ ID NO: 4655865 - DNA, 25 bp, Homo sapien
gaaacgctaaatagaattgacaaac

SEQ ID NO: 4655866 - DNA, 25 bp, Homo sapien
caggaaacgctaaatagaattgaca

SEQ ID NO: 4655867 - DNA, 25 bp, Homo sapien
aggaaacgctaaatagaattgacaa

SEQ ID NO: 4655868 - DNA, 25 bp, Homo sapien
tcttctcctgtaacagagcctcctt

SEQ ID NO: 4655869 - DNA, 25 bp, Homo sapien
gactcttctcctgtaacagagcctc

SEQ ID NO: 4655870 - DNA, 25 bp, Homo sapien
caggtgactcttctcctgtaacaga

SEQ ID NO: 4655871 - DNA, 25 bp, Homo sapien
ggtgactcttctcctgtaacagagc

SEQ ID NO: 4655872 - DNA, 25 bp, Homo sapien
taaaaatgtgtcttcgtttctggag

SEQ ID NO: 4655873 - DNA, 25 bp, Homo sapien
aaaaatgtgtcttcgtttctggagc

SEQ ID NO: 4655874 - DNA, 25 bp, Homo sapien
aaatgtgtcttcgtttctggagctg

SEQ ID NO: 4655875 - DNA, 25 bp, Homo sapien
cttaaaaatgtgtcttcgtttctgg

SEQ ID NO: 4655876 - DNA, 25 bp, Homo sapien
catacagcacctccagttccaaaga

SEQ ID NO: 4655877 - DNA, 25 bp, Homo sapien
tacagcacctccagttccaaagaat

SEQ ID NO: 4655878 - DNA, 25 bp, Homo sapien
cagcacctccagttccaaagaatac

SEQ ID NO: 4655879 - DNA, 25 bp, Homo sapien
agcacctccagttccaaagaatact

SEQ ID NO: 4655880 - DNA, 25 bp, Homo sapien
agacatttgcttcaccacgagagag

SEQ ID NO: 4655881 - DNA, 25 bp, Homo sapien
gacatttgcttcaccacgagagagg

SEQ ID NO: 4655882 - DNA, 25 bp, Homo sapien
aatgatgctctaagtgacttctggc

SEQ ID NO: 4655883 - DNA, 25 bp, Homo sapien
ggttatggaatgatgctctaagtga

SEQ ID NO: 4655884 - DNA, 25 bp, Homo sapien
taattcacgaaccatattatcccgt

SEQ ID NO: 4655885 - DNA, 25 bp, Homo sapien
tccttttgctggagggtcagtctcc

SEQ ID NO: 4655886 - DNA, 25 bp, Homo sapien
gtctccggtcacactgcaattttag

SEQ ID NO: 4655887 - DNA, 25 bp, Homo sapien
tgttgtttccgttcagcttctcgca

SEQ ID NO: 4655888 - DNA, 25 bp, Homo sapien
tcttcttatgatcccggctggtttt

SEQ ID NO: 4655889 - DNA, 25 bp, Homo sapien
agtttcttcttatgatcccggctgg

SEQ ID NO: 4655890 - DNA, 25 bp, Homo sapien
agttgccgccgaattgcttccccta

SEQ ID NO: 4655891 - DNA, 25 bp, Homo sapien
tgctagttgccgccgaattgcttcc

SEQ ID NO: 4655892 - DNA, 25 bp, Homo sapien
caaagctggcatgacttcaccaaat

SEQ ID NO: 4655893 - DNA, 25 bp, Homo sapien
accaaatgctagagaaacagtgtta

SEQ ID NO: 4655894 - DNA, 25 bp, Homo sapien
ctagagaaacagtgttaagagtgac

SEQ ID NO: 4655895 - DNA, 25 bp, Homo sapien
aaagctggcatgacttcaccaaatg

SEQ ID NO: 4655896 - DNA, 25 bp, Homo sapien
tctggcttcaggactccatctccag

SEQ ID NO: 4655897 - DNA, 25 bp, Homo sapien
aggactccatctccagccttatgat

SEQ ID NO: 4655898 - DNA, 25 bp, Homo sapien
gcctccttctggcttcaggactcca

SEQ ID NO: 4655899 - DNA, 25 bp, Homo sapien
caggactccatctccagccttatga

SEQ ID NO: 4655900 - DNA, 25 bp, Homo sapien
tcccagagcttttgaggatttggct

SEQ ID NO: 4655901 - DNA, 25 bp, Homo sapien
ggaggtaattctgggatatcttccc

SEQ ID NO: 4655902 - DNA, 25 bp, Homo sapien
taaagaactatgaattggaggtaat

SEQ ID NO: 4655903 - DNA, 25 bp, Homo sapien
cttaatttcatactttcaggtctgg

SEQ ID NO: 4655904 - DNA, 25 bp, Homo sapien
tgggatgacagtcgactgagatttt

SEQ ID NO: 4655905 - DNA, 25 bp, Homo sapien
tgaatttgggatgacagtcgactga

SEQ ID NO: 4655906 - DNA, 25 bp, Homo sapien
tgacagtcgactgagattttgtaaa

SEQ ID NO: 4655907 - DNA, 25 bp, Homo sapien
aatttgggatgacagtcgactgaga

SEQ ID NO: 4655908 - DNA, 25 bp, Homo sapien
caaggcggaaatttgacgtaattct

SEQ ID NO: 4655909 - DNA, 25 bp, Homo sapien
tcttttcgacacagttttacaggtg

SEQ ID NO: 4655910 - DNA, 25 bp, Homo sapien
gaacgtcgcaatgatagttccaagg

SEQ ID NO: 4655911 - DNA, 25 bp, Homo sapien
ggtgtgacaccatgaagtcgtccca

SEQ ID NO: 4655912 - DNA, 25 bp, Homo sapien
gcagccattgatccaatgccaactc

SEQ ID NO: 4655913 - DNA, 25 bp, Homo sapien
agcagccattgatccaatgccaact

SEQ ID NO: 4655914 - DNA, 25 bp, Homo sapien
cagcagccattgatccaatgccaac

SEQ ID NO: 4655915 - DNA, 25 bp, Homo sapien
tcagcagccattgatccaatgccaa

SEQ ID NO: 4655916 - DNA, 25 bp, Homo sapien
cccttggttttctagatacttcgat

SEQ ID NO: 4655917 - DNA, 25 bp, Homo sapien
tggttttctagatacttcgatggaa

SEQ ID NO: 4655918 - DNA, 25 bp, Homo sapien
tcccttggttttctagatacttcga

SEQ ID NO: 4655919 - DNA, 25 bp, Homo sapien
cttggttttctagatacttcgatgg

SEQ ID NO: 4655920 - DNA, 25 bp, Homo sapien
gggataaggaaagaaacgcagcatg

SEQ ID NO: 4655921 - DNA, 25 bp, Homo sapien
catgataggtgccacgtgaaaagtg

SEQ ID NO: 4655922 - DNA, 25 bp, Homo sapien
aagaaccgtgtatatctgtcttggg

SEQ ID NO: 4655923 - DNA, 25 bp, Homo sapien
tactgccgggaatcaaagaaccgtg

SEQ ID NO: 4655924 - DNA, 25 bp, Homo sapien
caagattccagtagcaagagtgcat

SEQ ID NO: 4655925 - DNA, 25 bp, Homo sapien
caagtcaagattccagtagcaagag

SEQ ID NO: 4655926 - DNA, 25 bp, Homo sapien
gtcaagattccagtagcaagagtgc

SEQ ID NO: 4655927 - DNA, 25 bp, Homo sapien
ctgcaagtcaagattccagtagcaa

SEQ ID NO: 4655928 - DNA, 25 bp, Homo sapien
tcgcggagagcagttagaggtccct

SEQ ID NO: 4655929 - DNA, 25 bp, Homo sapien
gtcgcggagagcagttagaggtccc

SEQ ID NO: 4655930 - DNA, 25 bp, Homo sapien
tgcgtcgcggagagcagttagaggt

SEQ ID NO: 4655931 - DNA, 25 bp, Homo sapien
cgtcgcggagagcagttagaggtcc

SEQ ID NO: 4655932 - DNA, 25 bp, Homo sapien
ggcgctggcgctggttagaggttcg

SEQ ID NO: 4655933 - DNA, 25 bp, Homo sapien
attttcccggttggtagcggcgctg

SEQ ID NO: 4655934 - DNA, 25 bp, Homo sapien
ccggtgacgtgagcgcccgagttgg

SEQ ID NO: 4655935 - DNA, 25 bp, Homo sapien
agaggttcgccggtgacgtgagcgc

SEQ ID NO: 4655936 - DNA, 25 bp, Homo sapien
caggctgggcactaacgggtcccgg

SEQ ID NO: 4655937 - DNA, 25 bp, Homo sapien
gggtcgcggtcggcccacaggctgg

SEQ ID NO: 4655938 - DNA, 25 bp, Homo sapien
gtctgggtcaagtgtcggcagagct

SEQ ID NO: 4655939 - DNA, 25 bp, Homo sapien
gccgcactgggcgttgggactggtc

SEQ ID NO: 4655940 - DNA, 25 bp, Homo sapien
gaggcgggcccgcctccgcgtactc

SEQ ID NO: 4655941 - DNA, 25 bp, Homo sapien
aggcgggcccgcctccgcgtactca

SEQ ID NO: 4655942 - DNA, 25 bp, Homo sapien
ccggagcggacacccgcgaggcggg

SEQ ID NO: 4655943 - DNA, 25 bp, Homo sapien
gttccggagcggacacccgcgaggc

SEQ ID NO: 4655944 - DNA, 25 bp, Homo sapien
agaaattgcgctgggcgaaacctaa

SEQ ID NO: 4655945 - DNA, 25 bp, Homo sapien
ttgcgctgggcgaaacctaactcgg

SEQ ID NO: 4655946 - DNA, 25 bp, Homo sapien
attgcgctgggcgaaacctaactcg

SEQ ID NO: 4655947 - DNA, 25 bp, Homo sapien
gaaagaaattgcgctgggcgaaacc

SEQ ID NO: 4655948 - DNA, 25 bp, Homo sapien
aggctgttaaccgatgctccgaaac

SEQ ID NO: 4655949 - DNA, 25 bp, Homo sapien
cataggctgttaaccgatgctccga

SEQ ID NO: 4655950 - DNA, 25 bp, Homo sapien
ttcacccataggctgttaaccgatg

SEQ ID NO: 4655951 - DNA, 25 bp, Homo sapien
caaatttcacccataggctgttaac

SEQ ID NO: 4655952 - DNA, 25 bp, Homo sapien
tgtaagtgatgtaaacccaatgggt

SEQ ID NO: 4655953 - DNA, 25 bp, Homo sapien
tgtaaacccaatgggtatgccccaa

SEQ ID NO: 4655954 - DNA, 25 bp, Homo sapien
gtgatgtaaacccaatgggtatgcc

SEQ ID NO: 4655955 - DNA, 25 bp, Homo sapien
taagtgatgtaaacccaatgggtat

SEQ ID NO: 4655956 - DNA, 25 bp, Homo sapien
ccaggctggccaacaaggcgaaaca

SEQ ID NO: 4655957 - DNA, 25 bp, Homo sapien
ccaacaaggcgaaacaccatctgta

SEQ ID NO: 4655958 - DNA, 25 bp, Homo sapien
gccaacaaggcgaaacaccatctgt

SEQ ID NO: 4655959 - DNA, 25 bp, Homo sapien
gctggccaacaaggcgaaacaccat

SEQ ID NO: 4655960 - DNA, 25 bp, Homo sapien
aagatactatatttcaggtcatggc

SEQ ID NO: 4655961 - DNA, 25 bp, Homo sapien
ttgtgtcctaaacttctgcatctcc

SEQ ID NO: 4655962 - DNA, 25 bp, Homo sapien
taggaagactacgaaaacattaggc

SEQ ID NO: 4655963 - DNA, 25 bp, Homo sapien
tagggttagtattccttcagtcttg

SEQ ID NO: 4655964 - DNA, 25 bp, Homo sapien
tcagattgctactgaagccttatca

SEQ ID NO: 4655965 - DNA, 25 bp, Homo sapien
ggtagcttgagcaagaaagcaactt

SEQ ID NO: 4655966 - DNA, 25 bp, Homo sapien
caacctgtggtggacatggtagctt

SEQ ID NO: 4655967 - DNA, 25 bp, Homo sapien
gctttcagctgctgagattttcaga

SEQ ID NO: 4655968 - DNA, 25 bp, Homo sapien
tccatcttatgtaagatctggattc

SEQ ID NO: 4655969 - DNA, 25 bp, Homo sapien
taatgttcagtatctagtgtgagag

SEQ ID NO: 4655970 - DNA, 25 bp, Homo sapien
ttccatcttatgtaagatctggatt

SEQ ID NO: 4655971 - DNA, 25 bp, Homo sapien
ggctgtttggaataactctcacaca

SEQ ID NO: 4655972 - DNA, 25 bp, Homo sapien
aggtctaattcttacagcaactttt

SEQ ID NO: 4655973 - DNA, 25 bp, Homo sapien
atctctcccaatgataacttgctgg

SEQ ID NO: 4655974 - DNA, 25 bp, Homo sapien
ccaatgataacttgctggctgtttg

SEQ ID NO: 4655975 - DNA, 25 bp, Homo sapien
gccctcaatgagtgacaacactagg

SEQ ID NO: 4655976 - DNA, 25 bp, Homo sapien
caacactaggggctttatacatgtg

SEQ ID NO: 4655977 - DNA, 25 bp, Homo sapien
gtatgtcttcccagatccagtttgt

SEQ ID NO: 4655978 - DNA, 25 bp, Homo sapien
caatatggccccctccaatggtgta

SEQ ID NO: 4655979 - DNA, 25 bp, Homo sapien
tccgagtttccatcaactttgatgg

SEQ ID NO: 4655980 - DNA, 25 bp, Homo sapien
atcgttctgaaaatccgagtttcca

SEQ ID NO: 4655981 - DNA, 25 bp, Homo sapien
cctaatttaagaggcaagactgcca

SEQ ID NO: 4655982 - DNA, 25 bp, Homo sapien
cttgcttccaagttgaagattacca

SEQ ID NO: 4655983 - DNA, 25 bp, Homo sapien
ttagaaaaagaaagcatatctggaa

SEQ ID NO: 4655984 - DNA, 25 bp, Homo sapien
ctgaaaatttagaaaaagaaagcat

SEQ ID NO: 4655985 - DNA, 25 bp, Homo sapien
aaatttagaaaaagaaagcatatct

SEQ ID NO: 4655986 - DNA, 25 bp, Homo sapien
atttagaaaaagaaagcatatctgg

SEQ ID NO: 4655987 - DNA, 25 bp, Homo sapien
aatgatacccttttggccctccaca

SEQ ID NO: 4655988 - DNA, 25 bp, Homo sapien
attaaagtcaatgctaggatgttca

SEQ ID NO: 4655989 - DNA, 25 bp, Homo sapien
gatctcttaggtcttccttgtacac

SEQ ID NO: 4655990 - DNA, 25 bp, Homo sapien
tcaatgctaggatgttcagagatgc

SEQ ID NO: 4655991 - DNA, 25 bp, Homo sapien
aatgaaggcaactgattaagcgggc

SEQ ID NO: 4655992 - DNA, 25 bp, Homo sapien
ttaaagcatgtctgtctgcgaatga

SEQ ID NO: 4655993 - DNA, 25 bp, Homo sapien
gaaggcaactgattaagcgggctac

SEQ ID NO: 4655994 - DNA, 25 bp, Homo sapien
aaagcattaaagcatgtctgtctgc

SEQ ID NO: 4655995 - DNA, 25 bp, Homo sapien
agaaaggcagaaagagttcagagaa

SEQ ID NO: 4655996 - DNA, 25 bp, Homo sapien
tttctgatttctttctaagaaaggc

SEQ ID NO: 4655997 - DNA, 25 bp, Homo sapien
tctgatttctttctaagaaaggcag

SEQ ID NO: 4655998 - DNA, 25 bp, Homo sapien
atttctttctaagaaaggcagaaag

SEQ ID NO: 4655999 - DNA, 25 bp, Homo sapien
caagaaaccccatatgataacacaa

SEQ ID NO: 4656000 - DNA, 25 bp, Homo sapien
aaataatcaagaaaccccatatgat

SEQ ID NO: 4656001 - DNA, 25 bp, Homo sapien
gaaggcacaagtgacattcaccatg

SEQ ID NO: 4656002 - DNA, 25 bp, Homo sapien
tggtgatttgattatagcttgatga

SEQ ID NO: 4656003 - DNA, 25 bp, Homo sapien
ctattcactttttgcgcttctttca

SEQ ID NO: 4656004 - DNA, 25 bp, Homo sapien
ccatcatctgcacttgattcttcag

SEQ ID NO: 4656005 - DNA, 25 bp, Homo sapien
catctgcacttgattcttcagttcc

SEQ ID NO: 4656006 - DNA, 25 bp, Homo sapien
ttcctgtaccatcatctgcacttga

SEQ ID NO: 4656007 - DNA, 25 bp, Homo sapien
ctgaggtggtaggatcactgagccc

SEQ ID NO: 4656008 - DNA, 25 bp, Homo sapien
catgcacctgtggtcacagttagga

SEQ ID NO: 4656009 - DNA, 25 bp, Homo sapien
gctgtgattgtgccagcgcacacca

SEQ ID NO: 4656010 - DNA, 25 bp, Homo sapien
acctgtggtcacagttaggaggctg

SEQ ID NO: 4656011 - DNA, 25 bp, Homo sapien
gccccaaatgagtatcaaatggtac

SEQ ID NO: 4656012 - DNA, 25 bp, Homo sapien
tctttagctgaagaagtcactgaca

SEQ ID NO: 4656013 - DNA, 25 bp, Homo sapien
tcctggaatcttgtcttgatgggat

SEQ ID NO: 4656014 - DNA, 25 bp, Homo sapien
ggatataaatataatgccccaaatg

SEQ ID NO: 4656015 - DNA, 25 bp, Homo sapien
aatcatcttatatctgatttttgtg

SEQ ID NO: 4656016 - DNA, 25 bp, Homo sapien
atcttatatctgatttttgtgcttc

SEQ ID NO: 4656017 - DNA, 25 bp, Homo sapien
gattctgaaaatcatcttatatctg

SEQ ID NO: 4656018 - DNA, 25 bp, Homo sapien
tcatcttatatctgatttttgtgct

SEQ ID NO: 4656019 - DNA, 25 bp, Homo sapien
ggtctgcatcccctccaatccaaat

SEQ ID NO: 4656020 - DNA, 25 bp, Homo sapien
ggtgctgccgccaaaggtctgcatc

SEQ ID NO: 4656021 - DNA, 25 bp, Homo sapien
gtctgcatcccctccaatccaaatc

SEQ ID NO: 4656022 - DNA, 25 bp, Homo sapien
ctggagaactgtggtgctgccgcca

SEQ ID NO: 4656023 - DNA, 25 bp, Homo sapien
cttgtgtggaccttgcaagtgattc

SEQ ID NO: 4656024 - DNA, 25 bp, Homo sapien
ttgtgtggaccttgcaagtgattcc

SEQ ID NO: 4656025 - DNA, 25 bp, Homo sapien
tgtgtggaccttgcaagtgattccc

SEQ ID NO: 4656026 - DNA, 25 bp, Homo sapien
cgttcttctacgtgatccaacagca

SEQ ID NO: 4656027 - DNA, 25 bp, Homo sapien
catctcgttcttctacgtgatccaa

SEQ ID NO: 4656028 - DNA, 25 bp, Homo sapien
ggacctcatctcgttcttctacgtg

SEQ ID NO: 4656029 - DNA, 25 bp, Homo sapien
ggaggacctcatctcgttcttctac

SEQ ID NO: 4656030 - DNA, 25 bp, Homo sapien
ttaaatcagtgtatatttaacatac

SEQ ID NO: 4656031 - DNA, 25 bp, Homo sapien
ctggcttctgaatccatgaacgact

SEQ ID NO: 4656032 - DNA, 25 bp, Homo sapien
tggcttctgaatccatgaacgactt

SEQ ID NO: 4656033 - DNA, 25 bp, Homo sapien
cattctccgaatctgacttttgtgt

SEQ ID NO: 4656034 - DNA, 25 bp, Homo sapien
cttcattctccgaatctgacttttg

SEQ ID NO: 4656035 - DNA, 25 bp, Homo sapien
tctccgaatctgacttttgtgtttc

SEQ ID NO: 4656036 - DNA, 25 bp, Homo sapien
ctccgaatctgacttttgtgtttca

SEQ ID NO: 4656037 - DNA, 25 bp, Homo sapien
tcccagtgaaggagtagacacctag

SEQ ID NO: 4656038 - DNA, 25 bp, Homo sapien
cagtacactaattgggctctaatgc

SEQ ID NO: 4656039 - DNA, 25 bp, Homo sapien
aatccttattctgagggagttagcc

SEQ ID NO: 4656040 - DNA, 25 bp, Homo sapien
tcattgacgttaggcacaagtccca

SEQ ID NO: 4656041 - DNA, 25 bp, Homo sapien
ttgactctcctggagacaatcaatc

SEQ ID NO: 4656042 - DNA, 25 bp, Homo sapien
taagtatgcgttctgaattctttaa

SEQ ID NO: 4656043 - DNA, 25 bp, Homo sapien
tctcctggagacaatcaatctttaa

SEQ ID NO: 4656044 - DNA, 25 bp, Homo sapien
ttcagtaagtatgcgttctgaattc

SEQ ID NO: 4656045 - DNA, 25 bp, Homo sapien
cttccttcatcttgatgttaactgt

SEQ ID NO: 4656046 - DNA, 25 bp, Homo sapien
tgatgttaactgtaagttctctcat

SEQ ID NO: 4656047 - DNA, 25 bp, Homo sapien
cttcatcttgatgttaactgtaagt

SEQ ID NO: 4656048 - DNA, 25 bp, Homo sapien
aattctttaatcagatcttccttca

SEQ ID NO: 4656049 - DNA, 25 bp, Homo sapien
tcacaccggttagaacaattcagag

SEQ ID NO: 4656050 - DNA, 25 bp, Homo sapien
tgataactaacctccacatattggc

SEQ ID NO: 4656051 - DNA, 25 bp, Homo sapien
tcatataagctggttcacaagatac

SEQ ID NO: 4656052 - DNA, 25 bp, Homo sapien
gctaagtggatagacctgagcttca

SEQ ID NO: 4656053 - DNA, 25 bp, Homo sapien
caactaataataacaggacatctat

SEQ ID NO: 4656054 - DNA, 25 bp, Homo sapien
tgccaactaataataacaggacatc

SEQ ID NO: 4656055 - DNA, 25 bp, Homo sapien
taataacaggacatctatactatat

SEQ ID NO: 4656056 - DNA, 25 bp, Homo sapien
ctaataataacaggacatctatact

SEQ ID NO: 4656057 - DNA, 25 bp, Homo sapien
tgattctaagtccagctagtgaccc

SEQ ID NO: 4656058 - DNA, 25 bp, Homo sapien
gaataggcaaccgtccctgaactag

SEQ ID NO: 4656059 - DNA, 25 bp, Homo sapien
ttaaatcaggatctaaacaaggtcc

SEQ ID NO: 4656060 - DNA, 25 bp, Homo sapien
gaactagactggcaaactcgtggca

SEQ ID NO: 4656061 - DNA, 25 bp, Homo sapien
aattttaccttcattgcaacatcag

SEQ ID NO: 4656062 - DNA, 25 bp, Homo sapien
agttcgacttttgcctgttctgcat

SEQ ID NO: 4656063 - DNA, 25 bp, Homo sapien
tactgcttgcttacagacttggcat

SEQ ID NO: 4656064 - DNA, 25 bp, Homo sapien
gcatcatgctctagctttgttactt

SEQ ID NO: 4656065 - DNA, 25 bp, Homo sapien
tactttgggtaccactggcttggag

SEQ ID NO: 4656066 - DNA, 25 bp, Homo sapien
caaggaagctgtgcaatgactgacc

SEQ ID NO: 4656067 - DNA, 25 bp, Homo sapien
caatcggcagatggactactttggg

SEQ ID NO: 4656068 - DNA, 25 bp, Homo sapien
cttccctgagagtgaccaaccatta

SEQ ID NO: 4656069 - DNA, 25 bp, Homo sapien
gaaaaactgaatctctcacaatcct

SEQ ID NO: 4656070 - DNA, 25 bp, Homo sapien
tcacaatcctcaactaaacttaatc

SEQ ID NO: 4656071 - DNA, 25 bp, Homo sapien
gacaggttcacaaacaattgcttac

SEQ ID NO: 4656072 - DNA, 25 bp, Homo sapien
atgaaaaactgaatctctcacaatc

SEQ ID NO: 4656073 - DNA, 25 bp, Homo sapien
tcattttggattgacagtgatgcca

SEQ ID NO: 4656074 - DNA, 25 bp, Homo sapien
tctttgtagctgtatcttttgatat

SEQ ID NO: 4656075 - DNA, 25 bp, Homo sapien
cttaattactgcatccagttgcttc

SEQ ID NO: 4656076 - DNA, 25 bp, Homo sapien
gtgatgccagtttcttactatcttg

SEQ ID NO: 4656077 - DNA, 25 bp, Homo sapien
tacttagcaggaatgtatgacaata

SEQ ID NO: 4656078 - DNA, 25 bp, Homo sapien
tagcaggaatgtatgacaatattac

SEQ ID NO: 4656079 - DNA, 25 bp, Homo sapien
tcatattatacttagcaggaatgta

SEQ ID NO: 4656080 - DNA, 25 bp, Homo sapien
attatacttagcaggaatgtatgac

SEQ ID NO: 4656081 - DNA, 25 bp, Homo sapien
catggattcgttagctctgagccgt

SEQ ID NO: 4656082 - DNA, 25 bp, Homo sapien
gtagatgaacaaagctttaaagtga

SEQ ID NO: 4656083 - DNA, 25 bp, Homo sapien
ctttaaagtgaataaggacagcagt

SEQ ID NO: 4656084 - DNA, 25 bp, Homo sapien
gtcaaggatagatacttcacaagcc

SEQ ID NO: 4656085 - DNA, 25 bp, Homo sapien
acatttcaacggaacagagcctggc

SEQ ID NO: 4656086 - DNA, 25 bp, Homo sapien
tcaaagagcctaggctgacaccact

SEQ ID NO: 4656087 - DNA, 25 bp, Homo sapien
tgctcactgtgaatgaaatggtacc

SEQ ID NO: 4656088 - DNA, 25 bp, Homo sapien
ccgatgatagcctggtcaaagagcc

SEQ ID NO: 4656089 - DNA, 25 bp, Homo sapien
cggccagctctctcttaaatgtagc

SEQ ID NO: 4656090 - DNA, 25 bp, Homo sapien
ccagctctctcttaaatgtagcagc

SEQ ID NO: 4656091 - DNA, 25 bp, Homo sapien
aaatgtagcagctggaaacattctt

SEQ ID NO: 4656092 - DNA, 25 bp, Homo sapien
aatgtagcagctggaaacattcttt

SEQ ID NO: 4656093 - DNA, 25 bp, Homo sapien
agaaaggggaacttgaggctgggca

SEQ ID NO: 4656094 - DNA, 25 bp, Homo sapien
aaggggaacttgaggctgggcaggt

SEQ ID NO: 4656095 - DNA, 25 bp, Homo sapien
aaaggggaacttgaggctgggcagg

SEQ ID NO: 4656096 - DNA, 25 bp, Homo sapien
gggaacttgaggctgggcaggtctg

SEQ ID NO: 4656097 - DNA, 25 bp, Homo sapien
atgagttggtgttaaactgcattct

SEQ ID NO: 4656098 - DNA, 25 bp, Homo sapien
tctgaggagccctcttagggaacat

SEQ ID NO: 4656099 - DNA, 25 bp, Homo sapien
gattctgaggagccctcttagggaa

SEQ ID NO: 4656100 - DNA, 25 bp, Homo sapien
tgagttggtgttaaactgcattctt

SEQ ID NO: 4656101 - DNA, 25 bp, Homo sapien
tccagagccatgtgaacaaaacatt

SEQ ID NO: 4656102 - DNA, 25 bp, Homo sapien
ttccagagccatgtgaacaaaacat

SEQ ID NO: 4656103 - DNA, 25 bp, Homo sapien
taaggatagctagccagcctcaagg

SEQ ID NO: 4656104 - DNA, 25 bp, Homo sapien
gcagcagtgaagtgaacccagagtt

SEQ ID NO: 4656105 - DNA, 25 bp, Homo sapien
ttacatgcagaaacacagggtccag

SEQ ID NO: 4656106 - DNA, 25 bp, Homo sapien
aattacatgccggtgactttccagg

SEQ ID NO: 4656107 - DNA, 25 bp, Homo sapien
taccttagaagccaatagacacatg

SEQ ID NO: 4656108 - DNA, 25 bp, Homo sapien
gcacagacaccgatgtcagacaggg

SEQ ID NO: 4656109 - DNA, 25 bp, Homo sapien
agatgactggcagcctacccataag

SEQ ID NO: 4656110 - DNA, 25 bp, Homo sapien
cattaatgtttcttggcccatctgc

SEQ ID NO: 4656111 - DNA, 25 bp, Homo sapien
tcatgttgtaccccaaattccatct

SEQ ID NO: 4656112 - DNA, 25 bp, Homo sapien
tctcatgttgtaccccaaattccat

SEQ ID NO: 4656113 - DNA, 25 bp, Homo sapien
ctttctcatgttgtaccccaaattc

SEQ ID NO: 4656114 - DNA, 25 bp, Homo sapien
ttctcatgttgtaccccaaattcca

SEQ ID NO: 4656115 - DNA, 25 bp, Homo sapien
tgaaccattgagctgaggatcatct

SEQ ID NO: 4656116 - DNA, 25 bp, Homo sapien
gcttgattgcatgtacctagaggca

SEQ ID NO: 4656117 - DNA, 25 bp, Homo sapien
gactggaagttatggctcatggcca

SEQ ID NO: 4656118 - DNA, 25 bp, Homo sapien
gaagacatggagaagtgctgctcag

SEQ ID NO: 4656119 - DNA, 25 bp, Homo sapien
taaagtaattatattggctcattaa

SEQ ID NO: 4656120 - DNA, 25 bp, Homo sapien
ttaataataaagtaattatattggc

SEQ ID NO: 4656121 - DNA, 25 bp, Homo sapien
taataaagtaattatattggctcat

SEQ ID NO: 4656122 - DNA, 25 bp, Homo sapien
aataataaagtaattatattggctc

SEQ ID NO: 4656123 - DNA, 25 bp, Homo sapien
caactactattagctttacagtctt

SEQ ID NO: 4656124 - DNA, 25 bp, Homo sapien
atacttaattacctaaagaagtctg

SEQ ID NO: 4656125 - DNA, 25 bp, Homo sapien
tgacaactactattagctttacagt

SEQ ID NO: 4656126 - DNA, 25 bp, Homo sapien
actattagctttacagtctttactg

SEQ ID NO: 4656127 - DNA, 25 bp, Homo sapien
tgaaaataccattaccagccaggcg

SEQ ID NO: 4656128 - DNA, 25 bp, Homo sapien
cctaacttccaggtatgaaacaatt

SEQ ID NO: 4656129 - DNA, 25 bp, Homo sapien
ataccattaccagccaggcgctgtg

SEQ ID NO: 4656130 - DNA, 25 bp, Homo sapien
gtatgaaacaattctacagtaccta

SEQ ID NO: 4656131 - DNA, 25 bp, Homo sapien
caacacttcagatgcttgcggtgga

SEQ ID NO: 4656132 - DNA, 25 bp, Homo sapien
accagcagcatatcagagccggagc

SEQ ID NO: 4656133 - DNA, 25 bp, Homo sapien
tagcttctgaggtaaacacactttg

SEQ ID NO: 4656134 - DNA, 25 bp, Homo sapien
aatgaccagatggatgccaaaccag

SEQ ID NO: 4656135 - DNA, 25 bp, Homo sapien
cacggaatcggtcaaagacgacagc

SEQ ID NO: 4656136 - DNA, 25 bp, Homo sapien
ttgccgatgaactcaaacattttgg

SEQ ID NO: 4656137 - DNA, 25 bp, Homo sapien
caaacttgccgatgaactcaaacat

SEQ ID NO: 4656138 - DNA, 25 bp, Homo sapien
aacttgccgatgaactcaaacattt

SEQ ID NO: 4656139 - DNA, 25 bp, Homo sapien
tgagacagtgagtccctttgcctac

SEQ ID NO: 4656140 - DNA, 25 bp, Homo sapien
tgggatgagacagtgagtccctttg

SEQ ID NO: 4656141 - DNA, 25 bp, Homo sapien
gatgagacagtgagtccctttgcct

SEQ ID NO: 4656142 - DNA, 25 bp, Homo sapien
ggatgagacagtgagtccctttgcc

SEQ ID NO: 4656143 - DNA, 25 bp, Homo sapien
acggcagtcaaagatattgatttct

SEQ ID NO: 4656144 - DNA, 25 bp, Homo sapien
ctgagaacggcagtcaaagatattg

SEQ ID NO: 4656145 - DNA, 25 bp, Homo sapien
ggcagtcaaagatattgatttctgt

SEQ ID NO: 4656146 - DNA, 25 bp, Homo sapien
cagtcaaagatattgatttctgtaa

SEQ ID NO: 4656147 - DNA, 25 bp, Homo sapien
ctaccggtgatgactggcacattac

SEQ ID NO: 4656148 - DNA, 25 bp, Homo sapien
taccggtgatgactggcacattacg

SEQ ID NO: 4656149 - DNA, 25 bp, Homo sapien
cggtgatgactggcacattacgtgg

SEQ ID NO: 4656150 - DNA, 25 bp, Homo sapien
ccggtgatgactggcacattacgtg

SEQ ID NO: 4656151 - DNA, 25 bp, Homo sapien
tgaggatcttgttcgtgatggacgg

SEQ ID NO: 4656152 - DNA, 25 bp, Homo sapien
ggctagctacgggccggaagatgat

SEQ ID NO: 4656153 - DNA, 25 bp, Homo sapien
tggctagctacgggccggaagatga

SEQ ID NO: 4656154 - DNA, 25 bp, Homo sapien
gatcttgttcgtgatggacggcggc

SEQ ID NO: 4656155 - DNA, 25 bp, Homo sapien
gagagcgtaaaagctggtaggtgat

SEQ ID NO: 4656156 - DNA, 25 bp, Homo sapien
tccgagagcgtaaaagctggtaggt

SEQ ID NO: 4656157 - DNA, 25 bp, Homo sapien
gcgtaaaagctggtaggtgatgtcc

SEQ ID NO: 4656158 - DNA, 25 bp, Homo sapien
gagcgtaaaagctggtaggtgatgt

SEQ ID NO: 4656159 - DNA, 25 bp, Homo sapien
gccttagagactatagcatgcagat

SEQ ID NO: 4656160 - DNA, 25 bp, Homo sapien
gcatgcagatttttagcaagcgtta

SEQ ID NO: 4656161 - DNA, 25 bp, Homo sapien
cttcctttggtcgttgccttagaga

SEQ ID NO: 4656162 - DNA, 25 bp, Homo sapien
ggtggtgcgatcaagtgattcctgc

SEQ ID NO: 4656163 - DNA, 25 bp, Homo sapien
ccctaattggataatgagagatctg

SEQ ID NO: 4656164 - DNA, 25 bp, Homo sapien
cccaaataggccctaattggataat

SEQ ID NO: 4656165 - DNA, 25 bp, Homo sapien
gttatgtgtaggagaaagctagaaa

SEQ ID NO: 4656166 - DNA, 25 bp, Homo sapien
tgtaggagaaagctagaaaagcagc

SEQ ID NO: 4656167 - DNA, 25 bp, Homo sapien
cagagtcacaagatctcaggtatca

SEQ ID NO: 4656168 - DNA, 25 bp, Homo sapien
tcaaggtctgatgcctaaaaatctg

SEQ ID NO: 4656169 - DNA, 25 bp, Homo sapien
ttaagtgacattagcatgactggcc

SEQ ID NO: 4656170 - DNA, 25 bp, Homo sapien
gccgagatcagaagaagcatattac

SEQ ID NO: 4656171 - DNA, 25 bp, Homo sapien
ccacaaacaatgtaagaaccttaca

SEQ ID NO: 4656172 - DNA, 25 bp, Homo sapien
ataatattaaatgaccacaaacaat

SEQ ID NO: 4656173 - DNA, 25 bp, Homo sapien
tgaccacaaacaatgtaagaacctt

SEQ ID NO: 4656174 - DNA, 25 bp, Homo sapien
aataatattaaatgaccacaaacaa

SEQ ID NO: 4656175 - DNA, 25 bp, Homo sapien
tgccaggacttcatatacaggaatc

SEQ ID NO: 4656176 - DNA, 25 bp, Homo sapien
tagtaggttcagatgtctatcacag

SEQ ID NO: 4656177 - DNA, 25 bp, Homo sapien
gtcaattcctgcctactcccagaag

SEQ ID NO: 4656178 - DNA, 25 bp, Homo sapien
aaaatattccgatcaccccagagag

SEQ ID NO: 4656179 - DNA, 25 bp, Homo sapien
tagaggcagtccctatttccaggtc

SEQ ID NO: 4656180 - DNA, 25 bp, Homo sapien
aatgggcctttttaggcaggagcca

SEQ ID NO: 4656181 - DNA, 25 bp, Homo sapien
ttaggactatctgaggcaaactggt

SEQ ID NO: 4656182 - DNA, 25 bp, Homo sapien
tactgaatttagtgacacggtgtct

SEQ ID NO: 4656183 - DNA, 25 bp, Homo sapien
cctcaaaaggctaaaacaggccaga

SEQ ID NO: 4656184 - DNA, 25 bp, Homo sapien
tagtcacatgacatttatgcacaga

SEQ ID NO: 4656185 - DNA, 25 bp, Homo sapien
gaacccgcatacgttgctgatagga

SEQ ID NO: 4656186 - DNA, 25 bp, Homo sapien
tgttacaagactaggttacagtccc

SEQ ID NO: 4656187 - DNA, 25 bp, Homo sapien
gtcctagaatcgtacactgagccat

SEQ ID NO: 4656188 - DNA, 25 bp, Homo sapien
cttcagaaatgcagttggctttgag

SEQ ID NO: 4656189 - DNA, 25 bp, Homo sapien
ttcagaaatgcagttggctttgagt

SEQ ID NO: 4656190 - DNA, 25 bp, Homo sapien
gagtcctagaatcgtacactgagcc

SEQ ID NO: 4656191 - DNA, 25 bp, Homo sapien
gcttaggatcttgagcaggtgtcct

SEQ ID NO: 4656192 - DNA, 25 bp, Homo sapien
gcttaaagttcgagaatcagagaat

SEQ ID NO: 4656193 - DNA, 25 bp, Homo sapien
gaatatgataaatcccagtgtcctc

SEQ ID NO: 4656194 - DNA, 25 bp, Homo sapien
caggtgtcctgaatatgataaatcc

SEQ ID NO: 4656195 - DNA, 25 bp, Homo sapien
tcttctaaatgtgattgaataccat

SEQ ID NO: 4656196 - DNA, 25 bp, Homo sapien
gtgattgaataccatgaggcaagcc

SEQ ID NO: 4656197 - DNA, 25 bp, Homo sapien
caatccatgatcatttttcctggac

SEQ ID NO: 4656198 - DNA, 25 bp, Homo sapien
taaatgtgattgaataccatgaggc

SEQ ID NO: 4656199 - DNA, 25 bp, Homo sapien
ctgcaagaaccacttttaggaatac

SEQ ID NO: 4656200 - DNA, 25 bp, Homo sapien
tgcaagaaccacttttaggaatact

SEQ ID NO: 4656201 - DNA, 25 bp, Homo sapien
cccagtgtgaccgatgtgtgtagca

SEQ ID NO: 4656202 - DNA, 25 bp, Homo sapien
tttcaacgatgtactcaatctgcat

SEQ ID NO: 4656203 - DNA, 25 bp, Homo sapien
taggaagggcaaccgatttctcagt

SEQ ID NO: 4656204 - DNA, 25 bp, Homo sapien
aatgttttcaacgatgtactcaatc

SEQ ID NO: 4656205 - DNA, 25 bp, Homo sapien
aataggaagggcaaccgatttctca

SEQ ID NO: 4656206 - DNA, 25 bp, Homo sapien
tgtttaatgatctctgcaggaccat

SEQ ID NO: 4656207 - DNA, 25 bp, Homo sapien
gcaggaccatgagatatctagaaaa

SEQ ID NO: 4656208 - DNA, 25 bp, Homo sapien
caggatcatgtataggttgtgacaa

SEQ ID NO: 4656209 - DNA, 25 bp, Homo sapien
tagaaaaggatgagctgactgcatc

SEQ ID NO: 4656210 - DNA, 25 bp, Homo sapien
ggtttgcgtagaccttagtggttgc

SEQ ID NO: 4656211 - DNA, 25 bp, Homo sapien
tccgagagcaacagcgtgctactgc

SEQ ID NO: 4656212 - DNA, 25 bp, Homo sapien
ttcttagaaaggtgacgcgaaggcg

SEQ ID NO: 4656213 - DNA, 25 bp, Homo sapien
ttgcgagcacgaacgagcagccaag

SEQ ID NO: 4656214 - DNA, 25 bp, Homo sapien
gcccagcccgaccggcagcgtgcac

SEQ ID NO: 4656215 - DNA, 25 bp, Homo sapien
ccacggaaataacgacgccgcctcg

SEQ ID NO: 4656216 - DNA, 25 bp, Homo sapien
gaaataacgacgccgcctcggccgc

SEQ ID NO: 4656217 - DNA, 25 bp, Homo sapien
cagcccagcccgaccggcagcgtgc

SEQ ID NO: 4656218 - DNA, 25 bp, Homo sapien
cgtggtcacccgcgccgccacgcac

SEQ ID NO: 4656219 - DNA, 25 bp, Homo sapien
caaggcactattcagggtcccctct

SEQ ID NO: 4656220 - DNA, 25 bp, Homo sapien
ggcagctaccgaagtcaatcaaggt

SEQ ID NO: 4656221 - DNA, 25 bp, Homo sapien
tctggcccgaaaagaacaactccag

SEQ ID NO: 4656222 - DNA, 25 bp, Homo sapien
atcaaggtagcccttcatctggcca

SEQ ID NO: 4656223 - DNA, 25 bp, Homo sapien
ttgggtaatgtccacccagtttgta

SEQ ID NO: 4656224 - DNA, 25 bp, Homo sapien
acccagtttgtattgcttttctcca

SEQ ID NO: 4656225 - DNA, 25 bp, Homo sapien
atactgagctcccatcctgaatcgt

SEQ ID NO: 4656226 - DNA, 25 bp, Homo sapien
tcctgaatcgtcatcatctacagaa

SEQ ID NO: 4656227 - DNA, 25 bp, Homo sapien
tctaccccttccagatgctgaactt

SEQ ID NO: 4656228 - DNA, 25 bp, Homo sapien
aagtttagaaagcacaatcgtcatt

SEQ ID NO: 4656229 - DNA, 25 bp, Homo sapien
aatcgtcattctaccccttccagat

SEQ ID NO: 4656230 - DNA, 25 bp, Homo sapien
gaaagcacaatcgtcattctacccc

SEQ ID NO: 4656231 - DNA, 25 bp, Homo sapien
tatcatgaagtagttctcccaactt

SEQ ID NO: 4656232 - DNA, 25 bp, Homo sapien
agcttatcatgaagtagttctccca

SEQ ID NO: 4656233 - DNA, 25 bp, Homo sapien
catgaagtagttctcccaactttaa

SEQ ID NO: 4656234 - DNA, 25 bp, Homo sapien
cttatcatgaagtagttctcccaac

SEQ ID NO: 4656235 - DNA, 25 bp, Homo sapien
cttgatagcttgttcaaaattgaga

SEQ ID NO: 4656236 - DNA, 25 bp, Homo sapien
catcatttcaatagcagacatggct

SEQ ID NO: 4656237 - DNA, 25 bp, Homo sapien
tgggatccatcatttcaatagcaga

SEQ ID NO: 4656238 - DNA, 25 bp, Homo sapien
aacttggtttccaatcatgccagca

SEQ ID NO: 4656239 - DNA, 25 bp, Homo sapien
gcaaaaacatgtatccataatccct

SEQ ID NO: 4656240 - DNA, 25 bp, Homo sapien
tcaggcaaggtgagatctttaattt

SEQ ID NO: 4656241 - DNA, 25 bp, Homo sapien
tcagttcaggcaaggtgagatcttt

SEQ ID NO: 4656242 - DNA, 25 bp, Homo sapien
tccataatccctatcagttcaggca

SEQ ID NO: 4656243 - DNA, 25 bp, Homo sapien
tctggattatgaatgtaaaggcacg

SEQ ID NO: 4656244 - DNA, 25 bp, Homo sapien
tgtctgtgccagtgaatggccttct

SEQ ID NO: 4656245 - DNA, 25 bp, Homo sapien
cagtgaatggccttctaaccacgtt

SEQ ID NO: 4656246 - DNA, 25 bp, Homo sapien
gcaaaagccttcatagcaggatctt

SEQ ID NO: 4656247 - DNA, 25 bp, Homo sapien
caggcaagcaccgtcaatggatatt

SEQ ID NO: 4656248 - DNA, 25 bp, Homo sapien
ataatatcgccattgaaagacagac

SEQ ID NO: 4656249 - DNA, 25 bp, Homo sapien
cagtaaacattagtccaggcaagca

SEQ ID NO: 4656250 - DNA, 25 bp, Homo sapien
tcaagtgctgactgatcaatgtgga

SEQ ID NO: 4656251 - DNA, 25 bp, Homo sapien
tcttttaattagtctcctactgatg

SEQ ID NO: 4656252 - DNA, 25 bp, Homo sapien
cagcaaagcacttgattgtatgaat

SEQ ID NO: 4656253 - DNA, 25 bp, Homo sapien
acatcttttaattagtctcctactg

SEQ ID NO: 4656254 - DNA, 25 bp, Homo sapien
cacttgattgtatgaatgtaacatc

SEQ ID NO: 4656255 - DNA, 25 bp, Homo sapien
tattcatgaaaatcaatcagttcta

SEQ ID NO: 4656256 - DNA, 25 bp, Homo sapien
gacagagtcatttgaccatccagac

SEQ ID NO: 4656257 - DNA, 25 bp, Homo sapien
tctttgaagatagagcatgggatca

SEQ ID NO: 4656258 - DNA, 25 bp, Homo sapien
tataaagcacgtttgcatgctgatg

SEQ ID NO: 4656259 - DNA, 25 bp, Homo sapien
cagaagttatcacccttaggaatac

SEQ ID NO: 4656260 - DNA, 25 bp, Homo sapien
tctgtcacactgttagccattttaa

SEQ ID NO: 4656261 - DNA, 25 bp, Homo sapien
tttaaatccataagtcattgactga

SEQ ID NO: 4656262 - DNA, 25 bp, Homo sapien
ctgtaactcgaagatctgtcacact

SEQ ID NO: 4656263 - DNA, 25 bp, Homo sapien
ttttaaatccataagtcattgactg

SEQ ID NO: 4656264 - DNA, 25 bp, Homo sapien
tatgaaaatgtaaaacttgtgaatt

SEQ ID NO: 4656265 - DNA, 25 bp, Homo sapien
ttaaaaggaaacatatgaaaatgta

SEQ ID NO: 4656266 - DNA, 25 bp, Homo sapien
tgaaaatgtaaaacttgtgaattaa

SEQ ID NO: 4656267 - DNA, 25 bp, Homo sapien
catatgaaaatgtaaaacttgtgaa

SEQ ID NO: 4656268 - DNA, 25 bp, Homo sapien
ctttactcttctttgcatgtcatcc

SEQ ID NO: 4656269 - DNA, 25 bp, Homo sapien
tctagttcaacttctggatctcttt

SEQ ID NO: 4656270 - DNA, 25 bp, Homo sapien
tttcttctccttgtcgacttcgagt

SEQ ID NO: 4656271 - DNA, 25 bp, Homo sapien
cttctccttgtcgacttcgagtact

SEQ ID NO: 4656272 - DNA, 25 bp, Homo sapien
ctagttcaacttctggatctctttc

SEQ ID NO: 4656273 - DNA, 25 bp, Homo sapien
gaagtttctatatcaacagcactga

SEQ ID NO: 4656274 - DNA, 25 bp, Homo sapien
gaatctcgacaaaggttcagcaact

SEQ ID NO: 4656275 - DNA, 25 bp, Homo sapien
ttacaggcaccttcacttacaggct

SEQ ID NO: 4656276 - DNA, 25 bp, Homo sapien
gatactgtggcgctctggtgcatca

SEQ ID NO: 4656277 - DNA, 25 bp, Homo sapien
gttaaaagatgcaaagcccgtgaaa

SEQ ID NO: 4656278 - DNA, 25 bp, Homo sapien
gactaaaagttaaaagatgcaaagc

SEQ ID NO: 4656279 - DNA, 25 bp, Homo sapien
taaaagatgcaaagcccgtgaaagg

SEQ ID NO: 4656280 - DNA, 25 bp, Homo sapien
aaagttaaaagatgcaaagcccgtg

SEQ ID NO: 4656281 - DNA, 25 bp, Homo sapien
tgtcagtaacacacgagtaaatttc

SEQ ID NO: 4656282 - DNA, 25 bp, Homo sapien
tcactctgctgaatactgctaaaca

SEQ ID NO: 4656283 - DNA, 25 bp, Homo sapien
taaaggctataagcactgtcagtaa

SEQ ID NO: 4656284 - DNA, 25 bp, Homo sapien
cacacgagtaaatttcactctgctg

SEQ ID NO: 4656285 - DNA, 25 bp, Homo sapien
gcacttcaagggagaagtttcagaa

SEQ ID NO: 4656286 - DNA, 25 bp, Homo sapien
ggatcaggagcacttcaagggagaa

SEQ ID NO: 4656287 - DNA, 25 bp, Homo sapien
tcagaactgcttcactcaggaattc

SEQ ID NO: 4656288 - DNA, 25 bp, Homo sapien
gaactgcttcactcaggaattccag

SEQ ID NO: 4656289 - DNA, 25 bp, Homo sapien
gatttcttgagaaagtcatcagtgt

SEQ ID NO: 4656290 - DNA, 25 bp, Homo sapien
atttcttgagaaagtcatcagtgtt

SEQ ID NO: 4656291 - DNA, 25 bp, Homo sapien
tttcttgagaaagtcatcagtgtta

SEQ ID NO: 4656292 - DNA, 25 bp, Homo sapien
ttcaccacttataaattattcacaa

SEQ ID NO: 4656293 - DNA, 25 bp, Homo sapien
aattaatctgtaattgacttgaatt

SEQ ID NO: 4656294 - DNA, 25 bp, Homo sapien
tggtaaaaattggatccctattcac

SEQ ID NO: 4656295 - DNA, 25 bp, Homo sapien
aattggatccctattcaccacttat

SEQ ID NO: 4656296 - DNA, 25 bp, Homo sapien
gctgtaatgacattggttttcataa

SEQ ID NO: 4656297 - DNA, 25 bp, Homo sapien
tggttttcataaactatgcacttaa

SEQ ID NO: 4656298 - DNA, 25 bp, Homo sapien
tgcacttaatacaggatgtccagat

SEQ ID NO: 4656299 - DNA, 25 bp, Homo sapien
gatcctgttaggatagaaaatggtt

SEQ ID NO: 4656300 - DNA, 25 bp, Homo sapien
tcaatttttgagcttctgcaacagc

SEQ ID NO: 4656301 - DNA, 25 bp, Homo sapien
aagatctgctgcttgaaccatcaat

SEQ ID NO: 4656302 - DNA, 25 bp, Homo sapien
tttgtagtatcattctgggcctgga

SEQ ID NO: 4656303 - DNA, 25 bp, Homo sapien
ccttttgtagtatcattctgggcct

SEQ ID NO: 4656304 - DNA, 25 bp, Homo sapien
gagtttaattagagggcatccagct

SEQ ID NO: 4656305 - DNA, 25 bp, Homo sapien
caaaaagagagtcgtgggaatccca

SEQ ID NO: 4656306 - DNA, 25 bp, Homo sapien
taggagatagtacacccagggaagg

SEQ ID NO: 4656307 - DNA, 25 bp, Homo sapien
tgggatctggcattacctccgggta

SEQ ID NO: 4656308 - DNA, 25 bp, Homo sapien
aaggaggaagtcagagacaatgtgt

SEQ ID NO: 4656309 - DNA, 25 bp, Homo sapien
gaggaagtcagagacaatgtgtaaa

SEQ ID NO: 4656310 - DNA, 25 bp, Homo sapien
ggaggaagtcagagacaatgtgtaa

SEQ ID NO: 4656311 - DNA, 25 bp, Homo sapien
aggaggaagtcagagacaatgtgta

SEQ ID NO: 4656312 - DNA, 25 bp, Homo sapien
catattttatgtgtgatgcaagacc

SEQ ID NO: 4656313 - DNA, 25 bp, Homo sapien
gtattatctacctcaagcttgtccc

SEQ ID NO: 4656314 - DNA, 25 bp, Homo sapien
aaaacaagcttagagtactccttcg

SEQ ID NO: 4656315 - DNA, 25 bp, Homo sapien
cacttgcagcccagaacaagtttga

SEQ ID NO: 4656316 - DNA, 25 bp, Homo sapien
catgcttaggctctgaaaccctgta

SEQ ID NO: 4656317 - DNA, 25 bp, Homo sapien
tcaacatgcttaggctctgaaaccc

SEQ ID NO: 4656318 - DNA, 25 bp, Homo sapien
tttcaacatgcttaggctctgaaac

SEQ ID NO: 4656319 - DNA, 25 bp, Homo sapien
aacatgcttaggctctgaaaccctg

SEQ ID NO: 4656320 - DNA, 25 bp, Homo sapien
tattctatctattaatcttgcaaaa

SEQ ID NO: 4656321 - DNA, 25 bp, Homo sapien
tcttgcaaaatagttcaccatttct

SEQ ID NO: 4656322 - DNA, 25 bp, Homo sapien
tagcctctggttcacaaggggttca

SEQ ID NO: 4656323 - DNA, 25 bp, Homo sapien
ttttgcatatcgagggaaggtaggt

SEQ ID NO: 4656324 - DNA, 25 bp, Homo sapien
gaacacatggtgactgttcactaaa

SEQ ID NO: 4656325 - DNA, 25 bp, Homo sapien
gaaagaacacatggtgactgttcac

SEQ ID NO: 4656326 - DNA, 25 bp, Homo sapien
tcttgaaagaacacatggtgactgt

SEQ ID NO: 4656327 - DNA, 25 bp, Homo sapien
acatggtgactgttcactaaattca

SEQ ID NO: 4656328 - DNA, 25 bp, Homo sapien
cacagtatgtttatccactgaccag

SEQ ID NO: 4656329 - DNA, 25 bp, Homo sapien
aatcatatagccttttgagtccagc

SEQ ID NO: 4656330 - DNA, 25 bp, Homo sapien
tgaccagctcaagaacatttgggtt

SEQ ID NO: 4656331 - DNA, 25 bp, Homo sapien
ccagcataatgcagtggagattcat

SEQ ID NO: 4656332 - DNA, 25 bp, Homo sapien
ggaaagcaccggaggactgacaaaa

SEQ ID NO: 4656333 - DNA, 25 bp, Homo sapien
caaagacctttttgttatccaccag

SEQ ID NO: 4656334 - DNA, 25 bp, Homo sapien
gcatgagatgagttccaaagacctt

SEQ ID NO: 4656335 - DNA, 25 bp, Homo sapien
gactgacaaaagaccgaagtgcatc

SEQ ID NO: 4656336 - DNA, 25 bp, Homo sapien
cagtgagtaacaaaggagtcgatac

SEQ ID NO: 4656337 - DNA, 25 bp, Homo sapien
cagtccttagcctggtgattattat

SEQ ID NO: 4656338 - DNA, 25 bp, Homo sapien
gagtcgatacagtccttagcctggt

SEQ ID NO: 4656339 - DNA, 25 bp, Homo sapien
gtaacaaaggagtcgatacagtcct

SEQ ID NO: 4656340 - DNA, 25 bp, Homo sapien
cattatgacaatccaaattgtagct

SEQ ID NO: 4656341 - DNA, 25 bp, Homo sapien
tatgacaatccaaattgtagctctt

SEQ ID NO: 4656342 - DNA, 25 bp, Homo sapien
gtacccattatgacaatccaaattg

SEQ ID NO: 4656343 - DNA, 25 bp, Homo sapien
ttttaaagtacccattatgacaatc

SEQ ID NO: 4656344 - DNA, 25 bp, Homo sapien
gaatatgaccaagcttatctctctg

SEQ ID NO: 4656345 - DNA, 25 bp, Homo sapien
tgtcgagccctgttatgtccatgga

SEQ ID NO: 4656346 - DNA, 25 bp, Homo sapien
aagcttatctctctgtcgagccctg

SEQ ID NO: 4656347 - DNA, 25 bp, Homo sapien
aattcctcaagaatatgaccaagct

SEQ ID NO: 4656348 - DNA, 25 bp, Homo sapien
ggacaaagtgtgtgcatcatttaat

SEQ ID NO: 4656349 - DNA, 25 bp, Homo sapien
cttcaggtcttatcaatattgctgc

SEQ ID NO: 4656350 - DNA, 25 bp, Homo sapien
tcattttgtaaacgttggtgtaaga

SEQ ID NO: 4656351 - DNA, 25 bp, Homo sapien
cgtacagctaaaaagaatatgagca

SEQ ID NO: 4656352 - DNA, 25 bp, Homo sapien
tcaacagcatggtgtgaagcgctgc

SEQ ID NO: 4656353 - DNA, 25 bp, Homo sapien
gaaggtactgtatcataatgcgaag

SEQ ID NO: 4656354 - DNA, 25 bp, Homo sapien
tgtagagttccaattcaaagccact

SEQ ID NO: 4656355 - DNA, 25 bp, Homo sapien
tgcgaaggttatggtaaaggaccca

SEQ ID NO: 4656356 - DNA, 25 bp, Homo sapien
tatcaacacatatattaacgataga

SEQ ID NO: 4656357 - DNA, 25 bp, Homo sapien
tcaaataatgctttaggtctttaaa

SEQ ID NO: 4656358 - DNA, 25 bp, Homo sapien
cacagttcagttcagtctataaata

SEQ ID NO: 4656359 - DNA, 25 bp, Homo sapien
atgaacataaggattaattttccct

SEQ ID NO: 4656360 - DNA, 25 bp, Homo sapien
ccatttgagagccatcggcacgact

SEQ ID NO: 4656361 - DNA, 25 bp, Homo sapien
gagagccatcggcacgactcaatgt

SEQ ID NO: 4656362 - DNA, 25 bp, Homo sapien
gcacgactcaatgttgacatcaacc

SEQ ID NO: 4656363 - DNA, 25 bp, Homo sapien
gacatcaaccatgcgtaaaggaatt

SEQ ID NO: 4656364 - DNA, 25 bp, Homo sapien
tctttcagcttgtatactaaattaa

SEQ ID NO: 4656365 - DNA, 25 bp, Homo sapien
aatctttcagcttgtatactaaatt

SEQ ID NO: 4656366 - DNA, 25 bp, Homo sapien
agaaaaacgtaatcttccataatct

SEQ ID NO: 4656367 - DNA, 25 bp, Homo sapien
cctccctcttgcattactgcaaaag

SEQ ID NO: 4656368 - DNA, 25 bp, Homo sapien
gatatgcttggctcattgtgatctc

SEQ ID NO: 4656369 - DNA, 25 bp, Homo sapien
ttccagcacacatgttctgatatgc

SEQ ID NO: 4656370 - DNA, 25 bp, Homo sapien
ttggctcattgtgatctctcggctc

SEQ ID NO: 4656371 - DNA, 25 bp, Homo sapien
cacatgttctgatatgcttggctca

SEQ ID NO: 4656372 - DNA, 25 bp, Homo sapien
gcaaacctgtgttcataccgaactt

SEQ ID NO: 4656373 - DNA, 25 bp, Homo sapien
cacactgttgaatggagcaaacctg

SEQ ID NO: 4656374 - DNA, 25 bp, Homo sapien
tatcaagctcaaacttcggtttacg

SEQ ID NO: 4656375 - DNA, 25 bp, Homo sapien
cggtttacgtactttgccgtccatg

SEQ ID NO: 4656376 - DNA, 25 bp, Homo sapien
aaagtgcttactagctgccacatac

SEQ ID NO: 4656377 - DNA, 25 bp, Homo sapien
tttgcctgttgaaagtgcttactag

SEQ ID NO: 4656378 - DNA, 25 bp, Homo sapien
catttttgcctgttgaaagtgctta

SEQ ID NO: 4656379 - DNA, 25 bp, Homo sapien
ctgttgaaagtgcttactagctgcc

SEQ ID NO: 4656380 - DNA, 25 bp, Homo sapien
caaactactgattaaaacagaaatg

SEQ ID NO: 4656381 - DNA, 25 bp, Homo sapien
aatcagatcagtctggatcttatgc

SEQ ID NO: 4656382 - DNA, 25 bp, Homo sapien
tgagctatgaatcagatcagtctgg

SEQ ID NO: 4656383 - DNA, 25 bp, Homo sapien
caatgcttacattttgagctatgaa

SEQ ID NO: 4656384 - DNA, 25 bp, Homo sapien
tcctttttgtgtcctcctgccaata

SEQ ID NO: 4656385 - DNA, 25 bp, Homo sapien
cataaccacaaagttgggtttggca

SEQ ID NO: 4656386 - DNA, 25 bp, Homo sapien
gattcctttttgtgtcctcctgcca

SEQ ID NO: 4656387 - DNA, 25 bp, Homo sapien
tcctgccaataacttcataaccaca

SEQ ID NO: 4656388 - DNA, 25 bp, Homo sapien
tagctccaggtaactgatagaacta

SEQ ID NO: 4656389 - DNA, 25 bp, Homo sapien
gctctgaaatgatgacgtagcatgg

SEQ ID NO: 4656390 - DNA, 25 bp, Homo sapien
ggtcagcacactttttagctccagg

SEQ ID NO: 4656391 - DNA, 25 bp, Homo sapien
ggaagaaaaggtgcacaacacacac

SEQ ID NO: 4656392 - DNA, 25 bp, Homo sapien
tattcagatggtacacaaaacaaag

SEQ ID NO: 4656393 - DNA, 25 bp, Homo sapien
tctacaaatattcagatggtacaca

SEQ ID NO: 4656394 - DNA, 25 bp, Homo sapien
aaaacgaaactcaattaatgtatct

SEQ ID NO: 4656395 - DNA, 25 bp, Homo sapien
gttcttagaaacaaggcagcacaaa

SEQ ID NO: 4656396 - DNA, 25 bp, Homo sapien
agcagagaaatcaaattcaggagga

SEQ ID NO: 4656397 - DNA, 25 bp, Homo sapien
taatgagttgttacccaagaaatcc

SEQ ID NO: 4656398 - DNA, 25 bp, Homo sapien
gaaagaagactctgcccctttatgg

SEQ ID NO: 4656399 - DNA, 25 bp, Homo sapien
tctcacttcccgtgatgtggagcct

SEQ ID NO: 4656400 - DNA, 25 bp, Homo sapien
ggagcctggtgatgtgccctctaag

SEQ ID NO: 4656401 - DNA, 25 bp, Homo sapien
tcttaacatggacaaagacctactg

SEQ ID NO: 4656402 - DNA, 25 bp, Homo sapien
tggataacgtttttggaactactca

SEQ ID NO: 4656403 - DNA, 25 bp, Homo sapien
tggaactactcaaatgttaaagagc

SEQ ID NO: 4656404 - DNA, 25 bp, Homo sapien
caagtgtttaattaatcccttgatt

SEQ ID NO: 4656405 - DNA, 25 bp, Homo sapien
aagtattaccgctcttggaaaggag

SEQ ID NO: 4656406 - DNA, 25 bp, Homo sapien
cagtaattaccagccagaaacagtt

SEQ ID NO: 4656407 - DNA, 25 bp, Homo sapien
taagatatttgaagctgagaaccct

SEQ ID NO: 4656408 - DNA, 25 bp, Homo sapien
gctaagagtattgcctgctacagag

SEQ ID NO: 4656409 - DNA, 25 bp, Homo sapien
tgaacttttccaaacagggtgcact

SEQ ID NO: 4656410 - DNA, 25 bp, Homo sapien
gaaacaggcacacttgtcaaagagt

SEQ ID NO: 4656411 - DNA, 25 bp, Homo sapien
gatggcacctcccagtttgagacca

SEQ ID NO: 4656412 - DNA, 25 bp, Homo sapien
tatctcagtcccttactctaggagc

SEQ ID NO: 4656413 - DNA, 25 bp, Homo sapien
gctgccctagggatcacgacagatt

SEQ ID NO: 4656414 - DNA, 25 bp, Homo sapien
gacagattcagccaacaatggagag

SEQ ID NO: 4656415 - DNA, 25 bp, Homo sapien
gaaagctttgtgctcaccacgtgtg

SEQ ID NO: 4656416 - DNA, 25 bp, Homo sapien
taatggcctctgagcggcatatggc

SEQ ID NO: 4656417 - DNA, 25 bp, Homo sapien
gacttcccagtaaggctctctaagg

SEQ ID NO: 4656418 - DNA, 25 bp, Homo sapien
tacagagcatctagctggtgcgctg

SEQ ID NO: 4656419 - DNA, 25 bp, Homo sapien
gatctgtgcctactttattactgga

SEQ ID NO: 4656420 - DNA, 25 bp, Homo sapien
taaggccccagagatcgtttgatcc

SEQ ID NO: 4656421 - DNA, 25 bp, Homo sapien
agttgataagaaaatgggacctgcc

SEQ ID NO: 4656422 - DNA, 25 bp, Homo sapien
tacttgatcagcgtgaaaagcggaa

SEQ ID NO: 4656423 - DNA, 25 bp, Homo sapien
catatttcacaacagggccgaagag

SEQ ID NO: 4656424 - DNA, 25 bp, Homo sapien
caatggcctagagcactgactgtta

SEQ ID NO: 4656425 - DNA, 25 bp, Homo sapien
attccctacactcaggtgtcctaag

SEQ ID NO: 4656426 - DNA, 25 bp, Homo sapien
gcctagtttcctactaaatgatggg

SEQ ID NO: 4656427 - DNA, 25 bp, Homo sapien
aaatgatgggctttgcggtgaagcc

SEQ ID NO: 4656428 - DNA, 25 bp, Homo sapien
tcctaaggacttgaccttgtgcaag

SEQ ID NO: 4656429 - DNA, 25 bp, Homo sapien
tgctctaagtatgagggacaccttc

SEQ ID NO: 4656430 - DNA, 25 bp, Homo sapien
tgtctgtagattccgagtccaagtg

SEQ ID NO: 4656431 - DNA, 25 bp, Homo sapien
taatgggtgctctcatgctctaagt

SEQ ID NO: 4656432 - DNA, 25 bp, Homo sapien
tctgagacagacaagcaagcagccc

SEQ ID NO: 4656433 - DNA, 25 bp, Homo sapien
cacttctgaggacatgacacctgcg

SEQ ID NO: 4656434 - DNA, 25 bp, Homo sapien
gtcacagaagttggagaatacactt

SEQ ID NO: 4656435 - DNA, 25 bp, Homo sapien
gagatcaaccgactattccaggatg

SEQ ID NO: 4656436 - DNA, 25 bp, Homo sapien
ccaggatgtatttcagtcccttcag

SEQ ID NO: 4656437 - DNA, 25 bp, Homo sapien
tggaagaggcttcgggggagccgga

SEQ ID NO: 4656438 - DNA, 25 bp, Homo sapien
cagcttgtcatccccgacggacagg

SEQ ID NO: 4656439 - DNA, 25 bp, Homo sapien
tcgggggagccggagaactgggcca

SEQ ID NO: 4656440 - DNA, 25 bp, Homo sapien
ttgtcatccccgacggacaggagga

SEQ ID NO: 4656441 - DNA, 25 bp, Homo sapien
accacacctggctaattttgtattt

SEQ ID NO: 4656442 - DNA, 25 bp, Homo sapien
ggtgttggagttttgcttttatcgc

SEQ ID NO: 4656443 - DNA, 25 bp, Homo sapien
ttggtgttggagttttgcttttatc

SEQ ID NO: 4656444 - DNA, 25 bp, Homo sapien
tttagtatatcggggtttctccatg

SEQ ID NO: 4656445 - DNA, 25 bp, Homo sapien
tgagtcccttggctgtgaatgtccc

SEQ ID NO: 4656446 - DNA, 25 bp, Homo sapien
gaatgtcccctatgcttctcttcag

SEQ ID NO: 4656447 - DNA, 25 bp, Homo sapien
tgagtgttttagtgagcctgagtcc

SEQ ID NO: 4656448 - DNA, 25 bp, Homo sapien
taccccagtgggacaaagtggctgg

SEQ ID NO: 4656449 - DNA, 25 bp, Homo sapien
ttgaggatggaggtagtttgttcct

SEQ ID NO: 4656450 - DNA, 25 bp, Homo sapien
attgaggatggaggtagtttgttcc

SEQ ID NO: 4656451 - DNA, 25 bp, Homo sapien
aagccaacctaagtcctcaggaaga

SEQ ID NO: 4656452 - DNA, 25 bp, Homo sapien
agaaaaagccaacctaagtcctcag

SEQ ID NO: 4656453 - DNA, 25 bp, Homo sapien
aaagccaacctaagtcctcaggaag

SEQ ID NO: 4656454 - DNA, 25 bp, Homo sapien
agccaacctaagtcctcaggaagaa

SEQ ID NO: 4656455 - DNA, 25 bp, Homo sapien
ggagaatcagttgcctcacgtgcat

SEQ ID NO: 4656456 - DNA, 25 bp, Homo sapien
gatttgagccatctgtgtggtcacc

SEQ ID NO: 4656457 - DNA, 25 bp, Homo sapien
cacgtgcattgcgttcttcggcatt

SEQ ID NO: 4656458 - DNA, 25 bp, Homo sapien
caaaacattgtccacctgccgtaat

SEQ ID NO: 4656459 - DNA, 25 bp, Homo sapien
tccgctagggctcttttatgagcca

SEQ ID NO: 4656460 - DNA, 25 bp, Homo sapien
ccagcttggccctttgtccgctagg

SEQ ID NO: 4656461 - DNA, 25 bp, Homo sapien
ccactgtggtatccgcctggtggct

SEQ ID NO: 4656462 - DNA, 25 bp, Homo sapien
ttttatgagccaagtcatcagggca

SEQ ID NO: 4656463 - DNA, 25 bp, Homo sapien
tgtcctttgtcgggggctccttcca

SEQ ID NO: 4656464 - DNA, 25 bp, Homo sapien
gctctgactcaacttggcagctggg

SEQ ID NO: 4656465 - DNA, 25 bp, Homo sapien
ctctttgccgctctgactcaacttg

SEQ ID NO: 4656466 - DNA, 25 bp, Homo sapien
ttgccgctctgactcaacttggcag

SEQ ID NO: 4656467 - DNA, 25 bp, Homo sapien
cagagccgccagtctccagtgtttc

SEQ ID NO: 4656468 - DNA, 25 bp, Homo sapien
taggcaaggctgacaaggaaccgaa

SEQ ID NO: 4656469 - DNA, 25 bp, Homo sapien
ggacagagccgccagtctccagtgt

SEQ ID NO: 4656470 - DNA, 25 bp, Homo sapien
ggccccacgctaggcaaggctgaca

SEQ ID NO: 4656471 - DNA, 25 bp, Homo sapien
acttgaggtgtctgtaaggtgcccc

SEQ ID NO: 4656472 - DNA, 25 bp, Homo sapien
gaccaggatcctaccatttacgctg

SEQ ID NO: 4656473 - DNA, 25 bp, Homo sapien
tcatggaccttgttctgccaagctg

SEQ ID NO: 4656474 - DNA, 25 bp, Homo sapien
tattctgggcgtgtagcaactgtgt

SEQ ID NO: 4656475 - DNA, 25 bp, Homo sapien
cattgagattgggagtctgcagccc

SEQ ID NO: 4656476 - DNA, 25 bp, Homo sapien
tcagaatgtacaaaagtgtctcctc

SEQ ID NO: 4656477 - DNA, 25 bp, Homo sapien
tctggcagggatctgcagtcattca

SEQ ID NO: 4656478 - DNA, 25 bp, Homo sapien
gaagctgctaggattcccgtttgaa

SEQ ID NO: 4656479 - DNA, 25 bp, Homo sapien
ccatagaaggcgtaacggaggcttt

SEQ ID NO: 4656480 - DNA, 25 bp, Homo sapien
gttagcggctgaccagacgaggcat

SEQ ID NO: 4656481 - DNA, 25 bp, Homo sapien
ggccttggcttcatacgcactagaa

SEQ ID NO: 4656482 - DNA, 25 bp, Homo sapien
tgtgaggttgcccacgatggttagc

SEQ ID NO: 4656483 - DNA, 25 bp, Homo sapien
ggctgtgttcattgcacatttacca

SEQ ID NO: 4656484 - DNA, 25 bp, Homo sapien
cgattttccgggtccagttctgtca

SEQ ID NO: 4656485 - DNA, 25 bp, Homo sapien
tgtcagtccgttcagtatttgttct

SEQ ID NO: 4656486 - DNA, 25 bp, Homo sapien
ggtccagttctgtcagtccgttcag

SEQ ID NO: 4656487 - DNA, 25 bp, Homo sapien
aattctcagagggttctggtgtctt

SEQ ID NO: 4656488 - DNA, 25 bp, Homo sapien
tctgggccagctttgcttgtgcacc

SEQ ID NO: 4656489 - DNA, 25 bp, Homo sapien
actgcattctcctgtggccagatgc

SEQ ID NO: 4656490 - DNA, 25 bp, Homo sapien
gcacctgcgaatgtaatgattgtct

SEQ ID NO: 4656491 - DNA, 25 bp, Homo sapien
agaggtcatggaaggctcccggcac

SEQ ID NO: 4656492 - DNA, 25 bp, Homo sapien
gagagccagagaggtcatggaaggc

SEQ ID NO: 4656493 - DNA, 25 bp, Homo sapien
cattcttgtcgcttgagacagaggg

SEQ ID NO: 4656494 - DNA, 25 bp, Homo sapien
tcattcttgtcgcttgagacagagg

SEQ ID NO: 4656495 - DNA, 25 bp, Homo sapien
ctgagtcatagggagccatgttcct

SEQ ID NO: 4656496 - DNA, 25 bp, Homo sapien
tgagtcatagggagccatgttcctc

SEQ ID NO: 4656497 - DNA, 25 bp, Homo sapien
tctgagtcatagggagccatgttcc

SEQ ID NO: 4656498 - DNA, 25 bp, Homo sapien
gagtcatagggagccatgttcctca

SEQ ID NO: 4656499 - DNA, 25 bp, Homo sapien
tttttccagaagaaaccgctccagc

SEQ ID NO: 4656500 - DNA, 25 bp, Homo sapien
tagacacggatcatggagctggaag

SEQ ID NO: 4656501 - DNA, 25 bp, Homo sapien
tgtccagttgacttaaaacacagcc

SEQ ID NO: 4656502 - DNA, 25 bp, Homo sapien
tgtgtataagactggtgctggccct

SEQ ID NO: 4656503 - DNA, 25 bp, Homo sapien
cagcttccacgggagttcctgttct

SEQ ID NO: 4656504 - DNA, 25 bp, Homo sapien
gagaactgaatctgttttcagaaat

SEQ ID NO: 4656505 - DNA, 25 bp, Homo sapien
cctcctgggcttgtactccctgtgt

SEQ ID NO: 4656506 - DNA, 25 bp, Homo sapien
ctgggcttgtactccctgtgtctca

SEQ ID NO: 4656507 - DNA, 25 bp, Homo sapien
ccatctcatccgcaatccaaataaa

SEQ ID NO: 4656508 - DNA, 25 bp, Homo sapien
cacttccatctcatccgcaatccaa

SEQ ID NO: 4656509 - DNA, 25 bp, Homo sapien
catctcatccgcaatccaaataaat

SEQ ID NO: 4656510 - DNA, 25 bp, Homo sapien
ttccatctcatccgcaatccaaata

SEQ ID NO: 4656511 - DNA, 25 bp, Homo sapien
gctccaccactgtttggagaagccc

SEQ ID NO: 4656512 - DNA, 25 bp, Homo sapien
cagtttctgcactggttgatgttgg

SEQ ID NO: 4656513 - DNA, 25 bp, Homo sapien
gacgcgattgctcctatatatttgc

SEQ ID NO: 4656514 - DNA, 25 bp, Homo sapien
ggttgatgttggtcaaacatgctaa

SEQ ID NO: 4656515 - DNA, 25 bp, Homo sapien
ctccatccctctatcagtaggtctg

SEQ ID NO: 4656516 - DNA, 25 bp, Homo sapien
cgagttggggaacactgcaagtttc

SEQ ID NO: 4656517 - DNA, 25 bp, Homo sapien
catccctctatcagtaggtctgtgt

SEQ ID NO: 4656518 - DNA, 25 bp, Homo sapien
tcagctggttctcggttcttcttgg

SEQ ID NO: 4656519 - DNA, 25 bp, Homo sapien
atagcaggcccagggctacccgggt

SEQ ID NO: 4656520 - DNA, 25 bp, Homo sapien
gctacccgggtttatatatatatgg

SEQ ID NO: 4656521 - DNA, 25 bp, Homo sapien
gctacccttatcctgtgaaagtgcg

SEQ ID NO: 4656522 - DNA, 25 bp, Homo sapien
tgcgagctggctttctgcattggaa

SEQ ID NO: 4656523 - DNA, 25 bp, Homo sapien
caacgtggaggatccacacaacttt

SEQ ID NO: 4656524 - DNA, 25 bp, Homo sapien
gttttctcgcatacctgtgtttcca

SEQ ID NO: 4656525 - DNA, 25 bp, Homo sapien
tctcgtggatgctcggggttttctc

SEQ ID NO: 4656526 - DNA, 25 bp, Homo sapien
ttccacctttgccaacgtggaggat

SEQ ID NO: 4656527 - DNA, 25 bp, Homo sapien
tgccctgcagtctcaggcgatgcgg

SEQ ID NO: 4656528 - DNA, 25 bp, Homo sapien
cgcgcgtcggcatccaaagtcaaaa

SEQ ID NO: 4656529 - DNA, 25 bp, Homo sapien
ttctgagctttgtcacgcgcgtcgg

SEQ ID NO: 4656530 - DNA, 25 bp, Homo sapien
ccctaagtcgcactagttccagttc

SEQ ID NO: 4656531 - DNA, 25 bp, Homo sapien
ccgaaggcgtccgggaatcttcact

SEQ ID NO: 4656532 - DNA, 25 bp, Homo sapien
gaatcttcactttttccgttgctag

SEQ ID NO: 4656533 - DNA, 25 bp, Homo sapien
tcacacccgaaggcgtccgggaatc

SEQ ID NO: 4656534 - DNA, 25 bp, Homo sapien
ccgttgctagcagtggaagggtcac

SEQ ID NO: 4656535 - DNA, 25 bp, Homo sapien
tgtaacaggataccctccagcatgg

SEQ ID NO: 4656536 - DNA, 25 bp, Homo sapien
ttggcatttggacctgtctctaacg

SEQ ID NO: 4656537 - DNA, 25 bp, Homo sapien
atcttcaaactggtccccatgtaac

SEQ ID NO: 4656538 - DNA, 25 bp, Homo sapien
acgtgtaccccacaccaagaagagc

SEQ ID NO: 4656539 - DNA, 25 bp, Homo sapien
ggaatgaatccttccggcagcctgg

SEQ ID NO: 4656540 - DNA, 25 bp, Homo sapien
ttaggaaggaatgaatccttccggc

SEQ ID NO: 4656541 - DNA, 25 bp, Homo sapien
ggtatcactttagtctccactagac

SEQ ID NO: 4656542 - DNA, 25 bp, Homo sapien
aattcttccctataatacggtatca

SEQ ID NO: 4656543 - DNA, 25 bp, Homo sapien
gagttcagtccaaaataacgggctc

SEQ ID NO: 4656544 - DNA, 25 bp, Homo sapien
taaagtcggattggctaacatgagg

SEQ ID NO: 4656545 - DNA, 25 bp, Homo sapien
taagttagcaactgaacaaagcgcc

SEQ ID NO: 4656546 - DNA, 25 bp, Homo sapien
aattcatgaatcagggcagcttcca

SEQ ID NO: 4656547 - DNA, 25 bp, Homo sapien
gactgcagctctaacaagccaattg

SEQ ID NO: 4656548 - DNA, 25 bp, Homo sapien
tgtcttcttcgcaaggtgagtctct

SEQ ID NO: 4656549 - DNA, 25 bp, Homo sapien
aatactgtcactttagacgttaggg

SEQ ID NO: 4656550 - DNA, 25 bp, Homo sapien
tcagtccataacacggcatgagtgc

SEQ ID NO: 4656551 - DNA, 25 bp, Homo sapien
aatcaaggcactggccattttggtc

SEQ ID NO: 4656552 - DNA, 25 bp, Homo sapien
atcaaggcactggccattttggtcc

SEQ ID NO: 4656553 - DNA, 25 bp, Homo sapien
ctgaagtctacgtgacagcagttgg

SEQ ID NO: 4656554 - DNA, 25 bp, Homo sapien
ttccatctggtgggggtccttgctt

SEQ ID NO: 4656555 - DNA, 25 bp, Homo sapien
ggtctttggcaccaaatgttacgca

SEQ ID NO: 4656556 - DNA, 25 bp, Homo sapien
aggacaggggaccagtctcccaaag

SEQ ID NO: 4656557 - DNA, 25 bp, Homo sapien
tctttggcaccaaatgttacgcacg

SEQ ID NO: 4656558 - DNA, 25 bp, Homo sapien
ctgggtctttggcaccaaatgttac

SEQ ID NO: 4656559 - DNA, 25 bp, Homo sapien
taaataccgggcatctgttggccag

SEQ ID NO: 4656560 - DNA, 25 bp, Homo sapien
tatcaccaagcagtgagcaccatcg

SEQ ID NO: 4656561 - DNA, 25 bp, Homo sapien
tctctacatcttggtgaggctagtc

SEQ ID NO: 4656562 - DNA, 25 bp, Homo sapien
gctgctggactaaagacacgagtgt

SEQ ID NO: 4656563 - DNA, 25 bp, Homo sapien
cactacctgcagcattcatctcatc

SEQ ID NO: 4656564 - DNA, 25 bp, Homo sapien
actacctgcagcattcatctcatct

SEQ ID NO: 4656565 - DNA, 25 bp, Homo sapien
tgactgaagagaagccaacccctag

SEQ ID NO: 4656566 - DNA, 25 bp, Homo sapien
agccttctactctagccatagctga

SEQ ID NO: 4656567 - DNA, 25 bp, Homo sapien
aagccaacccctagccttggctgag

SEQ ID NO: 4656568 - DNA, 25 bp, Homo sapien
tgcatactgcatgccccagccacca

SEQ ID NO: 4656569 - DNA, 25 bp, Homo sapien
catcttccacttcccgtaggttggt

SEQ ID NO: 4656570 - DNA, 25 bp, Homo sapien
cttccaacactggttggggggatct

SEQ ID NO: 4656571 - DNA, 25 bp, Homo sapien
tgatccacagtagatgggtctattc

SEQ ID NO: 4656572 - DNA, 25 bp, Homo sapien
gccaaagttgggagaaggcctcaga

SEQ ID NO: 4656573 - DNA, 25 bp, Homo sapien
aagcagacagtgcaagggtcacaaa

SEQ ID NO: 4656574 - DNA, 25 bp, Homo sapien
aaatagaaagcagacagtgcaaggg

SEQ ID NO: 4656575 - DNA, 25 bp, Homo sapien
caagggtcacaaagtcctgtcacac

SEQ ID NO: 4656576 - DNA, 25 bp, Homo sapien
gtcacacttctatctttacaaatag

SEQ ID NO: 4656577 - DNA, 25 bp, Homo sapien
actccggtgaggcagatctcccatg

SEQ ID NO: 4656578 - DNA, 25 bp, Homo sapien
catgactccggtgaggcagatctcc

SEQ ID NO: 4656579 - DNA, 25 bp, Homo sapien
ggcagatctcccatgggactgtcca

SEQ ID NO: 4656580 - DNA, 25 bp, Homo sapien
cggtgaggcagatctcccatgggac

SEQ ID NO: 4656581 - DNA, 25 bp, Homo sapien
cttcctcatggtcacgattacccag

SEQ ID NO: 4656582 - DNA, 25 bp, Homo sapien
tcttcctcatggtcacgattaccca

SEQ ID NO: 4656583 - DNA, 25 bp, Homo sapien
tcctcatggtcacgattacccaggg

SEQ ID NO: 4656584 - DNA, 25 bp, Homo sapien
ttcctcatggtcacgattacccagg

SEQ ID NO: 4656585 - DNA, 25 bp, Homo sapien
ttcaaagtgtactctcagggcttcc

SEQ ID NO: 4656586 - DNA, 25 bp, Homo sapien
ggtcatttacagacatgtatctgat

SEQ ID NO: 4656587 - DNA, 25 bp, Homo sapien
tcaaagtgtactctcagggcttcct

SEQ ID NO: 4656588 - DNA, 25 bp, Homo sapien
acagaactggaaggtcatttacaga

SEQ ID NO: 4656589 - DNA, 25 bp, Homo sapien
gaaactgaggatgcctgaagcccct

SEQ ID NO: 4656590 - DNA, 25 bp, Homo sapien
gcctccatgttgagaaagcaagcca

SEQ ID NO: 4656591 - DNA, 25 bp, Homo sapien
gggaaaatctcagactcaagggctg

SEQ ID NO: 4656592 - DNA, 25 bp, Homo sapien
acaggttttcggcatctcagggagc

SEQ ID NO: 4656593 - DNA, 25 bp, Homo sapien
cattggtgctgcagtgatcattcag

SEQ ID NO: 4656594 - DNA, 25 bp, Homo sapien
tataagtttgggagctccagcatta

SEQ ID NO: 4656595 - DNA, 25 bp, Homo sapien
ctattatcgtttagttcaaaggatc

SEQ ID NO: 4656596 - DNA, 25 bp, Homo sapien
gactacaggcgcacttatttcttta

SEQ ID NO: 4656597 - DNA, 25 bp, Homo sapien
cagaagaggtggaccactgcttcag

SEQ ID NO: 4656598 - DNA, 25 bp, Homo sapien
atctggatcagaatcagaagaggtg

SEQ ID NO: 4656599 - DNA, 25 bp, Homo sapien
gttcacaatctggatcagaatcaga

SEQ ID NO: 4656600 - DNA, 25 bp, Homo sapien
gttgctaagttcacaatctggatca

SEQ ID NO: 4656601 - DNA, 25 bp, Homo sapien
tttccggccttcaacactgatagct

SEQ ID NO: 4656602 - DNA, 25 bp, Homo sapien
gatgcttggtcctgactttgcacct

SEQ ID NO: 4656603 - DNA, 25 bp, Homo sapien
ggtttatctttaccaataaggatga

SEQ ID NO: 4656604 - DNA, 25 bp, Homo sapien
gaagctggaaccagttgatcgggcc

SEQ ID NO: 4656605 - DNA, 25 bp, Homo sapien
aatggagtctggagcacggctgcat

SEQ ID NO: 4656606 - DNA, 25 bp, Homo sapien
caggtgcaaagagcatagctgtacc

SEQ ID NO: 4656607 - DNA, 25 bp, Homo sapien
catggctcatggagagaatttgcac

SEQ ID NO: 4656608 - DNA, 25 bp, Homo sapien
acttctacccatatctggccaggtg

SEQ ID NO: 4656609 - DNA, 25 bp, Homo sapien
gcttttggaatgtggtcctcactgt

SEQ ID NO: 4656610 - DNA, 25 bp, Homo sapien
gagatgacattgtagcaacccagaa

SEQ ID NO: 4656611 - DNA, 25 bp, Homo sapien
caatggtttgtagcagagatgacat

SEQ ID NO: 4656612 - DNA, 25 bp, Homo sapien
cctcactgtacaggagaatgtgtaa

SEQ ID NO: 4656613 - DNA, 25 bp, Homo sapien
taaaatagccccattgtatcacagt

SEQ ID NO: 4656614 - DNA, 25 bp, Homo sapien
gtacatctttaagcttgaatccgtg

SEQ ID NO: 4656615 - DNA, 25 bp, Homo sapien
tgcaaactggaaaaatgagtgaagt

SEQ ID NO: 4656616 - DNA, 25 bp, Homo sapien
gaatccgtgtatctagtgtattgca

SEQ ID NO: 4656617 - DNA, 25 bp, Homo sapien
cgtcctcggcggtgaagacattcct

SEQ ID NO: 4656618 - DNA, 25 bp, Homo sapien
ggtggcgattatacaactctgcggt

SEQ ID NO: 4656619 - DNA, 25 bp, Homo sapien
aaggcagaattaagcccctgagcag

SEQ ID NO: 4656620 - DNA, 25 bp, Homo sapien
tgaagctacgtgcatccggagtcag

SEQ ID NO: 4656621 - DNA, 25 bp, Homo sapien
aaaacgtctgctctttgctaagtcc

SEQ ID NO: 4656622 - DNA, 25 bp, Homo sapien
gctgccccagctgggatgccaaaac

SEQ ID NO: 4656623 - DNA, 25 bp, Homo sapien
cccagctgggatgccaaaacgtctg

SEQ ID NO: 4656624 - DNA, 25 bp, Homo sapien
aacgtctgctctttgctaagtccat

SEQ ID NO: 4656625 - DNA, 25 bp, Homo sapien
taaaaatggtgtgctgataaacccc

SEQ ID NO: 4656626 - DNA, 25 bp, Homo sapien
aaagccctgcagacatagtacctgg

SEQ ID NO: 4656627 - DNA, 25 bp, Homo sapien
gtacctggtcagaactatgcctcgg

SEQ ID NO: 4656628 - DNA, 25 bp, Homo sapien
tactgctgtacttccgatttacgga

SEQ ID NO: 4656629 - DNA, 25 bp, Homo sapien
tagtgtgcttaggaaactcttaccc

SEQ ID NO: 4656630 - DNA, 25 bp, Homo sapien
ggattactcactctttcttacgctc

SEQ ID NO: 4656631 - DNA, 25 bp, Homo sapien
tgtgcatagttcctcatatacttgg

SEQ ID NO: 4656632 - DNA, 25 bp, Homo sapien
taccccaggattacctacaggatta

SEQ ID NO: 4656633 - DNA, 25 bp, Homo sapien
gtgtatgaagtatgaggtagtctct

SEQ ID NO: 4656634 - DNA, 25 bp, Homo sapien
tttagacctttaatccatccagagt

SEQ ID NO: 4656635 - DNA, 25 bp, Homo sapien
gtgtattgccattccaaagttttta

SEQ ID NO: 4656636 - DNA, 25 bp, Homo sapien
tcatttattctgaataccgctcttt

SEQ ID NO: 4656637 - DNA, 25 bp, Homo sapien
taggagatacgcctttcttttgtaa

SEQ ID NO: 4656638 - DNA, 25 bp, Homo sapien
tgcctcatggcaatacaccacagta

SEQ ID NO: 4656639 - DNA, 25 bp, Homo sapien
taggatttggctggttaggagatac

SEQ ID NO: 4656640 - DNA, 25 bp, Homo sapien
gcaatacaccacagtaggatttggc

SEQ ID NO: 4656641 - DNA, 25 bp, Homo sapien
cattgatgttattattccttcaggg

SEQ ID NO: 4656642 - DNA, 25 bp, Homo sapien
aggcatacacctagaaatagcattg

SEQ ID NO: 4656643 - DNA, 25 bp, Homo sapien
tccttcagggtatcaccaagtcttc

SEQ ID NO: 4656644 - DNA, 25 bp, Homo sapien
tgagagagaaatatagatgctaggc

SEQ ID NO: 4656645 - DNA, 25 bp, Homo sapien
ggccttgtttcagaactcctgccca

SEQ ID NO: 4656646 - DNA, 25 bp, Homo sapien
gcttttcagttaacttgcaaaattc

SEQ ID NO: 4656647 - DNA, 25 bp, Homo sapien
tcggttttaaggctgtttcagatgc

SEQ ID NO: 4656648 - DNA, 25 bp, Homo sapien
aggcttactgggcaccggatggcgg

SEQ ID NO: 4656649 - DNA, 25 bp, Homo sapien
tgtcatctgttcactcaggagctgc

SEQ ID NO: 4656650 - DNA, 25 bp, Homo sapien
ctgtgctggcagtgcgggccctcct

SEQ ID NO: 4656651 - DNA, 25 bp, Homo sapien
ctcaaacggagaaggaggcgtgtct

SEQ ID NO: 4656652 - DNA, 25 bp, Homo sapien
caccatgtccttgcgctgtgctggc

SEQ ID NO: 4656653 - DNA, 25 bp, Homo sapien
agattgtatgtttggatcgccctca

SEQ ID NO: 4656654 - DNA, 25 bp, Homo sapien
taagttgtgtactagggaagctctc

SEQ ID NO: 4656655 - DNA, 25 bp, Homo sapien
gagaatttgccccagctttgatgaa

SEQ ID NO: 4656656 - DNA, 25 bp, Homo sapien
cagttagaccaatgattttggcagc

SEQ ID NO: 4656657 - DNA, 25 bp, Homo sapien
cctctttggtacaacaaagtggaga

SEQ ID NO: 4656658 - DNA, 25 bp, Homo sapien
tgtttgctctaacatctcaagggaa

SEQ ID NO: 4656659 - DNA, 25 bp, Homo sapien
tcatccctggtacctgcacatgtag

SEQ ID NO: 4656660 - DNA, 25 bp, Homo sapien
ggcggtagccagagttatctcagga

SEQ ID NO: 4656661 - DNA, 25 bp, Homo sapien
gcacatgtagcctcagtgaccagaa

SEQ ID NO: 4656662 - DNA, 25 bp, Homo sapien
tgatagatgttgtcgaatttgtgga

SEQ ID NO: 4656663 - DNA, 25 bp, Homo sapien
tgttgtcgaatttgtggaaaaatcg

SEQ ID NO: 4656664 - DNA, 25 bp, Homo sapien
tttgtgttccgatctcacgtgaata

SEQ ID NO: 4656665 - DNA, 25 bp, Homo sapien
gatctcacgtgaatagttcaggctt

SEQ ID NO: 4656666 - DNA, 25 bp, Homo sapien
ccagaagtatacctaggccagcgag

SEQ ID NO: 4656667 - DNA, 25 bp, Homo sapien
aatgaaggaacttgtttcacatggc

SEQ ID NO: 4656668 - DNA, 25 bp, Homo sapien
gccagcgagggaataacactacaca

SEQ ID NO: 4656669 - DNA, 25 bp, Homo sapien
gaagcattggtgtagagagccttaa

SEQ ID NO: 4656670 - DNA, 25 bp, Homo sapien
gaaaactcagactgtatccaagcag

SEQ ID NO: 4656671 - DNA, 25 bp, Homo sapien
tggaagcccaccaaaagaagaaatg

SEQ ID NO: 4656672 - DNA, 25 bp, Homo sapien
ggtacagccacttactcttaaagag

SEQ ID NO: 4656673 - DNA, 25 bp, Homo sapien
gataaagtataccatccagaaacag

SEQ ID NO: 4656674 - DNA, 25 bp, Homo sapien
ggcacaggaacgttgagataaagct

SEQ ID NO: 4656675 - DNA, 25 bp, Homo sapien
tttaccacagtggttgttaggcaca

SEQ ID NO: 4656676 - DNA, 25 bp, Homo sapien
ttgagattctgtcgcttgaacctgg

SEQ ID NO: 4656677 - DNA, 25 bp, Homo sapien
tctcagaggataaggcccaggaatt

SEQ ID NO: 4656678 - DNA, 25 bp, Homo sapien
tccgggctgattctccagttggttt

SEQ ID NO: 4656679 - DNA, 25 bp, Homo sapien
tgagtgctcttgggcgccttctccc

SEQ ID NO: 4656680 - DNA, 25 bp, Homo sapien
cacaatgagacagcgctgagcgccg

SEQ ID NO: 4656681 - DNA, 25 bp, Homo sapien
agtcggctcccaatcgcgcacaatg

SEQ ID NO: 4656682 - DNA, 25 bp, Homo sapien
gaacattgcttaacagtatatggca

SEQ ID NO: 4656683 - DNA, 25 bp, Homo sapien
tactgcatcttatttgagagagcct

SEQ ID NO: 4656684 - DNA, 25 bp, Homo sapien
gagagagcctgatttgtcctcaaaa

SEQ ID NO: 4656685 - DNA, 25 bp, Homo sapien
tggaaatatgtcaagaccgtgaagc

SEQ ID NO: 4656686 - DNA, 25 bp, Homo sapien
tcctctgaagtacgtttttgctctc

SEQ ID NO: 4656687 - DNA, 25 bp, Homo sapien
tctgaagtacgtttttgctctcaaa

SEQ ID NO: 4656688 - DNA, 25 bp, Homo sapien
tgaagtacgtttttgctctcaaagt

SEQ ID NO: 4656689 - DNA, 25 bp, Homo sapien
cctctgaagtacgtttttgctctca

SEQ ID NO: 4656690 - DNA, 25 bp, Homo sapien
tcataattatcactagtccatgaac

SEQ ID NO: 4656691 - DNA, 25 bp, Homo sapien
ctcaggcctgccaactaaaagtcca

SEQ ID NO: 4656692 - DNA, 25 bp, Homo sapien
ccaactaaaagtccatatcgcagct

SEQ ID NO: 4656693 - DNA, 25 bp, Homo sapien
catatcgcagcttcacgagagctgg

SEQ ID NO: 4656694 - DNA, 25 bp, Homo sapien
taaaagtccatatcgcagcttcacg

SEQ ID NO: 4656695 - DNA, 25 bp, Homo sapien
tcagcaaatctgtaattcactttct

SEQ ID NO: 4656696 - DNA, 25 bp, Homo sapien
tccaccccctctgcccgtgaccagg

SEQ ID NO: 4656697 - DNA, 25 bp, Homo sapien
cccctctgcccgtgaccaggaatga

SEQ ID NO: 4656698 - DNA, 25 bp, Homo sapien
cagaaggaccttgtagaagggacct

SEQ ID NO: 4656699 - DNA, 25 bp, Homo sapien
ctttatctttgtgtagccagcaagc

SEQ ID NO: 4656700 - DNA, 25 bp, Homo sapien
ctgtaaatgtctttatctttgtgta

SEQ ID NO: 4656701 - DNA, 25 bp, Homo sapien
tgtctttatctttgtgtagccagca

SEQ ID NO: 4656702 - DNA, 25 bp, Homo sapien
tatctttgtgtagccagcaagctga

SEQ ID NO: 4656703 - DNA, 25 bp, Homo sapien
gaaattcaaggcttcttgaggctct

SEQ ID NO: 4656704 - DNA, 25 bp, Homo sapien
gaggctcttttagtgaataccgcag

SEQ ID NO: 4656705 - DNA, 25 bp, Homo sapien
ttgatccatggaggaaagatcttcc

SEQ ID NO: 4656706 - DNA, 25 bp, Homo sapien
acttctacctctagaccaatgcggg

SEQ ID NO: 4656707 - DNA, 25 bp, Homo sapien
tatttcacattatcctgaaggcaag

SEQ ID NO: 4656708 - DNA, 25 bp, Homo sapien
gaaggcaagatggacagtaaggctt

SEQ ID NO: 4656709 - DNA, 25 bp, Homo sapien
atatttcacattatcctgaaggcaa

SEQ ID NO: 4656710 - DNA, 25 bp, Homo sapien
agatggacagtaaggcttagttttc

SEQ ID NO: 4656711 - DNA, 25 bp, Homo sapien
tctgagttcatcctcatcgcagctt

SEQ ID NO: 4656712 - DNA, 25 bp, Homo sapien
caaatccctgtacaaagaactgctg

SEQ ID NO: 4656713 - DNA, 25 bp, Homo sapien
catcctcatcgcagctttatgggaa

SEQ ID NO: 4656714 - DNA, 25 bp, Homo sapien
tctttaactctactgccatctagtg

SEQ ID NO: 4656715 - DNA, 25 bp, Homo sapien
tgagatcttactccatataaaattt

SEQ ID NO: 4656716 - DNA, 25 bp, Homo sapien
gagatcttactccatataaaatttt

SEQ ID NO: 4656717 - DNA, 25 bp, Homo sapien
agatcttactccatataaaatttta

SEQ ID NO: 4656718 - DNA, 25 bp, Homo sapien
gctgggcatttaccaaaacctgtca

SEQ ID NO: 4656719 - DNA, 25 bp, Homo sapien
tgttatgcagaggaccaggatcctg

SEQ ID NO: 4656720 - DNA, 25 bp, Homo sapien
gactctgaaaatgttaacgtattat

SEQ ID NO: 4656721 - DNA, 25 bp, Homo sapien
tacttataacccagattgactctga

SEQ ID NO: 4656722 - DNA, 25 bp, Homo sapien
aatcgtaggccctagaagctcagca

SEQ ID NO: 4656723 - DNA, 25 bp, Homo sapien
gatcctaatgcttccgtggagaaag

SEQ ID NO: 4656724 - DNA, 25 bp, Homo sapien
agaggtgaccgaccagcagtctcaa

SEQ ID NO: 4656725 - DNA, 25 bp, Homo sapien
gaaaggagacacaatatctgtagaa

SEQ ID NO: 4656726 - DNA, 25 bp, Homo sapien
tcagctttccatggacagcaaacat

SEQ ID NO: 4656727 - DNA, 25 bp, Homo sapien
ttccctttggtacagacactgactt

SEQ ID NO: 4656728 - DNA, 25 bp, Homo sapien
cctttggtacagacactgacttgaa

SEQ ID NO: 4656729 - DNA, 25 bp, Homo sapien
tttggtacagacactgacttgaatt

SEQ ID NO: 4656730 - DNA, 25 bp, Homo sapien
gctggtgtagaagtatacttctcat

SEQ ID NO: 4656731 - DNA, 25 bp, Homo sapien
tgcatcgttcaggatcatcactcca

SEQ ID NO: 4656732 - DNA, 25 bp, Homo sapien
tatctggatgcatcgttcaggatca

SEQ ID NO: 4656733 - DNA, 25 bp, Homo sapien
cagaattatctggatgcatcgttca

SEQ ID NO: 4656734 - DNA, 25 bp, Homo sapien
caatctgacatccttttcatatggc

SEQ ID NO: 4656735 - DNA, 25 bp, Homo sapien
aatagtggatccgattcaatctgac

SEQ ID NO: 4656736 - DNA, 25 bp, Homo sapien
tatggcttccaaactatcagcctct

SEQ ID NO: 4656737 - DNA, 25 bp, Homo sapien
ctgagtgctcaagaactggaaaata

SEQ ID NO: 4656738 - DNA, 25 bp, Homo sapien
ataggtaatgccataaacctccacc

SEQ ID NO: 4656739 - DNA, 25 bp, Homo sapien
agataggtaatgccataaacctcca

SEQ ID NO: 4656740 - DNA, 25 bp, Homo sapien
gataggtaatgccataaacctccac

SEQ ID NO: 4656741 - DNA, 25 bp, Homo sapien
taggtaatgccataaacctccacca

SEQ ID NO: 4656742 - DNA, 25 bp, Homo sapien
tagtggacaatctccagagaggcca

SEQ ID NO: 4656743 - DNA, 25 bp, Homo sapien
acacttcgaggcaaccgctgaggaa

SEQ ID NO: 4656744 - DNA, 25 bp, Homo sapien
tagttcatcagtaccatgcaccagg

SEQ ID NO: 4656745 - DNA, 25 bp, Homo sapien
cgtgcattcctagatacagcggcct

SEQ ID NO: 4656746 - DNA, 25 bp, Homo sapien
aagtccagctatctctggccgaatt

SEQ ID NO: 4656747 - DNA, 25 bp, Homo sapien
gaggcggaaagatcatcttcccctg

SEQ ID NO: 4656748 - DNA, 25 bp, Homo sapien
atctctggccgaattcttcactgtc

SEQ ID NO: 4656749 - DNA, 25 bp, Homo sapien
ccagctatctctggccgaattcttc

SEQ ID NO: 4656750 - DNA, 25 bp, Homo sapien
tttctcggaagatggtataatccaa

SEQ ID NO: 4656751 - DNA, 25 bp, Homo sapien
gtgctaatttctcggaagatggtat

SEQ ID NO: 4656752 - DNA, 25 bp, Homo sapien
gctaatttctcggaagatggtataa

SEQ ID NO: 4656753 - DNA, 25 bp, Homo sapien
aatttctcggaagatggtataatcc

SEQ ID NO: 4656754 - DNA, 25 bp, Homo sapien
tagggctacttagtagatcagagcc

SEQ ID NO: 4656755 - DNA, 25 bp, Homo sapien
tgaaattcgattacagcgatgcact

SEQ ID NO: 4656756 - DNA, 25 bp, Homo sapien
gatcagagcccttaacagagctata

SEQ ID NO: 4656757 - DNA, 25 bp, Homo sapien
gctcttgtgcctttgccatggttag

SEQ ID NO: 4656758 - DNA, 25 bp, Homo sapien
cttggggctgcttgtcttgtattca

SEQ ID NO: 4656759 - DNA, 25 bp, Homo sapien
cccatgcactgttcttcatatcctt

SEQ ID NO: 4656760 - DNA, 25 bp, Homo sapien
tggcagatagggagggtcatctctt

SEQ ID NO: 4656761 - DNA, 25 bp, Homo sapien
tatttttggccagtgtggcagatag

SEQ ID NO: 4656762 - DNA, 25 bp, Homo sapien
cctataagtccaaatatgtacgtat

SEQ ID NO: 4656763 - DNA, 25 bp, Homo sapien
cataaaccgtggtcaacaattcata

SEQ ID NO: 4656764 - DNA, 25 bp, Homo sapien
tttacacctataagtccaaatatgt

SEQ ID NO: 4656765 - DNA, 25 bp, Homo sapien
catatttacacatgtttacaccttt

SEQ ID NO: 4656766 - DNA, 25 bp, Homo sapien
actgcacacctatgctagatggtgt

SEQ ID NO: 4656767 - DNA, 25 bp, Homo sapien
cactctttcggatgcagacatttaa

SEQ ID NO: 4656768 - DNA, 25 bp, Homo sapien
ccaaatcctatgttgtgaagcttta

SEQ ID NO: 4656769 - DNA, 25 bp, Homo sapien
tgtgaagctttatccctgttttctc

SEQ ID NO: 4656770 - DNA, 25 bp, Homo sapien
caacaggcctgttacaattcccatc

SEQ ID NO: 4656771 - DNA, 25 bp, Homo sapien
caggactatagcaggcttggccaac

SEQ ID NO: 4656772 - DNA, 25 bp, Homo sapien
tgttttccagggcaccattcttctg

SEQ ID NO: 4656773 - DNA, 25 bp, Homo sapien
tctggttctgagaataaagggaaca

SEQ ID NO: 4656774 - DNA, 25 bp, Homo sapien
cagactgaggctgttcctggggaac

SEQ ID NO: 4656775 - DNA, 25 bp, Homo sapien
gagttgagaaacagactgaggctgt

SEQ ID NO: 4656776 - DNA, 25 bp, Homo sapien
acaggagcaacaggagagaggacat

SEQ ID NO: 4656777 - DNA, 25 bp, Homo sapien
ggagcagagttgagaaacagactga

SEQ ID NO: 4656778 - DNA, 25 bp, Homo sapien
cctctcgttatctgcagggtgcaca

SEQ ID NO: 4656779 - DNA, 25 bp, Homo sapien
cctcaggccgagaagtaggctttgc

SEQ ID NO: 4656780 - DNA, 25 bp, Homo sapien
tggagccataatctcgtgcgccctg

SEQ ID NO: 4656781 - DNA, 25 bp, Homo sapien
gcaagaaaatgaggcacggctccct

SEQ ID NO: 4656782 - DNA, 25 bp, Homo sapien
ccagctggccagaggcttatcactt

SEQ ID NO: 4656783 - DNA, 25 bp, Homo sapien
ccagaggcttatcacttggggtggt

SEQ ID NO: 4656784 - DNA, 25 bp, Homo sapien
gcagaggcagaacatgaggacagct

SEQ ID NO: 4656785 - DNA, 25 bp, Homo sapien
tggaaagccaggacactggtgtccc

SEQ ID NO: 4656786 - DNA, 25 bp, Homo sapien
tccctcttataagaaatcttgtggc

SEQ ID NO: 4656787 - DNA, 25 bp, Homo sapien
tctttggcttgtggaccaacctggc

SEQ ID NO: 4656788 - DNA, 25 bp, Homo sapien
tctagagcctctagcggaaaatcca

SEQ ID NO: 4656789 - DNA, 25 bp, Homo sapien
cagtctctgctcctatggtcacatc

SEQ ID NO: 4656790 - DNA, 25 bp, Homo sapien
ttttccaccagcctgcaatttttct

SEQ ID NO: 4656791 - DNA, 25 bp, Homo sapien
gcattttccaccagcctgcaatttt

SEQ ID NO: 4656792 - DNA, 25 bp, Homo sapien
cattttccaccagcctgcaattttt

SEQ ID NO: 4656793 - DNA, 25 bp, Homo sapien
ggcattttccaccagcctgcaattt

SEQ ID NO: 4656794 - DNA, 25 bp, Homo sapien
tagagaataaatggacgtgtaaggg

SEQ ID NO: 4656795 - DNA, 25 bp, Homo sapien
tgacccatgaaagctagagaataaa

SEQ ID NO: 4656796 - DNA, 25 bp, Homo sapien
taaatggacgtgtaagggatggaaa

SEQ ID NO: 4656797 - DNA, 25 bp, Homo sapien
ggtaaggtttgaaatgacccatgaa

SEQ ID NO: 4656798 - DNA, 25 bp, Homo sapien
atttcatgctgtatctgccagtcac

SEQ ID NO: 4656799 - DNA, 25 bp, Homo sapien
tgctgtatctgccagtcacagaaac

SEQ ID NO: 4656800 - DNA, 25 bp, Homo sapien
ttcatgctgtatctgccagtcacag

SEQ ID NO: 4656801 - DNA, 25 bp, Homo sapien
catgctgtatctgccagtcacagaa

SEQ ID NO: 4656802 - DNA, 25 bp, Homo sapien
tgcacaggtcagacatgttctctcc

SEQ ID NO: 4656803 - DNA, 25 bp, Homo sapien
ctagttaagtgaggaggcgtcctcg

SEQ ID NO: 4656804 - DNA, 25 bp, Homo sapien
atatcctgtatccaattcatattca

SEQ ID NO: 4656805 - DNA, 25 bp, Homo sapien
cactgtcaacatcctaatcggcatt

SEQ ID NO: 4656806 - DNA, 25 bp, Homo sapien
tataactgaatctaggtggcctcct

SEQ ID NO: 4656807 - DNA, 25 bp, Homo sapien
cttcgctacccagggaatggtcctc

SEQ ID NO: 4656808 - DNA, 25 bp, Homo sapien
tgtatgacaatctaatccacgatgt

SEQ ID NO: 4656809 - DNA, 25 bp, Homo sapien
tcctcggctccttgatgtatgacaa

SEQ ID NO: 4656810 - DNA, 25 bp, Homo sapien
aagattctggaggtccagtgaagtc

SEQ ID NO: 4656811 - DNA, 25 bp, Homo sapien
atgaatatccatgaagaagattctg

SEQ ID NO: 4656812 - DNA, 25 bp, Homo sapien
gaagattctggaggtccagtgaagt

SEQ ID NO: 4656813 - DNA, 25 bp, Homo sapien
gcaatgaatatccatgaagaagatt

SEQ ID NO: 4656814 - DNA, 25 bp, Homo sapien
gctgcctctcccctgtccaggtctt

SEQ ID NO: 4656815 - DNA, 25 bp, Homo sapien
ctcccacatccattccaggcctgct

SEQ ID NO: 4656816 - DNA, 25 bp, Homo sapien
ccaggtcttcctggatcgcagacat

SEQ ID NO: 4656817 - DNA, 25 bp, Homo sapien
ctctcccctgtccaggtcttcctgg

SEQ ID NO: 4656818 - DNA, 25 bp, Homo sapien
ttgattcagcgttcttgctggcaga

SEQ ID NO: 4656819 - DNA, 25 bp, Homo sapien
gaagacctagttttgcttgaaggct

SEQ ID NO: 4656820 - DNA, 25 bp, Homo sapien
gcttgaaggctctagaatgcatatt

SEQ ID NO: 4656821 - DNA, 25 bp, Homo sapien
tgcatattttggcactggatcccag

SEQ ID NO: 4656822 - DNA, 25 bp, Homo sapien
gctgctttgcttcacaaagaggcta

SEQ ID NO: 4656823 - DNA, 25 bp, Homo sapien
ggctagagaaaatgtcagtactgaa

SEQ ID NO: 4656824 - DNA, 25 bp, Homo sapien
cattaaggtctttggtttacaacag

SEQ ID NO: 4656825 - DNA, 25 bp, Homo sapien
caaaagaaattacactgtccaatgc

SEQ ID NO: 4656826 - DNA, 25 bp, Homo sapien
caatcttgattctggcataagggcc

SEQ ID NO: 4656827 - DNA, 25 bp, Homo sapien
tgtcgccttcaatcttgattctggc

SEQ ID NO: 4656828 - DNA, 25 bp, Homo sapien
atgccactgccatggtgtcgccttc

SEQ ID NO: 4656829 - DNA, 25 bp, Homo sapien
ccatggtgtcgccttcaatcttgat

SEQ ID NO: 4656830 - DNA, 25 bp, Homo sapien
aaatcatgtttacatcctcttcttc

SEQ ID NO: 4656831 - DNA, 25 bp, Homo sapien
cttaaacaatcttttagatgaatca

SEQ ID NO: 4656832 - DNA, 25 bp, Homo sapien
aaacaatcttttagatgaatcattt

SEQ ID NO: 4656833 - DNA, 25 bp, Homo sapien
taaacaatcttttagatgaatcatt

SEQ ID NO: 4656834 - DNA, 25 bp, Homo sapien
tccagggcatcttggcaacatttca

SEQ ID NO: 4656835 - DNA, 25 bp, Homo sapien
gaatccagggcatcttggcaacatt

SEQ ID NO: 4656836 - DNA, 25 bp, Homo sapien
caaagctgatagatcatcattcaag

SEQ ID NO: 4656837 - DNA, 25 bp, Homo sapien
tctaatctcagaatccgaatcccca

SEQ ID NO: 4656838 - DNA, 25 bp, Homo sapien
caagatgtgtcaggatttttcttgg

SEQ ID NO: 4656839 - DNA, 25 bp, Homo sapien
tctgagtcggctcaactaaaagcat

SEQ ID NO: 4656840 - DNA, 25 bp, Homo sapien
tgagtcggctcaactaaaagcatat

SEQ ID NO: 4656841 - DNA, 25 bp, Homo sapien
tctgtgggaatgttagaacgaagaa

SEQ ID NO: 4656842 - DNA, 25 bp, Homo sapien
gagtgctttgtaagacatcaggtcc

SEQ ID NO: 4656843 - DNA, 25 bp, Homo sapien
tccaagcagctttggaggctggcct

SEQ ID NO: 4656844 - DNA, 25 bp, Homo sapien
gaaccattagccctggtagggcaga

SEQ ID NO: 4656845 - DNA, 25 bp, Homo sapien
tagggcagaagatctcacttttggc

SEQ ID NO: 4656846 - DNA, 25 bp, Homo sapien
gtggagtccgtgattccagtggaat

SEQ ID NO: 4656847 - DNA, 25 bp, Homo sapien
attccagtggaatctaaccctgagg

SEQ ID NO: 4656848 - DNA, 25 bp, Homo sapien
agtggaatctaaccctgaggtcaac

SEQ ID NO: 4656849 - DNA, 25 bp, Homo sapien
tggagtccgtgattccagtggaatc

SEQ ID NO: 4656850 - DNA, 25 bp, Homo sapien
gactttgccacagctgaaaccttct

SEQ ID NO: 4656851 - DNA, 25 bp, Homo sapien
tagggacagactgaacattctttgc

SEQ ID NO: 4656852 - DNA, 25 bp, Homo sapien
tcaggacaacatggataaactagga

SEQ ID NO: 4656853 - DNA, 25 bp, Homo sapien
cagctgacgggaagccgactttgcc

SEQ ID NO: 4656854 - DNA, 25 bp, Homo sapien
ttctgtatttcaggggttttggcga

SEQ ID NO: 4656855 - DNA, 25 bp, Homo sapien
ttagcaacttgcatatctccagctt

SEQ ID NO: 4656856 - DNA, 25 bp, Homo sapien
tctgaaataagtgcagttctccagg

SEQ ID NO: 4656857 - DNA, 25 bp, Homo sapien
ggaagggctggtttagcaacttgca

SEQ ID NO: 4656858 - DNA, 25 bp, Homo sapien
aggtcagtacccaaaaggcagcatg

SEQ ID NO: 4656859 - DNA, 25 bp, Homo sapien
gaggtcagtacccaaaaggcagcat

SEQ ID NO: 4656860 - DNA, 25 bp, Homo sapien
aagaggtcagtacccaaaaggcagc

SEQ ID NO: 4656861 - DNA, 25 bp, Homo sapien
ggtcagtacccaaaaggcagcatga

SEQ ID NO: 4656862 - DNA, 25 bp, Homo sapien
cctgctgtctgcgatgtttttaaag

SEQ ID NO: 4656863 - DNA, 25 bp, Homo sapien
tgctgtctgcgatgtttttaaagaa

SEQ ID NO: 4656864 - DNA, 25 bp, Homo sapien
atgcctgctgtctgcgatgttttta

SEQ ID NO: 4656865 - DNA, 25 bp, Homo sapien
agcacccaaacatgcctgctgtctg

SEQ ID NO: 4656866 - DNA, 25 bp, Homo sapien
cttgggcaagaaccagcttggaaac

SEQ ID NO: 4656867 - DNA, 25 bp, Homo sapien
cttgcttgggcaagaaccagcttgg

SEQ ID NO: 4656868 - DNA, 25 bp, Homo sapien
tgcttgggcaagaaccagcttggaa

SEQ ID NO: 4656869 - DNA, 25 bp, Homo sapien
ccttgcttgggcaagaaccagcttg

SEQ ID NO: 4656870 - DNA, 25 bp, Homo sapien
gagcttccactctccgtgagaaaag

SEQ ID NO: 4656871 - DNA, 25 bp, Homo sapien
gcaaaggaggctggcggacacagag

SEQ ID NO: 4656872 - DNA, 25 bp, Homo sapien
cttccactctccgtgagaaaagaat

SEQ ID NO: 4656873 - DNA, 25 bp, Homo sapien
ctctccgtgagaaaagaatagcaga

SEQ ID NO: 4656874 - DNA, 25 bp, Homo sapien
cagaagtgaggaactccgaagccca

SEQ ID NO: 4656875 - DNA, 25 bp, Homo sapien
gacagaagtgaggaactccgaagcc

SEQ ID NO: 4656876 - DNA, 25 bp, Homo sapien
ggacagaagtgaggaactccgaagc

SEQ ID NO: 4656877 - DNA, 25 bp, Homo sapien
acagaagtgaggaactccgaagccc

SEQ ID NO: 4656878 - DNA, 25 bp, Homo sapien
ggctggtggaagccctcatctcttc

SEQ ID NO: 4656879 - DNA, 25 bp, Homo sapien
gatgagatggcccagtggtaatagc

SEQ ID NO: 4656880 - DNA, 25 bp, Homo sapien
tatagatgtgggaacgaaagtacat

SEQ ID NO: 4656881 - DNA, 25 bp, Homo sapien
tggcccagtggtaatagcccagcag

SEQ ID NO: 4656882 - DNA, 25 bp, Homo sapien
ctggagagtccatatcgggcgccat

SEQ ID NO: 4656883 - DNA, 25 bp, Homo sapien
acagcactggacacttgcctctgca

SEQ ID NO: 4656884 - DNA, 25 bp, Homo sapien
catatcgggcgccatcaacttctac

SEQ ID NO: 4656885 - DNA, 25 bp, Homo sapien
tcatttcccaaagaccctctggaga

SEQ ID NO: 4656886 - DNA, 25 bp, Homo sapien
gggccatgaaaaggcggttcttgaa

SEQ ID NO: 4656887 - DNA, 25 bp, Homo sapien
gccatgaaaaggcggttcttgaaaa

SEQ ID NO: 4656888 - DNA, 25 bp, Homo sapien
aaatctattttcagagggccatgaa

SEQ ID NO: 4656889 - DNA, 25 bp, Homo sapien
atctattttcagagggccatgaaaa

SEQ ID NO: 4656890 - DNA, 25 bp, Homo sapien
ttctctattattgatctaggcccca

SEQ ID NO: 4656891 - DNA, 25 bp, Homo sapien
tctctattattgatctaggccccac

SEQ ID NO: 4656892 - DNA, 25 bp, Homo sapien
ttttctctattattgatctaggccc

SEQ ID NO: 4656893 - DNA, 25 bp, Homo sapien
tctattattgatctaggccccactg

SEQ ID NO: 4656894 - DNA, 25 bp, Homo sapien
agaaagtggcgttgctctcggccca

SEQ ID NO: 4656895 - DNA, 25 bp, Homo sapien
gtcttcatgagatgtgttaggatct

SEQ ID NO: 4656896 - DNA, 25 bp, Homo sapien
cttgcattccttctcaggggcacga

SEQ ID NO: 4656897 - DNA, 25 bp, Homo sapien
ttctcaggggcacgacaccttccaa

SEQ ID NO: 4656898 - DNA, 25 bp, Homo sapien
tttaaagtatctgctggcatccaca

SEQ ID NO: 4656899 - DNA, 25 bp, Homo sapien
ttaaagtatctgctggcatccacaa

SEQ ID NO: 4656900 - DNA, 25 bp, Homo sapien
gaatgtcttccttgaatgctggctt

SEQ ID NO: 4656901 - DNA, 25 bp, Homo sapien
ttccagtttgcattgcagaatgtct

SEQ ID NO: 4656902 - DNA, 25 bp, Homo sapien
aacattcctagagtttttactgcag

SEQ ID NO: 4656903 - DNA, 25 bp, Homo sapien
tcaatcgccaaacattcctagagtt

SEQ ID NO: 4656904 - DNA, 25 bp, Homo sapien
tcgccaaacattcctagagttttta

SEQ ID NO: 4656905 - DNA, 25 bp, Homo sapien
cctagagtttttactgcagagaatg

SEQ ID NO: 4656906 - DNA, 25 bp, Homo sapien
acctctgactttcgcatgatctcct

SEQ ID NO: 4656907 - DNA, 25 bp, Homo sapien
gacgcagctaactgagtgcaatgtg

SEQ ID NO: 4656908 - DNA, 25 bp, Homo sapien
tccatgaccactcgagaattataat

SEQ ID NO: 4656909 - DNA, 25 bp, Homo sapien
ggctcttgactctggccacctctga

SEQ ID NO: 4656910 - DNA, 25 bp, Homo sapien
cactgtagcttgagaaatgtacacg

SEQ ID NO: 4656911 - DNA, 25 bp, Homo sapien
tgtacacgatataaatgaacttgct

SEQ ID NO: 4656912 - DNA, 25 bp, Homo sapien
gaatctaatacggtccagacgaaaa

SEQ ID NO: 4656913 - DNA, 25 bp, Homo sapien
gtcatctttgccaagccgttgataa

SEQ ID NO: 4656914 - DNA, 25 bp, Homo sapien
cctgaggacatttggcgatattcag

SEQ ID NO: 4656915 - DNA, 25 bp, Homo sapien
ggacatttggcgatattcagacata

SEQ ID NO: 4656916 - DNA, 25 bp, Homo sapien
gacatttggcgatattcagacatac

SEQ ID NO: 4656917 - DNA, 25 bp, Homo sapien
gaggacatttggcgatattcagaca

SEQ ID NO: 4656918 - DNA, 25 bp, Homo sapien
agccagggaccctctccagagcggg

SEQ ID NO: 4656919 - DNA, 25 bp, Homo sapien
gactggctgcagactctgctctgct

SEQ ID NO: 4656920 - DNA, 25 bp, Homo sapien
tggctccagaggcaggatgtgacat

SEQ ID NO: 4656921 - DNA, 25 bp, Homo sapien
gccttgtctgtagttttctccttca

SEQ ID NO: 4656922 - DNA, 25 bp, Homo sapien
tgtgaagtgagcacttccttcaaga

SEQ ID NO: 4656923 - DNA, 25 bp, Homo sapien
cagctgccgagagggagttattgct

SEQ ID NO: 4656924 - DNA, 25 bp, Homo sapien
tgagcacttccttcaagagatgcca

SEQ ID NO: 4656925 - DNA, 25 bp, Homo sapien
tgcaggtcacctcgtgcagtcaggg

SEQ ID NO: 4656926 - DNA, 25 bp, Homo sapien
tcctgagacagacaatctattgctc

SEQ ID NO: 4656927 - DNA, 25 bp, Homo sapien
tgccctctgtgagtcccaggatctc

SEQ ID NO: 4656928 - DNA, 25 bp, Homo sapien
tattcctgagacagacaatctattg

SEQ ID NO: 4656929 - DNA, 25 bp, Homo sapien
tgagtcccaggatctcatattcctg

SEQ ID NO: 4656930 - DNA, 25 bp, Homo sapien
caatctggcagagtctttgttcaca

SEQ ID NO: 4656931 - DNA, 25 bp, Homo sapien
cccaatacttaactctctatgcttc

SEQ ID NO: 4656932 - DNA, 25 bp, Homo sapien
gggattaagtaacattgtgcttcta

SEQ ID NO: 4656933 - DNA, 25 bp, Homo sapien
ggtggtgagtttagcttcagaaaga

SEQ ID NO: 4656934 - DNA, 25 bp, Homo sapien
cctcctcggccaatgtgaaatgact

SEQ ID NO: 4656935 - DNA, 25 bp, Homo sapien
tgttgaaggccagaacacacacttt

SEQ ID NO: 4656936 - DNA, 25 bp, Homo sapien
gcctggacagcacaccggagagtgt

SEQ ID NO: 4656937 - DNA, 25 bp, Homo sapien
agagtgttttgaactcctcctcggc

SEQ ID NO: 4656938 - DNA, 25 bp, Homo sapien
ccctgagtggcgcagtttgacagct

SEQ ID NO: 4656939 - DNA, 25 bp, Homo sapien
aaaacctgaggagtcgtgatctgcc

SEQ ID NO: 4656940 - DNA, 25 bp, Homo sapien
tggtggctctgaaaatgtggcctct

SEQ ID NO: 4656941 - DNA, 25 bp, Homo sapien
gaatgcaggttatcaccctgagtgg

SEQ ID NO: 4656942 - DNA, 25 bp, Homo sapien
cagcaataggaaaggccaaaggaag

SEQ ID NO: 4656943 - DNA, 25 bp, Homo sapien
ccagtagttccatgaaaccagatgg

SEQ ID NO: 4656944 - DNA, 25 bp, Homo sapien
ctccagtagttcttgacattccagt

SEQ ID NO: 4656945 - DNA, 25 bp, Homo sapien
gaagaggctggatccctacagtcat

SEQ ID NO: 4656946 - DNA, 25 bp, Homo sapien
gatacagctgacaactaataaaatg

SEQ ID NO: 4656947 - DNA, 25 bp, Homo sapien
ggatacagctgacaactaataaaat

SEQ ID NO: 4656948 - DNA, 25 bp, Homo sapien
taggatacagctgacaactaataaa

SEQ ID NO: 4656949 - DNA, 25 bp, Homo sapien
ataggatacagctgacaactaataa

SEQ ID NO: 4656950 - DNA, 25 bp, Homo sapien
tcttgggtgactccgatggcttcag

SEQ ID NO: 4656951 - DNA, 25 bp, Homo sapien
caggaactaggaggataccacaggg

SEQ ID NO: 4656952 - DNA, 25 bp, Homo sapien
ccgatggcttcagcatggatgactg

SEQ ID NO: 4656953 - DNA, 25 bp, Homo sapien
gactggatgaatggcagagtcactg

SEQ ID NO: 4656954 - DNA, 25 bp, Homo sapien
ctccttcaataccaggaccaagcat

SEQ ID NO: 4656955 - DNA, 25 bp, Homo sapien
ttcctccttcaataccaggaccaag

SEQ ID NO: 4656956 - DNA, 25 bp, Homo sapien
tttgatacaagcctccaaagtttcc

SEQ ID NO: 4656957 - DNA, 25 bp, Homo sapien
ttatttgatacaagcctccaaagtt

SEQ ID NO: 4656958 - DNA, 25 bp, Homo sapien
gcggtacctgatccataaggactca

SEQ ID NO: 4656959 - DNA, 25 bp, Homo sapien
gacccgcggtacctgatccataagg

SEQ ID NO: 4656960 - DNA, 25 bp, Homo sapien
cctgatccataaggactcagctgct

SEQ ID NO: 4656961 - DNA, 25 bp, Homo sapien
ggaagacccgcggtacctgatccat

SEQ ID NO: 4656962 - DNA, 25 bp, Homo sapien
tatgtgtgtgttcctcgagagcctg

SEQ ID NO: 4656963 - DNA, 25 bp, Homo sapien
tggtcacattgaattacatttggct

SEQ ID NO: 4656964 - DNA, 25 bp, Homo sapien
cgctctctcccgcaggtatgggaag

SEQ ID NO: 4656965 - DNA, 25 bp, Homo sapien
gaggtgaaagtcatagaaagtttat

SEQ ID NO: 4656966 - DNA, 25 bp, Homo sapien
cttgccagtggattcttcaaaacct

SEQ ID NO: 4656967 - DNA, 25 bp, Homo sapien
ttgccagtggattcttcaaaacctt

SEQ ID NO: 4656968 - DNA, 25 bp, Homo sapien
aatacaggtttccacccggatggct

SEQ ID NO: 4656969 - DNA, 25 bp, Homo sapien
tttccacccggatggcttgtacttg

SEQ ID NO: 4656970 - DNA, 25 bp, Homo sapien
acccggatggcttgtacttggcctt

SEQ ID NO: 4656971 - DNA, 25 bp, Homo sapien
tacaggtttccacccggatggcttg

SEQ ID NO: 4656972 - DNA, 25 bp, Homo sapien
ccacgaaatgcctgcttcatgttaa

SEQ ID NO: 4656973 - DNA, 25 bp, Homo sapien
ttgcaatggccttcccacgaaatgc

SEQ ID NO: 4656974 - DNA, 25 bp, Homo sapien
tggccttcccacgaaatgcctgctt

SEQ ID NO: 4656975 - DNA, 25 bp, Homo sapien
gagtgtcagtgatgggcaaaaggga

SEQ ID NO: 4656976 - DNA, 25 bp, Homo sapien
tccttagctgtgctttggttgctaa

SEQ ID NO: 4656977 - DNA, 25 bp, Homo sapien
tagctgtgctttggttgctaatact

SEQ ID NO: 4656978 - DNA, 25 bp, Homo sapien
ccagtccattggtgcagctctgctc

SEQ ID NO: 4656979 - DNA, 25 bp, Homo sapien
gctctgctccttagctgtgctttgg

SEQ ID NO: 4656980 - DNA, 25 bp, Homo sapien
gtgtgtttcagagggttgggcaggc

SEQ ID NO: 4656981 - DNA, 25 bp, Homo sapien
ggtgtgtttcagagggttgggcagg

SEQ ID NO: 4656982 - DNA, 25 bp, Homo sapien
gtgtttcagagggttgggcaggctg

SEQ ID NO: 4656983 - DNA, 25 bp, Homo sapien
tgtgtttcagagggttgggcaggct

SEQ ID NO: 4656984 - DNA, 25 bp, Homo sapien
tccgcggctcccactctgagtagtg

SEQ ID NO: 4656985 - DNA, 25 bp, Homo sapien
gatttgttgcctttagaccagtgct

SEQ ID NO: 4656986 - DNA, 25 bp, Homo sapien
tcaggagggtcaaagtggcaattcc

SEQ ID NO: 4656987 - DNA, 25 bp, Homo sapien
taaagctgtacaggcatcagccagg

SEQ ID NO: 4656988 - DNA, 25 bp, Homo sapien
ggcatgagcgagagatgagaggcac

SEQ ID NO: 4656989 - DNA, 25 bp, Homo sapien
gatgagaggcacacatgagggcaga

SEQ ID NO: 4656990 - DNA, 25 bp, Homo sapien
gaggttgccccgtgacctgtgtcct

SEQ ID NO: 4656991 - DNA, 25 bp, Homo sapien
tgcccacgggcgcttccagtcgtgg

SEQ ID NO: 4656992 - DNA, 25 bp, Homo sapien
gacagatactgcatggatggagcct

SEQ ID NO: 4656993 - DNA, 25 bp, Homo sapien
gaagacagagattcctactcccagg

SEQ ID NO: 4656994 - DNA, 25 bp, Homo sapien
gggcctgatggacagcaaatgctca

SEQ ID NO: 4656995 - DNA, 25 bp, Homo sapien
catgagcagcctgtcagtgatggca

SEQ ID NO: 4656996 - DNA, 25 bp, Homo sapien
tcggcagcctacgttctctttaatg

SEQ ID NO: 4656997 - DNA, 25 bp, Homo sapien
cggcagcctacgttctctttaatgt

SEQ ID NO: 4656998 - DNA, 25 bp, Homo sapien
tcctgttttaccagtgaaaggtcca

SEQ ID NO: 4656999 - DNA, 25 bp, Homo sapien
gagctggtttacaatgcgatcatcg

SEQ ID NO: 4657000 - DNA, 25 bp, Homo sapien
tgtttaaggttcctagcagaccacg

SEQ ID NO: 4657001 - DNA, 25 bp, Homo sapien
taaaaggcttagactagaactccaa

SEQ ID NO: 4657002 - DNA, 25 bp, Homo sapien
gacgctggaaagtcgtacacagaca

SEQ ID NO: 4657003 - DNA, 25 bp, Homo sapien
ttatggatgcagtaacggagggaca

SEQ ID NO: 4657004 - DNA, 25 bp, Homo sapien
tgtgcattaacacgatgctctgggt

SEQ ID NO: 4657005 - DNA, 25 bp, Homo sapien
tgctctgggtagaaagtgaccaact

SEQ ID NO: 4657006 - DNA, 25 bp, Homo sapien
agggtacagtcttccttggaagagg

SEQ ID NO: 4657007 - DNA, 25 bp, Homo sapien
aaagaaagatcaagggtacagtctt

SEQ ID NO: 4657008 - DNA, 25 bp, Homo sapien
cctgcaccttcaaagatgacaaaga

SEQ ID NO: 4657009 - DNA, 25 bp, Homo sapien
atgacaaagaaagatcaagggtaca

SEQ ID NO: 4657010 - DNA, 25 bp, Homo sapien
ccatcagtaaactgccacaacagtc

SEQ ID NO: 4657011 - DNA, 25 bp, Homo sapien
gattttgctattggaagaagtaaga

SEQ ID NO: 4657012 - DNA, 25 bp, Homo sapien
gcatctggggctaggaacccatcag

SEQ ID NO: 4657013 - DNA, 25 bp, Homo sapien
cagggagagattttgctattggaag

SEQ ID NO: 4657014 - DNA, 25 bp, Homo sapien
tctttcttcaccagatgagagtcat

SEQ ID NO: 4657015 - DNA, 25 bp, Homo sapien
tacgtccgtgaaacacaagctgcag

SEQ ID NO: 4657016 - DNA, 25 bp, Homo sapien
ccagggccagcaaatgagaacagct

SEQ ID NO: 4657017 - DNA, 25 bp, Homo sapien
gaatatttgggcgtttggctccaag

SEQ ID NO: 4657018 - DNA, 25 bp, Homo sapien
ttctgagtgttcgtgatgatgaagt

SEQ ID NO: 4657019 - DNA, 25 bp, Homo sapien
ggattctgagtgttcgtgatgatga

SEQ ID NO: 4657020 - DNA, 25 bp, Homo sapien
tgatgatgaagtctgtccacagttc

SEQ ID NO: 4657021 - DNA, 25 bp, Homo sapien
gatgatgaagtctgtccacagttca

SEQ ID NO: 4657022 - DNA, 25 bp, Homo sapien
taacatgatataagaaggtgcctga

SEQ ID NO: 4657023 - DNA, 25 bp, Homo sapien
gctgtcatgggttcttaacatgata

SEQ ID NO: 4657024 - DNA, 25 bp, Homo sapien
gaggatcatttacttctcttggcat

SEQ ID NO: 4657025 - DNA, 25 bp, Homo sapien
tcatgggttcttaacatgatataag

SEQ ID NO: 4657026 - DNA, 25 bp, Homo sapien
atgacttatccaagacatcactccc

SEQ ID NO: 4657027 - DNA, 25 bp, Homo sapien
tcccgtgtaatgtttgggcttaatg

SEQ ID NO: 4657028 - DNA, 25 bp, Homo sapien
ccgtgtaatgtttgggcttaatgtt

SEQ ID NO: 4657029 - DNA, 25 bp, Homo sapien
agtttgtgtcgggtcatgacttatc

SEQ ID NO: 4657030 - DNA, 25 bp, Homo sapien
tttgcatggccagcggcttctgcat

SEQ ID NO: 4657031 - DNA, 25 bp, Homo sapien
ctgttttgcatggccagcggcttct

SEQ ID NO: 4657032 - DNA, 25 bp, Homo sapien
ttttgcatggccagcggcttctgca

SEQ ID NO: 4657033 - DNA, 25 bp, Homo sapien
gttttgcatggccagcggcttctgc

SEQ ID NO: 4657034 - DNA, 25 bp, Homo sapien
tgacctgacgggagagtcacctcca

SEQ ID NO: 4657035 - DNA, 25 bp, Homo sapien
ggaaattaaggcttgaccgctgctg

SEQ ID NO: 4657036 - DNA, 25 bp, Homo sapien
agacagggcgctgctggcatcaggt

SEQ ID NO: 4657037 - DNA, 25 bp, Homo sapien
tacactagtgattaactttggaagg

SEQ ID NO: 4657038 - DNA, 25 bp, Homo sapien
ttattttgctgggagctctcttcac

SEQ ID NO: 4657039 - DNA, 25 bp, Homo sapien
gagcagctgctctcttattttgctg

SEQ ID NO: 4657040 - DNA, 25 bp, Homo sapien
agagcagctgctctcttattttgct

SEQ ID NO: 4657041 - DNA, 25 bp, Homo sapien
gctctcttattttgctgggagctct

SEQ ID NO: 4657042 - DNA, 25 bp, Homo sapien
aacaaaacagaaacctctgagcttt

SEQ ID NO: 4657043 - DNA, 25 bp, Homo sapien
atcacctggactttgaaacaaaaca

SEQ ID NO: 4657044 - DNA, 25 bp, Homo sapien
tcatcacctggactttgaaacaaaa

SEQ ID NO: 4657045 - DNA, 25 bp, Homo sapien
cttctcaacttcatcacctggactt

SEQ ID NO: 4657046 - DNA, 25 bp, Homo sapien
aagtgacacactgttacaacccgtg

SEQ ID NO: 4657047 - DNA, 25 bp, Homo sapien
aattgtgactgctcctaagaggctg

SEQ ID NO: 4657048 - DNA, 25 bp, Homo sapien
tttcccaggtctccataaagtgaca

SEQ ID NO: 4657049 - DNA, 25 bp, Homo sapien
gtttccaacgtcctgcttggagagg

SEQ ID NO: 4657050 - DNA, 25 bp, Homo sapien
gctgtgactgtaggggacagtccat

SEQ ID NO: 4657051 - DNA, 25 bp, Homo sapien
tagaaattttgggatgtcattggca

SEQ ID NO: 4657052 - DNA, 25 bp, Homo sapien
taagctcctggatatagaaattttg

SEQ ID NO: 4657053 - DNA, 25 bp, Homo sapien
ccacaatgcctgtcatccagcagct

SEQ ID NO: 4657054 - DNA, 25 bp, Homo sapien
cagtcaatgatgtaattgtgagtcg

SEQ ID NO: 4657055 - DNA, 25 bp, Homo sapien
gaggaaatgtgtcttaatgttagca

SEQ ID NO: 4657056 - DNA, 25 bp, Homo sapien
taatcatctgtctatgagaggaaat

SEQ ID NO: 4657057 - DNA, 25 bp, Homo sapien
ttgtgagtcgttattattttcttcc

SEQ ID NO: 4657058 - DNA, 25 bp, Homo sapien
caaaccctgtgtaatatgcatgcaa

SEQ ID NO: 4657059 - DNA, 25 bp, Homo sapien
catgcaagagaatcccgaagggctg

SEQ ID NO: 4657060 - DNA, 25 bp, Homo sapien
ctttccgaggaagctttcagctaat

SEQ ID NO: 4657061 - DNA, 25 bp, Homo sapien
ccatgctgacacctcttaaagagga

SEQ ID NO: 4657062 - DNA, 25 bp, Homo sapien
ggttgctaaaccctggtacatcgta

SEQ ID NO: 4657063 - DNA, 25 bp, Homo sapien
gaatcaaaacccacagtccattgtg

SEQ ID NO: 4657064 - DNA, 25 bp, Homo sapien
taggattaagggtccaaaaatgctg

SEQ ID NO: 4657065 - DNA, 25 bp, Homo sapien
gcctctgctcctatcagggttgcta

SEQ ID NO: 4657066 - DNA, 25 bp, Homo sapien
tcctggactcgaaagggaaggtgct

SEQ ID NO: 4657067 - DNA, 25 bp, Homo sapien
tgcgcccagaattctcagtgacgtg

SEQ ID NO: 4657068 - DNA, 25 bp, Homo sapien
gacttttacagattgtggccagtga

SEQ ID NO: 4657069 - DNA, 25 bp, Homo sapien
gcgattgccttagagggaaccccta

SEQ ID NO: 4657070 - DNA, 25 bp, Homo sapien
gaccagatctcgacagctgttcatt

SEQ ID NO: 4657071 - DNA, 25 bp, Homo sapien
gggccgagcggagggctctcgggtg

SEQ ID NO: 4657072 - DNA, 25 bp, Homo sapien
tgcaggcgcggagcaaaatgcaccc

SEQ ID NO: 4657073 - DNA, 25 bp, Homo sapien
ctctcgggtgggagagcgggaccag

SEQ ID NO: 4657074 - DNA, 25 bp, Homo sapien
agaggtgcagcttcccacggcagac

SEQ ID NO: 4657075 - DNA, 25 bp, Homo sapien
ggaatctcctagtgctgggcctccg

SEQ ID NO: 4657076 - DNA, 25 bp, Homo sapien
gccttaatttttgtgacagatggag

SEQ ID NO: 4657077 - DNA, 25 bp, Homo sapien
gcgcctctgaggaacgcagcagctt

SEQ ID NO: 4657078 - DNA, 25 bp, Homo sapien
agcatgcgagtctgaaggtggtcca

SEQ ID NO: 4657079 - DNA, 25 bp, Homo sapien
tatcctctacacatagtaagcatgg

SEQ ID NO: 4657080 - DNA, 25 bp, Homo sapien
tctccatgtatcctctacacatagt

SEQ ID NO: 4657081 - DNA, 25 bp, Homo sapien
cagatgtcttacgtggtgactggct

SEQ ID NO: 4657082 - DNA, 25 bp, Homo sapien
tcactcttggagtcttggagcccaa

SEQ ID NO: 4657083 - DNA, 25 bp, Homo sapien
tgcttcacgctgatcttgaccctgg

SEQ ID NO: 4657084 - DNA, 25 bp, Homo sapien
tagtgtctccactcacaagtctggt

SEQ ID NO: 4657085 - DNA, 25 bp, Homo sapien
tcttcagtaggatggcagctagagc

SEQ ID NO: 4657086 - DNA, 25 bp, Homo sapien
gaaagacctggtattcagcaatgaa

SEQ ID NO: 4657087 - DNA, 25 bp, Homo sapien
aaactgctgtaacactggtagtgac

SEQ ID NO: 4657088 - DNA, 25 bp, Homo sapien
aaagctcccgagtcctttagagatg

SEQ ID NO: 4657089 - DNA, 25 bp, Homo sapien
tattcaactcgcctgtattctctgg

SEQ ID NO: 4657090 - DNA, 25 bp, Homo sapien
gaaataaggcctagcacgactttga

SEQ ID NO: 4657091 - DNA, 25 bp, Homo sapien
gactttgaaacatactaactacgca

SEQ ID NO: 4657092 - DNA, 25 bp, Homo sapien
caaatgtgcccaaggtactctcttg

SEQ ID NO: 4657093 - DNA, 25 bp, Homo sapien
tacgcatattgtagaatcggcccca

SEQ ID NO: 4657094 - DNA, 25 bp, Homo sapien
cgttctggcggaaagcacctatagt

SEQ ID NO: 4657095 - DNA, 25 bp, Homo sapien
ggcggaaagcacctatagttgaaag

SEQ ID NO: 4657096 - DNA, 25 bp, Homo sapien
aaaagtgccttcataagggatctcc

SEQ ID NO: 4657097 - DNA, 25 bp, Homo sapien
aagttattcaccttgaccttgacca

SEQ ID NO: 4657098 - DNA, 25 bp, Homo sapien
agatatggagtaacttcaagacaac

SEQ ID NO: 4657099 - DNA, 25 bp, Homo sapien
tcttcttcacttgcgtgtcactgaa

SEQ ID NO: 4657100 - DNA, 25 bp, Homo sapien
tcacttgcgtgtcactgaagactaa

SEQ ID NO: 4657101 - DNA, 25 bp, Homo sapien
ggagtaacttcaagacaactacatc

SEQ ID NO: 4657102 - DNA, 25 bp, Homo sapien
tatggccccttccttgaaggtggac

SEQ ID NO: 4657103 - DNA, 25 bp, Homo sapien
ggtggaccttgactcgctgttgatg

SEQ ID NO: 4657104 - DNA, 25 bp, Homo sapien
tggtcattaccaagcatcatcccct

SEQ ID NO: 4657105 - DNA, 25 bp, Homo sapien
gaaccataaggcatgggtgggatga

SEQ ID NO: 4657106 - DNA, 25 bp, Homo sapien
tggtaaagtggactcacagaatctg

SEQ ID NO: 4657107 - DNA, 25 bp, Homo sapien
atggtaaagtggactcacagaatct

SEQ ID NO: 4657108 - DNA, 25 bp, Homo sapien
ccaagtcttttacccttgaatatcg

SEQ ID NO: 4657109 - DNA, 25 bp, Homo sapien
tatgtccatgaatagttcaccaatg

SEQ ID NO: 4657110 - DNA, 25 bp, Homo sapien
tatagcgtcattagtgcagacttcc

SEQ ID NO: 4657111 - DNA, 25 bp, Homo sapien
gtccatgaatagttcaccaatgatg

SEQ ID NO: 4657112 - DNA, 25 bp, Homo sapien
atctgacgcaattgactgtaagttc

SEQ ID NO: 4657113 - DNA, 25 bp, Homo sapien
cgtaacattagctcaattttcttgt

SEQ ID NO: 4657114 - DNA, 25 bp, Homo sapien
ttgtaccgtatctgacgcaattgac

SEQ ID NO: 4657115 - DNA, 25 bp, Homo sapien
aattttcttgtaccgtatctgacgc

SEQ ID NO: 4657116 - DNA, 25 bp, Homo sapien
gtcatatgatatttcagcatgccat

SEQ ID NO: 4657117 - DNA, 25 bp, Homo sapien
atactatcccctccaattagctgct

SEQ ID NO: 4657118 - DNA, 25 bp, Homo sapien
ttttgcattgaaccaaagcaagttt

SEQ ID NO: 4657119 - DNA, 25 bp, Homo sapien
ttcttccctaatctttggaggctca

SEQ ID NO: 4657120 - DNA, 25 bp, Homo sapien
caggaatggctggatactgtaactt

SEQ ID NO: 4657121 - DNA, 25 bp, Homo sapien
catctatggctgattattcactgca

SEQ ID NO: 4657122 - DNA, 25 bp, Homo sapien
cactgcattgtgttctgaagacgca

SEQ ID NO: 4657123 - DNA, 25 bp, Homo sapien
tccatcacgcctacagagggctgtg

SEQ ID NO: 4657124 - DNA, 25 bp, Homo sapien
taatcccagtagtgtttcaacattg

SEQ ID NO: 4657125 - DNA, 25 bp, Homo sapien
agctttttgcgtatacagttgcccc

SEQ ID NO: 4657126 - DNA, 25 bp, Homo sapien
ggaggtgcttgatcactggtagtca

SEQ ID NO: 4657127 - DNA, 25 bp, Homo sapien
tcatgggttccacatatgtagattc

SEQ ID NO: 4657128 - DNA, 25 bp, Homo sapien
tgtgtacattttttcgtgtcttcaa

SEQ ID NO: 4657129 - DNA, 25 bp, Homo sapien
cagttctaaatcattttgtgtacat

SEQ ID NO: 4657130 - DNA, 25 bp, Homo sapien
tcaacagttctaaatcattttgtgt

SEQ ID NO: 4657131 - DNA, 25 bp, Homo sapien
ctttagttatgaggtagatgatttt

SEQ ID NO: 4657132 - DNA, 25 bp, Homo sapien
accagaaggtggcaaccaaggtaag

SEQ ID NO: 4657133 - DNA, 25 bp, Homo sapien
taagctccttacatcagctggctcc

SEQ ID NO: 4657134 - DNA, 25 bp, Homo sapien
tggcaaccaaggtaagctccttaca

SEQ ID NO: 4657135 - DNA, 25 bp, Homo sapien
gttgttcctcaaacagagaccagaa

SEQ ID NO: 4657136 - DNA, 25 bp, Homo sapien
aaggcctggcatgtagcacacgtca

SEQ ID NO: 4657137 - DNA, 25 bp, Homo sapien
gaaatcatagagagtgcagcaaggc

SEQ ID NO: 4657138 - DNA, 25 bp, Homo sapien
cagagcttgaaaggtgaaagacccc

SEQ ID NO: 4657139 - DNA, 25 bp, Homo sapien
aaatccagtagaataggccagggcg

SEQ ID NO: 4657140 - DNA, 25 bp, Homo sapien
agcacgttgggctctacctaggact

SEQ ID NO: 4657141 - DNA, 25 bp, Homo sapien
catgtgggcaccagactgattgacc

SEQ ID NO: 4657142 - DNA, 25 bp, Homo sapien
ccagtattcacaaagcatgtgggca

SEQ ID NO: 4657143 - DNA, 25 bp, Homo sapien
tctgtcaaccgaaaatgccatctct

SEQ ID NO: 4657144 - DNA, 25 bp, Homo sapien
gcctctcaccccaggaaaagtcgtg

SEQ ID NO: 4657145 - DNA, 25 bp, Homo sapien
ccagctttgcctccttatgtgccag

SEQ ID NO: 4657146 - DNA, 25 bp, Homo sapien
tgttgttatatagatgaggccttcc

SEQ ID NO: 4657147 - DNA, 25 bp, Homo sapien
tcaacaagttgcaatgtaagacggg

SEQ ID NO: 4657148 - DNA, 25 bp, Homo sapien
agtggtacccctcaaaataatgtca

SEQ ID NO: 4657149 - DNA, 25 bp, Homo sapien
cagggggagggggccttgcagttgg

SEQ ID NO: 4657150 - DNA, 25 bp, Homo sapien
ggggagggggccttgcagttggtga

SEQ ID NO: 4657151 - DNA, 25 bp, Homo sapien
ctcgaacgcgaattgtgccagggga

SEQ ID NO: 4657152 - DNA, 25 bp, Homo sapien
tgccaggggagcgcccgcaggggga

SEQ ID NO: 4657153 - DNA, 25 bp, Homo sapien
tccacaagattcaggtagtagtcat

SEQ ID NO: 4657154 - DNA, 25 bp, Homo sapien
aggggcatccaggttatggtctggc

SEQ ID NO: 4657155 - DNA, 25 bp, Homo sapien
ggccgcagaggatacatatttccca

SEQ ID NO: 4657156 - DNA, 25 bp, Homo sapien
ccaggccgcagaggatacatatttc

SEQ ID NO: 4657157 - DNA, 25 bp, Homo sapien
ccgcagaggatacatatttcccagt

SEQ ID NO: 4657158 - DNA, 25 bp, Homo sapien
gcagaggatacatatttcccagtct

SEQ ID NO: 4657159 - DNA, 25 bp, Homo sapien
accactggataggatatagctgttc

SEQ ID NO: 4657160 - DNA, 25 bp, Homo sapien
aatgtgtcgatcactggtgccccct

SEQ ID NO: 4657161 - DNA, 25 bp, Homo sapien
gggcatccacggcactcagacaggc

SEQ ID NO: 4657162 - DNA, 25 bp, Homo sapien
atgtgtcgatcactggtgccccctc

SEQ ID NO: 4657163 - DNA, 25 bp, Homo sapien
cttgtagtggggagaccagagggtg

SEQ ID NO: 4657164 - DNA, 25 bp, Homo sapien
tgtagtggggagaccagagggtgga

SEQ ID NO: 4657165 - DNA, 25 bp, Homo sapien
ggggagaccagagggtggagcacac

SEQ ID NO: 4657166 - DNA, 25 bp, Homo sapien
agtggggagaccagagggtggagca

SEQ ID NO: 4657167 - DNA, 25 bp, Homo sapien
gccatggttgggtacttccaaataa

SEQ ID NO: 4657168 - DNA, 25 bp, Homo sapien
ccttggtggatgaagctgcttttgg

SEQ ID NO: 4657169 - DNA, 25 bp, Homo sapien
ccatctgggctcatggtcagagtca

SEQ ID NO: 4657170 - DNA, 25 bp, Homo sapien
tgcttttggctgcactggccttctc

SEQ ID NO: 4657171 - DNA, 25 bp, Homo sapien
cagggtccaactcaaaacagtgcca

SEQ ID NO: 4657172 - DNA, 25 bp, Homo sapien
tgctgccgagaaagcagaggccagt

SEQ ID NO: 4657173 - DNA, 25 bp, Homo sapien
cagaggccagttcaaacctgggcat

SEQ ID NO: 4657174 - DNA, 25 bp, Homo sapien
gaaagcagaggccagttcaaacctg

SEQ ID NO: 4657175 - DNA, 25 bp, Homo sapien
ctgccgagaaagcagaggccagttc

SEQ ID NO: 4657176 - DNA, 25 bp, Homo sapien
ctccaggttcttttccgtgccttgg

SEQ ID NO: 4657177 - DNA, 25 bp, Homo sapien
tccccttgactaaagccactctgcc

SEQ ID NO: 4657178 - DNA, 25 bp, Homo sapien
gttcttttccgtgccttggtgtgga

SEQ ID NO: 4657179 - DNA, 25 bp, Homo sapien
gcttttcccagaggccgacatcttt

SEQ ID NO: 4657180 - DNA, 25 bp, Homo sapien
ggactccaaacattagcaggaggct

SEQ ID NO: 4657181 - DNA, 25 bp, Homo sapien
tggcccagtgttttcgggctgatat

SEQ ID NO: 4657182 - DNA, 25 bp, Homo sapien
tgttctcctgaactttccgtctgga

SEQ ID NO: 4657183 - DNA, 25 bp, Homo sapien
ctgactccttgtttgaacgtttttg

SEQ ID NO: 4657184 - DNA, 25 bp, Homo sapien
cagaatgagcttcctaaacatgtgg

SEQ ID NO: 4657185 - DNA, 25 bp, Homo sapien
cagggcagaatgagcttcctaaaca

SEQ ID NO: 4657186 - DNA, 25 bp, Homo sapien
agcgcagggcagaatgagcttccta

SEQ ID NO: 4657187 - DNA, 25 bp, Homo sapien
tcctaaacatgtggggagaaaccaa

SEQ ID NO: 4657188 - DNA, 25 bp, Homo sapien
tgccttaagcaccgcttgcctttct

SEQ ID NO: 4657189 - DNA, 25 bp, Homo sapien
agccctgccttaagcaccgcttgcc

SEQ ID NO: 4657190 - DNA, 25 bp, Homo sapien
gtccaacatctttgaggcttcccct

SEQ ID NO: 4657191 - DNA, 25 bp, Homo sapien
ttaagcaccgcttgcctttctcccc

SEQ ID NO: 4657192 - DNA, 25 bp, Homo sapien
ctttgagcaagtagtcaggggtcgt

SEQ ID NO: 4657193 - DNA, 25 bp, Homo sapien
gggtcgttctagctcatgcaacgtc

SEQ ID NO: 4657194 - DNA, 25 bp, Homo sapien
gttctagctcatgcaacgtcagcat

SEQ ID NO: 4657195 - DNA, 25 bp, Homo sapien
tagtcaggggtcgttctagctcatg

SEQ ID NO: 4657196 - DNA, 25 bp, Homo sapien
caacagcagtgtggcttgcacagga

SEQ ID NO: 4657197 - DNA, 25 bp, Homo sapien
tgcagggagggtaggctttccttct

SEQ ID NO: 4657198 - DNA, 25 bp, Homo sapien
gccaggatttcccttgatgtaccca

SEQ ID NO: 4657199 - DNA, 25 bp, Homo sapien
ttccgtggccaaatgtaagatgaga

SEQ ID NO: 4657200 - DNA, 25 bp, Homo sapien
cgcggtgcctgagcctatgcagtgc

SEQ ID NO: 4657201 - DNA, 25 bp, Homo sapien
gtgatgcccagcaaagcctaaagtc

SEQ ID NO: 4657202 - DNA, 25 bp, Homo sapien
gactccctgaagaggcgtttgtcga

SEQ ID NO: 4657203 - DNA, 25 bp, Homo sapien
gatttggtggtactagccgcagtga

SEQ ID NO: 4657204 - DNA, 25 bp, Homo sapien
ttttcctgagaattcagtagctccc

SEQ ID NO: 4657205 - DNA, 25 bp, Homo sapien
cacagggccacgattcctgatggga

SEQ ID NO: 4657206 - DNA, 25 bp, Homo sapien
gggcatggtcaacttctcttgcata

SEQ ID NO: 4657207 - DNA, 25 bp, Homo sapien
tgctggacttggtataggcttttcc

SEQ ID NO: 4657208 - DNA, 25 bp, Homo sapien
cagggtcccatcgttgccatgtgtg

SEQ ID NO: 4657209 - DNA, 25 bp, Homo sapien
tttcatccaagggaagagcatgcct

SEQ ID NO: 4657210 - DNA, 25 bp, Homo sapien
gagtcttagttccacatccatctgg

SEQ ID NO: 4657211 - DNA, 25 bp, Homo sapien
cagatgccatctaatgcagtacagg

SEQ ID NO: 4657212 - DNA, 25 bp, Homo sapien
agtgagccacaatagtgctgctgca

SEQ ID NO: 4657213 - DNA, 25 bp, Homo sapien
tgagccacaatagtgctgctgcact

SEQ ID NO: 4657214 - DNA, 25 bp, Homo sapien
gagccacaatagtgctgctgcactc

SEQ ID NO: 4657215 - DNA, 25 bp, Homo sapien
gcagtgagccacaatagtgctgctg

SEQ ID NO: 4657216 - DNA, 25 bp, Homo sapien
agcatccaatagctcatgaccaagg

SEQ ID NO: 4657217 - DNA, 25 bp, Homo sapien
tactacttaggtagccatctccaaa

SEQ ID NO: 4657218 - DNA, 25 bp, Homo sapien
gccatgcaatgttcagctgacccca

SEQ ID NO: 4657219 - DNA, 25 bp, Homo sapien
caaggaacatggtcatcaggcacca

SEQ ID NO: 4657220 - DNA, 25 bp, Homo sapien
caaaaaatggaatacgaataggcta

SEQ ID NO: 4657221 - DNA, 25 bp, Homo sapien
tgaaatcaatatcaccagcctgaaa

SEQ ID NO: 4657222 - DNA, 25 bp, Homo sapien
ggagaatttgcctttttgccatgtc

SEQ ID NO: 4657223 - DNA, 25 bp, Homo sapien
atgtcagggcaacgctccctctgga

SEQ ID NO: 4657224 - DNA, 25 bp, Homo sapien
tggaaaagcagagtgcgaaatgatc

SEQ ID NO: 4657225 - DNA, 25 bp, Homo sapien
aaagcagagtgcgaaatgatctggg

SEQ ID NO: 4657226 - DNA, 25 bp, Homo sapien
ctggggcgacttggggattctcctt

SEQ ID NO: 4657227 - DNA, 25 bp, Homo sapien
gggattctccttacatcctgttctg

SEQ ID NO: 4657228 - DNA, 25 bp, Homo sapien
ctaatccagcatcggtacaacctgg

SEQ ID NO: 4657229 - DNA, 25 bp, Homo sapien
tctgcagcacagcccggattcttgc

SEQ ID NO: 4657230 - DNA, 25 bp, Homo sapien
tgcctaatccagcatcggtacaacc

SEQ ID NO: 4657231 - DNA, 25 bp, Homo sapien
ttcttgcctaatccagcatcggtac

SEQ ID NO: 4657232 - DNA, 25 bp, Homo sapien
aactctgtagatgccacctttgcta

SEQ ID NO: 4657233 - DNA, 25 bp, Homo sapien
gctaacagcactaattacagaacgc

SEQ ID NO: 4657234 - DNA, 25 bp, Homo sapien
cagcactaattacagaacgcggcat

SEQ ID NO: 4657235 - DNA, 25 bp, Homo sapien
cagcaacggccagcaactctgtaga

SEQ ID NO: 4657236 - DNA, 25 bp, Homo sapien
tctaggttcacctcattttgaaggt

SEQ ID NO: 4657237 - DNA, 25 bp, Homo sapien
taaaccagtcacacccatatttgat

SEQ ID NO: 4657238 - DNA, 25 bp, Homo sapien
gcaaatataaaccagtcacacccat

SEQ ID NO: 4657239 - DNA, 25 bp, Homo sapien
tgttgtgacaagctgtggacttatc

SEQ ID NO: 4657240 - DNA, 25 bp, Homo sapien
tagtggataaccctcagactcatgg

SEQ ID NO: 4657241 - DNA, 25 bp, Homo sapien
ttaggtaacctcatcatagctcggg

SEQ ID NO: 4657242 - DNA, 25 bp, Homo sapien
ggaaaatgactgagccaattctctg

SEQ ID NO: 4657243 - DNA, 25 bp, Homo sapien
gaaatgtctactgcatgtggcctta

SEQ ID NO: 4657244 - DNA, 25 bp, Homo sapien
ggtagacatcaattagcaatgcaaa

SEQ ID NO: 4657245 - DNA, 25 bp, Homo sapien
aggtagacatcaattagcaatgcaa

SEQ ID NO: 4657246 - DNA, 25 bp, Homo sapien
tagacatcaattagcaatgcaaaca

SEQ ID NO: 4657247 - DNA, 25 bp, Homo sapien
gacatcaattagcaatgcaaacacc

SEQ ID NO: 4657248 - DNA, 25 bp, Homo sapien
cgtctgcttttcagcgcgcggacat

SEQ ID NO: 4657249 - DNA, 25 bp, Homo sapien
gggacagaagggaccgcggccagcc

SEQ ID NO: 4657250 - DNA, 25 bp, Homo sapien
agaagggaccgcggccagccagttc

SEQ ID NO: 4657251 - DNA, 25 bp, Homo sapien
tcagcgcgcggacatttccggctgg

SEQ ID NO: 4657252 - DNA, 25 bp, Homo sapien
gggtgtgaatctgtttctcccctct

SEQ ID NO: 4657253 - DNA, 25 bp, Homo sapien
catttgcaccgactgagcaggaggc

SEQ ID NO: 4657254 - DNA, 25 bp, Homo sapien
ggagctctgctgacgccgaggccgc

SEQ ID NO: 4657255 - DNA, 25 bp, Homo sapien
attccaagcgggacacggcctgagt

SEQ ID NO: 4657256 - DNA, 25 bp, Homo sapien
gaaacgcttctttgagacataaaca

SEQ ID NO: 4657257 - DNA, 25 bp, Homo sapien
gtcaatctcagccattcctcaggaa

SEQ ID NO: 4657258 - DNA, 25 bp, Homo sapien
cagcccaattgggtttcctcagcaa

SEQ ID NO: 4657259 - DNA, 25 bp, Homo sapien
tgctccagacaggatggtttccatg

SEQ ID NO: 4657260 - DNA, 25 bp, Homo sapien
tatgctgcagatggccaagggcaaa

SEQ ID NO: 4657261 - DNA, 25 bp, Homo sapien
gctcagcatgtgactgacgggtgct

SEQ ID NO: 4657262 - DNA, 25 bp, Homo sapien
gacgggtgctgatcctggctcttac

SEQ ID NO: 4657263 - DNA, 25 bp, Homo sapien
ccttaaatgagttcctaggaggctc

SEQ ID NO: 4657264 - DNA, 25 bp, Homo sapien
tattgccaacgccagagggtacttg

SEQ ID NO: 4657265 - DNA, 25 bp, Homo sapien
agtaggtcgtttctccacgcctggg

SEQ ID NO: 4657266 - DNA, 25 bp, Homo sapien
ccttgagtatggaggaaatcgccag

SEQ ID NO: 4657267 - DNA, 25 bp, Homo sapien
tgatgccaatctgaaacccgggcag

SEQ ID NO: 4657268 - DNA, 25 bp, Homo sapien
ggagatcatggaaggcatctaacat

SEQ ID NO: 4657269 - DNA, 25 bp, Homo sapien
tggagatcatggaaggcatctaaca

SEQ ID NO: 4657270 - DNA, 25 bp, Homo sapien
ctccttttccaccttatagccatac

SEQ ID NO: 4657271 - DNA, 25 bp, Homo sapien
atcttctccagtgagaaagtccttt

SEQ ID NO: 4657272 - DNA, 25 bp, Homo sapien
ttctccagtgagaaagtcctttctt

SEQ ID NO: 4657273 - DNA, 25 bp, Homo sapien
tggagctccaactagaggcctggga

SEQ ID NO: 4657274 - DNA, 25 bp, Homo sapien
cctccttgttgggctgtgaactcta

SEQ ID NO: 4657275 - DNA, 25 bp, Homo sapien
tcctccttgttgggctgtgaactct

SEQ ID NO: 4657276 - DNA, 25 bp, Homo sapien
tttggtataatcttttggagctcca

SEQ ID NO: 4657277 - DNA, 25 bp, Homo sapien
tctgtgaagattttgtccccggctg

SEQ ID NO: 4657278 - DNA, 25 bp, Homo sapien
ggctgttatctttccttgctgagaa

SEQ ID NO: 4657279 - DNA, 25 bp, Homo sapien
tgtccccggctgttatctttccttg

SEQ ID NO: 4657280 - DNA, 25 bp, Homo sapien
tgaagattttgtccccggctgttat

SEQ ID NO: 4657281 - DNA, 25 bp, Homo sapien
ttgacagtgcttctccccatgaaaa

SEQ ID NO: 4657282 - DNA, 25 bp, Homo sapien
caggttctagaaaggaggagtcagg

SEQ ID NO: 4657283 - DNA, 25 bp, Homo sapien
ctgaagggatcagtagatgagtggg

SEQ ID NO: 4657284 - DNA, 25 bp, Homo sapien
gatgagtgggatgcattaggatttc

SEQ ID NO: 4657285 - DNA, 25 bp, Homo sapien
agagccagaattatgaagggaagcc

SEQ ID NO: 4657286 - DNA, 25 bp, Homo sapien
ggaaacacggccagctttgccatgt

SEQ ID NO: 4657287 - DNA, 25 bp, Homo sapien
gagccagaattatgaagggaagcca

SEQ ID NO: 4657288 - DNA, 25 bp, Homo sapien
tgtctctgacgtgcgttaattctgg

SEQ ID NO: 4657289 - DNA, 25 bp, Homo sapien
gacgtgcgttaattctggcgcacat

SEQ ID NO: 4657290 - DNA, 25 bp, Homo sapien
aatggtattctaggggcctgtttag

SEQ ID NO: 4657291 - DNA, 25 bp, Homo sapien
aagaaagttgtctctgacgtgcgtt

SEQ ID NO: 4657292 - DNA, 25 bp, Homo sapien
tcactcaggattgacaacttctaca

SEQ ID NO: 4657293 - DNA, 25 bp, Homo sapien
gggtcagctggagaggcgtggatct

SEQ ID NO: 4657294 - DNA, 25 bp, Homo sapien
tatcttcttgacttagtctccctcc

SEQ ID NO: 4657295 - DNA, 25 bp, Homo sapien
cctgatctcataggggtcagctgga

SEQ ID NO: 4657296 - DNA, 25 bp, Homo sapien
taatgtaagaactcttaagagccat

SEQ ID NO: 4657297 - DNA, 25 bp, Homo sapien
tgttaatgtaagaactcttaagagc

SEQ ID NO: 4657298 - DNA, 25 bp, Homo sapien
ttaatgtaagaactcttaagagcca

SEQ ID NO: 4657299 - DNA, 25 bp, Homo sapien
gttaatgtaagaactcttaagagcc

SEQ ID NO: 4657300 - DNA, 25 bp, Homo sapien
gagactgacactctgccagcaggaa

SEQ ID NO: 4657301 - DNA, 25 bp, Homo sapien
caactactcatcaggttgctactgc

SEQ ID NO: 4657302 - DNA, 25 bp, Homo sapien
ttgcacctccaactactcatcaggt

SEQ ID NO: 4657303 - DNA, 25 bp, Homo sapien
tactgcttaaggttccccatccatc

SEQ ID NO: 4657304 - DNA, 25 bp, Homo sapien
ctggaagggtatgatcttccatatt

SEQ ID NO: 4657305 - DNA, 25 bp, Homo sapien
aggactggaagggtatgatcttcca

SEQ ID NO: 4657306 - DNA, 25 bp, Homo sapien
gactggaagggtatgatcttccata

SEQ ID NO: 4657307 - DNA, 25 bp, Homo sapien
ggcaggactggaagggtatgatctt

SEQ ID NO: 4657308 - DNA, 25 bp, Homo sapien
ttgaccttgactgtcaggctccatc

SEQ ID NO: 4657309 - DNA, 25 bp, Homo sapien
ctcggaggtgatgcttgaccttgac

SEQ ID NO: 4657310 - DNA, 25 bp, Homo sapien
ggaggtgatgcttgaccttgactgt

SEQ ID NO: 4657311 - DNA, 25 bp, Homo sapien
aggtgatgcttgaccttgactgtca

SEQ ID NO: 4657312 - DNA, 25 bp, Homo sapien
tcttcttttcacacgctttcccacc

SEQ ID NO: 4657313 - DNA, 25 bp, Homo sapien
ccctttatgatgacgtgttttcttc

SEQ ID NO: 4657314 - DNA, 25 bp, Homo sapien
gagccctttatgatgacgtgttttc

SEQ ID NO: 4657315 - DNA, 25 bp, Homo sapien
aaggagccctttatgatgacgtgtt

SEQ ID NO: 4657316 - DNA, 25 bp, Homo sapien
ttgccttttgtaagaatacttttca

SEQ ID NO: 4657317 - DNA, 25 bp, Homo sapien
caggtagcccgcatttgccttttgt

SEQ ID NO: 4657318 - DNA, 25 bp, Homo sapien
tgactatatcaggtagcccgcattt

SEQ ID NO: 4657319 - DNA, 25 bp, Homo sapien
ctatatcaggtagcccgcatttgcc

SEQ ID NO: 4657320 - DNA, 25 bp, Homo sapien
cgtttcgcgtctgctgtggcttgct

SEQ ID NO: 4657321 - DNA, 25 bp, Homo sapien
aagccaggcatctccggagatggta

SEQ ID NO: 4657322 - DNA, 25 bp, Homo sapien
catctccggagatggtatggagcct

SEQ ID NO: 4657323 - DNA, 25 bp, Homo sapien
tgatcaccagcgatgccattgctct

SEQ ID NO: 4657324 - DNA, 25 bp, Homo sapien
gggctgataccaccatccggttctg

SEQ ID NO: 4657325 - DNA, 25 bp, Homo sapien
gcttgaagggctgataccaccatcc

SEQ ID NO: 4657326 - DNA, 25 bp, Homo sapien
aaaggaacggagtagaaacaggcag

SEQ ID NO: 4657327 - DNA, 25 bp, Homo sapien
tgaagggctgataccaccatccggt

SEQ ID NO: 4657328 - DNA, 25 bp, Homo sapien
agtgagatcccaggttcccaggtgg

SEQ ID NO: 4657329 - DNA, 25 bp, Homo sapien
ctaagtgagatcccaggttcccagg

SEQ ID NO: 4657330 - DNA, 25 bp, Homo sapien
tcccaggtgggagcaggacagctga

SEQ ID NO: 4657331 - DNA, 25 bp, Homo sapien
cccaggtgggagcaggacagctgac

SEQ ID NO: 4657332 - DNA, 25 bp, Homo sapien
tcggtattgcttgtgcttcaacttc

SEQ ID NO: 4657333 - DNA, 25 bp, Homo sapien
ggaagtctggcaaacgtcggtattg

SEQ ID NO: 4657334 - DNA, 25 bp, Homo sapien
tttcctacaggacgccttcagcagg

SEQ ID NO: 4657335 - DNA, 25 bp, Homo sapien
gaatggtcaattgcttgcagttgga

SEQ ID NO: 4657336 - DNA, 25 bp, Homo sapien
gaagcctaggaagccctgtcgttgt

SEQ ID NO: 4657337 - DNA, 25 bp, Homo sapien
tcatcaacataagaggccacgctaa

SEQ ID NO: 4657338 - DNA, 25 bp, Homo sapien
ccacgctaagaagcctgggaagcct

SEQ ID NO: 4657339 - DNA, 25 bp, Homo sapien
tatgagtggaggaatctcatcaaca

SEQ ID NO: 4657340 - DNA, 25 bp, Homo sapien
agctgggttcccaatcaggcactga

SEQ ID NO: 4657341 - DNA, 25 bp, Homo sapien
gccccatcttggcactgtgacggct

SEQ ID NO: 4657342 - DNA, 25 bp, Homo sapien
gatgtggttccaggtgtggcaggag

SEQ ID NO: 4657343 - DNA, 25 bp, Homo sapien
catgtgttcctttgtcatagggcat

SEQ ID NO: 4657344 - DNA, 25 bp, Homo sapien
attccatggtcctcaatgacgccct

SEQ ID NO: 4657345 - DNA, 25 bp, Homo sapien
ccaacagtaagatggtgctaccctg

SEQ ID NO: 4657346 - DNA, 25 bp, Homo sapien
gaatttcctagaaccgtggccaaca

SEQ ID NO: 4657347 - DNA, 25 bp, Homo sapien
tagaaccgtggccaacagtaagatg

SEQ ID NO: 4657348 - DNA, 25 bp, Homo sapien
ccgtggccaacagtaagatggtgct

SEQ ID NO: 4657349 - DNA, 25 bp, Homo sapien
taaacattgccaaaggccactcttt

SEQ ID NO: 4657350 - DNA, 25 bp, Homo sapien
ggataaacattgccaaaggccactc

SEQ ID NO: 4657351 - DNA, 25 bp, Homo sapien
ttgccaaaggccactctttgtcctc

SEQ ID NO: 4657352 - DNA, 25 bp, Homo sapien
aacattgccaaaggccactctttgt

SEQ ID NO: 4657353 - DNA, 25 bp, Homo sapien
tgttggtgaattcaggtgggaattc

SEQ ID NO: 4657354 - DNA, 25 bp, Homo sapien
ggtgaattcaggtgggaattcggat

SEQ ID NO: 4657355 - DNA, 25 bp, Homo sapien
ttggtgaattcaggtgggaattcgg

SEQ ID NO: 4657356 - DNA, 25 bp, Homo sapien
ataatgttggtgaattcaggtggga

SEQ ID NO: 4657357 - DNA, 25 bp, Homo sapien
ggattctggaacttgctcttgggcc

SEQ ID NO: 4657358 - DNA, 25 bp, Homo sapien
gcaggattctggaacttgctcttgg

SEQ ID NO: 4657359 - DNA, 25 bp, Homo sapien
gattctggaacttgctcttgggcct

SEQ ID NO: 4657360 - DNA, 25 bp, Homo sapien
aggcaggattctggaacttgctctt

SEQ ID NO: 4657361 - DNA, 25 bp, Homo sapien
gggacggccggctgacagccttcct

SEQ ID NO: 4657362 - DNA, 25 bp, Homo sapien
gggaggacagctggcatccgaggag

SEQ ID NO: 4657363 - DNA, 25 bp, Homo sapien
tcttttatttcgttctgccttcact

SEQ ID NO: 4657364 - DNA, 25 bp, Homo sapien
ttttatttcgttctgccttcactct

SEQ ID NO: 4657365 - DNA, 25 bp, Homo sapien
agtcttttatttcgttctgccttca

SEQ ID NO: 4657366 - DNA, 25 bp, Homo sapien
gtcttttatttcgttctgccttcac

SEQ ID NO: 4657367 - DNA, 25 bp, Homo sapien
gcaaagcactgttgtcatacagagc

SEQ ID NO: 4657368 - DNA, 25 bp, Homo sapien
tgagcaaagcactgttgtcatacag

SEQ ID NO: 4657369 - DNA, 25 bp, Homo sapien
gaactgagcaaagcactgttgtcat

SEQ ID NO: 4657370 - DNA, 25 bp, Homo sapien
cagagtttggggagaactgagcaaa

SEQ ID NO: 4657371 - DNA, 25 bp, Homo sapien
aaacaatgatgaaagtagcttgatc

SEQ ID NO: 4657372 - DNA, 25 bp, Homo sapien
cttgatcaatgcgagtgtaaggagg

SEQ ID NO: 4657373 - DNA, 25 bp, Homo sapien
gatgaaagtagcttgatcaatgcga

SEQ ID NO: 4657374 - DNA, 25 bp, Homo sapien
gtagcttgatcaatgcgagtgtaag

SEQ ID NO: 4657375 - DNA, 25 bp, Homo sapien
gacattatggagtgctgacaggcac

SEQ ID NO: 4657376 - DNA, 25 bp, Homo sapien
tttggagtgctgacagacattatgg

SEQ ID NO: 4657377 - DNA, 25 bp, Homo sapien
gggtttgccggtggtactcagtcca

SEQ ID NO: 4657378 - DNA, 25 bp, Homo sapien
ccaagacccaggcaaaggtttcctg

SEQ ID NO: 4657379 - DNA, 25 bp, Homo sapien
ttacagatgactgtcagtggtagtc

SEQ ID NO: 4657380 - DNA, 25 bp, Homo sapien
tacagatgactgtcagtggtagtcc

SEQ ID NO: 4657381 - DNA, 25 bp, Homo sapien
ttcaggtttgaagcgtgtatgtctc

SEQ ID NO: 4657382 - DNA, 25 bp, Homo sapien
accttcaggtttgaagcgtgtatgt

SEQ ID NO: 4657383 - DNA, 25 bp, Homo sapien
tcaggtttgaagcgtgtatgtctca

SEQ ID NO: 4657384 - DNA, 25 bp, Homo sapien
acagcaccttcaggtttgaagcgtg

SEQ ID NO: 4657385 - DNA, 25 bp, Homo sapien
ttttcccttcactttctttctctgc

SEQ ID NO: 4657386 - DNA, 25 bp, Homo sapien
tcccttcactttctttctctgccat

SEQ ID NO: 4657387 - DNA, 25 bp, Homo sapien
cctagagattttcccttcactttct

SEQ ID NO: 4657388 - DNA, 25 bp, Homo sapien
attttcccttcactttctttctctg

SEQ ID NO: 4657389 - DNA, 25 bp, Homo sapien
acagacacaaaacgggccactgctt

SEQ ID NO: 4657390 - DNA, 25 bp, Homo sapien
caaaacgggccactgcttgtaggtt

SEQ ID NO: 4657391 - DNA, 25 bp, Homo sapien
cgggccactgcttgtaggttgtgtc

SEQ ID NO: 4657392 - DNA, 25 bp, Homo sapien
cacaaaacgggccactgcttgtagg

SEQ ID NO: 4657393 - DNA, 25 bp, Homo sapien
caagaatcgtaaccagagaaccaca

SEQ ID NO: 4657394 - DNA, 25 bp, Homo sapien
tccgtcagcaagttccaaaggcatt

SEQ ID NO: 4657395 - DNA, 25 bp, Homo sapien
cagagaaccacatccgtcagcaagt

SEQ ID NO: 4657396 - DNA, 25 bp, Homo sapien
ggtatcagttgcagagcgccaagaa

SEQ ID NO: 4657397 - DNA, 25 bp, Homo sapien
tgagtccttttagcggtcgggctgc

SEQ ID NO: 4657398 - DNA, 25 bp, Homo sapien
taggaaaggctagtaattgtggcga

SEQ ID NO: 4657399 - DNA, 25 bp, Homo sapien
cattgggaaagcgtagtagactggt

SEQ ID NO: 4657400 - DNA, 25 bp, Homo sapien
tattctattgcttctagggccacct

SEQ ID NO: 4657401 - DNA, 25 bp, Homo sapien
aaagaagagcttagggatgtggacc

SEQ ID NO: 4657402 - DNA, 25 bp, Homo sapien
tctgtaatagattgcctgggcttga

SEQ ID NO: 4657403 - DNA, 25 bp, Homo sapien
caaatgttgctagggcaggaagtcc

SEQ ID NO: 4657404 - DNA, 25 bp, Homo sapien
ggcacaaacaaccacttctgaacag

SEQ ID NO: 4657405 - DNA, 25 bp, Homo sapien
ctgcctcaaattcagcctgttccct

SEQ ID NO: 4657406 - DNA, 25 bp, Homo sapien
cctcaaattcagcctgttccctcat

SEQ ID NO: 4657407 - DNA, 25 bp, Homo sapien
tgcctcaaattcagcctgttccctc

SEQ ID NO: 4657408 - DNA, 25 bp, Homo sapien
gcctcaaattcagcctgttccctca

SEQ ID NO: 4657409 - DNA, 25 bp, Homo sapien
cttccctcgaaaaagaacttggcag

SEQ ID NO: 4657410 - DNA, 25 bp, Homo sapien
ggcaccctgaggtcaaactcctcct

SEQ ID NO: 4657411 - DNA, 25 bp, Homo sapien
gtccctcatcggcaagcctgccttc

SEQ ID NO: 4657412 - DNA, 25 bp, Homo sapien
atcgtggaggagtcccagcccagtc

SEQ ID NO: 4657413 - DNA, 25 bp, Homo sapien
tgataacggtcacaacttcacagct

SEQ ID NO: 4657414 - DNA, 25 bp, Homo sapien
ctgtgtagtggaacaatgtgatcac

SEQ ID NO: 4657415 - DNA, 25 bp, Homo sapien
tgtagtggaacaatgtgatcacact

SEQ ID NO: 4657416 - DNA, 25 bp, Homo sapien
tggtgaggaccgcattttgataacg

SEQ ID NO: 4657417 - DNA, 25 bp, Homo sapien
cacaaataatatgggaaccagggtt

SEQ ID NO: 4657418 - DNA, 25 bp, Homo sapien
gagaacttcgtaaggtctgtaggga

SEQ ID NO: 4657419 - DNA, 25 bp, Homo sapien
caacagtcttgtgcatcgtgggcaa

SEQ ID NO: 4657420 - DNA, 25 bp, Homo sapien
gaggccctagtgaaccctacgtata

SEQ ID NO: 4657421 - DNA, 25 bp, Homo sapien
catctggtatggaactcttggcagt

SEQ ID NO: 4657422 - DNA, 25 bp, Homo sapien
tcttggcagtgctccccttggggat

SEQ ID NO: 4657423 - DNA, 25 bp, Homo sapien
ctattctgcatctggtatggaactc

SEQ ID NO: 4657424 - DNA, 25 bp, Homo sapien
tgctccaccttttgagaatagaact

SEQ ID NO: 4657425 - DNA, 25 bp, Homo sapien
ctacagacccggaatcaatagaaaa

SEQ ID NO: 4657426 - DNA, 25 bp, Homo sapien
taaggtaagggattatgaagaccaa

SEQ ID NO: 4657427 - DNA, 25 bp, Homo sapien
gattggcgattggttattatctaca

SEQ ID NO: 4657428 - DNA, 25 bp, Homo sapien
tgaagcttcagggtagcaggcttca

SEQ ID NO: 4657429 - DNA, 25 bp, Homo sapien
cagccatgcataactataagtcaat

SEQ ID NO: 4657430 - DNA, 25 bp, Homo sapien
tgatcggatcatgcaggtggtttcc

SEQ ID NO: 4657431 - DNA, 25 bp, Homo sapien
tccccagttattgagggagggacca

SEQ ID NO: 4657432 - DNA, 25 bp, Homo sapien
tttgatatggctaggctttgtattc

SEQ ID NO: 4657433 - DNA, 25 bp, Homo sapien
cgtgtttgcggcagaggactccgaa

SEQ ID NO: 4657434 - DNA, 25 bp, Homo sapien
acggaaaggagagaatcagcctggc

SEQ ID NO: 4657435 - DNA, 25 bp, Homo sapien
cagaggactccgaacggaaaggaga

SEQ ID NO: 4657436 - DNA, 25 bp, Homo sapien
tccgaacggaaaggagagaatcagc

SEQ ID NO: 4657437 - DNA, 25 bp, Homo sapien
gtggagaagagcacagaggagccat

SEQ ID NO: 4657438 - DNA, 25 bp, Homo sapien
ggtggagaagagcacagaggagcca

SEQ ID NO: 4657439 - DNA, 25 bp, Homo sapien
ggggtggagaagagcacagaggagc

SEQ ID NO: 4657440 - DNA, 25 bp, Homo sapien
ctggggtggagaagagcacagagga

SEQ ID NO: 4657441 - DNA, 25 bp, Homo sapien
catgctgacttttccgtggtgaatg

SEQ ID NO: 4657442 - DNA, 25 bp, Homo sapien
atagtcctgggacgctaaagcaaag

SEQ ID NO: 4657443 - DNA, 25 bp, Homo sapien
tgttatgtccactctaatccatggc

SEQ ID NO: 4657444 - DNA, 25 bp, Homo sapien
ccgtggtgaatgctgtccaatgggc

SEQ ID NO: 4657445 - DNA, 25 bp, Homo sapien
cacagagagtgaacatctatcacat

SEQ ID NO: 4657446 - DNA, 25 bp, Homo sapien
taacttgagctgttgaattgacttt

SEQ ID NO: 4657447 - DNA, 25 bp, Homo sapien
tatggaaattccagttaacggagat

SEQ ID NO: 4657448 - DNA, 25 bp, Homo sapien
gctgctgggatactgccgaaacctg

SEQ ID NO: 4657449 - DNA, 25 bp, Homo sapien
tatcttttctgtaatgatccagaag

SEQ ID NO: 4657450 - DNA, 25 bp, Homo sapien
atcttttctgtaatgatccagaagg

SEQ ID NO: 4657451 - DNA, 25 bp, Homo sapien
agcagagcacgggccacacgcgacc

SEQ ID NO: 4657452 - DNA, 25 bp, Homo sapien
gggctggccctttgacagcctcgcc

SEQ ID NO: 4657453 - DNA, 25 bp, Homo sapien
cacgcgacccctctagcacccaaag

SEQ ID NO: 4657454 - DNA, 25 bp, Homo sapien
gctggccctttgacagcctcgcctt

SEQ ID NO: 4657455 - DNA, 25 bp, Homo sapien
cactccctgaactgtgagtctgtga

SEQ ID NO: 4657456 - DNA, 25 bp, Homo sapien
agtctgtgacccgggcggtcctgct

SEQ ID NO: 4657457 - DNA, 25 bp, Homo sapien
gggctgcactccctgaactgtgagt

SEQ ID NO: 4657458 - DNA, 25 bp, Homo sapien
taaagctggtaaaactaggatactc

SEQ ID NO: 4657459 - DNA, 25 bp, Homo sapien
ctgccaggccggcgctgcgggttct

SEQ ID NO: 4657460 - DNA, 25 bp, Homo sapien
ccctgccaggccggcgctgcgggtt

SEQ ID NO: 4657461 - DNA, 25 bp, Homo sapien
tgccctgccaggccggcgctgcggg

SEQ ID NO: 4657462 - DNA, 25 bp, Homo sapien
tgccaggccggcgctgcgggttctg

SEQ ID NO: 4657463 - DNA, 25 bp, Homo sapien
ggaccctgcaagcgggctggcggcg

SEQ ID NO: 4657464 - DNA, 25 bp, Homo sapien
cttttgggcggagggcggccggcag

SEQ ID NO: 4657465 - DNA, 25 bp, Homo sapien
tctcggctccttgccgccttttggg

SEQ ID NO: 4657466 - DNA, 25 bp, Homo sapien
ctccttgccgccttttgggcggagg

SEQ ID NO: 4657467 - DNA, 25 bp, Homo sapien
tgccgagtcccctccgcggagggaa

SEQ ID NO: 4657468 - DNA, 25 bp, Homo sapien
agaccctgccgctgcgagttgccga

SEQ ID NO: 4657469 - DNA, 25 bp, Homo sapien
tagggagtgagtggggggcgcagat

SEQ ID NO: 4657470 - DNA, 25 bp, Homo sapien
gagttgccgagtcccctccgcggag

SEQ ID NO: 4657471 - DNA, 25 bp, Homo sapien
cggtccctccggagcgctgtcggag

SEQ ID NO: 4657472 - DNA, 25 bp, Homo sapien
ccataggcgccagcgccggagacta

SEQ ID NO: 4657473 - DNA, 25 bp, Homo sapien
tcggaggccgaccataggcgccagc

SEQ ID NO: 4657474 - DNA, 25 bp, Homo sapien
ctgtcggaggccgaccataggcgcc

SEQ ID NO: 4657475 - DNA, 25 bp, Homo sapien
gccgcggaagaatgaagccctcgcc

SEQ ID NO: 4657476 - DNA, 25 bp, Homo sapien
agggacgccgcggaagaatgaagcc

SEQ ID NO: 4657477 - DNA, 25 bp, Homo sapien
gcggaagaatgaagccctcgcccag

SEQ ID NO: 4657478 - DNA, 25 bp, Homo sapien
ggacgccgcggaagaatgaagccct

SEQ ID NO: 4657479 - DNA, 25 bp, Homo sapien
gcttcccagaccatcaccaccgctc

SEQ ID NO: 4657480 - DNA, 25 bp, Homo sapien
gctccgcttcccagaccatcaccac

SEQ ID NO: 4657481 - DNA, 25 bp, Homo sapien
ccagggcacttcagctccgcttccc

SEQ ID NO: 4657482 - DNA, 25 bp, Homo sapien
agggcacttcagctccgcttcccag

SEQ ID NO: 4657483 - DNA, 25 bp, Homo sapien
agttcctcgccggtgtcgtagtaat

SEQ ID NO: 4657484 - DNA, 25 bp, Homo sapien
ctgccaagttcctcgccggtgtcgt

SEQ ID NO: 4657485 - DNA, 25 bp, Homo sapien
tcgtagtaatcatccacgttttcct

SEQ ID NO: 4657486 - DNA, 25 bp, Homo sapien
gccggtgtcgtagtaatcatccacg

SEQ ID NO: 4657487 - DNA, 25 bp, Homo sapien
gctctgaatccagatagccatatta

SEQ ID NO: 4657488 - DNA, 25 bp, Homo sapien
taaatcacacataaaagctaactcc

SEQ ID NO: 4657489 - DNA, 25 bp, Homo sapien
cagcaatggaggtatgctctgaatc

SEQ ID NO: 4657490 - DNA, 25 bp, Homo sapien
cactgaaaatttagatagagggtaa

SEQ ID NO: 4657491 - DNA, 25 bp, Homo sapien
tgtgatgtttgaagagctttcctta

SEQ ID NO: 4657492 - DNA, 25 bp, Homo sapien
tttactcaccagatcatcaatatac

SEQ ID NO: 4657493 - DNA, 25 bp, Homo sapien
tttccttatttactcaccagatcat

SEQ ID NO: 4657494 - DNA, 25 bp, Homo sapien
gaaatgtgatgtttgaagagctttc

SEQ ID NO: 4657495 - DNA, 25 bp, Homo sapien
aaacgatcaggccacactatgcaaa

SEQ ID NO: 4657496 - DNA, 25 bp, Homo sapien
catcatcacgcccacgaaataaaga

SEQ ID NO: 4657497 - DNA, 25 bp, Homo sapien
taaagatcaaaaactcccttcgcca

SEQ ID NO: 4657498 - DNA, 25 bp, Homo sapien
taatggtaccaaaaaatcataatga

SEQ ID NO: 4657499 - DNA, 25 bp, Homo sapien
tctaacaacactctaccagggtagg

SEQ ID NO: 4657500 - DNA, 25 bp, Homo sapien
caaagaaactcacaagctggctgca

SEQ ID NO: 4657501 - DNA, 25 bp, Homo sapien
gaagtctatgaaaccctgcacacca

SEQ ID NO: 4657502 - DNA, 25 bp, Homo sapien
gataccaatttgcaggaagtctatg

SEQ ID NO: 4657503 - DNA, 25 bp, Homo sapien
agaagtggtctggattacaactctg

SEQ ID NO: 4657504 - DNA, 25 bp, Homo sapien
aaagaagtggtctggattacaactc

SEQ ID NO: 4657505 - DNA, 25 bp, Homo sapien
aagaagtggtctggattacaactct

SEQ ID NO: 4657506 - DNA, 25 bp, Homo sapien
ccattttagttagatgatgtggaaa

SEQ ID NO: 4657507 - DNA, 25 bp, Homo sapien
cccagcacattaactctagagctgg

SEQ ID NO: 4657508 - DNA, 25 bp, Homo sapien
tggaaaatcggagtgtcaacttctt

SEQ ID NO: 4657509 - DNA, 25 bp, Homo sapien
tagagctgggatacaactgtactta

SEQ ID NO: 4657510 - DNA, 25 bp, Homo sapien
ctggaggagtagcctaggacatgct

SEQ ID NO: 4657511 - DNA, 25 bp, Homo sapien
ggaagccaataatcccacgcataag

SEQ ID NO: 4657512 - DNA, 25 bp, Homo sapien
cgcataagtcccctgtaataagaat

SEQ ID NO: 4657513 - DNA, 25 bp, Homo sapien
tgccaagtggccagttatctactcc

SEQ ID NO: 4657514 - DNA, 25 bp, Homo sapien
cgtgcacttagctgaattccaacca

SEQ ID NO: 4657515 - DNA, 25 bp, Homo sapien
taaactgagtccagtcggaaggagg

SEQ ID NO: 4657516 - DNA, 25 bp, Homo sapien
aagagagctcggcacataaactgag

SEQ ID NO: 4657517 - DNA, 25 bp, Homo sapien
gagagctcggcacataaactgagtc

SEQ ID NO: 4657518 - DNA, 25 bp, Homo sapien
tcggcacataaactgagtccagtcg

SEQ ID NO: 4657519 - DNA, 25 bp, Homo sapien
ccttcagaggcagggatgcgctgac

SEQ ID NO: 4657520 - DNA, 25 bp, Homo sapien
gatgcgctgactgggatacaagccc

SEQ ID NO: 4657521 - DNA, 25 bp, Homo sapien
gatacaagcccataactgtacaact

SEQ ID NO: 4657522 - DNA, 25 bp, Homo sapien
tcatctgcatcccttcagaggcagg

SEQ ID NO: 4657523 - DNA, 25 bp, Homo sapien
tatggatgctgcaacgctggcagtg

SEQ ID NO: 4657524 - DNA, 25 bp, Homo sapien
tcttgagccccaacagtatggatgc

SEQ ID NO: 4657525 - DNA, 25 bp, Homo sapien
tgggagaacccgatatggcctagac

SEQ ID NO: 4657526 - DNA, 25 bp, Homo sapien
tagaccacagctatgacctggctgg

SEQ ID NO: 4657527 - DNA, 25 bp, Homo sapien
gacattgaagaaaaattagaaatca

SEQ ID NO: 4657528 - DNA, 25 bp, Homo sapien
ctgacattgaagaaaaattagaaat

SEQ ID NO: 4657529 - DNA, 25 bp, Homo sapien
tgacattgaagaaaaattagaaatc

SEQ ID NO: 4657530 - DNA, 25 bp, Homo sapien
cattgaagaaaaattagaaatcagc

SEQ ID NO: 4657531 - DNA, 25 bp, Homo sapien
tacagctgccaaatactgggcgcgg

SEQ ID NO: 4657532 - DNA, 25 bp, Homo sapien
tgactggccgacatcaatgagattg

SEQ ID NO: 4657533 - DNA, 25 bp, Homo sapien
caagatttgacaggattgactggcc

SEQ ID NO: 4657534 - DNA, 25 bp, Homo sapien
tctgggcatggtcagataacaggct

SEQ ID NO: 4657535 - DNA, 25 bp, Homo sapien
tgcaacgaggtaaaagcaagaagct

SEQ ID NO: 4657536 - DNA, 25 bp, Homo sapien
ctcaggagtgcaacgaggtaaaagc

SEQ ID NO: 4657537 - DNA, 25 bp, Homo sapien
ggagtgcaacgaggtaaaagcaaga

SEQ ID NO: 4657538 - DNA, 25 bp, Homo sapien
tcaggagtgcaacgaggtaaaagca

SEQ ID NO: 4657539 - DNA, 25 bp, Homo sapien
tgtttgaacacacgcaacaagagcg

SEQ ID NO: 4657540 - DNA, 25 bp, Homo sapien
ggttgtttgaacacacgcaacaaga

SEQ ID NO: 4657541 - DNA, 25 bp, Homo sapien
gaccgtgccggttgtttgaacacac

SEQ ID NO: 4657542 - DNA, 25 bp, Homo sapien
tgccggttgtttgaacacacgcaac

SEQ ID NO: 4657543 - DNA, 25 bp, Homo sapien
ttttcattgagtatatgccttggat

SEQ ID NO: 4657544 - DNA, 25 bp, Homo sapien
atgtacaaagaactatcatggtttt

SEQ ID NO: 4657545 - DNA, 25 bp, Homo sapien
ggataatcctttgaaggaagatcat

SEQ ID NO: 4657546 - DNA, 25 bp, Homo sapien
ggtttttcattgagtatatgccttg

SEQ ID NO: 4657547 - DNA, 25 bp, Homo sapien
gagggaaatagataccaggaaggca

SEQ ID NO: 4657548 - DNA, 25 bp, Homo sapien
tgtcaatcagacttgggcacggcga

SEQ ID NO: 4657549 - DNA, 25 bp, Homo sapien
cactgctaatgggaagaaattctgt

SEQ ID NO: 4657550 - DNA, 25 bp, Homo sapien
tatgttgttcaccagagagaggaga

SEQ ID NO: 4657551 - DNA, 25 bp, Homo sapien
gaaggattcagtgtcagagagccaa

SEQ ID NO: 4657552 - DNA, 25 bp, Homo sapien
gaagcagaaacgttcccgtggcatg

SEQ ID NO: 4657553 - DNA, 25 bp, Homo sapien
caaggacgtacaatgctcaagagca

SEQ ID NO: 4657554 - DNA, 25 bp, Homo sapien
gatctgaaggcaagcgattagccca

SEQ ID NO: 4657555 - DNA, 25 bp, Homo sapien
cattagtatcagtgtcagtgcaagt

SEQ ID NO: 4657556 - DNA, 25 bp, Homo sapien
gcttggtgcacagaattcaaactac

SEQ ID NO: 4657557 - DNA, 25 bp, Homo sapien
gacatcaaggtgcttacgcacgctc

SEQ ID NO: 4657558 - DNA, 25 bp, Homo sapien
tgcatgtgtgcaatcaaaaggtttc

SEQ ID NO: 4657559 - DNA, 25 bp, Homo sapien
tgaagtaaaccatagggccttggca

SEQ ID NO: 4657560 - DNA, 25 bp, Homo sapien
cacatggagggaaaactactgcaca

SEQ ID NO: 4657561 - DNA, 25 bp, Homo sapien
gagtcaggcccataagcattaagca

SEQ ID NO: 4657562 - DNA, 25 bp, Homo sapien
tactgcacaataaggaggcccctgg

SEQ ID NO: 4657563 - DNA, 25 bp, Homo sapien
tgttagtaattacagactctgggtg

SEQ ID NO: 4657564 - DNA, 25 bp, Homo sapien
aatgcctggctccttgtattcaaca

SEQ ID NO: 4657565 - DNA, 25 bp, Homo sapien
ttctctcaaagcatcagctggctct

SEQ ID NO: 4657566 - DNA, 25 bp, Homo sapien
ggcgttccctgtacagttctaccaa

SEQ ID NO: 4657567 - DNA, 25 bp, Homo sapien
cactagtgtgatagagcatgctcat

SEQ ID NO: 4657568 - DNA, 25 bp, Homo sapien
caaaggagaccttcacacatgagaa

SEQ ID NO: 4657569 - DNA, 25 bp, Homo sapien
cccaaattaggatcccatacagacc

SEQ ID NO: 4657570 - DNA, 25 bp, Homo sapien
ttctcaagccagaggtgacaccaga

SEQ ID NO: 4657571 - DNA, 25 bp, Homo sapien
gctcctagagctcgcaagggctgtt

SEQ ID NO: 4657572 - DNA, 25 bp, Homo sapien
acataaatgaatcagctggcaagcc

SEQ ID NO: 4657573 - DNA, 25 bp, Homo sapien
tgtccttaacccagaggctgtagct

SEQ ID NO: 4657574 - DNA, 25 bp, Homo sapien
tctctgcgctttgtgggtccaagaa

SEQ ID NO: 4657575 - DNA, 25 bp, Homo sapien
taaaaacaccttcacttgcagatag

SEQ ID NO: 4657576 - DNA, 25 bp, Homo sapien
aagtcagcatcataaaccacatggg

SEQ ID NO: 4657577 - DNA, 25 bp, Homo sapien
accacatgggtcacatgctcacgca

SEQ ID NO: 4657578 - DNA, 25 bp, Homo sapien
taagtatttcgcatttccccagagg

SEQ ID NO: 4657579 - DNA, 25 bp, Homo sapien
ccattaagaacagatgataggaaat

SEQ ID NO: 4657580 - DNA, 25 bp, Homo sapien
ctccattaagaacagatgataggaa

SEQ ID NO: 4657581 - DNA, 25 bp, Homo sapien
tccattaagaacagatgataggaaa

SEQ ID NO: 4657582 - DNA, 25 bp, Homo sapien
cattaagaacagatgataggaaatg

SEQ ID NO: 4657583 - DNA, 25 bp, Homo sapien
ttcctgcccagaaccaatctggtcc

SEQ ID NO: 4657584 - DNA, 25 bp, Homo sapien
ttatgaggatactccttcctgccca

SEQ ID NO: 4657585 - DNA, 25 bp, Homo sapien
ctgcccagaaccaatctggtcctta

SEQ ID NO: 4657586 - DNA, 25 bp, Homo sapien
tgcccagaaccaatctggtccttac

SEQ ID NO: 4657587 - DNA, 25 bp, Homo sapien
cacatccgtacatattaaacttcag

SEQ ID NO: 4657588 - DNA, 25 bp, Homo sapien
caccaaggataagagaggactaccg

SEQ ID NO: 4657589 - DNA, 25 bp, Homo sapien
tgggtaactttaagctcagaaagcg

SEQ ID NO: 4657590 - DNA, 25 bp, Homo sapien
catatcgaggttaaatgtgggtaac

SEQ ID NO: 4657591 - DNA, 25 bp, Homo sapien
caattattgatacgcagagggctcc

SEQ ID NO: 4657592 - DNA, 25 bp, Homo sapien
cacttgacggcttctttttggcaca

SEQ ID NO: 4657593 - DNA, 25 bp, Homo sapien
aaggatgcttctactctcggatggt

SEQ ID NO: 4657594 - DNA, 25 bp, Homo sapien
tcgtgaatagctggacaaaggatgc

SEQ ID NO: 4657595 - DNA, 25 bp, Homo sapien
gacaggtaagtgagcaactacgctg

SEQ ID NO: 4657596 - DNA, 25 bp, Homo sapien
ctgtggtcacactgataagcctatt

SEQ ID NO: 4657597 - DNA, 25 bp, Homo sapien
gatgcaggttcccttaagagacagg

SEQ ID NO: 4657598 - DNA, 25 bp, Homo sapien
ggtcaagtatatgtcagccctaaaa

SEQ ID NO: 4657599 - DNA, 25 bp, Homo sapien
cggtttggacataaactacatagga

SEQ ID NO: 4657600 - DNA, 25 bp, Homo sapien
tcccaccagtggaataaaagtagga

SEQ ID NO: 4657601 - DNA, 25 bp, Homo sapien
acagaagaaccacttacagtcggtt

SEQ ID NO: 4657602 - DNA, 25 bp, Homo sapien
aaagatgttctattgaatgttgcaa

SEQ ID NO: 4657603 - DNA, 25 bp, Homo sapien
ccgaaagtaacctagattgtgtggg

SEQ ID NO: 4657604 - DNA, 25 bp, Homo sapien
caaagtgcagggatagctgatgata

SEQ ID NO: 4657605 - DNA, 25 bp, Homo sapien
aaaaggtgttaagcactttggcagc

SEQ ID NO: 4657606 - DNA, 25 bp, Homo sapien
gggacaaccaccaacagtactgaag

SEQ ID NO: 4657607 - DNA, 25 bp, Homo sapien
cagagatagtgaggataacccatac

SEQ ID NO: 4657608 - DNA, 25 bp, Homo sapien
ggaaatgacacgcatgacgaagcct

SEQ ID NO: 4657609 - DNA, 25 bp, Homo sapien
cattgctgaggctctagaaggcacg

SEQ ID NO: 4657610 - DNA, 25 bp, Homo sapien
cataaagtaatgaagatggcgtgac

SEQ ID NO: 4657611 - DNA, 25 bp, Homo sapien
cacttccttactggtccaggtgacc

SEQ ID NO: 4657612 - DNA, 25 bp, Homo sapien
ccttactggtccaggtgaccggatc

SEQ ID NO: 4657613 - DNA, 25 bp, Homo sapien
cttccttactggtccaggtgaccgg

SEQ ID NO: 4657614 - DNA, 25 bp, Homo sapien
tactggtccaggtgaccggatctca

SEQ ID NO: 4657615 - DNA, 25 bp, Homo sapien
gatcccttctctcgcccttatcctc

SEQ ID NO: 4657616 - DNA, 25 bp, Homo sapien
ttctctcgcccttatcctcaaaagc

SEQ ID NO: 4657617 - DNA, 25 bp, Homo sapien
tggatcccttctctcgcccttatcc

SEQ ID NO: 4657618 - DNA, 25 bp, Homo sapien
ccttctctcgcccttatcctcaaaa

SEQ ID NO: 4657619 - DNA, 25 bp, Homo sapien
tgctgcaggctagactttcacgtgt

SEQ ID NO: 4657620 - DNA, 25 bp, Homo sapien
tgttgatctagattccggctgccca

SEQ ID NO: 4657621 - DNA, 25 bp, Homo sapien
tcttggttatcacagggactcctca

SEQ ID NO: 4657622 - DNA, 25 bp, Homo sapien
ccagcagcctgaaaggtgagccagc

SEQ ID NO: 4657623 - DNA, 25 bp, Homo sapien
cacacccgcctgggcaacagaccga

SEQ ID NO: 4657624 - DNA, 25 bp, Homo sapien
tgcacacccgcctgggcaacagacc

SEQ ID NO: 4657625 - DNA, 25 bp, Homo sapien
gcacacccgcctgggcaacagaccg

SEQ ID NO: 4657626 - DNA, 25 bp, Homo sapien
ccacaagccacatgtctcatccttt

SEQ ID NO: 4657627 - DNA, 25 bp, Homo sapien
cacaagccacatgtctcatcctttt

SEQ ID NO: 4657628 - DNA, 25 bp, Homo sapien
caaaatgctgctcgtgatgtatgcc

SEQ ID NO: 4657629 - DNA, 25 bp, Homo sapien
taaggtctgggaacctgctaaggct

SEQ ID NO: 4657630 - DNA, 25 bp, Homo sapien
ttgacagcagagtttcccgatcggg

SEQ ID NO: 4657631 - DNA, 25 bp, Homo sapien
tattcagctaaaaacatgcctcgag

SEQ ID NO: 4657632 - DNA, 25 bp, Homo sapien
agccaagttcccctcatgtttaagc

SEQ ID NO: 4657633 - DNA, 25 bp, Homo sapien
aagttcccctcatgtttaagctcca

SEQ ID NO: 4657634 - DNA, 25 bp, Homo sapien
gagaaaccagcccatgattacaatt

SEQ ID NO: 4657635 - DNA, 25 bp, Homo sapien
caaacaccagcaacagttcagatac

SEQ ID NO: 4657636 - DNA, 25 bp, Homo sapien
gttgtattactgtatcactgtgtgc

SEQ ID NO: 4657637 - DNA, 25 bp, Homo sapien
tactgtatcactgtgtgcaatgaac

SEQ ID NO: 4657638 - DNA, 25 bp, Homo sapien
cactgtgtgcaatgaacagaaagcc

SEQ ID NO: 4657639 - DNA, 25 bp, Homo sapien
ccatcatctctggatgttgtattac

SEQ ID NO: 4657640 - DNA, 25 bp, Homo sapien
ttcaaatttagatgactgccagcag

SEQ ID NO: 4657641 - DNA, 25 bp, Homo sapien
ctgtgggtagcttctcgcgcctcat

SEQ ID NO: 4657642 - DNA, 25 bp, Homo sapien
tcatccctgtcatcgcctctgagca

SEQ ID NO: 4657643 - DNA, 25 bp, Homo sapien
tgtgggtagcttctcgcgcctcatc

SEQ ID NO: 4657644 - DNA, 25 bp, Homo sapien
gcctctgagcacctgttccaaaata

SEQ ID NO: 4657645 - DNA, 25 bp, Homo sapien
gactgaaaacaagcggagagaactc

SEQ ID NO: 4657646 - DNA, 25 bp, Homo sapien
gatagctatctaactgggtcacgcg

SEQ ID NO: 4657647 - DNA, 25 bp, Homo sapien
tgtcaagttgtacaaagggcacacg

SEQ ID NO: 4657648 - DNA, 25 bp, Homo sapien
tagtggtcccatggagttccgtgta

SEQ ID NO: 4657649 - DNA, 25 bp, Homo sapien
agcatggtaggctgaaaggttccaa

SEQ ID NO: 4657650 - DNA, 25 bp, Homo sapien
tttgggtggagtttctagtgacagc

SEQ ID NO: 4657651 - DNA, 25 bp, Homo sapien
gctgagtgctcctgcctagtggcaa

SEQ ID NO: 4657652 - DNA, 25 bp, Homo sapien
gggaaggccgcaagcttagattttc

SEQ ID NO: 4657653 - DNA, 25 bp, Homo sapien
tgaactaggcaacctgtacagcgat

SEQ ID NO: 4657654 - DNA, 25 bp, Homo sapien
aacgtcgatgtaaaatgctgctggc

SEQ ID NO: 4657655 - DNA, 25 bp, Homo sapien
gaaacacacggtgagcatgctcctg

SEQ ID NO: 4657656 - DNA, 25 bp, Homo sapien
cgtcttgggcccttgagtaacatta

SEQ ID NO: 4657657 - DNA, 25 bp, Homo sapien
tgacacaagtgtaatctccctgctg

SEQ ID NO: 4657658 - DNA, 25 bp, Homo sapien
aaagtacttgatggtgctagctgac

SEQ ID NO: 4657659 - DNA, 25 bp, Homo sapien
cacacttttgaatggctaagacagc

SEQ ID NO: 4657660 - DNA, 25 bp, Homo sapien
aaagtgttttgatgtcaccgaggcc

SEQ ID NO: 4657661 - DNA, 25 bp, Homo sapien
gctctcgagtggttctggtcagctc

SEQ ID NO: 4657662 - DNA, 25 bp, Homo sapien
cctggctctcgagtggttctggtca

SEQ ID NO: 4657663 - DNA, 25 bp, Homo sapien
ctcgagtggttctggtcagctccat

SEQ ID NO: 4657664 - DNA, 25 bp, Homo sapien
aagaccccagttgagccccctggct

SEQ ID NO: 4657665 - DNA, 25 bp, Homo sapien
tttcaagttctctgcttctcatcat

SEQ ID NO: 4657666 - DNA, 25 bp, Homo sapien
ttttcaagttctctgcttctcatca

SEQ ID NO: 4657667 - DNA, 25 bp, Homo sapien
aaagcaacttgtctcagagacttcc

SEQ ID NO: 4657668 - DNA, 25 bp, Homo sapien
aagcaacttgtctcagagacttcca

SEQ ID NO: 4657669 - DNA, 25 bp, Homo sapien
ctcacacatggccaaagcaacttgt

SEQ ID NO: 4657670 - DNA, 25 bp, Homo sapien
tttcctgcacgtctagtctctgagc

SEQ ID NO: 4657671 - DNA, 25 bp, Homo sapien
ttttcctgcacgtctagtctctgag

SEQ ID NO: 4657672 - DNA, 25 bp, Homo sapien
cttttcctgcacgtctagtctctga

SEQ ID NO: 4657673 - DNA, 25 bp, Homo sapien
tgaatttggcggcatactggaggcc

SEQ ID NO: 4657674 - DNA, 25 bp, Homo sapien
ggaggccggtgcttttctcacggca

SEQ ID NO: 4657675 - DNA, 25 bp, Homo sapien
ggcatttcttcacaaccgcaaactg

SEQ ID NO: 4657676 - DNA, 25 bp, Homo sapien
tccaagatcaggatgacgtccgtct

SEQ ID NO: 4657677 - DNA, 25 bp, Homo sapien
cagagcagatgtgcgccccaagctg

SEQ ID NO: 4657678 - DNA, 25 bp, Homo sapien
gtcctctctcgccagcatgtgctga

SEQ ID NO: 4657679 - DNA, 25 bp, Homo sapien
atctcgcctccatcccaaaagcccg

SEQ ID NO: 4657680 - DNA, 25 bp, Homo sapien
tctcgccagcatgtgctgatggact

SEQ ID NO: 4657681 - DNA, 25 bp, Homo sapien
tctttggttccatccgcccctcctc

SEQ ID NO: 4657682 - DNA, 25 bp, Homo sapien
ccttcaccagataacaaggcgagtt

SEQ ID NO: 4657683 - DNA, 25 bp, Homo sapien
tgagtttggcttcgcccttcaccag

SEQ ID NO: 4657684 - DNA, 25 bp, Homo sapien
tatgaaacgattcaagcactgaagg

SEQ ID NO: 4657685 - DNA, 25 bp, Homo sapien
tgaaagttttgtagtggcttgcccg

SEQ ID NO: 4657686 - DNA, 25 bp, Homo sapien
cactcaaagtaagtggtcatgacca

SEQ ID NO: 4657687 - DNA, 25 bp, Homo sapien
ggaccttccaggtgatcatctccag

SEQ ID NO: 4657688 - DNA, 25 bp, Homo sapien
catgaccaatgcatgctgtcccagg

SEQ ID NO: 4657689 - DNA, 25 bp, Homo sapien
caaccgggtcgctgtaaacgggatg

SEQ ID NO: 4657690 - DNA, 25 bp, Homo sapien
tctcatgtctctgcgtggtctctcc

SEQ ID NO: 4657691 - DNA, 25 bp, Homo sapien
tggcctcaagataagtggactgttc

SEQ ID NO: 4657692 - DNA, 25 bp, Homo sapien
gaaagtgaccaatgcaaagcacaga

SEQ ID NO: 4657693 - DNA, 25 bp, Homo sapien
tgtctgggcacctctctccttgtag

SEQ ID NO: 4657694 - DNA, 25 bp, Homo sapien
catttttcagacaatgagaaacgtc

SEQ ID NO: 4657695 - DNA, 25 bp, Homo sapien
tgcttgtgttgtcttagagtacaga

SEQ ID NO: 4657696 - DNA, 25 bp, Homo sapien
gaaacgtcaggagtttggctgcctg

SEQ ID NO: 4657697 - DNA, 25 bp, Homo sapien
cttagagtacagagatgcatttttc

SEQ ID NO: 4657698 - DNA, 25 bp, Homo sapien
cttaagatcaaagtgggcgatttga

SEQ ID NO: 4657699 - DNA, 25 bp, Homo sapien
ttgaagggagtgcaggtagtaaaca

SEQ ID NO: 4657700 - DNA, 25 bp, Homo sapien
cgatttgaagggagtgcaggtagta

SEQ ID NO: 4657701 - DNA, 25 bp, Homo sapien
cttttcagctaagaagtcaaacagc

SEQ ID NO: 4657702 - DNA, 25 bp, Homo sapien
aaatgccccaattagccaatctgag

SEQ ID NO: 4657703 - DNA, 25 bp, Homo sapien
cagagtcaggccatacgcctttgca

SEQ ID NO: 4657704 - DNA, 25 bp, Homo sapien
tacgcctttgcatcactcaacacat

SEQ ID NO: 4657705 - DNA, 25 bp, Homo sapien
ggtttgcttgattattggtgacaga

SEQ ID NO: 4657706 - DNA, 25 bp, Homo sapien
tatccaaaagcattatgttctcagg

SEQ ID NO: 4657707 - DNA, 25 bp, Homo sapien
ttctatccaaaagcattatgttctc

SEQ ID NO: 4657708 - DNA, 25 bp, Homo sapien
aaagtcaatgatcttgatccgaggt

SEQ ID NO: 4657709 - DNA, 25 bp, Homo sapien
caatgatcttgatccgaggtttggg

SEQ ID NO: 4657710 - DNA, 25 bp, Homo sapien
ggttcatagttgactatctcaggag

SEQ ID NO: 4657711 - DNA, 25 bp, Homo sapien
catatctgcctcaagaccaagaggt

SEQ ID NO: 4657712 - DNA, 25 bp, Homo sapien
aagaccaagaggttcatagttgact

SEQ ID NO: 4657713 - DNA, 25 bp, Homo sapien
cacatatctgcctcaagaccaagag

SEQ ID NO: 4657714 - DNA, 25 bp, Homo sapien
gatataggttattaccccgatactc

SEQ ID NO: 4657715 - DNA, 25 bp, Homo sapien
cagcggatacatttgctaacgtttc

SEQ ID NO: 4657716 - DNA, 25 bp, Homo sapien
gaaatctttggctagggcactggta

SEQ ID NO: 4657717 - DNA, 25 bp, Homo sapien
ggtattactgaagtattcatcctca

SEQ ID NO: 4657718 - DNA, 25 bp, Homo sapien
caaattcgtagttgacagcggatac

SEQ ID NO: 4657719 - DNA, 25 bp, Homo sapien
gggatgctgcaaactatcttgaatt

SEQ ID NO: 4657720 - DNA, 25 bp, Homo sapien
tgctgcaaactatcttgaattgtca

SEQ ID NO: 4657721 - DNA, 25 bp, Homo sapien
gatgctgcaaactatcttgaattgt

SEQ ID NO: 4657722 - DNA, 25 bp, Homo sapien
ccagggatgctgcaaactatcttga

SEQ ID NO: 4657723 - DNA, 25 bp, Homo sapien
tgctgatgcttttctactaagtgcc

SEQ ID NO: 4657724 - DNA, 25 bp, Homo sapien
tttttccgggctgcaaacttcttga

SEQ ID NO: 4657725 - DNA, 25 bp, Homo sapien
taagtgcctgttgtgtatctttagg

SEQ ID NO: 4657726 - DNA, 25 bp, Homo sapien
cattttttccgggctgcaaacttct

SEQ ID NO: 4657727 - DNA, 25 bp, Homo sapien
ctgaccacacactactctacacagg

SEQ ID NO: 4657728 - DNA, 25 bp, Homo sapien
ggatgtatcttccatattaccagta

SEQ ID NO: 4657729 - DNA, 25 bp, Homo sapien
tatcttccatattaccagtatcaga

SEQ ID NO: 4657730 - DNA, 25 bp, Homo sapien
aagaggaaaggatgtatcttccata

SEQ ID NO: 4657731 - DNA, 25 bp, Homo sapien
taatctcatgctgcttaccacaaag

SEQ ID NO: 4657732 - DNA, 25 bp, Homo sapien
tgagagacccacttacccaaggtac

SEQ ID NO: 4657733 - DNA, 25 bp, Homo sapien
tcctctaggtttgacatgaccctgg

SEQ ID NO: 4657734 - DNA, 25 bp, Homo sapien
accactcacagataaaggctgggct

SEQ ID NO: 4657735 - DNA, 25 bp, Homo sapien
tgggcaatcctacagcagaatgggt

SEQ ID NO: 4657736 - DNA, 25 bp, Homo sapien
ctttgtgccacataagcagtgatgg

SEQ ID NO: 4657737 - DNA, 25 bp, Homo sapien
tattgaactacagagctggacaccc

SEQ ID NO: 4657738 - DNA, 25 bp, Homo sapien
tgtgataaccaaaacgcaacagctg

SEQ ID NO: 4657739 - DNA, 25 bp, Homo sapien
cacagtgatatcaagcgaacggatt

SEQ ID NO: 4657740 - DNA, 25 bp, Homo sapien
ctggataatctttggcacagtgata

SEQ ID NO: 4657741 - DNA, 25 bp, Homo sapien
agagtatcatcgcttctggcaacac

SEQ ID NO: 4657742 - DNA, 25 bp, Homo sapien
cgcttctggcaacactcatgttact

SEQ ID NO: 4657743 - DNA, 25 bp, Homo sapien
taccaaaatatcagtgcgtgtgtct

SEQ ID NO: 4657744 - DNA, 25 bp, Homo sapien
aagggccttgggcagtcaacaccag

SEQ ID NO: 4657745 - DNA, 25 bp, Homo sapien
ctgagtacccagtgctaagaaagga

SEQ ID NO: 4657746 - DNA, 25 bp, Homo sapien
caccagggctcacgggtttgcttac

SEQ ID NO: 4657747 - DNA, 25 bp, Homo sapien
tagagagtaccgaacaacaaatttg

SEQ ID NO: 4657748 - DNA, 25 bp, Homo sapien
taccgaacaacaaatttgataaatc

SEQ ID NO: 4657749 - DNA, 25 bp, Homo sapien
gagtaccgaacaacaaatttgataa

SEQ ID NO: 4657750 - DNA, 25 bp, Homo sapien
ccgaacaacaaatttgataaatctt

SEQ ID NO: 4657751 - DNA, 25 bp, Homo sapien
ggaaagtcttgttgaattcggacac

SEQ ID NO: 4657752 - DNA, 25 bp, Homo sapien
gctagatgtgaagcctcagtgaagc

SEQ ID NO: 4657753 - DNA, 25 bp, Homo sapien
aaagccccgttgtttgattgtcagg

SEQ ID NO: 4657754 - DNA, 25 bp, Homo sapien
tgaagtacttggctccaccgggaaa

SEQ ID NO: 4657755 - DNA, 25 bp, Homo sapien
tttccacctggagctcctacaagac

SEQ ID NO: 4657756 - DNA, 25 bp, Homo sapien
atctttccacctggagctcctacaa

SEQ ID NO: 4657757 - DNA, 25 bp, Homo sapien
ggagggtatctttccacctggagct

SEQ ID NO: 4657758 - DNA, 25 bp, Homo sapien
gagggtatctttccacctggagctc

SEQ ID NO: 4657759 - DNA, 25 bp, Homo sapien
gaaagtgcaagtcaagagaaatggg

SEQ ID NO: 4657760 - DNA, 25 bp, Homo sapien
taaagcagattgttatgactcatcc

SEQ ID NO: 4657761 - DNA, 25 bp, Homo sapien
gaatccaaacacttttcatgtgggt

SEQ ID NO: 4657762 - DNA, 25 bp, Homo sapien
taagaggcgtttacatgaaagtgca

SEQ ID NO: 4657763 - DNA, 25 bp, Homo sapien
cagaattatgaccactggaatttca

SEQ ID NO: 4657764 - DNA, 25 bp, Homo sapien
cacagaattatgaccactggaattt

SEQ ID NO: 4657765 - DNA, 25 bp, Homo sapien
acacagaattatgaccactggaatt

SEQ ID NO: 4657766 - DNA, 25 bp, Homo sapien
aatctttgccactctttcaaaattc

SEQ ID NO: 4657767 - DNA, 25 bp, Homo sapien
tctctgaaagctggtcccaattata

SEQ ID NO: 4657768 - DNA, 25 bp, Homo sapien
attgctaggtatagaataacacggc

SEQ ID NO: 4657769 - DNA, 25 bp, Homo sapien
gaataacacggcaaaaatctctgaa

SEQ ID NO: 4657770 - DNA, 25 bp, Homo sapien
ctgaaagctggtcccaattataaaa

SEQ ID NO: 4657771 - DNA, 25 bp, Homo sapien
tagttggataatgagcccagaaggt

SEQ ID NO: 4657772 - DNA, 25 bp, Homo sapien
ggttggttaacatcatagttggata

SEQ ID NO: 4657773 - DNA, 25 bp, Homo sapien
tgggacattgtcatcgttgatggca

SEQ ID NO: 4657774 - DNA, 25 bp, Homo sapien
gatggctttcatcacaaaggagtct

SEQ ID NO: 4657775 - DNA, 25 bp, Homo sapien
cttatcctggacatcgattctcgag

SEQ ID NO: 4657776 - DNA, 25 bp, Homo sapien
gcaactgtagtatttgaatattccc

SEQ ID NO: 4657777 - DNA, 25 bp, Homo sapien
cacagccagcagcaatgagtaatgg

SEQ ID NO: 4657778 - DNA, 25 bp, Homo sapien
tcttttaatgagcaactgtagtatt

SEQ ID NO: 4657779 - DNA, 25 bp, Homo sapien
tgcagagggccagatctactccact

SEQ ID NO: 4657780 - DNA, 25 bp, Homo sapien
cacctgggtgaagcgaatgatggaa

SEQ ID NO: 4657781 - DNA, 25 bp, Homo sapien
tgacagcaccagatgcatgcattcc

SEQ ID NO: 4657782 - DNA, 25 bp, Homo sapien
ccgtggttacacaagatgctagcat

SEQ ID NO: 4657783 - DNA, 25 bp, Homo sapien
gagaaatttcaaggtatcgacgtgg

SEQ ID NO: 4657784 - DNA, 25 bp, Homo sapien
cagcccagtagacggcattggaccc

SEQ ID NO: 4657785 - DNA, 25 bp, Homo sapien
ccgagcagcccagtagacggcattg

SEQ ID NO: 4657786 - DNA, 25 bp, Homo sapien
ttcaaggtatcgacgtggccatgcc

SEQ ID NO: 4657787 - DNA, 25 bp, Homo sapien
gcaggctatggagaccagaacccaa

SEQ ID NO: 4657788 - DNA, 25 bp, Homo sapien
tttgggtcccgatgcacacggtagg

SEQ ID NO: 4657789 - DNA, 25 bp, Homo sapien
cccctcagatatggtgcagtgcaca

SEQ ID NO: 4657790 - DNA, 25 bp, Homo sapien
gcagatgcccctatagtggctagga

SEQ ID NO: 4657791 - DNA, 25 bp, Homo sapien
tggccatagcgagctgccacgtgga

SEQ ID NO: 4657792 - DNA, 25 bp, Homo sapien
tgagccgaagctgcacagtaactga

SEQ ID NO: 4657793 - DNA, 25 bp, Homo sapien
tgtcctggatattgggatttgagcc

SEQ ID NO: 4657794 - DNA, 25 bp, Homo sapien
cagtaactgagccacgtcagcatgg

SEQ ID NO: 4657795 - DNA, 25 bp, Homo sapien
tctgaacaatagagccttcgtgcag

SEQ ID NO: 4657796 - DNA, 25 bp, Homo sapien
tctttctaataagtgcctcgctgac

SEQ ID NO: 4657797 - DNA, 25 bp, Homo sapien
cgttgaaaccatcggccctgcttgt

SEQ ID NO: 4657798 - DNA, 25 bp, Homo sapien
tgacaattgactttcgggagcccgt

SEQ ID NO: 4657799 - DNA, 25 bp, Homo sapien
ccacgatgtcgtggtagcccctggc

SEQ ID NO: 4657800 - DNA, 25 bp, Homo sapien
taaggtcggctccatgttcggccag

SEQ ID NO: 4657801 - DNA, 25 bp, Homo sapien
cttgatgttcacgttacagccggct

SEQ ID NO: 4657802 - DNA, 25 bp, Homo sapien
agagtaatagccgtgccaagcagca

SEQ ID NO: 4657803 - DNA, 25 bp, Homo sapien
tctttttacaacacagcggatgata

SEQ ID NO: 4657804 - DNA, 25 bp, Homo sapien
tagcatcgagattgccagacaagag

SEQ ID NO: 4657805 - DNA, 25 bp, Homo sapien
taatagcgtgttgccaatgtcagtc

SEQ ID NO: 4657806 - DNA, 25 bp, Homo sapien
caaactgaggagtcttgtggtccct

SEQ ID NO: 4657807 - DNA, 25 bp, Homo sapien
gggagtattgccgtgcctgtcttga

SEQ ID NO: 4657808 - DNA, 25 bp, Homo sapien
gataatcgacgaaacacccttggct

SEQ ID NO: 4657809 - DNA, 25 bp, Homo sapien
attgcagtttgcttcacagagggcc

SEQ ID NO: 4657810 - DNA, 25 bp, Homo sapien
gacaccgtcttacagccagatgaag

SEQ ID NO: 4657811 - DNA, 25 bp, Homo sapien
cacatgcaaatagaaacttggccaa

SEQ ID NO: 4657812 - DNA, 25 bp, Homo sapien
aaatagaaacttggccaaaatccag

SEQ ID NO: 4657813 - DNA, 25 bp, Homo sapien
cagaatcgggtggatggacacagtt

SEQ ID NO: 4657814 - DNA, 25 bp, Homo sapien
ccagaatcgggtggatggacacagt

SEQ ID NO: 4657815 - DNA, 25 bp, Homo sapien
cgtgtgtcagcgacagcccacggca

SEQ ID NO: 4657816 - DNA, 25 bp, Homo sapien
gtgtcagcgacagcccacggcagac

SEQ ID NO: 4657817 - DNA, 25 bp, Homo sapien
aacacccgccgtgtgtcagcgacag

SEQ ID NO: 4657818 - DNA, 25 bp, Homo sapien
ccaacacccgccgtgtgtcagcgac

SEQ ID NO: 4657819 - DNA, 25 bp, Homo sapien
ttagtgaaaataccaggacaagccc

SEQ ID NO: 4657820 - DNA, 25 bp, Homo sapien
cagccaggcagaacctttccaagta

SEQ ID NO: 4657821 - DNA, 25 bp, Homo sapien
gagtcaagggctcaaggtccagagt

SEQ ID NO: 4657822 - DNA, 25 bp, Homo sapien
tgtgccaaggtaacccagggaactg

SEQ ID NO: 4657823 - DNA, 25 bp, Homo sapien
tcacgcagttgctgaggatgacatt

SEQ ID NO: 4657824 - DNA, 25 bp, Homo sapien
cattccggagacacaaggttaagga

SEQ ID NO: 4657825 - DNA, 25 bp, Homo sapien
aaggccaaaggtcgttcttctcacg

SEQ ID NO: 4657826 - DNA, 25 bp, Homo sapien
gatgacattccggagacacaaggtt

SEQ ID NO: 4657827 - DNA, 25 bp, Homo sapien
cagagataccggaccacgtctagga

SEQ ID NO: 4657828 - DNA, 25 bp, Homo sapien
gcaaggtgcagaggcgttcgcccat

SEQ ID NO: 4657829 - DNA, 25 bp, Homo sapien
taggattccgttgttggccgcaagg

SEQ ID NO: 4657830 - DNA, 25 bp, Homo sapien
cgtggtcagcgcctcaacgctggct

SEQ ID NO: 4657831 - DNA, 25 bp, Homo sapien
ctcccatctcctgggcctccacgcc

SEQ ID NO: 4657832 - DNA, 25 bp, Homo sapien
tctcctgggcctccacgccagctcc

SEQ ID NO: 4657833 - DNA, 25 bp, Homo sapien
gggcctccacgccagctccagacat

SEQ ID NO: 4657834 - DNA, 25 bp, Homo sapien
catctcctgggcctccacgccagct

SEQ ID NO: 4657835 - DNA, 25 bp, Homo sapien
gggacaggacgtgcagacttgttca

SEQ ID NO: 4657836 - DNA, 25 bp, Homo sapien
gctggtggtcaagggtggttctgaa

SEQ ID NO: 4657837 - DNA, 25 bp, Homo sapien
ggcaagacagtggagggtgcaggag

SEQ ID NO: 4657838 - DNA, 25 bp, Homo sapien
gactcagcggagagggaaggtggca

SEQ ID NO: 4657839 - DNA, 25 bp, Homo sapien
gagctccagggtgaaagaacagcag

SEQ ID NO: 4657840 - DNA, 25 bp, Homo sapien
tgatgctgtgggcacactatgcgca

SEQ ID NO: 4657841 - DNA, 25 bp, Homo sapien
cacactatgcgcagggggtgaaggg

SEQ ID NO: 4657842 - DNA, 25 bp, Homo sapien
agctccagggtgaaagaacagcagg

SEQ ID NO: 4657843 - DNA, 25 bp, Homo sapien
tgcttattgacgtctggggaaatgc

SEQ ID NO: 4657844 - DNA, 25 bp, Homo sapien
acatgctgcttattgacgtctgggg

SEQ ID NO: 4657845 - DNA, 25 bp, Homo sapien
ttattgacgtctggggaaatgctca

SEQ ID NO: 4657846 - DNA, 25 bp, Homo sapien
tgctgcttattgacgtctggggaaa

SEQ ID NO: 4657847 - DNA, 25 bp, Homo sapien
ggaaaggggcagaagtcagatctct

SEQ ID NO: 4657848 - DNA, 25 bp, Homo sapien
ggccttctgtctgagagggaaaggg

SEQ ID NO: 4657849 - DNA, 25 bp, Homo sapien
ctggccttctgtctgagagggaaag

SEQ ID NO: 4657850 - DNA, 25 bp, Homo sapien
aaggggcagaagtcagatctctgca

SEQ ID NO: 4657851 - DNA, 25 bp, Homo sapien
cttgtagaagcttagggatatccga

SEQ ID NO: 4657852 - DNA, 25 bp, Homo sapien
tacacactaggtggcagtagcaccc

SEQ ID NO: 4657853 - DNA, 25 bp, Homo sapien
cagacactgttgctcaatcttgcca

SEQ ID NO: 4657854 - DNA, 25 bp, Homo sapien
gggcctgtcttgtgcctcttaggaa

SEQ ID NO: 4657855 - DNA, 25 bp, Homo sapien
tgtgctcgacccagctctcagtgct

SEQ ID NO: 4657856 - DNA, 25 bp, Homo sapien
tctacaccatgaacatacacgatga

SEQ ID NO: 4657857 - DNA, 25 bp, Homo sapien
attgaacaccacctcataatatgtg

SEQ ID NO: 4657858 - DNA, 25 bp, Homo sapien
agtccttgaagtcacccctgagagg

SEQ ID NO: 4657859 - DNA, 25 bp, Homo sapien
acaggaaggtaagacgcaggaacaa

SEQ ID NO: 4657860 - DNA, 25 bp, Homo sapien
aggacaggaaggtaagacgcaggaa

SEQ ID NO: 4657861 - DNA, 25 bp, Homo sapien
ggacaggaaggtaagacgcaggaac

SEQ ID NO: 4657862 - DNA, 25 bp, Homo sapien
gacaggaaggtaagacgcaggaaca

SEQ ID NO: 4657863 - DNA, 25 bp, Homo sapien
tgtgtgttccatacgccaattccgt

SEQ ID NO: 4657864 - DNA, 25 bp, Homo sapien
catagcaggtgtgagaagcaagcca

SEQ ID NO: 4657865 - DNA, 25 bp, Homo sapien
ggcagaaacaagcatagcaggtgtg

SEQ ID NO: 4657866 - DNA, 25 bp, Homo sapien
tacgccaattccgtgggtctgaggc

SEQ ID NO: 4657867 - DNA, 25 bp, Homo sapien
tgctacgtgctcgtgctgttccgat

SEQ ID NO: 4657868 - DNA, 25 bp, Homo sapien
agtcttgcaaggagacctgctacgt

SEQ ID NO: 4657869 - DNA, 25 bp, Homo sapien
gcaagatcttctgccgtctttccgt

SEQ ID NO: 4657870 - DNA, 25 bp, Homo sapien
gctgttccgatctagcaagatcttc

SEQ ID NO: 4657871 - DNA, 25 bp, Homo sapien
gacatgtaaaccacaggacagggac

SEQ ID NO: 4657872 - DNA, 25 bp, Homo sapien
ggcacggcaactgcaaacatgctaa

SEQ ID NO: 4657873 - DNA, 25 bp, Homo sapien
gttcctaaaacctggctgtctagag

SEQ ID NO: 4657874 - DNA, 25 bp, Homo sapien
gagctgatgcatttataccgactga

SEQ ID NO: 4657875 - DNA, 25 bp, Homo sapien
tattctatggctgtaggacccttta

SEQ ID NO: 4657876 - DNA, 25 bp, Homo sapien
gtatggctattgtgaagtctcctga

SEQ ID NO: 4657877 - DNA, 25 bp, Homo sapien
gaccctttactagacattatcgtgg

SEQ ID NO: 4657878 - DNA, 25 bp, Homo sapien
caactgtcatgttgtaggctggaaa

SEQ ID NO: 4657879 - DNA, 25 bp, Homo sapien
gagtgaatgtggtaagcggatttcc

SEQ ID NO: 4657880 - DNA, 25 bp, Homo sapien
ggtaaacagcactcgaagttgagag

SEQ ID NO: 4657881 - DNA, 25 bp, Homo sapien
tgaatgtggtaagcggatttccaga

SEQ ID NO: 4657882 - DNA, 25 bp, Homo sapien
tacagtttcttagatggtaaacagc

SEQ ID NO: 4657883 - DNA, 25 bp, Homo sapien
cagtgggtttgcatctcgcacagta

SEQ ID NO: 4657884 - DNA, 25 bp, Homo sapien
cagtaagctacttttaagtcaaaga

SEQ ID NO: 4657885 - DNA, 25 bp, Homo sapien
tcagactcgtccaaacagtgggttt

SEQ ID NO: 4657886 - DNA, 25 bp, Homo sapien
tccccggctagtgcaacactgctct

SEQ ID NO: 4657887 - DNA, 25 bp, Homo sapien
tgtgccgcctctcgggtcatgtcgg

SEQ ID NO: 4657888 - DNA, 25 bp, Homo sapien
gtctatagagctgtgccgcctctcg

SEQ ID NO: 4657889 - DNA, 25 bp, Homo sapien
ccgcctctcgggtcatgtcgggcat

SEQ ID NO: 4657890 - DNA, 25 bp, Homo sapien
ccgctgggtaaggtctatagagctg

SEQ ID NO: 4657891 - DNA, 25 bp, Homo sapien
tggtaccggcccgagtctgcttcat

SEQ ID NO: 4657892 - DNA, 25 bp, Homo sapien
atctattccctgaacgcagctcctg

SEQ ID NO: 4657893 - DNA, 25 bp, Homo sapien
agattcttggtaccggcccgagtct

SEQ ID NO: 4657894 - DNA, 25 bp, Homo sapien
cacacagagattcttggtaccggcc

SEQ ID NO: 4657895 - DNA, 25 bp, Homo sapien
gcgtccactgtgctgagcagtggtc

SEQ ID NO: 4657896 - DNA, 25 bp, Homo sapien
ctgagctgcgtccactgtgctgagc

SEQ ID NO: 4657897 - DNA, 25 bp, Homo sapien
gagctgcgtccactgtgctgagcag

SEQ ID NO: 4657898 - DNA, 25 bp, Homo sapien
gtccactgtgctgagcagtggtcac

SEQ ID NO: 4657899 - DNA, 25 bp, Homo sapien
ccagccttccgcagcagccctgggt

SEQ ID NO: 4657900 - DNA, 25 bp, Homo sapien
tcttccttgtgagtccaaggctata

SEQ ID NO: 4657901 - DNA, 25 bp, Homo sapien
cttgtgagtccaaggctatacccac

SEQ ID NO: 4657902 - DNA, 25 bp, Homo sapien
gggtcttccttgtgagtccaaggct

SEQ ID NO: 4657903 - DNA, 25 bp, Homo sapien
cgcagtgcggacaacaggaaaatct

SEQ ID NO: 4657904 - DNA, 25 bp, Homo sapien
cattcatcaaccagcatttagggag

SEQ ID NO: 4657905 - DNA, 25 bp, Homo sapien
gaaaatctagattcagcccagatcc

SEQ ID NO: 4657906 - DNA, 25 bp, Homo sapien
aaccccatgctaagcgcagtgcgga

SEQ ID NO: 4657907 - DNA, 25 bp, Homo sapien
tgggccgacgccttctgaaaaagct

SEQ ID NO: 4657908 - DNA, 25 bp, Homo sapien
agctgctggatgaagagtcctcggt

SEQ ID NO: 4657909 - DNA, 25 bp, Homo sapien
tcccgagtggccaaacagcttgagc

SEQ ID NO: 4657910 - DNA, 25 bp, Homo sapien
gagagattctacaagggtggttttc

SEQ ID NO: 4657911 - DNA, 25 bp, Homo sapien
gatgtgaccagagagaccatccctg

SEQ ID NO: 4657912 - DNA, 25 bp, Homo sapien
ttttgtctctaaggccagagccctg

SEQ ID NO: 4657913 - DNA, 25 bp, Homo sapien
taaggagcctctggaaacctctatc

SEQ ID NO: 4657914 - DNA, 25 bp, Homo sapien
ccacagggtccagtataggccaagt

SEQ ID NO: 4657915 - DNA, 25 bp, Homo sapien
cccgggcgctgtctgatgctgatgt

SEQ ID NO: 4657916 - DNA, 25 bp, Homo sapien
tcgcggtgccctgtgcttgtgccct

SEQ ID NO: 4657917 - DNA, 25 bp, Homo sapien
caagtccagctgccgagctatgcct

SEQ ID NO: 4657918 - DNA, 25 bp, Homo sapien
gctgtgagggcagcaagtgcctggt

SEQ ID NO: 4657919 - DNA, 25 bp, Homo sapien
gcatgctcaggagcggcagttcctc

SEQ ID NO: 4657920 - DNA, 25 bp, Homo sapien
ttggcctccagcgttctcaagagaa

SEQ ID NO: 4657921 - DNA, 25 bp, Homo sapien
tcctcgggtgtctaacaaagccacg

SEQ ID NO: 4657922 - DNA, 25 bp, Homo sapien
cagctgagtgatgtgtgcaacagaa

SEQ ID NO: 4657923 - DNA, 25 bp, Homo sapien
ttttacttatggcagtgacactggg

SEQ ID NO: 4657924 - DNA, 25 bp, Homo sapien
ggcgtttagcgggattttattcaca

SEQ ID NO: 4657925 - DNA, 25 bp, Homo sapien
gagtctccacttgaggccttccgat

SEQ ID NO: 4657926 - DNA, 25 bp, Homo sapien
tctgcttagggtcagccaacgggag

SEQ ID NO: 4657927 - DNA, 25 bp, Homo sapien
ggtacaggttgttgatgctcactga

SEQ ID NO: 4657928 - DNA, 25 bp, Homo sapien
ctgggtacaggttgttgatgctcac

SEQ ID NO: 4657929 - DNA, 25 bp, Homo sapien
tacaggttgttgatgctcactgaga

SEQ ID NO: 4657930 - DNA, 25 bp, Homo sapien
tgggtacaggttgttgatgctcact

SEQ ID NO: 4657931 - DNA, 25 bp, Homo sapien
gctcgaacatcatgctgcggctcct

SEQ ID NO: 4657932 - DNA, 25 bp, Homo sapien
tggtcatcggccgagcagtgcgggt

SEQ ID NO: 4657933 - DNA, 25 bp, Homo sapien
taagcgttctggatgtcgatggcct

SEQ ID NO: 4657934 - DNA, 25 bp, Homo sapien
cagcatccctttggtaagacccggc

SEQ ID NO: 4657935 - DNA, 25 bp, Homo sapien
gattttatggaggtagggagtagaa

SEQ ID NO: 4657936 - DNA, 25 bp, Homo sapien
agaagaaatacattccagtgttcaa

SEQ ID NO: 4657937 - DNA, 25 bp, Homo sapien
cagtgttcaatagcagaatagggtg

SEQ ID NO: 4657938 - DNA, 25 bp, Homo sapien
taacaatgcgttgtatttttcaaaa

SEQ ID NO: 4657939 - DNA, 25 bp, Homo sapien
tatgggttcttcaactgggacaagg

SEQ ID NO: 4657940 - DNA, 25 bp, Homo sapien
tgggacaagggacttcaggaaactg

SEQ ID NO: 4657941 - DNA, 25 bp, Homo sapien
agagaactcccacacgctgaaatcg

SEQ ID NO: 4657942 - DNA, 25 bp, Homo sapien
caacaacatggattgacgtgggatc

SEQ ID NO: 4657943 - DNA, 25 bp, Homo sapien
catggccaacgacaggataagccta

SEQ ID NO: 4657944 - DNA, 25 bp, Homo sapien
taagcctatctcctaggccacaagg

SEQ ID NO: 4657945 - DNA, 25 bp, Homo sapien
tgctgtgcactgtgaccctagaagg

SEQ ID NO: 4657946 - DNA, 25 bp, Homo sapien
ggtacaagtgcaacatgccacagag

SEQ ID NO: 4657947 - DNA, 25 bp, Homo sapien
cctccagccggtcgaggaacattca

SEQ ID NO: 4657948 - DNA, 25 bp, Homo sapien
tctctttcagcaacgatgtgtcttt

SEQ ID NO: 4657949 - DNA, 25 bp, Homo sapien
ttcatgatgtcagcgtgggtggcca

SEQ ID NO: 4657950 - DNA, 25 bp, Homo sapien
tcagcaacgatgtgtctttgtcata

SEQ ID NO: 4657951 - DNA, 25 bp, Homo sapien
gatttcgaagtaccttcatgtcctt

SEQ ID NO: 4657952 - DNA, 25 bp, Homo sapien
tcttgcagatgatttcgaagtacct

SEQ ID NO: 4657953 - DNA, 25 bp, Homo sapien
tgcagatgatttcgaagtaccttca

SEQ ID NO: 4657954 - DNA, 25 bp, Homo sapien
gatgatttcgaagtaccttcatgtc

SEQ ID NO: 4657955 - DNA, 25 bp, Homo sapien
gtttcccgagaattctggaagcaca

SEQ ID NO: 4657956 - DNA, 25 bp, Homo sapien
gggtttcccgagaattctggaagca

SEQ ID NO: 4657957 - DNA, 25 bp, Homo sapien
ggtttcccgagaattctggaagcac

SEQ ID NO: 4657958 - DNA, 25 bp, Homo sapien
tttcccgagaattctggaagcacat

SEQ ID NO: 4657959 - DNA, 25 bp, Homo sapien
acagtgggaccccaacgaggatatc

SEQ ID NO: 4657960 - DNA, 25 bp, Homo sapien
ccaacgaggatatctggtgtgaagg

SEQ ID NO: 4657961 - DNA, 25 bp, Homo sapien
ccctatcttctgatgatgccacagt

SEQ ID NO: 4657962 - DNA, 25 bp, Homo sapien
cggactaccccctatcttctgatga

SEQ ID NO: 4657963 - DNA, 25 bp, Homo sapien
tcaaaaatctccagggacactccct

SEQ ID NO: 4657964 - DNA, 25 bp, Homo sapien
tcagcatatgttacagactcacgta

SEQ ID NO: 4657965 - DNA, 25 bp, Homo sapien
gctacaccgtgccattaattccgca

SEQ ID NO: 4657966 - DNA, 25 bp, Homo sapien
tgtgtcagctaaattccactctgca

SEQ ID NO: 4657967 - DNA, 25 bp, Homo sapien
ctgagcaatgcgcctgaggtcctcc

SEQ ID NO: 4657968 - DNA, 25 bp, Homo sapien
agcaatgcgcctgaggtcctcctcg

SEQ ID NO: 4657969 - DNA, 25 bp, Homo sapien
ctgctgagcaatgcgcctgaggtcc

SEQ ID NO: 4657970 - DNA, 25 bp, Homo sapien
gctgctgagcaatgcgcctgaggtc

SEQ ID NO: 4657971 - DNA, 25 bp, Homo sapien
tcagtttggacatgagggtgcccac

SEQ ID NO: 4657972 - DNA, 25 bp, Homo sapien
taagttcatggcgagaaggcaccag

SEQ ID NO: 4657973 - DNA, 25 bp, Homo sapien
tgtactttgccacgaggtcagggag

SEQ ID NO: 4657974 - DNA, 25 bp, Homo sapien
tcaggtaatgcttcacggtcaggag

SEQ ID NO: 4657975 - DNA, 25 bp, Homo sapien
tatgcaccaattataagggactgcc

SEQ ID NO: 4657976 - DNA, 25 bp, Homo sapien
gatgatcagcatacagcaagggaca

SEQ ID NO: 4657977 - DNA, 25 bp, Homo sapien
tgaagcacctctggcgatgatcagc

SEQ ID NO: 4657978 - DNA, 25 bp, Homo sapien
caaaacactgagaggaggtacacta

SEQ ID NO: 4657979 - DNA, 25 bp, Homo sapien
cctgttgccaaaactaaaagagtca

SEQ ID NO: 4657980 - DNA, 25 bp, Homo sapien
ggtgccatccccatcatttttgtgt

SEQ ID NO: 4657981 - DNA, 25 bp, Homo sapien
cacgaaggtctttttgctgtaggtt

SEQ ID NO: 4657982 - DNA, 25 bp, Homo sapien
tgtagaagtcgcaaagcttcctctg

SEQ ID NO: 4657983 - DNA, 25 bp, Homo sapien
ccaaggtggcccaagtttggacgtg

SEQ ID NO: 4657984 - DNA, 25 bp, Homo sapien
gtccctgggatacttttgtccacac

SEQ ID NO: 4657985 - DNA, 25 bp, Homo sapien
ctggagacctcaggcaccccaaggt

SEQ ID NO: 4657986 - DNA, 25 bp, Homo sapien
caagtttggacgtggtacccagagg

SEQ ID NO: 4657987 - DNA, 25 bp, Homo sapien
gattttggaacccattgcaactccc

SEQ ID NO: 4657988 - DNA, 25 bp, Homo sapien
ttgagattttggaacccattgcaac

SEQ ID NO: 4657989 - DNA, 25 bp, Homo sapien
agattttggaacccattgcaactcc

SEQ ID NO: 4657990 - DNA, 25 bp, Homo sapien
gggttgagattttggaacccattgc

SEQ ID NO: 4657991 - DNA, 25 bp, Homo sapien
aagaatcaagaatttgccgtgggag

SEQ ID NO: 4657992 - DNA, 25 bp, Homo sapien
gcttctgaggcccagcgcttccagg

SEQ ID NO: 4657993 - DNA, 25 bp, Homo sapien
ccgtgggagcaaataggcaggaacc

SEQ ID NO: 4657994 - DNA, 25 bp, Homo sapien
aatttgccgtgggagcaaataggca

SEQ ID NO: 4657995 - DNA, 25 bp, Homo sapien
agtgttgccaccagggatagcccag

SEQ ID NO: 4657996 - DNA, 25 bp, Homo sapien
agcaccagccccaagagtgttgcca

SEQ ID NO: 4657997 - DNA, 25 bp, Homo sapien
ccagcgtccccgaggacctctgctg

SEQ ID NO: 4657998 - DNA, 25 bp, Homo sapien
ttgccaccagggatagcccagcgtc

SEQ ID NO: 4657999 - DNA, 25 bp, Homo sapien
ctggagtcacagcatagggtgcttg

SEQ ID NO: 4658000 - DNA, 25 bp, Homo sapien
agtcacagcatagggtgcttgggag

SEQ ID NO: 4658001 - DNA, 25 bp, Homo sapien
ttctctctaccctgaggagaatcct

SEQ ID NO: 4658002 - DNA, 25 bp, Homo sapien
tccttctctctaccctgaggagaat

SEQ ID NO: 4658003 - DNA, 25 bp, Homo sapien
tgacgcaacctgaggactctgcaaa

SEQ ID NO: 4658004 - DNA, 25 bp, Homo sapien
acctcccgtggggtcacacactggg

SEQ ID NO: 4658005 - DNA, 25 bp, Homo sapien
tcttggaagacaggatgatgctcat

SEQ ID NO: 4658006 - DNA, 25 bp, Homo sapien
atgatgctcatcaacgctggctgtg

SEQ ID NO: 4658007 - DNA, 25 bp, Homo sapien
tgacttgtgcctacggcggcagcag

SEQ ID NO: 4658008 - DNA, 25 bp, Homo sapien
tgaagttgctgacttgtgcctacgg

SEQ ID NO: 4658009 - DNA, 25 bp, Homo sapien
tctccttccatgttaatctgggtca

SEQ ID NO: 4658010 - DNA, 25 bp, Homo sapien
taatctgggtcacagaatctcgtga

SEQ ID NO: 4658011 - DNA, 25 bp, Homo sapien
taattgttatgtgccgacagcccaa

SEQ ID NO: 4658012 - DNA, 25 bp, Homo sapien
tatcatgtccagtccgaaatacaga

SEQ ID NO: 4658013 - DNA, 25 bp, Homo sapien
cacagtagggaattgggatatgaca

SEQ ID NO: 4658014 - DNA, 25 bp, Homo sapien
taacgcctgagtgtttcacagtagg

SEQ ID NO: 4658015 - DNA, 25 bp, Homo sapien
tatgtgtccaaccaccaaggtgggc

SEQ ID NO: 4658016 - DNA, 25 bp, Homo sapien
ccatgtcagcaggatgtatgtggct

SEQ ID NO: 4658017 - DNA, 25 bp, Homo sapien
gcttgttttgactccaggtcctcca

SEQ ID NO: 4658018 - DNA, 25 bp, Homo sapien
agcagagtttggaggccaaatcctt

SEQ ID NO: 4658019 - DNA, 25 bp, Homo sapien
agctgtgccaacaaatagtggggcg

SEQ ID NO: 4658020 - DNA, 25 bp, Homo sapien
ccaacaaatagtggggcgggtatcg

SEQ ID NO: 4658021 - DNA, 25 bp, Homo sapien
tgtgccaacaaatagtggggcgggt

SEQ ID NO: 4658022 - DNA, 25 bp, Homo sapien
tgccaacaaatagtggggcgggtat

SEQ ID NO: 4658023 - DNA, 25 bp, Homo sapien
gcgccactgtctttaggagtgaaaa

SEQ ID NO: 4658024 - DNA, 25 bp, Homo sapien
caggcagaggtatccattgtcttgg

SEQ ID NO: 4658025 - DNA, 25 bp, Homo sapien
aggtcaccttgccttgcgccactgt

SEQ ID NO: 4658026 - DNA, 25 bp, Homo sapien
gaggcaaatgtccttccaaattcca

SEQ ID NO: 4658027 - DNA, 25 bp, Homo sapien
cacactcaggcttgcatggagggtg

SEQ ID NO: 4658028 - DNA, 25 bp, Homo sapien
gacacttgcacaaccatgggaggag

SEQ ID NO: 4658029 - DNA, 25 bp, Homo sapien
ccttgcactcatacctgggatggct

SEQ ID NO: 4658030 - DNA, 25 bp, Homo sapien
gatgaccaaaggcagcaaacgcaga

SEQ ID NO: 4658031 - DNA, 25 bp, Homo sapien
cctggcctgttcgtaatttgatgaa

SEQ ID NO: 4658032 - DNA, 25 bp, Homo sapien
ttcaaacttcagtgtcctggcctgt

SEQ ID NO: 4658033 - DNA, 25 bp, Homo sapien
tgtcctggcctgttcgtaatttgat

SEQ ID NO: 4658034 - DNA, 25 bp, Homo sapien
tggcctgttcgtaatttgatgaaaa

SEQ ID NO: 4658035 - DNA, 25 bp, Homo sapien
cttaacacatattactgaagatgtt

SEQ ID NO: 4658036 - DNA, 25 bp, Homo sapien
tagatagaattgtcgaaaaacacag

SEQ ID NO: 4658037 - DNA, 25 bp, Homo sapien
gacaagcccttgagacctggggaag

SEQ ID NO: 4658038 - DNA, 25 bp, Homo sapien
ctggggaaggccagtcaactgaagt

SEQ ID NO: 4658039 - DNA, 25 bp, Homo sapien
tgtaacaaacatagggtagtgatgg

SEQ ID NO: 4658040 - DNA, 25 bp, Homo sapien
catattccgcactgattcagaggtc

SEQ ID NO: 4658041 - DNA, 25 bp, Homo sapien
gggaggacggtcctctctcctgtaa

SEQ ID NO: 4658042 - DNA, 25 bp, Homo sapien
catcacttagataagcacaggcagg

SEQ ID NO: 4658043 - DNA, 25 bp, Homo sapien
tctgagaactgaagccggacccttt

SEQ ID NO: 4658044 - DNA, 25 bp, Homo sapien
acctgcaggatactcccatattctg

SEQ ID NO: 4658045 - DNA, 25 bp, Homo sapien
tctgccaccttggtacttatcagcc

SEQ ID NO: 4658046 - DNA, 25 bp, Homo sapien
tggtacttatcagcctctgagaact

SEQ ID NO: 4658047 - DNA, 25 bp, Homo sapien
tccgcagagccgagagtcaagtgta

SEQ ID NO: 4658048 - DNA, 25 bp, Homo sapien
tatcgtcaagaccagaccctaggag

SEQ ID NO: 4658049 - DNA, 25 bp, Homo sapien
gacgtttaccgcaagccctgtgtgg

SEQ ID NO: 4658050 - DNA, 25 bp, Homo sapien
gaaaggcatccccaaaacacgagat

SEQ ID NO: 4658051 - DNA, 25 bp, Homo sapien
gcgcagagtagggtcgggcgtctcc

SEQ ID NO: 4658052 - DNA, 25 bp, Homo sapien
gcagagtagggtcgggcgtctccct

SEQ ID NO: 4658053 - DNA, 25 bp, Homo sapien
agagtagggtcgggcgtctccctgg

SEQ ID NO: 4658054 - DNA, 25 bp, Homo sapien
cggcgcagagtagggtcgggcgtct

SEQ ID NO: 4658055 - DNA, 25 bp, Homo sapien
ctctgcttctaaaacctcgggtctg

SEQ ID NO: 4658056 - DNA, 25 bp, Homo sapien
tgtttactgactgtcccagagctgg

SEQ ID NO: 4658057 - DNA, 25 bp, Homo sapien
tttcctgctgcggtcgtagctgcgc

SEQ ID NO: 4658058 - DNA, 25 bp, Homo sapien
cacggatgccgctcaaggttgcgga

SEQ ID NO: 4658059 - DNA, 25 bp, Homo sapien
ggtagacgctctcgttgccagggct

SEQ ID NO: 4658060 - DNA, 25 bp, Homo sapien
tcggggtagacgctctcgttgccag

SEQ ID NO: 4658061 - DNA, 25 bp, Homo sapien
cagagttcggggtagacgctctcgt

SEQ ID NO: 4658062 - DNA, 25 bp, Homo sapien
tagacgctctcgttgccagggctgg

SEQ ID NO: 4658063 - DNA, 25 bp, Homo sapien
ctcaaccagtcacgcgcctccgcgg

SEQ ID NO: 4658064 - DNA, 25 bp, Homo sapien
tcctcaactgccctccccggcttcc

SEQ ID NO: 4658065 - DNA, 25 bp, Homo sapien
tggcctgcccgctcaaccagtcacg

SEQ ID NO: 4658066 - DNA, 25 bp, Homo sapien
ctgtgtccacccggctcggaggctg

SEQ ID NO: 4658067 - DNA, 25 bp, Homo sapien
ggccaggccctgagtcggcgcggcg

SEQ ID NO: 4658068 - DNA, 25 bp, Homo sapien
ctgtctggccgggccaggccctgag

SEQ ID NO: 4658069 - DNA, 25 bp, Homo sapien
caggccctgagtcggcgcggcgcgg

SEQ ID NO: 4658070 - DNA, 25 bp, Homo sapien
ccgggccaggccctgagtcggcgcg

SEQ ID NO: 4658071 - DNA, 25 bp, Homo sapien
cacactggctgtagcggtcagagga

SEQ ID NO: 4658072 - DNA, 25 bp, Homo sapien
cacacactggctgtagcggtcagag

SEQ ID NO: 4658073 - DNA, 25 bp, Homo sapien
gatgtttgcggtgacgccagcagga

SEQ ID NO: 4658074 - DNA, 25 bp, Homo sapien
ccagcaggagtaccgctgtctggcg

SEQ ID NO: 4658075 - DNA, 25 bp, Homo sapien
gtcatatggccgcacgcgggaagcc

SEQ ID NO: 4658076 - DNA, 25 bp, Homo sapien
ctgtgctgccgacaccccaaactgc

SEQ ID NO: 4658077 - DNA, 25 bp, Homo sapien
actgctcccctaaatcagggacggg

SEQ ID NO: 4658078 - DNA, 25 bp, Homo sapien
tccttcattcacttgggcctgtgct

SEQ ID NO: 4658079 - DNA, 25 bp, Homo sapien
tgaaatgctttcccaggaaaaactg

SEQ ID NO: 4658080 - DNA, 25 bp, Homo sapien
ctttctgaaatgctttcccaggaaa

SEQ ID NO: 4658081 - DNA, 25 bp, Homo sapien
ccaggaaaaactgggaaggagagca

SEQ ID NO: 4658082 - DNA, 25 bp, Homo sapien
tctgaaatgctttcccaggaaaaac

SEQ ID NO: 4658083 - DNA, 25 bp, Homo sapien
gatccaggttttgtaccaatcgcaa

SEQ ID NO: 4658084 - DNA, 25 bp, Homo sapien
aaatccaggtttcgtgcccaggcaa

SEQ ID NO: 4658085 - DNA, 25 bp, Homo sapien
ccaagagttaggaggccttcacaca

SEQ ID NO: 4658086 - DNA, 25 bp, Homo sapien
cactaatgataaggtgggattccca

SEQ ID NO: 4658087 - DNA, 25 bp, Homo sapien
agcagcctgtccagagctgtaggag

SEQ ID NO: 4658088 - DNA, 25 bp, Homo sapien
aagcagcctgtccagagctgtagga

SEQ ID NO: 4658089 - DNA, 25 bp, Homo sapien
aaaacagggcacgtggaggtactgg

SEQ ID NO: 4658090 - DNA, 25 bp, Homo sapien
acagggcacgtggaggtactggatg

SEQ ID NO: 4658091 - DNA, 25 bp, Homo sapien
aaacagggcacgtggaggtactgga

SEQ ID NO: 4658092 - DNA, 25 bp, Homo sapien
aaaaacagggcacgtggaggtactg

SEQ ID NO: 4658093 - DNA, 25 bp, Homo sapien
aaggactgtggaagaggccaaggat

SEQ ID NO: 4658094 - DNA, 25 bp, Homo sapien
ccaaggactgtggaagaggccaagg

SEQ ID NO: 4658095 - DNA, 25 bp, Homo sapien
actgtggaagaggccaaggatgtgc

SEQ ID NO: 4658096 - DNA, 25 bp, Homo sapien
ggactgtggaagaggccaaggatgt

SEQ ID NO: 4658097 - DNA, 25 bp, Homo sapien
taaaaagccatcttactgccccctg

SEQ ID NO: 4658098 - DNA, 25 bp, Homo sapien
agccatcttactgccccctgaaaaa

SEQ ID NO: 4658099 - DNA, 25 bp, Homo sapien
ggatctgattagaccaatcctaaaa

SEQ ID NO: 4658100 - DNA, 25 bp, Homo sapien
aaaattagggccaccatggtagaat

SEQ ID NO: 4658101 - DNA, 25 bp, Homo sapien
tgaggcaattcccaggcaaaaggca

SEQ ID NO: 4658102 - DNA, 25 bp, Homo sapien
cagcaaggatgagtgtaggattcat

SEQ ID NO: 4658103 - DNA, 25 bp, Homo sapien
caattcccaggcaaaaggcagcaag

SEQ ID NO: 4658104 - DNA, 25 bp, Homo sapien
aggcagcaaggatgagtgtaggatt

SEQ ID NO: 4658105 - DNA, 25 bp, Homo sapien
cttccacttggtccactgtgcctct

SEQ ID NO: 4658106 - DNA, 25 bp, Homo sapien
tccacttggtccactgtgcctctaa

SEQ ID NO: 4658107 - DNA, 25 bp, Homo sapien
ccacttggtccactgtgcctctaaa

SEQ ID NO: 4658108 - DNA, 25 bp, Homo sapien
ttccacttggtccactgtgcctcta

SEQ ID NO: 4658109 - DNA, 25 bp, Homo sapien
atgccgtataatctgttgtgcatcg

SEQ ID NO: 4658110 - DNA, 25 bp, Homo sapien
tgccgtataatctgttgtgcatcgc

SEQ ID NO: 4658111 - DNA, 25 bp, Homo sapien
catgccgtataatctgttgtgcatc

SEQ ID NO: 4658112 - DNA, 25 bp, Homo sapien
cttcatgttcttctcccacactgct

SEQ ID NO: 4658113 - DNA, 25 bp, Homo sapien
gtgcagttcaatcatcttcatgttc

SEQ ID NO: 4658114 - DNA, 25 bp, Homo sapien
ctgattgtgcagttcaatcatcttc

SEQ ID NO: 4658115 - DNA, 25 bp, Homo sapien
attgtgcagttcaatcatcttcatg

SEQ ID NO: 4658116 - DNA, 25 bp, Homo sapien
gagctcggcagtccacagcacactt

SEQ ID NO: 4658117 - DNA, 25 bp, Homo sapien
gctcggcagtccacagcacacttac

SEQ ID NO: 4658118 - DNA, 25 bp, Homo sapien
agctcggcagtccacagcacactta

SEQ ID NO: 4658119 - DNA, 25 bp, Homo sapien
gaaataaaatgttgaaaagcaagag

SEQ ID NO: 4658120 - DNA, 25 bp, Homo sapien
aaaatgttgaaaagcaagagattac

SEQ ID NO: 4658121 - DNA, 25 bp, Homo sapien
ggaaataaaatgttgaaaagcaaga

SEQ ID NO: 4658122 - DNA, 25 bp, Homo sapien
aataaaatgttgaaaagcaagagat

SEQ ID NO: 4658123 - DNA, 25 bp, Homo sapien
ctgggcttacggttttgaaagccat

SEQ ID NO: 4658124 - DNA, 25 bp, Homo sapien
catcactttaaagtctaccaaaaca

SEQ ID NO: 4658125 - DNA, 25 bp, Homo sapien
gaactgtacatcactttaaagtcta

SEQ ID NO: 4658126 - DNA, 25 bp, Homo sapien
gacaacagctcacacatctgaatac

SEQ ID NO: 4658127 - DNA, 25 bp, Homo sapien
aataataagactttgacaacagctc

SEQ ID NO: 4658128 - DNA, 25 bp, Homo sapien
tccggaacatctgtccttcaagagc

SEQ ID NO: 4658129 - DNA, 25 bp, Homo sapien
tttccggaacatctgtccttcaaga

SEQ ID NO: 4658130 - DNA, 25 bp, Homo sapien
ttccggaacatctgtccttcaagag

SEQ ID NO: 4658131 - DNA, 25 bp, Homo sapien
ttttccggaacatctgtccttcaag

SEQ ID NO: 4658132 - DNA, 25 bp, Homo sapien
gaacatactggaaagcataatccat

SEQ ID NO: 4658133 - DNA, 25 bp, Homo sapien
cataatccattaggccaccattgca

SEQ ID NO: 4658134 - DNA, 25 bp, Homo sapien
gaaagcataatccattaggccacca

SEQ ID NO: 4658135 - DNA, 25 bp, Homo sapien
ggcctccattatcctgaacatactg

SEQ ID NO: 4658136 - DNA, 25 bp, Homo sapien
ctgttatctcttaaagtgtccacct

SEQ ID NO: 4658137 - DNA, 25 bp, Homo sapien
ccagccctaatatatgaattccgaa

SEQ ID NO: 4658138 - DNA, 25 bp, Homo sapien
agtgcatttgcacaaccacctccca

SEQ ID NO: 4658139 - DNA, 25 bp, Homo sapien
aatcgccctacctcagcatagctgg

SEQ ID NO: 4658140 - DNA, 25 bp, Homo sapien
cacgttacatagaagcaagaacagc

SEQ ID NO: 4658141 - DNA, 25 bp, Homo sapien
cactgttataaatcatcccaggaag

SEQ ID NO: 4658142 - DNA, 25 bp, Homo sapien
gttagaaccacaacactcagcagtg

SEQ ID NO: 4658143 - DNA, 25 bp, Homo sapien
gcagcttagtatttccaagtcacca

SEQ ID NO: 4658144 - DNA, 25 bp, Homo sapien
ggactcatgacctgcatcaatagca

SEQ ID NO: 4658145 - DNA, 25 bp, Homo sapien
cttctttatagaacaggaaggactc

SEQ ID NO: 4658146 - DNA, 25 bp, Homo sapien
acttgggattgtacttacaggattc

SEQ ID NO: 4658147 - DNA, 25 bp, Homo sapien
ctttatagaacaggaaggactcatg

SEQ ID NO: 4658148 - DNA, 25 bp, Homo sapien
tcaatttctacaaagaaaaatatgc

SEQ ID NO: 4658149 - DNA, 25 bp, Homo sapien
atttctacaaagaaaaatatgctta

SEQ ID NO: 4658150 - DNA, 25 bp, Homo sapien
caatttctacaaagaaaaatatgct

SEQ ID NO: 4658151 - DNA, 25 bp, Homo sapien
tttctacaaagaaaaatatgcttac

SEQ ID NO: 4658152 - DNA, 25 bp, Homo sapien
gtgacacacattccagatagtactt

SEQ ID NO: 4658153 - DNA, 25 bp, Homo sapien
ggacacatgacagtaacccatcctg

SEQ ID NO: 4658154 - DNA, 25 bp, Homo sapien
ggtgagaagctccagaggacacatg

SEQ ID NO: 4658155 - DNA, 25 bp, Homo sapien
agacccctctttgtaagcttgtaat

SEQ ID NO: 4658156 - DNA, 25 bp, Homo sapien
gattctgtgctttcaaatccgtagc

SEQ ID NO: 4658157 - DNA, 25 bp, Homo sapien
atctgattctgtgctttcaaatccg

SEQ ID NO: 4658158 - DNA, 25 bp, Homo sapien
tctgtgctttcaaatccgtagccaa

SEQ ID NO: 4658159 - DNA, 25 bp, Homo sapien
gtgctttcaaatccgtagccaacca

SEQ ID NO: 4658160 - DNA, 25 bp, Homo sapien
gccagaggccatagacttaacagaa

SEQ ID NO: 4658161 - DNA, 25 bp, Homo sapien
cctaagggcatgtggaactgtatcc

SEQ ID NO: 4658162 - DNA, 25 bp, Homo sapien
cacagaactacagatcagagacagg

SEQ ID NO: 4658163 - DNA, 25 bp, Homo sapien
tatatgttcaacttagacttctggg

SEQ ID NO: 4658164 - DNA, 25 bp, Homo sapien
ggcaattccacaatggtttctccgg

SEQ ID NO: 4658165 - DNA, 25 bp, Homo sapien
caattccacaatggtttctccggtc

SEQ ID NO: 4658166 - DNA, 25 bp, Homo sapien
cacaatggtttctccggtctttggc

SEQ ID NO: 4658167 - DNA, 25 bp, Homo sapien
tccacaatggtttctccggtctttg

SEQ ID NO: 4658168 - DNA, 25 bp, Homo sapien
aatgcaaagtcagtaagtgaatcaa

SEQ ID NO: 4658169 - DNA, 25 bp, Homo sapien
aagatgaattcctcccatgcatgcg

SEQ ID NO: 4658170 - DNA, 25 bp, Homo sapien
tgattcgagtgtgtatccgacacag

SEQ ID NO: 4658171 - DNA, 25 bp, Homo sapien
tcacactcggatcttcaatgattcg

SEQ ID NO: 4658172 - DNA, 25 bp, Homo sapien
atggcttagagcccaattatgttct

SEQ ID NO: 4658173 - DNA, 25 bp, Homo sapien
tggcttagagcccaattatgttctt

SEQ ID NO: 4658174 - DNA, 25 bp, Homo sapien
ttttgctgcaatcaaggattggtta

SEQ ID NO: 4658175 - DNA, 25 bp, Homo sapien
tggttaagacatagccactgggcag

SEQ ID NO: 4658176 - DNA, 25 bp, Homo sapien
ctgggcagctgacatgagatctgta

SEQ ID NO: 4658177 - DNA, 25 bp, Homo sapien
ttcctttgtcctcatagatcatttt

SEQ ID NO: 4658178 - DNA, 25 bp, Homo sapien
gtatgttcacttttctaaaaagtga

SEQ ID NO: 4658179 - DNA, 25 bp, Homo sapien
tatgttcacttttctaaaaagtgaa

SEQ ID NO: 4658180 - DNA, 25 bp, Homo sapien
tgttcacttttctaaaaagtgaata

SEQ ID NO: 4658181 - DNA, 25 bp, Homo sapien
ggcgaagatgctccagaaacaggct

SEQ ID NO: 4658182 - DNA, 25 bp, Homo sapien
ttcaccagcagtgggcgaagatgct

SEQ ID NO: 4658183 - DNA, 25 bp, Homo sapien
caggctgagacctttgccctgtaac

SEQ ID NO: 4658184 - DNA, 25 bp, Homo sapien
gccctgtaacttgactgagatgcaa

SEQ ID NO: 4658185 - DNA, 25 bp, Homo sapien
gttatcccagacgtcctcatcctcg

SEQ ID NO: 4658186 - DNA, 25 bp, Homo sapien
ttatcccagacgtcctcatcctcgt

SEQ ID NO: 4658187 - DNA, 25 bp, Homo sapien
cagttatcccagacgtcctcatcct

SEQ ID NO: 4658188 - DNA, 25 bp, Homo sapien
cccagttatcccagacgtcctcatc

SEQ ID NO: 4658189 - DNA, 25 bp, Homo sapien
tatacagtagtcttaacaccaaaag

SEQ ID NO: 4658190 - DNA, 25 bp, Homo sapien
acagcatccgatccatatacagtag

SEQ ID NO: 4658191 - DNA, 25 bp, Homo sapien
ggtcatcccttgaagatgggtttac

SEQ ID NO: 4658192 - DNA, 25 bp, Homo sapien
cacaatgtattgagaacctttttca

SEQ ID NO: 4658193 - DNA, 25 bp, Homo sapien
ttttcatagtcttgtgcataccctg

SEQ ID NO: 4658194 - DNA, 25 bp, Homo sapien
gtgcataccctgcatcatcaccacc

SEQ ID NO: 4658195 - DNA, 25 bp, Homo sapien
gacattttcatagtcttgtgcatac

SEQ ID NO: 4658196 - DNA, 25 bp, Homo sapien
ttcatagtcttgtgcataccctgca

SEQ ID NO: 4658197 - DNA, 25 bp, Homo sapien
taacgtggagtggaaagtgcccgca

SEQ ID NO: 4658198 - DNA, 25 bp, Homo sapien
gaaagtgcccgcaggatgtaggacc

SEQ ID NO: 4658199 - DNA, 25 bp, Homo sapien
tgggtaacgtggagtggaaagtgcc

SEQ ID NO: 4658200 - DNA, 25 bp, Homo sapien
gcaggatgtaggacctctctaacat

SEQ ID NO: 4658201 - DNA, 25 bp, Homo sapien
tacaataggaaagcaccacatccgt

SEQ ID NO: 4658202 - DNA, 25 bp, Homo sapien
caataggaaagcaccacatccgtgg

SEQ ID NO: 4658203 - DNA, 25 bp, Homo sapien
ataggaaagcaccacatccgtggat

SEQ ID NO: 4658204 - DNA, 25 bp, Homo sapien
ctcctacaataggaaagcaccacat

SEQ ID NO: 4658205 - DNA, 25 bp, Homo sapien
agccgcctctgggcgtagcctcagg

SEQ ID NO: 4658206 - DNA, 25 bp, Homo sapien
gcctgcccgcactgtgattggctga

SEQ ID NO: 4658207 - DNA, 25 bp, Homo sapien
tagcctcagggcactgggacgcagc

SEQ ID NO: 4658208 - DNA, 25 bp, Homo sapien
tcagggcactgggacgcagcaccat

SEQ ID NO: 4658209 - DNA, 25 bp, Homo sapien
cccactcacagagcggaggtactcg

SEQ ID NO: 4658210 - DNA, 25 bp, Homo sapien
ctcacagagcggaggtactcgccgg

SEQ ID NO: 4658211 - DNA, 25 bp, Homo sapien
agcggaggtactcgccgggcaccgg

SEQ ID NO: 4658212 - DNA, 25 bp, Homo sapien
agagcggaggtactcgccgggcacc

SEQ ID NO: 4658213 - DNA, 25 bp, Homo sapien
ctgacttgcaggggtcgagcttccc

SEQ ID NO: 4658214 - DNA, 25 bp, Homo sapien
tgcaaggagcaagggacatctccac

SEQ ID NO: 4658215 - DNA, 25 bp, Homo sapien
cggtggtgcaaggagcaagggacat

SEQ ID NO: 4658216 - DNA, 25 bp, Homo sapien
tggtgcaaggagcaagggacatctc

SEQ ID NO: 4658217 - DNA, 25 bp, Homo sapien
gtgcggtggtgcaaggagcaaggga

SEQ ID NO: 4658218 - DNA, 25 bp, Homo sapien
atgtcgccagtactgccaacacctc

SEQ ID NO: 4658219 - DNA, 25 bp, Homo sapien
tactgccaacacctcatctgcctct

SEQ ID NO: 4658220 - DNA, 25 bp, Homo sapien
tgcctctccaaaaccagggctcctg

SEQ ID NO: 4658221 - DNA, 25 bp, Homo sapien
caggtcccatgctgcttgcccccac

SEQ ID NO: 4658222 - DNA, 25 bp, Homo sapien
gttctgccacactgctctcctccat

SEQ ID NO: 4658223 - DNA, 25 bp, Homo sapien
ctgccacactgctctcctccatcct

SEQ ID NO: 4658224 - DNA, 25 bp, Homo sapien
ttctgccacactgctctcctccatc

SEQ ID NO: 4658225 - DNA, 25 bp, Homo sapien
gccacactgctctcctccatccttc

SEQ ID NO: 4658226 - DNA, 25 bp, Homo sapien
catttctccaaaggcgttcatggcc

SEQ ID NO: 4658227 - DNA, 25 bp, Homo sapien
ttcccttccctgtattcctgattgt

SEQ ID NO: 4658228 - DNA, 25 bp, Homo sapien
cttccctgtattcctgattgtgctg

SEQ ID NO: 4658229 - DNA, 25 bp, Homo sapien
gattgtgctgctcaatcatcttcat

SEQ ID NO: 4658230 - DNA, 25 bp, Homo sapien
acagagctcggcagtccacagcaca

SEQ ID NO: 4658231 - DNA, 25 bp, Homo sapien
gagaggaagcacagagctcggcagt

SEQ ID NO: 4658232 - DNA, 25 bp, Homo sapien
aggaagcacagagctcggcagtcca

SEQ ID NO: 4658233 - DNA, 25 bp, Homo sapien
agagctcggcagtccacagcacact

SEQ ID NO: 4658234 - DNA, 25 bp, Homo sapien
gatttgcggatgtcatgaagcagag

SEQ ID NO: 4658235 - DNA, 25 bp, Homo sapien
tttgcggatgtcatgaagcagaggt

SEQ ID NO: 4658236 - DNA, 25 bp, Homo sapien
gcggatgtcatgaagcagaggttcc

SEQ ID NO: 4658237 - DNA, 25 bp, Homo sapien
cacagatttgcggatgtcatgaagc

SEQ ID NO: 4658238 - DNA, 25 bp, Homo sapien
gggaggtctgaatctgacactgtct

SEQ ID NO: 4658239 - DNA, 25 bp, Homo sapien
aggtctgaatctgacactgtcttac

SEQ ID NO: 4658240 - DNA, 25 bp, Homo sapien
gatgggaggtctgaatctgacactg

SEQ ID NO: 4658241 - DNA, 25 bp, Homo sapien
agatgggaggtctgaatctgacact

SEQ ID NO: 4658242 - DNA, 25 bp, Homo sapien
gtttctcagttttcctaacatctgt

SEQ ID NO: 4658243 - DNA, 25 bp, Homo sapien
gcagtccaccaggtctgcacactca

SEQ ID NO: 4658244 - DNA, 25 bp, Homo sapien
agtccaccaggtctgcacactcagt

SEQ ID NO: 4658245 - DNA, 25 bp, Homo sapien
gagcagtccaccaggtctgcacact

SEQ ID NO: 4658246 - DNA, 25 bp, Homo sapien
ctggaagcaaaataatggttctcca

SEQ ID NO: 4658247 - DNA, 25 bp, Homo sapien
gaagcaaaataatggttctccaaaa

SEQ ID NO: 4658248 - DNA, 25 bp, Homo sapien
tctccaaaaatgcagccaacattgc

SEQ ID NO: 4658249 - DNA, 25 bp, Homo sapien
aatgcagccaacattgccttgaagc

SEQ ID NO: 4658250 - DNA, 25 bp, Homo sapien
gagtccaggcctccattgtcggcaa

SEQ ID NO: 4658251 - DNA, 25 bp, Homo sapien
ttcttcatatgaaaaggattcctca

SEQ ID NO: 4658252 - DNA, 25 bp, Homo sapien
ccaggcctccattgtcggcaacata

SEQ ID NO: 4658253 - DNA, 25 bp, Homo sapien
ttcatatgaaaaggattcctcagag

SEQ ID NO: 4658254 - DNA, 25 bp, Homo sapien
tgacagcaagataaagagctccact

SEQ ID NO: 4658255 - DNA, 25 bp, Homo sapien
gaatgacagcaagataaagagctcc

SEQ ID NO: 4658256 - DNA, 25 bp, Homo sapien
ctggaatgacagcaagataaagagc

SEQ ID NO: 4658257 - DNA, 25 bp, Homo sapien
ggaatgacagcaagataaagagctc

SEQ ID NO: 4658258 - DNA, 25 bp, Homo sapien
gaaagcgttccacttcccaaaagca

SEQ ID NO: 4658259 - DNA, 25 bp, Homo sapien
ctctgaaagcgttccacttcccaaa

SEQ ID NO: 4658260 - DNA, 25 bp, Homo sapien
agcgttccacttcccaaaagcagag

SEQ ID NO: 4658261 - DNA, 25 bp, Homo sapien
tgaaagcgttccacttcccaaaagc

SEQ ID NO: 4658262 - DNA, 25 bp, Homo sapien
tccacagggagtatttgcatgtacc

SEQ ID NO: 4658263 - DNA, 25 bp, Homo sapien
gtacccagtgtcattagtagcagaa

SEQ ID NO: 4658264 - DNA, 25 bp, Homo sapien
cacagccttcattagggccttctct

SEQ ID NO: 4658265 - DNA, 25 bp, Homo sapien
aagaagtccataaacaacagcagag

SEQ ID NO: 4658266 - DNA, 25 bp, Homo sapien
cctgctccacgtgaaataactcaga

SEQ ID NO: 4658267 - DNA, 25 bp, Homo sapien
taactcagatgtggggaaatcttct

SEQ ID NO: 4658268 - DNA, 25 bp, Homo sapien
ctgctccacgtgaaataactcagat

SEQ ID NO: 4658269 - DNA, 25 bp, Homo sapien
gcacctgctccacgtgaaataactc

SEQ ID NO: 4658270 - DNA, 25 bp, Homo sapien
aaaacaatacccctcgctatagagg

SEQ ID NO: 4658271 - DNA, 25 bp, Homo sapien
aaacaatacccctcgctatagaggg

SEQ ID NO: 4658272 - DNA, 25 bp, Homo sapien
agaaaacaatacccctcgctataga

SEQ ID NO: 4658273 - DNA, 25 bp, Homo sapien
caatacccctcgctatagaggggaa

SEQ ID NO: 4658274 - DNA, 25 bp, Homo sapien
attctgtttgggaggtctaatgctg

SEQ ID NO: 4658275 - DNA, 25 bp, Homo sapien
ttctgtttgggaggtctaatgctga

SEQ ID NO: 4658276 - DNA, 25 bp, Homo sapien
aggtctaatgctgaacaccaattct

SEQ ID NO: 4658277 - DNA, 25 bp, Homo sapien
ctctagtggaattgggagaatattt

SEQ ID NO: 4658278 - DNA, 25 bp, Homo sapien
ctcttctctagtggaattgggagaa

SEQ ID NO: 4658279 - DNA, 25 bp, Homo sapien
tgcaagacttcaaatccattcgtgg

SEQ ID NO: 4658280 - DNA, 25 bp, Homo sapien
ctattacccttcttgcaagacttca

SEQ ID NO: 4658281 - DNA, 25 bp, Homo sapien
gaaaaaacactgttgcctgaatcca

SEQ ID NO: 4658282 - DNA, 25 bp, Homo sapien
gattcctcagcacaagacctgactt

SEQ ID NO: 4658283 - DNA, 25 bp, Homo sapien
ggtagagccttctacacattcaggc

SEQ ID NO: 4658284 - DNA, 25 bp, Homo sapien
tgctaccacgatcacaaattccctg

SEQ ID NO: 4658285 - DNA, 25 bp, Homo sapien
gggttgaaccaagaccattatcttc

SEQ ID NO: 4658286 - DNA, 25 bp, Homo sapien
tcttgtaccagatagaggcagaata

SEQ ID NO: 4658287 - DNA, 25 bp, Homo sapien
caaaacctattcgtgccaacttgaa

SEQ ID NO: 4658288 - DNA, 25 bp, Homo sapien
ttcataggcaggttatgtgtctcca

SEQ ID NO: 4658289 - DNA, 25 bp, Homo sapien
tcctcatgtcatggggccatttgtc

SEQ ID NO: 4658290 - DNA, 25 bp, Homo sapien
ttgtcttcatcgtgatcctcatccc

SEQ ID NO: 4658291 - DNA, 25 bp, Homo sapien
gcctcctcgataagatgacactgca

SEQ ID NO: 4658292 - DNA, 25 bp, Homo sapien
gattcctcatgtcatggggccattt

SEQ ID NO: 4658293 - DNA, 25 bp, Homo sapien
ggctctgattgtaaatagtgactag

SEQ ID NO: 4658294 - DNA, 25 bp, Homo sapien
gacagtcaaaacgttctgtgttgct

SEQ ID NO: 4658295 - DNA, 25 bp, Homo sapien
taaatagtgactaggcactgacagt

SEQ ID NO: 4658296 - DNA, 25 bp, Homo sapien
tcaaccaaggcaagcagctgtgtct

SEQ ID NO: 4658297 - DNA, 25 bp, Homo sapien
tccaatgctgtcaccaattatagta

SEQ ID NO: 4658298 - DNA, 25 bp, Homo sapien
ctatccaatgctgtcaccaattata

SEQ ID NO: 4658299 - DNA, 25 bp, Homo sapien
caatgctgtcaccaattatagtacc

SEQ ID NO: 4658300 - DNA, 25 bp, Homo sapien
tatccaatgctgtcaccaattatag

SEQ ID NO: 4658301 - DNA, 25 bp, Homo sapien
taggtgggagatttcataggaagca

SEQ ID NO: 4658302 - DNA, 25 bp, Homo sapien
aatccctcaagtaggtgggagattt

SEQ ID NO: 4658303 - DNA, 25 bp, Homo sapien
cgttggttcagacccctcagttgac

SEQ ID NO: 4658304 - DNA, 25 bp, Homo sapien
ggtatccgttggttcagacccctca

SEQ ID NO: 4658305 - DNA, 25 bp, Homo sapien
tcccttttggtagctttgcaataat

SEQ ID NO: 4658306 - DNA, 25 bp, Homo sapien
tttgcaagacttcccttttggtagc

SEQ ID NO: 4658307 - DNA, 25 bp, Homo sapien
gacttcccttttggtagctttgcaa

SEQ ID NO: 4658308 - DNA, 25 bp, Homo sapien
ttttggtagctttgcaataattccc

SEQ ID NO: 4658309 - DNA, 25 bp, Homo sapien
actgatatacaagcctctgtccttc

SEQ ID NO: 4658310 - DNA, 25 bp, Homo sapien
atctgtgaccactatggttttgggc

SEQ ID NO: 4658311 - DNA, 25 bp, Homo sapien
aacctgcatgaagcatcgtgaccag

SEQ ID NO: 4658312 - DNA, 25 bp, Homo sapien
ctgtcatcatctgtgaccactatgg

SEQ ID NO: 4658313 - DNA, 25 bp, Homo sapien
agtggtagttggaaacctgcatgaa

SEQ ID NO: 4658314 - DNA, 25 bp, Homo sapien
tcgctgttgttggattagtgctggt

SEQ ID NO: 4658315 - DNA, 25 bp, Homo sapien
ttagtgctggttattaatggtgcac

SEQ ID NO: 4658316 - DNA, 25 bp, Homo sapien
gattagtgctggttattaatggtgc

SEQ ID NO: 4658317 - DNA, 25 bp, Homo sapien
tacctttggagaggtcgctgttgtt

SEQ ID NO: 4658318 - DNA, 25 bp, Homo sapien
tctgtagttgacaaagtcaaactgt

SEQ ID NO: 4658319 - DNA, 25 bp, Homo sapien
gtcatcatagtagggattatctgaa

SEQ ID NO: 4658320 - DNA, 25 bp, Homo sapien
gaagctgtcatcatagtagggatta

SEQ ID NO: 4658321 - DNA, 25 bp, Homo sapien
tttgtctgtagttgacaaagtcaaa

SEQ ID NO: 4658322 - DNA, 25 bp, Homo sapien
aactgataactagaggatgagtctg

SEQ ID NO: 4658323 - DNA, 25 bp, Homo sapien
catagttacaagaaggggcaatagc

SEQ ID NO: 4658324 - DNA, 25 bp, Homo sapien
ttatgaccaaactgataactagagg

SEQ ID NO: 4658325 - DNA, 25 bp, Homo sapien
agtccatcattttcatagttacaag

SEQ ID NO: 4658326 - DNA, 25 bp, Homo sapien
gatgtcttggcttctacactgtctc

SEQ ID NO: 4658327 - DNA, 25 bp, Homo sapien
tccaggatgtcttggcttctacact

SEQ ID NO: 4658328 - DNA, 25 bp, Homo sapien
ccaggatgtcttggcttctacactg

SEQ ID NO: 4658329 - DNA, 25 bp, Homo sapien
tctccaggatgtcttggcttctaca

SEQ ID NO: 4658330 - DNA, 25 bp, Homo sapien
tcctaggcgcgctgtagaagctgac

SEQ ID NO: 4658331 - DNA, 25 bp, Homo sapien
cccgcgactctgctgagggttaaag

SEQ ID NO: 4658332 - DNA, 25 bp, Homo sapien
caggctgagaggactcacgggctat

SEQ ID NO: 4658333 - DNA, 25 bp, Homo sapien
agaggacacggtctcctaggcgcgc

SEQ ID NO: 4658334 - DNA, 25 bp, Homo sapien
cttggtcttattcggcggcctggct

SEQ ID NO: 4658335 - DNA, 25 bp, Homo sapien
gatcggaatcagcttcctagcccca

SEQ ID NO: 4658336 - DNA, 25 bp, Homo sapien
gcctggctgggatcggaatcagctt

SEQ ID NO: 4658337 - DNA, 25 bp, Homo sapien
cctggaagcggatgtcctgccgaga

SEQ ID NO: 4658338 - DNA, 25 bp, Homo sapien
tcaattaattgtagggtagaggcca

SEQ ID NO: 4658339 - DNA, 25 bp, Homo sapien
tccttgatgcaagagctgaaggctc

SEQ ID NO: 4658340 - DNA, 25 bp, Homo sapien
tgacaatttatttgcgggacctgtg

SEQ ID NO: 4658341 - DNA, 25 bp, Homo sapien
tgagcaggtggtctttatcctgcac

SEQ ID NO: 4658342 - DNA, 25 bp, Homo sapien
cactcataaaaacaccacggggcag

SEQ ID NO: 4658343 - DNA, 25 bp, Homo sapien
tgggctccatattgtcactgttctt

SEQ ID NO: 4658344 - DNA, 25 bp, Homo sapien
tttgtgggctccatattgtcactgt

SEQ ID NO: 4658345 - DNA, 25 bp, Homo sapien
tccaccactcataaaaacaccacgg

SEQ ID NO: 4658346 - DNA, 25 bp, Homo sapien
cactgctctcctccatccttcttca

SEQ ID NO: 4658347 - DNA, 25 bp, Homo sapien
cttcatgttctcccacactgctctc

SEQ ID NO: 4658348 - DNA, 25 bp, Homo sapien
ctgctctcctccatccttcttcatt

SEQ ID NO: 4658349 - DNA, 25 bp, Homo sapien
cacactgctctcctccatccttctt

SEQ ID NO: 4658350 - DNA, 25 bp, Homo sapien
tccaaaggcgttcatggctgttgtg

SEQ ID NO: 4658351 - DNA, 25 bp, Homo sapien
aggcgttcatggctgttgtgaagct

SEQ ID NO: 4658352 - DNA, 25 bp, Homo sapien
caaaggcgttcatggctgttgtgaa

SEQ ID NO: 4658353 - DNA, 25 bp, Homo sapien
gtctccaaaggcgttcatggctgtt

SEQ ID NO: 4658354 - DNA, 25 bp, Homo sapien
gcagacgttcctggaactctttccc

SEQ ID NO: 4658355 - DNA, 25 bp, Homo sapien
ttctctctccagttcacagatgtgg

SEQ ID NO: 4658356 - DNA, 25 bp, Homo sapien
tgatccttcacaggactcatgtagc

SEQ ID NO: 4658357 - DNA, 25 bp, Homo sapien
ggatctcaagaagcagacgttcctg

SEQ ID NO: 4658358 - DNA, 25 bp, Homo sapien
agaatacttgggattgtacctacag

SEQ ID NO: 4658359 - DNA, 25 bp, Homo sapien
gaatacttgggattgtacctacagg

SEQ ID NO: 4658360 - DNA, 25 bp, Homo sapien
cagccaatatttgttatccgagtct

SEQ ID NO: 4658361 - DNA, 25 bp, Homo sapien
tttgttatccgagtctgatccttca

SEQ ID NO: 4658362 - DNA, 25 bp, Homo sapien
tcaaaataaatttccgagagaataa

SEQ ID NO: 4658363 - DNA, 25 bp, Homo sapien
ccgagtctgatccttcatagccata

SEQ ID NO: 4658364 - DNA, 25 bp, Homo sapien
ctttatgtagccatccatgccccag

SEQ ID NO: 4658365 - DNA, 25 bp, Homo sapien
tttatgtagccatccatgccccagt

SEQ ID NO: 4658366 - DNA, 25 bp, Homo sapien
tgaagtgtgcatttcacacagcagg

SEQ ID NO: 4658367 - DNA, 25 bp, Homo sapien
gattgaagatcagttcctcctctgg

SEQ ID NO: 4658368 - DNA, 25 bp, Homo sapien
tggatgtgccatcctcagtcgagtc

SEQ ID NO: 4658369 - DNA, 25 bp, Homo sapien
ggatcttcaatgattgaagtgtgca

SEQ ID NO: 4658370 - DNA, 25 bp, Homo sapien
tcttcaccttcccttagtgactggc

SEQ ID NO: 4658371 - DNA, 25 bp, Homo sapien
ttcaccttcccttagtgactggctg

SEQ ID NO: 4658372 - DNA, 25 bp, Homo sapien
caccttcccttagtgactggctgct

SEQ ID NO: 4658373 - DNA, 25 bp, Homo sapien
cttcccttagtgactggctgctctg

SEQ ID NO: 4658374 - DNA, 25 bp, Homo sapien
tgtactgcaccctgagcttgtgagc

SEQ ID NO: 4658375 - DNA, 25 bp, Homo sapien
gctgacatcccgttcacatcggcct

SEQ ID NO: 4658376 - DNA, 25 bp, Homo sapien
cacagttcccggtgtgaacggctga

SEQ ID NO: 4658377 - DNA, 25 bp, Homo sapien
cagcctgagcgctgttctcccctgc

SEQ ID NO: 4658378 - DNA, 25 bp, Homo sapien
agcctcctcagcagtgagccaatct

SEQ ID NO: 4658379 - DNA, 25 bp, Homo sapien
agcagcagcctcctcagcagtgagc

SEQ ID NO: 4658380 - DNA, 25 bp, Homo sapien
cagcagcctcctcagcagtgagcca

SEQ ID NO: 4658381 - DNA, 25 bp, Homo sapien
gcagcctcctcagcagtgagccaat

SEQ ID NO: 4658382 - DNA, 25 bp, Homo sapien
tatttatctttattcaattctgctc

SEQ ID NO: 4658383 - DNA, 25 bp, Homo sapien
ttcaccagccagtatttatctttat

SEQ ID NO: 4658384 - DNA, 25 bp, Homo sapien
gtatttatctttattcaattctgct

SEQ ID NO: 4658385 - DNA, 25 bp, Homo sapien
gtcttcaccagccagtatttatctt

SEQ ID NO: 4658386 - DNA, 25 bp, Homo sapien
tgaatttcaaatagaagtatttttg

SEQ ID NO: 4658387 - DNA, 25 bp, Homo sapien
tagaagtatttttggcagtttatac

SEQ ID NO: 4658388 - DNA, 25 bp, Homo sapien
ttcaaatagaagtatttttggcagt

SEQ ID NO: 4658389 - DNA, 25 bp, Homo sapien
ccttttgaatttcaaatagaagtat

SEQ ID NO: 4658390 - DNA, 25 bp, Homo sapien
gtagccacgcatgtcccagtcttca

SEQ ID NO: 4658391 - DNA, 25 bp, Homo sapien
cagcatggcgattctgcagttgtta

SEQ ID NO: 4658392 - DNA, 25 bp, Homo sapien
tctttatgtagccacgcatgtccca

SEQ ID NO: 4658393 - DNA, 25 bp, Homo sapien
ggccagcatggcgattctgcagttg

SEQ ID NO: 4658394 - DNA, 25 bp, Homo sapien
tttcagatgaattcctcccatgtat

SEQ ID NO: 4658395 - DNA, 25 bp, Homo sapien
aacatttaccattacgaaagcgtca

SEQ ID NO: 4658396 - DNA, 25 bp, Homo sapien
aaatctaaagtcattcagtgaatca

SEQ ID NO: 4658397 - DNA, 25 bp, Homo sapien
gcaaagctggttatagcagtaatca

SEQ ID NO: 4658398 - DNA, 25 bp, Homo sapien
tccagttggcttaatatagaggcag

SEQ ID NO: 4658399 - DNA, 25 bp, Homo sapien
cagttggcttaatatagaggcagga

SEQ ID NO: 4658400 - DNA, 25 bp, Homo sapien
atggtctccagttggcttaatatag

SEQ ID NO: 4658401 - DNA, 25 bp, Homo sapien
gtctccagttggcttaatatagagg

SEQ ID NO: 4658402 - DNA, 25 bp, Homo sapien
tgcccacaggcgttggaagcaggca

SEQ ID NO: 4658403 - DNA, 25 bp, Homo sapien
accgatgcccacaggcgttggaagc

SEQ ID NO: 4658404 - DNA, 25 bp, Homo sapien
aggcgttggaagcaggcagcaccat

SEQ ID NO: 4658405 - DNA, 25 bp, Homo sapien
atcagtcttgcccaccgatgcccac

SEQ ID NO: 4658406 - DNA, 25 bp, Homo sapien
atcaggcagtaccctatctgtagcc

SEQ ID NO: 4658407 - DNA, 25 bp, Homo sapien
catcatcaggcagtaccctatctgt

SEQ ID NO: 4658408 - DNA, 25 bp, Homo sapien
catcaggcagtaccctatctgtagc

SEQ ID NO: 4658409 - DNA, 25 bp, Homo sapien
tcatcaggcagtaccctatctgtag

SEQ ID NO: 4658410 - DNA, 25 bp, Homo sapien
acccaccgaccttggcttctgatcc

SEQ ID NO: 4658411 - DNA, 25 bp, Homo sapien
tcccagagacctgtcactgaagcct

SEQ ID NO: 4658412 - DNA, 25 bp, Homo sapien
gaacacacagagacctcatatggga

SEQ ID NO: 4658413 - DNA, 25 bp, Homo sapien
tgaagcctccccgattaacacctgg

SEQ ID NO: 4658414 - DNA, 25 bp, Homo sapien
gaactcggagacttagcactgagag

SEQ ID NO: 4658415 - DNA, 25 bp, Homo sapien
gggaactcggagacttagcactgag

SEQ ID NO: 4658416 - DNA, 25 bp, Homo sapien
cttagcactgagagctccccaagga

SEQ ID NO: 4658417 - DNA, 25 bp, Homo sapien
ttagcactgagagctccccaaggac

SEQ ID NO: 4658418 - DNA, 25 bp, Homo sapien
tgtggacccctgtgcgctcctgctt

SEQ ID NO: 4658419 - DNA, 25 bp, Homo sapien
tttccgcatgaggaaaacggatggg

SEQ ID NO: 4658420 - DNA, 25 bp, Homo sapien
cggatgggggaatacgggctggcag

SEQ ID NO: 4658421 - DNA, 25 bp, Homo sapien
gcttccctaatttccgcatgaggaa

SEQ ID NO: 4658422 - DNA, 25 bp, Homo sapien
tgtggactggagtcacagctttggt

SEQ ID NO: 4658423 - DNA, 25 bp, Homo sapien
gtgtggactggagtcacagctttgg

SEQ ID NO: 4658424 - DNA, 25 bp, Homo sapien
gtggactggagtcacagctttggtc

SEQ ID NO: 4658425 - DNA, 25 bp, Homo sapien
tgggcatcccctttgggactaggga

SEQ ID NO: 4658426 - DNA, 25 bp, Homo sapien
cgccttcaagcaactgagctctggg

SEQ ID NO: 4658427 - DNA, 25 bp, Homo sapien
gctctgggcatcccctttgggacta

SEQ ID NO: 4658428 - DNA, 25 bp, Homo sapien
catcccctttgggactagggactgg

SEQ ID NO: 4658429 - DNA, 25 bp, Homo sapien
ttccctagagggatgacgagatttc

SEQ ID NO: 4658430 - DNA, 25 bp, Homo sapien
tctgaagtgcaatgtcgtctcctgt

SEQ ID NO: 4658431 - DNA, 25 bp, Homo sapien
tgggtcactgtggacgtagaggagc

SEQ ID NO: 4658432 - DNA, 25 bp, Homo sapien
cactgtggacgtagaggagcaatag

SEQ ID NO: 4658433 - DNA, 25 bp, Homo sapien
cgtagaggagcaataggaagaggag

SEQ ID NO: 4658434 - DNA, 25 bp, Homo sapien
gggtgggtcactgtggacgtagagg

SEQ ID NO: 4658435 - DNA, 25 bp, Homo sapien
gggctgggaccagttctcagtctcc

SEQ ID NO: 4658436 - DNA, 25 bp, Homo sapien
gctgggaccagttctcagtctcctc

SEQ ID NO: 4658437 - DNA, 25 bp, Homo sapien
aggggctgggaccagttctcagtct

SEQ ID NO: 4658438 - DNA, 25 bp, Homo sapien
gatgaggggctgggaccagttctca

SEQ ID NO: 4658439 - DNA, 25 bp, Homo sapien
ctcctggacctcccgcttctctccc

SEQ ID NO: 4658440 - DNA, 25 bp, Homo sapien
tcagagctgagatcttcctgctcct

SEQ ID NO: 4658441 - DNA, 25 bp, Homo sapien
ggacctcccgcttctctccctttga

SEQ ID NO: 4658442 - DNA, 25 bp, Homo sapien
ctttcagagctgagatcttcctgct

SEQ ID NO: 4658443 - DNA, 25 bp, Homo sapien
gtgtccgaggccacatggccccaat

SEQ ID NO: 4658444 - DNA, 25 bp, Homo sapien
gccccaatggtgacaggaaggtttc

SEQ ID NO: 4658445 - DNA, 25 bp, Homo sapien
tgaagccctcgcatctgtgtccgag

SEQ ID NO: 4658446 - DNA, 25 bp, Homo sapien
ggaaggtttccactgtgcagcactt

SEQ ID NO: 4658447 - DNA, 25 bp, Homo sapien
cagaaggtagttcaggtcccgagtc

SEQ ID NO: 4658448 - DNA, 25 bp, Homo sapien
gaaggtagttcaggtcccgagtctc

SEQ ID NO: 4658449 - DNA, 25 bp, Homo sapien
ttccagaaggtagttcaggtcccga

SEQ ID NO: 4658450 - DNA, 25 bp, Homo sapien
aggtagttcaggtcccgagtctcct

SEQ ID NO: 4658451 - DNA, 25 bp, Homo sapien
cacctaagggcaggtgggagctgcc

SEQ ID NO: 4658452 - DNA, 25 bp, Homo sapien
tagcaggcactggtttacacacgtc

SEQ ID NO: 4658453 - DNA, 25 bp, Homo sapien
ttcgccagcgagcttcctcaggtgg

SEQ ID NO: 4658454 - DNA, 25 bp, Homo sapien
ctgagaaggtcatcgggcctggtga

SEQ ID NO: 4658455 - DNA, 25 bp, Homo sapien
gggaccatgcggctgtggtgaagga

SEQ ID NO: 4658456 - DNA, 25 bp, Homo sapien
cagccaggctggagtcgggtggagg

SEQ ID NO: 4658457 - DNA, 25 bp, Homo sapien
ccacatgtggctgggttgcagggca

SEQ ID NO: 4658458 - DNA, 25 bp, Homo sapien
gaggaggcagcacctggttgtgtag

SEQ ID NO: 4658459 - DNA, 25 bp, Homo sapien
gaagcctctgaggtgtggtcgggaa

SEQ ID NO: 4658460 - DNA, 25 bp, Homo sapien
tggctgggatttgccatgtgagtag

SEQ ID NO: 4658461 - DNA, 25 bp, Homo sapien
cgggaagatgccgtggctgggattt

SEQ ID NO: 4658462 - DNA, 25 bp, Homo sapien
agatgggatcgctggagcaccccag

SEQ ID NO: 4658463 - DNA, 25 bp, Homo sapien
cagtgctctcttggcgatgagggtc

SEQ ID NO: 4658464 - DNA, 25 bp, Homo sapien
gctgtggctgggttgacacgttcca

SEQ ID NO: 4658465 - DNA, 25 bp, Homo sapien
tttatccagtggtacagagtgtgca

SEQ ID NO: 4658466 - DNA, 25 bp, Homo sapien
tttctgctgtaagtggttccccacg

SEQ ID NO: 4658467 - DNA, 25 bp, Homo sapien
tggagtgaaatgttggggctgggcc

SEQ ID NO: 4658468 - DNA, 25 bp, Homo sapien
ccccaggcttgggacagggggtgag

SEQ ID NO: 4658469 - DNA, 25 bp, Homo sapien
cccaggcttgggacagggggtgaga

SEQ ID NO: 4658470 - DNA, 25 bp, Homo sapien
cattcaagatactcctttccagtgg

SEQ ID NO: 4658471 - DNA, 25 bp, Homo sapien
gatgtagggtaagatgccccacagc

SEQ ID NO: 4658472 - DNA, 25 bp, Homo sapien
ggtcgcttcttcaagggccattcaa

SEQ ID NO: 4658473 - DNA, 25 bp, Homo sapien
gagagagggcaaaaccctcttccac

SEQ ID NO: 4658474 - DNA, 25 bp, Homo sapien
agattcaacccgagatacccaggag

SEQ ID NO: 4658475 - DNA, 25 bp, Homo sapien
cagacttgggaacagcacatttggc

SEQ ID NO: 4658476 - DNA, 25 bp, Homo sapien
tgcctgcaatctgctgggagggcca

SEQ ID NO: 4658477 - DNA, 25 bp, Homo sapien
catttggccatgagccaggagcgac

SEQ ID NO: 4658478 - DNA, 25 bp, Homo sapien
tgcccttgtgtccagtcggaaaggc

SEQ ID NO: 4658479 - DNA, 25 bp, Homo sapien
tcggaaaggcctctgatcgcccatg

SEQ ID NO: 4658480 - DNA, 25 bp, Homo sapien
caacacagactgaagacgctgaggg

SEQ ID NO: 4658481 - DNA, 25 bp, Homo sapien
tcgcccatgggtatcagctgactgg

SEQ ID NO: 4658482 - DNA, 25 bp, Homo sapien
cactgaccacctgcgctttcaggtg

SEQ ID NO: 4658483 - DNA, 25 bp, Homo sapien
cagtgagcatgtccatgtggcggcc

SEQ ID NO: 4658484 - DNA, 25 bp, Homo sapien
tctgcggcagtgagcatgtccatgt

SEQ ID NO: 4658485 - DNA, 25 bp, Homo sapien
ggcagcctgtctgcggcagtgagca

SEQ ID NO: 4658486 - DNA, 25 bp, Homo sapien
cagctctggaaagcatctgccccag

SEQ ID NO: 4658487 - DNA, 25 bp, Homo sapien
cataaactgccttggtgggccagac

SEQ ID NO: 4658488 - DNA, 25 bp, Homo sapien
ttgtcagccatgcagtccataaact

SEQ ID NO: 4658489 - DNA, 25 bp, Homo sapien
cacaactctgctgatggtccaggct

SEQ ID NO: 4658490 - DNA, 25 bp, Homo sapien
gaaggcacattctcctgggcgcgga

SEQ ID NO: 4658491 - DNA, 25 bp, Homo sapien
caggaaggcacattctcctgggcgc

SEQ ID NO: 4658492 - DNA, 25 bp, Homo sapien
aggcacattctcctgggcgcggaag

SEQ ID NO: 4658493 - DNA, 25 bp, Homo sapien
acattctcctgggcgcggaagtcac

SEQ ID NO: 4658494 - DNA, 25 bp, Homo sapien
tctctctgctacgttcttggtggca

SEQ ID NO: 4658495 - DNA, 25 bp, Homo sapien
catctctctgctacgttcttggtgg

SEQ ID NO: 4658496 - DNA, 25 bp, Homo sapien
tcatctctctgctacgttcttggtg

SEQ ID NO: 4658497 - DNA, 25 bp, Homo sapien
tctctgctacgttcttggtggcagt

SEQ ID NO: 4658498 - DNA, 25 bp, Homo sapien
gcttgccattcttggcctgtggtgg

SEQ ID NO: 4658499 - DNA, 25 bp, Homo sapien
gatgggggccgcccgaggtgcttgc

SEQ ID NO: 4658500 - DNA, 25 bp, Homo sapien
tgtggatgggggccgcccgaggtgc

SEQ ID NO: 4658501 - DNA, 25 bp, Homo sapien
cgaggtgcttgccattcttggcctg

SEQ ID NO: 4658502 - DNA, 25 bp, Homo sapien
ttatttgagtagaaccccctgtctc

SEQ ID NO: 4658503 - DNA, 25 bp, Homo sapien
aggagacatgcaagaagactggtct

SEQ ID NO: 4658504 - DNA, 25 bp, Homo sapien
tatttgagtagaaccccctgtctcc

SEQ ID NO: 4658505 - DNA, 25 bp, Homo sapien
agacatgcaagaagactggtctagt

SEQ ID NO: 4658506 - DNA, 25 bp, Homo sapien
ctgcccaggtcaccaccccagacag

SEQ ID NO: 4658507 - DNA, 25 bp, Homo sapien
gatcctgggtcccatagatgttggg

SEQ ID NO: 4658508 - DNA, 25 bp, Homo sapien
ggtcaccaccccagacaggacttgg

SEQ ID NO: 4658509 - DNA, 25 bp, Homo sapien
gatgttgggcccacactggagctgc

SEQ ID NO: 4658510 - DNA, 25 bp, Homo sapien
gtgaggtggacatgctgccagtgga

SEQ ID NO: 4658511 - DNA, 25 bp, Homo sapien
ccaaacccaagaactggcaggcctg

SEQ ID NO: 4658512 - DNA, 25 bp, Homo sapien
ggtggacatgctgccagtggaggtg

SEQ ID NO: 4658513 - DNA, 25 bp, Homo sapien
aacccaagaactggcaggcctggca

SEQ ID NO: 4658514 - DNA, 25 bp, Homo sapien
ttgcgactgtagtcaccgcccgagg

SEQ ID NO: 4658515 - DNA, 25 bp, Homo sapien
tggttcttgcgactgtagtcaccgc

SEQ ID NO: 4658516 - DNA, 25 bp, Homo sapien
accgcccgaggcaaatgaccactgt

SEQ ID NO: 4658517 - DNA, 25 bp, Homo sapien
tagtcaccgcccgaggcaaatgacc

SEQ ID NO: 4658518 - DNA, 25 bp, Homo sapien
ggaagatatccaacacccatggtgt

SEQ ID NO: 4658519 - DNA, 25 bp, Homo sapien
gcaaacaccaaggtgaggaagatat

SEQ ID NO: 4658520 - DNA, 25 bp, Homo sapien
gaggaagatatccaacacccatggt

SEQ ID NO: 4658521 - DNA, 25 bp, Homo sapien
aagatatccaacacccatggtgtgg

SEQ ID NO: 4658522 - DNA, 25 bp, Homo sapien
tatctattggagtcggtggcttgag

SEQ ID NO: 4658523 - DNA, 25 bp, Homo sapien
tattttcagaatctcgttcgtcctc

SEQ ID NO: 4658524 - DNA, 25 bp, Homo sapien
tggcttatgtaccagggatttttat

SEQ ID NO: 4658525 - DNA, 25 bp, Homo sapien
gaatctcgttcgtcctcaactccag

SEQ ID NO: 4658526 - DNA, 25 bp, Homo sapien
gaataggcgcattgctttctagcaa

SEQ ID NO: 4658527 - DNA, 25 bp, Homo sapien
taggcgcattgctttctagcaactg

SEQ ID NO: 4658528 - DNA, 25 bp, Homo sapien
tccatgtgaataggcgcattgcttt

SEQ ID NO: 4658529 - DNA, 25 bp, Homo sapien
gtgaataggcgcattgctttctagc

SEQ ID NO: 4658530 - DNA, 25 bp, Homo sapien
ggaagatatccaacacccatggtgt

SEQ ID NO: 4658531 - DNA, 25 bp, Homo sapien
gcaaacaccaaggtgaggaagatat

SEQ ID NO: 4658532 - DNA, 25 bp, Homo sapien
gaggaagatatccaacacccatggt

SEQ ID NO: 4658533 - DNA, 25 bp, Homo sapien
aagatatccaacacccatggtgtgg

SEQ ID NO: 4658534 - DNA, 25 bp, Homo sapien
atcgcagaagtctccactggatttg

SEQ ID NO: 4658535 - DNA, 25 bp, Homo sapien
catcgcagaagtctccactggattt

SEQ ID NO: 4658536 - DNA, 25 bp, Homo sapien
tcccatcgcagaagtctccactgga

SEQ ID NO: 4658537 - DNA, 25 bp, Homo sapien
ccatcgcagaagtctccactggatt

SEQ ID NO: 4658538 - DNA, 25 bp, Homo sapien
caagaaatggcgaggagctaggacc

SEQ ID NO: 4658539 - DNA, 25 bp, Homo sapien
acaagatgacgctgggagacaagaa

SEQ ID NO: 4658540 - DNA, 25 bp, Homo sapien
ggcactgagccggtatcgcttcatt

SEQ ID NO: 4658541 - DNA, 25 bp, Homo sapien
gaaccgcatggctctgtctgtcttg

SEQ ID NO: 4658542 - DNA, 25 bp, Homo sapien
aggcctctcgggcactctctacaag

SEQ ID NO: 4658543 - DNA, 25 bp, Homo sapien
ttgtgaaagcaggtcccaagtctcc

SEQ ID NO: 4658544 - DNA, 25 bp, Homo sapien
aaagcaggtcccaagtctcctccag

SEQ ID NO: 4658545 - DNA, 25 bp, Homo sapien
ctgcagttgtgaaagcaggtcccaa

SEQ ID NO: 4658546 - DNA, 25 bp, Homo sapien
caggagccagatgggttcggagggc

SEQ ID NO: 4658547 - DNA, 25 bp, Homo sapien
ccctctccaccacgccacaccctga

SEQ ID NO: 4658548 - DNA, 25 bp, Homo sapien
accctctccaccacgccacaccctg

SEQ ID NO: 4658549 - DNA, 25 bp, Homo sapien
gccagatgggttcggagggcagagt

SEQ ID NO: 4658550 - DNA, 25 bp, Homo sapien
gtctggaccagagagctgaccaaag

SEQ ID NO: 4658551 - DNA, 25 bp, Homo sapien
ctggcgggtctggaccagagagctg

SEQ ID NO: 4658552 - DNA, 25 bp, Homo sapien
gctgaccaaagtcacctttttcaag

SEQ ID NO: 4658553 - DNA, 25 bp, Homo sapien
ctttttcaaggtgtggccccaggag

SEQ ID NO: 4658554 - DNA, 25 bp, Homo sapien
agatggtgttaacagagtggagtcc

SEQ ID NO: 4658555 - DNA, 25 bp, Homo sapien
gtgttaacagagtggagtcccgcag

SEQ ID NO: 4658556 - DNA, 25 bp, Homo sapien
gatggtgttaacagagtggagtccc

SEQ ID NO: 4658557 - DNA, 25 bp, Homo sapien
tggtgttaacagagtggagtcccgc

SEQ ID NO: 4658558 - DNA, 25 bp, Homo sapien
gaagatgcaccaggttttggtagtc

SEQ ID NO: 4658559 - DNA, 25 bp, Homo sapien
tggactgacgagttgaagatgcacc

SEQ ID NO: 4658560 - DNA, 25 bp, Homo sapien
tcttgctggactgacgagttgaaga

SEQ ID NO: 4658561 - DNA, 25 bp, Homo sapien
ggacattgtggtgtccctttggcgg

SEQ ID NO: 4658562 - DNA, 25 bp, Homo sapien
tgcatcagatccagagactcttgga

SEQ ID NO: 4658563 - DNA, 25 bp, Homo sapien
ctgcatcagatccagagactcttgg

SEQ ID NO: 4658564 - DNA, 25 bp, Homo sapien
cacccagaatttgccccagatgtgg

SEQ ID NO: 4658565 - DNA, 25 bp, Homo sapien
gacagcaagccaggatcgacgcaca

SEQ ID NO: 4658566 - DNA, 25 bp, Homo sapien
gtgtttggcccaaaacctcacaata

SEQ ID NO: 4658567 - DNA, 25 bp, Homo sapien
cctgaggggtagaccccacctgtgt

SEQ ID NO: 4658568 - DNA, 25 bp, Homo sapien
tttgctctcatacaggttcccaagg

SEQ ID NO: 4658569 - DNA, 25 bp, Homo sapien
ttgctctcatacaggttcccaaggg

SEQ ID NO: 4658570 - DNA, 25 bp, Homo sapien
gctctcatacaggttcccaagggga

SEQ ID NO: 4658571 - DNA, 25 bp, Homo sapien
ctcatacaggttcccaaggggactg

SEQ ID NO: 4658572 - DNA, 25 bp, Homo sapien
attccaggctcaaattcactaacag

SEQ ID NO: 4658573 - DNA, 25 bp, Homo sapien
ggtctctgacttcgtggccattcca

SEQ ID NO: 4658574 - DNA, 25 bp, Homo sapien
gcctggagccttgaaaccacgcaca

SEQ ID NO: 4658575 - DNA, 25 bp, Homo sapien
ttttgctggcgcctggagccttgaa

SEQ ID NO: 4658576 - DNA, 25 bp, Homo sapien
tgtccaactgctgtcatgagcctct

SEQ ID NO: 4658577 - DNA, 25 bp, Homo sapien
tgtgccccatgttactccttctggc

SEQ ID NO: 4658578 - DNA, 25 bp, Homo sapien
ctgttgggacgactctggttcttga

SEQ ID NO: 4658579 - DNA, 25 bp, Homo sapien
tgggacgactctggttcttgagagt

SEQ ID NO: 4658580 - DNA, 25 bp, Homo sapien
actgaccaaattagatacctccctg

SEQ ID NO: 4658581 - DNA, 25 bp, Homo sapien
tacatagagtgaattttttcttggt

SEQ ID NO: 4658582 - DNA, 25 bp, Homo sapien
tgaccaaattagatacctccctgaa

SEQ ID NO: 4658583 - DNA, 25 bp, Homo sapien
gaccaaattagatacctccctgaaa

SEQ ID NO: 4658584 - DNA, 25 bp, Homo sapien
gagatcttgctcagagattttgaca

SEQ ID NO: 4658585 - DNA, 25 bp, Homo sapien
tgggagatcttgctcagagattttg

SEQ ID NO: 4658586 - DNA, 25 bp, Homo sapien
cctgggagatcttgctcagagattt

SEQ ID NO: 4658587 - DNA, 25 bp, Homo sapien
gatcttgctcagagattttgacagg

SEQ ID NO: 4658588 - DNA, 25 bp, Homo sapien
gacacccacaggaccaccagaacaa

SEQ ID NO: 4658589 - DNA, 25 bp, Homo sapien
tctggacacccacaggaccaccaga

SEQ ID NO: 4658590 - DNA, 25 bp, Homo sapien
cacaggaccaccagaacaacaccat

SEQ ID NO: 4658591 - DNA, 25 bp, Homo sapien
ctcctctggacacccacaggaccac

SEQ ID NO: 4658592 - DNA, 25 bp, Homo sapien
gagggtaaaccctgagcactcacca

SEQ ID NO: 4658593 - DNA, 25 bp, Homo sapien
tagggacagtcgctatcaggtggat

SEQ ID NO: 4658594 - DNA, 25 bp, Homo sapien
taaaccctgagcactcaccaggtgc

SEQ ID NO: 4658595 - DNA, 25 bp, Homo sapien
cagctactgagggtaaaccctgagc

SEQ ID NO: 4658596 - DNA, 25 bp, Homo sapien
tgtcagccagcacgttgaaaggatt

SEQ ID NO: 4658597 - DNA, 25 bp, Homo sapien
tcagccagcacgttgaaaggattct

SEQ ID NO: 4658598 - DNA, 25 bp, Homo sapien
gaactgtcagccagcacgttgaaag

SEQ ID NO: 4658599 - DNA, 25 bp, Homo sapien
cttttgccatcctcatggaactgtc

SEQ ID NO: 4658600 - DNA, 25 bp, Homo sapien
tcagcatccctcgatatacctttgg

SEQ ID NO: 4658601 - DNA, 25 bp, Homo sapien
tacacaggtaccactttaatttaga

SEQ ID NO: 4658602 - DNA, 25 bp, Homo sapien
tgatgggttcaattgtactccaaac

SEQ ID NO: 4658603 - DNA, 25 bp, Homo sapien
gatatacctttggaagaaacttaca

SEQ ID NO: 4658604 - DNA, 25 bp, Homo sapien
gcgccatctccatcgctgccaacaa

SEQ ID NO: 4658605 - DNA, 25 bp, Homo sapien
gattcctagtcctctacgccgggat

SEQ ID NO: 4658606 - DNA, 25 bp, Homo sapien
tggccagtgactcccgattcctagt

SEQ ID NO: 4658607 - DNA, 25 bp, Homo sapien
aacaaccgcagcgacgcaagccacg

SEQ ID NO: 4658608 - DNA, 25 bp, Homo sapien
ttcagacagggcctgatctccgcag

SEQ ID NO: 4658609 - DNA, 25 bp, Homo sapien
tccgcagcccagtattacaagagtt

SEQ ID NO: 4658610 - DNA, 25 bp, Homo sapien
gaggcccgcttcagcgagttcaaga

SEQ ID NO: 4658611 - DNA, 25 bp, Homo sapien
tgggagaggaaacttcagctcatcc

SEQ ID NO: 4658612 - DNA, 25 bp, Homo sapien
cacctgtgttcacactttggtggag

SEQ ID NO: 4658613 - DNA, 25 bp, Homo sapien
gccacctgtgttcacactttggtgg

SEQ ID NO: 4658614 - DNA, 25 bp, Homo sapien
cctgtgttcacactttggtggagga

SEQ ID NO: 4658615 - DNA, 25 bp, Homo sapien
gtgttcacactttggtggaggatgt

SEQ ID NO: 4658616 - DNA, 25 bp, Homo sapien
gaaggcgctcttattcgttacgaag

SEQ ID NO: 4658617 - DNA, 25 bp, Homo sapien
tctccaaggttgttcacgaaggccc

SEQ ID NO: 4658618 - DNA, 25 bp, Homo sapien
gaaggcccttcgcaggtacagggaa

SEQ ID NO: 4658619 - DNA, 25 bp, Homo sapien
gggaatctcctgctttgaaggcgct

SEQ ID NO: 4658620 - DNA, 25 bp, Homo sapien
gaactcgtcccctatggtggcacag

SEQ ID NO: 4658621 - DNA, 25 bp, Homo sapien
acagagagatacagaaggagaccca

SEQ ID NO: 4658622 - DNA, 25 bp, Homo sapien
tcttgcctccaggagaatctgtaag

SEQ ID NO: 4658623 - DNA, 25 bp, Homo sapien
attttagaggcagtccatttgtgtc

SEQ ID NO: 4658624 - DNA, 25 bp, Homo sapien
tcttgttcccactactgaatggacc

SEQ ID NO: 4658625 - DNA, 25 bp, Homo sapien
tgtgctgcctaagacaagacactga

SEQ ID NO: 4658626 - DNA, 25 bp, Homo sapien
ttccctgtgggaatcggtcagcctt

SEQ ID NO: 4658627 - DNA, 25 bp, Homo sapien
tatccagttgaggtggtagatacac

SEQ ID NO: 4658628 - DNA, 25 bp, Homo sapien
taaggtgtccttatgttggaaactc

SEQ ID NO: 4658629 - DNA, 25 bp, Homo sapien
aaaaacctcaggtggctctgcctta

SEQ ID NO: 4658630 - DNA, 25 bp, Homo sapien
tcagagccattaaacactagttcag

SEQ ID NO: 4658631 - DNA, 25 bp, Homo sapien
gaaatggctaaggtggcattgtctc

SEQ ID NO: 4658632 - DNA, 25 bp, Homo sapien
tgcatatgcagaatgacgatgcctg

SEQ ID NO: 4658633 - DNA, 25 bp, Homo sapien
tactgacgtacccatcaggacagtg

SEQ ID NO: 4658634 - DNA, 25 bp, Homo sapien
gccagtcaaggcctgcatatgcaga

SEQ ID NO: 4658635 - DNA, 25 bp, Homo sapien
ttctgtgtgctactgacgtacccat

SEQ ID NO: 4658636 - DNA, 25 bp, Homo sapien
gagaacatccagtcgagcagaggag

SEQ ID NO: 4658637 - DNA, 25 bp, Homo sapien
caagagtatgagaacatccagtcga

SEQ ID NO: 4658638 - DNA, 25 bp, Homo sapien
catggcctgtgctcggtgagcctta

SEQ ID NO: 4658639 - DNA, 25 bp, Homo sapien
gagattcatggcctgtgctcggtga

SEQ ID NO: 4658640 - DNA, 25 bp, Homo sapien
ggcctcttgaggagtcgctgttgaa

SEQ ID NO: 4658641 - DNA, 25 bp, Homo sapien
acttccacgtggaccggcctcttga

SEQ ID NO: 4658642 - DNA, 25 bp, Homo sapien
gattcctcagcgtctagggggacct

SEQ ID NO: 4658643 - DNA, 25 bp, Homo sapien
acccagagctgattcggcccttcat

SEQ ID NO: 4658644 - DNA, 25 bp, Homo sapien
aggtagctccaggtccaaaaggtca

SEQ ID NO: 4658645 - DNA, 25 bp, Homo sapien
gggcaggtttaagcatgagatgttt

SEQ ID NO: 4658646 - DNA, 25 bp, Homo sapien
gcacatgcagggattgtcctgggcc

SEQ ID NO: 4658647 - DNA, 25 bp, Homo sapien
gtaaacaatcagtcctacctccgcg

SEQ ID NO: 4658648 - DNA, 25 bp, Homo sapien
tgccattagttcaagcaagatctgg

SEQ ID NO: 4658649 - DNA, 25 bp, Homo sapien
tacattaatgagagttctagtgcca

SEQ ID NO: 4658650 - DNA, 25 bp, Homo sapien
ttgttaaagagtctgggatctgccc

SEQ ID NO: 4658651 - DNA, 25 bp, Homo sapien
gcttggtgccttccctacattaatg

SEQ ID NO: 4658652 - DNA, 25 bp, Homo sapien
caaatgctagctaggagatagagca

SEQ ID NO: 4658653 - DNA, 25 bp, Homo sapien
ccccattcattactggtgagaatgc

SEQ ID NO: 4658654 - DNA, 25 bp, Homo sapien
tcatatttctttagggaattgcaaa

SEQ ID NO: 4658655 - DNA, 25 bp, Homo sapien
catctgagatatgaggacttgaaaa

SEQ ID NO: 4658656 - DNA, 25 bp, Homo sapien
agtctctggacggctacggcatagg

SEQ ID NO: 4658657 - DNA, 25 bp, Homo sapien
atagcctcgggacttgagaaactgc

SEQ ID NO: 4658658 - DNA, 25 bp, Homo sapien
tctctggacggctacggcatagggt

SEQ ID NO: 4658659 - DNA, 25 bp, Homo sapien
ttcacatagcctcgggacttgagaa

SEQ ID NO: 4658660 - DNA, 25 bp, Homo sapien
tgcgagtctcgtaggtcgctcaatc

SEQ ID NO: 4658661 - DNA, 25 bp, Homo sapien
gcgagtctcgtaggtcgctcaatct

SEQ ID NO: 4658662 - DNA, 25 bp, Homo sapien
gagtctcgtaggtcgctcaatctcc

SEQ ID NO: 4658663 - DNA, 25 bp, Homo sapien
cttgcgagtctcgtaggtcgctcaa

SEQ ID NO: 4658664 - DNA, 25 bp, Homo sapien
gcaacacgcagaatttatctctcct

SEQ ID NO: 4658665 - DNA, 25 bp, Homo sapien
tgcaacacgcagaatttatctctcc

SEQ ID NO: 4658666 - DNA, 25 bp, Homo sapien
aacacgcagaatttatctctcctca

SEQ ID NO: 4658667 - DNA, 25 bp, Homo sapien
acacgcagaatttatctctcctcat

SEQ ID NO: 4658668 - DNA, 25 bp, Homo sapien
gaccagacataagcacaaatctgaa

SEQ ID NO: 4658669 - DNA, 25 bp, Homo sapien
gctggagaccagacataagcacaaa

SEQ ID NO: 4658670 - DNA, 25 bp, Homo sapien
tggagaccagacataagcacaaatc

SEQ ID NO: 4658671 - DNA, 25 bp, Homo sapien
cagacataagcacaaatctgaaggt

SEQ ID NO: 4658672 - DNA, 25 bp, Homo sapien
agtcaggacccatcatccactttcc

SEQ ID NO: 4658673 - DNA, 25 bp, Homo sapien
gtcaggacccatcatccactttcct

SEQ ID NO: 4658674 - DNA, 25 bp, Homo sapien
tgccctgccgcatgctccacaaagg

SEQ ID NO: 4658675 - DNA, 25 bp, Homo sapien
ctgccgcatgctccacaaaggcaca

SEQ ID NO: 4658676 - DNA, 25 bp, Homo sapien
ccctgccgcatgctccacaaaggca

SEQ ID NO: 4658677 - DNA, 25 bp, Homo sapien
cctgccgcatgctccacaaaggcac

SEQ ID NO: 4658678 - DNA, 25 bp, Homo sapien
caagccccacaagccgctaccagtg

SEQ ID NO: 4658679 - DNA, 25 bp, Homo sapien
aggggagctcagggctaacaagccc

SEQ ID NO: 4658680 - DNA, 25 bp, Homo sapien
cccacaagccgctaccagtgctcac

SEQ ID NO: 4658681 - DNA, 25 bp, Homo sapien
aacaagccccacaagccgctaccag

SEQ ID NO: 4658682 - DNA, 25 bp, Homo sapien
ggcaggatgtgggctggtaaggagg

SEQ ID NO: 4658683 - DNA, 25 bp, Homo sapien
atgagggcaggatgtgggctggtaa

SEQ ID NO: 4658684 - DNA, 25 bp, Homo sapien
caggatgtgggctggtaaggaggac

SEQ ID NO: 4658685 - DNA, 25 bp, Homo sapien
ttatgagggcaggatgtgggctggt

SEQ ID NO: 4658686 - DNA, 25 bp, Homo sapien
tgtcataagcagtggtactcagtgt

SEQ ID NO: 4658687 - DNA, 25 bp, Homo sapien
gtcataaaagatttgtcataaacaa

SEQ ID NO: 4658688 - DNA, 25 bp, Homo sapien
tctgagtgtcataagcagtggtact

SEQ ID NO: 4658689 - DNA, 25 bp, Homo sapien
tgaattctgagtgtcataagcagtg

SEQ ID NO: 4658690 - DNA, 25 bp, Homo sapien
ctgactgccaaggaaggccgggctg

SEQ ID NO: 4658691 - DNA, 25 bp, Homo sapien
gcgaccgcggacagaatgtacaggt

SEQ ID NO: 4658692 - DNA, 25 bp, Homo sapien
ttcggggttcggcaagagcagttct

SEQ ID NO: 4658693 - DNA, 25 bp, Homo sapien
tctgcctgcgtgacgtggaggaacc

SEQ ID NO: 4658694 - DNA, 25 bp, Homo sapien
ccaacacctctcgtatctttatctt

SEQ ID NO: 4658695 - DNA, 25 bp, Homo sapien
cctctcgtatctttatctttgtccc

SEQ ID NO: 4658696 - DNA, 25 bp, Homo sapien
tctcgtatctttatctttgtccctg

SEQ ID NO: 4658697 - DNA, 25 bp, Homo sapien
aacacctctcgtatctttatctttg

SEQ ID NO: 4658698 - DNA, 25 bp, Homo sapien
tctcttctgagaatgttcgtgaaca

SEQ ID NO: 4658699 - DNA, 25 bp, Homo sapien
actttaacagaggagctgatagaca

SEQ ID NO: 4658700 - DNA, 25 bp, Homo sapien
ctttaacagaggagctgatagacat

SEQ ID NO: 4658701 - DNA, 25 bp, Homo sapien
tcgtgaacatcacaacaggacactt

SEQ ID NO: 4658702 - DNA, 25 bp, Homo sapien
taagcttgatgcttctcaaggagcc

SEQ ID NO: 4658703 - DNA, 25 bp, Homo sapien
ttttactaaagtataagcttgatgc

SEQ ID NO: 4658704 - DNA, 25 bp, Homo sapien
ttactaaagtataagcttgatgctt

SEQ ID NO: 4658705 - DNA, 25 bp, Homo sapien
tgctttttactaaagtataagcttg

SEQ ID NO: 4658706 - DNA, 25 bp, Homo sapien
cttttccagagactattatgggggg

SEQ ID NO: 4658707 - DNA, 25 bp, Homo sapien
tttccagagactattatggggggat

SEQ ID NO: 4658708 - DNA, 25 bp, Homo sapien
atttgatataccaaatgtatctttc

SEQ ID NO: 4658709 - DNA, 25 bp, Homo sapien
tccagagactattatggggggattt

SEQ ID NO: 4658710 - DNA, 25 bp, Homo sapien
gactgtagcagtatccacctgctga

SEQ ID NO: 4658711 - DNA, 25 bp, Homo sapien
tgctgaagttccggagcaccaacat

SEQ ID NO: 4658712 - DNA, 25 bp, Homo sapien
cttcgcatgagactgtagcagtatc

SEQ ID NO: 4658713 - DNA, 25 bp, Homo sapien
gcagtatccacctgctgaagttccg

SEQ ID NO: 4658714 - DNA, 25 bp, Homo sapien
cttcccagataagccatggtcaggg

SEQ ID NO: 4658715 - DNA, 25 bp, Homo sapien
ttcctgggactccatggataggtga

SEQ ID NO: 4658716 - DNA, 25 bp, Homo sapien
tcagcttcccagataagccatggtc

SEQ ID NO: 4658717 - DNA, 25 bp, Homo sapien
tcctgggactccatggataggtgag

SEQ ID NO: 4658718 - DNA, 25 bp, Homo sapien
gatccaggttccatccgttctccag

SEQ ID NO: 4658719 - DNA, 25 bp, Homo sapien
caaccacagcaaggcgagctgccac

SEQ ID NO: 4658720 - DNA, 25 bp, Homo sapien
ccagccgccctcctactggtctgtg

SEQ ID NO: 4658721 - DNA, 25 bp, Homo sapien
agcaaggcgagctgccaccaaccac

SEQ ID NO: 4658722 - DNA, 25 bp, Homo sapien
cttgtcacactggtgactgggtggc

SEQ ID NO: 4658723 - DNA, 25 bp, Homo sapien
ctgggtggcaaggatcagtttcatt

SEQ ID NO: 4658724 - DNA, 25 bp, Homo sapien
gcaaggatcagtttcattgaaggca

SEQ ID NO: 4658725 - DNA, 25 bp, Homo sapien
actggtgactgggtggcaaggatca

SEQ ID NO: 4658726 - DNA, 25 bp, Homo sapien
tgtaagtttcttccaaaggtatatc

SEQ ID NO: 4658727 - DNA, 25 bp, Homo sapien
taagtttcttccaaaggtatatcga

SEQ ID NO: 4658728 - DNA, 25 bp, Homo sapien
aagtttcttccaaaggtatatcgag

SEQ ID NO: 4658729 - DNA, 25 bp, Homo sapien
ctgtgtaagtttcttccaaaggtat

SEQ ID NO: 4658730 - DNA, 25 bp, Homo sapien
aagcaagcagatgggagcaagtgcc

SEQ ID NO: 4658731 - DNA, 25 bp, Homo sapien
caagcagatgggagcaagtgcccaa

SEQ ID NO: 4658732 - DNA, 25 bp, Homo sapien
gcagatgggagcaagtgcccaacac

SEQ ID NO: 4658733 - DNA, 25 bp, Homo sapien
gcaagcagatgggagcaagtgccca

SEQ ID NO: 4658734 - DNA, 25 bp, Homo sapien
ggttccaactctgcttctaagaaaa

SEQ ID NO: 4658735 - DNA, 25 bp, Homo sapien
tctaagaaaaattactcattctagg

SEQ ID NO: 4658736 - DNA, 25 bp, Homo sapien
cagtggttccaactctgcttctaag

SEQ ID NO: 4658737 - DNA, 25 bp, Homo sapien
ctaagaaaaattactcattctaggg

SEQ ID NO: 4658738 - DNA, 25 bp, Homo sapien
aggccaaaaccatccacctgatagc

SEQ ID NO: 4658739 - DNA, 25 bp, Homo sapien
aaccatccacctgatagcgactgtc

SEQ ID NO: 4658740 - DNA, 25 bp, Homo sapien
aaaaccatccacctgatagcgactg

SEQ ID NO: 4658741 - DNA, 25 bp, Homo sapien
gccaaaaccatccacctgatagcga

SEQ ID NO: 4658742 - DNA, 25 bp, Homo sapien
ggtaagcattcccagccaatagaag

SEQ ID NO: 4658743 - DNA, 25 bp, Homo sapien
aacaaacaccgatgggactcatagg

SEQ ID NO: 4658744 - DNA, 25 bp, Homo sapien
tgtccctgcccatgcaaatctcgta

SEQ ID NO: 4658745 - DNA, 25 bp, Homo sapien
gactcataggatacacgaacatcca

SEQ ID NO: 4658746 - DNA, 25 bp, Homo sapien
agaccccagattcataagcccacca

SEQ ID NO: 4658747 - DNA, 25 bp, Homo sapien
tctcaagagaacccactatcaggag

SEQ ID NO: 4658748 - DNA, 25 bp, Homo sapien
caccgagacgcccactactagatcc

SEQ ID NO: 4658749 - DNA, 25 bp, Homo sapien
gggccctcctaactataccagaaga

SEQ ID NO: 4658750 - DNA, 25 bp, Homo sapien
tcagtagcccttgaaaagtgtccgg

SEQ ID NO: 4658751 - DNA, 25 bp, Homo sapien
aacagatcatgcgtgtacggcagca

SEQ ID NO: 4658752 - DNA, 25 bp, Homo sapien
caagaaagctgtatccccagtcagt

SEQ ID NO: 4658753 - DNA, 25 bp, Homo sapien
tgcgcgccatgcctcgaaggtaaat

SEQ ID NO: 4658754 - DNA, 25 bp, Homo sapien
tgggatttccatcccaagctctcag

SEQ ID NO: 4658755 - DNA, 25 bp, Homo sapien
ggtagatcgtgtactgggatttcca

SEQ ID NO: 4658756 - DNA, 25 bp, Homo sapien
aagtctcaggagagaccagaacagc

SEQ ID NO: 4658757 - DNA, 25 bp, Homo sapien
aaatccagtggagacttctgcgatg

SEQ ID NO: 4658758 - DNA, 25 bp, Homo sapien
taatatttgaccaagcccgaagtaa

SEQ ID NO: 4658759 - DNA, 25 bp, Homo sapien
caaaaagcgatgttgaggcacttgc

SEQ ID NO: 4658760 - DNA, 25 bp, Homo sapien
caatggccaggagtagttaaaaatc

SEQ ID NO: 4658761 - DNA, 25 bp, Homo sapien
gacatgggcttctcggtcattccaa

SEQ ID NO: 4658762 - DNA, 25 bp, Homo sapien
agaaacccagcctccgttgtgcctg

SEQ ID NO: 4658763 - DNA, 25 bp, Homo sapien
gcacactttcgctttgcaatggaag

SEQ ID NO: 4658764 - DNA, 25 bp, Homo sapien
gacttgttctcacgggcatggctac

SEQ ID NO: 4658765 - DNA, 25 bp, Homo sapien
cttgtgatgctgtcaagaacctgga

SEQ ID NO: 4658766 - DNA, 25 bp, Homo sapien
tattcaccactgctatacaccccat

SEQ ID NO: 4658767 - DNA, 25 bp, Homo sapien
caaggccatgcctcctgtattcacc

SEQ ID NO: 4658768 - DNA, 25 bp, Homo sapien
catgcctcctgtacccaccaaggcc

SEQ ID NO: 4658769 - DNA, 25 bp, Homo sapien
ttcaatagccacactacacttccta

SEQ ID NO: 4658770 - DNA, 25 bp, Homo sapien
catgcttcttgcatcacagctatgc

SEQ ID NO: 4658771 - DNA, 25 bp, Homo sapien
tgcatcacagctatgcttcctgcac

SEQ ID NO: 4658772 - DNA, 25 bp, Homo sapien
caaggccatgcttcttgcatcacag

SEQ ID NO: 4658773 - DNA, 25 bp, Homo sapien
ggccatgcttcttgcatcacagcta

SEQ ID NO: 4658774 - DNA, 25 bp, Homo sapien
caaaaatgtagtgatcagaggcgtg

SEQ ID NO: 4658775 - DNA, 25 bp, Homo sapien
gcagtggttcagtatgggctaatag

SEQ ID NO: 4658776 - DNA, 25 bp, Homo sapien
caaggtgtctgtagataaaaacaca

SEQ ID NO: 4658777 - DNA, 25 bp, Homo sapien
tctttagagaacatactccagcact

SEQ ID NO: 4658778 - DNA, 25 bp, Homo sapien
tcagaggtcttaacatatgaggccg

SEQ ID NO: 4658779 - DNA, 25 bp, Homo sapien
tgatcagaggtcttaacatatgagg

SEQ ID NO: 4658780 - DNA, 25 bp, Homo sapien
cagaggtcttaacatatgaggccga

SEQ ID NO: 4658781 - DNA, 25 bp, Homo sapien
ctagtgatcagaggtcttaacatat

SEQ ID NO: 4658782 - DNA, 25 bp, Homo sapien
tggctgcccacatcagtgtggacat

SEQ ID NO: 4658783 - DNA, 25 bp, Homo sapien
gcctgcactgataaagttgcacatc

SEQ ID NO: 4658784 - DNA, 25 bp, Homo sapien
cgatgtgcgtggagtcgtgattcca

SEQ ID NO: 4658785 - DNA, 25 bp, Homo sapien
ctgattctggatacagggtatttgg

SEQ ID NO: 4658786 - DNA, 25 bp, Homo sapien
aggagcccacgatttcaaatcctct

SEQ ID NO: 4658787 - DNA, 25 bp, Homo sapien
taggacaagcccactcctcccctac

SEQ ID NO: 4658788 - DNA, 25 bp, Homo sapien
ctaggacaagcccactcctccccta

SEQ ID NO: 4658789 - DNA, 25 bp, Homo sapien
aaagtcctggtggtccgatgccaat

SEQ ID NO: 4658790 - DNA, 25 bp, Homo sapien
aagaaaccctacactggtgaacctg

SEQ ID NO: 4658791 - DNA, 25 bp, Homo sapien
ggtccgatgccaattgtcatggaag

SEQ ID NO: 4658792 - DNA, 25 bp, Homo sapien
cctgtgtgtagttgagggtctgtat

SEQ ID NO: 4658793 - DNA, 25 bp, Homo sapien
acaggattagcttctcttacatcta

SEQ ID NO: 4658794 - DNA, 25 bp, Homo sapien
gcttctcttacatctaggacttcta

SEQ ID NO: 4658795 - DNA, 25 bp, Homo sapien
ggattagcttctcttacatctagga

SEQ ID NO: 4658796 - DNA, 25 bp, Homo sapien
ttacatctaggacttctacggacat

SEQ ID NO: 4658797 - DNA, 25 bp, Homo sapien
ttgatgcaggcagcgtttggtgtcc

SEQ ID NO: 4658798 - DNA, 25 bp, Homo sapien
tgtggccttcgttgatgcaggcagc

SEQ ID NO: 4658799 - DNA, 25 bp, Homo sapien
cagaggtgaactgcgtgtggccttc

SEQ ID NO: 4658800 - DNA, 25 bp, Homo sapien
gaaatcgattgcagttacagaggtg

SEQ ID NO: 4658801 - DNA, 25 bp, Homo sapien
agaagacttccaagtcaactggaag

SEQ ID NO: 4658802 - DNA, 25 bp, Homo sapien
gaagacttccaagtcaactggaagt

SEQ ID NO: 4658803 - DNA, 25 bp, Homo sapien
agacttccaagtcaactggaagttg

SEQ ID NO: 4658804 - DNA, 25 bp, Homo sapien
gacttccaagtcaactggaagttga

SEQ ID NO: 4658805 - DNA, 25 bp, Homo sapien
caggcagtatccagtgctcaggcga

SEQ ID NO: 4658806 - DNA, 25 bp, Homo sapien
cagactggcagcttatcccctgtga

SEQ ID NO: 4658807 - DNA, 25 bp, Homo sapien
tttgcagctccgcaccaggcagtat

SEQ ID NO: 4658808 - DNA, 25 bp, Homo sapien
tattctcctcgagaaatcctctgcc

SEQ ID NO: 4658809 - DNA, 25 bp, Homo sapien
gaccacgttttcagatgcattcagt

SEQ ID NO: 4658810 - DNA, 25 bp, Homo sapien
gagcgctcttatcctcatatcgcag

SEQ ID NO: 4658811 - DNA, 25 bp, Homo sapien
catatcgcagaaggtccacagaggg

SEQ ID NO: 4658812 - DNA, 25 bp, Homo sapien
tccctgaggtgagtaagagcgctct

SEQ ID NO: 4658813 - DNA, 25 bp, Homo sapien
gacccttccataatcacatatcctt

SEQ ID NO: 4658814 - DNA, 25 bp, Homo sapien
aattacctcttaccaggtgcctcct

SEQ ID NO: 4658815 - DNA, 25 bp, Homo sapien
ttctgtcacttcagttcccttttga

SEQ ID NO: 4658816 - DNA, 25 bp, Homo sapien
aacttacaatcgtggatgaagggca

SEQ ID NO: 4658817 - DNA, 25 bp, Homo sapien
gctgtttgaggtaggccaccccatt

SEQ ID NO: 4658818 - DNA, 25 bp, Homo sapien
ccatgactcgccttgctgtttgagg

SEQ ID NO: 4658819 - DNA, 25 bp, Homo sapien
ttgtttctgggccatgactcgcctt

SEQ ID NO: 4658820 - DNA, 25 bp, Homo sapien
ccttgctgtttgaggtaggccaccc

SEQ ID NO: 4658821 - DNA, 25 bp, Homo sapien
gctctctgttccgtgctgtgaacag

SEQ ID NO: 4658822 - DNA, 25 bp, Homo sapien
tctctgttccgtgctgtgaacagtc

SEQ ID NO: 4658823 - DNA, 25 bp, Homo sapien
ctctgttccgtgctgtgaacagtct

SEQ ID NO: 4658824 - DNA, 25 bp, Homo sapien
ctgctctctgttccgtgctgtgaac

SEQ ID NO: 4658825 - DNA, 25 bp, Homo sapien
gatccttcacaataaggtagccatg

SEQ ID NO: 4658826 - DNA, 25 bp, Homo sapien
tgacttctatgatccttcacaataa

SEQ ID NO: 4658827 - DNA, 25 bp, Homo sapien
ccatggtcaaagaccagggagtgac

SEQ ID NO: 4658828 - DNA, 25 bp, Homo sapien
taaggtagccatggtcaaagaccag

SEQ ID NO: 4658829 - DNA, 25 bp, Homo sapien
ctggagtgttaacacgatcatctca

SEQ ID NO: 4658830 - DNA, 25 bp, Homo sapien
tgttaacacgatcatctcaaccttt

SEQ ID NO: 4658831 - DNA, 25 bp, Homo sapien
aacacgatcatctcaacctttttcc

SEQ ID NO: 4658832 - DNA, 25 bp, Homo sapien
gagtgttaacacgatcatctcaacc

SEQ ID NO: 4658833 - DNA, 25 bp, Homo sapien
ttgcaggacatcaagggctccgcac

SEQ ID NO: 4658834 - DNA, 25 bp, Homo sapien
caaggaacttaaggacatccttctt

SEQ ID NO: 4658835 - DNA, 25 bp, Homo sapien
cttaaggacatccttcttcttcatt

SEQ ID NO: 4658836 - DNA, 25 bp, Homo sapien
gaacttaaggacatccttcttcttc

SEQ ID NO: 4658837 - DNA, 25 bp, Homo sapien
agtcaagattggtgccacctaagtg

SEQ ID NO: 4658838 - DNA, 25 bp, Homo sapien
aagattggtgccacctaagtgggtt

SEQ ID NO: 4658839 - DNA, 25 bp, Homo sapien
caagattggtgccacctaagtgggt

SEQ ID NO: 4658840 - DNA, 25 bp, Homo sapien
ctggaagtcaagattggtgccacct

SEQ ID NO: 4658841 - DNA, 25 bp, Homo sapien
tccttttatagatgtactgtttcat

SEQ ID NO: 4658842 - DNA, 25 bp, Homo sapien
ttccttttatagatgtactgtttca

SEQ ID NO: 4658843 - DNA, 25 bp, Homo sapien
tggcatccaccatatctgacccact

SEQ ID NO: 4658844 - DNA, 25 bp, Homo sapien
ctggcatccaccatatctgacccac

SEQ ID NO: 4658845 - DNA, 25 bp, Homo sapien
gctggcatccaccatatctgaccca

SEQ ID NO: 4658846 - DNA, 25 bp, Homo sapien
ggcatccaccatatctgacccactg

SEQ ID NO: 4658847 - DNA, 25 bp, Homo sapien
aggaaatggtgccacgcatgtgcag

SEQ ID NO: 4658848 - DNA, 25 bp, Homo sapien
gacctcccacgggtgttcacaggaa

SEQ ID NO: 4658849 - DNA, 25 bp, Homo sapien
cacgggtgttcacaggaaatggtgc

SEQ ID NO: 4658850 - DNA, 25 bp, Homo sapien
cctcccacgggtgttcacaggaaat

SEQ ID NO: 4658851 - DNA, 25 bp, Homo sapien
caggagctagagcagtccactcacc

SEQ ID NO: 4658852 - DNA, 25 bp, Homo sapien
agctagagcagtccactcaccctga

SEQ ID NO: 4658853 - DNA, 25 bp, Homo sapien
ctagagcagtccactcaccctgaaa

SEQ ID NO: 4658854 - DNA, 25 bp, Homo sapien
ggagctagagcagtccactcaccct

SEQ ID NO: 4658855 - DNA, 25 bp, Homo sapien
cagtctttagtagggaactgtgaat

SEQ ID NO: 4658856 - DNA, 25 bp, Homo sapien
tataagttataacaatcctgagtca

SEQ ID NO: 4658857 - DNA, 25 bp, Homo sapien
tgatataagttataacaatcctgag

SEQ ID NO: 4658858 - DNA, 25 bp, Homo sapien
tggtgctgttctcagtttgatataa

SEQ ID NO: 4658859 - DNA, 25 bp, Homo sapien
gctgttctcagtttgatataagtta

SEQ ID NO: 4658860 - DNA, 25 bp, Homo sapien
cataaattccggtgtgaacaaaggc

SEQ ID NO: 4658861 - DNA, 25 bp, Homo sapien
aattctaaggcgtttaggtgctctg

SEQ ID NO: 4658862 - DNA, 25 bp, Homo sapien
aagtgtctcctaagaaattctaagg

SEQ ID NO: 4658863 - DNA, 25 bp, Homo sapien
ggtgaccaatcccatcctgaggcta

SEQ ID NO: 4658864 - DNA, 25 bp, Homo sapien
atttgtttgtaccggtgctctacac

SEQ ID NO: 4658865 - DNA, 25 bp, Homo sapien
ccatttgtttgtaccggtgctctac

SEQ ID NO: 4658866 - DNA, 25 bp, Homo sapien
catttgtttgtaccggtgctctaca

SEQ ID NO: 4658867 - DNA, 25 bp, Homo sapien
tttgtttgtaccggtgctctacacg

SEQ ID NO: 4658868 - DNA, 25 bp, Homo sapien
gcaccagtgattcgggagtgccgat

SEQ ID NO: 4658869 - DNA, 25 bp, Homo sapien
tggtatagagtctcgcctgtctccc

SEQ ID NO: 4658870 - DNA, 25 bp, Homo sapien
tcagttcctgaatggaggccacaaa

SEQ ID NO: 4658871 - DNA, 25 bp, Homo sapien
tccccaggcattcggggatcagaat

SEQ ID NO: 4658872 - DNA, 25 bp, Homo sapien
gaggctggcaagggtgggagcatgc

SEQ ID NO: 4658873 - DNA, 25 bp, Homo sapien
gctggcaagggtgggagcatgctcc

SEQ ID NO: 4658874 - DNA, 25 bp, Homo sapien
tgggttccaggaggctggcaagggt

SEQ ID NO: 4658875 - DNA, 25 bp, Homo sapien
ctgggttccaggaggctggcaaggg

SEQ ID NO: 4658876 - DNA, 25 bp, Homo sapien
tggatcacagggctgggccgtgagc

SEQ ID NO: 4658877 - DNA, 25 bp, Homo sapien
ctggatcacagggctgggccgtgag

SEQ ID NO: 4658878 - DNA, 25 bp, Homo sapien
aagtcgtcctgagtggtgcacaccg

SEQ ID NO: 4658879 - DNA, 25 bp, Homo sapien
gacgtaagccgcaagtcgtcctgag

SEQ ID NO: 4658880 - DNA, 25 bp, Homo sapien
gtgcacaccgcgaagactgaggaaa

SEQ ID NO: 4658881 - DNA, 25 bp, Homo sapien
tcctgagtggtgcacaccgcgaaga

SEQ ID NO: 4658882 - DNA, 25 bp, Homo sapien
agggcttcgtttttgcgcagtagga

SEQ ID NO: 4658883 - DNA, 25 bp, Homo sapien
ggactgccaggtgcgcgccgggaat

SEQ ID NO: 4658884 - DNA, 25 bp, Homo sapien
gcagtaggacgttgaagaaaggaca

SEQ ID NO: 4658885 - DNA, 25 bp, Homo sapien
cgcgccgggaatgggcggcggcagg

SEQ ID NO: 4658886 - DNA, 25 bp, Homo sapien
cagcctgagccagacggcgcctccc

SEQ ID NO: 4658887 - DNA, 25 bp, Homo sapien
gttccgccgtcgctcgttcgcgctc

SEQ ID NO: 4658888 - DNA, 25 bp, Homo sapien
cacaggcccacgggttccgccgtcg

SEQ ID NO: 4658889 - DNA, 25 bp, Homo sapien
cacgggttccgccgtcgctcgttcg

SEQ ID NO: 4658890 - DNA, 25 bp, Homo sapien
gacccaaagagccagtaggtcctaa

SEQ ID NO: 4658891 - DNA, 25 bp, Homo sapien
agtcagtgagatgaagcccaaccca

SEQ ID NO: 4658892 - DNA, 25 bp, Homo sapien
tgtgaactccaataagaggaccttc

SEQ ID NO: 4658893 - DNA, 25 bp, Homo sapien
tcctatgtgtgttagaagcctgaag

SEQ ID NO: 4658894 - DNA, 25 bp, Homo sapien
tacccacaaggttattcattgccgc

SEQ ID NO: 4658895 - DNA, 25 bp, Homo sapien
tgcaagcacgcacttcaatgaagcg

SEQ ID NO: 4658896 - DNA, 25 bp, Homo sapien
tgcatagaacggcagagcagtgtgc

SEQ ID NO: 4658897 - DNA, 25 bp, Homo sapien
cattaggagatgagttgcaagcacg

SEQ ID NO: 4658898 - DNA, 25 bp, Homo sapien
tgtattgatgcctgacgcctgtaat

SEQ ID NO: 4658899 - DNA, 25 bp, Homo sapien
tttttaggctgtattgatgcctgac

SEQ ID NO: 4658900 - DNA, 25 bp, Homo sapien
taggctgtattgatgcctgacgcct

SEQ ID NO: 4658901 - DNA, 25 bp, Homo sapien
ggctgtattgatgcctgacgcctgt

SEQ ID NO: 4658902 - DNA, 25 bp, Homo sapien
cagtacaagatgaggctgaggccca

SEQ ID NO: 4658903 - DNA, 25 bp, Homo sapien
caagtgccaagattcctggtggaga

SEQ ID NO: 4658904 - DNA, 25 bp, Homo sapien
tgatgcttgagccaaactctaaaga

SEQ ID NO: 4658905 - DNA, 25 bp, Homo sapien
caaaagtaattagtcatgcaccacc

SEQ ID NO: 4658906 - DNA, 25 bp, Homo sapien
caagaggttccagcaagccaagatc

SEQ ID NO: 4658907 - DNA, 25 bp, Homo sapien
gcaagaggttccagcaagccaagat

SEQ ID NO: 4658908 - DNA, 25 bp, Homo sapien
gctcaacagagtatccaggagagga

SEQ ID NO: 4658909 - DNA, 25 bp, Homo sapien
caatttgaggcatgtctagactaac

SEQ ID NO: 4658910 - DNA, 25 bp, Homo sapien
cacaaaaggtgggaagcataaaggg

SEQ ID NO: 4658911 - DNA, 25 bp, Homo sapien
cataaagggtgttcttcgggcagaa

SEQ ID NO: 4658912 - DNA, 25 bp, Homo sapien
caggctctaagacatgtagctcaat

SEQ ID NO: 4658913 - DNA, 25 bp, Homo sapien
tgccaggctctaagacatgtagctc

SEQ ID NO: 4658914 - DNA, 25 bp, Homo sapien
aagctgccaggctctaagacatgta

SEQ ID NO: 4658915 - DNA, 25 bp, Homo sapien
gctctaagacatgtagctcaatttc

SEQ ID NO: 4658916 - DNA, 25 bp, Homo sapien
ctcccttcgagttggaatcctgaat

SEQ ID NO: 4658917 - DNA, 25 bp, Homo sapien
tcgagttggaatcctgaattgctga

SEQ ID NO: 4658918 - DNA, 25 bp, Homo sapien
tcccttcgagttggaatcctgaatt

SEQ ID NO: 4658919 - DNA, 25 bp, Homo sapien
ccttcgagttggaatcctgaattgc

SEQ ID NO: 4658920 - DNA, 25 bp, Homo sapien
gagggacaccctacatttataacca

SEQ ID NO: 4658921 - DNA, 25 bp, Homo sapien
caattgccaagtgttaaggaccagc

SEQ ID NO: 4658922 - DNA, 25 bp, Homo sapien
ctttggtccctgagagcaattgcca

SEQ ID NO: 4658923 - DNA, 25 bp, Homo sapien
gagacaggatctaaagagggacacc

SEQ ID NO: 4658924 - DNA, 25 bp, Homo sapien
tctgttcttttgtttaaagcattcc

SEQ ID NO: 4658925 - DNA, 25 bp, Homo sapien
ttttagacaaatactcatgtatatg

SEQ ID NO: 4658926 - DNA, 25 bp, Homo sapien
ttcttttgtttaaagcattccaaca

SEQ ID NO: 4658927 - DNA, 25 bp, Homo sapien
tactcatgtatatgggcaaaaaact

SEQ ID NO: 4658928 - DNA, 25 bp, Homo sapien
aaggtgaacagaagacttgtggaac

SEQ ID NO: 4658929 - DNA, 25 bp, Homo sapien
tgaacagaagacttgtggaaccaaa

SEQ ID NO: 4658930 - DNA, 25 bp, Homo sapien
aacagaagacttgtggaaccaaaga

SEQ ID NO: 4658931 - DNA, 25 bp, Homo sapien
ggtgaacagaagacttgtggaacca

SEQ ID NO: 4658932 - DNA, 25 bp, Homo sapien
attagtcaggcatgccgatgcatac

SEQ ID NO: 4658933 - DNA, 25 bp, Homo sapien
ctcaaacggggttgttctgaactat

SEQ ID NO: 4658934 - DNA, 25 bp, Homo sapien
gcccatggatgacgctgaagcatca

SEQ ID NO: 4658935 - DNA, 25 bp, Homo sapien
atggatgacgctgaagcatcattaa

SEQ ID NO: 4658936 - DNA, 25 bp, Homo sapien
gaggccaacatgttaggaggccaag

SEQ ID NO: 4658937 - DNA, 25 bp, Homo sapien
cccgaagtttgcagctggtatccaa

SEQ ID NO: 4658938 - DNA, 25 bp, Homo sapien
agtgtgagaccttgggaggccaaca

SEQ ID NO: 4658939 - DNA, 25 bp, Homo sapien
cctgggcgatacagggagactgcct

SEQ ID NO: 4658940 - DNA, 25 bp, Homo sapien
agttccagagcagcctgggctacac

SEQ ID NO: 4658941 - DNA, 25 bp, Homo sapien
tgggctacacagtaagacctcattg

SEQ ID NO: 4658942 - DNA, 25 bp, Homo sapien
tggaagaccaaggtaggaagatcac

SEQ ID NO: 4658943 - DNA, 25 bp, Homo sapien
tttggaagaccaaggtaggaagatc

SEQ ID NO: 4658944 - DNA, 25 bp, Homo sapien
cagagagctatgatcaagtcacact

SEQ ID NO: 4658945 - DNA, 25 bp, Homo sapien
agaatttgatgctgcagagagctat

SEQ ID NO: 4658946 - DNA, 25 bp, Homo sapien
tcccatgagcccaagaatttgatgc

SEQ ID NO: 4658947 - DNA, 25 bp, Homo sapien
agagagctatgatcaagtcacactg

SEQ ID NO: 4658948 - DNA, 25 bp, Homo sapien
ccagttaagtttgtaactaagacat

SEQ ID NO: 4658949 - DNA, 25 bp, Homo sapien
catcacaagggtttaccagttaagt

SEQ ID NO: 4658950 - DNA, 25 bp, Homo sapien
actgcaactagcattgtcgagataa

SEQ ID NO: 4658951 - DNA, 25 bp, Homo sapien
cattaaaataacttggtcagggtca

SEQ ID NO: 4658952 - DNA, 25 bp, Homo sapien
aactagcattgtcgagataaacttc

SEQ ID NO: 4658953 - DNA, 25 bp, Homo sapien
cagggtcacacagactgcaactagc

SEQ ID NO: 4658954 - DNA, 25 bp, Homo sapien
tcgctatgtgtcatgcactcctcac

SEQ ID NO: 4658955 - DNA, 25 bp, Homo sapien
aaccatgaggaagatatgcactata

SEQ ID NO: 4658956 - DNA, 25 bp, Homo sapien
gagcactcgctatgtgtcatgcact

SEQ ID NO: 4658957 - DNA, 25 bp, Homo sapien
taactattccatcttggaaactgaa

SEQ ID NO: 4658958 - DNA, 25 bp, Homo sapien
tgtgaatcttccgtcatcagcactc

SEQ ID NO: 4658959 - DNA, 25 bp, Homo sapien
gaagcacatgccataacactagtca

SEQ ID NO: 4658960 - DNA, 25 bp, Homo sapien
gaaggctatcaggacaactggttgc

SEQ ID NO: 4658961 - DNA, 25 bp, Homo sapien
cagacctatctaatgggcccctatt

SEQ ID NO: 4658962 - DNA, 25 bp, Homo sapien
tttacgagttcagcaaaaatacgtg

SEQ ID NO: 4658963 - DNA, 25 bp, Homo sapien
gctgctggactagggtgaaaattca

SEQ ID NO: 4658964 - DNA, 25 bp, Homo sapien
gtatttaagtgagcagcggagctgc

SEQ ID NO: 4658965 - DNA, 25 bp, Homo sapien
accatccaagtgtctcttttacgag

SEQ ID NO: 4658966 - DNA, 25 bp, Homo sapien
gctggccaggtgtctttccgaatgg

SEQ ID NO: 4658967 - DNA, 25 bp, Homo sapien
ctggccaggtgtctttccgaatggg

SEQ ID NO: 4658968 - DNA, 25 bp, Homo sapien
gtgtctttccgaatggggtcttcat

SEQ ID NO: 4658969 - DNA, 25 bp, Homo sapien
ccaggtgtctttccgaatggggtct

SEQ ID NO: 4658970 - DNA, 25 bp, Homo sapien
aaccaaaagctagttgcttgtggaa

SEQ ID NO: 4658971 - DNA, 25 bp, Homo sapien
ccacgcccagataaagaaagatcta

SEQ ID NO: 4658972 - DNA, 25 bp, Homo sapien
gcaaaacggtagagccgctttggaa

SEQ ID NO: 4658973 - DNA, 25 bp, Homo sapien
tgcaaagtaaacatacgtttaacca

SEQ ID NO: 4658974 - DNA, 25 bp, Homo sapien
ggtgtcactagctcaacccatgtgg

SEQ ID NO: 4658975 - DNA, 25 bp, Homo sapien
tatagcataccattaatacactgaa

SEQ ID NO: 4658976 - DNA, 25 bp, Homo sapien
cagtagcagcgccagaatatctata

SEQ ID NO: 4658977 - DNA, 25 bp, Homo sapien
aagtgggtccttaggaatgagcaag

SEQ ID NO: 4658978 - DNA, 25 bp, Homo sapien
tgtgggatgtcctcttcttcatcat

SEQ ID NO: 4658979 - DNA, 25 bp, Homo sapien
ttgtgggatgtcctcttcttcatca

SEQ ID NO: 4658980 - DNA, 25 bp, Homo sapien
cattggcccagttcccaaaggcttt

SEQ ID NO: 4658981 - DNA, 25 bp, Homo sapien
aacagttttccttccattggcccag

SEQ ID NO: 4658982 - DNA, 25 bp, Homo sapien
tccattggcccagttcccaaaggct

SEQ ID NO: 4658983 - DNA, 25 bp, Homo sapien
cataacagttttccttccattggcc

SEQ ID NO: 4658984 - DNA, 25 bp, Homo sapien
catgataatgagcagaaacatatca

SEQ ID NO: 4658985 - DNA, 25 bp, Homo sapien
cactaaattaaggtccccaaatgtg

SEQ ID NO: 4658986 - DNA, 25 bp, Homo sapien
tcattcgtgaatgtggaaacttctg

SEQ ID NO: 4658987 - DNA, 25 bp, Homo sapien
gattttagacaggattaagccaacc

SEQ ID NO: 4658988 - DNA, 25 bp, Homo sapien
gatagtaatatgctcaaggcttcca

SEQ ID NO: 4658989 - DNA, 25 bp, Homo sapien
ttacccagtcttcatgtccacgact

SEQ ID NO: 4658990 - DNA, 25 bp, Homo sapien
catgtccacgactgaaataaccaat

SEQ ID NO: 4658991 - DNA, 25 bp, Homo sapien
gtcttcatgtccacgactgaaataa

SEQ ID NO: 4658992 - DNA, 25 bp, Homo sapien
ccagtcttcatgtccacgactgaaa

SEQ ID NO: 4658993 - DNA, 25 bp, Homo sapien
aaagctcagagcgttatctctatga

SEQ ID NO: 4658994 - DNA, 25 bp, Homo sapien
gatattgctaacacgggaaactaaa

SEQ ID NO: 4658995 - DNA, 25 bp, Homo sapien
tagctggaactacgtaagggtgcct

SEQ ID NO: 4658996 - DNA, 25 bp, Homo sapien
atgtttaacaataggccccattaat

SEQ ID NO: 4658997 - DNA, 25 bp, Homo sapien
tttacttgttggcaccagagttcct

SEQ ID NO: 4658998 - DNA, 25 bp, Homo sapien
tcttagtgttctggtctgccagcag

SEQ ID NO: 4658999 - DNA, 25 bp, Homo sapien
ctaaatctagtttatttacttgttg

SEQ ID NO: 4659000 - DNA, 25 bp, Homo sapien
acttgttggcaccagagttcctcag

SEQ ID NO: 4659001 - DNA, 25 bp, Homo sapien
ctggctaattctactgcattgctga

SEQ ID NO: 4659002 - DNA, 25 bp, Homo sapien
cattgctgaaatgtagacttttgtt

SEQ ID NO: 4659003 - DNA, 25 bp, Homo sapien
gctgaaatgtagacttttgttacaa

SEQ ID NO: 4659004 - DNA, 25 bp, Homo sapien
ggctaattctactgcattgctgaaa

SEQ ID NO: 4659005 - DNA, 25 bp, Homo sapien
cccgaggcttggcttacagacagca

SEQ ID NO: 4659006 - DNA, 25 bp, Homo sapien
caccaatgtgggtggccataatcca

SEQ ID NO: 4659007 - DNA, 25 bp, Homo sapien
cagcagactgaacaaagaagatgcc

SEQ ID NO: 4659008 - DNA, 25 bp, Homo sapien
gccacagagtgcctagattaaacac

SEQ ID NO: 4659009 - DNA, 25 bp, Homo sapien
cagatgctgatatacgccaagaaca

SEQ ID NO: 4659010 - DNA, 25 bp, Homo sapien
taagtcagacgggaacaggccataa

SEQ ID NO: 4659011 - DNA, 25 bp, Homo sapien
gaggtggctacccagagaggtctta

SEQ ID NO: 4659012 - DNA, 25 bp, Homo sapien
agtactcgccgcagaagggaagctt

SEQ ID NO: 4659013 - DNA, 25 bp, Homo sapien
aggtttgctcggacccacactgctc

SEQ ID NO: 4659014 - DNA, 25 bp, Homo sapien
caggtttgctcggacccacactgct

SEQ ID NO: 4659015 - DNA, 25 bp, Homo sapien
gaaacaggtttgctcggacccacac

SEQ ID NO: 4659016 - DNA, 25 bp, Homo sapien
aacaggtttgctcggacccacactg

SEQ ID NO: 4659017 - DNA, 25 bp, Homo sapien
ctgcagcctacgatgttccgccggg

SEQ ID NO: 4659018 - DNA, 25 bp, Homo sapien
atgctgaatcctgcagcctacgatg

SEQ ID NO: 4659019 - DNA, 25 bp, Homo sapien
cacccatgctgaatcctgcagccta

SEQ ID NO: 4659020 - DNA, 25 bp, Homo sapien
gaatcctgcagcctacgatgttccg

SEQ ID NO: 4659021 - DNA, 25 bp, Homo sapien
ggaggacttcaagcgcagaaactct

SEQ ID NO: 4659022 - DNA, 25 bp, Homo sapien
tcagggaggacttcaagcgcagaaa

SEQ ID NO: 4659023 - DNA, 25 bp, Homo sapien
atccatcgtattttataagatacaa

SEQ ID NO: 4659024 - DNA, 25 bp, Homo sapien
gacttcaagcgcagaaactctttca

SEQ ID NO: 4659025 - DNA, 25 bp, Homo sapien
ttcagttcaggtataaaatccagcc

SEQ ID NO: 4659026 - DNA, 25 bp, Homo sapien
caaaatgaggtatcgtatcacaccc

SEQ ID NO: 4659027 - DNA, 25 bp, Homo sapien
gatgtgagtagatatttccccaaag

SEQ ID NO: 4659028 - DNA, 25 bp, Homo sapien
cccaaagatgatttacaagtggcca

SEQ ID NO: 4659029 - DNA, 25 bp, Homo sapien
tgccaagtgtgcatcgctgattcga

SEQ ID NO: 4659030 - DNA, 25 bp, Homo sapien
tgccaatcattgtgtctgccaagtg

SEQ ID NO: 4659031 - DNA, 25 bp, Homo sapien
tagaaccatcctctgtctcaaacat

SEQ ID NO: 4659032 - DNA, 25 bp, Homo sapien
caggtgcacgtgctaagaccattcc

SEQ ID NO: 4659033 - DNA, 25 bp, Homo sapien
ggcataatgcgaaggtcgccttctt

SEQ ID NO: 4659034 - DNA, 25 bp, Homo sapien
tggaatcaggcataatgcgaaggtc

SEQ ID NO: 4659035 - DNA, 25 bp, Homo sapien
aatcaggcataatgcgaaggtcgcc

SEQ ID NO: 4659036 - DNA, 25 bp, Homo sapien
gcgaaggtcgccttctttgtaatca

SEQ ID NO: 4659037 - DNA, 25 bp, Homo sapien
aatgaccatgccagtccttttcgag

SEQ ID NO: 4659038 - DNA, 25 bp, Homo sapien
tgatgaaatagacggagggcttggc

SEQ ID NO: 4659039 - DNA, 25 bp, Homo sapien
tgccagtccttttcgagccatcttc

SEQ ID NO: 4659040 - DNA, 25 bp, Homo sapien
aggctgtccacaacttctcctggtt

SEQ ID NO: 4659041 - DNA, 25 bp, Homo sapien
caaagttaccgagccaagttctgca

SEQ ID NO: 4659042 - DNA, 25 bp, Homo sapien
taaagactccgtggctaagggctgc

SEQ ID NO: 4659043 - DNA, 25 bp, Homo sapien
cactgtgtggaacaagaacctgggc

SEQ ID NO: 4659044 - DNA, 25 bp, Homo sapien
catgcataacgaggcctggaaacca

SEQ ID NO: 4659045 - DNA, 25 bp, Homo sapien
attttttgccataaaagcagtggca

SEQ ID NO: 4659046 - DNA, 25 bp, Homo sapien
tttgtatcctagcattgagaaatag

SEQ ID NO: 4659047 - DNA, 25 bp, Homo sapien
ccagacttaagcatgagatccttag

SEQ ID NO: 4659048 - DNA, 25 bp, Homo sapien
cacatcacatgttgctcatcagcac

SEQ ID NO: 4659049 - DNA, 25 bp, Homo sapien
gatccgagtcttcattcccctataa

SEQ ID NO: 4659050 - DNA, 25 bp, Homo sapien
aattctccaacagagtgatgactgc

SEQ ID NO: 4659051 - DNA, 25 bp, Homo sapien
tctgggcacaaaatagagatccgag

SEQ ID NO: 4659052 - DNA, 25 bp, Homo sapien
gaaaacccagactcaagagaggcac

SEQ ID NO: 4659053 - DNA, 25 bp, Homo sapien
ggttataattcttagcatacagaga

SEQ ID NO: 4659054 - DNA, 25 bp, Homo sapien
gccatcgtggagacatcatttattt

SEQ ID NO: 4659055 - DNA, 25 bp, Homo sapien
cagagacacagatgcctacattcta

SEQ ID NO: 4659056 - DNA, 25 bp, Homo sapien
taagtatatgcgtgccatcgtggag

SEQ ID NO: 4659057 - DNA, 25 bp, Homo sapien
gattttgatagggactgccatcttg

SEQ ID NO: 4659058 - DNA, 25 bp, Homo sapien
agtgtacaaatcttgcacttttgtc

SEQ ID NO: 4659059 - DNA, 25 bp, Homo sapien
ggatcagcttgttaattactgaaaa

SEQ ID NO: 4659060 - DNA, 25 bp, Homo sapien
tcctctcagccatattttgcagttt

SEQ ID NO: 4659061 - DNA, 25 bp, Homo sapien
ggaggcagcacaagggaacgtgaag

SEQ ID NO: 4659062 - DNA, 25 bp, Homo sapien
aggcctgactctcgggcgagcccca

SEQ ID NO: 4659063 - DNA, 25 bp, Homo sapien
gcagcacaagggaacgtgaagagcc

SEQ ID NO: 4659064 - DNA, 25 bp, Homo sapien
acaagggaacgtgaagagccaggcc

SEQ ID NO: 4659065 - DNA, 25 bp, Homo sapien
ggcccagtcccccacatttgtgatg

SEQ ID NO: 4659066 - DNA, 25 bp, Homo sapien
tgactttccgaacaagagaatgggt

SEQ ID NO: 4659067 - DNA, 25 bp, Homo sapien
catttgtgatggcaagttcacatcc

SEQ ID NO: 4659068 - DNA, 25 bp, Homo sapien
ttcgagtctcccactgcaatgactt

SEQ ID NO: 4659069 - DNA, 25 bp, Homo sapien
tccacatacattgttacataattct

SEQ ID NO: 4659070 - DNA, 25 bp, Homo sapien
acacatgcaccgtccacatacattg

SEQ ID NO: 4659071 - DNA, 25 bp, Homo sapien
gatcaactgctcatcaacggcgtcc

SEQ ID NO: 4659072 - DNA, 25 bp, Homo sapien
tcaacggcgtccacacatgcaccgt

SEQ ID NO: 4659073 - DNA, 25 bp, Homo sapien
ggctgcttgcccgagttccaatcca

SEQ ID NO: 4659074 - DNA, 25 bp, Homo sapien
ttgcccgagttccaatccaccagga

SEQ ID NO: 4659075 - DNA, 25 bp, Homo sapien
gaggctgcttgcccgagttccaatc

SEQ ID NO: 4659076 - DNA, 25 bp, Homo sapien
gcccgagttccaatccaccaggaat

SEQ ID NO: 4659077 - DNA, 25 bp, Homo sapien
ggtctcagggcagttagatcgcaac

SEQ ID NO: 4659078 - DNA, 25 bp, Homo sapien
tgagctagtatgagtgacaacagcc

SEQ ID NO: 4659079 - DNA, 25 bp, Homo sapien
aggaagtctgttaaccaaaccactg

SEQ ID NO: 4659080 - DNA, 25 bp, Homo sapien
agaaaggcagaatatgttaaagtgg

SEQ ID NO: 4659081 - DNA, 25 bp, Homo sapien
gattgattggcgctcttaggtgaag

SEQ ID NO: 4659082 - DNA, 25 bp, Homo sapien
gcaggctgtcaagagccccgattca

SEQ ID NO: 4659083 - DNA, 25 bp, Homo sapien
aatcttgcatgaggaggcccctgac

SEQ ID NO: 4659084 - DNA, 25 bp, Homo sapien
cagcccgtcggctcggttgcgtaaa

SEQ ID NO: 4659085 - DNA, 25 bp, Homo sapien
tggttggttggttgagatggagtct

SEQ ID NO: 4659086 - DNA, 25 bp, Homo sapien
ggtttggttggttggttgagatgga

SEQ ID NO: 4659087 - DNA, 25 bp, Homo sapien
ttggtttggttggttggttgagatg

SEQ ID NO: 4659088 - DNA, 25 bp, Homo sapien
tttggttggttggttgagatggagt

SEQ ID NO: 4659089 - DNA, 25 bp, Homo sapien
cccccaactgcgccccgcccacact

SEQ ID NO: 4659090 - DNA, 25 bp, Homo sapien
tcccccaactgcgccccgcccacac

SEQ ID NO: 4659091 - DNA, 25 bp, Homo sapien
ctcccccaactgcgccccgcccaca

SEQ ID NO: 4659092 - DNA, 25 bp, Homo sapien
gggcgctggacctctcaagacctgc

SEQ ID NO: 4659093 - DNA, 25 bp, Homo sapien
tggctggagcaattgtgttcgcgcc

SEQ ID NO: 4659094 - DNA, 25 bp, Homo sapien
tgttcgcgccgacaatgagacactc

SEQ ID NO: 4659095 - DNA, 25 bp, Homo sapien
ggagcaattgtgttcgcgccgacaa

SEQ ID NO: 4659096 - DNA, 25 bp, Homo sapien
aggacacctgcaggaggatgatcac

SEQ ID NO: 4659097 - DNA, 25 bp, Homo sapien
ctgagacccgaggacacctgcagga

SEQ ID NO: 4659098 - DNA, 25 bp, Homo sapien
ccgaggacacctgcaggaggatgat

SEQ ID NO: 4659099 - DNA, 25 bp, Homo sapien
tgagacccgaggacacctgcaggag

SEQ ID NO: 4659100 - DNA, 25 bp, Homo sapien
gtcgcgcccttacaggtcaccaggt

SEQ ID NO: 4659101 - DNA, 25 bp, Homo sapien
gacacgaagaccacttcgaagggcg

SEQ ID NO: 4659102 - DNA, 25 bp, Homo sapien
gcgccatgcagctcgcgcatgaagt

SEQ ID NO: 4659103 - DNA, 25 bp, Homo sapien
tatagaagtcgcagagcagcggcgt

SEQ ID NO: 4659104 - DNA, 25 bp, Homo sapien
ggttttcgaatctggtctgcaccct

SEQ ID NO: 4659105 - DNA, 25 bp, Homo sapien
ggtgccgatgccctgggttttcgaa

SEQ ID NO: 4659106 - DNA, 25 bp, Homo sapien
ttcgcaatgcagattcccggagctc

SEQ ID NO: 4659107 - DNA, 25 bp, Homo sapien
acagagctgatgtcctcgcgggtca

SEQ ID NO: 4659108 - DNA, 25 bp, Homo sapien
caagagccaatcagatgggaacacc

SEQ ID NO: 4659109 - DNA, 25 bp, Homo sapien
ggagcaaggcatggctaaaccggat

SEQ ID NO: 4659110 - DNA, 25 bp, Homo sapien
ccggattggtctttgaaccaagagc

SEQ ID NO: 4659111 - DNA, 25 bp, Homo sapien
tctgtcctgtgggcaatggaaactc

SEQ ID NO: 4659112 - DNA, 25 bp, Homo sapien
cactccagcctgggtgacagagtga

SEQ ID NO: 4659113 - DNA, 25 bp, Homo sapien
tgcttgaatccagcaggcggaagtt

SEQ ID NO: 4659114 - DNA, 25 bp, Homo sapien
gcagtgagccgagatcgcgccactg

SEQ ID NO: 4659115 - DNA, 25 bp, Homo sapien
cctgggtgacagagtgagactctgt

SEQ ID NO: 4659116 - DNA, 25 bp, Homo sapien
tcacaatcacaagcttggggatggc

SEQ ID NO: 4659117 - DNA, 25 bp, Homo sapien
gggatggctgtgacgttgtacctct

SEQ ID NO: 4659118 - DNA, 25 bp, Homo sapien
gttggtgatgacctccccattttgt

SEQ ID NO: 4659119 - DNA, 25 bp, Homo sapien
cgttcccggatctgcttccgccctt

SEQ ID NO: 4659120 - DNA, 25 bp, Homo sapien
cacttcaaacggagaaattctggaa

SEQ ID NO: 4659121 - DNA, 25 bp, Homo sapien
tgctttttgaccacagcttagtgct

SEQ ID NO: 4659122 - DNA, 25 bp, Homo sapien
catatgaggatccttccttaagcac

SEQ ID NO: 4659123 - DNA, 25 bp, Homo sapien
taagcacaggtggataaaggtatgc

SEQ ID NO: 4659124 - DNA, 25 bp, Homo sapien
agggagtctggatgagacgtgggcc

SEQ ID NO: 4659125 - DNA, 25 bp, Homo sapien
cctgggctgggtcacgatgctgcat

SEQ ID NO: 4659126 - DNA, 25 bp, Homo sapien
gagtctggatgagacgtgggcctgg

SEQ ID NO: 4659127 - DNA, 25 bp, Homo sapien
tgctgcatgtctttcaacccctgcc

SEQ ID NO: 4659128 - DNA, 25 bp, Homo sapien
caggcctgatggcttgtggagcacc

SEQ ID NO: 4659129 - DNA, 25 bp, Homo sapien
ttgataaagatgccccagttgtggg

SEQ ID NO: 4659130 - DNA, 25 bp, Homo sapien
ggcctgatggcttgtggagcaccct

SEQ ID NO: 4659131 - DNA, 25 bp, Homo sapien
cctgatggcttgtggagcaccctgg

SEQ ID NO: 4659132 - DNA, 25 bp, Homo sapien
ccaggactgcttatggaccaatcag

SEQ ID NO: 4659133 - DNA, 25 bp, Homo sapien
gcttttatagccagtcaaatggtgc

SEQ ID NO: 4659134 - DNA, 25 bp, Homo sapien
tcagctacatgttgggactacccac

SEQ ID NO: 4659135 - DNA, 25 bp, Homo sapien
caccttcagatatgggttacccact

SEQ ID NO: 4659136 - DNA, 25 bp, Homo sapien
actgcagggattctgatgagtggct

SEQ ID NO: 4659137 - DNA, 25 bp, Homo sapien
agtgactgcagggattctgatgagt

SEQ ID NO: 4659138 - DNA, 25 bp, Homo sapien
tgactgcagggattctgatgagtgg

SEQ ID NO: 4659139 - DNA, 25 bp, Homo sapien
tgagtgactgcagggattctgatga

SEQ ID NO: 4659140 - DNA, 25 bp, Homo sapien
aggggacaagctcgtgttgcagcct

SEQ ID NO: 4659141 - DNA, 25 bp, Homo sapien
tctcaggggacaagctcgtgttgca

SEQ ID NO: 4659142 - DNA, 25 bp, Homo sapien
gagtctcaggggacaagctcgtgtt

SEQ ID NO: 4659143 - DNA, 25 bp, Homo sapien
tcaggggacaagctcgtgttgcagc

SEQ ID NO: 4659144 - DNA, 25 bp, Homo sapien
gcaagtaccagatgctggctggtca

SEQ ID NO: 4659145 - DNA, 25 bp, Homo sapien
cagatgctggctggtcatgaaggac

SEQ ID NO: 4659146 - DNA, 25 bp, Homo sapien
ctgttggaggggcaagtaccagatg

SEQ ID NO: 4659147 - DNA, 25 bp, Homo sapien
tgctggctggtcatgaaggacagat

SEQ ID NO: 4659148 - DNA, 25 bp, Homo sapien
gaagccctttgcaattcgatttgct

SEQ ID NO: 4659149 - DNA, 25 bp, Homo sapien
tgaggtcgagcaagtgaacgtgctt

SEQ ID NO: 4659150 - DNA, 25 bp, Homo sapien
tcaagggacaggcctacggatggca

SEQ ID NO: 4659151 - DNA, 25 bp, Homo sapien
cttggtagcgaggaagccctttgca

SEQ ID NO: 4659152 - DNA, 25 bp, Homo sapien
cttgaacccaggaggcaaaggttgc

SEQ ID NO: 4659153 - DNA, 25 bp, Homo sapien
cagtgagctaagatcacgccactgc

SEQ ID NO: 4659154 - DNA, 25 bp, Homo sapien
tcaggaggctaaggctagagaatca

SEQ ID NO: 4659155 - DNA, 25 bp, Homo sapien
actccagcctgggcaacagagcgag

SEQ ID NO: 4659156 - DNA, 25 bp, Homo sapien
tgggtcgcagcacaggccgatcgcc

SEQ ID NO: 4659157 - DNA, 25 bp, Homo sapien
gcagcacaggccgatcgccctgtgt

SEQ ID NO: 4659158 - DNA, 25 bp, Homo sapien
aggccgatcgccctgtgttttgccg

SEQ ID NO: 4659159 - DNA, 25 bp, Homo sapien
acctgggtcgcagcacaggccgatc

SEQ ID NO: 4659160 - DNA, 25 bp, Homo sapien
ttaatgagcacagactcgcagaatg

SEQ ID NO: 4659161 - DNA, 25 bp, Homo sapien
ttcacttcacataagggcctccttt

SEQ ID NO: 4659162 - DNA, 25 bp, Homo sapien
tccctcacgtaattcacagcaatgg

SEQ ID NO: 4659163 - DNA, 25 bp, Homo sapien
tcgcagaatgcaggacacggatggt

SEQ ID NO: 4659164 - DNA, 25 bp, Homo sapien
ccgtgtccattgtctgtgcagggct

SEQ ID NO: 4659165 - DNA, 25 bp, Homo sapien
gtctgtgcagggctgttctcacccc

SEQ ID NO: 4659166 - DNA, 25 bp, Homo sapien
cctgcccgggggtgcatcacaaaca

SEQ ID NO: 4659167 - DNA, 25 bp, Homo sapien
gaggccaccgtgtccattgtctgtg

SEQ ID NO: 4659168 - DNA, 25 bp, Homo sapien
tctcttaggaccgtagacatgctca

SEQ ID NO: 4659169 - DNA, 25 bp, Homo sapien
tgcagttctcttaggaccgtagaca

SEQ ID NO: 4659170 - DNA, 25 bp, Homo sapien
ctcttaggaccgtagacatgctcac

SEQ ID NO: 4659171 - DNA, 25 bp, Homo sapien
agttctcttaggaccgtagacatgc

SEQ ID NO: 4659172 - DNA, 25 bp, Homo sapien
aggcaaggaagatttgtacccctgg

SEQ ID NO: 4659173 - DNA, 25 bp, Homo sapien
ttgtacccctgggagccgctgtgcc

SEQ ID NO: 4659174 - DNA, 25 bp, Homo sapien
tgaccaggtgtcacggaccactcca

SEQ ID NO: 4659175 - DNA, 25 bp, Homo sapien
tgtatccaaattcacacatttgtcc

SEQ ID NO: 4659176 - DNA, 25 bp, Homo sapien
gcaagaaatcgagactttcctgtga

SEQ ID NO: 4659177 - DNA, 25 bp, Homo sapien
tcgagactttcctgtgatccccatg

SEQ ID NO: 4659178 - DNA, 25 bp, Homo sapien
aatcagcaagaaatcgagactttcc

SEQ ID NO: 4659179 - DNA, 25 bp, Homo sapien
ctgtgatccccatgtccagttcatc

SEQ ID NO: 4659180 - DNA, 25 bp, Homo sapien
tggacttgaataagctcaatgggga

SEQ ID NO: 4659181 - DNA, 25 bp, Homo sapien
gaataagctcaatggggaccaaagc

SEQ ID NO: 4659182 - DNA, 25 bp, Homo sapien
agctcaatggggaccaaagctacct

SEQ ID NO: 4659183 - DNA, 25 bp, Homo sapien
cttgaataagctcaatggggaccaa

SEQ ID NO: 4659184 - DNA, 25 bp, Homo sapien
gaaaagcatagacatcagcaagtac

SEQ ID NO: 4659185 - DNA, 25 bp, Homo sapien
tacttatgtgcagcaaagtccattc

SEQ ID NO: 4659186 - DNA, 25 bp, Homo sapien
gacatcagcaagtacttatgtgcag

SEQ ID NO: 4659187 - DNA, 25 bp, Homo sapien
aagtccattccacaatatgttctta

SEQ ID NO: 4659188 - DNA, 25 bp, Homo sapien
atcaagctggcccaaactagaagaa

SEQ ID NO: 4659189 - DNA, 25 bp, Homo sapien
atggaattgtccagtagagaccatc

SEQ ID NO: 4659190 - DNA, 25 bp, Homo sapien
gaagaaatgcccaaccaactcctag

SEQ ID NO: 4659191 - DNA, 25 bp, Homo sapien
atcaaggtgtcctagctgcctggct

SEQ ID NO: 4659192 - DNA, 25 bp, Homo sapien
cgcatgtattagttggctccggctg

SEQ ID NO: 4659193 - DNA, 25 bp, Homo sapien
caggattagtttctaggcagagctc

SEQ ID NO: 4659194 - DNA, 25 bp, Homo sapien
tgatgagttgtaggacctcaggcaa

SEQ ID NO: 4659195 - DNA, 25 bp, Homo sapien
aggcaaatcacctcgacagcccttg

SEQ ID NO: 4659196 - DNA, 25 bp, Homo sapien
caccatccctgggaacgttccagtt

SEQ ID NO: 4659197 - DNA, 25 bp, Homo sapien
gcaccatccctgggaacgttccagt

SEQ ID NO: 4659198 - DNA, 25 bp, Homo sapien
ggcaccatccctgggaacgttccag

SEQ ID NO: 4659199 - DNA, 25 bp, Homo sapien
gcaggcagaaaacgatgcccacatt

SEQ ID NO: 4659200 - DNA, 25 bp, Homo sapien
tctaatgaaatcttccacgcagttg

SEQ ID NO: 4659201 - DNA, 25 bp, Homo sapien
gcccacattgagtggagaatttctg

SEQ ID NO: 4659202 - DNA, 25 bp, Homo sapien
cacgcagttgatggcctgcataccc

SEQ ID NO: 4659203 - DNA, 25 bp, Homo sapien
gctctgcacagatgccgataggtca

SEQ ID NO: 4659204 - DNA, 25 bp, Homo sapien
ccagtgccagtctacaggctctgca

SEQ ID NO: 4659205 - DNA, 25 bp, Homo sapien
tccaatgggccgaggtgacacatag

SEQ ID NO: 4659206 - DNA, 25 bp, Homo sapien
gggcttgaacgaccagaggctgaat

SEQ ID NO: 4659207 - DNA, 25 bp, Homo sapien
taattagatcccattcatctatttt

SEQ ID NO: 4659208 - DNA, 25 bp, Homo sapien
aattagatcccattcatctattttg

SEQ ID NO: 4659209 - DNA, 25 bp, Homo sapien
attagatcccattcatctattttgg

SEQ ID NO: 4659210 - DNA, 25 bp, Homo sapien
gtttttgtcctgtatccaagaatta

SEQ ID NO: 4659211 - DNA, 25 bp, Homo sapien
cctgtatccaagaattaagagtgag

SEQ ID NO: 4659212 - DNA, 25 bp, Homo sapien
tgtcctgtatccaagaattaagagt

SEQ ID NO: 4659213 - DNA, 25 bp, Homo sapien
tccaagaattaagagtgagttccat

SEQ ID NO: 4659214 - DNA, 25 bp, Homo sapien
ttgatcttacggaagctgaatgccg

SEQ ID NO: 4659215 - DNA, 25 bp, Homo sapien
aaatccgcagcagatgacctctgtg

SEQ ID NO: 4659216 - DNA, 25 bp, Homo sapien
tttcctctacaaatccgcagcagat

SEQ ID NO: 4659217 - DNA, 25 bp, Homo sapien
gatgacctctgtgcttgatcttacg

SEQ ID NO: 4659218 - DNA, 25 bp, Homo sapien
agaaagatcacaccaacttctcggg

SEQ ID NO: 4659219 - DNA, 25 bp, Homo sapien
tgacaatcctataaagagtggcgtg

SEQ ID NO: 4659220 - DNA, 25 bp, Homo sapien
gcagaattttgtcctaaaactagaa

SEQ ID NO: 4659221 - DNA, 25 bp, Homo sapien
tcatcataatcatgagtgacaatcc

SEQ ID NO: 4659222 - DNA, 25 bp, Homo sapien
catcctgcaggattcgtgttgtgtt

SEQ ID NO: 4659223 - DNA, 25 bp, Homo sapien
atcctgcaggattcgtgttgtgttc

SEQ ID NO: 4659224 - DNA, 25 bp, Homo sapien
tcatcctgcaggattcgtgttgtgt

SEQ ID NO: 4659225 - DNA, 25 bp, Homo sapien
tcctgcaggattcgtgttgtgttct

SEQ ID NO: 4659226 - DNA, 25 bp, Homo sapien
caatgcctatggtgctattcacctc

SEQ ID NO: 4659227 - DNA, 25 bp, Homo sapien
tgacgttagcaatgcctatggtgct

SEQ ID NO: 4659228 - DNA, 25 bp, Homo sapien
tcttcccctctgatagcgtgcgcaa

SEQ ID NO: 4659229 - DNA, 25 bp, Homo sapien
tagcgtgcgcaaacttgacgttagc

SEQ ID NO: 4659230 - DNA, 25 bp, Homo sapien
ctcaatgtccccatgatcttcactg

SEQ ID NO: 4659231 - DNA, 25 bp, Homo sapien
tggtccccaatgtcccaatgatcct

SEQ ID NO: 4659232 - DNA, 25 bp, Homo sapien
tgtccccatggtccccaatgtccca

SEQ ID NO: 4659233 - DNA, 25 bp, Homo sapien
ccccatggtccccaatgtcccaatg

SEQ ID NO: 4659234 - DNA, 25 bp, Homo sapien
ccatggtccccaatgtcccaatgat

SEQ ID NO: 4659235 - DNA, 25 bp, Homo sapien
tgtttcaccctcaccaagcctcttt

SEQ ID NO: 4659236 - DNA, 25 bp, Homo sapien
tttcaccctcaccaagcctctttgg

SEQ ID NO: 4659237 - DNA, 25 bp, Homo sapien
tcaccctcaccaagcctctttggag

SEQ ID NO: 4659238 - DNA, 25 bp, Homo sapien
ggtgtttcaccctcaccaagcctct

SEQ ID NO: 4659239 - DNA, 25 bp, Homo sapien
tctctttgcaaactggcctctcgat

SEQ ID NO: 4659240 - DNA, 25 bp, Homo sapien
tctttgcaaactggcctctcgattc

SEQ ID NO: 4659241 - DNA, 25 bp, Homo sapien
ctctctttgcaaactggcctctcga

SEQ ID NO: 4659242 - DNA, 25 bp, Homo sapien
ctctttgcaaactggcctctcgatt

SEQ ID NO: 4659243 - DNA, 25 bp, Homo sapien
agaatcccccgatgtccactgaggg

SEQ ID NO: 4659244 - DNA, 25 bp, Homo sapien
tgaagaggcctctactgggaaagct

SEQ ID NO: 4659245 - DNA, 25 bp, Homo sapien
tgcacggcacccacagccgtgagaa

SEQ ID NO: 4659246 - DNA, 25 bp, Homo sapien
actgggaaagctccgatgcacggca

SEQ ID NO: 4659247 - DNA, 25 bp, Homo sapien
cttgttccaaataagcgtttggcct

SEQ ID NO: 4659248 - DNA, 25 bp, Homo sapien
ggatcggttgctcttgcaggacagc

SEQ ID NO: 4659249 - DNA, 25 bp, Homo sapien
taagcgtttggcctggatcggttgc

SEQ ID NO: 4659250 - DNA, 25 bp, Homo sapien
tggcctggatcggttgctcttgcag

SEQ ID NO: 4659251 - DNA, 25 bp, Homo sapien
caagagctaggtgtgcctgtctgcc

SEQ ID NO: 4659252 - DNA, 25 bp, Homo sapien
tcagcaagagctaggtgtgcctgtc

SEQ ID NO: 4659253 - DNA, 25 bp, Homo sapien
aggtgtgcctgtctgccctggattt

SEQ ID NO: 4659254 - DNA, 25 bp, Homo sapien
agctaggtgtgcctgtctgccctgg

SEQ ID NO: 4659255 - DNA, 25 bp, Homo sapien
tgttagcattttcagcagtgacttt

SEQ ID NO: 4659256 - DNA, 25 bp, Homo sapien
gtgttagcattttcagcagtgactt

SEQ ID NO: 4659257 - DNA, 25 bp, Homo sapien
ggaatggaatcctgaacctagactg

SEQ ID NO: 4659258 - DNA, 25 bp, Homo sapien
ccaaggacatagaacaagacagcag

SEQ ID NO: 4659259 - DNA, 25 bp, Homo sapien
ggtggagaccaatagaaaatactgc

SEQ ID NO: 4659260 - DNA, 25 bp, Homo sapien
gacagcaggagaagctcatccagtt

SEQ ID NO: 4659261 - DNA, 25 bp, Homo sapien
gcagcactccatgaaagttcggaaa

SEQ ID NO: 4659262 - DNA, 25 bp, Homo sapien
tttgaagaggaccaaaacagacaac

SEQ ID NO: 4659263 - DNA, 25 bp, Homo sapien
taacaaagattacgtcaggctttta

SEQ ID NO: 4659264 - DNA, 25 bp, Homo sapien
tctacttgacattcgtgaacattgc

SEQ ID NO: 4659265 - DNA, 25 bp, Homo sapien
tctgagttgcagacatggccaggtg

SEQ ID NO: 4659266 - DNA, 25 bp, Homo sapien
gatgggattcgccttccagaagtac

SEQ ID NO: 4659267 - DNA, 25 bp, Homo sapien
tgaagtttgcgatgtgggcactgcc

SEQ ID NO: 4659268 - DNA, 25 bp, Homo sapien
gaaatgccaaagaggcgtgaacctt

SEQ ID NO: 4659269 - DNA, 25 bp, Homo sapien
cttttaaatgatgccccgccactgg

SEQ ID NO: 4659270 - DNA, 25 bp, Homo sapien
tagaagcaaggagacgatggtgacc

SEQ ID NO: 4659271 - DNA, 25 bp, Homo sapien
taaagcaggtgtaacgtagagaaag

SEQ ID NO: 4659272 - DNA, 25 bp, Homo sapien
gatttcatactaagtgcatggaggg

SEQ ID NO: 4659273 - DNA, 25 bp, Homo sapien
caggcaactggatcctgtgcccagc

SEQ ID NO: 4659274 - DNA, 25 bp, Homo sapien
caaattcccagaaatggtgcgggta

SEQ ID NO: 4659275 - DNA, 25 bp, Homo sapien
caggtctccgcatctgattcagcca

SEQ ID NO: 4659276 - DNA, 25 bp, Homo sapien
tctgttctctgtcgtggaatgcaac

SEQ ID NO: 4659277 - DNA, 25 bp, Homo sapien
cctctgcttcatttggatgggcaat

SEQ ID NO: 4659278 - DNA, 25 bp, Homo sapien
ttggatgggcaattgtcttggagta

SEQ ID NO: 4659279 - DNA, 25 bp, Homo sapien
catttggatgggcaattgtcttgga

SEQ ID NO: 4659280 - DNA, 25 bp, Homo sapien
gcttcatttggatgggcaattgtct

SEQ ID NO: 4659281 - DNA, 25 bp, Homo sapien
ttcctgtggctgttaagatcatggg

SEQ ID NO: 4659282 - DNA, 25 bp, Homo sapien
gaatgggagacccactgtgctggga

SEQ ID NO: 4659283 - DNA, 25 bp, Homo sapien
cgcttccgtgtgaggaactgcttcc

SEQ ID NO: 4659284 - DNA, 25 bp, Homo sapien
gagtgatgccctgtcagagccggct

SEQ ID NO: 4659285 - DNA, 25 bp, Homo sapien
tcaacagcttctaaaagctcacaca

SEQ ID NO: 4659286 - DNA, 25 bp, Homo sapien
tccaaacttcattgtttcaggtcct

SEQ ID NO: 4659287 - DNA, 25 bp, Homo sapien
tgttctccaggactgctcaacagct

SEQ ID NO: 4659288 - DNA, 25 bp, Homo sapien
ttcattgtttcaggtccttcctgga

SEQ ID NO: 4659289 - DNA, 25 bp, Homo sapien
ttcctgggctactccagttggaatc

SEQ ID NO: 4659290 - DNA, 25 bp, Homo sapien
tccagttggaatcttgtctacattc

SEQ ID NO: 4659291 - DNA, 25 bp, Homo sapien
tcttttcctgggctactccagttgg

SEQ ID NO: 4659292 - DNA, 25 bp, Homo sapien
tcttgtctacattccactctttcat

SEQ ID NO: 4659293 - DNA, 25 bp, Homo sapien
aggctgaatattaatccccaagaca

SEQ ID NO: 4659294 - DNA, 25 bp, Homo sapien
ccaaggtataactcaggccattgct

SEQ ID NO: 4659295 - DNA, 25 bp, Homo sapien
ccatggctagaagggcccaaggtat

SEQ ID NO: 4659296 - DNA, 25 bp, Homo sapien
tgcatctcactcactccagccatgg

SEQ ID NO: 4659297 - DNA, 25 bp, Homo sapien
gctgagtttggtcagttacttcact

SEQ ID NO: 4659298 - DNA, 25 bp, Homo sapien
tctggtgtgaccaggcagcctctcc

SEQ ID NO: 4659299 - DNA, 25 bp, Homo sapien
caagggctcagaggcggagaagctg

SEQ ID NO: 4659300 - DNA, 25 bp, Homo sapien
cctccgcagcttccatagggaagga

SEQ ID NO: 4659301 - DNA, 25 bp, Homo sapien
ttgcttaatacaagcgggcaggagg

SEQ ID NO: 4659302 - DNA, 25 bp, Homo sapien
tgggagaatagacagccactttggc

SEQ ID NO: 4659303 - DNA, 25 bp, Homo sapien
gacagtagaagtgtaggctcagcaa

SEQ ID NO: 4659304 - DNA, 25 bp, Homo sapien
tggctagattccaaaagctggagac

SEQ ID NO: 4659305 - DNA, 25 bp, Homo sapien
cctcggtgcctacaccactgccctt

SEQ ID NO: 4659306 - DNA, 25 bp, Homo sapien
tcctcggtgcctacaccactgccct

SEQ ID NO: 4659307 - DNA, 25 bp, Homo sapien
ctcggtgcctacaccactgcccttc

SEQ ID NO: 4659308 - DNA, 25 bp, Homo sapien
tcggtgcctacaccactgcccttct

SEQ ID NO: 4659309 - DNA, 25 bp, Homo sapien
agaccttgaggacagccattacagg

SEQ ID NO: 4659310 - DNA, 25 bp, Homo sapien
accatgggctggtttgggtgagact

SEQ ID NO: 4659311 - DNA, 25 bp, Homo sapien
gattccttttggacagccccagctg

SEQ ID NO: 4659312 - DNA, 25 bp, Homo sapien
tcaaatctggagtaccatgggctgg

SEQ ID NO: 4659313 - DNA, 25 bp, Homo sapien
actggttcggcgtattcctcccctg

SEQ ID NO: 4659314 - DNA, 25 bp, Homo sapien
tcgacaatgttgtggaataactttt

SEQ ID NO: 4659315 - DNA, 25 bp, Homo sapien
tctttgaacaagtgtcgacaatgtt

SEQ ID NO: 4659316 - DNA, 25 bp, Homo sapien
attctgcatagactggttcggcgta

SEQ ID NO: 4659317 - DNA, 25 bp, Homo sapien
tctgaattccacaaacgggcagtgc

SEQ ID NO: 4659318 - DNA, 25 bp, Homo sapien
cgggcagtgccatctttagcagtct

SEQ ID NO: 4659319 - DNA, 25 bp, Homo sapien
gactcatagtgaagcctgcatctga

SEQ ID NO: 4659320 - DNA, 25 bp, Homo sapien
gatgctctgagtcaaattagtccaa

SEQ ID NO: 4659321 - DNA, 25 bp, Homo sapien
actggccgagcaccggcttgggctt

SEQ ID NO: 4659322 - DNA, 25 bp, Homo sapien
tatcattatcgttgtccagatcctg

SEQ ID NO: 4659323 - DNA, 25 bp, Homo sapien
gcctggcgccggacagcgtttttgt

SEQ ID NO: 4659324 - DNA, 25 bp, Homo sapien
tcttttgtaactggccgagcaccgg

SEQ ID NO: 4659325 - DNA, 25 bp, Homo sapien
agacccagcgggaacaggcttggaa

SEQ ID NO: 4659326 - DNA, 25 bp, Homo sapien
tcctcatcgggcgagctccaggtgc

SEQ ID NO: 4659327 - DNA, 25 bp, Homo sapien
caggtgcagaaaccgggcgcccaga

SEQ ID NO: 4659328 - DNA, 25 bp, Homo sapien
gaaccaggtccgaggtctgggcttg

SEQ ID NO: 4659329 - DNA, 25 bp, Homo sapien
ctcgcccttcggcccctgttcccag

SEQ ID NO: 4659330 - DNA, 25 bp, Homo sapien
cctgttcccaggccggcctccagac

SEQ ID NO: 4659331 - DNA, 25 bp, Homo sapien
gctcgcccttcggcccctgttccca

SEQ ID NO: 4659332 - DNA, 25 bp, Homo sapien
gcccctgttcccaggccggcctcca

SEQ ID NO: 4659333 - DNA, 25 bp, Homo sapien
agtctcagcgctcgcgacgtcgttc

SEQ ID NO: 4659334 - DNA, 25 bp, Homo sapien
cctgcgctcgaatgccagatgggct

SEQ ID NO: 4659335 - DNA, 25 bp, Homo sapien
caccggcatcctagcgggtggcgcg

SEQ ID NO: 4659336 - DNA, 25 bp, Homo sapien
gggtcctgctcggtcgcgtcctgca

SEQ ID NO: 4659337 - DNA, 25 bp, Homo sapien
taaacagactgcataaggctggcgg

SEQ ID NO: 4659338 - DNA, 25 bp, Homo sapien
aaaatggagcggcatctgcaaggcc

SEQ ID NO: 4659339 - DNA, 25 bp, Homo sapien
cagttaaagggttctacagcagggc

SEQ ID NO: 4659340 - DNA, 25 bp, Homo sapien
tgaatgtacacaggaggagaccgag

SEQ ID NO: 4659341 - DNA, 25 bp, Homo sapien
gctcccctgagaaataacaactgtt

SEQ ID NO: 4659342 - DNA, 25 bp, Homo sapien
aatgagtcggccgttacaaggctcc

SEQ ID NO: 4659343 - DNA, 25 bp, Homo sapien
taataggcatgtactcccagggaaa

SEQ ID NO: 4659344 - DNA, 25 bp, Homo sapien
tgggtgacctcgctctgcttttgga

SEQ ID NO: 4659345 - DNA, 25 bp, Homo sapien
ccccaacttccaaggagaaacattg

SEQ ID NO: 4659346 - DNA, 25 bp, Homo sapien
tgtcgaggaggaataagacgccttc

SEQ ID NO: 4659347 - DNA, 25 bp, Homo sapien
ggcacattacggaagacacaggagt

SEQ ID NO: 4659348 - DNA, 25 bp, Homo sapien
tggatgaccccaagttagaccctgc

SEQ ID NO: 4659349 - DNA, 25 bp, Homo sapien
tcatgtcatcctcactaagctgggt

SEQ ID NO: 4659350 - DNA, 25 bp, Homo sapien
tattgcgcacggttaaaagcatctc

SEQ ID NO: 4659351 - DNA, 25 bp, Homo sapien
cactctggcggattggtactaacac

SEQ ID NO: 4659352 - DNA, 25 bp, Homo sapien
gctttaaccatgactcggaggcact

SEQ ID NO: 4659353 - DNA, 25 bp, Homo sapien
cctaacagagggcaagactgatgca

SEQ ID NO: 4659354 - DNA, 25 bp, Homo sapien
tcacgtagggattcaagtacagctc

SEQ ID NO: 4659355 - DNA, 25 bp, Homo sapien
cgtagggattcaagtacagctccat

SEQ ID NO: 4659356 - DNA, 25 bp, Homo sapien
ccagctcacgtagggattcaagtac

SEQ ID NO: 4659357 - DNA, 25 bp, Homo sapien
ttccccagctcacgtagggattcaa

SEQ ID NO: 4659358 - DNA, 25 bp, Homo sapien
tcacagaggccttgggtcgaggtca

SEQ ID NO: 4659359 - DNA, 25 bp, Homo sapien
tgataaaacgatcgccgcctaaggg

SEQ ID NO: 4659360 - DNA, 25 bp, Homo sapien
tacagtgacatcgtgggaagatccc

SEQ ID NO: 4659361 - DNA, 25 bp, Homo sapien
tgaagccgggtatgaagacaacctg

SEQ ID NO: 4659362 - DNA, 25 bp, Homo sapien
ttggcattcacagacgattagctcc

SEQ ID NO: 4659363 - DNA, 25 bp, Homo sapien
gcaaggcgtgcaggccagactccag

SEQ ID NO: 4659364 - DNA, 25 bp, Homo sapien
tgaggttccggcttcattcagcaag

SEQ ID NO: 4659365 - DNA, 25 bp, Homo sapien
agctccaaaatccacgagagggcgc

SEQ ID NO: 4659366 - DNA, 25 bp, Homo sapien
tggagacgcggcgggagggcagttg

SEQ ID NO: 4659367 - DNA, 25 bp, Homo sapien
gacgcggcgggagggcagttgccat

SEQ ID NO: 4659368 - DNA, 25 bp, Homo sapien
ctggagacgcggcgggagggcagtt

SEQ ID NO: 4659369 - DNA, 25 bp, Homo sapien
gagacgcggcgggagggcagttgcc

SEQ ID NO: 4659370 - DNA, 25 bp, Homo sapien
tgttgaccttgtaagcgatgccggc

SEQ ID NO: 4659371 - DNA, 25 bp, Homo sapien
tagaggatcacgatggtcaccagga

SEQ ID NO: 4659372 - DNA, 25 bp, Homo sapien
tcattgtcaagtgccgctcgatggc

SEQ ID NO: 4659373 - DNA, 25 bp, Homo sapien
tactggtaatgctcccgcagggtct

SEQ ID NO: 4659374 - DNA, 25 bp, Homo sapien
tgtaagagacatccacactgggcag

SEQ ID NO: 4659375 - DNA, 25 bp, Homo sapien
caaagtaaggtagctctcccgagtc

SEQ ID NO: 4659376 - DNA, 25 bp, Homo sapien
gaaaagcctttggtcagcccatgga

SEQ ID NO: 4659377 - DNA, 25 bp, Homo sapien
tacttagatactgcggacatcaggg

SEQ ID NO: 4659378 - DNA, 25 bp, Homo sapien
ggaaacaatttctgactggccctgc

SEQ ID NO: 4659379 - DNA, 25 bp, Homo sapien
gaagtgaatgtatgaggcctctgcc

SEQ ID NO: 4659380 - DNA, 25 bp, Homo sapien
taaaattgtgcattcccagcgtgcc

SEQ ID NO: 4659381 - DNA, 25 bp, Homo sapien
caatgcgggccacgagtagatacct

SEQ ID NO: 4659382 - DNA, 25 bp, Homo sapien
caggctgttggtacgagtttcccca

SEQ ID NO: 4659383 - DNA, 25 bp, Homo sapien
tcacacagggcaggctagaagattg

SEQ ID NO: 4659384 - DNA, 25 bp, Homo sapien
gaatgggctgcatacctctcttggt

SEQ ID NO: 4659385 - DNA, 25 bp, Homo sapien
cagtgggcagtttcctcaaatgagg

SEQ ID NO: 4659386 - DNA, 25 bp, Homo sapien
tgttcgtgtaactctgccacgttgg

SEQ ID NO: 4659387 - DNA, 25 bp, Homo sapien
tttttgtggtatcttcataattctc

SEQ ID NO: 4659388 - DNA, 25 bp, Homo sapien
cccgtattcccacaattctatgaca

SEQ ID NO: 4659389 - DNA, 25 bp, Homo sapien
tggtggtggtattcccgtattccca

SEQ ID NO: 4659390 - DNA, 25 bp, Homo sapien
tttcaaataactctatggcattggc

SEQ ID NO: 4659391 - DNA, 25 bp, Homo sapien
ctctatggcattggcatgatattta

SEQ ID NO: 4659392 - DNA, 25 bp, Homo sapien
caaaactctgtaataatggtggtag

SEQ ID NO: 4659393 - DNA, 25 bp, Homo sapien
ggtggtagtgttaacataactctga

SEQ ID NO: 4659394 - DNA, 25 bp, Homo sapien
caattttgcagcattggcggttgtg

SEQ ID NO: 4659395 - DNA, 25 bp, Homo sapien
ccttgctgattatggaattcacata

SEQ ID NO: 4659396 - DNA, 25 bp, Homo sapien
gacatttgccatgatagtcacacaa

SEQ ID NO: 4659397 - DNA, 25 bp, Homo sapien
acagtgaatgtggtgttcccataac

SEQ ID NO: 4659398 - DNA, 25 bp, Homo sapien
tagtagggttgacatgcactgtgca

SEQ ID NO: 4659399 - DNA, 25 bp, Homo sapien
aaagtggtcctggtatttgcatgac

SEQ ID NO: 4659400 - DNA, 25 bp, Homo sapien
gacattactcatggtgttcacacaa

SEQ ID NO: 4659401 - DNA, 25 bp, Homo sapien
gactctgcaatgctggtggtagtag

SEQ ID NO: 4659402 - DNA, 25 bp, Homo sapien
gcagtaacagcatgagccaatcaca

SEQ ID NO: 4659403 - DNA, 25 bp, Homo sapien
gttagtgctgaagtaggcgatgttc

SEQ ID NO: 4659404 - DNA, 25 bp, Homo sapien
taaccagggaggagttttgaaatgc

SEQ ID NO: 4659405 - DNA, 25 bp, Homo sapien
gaaatgctctgagtgagagcagcgt

SEQ ID NO: 4659406 - DNA, 25 bp, Homo sapien
tccctacttggtgtccggcgaggcg

SEQ ID NO: 4659407 - DNA, 25 bp, Homo sapien
tataaccgcttcaggaatgactcgg

SEQ ID NO: 4659408 - DNA, 25 bp, Homo sapien
tctccacagcctgtcggtgagcggc

SEQ ID NO: 4659409 - DNA, 25 bp, Homo sapien
tgactcggtgacatcggtcgatgac

SEQ ID NO: 4659410 - DNA, 25 bp, Homo sapien
gggacagtggctcgcctgctatgcg

SEQ ID NO: 4659411 - DNA, 25 bp, Homo sapien
agcgcccgggcggatgcagcgagcc

SEQ ID NO: 4659412 - DNA, 25 bp, Homo sapien
tggctcgcctgctatgcgcggcagc

SEQ ID NO: 4659413 - DNA, 25 bp, Homo sapien
ttgctctgctctcgttctccagaag

SEQ ID NO: 4659414 - DNA, 25 bp, Homo sapien
caggaagtgatttgcagtgctcacc

SEQ ID NO: 4659415 - DNA, 25 bp, Homo sapien
tagacacttttacaggctcacacag

SEQ ID NO: 4659416 - DNA, 25 bp, Homo sapien
tgcttttgctgtgagcagccccaag

SEQ ID NO: 4659417 - DNA, 25 bp, Homo sapien
aagggtctcctctcagagtgagtca

SEQ ID NO: 4659418 - DNA, 25 bp, Homo sapien
gctgttctgctagggctgcggcaca

SEQ ID NO: 4659419 - DNA, 25 bp, Homo sapien
ggaacaaatgagtgccgtgtagctg

SEQ ID NO: 4659420 - DNA, 25 bp, Homo sapien
tcattcacagaaacgctggctcgct

SEQ ID NO: 4659421 - DNA, 25 bp, Homo sapien
tctcgctttgggaatgatagggctg

SEQ ID NO: 4659422 - DNA, 25 bp, Homo sapien
gcctttgattgaaatggaatcttcc

SEQ ID NO: 4659423 - DNA, 25 bp, Homo sapien
gaatcttccactattgagcaagcct

SEQ ID NO: 4659424 - DNA, 25 bp, Homo sapien
aaagatcccgcctttgattgaaatg

SEQ ID NO: 4659425 - DNA, 25 bp, Homo sapien
ttggataaaagatcccgcctttgat

SEQ ID NO: 4659426 - DNA, 25 bp, Homo sapien
cttcctcttggtacacagaacatct

SEQ ID NO: 4659427 - DNA, 25 bp, Homo sapien
ccttcctcttggtacacagaacatc

SEQ ID NO: 4659428 - DNA, 25 bp, Homo sapien
acaggaggagttcgcaggaatttct

SEQ ID NO: 4659429 - DNA, 25 bp, Homo sapien
ctcagcgtgtttaagaaatgaatgc

SEQ ID NO: 4659430 - DNA, 25 bp, Homo sapien
gagaggaagcagacataaggagaca

SEQ ID NO: 4659431 - DNA, 25 bp, Homo sapien
cgtgtttaagaaatgaatgcggcat

SEQ ID NO: 4659432 - DNA, 25 bp, Homo sapien
cccccttagcaacagagttgccatg

SEQ ID NO: 4659433 - DNA, 25 bp, Homo sapien
cccttagcaacagagttgccatgga

SEQ ID NO: 4659434 - DNA, 25 bp, Homo sapien
ggtccccccttagcaacagagttgc

SEQ ID NO: 4659435 - DNA, 25 bp, Homo sapien
cttagcaacagagttgccatggaaa

SEQ ID NO: 4659436 - DNA, 25 bp, Homo sapien
ctgcagataacacgctgatgtactt

SEQ ID NO: 4659437 - DNA, 25 bp, Homo sapien
gcagataacacgctgatgtacttac

SEQ ID NO: 4659438 - DNA, 25 bp, Homo sapien
atgctgcagataacacgctgatgta

SEQ ID NO: 4659439 - DNA, 25 bp, Homo sapien
tgctgcagataacacgctgatgtac

SEQ ID NO: 4659440 - DNA, 25 bp, Homo sapien
gagagttcctgggtggctaggcttg

SEQ ID NO: 4659441 - DNA, 25 bp, Homo sapien
acccgcctgagagttcctgggtggc

SEQ ID NO: 4659442 - DNA, 25 bp, Homo sapien
ccgcctgagagttcctgggtggcta

SEQ ID NO: 4659443 - DNA, 25 bp, Homo sapien
gagttcctgggtggctaggcttgcc

SEQ ID NO: 4659444 - DNA, 25 bp, Homo sapien
gccgactgcacaggaatagcctgga

SEQ ID NO: 4659445 - DNA, 25 bp, Homo sapien
tcgaatctgaatgttgagatacagt

SEQ ID NO: 4659446 - DNA, 25 bp, Homo sapien
gatatttgtatatcgaatctgaatg

SEQ ID NO: 4659447 - DNA, 25 bp, Homo sapien
cagtttctgagtgaaactgaaggcc

SEQ ID NO: 4659448 - DNA, 25 bp, Homo sapien
gagcactcaccatctgaggcagcat

SEQ ID NO: 4659449 - DNA, 25 bp, Homo sapien
tcctcatgagcactcaccatctgag

SEQ ID NO: 4659450 - DNA, 25 bp, Homo sapien
catcttcttcctcatgagcactcac

SEQ ID NO: 4659451 - DNA, 25 bp, Homo sapien
tcatgagcactcaccatctgaggca

SEQ ID NO: 4659452 - DNA, 25 bp, Homo sapien
caaacttcctgtgtccacagtgtgc

SEQ ID NO: 4659453 - DNA, 25 bp, Homo sapien
aacttcctgtgtccacagtgtgcat

SEQ ID NO: 4659454 - DNA, 25 bp, Homo sapien
aaacttcctgtgtccacagtgtgca

SEQ ID NO: 4659455 - DNA, 25 bp, Homo sapien
ccaaacttcctgtgtccacagtgtg

SEQ ID NO: 4659456 - DNA, 25 bp, Homo sapien
tctggtgctccactgtttcccaaca

SEQ ID NO: 4659457 - DNA, 25 bp, Homo sapien
ccaacactcgatgaaaagcagtaga

SEQ ID NO: 4659458 - DNA, 25 bp, Homo sapien
ggcatggcctggttctggtgctcca

SEQ ID NO: 4659459 - DNA, 25 bp, Homo sapien
tgtttcccaacactcgatgaaaagc

SEQ ID NO: 4659460 - DNA, 25 bp, Homo sapien
cacgctctgtacagggaaggcatga

SEQ ID NO: 4659461 - DNA, 25 bp, Homo sapien
catttgccttcttatgagcgttcca

SEQ ID NO: 4659462 - DNA, 25 bp, Homo sapien
cagtcgtagcttcctggacatgcca

SEQ ID NO: 4659463 - DNA, 25 bp, Homo sapien
catgacacaggtgtgggaaggctgc

SEQ ID NO: 4659464 - DNA, 25 bp, Homo sapien
gggagcagactatcacagaccagtg

SEQ ID NO: 4659465 - DNA, 25 bp, Homo sapien
gatgctcatgtcctgtaagaacacc

SEQ ID NO: 4659466 - DNA, 25 bp, Homo sapien
cagtgtgatgggcacaaagagatat

SEQ ID NO: 4659467 - DNA, 25 bp, Homo sapien
gagactgtggctagaagcgacaatg

SEQ ID NO: 4659468 - DNA, 25 bp, Homo sapien
tgcagctggctttgcccgcatggtc

SEQ ID NO: 4659469 - DNA, 25 bp, Homo sapien
ttggaatgcagctggctttgcccgc

SEQ ID NO: 4659470 - DNA, 25 bp, Homo sapien
tgcccgcatggtccctctctgtcgc

SEQ ID NO: 4659471 - DNA, 25 bp, Homo sapien
tacaacttggaatgcagctggcttt

SEQ ID NO: 4659472 - DNA, 25 bp, Homo sapien
tcctttagattatccgggacagaaa

SEQ ID NO: 4659473 - DNA, 25 bp, Homo sapien
gagtgcatggttggttcttccttta

SEQ ID NO: 4659474 - DNA, 25 bp, Homo sapien
ttagtacagattgtaagagagattc

SEQ ID NO: 4659475 - DNA, 25 bp, Homo sapien
tctgagcgcgtaggaagttttaagt

SEQ ID NO: 4659476 - DNA, 25 bp, Homo sapien
cttccagccaaggtagatgctgaag

SEQ ID NO: 4659477 - DNA, 25 bp, Homo sapien
aggcttccagccaaggtagatgctg

SEQ ID NO: 4659478 - DNA, 25 bp, Homo sapien
ggcttccagccaaggtagatgctga

SEQ ID NO: 4659479 - DNA, 25 bp, Homo sapien
gcttccagccaaggtagatgctgaa

SEQ ID NO: 4659480 - DNA, 25 bp, Homo sapien
tcagtcgtctttgcatgagtagtgg

SEQ ID NO: 4659481 - DNA, 25 bp, Homo sapien
agtcgtctttgcatgagtagtgggg

SEQ ID NO: 4659482 - DNA, 25 bp, Homo sapien
cagtcgtctttgcatgagtagtggg

SEQ ID NO: 4659483 - DNA, 25 bp, Homo sapien
tttagctcgacttaagtcatgaagc

SEQ ID NO: 4659484 - DNA, 25 bp, Homo sapien
attaattttagctcgacttaagtca

SEQ ID NO: 4659485 - DNA, 25 bp, Homo sapien
cttaagtcatgaagctgaatgcgtt

SEQ ID NO: 4659486 - DNA, 25 bp, Homo sapien
gctcgacttaagtcatgaagctgaa

SEQ ID NO: 4659487 - DNA, 25 bp, Homo sapien
taacaatgctaattcctggataagg

SEQ ID NO: 4659488 - DNA, 25 bp, Homo sapien
aataatattctgctgcggccaagaa

SEQ ID NO: 4659489 - DNA, 25 bp, Homo sapien
gacccaagccatggaaagcttgagg

SEQ ID NO: 4659490 - DNA, 25 bp, Homo sapien
cctagacgactgtgtggagaatgga

SEQ ID NO: 4659491 - DNA, 25 bp, Homo sapien
gaagctgtcgaccttgcacggtgat

SEQ ID NO: 4659492 - DNA, 25 bp, Homo sapien
acggtgatggcgctcctcgtgatcc

SEQ ID NO: 4659493 - DNA, 25 bp, Homo sapien
cacagggctttgagcggaagctgtc

SEQ ID NO: 4659494 - DNA, 25 bp, Homo sapien
tcgtgatcccttgtatcccctcagg

SEQ ID NO: 4659495 - DNA, 25 bp, Homo sapien
aaatgaaacgagagcgcgaagagcg

SEQ ID NO: 4659496 - DNA, 25 bp, Homo sapien
agagcgcgaagagcgggcgcagcag

SEQ ID NO: 4659497 - DNA, 25 bp, Homo sapien
gagagcgcgaagagcgggcgcagca

SEQ ID NO: 4659498 - DNA, 25 bp, Homo sapien
tgcagaaaatgaaacgagagcgcga

SEQ ID NO: 4659499 - DNA, 25 bp, Homo sapien
cttgtccgagtagtagatctgcttg

SEQ ID NO: 4659500 - DNA, 25 bp, Homo sapien
tacttgtccgagtagtagatctgct

SEQ ID NO: 4659501 - DNA, 25 bp, Homo sapien
gaagtacttgtccgagtagtagatc

SEQ ID NO: 4659502 - DNA, 25 bp, Homo sapien
tgtccgagtagtagatctgcttgtg

SEQ ID NO: 4659503 - DNA, 25 bp, Homo sapien
tgaagtgtcccgcatacagtaagga

SEQ ID NO: 4659504 - DNA, 25 bp, Homo sapien
tggtagtatcccagaacgcagcgtt

SEQ ID NO: 4659505 - DNA, 25 bp, Homo sapien
tcaattgtatgactgcggctaacct

SEQ ID NO: 4659506 - DNA, 25 bp, Homo sapien
catgttctagtacggtgcttcagga

SEQ ID NO: 4659507 - DNA, 25 bp, Homo sapien
tcataaaggttactggcttggccaa

SEQ ID NO: 4659508 - DNA, 25 bp, Homo sapien
tgcatgctgcaccattacatattaa

SEQ ID NO: 4659509 - DNA, 25 bp, Homo sapien
aaaccaccctagactcatgccttag

SEQ ID NO: 4659510 - DNA, 25 bp, Homo sapien
gcttggccaattaataccagctcta

SEQ ID NO: 4659511 - DNA, 25 bp, Homo sapien
taaagctgttatccctgccccagat

SEQ ID NO: 4659512 - DNA, 25 bp, Homo sapien
tacagccaagtgttagtccagtgcc

SEQ ID NO: 4659513 - DNA, 25 bp, Homo sapien
tatcacagaatgcttaccagttgcc

SEQ ID NO: 4659514 - DNA, 25 bp, Homo sapien
caagaggtaaggacccagcctagtc

SEQ ID NO: 4659515 - DNA, 25 bp, Homo sapien
actctgttggacaccaagtctcctc

SEQ ID NO: 4659516 - DNA, 25 bp, Homo sapien
gactctgttggacaccaagtctcct

SEQ ID NO: 4659517 - DNA, 25 bp, Homo sapien
agactctgttggacaccaagtctcc

SEQ ID NO: 4659518 - DNA, 25 bp, Homo sapien
caacaattactgctttactataaca

SEQ ID NO: 4659519 - DNA, 25 bp, Homo sapien
aattttgacaaccataaccaccaat

SEQ ID NO: 4659520 - DNA, 25 bp, Homo sapien
ttttccaagtagaataatgtgttac

SEQ ID NO: 4659521 - DNA, 25 bp, Homo sapien
tttactataacatagcatagcttac

SEQ ID NO: 4659522 - DNA, 25 bp, Homo sapien
gaaattcaaaagtattctcaactaa

SEQ ID NO: 4659523 - DNA, 25 bp, Homo sapien
tcatttttgttgatcttttggaaga

SEQ ID NO: 4659524 - DNA, 25 bp, Homo sapien
atttttgttgatcttttggaagagg

SEQ ID NO: 4659525 - DNA, 25 bp, Homo sapien
ttgttgatcttttggaagaggtcgt

SEQ ID NO: 4659526 - DNA, 25 bp, Homo sapien
ttttgttgatcttttggaagaggtc

SEQ ID NO: 4659527 - DNA, 25 bp, Homo sapien
tatacacatatacattaaatttgaa

SEQ ID NO: 4659528 - DNA, 25 bp, Homo sapien
tacacatatacattaaatttgaaaa

SEQ ID NO: 4659529 - DNA, 25 bp, Homo sapien
atatacacatatacattaaatttga

SEQ ID NO: 4659530 - DNA, 25 bp, Homo sapien
tacattaaatttgaaaaagatttga

SEQ ID NO: 4659531 - DNA, 25 bp, Homo sapien
gcacaggtatggatgaaagatttgt

SEQ ID NO: 4659532 - DNA, 25 bp, Homo sapien
tgcacaggtatggatgaaagatttg

SEQ ID NO: 4659533 - DNA, 25 bp, Homo sapien
gctaaaactataacactgaaatcaa

SEQ ID NO: 4659534 - DNA, 25 bp, Homo sapien
caatagtcacaaatttcaatagtca

SEQ ID NO: 4659535 - DNA, 25 bp, Homo sapien
gagctaaaactataacactgaaatc

SEQ ID NO: 4659536 - DNA, 25 bp, Homo sapien
gaaatcaatttcaatagtcacaaat

SEQ ID NO: 4659537 - DNA, 25 bp, Homo sapien
tgcgcgggcagcacgtggaggcagt

SEQ ID NO: 4659538 - DNA, 25 bp, Homo sapien
tatcggagatagtctccaccaaggc

SEQ ID NO: 4659539 - DNA, 25 bp, Homo sapien
tagcttgcgggagtcttggatctgc

SEQ ID NO: 4659540 - DNA, 25 bp, Homo sapien
ccttttagtgctgggatatcggaga

SEQ ID NO: 4659541 - DNA, 25 bp, Homo sapien
caggcgacgccaggaagtgcgtcac

SEQ ID NO: 4659542 - DNA, 25 bp, Homo sapien
cttgccggacagacaaagcgtttcc

SEQ ID NO: 4659543 - DNA, 25 bp, Homo sapien
ggccgtcggcttgccggacagacaa

SEQ ID NO: 4659544 - DNA, 25 bp, Homo sapien
agcaaagcgacagagcccgcccttt

SEQ ID NO: 4659545 - DNA, 25 bp, Homo sapien
gctcccgcggcccctccgacgccat

SEQ ID NO: 4659546 - DNA, 25 bp, Homo sapien
ggctcccgcggcccctccgacgcca

SEQ ID NO: 4659547 - DNA, 25 bp, Homo sapien
actactgcagtcaaatacacgtgga

SEQ ID NO: 4659548 - DNA, 25 bp, Homo sapien
aaatattatcaccacgagcctttga

SEQ ID NO: 4659549 - DNA, 25 bp, Homo sapien
tacacgtggactgtttaactacagc

SEQ ID NO: 4659550 - DNA, 25 bp, Homo sapien
gaaaaatgacaacgaattcaagtgg

SEQ ID NO: 4659551 - DNA, 25 bp, Homo sapien
tctgaggactctaaccatgccacat

SEQ ID NO: 4659552 - DNA, 25 bp, Homo sapien
tggtggttcctgaacaaacggatag

SEQ ID NO: 4659553 - DNA, 25 bp, Homo sapien
aacggatagtatgtggctgcagagc

SEQ ID NO: 4659554 - DNA, 25 bp, Homo sapien
catgccacattgagcccggcaaatc

SEQ ID NO: 4659555 - DNA, 25 bp, Homo sapien
tagaacctggtcaaagccttcaaga

SEQ ID NO: 4659556 - DNA, 25 bp, Homo sapien
taattgtgcaatacctgctggtctc

SEQ ID NO: 4659557 - DNA, 25 bp, Homo sapien
gagccacgtgctcagctgtacaatg

SEQ ID NO: 4659558 - DNA, 25 bp, Homo sapien
ttcagtcaggcaacgacccaaaggg

SEQ ID NO: 4659559 - DNA, 25 bp, Homo sapien
agcatctggcgtggcttcaaatggc

SEQ ID NO: 4659560 - DNA, 25 bp, Homo sapien
gactaacagggtcagagcgcaaagc

SEQ ID NO: 4659561 - DNA, 25 bp, Homo sapien
cacggcaccgtggatgttaactaca

SEQ ID NO: 4659562 - DNA, 25 bp, Homo sapien
gggtcctagctcaatcacaatccag

SEQ ID NO: 4659563 - DNA, 25 bp, Homo sapien
ttaagaccttcaaactgctacgctg

SEQ ID NO: 4659564 - DNA, 25 bp, Homo sapien
ggatgaagagttatctcagaagata

SEQ ID NO: 4659565 - DNA, 25 bp, Homo sapien
gagaataggcatatggatgaagagt

SEQ ID NO: 4659566 - DNA, 25 bp, Homo sapien
ggtataaggagaataggcatatgga

SEQ ID NO: 4659567 - DNA, 25 bp, Homo sapien
ctgtgtggagtcaagggtataagga

SEQ ID NO: 4659568 - DNA, 25 bp, Homo sapien
gttggttataaagatactgggagcc

SEQ ID NO: 4659569 - DNA, 25 bp, Homo sapien
tataaagatactgggagccaggcac

SEQ ID NO: 4659570 - DNA, 25 bp, Homo sapien
ggttataaagatactgggagccagg

SEQ ID NO: 4659571 - DNA, 25 bp, Homo sapien
ctgggttggttataaagatactggg

SEQ ID NO: 4659572 - DNA, 25 bp, Homo sapien
tcactgtttgaaaacctcggtaaca

SEQ ID NO: 4659573 - DNA, 25 bp, Homo sapien
catttcttgtgggagagggcatgtg

SEQ ID NO: 4659574 - DNA, 25 bp, Homo sapien
gatgtgaacctctagctgattttat

SEQ ID NO: 4659575 - DNA, 25 bp, Homo sapien
caaactattctcagcgtaaatggac

SEQ ID NO: 4659576 - DNA, 25 bp, Homo sapien
tgtcaaacttttgctgatcatacgt

SEQ ID NO: 4659577 - DNA, 25 bp, Homo sapien
tctcagatgatatagttccatcagc

SEQ ID NO: 4659578 - DNA, 25 bp, Homo sapien
cctgtctgttcgcttatggtaacca

SEQ ID NO: 4659579 - DNA, 25 bp, Homo sapien
ccagtgtggtaaattcaaactcagg

SEQ ID NO: 4659580 - DNA, 25 bp, Homo sapien
gcagttcaggaaagtccagtgtggt

SEQ ID NO: 4659581 - DNA, 25 bp, Homo sapien
caaactcaggtttggaggtagatac

SEQ ID NO: 4659582 - DNA, 25 bp, Homo sapien
tctgtatctctgacatattgttctc

SEQ ID NO: 4659583 - DNA, 25 bp, Homo sapien
tgcttctgtatctctgacatattgt

SEQ ID NO: 4659584 - DNA, 25 bp, Homo sapien
ttgggttgcttctgtatctctgaca

SEQ ID NO: 4659585 - DNA, 25 bp, Homo sapien
gttgcttctgtatctctgacatatt

SEQ ID NO: 4659586 - DNA, 25 bp, Homo sapien
acactgcagctggttttactacttc

SEQ ID NO: 4659587 - DNA, 25 bp, Homo sapien
tctcttagaagagaaatgtcggtag

SEQ ID NO: 4659588 - DNA, 25 bp, Homo sapien
agagacagagtggacaggtccccac

SEQ ID NO: 4659589 - DNA, 25 bp, Homo sapien
aaatgtcggtagagacagagtggac

SEQ ID NO: 4659590 - DNA, 25 bp, Homo sapien
gaaatgcctcaacttggtggactaa

SEQ ID NO: 4659591 - DNA, 25 bp, Homo sapien
caaagcggcttgactctgttacaac

SEQ ID NO: 4659592 - DNA, 25 bp, Homo sapien
tacagttaagtcctcagtaccatgg

SEQ ID NO: 4659593 - DNA, 25 bp, Homo sapien
ttgaaaatgggctgtcaaagcggct

SEQ ID NO: 4659594 - DNA, 25 bp, Homo sapien
gtacgtgatgaagaccggcagcgcc

SEQ ID NO: 4659595 - DNA, 25 bp, Homo sapien
acgtgatgaagaccggcagcgccgt

SEQ ID NO: 4659596 - DNA, 25 bp, Homo sapien
cagggcactcatgagagcggtacgt

SEQ ID NO: 4659597 - DNA, 25 bp, Homo sapien
catgagagcggtacgtgatgaagac

SEQ ID NO: 4659598 - DNA, 25 bp, Homo sapien
gcagccaagatgtgggctacatact

SEQ ID NO: 4659599 - DNA, 25 bp, Homo sapien
ccctaatgcaaacgatgcgctttgg

SEQ ID NO: 4659600 - DNA, 25 bp, Homo sapien
aatgaaaaacgttacagccactttg

SEQ ID NO: 4659601 - DNA, 25 bp, Homo sapien
actcataactgccacaacttggaag

SEQ ID NO: 4659602 - DNA, 25 bp, Homo sapien
gcagttacagattcatttgggttat

SEQ ID NO: 4659603 - DNA, 25 bp, Homo sapien
aaggagaattggtagcggcattagc

SEQ ID NO: 4659604 - DNA, 25 bp, Homo sapien
aattggtagcggcattagcagttac

SEQ ID NO: 4659605 - DNA, 25 bp, Homo sapien
tggtagcggcattagcagttacaga

SEQ ID NO: 4659606 - DNA, 25 bp, Homo sapien
caaatgctgtatgaggcaggaccgt

SEQ ID NO: 4659607 - DNA, 25 bp, Homo sapien
aaacagactgttcccctcactagag

SEQ ID NO: 4659608 - DNA, 25 bp, Homo sapien
caaagacatctatcaggacacaggc

SEQ ID NO: 4659609 - DNA, 25 bp, Homo sapien
tcaaagcagggtacatggaactctc

SEQ ID NO: 4659610 - DNA, 25 bp, Homo sapien
agacttcagctatcacaataactgg

SEQ ID NO: 4659611 - DNA, 25 bp, Homo sapien
gaacagaggcataagtacagcaaca

SEQ ID NO: 4659612 - DNA, 25 bp, Homo sapien
tacagcaacactactcctttaggtg

SEQ ID NO: 4659613 - DNA, 25 bp, Homo sapien
tactcctttaggtgcccatgaaact

SEQ ID NO: 4659614 - DNA, 25 bp, Homo sapien
catcctcttggaaactatagtagtc

SEQ ID NO: 4659615 - DNA, 25 bp, Homo sapien
gcattacatgaggtaactgctcaga

SEQ ID NO: 4659616 - DNA, 25 bp, Homo sapien
tgctcagagcatcattaaatgtagg

SEQ ID NO: 4659617 - DNA, 25 bp, Homo sapien
cacaataaatgtccacgtggcaagc

SEQ ID NO: 4659618 - DNA, 25 bp, Homo sapien
cgaacaacataacccattggtgtcc

SEQ ID NO: 4659619 - DNA, 25 bp, Homo sapien
taacccattggtgtccaagataact

SEQ ID NO: 4659620 - DNA, 25 bp, Homo sapien
caacataacccattggtgtccaaga

SEQ ID NO: 4659621 - DNA, 25 bp, Homo sapien
ctgtcgaacaacataacccattggt

SEQ ID NO: 4659622 - DNA, 25 bp, Homo sapien
acatttttaggggctgctgacagtt

SEQ ID NO: 4659623 - DNA, 25 bp, Homo sapien
ggtctttaagtttatcatagaagta

SEQ ID NO: 4659624 - DNA, 25 bp, Homo sapien
atttttaggggctgctgacagttct

SEQ ID NO: 4659625 - DNA, 25 bp, Homo sapien
atggtctttaagtttatcatagaag

SEQ ID NO: 4659626 - DNA, 25 bp, Homo sapien
agatggtatactaacatttttagga

SEQ ID NO: 4659627 - DNA, 25 bp, Homo sapien
gcttcagaagatggtatactaacat

SEQ ID NO: 4659628 - DNA, 25 bp, Homo sapien
ggatccgaagataaagcttcagaag

SEQ ID NO: 4659629 - DNA, 25 bp, Homo sapien
ctttgttgtaggaaggatccgaaga

SEQ ID NO: 4659630 - DNA, 25 bp, Homo sapien
actagtactcttgtactggtaaaag

SEQ ID NO: 4659631 - DNA, 25 bp, Homo sapien
tttgctactagtactcttgtactgg

SEQ ID NO: 4659632 - DNA, 25 bp, Homo sapien
tcttgtactggtaaaagccatttaa

SEQ ID NO: 4659633 - DNA, 25 bp, Homo sapien
tactcttgtactggtaaaagccatt

SEQ ID NO: 4659634 - DNA, 25 bp, Homo sapien
tgagagtgacttggcagctgcaaca

SEQ ID NO: 4659635 - DNA, 25 bp, Homo sapien
gagagatgaccttttccataagtag

SEQ ID NO: 4659636 - DNA, 25 bp, Homo sapien
tgcatattaggaaaaccggctctga

SEQ ID NO: 4659637 - DNA, 25 bp, Homo sapien
tgaggcaggacatatgccagattgc

SEQ ID NO: 4659638 - DNA, 25 bp, Homo sapien
ccaggtcagatgtgctttggccaca

SEQ ID NO: 4659639 - DNA, 25 bp, Homo sapien
aactggtggatttggacagaaccta

SEQ ID NO: 4659640 - DNA, 25 bp, Homo sapien
gggaccatcccaggactgctaaatg

SEQ ID NO: 4659641 - DNA, 25 bp, Homo sapien
gagatcatggtgttcgtgaccttcc

SEQ ID NO: 4659642 - DNA, 25 bp, Homo sapien
gacttcatattttgatgtagatttt

SEQ ID NO: 4659643 - DNA, 25 bp, Homo sapien
ggtcactaccttgtgatgctttaga

SEQ ID NO: 4659644 - DNA, 25 bp, Homo sapien
ttcaaggtcactaccttgtgatgct

SEQ ID NO: 4659645 - DNA, 25 bp, Homo sapien
ggaggctcttgaactgtcaggactt

SEQ ID NO: 4659646 - DNA, 25 bp, Homo sapien
aaagccctggagattttcacttagg

SEQ ID NO: 4659647 - DNA, 25 bp, Homo sapien
tgagtggctgctctgagacaactgg

SEQ ID NO: 4659648 - DNA, 25 bp, Homo sapien
gacccacttattatatcacaccatg

SEQ ID NO: 4659649 - DNA, 25 bp, Homo sapien
gctactgttttctttagcactacaa

SEQ ID NO: 4659650 - DNA, 25 bp, Homo sapien
ctgtggctgctgcttagattgaaat

SEQ ID NO: 4659651 - DNA, 25 bp, Homo sapien
gcttagattgaaatttcggtgtctc

SEQ ID NO: 4659652 - DNA, 25 bp, Homo sapien
gaaatttcggtgtctctattctgtc

SEQ ID NO: 4659653 - DNA, 25 bp, Homo sapien
tgccaggttgggaaattcctcggca

SEQ ID NO: 4659654 - DNA, 25 bp, Homo sapien
gagactaccactggtttggaggact

SEQ ID NO: 4659655 - DNA, 25 bp, Homo sapien
ctaccactggtttggaggactgctt

SEQ ID NO: 4659656 - DNA, 25 bp, Homo sapien
gactaccactggtttggaggactgc

SEQ ID NO: 4659657 - DNA, 25 bp, Homo sapien
ccactggtttggaggactgctttgc

SEQ ID NO: 4659658 - DNA, 25 bp, Homo sapien
gctacaagccttttggtggagaaaa

SEQ ID NO: 4659659 - DNA, 25 bp, Homo sapien
taacctctgagtcctgacacctgct

SEQ ID NO: 4659660 - DNA, 25 bp, Homo sapien
tcatgcgagttgacgaaatcatctg

SEQ ID NO: 4659661 - DNA, 25 bp, Homo sapien
tgtgtgcccctatcaggacttccat

SEQ ID NO: 4659662 - DNA, 25 bp, Homo sapien
ctctgcaggctccgcatccgtcttc

SEQ ID NO: 4659663 - DNA, 25 bp, Homo sapien
gcaggctccgcatccgtcttcagag

SEQ ID NO: 4659664 - DNA, 25 bp, Homo sapien
tccgcatccgtcttcagagcgcctt

SEQ ID NO: 4659665 - DNA, 25 bp, Homo sapien
cgcatccgtcttcagagcgccttct

SEQ ID NO: 4659666 - DNA, 25 bp, Homo sapien
tcttctgcttctggatccactgggc

SEQ ID NO: 4659667 - DNA, 25 bp, Homo sapien
tcagggggtcatgtcttctgcttct

SEQ ID NO: 4659668 - DNA, 25 bp, Homo sapien
ggtcatgtcttctgcttctggatcc

SEQ ID NO: 4659669 - DNA, 25 bp, Homo sapien
tctggatccactgggctgctttccc

SEQ ID NO: 4659670 - DNA, 25 bp, Homo sapien
tttgttggttgtttgtaacattgtg

SEQ ID NO: 4659671 - DNA, 25 bp, Homo sapien
gtggggatagtgccattttgttggt

SEQ ID NO: 4659672 - DNA, 25 bp, Homo sapien
ttgttggttgtttgtaacattgtgt

SEQ ID NO: 4659673 - DNA, 25 bp, Homo sapien
tgtggggatagtgccattttgttgg

SEQ ID NO: 4659674 - DNA, 25 bp, Homo sapien
ctctcccagtggctctagacggttg

SEQ ID NO: 4659675 - DNA, 25 bp, Homo sapien
ggctctagacggttgttgcattttt

SEQ ID NO: 4659676 - DNA, 25 bp, Homo sapien
ttcccagcagtgctgtaaaacctgt

SEQ ID NO: 4659677 - DNA, 25 bp, Homo sapien
cttcccagcagtgctgtaaaacctg

SEQ ID NO: 4659678 - DNA, 25 bp, Homo sapien
aaggagccattgtttctgaagggcc

SEQ ID NO: 4659679 - DNA, 25 bp, Homo sapien
cactgctggcagttggcaaagagaa

SEQ ID NO: 4659680 - DNA, 25 bp, Homo sapien
cttcactgctggcagttggcaaaga

SEQ ID NO: 4659681 - DNA, 25 bp, Homo sapien
agccattgtttctgaagggcctgtc

SEQ ID NO: 4659682 - DNA, 25 bp, Homo sapien
aaagctggggccttcgcagagctct

SEQ ID NO: 4659683 - DNA, 25 bp, Homo sapien
tgttgctaaggctggcaaaagccat

SEQ ID NO: 4659684 - DNA, 25 bp, Homo sapien
tttgtttcccgcctggagtgaggca

SEQ ID NO: 4659685 - DNA, 25 bp, Homo sapien
ccagatgatgaaatggcgaacatcc

SEQ ID NO: 4659686 - DNA, 25 bp, Homo sapien
gacggtaagacagcatttaaggtca

SEQ ID NO: 4659687 - DNA, 25 bp, Homo sapien
agacagcatttaaggtcagtactga

SEQ ID NO: 4659688 - DNA, 25 bp, Homo sapien
cgcacgacggtaagacagcatttaa

SEQ ID NO: 4659689 - DNA, 25 bp, Homo sapien
ctggtgtctgcgcacgacggtaaga

SEQ ID NO: 4659690 - DNA, 25 bp, Homo sapien
cgggtgttgtggttgtcacattgtc

SEQ ID NO: 4659691 - DNA, 25 bp, Homo sapien
ggtgttgtggttgtcacattgtcta

SEQ ID NO: 4659692 - DNA, 25 bp, Homo sapien
tgttgtggttgtcacattgtctatt

SEQ ID NO: 4659693 - DNA, 25 bp, Homo sapien
gccgggtgttgtggttgtcacattg

SEQ ID NO: 4659694 - DNA, 25 bp, Homo sapien
aggtgacacactgctcggaaaatga

SEQ ID NO: 4659695 - DNA, 25 bp, Homo sapien
gccacgtcgcacacattctgaatca

SEQ ID NO: 4659696 - DNA, 25 bp, Homo sapien
gaacccccacatgctgtagagctgg

SEQ ID NO: 4659697 - DNA, 25 bp, Homo sapien
cagctcctccccacgtgtgacccgc

SEQ ID NO: 4659698 - DNA, 25 bp, Homo sapien
aggtgactgtgtggggggcaatgag

SEQ ID NO: 4659699 - DNA, 25 bp, Homo sapien
gtgactgtgtggggggcaatgagtg

SEQ ID NO: 4659700 - DNA, 25 bp, Homo sapien
tgactgtgtggggggcaatgagtga

SEQ ID NO: 4659701 - DNA, 25 bp, Homo sapien
ggtgactgtgtggggggcaatgagt

SEQ ID NO: 4659702 - DNA, 25 bp, Homo sapien
cagtggtggtcctcaacttgtgacc

SEQ ID NO: 4659703 - DNA, 25 bp, Homo sapien
gaccactgagatggttgggaagagc

SEQ ID NO: 4659704 - DNA, 25 bp, Homo sapien
gtggtcctcaacttgtgaccactga

SEQ ID NO: 4659705 - DNA, 25 bp, Homo sapien
cctcaacttgtgaccactgagatgg

SEQ ID NO: 4659706 - DNA, 25 bp, Homo sapien
catatgggtcttgccctcgtccttc

SEQ ID NO: 4659707 - DNA, 25 bp, Homo sapien
cagtgctgggcagcatcgaatgtga

SEQ ID NO: 4659708 - DNA, 25 bp, Homo sapien
tgggcagcatcgaatgtgaggccca

SEQ ID NO: 4659709 - DNA, 25 bp, Homo sapien
ctcttggcaggtcatatgggtcttg

SEQ ID NO: 4659710 - DNA, 25 bp, Homo sapien
cctgagatccacgctggctgcaatg

SEQ ID NO: 4659711 - DNA, 25 bp, Homo sapien
ctatttgtagccctgagatccacgc

SEQ ID NO: 4659712 - DNA, 25 bp, Homo sapien
tgagatccacgctggctgcaatgga

SEQ ID NO: 4659713 - DNA, 25 bp, Homo sapien
gtagccctgagatccacgctggctg

SEQ ID NO: 4659714 - DNA, 25 bp, Homo sapien
gctttgggtgaagctaggattagag

SEQ ID NO: 4659715 - DNA, 25 bp, Homo sapien
gcatccagagtcagccgaggtggcc

SEQ ID NO: 4659716 - DNA, 25 bp, Homo sapien
atccagagtcagccgaggtggccgc

SEQ ID NO: 4659717 - DNA, 25 bp, Homo sapien
ctttgggtgaagctaggattagagg

SEQ ID NO: 4659718 - DNA, 25 bp, Homo sapien
agaaaccgatttgaatgagcacagc

SEQ ID NO: 4659719 - DNA, 25 bp, Homo sapien
cagggcggggaactttgctttccat

SEQ ID NO: 4659720 - DNA, 25 bp, Homo sapien
gttaagaaaccgatttgaatgagca

SEQ ID NO: 4659721 - DNA, 25 bp, Homo sapien
tgctttggcccacctgagtttgtct

SEQ ID NO: 4659722 - DNA, 25 bp, Homo sapien
gctccaagcttgagatgaacttgag

SEQ ID NO: 4659723 - DNA, 25 bp, Homo sapien
gaagtgctcaccaggctccaagctt

SEQ ID NO: 4659724 - DNA, 25 bp, Homo sapien
tcgggtacgtccctcggccactgtc

SEQ ID NO: 4659725 - DNA, 25 bp, Homo sapien
cttcatgaagtgctcaccaggctcc

SEQ ID NO: 4659726 - DNA, 25 bp, Homo sapien
cattcttctgagcacgtaactggcc

SEQ ID NO: 4659727 - DNA, 25 bp, Homo sapien
tgagcacgtaactggccactccatc

SEQ ID NO: 4659728 - DNA, 25 bp, Homo sapien
actccatccaccatgtagacttcag

SEQ ID NO: 4659729 - DNA, 25 bp, Homo sapien
tgcaaaccgcgtaatttctttcttg

SEQ ID NO: 4659730 - DNA, 25 bp, Homo sapien
cagagggttgagtggccattccagg

SEQ ID NO: 4659731 - DNA, 25 bp, Homo sapien
gctgcatagctggtaagggtgggcc

SEQ ID NO: 4659732 - DNA, 25 bp, Homo sapien
gtggccaactctgtcttatggatgg

SEQ ID NO: 4659733 - DNA, 25 bp, Homo sapien
ccaactctgtcttatggatggaagc

SEQ ID NO: 4659734 - DNA, 25 bp, Homo sapien
tactgctgctccggggctgaggtct

SEQ ID NO: 4659735 - DNA, 25 bp, Homo sapien
tgctccggggctgaggtctggctgg

SEQ ID NO: 4659736 - DNA, 25 bp, Homo sapien
ctgctgctccggggctgaggtctgg

SEQ ID NO: 4659737 - DNA, 25 bp, Homo sapien
gctgctccggggctgaggtctggct

SEQ ID NO: 4659738 - DNA, 25 bp, Homo sapien
cagcgggtgactgggtagaccttgt

SEQ ID NO: 4659739 - DNA, 25 bp, Homo sapien
ggtgactgggtagaccttgtcgcac

SEQ ID NO: 4659740 - DNA, 25 bp, Homo sapien
tgactgggtagaccttgtcgcacat

SEQ ID NO: 4659741 - DNA, 25 bp, Homo sapien
ggctggcagcgggtgactgggtaga

SEQ ID NO: 4659742 - DNA, 25 bp, Homo sapien
cctgtaggacttgctctgcataaag

SEQ ID NO: 4659743 - DNA, 25 bp, Homo sapien
aagccgtgggtgtggctgatgttca

SEQ ID NO: 4659744 - DNA, 25 bp, Homo sapien
taaatcaaagtacatgcccggcact

SEQ ID NO: 4659745 - DNA, 25 bp, Homo sapien
aatcaaagtacatgcccggcactgt

SEQ ID NO: 4659746 - DNA, 25 bp, Homo sapien
tgggcgtggccctgggaggggtgca

SEQ ID NO: 4659747 - DNA, 25 bp, Homo sapien
gcgtggccctgggaggggtgcaccc

SEQ ID NO: 4659748 - DNA, 25 bp, Homo sapien
gtggccctgggaggggtgcacccag

SEQ ID NO: 4659749 - DNA, 25 bp, Homo sapien
ggccctgggaggggtgcacccagac

SEQ ID NO: 4659750 - DNA, 25 bp, Homo sapien
ggaggtgctccaccctgaaagctct

SEQ ID NO: 4659751 - DNA, 25 bp, Homo sapien
ccaccctgaaagctctctccaggcc

SEQ ID NO: 4659752 - DNA, 25 bp, Homo sapien
gctccaccctgaaagctctctccag

SEQ ID NO: 4659753 - DNA, 25 bp, Homo sapien
gggaggtgctccaccctgaaagctc

SEQ ID NO: 4659754 - DNA, 25 bp, Homo sapien
ctgtgatgcagccatcacgagctgc

SEQ ID NO: 4659755 - DNA, 25 bp, Homo sapien
tgggccgtacggcgcagcaaaccat

SEQ ID NO: 4659756 - DNA, 25 bp, Homo sapien
ctgggccgtacggcgcagcaaacca

SEQ ID NO: 4659757 - DNA, 25 bp, Homo sapien
ggccgtacggcgcagcaaaccatgt

SEQ ID NO: 4659758 - DNA, 25 bp, Homo sapien
ccgtacggcgcagcaaaccatgtct

SEQ ID NO: 4659759 - DNA, 25 bp, Homo sapien
tctccagagcacctcgcgacccggc

SEQ ID NO: 4659760 - DNA, 25 bp, Homo sapien
tccagagcacctcgcgacccggcct

SEQ ID NO: 4659761 - DNA, 25 bp, Homo sapien
gtgtgtgtccagttgagcactggca

SEQ ID NO: 4659762 - DNA, 25 bp, Homo sapien
tgagcactggcatccgttcttctcc

SEQ ID NO: 4659763 - DNA, 25 bp, Homo sapien
ctcgtttcccctgagccgcccctct

SEQ ID NO: 4659764 - DNA, 25 bp, Homo sapien
accactgcagcctcgtttcccctga

SEQ ID NO: 4659765 - DNA, 25 bp, Homo sapien
actgcagcctcgtttcccctgagcc

SEQ ID NO: 4659766 - DNA, 25 bp, Homo sapien
cagcctcgtttcccctgagccgccc

SEQ ID NO: 4659767 - DNA, 25 bp, Homo sapien
cctgctgctcgtctttgcctgacat

SEQ ID NO: 4659768 - DNA, 25 bp, Homo sapien
tcctgctgctcgtctttgcctgaca

SEQ ID NO: 4659769 - DNA, 25 bp, Homo sapien
ggaccgaagtaccccattggcaatg

SEQ ID NO: 4659770 - DNA, 25 bp, Homo sapien
gcataatcacggcatcacctttctc

SEQ ID NO: 4659771 - DNA, 25 bp, Homo sapien
aaagcaatacgtttcttcatctctt

SEQ ID NO: 4659772 - DNA, 25 bp, Homo sapien
ggaaaagcaatacgtttcttcatct

SEQ ID NO: 4659773 - DNA, 25 bp, Homo sapien
tttcttgcataatcacggcatcacc

SEQ ID NO: 4659774 - DNA, 25 bp, Homo sapien
acatcagtcagaaaagtacgagcta

SEQ ID NO: 4659775 - DNA, 25 bp, Homo sapien
tcagaaaagtacgagctacattagt

SEQ ID NO: 4659776 - DNA, 25 bp, Homo sapien
cagtcagaaaagtacgagctacatt

SEQ ID NO: 4659777 - DNA, 25 bp, Homo sapien
gaaaagtacgagctacattagtgat

SEQ ID NO: 4659778 - DNA, 25 bp, Homo sapien
gcagcttcagcacaacggtgagctg

SEQ ID NO: 4659779 - DNA, 25 bp, Homo sapien
cagcacaacggtgagctgccttaat

SEQ ID NO: 4659780 - DNA, 25 bp, Homo sapien
gatttccaggtgtgaccaggcatgg

SEQ ID NO: 4659781 - DNA, 25 bp, Homo sapien
atttccaggtgtgaccaggcatggg

SEQ ID NO: 4659782 - DNA, 25 bp, Homo sapien
cttctattggcatgcagttaaataa

SEQ ID NO: 4659783 - DNA, 25 bp, Homo sapien
cagttaaataagtgggcaactttgt

SEQ ID NO: 4659784 - DNA, 25 bp, Homo sapien
gcatgcagttaaataagtgggcaac

SEQ ID NO: 4659785 - DNA, 25 bp, Homo sapien
tgcagttaaataagtgggcaacttt

SEQ ID NO: 4659786 - DNA, 25 bp, Homo sapien
tgtctgtgggaatctgggtaatggt

SEQ ID NO: 4659787 - DNA, 25 bp, Homo sapien
tgcttgtctgtgggaatctgggtaa

SEQ ID NO: 4659788 - DNA, 25 bp, Homo sapien
cttgtctgtgggaatctgggtaatg

SEQ ID NO: 4659789 - DNA, 25 bp, Homo sapien
ccttcttctgcttgtctgtgggaat

SEQ ID NO: 4659790 - DNA, 25 bp, Homo sapien
ttggtcttgccctttcctgagctga

SEQ ID NO: 4659791 - DNA, 25 bp, Homo sapien
ggtcttgccctttcctgagctgatg

SEQ ID NO: 4659792 - DNA, 25 bp, Homo sapien
atagtggttctctctcctgcatcct

SEQ ID NO: 4659793 - DNA, 25 bp, Homo sapien
ttcctgagctgatgagaacatccac

SEQ ID NO: 4659794 - DNA, 25 bp, Homo sapien
ttttcagtccatactgtttggaggg

SEQ ID NO: 4659795 - DNA, 25 bp, Homo sapien
ttcattttcagtccatactgtttgg

SEQ ID NO: 4659796 - DNA, 25 bp, Homo sapien
aagaaggcatgtcaagttttcattt

SEQ ID NO: 4659797 - DNA, 25 bp, Homo sapien
tcagtccatactgtttggaggggtc

SEQ ID NO: 4659798 - DNA, 25 bp, Homo sapien
gaacattaaatggttgcagcatttc

SEQ ID NO: 4659799 - DNA, 25 bp, Homo sapien
atggcatcaaaacgccttttcatgt

SEQ ID NO: 4659800 - DNA, 25 bp, Homo sapien
ttcacatgctcttgaagtaaatggc

SEQ ID NO: 4659801 - DNA, 25 bp, Homo sapien
cagacttatagaggtcaggctggaa

SEQ ID NO: 4659802 - DNA, 25 bp, Homo sapien
agtgggttgcaaaactggggtggcg

SEQ ID NO: 4659803 - DNA, 25 bp, Homo sapien
cttttgttcaattaaagtcttctgt

SEQ ID NO: 4659804 - DNA, 25 bp, Homo sapien
gagtgggttgcaaaactggggtggc

SEQ ID NO: 4659805 - DNA, 25 bp, Homo sapien
gagggccgcgaccagatggttctgg

SEQ ID NO: 4659806 - DNA, 25 bp, Homo sapien
tggggtctctactgcaggcctgttg

SEQ ID NO: 4659807 - DNA, 25 bp, Homo sapien
ctggcttagattggtctggggtact

SEQ ID NO: 4659808 - DNA, 25 bp, Homo sapien
cctgttggacgtggctggaaacacg

SEQ ID NO: 4659809 - DNA, 25 bp, Homo sapien
agtcctggagacagcacggccacca

SEQ ID NO: 4659810 - DNA, 25 bp, Homo sapien
acttttcccagcgtgaagtggccca

SEQ ID NO: 4659811 - DNA, 25 bp, Homo sapien
caaagcaggcattgtggttcccggt

SEQ ID NO: 4659812 - DNA, 25 bp, Homo sapien
aagtggcccatataaggtgctttgc

SEQ ID NO: 4659813 - DNA, 25 bp, Homo sapien
tgtttgatttggtggagggcccacc

SEQ ID NO: 4659814 - DNA, 25 bp, Homo sapien
tttgatttggtggagggcccacctg

SEQ ID NO: 4659815 - DNA, 25 bp, Homo sapien
ctgtttgatttggtggagggcccac

SEQ ID NO: 4659816 - DNA, 25 bp, Homo sapien
cccccaaggtccactcctgctagat

SEQ ID NO: 4659817 - DNA, 25 bp, Homo sapien
actgcggtttgacactctcactggg

SEQ ID NO: 4659818 - DNA, 25 bp, Homo sapien
tgcaggtctctcgtttccggcttgt

SEQ ID NO: 4659819 - DNA, 25 bp, Homo sapien
gtgggaagtgccctcggtagcccca

SEQ ID NO: 4659820 - DNA, 25 bp, Homo sapien
caggagggaccgtcttcggccagca

SEQ ID NO: 4659821 - DNA, 25 bp, Homo sapien
catgtgggtgcgagtccgcatgtca

SEQ ID NO: 4659822 - DNA, 25 bp, Homo sapien
tgcgagtccgcatgtcatggcagcc

SEQ ID NO: 4659823 - DNA, 25 bp, Homo sapien
acagcatgtgggtgcgagtccgcat

SEQ ID NO: 4659824 - DNA, 25 bp, Homo sapien
catgtcatggcagccccaaagggca

SEQ ID NO: 4659825 - DNA, 25 bp, Homo sapien
aaagcagcagcgaaaaagggctggt

SEQ ID NO: 4659826 - DNA, 25 bp, Homo sapien
gaacagatttagcacctgggaatgg

SEQ ID NO: 4659827 - DNA, 25 bp, Homo sapien
gatcatgaaaagcccccaagtagcc

SEQ ID NO: 4659828 - DNA, 25 bp, Homo sapien
cagcagcgaaaaagggctggtcatg

SEQ ID NO: 4659829 - DNA, 25 bp, Homo sapien
tttcccctgggggtgcttcactctg

SEQ ID NO: 4659830 - DNA, 25 bp, Homo sapien
cactctggggagaccagtgggtttt

SEQ ID NO: 4659831 - DNA, 25 bp, Homo sapien
tgatggttgacctctgtgactgcct

SEQ ID NO: 4659832 - DNA, 25 bp, Homo sapien
ctctctgatggttgacctctgtgac

SEQ ID NO: 4659833 - DNA, 25 bp, Homo sapien
ttaaagtgagaatctggtcatggag

SEQ ID NO: 4659834 - DNA, 25 bp, Homo sapien
ctttttaaagtgagaatctggtcat

SEQ ID NO: 4659835 - DNA, 25 bp, Homo sapien
ttttaaagtgagaatctggtcatgg

SEQ ID NO: 4659836 - DNA, 25 bp, Homo sapien
ctggtcatggagggcaaggaggaac

SEQ ID NO: 4659837 - DNA, 25 bp, Homo sapien
cttgtctgttctccgcgggatgcac

SEQ ID NO: 4659838 - DNA, 25 bp, Homo sapien
ctccgcgggatgcaccggactaagg

SEQ ID NO: 4659839 - DNA, 25 bp, Homo sapien
tcttgtctgttctccgcgggatgca

SEQ ID NO: 4659840 - DNA, 25 bp, Homo sapien
tgttctccgcgggatgcaccggact

SEQ ID NO: 4659841 - DNA, 25 bp, Homo sapien
tgtgagtgttagcgtgtcccaggtg

SEQ ID NO: 4659842 - DNA, 25 bp, Homo sapien
gtgagtgttagcgtgtcccaggtgt

SEQ ID NO: 4659843 - DNA, 25 bp, Homo sapien
tgttagcgtgtcccaggtgttgtag

SEQ ID NO: 4659844 - DNA, 25 bp, Homo sapien
tgagtgttagcgtgtcccaggtgtt

SEQ ID NO: 4659845 - DNA, 25 bp, Homo sapien
cagccctcggtacatatggagagca

SEQ ID NO: 4659846 - DNA, 25 bp, Homo sapien
tacatatggagagcagtcaagcatg

SEQ ID NO: 4659847 - DNA, 25 bp, Homo sapien
gaggtcatgggcagccctcggtaca

SEQ ID NO: 4659848 - DNA, 25 bp, Homo sapien
catgggcagccctcggtacatatgg

SEQ ID NO: 4659849 - DNA, 25 bp, Homo sapien
gctgtgtgctccctcgatgatgcac

SEQ ID NO: 4659850 - DNA, 25 bp, Homo sapien
ctgtgtgctccctcgatgatgcact

SEQ ID NO: 4659851 - DNA, 25 bp, Homo sapien
caggagagcctcctccggggtgggc

SEQ ID NO: 4659852 - DNA, 25 bp, Homo sapien
gcaggttctttctcatcctgcacct

SEQ ID NO: 4659853 - DNA, 25 bp, Homo sapien
cctccaggttgtggctggtctgtcc

SEQ ID NO: 4659854 - DNA, 25 bp, Homo sapien
tgcacctcgacccttttccccagga

SEQ ID NO: 4659855 - DNA, 25 bp, Homo sapien
cttgtccacttgatgaagtttcact

SEQ ID NO: 4659856 - DNA, 25 bp, Homo sapien
tgtccacttgatgaagtttcactgc

SEQ ID NO: 4659857 - DNA, 25 bp, Homo sapien
gtccacttgatgaagtttcactgct

SEQ ID NO: 4659858 - DNA, 25 bp, Homo sapien
ttgtccacttgatgaagtttcactg

SEQ ID NO: 4659859 - DNA, 25 bp, Homo sapien
tgctgttcccaaccagggcagttat

SEQ ID NO: 4659860 - DNA, 25 bp, Homo sapien
tatagaaataaacgtgccgtcggct

SEQ ID NO: 4659861 - DNA, 25 bp, Homo sapien
tccagggttggagctaggacccatg

SEQ ID NO: 4659862 - DNA, 25 bp, Homo sapien
gctgattgtcgagcctagttgctga

SEQ ID NO: 4659863 - DNA, 25 bp, Homo sapien
tggtgtctgcgtatatcatgtcttg

SEQ ID NO: 4659864 - DNA, 25 bp, Homo sapien
aaagcaggcgggctcagcataccca

SEQ ID NO: 4659865 - DNA, 25 bp, Homo sapien
gattctggtagagatgataatgccc

SEQ ID NO: 4659866 - DNA, 25 bp, Homo sapien
tggtagtcgtcagccagaagaagaa

SEQ ID NO: 4659867 - DNA, 25 bp, Homo sapien
caccaggcgccacggaacggaagtt

SEQ ID NO: 4659868 - DNA, 25 bp, Homo sapien
tcttttcaaatccaccaggcgccac

SEQ ID NO: 4659869 - DNA, 25 bp, Homo sapien
gtcttttcaaatccaccaggcgcca

SEQ ID NO: 4659870 - DNA, 25 bp, Homo sapien
cttttcaaatccaccaggcgccacg

SEQ ID NO: 4659871 - DNA, 25 bp, Homo sapien
aaaccctccaggacgaccacactgt

SEQ ID NO: 4659872 - DNA, 25 bp, Homo sapien
ccaaaccctccaggacgaccacact

SEQ ID NO: 4659873 - DNA, 25 bp, Homo sapien
caaaccctccaggacgaccacactg

SEQ ID NO: 4659874 - DNA, 25 bp, Homo sapien
cttgcatgtgtagatcctaagcgtg

SEQ ID NO: 4659875 - DNA, 25 bp, Homo sapien
tgtggaacatggattcatggacccc

SEQ ID NO: 4659876 - DNA, 25 bp, Homo sapien
ctaagcgtgcatccctccttgggta

SEQ ID NO: 4659877 - DNA, 25 bp, Homo sapien
catggacccctacaattggaaaaga

SEQ ID NO: 4659878 - DNA, 25 bp, Homo sapien
tctctctctaagcttagcctggaca

SEQ ID NO: 4659879 - DNA, 25 bp, Homo sapien
tcagaggaccccgtttctccacttg

SEQ ID NO: 4659880 - DNA, 25 bp, Homo sapien
tctccccggacttttctagaagctg

SEQ ID NO: 4659881 - DNA, 25 bp, Homo sapien
ggaccccgtttctccacttgctgtg

SEQ ID NO: 4659882 - DNA, 25 bp, Homo sapien
gaacaattgagttctcccatgctca

SEQ ID NO: 4659883 - DNA, 25 bp, Homo sapien
tcccgaataatcaaaagggaatcag

SEQ ID NO: 4659884 - DNA, 25 bp, Homo sapien
agcaataaggctctcaatgtttctc

SEQ ID NO: 4659885 - DNA, 25 bp, Homo sapien
catgctcaggttcacggcacctttc

SEQ ID NO: 4659886 - DNA, 25 bp, Homo sapien
ctgcaaggtgtgtaggctgctgttc

SEQ ID NO: 4659887 - DNA, 25 bp, Homo sapien
ctgttagcatggtgatgcgtctgca

SEQ ID NO: 4659888 - DNA, 25 bp, Homo sapien
gaacacagtctgttagcatggtgat

SEQ ID NO: 4659889 - DNA, 25 bp, Homo sapien
cagccctgcaaggtgtgtaggctgc

SEQ ID NO: 4659890 - DNA, 25 bp, Homo sapien
gcccttgatggacatcagtgagcct

SEQ ID NO: 4659891 - DNA, 25 bp, Homo sapien
aggcccttgatggacatcagtgagc

SEQ ID NO: 4659892 - DNA, 25 bp, Homo sapien
ggcccttgatggacatcagtgagcc

SEQ ID NO: 4659893 - DNA, 25 bp, Homo sapien
ggcttgctgtgtgttgcgcccttac

SEQ ID NO: 4659894 - DNA, 25 bp, Homo sapien
cagagctgagtggtcttcatctctc

SEQ ID NO: 4659895 - DNA, 25 bp, Homo sapien
ggtggagacgaagaaccagagctga

SEQ ID NO: 4659896 - DNA, 25 bp, Homo sapien
ggatgagggtggagacgaagaacca

SEQ ID NO: 4659897 - DNA, 25 bp, Homo sapien
tgactgggctttctttcttccagtg

SEQ ID NO: 4659898 - DNA, 25 bp, Homo sapien
ttctttcttccagtgcttggggttc

SEQ ID NO: 4659899 - DNA, 25 bp, Homo sapien
tgggctttctttcttccagtgcttg

SEQ ID NO: 4659900 - DNA, 25 bp, Homo sapien
ggctttctttcttccagtgcttggg

SEQ ID NO: 4659901 - DNA, 25 bp, Homo sapien
tacgtgcttgtcaggaacaggtagc

SEQ ID NO: 4659902 - DNA, 25 bp, Homo sapien
ttttccaaaggtctagcagcagata

SEQ ID NO: 4659903 - DNA, 25 bp, Homo sapien
tatgcaaagatcaactacgtgcttg

SEQ ID NO: 4659904 - DNA, 25 bp, Homo sapien
gtctcctcaagctgagattcacact

SEQ ID NO: 4659905 - DNA, 25 bp, Homo sapien
actatgtgactgtagctgccctcaa

SEQ ID NO: 4659906 - DNA, 25 bp, Homo sapien
cggctgcttctcaagcactatgtga

SEQ ID NO: 4659907 - DNA, 25 bp, Homo sapien
gcttctcaagcactatgtgactgta

SEQ ID NO: 4659908 - DNA, 25 bp, Homo sapien
aagcactatgtgactgtagctgccc

SEQ ID NO: 4659909 - DNA, 25 bp, Homo sapien
cactggagttctcgttgcacatgga

SEQ ID NO: 4659910 - DNA, 25 bp, Homo sapien
gagttctcgttgcacatggagctgg

SEQ ID NO: 4659911 - DNA, 25 bp, Homo sapien
ctggagttctcgttgcacatggagc

SEQ ID NO: 4659912 - DNA, 25 bp, Homo sapien
ttctcgttgcacatggagctgggca

SEQ ID NO: 4659913 - DNA, 25 bp, Homo sapien
tgttggctgaatttagcaagatagt

SEQ ID NO: 4659914 - DNA, 25 bp, Homo sapien
cctgtgcatcttggtgcttgatgtt

SEQ ID NO: 4659915 - DNA, 25 bp, Homo sapien
gctgaatttagcaagatagtctcat

SEQ ID NO: 4659916 - DNA, 25 bp, Homo sapien
tagtctcatttggttccaaatggcc

SEQ ID NO: 4659917 - DNA, 25 bp, Homo sapien
tgttcataggctgtagcagttccgt

SEQ ID NO: 4659918 - DNA, 25 bp, Homo sapien
gaacacaggtattgccttcagcagc

SEQ ID NO: 4659919 - DNA, 25 bp, Homo sapien
tcatcaactcgctctcccaagggtt

SEQ ID NO: 4659920 - DNA, 25 bp, Homo sapien
cgttgttcatgctctcttcggtgag

SEQ ID NO: 4659921 - DNA, 25 bp, Homo sapien
gacccaagttccaggctcatgtctc

SEQ ID NO: 4659922 - DNA, 25 bp, Homo sapien
agcacaggagatcaccatgggtacc

SEQ ID NO: 4659923 - DNA, 25 bp, Homo sapien
ttagggttccagtccaaagcacagg

SEQ ID NO: 4659924 - DNA, 25 bp, Homo sapien
atctccatagcaaaagtgacccaag

SEQ ID NO: 4659925 - DNA, 25 bp, Homo sapien
gatgtgatggaaagaagtgggttgg

SEQ ID NO: 4659926 - DNA, 25 bp, Homo sapien
gcttgcatctggttgcatgcaacag

SEQ ID NO: 4659927 - DNA, 25 bp, Homo sapien
aaggatgtgatggaaagaagtgggt

SEQ ID NO: 4659928 - DNA, 25 bp, Homo sapien
caacagaaatggattctggcccact

SEQ ID NO: 4659929 - DNA, 25 bp, Homo sapien
catagcagctttgttcccggtagcc

SEQ ID NO: 4659930 - DNA, 25 bp, Homo sapien
cggagtgtgaatgcgcaacagcgct

SEQ ID NO: 4659931 - DNA, 25 bp, Homo sapien
ggctcagcacggttcacctacagga

SEQ ID NO: 4659932 - DNA, 25 bp, Homo sapien
tagtcacgtctgattgagcaagtcc

SEQ ID NO: 4659933 - DNA, 25 bp, Homo sapien
aacatcacgtattccatcagtggca

SEQ ID NO: 4659934 - DNA, 25 bp, Homo sapien
aggagcgtgcctttgaccctgatct

SEQ ID NO: 4659935 - DNA, 25 bp, Homo sapien
gaatcttgttcttcaggttgctgcc

SEQ ID NO: 4659936 - DNA, 25 bp, Homo sapien
tctattgtaaggtaccacaggttat

SEQ ID NO: 4659937 - DNA, 25 bp, Homo sapien
tacaaatgcggttcacaggaccctt

SEQ ID NO: 4659938 - DNA, 25 bp, Homo sapien
gatccagaagccagacgtctgtggg

SEQ ID NO: 4659939 - DNA, 25 bp, Homo sapien
aaatcgtcataactgtactcggagg

SEQ ID NO: 4659940 - DNA, 25 bp, Homo sapien
cattgcctacataacacagcaggga

SEQ ID NO: 4659941 - DNA, 25 bp, Homo sapien
gagttctgaagagtagttcccggca

SEQ ID NO: 4659942 - DNA, 25 bp, Homo sapien
cgtacacgactatcactgtataaag

SEQ ID NO: 4659943 - DNA, 25 bp, Homo sapien
tataaagtcacaaagtaggaatggt

SEQ ID NO: 4659944 - DNA, 25 bp, Homo sapien
tgcaaaaactttcagcgtacacgac

SEQ ID NO: 4659945 - DNA, 25 bp, Homo sapien
ggacgcgggcgaacacactgacagc

SEQ ID NO: 4659946 - DNA, 25 bp, Homo sapien
tagttatccacaagcggagagcgcg

SEQ ID NO: 4659947 - DNA, 25 bp, Homo sapien
cagccagagctcagcacggcgcgcc

SEQ ID NO: 4659948 - DNA, 25 bp, Homo sapien
agtgcgatcaaccagcagctagtta

SEQ ID NO: 4659949 - DNA, 25 bp, Homo sapien
tgtgctttccggaactgtgtcctgg

SEQ ID NO: 4659950 - DNA, 25 bp, Homo sapien
ctggctgtgctttccggaactgtgt

SEQ ID NO: 4659951 - DNA, 25 bp, Homo sapien
tcctggccgcggacttcttccagag

SEQ ID NO: 4659952 - DNA, 25 bp, Homo sapien
tgtgtcctggccgcggacttcttcc

SEQ ID NO: 4659953 - DNA, 25 bp, Homo sapien
tccaaccgggatctggcgcccggac

SEQ ID NO: 4659954 - DNA, 25 bp, Homo sapien
ctgacggtcgccgaccgaccagcgg

SEQ ID NO: 4659955 - DNA, 25 bp, Homo sapien
tgcaccccggctctccaaccgggat

SEQ ID NO: 4659956 - DNA, 25 bp, Homo sapien
cagcggctttctcagcgccctgaaa

SEQ ID NO: 4659957 - DNA, 25 bp, Homo sapien
cgttcaagactttggctgactcgta

SEQ ID NO: 4659958 - DNA, 25 bp, Homo sapien
agcaactcatgcagcgctttcccgg

SEQ ID NO: 4659959 - DNA, 25 bp, Homo sapien
ctgactcgtagacgccggcagtgag

SEQ ID NO: 4659960 - DNA, 25 bp, Homo sapien
tgacgctgcgccgacagcagcaact

SEQ ID NO: 4659961 - DNA, 25 bp, Homo sapien
gggacctaggtcagaaccggctagc

SEQ ID NO: 4659962 - DNA, 25 bp, Homo sapien
atccgccagtctcctcgccattcac

SEQ ID NO: 4659963 - DNA, 25 bp, Homo sapien
tcagaaccggctagccgagttctcc

SEQ ID NO: 4659964 - DNA, 25 bp, Homo sapien
cagcctgggccgcgtctacacttac

SEQ ID NO: 4659965 - DNA, 25 bp, Homo sapien
atctgcagcgcgatgtcgccctcgt

SEQ ID NO: 4659966 - DNA, 25 bp, Homo sapien
aaatggatctgcagcgcgatgtcgc

SEQ ID NO: 4659967 - DNA, 25 bp, Homo sapien
tggatcagcgtaaaatggatctgca

SEQ ID NO: 4659968 - DNA, 25 bp, Homo sapien
cacagaaggtcacattgtcggggtc

SEQ ID NO: 4659969 - DNA, 25 bp, Homo sapien
atcgcccacgcgcactatgtcgatg

SEQ ID NO: 4659970 - DNA, 25 bp, Homo sapien
aggatgcagtgcaggtcgcccggcg

SEQ ID NO: 4659971 - DNA, 25 bp, Homo sapien
gcactatgtcgatgtcgttctcgca

SEQ ID NO: 4659972 - DNA, 25 bp, Homo sapien
cacgatagccgccagccgctgcaca

SEQ ID NO: 4659973 - DNA, 25 bp, Homo sapien
gtcgttaacgctgcggctctcctcg

SEQ ID NO: 4659974 - DNA, 25 bp, Homo sapien
gggatccttccaggcgtcctcgttg

SEQ ID NO: 4659975 - DNA, 25 bp, Homo sapien
gctgggcacccagtcgttaacgctg

SEQ ID NO: 4659976 - DNA, 25 bp, Homo sapien
tcctcgcaaaacaggctgagcttct

SEQ ID NO: 4659977 - DNA, 25 bp, Homo sapien
tgccagtctccacgccgcactcggg

SEQ ID NO: 4659978 - DNA, 25 bp, Homo sapien
tccacagagccagccgcgctctagg

SEQ ID NO: 4659979 - DNA, 25 bp, Homo sapien
acacttgcagagtcctcagctcgga

SEQ ID NO: 4659980 - DNA, 25 bp, Homo sapien
tcaccacgtcgatcagaccaaggtc

SEQ ID NO: 4659981 - DNA, 25 bp, Homo sapien
tgaggccaacgtcctagcctaggcc

SEQ ID NO: 4659982 - DNA, 25 bp, Homo sapien
gcattgcccggatccgttttgaaaa

SEQ ID NO: 4659983 - DNA, 25 bp, Homo sapien
ttcacgctcctgcaactgtaccaag

SEQ ID NO: 4659984 - DNA, 25 bp, Homo sapien
aaaagcagcgcagtcggctaagtcc

SEQ ID NO: 4659985 - DNA, 25 bp, Homo sapien
ccctaccctcaataaagagcataag

SEQ ID NO: 4659986 - DNA, 25 bp, Homo sapien
cagttccacggagttccagcaatcc

SEQ ID NO: 4659987 - DNA, 25 bp, Homo sapien
cccgacaggaagacggaacaggtgc

SEQ ID NO: 4659988 - DNA, 25 bp, Homo sapien
aacaggtgccatcagttccacggag

SEQ ID NO: 4659989 - DNA, 25 bp, Homo sapien
cggaattttaggacgtggcactcaa

SEQ ID NO: 4659990 - DNA, 25 bp, Homo sapien
gcttggcagtctagctgacagcaca

SEQ ID NO: 4659991 - DNA, 25 bp, Homo sapien
aatagtagatagcagatgccaggcc

SEQ ID NO: 4659992 - DNA, 25 bp, Homo sapien
tcaatgaggtaaatcagccacccca

SEQ ID NO: 4659993 - DNA, 25 bp, Homo sapien
ctcaccgtgttttctaggcaggatg

SEQ ID NO: 4659994 - DNA, 25 bp, Homo sapien
ttgggaatgcgaagccatgggctca

SEQ ID NO: 4659995 - DNA, 25 bp, Homo sapien
caactcaatgctgtcaggaccttcc

SEQ ID NO: 4659996 - DNA, 25 bp, Homo sapien
caggatgaataagagacggatgggc

SEQ ID NO: 4659997 - DNA, 25 bp, Homo sapien
atccacaagcccacctcaaagatca

SEQ ID NO: 4659998 - DNA, 25 bp, Homo sapien
aagcccacctcaaagatcaggacct

SEQ ID NO: 4659999 - DNA, 25 bp, Homo sapien
ccacctcaaagatcaggaccttggc

SEQ ID NO: 4660000 - DNA, 25 bp, Homo sapien
catggaataagcatgcgggtgtgca

SEQ ID NO: 4660001 - DNA, 25 bp, Homo sapien
gccgttcaagaaaacatgcagttca

SEQ ID NO: 4660002 - DNA, 25 bp, Homo sapien
atgaaagggcatgatatgtctggag

SEQ ID NO: 4660003 - DNA, 25 bp, Homo sapien
aaagggcatgatatgtctggagaga

SEQ ID NO: 4660004 - DNA, 25 bp, Homo sapien
tgcaagcagagtcgccgttcaagaa

SEQ ID NO: 4660005 - DNA, 25 bp, Homo sapien
actgagtgactttgttcggtcagcc

SEQ ID NO: 4660006 - DNA, 25 bp, Homo sapien
ataactgagtgactttgttcggtca

SEQ ID NO: 4660007 - DNA, 25 bp, Homo sapien
cacagcaagacacaaacttttcctg

SEQ ID NO: 4660008 - DNA, 25 bp, Homo sapien
cacacagcaagacacaaacttttcc

SEQ ID NO: 4660009 - DNA, 25 bp, Homo sapien
gggtggaggatgtgccgagacacag

SEQ ID NO: 4660010 - DNA, 25 bp, Homo sapien
gaggatgtgccgagacacagccttg

SEQ ID NO: 4660011 - DNA, 25 bp, Homo sapien
aggatgtgccgagacacagccttgt

SEQ ID NO: 4660012 - DNA, 25 bp, Homo sapien
tggaggatgtgccgagacacagcct

SEQ ID NO: 4660013 - DNA, 25 bp, Homo sapien
tgggggcacagggaaatcgagtccc

SEQ ID NO: 4660014 - DNA, 25 bp, Homo sapien
tgaagtggagaatatctgatggggt

SEQ ID NO: 4660015 - DNA, 25 bp, Homo sapien
ggcacagggaaatcgagtccctggg

SEQ ID NO: 4660016 - DNA, 25 bp, Homo sapien
tggagaatatctgatggggtggggg

SEQ ID NO: 4660017 - DNA, 25 bp, Homo sapien
gctgttgcaggccattgagcacggc

SEQ ID NO: 4660018 - DNA, 25 bp, Homo sapien
cattgagcacggcatgctggccctc

SEQ ID NO: 4660019 - DNA, 25 bp, Homo sapien
ctgttgcaggccattgagcacggca

SEQ ID NO: 4660020 - DNA, 25 bp, Homo sapien
ccatgccgatcctggggttgctttg

SEQ ID NO: 4660021 - DNA, 25 bp, Homo sapien
cgcaccatgccgatcctggggttgc

SEQ ID NO: 4660022 - DNA, 25 bp, Homo sapien
gactgtatttagaaaggcaagttcc

SEQ ID NO: 4660023 - DNA, 25 bp, Homo sapien
caccatgccgatcctggggttgctt

SEQ ID NO: 4660024 - DNA, 25 bp, Homo sapien
ttgggtgcttggcagttccacagca

SEQ ID NO: 4660025 - DNA, 25 bp, Homo sapien
tctctgtagccatcggcctcgcagg

SEQ ID NO: 4660026 - DNA, 25 bp, Homo sapien
cagggttcctgtctccttgagccag

SEQ ID NO: 4660027 - DNA, 25 bp, Homo sapien
gacttagattgtacccatctcttgg

SEQ ID NO: 4660028 - DNA, 25 bp, Homo sapien
actcctcgcactttgtcattgtgtg

SEQ ID NO: 4660029 - DNA, 25 bp, Homo sapien
cttctgtgattactggctgggtcgc

SEQ ID NO: 4660030 - DNA, 25 bp, Homo sapien
tggctgggtcgctgttctccaccca

SEQ ID NO: 4660031 - DNA, 25 bp, Homo sapien
acactcctcgcactttgtcattgtg

SEQ ID NO: 4660032 - DNA, 25 bp, Homo sapien
gctggaacaagtggcatagtatgct

SEQ ID NO: 4660033 - DNA, 25 bp, Homo sapien
tattgttgactcttttaatactaca

SEQ ID NO: 4660034 - DNA, 25 bp, Homo sapien
caaaaatagttcatgttgctggaac

SEQ ID NO: 4660035 - DNA, 25 bp, Homo sapien
cctgcaaccggctgggttttattgt

SEQ ID NO: 4660036 - DNA, 25 bp, Homo sapien
tctgagcgcaaggaaccgctgggtc

SEQ ID NO: 4660037 - DNA, 25 bp, Homo sapien
ctcctgctctgagcgcaaggaaccg

SEQ ID NO: 4660038 - DNA, 25 bp, Homo sapien
tgctctgagcgcaaggaaccgctgg

SEQ ID NO: 4660039 - DNA, 25 bp, Homo sapien
cgcaaggaaccgctgggtccctact

SEQ ID NO: 4660040 - DNA, 25 bp, Homo sapien
tcagaggccgaagaacacggtggag

SEQ ID NO: 4660041 - DNA, 25 bp, Homo sapien
agaacacggtggagggcatgtgctc

SEQ ID NO: 4660042 - DNA, 25 bp, Homo sapien
ggccgaagaacacggtggagggcat

SEQ ID NO: 4660043 - DNA, 25 bp, Homo sapien
aacacggtggagggcatgtgctcct

SEQ ID NO: 4660044 - DNA, 25 bp, Homo sapien
gcctttaagatggagcaagctggct

SEQ ID NO: 4660045 - DNA, 25 bp, Homo sapien
gctggctgtgacttgtgttgaattc

SEQ ID NO: 4660046 - DNA, 25 bp, Homo sapien
ccagggtcaatgtgtggtctcgaac

SEQ ID NO: 4660047 - DNA, 25 bp, Homo sapien
acaggttggcaagagctcaggactt

SEQ ID NO: 4660048 - DNA, 25 bp, Homo sapien
gagcccacacttctccacgaggaat

SEQ ID NO: 4660049 - DNA, 25 bp, Homo sapien
ccacacagtgcacacttgccagttc

SEQ ID NO: 4660050 - DNA, 25 bp, Homo sapien
cccacacttctccacgaggaatgaa

SEQ ID NO: 4660051 - DNA, 25 bp, Homo sapien
ggagcccacacttctccacgaggaa

SEQ ID NO: 4660052 - DNA, 25 bp, Homo sapien
catggaactgcttggaaagtagagc

SEQ ID NO: 4660053 - DNA, 25 bp, Homo sapien
cttggaaagtagagctccctgggac

SEQ ID NO: 4660054 - DNA, 25 bp, Homo sapien
cagctcgtccctaaaataagactcc

SEQ ID NO: 4660055 - DNA, 25 bp, Homo sapien
gctgggctgccagctcgtccctaaa

SEQ ID NO: 4660056 - DNA, 25 bp, Homo sapien
caggatggggatccaaaaagccagg

SEQ ID NO: 4660057 - DNA, 25 bp, Homo sapien
tccaatctgggactcttggggttgg

SEQ ID NO: 4660058 - DNA, 25 bp, Homo sapien
aggatggggatccaaaaagccagga

SEQ ID NO: 4660059 - DNA, 25 bp, Homo sapien
tcaagttgaccagggcttatgctcc

SEQ ID NO: 4660060 - DNA, 25 bp, Homo sapien
tcaaacacccgaggcataatgctgg

SEQ ID NO: 4660061 - DNA, 25 bp, Homo sapien
gcgccgacgggaagcaagtatgact

SEQ ID NO: 4660062 - DNA, 25 bp, Homo sapien
gggacacggccatataacctggaga

SEQ ID NO: 4660063 - DNA, 25 bp, Homo sapien
cgtgcttgtgtcttcccaacagagg

SEQ ID NO: 4660064 - DNA, 25 bp, Homo sapien
cagctgctcaggtgtctagggccat

SEQ ID NO: 4660065 - DNA, 25 bp, Homo sapien
taacgggcataatcctggtggcaac

SEQ ID NO: 4660066 - DNA, 25 bp, Homo sapien
ttcactaattaaggccccagtcggc

SEQ ID NO: 4660067 - DNA, 25 bp, Homo sapien
ttcttgtccttgaggcttggcttct

SEQ ID NO: 4660068 - DNA, 25 bp, Homo sapien
cttgtccttgaggcttggcttctcc

SEQ ID NO: 4660069 - DNA, 25 bp, Homo sapien
tcttgtccttgaggcttggcttctc

SEQ ID NO: 4660070 - DNA, 25 bp, Homo sapien
cttcttgtccttgaggcttggcttc

SEQ ID NO: 4660071 - DNA, 25 bp, Homo sapien
gaagagcatttggtggccataccag

SEQ ID NO: 4660072 - DNA, 25 bp, Homo sapien
catgctatctgtggaatgctgtgcg

SEQ ID NO: 4660073 - DNA, 25 bp, Homo sapien
atgctgtgcgcaaagctccctggca

SEQ ID NO: 4660074 - DNA, 25 bp, Homo sapien
ccataccagagtggcagatgctcac

SEQ ID NO: 4660075 - DNA, 25 bp, Homo sapien
tcaaccgcagcactgaaagtgtgtg

SEQ ID NO: 4660076 - DNA, 25 bp, Homo sapien
tgagcgtctcaagcatcaaccgcag

SEQ ID NO: 4660077 - DNA, 25 bp, Homo sapien
acttggtcagctgaagaacggtgtg

SEQ ID NO: 4660078 - DNA, 25 bp, Homo sapien
aaagtgtgtgctttgccgcacaggg

SEQ ID NO: 4660079 - DNA, 25 bp, Homo sapien
tatccttcatgtgtccccaagcgtg

SEQ ID NO: 4660080 - DNA, 25 bp, Homo sapien
tcaacgtgcgatgggagcctgaaag

SEQ ID NO: 4660081 - DNA, 25 bp, Homo sapien
aagcgaggtgttactgggccagctc

SEQ ID NO: 4660082 - DNA, 25 bp, Homo sapien
tgttcacaagccaggttcaacgtgc

SEQ ID NO: 4660083 - DNA, 25 bp, Homo sapien
ttgcgtttcttgcagcagcctttct

SEQ ID NO: 4660084 - DNA, 25 bp, Homo sapien
ggtgcatacagcgatacatccataa

SEQ ID NO: 4660085 - DNA, 25 bp, Homo sapien
acatccataaattttgcggggcagc

SEQ ID NO: 4660086 - DNA, 25 bp, Homo sapien
tagagcttgctattaggtgcataca

SEQ ID NO: 4660087 - DNA, 25 bp, Homo sapien
tgctgaggctcccataaaggatgca

SEQ ID NO: 4660088 - DNA, 25 bp, Homo sapien
tactggagtgcattttgcccctctg

SEQ ID NO: 4660089 - DNA, 25 bp, Homo sapien
tcagcaaggcctcaatgaccaaaat

SEQ ID NO: 4660090 - DNA, 25 bp, Homo sapien
tcaagaaaactcctcggtgagcttt

SEQ ID NO: 4660091 - DNA, 25 bp, Homo sapien
cactatggggatgtgcacactggag

SEQ ID NO: 4660092 - DNA, 25 bp, Homo sapien
cactggggggatgtatacaccagga

SEQ ID NO: 4660093 - DNA, 25 bp, Homo sapien
tgcacactgggggaggtacacactg

SEQ ID NO: 4660094 - DNA, 25 bp, Homo sapien
gatgtttacactggaggcatgtgca

SEQ ID NO: 4660095 - DNA, 25 bp, Homo sapien
agggctgtccctacccagaagtggc

SEQ ID NO: 4660096 - DNA, 25 bp, Homo sapien
agagcatatggcgagctgcacacct

SEQ ID NO: 4660097 - DNA, 25 bp, Homo sapien
gaaacccgacgctcagcagagcata

SEQ ID NO: 4660098 - DNA, 25 bp, Homo sapien
cactcactttatctcacctggtagg

SEQ ID NO: 4660099 - DNA, 25 bp, Homo sapien
ccccacgctgacattcatgaaggca

SEQ ID NO: 4660100 - DNA, 25 bp, Homo sapien
cagggggctgtttaggaacatccat

SEQ ID NO: 4660101 - DNA, 25 bp, Homo sapien
ctcagggggctgtttaggaacatcc

SEQ ID NO: 4660102 - DNA, 25 bp, Homo sapien
cggagccccccacgctgacattcat

SEQ ID NO: 4660103 - DNA, 25 bp, Homo sapien
ctgtgtcccaagatgtcatgaggcc

SEQ ID NO: 4660104 - DNA, 25 bp, Homo sapien
gcaggacttccacggcacttgaaac

SEQ ID NO: 4660105 - DNA, 25 bp, Homo sapien
aaggagtctgacttttgtagctctg

SEQ ID NO: 4660106 - DNA, 25 bp, Homo sapien
gaaacctgtggcaaggagtctgact

SEQ ID NO: 4660107 - DNA, 25 bp, Homo sapien
gaccaggtaatgttggaacatctgt

SEQ ID NO: 4660108 - DNA, 25 bp, Homo sapien
ggtaatgttggaacatctgtctgga

SEQ ID NO: 4660109 - DNA, 25 bp, Homo sapien
aatgttggaacatctgtctggacgt

SEQ ID NO: 4660110 - DNA, 25 bp, Homo sapien
tgagtcagcagccagctaggtgtga

SEQ ID NO: 4660111 - DNA, 25 bp, Homo sapien
tggcagggcaggaagagcaggccgg

SEQ ID NO: 4660112 - DNA, 25 bp, Homo sapien
ctggagcaacacaggtggcagggca

SEQ ID NO: 4660113 - DNA, 25 bp, Homo sapien
agggcaggaagagcaggccggctcc

SEQ ID NO: 4660114 - DNA, 25 bp, Homo sapien
gcagggcaggaagagcaggccggct

SEQ ID NO: 4660115 - DNA, 25 bp, Homo sapien
cttgatgctccccgaggatgagggc

SEQ ID NO: 4660116 - DNA, 25 bp, Homo sapien
ttgatgctccccgaggatgagggct

SEQ ID NO: 4660117 - DNA, 25 bp, Homo sapien
tgctccccgaggatgagggctgagc

SEQ ID NO: 4660118 - DNA, 25 bp, Homo sapien
gatgctccccgaggatgagggctga

SEQ ID NO: 4660119 - DNA, 25 bp, Homo sapien
agaaccacgtgagagcattgctgac

SEQ ID NO: 4660120 - DNA, 25 bp, Homo sapien
gaaccacgtgagagcattgctgact

SEQ ID NO: 4660121 - DNA, 25 bp, Homo sapien
accacgtgagagcattgctgactct

SEQ ID NO: 4660122 - DNA, 25 bp, Homo sapien
tcagaaccacgtgagagcattgctg

SEQ ID NO: 4660123 - DNA, 25 bp, Homo sapien
ctgtgtctctggcatgatatgtctg

SEQ ID NO: 4660124 - DNA, 25 bp, Homo sapien
gattttcaggttgattacgctgatc

SEQ ID NO: 4660125 - DNA, 25 bp, Homo sapien
gatcacatcacagtttagcaaagtg

SEQ ID NO: 4660126 - DNA, 25 bp, Homo sapien
caatacctttgacgggagctgcaga

SEQ ID NO: 4660127 - DNA, 25 bp, Homo sapien
atgctgcaatccgtgaagatctgtg

SEQ ID NO: 4660128 - DNA, 25 bp, Homo sapien
cctgaatgctgcaatccgtgaagat

SEQ ID NO: 4660129 - DNA, 25 bp, Homo sapien
tggaaatgcagctatgctaagcaaa

SEQ ID NO: 4660130 - DNA, 25 bp, Homo sapien
gctaagcaaacactgcaatgggcct

SEQ ID NO: 4660131 - DNA, 25 bp, Homo sapien
gactctttagaatgtgagccatcag

SEQ ID NO: 4660132 - DNA, 25 bp, Homo sapien
tagaatgtgagccatcagtgtgcat

SEQ ID NO: 4660133 - DNA, 25 bp, Homo sapien
tgactctttagaatgtgagccatca

SEQ ID NO: 4660134 - DNA, 25 bp, Homo sapien
tctttagaatgtgagccatcagtgt

SEQ ID NO: 4660135 - DNA, 25 bp, Homo sapien
ggccaattctgtctcaacacctgga

SEQ ID NO: 4660136 - DNA, 25 bp, Homo sapien
gaggtgtcctcagccacagggcatc

SEQ ID NO: 4660137 - DNA, 25 bp, Homo sapien
tagcaggcagcacaatcagagaatg

SEQ ID NO: 4660138 - DNA, 25 bp, Homo sapien
gcaagctggacttccaaactggctc

SEQ ID NO: 4660139 - DNA, 25 bp, Homo sapien
ctttcagaagtctaccaggtcagcc

SEQ ID NO: 4660140 - DNA, 25 bp, Homo sapien
gaggacaacttgaacccagagcact

SEQ ID NO: 4660141 - DNA, 25 bp, Homo sapien
ggacaacttgaacccagagcactgt

SEQ ID NO: 4660142 - DNA, 25 bp, Homo sapien
tgtctttcagaagtctaccaggtca

SEQ ID NO: 4660143 - DNA, 25 bp, Homo sapien
catcttgcactgataccacgctctt

SEQ ID NO: 4660144 - DNA, 25 bp, Homo sapien
tacagtatctacctaggaagcacca

SEQ ID NO: 4660145 - DNA, 25 bp, Homo sapien
ctgataccacgctcttagaagagtc

SEQ ID NO: 4660146 - DNA, 25 bp, Homo sapien
ctaggaagcaccaaatagcatcttg

SEQ ID NO: 4660147 - DNA, 25 bp, Homo sapien
tgagcttcagtctgtgcttttgctt

SEQ ID NO: 4660148 - DNA, 25 bp, Homo sapien
ttgagcttcagtctgtgcttttgct

SEQ ID NO: 4660149 - DNA, 25 bp, Homo sapien
gaagtggctgcaaaactggacagtg

SEQ ID NO: 4660150 - DNA, 25 bp, Homo sapien
ttatgcggagtgcagaacttggacc

SEQ ID NO: 4660151 - DNA, 25 bp, Homo sapien
aacttggacctagcaaactgtgtag

SEQ ID NO: 4660152 - DNA, 25 bp, Homo sapien
tcacatagtggcaaaaggtttagct

SEQ ID NO: 4660153 - DNA, 25 bp, Homo sapien
gatatttgctatggatcatccagcc

SEQ ID NO: 4660154 - DNA, 25 bp, Homo sapien
tacacagctgatggaggcaagtctc

SEQ ID NO: 4660155 - DNA, 25 bp, Homo sapien
aggtcatcctgaggtttacacagct

SEQ ID NO: 4660156 - DNA, 25 bp, Homo sapien
cacaatgcttatccatcaggggata

SEQ ID NO: 4660157 - DNA, 25 bp, Homo sapien
tgaagccagcccgtattcaagggag

SEQ ID NO: 4660158 - DNA, 25 bp, Homo sapien
gatcactcattgacgtgttgggcag

SEQ ID NO: 4660159 - DNA, 25 bp, Homo sapien
tgtcactgactacgagctggtctct

SEQ ID NO: 4660160 - DNA, 25 bp, Homo sapien
gcagctaatgtccaagaacaagggc

SEQ ID NO: 4660161 - DNA, 25 bp, Homo sapien
agggagcagcggtgaaccaagcacc

SEQ ID NO: 4660162 - DNA, 25 bp, Homo sapien
tcagtgcactgagctaagcagttcc

SEQ ID NO: 4660163 - DNA, 25 bp, Homo sapien
ccagctttatgagggtgggtgggat

SEQ ID NO: 4660164 - DNA, 25 bp, Homo sapien
caagcaccagaaataccagcactta

SEQ ID NO: 4660165 - DNA, 25 bp, Homo sapien
aaaactaagccaggattgcggcgcc

SEQ ID NO: 4660166 - DNA, 25 bp, Homo sapien
ccctggagtggactgactgagaacc

SEQ ID NO: 4660167 - DNA, 25 bp, Homo sapien
aaatcaaggcaaagcgggacagccc

SEQ ID NO: 4660168 - DNA, 25 bp, Homo sapien
cggctcttggccactcagtagggaa

SEQ ID NO: 4660169 - DNA, 25 bp, Homo sapien
tagccttttaccgaagagtctcctg

SEQ ID NO: 4660170 - DNA, 25 bp, Homo sapien
gacactcagttatgggttttcccca

SEQ ID NO: 4660171 - DNA, 25 bp, Homo sapien
gaatgacaggcaaacaaggtgggca

SEQ ID NO: 4660172 - DNA, 25 bp, Homo sapien
gactcttgacaaattgccctctgca

SEQ ID NO: 4660173 - DNA, 25 bp, Homo sapien
aagacaccataaaagcagagccggc

SEQ ID NO: 4660174 - DNA, 25 bp, Homo sapien
gaaccaggcgagaacctctttgaag

SEQ ID NO: 4660175 - DNA, 25 bp, Homo sapien
aacaaaggtctatagtctccccgag

SEQ ID NO: 4660176 - DNA, 25 bp, Homo sapien
gaccacagcagacatagaagccctg

SEQ ID NO: 4660177 - DNA, 25 bp, Homo sapien
tcctagagctatgtccttggcccag

SEQ ID NO: 4660178 - DNA, 25 bp, Homo sapien
ctgaccatggtggacagctagccct

SEQ ID NO: 4660179 - DNA, 25 bp, Homo sapien
gatggcaccctcactactaagataa

SEQ ID NO: 4660180 - DNA, 25 bp, Homo sapien
gggacttctttgaggcgattgccaa

SEQ ID NO: 4660181 - DNA, 25 bp, Homo sapien
cctttgtcctggtttagcagagtcc

SEQ ID NO: 4660182 - DNA, 25 bp, Homo sapien
aggtcagctgcttccgccaccaacg

SEQ ID NO: 4660183 - DNA, 25 bp, Homo sapien
gtcctggtttagcagagtcccggat

SEQ ID NO: 4660184 - DNA, 25 bp, Homo sapien
tggtttagcagagtcccggattcca

SEQ ID NO: 4660185 - DNA, 25 bp, Homo sapien
ccttcaacaaaaatgacgccattca

SEQ ID NO: 4660186 - DNA, 25 bp, Homo sapien
tgccttcaacaaaaatgacgccatt

SEQ ID NO: 4660187 - DNA, 25 bp, Homo sapien
aatgacgccattcaactcccttctt

SEQ ID NO: 4660188 - DNA, 25 bp, Homo sapien
tgtgccttcaacaaaaatgacgcca

SEQ ID NO: 4660189 - DNA, 25 bp, Homo sapien
tatccaagcctacaattgttccagc

SEQ ID NO: 4660190 - DNA, 25 bp, Homo sapien
cactgtcgatgttcccacagatgag

SEQ ID NO: 4660191 - DNA, 25 bp, Homo sapien
taattgcccggactgttcccatcca

SEQ ID NO: 4660192 - DNA, 25 bp, Homo sapien
gaagccatagagtcacaaagccaac

SEQ ID NO: 4660193 - DNA, 25 bp, Homo sapien
ggtgtggcatctggagactcccaaa

SEQ ID NO: 4660194 - DNA, 25 bp, Homo sapien
tggttgtgaacacaacagttagcaa

SEQ ID NO: 4660195 - DNA, 25 bp, Homo sapien
gctcgtggatgtggcctagatcctg

SEQ ID NO: 4660196 - DNA, 25 bp, Homo sapien
gaaccaggttggtgtcatgcaaaat

SEQ ID NO: 4660197 - DNA, 25 bp, Homo sapien
cagtcccagccaaacctttgtgaca

SEQ ID NO: 4660198 - DNA, 25 bp, Homo sapien
cagccaaacctttgtgacaggacac

SEQ ID NO: 4660199 - DNA, 25 bp, Homo sapien
tccagcccagtcagcataaccttta

SEQ ID NO: 4660200 - DNA, 25 bp, Homo sapien
gacaggcagcaagccagtggctttt

SEQ ID NO: 4660201 - DNA, 25 bp, Homo sapien
ccaacacacgctgtcctcgcctcac

SEQ ID NO: 4660202 - DNA, 25 bp, Homo sapien
ctccaacacacgctgtcctcgcctc

SEQ ID NO: 4660203 - DNA, 25 bp, Homo sapien
tccaacacacgctgtcctcgcctca

SEQ ID NO: 4660204 - DNA, 25 bp, Homo sapien
cagcgaccggctcctggagcaatgg

SEQ ID NO: 4660205 - DNA, 25 bp, Homo sapien
tcagcgaccggctcctggagcaatg

SEQ ID NO: 4660206 - DNA, 25 bp, Homo sapien
tcttcacctgcgtcctctggatttg

SEQ ID NO: 4660207 - DNA, 25 bp, Homo sapien
tgtcttcacctgcgtcctctggatt

SEQ ID NO: 4660208 - DNA, 25 bp, Homo sapien
ttcacctgcgtcctctggatttgca

SEQ ID NO: 4660209 - DNA, 25 bp, Homo sapien
tcacctgcgtcctctggatttgcat

SEQ ID NO: 4660210 - DNA, 25 bp, Homo sapien
tgacagcccaggtataccaggtcag

SEQ ID NO: 4660211 - DNA, 25 bp, Homo sapien
tataccaggtcagctggtgactggg

SEQ ID NO: 4660212 - DNA, 25 bp, Homo sapien
agcccaggtataccaggtcagctgg

SEQ ID NO: 4660213 - DNA, 25 bp, Homo sapien
ccaggtataccaggtcagctggtga

SEQ ID NO: 4660214 - DNA, 25 bp, Homo sapien
tacattggcagaatggaagttattc

SEQ ID NO: 4660215 - DNA, 25 bp, Homo sapien
gaggcaaagcccttcgtaattacag

SEQ ID NO: 4660216 - DNA, 25 bp, Homo sapien
gctggcatttgttgtattattgggc

SEQ ID NO: 4660217 - DNA, 25 bp, Homo sapien
tctctttagagtgctaagccagtgg

SEQ ID NO: 4660218 - DNA, 25 bp, Homo sapien
ctgactaccagagccgccatgctgc

SEQ ID NO: 4660219 - DNA, 25 bp, Homo sapien
gctgggatatccttgagcatagctc

SEQ ID NO: 4660220 - DNA, 25 bp, Homo sapien
tgcaggtcccatgcaggctgtggtt

SEQ ID NO: 4660221 - DNA, 25 bp, Homo sapien
caacttggggatagctctgggagct

SEQ ID NO: 4660222 - DNA, 25 bp, Homo sapien
gttaagatccacattgcagaaatca

SEQ ID NO: 4660223 - DNA, 25 bp, Homo sapien
aagaagcctggctgactagtgaagg

SEQ ID NO: 4660224 - DNA, 25 bp, Homo sapien
tagcagatgtaaggcggttctggta

SEQ ID NO: 4660225 - DNA, 25 bp, Homo sapien
gaaatcagcccatttgcactggaag

SEQ ID NO: 4660226 - DNA, 25 bp, Homo sapien
gaatccttcatgtacacgatactcg

SEQ ID NO: 4660227 - DNA, 25 bp, Homo sapien
ttgagtcatccccatcggatgagaa

SEQ ID NO: 4660228 - DNA, 25 bp, Homo sapien
cacgatactcgttatttggcaaccg

SEQ ID NO: 4660229 - DNA, 25 bp, Homo sapien
tttggcaaccggatctcatccacat

SEQ ID NO: 4660230 - DNA, 25 bp, Homo sapien
aatgaacctacagcttggaagtggc

SEQ ID NO: 4660231 - DNA, 25 bp, Homo sapien
gggaaggtatcagggaccccagcat

SEQ ID NO: 4660232 - DNA, 25 bp, Homo sapien
cagacttgaagttgtcccgggaagg

SEQ ID NO: 4660233 - DNA, 25 bp, Homo sapien
ctggcgggcctaagagctgctttga

SEQ ID NO: 4660234 - DNA, 25 bp, Homo sapien
tagggctcactaccagaaattagat

SEQ ID NO: 4660235 - DNA, 25 bp, Homo sapien
tctccagtgggcagttgggtgtccc

SEQ ID NO: 4660236 - DNA, 25 bp, Homo sapien
tttaaccacaatctttacgaggtgc

SEQ ID NO: 4660237 - DNA, 25 bp, Homo sapien
gatgaacaagtgagacctacctggc

SEQ ID NO: 4660238 - DNA, 25 bp, Homo sapien
tcctgtttaaggtttgctccatttc

SEQ ID NO: 4660239 - DNA, 25 bp, Homo sapien
tctcttttgctattgagtccatcaa

SEQ ID NO: 4660240 - DNA, 25 bp, Homo sapien
tctgggagtggatttccttattttg

SEQ ID NO: 4660241 - DNA, 25 bp, Homo sapien
tttaaccttgctccacagttctctg

SEQ ID NO: 4660242 - DNA, 25 bp, Homo sapien
gagcagtgcacgtggggccatgagg

SEQ ID NO: 4660243 - DNA, 25 bp, Homo sapien
gctgcagctggatcagaagaggcat

SEQ ID NO: 4660244 - DNA, 25 bp, Homo sapien
cagggctgcagctggatcagaagag

SEQ ID NO: 4660245 - DNA, 25 bp, Homo sapien
aggttccagaagcaggacctcccag

SEQ ID NO: 4660246 - DNA, 25 bp, Homo sapien
ggcaccagttggcacttcctcctgc

SEQ ID NO: 4660247 - DNA, 25 bp, Homo sapien
cagctgaaacaaggctcgaccatca

SEQ ID NO: 4660248 - DNA, 25 bp, Homo sapien
gggacaccgatgcagtcaaccctgt

SEQ ID NO: 4660249 - DNA, 25 bp, Homo sapien
gcttaggaagcacttaatcaaacgt

SEQ ID NO: 4660250 - DNA, 25 bp, Homo sapien
gacacatatgaaagaccctcctgag

SEQ ID NO: 4660251 - DNA, 25 bp, Homo sapien
tcgtgccccaaaacatgatgcaacc

SEQ ID NO: 4660252 - DNA, 25 bp, Homo sapien
caagaagaagcaagttgatgggagc

SEQ ID NO: 4660253 - DNA, 25 bp, Homo sapien
tttgtgctggtcaatccagctgcag

SEQ ID NO: 4660254 - DNA, 25 bp, Homo sapien
ccttgctattcagccagcacaaagg

SEQ ID NO: 4660255 - DNA, 25 bp, Homo sapien
tgtgatggcaaacatcctgagctgc

SEQ ID NO: 4660256 - DNA, 25 bp, Homo sapien
tcaactgttggctaggcgagcaccg

SEQ ID NO: 4660257 - DNA, 25 bp, Homo sapien
caaacaaatcatgggaaaagggtag

SEQ ID NO: 4660258 - DNA, 25 bp, Homo sapien
tcacattccatgcatagcagtggtt

SEQ ID NO: 4660259 - DNA, 25 bp, Homo sapien
tgacaaggtattacgggtgaaaatg

SEQ ID NO: 4660260 - DNA, 25 bp, Homo sapien
aaggtattacgggtgaaaatgtcat

SEQ ID NO: 4660261 - DNA, 25 bp, Homo sapien
ctgccaaagtggtacgggtgacaag

SEQ ID NO: 4660262 - DNA, 25 bp, Homo sapien
ctgagactgccaaagtggtacgggt

SEQ ID NO: 4660263 - DNA, 25 bp, Homo sapien
tcagccccttactgcggagggccat

SEQ ID NO: 4660264 - DNA, 25 bp, Homo sapien
tgggctgggtgccagaatcagcccc

SEQ ID NO: 4660265 - DNA, 25 bp, Homo sapien
ggtgccagaatcagccccttactgc

SEQ ID NO: 4660266 - DNA, 25 bp, Homo sapien
cagaatcagccccttactgcggagg

SEQ ID NO: 4660267 - DNA, 25 bp, Homo sapien
accaaggcagactctcggagtccgt

SEQ ID NO: 4660268 - DNA, 25 bp, Homo sapien
ccgtgtgggctttactggtattcca

SEQ ID NO: 4660269 - DNA, 25 bp, Homo sapien
ttctgcctctcctcggaggagggtc

SEQ ID NO: 4660270 - DNA, 25 bp, Homo sapien
cctctcctcggaggagggtcgtgca

SEQ ID NO: 4660271 - DNA, 25 bp, Homo sapien
tgaccttcaatctccaacacgaatg

SEQ ID NO: 4660272 - DNA, 25 bp, Homo sapien
gctgtgtgaataccaaagtcttttg

SEQ ID NO: 4660273 - DNA, 25 bp, Homo sapien
aatctccaacacgaatgctgtgtga

SEQ ID NO: 4660274 - DNA, 25 bp, Homo sapien
agaaagtgaccttcaatctccaaca

SEQ ID NO: 4660275 - DNA, 25 bp, Homo sapien
ccatatttatgtcgagagatggaga

SEQ ID NO: 4660276 - DNA, 25 bp, Homo sapien
tacaacaaatattgtgccatactgg

SEQ ID NO: 4660277 - DNA, 25 bp, Homo sapien
caggtgtgatcaggtacagtccata

SEQ ID NO: 4660278 - DNA, 25 bp, Homo sapien
tgtctcctacaacaaatattgtgcc

SEQ ID NO: 4660279 - DNA, 25 bp, Homo sapien
tgtacttgggaagcgacgaagcacc

SEQ ID NO: 4660280 - DNA, 25 bp, Homo sapien
tcaacaactgggtttcagaagagct

SEQ ID NO: 4660281 - DNA, 25 bp, Homo sapien
cacgactagtgtctgaagtgggctc

SEQ ID NO: 4660282 - DNA, 25 bp, Homo sapien
tatacaaacaagtggtgctcgtcgg

SEQ ID NO: 4660283 - DNA, 25 bp, Homo sapien
tccagttcacacattgggcttgtgt

SEQ ID NO: 4660284 - DNA, 25 bp, Homo sapien
tggcctccagttcacacattgggct

SEQ ID NO: 4660285 - DNA, 25 bp, Homo sapien
agttcacacattgggcttgtgttca

SEQ ID NO: 4660286 - DNA, 25 bp, Homo sapien
gcctccagttcacacattgggcttg

SEQ ID NO: 4660287 - DNA, 25 bp, Homo sapien
tgcatctccatgagtagttgagctg

SEQ ID NO: 4660288 - DNA, 25 bp, Homo sapien
gggagtgagctagcagcatctgcat

SEQ ID NO: 4660289 - DNA, 25 bp, Homo sapien
cctcctttcgcacaggaccatcatg

SEQ ID NO: 4660290 - DNA, 25 bp, Homo sapien
agaatgggagtgagctagcagcatc

SEQ ID NO: 4660291 - DNA, 25 bp, Homo sapien
catagtagccacctctgggtgaagg

SEQ ID NO: 4660292 - DNA, 25 bp, Homo sapien
ctaggtgatcatagtagccacctct

SEQ ID NO: 4660293 - DNA, 25 bp, Homo sapien
gatcatagtagccacctctgggtga

SEQ ID NO: 4660294 - DNA, 25 bp, Homo sapien
ggtgatcatagtagccacctctggg

SEQ ID NO: 4660295 - DNA, 25 bp, Homo sapien
tagggatcagagacttttctccgag

SEQ ID NO: 4660296 - DNA, 25 bp, Homo sapien
aaaaatattactgggcatcctctca

SEQ ID NO: 4660297 - DNA, 25 bp, Homo sapien
cctcggatgatctggaccttaggga

SEQ ID NO: 4660298 - DNA, 25 bp, Homo sapien
tcctctcaatggatgagggtgtccc

SEQ ID NO: 4660299 - DNA, 25 bp, Homo sapien
cagcttgatatcctcaccttcctgg

SEQ ID NO: 4660300 - DNA, 25 bp, Homo sapien
tgtggggcttgtttgacttgtcatc

SEQ ID NO: 4660301 - DNA, 25 bp, Homo sapien
ggcttgtttgacttgtcatccagct

SEQ ID NO: 4660302 - DNA, 25 bp, Homo sapien
ttgtcatccagcttgatatcctcac

SEQ ID NO: 4660303 - DNA, 25 bp, Homo sapien
gtttcctgatggggacaactctgag

SEQ ID NO: 4660304 - DNA, 25 bp, Homo sapien
gaagcaaatgtgacaagctcgtttc

SEQ ID NO: 4660305 - DNA, 25 bp, Homo sapien
gcaaatgtgacaagctcgtttctag

SEQ ID NO: 4660306 - DNA, 25 bp, Homo sapien
aatgtgacaagctcgtttctagacc

SEQ ID NO: 4660307 - DNA, 25 bp, Homo sapien
gagaagcaaatgtgacaagctcgtt

SEQ ID NO: 4660308 - DNA, 25 bp, Homo sapien
tttggacctttagggcagccctgca

SEQ ID NO: 4660309 - DNA, 25 bp, Homo sapien
cctgagtccagatgcgctggcctgg

SEQ ID NO: 4660310 - DNA, 25 bp, Homo sapien
tgcgttggatgactgctgtccagcc

SEQ ID NO: 4660311 - DNA, 25 bp, Homo sapien
aagctgtccttggagtagcctttgg

SEQ ID NO: 4660312 - DNA, 25 bp, Homo sapien
catcagattcacagtgtaggtggcc

SEQ ID NO: 4660313 - DNA, 25 bp, Homo sapien
caagggagttatcctgcatgtgcct

SEQ ID NO: 4660314 - DNA, 25 bp, Homo sapien
ccacatgatcatcggcccttggtgt

SEQ ID NO: 4660315 - DNA, 25 bp, Homo sapien
cagccatgccacgaaagacaaggga

SEQ ID NO: 4660316 - DNA, 25 bp, Homo sapien
ctgggcctggggaccctggcactgc

SEQ ID NO: 4660317 - DNA, 25 bp, Homo sapien
ctggcactgccacccctgtgctcac

SEQ ID NO: 4660318 - DNA, 25 bp, Homo sapien
gctgggcctggggaccctggcactg

SEQ ID NO: 4660319 - DNA, 25 bp, Homo sapien
gtggctgggcctggggaccctggca

SEQ ID NO: 4660320 - DNA, 25 bp, Homo sapien
aggtcccaggtggtaatacgactga

SEQ ID NO: 4660321 - DNA, 25 bp, Homo sapien
ggccctgagagttgacctgaggtcc

SEQ ID NO: 4660322 - DNA, 25 bp, Homo sapien
taatgaagtaatcaaggccctgaga

SEQ ID NO: 4660323 - DNA, 25 bp, Homo sapien
taatacgactgacagtcccaatgtg

SEQ ID NO: 4660324 - DNA, 25 bp, Homo sapien
aatatagagaaagacataggtctcc

SEQ ID NO: 4660325 - DNA, 25 bp, Homo sapien
atagagaaagacataggtctcctga

SEQ ID NO: 4660326 - DNA, 25 bp, Homo sapien
tatagagaaagacataggtctcctg

SEQ ID NO: 4660327 - DNA, 25 bp, Homo sapien
agaatatagagaaagacataggtct

SEQ ID NO: 4660328 - DNA, 25 bp, Homo sapien
ggtgctcctcttgaacagggagaga

SEQ ID NO: 4660329 - DNA, 25 bp, Homo sapien
gagagaaacaccctcttactgcgga

SEQ ID NO: 4660330 - DNA, 25 bp, Homo sapien
ttggacagccgatgcaagaacagga

SEQ ID NO: 4660331 - DNA, 25 bp, Homo sapien
tgggatcctaaacctttctggctga

SEQ ID NO: 4660332 - DNA, 25 bp, Homo sapien
gactgcaggttcttcgtaggcctct

SEQ ID NO: 4660333 - DNA, 25 bp, Homo sapien
tgtcagcatgggaagatccagtcct

SEQ ID NO: 4660334 - DNA, 25 bp, Homo sapien
taatgacttggacacccagagctga

SEQ ID NO: 4660335 - DNA, 25 bp, Homo sapien
tcactcagtggtctctcttgccaag

SEQ ID NO: 4660336 - DNA, 25 bp, Homo sapien
gtctcaatacccagctgtcccagcc

SEQ ID NO: 4660337 - DNA, 25 bp, Homo sapien
cccttgactggaaagtggctactga

SEQ ID NO: 4660338 - DNA, 25 bp, Homo sapien
tgctgagaaccaccccgacttacag

SEQ ID NO: 4660339 - DNA, 25 bp, Homo sapien
gctactgaggctgagtgtctcctag

SEQ ID NO: 4660340 - DNA, 25 bp, Homo sapien
caggagcatgtgctacggagccagt

SEQ ID NO: 4660341 - DNA, 25 bp, Homo sapien
tcagggacccgacaccagaactgga

SEQ ID NO: 4660342 - DNA, 25 bp, Homo sapien
ctcagggacccgacaccagaactgg

SEQ ID NO: 4660343 - DNA, 25 bp, Homo sapien
gctacggagccagtccacagagctc

SEQ ID NO: 4660344 - DNA, 25 bp, Homo sapien
gagctacgacaagcaggagtactac

SEQ ID NO: 4660345 - DNA, 25 bp, Homo sapien
tgtttgatctttgaaggtcaccctt

SEQ ID NO: 4660346 - DNA, 25 bp, Homo sapien
ggagatttgggacgatgtttgatct

SEQ ID NO: 4660347 - DNA, 25 bp, Homo sapien
ctgatggtaacaggagctacgacaa

SEQ ID NO: 4660348 - DNA, 25 bp, Homo sapien
gggcaaaggtgaaataatccaggga

SEQ ID NO: 4660349 - DNA, 25 bp, Homo sapien
tctcttctgacatgacggatggttg

SEQ ID NO: 4660350 - DNA, 25 bp, Homo sapien
aataatccagggattgtccccaact

SEQ ID NO: 4660351 - DNA, 25 bp, Homo sapien
acatgacggatggttggcccagtac

SEQ ID NO: 4660352 - DNA, 25 bp, Homo sapien
tgacacgtgaggatggcataataaa

SEQ ID NO: 4660353 - DNA, 25 bp, Homo sapien
ctgacacgtgaggatggcataataa

SEQ ID NO: 4660354 - DNA, 25 bp, Homo sapien
acacgtgaggatggcataataaatg

SEQ ID NO: 4660355 - DNA, 25 bp, Homo sapien
cgtgaggatggcataataaatgcat

SEQ ID NO: 4660356 - DNA, 25 bp, Homo sapien
tgttatgcagccatctcgtagcaac

SEQ ID NO: 4660357 - DNA, 25 bp, Homo sapien
caacaacacagcagtcgttgtcagt

SEQ ID NO: 4660358 - DNA, 25 bp, Homo sapien
catctcgtagcaacaacacagcagt

SEQ ID NO: 4660359 - DNA, 25 bp, Homo sapien
gcagccatctcgtagcaacaacaca

SEQ ID NO: 4660360 - DNA, 25 bp, Homo sapien
gctcctctgtgggttgctcaatggt

SEQ ID NO: 4660361 - DNA, 25 bp, Homo sapien
tgtgggttgctcaatggtgtaagtc

SEQ ID NO: 4660362 - DNA, 25 bp, Homo sapien
tcagagaatggagcccccgaggtgt

SEQ ID NO: 4660363 - DNA, 25 bp, Homo sapien
ttcttcagagaatggagcccccgag

SEQ ID NO: 4660364 - DNA, 25 bp, Homo sapien
acgctggcccgtgagtgccccggga

SEQ ID NO: 4660365 - DNA, 25 bp, Homo sapien
cgggagcccgggtataccggatgag

SEQ ID NO: 4660366 - DNA, 25 bp, Homo sapien
cctgatgtctggtcggacgctggcc

SEQ ID NO: 4660367 - DNA, 25 bp, Homo sapien
taccgcagaggttctggatcttccc

SEQ ID NO: 4660368 - DNA, 25 bp, Homo sapien
gtttaaatatgcacactcgtacatg

SEQ ID NO: 4660369 - DNA, 25 bp, Homo sapien
catggtagacattgaccagcagcag

SEQ ID NO: 4660370 - DNA, 25 bp, Homo sapien
gggcctggcagatgcaagcctcatg

SEQ ID NO: 4660371 - DNA, 25 bp, Homo sapien
catgctttggttcgcatgcacaggg

SEQ ID NO: 4660372 - DNA, 25 bp, Homo sapien
gctcttcgaagccctggtcctgtca

SEQ ID NO: 4660373 - DNA, 25 bp, Homo sapien
tggtcctgtcaaggcacctatccca

SEQ ID NO: 4660374 - DNA, 25 bp, Homo sapien
ggcacctatcccatggcccatgtgg

SEQ ID NO: 4660375 - DNA, 25 bp, Homo sapien
tgaccccgctcttcgaagccctggt

SEQ ID NO: 4660376 - DNA, 25 bp, Homo sapien
ggtgtgctggctttcacctcgccaa

SEQ ID NO: 4660377 - DNA, 25 bp, Homo sapien
acctcgccaattggcaaagttggct

SEQ ID NO: 4660378 - DNA, 25 bp, Homo sapien
gggacggtgtgctggctttcacctc

SEQ ID NO: 4660379 - DNA, 25 bp, Homo sapien
tttcacctcgccaattggcaaagtt

SEQ ID NO: 4660380 - DNA, 25 bp, Homo sapien
tggggagtactggtcccacactgag

SEQ ID NO: 4660381 - DNA, 25 bp, Homo sapien
gctttcttgcttgaactgcaaagga

SEQ ID NO: 4660382 - DNA, 25 bp, Homo sapien
cacactgaggactgaaggattctct

SEQ ID NO: 4660383 - DNA, 25 bp, Homo sapien
ctgaacaatgcagactgcgtccctt

SEQ ID NO: 4660384 - DNA, 25 bp, Homo sapien
tccaaatcatcacaccctcactcaa

SEQ ID NO: 4660385 - DNA, 25 bp, Homo sapien
ccaaatcatcacaccctcactcaaa

SEQ ID NO: 4660386 - DNA, 25 bp, Homo sapien
tgctggtccttagacttggagcacc

SEQ ID NO: 4660387 - DNA, 25 bp, Homo sapien
gcacctgatgctgtttgcccatctg

SEQ ID NO: 4660388 - DNA, 25 bp, Homo sapien
tttgagaattggatctggcagcccc

SEQ ID NO: 4660389 - DNA, 25 bp, Homo sapien
agcacagtttaccagcaccatcaag

SEQ ID NO: 4660390 - DNA, 25 bp, Homo sapien
tccatcaggtcagggttgccacaaa

SEQ ID NO: 4660391 - DNA, 25 bp, Homo sapien
cccatcaggaccatgtgtatattga

SEQ ID NO: 4660392 - DNA, 25 bp, Homo sapien
ttatcttccatcaggtcagggttgc

SEQ ID NO: 4660393 - DNA, 25 bp, Homo sapien
tgtatattgacatctttatcttcca

SEQ ID NO: 4660394 - DNA, 25 bp, Homo sapien
atgggcagccccaacagaagttgga

SEQ ID NO: 4660395 - DNA, 25 bp, Homo sapien
cccatgggcagccccaacagaagtt

SEQ ID NO: 4660396 - DNA, 25 bp, Homo sapien
ccatgggcagccccaacagaagttg

SEQ ID NO: 4660397 - DNA, 25 bp, Homo sapien
catgggcagccccaacagaagttgg

SEQ ID NO: 4660398 - DNA, 25 bp, Homo sapien
cctccagcattactctcataagaac

SEQ ID NO: 4660399 - DNA, 25 bp, Homo sapien
tgccagtgggaattctggtaaggcc

SEQ ID NO: 4660400 - DNA, 25 bp, Homo sapien
gcagaaggttggctgtgcaaatcct

SEQ ID NO: 4660401 - DNA, 25 bp, Homo sapien
ctcataagaacacatgactgccaca

SEQ ID NO: 4660402 - DNA, 25 bp, Homo sapien
tagcaagctgccctcttactgaaag

SEQ ID NO: 4660403 - DNA, 25 bp, Homo sapien
gagccaaaagcactgcagactgata

SEQ ID NO: 4660404 - DNA, 25 bp, Homo sapien
tactgaaagcagttagttccaagct

SEQ ID NO: 4660405 - DNA, 25 bp, Homo sapien
tccaagcttctctgacatgtgagcc

SEQ ID NO: 4660406 - DNA, 25 bp, Homo sapien
cctccctcctcctctgctgctggtc

SEQ ID NO: 4660407 - DNA, 25 bp, Homo sapien
tggtcatttgggcagaagcttcctc

SEQ ID NO: 4660408 - DNA, 25 bp, Homo sapien
catggtcatttgggcagaagcttcc

SEQ ID NO: 4660409 - DNA, 25 bp, Homo sapien
ccctcctcctctgctgctggtccat

SEQ ID NO: 4660410 - DNA, 25 bp, Homo sapien
cccagctgtcacagcacactggcct

SEQ ID NO: 4660411 - DNA, 25 bp, Homo sapien
ggaagtcgtccctctcctgttggta

SEQ ID NO: 4660412 - DNA, 25 bp, Homo sapien
ttccagcatggacatactgccggag

SEQ ID NO: 4660413 - DNA, 25 bp, Homo sapien
tggtgggccggcaaccttccagcat

SEQ ID NO: 4660414 - DNA, 25 bp, Homo sapien
tgctggtgccattgttcctttcgtt

SEQ ID NO: 4660415 - DNA, 25 bp, Homo sapien
tggtgccattgttcctttcgtttag

SEQ ID NO: 4660416 - DNA, 25 bp, Homo sapien
gtgccattgttcctttcgtttagcc

SEQ ID NO: 4660417 - DNA, 25 bp, Homo sapien
tcggaacaagcctgctggtgccatt

SEQ ID NO: 4660418 - DNA, 25 bp, Homo sapien
ctgccagttggagggcacagtgcat

SEQ ID NO: 4660419 - DNA, 25 bp, Homo sapien
agggcacagtgcatgagcatccacc

SEQ ID NO: 4660420 - DNA, 25 bp, Homo sapien
gccagctccctatgccaatggcccc

SEQ ID NO: 4660421 - DNA, 25 bp, Homo sapien
cccgccagctccctatgccaatggc

SEQ ID NO: 4660422 - DNA, 25 bp, Homo sapien
cttccaatagcctctcggagctcag

SEQ ID NO: 4660423 - DNA, 25 bp, Homo sapien
ttccaatagcctctcggagctcagc

SEQ ID NO: 4660424 - DNA, 25 bp, Homo sapien
tcggagctcagcctgcaacccaggg

SEQ ID NO: 4660425 - DNA, 25 bp, Homo sapien
ggggtaattattactgagctgatct

SEQ ID NO: 4660426 - DNA, 25 bp, Homo sapien
agaaggttctgggacaggttgataa

SEQ ID NO: 4660427 - DNA, 25 bp, Homo sapien
tctggccccaatcctttagcctggg

SEQ ID NO: 4660428 - DNA, 25 bp, Homo sapien
tgtgcagccgcactctttcagggtt

SEQ ID NO: 4660429 - DNA, 25 bp, Homo sapien
tggaagcccatgaaagttgatcggt

SEQ ID NO: 4660430 - DNA, 25 bp, Homo sapien
agcccatgaaagttgatcggttgcc

SEQ ID NO: 4660431 - DNA, 25 bp, Homo sapien
catgaaagttgatcggttgccctgt

SEQ ID NO: 4660432 - DNA, 25 bp, Homo sapien
gaaagttgatcggttgccctgtgga

SEQ ID NO: 4660433 - DNA, 25 bp, Homo sapien
ctaagttgaaagacgagtttgctca

SEQ ID NO: 4660434 - DNA, 25 bp, Homo sapien
gctgtgtccaggatcctggtcccat

SEQ ID NO: 4660435 - DNA, 25 bp, Homo sapien
cttactaagttgaaagacgagtttg

SEQ ID NO: 4660436 - DNA, 25 bp, Homo sapien
atgtgtctaaatgcagcctgtttcc

SEQ ID NO: 4660437 - DNA, 25 bp, Homo sapien
caggctcttttgggtgcaaaggaaa

SEQ ID NO: 4660438 - DNA, 25 bp, Homo sapien
ggaaaagaattagacaatcgctgtc

SEQ ID NO: 4660439 - DNA, 25 bp, Homo sapien
aggaaaagaattagacaatcgctgt

SEQ ID NO: 4660440 - DNA, 25 bp, Homo sapien
gaaattctccgtatagtcctgaaag

SEQ ID NO: 4660441 - DNA, 25 bp, Homo sapien
gtgatgaaactaccatagaaaattc

SEQ ID NO: 4660442 - DNA, 25 bp, Homo sapien
ctggatgacccttgacgaaattctc

SEQ ID NO: 4660443 - DNA, 25 bp, Homo sapien
ggaagcctttcattcctggatgacc

SEQ ID NO: 4660444 - DNA, 25 bp, Homo sapien
agtagcccaacacagctgtatatta

SEQ ID NO: 4660445 - DNA, 25 bp, Homo sapien
aagtagcccaacacagctgtatatt

SEQ ID NO: 4660446 - DNA, 25 bp, Homo sapien
tcaagactagcaaagtagcccaaca

SEQ ID NO: 4660447 - DNA, 25 bp, Homo sapien
taaggcccgcattaaaacattcgtg

SEQ ID NO: 4660448 - DNA, 25 bp, Homo sapien
tccttgcctactctatgtggagctc

SEQ ID NO: 4660449 - DNA, 25 bp, Homo sapien
aacattcgtgcatgcagcctgctcc

SEQ ID NO: 4660450 - DNA, 25 bp, Homo sapien
tcccacttagcttccaaaaggtgag

SEQ ID NO: 4660451 - DNA, 25 bp, Homo sapien
ctctatctaaggcgcagttatcctc

SEQ ID NO: 4660452 - DNA, 25 bp, Homo sapien
tatctaaggcgcagttatcctccat

SEQ ID NO: 4660453 - DNA, 25 bp, Homo sapien
ctatctaaggcgcagttatcctcca

SEQ ID NO: 4660454 - DNA, 25 bp, Homo sapien
tctatctaaggcgcagttatcctcc

SEQ ID NO: 4660455 - DNA, 25 bp, Homo sapien
ggcagctggaggaaatgcatgactt

SEQ ID NO: 4660456 - DNA, 25 bp, Homo sapien
gaggaaatgcatgacttcctcccat

SEQ ID NO: 4660457 - DNA, 25 bp, Homo sapien
gcagctggaggaaatgcatgacttc

SEQ ID NO: 4660458 - DNA, 25 bp, Homo sapien
gctggaggaaatgcatgacttcctc

SEQ ID NO: 4660459 - DNA, 25 bp, Homo sapien
tgaggagagggccagagtgcacacc

SEQ ID NO: 4660460 - DNA, 25 bp, Homo sapien
gaggagagggccagagtgcacacca

SEQ ID NO: 4660461 - DNA, 25 bp, Homo sapien
aggagagggccagagtgcacaccat

SEQ ID NO: 4660462 - DNA, 25 bp, Homo sapien
ccagtgtaggaagccatgaagtgga

SEQ ID NO: 4660463 - DNA, 25 bp, Homo sapien
catttgcaaggcgatgatgctccag

SEQ ID NO: 4660464 - DNA, 25 bp, Homo sapien
caggagacttccttatgtccgacac

SEQ ID NO: 4660465 - DNA, 25 bp, Homo sapien
gggcctgtgtctactactgatgtcg

SEQ ID NO: 4660466 - DNA, 25 bp, Homo sapien
tggatgtgagtgaaggatttggtgg

SEQ ID NO: 4660467 - DNA, 25 bp, Homo sapien
ctgaagaaggaccaatcaaatggaa

SEQ ID NO: 4660468 - DNA, 25 bp, Homo sapien
ctgctgagggcagggttcaaagtct

SEQ ID NO: 4660469 - DNA, 25 bp, Homo sapien
gaaaataacgtgggtggatgtgagt

SEQ ID NO: 4660470 - DNA, 25 bp, Homo sapien
tttcaggtatcctgactttttatcc

SEQ ID NO: 4660471 - DNA, 25 bp, Homo sapien
tcaggtatcctgactttttatccat

SEQ ID NO: 4660472 - DNA, 25 bp, Homo sapien
ttcaggtatcctgactttttatcca

SEQ ID NO: 4660473 - DNA, 25 bp, Homo sapien
tcttctgacgccttcctcctttgcc

SEQ ID NO: 4660474 - DNA, 25 bp, Homo sapien
gtcttctgacgccttcctcctttgc

SEQ ID NO: 4660475 - DNA, 25 bp, Homo sapien
cctgtcttctgacgccttcctcctt

SEQ ID NO: 4660476 - DNA, 25 bp, Homo sapien
tgtcttctgacgccttcctcctttg

SEQ ID NO: 4660477 - DNA, 25 bp, Homo sapien
tgattcccctaaccccgcagcatgt

SEQ ID NO: 4660478 - DNA, 25 bp, Homo sapien
tcctggccttcttgagggtgtactg

SEQ ID NO: 4660479 - DNA, 25 bp, Homo sapien
gtcagcaggagcgtgttagcattca

SEQ ID NO: 4660480 - DNA, 25 bp, Homo sapien
ttcttgagggtgtactggtcagcag

SEQ ID NO: 4660481 - DNA, 25 bp, Homo sapien
attgtgccctaggaactgcagtctc

SEQ ID NO: 4660482 - DNA, 25 bp, Homo sapien
actgcagtctccaccaaggagctcc

SEQ ID NO: 4660483 - DNA, 25 bp, Homo sapien
gaaatatgtagtggcaaattgtgcc

SEQ ID NO: 4660484 - DNA, 25 bp, Homo sapien
tgaagaaatatgtagtggcaaattg

SEQ ID NO: 4660485 - DNA, 25 bp, Homo sapien
ctctccccattgctgtcaaccaaat

SEQ ID NO: 4660486 - DNA, 25 bp, Homo sapien
tctccccattgctgtcaaccaaatg

SEQ ID NO: 4660487 - DNA, 25 bp, Homo sapien
gctctccccattgctgtcaaccaaa

SEQ ID NO: 4660488 - DNA, 25 bp, Homo sapien
aaacaagtaaaccaacacccagcat

SEQ ID NO: 4660489 - DNA, 25 bp, Homo sapien
tgagaaatcggaaacaagtaaacca

SEQ ID NO: 4660490 - DNA, 25 bp, Homo sapien
ctagaaaagagggttgagaaatcgg

SEQ ID NO: 4660491 - DNA, 25 bp, Homo sapien
agagggttgagaaatcggaaacaag

SEQ ID NO: 4660492 - DNA, 25 bp, Homo sapien
caaagacatctattagattttgtgg

SEQ ID NO: 4660493 - DNA, 25 bp, Homo sapien
atacaaagacatctattagattttg

SEQ ID NO: 4660494 - DNA, 25 bp, Homo sapien
gaggttccaggaggaggaatacaaa

SEQ ID NO: 4660495 - DNA, 25 bp, Homo sapien
gaatacaaagacatctattagattt

SEQ ID NO: 4660496 - DNA, 25 bp, Homo sapien
caggcacatggacaggaacagccca

SEQ ID NO: 4660497 - DNA, 25 bp, Homo sapien
acaggaacagcccagcaaggaccag

SEQ ID NO: 4660498 - DNA, 25 bp, Homo sapien
gagtcagggctgacggccaggatga

SEQ ID NO: 4660499 - DNA, 25 bp, Homo sapien
tgagcaggttccccagcaccgtgac

SEQ ID NO: 4660500 - DNA, 25 bp, Homo sapien
aatcaacttggggaccgtggtggag

SEQ ID NO: 4660501 - DNA, 25 bp, Homo sapien
tggaggtgaaaccgatgtcaggcaa

SEQ ID NO: 4660502 - DNA, 25 bp, Homo sapien
tgaaaccgatgtcaggcaaggacag

SEQ ID NO: 4660503 - DNA, 25 bp, Homo sapien
cgtggtggaggtgaaaccgatgtca

SEQ ID NO: 4660504 - DNA, 25 bp, Homo sapien
tggcaaagagagacgtctgagtcag

SEQ ID NO: 4660505 - DNA, 25 bp, Homo sapien
aaagagagacgtctgagtcaggcag

SEQ ID NO: 4660506 - DNA, 25 bp, Homo sapien
ccaaaaatggcaaagagagacgtct

SEQ ID NO: 4660507 - DNA, 25 bp, Homo sapien
aaaatggcaaagagagacgtctgag

SEQ ID NO: 4660508 - DNA, 25 bp, Homo sapien
acagaaacaggggttcatgacggct

SEQ ID NO: 4660509 - DNA, 25 bp, Homo sapien
gaaacaggggttcatgacggctgaa

SEQ ID NO: 4660510 - DNA, 25 bp, Homo sapien
aacaggggttcatgacggctgaatg

SEQ ID NO: 4660511 - DNA, 25 bp, Homo sapien
caggggttcatgacggctgaatgat

SEQ ID NO: 4660512 - DNA, 25 bp, Homo sapien
attatgttattggtgaaggtgtcac

SEQ ID NO: 4660513 - DNA, 25 bp, Homo sapien
caatcaagttgtgcagctgggcgtc

SEQ ID NO: 4660514 - DNA, 25 bp, Homo sapien
atgattatgttattggtgaaggtgt

SEQ ID NO: 4660515 - DNA, 25 bp, Homo sapien
caagttgtgcagctgggcgtctaaa

SEQ ID NO: 4660516 - DNA, 25 bp, Homo sapien
gccgcaggacacttttagtatccct

SEQ ID NO: 4660517 - DNA, 25 bp, Homo sapien
cggccgccgcaggacacttttagta

SEQ ID NO: 4660518 - DNA, 25 bp, Homo sapien
ttacaccgtgctgccgtgcggccgc

SEQ ID NO: 4660519 - DNA, 25 bp, Homo sapien
catcactgaggccaccgcagccttt

SEQ ID NO: 4660520 - DNA, 25 bp, Homo sapien
tttcacgacaggtgtacacgcacag

SEQ ID NO: 4660521 - DNA, 25 bp, Homo sapien
gttcatcatatccagggagacacag

SEQ ID NO: 4660522 - DNA, 25 bp, Homo sapien
ttcacgacaggtgtacacgcacagt

SEQ ID NO: 4660523 - DNA, 25 bp, Homo sapien
gaatttcacgacaggtgtacacgca

SEQ ID NO: 4660524 - DNA, 25 bp, Homo sapien
gacagcccagcgaggacaggctgca

SEQ ID NO: 4660525 - DNA, 25 bp, Homo sapien
ggacagggacagcccagcgaggaca

SEQ ID NO: 4660526 - DNA, 25 bp, Homo sapien
acagggacagcccagcgaggacagg

SEQ ID NO: 4660527 - DNA, 25 bp, Homo sapien
agggacagcccagcgaggacaggct

SEQ ID NO: 4660528 - DNA, 25 bp, Homo sapien
ggacgaagaaagacatccgtgtcag

SEQ ID NO: 4660529 - DNA, 25 bp, Homo sapien
tgtccaccgtcatcttgggaaccgt

SEQ ID NO: 4660530 - DNA, 25 bp, Homo sapien
aaaggacgaagaaagacatccgtgt

SEQ ID NO: 4660531 - DNA, 25 bp, Homo sapien
gcgactgcatgtccaccgtcatctt

SEQ ID NO: 4660532 - DNA, 25 bp, Homo sapien
gttgagatggctcacagacaaaatg

SEQ ID NO: 4660533 - DNA, 25 bp, Homo sapien
gttgagaagttgagatggctcacag

SEQ ID NO: 4660534 - DNA, 25 bp, Homo sapien
caaggttgagaagttgagatggctc

SEQ ID NO: 4660535 - DNA, 25 bp, Homo sapien
gatggctcacagacaaaatgagaga

SEQ ID NO: 4660536 - DNA, 25 bp, Homo sapien
cacggtgtacttcactgatgccacc

SEQ ID NO: 4660537 - DNA, 25 bp, Homo sapien
acggtgtacttcactgatgccacca

SEQ ID NO: 4660538 - DNA, 25 bp, Homo sapien
ccacggtgtacttcactgatgccac

SEQ ID NO: 4660539 - DNA, 25 bp, Homo sapien
aatggaacagatcaagagatttaac

SEQ ID NO: 4660540 - DNA, 25 bp, Homo sapien
caaagataaagcgaagatctcacaa

SEQ ID NO: 4660541 - DNA, 25 bp, Homo sapien
agataaagcgaagatctcacaaagt

SEQ ID NO: 4660542 - DNA, 25 bp, Homo sapien
tttcaaagataaagcgaagatctca

SEQ ID NO: 4660543 - DNA, 25 bp, Homo sapien
ttcaaagataaagcgaagatctcac

SEQ ID NO: 4660544 - DNA, 25 bp, Homo sapien
tgctgcaccatccaattcttcataa

SEQ ID NO: 4660545 - DNA, 25 bp, Homo sapien
gatctctcctctgtttactcttcct

SEQ ID NO: 4660546 - DNA, 25 bp, Homo sapien
tccactggcttctgaaacaacagac

SEQ ID NO: 4660547 - DNA, 25 bp, Homo sapien
ttgtgtccaagagcccaatctctgg

SEQ ID NO: 4660548 - DNA, 25 bp, Homo sapien
ctttgaagctggccttaaaaggact

SEQ ID NO: 4660549 - DNA, 25 bp, Homo sapien
tgaagctggccttaaaaggactact

SEQ ID NO: 4660550 - DNA, 25 bp, Homo sapien
tcccttatgcactggacttgaggac

SEQ ID NO: 4660551 - DNA, 25 bp, Homo sapien
cccttatgcactggacttgaggact

SEQ ID NO: 4660552 - DNA, 25 bp, Homo sapien
tcaggaactatgtccagctatgcag

SEQ ID NO: 4660553 - DNA, 25 bp, Homo sapien
cacccagttcctggacagtagttca

SEQ ID NO: 4660554 - DNA, 25 bp, Homo sapien
gctgtccagatttctatagatgtgg

SEQ ID NO: 4660555 - DNA, 25 bp, Homo sapien
gataacatctcacatcctgtgcacc

SEQ ID NO: 4660556 - DNA, 25 bp, Homo sapien
gaactgaacaaagtggatatagaaa

SEQ ID NO: 4660557 - DNA, 25 bp, Homo sapien
ttcatgagaagggatcatatgaaga

SEQ ID NO: 4660558 - DNA, 25 bp, Homo sapien
aacaaagtggatatagaaagatttc

SEQ ID NO: 4660559 - DNA, 25 bp, Homo sapien
agacaaatgctgaaacaccactgag

SEQ ID NO: 4660560 - DNA, 25 bp, Homo sapien
tatttgcacttagtaggagcatgag

SEQ ID NO: 4660561 - DNA, 25 bp, Homo sapien
tccaagtcgttcctcaggtcccaat

SEQ ID NO: 4660562 - DNA, 25 bp, Homo sapien
acttacctccaagtcgttcctcagg

SEQ ID NO: 4660563 - DNA, 25 bp, Homo sapien
ctcaggtcccaatgtccttagctgg

SEQ ID NO: 4660564 - DNA, 25 bp, Homo sapien
aagaggctgccccgccattgtcctg

SEQ ID NO: 4660565 - DNA, 25 bp, Homo sapien
tgaagaggctgccccgccattgtcc

SEQ ID NO: 4660566 - DNA, 25 bp, Homo sapien
gaagaggctgccccgccattgtcct

SEQ ID NO: 4660567 - DNA, 25 bp, Homo sapien
gaggacaagtccaatgaagaggcac

SEQ ID NO: 4660568 - DNA, 25 bp, Homo sapien
tcatgcctgaggacaagtccaatga

SEQ ID NO: 4660569 - DNA, 25 bp, Homo sapien
cctgaggacaagtccaatgaagagg

SEQ ID NO: 4660570 - DNA, 25 bp, Homo sapien
tgcctgaggacaagtccaatgaaga

SEQ ID NO: 4660571 - DNA, 25 bp, Homo sapien
gcagtggtgatgaatctgcatctca

SEQ ID NO: 4660572 - DNA, 25 bp, Homo sapien
cattcataaccagtgggcctttcga

SEQ ID NO: 4660573 - DNA, 25 bp, Homo sapien
atctcataccaagcagcagatgcca

SEQ ID NO: 4660574 - DNA, 25 bp, Homo sapien
gcagatgccaagtgaactatgctaa

SEQ ID NO: 4660575 - DNA, 25 bp, Homo sapien
tttctggtgcttcctcacataatga

SEQ ID NO: 4660576 - DNA, 25 bp, Homo sapien
ggcagtaattggtgaggcttctgtt

SEQ ID NO: 4660577 - DNA, 25 bp, Homo sapien
tggagggtatttttctggtgcttcc

SEQ ID NO: 4660578 - DNA, 25 bp, Homo sapien
ctgttaggaacactttggagggtat

SEQ ID NO: 4660579 - DNA, 25 bp, Homo sapien
cttcactcctacttcacctcctact

SEQ ID NO: 4660580 - DNA, 25 bp, Homo sapien
ttcacctcctacttctcgtgcatag

SEQ ID NO: 4660581 - DNA, 25 bp, Homo sapien
cctcctacttctcgtgcatagatat

SEQ ID NO: 4660582 - DNA, 25 bp, Homo sapien
cctacttctcgtgcatagatattca

SEQ ID NO: 4660583 - DNA, 25 bp, Homo sapien
cattgtgggtaacatcggagacctt

SEQ ID NO: 4660584 - DNA, 25 bp, Homo sapien
attgtgggtaacatcggagaccttc

SEQ ID NO: 4660585 - DNA, 25 bp, Homo sapien
ttgtgggtaacatcggagaccttca

SEQ ID NO: 4660586 - DNA, 25 bp, Homo sapien
ttcttatgtcctgtgtaggcgaagg

SEQ ID NO: 4660587 - DNA, 25 bp, Homo sapien
cagcagggtcagcccgggacccttg

SEQ ID NO: 4660588 - DNA, 25 bp, Homo sapien
tgggtctggtggcaaaatgcaaact

SEQ ID NO: 4660589 - DNA, 25 bp, Homo sapien
taggcgaaggtgacaagctctgcca

SEQ ID NO: 4660590 - DNA, 25 bp, Homo sapien
tcagtaggcgtcatcatatagacgt

SEQ ID NO: 4660591 - DNA, 25 bp, Homo sapien
gacgttctatctctacagccttggc

SEQ ID NO: 4660592 - DNA, 25 bp, Homo sapien
ctctacagccttggctaccaagaag

SEQ ID NO: 4660593 - DNA, 25 bp, Homo sapien
ggcgtcatcatatagacgttctatc

SEQ ID NO: 4660594 - DNA, 25 bp, Homo sapien
gaacgcctggctgctgcggttcagt

SEQ ID NO: 4660595 - DNA, 25 bp, Homo sapien
cgcctggctgctgcggttcagtcgt

SEQ ID NO: 4660596 - DNA, 25 bp, Homo sapien
agttactggcagctcggcgtccgtg

SEQ ID NO: 4660597 - DNA, 25 bp, Homo sapien
actgtgagagttactggcagctcgg

SEQ ID NO: 4660598 - DNA, 25 bp, Homo sapien
cttggcttggaccaggatgatgaga

SEQ ID NO: 4660599 - DNA, 25 bp, Homo sapien
tatgatgtcagaatagcaagcgaca

SEQ ID NO: 4660600 - DNA, 25 bp, Homo sapien
gaacagcggcattttgcagagaatg

SEQ ID NO: 4660601 - DNA, 25 bp, Homo sapien
caaaagagaccaagatatgatgtca

SEQ ID NO: 4660602 - DNA, 25 bp, Homo sapien
caggccaagggtaaaaatcgaatat

SEQ ID NO: 4660603 - DNA, 25 bp, Homo sapien
tgtctcagctggattgaaaggcagg

SEQ ID NO: 4660604 - DNA, 25 bp, Homo sapien
gctggttttcccatgtgaagagctc

SEQ ID NO: 4660605 - DNA, 25 bp, Homo sapien
taaacatgcatacattgtctcagct

SEQ ID NO: 4660606 - DNA, 25 bp, Homo sapien
tccctccagagaagtccctaagtct

SEQ ID NO: 4660607 - DNA, 25 bp, Homo sapien
attcctccctccagagaagtcccta

SEQ ID NO: 4660608 - DNA, 25 bp, Homo sapien
tttattcctccctccagagaagtcc

SEQ ID NO: 4660609 - DNA, 25 bp, Homo sapien
cctccctccagagaagtccctaagt

SEQ ID NO: 4660610 - DNA, 25 bp, Homo sapien
atcttgtattttcgtggaaccaaga

SEQ ID NO: 4660611 - DNA, 25 bp, Homo sapien
aatcttgtattttcgtggaaccaag

SEQ ID NO: 4660612 - DNA, 25 bp, Homo sapien
tcttgtattttcgtggaaccaagat

SEQ ID NO: 4660613 - DNA, 25 bp, Homo sapien
cttgtattttcgtggaaccaagatt

SEQ ID NO: 4660614 - DNA, 25 bp, Homo sapien
tccttgcatgaaacatagctgatag

SEQ ID NO: 4660615 - DNA, 25 bp, Homo sapien
atcttttccttgcatgaaacatagc

SEQ ID NO: 4660616 - DNA, 25 bp, Homo sapien
cttgcatgaaacatagctgatagta

SEQ ID NO: 4660617 - DNA, 25 bp, Homo sapien
cccttctctagatgggggatgttaa

SEQ ID NO: 4660618 - DNA, 25 bp, Homo sapien
ttgaaaaataggccgcggacttcca

SEQ ID NO: 4660619 - DNA, 25 bp, Homo sapien
gaaaaggtgtcgaatgcatcggggg

SEQ ID NO: 4660620 - DNA, 25 bp, Homo sapien
tgaaaaataggccgcggacttccat

SEQ ID NO: 4660621 - DNA, 25 bp, Homo sapien
atgcatcgggggctttgtagcttcc

SEQ ID NO: 4660622 - DNA, 25 bp, Homo sapien
tttcaataccacattctctaaacca

SEQ ID NO: 4660623 - DNA, 25 bp, Homo sapien
ttgagaagccaccattgaatccaat

SEQ ID NO: 4660624 - DNA, 25 bp, Homo sapien
cagctcttccagtgtatggcttatc

SEQ ID NO: 4660625 - DNA, 25 bp, Homo sapien
caccattgaatccaatatctgcctg

SEQ ID NO: 4660626 - DNA, 25 bp, Homo sapien
ggcctttggtacttgacagcactca

SEQ ID NO: 4660627 - DNA, 25 bp, Homo sapien
tcaggcctttggtacttgacagcac

SEQ ID NO: 4660628 - DNA, 25 bp, Homo sapien
ttggtacttgacagcactcagcaag

SEQ ID NO: 4660629 - DNA, 25 bp, Homo sapien
catctcaggcctttggtacttgaca

SEQ ID NO: 4660630 - DNA, 25 bp, Homo sapien
gatctaagataagtcctctgtgttc

SEQ ID NO: 4660631 - DNA, 25 bp, Homo sapien
gggcagcccgctggaaatgatctaa

SEQ ID NO: 4660632 - DNA, 25 bp, Homo sapien
taggaagtgaggtctcagaagccac

SEQ ID NO: 4660633 - DNA, 25 bp, Homo sapien
gtgttctctaggaagtgaggtctca

SEQ ID NO: 4660634 - DNA, 25 bp, Homo sapien
gccaacaggacatacgctcccagag

SEQ ID NO: 4660635 - DNA, 25 bp, Homo sapien
aacaggacatacgctcccagagcct

SEQ ID NO: 4660636 - DNA, 25 bp, Homo sapien
gatgccaacaggacatacgctccca

SEQ ID NO: 4660637 - DNA, 25 bp, Homo sapien
acaggacatacgctcccagagccta

SEQ ID NO: 4660638 - DNA, 25 bp, Homo sapien
atacctgagatatctgcttgggatc

SEQ ID NO: 4660639 - DNA, 25 bp, Homo sapien
tggacttggatacctgagatatctg

SEQ ID NO: 4660640 - DNA, 25 bp, Homo sapien
tctggttctgcgactccttacagcg

SEQ ID NO: 4660641 - DNA, 25 bp, Homo sapien
ttcttctggttctgcgactccttac

SEQ ID NO: 4660642 - DNA, 25 bp, Homo sapien
cgctgaccgacatttctgctgctca

SEQ ID NO: 4660643 - DNA, 25 bp, Homo sapien
gagaagctgccgctgaccgacattt

SEQ ID NO: 4660644 - DNA, 25 bp, Homo sapien
tcagcgtttcccgagataccaccgg

SEQ ID NO: 4660645 - DNA, 25 bp, Homo sapien
gagataccaccggaattgagaagct

SEQ ID NO: 4660646 - DNA, 25 bp, Homo sapien
gtactcaaatctgcattattcaaac

SEQ ID NO: 4660647 - DNA, 25 bp, Homo sapien
ctctcagtactcaaatctgcattat

SEQ ID NO: 4660648 - DNA, 25 bp, Homo sapien
ggcactctcagtactcaaatctgca

SEQ ID NO: 4660649 - DNA, 25 bp, Homo sapien
agcacaggcactctcagtactcaaa

SEQ ID NO: 4660650 - DNA, 25 bp, Homo sapien
taactaaagcatcagcggagtactt

SEQ ID NO: 4660651 - DNA, 25 bp, Homo sapien
ggtccatgtaactaaagcatcagcg

SEQ ID NO: 4660652 - DNA, 25 bp, Homo sapien
tttatctggagtggtccatgtaact

SEQ ID NO: 4660653 - DNA, 25 bp, Homo sapien
aagcatcagcggagtactttttgta

SEQ ID NO: 4660654 - DNA, 25 bp, Homo sapien
ctggtgcatacttggttgtgaggac

SEQ ID NO: 4660655 - DNA, 25 bp, Homo sapien
tgaggacagctgttaggtactctat

SEQ ID NO: 4660656 - DNA, 25 bp, Homo sapien
tctatagccccaccatagttttggt

SEQ ID NO: 4660657 - DNA, 25 bp, Homo sapien
tgtatcaataatggctggtgcatac

SEQ ID NO: 4660658 - DNA, 25 bp, Homo sapien
tgctatgacccagtgcttgggtggc

SEQ ID NO: 4660659 - DNA, 25 bp, Homo sapien
cactctcgctatctgcattgctata

SEQ ID NO: 4660660 - DNA, 25 bp, Homo sapien
tacacctgagctgatgtgtacccgg

SEQ ID NO: 4660661 - DNA, 25 bp, Homo sapien
tacccggggaaagtgtgctatgacc

SEQ ID NO: 4660662 - DNA, 25 bp, Homo sapien
tgtgttggaggatcggtgatggtct

SEQ ID NO: 4660663 - DNA, 25 bp, Homo sapien
actttgccccaccagctaaacagtg

SEQ ID NO: 4660664 - DNA, 25 bp, Homo sapien
caccagctaaacagtgagaagctgt

SEQ ID NO: 4660665 - DNA, 25 bp, Homo sapien
tgtggacactttgccccaccagcta

SEQ ID NO: 4660666 - DNA, 25 bp, Homo sapien
gagaccaaaccactgtcagggtggg

SEQ ID NO: 4660667 - DNA, 25 bp, Homo sapien
taggctgtactagcgaggagtcccc

SEQ ID NO: 4660668 - DNA, 25 bp, Homo sapien
taatttccccattgagtaagcctgg

SEQ ID NO: 4660669 - DNA, 25 bp, Homo sapien
ggtcatgcggctttccttattcatc

SEQ ID NO: 4660670 - DNA, 25 bp, Homo sapien
cactttctcaaatatcggattgttg

SEQ ID NO: 4660671 - DNA, 25 bp, Homo sapien
caggctccctggatagctaaattta

SEQ ID NO: 4660672 - DNA, 25 bp, Homo sapien
tgttgctcatgagaataatggctga

SEQ ID NO: 4660673 - DNA, 25 bp, Homo sapien
gagctggcacggcagtcttctcagg

SEQ ID NO: 4660674 - DNA, 25 bp, Homo sapien
atattgcttggccttagttaagtca

SEQ ID NO: 4660675 - DNA, 25 bp, Homo sapien
tctgcacctttagtggtcctgactt

SEQ ID NO: 4660676 - DNA, 25 bp, Homo sapien
gtccgtttcacatatgcacactttg

SEQ ID NO: 4660677 - DNA, 25 bp, Homo sapien
tgaagccccttgaagcaatatgatt

SEQ ID NO: 4660678 - DNA, 25 bp, Homo sapien
cactttgtaagactgaagccccttg

SEQ ID NO: 4660679 - DNA, 25 bp, Homo sapien
atacctggacccctgtgtactcagc

SEQ ID NO: 4660680 - DNA, 25 bp, Homo sapien
gatgaagtgtccctgaatacctgga

SEQ ID NO: 4660681 - DNA, 25 bp, Homo sapien
tccttcctgtagcattgatgaagtg

SEQ ID NO: 4660682 - DNA, 25 bp, Homo sapien
gctttcagtgcatttagccttaaca

SEQ ID NO: 4660683 - DNA, 25 bp, Homo sapien
gaggcagcttcactgtgaaccagtt

SEQ ID NO: 4660684 - DNA, 25 bp, Homo sapien
ggcagcttcactgtgaaccagttca

SEQ ID NO: 4660685 - DNA, 25 bp, Homo sapien
gcagcttcactgtgaaccagttcat

SEQ ID NO: 4660686 - DNA, 25 bp, Homo sapien
aggcagcttcactgtgaaccagttc

SEQ ID NO: 4660687 - DNA, 25 bp, Homo sapien
tctgccttgtggacctcccaactaa

SEQ ID NO: 4660688 - DNA, 25 bp, Homo sapien
gacctcccaactaaaggacatgttc

SEQ ID NO: 4660689 - DNA, 25 bp, Homo sapien
ttgtggacctcccaactaaaggaca

SEQ ID NO: 4660690 - DNA, 25 bp, Homo sapien
tgccttgtggacctcccaactaaag

SEQ ID NO: 4660691 - DNA, 25 bp, Homo sapien
ttctggagacacattgagattcttt

SEQ ID NO: 4660692 - DNA, 25 bp, Homo sapien
gattctttctcctggtccctttcga

SEQ ID NO: 4660693 - DNA, 25 bp, Homo sapien
gacacttgcagtccttattctgttt

SEQ ID NO: 4660694 - DNA, 25 bp, Homo sapien
gacacgtgcagagacgggggtggac

SEQ ID NO: 4660695 - DNA, 25 bp, Homo sapien
caagcatggagacaacgtggcaaga

SEQ ID NO: 4660696 - DNA, 25 bp, Homo sapien
aagcatgctggaggcccaaccacaa

SEQ ID NO: 4660697 - DNA, 25 bp, Homo sapien
gcagatgtcgtcttatcctcaatga

SEQ ID NO: 4660698 - DNA, 25 bp, Homo sapien
tccatatccaaatgcagatgtcgtc

SEQ ID NO: 4660699 - DNA, 25 bp, Homo sapien
aagaggctcgtgtgacaactcgcac

SEQ ID NO: 4660700 - DNA, 25 bp, Homo sapien
cccgtgaagaggctcgtgtgacaac

SEQ ID NO: 4660701 - DNA, 25 bp, Homo sapien
tgggtgcacatttgcccgtgaagag

SEQ ID NO: 4660702 - DNA, 25 bp, Homo sapien
ttgggtgcacatttgcccgtgaaga

SEQ ID NO: 4660703 - DNA, 25 bp, Homo sapien
aaatgtcaggtcgtttaggtgtggc

SEQ ID NO: 4660704 - DNA, 25 bp, Homo sapien
aatgtcccattgtcatgatccctca

SEQ ID NO: 4660705 - DNA, 25 bp, Homo sapien
gctctggagacattgccttgtacac

SEQ ID NO: 4660706 - DNA, 25 bp, Homo sapien
tctggcagttgaccagtcatgtgct

SEQ ID NO: 4660707 - DNA, 25 bp, Homo sapien
tgaagaagaagaagtatggcatccc

SEQ ID NO: 4660708 - DNA, 25 bp, Homo sapien
tacaatcctaagcacatgtcctttc

SEQ ID NO: 4660709 - DNA, 25 bp, Homo sapien
tgacctacaatcctaagcacatgtc

SEQ ID NO: 4660710 - DNA, 25 bp, Homo sapien
tcactgaagaagaagaagtatggca

SEQ ID NO: 4660711 - DNA, 25 bp, Homo sapien
atcttgtcgccacttccctcaggag

SEQ ID NO: 4660712 - DNA, 25 bp, Homo sapien
gccatcttgtcgccacttccctcag

SEQ ID NO: 4660713 - DNA, 25 bp, Homo sapien
gcgccatcttgtcgccacttccctc

SEQ ID NO: 4660714 - DNA, 25 bp, Homo sapien
catcttgtcgccacttccctcagga

SEQ ID NO: 4660715 - DNA, 25 bp, Homo sapien
tcacaaccaaagcttaaagctgttg

SEQ ID NO: 4660716 - DNA, 25 bp, Homo sapien
cagctgcctgggaatcacgctcctt

SEQ ID NO: 4660717 - DNA, 25 bp, Homo sapien
taaagctgttgggatgagcagctgc

SEQ ID NO: 4660718 - DNA, 25 bp, Homo sapien
cctttgacccgcagtctgtgcggga

SEQ ID NO: 4660719 - DNA, 25 bp, Homo sapien
ggagagttccgtgcctaacagaaac

SEQ ID NO: 4660720 - DNA, 25 bp, Homo sapien
caccaacagggtagatcgtccgttg

SEQ ID NO: 4660721 - DNA, 25 bp, Homo sapien
ccaacagggtagatcgtccgttggg

SEQ ID NO: 4660722 - DNA, 25 bp, Homo sapien
ccacttggaaccctgcggagagttc

SEQ ID NO: 4660723 - DNA, 25 bp, Homo sapien
accacccagggtatccacagggtcg

SEQ ID NO: 4660724 - DNA, 25 bp, Homo sapien
ccaggattctgtacatcactatcac

SEQ ID NO: 4660725 - DNA, 25 bp, Homo sapien
ggtcgctggcgctagtcccaggatt

SEQ ID NO: 4660726 - DNA, 25 bp, Homo sapien
ttctgtacatcactatcactgctgc

SEQ ID NO: 4660727 - DNA, 25 bp, Homo sapien
ttcttcccacaattgtacatctgct

SEQ ID NO: 4660728 - DNA, 25 bp, Homo sapien
tcttcccacaattgtacatctgctg

SEQ ID NO: 4660729 - DNA, 25 bp, Homo sapien
attcttcccacaattgtacatctgc

SEQ ID NO: 4660730 - DNA, 25 bp, Homo sapien
cagagaggcctgctctggtcagact

SEQ ID NO: 4660731 - DNA, 25 bp, Homo sapien
ggcctgctctggtcagactttggtc

SEQ ID NO: 4660732 - DNA, 25 bp, Homo sapien
tggtcagactttggtcttgtgttac

SEQ ID NO: 4660733 - DNA, 25 bp, Homo sapien
tgtgcccttgtcctgcagagaggcc

SEQ ID NO: 4660734 - DNA, 25 bp, Homo sapien
tcttgtagcagttgtgagtcttgac

SEQ ID NO: 4660735 - DNA, 25 bp, Homo sapien
agtacccgcgcaccttgggaagcct

SEQ ID NO: 4660736 - DNA, 25 bp, Homo sapien
gacacacgcagttcaagtacccgcg

SEQ ID NO: 4660737 - DNA, 25 bp, Homo sapien
gggaagcctttgcttgaggtccagg

SEQ ID NO: 4660738 - DNA, 25 bp, Homo sapien
agcacatcagagtggggacttactg

SEQ ID NO: 4660739 - DNA, 25 bp, Homo sapien
gtggggctgtttttacggctttgca

SEQ ID NO: 4660740 - DNA, 25 bp, Homo sapien
tcagagtggggacttactgtgtaga

SEQ ID NO: 4660741 - DNA, 25 bp, Homo sapien
tgctttgtggggctgtttttacggc

SEQ ID NO: 4660742 - DNA, 25 bp, Homo sapien
ctaagactcccacgtcttgagaggg

SEQ ID NO: 4660743 - DNA, 25 bp, Homo sapien
taagactcccacgtcttgagagggc

SEQ ID NO: 4660744 - DNA, 25 bp, Homo sapien
ttacttagcctccacatcgtctaac

SEQ ID NO: 4660745 - DNA, 25 bp, Homo sapien
tacttagcctccacatcgtctaact

SEQ ID NO: 4660746 - DNA, 25 bp, Homo sapien
tcattggaccaactgggactctatt

SEQ ID NO: 4660747 - DNA, 25 bp, Homo sapien
gcttcagccctttctaatttaccag

SEQ ID NO: 4660748 - DNA, 25 bp, Homo sapien
tgttcatctgtgtaaagatcctggg

SEQ ID NO: 4660749 - DNA, 25 bp, Homo sapien
ttgactagactcatctccccatagg

SEQ ID NO: 4660750 - DNA, 25 bp, Homo sapien
gctctgaagaagctctgagcggagt

SEQ ID NO: 4660751 - DNA, 25 bp, Homo sapien
tcctgcgcgagtggagctctgaaga

SEQ ID NO: 4660752 - DNA, 25 bp, Homo sapien
tgcgctgccctgtcctgcgcgagtg

SEQ ID NO: 4660753 - DNA, 25 bp, Homo sapien
cgtggcttcgctgcgtccgcattgg

SEQ ID NO: 4660754 - DNA, 25 bp, Homo sapien
agcacggccggtgggcggtgcaggg

SEQ ID NO: 4660755 - DNA, 25 bp, Homo sapien
agctgacagcatcgtcacggcggcg

SEQ ID NO: 4660756 - DNA, 25 bp, Homo sapien
cgcacggcgggcgagcagctgacag

SEQ ID NO: 4660757 - DNA, 25 bp, Homo sapien
gcgcagggagcacggccggtgggcg

SEQ ID NO: 4660758 - DNA, 25 bp, Homo sapien
ggcgccatttaagcaggagcagcag

SEQ ID NO: 4660759 - DNA, 25 bp, Homo sapien
tctttggaggcgaacaggcgccatt

SEQ ID NO: 4660760 - DNA, 25 bp, Homo sapien
taggtggcacctaaaagctctttgg

SEQ ID NO: 4660761 - DNA, 25 bp, Homo sapien
agcatgcagtaggtggcacctaaaa

SEQ ID NO: 4660762 - DNA, 25 bp, Homo sapien
ggtgaaaagcatgtttagtcttaga

SEQ ID NO: 4660763 - DNA, 25 bp, Homo sapien
cttagatctgccatttttatggtat

SEQ ID NO: 4660764 - DNA, 25 bp, Homo sapien
tttgaggtgaaaagcatgtttagtc

SEQ ID NO: 4660765 - DNA, 25 bp, Homo sapien
tttagtcttagatctgccattttta

SEQ ID NO: 4660766 - DNA, 25 bp, Homo sapien
aagcatcaactcagatcctctgcat

SEQ ID NO: 4660767 - DNA, 25 bp, Homo sapien
cctctgcatttggtgcacaaagatt

SEQ ID NO: 4660768 - DNA, 25 bp, Homo sapien
cctctgcattagtagttgccttgct

SEQ ID NO: 4660769 - DNA, 25 bp, Homo sapien
gcattagtagttgccttgctgtttg

SEQ ID NO: 4660770 - DNA, 25 bp, Homo sapien
tttccaggatggtgtttctgaccat

SEQ ID NO: 4660771 - DNA, 25 bp, Homo sapien
tactttttccaggatggtgtttctg

SEQ ID NO: 4660772 - DNA, 25 bp, Homo sapien
ctttttccaggatggtgtttctgac

SEQ ID NO: 4660773 - DNA, 25 bp, Homo sapien
tttttccaggatggtgtttctgacc

SEQ ID NO: 4660774 - DNA, 25 bp, Homo sapien
gccaatgtttccattcatggaaacg

SEQ ID NO: 4660775 - DNA, 25 bp, Homo sapien
attgattagccaatgtttccattca

SEQ ID NO: 4660776 - DNA, 25 bp, Homo sapien
atgtttccattcatggaaacgacgt

SEQ ID NO: 4660777 - DNA, 25 bp, Homo sapien
caatgtttccattcatggaaacgac

SEQ ID NO: 4660778 - DNA, 25 bp, Homo sapien
cctcacccctagaggaagcacccat

SEQ ID NO: 4660779 - DNA, 25 bp, Homo sapien
tcctcacccctagaggaagcaccca

SEQ ID NO: 4660780 - DNA, 25 bp, Homo sapien
agctcctcacccctagaggaagcac

SEQ ID NO: 4660781 - DNA, 25 bp, Homo sapien
ggccagctcctcacccctagaggaa

SEQ ID NO: 4660782 - DNA, 25 bp, Homo sapien
ccattctgatggcagctctagccca

SEQ ID NO: 4660783 - DNA, 25 bp, Homo sapien
aaggggctgtggcatcggatggatt

SEQ ID NO: 4660784 - DNA, 25 bp, Homo sapien
gtctgaaggggctgtggcatcggat

SEQ ID NO: 4660785 - DNA, 25 bp, Homo sapien
ccacagtggcttcatgtctgaaggg

SEQ ID NO: 4660786 - DNA, 25 bp, Homo sapien
gaggagggtactcagtgtggagcag

SEQ ID NO: 4660787 - DNA, 25 bp, Homo sapien
ctgcggaggagggtactcagtgtgg

SEQ ID NO: 4660788 - DNA, 25 bp, Homo sapien
cggaggagggtactcagtgtggagc

SEQ ID NO: 4660789 - DNA, 25 bp, Homo sapien
tgcggaggagggtactcagtgtgga

SEQ ID NO: 4660790 - DNA, 25 bp, Homo sapien
aggttgtggctgtcaccctcgggct

SEQ ID NO: 4660791 - DNA, 25 bp, Homo sapien
cagggtcgtggaatatgggtaaatc

SEQ ID NO: 4660792 - DNA, 25 bp, Homo sapien
gcgtgcggctctgggaaaattcaaa

SEQ ID NO: 4660793 - DNA, 25 bp, Homo sapien
aatatgggtaaatcccattggtggg

SEQ ID NO: 4660794 - DNA, 25 bp, Homo sapien
caacttcatgttgatttacagtcaa

SEQ ID NO: 4660795 - DNA, 25 bp, Homo sapien
aacttcatgttgatttacagtcaaa

SEQ ID NO: 4660796 - DNA, 25 bp, Homo sapien
acttcatgttgatttacagtcaaaa

SEQ ID NO: 4660797 - DNA, 25 bp, Homo sapien
cttcatgttgatttacagtcaaaac

SEQ ID NO: 4660798 - DNA, 25 bp, Homo sapien
tggtgtggtggcgtcagtgatgtac

SEQ ID NO: 4660799 - DNA, 25 bp, Homo sapien
ggtggcgtcagtgatgtacgctgtg

SEQ ID NO: 4660800 - DNA, 25 bp, Homo sapien
ctgacttcagctgtggcaccacccc

SEQ ID NO: 4660801 - DNA, 25 bp, Homo sapien
ccaggaatggtgtggtggcgtcagt

SEQ ID NO: 4660802 - DNA, 25 bp, Homo sapien
aactgcagcctgtcctcgctgggct

SEQ ID NO: 4660803 - DNA, 25 bp, Homo sapien
tgcagcctgtcctcgctgggctgtc

SEQ ID NO: 4660804 - DNA, 25 bp, Homo sapien
tgggctgtccccatccatgtatctg

SEQ ID NO: 4660805 - DNA, 25 bp, Homo sapien
gctgtccccatccatgtatctggtc

SEQ ID NO: 4660806 - DNA, 25 bp, Homo sapien
agttgcactagcttcacatggcctt

SEQ ID NO: 4660807 - DNA, 25 bp, Homo sapien
gccttttgggaatagcacctgtgct

SEQ ID NO: 4660808 - DNA, 25 bp, Homo sapien
ttgacagttgcactagcttcacatg

SEQ ID NO: 4660809 - DNA, 25 bp, Homo sapien
cttttgggaatagcacctgtgctac

SEQ ID NO: 4660810 - DNA, 25 bp, Homo sapien
gcaacttccttaacgcgcccgggca

SEQ ID NO: 4660811 - DNA, 25 bp, Homo sapien
ccaggcggcggcaggtgtagaggag

SEQ ID NO: 4660812 - DNA, 25 bp, Homo sapien
gacaagggcccttcgcaggcagaga

SEQ ID NO: 4660813 - DNA, 25 bp, Homo sapien
gggctgcccgggacatggaccgcat

SEQ ID NO: 4660814 - DNA, 25 bp, Homo sapien
caggtgaggcgagggcgggcgcagc

SEQ ID NO: 4660815 - DNA, 25 bp, Homo sapien
gccggggtggcctcagccgccgggc

SEQ ID NO: 4660816 - DNA, 25 bp, Homo sapien
gccaggtgaggcgagggcgggcgca

SEQ ID NO: 4660817 - DNA, 25 bp, Homo sapien
ctgcgccaggtgaggcgagggcggg

SEQ ID NO: 4660818 - DNA, 25 bp, Homo sapien
gaaagcagcgcgtcgttccccgtaa

SEQ ID NO: 4660819 - DNA, 25 bp, Homo sapien
aagggcatgaaagcagcgcgtcgtt

SEQ ID NO: 4660820 - DNA, 25 bp, Homo sapien
ctcggccgatgaaggtagaacaaga

SEQ ID NO: 4660821 - DNA, 25 bp, Homo sapien
tcggccgatgaaggtagaacaagaa

SEQ ID NO: 4660822 - DNA, 25 bp, Homo sapien
attcacatggtttcagcacttttac

SEQ ID NO: 4660823 - DNA, 25 bp, Homo sapien
ttattcacatggtttcagcactttt

SEQ ID NO: 4660824 - DNA, 25 bp, Homo sapien
tttattcacatggtttcagcacttt

SEQ ID NO: 4660825 - DNA, 25 bp, Homo sapien
tattcacatggtttcagcactttta

SEQ ID NO: 4660826 - DNA, 25 bp, Homo sapien
aaatgttctagctccaagatcgact

SEQ ID NO: 4660827 - DNA, 25 bp, Homo sapien
aagatcgacttcctcgcgctgtgcc

SEQ ID NO: 4660828 - DNA, 25 bp, Homo sapien
tctaagctcataagacgtctggaca

SEQ ID NO: 4660829 - DNA, 25 bp, Homo sapien
gtaactttgataaacactgcggcat

SEQ ID NO: 4660830 - DNA, 25 bp, Homo sapien
taataaactaccaggttgaccatgg

SEQ ID NO: 4660831 - DNA, 25 bp, Homo sapien
tcatctgcatcccaggctaaaagcc

SEQ ID NO: 4660832 - DNA, 25 bp, Homo sapien
tgctcggtagacctgcagcttgcct

SEQ ID NO: 4660833 - DNA, 25 bp, Homo sapien
agcagtaactggaagcgcctctcca

SEQ ID NO: 4660834 - DNA, 25 bp, Homo sapien
aggcacggtctccattaggtatcag

SEQ ID NO: 4660835 - DNA, 25 bp, Homo sapien
caggtaccgagcactgcaggcacgg

SEQ ID NO: 4660836 - DNA, 25 bp, Homo sapien
gtaccgagcactgcaggcacggtct

SEQ ID NO: 4660837 - DNA, 25 bp, Homo sapien
ccattaggtatcagagtgaagcccc

SEQ ID NO: 4660838 - DNA, 25 bp, Homo sapien
aggacagaatggtgccagcagtcat

SEQ ID NO: 4660839 - DNA, 25 bp, Homo sapien
tcaaagcctcgctcttcattggagg

SEQ ID NO: 4660840 - DNA, 25 bp, Homo sapien
ctgaacctctcaaagcctcgctctt

SEQ ID NO: 4660841 - DNA, 25 bp, Homo sapien
gaggacagaatggtgccagcagtca

SEQ ID NO: 4660842 - DNA, 25 bp, Homo sapien
gaaactattctgaaccaagtgtgct

SEQ ID NO: 4660843 - DNA, 25 bp, Homo sapien
caagtgtgcttaccccaaggataca

SEQ ID NO: 4660844 - DNA, 25 bp, Homo sapien
tgctgcaaggaaataactgggaacc

SEQ ID NO: 4660845 - DNA, 25 bp, Homo sapien
gaaccatgtcagttcccgggtgact

SEQ ID NO: 4660846 - DNA, 25 bp, Homo sapien
caaggctcttgcaaagtgttttccc

SEQ ID NO: 4660847 - DNA, 25 bp, Homo sapien
aacaatttccttgaagcgctgaccc

SEQ ID NO: 4660848 - DNA, 25 bp, Homo sapien
gcgctgacccctgttgactatgagt

SEQ ID NO: 4660849 - DNA, 25 bp, Homo sapien
tgggaattcccagctgagacaaggc

SEQ ID NO: 4660850 - DNA, 25 bp, Homo sapien
ttttcttgcactagctagggctccc

SEQ ID NO: 4660851 - DNA, 25 bp, Homo sapien
accttgttttcagtatcagagggac

SEQ ID NO: 4660852 - DNA, 25 bp, Homo sapien
agcatcctgtagactcacttattgg

SEQ ID NO: 4660853 - DNA, 25 bp, Homo sapien
tagggctcccagtaggatgttgaac

SEQ ID NO: 4660854 - DNA, 25 bp, Homo sapien
gggaagaagcacacaaatctgagag

SEQ ID NO: 4660855 - DNA, 25 bp, Homo sapien
caggcatcaacaagccagagtgctt

SEQ ID NO: 4660856 - DNA, 25 bp, Homo sapien
tctgagaggagtatcttaaaaggaa

SEQ ID NO: 4660857 - DNA, 25 bp, Homo sapien
tttcctggattcaaacgcagatctg

SEQ ID NO: 4660858 - DNA, 25 bp, Homo sapien
gctgagcggttgactctcccatatt

SEQ ID NO: 4660859 - DNA, 25 bp, Homo sapien
ttctgctgagcggttgactctccca

SEQ ID NO: 4660860 - DNA, 25 bp, Homo sapien
acattctgctgagcggttgactctc

SEQ ID NO: 4660861 - DNA, 25 bp, Homo sapien
gtgcacattctgctgagcggttgac

SEQ ID NO: 4660862 - DNA, 25 bp, Homo sapien
gccccagtgacgctgccaagatttc

SEQ ID NO: 4660863 - DNA, 25 bp, Homo sapien
taagatggttgcctttaccctgttc

SEQ ID NO: 4660864 - DNA, 25 bp, Homo sapien
catgaatgcagctatgggtggcccc

SEQ ID NO: 4660865 - DNA, 25 bp, Homo sapien
agctcctcttaaaagtgcaccggcc

SEQ ID NO: 4660866 - DNA, 25 bp, Homo sapien
ctgtgaatggcatataagtatttat

SEQ ID NO: 4660867 - DNA, 25 bp, Homo sapien
ggcatataagtatttatgtgtaagt

SEQ ID NO: 4660868 - DNA, 25 bp, Homo sapien
ttttgtgcattcaatatacacttaa

SEQ ID NO: 4660869 - DNA, 25 bp, Homo sapien
tttgtgcattcaatatacacttaac

SEQ ID NO: 4660870 - DNA, 25 bp, Homo sapien
acgtctcatacttccacgtggcctg

SEQ ID NO: 4660871 - DNA, 25 bp, Homo sapien
tggctcacgcctgcattctacaatg

SEQ ID NO: 4660872 - DNA, 25 bp, Homo sapien
ctgcaatcctggtgatgcggatgct

SEQ ID NO: 4660873 - DNA, 25 bp, Homo sapien
caatgcttttgttgcaggccagcca

SEQ ID NO: 4660874 - DNA, 25 bp, Homo sapien
ttcaggggccggagggcacacacct

SEQ ID NO: 4660875 - DNA, 25 bp, Homo sapien
cttcaggggccggagggcacacacc

SEQ ID NO: 4660876 - DNA, 25 bp, Homo sapien
gcttcaggggccggagggcacacac

SEQ ID NO: 4660877 - DNA, 25 bp, Homo sapien
tgatgttgccgaaaaagaagggcag

SEQ ID NO: 4660878 - DNA, 25 bp, Homo sapien
cggctctggcgcagcaaataaagcc

SEQ ID NO: 4660879 - DNA, 25 bp, Homo sapien
cggacagggcgaagccacccaggta

SEQ ID NO: 4660880 - DNA, 25 bp, Homo sapien
gggcaggtggttggcgctgtcagcc

SEQ ID NO: 4660881 - DNA, 25 bp, Homo sapien
tggcatgggtcctgccaccggcgat

SEQ ID NO: 4660882 - DNA, 25 bp, Homo sapien
gcgtaggtgccattcagctcccgct

SEQ ID NO: 4660883 - DNA, 25 bp, Homo sapien
ttcaaatcctcaaagggcccagtct

SEQ ID NO: 4660884 - DNA, 25 bp, Homo sapien
ctcgatggtgtagtggtgtgccttc

SEQ ID NO: 4660885 - DNA, 25 bp, Homo sapien
ggttccctgctgtggagaaacccac

SEQ ID NO: 4660886 - DNA, 25 bp, Homo sapien
gcacacagggcacataggcacatgt

SEQ ID NO: 4660887 - DNA, 25 bp, Homo sapien
tgtgttgcatgtagccaggaagtct

SEQ ID NO: 4660888 - DNA, 25 bp, Homo sapien
gccaaagaacgggtgatgcaactat

SEQ ID NO: 4660889 - DNA, 25 bp, Homo sapien
tcctgcagacgttgcatacaagtgt

SEQ ID NO: 4660890 - DNA, 25 bp, Homo sapien
tgctgtggcaatcccaaccctttca

SEQ ID NO: 4660891 - DNA, 25 bp, Homo sapien
tttcaaagtttatcctgcagacgtt

SEQ ID NO: 4660892 - DNA, 25 bp, Homo sapien
aaacacacatatcctttgctgtggc

SEQ ID NO: 4660893 - DNA, 25 bp, Homo sapien
ttccaatctatctcgagtcctggca

SEQ ID NO: 4660894 - DNA, 25 bp, Homo sapien
ggatcaaaacttattcactcattca

SEQ ID NO: 4660895 - DNA, 25 bp, Homo sapien
gagcaaagcagagtaaaccataccg

SEQ ID NO: 4660896 - DNA, 25 bp, Homo sapien
tggcatggtaaaacaggatcaaaac

SEQ ID NO: 4660897 - DNA, 25 bp, Homo sapien
gactgatgatggcctgctccagagc

SEQ ID NO: 4660898 - DNA, 25 bp, Homo sapien
atgatggcctgctccagagcctgac

SEQ ID NO: 4660899 - DNA, 25 bp, Homo sapien
ctgatgatggcctgctccagagcct

SEQ ID NO: 4660900 - DNA, 25 bp, Homo sapien
gatgatggcctgctccagagcctga

SEQ ID NO: 4660901 - DNA, 25 bp, Homo sapien
tcttcccgagagatttttccatgga

SEQ ID NO: 4660902 - DNA, 25 bp, Homo sapien
gatcctatcaggacaatttgctcag

SEQ ID NO: 4660903 - DNA, 25 bp, Homo sapien
ttcatgggctgtggtagcgatcagc

SEQ ID NO: 4660904 - DNA, 25 bp, Homo sapien
tccatggaaccaaggcattttttca

SEQ ID NO: 4660905 - DNA, 25 bp, Homo sapien
attcccaattgtccacacaggcctg

SEQ ID NO: 4660906 - DNA, 25 bp, Homo sapien
gaagctgaattattcccaattgtcc

SEQ ID NO: 4660907 - DNA, 25 bp, Homo sapien
gccagtcacaaggaagctgaattat

SEQ ID NO: 4660908 - DNA, 25 bp, Homo sapien
atgtggggccagtcacaaggaagct

SEQ ID NO: 4660909 - DNA, 25 bp, Homo sapien
cactcatggatgctactcccaggaa

SEQ ID NO: 4660910 - DNA, 25 bp, Homo sapien
tgaggatagcaaacagaacccagga

SEQ ID NO: 4660911 - DNA, 25 bp, Homo sapien
taaatattacatccctcggtgccca

SEQ ID NO: 4660912 - DNA, 25 bp, Homo sapien
tctaatgactgtgggcctaaggctg

SEQ ID NO: 4660913 - DNA, 25 bp, Homo sapien
tgtacaggacccaggtaaaagcacg

SEQ ID NO: 4660914 - DNA, 25 bp, Homo sapien
cagcaaaccgatgatgtggcagcca

SEQ ID NO: 4660915 - DNA, 25 bp, Homo sapien
catgagaaagtgaaggccctgaaat

SEQ ID NO: 4660916 - DNA, 25 bp, Homo sapien
caggagatcagagcggagacaaact

SEQ ID NO: 4660917 - DNA, 25 bp, Homo sapien
ttagtttatggcttgcaatgcaaaa

SEQ ID NO: 4660918 - DNA, 25 bp, Homo sapien
cctcttgattagtttatggcttgca

SEQ ID NO: 4660919 - DNA, 25 bp, Homo sapien
aatcctcttgattagtttatggctt

SEQ ID NO: 4660920 - DNA, 25 bp, Homo sapien
tgattagtttatggcttgcaatgca

SEQ ID NO: 4660921 - DNA, 25 bp, Homo sapien
tggtggagacagcatattggtactc

SEQ ID NO: 4660922 - DNA, 25 bp, Homo sapien
tttccacgtaaagcgattctcagac

SEQ ID NO: 4660923 - DNA, 25 bp, Homo sapien
tgaaagtgtgaagagtaatcgctgg

SEQ ID NO: 4660924 - DNA, 25 bp, Homo sapien
tattggtactcacgatgaaagtgtg

SEQ ID NO: 4660925 - DNA, 25 bp, Homo sapien
tttcaaggtctgtttgagcaaaggc

SEQ ID NO: 4660926 - DNA, 25 bp, Homo sapien
cctcagtgttttcaaggtctgtttg

SEQ ID NO: 4660927 - DNA, 25 bp, Homo sapien
gttttcaaggtctgtttgagcaaag

SEQ ID NO: 4660928 - DNA, 25 bp, Homo sapien
tcaaggtctgtttgagcaaaggcat

SEQ ID NO: 4660929 - DNA, 25 bp, Homo sapien
gaaagctgatggacgcctctgtgtg

SEQ ID NO: 4660930 - DNA, 25 bp, Homo sapien
taagtggtaaatgccctctagctca

SEQ ID NO: 4660931 - DNA, 25 bp, Homo sapien
tgcttagccccagacaacatcaggg

SEQ ID NO: 4660932 - DNA, 25 bp, Homo sapien
gatccgagttggacagcatctccca

SEQ ID NO: 4660933 - DNA, 25 bp, Homo sapien
cactcctgaatggtgtgggtaagct

SEQ ID NO: 4660934 - DNA, 25 bp, Homo sapien
acaaagagcctctgtttatattcgt

SEQ ID NO: 4660935 - DNA, 25 bp, Homo sapien
gcggctgtgagggacaaccactgac

SEQ ID NO: 4660936 - DNA, 25 bp, Homo sapien
tcgttattcttcaagcacatgtgca

SEQ ID NO: 4660937 - DNA, 25 bp, Homo sapien
tatagcaaaggccaggtgatgaaca

SEQ ID NO: 4660938 - DNA, 25 bp, Homo sapien
gcaaaggccaggtgatgaacatcac

SEQ ID NO: 4660939 - DNA, 25 bp, Homo sapien
tagcaaaggccaggtgatgaacatc

SEQ ID NO: 4660940 - DNA, 25 bp, Homo sapien
ttatatagcaaaggccaggtgatga

SEQ ID NO: 4660941 - DNA, 25 bp, Homo sapien
aagctatccctccccgctcctccca

SEQ ID NO: 4660942 - DNA, 25 bp, Homo sapien
agctatccctccccgctcctcccac

SEQ ID NO: 4660943 - DNA, 25 bp, Homo sapien
taaagctatccctccccgctcctcc

SEQ ID NO: 4660944 - DNA, 25 bp, Homo sapien
cctaaagctatccctccccgctcct

SEQ ID NO: 4660945 - DNA, 25 bp, Homo sapien
ggccagtcctggcaacaggtaactg

SEQ ID NO: 4660946 - DNA, 25 bp, Homo sapien
ggttctgcaggcgatcccctctctt

SEQ ID NO: 4660947 - DNA, 25 bp, Homo sapien
taggtagtgaccatggacatgtggc

SEQ ID NO: 4660948 - DNA, 25 bp, Homo sapien
taactggaaggtataggtagtgacc

SEQ ID NO: 4660949 - DNA, 25 bp, Homo sapien
tcagatacacgaccacagggagagt

SEQ ID NO: 4660950 - DNA, 25 bp, Homo sapien
tctgagggtgagtcatgaagtccca

SEQ ID NO: 4660951 - DNA, 25 bp, Homo sapien
ccttcagaactggacatggccatgc

SEQ ID NO: 4660952 - DNA, 25 bp, Homo sapien
caactgccttgggacgtctgggtac

SEQ ID NO: 4660953 - DNA, 25 bp, Homo sapien
tttgggttagatccaagatggacag

SEQ ID NO: 4660954 - DNA, 25 bp, Homo sapien
taccacctagcttggagtgtgggtg

SEQ ID NO: 4660955 - DNA, 25 bp, Homo sapien
gacagctctaccacctagcttggag

SEQ ID NO: 4660956 - DNA, 25 bp, Homo sapien
gatccaagatggacagctctaccac

SEQ ID NO: 4660957 - DNA, 25 bp, Homo sapien
ttgtcgatgcgatagtgcagcacct

SEQ ID NO: 4660958 - DNA, 25 bp, Homo sapien
ctgccagagcgtgtcgaacttcttt

SEQ ID NO: 4660959 - DNA, 25 bp, Homo sapien
accttcccttcgtgcagcaggcaca

SEQ ID NO: 4660960 - DNA, 25 bp, Homo sapien
cgtaggagccgttgttgtctctggc

SEQ ID NO: 4660961 - DNA, 25 bp, Homo sapien
tgagtggccctgaacaagccatgga

SEQ ID NO: 4660962 - DNA, 25 bp, Homo sapien
acatgacggcctctggaccagtgct

SEQ ID NO: 4660963 - DNA, 25 bp, Homo sapien
ctaagagtccatgggacaaggagcc

SEQ ID NO: 4660964 - DNA, 25 bp, Homo sapien
ggtggtccagttcctctcatgtcta

SEQ ID NO: 4660965 - DNA, 25 bp, Homo sapien
aaagacaggattttgagttgagtcc

SEQ ID NO: 4660966 - DNA, 25 bp, Homo sapien
catgttcaaggtagctggtgctctg

SEQ ID NO: 4660967 - DNA, 25 bp, Homo sapien
tacagcactagaaagcaaatcacat

SEQ ID NO: 4660968 - DNA, 25 bp, Homo sapien
gggtgaggacattggaacacgccct

SEQ ID NO: 4660969 - DNA, 25 bp, Homo sapien
gccgattttttgacatgggacagta

SEQ ID NO: 4660970 - DNA, 25 bp, Homo sapien
gacatgggacagtaagaactcttaa

SEQ ID NO: 4660971 - DNA, 25 bp, Homo sapien
cagtaagaactcttaacaaaccatc

SEQ ID NO: 4660972 - DNA, 25 bp, Homo sapien
cctgtgtgccgattttttgacatgg

SEQ ID NO: 4660973 - DNA, 25 bp, Homo sapien
ctggaagttgtggacggcctccaaa

SEQ ID NO: 4660974 - DNA, 25 bp, Homo sapien
cttgagattattccacccgctgacc

SEQ ID NO: 4660975 - DNA, 25 bp, Homo sapien
gattcttgagattattccacccgct

SEQ ID NO: 4660976 - DNA, 25 bp, Homo sapien
gatttgattcttgagattattccac

SEQ ID NO: 4660977 - DNA, 25 bp, Homo sapien
tgagattattccacccgctgaccaa

SEQ ID NO: 4660978 - DNA, 25 bp, Homo sapien
cccaggaacagcaggtgtgagcaag

SEQ ID NO: 4660979 - DNA, 25 bp, Homo sapien
aacagcaggtgtgagcaagggcaaa

SEQ ID NO: 4660980 - DNA, 25 bp, Homo sapien
ctggggcgcggctgcccaggaacag

SEQ ID NO: 4660981 - DNA, 25 bp, Homo sapien
aggaacagcaggtgtgagcaagggc

SEQ ID NO: 4660982 - DNA, 25 bp, Homo sapien
taattagctatgacggatgacgcca

SEQ ID NO: 4660983 - DNA, 25 bp, Homo sapien
aacacgtgagtctggccaccaaaaa

SEQ ID NO: 4660984 - DNA, 25 bp, Homo sapien
caccaaaaagtaagtgggccatctt

SEQ ID NO: 4660985 - DNA, 25 bp, Homo sapien
tggtgttccctccatcacaacgtaa

SEQ ID NO: 4660986 - DNA, 25 bp, Homo sapien
gcctcccatagtagcaattttactg

SEQ ID NO: 4660987 - DNA, 25 bp, Homo sapien
gaggcaaccagcattgccagcattt

SEQ ID NO: 4660988 - DNA, 25 bp, Homo sapien
aacaattctagatctcagctgcctc

SEQ ID NO: 4660989 - DNA, 25 bp, Homo sapien
gtatacgatatcaacacattctgca

SEQ ID NO: 4660990 - DNA, 25 bp, Homo sapien
tctcaagggtctggtctactaaggc

SEQ ID NO: 4660991 - DNA, 25 bp, Homo sapien
tctcttagctaacatgatgggacat

SEQ ID NO: 4660992 - DNA, 25 bp, Homo sapien
tactaaggcattaccaagcaacagg

SEQ ID NO: 4660993 - DNA, 25 bp, Homo sapien
gaaaataacacttgacctctgcaat

SEQ ID NO: 4660994 - DNA, 25 bp, Homo sapien
cagaatgttctccagaccaggagga

SEQ ID NO: 4660995 - DNA, 25 bp, Homo sapien
gaaacagatgggagatcttcctcgg

SEQ ID NO: 4660996 - DNA, 25 bp, Homo sapien
tgtcctcggactagccatcactggt

SEQ ID NO: 4660997 - DNA, 25 bp, Homo sapien
cctgacagaaactgggtgatcccct

SEQ ID NO: 4660998 - DNA, 25 bp, Homo sapien
caagcctgttgacaaggctaaagga

SEQ ID NO: 4660999 - DNA, 25 bp, Homo sapien
tgagcacttcagaggcagacattgt

SEQ ID NO: 4661000 - DNA, 25 bp, Homo sapien
cagacattgttcaccatggcccaag

SEQ ID NO: 4661001 - DNA, 25 bp, Homo sapien
tctttcacacggtctgctgagcact

SEQ ID NO: 4661002 - DNA, 25 bp, Homo sapien
gagtcaactctactggcctggatag

SEQ ID NO: 4661003 - DNA, 25 bp, Homo sapien
tcagtaactacaggtcccaagggaa

SEQ ID NO: 4661004 - DNA, 25 bp, Homo sapien
tgctgctacaactcaagggactctg

SEQ ID NO: 4661005 - DNA, 25 bp, Homo sapien
cactggccacgaagaaatgagatac

SEQ ID NO: 4661006 - DNA, 25 bp, Homo sapien
tcatacggattgaatgacacagtac

SEQ ID NO: 4661007 - DNA, 25 bp, Homo sapien
catacggattgaatgacacagtact

SEQ ID NO: 4661008 - DNA, 25 bp, Homo sapien
acggattgaatgacacagtactctc

SEQ ID NO: 4661009 - DNA, 25 bp, Homo sapien
tacggattgaatgacacagtactct

SEQ ID NO: 4661010 - DNA, 25 bp, Homo sapien
agtgaccacgcactttgctctgtga

SEQ ID NO: 4661011 - DNA, 25 bp, Homo sapien
tgaccacgcactttgctctgtgaat

SEQ ID NO: 4661012 - DNA, 25 bp, Homo sapien
gtgaccacgcactttgctctgtgaa

SEQ ID NO: 4661013 - DNA, 25 bp, Homo sapien
aagtgaccacgcactttgctctgtg

SEQ ID NO: 4661014 - DNA, 25 bp, Homo sapien
tgctgcctgccactagatgtgagtg

SEQ ID NO: 4661015 - DNA, 25 bp, Homo sapien
taactgtggctgtattgcaatcacg

SEQ ID NO: 4661016 - DNA, 25 bp, Homo sapien
tgcagtcaagaaacatacgacctgg

SEQ ID NO: 4661017 - DNA, 25 bp, Homo sapien
gcagggacatttccaacgtcgttgg

SEQ ID NO: 4661018 - DNA, 25 bp, Homo sapien
ccagttctttgtcttccagcgtcag

SEQ ID NO: 4661019 - DNA, 25 bp, Homo sapien
attaccagagcccagttctttgtct

SEQ ID NO: 4661020 - DNA, 25 bp, Homo sapien
ccagcgtcagcagctttcggtccag

SEQ ID NO: 4661021 - DNA, 25 bp, Homo sapien
tggtagtagccctttttcacagttc

SEQ ID NO: 4661022 - DNA, 25 bp, Homo sapien
aagggtttagtcatgccaggttaca

SEQ ID NO: 4661023 - DNA, 25 bp, Homo sapien
tgaggctggtggaacatagcaactt

SEQ ID NO: 4661024 - DNA, 25 bp, Homo sapien
cagtcatgtctagaacctgagctca

SEQ ID NO: 4661025 - DNA, 25 bp, Homo sapien
taaggtgcatgtactattaggttgg

SEQ ID NO: 4661026 - DNA, 25 bp, Homo sapien
gatcatccgcacgatgtacgggttg

SEQ ID NO: 4661027 - DNA, 25 bp, Homo sapien
tattgaggggaccaagttctgccat

SEQ ID NO: 4661028 - DNA, 25 bp, Homo sapien
aggactcggcctcgcatatcccgat

SEQ ID NO: 4661029 - DNA, 25 bp, Homo sapien
atctccataaccagcatccaggact

SEQ ID NO: 4661030 - DNA, 25 bp, Homo sapien
ttcccaaggaaatcaggctgctcgg

SEQ ID NO: 4661031 - DNA, 25 bp, Homo sapien
gcagtataacagagtagtcaggcct

SEQ ID NO: 4661032 - DNA, 25 bp, Homo sapien
gaggctgagtctatcactaggccaa

SEQ ID NO: 4661033 - DNA, 25 bp, Homo sapien
aaatgaggcaagctcctcggtggcc

SEQ ID NO: 4661034 - DNA, 25 bp, Homo sapien
tagttttcatcagcacgcagtgctt

SEQ ID NO: 4661035 - DNA, 25 bp, Homo sapien
catgcccatggaaacctgatgaacc

SEQ ID NO: 4661036 - DNA, 25 bp, Homo sapien
gcgtaatgttgggtaactagcaaca

SEQ ID NO: 4661037 - DNA, 25 bp, Homo sapien
gctttggaaagtccgaaatcactga

SEQ ID NO: 4661038 - DNA, 25 bp, Homo sapien
ctctgaatattagctaagttgtact

SEQ ID NO: 4661039 - DNA, 25 bp, Homo sapien
cagtaaaatcaaagattataagaac

SEQ ID NO: 4661040 - DNA, 25 bp, Homo sapien
ctgctttttgaaaccataccaataa

SEQ ID NO: 4661041 - DNA, 25 bp, Homo sapien
accacctgctgctctgaatattagc

SEQ ID NO: 4661042 - DNA, 25 bp, Homo sapien
agttgctttacactgccccatatat

SEQ ID NO: 4661043 - DNA, 25 bp, Homo sapien
tgcatctggatgtctaggtttgttg

SEQ ID NO: 4661044 - DNA, 25 bp, Homo sapien
catggtctccttgggtggcagtatt

SEQ ID NO: 4661045 - DNA, 25 bp, Homo sapien
gggacactgatgatttgaatattca

SEQ ID NO: 4661046 - DNA, 25 bp, Homo sapien
tgtagtagttgatgcattccggagc

SEQ ID NO: 4661047 - DNA, 25 bp, Homo sapien
ttccggagcgtaccacttgacaggc

SEQ ID NO: 4661048 - DNA, 25 bp, Homo sapien
tctgcccataggagaatgcttccca

SEQ ID NO: 4661049 - DNA, 25 bp, Homo sapien
tttgctggagaacttgtagtagttg

SEQ ID NO: 4661050 - DNA, 25 bp, Homo sapien
taatggccccacagtgagaaaatga

SEQ ID NO: 4661051 - DNA, 25 bp, Homo sapien
ctaatggccccacagtgagaaaatg

SEQ ID NO: 4661052 - DNA, 25 bp, Homo sapien
agaaaatgaagcaggactggctcac

SEQ ID NO: 4661053 - DNA, 25 bp, Homo sapien
gtgagaaaatgaagcaggactggct

SEQ ID NO: 4661054 - DNA, 25 bp, Homo sapien
tgagggcacattaactgcttactgg

SEQ ID NO: 4661055 - DNA, 25 bp, Homo sapien
cagtttggaatagactgagggcaca

SEQ ID NO: 4661056 - DNA, 25 bp, Homo sapien
tgttggagtcagttgggtcacccct

SEQ ID NO: 4661057 - DNA, 25 bp, Homo sapien
tccaagacatgaaggagtacacatt

SEQ ID NO: 4661058 - DNA, 25 bp, Homo sapien
catgagatcgtacatctctcttgga

SEQ ID NO: 4661059 - DNA, 25 bp, Homo sapien
tcctttctctaacatagcggtgact

SEQ ID NO: 4661060 - DNA, 25 bp, Homo sapien
tctaacatagcggtgacttcacttc

SEQ ID NO: 4661061 - DNA, 25 bp, Homo sapien
gtccagcacagattcatgagatcgt

SEQ ID NO: 4661062 - DNA, 25 bp, Homo sapien
gtcagctgtatctgaaggcaaacct

SEQ ID NO: 4661063 - DNA, 25 bp, Homo sapien
tgaaggcaaacctgattccgcaaag

SEQ ID NO: 4661064 - DNA, 25 bp, Homo sapien
tccgcaaagcatcaaatccatggcc

SEQ ID NO: 4661065 - DNA, 25 bp, Homo sapien
aaggcaaacctgattccgcaaagca

SEQ ID NO: 4661066 - DNA, 25 bp, Homo sapien
agacccttcctgtagcaggatgaga

SEQ ID NO: 4661067 - DNA, 25 bp, Homo sapien
tccttgagtgacctgcacagggcag

SEQ ID NO: 4661068 - DNA, 25 bp, Homo sapien
tttttcaggatcaagagcaccaact

SEQ ID NO: 4661069 - DNA, 25 bp, Homo sapien
tcggataggactaactgacctgtct

SEQ ID NO: 4661070 - DNA, 25 bp, Homo sapien
ggcttgttgatctttaaacaggaat

SEQ ID NO: 4661071 - DNA, 25 bp, Homo sapien
aaatttctccattcggcagaggccc

SEQ ID NO: 4661072 - DNA, 25 bp, Homo sapien
gaatttgagccgcatctagagcctc

SEQ ID NO: 4661073 - DNA, 25 bp, Homo sapien
tcatgttttatcttgggcttgttga

SEQ ID NO: 4661074 - DNA, 25 bp, Homo sapien
gctttcgggccagagtgcagattct

SEQ ID NO: 4661075 - DNA, 25 bp, Homo sapien
gaaactacttcgacacgagagggct

SEQ ID NO: 4661076 - DNA, 25 bp, Homo sapien
tatatatcaccttggagagagtggc

SEQ ID NO: 4661077 - DNA, 25 bp, Homo sapien
ccaggttcagatatgcggcacacaa

SEQ ID NO: 4661078 - DNA, 25 bp, Homo sapien
cagttccactgctgcgaatccgggc

SEQ ID NO: 4661079 - DNA, 25 bp, Homo sapien
gtagtaattgcgcagccgcagttcc

SEQ ID NO: 4661080 - DNA, 25 bp, Homo sapien
tagtagtaattgcgcagccgcagtt

SEQ ID NO: 4661081 - DNA, 25 bp, Homo sapien
actgctgcgaatccgggcctgtttt

SEQ ID NO: 4661082 - DNA, 25 bp, Homo sapien
tgtgggcatgttccatccaagcctg

SEQ ID NO: 4661083 - DNA, 25 bp, Homo sapien
gattgctcctgtgatcaaaggcagc

SEQ ID NO: 4661084 - DNA, 25 bp, Homo sapien
tttcagtggccagggatcagtctca

SEQ ID NO: 4661085 - DNA, 25 bp, Homo sapien
tccctgggcccgatgagtaacaaat

SEQ ID NO: 4661086 - DNA, 25 bp, Homo sapien
catgcagggctttatttaccagtca

SEQ ID NO: 4661087 - DNA, 25 bp, Homo sapien
tggtccccttttatcacaaacatgt

SEQ ID NO: 4661088 - DNA, 25 bp, Homo sapien
ggaaagtaagccaagccaattcatt

SEQ ID NO: 4661089 - DNA, 25 bp, Homo sapien
ttcaagacagtctgcaggagagagg

SEQ ID NO: 4661090 - DNA, 25 bp, Homo sapien
tagatggctttgatccctgtgctgc

SEQ ID NO: 4661091 - DNA, 25 bp, Homo sapien
acaggggattctggcggcaccctct

SEQ ID NO: 4661092 - DNA, 25 bp, Homo sapien
tgtgctgccccccattgcagacaca

SEQ ID NO: 4661093 - DNA, 25 bp, Homo sapien
attgcagacacagaaagcgacaggg

SEQ ID NO: 4661094 - DNA, 25 bp, Homo sapien
tttcagaaagtgtgcgtggctacca

SEQ ID NO: 4661095 - DNA, 25 bp, Homo sapien
gatattcacggcctcactagccagt

SEQ ID NO: 4661096 - DNA, 25 bp, Homo sapien
gagaatctgctcagcactcagggat

SEQ ID NO: 4661097 - DNA, 25 bp, Homo sapien
taccttatggagtgagcccagaccc

SEQ ID NO: 4661098 - DNA, 25 bp, Homo sapien
gaacacatccggtgtccagaaagtg

SEQ ID NO: 4661099 - DNA, 25 bp, Homo sapien
cagaaagtgtgctttaccaggcgct

SEQ ID NO: 4661100 - DNA, 25 bp, Homo sapien
accaggcgcttttggtacgagagga

SEQ ID NO: 4661101 - DNA, 25 bp, Homo sapien
gcgtgctgctgtgtaagtctgtcca

SEQ ID NO: 4661102 - DNA, 25 bp, Homo sapien
gaggagtcttttctcgcccctgttc

SEQ ID NO: 4661103 - DNA, 25 bp, Homo sapien
cactgaagtctgtccgaggagtctt

SEQ ID NO: 4661104 - DNA, 25 bp, Homo sapien
cactgggcagcttgtgtccctaaat

SEQ ID NO: 4661105 - DNA, 25 bp, Homo sapien
tgttcacggccatgctttaactggg

SEQ ID NO: 4661106 - DNA, 25 bp, Homo sapien
gtcctgtccctgaaaagcccatgga

SEQ ID NO: 4661107 - DNA, 25 bp, Homo sapien
tcctgtccctgaaaagcccatggag

SEQ ID NO: 4661108 - DNA, 25 bp, Homo sapien
cctgtccctgaaaagcccatggagt

SEQ ID NO: 4661109 - DNA, 25 bp, Homo sapien
ttgggcgtcgggtgttgttttcaca

SEQ ID NO: 4661110 - DNA, 25 bp, Homo sapien
ggaccaccaggtttttcagcagaca

SEQ ID NO: 4661111 - DNA, 25 bp, Homo sapien
ccaccaggtttttcagcagacagca

SEQ ID NO: 4661112 - DNA, 25 bp, Homo sapien
accaggtttttcagcagacagcagg

SEQ ID NO: 4661113 - DNA, 25 bp, Homo sapien
cacctgcccattccccaggaacggt

SEQ ID NO: 4661114 - DNA, 25 bp, Homo sapien
gcccattccccaggaacggtctcac

SEQ ID NO: 4661115 - DNA, 25 bp, Homo sapien
ctgtgcctttcacctgcccattccc

SEQ ID NO: 4661116 - DNA, 25 bp, Homo sapien
cctgcccattccccaggaacggtct

SEQ ID NO: 4661117 - DNA, 25 bp, Homo sapien
tggtgctgtccataggccgccttgt

SEQ ID NO: 4661118 - DNA, 25 bp, Homo sapien
tctcctttgacaaccgtggcccgaa

SEQ ID NO: 4661119 - DNA, 25 bp, Homo sapien
tttgacaaccgtggcccgaacttca

SEQ ID NO: 4661120 - DNA, 25 bp, Homo sapien
gtggcccgaacttcagctccagcgt

SEQ ID NO: 4661121 - DNA, 25 bp, Homo sapien
ctactctcctttgacaaccgtggcc

SEQ ID NO: 4661122 - DNA, 25 bp, Homo sapien
gacaggaagtgcatcttagtgaccc

SEQ ID NO: 4661123 - DNA, 25 bp, Homo sapien
tctctgtagacctccaaatccagta

SEQ ID NO: 4661124 - DNA, 25 bp, Homo sapien
aaattctggacaaaatgcagccctc

SEQ ID NO: 4661125 - DNA, 25 bp, Homo sapien
tccagtagggatccagtgttcgtct

SEQ ID NO: 4661126 - DNA, 25 bp, Homo sapien
actggagacaccaggctcaacttcc

SEQ ID NO: 4661127 - DNA, 25 bp, Homo sapien
tggagacaccaggctcaacttcccc

SEQ ID NO: 4661128 - DNA, 25 bp, Homo sapien
gagacaccaggctcaacttccccac

SEQ ID NO: 4661129 - DNA, 25 bp, Homo sapien
ctggagacaccaggctcaacttccc

SEQ ID NO: 4661130 - DNA, 25 bp, Homo sapien
cccactggagacaccaggtccacct

SEQ ID NO: 4661131 - DNA, 25 bp, Homo sapien
actggagacaccaggtctacctccc

SEQ ID NO: 4661132 - DNA, 25 bp, Homo sapien
ttccccactggtgactccaggctca

SEQ ID NO: 4661133 - DNA, 25 bp, Homo sapien
ccactggagacaccaggtccacctt

SEQ ID NO: 4661134 - DNA, 25 bp, Homo sapien
gtccacctcccccactggtgactcc

SEQ ID NO: 4661135 - DNA, 25 bp, Homo sapien
ctggagacaccaggtctacctcccc

SEQ ID NO: 4661136 - DNA, 25 bp, Homo sapien
acctccccaactggagacaccaggt

SEQ ID NO: 4661137 - DNA, 25 bp, Homo sapien
agacaccaggtctacctcccctact

SEQ ID NO: 4661138 - DNA, 25 bp, Homo sapien
tcatcttcctgaccggtgacaccag

SEQ ID NO: 4661139 - DNA, 25 bp, Homo sapien
ccagagaaaccaggctcatcttcct

SEQ ID NO: 4661140 - DNA, 25 bp, Homo sapien
tccaggttcacattccgcaccagag

SEQ ID NO: 4661141 - DNA, 25 bp, Homo sapien
cgcaccagaggcaccaggttcatct

SEQ ID NO: 4661142 - DNA, 25 bp, Homo sapien
cacacgtgggcacgtgcgtggctgc

SEQ ID NO: 4661143 - DNA, 25 bp, Homo sapien
cgtggctgcaggttcaatacgggct

SEQ ID NO: 4661144 - DNA, 25 bp, Homo sapien
tgcaggttcaatacgggctagctct

SEQ ID NO: 4661145 - DNA, 25 bp, Homo sapien
acgggctagctctgatttttgccaa

SEQ ID NO: 4661146 - DNA, 25 bp, Homo sapien
cataaggctatcagaatacacaggg

SEQ ID NO: 4661147 - DNA, 25 bp, Homo sapien
cttttcgtgatgtatacataaggct

SEQ ID NO: 4661148 - DNA, 25 bp, Homo sapien
gcttttgtgggtcctaaccatgggc

SEQ ID NO: 4661149 - DNA, 25 bp, Homo sapien
cagggcttttgtgggtcctaaccat

SEQ ID NO: 4661150 - DNA, 25 bp, Homo sapien
gcagttcccattaggagaattattg

SEQ ID NO: 4661151 - DNA, 25 bp, Homo sapien
gttcccattaggagaattattgtac

SEQ ID NO: 4661152 - DNA, 25 bp, Homo sapien
gagaattattgtacttgctaaggct

SEQ ID NO: 4661153 - DNA, 25 bp, Homo sapien
ttgtacttgctaaggctacataaac

SEQ ID NO: 4661154 - DNA, 25 bp, Homo sapien
tcctgctgggaccatcatgcccaga

SEQ ID NO: 4661155 - DNA, 25 bp, Homo sapien
ctgtgtcagcgacgacaacccagac

SEQ ID NO: 4661156 - DNA, 25 bp, Homo sapien
catgcccagaacctgcaaagcgggt

SEQ ID NO: 4661157 - DNA, 25 bp, Homo sapien
ccagccagctgtctacgtggggcag

SEQ ID NO: 4661158 - DNA, 25 bp, Homo sapien
ctgcatctctacttagggtcttgca

SEQ ID NO: 4661159 - DNA, 25 bp, Homo sapien
gggccagcacagtccgtgggtctcc

SEQ ID NO: 4661160 - DNA, 25 bp, Homo sapien
ggtctcccaggcagtccgtaggtcc

SEQ ID NO: 4661161 - DNA, 25 bp, Homo sapien
gcagtccgtaggtcccgtcctgagc

SEQ ID NO: 4661162 - DNA, 25 bp, Homo sapien
ctggaataaataataaatgggcttt

SEQ ID NO: 4661163 - DNA, 25 bp, Homo sapien
tggaataaataataaatgggctttc

SEQ ID NO: 4661164 - DNA, 25 bp, Homo sapien
aataataaatgggctttcttcattt

SEQ ID NO: 4661165 - DNA, 25 bp, Homo sapien
ataaataataaatgggctttcttca

SEQ ID NO: 4661166 - DNA, 25 bp, Homo sapien
aaggcgaggacagctgcttgctgta

SEQ ID NO: 4661167 - DNA, 25 bp, Homo sapien
gcgaggacagctgcttgctgtatca

SEQ ID NO: 4661168 - DNA, 25 bp, Homo sapien
gcacagccaaaggcgaggacagctg

SEQ ID NO: 4661169 - DNA, 25 bp, Homo sapien
gccaaaggcgaggacagctgcttgc

SEQ ID NO: 4661170 - DNA, 25 bp, Homo sapien
tgtaggtgtatgtatgccgggggtt

SEQ ID NO: 4661171 - DNA, 25 bp, Homo sapien
gctcctcctacggtgaggtaggtct

SEQ ID NO: 4661172 - DNA, 25 bp, Homo sapien
cctcctacggtgaggtaggtctgct

SEQ ID NO: 4661173 - DNA, 25 bp, Homo sapien
tcctacggtgaggtaggtctgcttg

SEQ ID NO: 4661174 - DNA, 25 bp, Homo sapien
ttggtagcaggagatcttgccctat

SEQ ID NO: 4661175 - DNA, 25 bp, Homo sapien
ttgtccagtatgcatgaatatctag

SEQ ID NO: 4661176 - DNA, 25 bp, Homo sapien
gagatcttgccctatttgtccagta

SEQ ID NO: 4661177 - DNA, 25 bp, Homo sapien
ttagtgtgtgcatcgacaggccaca

SEQ ID NO: 4661178 - DNA, 25 bp, Homo sapien
tcacttttgggtgttcctccctgcc

SEQ ID NO: 4661179 - DNA, 25 bp, Homo sapien
atggatggtgaggacattaggactc

SEQ ID NO: 4661180 - DNA, 25 bp, Homo sapien
actcacttttgggtgttcctccctg

SEQ ID NO: 4661181 - DNA, 25 bp, Homo sapien
tgaggacattaggactcacttttgg

SEQ ID NO: 4661182 - DNA, 25 bp, Homo sapien
cacagcaatcttagtgggtgatgga

SEQ ID NO: 4661183 - DNA, 25 bp, Homo sapien
ccagcactggatttgacactgtgcc

SEQ ID NO: 4661184 - DNA, 25 bp, Homo sapien
atggaggtgagaacgtggtggaagt

SEQ ID NO: 4661185 - DNA, 25 bp, Homo sapien
actgtgccatcaacattacctacca

SEQ ID NO: 4661186 - DNA, 25 bp, Homo sapien
ggactgctaactggatgaaataggc

SEQ ID NO: 4661187 - DNA, 25 bp, Homo sapien
aggactgctaactggatgaaatagg

SEQ ID NO: 4661188 - DNA, 25 bp, Homo sapien
aaggactgctaactggatgaaatag

SEQ ID NO: 4661189 - DNA, 25 bp, Homo sapien
gactgctaactggatgaaataggcc

SEQ ID NO: 4661190 - DNA, 25 bp, Homo sapien
tctccaaagcttagggcgcaaggcg

SEQ ID NO: 4661191 - DNA, 25 bp, Homo sapien
acctgcactcactcatactgggatg

SEQ ID NO: 4661192 - DNA, 25 bp, Homo sapien
ttgagggtggccgaagcctatctcc

SEQ ID NO: 4661193 - DNA, 25 bp, Homo sapien
tagacatggcagttcacctcatagg

SEQ ID NO: 4661194 - DNA, 25 bp, Homo sapien
tagaagcattacctctccctgaatc

SEQ ID NO: 4661195 - DNA, 25 bp, Homo sapien
aagcatgggtttccacctccctagc

SEQ ID NO: 4661196 - DNA, 25 bp, Homo sapien
tcattgagaaataggtggagagccc

SEQ ID NO: 4661197 - DNA, 25 bp, Homo sapien
gagccctctgatgatttcggactga

SEQ ID NO: 4661198 - DNA, 25 bp, Homo sapien
tccttaggggacatgtgccttgacc

SEQ ID NO: 4661199 - DNA, 25 bp, Homo sapien
aggctgttgttgatgaccattcagg

SEQ ID NO: 4661200 - DNA, 25 bp, Homo sapien
ctgttgttgatgaccattcagggct

SEQ ID NO: 4661201 - DNA, 25 bp, Homo sapien
acatgtgccttgaccacaggttctg

SEQ ID NO: 4661202 - DNA, 25 bp, Homo sapien
tttgagtcgatcctccaatggtggg

SEQ ID NO: 4661203 - DNA, 25 bp, Homo sapien
tcgatcctccaatggtggggcagcc

SEQ ID NO: 4661204 - DNA, 25 bp, Homo sapien
gaatttgagtcgatcctccaatggt

SEQ ID NO: 4661205 - DNA, 25 bp, Homo sapien
cgatcctccaatggtggggcagccc

SEQ ID NO: 4661206 - DNA, 25 bp, Homo sapien
ctgtaaggacacagccttgtatttt

SEQ ID NO: 4661207 - DNA, 25 bp, Homo sapien
taaggacacagccttgtatttttcc

SEQ ID NO: 4661208 - DNA, 25 bp, Homo sapien
atttttccacagaataattacagtg

SEQ ID NO: 4661209 - DNA, 25 bp, Homo sapien
ccacagaataattacagtgttccat

SEQ ID NO: 4661210 - DNA, 25 bp, Homo sapien
ctgctctcatccgagacacagccga

SEQ ID NO: 4661211 - DNA, 25 bp, Homo sapien
catccgagacacagccgacatcctg

SEQ ID NO: 4661212 - DNA, 25 bp, Homo sapien
tgctctcatccgagacacagccgac

SEQ ID NO: 4661213 - DNA, 25 bp, Homo sapien
tctcatccgagacacagccgacatc

SEQ ID NO: 4661214 - DNA, 25 bp, Homo sapien
tgaaagcgaccacagggagttggta

SEQ ID NO: 4661215 - DNA, 25 bp, Homo sapien
gaccacagggagttggtacttcagt

SEQ ID NO: 4661216 - DNA, 25 bp, Homo sapien
agcttggtgaaagcgaccacaggga

SEQ ID NO: 4661217 - DNA, 25 bp, Homo sapien
cagcttggtgaaagcgaccacaggg

SEQ ID NO: 4661218 - DNA, 25 bp, Homo sapien
tcgtcggtatcaaggactcctaggt

SEQ ID NO: 4661219 - DNA, 25 bp, Homo sapien
ctctagtgatgtgattgaggactgg

SEQ ID NO: 4661220 - DNA, 25 bp, Homo sapien
actcctaggtgtttgcctgagctgc

SEQ ID NO: 4661221 - DNA, 25 bp, Homo sapien
actgggctgcagtcgtcggtatcaa

SEQ ID NO: 4661222 - DNA, 25 bp, Homo sapien
cacatcgcacatgtgtataaacctc

SEQ ID NO: 4661223 - DNA, 25 bp, Homo sapien
cgctggcccacatcgcacatgtgta

SEQ ID NO: 4661224 - DNA, 25 bp, Homo sapien
ggcccacatcgcacatgtgtataaa

SEQ ID NO: 4661225 - DNA, 25 bp, Homo sapien
catcgcacatgtgtataaacctctc

SEQ ID NO: 4661226 - DNA, 25 bp, Homo sapien
gctgtgtctggaaggacaaatgtct

SEQ ID NO: 4661227 - DNA, 25 bp, Homo sapien
gtgtctggaaggacaaatgtctgac

SEQ ID NO: 4661228 - DNA, 25 bp, Homo sapien
ctcgcgggagctgtgtctggaagga

SEQ ID NO: 4661229 - DNA, 25 bp, Homo sapien
tcgcgggagctgtgtctggaaggac

SEQ ID NO: 4661230 - DNA, 25 bp, Homo sapien
agataagggagccattctccgctga

SEQ ID NO: 4661231 - DNA, 25 bp, Homo sapien
gctgcagcacccgatggccttgttt

SEQ ID NO: 4661232 - DNA, 25 bp, Homo sapien
taagggagccattctccgctgagcg

SEQ ID NO: 4661233 - DNA, 25 bp, Homo sapien
gatggccttgtttgctttacactca

SEQ ID NO: 4661234 - DNA, 25 bp, Homo sapien
tgcaaacgtgcagcacaggcgctgt

SEQ ID NO: 4661235 - DNA, 25 bp, Homo sapien
cagccgttcttgtggaatccgtcca

SEQ ID NO: 4661236 - DNA, 25 bp, Homo sapien
cagcctcgtggactttaacagccgt

SEQ ID NO: 4661237 - DNA, 25 bp, Homo sapien
gcagttcctctccttggagtttcca

SEQ ID NO: 4661238 - DNA, 25 bp, Homo sapien
gccgaccaccttcagtggcgcttct

SEQ ID NO: 4661239 - DNA, 25 bp, Homo sapien
ggttgcctggtgactcgagccgacc

SEQ ID NO: 4661240 - DNA, 25 bp, Homo sapien
accaccttcagtggcgcttctgcgg

SEQ ID NO: 4661241 - DNA, 25 bp, Homo sapien
ttgcctggtgactcgagccgaccac

SEQ ID NO: 4661242 - DNA, 25 bp, Homo sapien
tgggcagtgcggatgcttctttggt

SEQ ID NO: 4661243 - DNA, 25 bp, Homo sapien
cgggagcaacttcccaagcgtggcc

SEQ ID NO: 4661244 - DNA, 25 bp, Homo sapien
aacttcccaagcgtggccgcatggg

SEQ ID NO: 4661245 - DNA, 25 bp, Homo sapien
cactgccacagcacgtggggagtgg

SEQ ID NO: 4661246 - DNA, 25 bp, Homo sapien
ctgctgcagcccgattggagaatgg

SEQ ID NO: 4661247 - DNA, 25 bp, Homo sapien
gagaatggcgggatagaagcagtga

SEQ ID NO: 4661248 - DNA, 25 bp, Homo sapien
tagaagcagtgaaagtgattggcat

SEQ ID NO: 4661249 - DNA, 25 bp, Homo sapien
aagtgattggcattaggaaccacca

SEQ ID NO: 4661250 - DNA, 25 bp, Homo sapien
cttgtttctgagatggccgaattgt

SEQ ID NO: 4661251 - DNA, 25 bp, Homo sapien
ttcggcagcgtgtgggagcagagct

SEQ ID NO: 4661252 - DNA, 25 bp, Homo sapien
cagagctgcagtaaacggtggctcc

SEQ ID NO: 4661253 - DNA, 25 bp, Homo sapien
aaacggtggctccttgttcgcccat

SEQ ID NO: 4661254 - DNA, 25 bp, Homo sapien
aaagcccagaggcgtgttcggcagc

SEQ ID NO: 4661255 - DNA, 25 bp, Homo sapien
gggctttcagcacagaatcaacagg

SEQ ID NO: 4661256 - DNA, 25 bp, Homo sapien
ggcagggctttcagcacagaatcaa

SEQ ID NO: 4661257 - DNA, 25 bp, Homo sapien
cagggctttcagcacagaatcaaca

SEQ ID NO: 4661258 - DNA, 25 bp, Homo sapien
ggctttcagcacagaatcaacagga

SEQ ID NO: 4661259 - DNA, 25 bp, Homo sapien
agcatgtcagttcttcgggcagcca

SEQ ID NO: 4661260 - DNA, 25 bp, Homo sapien
gagcatgtcagttcttcgggcagcc

SEQ ID NO: 4661261 - DNA, 25 bp, Homo sapien
gcatgtcagttcttcgggcagccat

SEQ ID NO: 4661262 - DNA, 25 bp, Homo sapien
ggcacgtggtcatagagactagact

SEQ ID NO: 4661263 - DNA, 25 bp, Homo sapien
tggtcatagagactagactccacct

SEQ ID NO: 4661264 - DNA, 25 bp, Homo sapien
cattccacatgggactgagggtggt

SEQ ID NO: 4661265 - DNA, 25 bp, Homo sapien
ctgcaggcatgcatgggcacgtggt

SEQ ID NO: 4661266 - DNA, 25 bp, Homo sapien
ggccatgcatgtgactcgggggcag

SEQ ID NO: 4661267 - DNA, 25 bp, Homo sapien
atgcatgtgactcgggggcagggct

SEQ ID NO: 4661268 - DNA, 25 bp, Homo sapien
ctgtgggccatgcatgtgactcggg

SEQ ID NO: 4661269 - DNA, 25 bp, Homo sapien
ccatgcatgtgactcgggggcaggg

SEQ ID NO: 4661270 - DNA, 25 bp, Homo sapien
cagccggatgcaggctgtttctgaa

SEQ ID NO: 4661271 - DNA, 25 bp, Homo sapien
ccgttccgactggacattgatcttg

SEQ ID NO: 4661272 - DNA, 25 bp, Homo sapien
ggccatgccggtccagcatgagcaa

SEQ ID NO: 4661273 - DNA, 25 bp, Homo sapien
taaaggaagcctgagtgtggttcag

SEQ ID NO: 4661274 - DNA, 25 bp, Homo sapien
cagcctggaatcatgtgggagacac

SEQ ID NO: 4661275 - DNA, 25 bp, Homo sapien
tctgctacgttgaagggaccacagc

SEQ ID NO: 4661276 - DNA, 25 bp, Homo sapien
tggttagcaaaggataataggaccc

SEQ ID NO: 4661277 - DNA, 25 bp, Homo sapien
gcttaagttggtcatcccagtgaca

SEQ ID NO: 4661278 - DNA, 25 bp, Homo sapien
aagcagctcttggatgggaaaggta

SEQ ID NO: 4661279 - DNA, 25 bp, Homo sapien
gggaaaggtagagatggtggtcaga

SEQ ID NO: 4661280 - DNA, 25 bp, Homo sapien
tgaagcagctcttggatgggaaagg

SEQ ID NO: 4661281 - DNA, 25 bp, Homo sapien
ggtggtcagagccagccttggtgcc

SEQ ID NO: 4661282 - DNA, 25 bp, Homo sapien
gtgtcatcatgatcagttttctctg

SEQ ID NO: 4661283 - DNA, 25 bp, Homo sapien
ctgtgtcatcatgatcagttttctc

SEQ ID NO: 4661284 - DNA, 25 bp, Homo sapien
gtcatcatgatcagttttctctgcc

SEQ ID NO: 4661285 - DNA, 25 bp, Homo sapien
agctgtgtcatcatgatcagttttc

SEQ ID NO: 4661286 - DNA, 25 bp, Homo sapien
cttggatggatgagcgcgcctcctt

SEQ ID NO: 4661287 - DNA, 25 bp, Homo sapien
ttttgccgggttggcctctgccgag

SEQ ID NO: 4661288 - DNA, 25 bp, Homo sapien
tgtgctcgcgggataagcctcttgg

SEQ ID NO: 4661289 - DNA, 25 bp, Homo sapien
ggccgggagatcctgctcgttttgc

SEQ ID NO: 4661290 - DNA, 25 bp, Homo sapien
tgcgcggttttgcaacgtcagagcc

SEQ ID NO: 4661291 - DNA, 25 bp, Homo sapien
gcccttgtttcttgcgcggttttgc

SEQ ID NO: 4661292 - DNA, 25 bp, Homo sapien
gtttcttgcgcggttttgcaacgtc

SEQ ID NO: 4661293 - DNA, 25 bp, Homo sapien
ttttgcaacgtcagagccgtccaca

SEQ ID NO: 4661294 - DNA, 25 bp, Homo sapien
gacaaaactgataacgcacgtcacc

SEQ ID NO: 4661295 - DNA, 25 bp, Homo sapien
tctggcagacgttttgaatgtggat

SEQ ID NO: 4661296 - DNA, 25 bp, Homo sapien
tgtggaagttctttcctcgtctcca

SEQ ID NO: 4661297 - DNA, 25 bp, Homo sapien
catcctgtcaagagccgtggagcaa

SEQ ID NO: 4661298 - DNA, 25 bp, Homo sapien
aaagctctcgaagagaaatcatctc

SEQ ID NO: 4661299 - DNA, 25 bp, Homo sapien
caaagctctcgaagagaaatcatct

SEQ ID NO: 4661300 - DNA, 25 bp, Homo sapien
taactggactcgatgctgaagggct

SEQ ID NO: 4661301 - DNA, 25 bp, Homo sapien
tgtgtaactggactcgatgctgaag

SEQ ID NO: 4661302 - DNA, 25 bp, Homo sapien
aataaatgtgtaactggactcgatg

SEQ ID NO: 4661303 - DNA, 25 bp, Homo sapien
ctggactcgatgctgaagggcttag

SEQ ID NO: 4661304 - DNA, 25 bp, Homo sapien
tatatactcccacagcttgtactca

SEQ ID NO: 4661305 - DNA, 25 bp, Homo sapien
gcattcacacttcggccctgaatga

SEQ ID NO: 4661306 - DNA, 25 bp, Homo sapien
aggccagcctgcattcacacttcgg

SEQ ID NO: 4661307 - DNA, 25 bp, Homo sapien
aatgaggagccccttgtatatactc

SEQ ID NO: 4661308 - DNA, 25 bp, Homo sapien
ctgtgagatgtatcagggaggaatg

SEQ ID NO: 4661309 - DNA, 25 bp, Homo sapien
gcttctggcgctgggttggccgcgg

SEQ ID NO: 4661310 - DNA, 25 bp, Homo sapien
ccacgtgctccctgcgcttctggcg

SEQ ID NO: 4661311 - DNA, 25 bp, Homo sapien
tccctgcgcttctggcgctgggttg

SEQ ID NO: 4661312 - DNA, 25 bp, Homo sapien
gtgctccctgcgcttctggcgctgg

SEQ ID NO: 4661313 - DNA, 25 bp, Homo sapien
aactggcccgaaattgtgccctgcc

SEQ ID NO: 4661314 - DNA, 25 bp, Homo sapien
ggcgtgctcctgaggaaccaacagc

SEQ ID NO: 4661315 - DNA, 25 bp, Homo sapien
ttcgtcactccctgggtgctcatct

SEQ ID NO: 4661316 - DNA, 25 bp, Homo sapien
ctgccccggaactggcccgaaattg

SEQ ID NO: 4661317 - DNA, 25 bp, Homo sapien
acaggactcacttgcattgccgggt

SEQ ID NO: 4661318 - DNA, 25 bp, Homo sapien
gtggctctcggtgctcctgtccaca

SEQ ID NO: 4661319 - DNA, 25 bp, Homo sapien
ctgcgatgattgacgaggtcaaaca

SEQ ID NO: 4661320 - DNA, 25 bp, Homo sapien
ggaggacttggaggtaggtgttcag

SEQ ID NO: 4661321 - DNA, 25 bp, Homo sapien
ggaaaatagctctcttgccaatacg

SEQ ID NO: 4661322 - DNA, 25 bp, Homo sapien
tcaagcgcatctctgaatgagggtc

SEQ ID NO: 4661323 - DNA, 25 bp, Homo sapien
gagtgtaggtcagaacccgtgagcc

SEQ ID NO: 4661324 - DNA, 25 bp, Homo sapien
cagaacagtttggagtgtcacacga

SEQ ID NO: 4661325 - DNA, 25 bp, Homo sapien
tctatcatgcgtggccagggtcttc

SEQ ID NO: 4661326 - DNA, 25 bp, Homo sapien
ttgatgaaagcacctacacgtagcc

SEQ ID NO: 4661327 - DNA, 25 bp, Homo sapien
gctcacaattgcacaggccagggat

SEQ ID NO: 4661328 - DNA, 25 bp, Homo sapien
gactgatggagtagaaacctgcttc

SEQ ID NO: 4661329 - DNA, 25 bp, Homo sapien
tgtatggcaaaagactctttcagat

SEQ ID NO: 4661330 - DNA, 25 bp, Homo sapien
ggcaaaagactctttcagatataat

SEQ ID NO: 4661331 - DNA, 25 bp, Homo sapien
gggtggggcctaatatgagttctta

SEQ ID NO: 4661332 - DNA, 25 bp, Homo sapien
aattgtctgatctaaaaattggaag

SEQ ID NO: 4661333 - DNA, 25 bp, Homo sapien
cattgctgactctggacagtctaat

SEQ ID NO: 4661334 - DNA, 25 bp, Homo sapien
cagtctaatacatttgactcgtcct

SEQ ID NO: 4661335 - DNA, 25 bp, Homo sapien
taaccaccagactactttttctgta

SEQ ID NO: 4661336 - DNA, 25 bp, Homo sapien
catttgactcgtcctttatcttaac

SEQ ID NO: 4661337 - DNA, 25 bp, Homo sapien
ccttctagctgtttgcagaccaagt

SEQ ID NO: 4661338 - DNA, 25 bp, Homo sapien
tgcactctgagcattagagagaaaa

SEQ ID NO: 4661339 - DNA, 25 bp, Homo sapien
gacatcaccgataatggtgagccct

SEQ ID NO: 4661340 - DNA, 25 bp, Homo sapien
tgtcaggatggcgacttcacaggcc

SEQ ID NO: 4661341 - DNA, 25 bp, Homo sapien
cttgctctgtatacaaaattcactt

SEQ ID NO: 4661342 - DNA, 25 bp, Homo sapien
ctgtatacaaaattcacttgaaatg

SEQ ID NO: 4661343 - DNA, 25 bp, Homo sapien
gtatacaaaattcacttgaaatgac

SEQ ID NO: 4661344 - DNA, 25 bp, Homo sapien
ctctgtatacaaaattcacttgaaa

SEQ ID NO: 4661345 - DNA, 25 bp, Homo sapien
gcctgagctatgtttcccctggttc

SEQ ID NO: 4661346 - DNA, 25 bp, Homo sapien
ggcctgagctatgtttcccctggtt

SEQ ID NO: 4661347 - DNA, 25 bp, Homo sapien
ctgagctgtgcaatacctgggaccc

SEQ ID NO: 4661348 - DNA, 25 bp, Homo sapien
tgggtggtgtccgaagtttccagcc

SEQ ID NO: 4661349 - DNA, 25 bp, Homo sapien
tcctgggggtgtttagcccacagct

SEQ ID NO: 4661350 - DNA, 25 bp, Homo sapien
cgctggggcgttgtctctctgagct

SEQ ID NO: 4661351 - DNA, 25 bp, Homo sapien
ttggccgagactcttgcctctggac

SEQ ID NO: 4661352 - DNA, 25 bp, Homo sapien
tctggaccaagcagccggccaaggg

SEQ ID NO: 4661353 - DNA, 25 bp, Homo sapien
cagtcactgggccagcgtgtttggg

SEQ ID NO: 4661354 - DNA, 25 bp, Homo sapien
tgtgatgccttgtccttggccgaga

SEQ ID NO: 4661355 - DNA, 25 bp, Homo sapien
ttggggatgcagagttttaactttc

SEQ ID NO: 4661356 - DNA, 25 bp, Homo sapien
ctgtcaaatcgctgtcccaaatcca

SEQ ID NO: 4661357 - DNA, 25 bp, Homo sapien
actttctcagatactgtcaaatcgc

SEQ ID NO: 4661358 - DNA, 25 bp, Homo sapien
gccactttgcacacctcctggaggg

SEQ ID NO: 4661359 - DNA, 25 bp, Homo sapien
gcatggcggcaaaacagaaagattc

SEQ ID NO: 4661360 - DNA, 25 bp, Homo sapien
caacttaggttggtcgcttgcctca

SEQ ID NO: 4661361 - DNA, 25 bp, Homo sapien
gactttggacacaagttgcctgact

SEQ ID NO: 4661362 - DNA, 25 bp, Homo sapien
cccagttgaggattaagtgcatgac

SEQ ID NO: 4661363 - DNA, 25 bp, Homo sapien
ttctttcatgttttaaagtaatcgc

SEQ ID NO: 4661364 - DNA, 25 bp, Homo sapien
gaaaaggtgcaatttctttcatgtt

SEQ ID NO: 4661365 - DNA, 25 bp, Homo sapien
aggaaaaggtgcaatttctttcatg

SEQ ID NO: 4661366 - DNA, 25 bp, Homo sapien
taaggaaaaggtgcaatttctttca

SEQ ID NO: 4661367 - DNA, 25 bp, Homo sapien
aaaccatgtttgacagctccaggct

SEQ ID NO: 4661368 - DNA, 25 bp, Homo sapien
gcaattcatgtgtcatgcaccgggt

SEQ ID NO: 4661369 - DNA, 25 bp, Homo sapien
acgggcagcgtttctctatggagtc

SEQ ID NO: 4661370 - DNA, 25 bp, Homo sapien
taactgcattgttacacgggcagcg

SEQ ID NO: 4661371 - DNA, 25 bp, Homo sapien
cacttgcatgatgcaggtaataagc

SEQ ID NO: 4661372 - DNA, 25 bp, Homo sapien
agctgtgggctttggcaagtgtgag

SEQ ID NO: 4661373 - DNA, 25 bp, Homo sapien
ttctagggcatctatgatgtctggc

SEQ ID NO: 4661374 - DNA, 25 bp, Homo sapien
tggtagaaggcttttgccggcatct

SEQ ID NO: 4661375 - DNA, 25 bp, Homo sapien
ttgtccccagtctggcacatccaca

SEQ ID NO: 4661376 - DNA, 25 bp, Homo sapien
cagcccttctttataaggtacttgg

SEQ ID NO: 4661377 - DNA, 25 bp, Homo sapien
tctgtgaagtgaccgcacgtgctga

SEQ ID NO: 4661378 - DNA, 25 bp, Homo sapien
taaggtacttggtgtagcctttgtg

SEQ ID NO: 4661379 - DNA, 25 bp, Homo sapien
gagacacagcgacgaccaccgtgtg

SEQ ID NO: 4661380 - DNA, 25 bp, Homo sapien
cgggcctggccgctgaggacgcgct

SEQ ID NO: 4661381 - DNA, 25 bp, Homo sapien
gacgaccaccgtgtgtccccgagtg

SEQ ID NO: 4661382 - DNA, 25 bp, Homo sapien
cccgagtgcccgagccccgtgccgg

SEQ ID NO: 4661383 - DNA, 25 bp, Homo sapien
tgctcctccggcgatctgtcttgcc

SEQ ID NO: 4661384 - DNA, 25 bp, Homo sapien
tgtcttgcccctcgcattcctgcgg

SEQ ID NO: 4661385 - DNA, 25 bp, Homo sapien
gggacgctgcctacgtgcggcggct

SEQ ID NO: 4661386 - DNA, 25 bp, Homo sapien
ttgcgcggccgaaacgccggctgct

SEQ ID NO: 4661387 - DNA, 25 bp, Homo sapien
ttgtgataacctttactcttgattg

SEQ ID NO: 4661388 - DNA, 25 bp, Homo sapien
tcctcccgtccgaagtccttgattc

SEQ ID NO: 4661389 - DNA, 25 bp, Homo sapien
ttccaactctttccttcgaagaaca

SEQ ID NO: 4661390 - DNA, 25 bp, Homo sapien
tttccttcgaagaacagactttgtg

SEQ ID NO: 4661391 - DNA, 25 bp, Homo sapien
tgtaataagcatctggaatggaccc

SEQ ID NO: 4661392 - DNA, 25 bp, Homo sapien
gaagagcagattattcatacggtgt

SEQ ID NO: 4661393 - DNA, 25 bp, Homo sapien
gtatgtctactgtgctgcattaaga

SEQ ID NO: 4661394 - DNA, 25 bp, Homo sapien
gaatggacccatccgtgtacttcat

SEQ ID NO: 4661395 - DNA, 25 bp, Homo sapien
tagagatgttgtgtagaccttctcc

SEQ ID NO: 4661396 - DNA, 25 bp, Homo sapien
agatgttgtgtagaccttctccctc

SEQ ID NO: 4661397 - DNA, 25 bp, Homo sapien
tgtagagatgttgtgtagaccttct

SEQ ID NO: 4661398 - DNA, 25 bp, Homo sapien
gagatgttgtgtagaccttctccct

SEQ ID NO: 4661399 - DNA, 25 bp, Homo sapien
catattttgtacagtgacaatactt

SEQ ID NO: 4661400 - DNA, 25 bp, Homo sapien
ccatattttgtacagtgacaatact

SEQ ID NO: 4661401 - DNA, 25 bp, Homo sapien
accatattttgtacagtgacaatac

SEQ ID NO: 4661402 - DNA, 25 bp, Homo sapien
aaccatattttgtacagtgacaata

SEQ ID NO: 4661403 - DNA, 25 bp, Homo sapien
cagaggtgcaccttggtaaatccat

SEQ ID NO: 4661404 - DNA, 25 bp, Homo sapien
ttcagaggtgcaccttggtaaatcc

SEQ ID NO: 4661405 - DNA, 25 bp, Homo sapien
ttttcagaggtgcaccttggtaaat

SEQ ID NO: 4661406 - DNA, 25 bp, Homo sapien
atttttcagaggtgcaccttggtaa

SEQ ID NO: 4661407 - DNA, 25 bp, Homo sapien
cagcgagtgagctttgggttgattc

SEQ ID NO: 4661408 - DNA, 25 bp, Homo sapien
gggttgattctggttgagggctcag

SEQ ID NO: 4661409 - DNA, 25 bp, Homo sapien
tcttcttttacacagcgagtgagct

SEQ ID NO: 4661410 - DNA, 25 bp, Homo sapien
ctggttgagggctcagaattgttgt

SEQ ID NO: 4661411 - DNA, 25 bp, Homo sapien
cctgtgtagcagatattgcaaagaa

SEQ ID NO: 4661412 - DNA, 25 bp, Homo sapien
gtgtagcagatattgcaaagaactc

SEQ ID NO: 4661413 - DNA, 25 bp, Homo sapien
gtgaacctgtgtagcagatattgca

SEQ ID NO: 4661414 - DNA, 25 bp, Homo sapien
gcagatattgcaaagaactcttgac

SEQ ID NO: 4661415 - DNA, 25 bp, Homo sapien
tggagttaatgtatgaagaccagag

SEQ ID NO: 4661416 - DNA, 25 bp, Homo sapien
tctggagttaatgtatgaagaccag

SEQ ID NO: 4661417 - DNA, 25 bp, Homo sapien
agttaatgtatgaagaccagagcag

SEQ ID NO: 4661418 - DNA, 25 bp, Homo sapien
catctggagttaatgtatgaagacc

SEQ ID NO: 4661419 - DNA, 25 bp, Homo sapien
caaaattggcgattattcctggtgg

SEQ ID NO: 4661420 - DNA, 25 bp, Homo sapien
aatgggcctggttgaaacaaaattg

SEQ ID NO: 4661421 - DNA, 25 bp, Homo sapien
gaggtatgagtagttcacgcccatt

SEQ ID NO: 4661422 - DNA, 25 bp, Homo sapien
gcttcctctgcaaaaatgggcctgg

SEQ ID NO: 4661423 - DNA, 25 bp, Homo sapien
tggtgttgccgtaggtctcaaggaa

SEQ ID NO: 4661424 - DNA, 25 bp, Homo sapien
tctcaaggaattagtggcgcacaga

SEQ ID NO: 4661425 - DNA, 25 bp, Homo sapien
tttctcgggtacgtggtcacaagtc

SEQ ID NO: 4661426 - DNA, 25 bp, Homo sapien
tgtcgggcttcctattgagtttcag

SEQ ID NO: 4661427 - DNA, 25 bp, Homo sapien
ttcgtggtggcagtgttgacatcac

SEQ ID NO: 4661428 - DNA, 25 bp, Homo sapien
tgttgacatcactattgggacccat

SEQ ID NO: 4661429 - DNA, 25 bp, Homo sapien
agtgttgacatcactattgggaccc

SEQ ID NO: 4661430 - DNA, 25 bp, Homo sapien
ccttccagtagttcgtggtggcagt

SEQ ID NO: 4661431 - DNA, 25 bp, Homo sapien
gtgcccaatggcatgacttgctcct

SEQ ID NO: 4661432 - DNA, 25 bp, Homo sapien
ggaaagtggacagaatcctttccca

SEQ ID NO: 4661433 - DNA, 25 bp, Homo sapien
gaagagggatttggaatgcaggaga

SEQ ID NO: 4661434 - DNA, 25 bp, Homo sapien
tgctcctatggcttatcctgaatta

SEQ ID NO: 4661435 - DNA, 25 bp, Homo sapien
taaggtcttcgctttgatagggagt

SEQ ID NO: 4661436 - DNA, 25 bp, Homo sapien
cctgttgtttggagttaattcctct

SEQ ID NO: 4661437 - DNA, 25 bp, Homo sapien
ttggcttatacctttgtcattgggt

SEQ ID NO: 4661438 - DNA, 25 bp, Homo sapien
tgaacaacttgatgcatgcttggct

SEQ ID NO: 4661439 - DNA, 25 bp, Homo sapien
tgtgcgatagtattgttggatctca

SEQ ID NO: 4661440 - DNA, 25 bp, Homo sapien
gagggaccatcccattttgccaaga

SEQ ID NO: 4661441 - DNA, 25 bp, Homo sapien
aaggctgccatcaggaaataggagg

SEQ ID NO: 4661442 - DNA, 25 bp, Homo sapien
gagtggaccatgctggttagctcaa

SEQ ID NO: 4661443 - DNA, 25 bp, Homo sapien
tcccagatggacttcaagttctctc

SEQ ID NO: 4661444 - DNA, 25 bp, Homo sapien
gctaccacaagggatgtcttggagg

SEQ ID NO: 4661445 - DNA, 25 bp, Homo sapien
aacctgtttcaaagatatggctttg

SEQ ID NO: 4661446 - DNA, 25 bp, Homo sapien
aaagatatggctttgatgtgttccc

SEQ ID NO: 4661447 - DNA, 25 bp, Homo sapien
acaggagcctcaaacagcatgcagc

SEQ ID NO: 4661448 - DNA, 25 bp, Homo sapien
gaatgacgactcaggcttggctaac

SEQ ID NO: 4661449 - DNA, 25 bp, Homo sapien
taatttgttgtaggaggcatagctc

SEQ ID NO: 4661450 - DNA, 25 bp, Homo sapien
tgttgaaccagcaataagcagtgca

SEQ ID NO: 4661451 - DNA, 25 bp, Homo sapien
tctgagatgaagacggaggacgagc

SEQ ID NO: 4661452 - DNA, 25 bp, Homo sapien
gccgcttgcagtgcgtggctctgcc

SEQ ID NO: 4661453 - DNA, 25 bp, Homo sapien
ggctcgttggcaggccggcgagcgg

SEQ ID NO: 4661454 - DNA, 25 bp, Homo sapien
agcgggcccggcgatctgggcccag

SEQ ID NO: 4661455 - DNA, 25 bp, Homo sapien
tcctagcgtatctcccattctctgt

SEQ ID NO: 4661456 - DNA, 25 bp, Homo sapien
gaattccagactgtgggttgcaact

SEQ ID NO: 4661457 - DNA, 25 bp, Homo sapien
tctgtgaattccagactgtgggttg

SEQ ID NO: 4661458 - DNA, 25 bp, Homo sapien
tgggttgcaactgcactggcttgtg

SEQ ID NO: 4661459 - DNA, 25 bp, Homo sapien
tctgcgcgatgccactaacattggg

SEQ ID NO: 4661460 - DNA, 25 bp, Homo sapien
ccaggccgcaagtgacagcagattt

SEQ ID NO: 4661461 - DNA, 25 bp, Homo sapien
gaggtcggcagggaaatttaagtca

SEQ ID NO: 4661462 - DNA, 25 bp, Homo sapien
gaaatagcctttcgcagaggtcggc

SEQ ID NO: 4661463 - DNA, 25 bp, Homo sapien
gtcacaacccgagaaagctcccact

SEQ ID NO: 4661464 - DNA, 25 bp, Homo sapien
caggggcattggctgggcgaggaca

SEQ ID NO: 4661465 - DNA, 25 bp, Homo sapien
agctcccactgggttccgccccagt

SEQ ID NO: 4661466 - DNA, 25 bp, Homo sapien
cgcgggaaggctgcacagctgcata

SEQ ID NO: 4661467 - DNA, 25 bp, Homo sapien
gggatagcaaacttatctgcagagg

SEQ ID NO: 4661468 - DNA, 25 bp, Homo sapien
ttatagccacacaaccaatctctgc

SEQ ID NO: 4661469 - DNA, 25 bp, Homo sapien
gaggttgtctcactcaagagactta

SEQ ID NO: 4661470 - DNA, 25 bp, Homo sapien
aattactactgagtaagagctgggc

SEQ ID NO: 4661471 - DNA, 25 bp, Homo sapien
caagattggtctctcaaatcggagc

SEQ ID NO: 4661472 - DNA, 25 bp, Homo sapien
tcagtgcaagtgactaacattcaag

SEQ ID NO: 4661473 - DNA, 25 bp, Homo sapien
tcgaactcgaaaagcatagtgcccc

SEQ ID NO: 4661474 - DNA, 25 bp, Homo sapien
ctggcatcaaaaagaactgagtggc

SEQ ID NO: 4661475 - DNA, 25 bp, Homo sapien
tcatttgtggacgagcacgaaccct

SEQ ID NO: 4661476 - DNA, 25 bp, Homo sapien
gatgaccgaggctcttacacagcgt

SEQ ID NO: 4661477 - DNA, 25 bp, Homo sapien
aattagagagctacacaagggagcc

SEQ ID NO: 4661478 - DNA, 25 bp, Homo sapien
ttccagattatcaagcaagagccga

SEQ ID NO: 4661479 - DNA, 25 bp, Homo sapien
agaacaaactaattgcactgggaga

SEQ ID NO: 4661480 - DNA, 25 bp, Homo sapien
gagaacaaactaattgcactgggag

SEQ ID NO: 4661481 - DNA, 25 bp, Homo sapien
aagccttttagttatcagaacatga

SEQ ID NO: 4661482 - DNA, 25 bp, Homo sapien
gacgttgacctttgatcacagacat

SEQ ID NO: 4661483 - DNA, 25 bp, Homo sapien
gaggactcagtttcataggactcag

SEQ ID NO: 4661484 - DNA, 25 bp, Homo sapien
tactagagatttgctagatgccatt

SEQ ID NO: 4661485 - DNA, 25 bp, Homo sapien
caagaagctagttgctctaggcccc

SEQ ID NO: 4661486 - DNA, 25 bp, Homo sapien
ccagaccagatatgacctatgggaa

SEQ ID NO: 4661487 - DNA, 25 bp, Homo sapien
atctccaatggcgagtccgtgcggc

SEQ ID NO: 4661488 - DNA, 25 bp, Homo sapien
acctactttgcgagctcgggtggga

SEQ ID NO: 4661489 - DNA, 25 bp, Homo sapien
cctaatcaccaggaggagctaaaga

SEQ ID NO: 4661490 - DNA, 25 bp, Homo sapien
gggacagatccttcatcctgttgtt

SEQ ID NO: 4661491 - DNA, 25 bp, Homo sapien
tattagatacatcatcacttcggcc

SEQ ID NO: 4661492 - DNA, 25 bp, Homo sapien
gttgttttctaagctggtatctcag

SEQ ID NO: 4661493 - DNA, 25 bp, Homo sapien
tgaggtccactgtaaaatccctggg

SEQ ID NO: 4661494 - DNA, 25 bp, Homo sapien
tcctggaaacagcaattgatgagag

SEQ ID NO: 4661495 - DNA, 25 bp, Homo sapien
agttactccggcctagtgaggtcca

SEQ ID NO: 4661496 - DNA, 25 bp, Homo sapien
taatgaattgcttgcctaacctgaa

SEQ ID NO: 4661497 - DNA, 25 bp, Homo sapien
gccgtggcacccactggaagcttgc

SEQ ID NO: 4661498 - DNA, 25 bp, Homo sapien
ggctgagttgcacccatcgcccgcc

SEQ ID NO: 4661499 - DNA, 25 bp, Homo sapien
tgagttgcacccatcgcccgccgtg

SEQ ID NO: 4661500 - DNA, 25 bp, Homo sapien
atcgcccgccgtggcacccactgga

SEQ ID NO: 4661501 - DNA, 25 bp, Homo sapien
tttgtttggctcctcaggcaacagc

SEQ ID NO: 4661502 - DNA, 25 bp, Homo sapien
gcaacagcatccctagaatgatgct

SEQ ID NO: 4661503 - DNA, 25 bp, Homo sapien
ggatacaatcacctctttgtttggc

SEQ ID NO: 4661504 - DNA, 25 bp, Homo sapien
gaatgatgcttccaacaagtgcctg

SEQ ID NO: 4661505 - DNA, 25 bp, Homo sapien
cattgctacaagtctcctctgtaac

SEQ ID NO: 4661506 - DNA, 25 bp, Homo sapien
ttcattgctacaagtctcctctgta

SEQ ID NO: 4661507 - DNA, 25 bp, Homo sapien
tttcattgctacaagtctcctctgt

SEQ ID NO: 4661508 - DNA, 25 bp, Homo sapien
tcattgctacaagtctcctctgtaa

SEQ ID NO: 4661509 - DNA, 25 bp, Homo sapien
ttctgggtgagtgggaaagggtcac

SEQ ID NO: 4661510 - DNA, 25 bp, Homo sapien
ttcaagcctggaccattcctgaagt

SEQ ID NO: 4661511 - DNA, 25 bp, Homo sapien
tagttgctgattcaagcctggacca

SEQ ID NO: 4661512 - DNA, 25 bp, Homo sapien
aagacctgctgagctagttgctgat

SEQ ID NO: 4661513 - DNA, 25 bp, Homo sapien
taacgctgactgcacgttgcctata

SEQ ID NO: 4661514 - DNA, 25 bp, Homo sapien
tataggcttaaaagcccgctgacga

SEQ ID NO: 4661515 - DNA, 25 bp, Homo sapien
tatatgctgagctccgtgataacca

SEQ ID NO: 4661516 - DNA, 25 bp, Homo sapien
tgtaataccaaaagctaacgctgac

SEQ ID NO: 4661517 - DNA, 25 bp, Homo sapien
gctgagaacagtaccagctgttccc

SEQ ID NO: 4661518 - DNA, 25 bp, Homo sapien
gggggccgccagtctcccatcacat

SEQ ID NO: 4661519 - DNA, 25 bp, Homo sapien
gagatctgctgagaacagtaccagc

SEQ ID NO: 4661520 - DNA, 25 bp, Homo sapien
tctgctgagaacagtaccagctgtt

SEQ ID NO: 4661521 - DNA, 25 bp, Homo sapien
tgggcactgtccagtctccagacat

SEQ ID NO: 4661522 - DNA, 25 bp, Homo sapien
ctgggcactgtccagtctccagaca

SEQ ID NO: 4661523 - DNA, 25 bp, Homo sapien
taaaacctgcttttccgtttgtgca

SEQ ID NO: 4661524 - DNA, 25 bp, Homo sapien
aaacctgcttttccgtttgtgcaca

SEQ ID NO: 4661525 - DNA, 25 bp, Homo sapien
ttttccgtttgtgcacaatggaggc

SEQ ID NO: 4661526 - DNA, 25 bp, Homo sapien
tcaatgtagtaaaacctgcttttcc

SEQ ID NO: 4661527 - DNA, 25 bp, Homo sapien
cctacaggactcaaaatcaaattgg

SEQ ID NO: 4661528 - DNA, 25 bp, Homo sapien
aaaatcaaattggagtgcatattcc

SEQ ID NO: 4661529 - DNA, 25 bp, Homo sapien
agggccctacaggactcaaaatcaa

SEQ ID NO: 4661530 - DNA, 25 bp, Homo sapien
gagtgcatattccttcatgcagtac

SEQ ID NO: 4661531 - DNA, 25 bp, Homo sapien
aaggtgccagtgctacattgttaca

SEQ ID NO: 4661532 - DNA, 25 bp, Homo sapien
aggaggtaaaggtgccagtgctaca

SEQ ID NO: 4661533 - DNA, 25 bp, Homo sapien
gccagtgctacattgttacattcat

SEQ ID NO: 4661534 - DNA, 25 bp, Homo sapien
tgctgactcatcgaggggaggaggt

SEQ ID NO: 4661535 - DNA, 25 bp, Homo sapien
cctcttttggtcatcatagttacta

SEQ ID NO: 4661536 - DNA, 25 bp, Homo sapien
tcgatgttaagaagggtcacagcca

SEQ ID NO: 4661537 - DNA, 25 bp, Homo sapien
accataggtctcctcgatgttaaga

SEQ ID NO: 4661538 - DNA, 25 bp, Homo sapien
tcatttgtgggtagaaatattacca

SEQ ID NO: 4661539 - DNA, 25 bp, Homo sapien
gtttgaaagacgtaatggaattgac

SEQ ID NO: 4661540 - DNA, 25 bp, Homo sapien
attctttttacacgttttgccaatg

SEQ ID NO: 4661541 - DNA, 25 bp, Homo sapien
cgtaatggaattgactaccctttca

SEQ ID NO: 4661542 - DNA, 25 bp, Homo sapien
cacgttttgccaatgggtttgaaag

SEQ ID NO: 4661543 - DNA, 25 bp, Homo sapien
tcactcctccaggtcctccaaccac

SEQ ID NO: 4661544 - DNA, 25 bp, Homo sapien
cctccaggtcctccaaccactgccc

SEQ ID NO: 4661545 - DNA, 25 bp, Homo sapien
actcctccaggtcctccaaccactg

SEQ ID NO: 4661546 - DNA, 25 bp, Homo sapien
ctcctccaggtcctccaaccactgc

SEQ ID NO: 4661547 - DNA, 25 bp, Homo sapien
gaattttccagcgacactgccaagg

SEQ ID NO: 4661548 - DNA, 25 bp, Homo sapien
caaggagggtgtttgcatccacccc

SEQ ID NO: 4661549 - DNA, 25 bp, Homo sapien
cctgcagaggcacagtgggtcttct

SEQ ID NO: 4661550 - DNA, 25 bp, Homo sapien
ccccaagatttggagctctcgtgca

SEQ ID NO: 4661551 - DNA, 25 bp, Homo sapien
gacaggagcgtctctgatagctaga

SEQ ID NO: 4661552 - DNA, 25 bp, Homo sapien
gaatatatgactacaccaccccatg

SEQ ID NO: 4661553 - DNA, 25 bp, Homo sapien
tttccagatataccagacaagtcgc

SEQ ID NO: 4661554 - DNA, 25 bp, Homo sapien
tggtgactgctgaacaggctgctaa

SEQ ID NO: 4661555 - DNA, 25 bp, Homo sapien
tgagtagtatctcaagccccaagtc

SEQ ID NO: 4661556 - DNA, 25 bp, Homo sapien
caagtctgtcgaggcaacacagcat

SEQ ID NO: 4661557 - DNA, 25 bp, Homo sapien
tgacagggctgctgagtagtatctc

SEQ ID NO: 4661558 - DNA, 25 bp, Homo sapien
tgctcagccgtggaacatcaatcat

SEQ ID NO: 4661559 - DNA, 25 bp, Homo sapien
ctggcagccgcaggaatggctgtcc

SEQ ID NO: 4661560 - DNA, 25 bp, Homo sapien
tggctgtcccctcccggaatctgtc

SEQ ID NO: 4661561 - DNA, 25 bp, Homo sapien
gctgtcccctcccggaatctgtcat

SEQ ID NO: 4661562 - DNA, 25 bp, Homo sapien
tggcagccgcaggaatggctgtccc

SEQ ID NO: 4661563 - DNA, 25 bp, Homo sapien
aggttgggtccctcttcaccaagag

SEQ ID NO: 4661564 - DNA, 25 bp, Homo sapien
tactgagagtgaacggagtccgtga

SEQ ID NO: 4661565 - DNA, 25 bp, Homo sapien
tgatggcatctgttcgatatgaacc

SEQ ID NO: 4661566 - DNA, 25 bp, Homo sapien
ccttggggacacctgaaaatactga

SEQ ID NO: 4661567 - DNA, 25 bp, Homo sapien
caatgaaagccatatccccacattt

SEQ ID NO: 4661568 - DNA, 25 bp, Homo sapien
tgaaaacatctccacgttaggtgag

SEQ ID NO: 4661569 - DNA, 25 bp, Homo sapien
ctattctgcaaacccctttaactgg

SEQ ID NO: 4661570 - DNA, 25 bp, Homo sapien
tgagtaaaactcacatctgtcgatg

SEQ ID NO: 4661571 - DNA, 25 bp, Homo sapien
gcagcaacaacaacttctctggtgg

SEQ ID NO: 4661572 - DNA, 25 bp, Homo sapien
tgatctctcgatggccagagtctct

SEQ ID NO: 4661573 - DNA, 25 bp, Homo sapien
tgtgcagcatgactcacgctagcta

SEQ ID NO: 4661574 - DNA, 25 bp, Homo sapien
tttgaggtcacaacaagactgtttg

SEQ ID NO: 4661575 - DNA, 25 bp, Homo sapien
tgaggcccacgctcatagcattaga

SEQ ID NO: 4661576 - DNA, 25 bp, Homo sapien
tagataaagggcgaaagcctgccgc

SEQ ID NO: 4661577 - DNA, 25 bp, Homo sapien
tatctttcctcagtcgcagagccca

SEQ ID NO: 4661578 - DNA, 25 bp, Homo sapien
ggaacaccatccctactctctggag

SEQ ID NO: 4661579 - DNA, 25 bp, Homo sapien
ggtagactggtagtgagcagcaaat

SEQ ID NO: 4661580 - DNA, 25 bp, Homo sapien
cggccagtgggcttgtttgcagact

SEQ ID NO: 4661581 - DNA, 25 bp, Homo sapien
ggagcaggacacatggtcatcccca

SEQ ID NO: 4661582 - DNA, 25 bp, Homo sapien
tcatccccagggctgtatacattga

SEQ ID NO: 4661583 - DNA, 25 bp, Homo sapien
tgtagaatggaaagccgagtgctct

SEQ ID NO: 4661584 - DNA, 25 bp, Homo sapien
ggtctactctaaatggatgtagaat

SEQ ID NO: 4661585 - DNA, 25 bp, Homo sapien
ttggggatggtctactctaaatgga

SEQ ID NO: 4661586 - DNA, 25 bp, Homo sapien
gggatggtctactctaaatggatgt

SEQ ID NO: 4661587 - DNA, 25 bp, Homo sapien
aatcataactttcagtaagtatctg

SEQ ID NO: 4661588 - DNA, 25 bp, Homo sapien
cctgccagctcatgtctttgccgaa

SEQ ID NO: 4661589 - DNA, 25 bp, Homo sapien
cagctcatgtctttgccgaatttgc

SEQ ID NO: 4661590 - DNA, 25 bp, Homo sapien
tgtctttgccgaatttgctagaagt

SEQ ID NO: 4661591 - DNA, 25 bp, Homo sapien
tggagccagtaaacaatatcaccat

SEQ ID NO: 4661592 - DNA, 25 bp, Homo sapien
caattctgcactgcaaggtggcagg

SEQ ID NO: 4661593 - DNA, 25 bp, Homo sapien
tggctaaagaatgatgccccggtgg

SEQ ID NO: 4661594 - DNA, 25 bp, Homo sapien
ccctaacgtgcggtggctaaagaat

SEQ ID NO: 4661595 - DNA, 25 bp, Homo sapien
tgtgaagctaggagacctgcgagct

SEQ ID NO: 4661596 - DNA, 25 bp, Homo sapien
ctgtgaagctaggagacctgcgagc

SEQ ID NO: 4661597 - DNA, 25 bp, Homo sapien
gggagctgttctttaagtggagtga

SEQ ID NO: 4661598 - DNA, 25 bp, Homo sapien
tgggagctgttctttaagtggagtg

SEQ ID NO: 4661599 - DNA, 25 bp, Homo sapien
atgggagctgttctttaagtggagt

SEQ ID NO: 4661600 - DNA, 25 bp, Homo sapien
ggagctgttctttaagtggagtgat

SEQ ID NO: 4661601 - DNA, 25 bp, Homo sapien
ccaaggcttctggagcagagggctg

SEQ ID NO: 4661602 - DNA, 25 bp, Homo sapien
tggggcggggctgtgccaaggcttc

SEQ ID NO: 4661603 - DNA, 25 bp, Homo sapien
tgccaaggcttctggagcagagggc

SEQ ID NO: 4661604 - DNA, 25 bp, Homo sapien
tgtgccaaggcttctggagcagagg

SEQ ID NO: 4661605 - DNA, 25 bp, Homo sapien
tgggtatggtggaatgccaccttga

SEQ ID NO: 4661606 - DNA, 25 bp, Homo sapien
ccctggtggtgggtatggtggaatg

SEQ ID NO: 4661607 - DNA, 25 bp, Homo sapien
gaaggaaggcgctgggggtcctctg

SEQ ID NO: 4661608 - DNA, 25 bp, Homo sapien
tgcactgccattgcctgaaggaagg

SEQ ID NO: 4661609 - DNA, 25 bp, Homo sapien
catcatgggtgttttcgatctgacg

SEQ ID NO: 4661610 - DNA, 25 bp, Homo sapien
cacagagcttgctcgcagcgtagct

SEQ ID NO: 4661611 - DNA, 25 bp, Homo sapien
cctttcgggactttatacgctgctc

SEQ ID NO: 4661612 - DNA, 25 bp, Homo sapien
catttgcacgtgcaagtgggacagt

SEQ ID NO: 4661613 - DNA, 25 bp, Homo sapien
aatcagacatcagctaatggcactg

SEQ ID NO: 4661614 - DNA, 25 bp, Homo sapien
taaagacggtggatggaagatattc

SEQ ID NO: 4661615 - DNA, 25 bp, Homo sapien
ctgtctcatattagaaatgcatggg

SEQ ID NO: 4661616 - DNA, 25 bp, Homo sapien
atggcactgaatatgtaaagacggt

SEQ ID NO: 4661617 - DNA, 25 bp, Homo sapien
tgtgctctggtccctcgccccttcc

SEQ ID NO: 4661618 - DNA, 25 bp, Homo sapien
acagcagtgcgtgggcgtgatgccc

SEQ ID NO: 4661619 - DNA, 25 bp, Homo sapien
gaggacaacagcagtgcgtgggcgt

SEQ ID NO: 4661620 - DNA, 25 bp, Homo sapien
cttgggaggacaacagcagtgcgtg

SEQ ID NO: 4661621 - DNA, 25 bp, Homo sapien
tgaactttactgtggcctcgtaact

SEQ ID NO: 4661622 - DNA, 25 bp, Homo sapien
acaaataacgagtctctttggaagc

SEQ ID NO: 4661623 - DNA, 25 bp, Homo sapien
gtgtttgcacaaataacgagtctct

SEQ ID NO: 4661624 - DNA, 25 bp, Homo sapien
actacacgtgaagcccgctgggaat

SEQ ID NO: 4661625 - DNA, 25 bp, Homo sapien
ggtccctggaaagtataagctgtcg

SEQ ID NO: 4661626 - DNA, 25 bp, Homo sapien
gcacatctgtgtgtacgcccacgta

SEQ ID NO: 4661627 - DNA, 25 bp, Homo sapien
gctgtcggttttatgcacaaggcca

SEQ ID NO: 4661628 - DNA, 25 bp, Homo sapien
acatccgtgtatgtccatgcctggc

SEQ ID NO: 4661629 - DNA, 25 bp, Homo sapien
cgtcctaccatgtgaagtactttga

SEQ ID NO: 4661630 - DNA, 25 bp, Homo sapien
gaatttaggaattagccctgggcag

SEQ ID NO: 4661631 - DNA, 25 bp, Homo sapien
taaagattggccctagttggtgaat

SEQ ID NO: 4661632 - DNA, 25 bp, Homo sapien
gaatgaagcgtttgaatgatctagc

SEQ ID NO: 4661633 - DNA, 25 bp, Homo sapien
caatcacttgcaggtgcttcgaggc

SEQ ID NO: 4661634 - DNA, 25 bp, Homo sapien
ttctctaagcccgtggaaaccagcc

SEQ ID NO: 4661635 - DNA, 25 bp, Homo sapien
gaggcattgtcaccgactgtgtcag

SEQ ID NO: 4661636 - DNA, 25 bp, Homo sapien
tgtgttttacgttccacggcccatg

SEQ ID NO: 4661637 - DNA, 25 bp, Homo sapien
gcacggccacctgcagtggtcctat

SEQ ID NO: 4661638 - DNA, 25 bp, Homo sapien
tggtcctatagctgcattggtctgg

SEQ ID NO: 4661639 - DNA, 25 bp, Homo sapien
tcactgtctctatcttgcacggcca

SEQ ID NO: 4661640 - DNA, 25 bp, Homo sapien
tccctggtgccttgaggtagagacc

SEQ ID NO: 4661641 - DNA, 25 bp, Homo sapien
taatcactgtcgttaaacccagcct

SEQ ID NO: 4661642 - DNA, 25 bp, Homo sapien
ttcactccccggaggagacgtgcac

SEQ ID NO: 4661643 - DNA, 25 bp, Homo sapien
aggtggccataggactgcaggaccc

SEQ ID NO: 4661644 - DNA, 25 bp, Homo sapien
ggtaggatgatcctgagcatcagtg

SEQ ID NO: 4661645 - DNA, 25 bp, Homo sapien
gaccacctctttgggactgaccgga

SEQ ID NO: 4661646 - DNA, 25 bp, Homo sapien
tctttgggactgaccggacagagct

SEQ ID NO: 4661647 - DNA, 25 bp, Homo sapien
agaggcggaccacctctttgggact

SEQ ID NO: 4661648 - DNA, 25 bp, Homo sapien
gatggaagaaggagtcatccttcaa

SEQ ID NO: 4661649 - DNA, 25 bp, Homo sapien
gacaatggttgactcacatttggaa

SEQ ID NO: 4661650 - DNA, 25 bp, Homo sapien
tgacaatggttgactcacatttgga

SEQ ID NO: 4661651 - DNA, 25 bp, Homo sapien
acaatggttgactcacatttggaag

SEQ ID NO: 4661652 - DNA, 25 bp, Homo sapien
gctccttctgcgtgttgaggcccca

SEQ ID NO: 4661653 - DNA, 25 bp, Homo sapien
tcaagctgagtcttgcagcaggact

SEQ ID NO: 4661654 - DNA, 25 bp, Homo sapien
tgcagggtgcgctggccatgggctg

SEQ ID NO: 4661655 - DNA, 25 bp, Homo sapien
gctgatcagttggaggctggcagga

SEQ ID NO: 4661656 - DNA, 25 bp, Homo sapien
gtatataccattgaccaaagctgca

SEQ ID NO: 4661657 - DNA, 25 bp, Homo sapien
cagacagactgaatggacagggctt

SEQ ID NO: 4661658 - DNA, 25 bp, Homo sapien
gaggagcgagctgccattcataact

SEQ ID NO: 4661659 - DNA, 25 bp, Homo sapien
aactcgccccaatgcaggatcctgt

SEQ ID NO: 4661660 - DNA, 25 bp, Homo sapien
tgaaagaggggagctggcatcaaaa

SEQ ID NO: 4661661 - DNA, 25 bp, Homo sapien
ctgaaagaggggagctggcatcaaa

SEQ ID NO: 4661662 - DNA, 25 bp, Homo sapien
cccccagctggggatccagcctcgc

SEQ ID NO: 4661663 - DNA, 25 bp, Homo sapien
ggccagctcaggaggaaggccccca

SEQ ID NO: 4661664 - DNA, 25 bp, Homo sapien
ggatccagcctcgctgcatgtggcc

SEQ ID NO: 4661665 - DNA, 25 bp, Homo sapien
agcctcgctgcatgtggccccaggc

SEQ ID NO: 4661666 - DNA, 25 bp, Homo sapien
tcctcattccctgtgcgctgggcag

SEQ ID NO: 4661667 - DNA, 25 bp, Homo sapien
cgctgggcagatactgactgagaaa

SEQ ID NO: 4661668 - DNA, 25 bp, Homo sapien
tccctgtgcgctgggcagatactga

SEQ ID NO: 4661669 - DNA, 25 bp, Homo sapien
gactgagaaagtatgggcggtgctg

SEQ ID NO: 4661670 - DNA, 25 bp, Homo sapien
ttcacagacctcacccatttgcaaa

SEQ ID NO: 4661671 - DNA, 25 bp, Homo sapien
gactttttcacagacctcacccatt

SEQ ID NO: 4661672 - DNA, 25 bp, Homo sapien
agcaccagcttttgcatggaaatac

SEQ ID NO: 4661673 - DNA, 25 bp, Homo sapien
cgggctgtactgctgagcaccagct

SEQ ID NO: 4661674 - DNA, 25 bp, Homo sapien
aagacacctcttgaggggatgcccc

SEQ ID NO: 4661675 - DNA, 25 bp, Homo sapien
ggcagctctcaattgggagcatctg

SEQ ID NO: 4661676 - DNA, 25 bp, Homo sapien
gtgtttaggcagctctcaattggga

SEQ ID NO: 4661677 - DNA, 25 bp, Homo sapien
ctcaattgggagcatctgtgttttc

SEQ ID NO: 4661678 - DNA, 25 bp, Homo sapien
cacagcctgcgtgacagcaagtggc

SEQ ID NO: 4661679 - DNA, 25 bp, Homo sapien
gtggcacgaaggaggcggtgtcttt

SEQ ID NO: 4661680 - DNA, 25 bp, Homo sapien
ccacagcctgcgtgacagcaagtgg

SEQ ID NO: 4661681 - DNA, 25 bp, Homo sapien
gacagcaagtggcacgaaggaggcg

SEQ ID NO: 4661682 - DNA, 25 bp, Homo sapien
gccaggctcttctcaaacgcctgac

SEQ ID NO: 4661683 - DNA, 25 bp, Homo sapien
ttggccaggctcttctcaaacgcct

SEQ ID NO: 4661684 - DNA, 25 bp, Homo sapien
gggatgatagacacctgccaccatg

SEQ ID NO: 4661685 - DNA, 25 bp, Homo sapien
gctcttctcaaacgcctgacctcag

SEQ ID NO: 4661686 - DNA, 25 bp, Homo sapien
ccatgccatttgtgtctgtgagcct

SEQ ID NO: 4661687 - DNA, 25 bp, Homo sapien
cccaatccatgccatttgtgtctgt

SEQ ID NO: 4661688 - DNA, 25 bp, Homo sapien
caatccatgccatttgtgtctgtga

SEQ ID NO: 4661689 - DNA, 25 bp, Homo sapien
cccggcccaatccatgccatttgtg

SEQ ID NO: 4661690 - DNA, 25 bp, Homo sapien
attccctccttgtagtcatcctcca

SEQ ID NO: 4661691 - DNA, 25 bp, Homo sapien
tctggttctaagtctgtctgtgctg

SEQ ID NO: 4661692 - DNA, 25 bp, Homo sapien
ttgtctgcaaaggactacctctgga

SEQ ID NO: 4661693 - DNA, 25 bp, Homo sapien
cgtcgagggacctggcagtagatct

SEQ ID NO: 4661694 - DNA, 25 bp, Homo sapien
tgcagacctgcacatactgatgcct

SEQ ID NO: 4661695 - DNA, 25 bp, Homo sapien
tgacttgagcttggtcgagcggaac

SEQ ID NO: 4661696 - DNA, 25 bp, Homo sapien
gctgctagccaggagttctgctgaa

SEQ ID NO: 4661697 - DNA, 25 bp, Homo sapien
cgagtatccttggttttgtgcccca

SEQ ID NO: 4661698 - DNA, 25 bp, Homo sapien
gacagtttctgtactgccaggcaga

SEQ ID NO: 4661699 - DNA, 25 bp, Homo sapien
ccagcctttctggagtgtgctcaca

SEQ ID NO: 4661700 - DNA, 25 bp, Homo sapien
ccgcccacaacctcgcgctccgcca

SEQ ID NO: 4661701 - DNA, 25 bp, Homo sapien
cgcgctccgccagcctttctggagt

SEQ ID NO: 4661702 - DNA, 25 bp, Homo sapien
ctggagtgtgctcacagagcatgcg

SEQ ID NO: 4661703 - DNA, 25 bp, Homo sapien
ctggcaatcccaggggcaaaggccc

SEQ ID NO: 4661704 - DNA, 25 bp, Homo sapien
tggcaatcccaggggcaaaggccca

SEQ ID NO: 4661705 - DNA, 25 bp, Homo sapien
tgatcaggcccatcccggaggagcc

SEQ ID NO: 4661706 - DNA, 25 bp, Homo sapien
cacctttcccagtaactctggttgg

SEQ ID NO: 4661707 - DNA, 25 bp, Homo sapien
tcgcccgccctctggccgttgagtc

SEQ ID NO: 4661708 - DNA, 25 bp, Homo sapien
ctattcacagcacggtcacctttcc

SEQ ID NO: 4661709 - DNA, 25 bp, Homo sapien
agcagagtgtgctgtctgtgcttgt

SEQ ID NO: 4661710 - DNA, 25 bp, Homo sapien
cttgcagtgacaactctgcaaatgg

SEQ ID NO: 4661711 - DNA, 25 bp, Homo sapien
tctgcaaatggagtactgtctttga

SEQ ID NO: 4661712 - DNA, 25 bp, Homo sapien
gcagcagagtgtgctgtctgtgctt

SEQ ID NO: 4661713 - DNA, 25 bp, Homo sapien
tccagcctgcgagcattgagtctaa

SEQ ID NO: 4661714 - DNA, 25 bp, Homo sapien
cctgcgagcattgagtctaatgtga

SEQ ID NO: 4661715 - DNA, 25 bp, Homo sapien
ttcctccagcctgcgagcattgagt

SEQ ID NO: 4661716 - DNA, 25 bp, Homo sapien
gagcattgagtctaatgtgaacgtg

SEQ ID NO: 4661717 - DNA, 25 bp, Homo sapien
gtgtaaaaatcctgccgaagccctg

SEQ ID NO: 4661718 - DNA, 25 bp, Homo sapien
tcatgctggtcgcagttgctcataa

SEQ ID NO: 4661719 - DNA, 25 bp, Homo sapien
gctcataaaggcaaggctgtgtaaa

SEQ ID NO: 4661720 - DNA, 25 bp, Homo sapien
aaggctgtgtaaaaatcctgccgaa

SEQ ID NO: 4661721 - DNA, 25 bp, Homo sapien
gccctgaatctctttgtgggtcacc

SEQ ID NO: 4661722 - DNA, 25 bp, Homo sapien
gaatctctttgtgggtcaccaaact

SEQ ID NO: 4661723 - DNA, 25 bp, Homo sapien
caccaaacttatggactgaccaggc

SEQ ID NO: 4661724 - DNA, 25 bp, Homo sapien
tgtgggtcaccaaacttatggactg

SEQ ID NO: 4661725 - DNA, 25 bp, Homo sapien
gacttgtctcccttccctatgttga

SEQ ID NO: 4661726 - DNA, 25 bp, Homo sapien
gactcctacaaagccaatgttttgg

SEQ ID NO: 4661727 - DNA, 25 bp, Homo sapien
tcccttccctatgttgactcctaca

SEQ ID NO: 4661728 - DNA, 25 bp, Homo sapien
aatgaaatgacttgtctcccttccc

SEQ ID NO: 4661729 - DNA, 25 bp, Homo sapien
tctccatcccccagaggatgttggt

SEQ ID NO: 4661730 - DNA, 25 bp, Homo sapien
gatgttggtacttcggccatgagcc

SEQ ID NO: 4661731 - DNA, 25 bp, Homo sapien
ccccagtgtgtaagggaccacagca

SEQ ID NO: 4661732 - DNA, 25 bp, Homo sapien
ccccagaggatgttggtacttcggc

SEQ ID NO: 4661733 - DNA, 25 bp, Homo sapien
tcctggttccatagattgatgcaaa

SEQ ID NO: 4661734 - DNA, 25 bp, Homo sapien
ggttccatagattgatgcaaaacac

SEQ ID NO: 4661735 - DNA, 25 bp, Homo sapien
ttccatagattgatgcaaaacacac

SEQ ID NO: 4661736 - DNA, 25 bp, Homo sapien
ggttcctggttccatagattgatgc

SEQ ID NO: 4661737 - DNA, 25 bp, Homo sapien
tgtttgagtcatgccatggtcgagg

SEQ ID NO: 4661738 - DNA, 25 bp, Homo sapien
catgccatggtcgaggggacacttg

SEQ ID NO: 4661739 - DNA, 25 bp, Homo sapien
gagtcatgccatggtcgaggggaca

SEQ ID NO: 4661740 - DNA, 25 bp, Homo sapien
gtcatgccatggtcgaggggacact

SEQ ID NO: 4661741 - DNA, 25 bp, Homo sapien
gggtttccatgtgtccatctataca

SEQ ID NO: 4661742 - DNA, 25 bp, Homo sapien
ccttgctttctgatgaacctggtgt

SEQ ID NO: 4661743 - DNA, 25 bp, Homo sapien
gctttctgatgaacctggtgtttcc

SEQ ID NO: 4661744 - DNA, 25 bp, Homo sapien
catctatacattcacactcaatctc

SEQ ID NO: 4661745 - DNA, 25 bp, Homo sapien
acagagcttccctttggtgactcct

SEQ ID NO: 4661746 - DNA, 25 bp, Homo sapien
gacagcctgtcacactagagtgggc

SEQ ID NO: 4661747 - DNA, 25 bp, Homo sapien
ctgcttcgtggacagcctgtcacac

SEQ ID NO: 4661748 - DNA, 25 bp, Homo sapien
tggacagcctgtcacactagagtgg

SEQ ID NO: 4661749 - DNA, 25 bp, Homo sapien
tcgtggacagcctgtcacactagag

SEQ ID NO: 4661750 - DNA, 25 bp, Homo sapien
tttaataaggagtgcagcgtctacg

SEQ ID NO: 4661751 - DNA, 25 bp, Homo sapien
gctggtgtctccatcggtggccctt

SEQ ID NO: 4661752 - DNA, 25 bp, Homo sapien
gaactcgttcattccacagttagcg

SEQ ID NO: 4661753 - DNA, 25 bp, Homo sapien
cagttagcgtttccctgcttgaggc

SEQ ID NO: 4661754 - DNA, 25 bp, Homo sapien
tacaaatatacccagtggagcggca

SEQ ID NO: 4661755 - DNA, 25 bp, Homo sapien
tggcaaggaaggacacgcagtctaa

SEQ ID NO: 4661756 - DNA, 25 bp, Homo sapien
tcacacttctgttggctgcgcaaaa

SEQ ID NO: 4661757 - DNA, 25 bp, Homo sapien
tgagatctttccagaagccgaagga

SEQ ID NO: 4661758 - DNA, 25 bp, Homo sapien
attgcaccgaacacggaagaggagc

SEQ ID NO: 4661759 - DNA, 25 bp, Homo sapien
tttcacgaggagcatgggccttccc

SEQ ID NO: 4661760 - DNA, 25 bp, Homo sapien
ctttgctcccactcgctctttaaat

SEQ ID NO: 4661761 - DNA, 25 bp, Homo sapien
tgctgcattgcaccgaacacggaag

SEQ ID NO: 4661762 - DNA, 25 bp, Homo sapien
gtggaaagcacctggtcatgcccgt

SEQ ID NO: 4661763 - DNA, 25 bp, Homo sapien
tggaaagcacctggtcatgcccgtt

SEQ ID NO: 4661764 - DNA, 25 bp, Homo sapien
tcagagtgaagaccaagaagatgct

SEQ ID NO: 4661765 - DNA, 25 bp, Homo sapien
gctgaagcgggctgccatttccgct

SEQ ID NO: 4661766 - DNA, 25 bp, Homo sapien
ttcctggagttactgtggccttgct

SEQ ID NO: 4661767 - DNA, 25 bp, Homo sapien
ttggcggctgtttgtcctgacacac

SEQ ID NO: 4661768 - DNA, 25 bp, Homo sapien
tctcagccgctgtcattgaccatct

SEQ ID NO: 4661769 - DNA, 25 bp, Homo sapien
cattgaccatcttgtgcgggaggca

SEQ ID NO: 4661770 - DNA, 25 bp, Homo sapien
agctggaggacttgcgtctgccgtc

SEQ ID NO: 4661771 - DNA, 25 bp, Homo sapien
cccttgcggcgtccagtttgcttct

SEQ ID NO: 4661772 - DNA, 25 bp, Homo sapien
tggagatgggatctttacagcctgg

SEQ ID NO: 4661773 - DNA, 25 bp, Homo sapien
gagatgggatctttacagcctggaa

SEQ ID NO: 4661774 - DNA, 25 bp, Homo sapien
gggatctttacagcctggaagggac

SEQ ID NO: 4661775 - DNA, 25 bp, Homo sapien
gatgggatctttacagcctggaagg

SEQ ID NO: 4661776 - DNA, 25 bp, Homo sapien
ggtagtaagccagaatggaggcaat

SEQ ID NO: 4661777 - DNA, 25 bp, Homo sapien
gcagtggagcgtaggagccagggcg

SEQ ID NO: 4661778 - DNA, 25 bp, Homo sapien
tggaggcaataatgagtgatgagca

SEQ ID NO: 4661779 - DNA, 25 bp, Homo sapien
tggcagagtcgaggaggcctccaaa

SEQ ID NO: 4661780 - DNA, 25 bp, Homo sapien
gctgcagctgggtaacctgaagacc

SEQ ID NO: 4661781 - DNA, 25 bp, Homo sapien
taacctgaagaccttgtgaggcagg

SEQ ID NO: 4661782 - DNA, 25 bp, Homo sapien
cagcatccgatccacgctgcagctg

SEQ ID NO: 4661783 - DNA, 25 bp, Homo sapien
aagaccttgtgaggcaggaagctca

SEQ ID NO: 4661784 - DNA, 25 bp, Homo sapien
cagatagtcacctttccctttattc

SEQ ID NO: 4661785 - DNA, 25 bp, Homo sapien
tgaagaccagatagtcacctttccc

SEQ ID NO: 4661786 - DNA, 25 bp, Homo sapien
tagtcacctttccctttattctggc

SEQ ID NO: 4661787 - DNA, 25 bp, Homo sapien
ctgaagaccagatagtcacctttcc

SEQ ID NO: 4661788 - DNA, 25 bp, Homo sapien
ctgtgcctccagactcagtttggat

SEQ ID NO: 4661789 - DNA, 25 bp, Homo sapien
tttgtcatagggttttgcggcattt

SEQ ID NO: 4661790 - DNA, 25 bp, Homo sapien
aagttctttcccacaacaattagtg

SEQ ID NO: 4661791 - DNA, 25 bp, Homo sapien
atttgcagttcccaaaggaagttct

SEQ ID NO: 4661792 - DNA, 25 bp, Homo sapien
tgattccagttaaaagggggctgct

SEQ ID NO: 4661793 - DNA, 25 bp, Homo sapien
gattccagttaaaagggggctgctg

SEQ ID NO: 4661794 - DNA, 25 bp, Homo sapien
agatgattccagttaaaagggggct

SEQ ID NO: 4661795 - DNA, 25 bp, Homo sapien
agaagatgattccagttaaaagggg

SEQ ID NO: 4661796 - DNA, 25 bp, Homo sapien
ggagcaccgttgctgtgctcagcct

SEQ ID NO: 4661797 - DNA, 25 bp, Homo sapien
gctctacaccaggtacgctggtttt

SEQ ID NO: 4661798 - DNA, 25 bp, Homo sapien
cccaatgtggggagcaccgttgctg

SEQ ID NO: 4661799 - DNA, 25 bp, Homo sapien
gtacgctggttttgcccaatgtggg

SEQ ID NO: 4661800 - DNA, 25 bp, Homo sapien
ttcccttgcctctttctgaatgtct

SEQ ID NO: 4661801 - DNA, 25 bp, Homo sapien
tgggaccaccaaggaactcagggag

SEQ ID NO: 4661802 - DNA, 25 bp, Homo sapien
gatagccatgccatcctgaaaacgg

SEQ ID NO: 4661803 - DNA, 25 bp, Homo sapien
gatactgactcatcggatagccatg

SEQ ID NO: 4661804 - DNA, 25 bp, Homo sapien
gaaaacggccttccttgtgtgtaca

SEQ ID NO: 4661805 - DNA, 25 bp, Homo sapien
gggatttggatgagcttccaaaagc

SEQ ID NO: 4661806 - DNA, 25 bp, Homo sapien
gatttggatgagcttccaaaagccg

SEQ ID NO: 4661807 - DNA, 25 bp, Homo sapien
ctgtgtaatggtttggggatttgga

SEQ ID NO: 4661808 - DNA, 25 bp, Homo sapien
tttggggatttggatgagcttccaa

SEQ ID NO: 4661809 - DNA, 25 bp, Homo sapien
tataagtaaggcaagttcttaaggc

SEQ ID NO: 4661810 - DNA, 25 bp, Homo sapien
taagtgggaccttagatataatctc

SEQ ID NO: 4661811 - DNA, 25 bp, Homo sapien
cagttaagagcaacttcattggtta

SEQ ID NO: 4661812 - DNA, 25 bp, Homo sapien
tgtcccatgagtgtagctttagcta

SEQ ID NO: 4661813 - DNA, 25 bp, Homo sapien
catgaaagcctccactcaagtttgc

SEQ ID NO: 4661814 - DNA, 25 bp, Homo sapien
agtttgcttcctgccagaccaacag

SEQ ID NO: 4661815 - DNA, 25 bp, Homo sapien
cctctgggtcagcttgttttagcac

SEQ ID NO: 4661816 - DNA, 25 bp, Homo sapien
tataatcccgagtttgcactgtgag

SEQ ID NO: 4661817 - DNA, 25 bp, Homo sapien
taggatctggcgttccggcttgtgc

SEQ ID NO: 4661818 - DNA, 25 bp, Homo sapien
aagtggacccgtttgcgaagcgcca

SEQ ID NO: 4661819 - DNA, 25 bp, Homo sapien
tgtcccggacttcaggtaggatctg

SEQ ID NO: 4661820 - DNA, 25 bp, Homo sapien
ggcttgtgcgcagacggtagctcac

SEQ ID NO: 4661821 - DNA, 25 bp, Homo sapien
gcgccggtgccaaggcggcctgttt

SEQ ID NO: 4661822 - DNA, 25 bp, Homo sapien
agatttgtcccggtgcgcagtgcag

SEQ ID NO: 4661823 - DNA, 25 bp, Homo sapien
cgcagtgcagcctggagttactgat

SEQ ID NO: 4661824 - DNA, 25 bp, Homo sapien
tgtgacctagatccccgggtgtgtc

SEQ ID NO: 4661825 - DNA, 25 bp, Homo sapien
ctggaaatatcggatagatgataac

SEQ ID NO: 4661826 - DNA, 25 bp, Homo sapien
gatagatgataacatatccattaga

SEQ ID NO: 4661827 - DNA, 25 bp, Homo sapien
tatccattagaatactcttggctca

SEQ ID NO: 4661828 - DNA, 25 bp, Homo sapien
tcttttctggaaatatcggatagat

SEQ ID NO: 4661829 - DNA, 25 bp, Homo sapien
cacatctccgtgatttccaggtaca

SEQ ID NO: 4661830 - DNA, 25 bp, Homo sapien
agacattcccagatgaccgcagagc

SEQ ID NO: 4661831 - DNA, 25 bp, Homo sapien
gagcttgtctgccatcacatctccg

SEQ ID NO: 4661832 - DNA, 25 bp, Homo sapien
ttccttcggtttggcgagacattcc

SEQ ID NO: 4661833 - DNA, 25 bp, Homo sapien
cttctcttgacggttgtttggatcc

SEQ ID NO: 4661834 - DNA, 25 bp, Homo sapien
tcttgacggttgtttggatcctgcc

SEQ ID NO: 4661835 - DNA, 25 bp, Homo sapien
atggaaatccctgcacacgacacac

SEQ ID NO: 4661836 - DNA, 25 bp, Homo sapien
ctttccttctcttgacggttgtttg

SEQ ID NO: 4661837 - DNA, 25 bp, Homo sapien
ctgaaccaattcacagtaccgtcag

SEQ ID NO: 4661838 - DNA, 25 bp, Homo sapien
atcacagggctctcggactcgtgga

SEQ ID NO: 4661839 - DNA, 25 bp, Homo sapien
gaattcagggatcttcaaagacaca

SEQ ID NO: 4661840 - DNA, 25 bp, Homo sapien
gcactgaaaatgcatggcatcacag

SEQ ID NO: 4661841 - DNA, 25 bp, Homo sapien
caaactgaccaaaatgtgctaagca

SEQ ID NO: 4661842 - DNA, 25 bp, Homo sapien
catcaggcacccatgcgggtgccca

SEQ ID NO: 4661843 - DNA, 25 bp, Homo sapien
acctccatcaggcacccatgcgggt

SEQ ID NO: 4661844 - DNA, 25 bp, Homo sapien
tgcccagaaaggctgtcgagggctc

SEQ ID NO: 4661845 - DNA, 25 bp, Homo sapien
gggctgctccagtagacagcaggct

SEQ ID NO: 4661846 - DNA, 25 bp, Homo sapien
agagaacacatatcgggtgcctctc

SEQ ID NO: 4661847 - DNA, 25 bp, Homo sapien
agaacacatatcgggtgcctctccc

SEQ ID NO: 4661848 - DNA, 25 bp, Homo sapien
cacatatcgggtgcctctccccttt

SEQ ID NO: 4661849 - DNA, 25 bp, Homo sapien
ctagagaacacatatcgggtgcctc

SEQ ID NO: 4661850 - DNA, 25 bp, Homo sapien
ttatcaccttccttatagatgtgca

SEQ ID NO: 4661851 - DNA, 25 bp, Homo sapien
tttgtttacgacagtgccaagagca

SEQ ID NO: 4661852 - DNA, 25 bp, Homo sapien
gtttgtttacgacagtgccaagagc

SEQ ID NO: 4661853 - DNA, 25 bp, Homo sapien
tggcacttcagttgaacccaggcac

SEQ ID NO: 4661854 - DNA, 25 bp, Homo sapien
gcacttcagttgaacccaggcacct

SEQ ID NO: 4661855 - DNA, 25 bp, Homo sapien
gctggcacttcagttgaacccaggc

SEQ ID NO: 4661856 - DNA, 25 bp, Homo sapien
cacttcagttgaacccaggcacctt

SEQ ID NO: 4661857 - DNA, 25 bp, Homo sapien
gggtcagtaactgtgcgctgtccat

SEQ ID NO: 4661858 - DNA, 25 bp, Homo sapien
tgcctggagctgagcacgaccaggg

SEQ ID NO: 4661859 - DNA, 25 bp, Homo sapien
tgttttgccctggtgcggatgccca

SEQ ID NO: 4661860 - DNA, 25 bp, Homo sapien
gctgagcacgaccaggggtcagtaa

SEQ ID NO: 4661861 - DNA, 25 bp, Homo sapien
ttggttacagtttctgctgcactcc

SEQ ID NO: 4661862 - DNA, 25 bp, Homo sapien
cctgccatgactcctgtagcagcca

SEQ ID NO: 4661863 - DNA, 25 bp, Homo sapien
tttcaaccaatatttgcctttcaac

SEQ ID NO: 4661864 - DNA, 25 bp, Homo sapien
accaatactttcttccaaagagtgg

SEQ ID NO: 4661865 - DNA, 25 bp, Homo sapien
taaaggtttgttatacgtgccacaa

SEQ ID NO: 4661866 - DNA, 25 bp, Homo sapien
ttgcctagggacgtgtaactacagg

SEQ ID NO: 4661867 - DNA, 25 bp, Homo sapien
gctaaatggtggctaaaaggaacac

SEQ ID NO: 4661868 - DNA, 25 bp, Homo sapien
tagtaatggttcagtaagcactcct

SEQ ID NO: 4661869 - DNA, 25 bp, Homo sapien
gagctgcatgcgctggtgttgggtc

SEQ ID NO: 4661870 - DNA, 25 bp, Homo sapien
tgttgggtctgagtaatggctccgc

SEQ ID NO: 4661871 - DNA, 25 bp, Homo sapien
ttctcgaactgcatcaggacagttg

SEQ ID NO: 4661872 - DNA, 25 bp, Homo sapien
aggacagttgtccacacatgcttca

SEQ ID NO: 4661873 - DNA, 25 bp, Homo sapien
aacaaggcttgatcgtttcttcaga

SEQ ID NO: 4661874 - DNA, 25 bp, Homo sapien
taggagtcagtgttagggtagcttc

SEQ ID NO: 4661875 - DNA, 25 bp, Homo sapien
tgcttcatggaagcactgagtaaaa

SEQ ID NO: 4661876 - DNA, 25 bp, Homo sapien
cagaagttgagagtaggtctcccac

SEQ ID NO: 4661877 - DNA, 25 bp, Homo sapien
atttgtttcttctcagcgactttcc

SEQ ID NO: 4661878 - DNA, 25 bp, Homo sapien
gcttcgttacctcccctgttagctg

SEQ ID NO: 4661879 - DNA, 25 bp, Homo sapien
tcagcttcgttacctcccctgttag

SEQ ID NO: 4661880 - DNA, 25 bp, Homo sapien
ttcttctcagcgactttccggccag

SEQ ID NO: 4661881 - DNA, 25 bp, Homo sapien
tctgtaataagcacgtgcacacctc

SEQ ID NO: 4661882 - DNA, 25 bp, Homo sapien
tatctgtaataagcacgtgcacacc

SEQ ID NO: 4661883 - DNA, 25 bp, Homo sapien
tgcacacctcgaaggaggtcttcac

SEQ ID NO: 4661884 - DNA, 25 bp, Homo sapien
cacctcgaaggaggtcttcacttca

SEQ ID NO: 4661885 - DNA, 25 bp, Homo sapien
ctgtgccgcctggagcaaggcccgc

SEQ ID NO: 4661886 - DNA, 25 bp, Homo sapien
cgcctggagcaaggcccgccttctc

SEQ ID NO: 4661887 - DNA, 25 bp, Homo sapien
tgccgcctggagcaaggcccgcctt

SEQ ID NO: 4661888 - DNA, 25 bp, Homo sapien
tctgtgccgcctggagcaaggcccg

SEQ ID NO: 4661889 - DNA, 25 bp, Homo sapien
ccagattcccggggcaggcacaggt

SEQ ID NO: 4661890 - DNA, 25 bp, Homo sapien
agaggagtgggaaacggccccagat

SEQ ID NO: 4661891 - DNA, 25 bp, Homo sapien
gacgagcaggttgccggtggcgtgg

SEQ ID NO: 4661892 - DNA, 25 bp, Homo sapien
agacgagcaggttgccggtggcgtg

SEQ ID NO: 4661893 - DNA, 25 bp, Homo sapien
acttgcctctgagacaagagatcct

SEQ ID NO: 4661894 - DNA, 25 bp, Homo sapien
tctgagacaagagatcctcacgggg

SEQ ID NO: 4661895 - DNA, 25 bp, Homo sapien
gcctctgagacaagagatcctcacg

SEQ ID NO: 4661896 - DNA, 25 bp, Homo sapien
tgagacaagagatcctcacggggct

SEQ ID NO: 4661897 - DNA, 25 bp, Homo sapien
ccaaagggaaggatgcctccaacag

SEQ ID NO: 4661898 - DNA, 25 bp, Homo sapien
agggaaggatgcctccaacagggct

SEQ ID NO: 4661899 - DNA, 25 bp, Homo sapien
tcccaaagggaaggatgcctccaac

SEQ ID NO: 4661900 - DNA, 25 bp, Homo sapien
aaagggaaggatgcctccaacaggg

SEQ ID NO: 4661901 - DNA, 25 bp, Homo sapien
cagcggtggccccgacagttttctt

SEQ ID NO: 4661902 - DNA, 25 bp, Homo sapien
tcttttgcgggacctgtggccggca

SEQ ID NO: 4661903 - DNA, 25 bp, Homo sapien
ttgcagctgcagcggtggccccgac

SEQ ID NO: 4661904 - DNA, 25 bp, Homo sapien
cgacagttttcttttgcgggacctg

SEQ ID NO: 4661905 - DNA, 25 bp, Homo sapien
taacaacctcatgttcttacgcatg

SEQ ID NO: 4661906 - DNA, 25 bp, Homo sapien
agctctcttagtctcctgaattttg

SEQ ID NO: 4661907 - DNA, 25 bp, Homo sapien
tttgatgttctacttaacaacctca

SEQ ID NO: 4661908 - DNA, 25 bp, Homo sapien
tcctcctaagcagctctcttagtct

SEQ ID NO: 4661909 - DNA, 25 bp, Homo sapien
tcctcacttcgcagacaggacggcg

SEQ ID NO: 4661910 - DNA, 25 bp, Homo sapien
tctcatttcccagatggtgaggagg

SEQ ID NO: 4661911 - DNA, 25 bp, Homo sapien
ggcgctcctcccttacaaacggtga

SEQ ID NO: 4661912 - DNA, 25 bp, Homo sapien
acttcgcagacaggacggcggcaag

SEQ ID NO: 4661913 - DNA, 25 bp, Homo sapien
tcagactttgtcgaaactagttgat

SEQ ID NO: 4661914 - DNA, 25 bp, Homo sapien
ctttttcagactttgtcgaaactag

SEQ ID NO: 4661915 - DNA, 25 bp, Homo sapien
tttcagactttgtcgaaactagttg

SEQ ID NO: 4661916 - DNA, 25 bp, Homo sapien
tctttttcagactttgtcgaaacta

SEQ ID NO: 4661917 - DNA, 25 bp, Homo sapien
taatgagtcgaaatcatttaattta

SEQ ID NO: 4661918 - DNA, 25 bp, Homo sapien
tggtctatcataatctaatgagtcg

SEQ ID NO: 4661919 - DNA, 25 bp, Homo sapien
ggtctatcataatctaatgagtcga

SEQ ID NO: 4661920 - DNA, 25 bp, Homo sapien
tgagtcgaaatcatttaatttaaac

SEQ ID NO: 4661921 - DNA, 25 bp, Homo sapien
taataatgattagggtagggatgag

SEQ ID NO: 4661922 - DNA, 25 bp, Homo sapien
tgtagcttcgaaaagaatgtaaagt

SEQ ID NO: 4661923 - DNA, 25 bp, Homo sapien
gggatgagtgtagcttcgaaaagaa

SEQ ID NO: 4661924 - DNA, 25 bp, Homo sapien
tgtaaagtatgactagttctgtggc

SEQ ID NO: 4661925 - DNA, 25 bp, Homo sapien
aaactgtccaacagtgagacttggg

SEQ ID NO: 4661926 - DNA, 25 bp, Homo sapien
gagacttgggagaactcctgtatgt

SEQ ID NO: 4661927 - DNA, 25 bp, Homo sapien
gtgagacttgggagaactcctgtat

SEQ ID NO: 4661928 - DNA, 25 bp, Homo sapien
tccccgaaactgtccaacagtgaga

SEQ ID NO: 4661929 - DNA, 25 bp, Homo sapien
ccctcaataattagtatgacaattc

SEQ ID NO: 4661930 - DNA, 25 bp, Homo sapien
tgtaaagcactccattcaataaaag

SEQ ID NO: 4661931 - DNA, 25 bp, Homo sapien
aagcactccattcaataaaagcaca

SEQ ID NO: 4661932 - DNA, 25 bp, Homo sapien
gacaattcacgatacagctcttact

SEQ ID NO: 4661933 - DNA, 25 bp, Homo sapien
gctgtgcattcagggttgggcacat

SEQ ID NO: 4661934 - DNA, 25 bp, Homo sapien
attgatgtagtcagaatgaggctct

SEQ ID NO: 4661935 - DNA, 25 bp, Homo sapien
tgatgtagtcagaatgaggctctcc

SEQ ID NO: 4661936 - DNA, 25 bp, Homo sapien
ttgatgtagtcagaatgaggctctc

SEQ ID NO: 4661937 - DNA, 25 bp, Homo sapien
cgttctccatgctgatggtcggcat

SEQ ID NO: 4661938 - DNA, 25 bp, Homo sapien
cccgttctccatgctgatggtcggc

SEQ ID NO: 4661939 - DNA, 25 bp, Homo sapien
ctgatggtcggcatgatgatgatgc

SEQ ID NO: 4661940 - DNA, 25 bp, Homo sapien
tccatgctgatggtcggcatgatga

SEQ ID NO: 4661941 - DNA, 25 bp, Homo sapien
tagagtcggtcagccagtaatgctc

SEQ ID NO: 4661942 - DNA, 25 bp, Homo sapien
gggtagagtcggtcagccagtaatg

SEQ ID NO: 4661943 - DNA, 25 bp, Homo sapien
cagctggaattcccgcttggtccac

SEQ ID NO: 4661944 - DNA, 25 bp, Homo sapien
gagtcggtcagccagtaatgctcac

SEQ ID NO: 4661945 - DNA, 25 bp, Homo sapien
tgcccacaccgcagggacagcccct

SEQ ID NO: 4661946 - DNA, 25 bp, Homo sapien
cggcccatgcccacaccgcagggac

SEQ ID NO: 4661947 - DNA, 25 bp, Homo sapien
catgcccacaccgcagggacagccc

SEQ ID NO: 4661948 - DNA, 25 bp, Homo sapien
ctgtccggcccatgcccacaccgca

SEQ ID NO: 4661949 - DNA, 25 bp, Homo sapien
cggagtgcatacacagcatggaaca

SEQ ID NO: 4661950 - DNA, 25 bp, Homo sapien
ctggtgcatccggagtgcatacaca

SEQ ID NO: 4661951 - DNA, 25 bp, Homo sapien
catccggagtgcatacacagcatgg

SEQ ID NO: 4661952 - DNA, 25 bp, Homo sapien
ggtgcatccggagtgcatacacagc

SEQ ID NO: 4661953 - DNA, 25 bp, Homo sapien
gggaaaaggcatcaggctgctcagc

SEQ ID NO: 4661954 - DNA, 25 bp, Homo sapien
gaaaaggcatcaggctgctcagcga

SEQ ID NO: 4661955 - DNA, 25 bp, Homo sapien
aaggcatcaggctgctcagcgagga

SEQ ID NO: 4661956 - DNA, 25 bp, Homo sapien
ctgccaggggaaaaggcatcaggct

SEQ ID NO: 4661957 - DNA, 25 bp, Homo sapien
agaatcttgttcagtaggcagctgt

SEQ ID NO: 4661958 - DNA, 25 bp, Homo sapien
ccagaatcttgttcagtaggcagct

SEQ ID NO: 4661959 - DNA, 25 bp, Homo sapien
tccagaatcttgttcagtaggcagc

SEQ ID NO: 4661960 - DNA, 25 bp, Homo sapien
atcttgttcagtaggcagctgtgca

SEQ ID NO: 4661961 - DNA, 25 bp, Homo sapien
gagaaggcactcaaggttccccagc

SEQ ID NO: 4661962 - DNA, 25 bp, Homo sapien
gttctagtccgctcagctctgccca

SEQ ID NO: 4661963 - DNA, 25 bp, Homo sapien
ccagctccccgttctagtccgctca

SEQ ID NO: 4661964 - DNA, 25 bp, Homo sapien
agctctgcccacgaacaggagcagg

SEQ ID NO: 4661965 - DNA, 25 bp, Homo sapien
gcctgcgggaggtccgtcacagaga

SEQ ID NO: 4661966 - DNA, 25 bp, Homo sapien
cctgcgggaggtccgtcacagagat

SEQ ID NO: 4661967 - DNA, 25 bp, Homo sapien
cgcctgcgggaggtccgtcacagag

SEQ ID NO: 4661968 - DNA, 25 bp, Homo sapien
acgcctgcgggaggtccgtcacaga

SEQ ID NO: 4661969 - DNA, 25 bp, Homo sapien
ggctgtcctgctcatagccaggcgg

SEQ ID NO: 4661970 - DNA, 25 bp, Homo sapien
gcggaaaagccagcctcgtccttga

SEQ ID NO: 4661971 - DNA, 25 bp, Homo sapien
gcgggggtgcggaaaagccagcctc

SEQ ID NO: 4661972 - DNA, 25 bp, Homo sapien
gggctgtcctgctcatagccaggcg

SEQ ID NO: 4661973 - DNA, 25 bp, Homo sapien
tcaggggggctctcctccaccggag

SEQ ID NO: 4661974 - DNA, 25 bp, Homo sapien
caccggagaaaactgcccctgagaa

SEQ ID NO: 4661975 - DNA, 25 bp, Homo sapien
gaaaactgcccctgagaacggtcat

SEQ ID NO: 4661976 - DNA, 25 bp, Homo sapien
aagagccaggcttcgggcatgtcgt

SEQ ID NO: 4661977 - DNA, 25 bp, Homo sapien
accgtatgatcacggccagagggcc

SEQ ID NO: 4661978 - DNA, 25 bp, Homo sapien
ggccagtcagcaccgtatgatcacg

SEQ ID NO: 4661979 - DNA, 25 bp, Homo sapien
tgcggggccagtcagcaccgtatga

SEQ ID NO: 4661980 - DNA, 25 bp, Homo sapien
gacaagcacatgagccctgtgctgc

SEQ ID NO: 4661981 - DNA, 25 bp, Homo sapien
ccatgtctgtgactacgggctgcat

SEQ ID NO: 4661982 - DNA, 25 bp, Homo sapien
tcaccatgtctgtgactacgggctg

SEQ ID NO: 4661983 - DNA, 25 bp, Homo sapien
cagtgcaccgtcaccatgtctgtga

SEQ ID NO: 4661984 - DNA, 25 bp, Homo sapien
accgtcaccatgtctgtgactacgg

SEQ ID NO: 4661985 - DNA, 25 bp, Homo sapien
atgtgtgaccctgaggagggtacag

SEQ ID NO: 4661986 - DNA, 25 bp, Homo sapien
tgtgtgaccctgaggagggtacaga

SEQ ID NO: 4661987 - DNA, 25 bp, Homo sapien
gtgtgaccctgaggagggtacagaa

SEQ ID NO: 4661988 - DNA, 25 bp, Homo sapien
ggctccaggtatggaaattgcagtc

SEQ ID NO: 4661989 - DNA, 25 bp, Homo sapien
gcccaggctccaggtatggaaattg

SEQ ID NO: 4661990 - DNA, 25 bp, Homo sapien
ccaggctccaggtatggaaattgca

SEQ ID NO: 4661991 - DNA, 25 bp, Homo sapien
tccaggtatggaaattgcagtctct

SEQ ID NO: 4661992 - DNA, 25 bp, Homo sapien
gctgagcagtgtgcccggcttcttg

SEQ ID NO: 4661993 - DNA, 25 bp, Homo sapien
cgttaaagatatccacggtgcactc

SEQ ID NO: 4661994 - DNA, 25 bp, Homo sapien
gcagggccacgttaaagatatccac

SEQ ID NO: 4661995 - DNA, 25 bp, Homo sapien
atatccacggtgcactcagaccctg

SEQ ID NO: 4661996 - DNA, 25 bp, Homo sapien
agggccacgttaaagatatccacgg

SEQ ID NO: 4661997 - DNA, 25 bp, Homo sapien
agttgtagaggtagacatactgctt

SEQ ID NO: 4661998 - DNA, 25 bp, Homo sapien
cgcgctgttcagacagttgtagagg

SEQ ID NO: 4661999 - DNA, 25 bp, Homo sapien
tgccagcgcgctgttcagacagttg

SEQ ID NO: 4662000 - DNA, 25 bp, Homo sapien
ggcagcccgtctgccagcgcgctgt

SEQ ID NO: 4662001 - DNA, 25 bp, Homo sapien
cccggagcctgggcgggttgggcat

SEQ ID NO: 4662002 - DNA, 25 bp, Homo sapien
cacgggcgcggtgtccgcagctgct

SEQ ID NO: 4662003 - DNA, 25 bp, Homo sapien
cggtatggcggacagcccaagctca

SEQ ID NO: 4662004 - DNA, 25 bp, Homo sapien
acacagcggcgcgaagtcacagcgc

SEQ ID NO: 4662005 - DNA, 25 bp, Homo sapien
agttctgtcagctttaccctcagcc

SEQ ID NO: 4662006 - DNA, 25 bp, Homo sapien
gttctgtcagctttaccctcagcca

SEQ ID NO: 4662007 - DNA, 25 bp, Homo sapien
ttctgtcagctttaccctcagccac

SEQ ID NO: 4662008 - DNA, 25 bp, Homo sapien
catggcagaagaacagacattattt

SEQ ID NO: 4662009 - DNA, 25 bp, Homo sapien
accccactggggcacgctcccctca

SEQ ID NO: 4662010 - DNA, 25 bp, Homo sapien
gaacagacattatttccaccccact

SEQ ID NO: 4662011 - DNA, 25 bp, Homo sapien
agaagaacagacattatttccaccc

SEQ ID NO: 4662012 - DNA, 25 bp, Homo sapien
tcctatggttccgtctatggctcct

SEQ ID NO: 4662013 - DNA, 25 bp, Homo sapien
aaggatcttcgagtcctctctggcc

SEQ ID NO: 4662014 - DNA, 25 bp, Homo sapien
ccttctaaggatcttcgagtcctct

SEQ ID NO: 4662015 - DNA, 25 bp, Homo sapien
ggttccgtctatggctccttctaag

SEQ ID NO: 4662016 - DNA, 25 bp, Homo sapien
gctgagaccacagtttaggaggaaa

SEQ ID NO: 4662017 - DNA, 25 bp, Homo sapien
catcagattggatgtcccacggcca

SEQ ID NO: 4662018 - DNA, 25 bp, Homo sapien
ggtgagtgtcaatgagcctcgctga

SEQ ID NO: 4662019 - DNA, 25 bp, Homo sapien
cagggagaatgtcgaaaccccggtg

SEQ ID NO: 4662020 - DNA, 25 bp, Homo sapien
aaaaagaatagaacaagaggcatca

SEQ ID NO: 4662021 - DNA, 25 bp, Homo sapien
aagaatagaacaagaggcatcatgc

SEQ ID NO: 4662022 - DNA, 25 bp, Homo sapien
caaaaaagaatagaacaagaggcat

SEQ ID NO: 4662023 - DNA, 25 bp, Homo sapien
aaagaatagaacaagaggcatcatg

SEQ ID NO: 4662024 - DNA, 25 bp, Homo sapien
ggaatgagacgaattgttcaatgac

SEQ ID NO: 4662025 - DNA, 25 bp, Homo sapien
gagaagcgcttttcttgcgagagat

SEQ ID NO: 4662026 - DNA, 25 bp, Homo sapien
aaacggcagcgccttgaggaaggaa

SEQ ID NO: 4662027 - DNA, 25 bp, Homo sapien
gacagaaatgagcatgagtctgcta

SEQ ID NO: 4662028 - DNA, 25 bp, Homo sapien
gcaccagcagaaagccggtactgcc

SEQ ID NO: 4662029 - DNA, 25 bp, Homo sapien
gtccatggaagtgggagctcccttt

SEQ ID NO: 4662030 - DNA, 25 bp, Homo sapien
gcatggctaagggtccatggaagtg

SEQ ID NO: 4662031 - DNA, 25 bp, Homo sapien
taagggtccatggaagtgggagctc

SEQ ID NO: 4662032 - DNA, 25 bp, Homo sapien
atccagggcccgtgaatcagctgac

SEQ ID NO: 4662033 - DNA, 25 bp, Homo sapien
tggcccgagtcccacttagcggaag

SEQ ID NO: 4662034 - DNA, 25 bp, Homo sapien
agctgcagcagctacctccttcatg

SEQ ID NO: 4662035 - DNA, 25 bp, Homo sapien
cccacttagcggaaggagagcagag

SEQ ID NO: 4662036 - DNA, 25 bp, Homo sapien
aattgtggcgaagggacagtccaga

SEQ ID NO: 4662037 - DNA, 25 bp, Homo sapien
gcgaagggacagtccagaacactcc

SEQ ID NO: 4662038 - DNA, 25 bp, Homo sapien
gcctctcgggagagcagccaccagg

SEQ ID NO: 4662039 - DNA, 25 bp, Homo sapien
agaacactcctggacagcccctagc

SEQ ID NO: 4662040 - DNA, 25 bp, Homo sapien
tagagatcataagatgcttactaga

SEQ ID NO: 4662041 - DNA, 25 bp, Homo sapien
gagatcataagatgcttactagaat

SEQ ID NO: 4662042 - DNA, 25 bp, Homo sapien
gatcataagatgcttactagaatgt

SEQ ID NO: 4662043 - DNA, 25 bp, Homo sapien
tcataagatgcttactagaatgtag

SEQ ID NO: 4662044 - DNA, 25 bp, Homo sapien
gaaaggaaggcacgaacagctgaaa

SEQ ID NO: 4662045 - DNA, 25 bp, Homo sapien
tggtctcccatcagctggaattaag

SEQ ID NO: 4662046 - DNA, 25 bp, Homo sapien
caaaagactctaagtgccaccagac

SEQ ID NO: 4662047 - DNA, 25 bp, Homo sapien
tctgagcatgccacagctgaacact

SEQ ID NO: 4662048 - DNA, 25 bp, Homo sapien
cgagacttcagaactctacgagaac

SEQ ID NO: 4662049 - DNA, 25 bp, Homo sapien
gttctcgtagagttctgaagtctcg

SEQ ID NO: 4662050 - DNA, 25 bp, Homo sapien
tcttcaggagaccagtggcattttg

SEQ ID NO: 4662051 - DNA, 25 bp, Homo sapien
tttgtattcataatcctgtaaaggt

SEQ ID NO: 4662052 - DNA, 25 bp, Homo sapien
ctgctgtatcttcaggagaccagtg

SEQ ID NO: 4662053 - DNA, 25 bp, Homo sapien
tctcaatttaagtcatatttgtgga

SEQ ID NO: 4662054 - DNA, 25 bp, Homo sapien
agagaacaaccgcagcacagtgaag

SEQ ID NO: 4662055 - DNA, 25 bp, Homo sapien
gaatattcttgtcatttacgatggc

SEQ ID NO: 4662056 - DNA, 25 bp, Homo sapien
tgtgtattcccgttgcaatgctctc

SEQ ID NO: 4662057 - DNA, 25 bp, Homo sapien
caggttgacaataacactgatgaaa

SEQ ID NO: 4662058 - DNA, 25 bp, Homo sapien
cctgttttcaagacattactctttg

SEQ ID NO: 4662059 - DNA, 25 bp, Homo sapien
tcagcctgttttcaagacattactc

SEQ ID NO: 4662060 - DNA, 25 bp, Homo sapien
gggtgttccagaatgccatgccttc

SEQ ID NO: 4662061 - DNA, 25 bp, Homo sapien
ccatgccttcacaggtataattggg

SEQ ID NO: 4662062 - DNA, 25 bp, Homo sapien
agtccaaggagatatggcagccaaa

SEQ ID NO: 4662063 - DNA, 25 bp, Homo sapien
ggctcttcaaaccatcaaggtcatc

SEQ ID NO: 4662064 - DNA, 25 bp, Homo sapien
cggcaagggccgtctgagaccctgt

SEQ ID NO: 4662065 - DNA, 25 bp, Homo sapien
catcaaggtcatcaacggcaagggc

SEQ ID NO: 4662066 - DNA, 25 bp, Homo sapien
caggctatttacgaggaaagcctca

SEQ ID NO: 4662067 - DNA, 25 bp, Homo sapien
cataaccccaggctatttacgagga

SEQ ID NO: 4662068 - DNA, 25 bp, Homo sapien
ttatctgtgtggtcttcctcccaaa

SEQ ID NO: 4662069 - DNA, 25 bp, Homo sapien
aactgaggagcgtcctgcaatgcac

SEQ ID NO: 4662070 - DNA, 25 bp, Homo sapien
gcatggcgacgtccttccagagagt

SEQ ID NO: 4662071 - DNA, 25 bp, Homo sapien
cagaaactggtgtcgttatgccaca

SEQ ID NO: 4662072 - DNA, 25 bp, Homo sapien
taaggagatgcccaaaaagccaagt

SEQ ID NO: 4662073 - DNA, 25 bp, Homo sapien
cactcagtcgaagctaaacggatcc

SEQ ID NO: 4662074 - DNA, 25 bp, Homo sapien
catcttcactgaattcagttgagtt

SEQ ID NO: 4662075 - DNA, 25 bp, Homo sapien
ttcttagaagttcttctacatcttc

SEQ ID NO: 4662076 - DNA, 25 bp, Homo sapien
cttcactgaattcagttgagttcat

SEQ ID NO: 4662077 - DNA, 25 bp, Homo sapien
tacatcttcactgaattcagttgag

SEQ ID NO: 4662078 - DNA, 25 bp, Homo sapien
tggtggcatggttgcagagctcctc

SEQ ID NO: 4662079 - DNA, 25 bp, Homo sapien
tggcatggttgcagagctcctcctt

SEQ ID NO: 4662080 - DNA, 25 bp, Homo sapien
ggtggtggcatggttgcagagctcc

SEQ ID NO: 4662081 - DNA, 25 bp, Homo sapien
gcatggttgcagagctcctccttgc

SEQ ID NO: 4662082 - DNA, 25 bp, Homo sapien
tgcggcccatgagctgctatgcggt

SEQ ID NO: 4662083 - DNA, 25 bp, Homo sapien
catgaacttgtgtgaggtgccatac

SEQ ID NO: 4662084 - DNA, 25 bp, Homo sapien
ttcagggagagtatgtccattgtgc

SEQ ID NO: 4662085 - DNA, 25 bp, Homo sapien
ttcaggagcctaagtgacgagggtc

SEQ ID NO: 4662086 - DNA, 25 bp, Homo sapien
ggtagtagacctccacgtagttgtg

SEQ ID NO: 4662087 - DNA, 25 bp, Homo sapien
ccatgtccttcaccgaggggtagta

SEQ ID NO: 4662088 - DNA, 25 bp, Homo sapien
acgcttggcctcaaagctacaggca

SEQ ID NO: 4662089 - DNA, 25 bp, Homo sapien
ggtgcagtgactccaacttacgctt

SEQ ID NO: 4662090 - DNA, 25 bp, Homo sapien
cagaagtggctgaagaagttattca

SEQ ID NO: 4662091 - DNA, 25 bp, Homo sapien
gcccagaagtggctgaagaagttat

SEQ ID NO: 4662092 - DNA, 25 bp, Homo sapien
tgggcccagaagtggctgaagaagt

SEQ ID NO: 4662093 - DNA, 25 bp, Homo sapien
cgggctggctgttctccatctccct

SEQ ID NO: 4662094 - DNA, 25 bp, Homo sapien
tgtggtccaggaagtggccggggtc

SEQ ID NO: 4662095 - DNA, 25 bp, Homo sapien
tggtccaggaagtggccggggtcca

SEQ ID NO: 4662096 - DNA, 25 bp, Homo sapien
ctttgtggtccaggaagtggccggg

SEQ ID NO: 4662097 - DNA, 25 bp, Homo sapien
ggggggctcgtcttcactgcccgca

SEQ ID NO: 4662098 - DNA, 25 bp, Homo sapien
gaagacagcatattcgctgggcgaa

SEQ ID NO: 4662099 - DNA, 25 bp, Homo sapien
cagcatattcgctgggcgaagaggc

SEQ ID NO: 4662100 - DNA, 25 bp, Homo sapien
ttcgctgggcgaagaggcttcatcc

SEQ ID NO: 4662101 - DNA, 25 bp, Homo sapien
cagcaggtgcaaggcgaagttgcca

SEQ ID NO: 4662102 - DNA, 25 bp, Homo sapien
gtagagcagacacacatactggcga

SEQ ID NO: 4662103 - DNA, 25 bp, Homo sapien
cagggaaccgctggagctgtactgc

SEQ ID NO: 4662104 - DNA, 25 bp, Homo sapien
caggttgatgagtaccagccagatc

SEQ ID NO: 4662105 - DNA, 25 bp, Homo sapien
ctcctcatgtctctgcactgggggc

SEQ ID NO: 4662106 - DNA, 25 bp, Homo sapien
catagctcctcatgtctctgcactg

SEQ ID NO: 4662107 - DNA, 25 bp, Homo sapien
gttgattgcatagctcctcatgtct

SEQ ID NO: 4662108 - DNA, 25 bp, Homo sapien
tcagggttgattgcatagctcctca

SEQ ID NO: 4662109 - DNA, 25 bp, Homo sapien
tactgcagcgggaggttcttggcag

SEQ ID NO: 4662110 - DNA, 25 bp, Homo sapien
aaaaagtctgcagatgagccacagc

SEQ ID NO: 4662111 - DNA, 25 bp, Homo sapien
gcccgggaatgattgtactgcagcg

SEQ ID NO: 4662112 - DNA, 25 bp, Homo sapien
taaaaagtctgcagatgagccacag

SEQ ID NO: 4662113 - DNA, 25 bp, Homo sapien
gcctggcaggtcgagctgcaatgag

SEQ ID NO: 4662114 - DNA, 25 bp, Homo sapien
ccatttccacgttgctaagcaactt

SEQ ID NO: 4662115 - DNA, 25 bp, Homo sapien
gggaagccttatagcttctcccatt

SEQ ID NO: 4662116 - DNA, 25 bp, Homo sapien
aatagggacgattgcgtgaacactg

SEQ ID NO: 4662117 - DNA, 25 bp, Homo sapien
gaattcacagcaccagttaacctct

SEQ ID NO: 4662118 - DNA, 25 bp, Homo sapien
gagccttcagactgcagtgtgggtc

SEQ ID NO: 4662119 - DNA, 25 bp, Homo sapien
ataaacgggagatggagcaagcgta

SEQ ID NO: 4662120 - DNA, 25 bp, Homo sapien
ataaatggaggataaacgggagatg

SEQ ID NO: 4662121 - DNA, 25 bp, Homo sapien
agcaagcgtaggtcgagagagcctt

SEQ ID NO: 4662122 - DNA, 25 bp, Homo sapien
cacttaaccttagacacctatgcag

SEQ ID NO: 4662123 - DNA, 25 bp, Homo sapien
tagacacctatgcagtcatgttggg

SEQ ID NO: 4662124 - DNA, 25 bp, Homo sapien
gtaatcttcacacttaaccttagac

SEQ ID NO: 4662125 - DNA, 25 bp, Homo sapien
tcatgttgggagcaggttacaatgt

SEQ ID NO: 4662126 - DNA, 25 bp, Homo sapien
gaagacatccccgtgaagactttga

SEQ ID NO: 4662127 - DNA, 25 bp, Homo sapien
tgtctcattagcaacaactgtcagg

SEQ ID NO: 4662128 - DNA, 25 bp, Homo sapien
aactgtcaggtttggtgaacatacc

SEQ ID NO: 4662129 - DNA, 25 bp, Homo sapien
ttatcaatgttgttcggtcagccct

SEQ ID NO: 4662130 - DNA, 25 bp, Homo sapien
ccctgctgcctcgtccaggatgtga

SEQ ID NO: 4662131 - DNA, 25 bp, Homo sapien
tgctgcctcgtccaggatgtgagga

SEQ ID NO: 4662132 - DNA, 25 bp, Homo sapien
tgccctgctgcctcgtccaggatgt

SEQ ID NO: 4662133 - DNA, 25 bp, Homo sapien
gcctcgtccaggatgtgaggagcgt

SEQ ID NO: 4662134 - DNA, 25 bp, Homo sapien
ggtagaaaaacatctcatggctggg

SEQ ID NO: 4662135 - DNA, 25 bp, Homo sapien
tcctagcccttttggaggccgatgc

SEQ ID NO: 4662136 - DNA, 25 bp, Homo sapien
tagcccttttggaggccgatgcagg

SEQ ID NO: 4662137 - DNA, 25 bp, Homo sapien
aatttttgaccataccatctggagg

SEQ ID NO: 4662138 - DNA, 25 bp, Homo sapien
gactaaccttgccaacataataaga

SEQ ID NO: 4662139 - DNA, 25 bp, Homo sapien
aagactaaccttgccaacataataa

SEQ ID NO: 4662140 - DNA, 25 bp, Homo sapien
cactaggcgagatgcagtggatcat

SEQ ID NO: 4662141 - DNA, 25 bp, Homo sapien
aaatgaattcactaggcgagatgca

SEQ ID NO: 4662142 - DNA, 25 bp, Homo sapien
ttagcctagatacgggcacatgctg

SEQ ID NO: 4662143 - DNA, 25 bp, Homo sapien
cctcctgagtgatacaagtgggtgg

SEQ ID NO: 4662144 - DNA, 25 bp, Homo sapien
cacagaaggactgctacaggatttg

SEQ ID NO: 4662145 - DNA, 25 bp, Homo sapien
tgtagaaggatcacgacagtccagc

SEQ ID NO: 4662146 - DNA, 25 bp, Homo sapien
tgagaacacggttagagaaagcccc

SEQ ID NO: 4662147 - DNA, 25 bp, Homo sapien
cattaattgttccttcctaggagga

SEQ ID NO: 4662148 - DNA, 25 bp, Homo sapien
cccaagtgtgccagtgtttcattaa

SEQ ID NO: 4662149 - DNA, 25 bp, Homo sapien
caacattacagaccggtggatcctg

SEQ ID NO: 4662150 - DNA, 25 bp, Homo sapien
tttagttctaatactgaggttggga

SEQ ID NO: 4662151 - DNA, 25 bp, Homo sapien
ctcaattttgtcaccattcttaact

SEQ ID NO: 4662152 - DNA, 25 bp, Homo sapien
accacgcccaggtgagtcacagagt

SEQ ID NO: 4662153 - DNA, 25 bp, Homo sapien
cacagagtatacttaatttttagtt

SEQ ID NO: 4662154 - DNA, 25 bp, Homo sapien
gacagctctccagtggattcgatgg

SEQ ID NO: 4662155 - DNA, 25 bp, Homo sapien
agtggattcgatgggccatagcaat

SEQ ID NO: 4662156 - DNA, 25 bp, Homo sapien
tgcatggacagctctccagtggatt

SEQ ID NO: 4662157 - DNA, 25 bp, Homo sapien
tgggccatagcaatcctgtgattta

SEQ ID NO: 4662158 - DNA, 25 bp, Homo sapien
gcacatcatcttcggttctgacagt

SEQ ID NO: 4662159 - DNA, 25 bp, Homo sapien
tcatccagaggataagccaacgcac

SEQ ID NO: 4662160 - DNA, 25 bp, Homo sapien
tgagagccccaatgagacccagggc

SEQ ID NO: 4662161 - DNA, 25 bp, Homo sapien
gaggagacatcgactcaggagcaga

SEQ ID NO: 4662162 - DNA, 25 bp, Homo sapien
gagggaatgaccctatgagtaagaa

SEQ ID NO: 4662163 - DNA, 25 bp, Homo sapien
gaattagaaggagggaatgacccta

SEQ ID NO: 4662164 - DNA, 25 bp, Homo sapien
atgaccctatgagtaagaaacggcg

SEQ ID NO: 4662165 - DNA, 25 bp, Homo sapien
ctatgagtaagaaacggcgaggaga

SEQ ID NO: 4662166 - DNA, 25 bp, Homo sapien
cctggctgtctaagcagtggctata

SEQ ID NO: 4662167 - DNA, 25 bp, Homo sapien
taggctcttttgcagtcgttgaggg

SEQ ID NO: 4662168 - DNA, 25 bp, Homo sapien
gagagcgcgttctttgctactccaa

SEQ ID NO: 4662169 - DNA, 25 bp, Homo sapien
ccaggaattggtacacacagcgata

SEQ ID NO: 4662170 - DNA, 25 bp, Homo sapien
cgctcccggcgcggaccatcccaga

SEQ ID NO: 4662171 - DNA, 25 bp, Homo sapien
gctcccggcgcggaccatcccagag

SEQ ID NO: 4662172 - DNA, 25 bp, Homo sapien
gcgctcccggcgcggaccatcccag

SEQ ID NO: 4662173 - DNA, 25 bp, Homo sapien
agcgcagctgtcactccgacctgcg

SEQ ID NO: 4662174 - DNA, 25 bp, Homo sapien
ccgacctgcgcgcttcacccgcgct

SEQ ID NO: 4662175 - DNA, 25 bp, Homo sapien
agctgtcactccgacctgcgcgctt

SEQ ID NO: 4662176 - DNA, 25 bp, Homo sapien
cggcagcgcagctgtcactccgacc

SEQ ID NO: 4662177 - DNA, 25 bp, Homo sapien
caaggcgcgcacctctgccagctct

SEQ ID NO: 4662178 - DNA, 25 bp, Homo sapien
tcagcttgcaaggcgcgcacctctg

SEQ ID NO: 4662179 - DNA, 25 bp, Homo sapien
ttcccagggcgccggtgggtcctca

SEQ ID NO: 4662180 - DNA, 25 bp, Homo sapien
tgggtcctcacacgctcgccgcagg

SEQ ID NO: 4662181 - DNA, 25 bp, Homo sapien
tggccagcgggccctgggggacttg

SEQ ID NO: 4662182 - DNA, 25 bp, Homo sapien
cgggaaccctggccagcgggccctg

SEQ ID NO: 4662183 - DNA, 25 bp, Homo sapien
gcctggcccgggaaccctggccagc

SEQ ID NO: 4662184 - DNA, 25 bp, Homo sapien
ctggccagcgggccctgggggactt

SEQ ID NO: 4662185 - DNA, 25 bp, Homo sapien
gccagtaagcgtacttagaaatgaa

SEQ ID NO: 4662186 - DNA, 25 bp, Homo sapien
tggagtgatttcttatattgatgcc

SEQ ID NO: 4662187 - DNA, 25 bp, Homo sapien
ttccaaattgaattggtgtatggct

SEQ ID NO: 4662188 - DNA, 25 bp, Homo sapien
aagttctgattctaaatgtccaagc

SEQ ID NO: 4662189 - DNA, 25 bp, Homo sapien
tcctgataatctgtgtctctgtaga

SEQ ID NO: 4662190 - DNA, 25 bp, Homo sapien
catgtggcaatttcctgataatctg

SEQ ID NO: 4662191 - DNA, 25 bp, Homo sapien
ttcctgataatctgtgtctctgtag

SEQ ID NO: 4662192 - DNA, 25 bp, Homo sapien
ccatgtggcaatttcctgataatct

SEQ ID NO: 4662193 - DNA, 25 bp, Homo sapien
tccttggtgaccttgtacatcccca

SEQ ID NO: 4662194 - DNA, 25 bp, Homo sapien
gatatctccttggtgaccttgtaca

SEQ ID NO: 4662195 - DNA, 25 bp, Homo sapien
tggtgaccttgtacatccccaaggc

SEQ ID NO: 4662196 - DNA, 25 bp, Homo sapien
gtgatatctccttggtgaccttgta

SEQ ID NO: 4662197 - DNA, 25 bp, Homo sapien
acttggatttgtggacaagcctctc

SEQ ID NO: 4662198 - DNA, 25 bp, Homo sapien
gacaagcctctcaaggacaagacta

SEQ ID NO: 4662199 - DNA, 25 bp, Homo sapien
aagactaattctgcccacaacggag

SEQ ID NO: 4662200 - DNA, 25 bp, Homo sapien
tctctccgcataacctatgaggcaa

SEQ ID NO: 4662201 - DNA, 25 bp, Homo sapien
tatgttgaggtcagtaacagcagaa

SEQ ID NO: 4662202 - DNA, 25 bp, Homo sapien
ctgtgggctccattattatgttgag

SEQ ID NO: 4662203 - DNA, 25 bp, Homo sapien
caaattcacttaattctgagcattc

SEQ ID NO: 4662204 - DNA, 25 bp, Homo sapien
tctgagcattctgtgggctccatta

SEQ ID NO: 4662205 - DNA, 25 bp, Homo sapien
gcagatttgagtgggcataagaatc

SEQ ID NO: 4662206 - DNA, 25 bp, Homo sapien
agcagatttgagtgggcataagaat

SEQ ID NO: 4662207 - DNA, 25 bp, Homo sapien
cagatttgagtgggcataagaatca

SEQ ID NO: 4662208 - DNA, 25 bp, Homo sapien
aaaaatgcaggcttcggaaaaacat

SEQ ID NO: 4662209 - DNA, 25 bp, Homo sapien
gcttacgatattcaaaccactccac

SEQ ID NO: 4662210 - DNA, 25 bp, Homo sapien
gatgtttaaacgtgcgcttacgata

SEQ ID NO: 4662211 - DNA, 25 bp, Homo sapien
aaaacatgaacagatcttttctctc

SEQ ID NO: 4662212 - DNA, 25 bp, Homo sapien
gaaaaggatgttagggatgaattct

SEQ ID NO: 4662213 - DNA, 25 bp, Homo sapien
tttagaaacatgagtccggactgtg

SEQ ID NO: 4662214 - DNA, 25 bp, Homo sapien
tttcagttatctccccatttgtcaa

SEQ ID NO: 4662215 - DNA, 25 bp, Homo sapien
tattagactacacattacattgaag

SEQ ID NO: 4662216 - DNA, 25 bp, Homo sapien
ttgataactaatgatcacagctatt

SEQ ID NO: 4662217 - DNA, 25 bp, Homo sapien
caaaagcatttaaggtacatgttcc

SEQ ID NO: 4662218 - DNA, 25 bp, Homo sapien
taaactcaagcaggccaaaaccaat

SEQ ID NO: 4662219 - DNA, 25 bp, Homo sapien
tggcctttactggatcccaaaagca

SEQ ID NO: 4662220 - DNA, 25 bp, Homo sapien
gtctttcaaatacgagataactgca

SEQ ID NO: 4662221 - DNA, 25 bp, Homo sapien
caagtagaccagcacagtacgtgtg

SEQ ID NO: 4662222 - DNA, 25 bp, Homo sapien
cattgaagagatacgcctggagggc

SEQ ID NO: 4662223 - DNA, 25 bp, Homo sapien
ggagggcaatccaatcgtcctggga

SEQ ID NO: 4662224 - DNA, 25 bp, Homo sapien
cataatgccctggaatccgtgcctc

SEQ ID NO: 4662225 - DNA, 25 bp, Homo sapien
cacacctggttacttgttttattgt

SEQ ID NO: 4662226 - DNA, 25 bp, Homo sapien
aagggattcttgtccctcagtctcg

SEQ ID NO: 4662227 - DNA, 25 bp, Homo sapien
ttcttgtccctcagtctcgcaagta

SEQ ID NO: 4662228 - DNA, 25 bp, Homo sapien
gtccctcagtctcgcaagtagctga

SEQ ID NO: 4662229 - DNA, 25 bp, Homo sapien
ttttaaatactgatactaggtccta

SEQ ID NO: 4662230 - DNA, 25 bp, Homo sapien
ttcccaggggttgtaattcagatct

SEQ ID NO: 4662231 - DNA, 25 bp, Homo sapien
tactgatactaggtcctacttccca

SEQ ID NO: 4662232 - DNA, 25 bp, Homo sapien
caaacaaactccttggatgattcta

SEQ ID NO: 4662233 - DNA, 25 bp, Homo sapien
agaagagagtgccaactaacaaatg

SEQ ID NO: 4662234 - DNA, 25 bp, Homo sapien
gaagagagtgccaactaacaaatgt

SEQ ID NO: 4662235 - DNA, 25 bp, Homo sapien
aacaaatttagcaattcaaaacaag

SEQ ID NO: 4662236 - DNA, 25 bp, Homo sapien
tctgatataagagctatgtgggtat

SEQ ID NO: 4662237 - DNA, 25 bp, Homo sapien
tgagcctagcaagtggacattgcag

SEQ ID NO: 4662238 - DNA, 25 bp, Homo sapien
tgacatgacacttttaagctaggtg

SEQ ID NO: 4662239 - DNA, 25 bp, Homo sapien
tagagagaacaagctcctgactggg

SEQ ID NO: 4662240 - DNA, 25 bp, Homo sapien
taaaatgctaaagcggcagtgacta

SEQ ID NO: 4662241 - DNA, 25 bp, Homo sapien
taatgtgtggcaggaactgactggc

SEQ ID NO: 4662242 - DNA, 25 bp, Homo sapien
cctggaggagtagttgaaggctccc

SEQ ID NO: 4662243 - DNA, 25 bp, Homo sapien
tatggatgggctagtaaacttgacc

SEQ ID NO: 4662244 - DNA, 25 bp, Homo sapien
gagccagatgatgattaccaaacag

SEQ ID NO: 4662245 - DNA, 25 bp, Homo sapien
gatgaagactatgaccaagagccag

SEQ ID NO: 4662246 - DNA, 25 bp, Homo sapien
tagaatcaatgcctcctggtttgcc

SEQ ID NO: 4662247 - DNA, 25 bp, Homo sapien
actgctcatgtgtctatccttttgc

SEQ ID NO: 4662248 - DNA, 25 bp, Homo sapien
aactttctctattccactgctcatg

SEQ ID NO: 4662249 - DNA, 25 bp, Homo sapien
aaagatgattccttctccactgact

SEQ ID NO: 4662250 - DNA, 25 bp, Homo sapien
tgtaagcttatatctgaactttctc

SEQ ID NO: 4662251 - DNA, 25 bp, Homo sapien
ggtgctgagacaattggatattcac

SEQ ID NO: 4662252 - DNA, 25 bp, Homo sapien
gaggatgtatactctccaatggcag

SEQ ID NO: 4662253 - DNA, 25 bp, Homo sapien
taataaggagggcatgacactggta

SEQ ID NO: 4662254 - DNA, 25 bp, Homo sapien
ttaataatggtagatgtagacacac

SEQ ID NO: 4662255 - DNA, 25 bp, Homo sapien
tacaggtacgcgctatcatgccagg

SEQ ID NO: 4662256 - DNA, 25 bp, Homo sapien
gagtcagtatccacataaggcccac

SEQ ID NO: 4662257 - DNA, 25 bp, Homo sapien
aaccaagttgtttgtctcacaggca

SEQ ID NO: 4662258 - DNA, 25 bp, Homo sapien
ttcggccttagaaagaatacctctc

SEQ ID NO: 4662259 - DNA, 25 bp, Homo sapien
cactgggacaactcaggctaaggca

SEQ ID NO: 4662260 - DNA, 25 bp, Homo sapien
gccattccttggctttacagtcaag

SEQ ID NO: 4662261 - DNA, 25 bp, Homo sapien
cacaatcatttgtataaagtcctgg

SEQ ID NO: 4662262 - DNA, 25 bp, Homo sapien
ccaaggagaatttatgacagaagcg

SEQ ID NO: 4662263 - DNA, 25 bp, Homo sapien
tattcacaccttaggaacacaatgt

SEQ ID NO: 4662264 - DNA, 25 bp, Homo sapien
tccccaaagctaacatgctgccttt

SEQ ID NO: 4662265 - DNA, 25 bp, Homo sapien
tctccagaggattttagatagcttg

SEQ ID NO: 4662266 - DNA, 25 bp, Homo sapien
gcttggttgcaaggactgtgtgtta

SEQ ID NO: 4662267 - DNA, 25 bp, Homo sapien
gaaaccgaaagctctatataaatgc

SEQ ID NO: 4662268 - DNA, 25 bp, Homo sapien
tgtaactcgcattttaatgatccgc

SEQ ID NO: 4662269 - DNA, 25 bp, Homo sapien
cttgcttggaagagcctggacacta

SEQ ID NO: 4662270 - DNA, 25 bp, Homo sapien
tatggactggataactctgagaaac

SEQ ID NO: 4662271 - DNA, 25 bp, Homo sapien
catttggttcaaagattctatggga

SEQ ID NO: 4662272 - DNA, 25 bp, Homo sapien
tggatatattatctgttaaataggt

SEQ ID NO: 4662273 - DNA, 25 bp, Homo sapien
ttttccggtccagactgggaatcta

SEQ ID NO: 4662274 - DNA, 25 bp, Homo sapien
cttaaactaaaacattcaggctggg

SEQ ID NO: 4662275 - DNA, 25 bp, Homo sapien
tacaagcacaagtcttgaggcactg

SEQ ID NO: 4662276 - DNA, 25 bp, Homo sapien
tactggtacctgtgaactgataggc

SEQ ID NO: 4662277 - DNA, 25 bp, Homo sapien
tgccaagcgggcctttaaacatggg

SEQ ID NO: 4662278 - DNA, 25 bp, Homo sapien
gcttgattgctagacatgtggagaa

SEQ ID NO: 4662279 - DNA, 25 bp, Homo sapien
gggagcagtttattccagtatcacc

SEQ ID NO: 4662280 - DNA, 25 bp, Homo sapien
taacatggactaatctgtgggagca

SEQ ID NO: 4662281 - DNA, 25 bp, Homo sapien
tggaaaacacatgagcagtaacaag

SEQ ID NO: 4662282 - DNA, 25 bp, Homo sapien
gaagtcttggctacgatacaaacag

SEQ ID NO: 4662283 - DNA, 25 bp, Homo sapien
gatccagaccggtgcctgtggagca

SEQ ID NO: 4662284 - DNA, 25 bp, Homo sapien
aaaaatgggtgacaatgcgacgagc

SEQ ID NO: 4662285 - DNA, 25 bp, Homo sapien
tcaaacagacaagtaagcaggcaag

SEQ ID NO: 4662286 - DNA, 25 bp, Homo sapien
tcaacggcctggattaacagcagat

SEQ ID NO: 4662287 - DNA, 25 bp, Homo sapien
cggtccaggctcactattagaatat

SEQ ID NO: 4662288 - DNA, 25 bp, Homo sapien
cagaggtggcgcaccattttgcatt

SEQ ID NO: 4662289 - DNA, 25 bp, Homo sapien
agtggtatgccagtaaagtttcaat

SEQ ID NO: 4662290 - DNA, 25 bp, Homo sapien
tcagtggtatttgatcggtccaggc

SEQ ID NO: 4662291 - DNA, 25 bp, Homo sapien
tactcactcccctgatcctagagag

SEQ ID NO: 4662292 - DNA, 25 bp, Homo sapien
caatctattcatgagtgacttgccc

SEQ ID NO: 4662293 - DNA, 25 bp, Homo sapien
cctgatcctagagaggatatcaatc

SEQ ID NO: 4662294 - DNA, 25 bp, Homo sapien
accaaaccttatggggtatgtgtat

SEQ ID NO: 4662295 - DNA, 25 bp, Homo sapien
tccactaagtgaaactgttactccc

SEQ ID NO: 4662296 - DNA, 25 bp, Homo sapien
gacagtcaactggatgccatattgg

SEQ ID NO: 4662297 - DNA, 25 bp, Homo sapien
cctgtttcttatctggagtctggca

SEQ ID NO: 4662298 - DNA, 25 bp, Homo sapien
tacaggctaggtttgaccaatgaac

SEQ ID NO: 4662299 - DNA, 25 bp, Homo sapien
cacggaagcatgctgtctggtttca

SEQ ID NO: 4662300 - DNA, 25 bp, Homo sapien
tctcattgagaagcaccacggaagc

SEQ ID NO: 4662301 - DNA, 25 bp, Homo sapien
catatcaagggtgggctgtgagctc

SEQ ID NO: 4662302 - DNA, 25 bp, Homo sapien
gctagctcagctctctggtcacatg

SEQ ID NO: 4662303 - DNA, 25 bp, Homo sapien
tactaagtatttccaagttgtccga

SEQ ID NO: 4662304 - DNA, 25 bp, Homo sapien
tgcacattttcgtcccaccaaaagg

SEQ ID NO: 4662305 - DNA, 25 bp, Homo sapien
taaagggtggtatgcataaaagtac

SEQ ID NO: 4662306 - DNA, 25 bp, Homo sapien
gattgtatcaccacacataacacaa

SEQ ID NO: 4662307 - DNA, 25 bp, Homo sapien
taacaatagatcatctagaatacag

SEQ ID NO: 4662308 - DNA, 25 bp, Homo sapien
tagttgtaatcctaacatagataat

SEQ ID NO: 4662309 - DNA, 25 bp, Homo sapien
caaaaattacttatcctaccactat

SEQ ID NO: 4662310 - DNA, 25 bp, Homo sapien
tctgtgaacatatggctattacata

SEQ ID NO: 4662311 - DNA, 25 bp, Homo sapien
cttgagctcaggagtttgagacctg

SEQ ID NO: 4662312 - DNA, 25 bp, Homo sapien
ggctcatgcctgtaatcctagcact

SEQ ID NO: 4662313 - DNA, 25 bp, Homo sapien
aaacatatctaaagccaggtgtggg

SEQ ID NO: 4662314 - DNA, 25 bp, Homo sapien
ttgtgaggctgaggtgggtgaatca

SEQ ID NO: 4662315 - DNA, 25 bp, Homo sapien
gaggtttagcctctgtccttagatt

SEQ ID NO: 4662316 - DNA, 25 bp, Homo sapien
ggtttagcctctgtccttagattta

SEQ ID NO: 4662317 - DNA, 25 bp, Homo sapien
aagaggtttagcctctgtccttaga

SEQ ID NO: 4662318 - DNA, 25 bp, Homo sapien
aaagaggtttagcctctgtccttag

SEQ ID NO: 4662319 - DNA, 25 bp, Homo sapien
tgcaattcaacatgaaagtcacctc

SEQ ID NO: 4662320 - DNA, 25 bp, Homo sapien
caattcaacatgaaagtcacctccg

SEQ ID NO: 4662321 - DNA, 25 bp, Homo sapien
ttcaacatgaaagtcacctccgggc

SEQ ID NO: 4662322 - DNA, 25 bp, Homo sapien
attcaacatgaaagtcacctccggg

SEQ ID NO: 4662323 - DNA, 25 bp, Homo sapien
gataaatgggactcaaacccataaa

SEQ ID NO: 4662324 - DNA, 25 bp, Homo sapien
tagataaatgggactcaaacccata

SEQ ID NO: 4662325 - DNA, 25 bp, Homo sapien
ctagataaatgggactcaaacccat

SEQ ID NO: 4662326 - DNA, 25 bp, Homo sapien
agataaatgggactcaaacccataa

SEQ ID NO: 4662327 - DNA, 25 bp, Homo sapien
aatcaatcactttaattaagctgag

SEQ ID NO: 4662328 - DNA, 25 bp, Homo sapien
aaaactctactctgcatcaactgaa

SEQ ID NO: 4662329 - DNA, 25 bp, Homo sapien
gcaaaactctactctgcatcaactg

SEQ ID NO: 4662330 - DNA, 25 bp, Homo sapien
aactctactctgcatcaactgaacg

SEQ ID NO: 4662331 - DNA, 25 bp, Homo sapien
gctccatgatattggtgtaggcaat

SEQ ID NO: 4662332 - DNA, 25 bp, Homo sapien
tacacagtaaacgaaacaacagagt

SEQ ID NO: 4662333 - DNA, 25 bp, Homo sapien
ataaggaacttgatagcaagaaaac

SEQ ID NO: 4662334 - DNA, 25 bp, Homo sapien
acaacagagttaagggacaacatac

SEQ ID NO: 4662335 - DNA, 25 bp, Homo sapien
tgagccacgaggctggcaccaatgc

SEQ ID NO: 4662336 - DNA, 25 bp, Homo sapien
cgaggctggcaccaatgccatcttg

SEQ ID NO: 4662337 - DNA, 25 bp, Homo sapien
caatgccatcttgatcaaagaaaac

SEQ ID NO: 4662338 - DNA, 25 bp, Homo sapien
gtgtgagccacgaggctggcaccaa

SEQ ID NO: 4662339 - DNA, 25 bp, Homo sapien
agtgaaagaccccacaaagcagaac

SEQ ID NO: 4662340 - DNA, 25 bp, Homo sapien
gagctttcatgatgccacagcagtg

SEQ ID NO: 4662341 - DNA, 25 bp, Homo sapien
cagcaagagagctttcatgatgcca

SEQ ID NO: 4662342 - DNA, 25 bp, Homo sapien
gaaagaccccacaaagcagaaccat

SEQ ID NO: 4662343 - DNA, 25 bp, Homo sapien
caaacattttcgtagggcagattcc

SEQ ID NO: 4662344 - DNA, 25 bp, Homo sapien
tatacactacaaatgaatacccatg

SEQ ID NO: 4662345 - DNA, 25 bp, Homo sapien
cactggacacccctactgtagaagc

SEQ ID NO: 4662346 - DNA, 25 bp, Homo sapien
tgcaagagttgaatagactccagag

SEQ ID NO: 4662347 - DNA, 25 bp, Homo sapien
aatacattcccttgcgtactagggc

SEQ ID NO: 4662348 - DNA, 25 bp, Homo sapien
tcccaggccctagggagtcgttcta

SEQ ID NO: 4662349 - DNA, 25 bp, Homo sapien
gaaaggacaccgttattgaacacag

SEQ ID NO: 4662350 - DNA, 25 bp, Homo sapien
gaatcttaacaatacaacagtcccc

SEQ ID NO: 4662351 - DNA, 25 bp, Homo sapien
ggttccccgtgatcccactgataag

SEQ ID NO: 4662352 - DNA, 25 bp, Homo sapien
cccagagccagaagtggaagcagca

SEQ ID NO: 4662353 - DNA, 25 bp, Homo sapien
aaaaacaaggctcagacacgccgtg

SEQ ID NO: 4662354 - DNA, 25 bp, Homo sapien
cagaggtgggctgaccctaaaacta

SEQ ID NO: 4662355 - DNA, 25 bp, Homo sapien
catgaagtcaacacatgttcttaga

SEQ ID NO: 4662356 - DNA, 25 bp, Homo sapien
tagaaaaacagcaacatggctgggc

SEQ ID NO: 4662357 - DNA, 25 bp, Homo sapien
atgagagagtgagatcttatctcca

SEQ ID NO: 4662358 - DNA, 25 bp, Homo sapien
aacaaataaaccatgaagtcaacac

SEQ ID NO: 4662359 - DNA, 25 bp, Homo sapien
catacttgatgaatagtttgggtat

SEQ ID NO: 4662360 - DNA, 25 bp, Homo sapien
cagtcttacgttaaatgctttcagt

SEQ ID NO: 4662361 - DNA, 25 bp, Homo sapien
caaacttgtacttcacagtcttacg

SEQ ID NO: 4662362 - DNA, 25 bp, Homo sapien
gcttggccctacctatttatctgtg

SEQ ID NO: 4662363 - DNA, 25 bp, Homo sapien
aatgcaagcatgaataatgggcctg

SEQ ID NO: 4662364 - DNA, 25 bp, Homo sapien
gagttgaaagagacccactctactg

SEQ ID NO: 4662365 - DNA, 25 bp, Homo sapien
actggaaatatatcccaatggcatt

SEQ ID NO: 4662366 - DNA, 25 bp, Homo sapien
cttgtttgtacagacttgggaagaa

SEQ ID NO: 4662367 - DNA, 25 bp, Homo sapien
ctttgcagaacagaccagctgggag

SEQ ID NO: 4662368 - DNA, 25 bp, Homo sapien
tcatctccagacctttgcagaacag

SEQ ID NO: 4662369 - DNA, 25 bp, Homo sapien
ctcatctccagacctttgcagaaca

SEQ ID NO: 4662370 - DNA, 25 bp, Homo sapien
cctttgcagaacagaccagctggga

SEQ ID NO: 4662371 - DNA, 25 bp, Homo sapien
tagacaatcaaaccattaccgagtg

SEQ ID NO: 4662372 - DNA, 25 bp, Homo sapien
tgctctccacgcacaagacttctga

SEQ ID NO: 4662373 - DNA, 25 bp, Homo sapien
ttagaaatgcctacagcaggagcac

SEQ ID NO: 4662374 - DNA, 25 bp, Homo sapien
taggttcttcacacattaccatgcg

SEQ ID NO: 4662375 - DNA, 25 bp, Homo sapien
tcacagatttctaggcttgcggttc

SEQ ID NO: 4662376 - DNA, 25 bp, Homo sapien
aatcagggtccgagtgtttgcgcag

SEQ ID NO: 4662377 - DNA, 25 bp, Homo sapien
caggtgtctggcgaaaatcagggtc

SEQ ID NO: 4662378 - DNA, 25 bp, Homo sapien
ggtcagaggattccccaagcggatg

SEQ ID NO: 4662379 - DNA, 25 bp, Homo sapien
agaaacgggtagacagatccactgg

SEQ ID NO: 4662380 - DNA, 25 bp, Homo sapien
gaagaaacgggtagacagatccact

SEQ ID NO: 4662381 - DNA, 25 bp, Homo sapien
gagaagaaacgggtagacagatcca

SEQ ID NO: 4662382 - DNA, 25 bp, Homo sapien
aacgggtagacagatccactggtgg

SEQ ID NO: 4662383 - DNA, 25 bp, Homo sapien
tggcgctgcggatccccatggagca

SEQ ID NO: 4662384 - DNA, 25 bp, Homo sapien
ggcccctccgagaggtacacggcat

SEQ ID NO: 4662385 - DNA, 25 bp, Homo sapien
ctggcgctgcggatccccatggagc

SEQ ID NO: 4662386 - DNA, 25 bp, Homo sapien
gaggtacacggcatctgggtacttt

SEQ ID NO: 4662387 - DNA, 25 bp, Homo sapien
cagtaaaacatgtcgttatgtgctt

SEQ ID NO: 4662388 - DNA, 25 bp, Homo sapien
aaaaagcagtaaaacatgtcgttat

SEQ ID NO: 4662389 - DNA, 25 bp, Homo sapien
aaaacatgtcgttatgtgctttttg

SEQ ID NO: 4662390 - DNA, 25 bp, Homo sapien
agcagtaaaacatgtcgttatgtgc

SEQ ID NO: 4662391 - DNA, 25 bp, Homo sapien
gtgggactttggtgagaagatccag

SEQ ID NO: 4662392 - DNA, 25 bp, Homo sapien
tgtatcctccaaacaatgactaatt

SEQ ID NO: 4662393 - DNA, 25 bp, Homo sapien
tgtgggactttggtgagaagatcca

SEQ ID NO: 4662394 - DNA, 25 bp, Homo sapien
ttgtatcctccaaacaatgactaat

SEQ ID NO: 4662395 - DNA, 25 bp, Homo sapien
cgggtaagaaacttcaaggtggcag

SEQ ID NO: 4662396 - DNA, 25 bp, Homo sapien
gaaacttcaaggtggcagcttttgg

SEQ ID NO: 4662397 - DNA, 25 bp, Homo sapien
taagaaacttcaaggtggcagcttt

SEQ ID NO: 4662398 - DNA, 25 bp, Homo sapien
ggtaagaaacttcaaggtggcagct

SEQ ID NO: 4662399 - DNA, 25 bp, Homo sapien
agaggagcagtttctatggctctgt

SEQ ID NO: 4662400 - DNA, 25 bp, Homo sapien
gaggagcagtttctatggctctgtt

SEQ ID NO: 4662401 - DNA, 25 bp, Homo sapien
cagcttcgattccaagcagtcctac

SEQ ID NO: 4662402 - DNA, 25 bp, Homo sapien
tcctctgcacaaagcgattttatca

SEQ ID NO: 4662403 - DNA, 25 bp, Homo sapien
tgcacaaagcgattttatcaggctt

SEQ ID NO: 4662404 - DNA, 25 bp, Homo sapien
agagcagcttcgattccaagcagtc

SEQ ID NO: 4662405 - DNA, 25 bp, Homo sapien
gctcccctgggctactaaggacagt

SEQ ID NO: 4662406 - DNA, 25 bp, Homo sapien
gtttaaagatgaggcgccataggca

SEQ ID NO: 4662407 - DNA, 25 bp, Homo sapien
gggacgatcgatatagcacttaggc

SEQ ID NO: 4662408 - DNA, 25 bp, Homo sapien
tagacagcacgtcttcagggtgtgg

SEQ ID NO: 4662409 - DNA, 25 bp, Homo sapien
taaatgggcgactgatgaggtcacg

SEQ ID NO: 4662410 - DNA, 25 bp, Homo sapien
ggtttgagacaacacgcgttcacag

SEQ ID NO: 4662411 - DNA, 25 bp, Homo sapien
catgacggccctgactggtttgaga

SEQ ID NO: 4662412 - DNA, 25 bp, Homo sapien
tctggcccgtcttggaaactgctgc

SEQ ID NO: 4662413 - DNA, 25 bp, Homo sapien
gattttgcccattgtcacggtgtgt

SEQ ID NO: 4662414 - DNA, 25 bp, Homo sapien
tgagtactgtcttgacccaagggag

SEQ ID NO: 4662415 - DNA, 25 bp, Homo sapien
gactagacacgatgaaaacagcctg

SEQ ID NO: 4662416 - DNA, 25 bp, Homo sapien
caagtgcacatgtgagggaacccca

SEQ ID NO: 4662417 - DNA, 25 bp, Homo sapien
acggagctcacggacaagccgcagg

SEQ ID NO: 4662418 - DNA, 25 bp, Homo sapien
tgacaccgtctcatacacacgggtc

SEQ ID NO: 4662419 - DNA, 25 bp, Homo sapien
tttggtgaagtgcacggagctcacg

SEQ ID NO: 4662420 - DNA, 25 bp, Homo sapien
tcacttccaatgacaccgtctcata

SEQ ID NO: 4662421 - DNA, 25 bp, Homo sapien
tattctatgctaggttgtacagact

SEQ ID NO: 4662422 - DNA, 25 bp, Homo sapien
tcgttttgagggactaatggaggct

SEQ ID NO: 4662423 - DNA, 25 bp, Homo sapien
aaagatacttatctaactggacact

SEQ ID NO: 4662424 - DNA, 25 bp, Homo sapien
tgtttgaatcaaggcaactcttcta

SEQ ID NO: 4662425 - DNA, 25 bp, Homo sapien
tcgggtttgccttgagacgtgttgc

SEQ ID NO: 4662426 - DNA, 25 bp, Homo sapien
tggacaccactcatgcgagcattga

SEQ ID NO: 4662427 - DNA, 25 bp, Homo sapien
tcgtggtcgcgcagatgccgattct

SEQ ID NO: 4662428 - DNA, 25 bp, Homo sapien
tggaagtgtccgttaagccctggga

SEQ ID NO: 4662429 - DNA, 25 bp, Homo sapien
gattgcacattagttctccacaagg

SEQ ID NO: 4662430 - DNA, 25 bp, Homo sapien
tgtcgtcccttcatcgaggtccagg

SEQ ID NO: 4662431 - DNA, 25 bp, Homo sapien
gatgtcgactcggttcaaggaaagc

SEQ ID NO: 4662432 - DNA, 25 bp, Homo sapien
tgtacgtgccaaagacaacgccgtg

SEQ ID NO: 4662433 - DNA, 25 bp, Homo sapien
catgagtcatcttggcgtcttgaga

SEQ ID NO: 4662434 - DNA, 25 bp, Homo sapien
tagggtgtaggcactggaaccatcc

SEQ ID NO: 4662435 - DNA, 25 bp, Homo sapien
tgctcagcagaaacgacactaggag

SEQ ID NO: 4662436 - DNA, 25 bp, Homo sapien
gaaggcttctcctccgagaacatgg

SEQ ID NO: 4662437 - DNA, 25 bp, Homo sapien
tactctgagtgtggccaacatgcgg

SEQ ID NO: 4662438 - DNA, 25 bp, Homo sapien
aatgtcagagccagcgtaccgggtt

SEQ ID NO: 4662439 - DNA, 25 bp, Homo sapien
tccatggcggagtgacataacttcc

SEQ ID NO: 4662440 - DNA, 25 bp, Homo sapien
tatggacagacccacatagcttgga

SEQ ID NO: 4662441 - DNA, 25 bp, Homo sapien
gagaactgaggatgtctggtaaagc

SEQ ID NO: 4662442 - DNA, 25 bp, Homo sapien
gagaggcccataggctttactaggc

SEQ ID NO: 4662443 - DNA, 25 bp, Homo sapien
aataagcagtgaggaaacctgttct

SEQ ID NO: 4662444 - DNA, 25 bp, Homo sapien
acatgtgcatgcaccgctgcctgga

SEQ ID NO: 4662445 - DNA, 25 bp, Homo sapien
agcaaaatgccatggaccacccgtg

SEQ ID NO: 4662446 - DNA, 25 bp, Homo sapien
tgtggtagtctatgtggcgctcagc

SEQ ID NO: 4662447 - DNA, 25 bp, Homo sapien
cacccgtgaaaaagcattgccctct

SEQ ID NO: 4662448 - DNA, 25 bp, Homo sapien
caagctttgcgttgccgagttccat

SEQ ID NO: 4662449 - DNA, 25 bp, Homo sapien
cagtatcccctctctactgggtcag

SEQ ID NO: 4662450 - DNA, 25 bp, Homo sapien
agatccttctcctggccggtctgtc

SEQ ID NO: 4662451 - DNA, 25 bp, Homo sapien
tcctcaacagggtcggttccacgtc

SEQ ID NO: 4662452 - DNA, 25 bp, Homo sapien
gccggtctgtcgtcccctcagtatt

SEQ ID NO: 4662453 - DNA, 25 bp, Homo sapien
cggtagctctacgaggcggtgccat

SEQ ID NO: 4662454 - DNA, 25 bp, Homo sapien
ttgccgccgcatcagtgaatttagg

SEQ ID NO: 4662455 - DNA, 25 bp, Homo sapien
aactgcgtccctcgaagtcttcagg

SEQ ID NO: 4662456 - DNA, 25 bp, Homo sapien
tcctcgcgtagaacgttggacaatg

SEQ ID NO: 4662457 - DNA, 25 bp, Homo sapien
tgttggcaatctatatgggacctag

SEQ ID NO: 4662458 - DNA, 25 bp, Homo sapien
tgggacctagatagaagagcataac

SEQ ID NO: 4662459 - DNA, 25 bp, Homo sapien
tatagcttaaacgacagacatgtgt

SEQ ID NO: 4662460 - DNA, 25 bp, Homo sapien
cagatgggaaccctctcctctgcat

SEQ ID NO: 4662461 - DNA, 25 bp, Homo sapien
catatcgtggcaacgcatggtatca

SEQ ID NO: 4662462 - DNA, 25 bp, Homo sapien
gagttcctatgtgctcttcaccagc

SEQ ID NO: 4662463 - DNA, 25 bp, Homo sapien
cctggtccgtgtctcagtatgaact

SEQ ID NO: 4662464 - DNA, 25 bp, Homo sapien
tagggttccctgatctgtgacactt

SEQ ID NO: 4662465 - DNA, 25 bp, Homo sapien
tatgatgtgaatgcctacaaagcca

SEQ ID NO: 4662466 - DNA, 25 bp, Homo sapien
tacaaagccagtgcgcataggaaca

SEQ ID NO: 4662467 - DNA, 25 bp, Homo sapien
taccttagtgtcagaatgttggtct

SEQ ID NO: 4662468 - DNA, 25 bp, Homo sapien
gccaaggaacctttacacagaccca

SEQ ID NO: 4662469 - DNA, 25 bp, Homo sapien
tcttattcctagttgtagggactcc

SEQ ID NO: 4662470 - DNA, 25 bp, Homo sapien
ggtcaaattggtactcttggaggaa

SEQ ID NO: 4662471 - DNA, 25 bp, Homo sapien
aactccttagcaaaccaggtctaca

SEQ ID NO: 4662472 - DNA, 25 bp, Homo sapien
gagggttagccatagtattctttgc

SEQ ID NO: 4662473 - DNA, 25 bp, Homo sapien
ctttttgttagtaatcattgccagt

SEQ ID NO: 4662474 - DNA, 25 bp, Homo sapien
taatcattgccagtagtgccttcat

SEQ ID NO: 4662475 - DNA, 25 bp, Homo sapien
ttagtaatcattgccagtagtgcct

SEQ ID NO: 4662476 - DNA, 25 bp, Homo sapien
tgttagtaatcattgccagtagtgc

SEQ ID NO: 4662477 - DNA, 25 bp, Homo sapien
ttgttactctggttgttgtgccaaa

SEQ ID NO: 4662478 - DNA, 25 bp, Homo sapien
caaattgtggtacacttagaaaatt

SEQ ID NO: 4662479 - DNA, 25 bp, Homo sapien
tatacaactgtaccaataaaattcc

SEQ ID NO: 4662480 - DNA, 25 bp, Homo sapien
ttaggacgttgtgaagcatgactga

SEQ ID NO: 4662481 - DNA, 25 bp, Homo sapien
gatgagtgctttgacccagcgagga

SEQ ID NO: 4662482 - DNA, 25 bp, Homo sapien
taatgttgagcatgctgcgagctgc

SEQ ID NO: 4662483 - DNA, 25 bp, Homo sapien
taattcctcgcgtagagacggtctc

SEQ ID NO: 4662484 - DNA, 25 bp, Homo sapien
cgagctgctgcgtggaaaggcctct

SEQ ID NO: 4662485 - DNA, 25 bp, Homo sapien
gaaaaccctagcctgaagtctgagc

SEQ ID NO: 4662486 - DNA, 25 bp, Homo sapien
aaagctttgcatagggccagggcca

SEQ ID NO: 4662487 - DNA, 25 bp, Homo sapien
gaaaggtagctgtagggttctccca

SEQ ID NO: 4662488 - DNA, 25 bp, Homo sapien
cagcccggtgctgggaaagctttgc

SEQ ID NO: 4662489 - DNA, 25 bp, Homo sapien
tgttccttccacctggcgcacttcc

SEQ ID NO: 4662490 - DNA, 25 bp, Homo sapien
tccttccacctggcgcacttcccca

SEQ ID NO: 4662491 - DNA, 25 bp, Homo sapien
gctgttccttccacctggcgcactt

SEQ ID NO: 4662492 - DNA, 25 bp, Homo sapien
cttttgctttgctgttccttccacc

SEQ ID NO: 4662493 - DNA, 25 bp, Homo sapien
tgtgctacacagcacccagactccc

SEQ ID NO: 4662494 - DNA, 25 bp, Homo sapien
aggcctgctggtgccgatgcccatc

SEQ ID NO: 4662495 - DNA, 25 bp, Homo sapien
tgggcatgcactccctgggtcagtt

SEQ ID NO: 4662496 - DNA, 25 bp, Homo sapien
gacagggacactttaggccgagacc

SEQ ID NO: 4662497 - DNA, 25 bp, Homo sapien
gatacatcaggaactgatagggcat

SEQ ID NO: 4662498 - DNA, 25 bp, Homo sapien
agcaaactgaacaggagtgttcaac

SEQ ID NO: 4662499 - DNA, 25 bp, Homo sapien
ctgctgaacattcccgttgagtttg

SEQ ID NO: 4662500 - DNA, 25 bp, Homo sapien
tagagaggacattacaaactcagca

SEQ ID NO: 4662501 - DNA, 25 bp, Homo sapien
tgcatctgtgttgggcgtggagttg

SEQ ID NO: 4662502 - DNA, 25 bp, Homo sapien
ttttgcatctgtgttgggcgtggag

SEQ ID NO: 4662503 - DNA, 25 bp, Homo sapien
tctgtgttgggcgtggagttggtcc

SEQ ID NO: 4662504 - DNA, 25 bp, Homo sapien
tgtgttgggcgtggagttggtccat

SEQ ID NO: 4662505 - DNA, 25 bp, Homo sapien
cactcgtgctttgccaccacaggta

SEQ ID NO: 4662506 - DNA, 25 bp, Homo sapien
aacatgtccgagcaggagggccagt

SEQ ID NO: 4662507 - DNA, 25 bp, Homo sapien
ggagggccagtcctttcactcgtgc

SEQ ID NO: 4662508 - DNA, 25 bp, Homo sapien
tcacatatcaacatgtccgagcagg

SEQ ID NO: 4662509 - DNA, 25 bp, Homo sapien
tgtaagaccacacgcagttgtgcag

SEQ ID NO: 4662510 - DNA, 25 bp, Homo sapien
gatttgcctgtaagaccacacgcag

SEQ ID NO: 4662511 - DNA, 25 bp, Homo sapien
ggtatgatttgcctgtaagaccaca

SEQ ID NO: 4662512 - DNA, 25 bp, Homo sapien
ggctgctgactagttgattgttttg

SEQ ID NO: 4662513 - DNA, 25 bp, Homo sapien
cagcatgcagacctgcttcccagtg

SEQ ID NO: 4662514 - DNA, 25 bp, Homo sapien
gcatgcagacctgcttcccagtgta

SEQ ID NO: 4662515 - DNA, 25 bp, Homo sapien
tgggcaaagtgcttctccacagagc

SEQ ID NO: 4662516 - DNA, 25 bp, Homo sapien
caggggcctgggcaaagtgcttctc

SEQ ID NO: 4662517 - DNA, 25 bp, Homo sapien
attgcgaggagatggcgtaagattc

SEQ ID NO: 4662518 - DNA, 25 bp, Homo sapien
tggcgtaagattctcctgccacttg

SEQ ID NO: 4662519 - DNA, 25 bp, Homo sapien
ggagatggcgtaagattctcctgcc

SEQ ID NO: 4662520 - DNA, 25 bp, Homo sapien
tgtgaaccttactggtgtctctttc

SEQ ID NO: 4662521 - DNA, 25 bp, Homo sapien
ggcggcgcaggccaatcacggacgg

SEQ ID NO: 4662522 - DNA, 25 bp, Homo sapien
gcaggccaatcacggacggggacgg

SEQ ID NO: 4662523 - DNA, 25 bp, Homo sapien
tacatccggctcgacgctggcggcg

SEQ ID NO: 4662524 - DNA, 25 bp, Homo sapien
cggtacatccggctcgacgctggcg

SEQ ID NO: 4662525 - DNA, 25 bp, Homo sapien
gctctgagtgtggggaaggccgcgg

SEQ ID NO: 4662526 - DNA, 25 bp, Homo sapien
gtccccggctctgagtgtggggaag

SEQ ID NO: 4662527 - DNA, 25 bp, Homo sapien
tctgagtgtggggaaggccgcgggg

SEQ ID NO: 4662528 - DNA, 25 bp, Homo sapien
tgagtgtggggaaggccgcggggcc

SEQ ID NO: 4662529 - DNA, 25 bp, Homo sapien
gaagggtacgactggctttcaaaca

SEQ ID NO: 4662530 - DNA, 25 bp, Homo sapien
tcggatgcgcttctagctcgtggcc

SEQ ID NO: 4662531 - DNA, 25 bp, Homo sapien
taagtcaggcctaaaaatagatgcg

SEQ ID NO: 4662532 - DNA, 25 bp, Homo sapien
gaagtgttacctacgccaaggcgaa

SEQ ID NO: 4662533 - DNA, 25 bp, Homo sapien
gccatctgtaatgtgtcagccactt

SEQ ID NO: 4662534 - DNA, 25 bp, Homo sapien
caaagccatctgtaatgtgtcagcc

SEQ ID NO: 4662535 - DNA, 25 bp, Homo sapien
atctgtaatgtgtcagccacttctg

SEQ ID NO: 4662536 - DNA, 25 bp, Homo sapien
aagccatctgtaatgtgtcagccac

SEQ ID NO: 4662537 - DNA, 25 bp, Homo sapien
aacacactgtggcatgttggacagg

SEQ ID NO: 4662538 - DNA, 25 bp, Homo sapien
ggccaccattctatgtcgtccaaga

SEQ ID NO: 4662539 - DNA, 25 bp, Homo sapien
ggtgatgcctactgctttagttcca

SEQ ID NO: 4662540 - DNA, 25 bp, Homo sapien
tttcctggtttgtgtaagagctttc

SEQ ID NO: 4662541 - DNA, 25 bp, Homo sapien
ctgcacaaagcacactgcgtagatc

SEQ ID NO: 4662542 - DNA, 25 bp, Homo sapien
gcacaaagcacactgcgtagatcca

SEQ ID NO: 4662543 - DNA, 25 bp, Homo sapien
cacaaagcacactgcgtagatccat

SEQ ID NO: 4662544 - DNA, 25 bp, Homo sapien
tgcacaaagcacactgcgtagatcc

SEQ ID NO: 4662545 - DNA, 25 bp, Homo sapien
ccatgggtggctattaggtaatgca

SEQ ID NO: 4662546 - DNA, 25 bp, Homo sapien
ccctcctcgtgaagccatgggtggc

SEQ ID NO: 4662547 - DNA, 25 bp, Homo sapien
gtgagcatccctcctcgtgaagcca

SEQ ID NO: 4662548 - DNA, 25 bp, Homo sapien
gaagccatgggtggctattaggtaa

SEQ ID NO: 4662549 - DNA, 25 bp, Homo sapien
gggctttcttccaccaggacctcca

SEQ ID NO: 4662550 - DNA, 25 bp, Homo sapien
ggctttcttccaccaggacctccat

SEQ ID NO: 4662551 - DNA, 25 bp, Homo sapien
tgcctgttaccagcgctgctgggag

SEQ ID NO: 4662552 - DNA, 25 bp, Homo sapien
gctttactcagaagcttggtgcctg

SEQ ID NO: 4662553 - DNA, 25 bp, Homo sapien
tatggcccaaggctttactcagaag

SEQ ID NO: 4662554 - DNA, 25 bp, Homo sapien
gaatgacatgacttatggcccaagg

SEQ ID NO: 4662555 - DNA, 25 bp, Homo sapien
ccggaaccatgagagaagcgcgtca

SEQ ID NO: 4662556 - DNA, 25 bp, Homo sapien
cgggacccacggcttataatgcgct

SEQ ID NO: 4662557 - DNA, 25 bp, Homo sapien
gcctcgcacgagagacagcaagtca

SEQ ID NO: 4662558 - DNA, 25 bp, Homo sapien
taatgcgcttaaatcccacgcctcg

SEQ ID NO: 4662559 - DNA, 25 bp, Homo sapien
gcagcagcgccttgggtgggatgct

SEQ ID NO: 4662560 - DNA, 25 bp, Homo sapien
tgcagcagcgccttgggtgggatgc

SEQ ID NO: 4662561 - DNA, 25 bp, Homo sapien
agtaaggctcacagcgatcggcccc

SEQ ID NO: 4662562 - DNA, 25 bp, Homo sapien
atcggcccccgcaaggactggcatg

SEQ ID NO: 4662563 - DNA, 25 bp, Homo sapien
gcggctggacctgagtaaggctcac

SEQ ID NO: 4662564 - DNA, 25 bp, Homo sapien
agggctcaggatcccgcactctggc

SEQ ID NO: 4662565 - DNA, 25 bp, Homo sapien
ctggcgtcggagaagcagcagacgc

SEQ ID NO: 4662566 - DNA, 25 bp, Homo sapien
tcggagaagcagcagacgcggagct

SEQ ID NO: 4662567 - DNA, 25 bp, Homo sapien
cgtcggagaagcagcagacgcggag

SEQ ID NO: 4662568 - DNA, 25 bp, Homo sapien
gagaagcagcagacgcggagctcct

SEQ ID NO: 4662569 - DNA, 25 bp, Homo sapien
ctgcacctgtcatcctggcggcgcc

SEQ ID NO: 4662570 - DNA, 25 bp, Homo sapien
aggacagcgcgctgggaagccaggg

SEQ ID NO: 4662571 - DNA, 25 bp, Homo sapien
tgctcacaggacagcgcgctgggaa

SEQ ID NO: 4662572 - DNA, 25 bp, Homo sapien
ccacagtctcctgcacctgtcatcc

SEQ ID NO: 4662573 - DNA, 25 bp, Homo sapien
cgaggcttgggagcgccagccagct

SEQ ID NO: 4662574 - DNA, 25 bp, Homo sapien
gccagctcggactccggaaaccgct

SEQ ID NO: 4662575 - DNA, 25 bp, Homo sapien
gtctcggaatcgcagacgtgcatcc

SEQ ID NO: 4662576 - DNA, 25 bp, Homo sapien
ctcgcgcgggacgtctcggaatcgc

SEQ ID NO: 4662577 - DNA, 25 bp, Homo sapien
aatcgcagacgtgcatcccttccgg

SEQ ID NO: 4662578 - DNA, 25 bp, Homo sapien
tcagacagcgtgggccccggctaag

SEQ ID NO: 4662579 - DNA, 25 bp, Homo sapien
gacagcgtgggccccggctaagcct

SEQ ID NO: 4662580 - DNA, 25 bp, Homo sapien
agacagcgtgggccccggctaagcc

SEQ ID NO: 4662581 - DNA, 25 bp, Homo sapien
cagacagcgtgggccccggctaagc

SEQ ID NO: 4662582 - DNA, 25 bp, Homo sapien
taagcgcgtgcctgtagctgaacgc

SEQ ID NO: 4662583 - DNA, 25 bp, Homo sapien
tcagaccgagtgagctccacgaagc

SEQ ID NO: 4662584 - DNA, 25 bp, Homo sapien
tccacgaagccgttaagcgcgtgcc

SEQ ID NO: 4662585 - DNA, 25 bp, Homo sapien
gcctgtagctgaacgctccgatctc

SEQ ID NO: 4662586 - DNA, 25 bp, Homo sapien
ggtggcgacttttcagacgcccacc

SEQ ID NO: 4662587 - DNA, 25 bp, Homo sapien
gtggcgacttttcagacgcccacca

SEQ ID NO: 4662588 - DNA, 25 bp, Homo sapien
acccgctcctgagccgccgcggctc

SEQ ID NO: 4662589 - DNA, 25 bp, Homo sapien
gcccaccacccgctcctgagccgcc

SEQ ID NO: 4662590 - DNA, 25 bp, Homo sapien
cggaacctgcgcgtcaggcagtgct

SEQ ID NO: 4662591 - DNA, 25 bp, Homo sapien
tactcttggtccatggagtccagga

SEQ ID NO: 4662592 - DNA, 25 bp, Homo sapien
tccgcagttcccagtcccggatgtg

SEQ ID NO: 4662593 - DNA, 25 bp, Homo sapien
atgtggtacccccgaccagcgtact

SEQ ID NO: 4662594 - DNA, 25 bp, Homo sapien
caagtgctacagacggggaattgcc

SEQ ID NO: 4662595 - DNA, 25 bp, Homo sapien
ggctccatttggctccgcggctccg

SEQ ID NO: 4662596 - DNA, 25 bp, Homo sapien
gcgatggaaagcagtctgaggctcc

SEQ ID NO: 4662597 - DNA, 25 bp, Homo sapien
tacagacggggaattgccagcgatg

SEQ ID NO: 4662598 - DNA, 25 bp, Homo sapien
tagtctatcatatatgttgatctgg

SEQ ID NO: 4662599 - DNA, 25 bp, Homo sapien
tctatcatatatgttgatctggcat

SEQ ID NO: 4662600 - DNA, 25 bp, Homo sapien
ctgtttagtctatcatatatgttga

SEQ ID NO: 4662601 - DNA, 25 bp, Homo sapien
tgtcctgtttagtctatcatatatg

SEQ ID NO: 4662602 - DNA, 25 bp, Homo sapien
gctgaaaaagttggctactatatac

SEQ ID NO: 4662603 - DNA, 25 bp, Homo sapien
tgaagtccccttattatacacagca

SEQ ID NO: 4662604 - DNA, 25 bp, Homo sapien
cagtgaagtccccttattatacaca

SEQ ID NO: 4662605 - DNA, 25 bp, Homo sapien
gtccccttattatacacagcataat

SEQ ID NO: 4662606 - DNA, 25 bp, Homo sapien
caatatttgcatggtgggaaagcag

SEQ ID NO: 4662607 - DNA, 25 bp, Homo sapien
tgaaaagaaagttgattgatctgta

SEQ ID NO: 4662608 - DNA, 25 bp, Homo sapien
gaaaagaaagttgattgatctgtac

SEQ ID NO: 4662609 - DNA, 25 bp, Homo sapien
ctatgtcaatgttaaaacaagtatt

SEQ ID NO: 4662610 - DNA, 25 bp, Homo sapien
tgtcaatgttaaaacaagtattttg

SEQ ID NO: 4662611 - DNA, 25 bp, Homo sapien
tggttcttcaacagaaattccacaa

SEQ ID NO: 4662612 - DNA, 25 bp, Homo sapien
ggaggctgacgatacttgatgagtt

SEQ ID NO: 4662613 - DNA, 25 bp, Homo sapien
aggaggctgacgatacttgatgagt

SEQ ID NO: 4662614 - DNA, 25 bp, Homo sapien
ggctgacgatacttgatgagttatg

SEQ ID NO: 4662615 - DNA, 25 bp, Homo sapien
gaggctgacgatacttgatgagtta

SEQ ID NO: 4662616 - DNA, 25 bp, Homo sapien
agaatatgtgctgctagggcaagta

SEQ ID NO: 4662617 - DNA, 25 bp, Homo sapien
taagtatcttatttttatgttccaa

SEQ ID NO: 4662618 - DNA, 25 bp, Homo sapien
ttatgttccaaaatttgttgttgaa

SEQ ID NO: 4662619 - DNA, 25 bp, Homo sapien
tcaaagatgacttttaagtatctta

SEQ ID NO: 4662620 - DNA, 25 bp, Homo sapien
atgttccaaaatttgttgttgaatg

SEQ ID NO: 4662621 - DNA, 25 bp, Homo sapien
ttcaaaattcaaggcttcatagctg

SEQ ID NO: 4662622 - DNA, 25 bp, Homo sapien
ttttttcaaaattcaaggcttcata

SEQ ID NO: 4662623 - DNA, 25 bp, Homo sapien
tttgcaccttcttgtctttttttca

SEQ ID NO: 4662624 - DNA, 25 bp, Homo sapien
tgcaccttcttgtctttttttcaaa

SEQ ID NO: 4662625 - DNA, 25 bp, Homo sapien
tatctattagaagtgtgatcactca

SEQ ID NO: 4662626 - DNA, 25 bp, Homo sapien
tcccacattgtggagcctctttgag

SEQ ID NO: 4662627 - DNA, 25 bp, Homo sapien
ctttgaggttcccagccaaccctag

SEQ ID NO: 4662628 - DNA, 25 bp, Homo sapien
gcctctagtcagacgtcttgaatcc

SEQ ID NO: 4662629 - DNA, 25 bp, Homo sapien
ctgatgggagatttttggtgaagtc

SEQ ID NO: 4662630 - DNA, 25 bp, Homo sapien
ctttactaaatttactgatgggaga

SEQ ID NO: 4662631 - DNA, 25 bp, Homo sapien
aaatttactgatgggagatttttgg

SEQ ID NO: 4662632 - DNA, 25 bp, Homo sapien
actttactaaatttactgatgggag

SEQ ID NO: 4662633 - DNA, 25 bp, Homo sapien
tactcaaggtatggattaggttgcc

SEQ ID NO: 4662634 - DNA, 25 bp, Homo sapien
tagcgtccaggccacttagtcacag

SEQ ID NO: 4662635 - DNA, 25 bp, Homo sapien
tacagcaggaccgaatggtaattct

SEQ ID NO: 4662636 - DNA, 25 bp, Homo sapien
gcagacttcccggacttcctgagta

SEQ ID NO: 4662637 - DNA, 25 bp, Homo sapien
gtgtgtgcgcccgtgaatccctgcc

SEQ ID NO: 4662638 - DNA, 25 bp, Homo sapien
cctgctggatttcaagccttgggac

SEQ ID NO: 4662639 - DNA, 25 bp, Homo sapien
ttgggacgatgagactgacatggcc

SEQ ID NO: 4662640 - DNA, 25 bp, Homo sapien
atttcaagccttgggacgatgagac

SEQ ID NO: 4662641 - DNA, 25 bp, Homo sapien
ccagagcctgcgcagtgtggtacag

SEQ ID NO: 4662642 - DNA, 25 bp, Homo sapien
gtcgtccggatcaccagtctgaaag

SEQ ID NO: 4662643 - DNA, 25 bp, Homo sapien
tgatcctccgtgacatcgcgagagc

SEQ ID NO: 4662644 - DNA, 25 bp, Homo sapien
ccaagagaacgacgccagcgtgatc

SEQ ID NO: 4662645 - DNA, 25 bp, Homo sapien
gacaagttcaaatatgacgacgcag

SEQ ID NO: 4662646 - DNA, 25 bp, Homo sapien
gacgacgcagaaaggagattctacg

SEQ ID NO: 4662647 - DNA, 25 bp, Homo sapien
gagaagatctggttcgacaagttca

SEQ ID NO: 4662648 - DNA, 25 bp, Homo sapien
tggcaggcgtcagaaaaatggctac

SEQ ID NO: 4662649 - DNA, 25 bp, Homo sapien
cccgagtaaggtaaagagataagag

SEQ ID NO: 4662650 - DNA, 25 bp, Homo sapien
aatacctcacataaacccgagtaag

SEQ ID NO: 4662651 - DNA, 25 bp, Homo sapien
ggaagagaatactacctacagtaaa

SEQ ID NO: 4662652 - DNA, 25 bp, Homo sapien
aatgggtgatctcctagtaagatac

SEQ ID NO: 4662653 - DNA, 25 bp, Homo sapien
gaaaaaagacagacttagctgtcac

SEQ ID NO: 4662654 - DNA, 25 bp, Homo sapien
tggggaaaggccaaaagattcacca

SEQ ID NO: 4662655 - DNA, 25 bp, Homo sapien
gttattgactcaaaagtagcagcaa

SEQ ID NO: 4662656 - DNA, 25 bp, Homo sapien
gccttgtacattatgcctccagcag

SEQ ID NO: 4662657 - DNA, 25 bp, Homo sapien
tcaaggacgtaactgtagacttcag

SEQ ID NO: 4662658 - DNA, 25 bp, Homo sapien
acttcagtagggatgagtggcaaca

SEQ ID NO: 4662659 - DNA, 25 bp, Homo sapien
tgctgggtatagagtaggctgcacc

SEQ ID NO: 4662660 - DNA, 25 bp, Homo sapien
tctcagtgggtaagcacggctctgc

SEQ ID NO: 4662661 - DNA, 25 bp, Homo sapien
ccttgctgtactactgccaggtgga

SEQ ID NO: 4662662 - DNA, 25 bp, Homo sapien
tattgttaggttggatagggcctca

SEQ ID NO: 4662663 - DNA, 25 bp, Homo sapien
ggaagagtgtcgcattactgctagg

SEQ ID NO: 4662664 - DNA, 25 bp, Homo sapien
caccttgtctgaaaggagagggtac

SEQ ID NO: 4662665 - DNA, 25 bp, Homo sapien
gtggatcgtcacaatggaggtaaga

SEQ ID NO: 4662666 - DNA, 25 bp, Homo sapien
gatgacgcgaggagacaagatgaca

SEQ ID NO: 4662667 - DNA, 25 bp, Homo sapien
ttgtgaaagcaggtcccaagtctcc

SEQ ID NO: 4662668 - DNA, 25 bp, Homo sapien
aaagcaggtcccaagtctcctccag

SEQ ID NO: 4662669 - DNA, 25 bp, Homo sapien
aggcctctcaggcactctctacaag

SEQ ID NO: 4662670 - DNA, 25 bp, Homo sapien
ctgcagttgtgaaagcaggtcccaa

SEQ ID NO: 4662671 - DNA, 25 bp, Homo sapien
caatatgttgctctggagttcagga

SEQ ID NO: 4662672 - DNA, 25 bp, Homo sapien
cattgatgtaaggatgtaagaccct

SEQ ID NO: 4662673 - DNA, 25 bp, Homo sapien
gtaagacccttacatacagtcagtg

SEQ ID NO: 4662674 - DNA, 25 bp, Homo sapien
tctcaggcagaatgggtgtcccctt

SEQ ID NO: 4662675 - DNA, 25 bp, Homo sapien
ttggtctggcccaacctcttaccca

SEQ ID NO: 4662676 - DNA, 25 bp, Homo sapien
gccaggatcgatgcatactcacggg

SEQ ID NO: 4662677 - DNA, 25 bp, Homo sapien
cacttttggggggtgctagattgct

SEQ ID NO: 4662678 - DNA, 25 bp, Homo sapien
catgtgggtgttggacacgggaaga

SEQ ID NO: 4662679 - DNA, 25 bp, Homo sapien
caagctgtgtattgcacaaggatga

SEQ ID NO: 4662680 - DNA, 25 bp, Homo sapien
aaggatgaaaccagtttaaagcact

SEQ ID NO: 4662681 - DNA, 25 bp, Homo sapien
aagctgtgtattgcacaaggatgaa

SEQ ID NO: 4662682 - DNA, 25 bp, Homo sapien
cgcatgttcccagtaggcgtgctct

SEQ ID NO: 4662683 - DNA, 25 bp, Homo sapien
gctctggggcacttgagaagccaaa

SEQ ID NO: 4662684 - DNA, 25 bp, Homo sapien
aagcccgcatgttcccagtaggcgt

SEQ ID NO: 4662685 - DNA, 25 bp, Homo sapien
tcacgtagctcctgggaagcccgca

SEQ ID NO: 4662686 - DNA, 25 bp, Homo sapien
tcctgagttagttagcctagccaac

SEQ ID NO: 4662687 - DNA, 25 bp, Homo sapien
cactgctgctgtacatgcatgatca

SEQ ID NO: 4662688 - DNA, 25 bp, Homo sapien
gctttgccggctttagccctcatgg

SEQ ID NO: 4662689 - DNA, 25 bp, Homo sapien
ttgatgctgaccttgtgatactgag

SEQ ID NO: 4662690 - DNA, 25 bp, Homo sapien
tatactccctaacattagaggtggg

SEQ ID NO: 4662691 - DNA, 25 bp, Homo sapien
gactcctgctggcaaggcatgattg

SEQ ID NO: 4662692 - DNA, 25 bp, Homo sapien
tcataaaatggtgcgggaagatcct

SEQ ID NO: 4662693 - DNA, 25 bp, Homo sapien
tccttcacgaatgataaagcactgg

SEQ ID NO: 4662694 - DNA, 25 bp, Homo sapien
tcatggagagtaggcaacatgtggc

SEQ ID NO: 4662695 - DNA, 25 bp, Homo sapien
gagatgccttcaacaccgtctgtga

SEQ ID NO: 4662696 - DNA, 25 bp, Homo sapien
tcatggacctgttagtgctgtctca

SEQ ID NO: 4662697 - DNA, 25 bp, Homo sapien
caggaagtggactcagtcatggacc

SEQ ID NO: 4662698 - DNA, 25 bp, Homo sapien
tctgtgctgacagtcatctgattca

SEQ ID NO: 4662699 - DNA, 25 bp, Homo sapien
cctgttctgtgctgacagtcatctg

SEQ ID NO: 4662700 - DNA, 25 bp, Homo sapien
caggtgcctgttctgtgctgacagt

SEQ ID NO: 4662701 - DNA, 25 bp, Homo sapien
gttctgtgctgacagtcatctgatt

SEQ ID NO: 4662702 - DNA, 25 bp, Homo sapien
ctttgaacaagtattactgtgatgg

SEQ ID NO: 4662703 - DNA, 25 bp, Homo sapien
aaatatataacatcacaatctttac

SEQ ID NO: 4662704 - DNA, 25 bp, Homo sapien
tatagtaggatacttaaggagtacc

SEQ ID NO: 4662705 - DNA, 25 bp, Homo sapien
tcttgtctttgaacaagtattactg

SEQ ID NO: 4662706 - DNA, 25 bp, Homo sapien
ataactctgataacgttctctttag

SEQ ID NO: 4662707 - DNA, 25 bp, Homo sapien
tttgggtagagaacataatcctttc

SEQ ID NO: 4662708 - DNA, 25 bp, Homo sapien
cttaataactctgataacgttctct

SEQ ID NO: 4662709 - DNA, 25 bp, Homo sapien
tgggtagagaacataatcctttctt

SEQ ID NO: 4662710 - DNA, 25 bp, Homo sapien
atggaactgtcagccagcacactgg

SEQ ID NO: 4662711 - DNA, 25 bp, Homo sapien
tgtcagccagcacactggaaggatt

SEQ ID NO: 4662712 - DNA, 25 bp, Homo sapien
gaactgtcagccagcacactggaag

SEQ ID NO: 4662713 - DNA, 25 bp, Homo sapien
ttttgccatcctcatggaactgtca

SEQ ID NO: 4662714 - DNA, 25 bp, Homo sapien
aattcccaagaagtgtatccatctc

SEQ ID NO: 4662715 - DNA, 25 bp, Homo sapien
cacagtgaagagtatactcatgcac

SEQ ID NO: 4662716 - DNA, 25 bp, Homo sapien
catgtcccatagcttaaaaaattcc

SEQ ID NO: 4662717 - DNA, 25 bp, Homo sapien
tattgggttagtagatactacgttc

SEQ ID NO: 4662718 - DNA, 25 bp, Homo sapien
tgctgcttcactttgggctggagcc

SEQ ID NO: 4662719 - DNA, 25 bp, Homo sapien
tctgctgcttcactttgggctggag

SEQ ID NO: 4662720 - DNA, 25 bp, Homo sapien
cttctgctgcttcactttgggctgg

SEQ ID NO: 4662721 - DNA, 25 bp, Homo sapien
ctgcttcactttgggctggagccat

SEQ ID NO: 4662722 - DNA, 25 bp, Homo sapien
ctccttgcccctcatcccactgcac

SEQ ID NO: 4662723 - DNA, 25 bp, Homo sapien
agcctggatggctaggaaatccccc

SEQ ID NO: 4662724 - DNA, 25 bp, Homo sapien
tggatggctaggaaatccccctcca

SEQ ID NO: 4662725 - DNA, 25 bp, Homo sapien
gcctggatggctaggaaatccccct

SEQ ID NO: 4662726 - DNA, 25 bp, Homo sapien
cctggatggctaggaaatccccctc

SEQ ID NO: 4662727 - DNA, 25 bp, Homo sapien
gtggacacccggacgcagtagagac

SEQ ID NO: 4662728 - DNA, 25 bp, Homo sapien
agctggcacagggtgaggccccggt

SEQ ID NO: 4662729 - DNA, 25 bp, Homo sapien
tcttgctcaaagacgtttcgctcct

SEQ ID NO: 4662730 - DNA, 25 bp, Homo sapien
gacgcagtagagaccaatcttgctc

SEQ ID NO: 4662731 - DNA, 25 bp, Homo sapien
cttgaattctacttcccgcgggaga

SEQ ID NO: 4662732 - DNA, 25 bp, Homo sapien
cttccggtacgctcaggacgccgtt

SEQ ID NO: 4662733 - DNA, 25 bp, Homo sapien
gccccaggtgctccggtacttgaac

SEQ ID NO: 4662734 - DNA, 25 bp, Homo sapien
cagtgccttccggtacgctcaggac

SEQ ID NO: 4662735 - DNA, 25 bp, Homo sapien
ttgagagtcctcggccacagtgcag

SEQ ID NO: 4662736 - DNA, 25 bp, Homo sapien
gccttgagagtcctcggccacagtg

SEQ ID NO: 4662737 - DNA, 25 bp, Homo sapien
cttgagagtcctcggccacagtgca

SEQ ID NO: 4662738 - DNA, 25 bp, Homo sapien
ccttgagagtcctcggccacagtgc

SEQ ID NO: 4662739 - DNA, 25 bp, Homo sapien
tcatgcacaggagatcacatagttt

SEQ ID NO: 4662740 - DNA, 25 bp, Homo sapien
ctcatgcacaggagatcacatagtt

SEQ ID NO: 4662741 - DNA, 25 bp, Homo sapien
gctcatgcacaggagatcacatagt

SEQ ID NO: 4662742 - DNA, 25 bp, Homo sapien
ggatctgagttcttggtccttccaa

SEQ ID NO: 4662743 - DNA, 25 bp, Homo sapien
ccaaataaggcatcctcctttcaga

SEQ ID NO: 4662744 - DNA, 25 bp, Homo sapien
gaaggtgaatggagagcctcagccc

SEQ ID NO: 4662745 - DNA, 25 bp, Homo sapien
tcagaagtcccacacattctctggg

SEQ ID NO: 4662746 - DNA, 25 bp, Homo sapien
cagctgggcctgcagttcctccatc

SEQ ID NO: 4662747 - DNA, 25 bp, Homo sapien
agctgggcctgcagttcctccatcc

SEQ ID NO: 4662748 - DNA, 25 bp, Homo sapien
ccagctgggcctgcagttcctccat

SEQ ID NO: 4662749 - DNA, 25 bp, Homo sapien
tccagctgggcctgcagttcctcca

SEQ ID NO: 4662750 - DNA, 25 bp, Homo sapien
gatgaccatgggcaagagtttccca

SEQ ID NO: 4662751 - DNA, 25 bp, Homo sapien
ggagcagaaatctcaagtcctctca

SEQ ID NO: 4662752 - DNA, 25 bp, Homo sapien
tgggagcagaaatctcaagtcctct

SEQ ID NO: 4662753 - DNA, 25 bp, Homo sapien
gggagcagaaatctcaagtcctctc

SEQ ID NO: 4662754 - DNA, 25 bp, Homo sapien
gagcagaaatctcaagtcctctcac

SEQ ID NO: 4662755 - DNA, 25 bp, Homo sapien
ttagcctggcgtagtctggccccca

SEQ ID NO: 4662756 - DNA, 25 bp, Homo sapien
acatcacactccttagcctggcgta

SEQ ID NO: 4662757 - DNA, 25 bp, Homo sapien
ccacatcacactccttagcctggcg

SEQ ID NO: 4662758 - DNA, 25 bp, Homo sapien
agcctggcgtagtctggcccccagt

SEQ ID NO: 4662759 - DNA, 25 bp, Homo sapien
tgtattgaaagcacctcatggtggc

SEQ ID NO: 4662760 - DNA, 25 bp, Homo sapien
tggacccagcatttggccagaagcc

SEQ ID NO: 4662761 - DNA, 25 bp, Homo sapien
ccagaagccagaccattgcaggatc

SEQ ID NO: 4662762 - DNA, 25 bp, Homo sapien
ctggaagtcagagctatggacccag

SEQ ID NO: 4662763 - DNA, 25 bp, Homo sapien
cagttctggcccagatgttaatttc

SEQ ID NO: 4662764 - DNA, 25 bp, Homo sapien
gttctggcccagatgttaatttcca

SEQ ID NO: 4662765 - DNA, 25 bp, Homo sapien
agttctggcccagatgttaatttcc

SEQ ID NO: 4662766 - DNA, 25 bp, Homo sapien
aagagtgacccagaatctccctttc

SEQ ID NO: 4662767 - DNA, 25 bp, Homo sapien
agccctgagtccagagtcagaaaga

SEQ ID NO: 4662768 - DNA, 25 bp, Homo sapien
ctgagtccagagtcagaaagaagag

SEQ ID NO: 4662769 - DNA, 25 bp, Homo sapien
gtgacccagaatctccctttctctc

SEQ ID NO: 4662770 - DNA, 25 bp, Homo sapien
gagaagcaaggatgggcagggtcag

SEQ ID NO: 4662771 - DNA, 25 bp, Homo sapien
ctgagaagcaaggatgggcagggtc

SEQ ID NO: 4662772 - DNA, 25 bp, Homo sapien
gatgggcagggtcaggcgaattgac

SEQ ID NO: 4662773 - DNA, 25 bp, Homo sapien
gcaaggatgggcagggtcaggcgaa

SEQ ID NO: 4662774 - DNA, 25 bp, Homo sapien
gccctggacagccaagtcatcaggg

SEQ ID NO: 4662775 - DNA, 25 bp, Homo sapien
agctcgcttgagcagctccacatgg

SEQ ID NO: 4662776 - DNA, 25 bp, Homo sapien
ggaacagaaggagctataggttaga

SEQ ID NO: 4662777 - DNA, 25 bp, Homo sapien
aggttagaaaggctccagctcgctt

SEQ ID NO: 4662778 - DNA, 25 bp, Homo sapien
cgagagatgatttcccggagctgca

SEQ ID NO: 4662779 - DNA, 25 bp, Homo sapien
agtgcatcttggcaaagaaggaaga

SEQ ID NO: 4662780 - DNA, 25 bp, Homo sapien
agatgatttcccggagctgcagtgc

SEQ ID NO: 4662781 - DNA, 25 bp, Homo sapien
atgatttcccggagctgcagtgcat

SEQ ID NO: 4662782 - DNA, 25 bp, Homo sapien
aggcccacaaccagacacagacctc

SEQ ID NO: 4662783 - DNA, 25 bp, Homo sapien
ctgttcacatggccatgtcagggcc

SEQ ID NO: 4662784 - DNA, 25 bp, Homo sapien
tgttcacatggccatgtcagggccc

SEQ ID NO: 4662785 - DNA, 25 bp, Homo sapien
tcacatggccatgtcagggccccag

SEQ ID NO: 4662786 - DNA, 25 bp, Homo sapien
tggccagccaatggggcagggccag

SEQ ID NO: 4662787 - DNA, 25 bp, Homo sapien
ctggccagccaatggggcagggcca

SEQ ID NO: 4662788 - DNA, 25 bp, Homo sapien
ggcagggccagggtgttgaagccag

SEQ ID NO: 4662789 - DNA, 25 bp, Homo sapien
tggggcagggccagggtgttgaagc

SEQ ID NO: 4662790 - DNA, 25 bp, Homo sapien
tgggcagccggatttcaatgatctc

SEQ ID NO: 4662791 - DNA, 25 bp, Homo sapien
cctgggcagccggatttcaatgatc

SEQ ID NO: 4662792 - DNA, 25 bp, Homo sapien
ggcagccggatttcaatgatctctc

SEQ ID NO: 4662793 - DNA, 25 bp, Homo sapien
ctgggcagccggatttcaatgatct

SEQ ID NO: 4662794 - DNA, 25 bp, Homo sapien
ctggtccaggtggacgaaggagtgt

SEQ ID NO: 4662795 - DNA, 25 bp, Homo sapien
caggtggacgaaggagtgtcggcca

SEQ ID NO: 4662796 - DNA, 25 bp, Homo sapien
tccaggtggacgaaggagtgtcggc

SEQ ID NO: 4662797 - DNA, 25 bp, Homo sapien
tggacgaaggagtgtcggccagtgc

SEQ ID NO: 4662798 - DNA, 25 bp, Homo sapien
ctgcatacagactcctccgtcaccc

SEQ ID NO: 4662799 - DNA, 25 bp, Homo sapien
tggagaggacatctggaaagttggg

SEQ ID NO: 4662800 - DNA, 25 bp, Homo sapien
tctggagaggacatctggaaagttg

SEQ ID NO: 4662801 - DNA, 25 bp, Homo sapien
ttggcagccacatcgtgcagggtgc

SEQ ID NO: 4662802 - DNA, 25 bp, Homo sapien
ctggagaggacatctggaaagttgg

SEQ ID NO: 4662803 - DNA, 25 bp, Homo sapien
gcatgtcccgtgtagcattccagat

SEQ ID NO: 4662804 - DNA, 25 bp, Homo sapien
gtagcattccagatctcagttcctc

SEQ ID NO: 4662805 - DNA, 25 bp, Homo sapien
caggctgggccgcaggtattcatag

SEQ ID NO: 4662806 - DNA, 25 bp, Homo sapien
gcaggtattcatagggcatgtcccg

SEQ ID NO: 4662807 - DNA, 25 bp, Homo sapien
gaggctgaagttctgatgccgagta

SEQ ID NO: 4662808 - DNA, 25 bp, Homo sapien
taaggtatggatgcatgaggctgaa

SEQ ID NO: 4662809 - DNA, 25 bp, Homo sapien
atgccgagtatctccagccaggagc

SEQ ID NO: 4662810 - DNA, 25 bp, Homo sapien
taatgttattaattgggagcttccc

SEQ ID NO: 4662811 - DNA, 25 bp, Homo sapien
gtctgtcaagctgaggacctcctgt

SEQ ID NO: 4662812 - DNA, 25 bp, Homo sapien
gggagcgcaggtctgtcaagctgag

SEQ ID NO: 4662813 - DNA, 25 bp, Homo sapien
gacctcctgtgggtccgcatttctg

SEQ ID NO: 4662814 - DNA, 25 bp, Homo sapien
cttgtgttgggcaagaaccagcagt

SEQ ID NO: 4662815 - DNA, 25 bp, Homo sapien
gccagtgggagggctaggggcgccg

SEQ ID NO: 4662816 - DNA, 25 bp, Homo sapien
tgggagggctaggggcgccggctcg

SEQ ID NO: 4662817 - DNA, 25 bp, Homo sapien
ccagtgggagggctaggggcgccgg

SEQ ID NO: 4662818 - DNA, 25 bp, Homo sapien
agtgggagggctaggggcgccggct

SEQ ID NO: 4662819 - DNA, 25 bp, Homo sapien
gctccgcacaggcaaactcgatact

SEQ ID NO: 4662820 - DNA, 25 bp, Homo sapien
agcaaacaggaaagccggaggctcc

SEQ ID NO: 4662821 - DNA, 25 bp, Homo sapien
atacttgccggagccgcttccagag

SEQ ID NO: 4662822 - DNA, 25 bp, Homo sapien
gaaggtccgcggcacccacaggcag

SEQ ID NO: 4662823 - DNA, 25 bp, Homo sapien
ggctccctgggaaaatgtgtgtaaa

SEQ ID NO: 4662824 - DNA, 25 bp, Homo sapien
gctacagtgtgagcagcgagaagct

SEQ ID NO: 4662825 - DNA, 25 bp, Homo sapien
ccagatctggaactgtgaggcccgt

SEQ ID NO: 4662826 - DNA, 25 bp, Homo sapien
gagaagctggctagtcatcactcac

SEQ ID NO: 4662827 - DNA, 25 bp, Homo sapien
taacatataaatttctacgtagaac

SEQ ID NO: 4662828 - DNA, 25 bp, Homo sapien
ggtggtgagcttccgggaattttca

SEQ ID NO: 4662829 - DNA, 25 bp, Homo sapien
ttgatgcttctcagtaacatataaa

SEQ ID NO: 4662830 - DNA, 25 bp, Homo sapien
gcttctcagtaacatataaatttct

SEQ ID NO: 4662831 - DNA, 25 bp, Homo sapien
tctccactgatcaggtgctaggctc

SEQ ID NO: 4662832 - DNA, 25 bp, Homo sapien
tgctaggctcacagctgcggcggcc

SEQ ID NO: 4662833 - DNA, 25 bp, Homo sapien
caaacaaacatgcaatccacagctc

SEQ ID NO: 4662834 - DNA, 25 bp, Homo sapien
gagcttggcttgctgattctagaag

SEQ ID NO: 4662835 - DNA, 25 bp, Homo sapien
ttctaattttcgcaatatgggtcac

SEQ ID NO: 4662836 - DNA, 25 bp, Homo sapien
gaacttcgtgcaatagcgaaacaca

SEQ ID NO: 4662837 - DNA, 25 bp, Homo sapien
gaaggcgagcgagtttctcctctgg

SEQ ID NO: 4662838 - DNA, 25 bp, Homo sapien
gtcacaacatgatggtgcatttgca

SEQ ID NO: 4662839 - DNA, 25 bp, Homo sapien
tctgccagcagctttacatgctcct

SEQ ID NO: 4662840 - DNA, 25 bp, Homo sapien
tgcctcacttgctaagcgaaataaa

SEQ ID NO: 4662841 - DNA, 25 bp, Homo sapien
gaccagctctatggtggagcacccc

SEQ ID NO: 4662842 - DNA, 25 bp, Homo sapien
gctctggcagcgtcctggtggctgt

SEQ ID NO: 4662843 - DNA, 25 bp, Homo sapien
ccggctctgcgggggtgcggaggag

SEQ ID NO: 4662844 - DNA, 25 bp, Homo sapien
ttctccaactggcatttggagcagc

SEQ ID NO: 4662845 - DNA, 25 bp, Homo sapien
caactggcatttggagcagccagag

SEQ ID NO: 4662846 - DNA, 25 bp, Homo sapien
gggggtgcggaggagggaagctcca

SEQ ID NO: 4662847 - DNA, 25 bp, Homo sapien
agacattagtagagaaagaaaacca

SEQ ID NO: 4662848 - DNA, 25 bp, Homo sapien
gaaaagacattagtagagaaagaaa

SEQ ID NO: 4662849 - DNA, 25 bp, Homo sapien
gacattagtagagaaagaaaaccac

SEQ ID NO: 4662850 - DNA, 25 bp, Homo sapien
ctgaaaagacattagtagagaaaga

SEQ ID NO: 4662851 - DNA, 25 bp, Homo sapien
gcccagcaggttcaaagtagagcca

SEQ ID NO: 4662852 - DNA, 25 bp, Homo sapien
cacggtagatggtttccttgaaaat

SEQ ID NO: 4662853 - DNA, 25 bp, Homo sapien
aggaggatgctgagggtcggcgggc

SEQ ID NO: 4662854 - DNA, 25 bp, Homo sapien
ccggcaggagcttgcacacggtaga

SEQ ID NO: 4662855 - DNA, 25 bp, Homo sapien
tgggctcaggtggaggctggccagg

SEQ ID NO: 4662856 - DNA, 25 bp, Homo sapien
ctcaggtggaggctggccaggggct

SEQ ID NO: 4662857 - DNA, 25 bp, Homo sapien
caggtggaggctggccaggggcttc

SEQ ID NO: 4662858 - DNA, 25 bp, Homo sapien
ggctcaggtggaggctggccagggg

SEQ ID NO: 4662859 - DNA, 25 bp, Homo sapien
ggttgaggaccccctgcctgactcc

SEQ ID NO: 4662860 - DNA, 25 bp, Homo sapien
ctagggcagcaatgggtcctggagg

SEQ ID NO: 4662861 - DNA, 25 bp, Homo sapien
tagggcagcaatgggtcctggaggg

SEQ ID NO: 4662862 - DNA, 25 bp, Homo sapien
aacagggagcgcctgaagcttccct

SEQ ID NO: 4662863 - DNA, 25 bp, Homo sapien
cagggagcgcctgaagcttccctag

SEQ ID NO: 4662864 - DNA, 25 bp, Homo sapien
ctgggcccaacagggagcgcctgaa

SEQ ID NO: 4662865 - DNA, 25 bp, Homo sapien
gctctgggcccaacagggagcgcct

SEQ ID NO: 4662866 - DNA, 25 bp, Homo sapien
aggagggactgtcgatcccgctgtc

SEQ ID NO: 4662867 - DNA, 25 bp, Homo sapien
gttggggatctttaagctaccactc

SEQ ID NO: 4662868 - DNA, 25 bp, Homo sapien
gggtgttctcagagtcaggttcctc

SEQ ID NO: 4662869 - DNA, 25 bp, Homo sapien
ggccggcatccttgtcagccttctg

SEQ ID NO: 4662870 - DNA, 25 bp, Homo sapien
atgagccttggggaatcggcaccta

SEQ ID NO: 4662871 - DNA, 25 bp, Homo sapien
agccttggggaatcggcacctaacg

SEQ ID NO: 4662872 - DNA, 25 bp, Homo sapien
ggggaatcggcacctaacgggctgc

SEQ ID NO: 4662873 - DNA, 25 bp, Homo sapien
aagatgagccttggggaatcggcac

SEQ ID NO: 4662874 - DNA, 25 bp, Homo sapien
gtctcctcggtgtgcaggagctcct

SEQ ID NO: 4662875 - DNA, 25 bp, Homo sapien
actgagcacagttgccgccccgctt

SEQ ID NO: 4662876 - DNA, 25 bp, Homo sapien
actggttcagacaacctcatggtct

SEQ ID NO: 4662877 - DNA, 25 bp, Homo sapien
tcagaattattgtcctcccttttca

SEQ ID NO: 4662878 - DNA, 25 bp, Homo sapien
gcttcggccacaggtgagggcgctc

SEQ ID NO: 4662879 - DNA, 25 bp, Homo sapien
actgcccgtggaagcggtggatgga

SEQ ID NO: 4662880 - DNA, 25 bp, Homo sapien
gaatatgcccatgatgacttctgga

SEQ ID NO: 4662881 - DNA, 25 bp, Homo sapien
gcatccgtcagcctggtgcagaaaa

SEQ ID NO: 4662882 - DNA, 25 bp, Homo sapien
agctccggcagcaggaactgcccgt

SEQ ID NO: 4662883 - DNA, 25 bp, Homo sapien
catgggcatgcgcagatggtactca

SEQ ID NO: 4662884 - DNA, 25 bp, Homo sapien
acttgcctcgctctcaggcacatga

SEQ ID NO: 4662885 - DNA, 25 bp, Homo sapien
aagggaggcgcccagccaccatgag

SEQ ID NO: 4662886 - DNA, 25 bp, Homo sapien
gaaccctggtctagagaacacttga

SEQ ID NO: 4662887 - DNA, 25 bp, Homo sapien
caggatgtccccgagccgtgggttt

SEQ ID NO: 4662888 - DNA, 25 bp, Homo sapien
cctacggctcggtcaaagttcttga

SEQ ID NO: 4662889 - DNA, 25 bp, Homo sapien
tgtggacgacgtctttaaacagtgg

SEQ ID NO: 4662890 - DNA, 25 bp, Homo sapien
tactcgccgtacatcttcaggaatg

SEQ ID NO: 4662891 - DNA, 25 bp, Homo sapien
tccagctcagatgagctcaaaaatg

SEQ ID NO: 4662892 - DNA, 25 bp, Homo sapien
gagcctcttcagatagtccttgagc

SEQ ID NO: 4662893 - DNA, 25 bp, Homo sapien
tgctgcagcgtcaggttcccgcata

SEQ ID NO: 4662894 - DNA, 25 bp, Homo sapien
ggcgtcctgcgggagcctcttcaga

SEQ ID NO: 4662895 - DNA, 25 bp, Homo sapien
gcagcagctcgtaccgggggaccct

SEQ ID NO: 4662896 - DNA, 25 bp, Homo sapien
cattggagtggttggcggctgtgga

SEQ ID NO: 4662897 - DNA, 25 bp, Homo sapien
tggcggctgtggagatgagctccaa

SEQ ID NO: 4662898 - DNA, 25 bp, Homo sapien
atggcagcattggagtggttggcgg

SEQ ID NO: 4662899 - DNA, 25 bp, Homo sapien
tggttggcggctgtggagatgagct

SEQ ID NO: 4662900 - DNA, 25 bp, Homo sapien
acagatgcccagtgagacaggctct

SEQ ID NO: 4662901 - DNA, 25 bp, Homo sapien
tagagtgctaaataactcaccaagg

SEQ ID NO: 4662902 - DNA, 25 bp, Homo sapien
gagccccccaaaggatagcggcaaa

SEQ ID NO: 4662903 - DNA, 25 bp, Homo sapien
cgcccggcccatagagtgattcttt

SEQ ID NO: 4662904 - DNA, 25 bp, Homo sapien
gatcagttcattggccgggttgaca

SEQ ID NO: 4662905 - DNA, 25 bp, Homo sapien
gccctccttgatcagttcattggcc

SEQ ID NO: 4662906 - DNA, 25 bp, Homo sapien
tggccgggttgacaatgtcttcttc

SEQ ID NO: 4662907 - DNA, 25 bp, Homo sapien
cattggccgggttgacaatgtcttc

SEQ ID NO: 4662908 - DNA, 25 bp, Homo sapien
gcacaggtgaggaacgagagctgcc

SEQ ID NO: 4662909 - DNA, 25 bp, Homo sapien
atggcacaggtgaggaacgagagct

SEQ ID NO: 4662910 - DNA, 25 bp, Homo sapien
ctgcaagagggatggcacaggtgag

SEQ ID NO: 4662911 - DNA, 25 bp, Homo sapien
gaggaacgagagctgcccgcaggtc

SEQ ID NO: 4662912 - DNA, 25 bp, Homo sapien
cttctggcccatgagccgcagcttg

SEQ ID NO: 4662913 - DNA, 25 bp, Homo sapien
gcacacagtaaaggatcatgctgtt

SEQ ID NO: 4662914 - DNA, 25 bp, Homo sapien
atgagccgcagcttgggcacacagt

SEQ ID NO: 4662915 - DNA, 25 bp, Homo sapien
ttctcccggacgctgaacttctggc

SEQ ID NO: 4662916 - DNA, 25 bp, Homo sapien
gtgtttggcttgacgatatcctgca

SEQ ID NO: 4662917 - DNA, 25 bp, Homo sapien
tgtttggcttgacgatatcctgcac

SEQ ID NO: 4662918 - DNA, 25 bp, Homo sapien
atgaatgtatgtgctgtgtttggct

SEQ ID NO: 4662919 - DNA, 25 bp, Homo sapien
gacattcactagaaacagcccgttc

SEQ ID NO: 4662920 - DNA, 25 bp, Homo sapien
cattcactagaaacagcccgttcca

SEQ ID NO: 4662921 - DNA, 25 bp, Homo sapien
agacattcactagaaacagcccgtt

SEQ ID NO: 4662922 - DNA, 25 bp, Homo sapien
tcactagaaacagcccgttccatac

SEQ ID NO: 4662923 - DNA, 25 bp, Homo sapien
atccattctttcttctcttcctctg

SEQ ID NO: 4662924 - DNA, 25 bp, Homo sapien
ctgaatccattctttcttctcttcc

SEQ ID NO: 4662925 - DNA, 25 bp, Homo sapien
tgaatccattctttcttctcttcct

SEQ ID NO: 4662926 - DNA, 25 bp, Homo sapien
gaatccattctttcttctcttcctc

SEQ ID NO: 4662927 - DNA, 25 bp, Homo sapien
tgcttatgaaggcacagtgtggtca

SEQ ID NO: 4662928 - DNA, 25 bp, Homo sapien
ggcttgtggcatctgaagctgctta

SEQ ID NO: 4662929 - DNA, 25 bp, Homo sapien
ccaggcccgctcatgtttatttggg

SEQ ID NO: 4662930 - DNA, 25 bp, Homo sapien
aaatgaatgggttgaagggcttgtg

SEQ ID NO: 4662931 - DNA, 25 bp, Homo sapien
ctataaaggggcatgggaggatgct

SEQ ID NO: 4662932 - DNA, 25 bp, Homo sapien
tataaaggggcatgggaggatgcta

SEQ ID NO: 4662933 - DNA, 25 bp, Homo sapien
ataaaggggcatgggaggatgctac

SEQ ID NO: 4662934 - DNA, 25 bp, Homo sapien
ggacacagcaacacaacagtgagga

SEQ ID NO: 4662935 - DNA, 25 bp, Homo sapien
ctggacacagcaacacaacagtgag

SEQ ID NO: 4662936 - DNA, 25 bp, Homo sapien
tggacacagcaacacaacagtgagg

SEQ ID NO: 4662937 - DNA, 25 bp, Homo sapien
ctgttctgtttgtgcttctcgatgg

SEQ ID NO: 4662938 - DNA, 25 bp, Homo sapien
aaagccttgaaggtttcgctgttct

SEQ ID NO: 4662939 - DNA, 25 bp, Homo sapien
tgtgcttctcgatggtggcctggat

SEQ ID NO: 4662940 - DNA, 25 bp, Homo sapien
gccttgaaggtttcgctgttctgtt

SEQ ID NO: 4662941 - DNA, 25 bp, Homo sapien
caggtagcccgtcccctggaggtct

SEQ ID NO: 4662942 - DNA, 25 bp, Homo sapien
ttctgctctccacaggtagcccgtc

SEQ ID NO: 4662943 - DNA, 25 bp, Homo sapien
gccttctgctctccacaggtagccc

SEQ ID NO: 4662944 - DNA, 25 bp, Homo sapien
tctccacaggtagcccgtcccctgg

SEQ ID NO: 4662945 - DNA, 25 bp, Homo sapien
ggagtgcccgctgtcctggtccctg

SEQ ID NO: 4662946 - DNA, 25 bp, Homo sapien
caagggagtgcccgctgtcctggtc

SEQ ID NO: 4662947 - DNA, 25 bp, Homo sapien
acacaagggagtgcccgctgtcctg

SEQ ID NO: 4662948 - DNA, 25 bp, Homo sapien
aacacaagggagtgcccgctgtcct

SEQ ID NO: 4662949 - DNA, 25 bp, Homo sapien
aactgccttcggtggtcaccacagg

SEQ ID NO: 4662950 - DNA, 25 bp, Homo sapien
gaactgccttcggtggtcaccacag

SEQ ID NO: 4662951 - DNA, 25 bp, Homo sapien
tgctgcacccgaactgccttcggtg

SEQ ID NO: 4662952 - DNA, 25 bp, Homo sapien
tgcacccgaactgccttcggtggtc

SEQ ID NO: 4662953 - DNA, 25 bp, Homo sapien
tgaccgctgagcatggggcacttac

SEQ ID NO: 4662954 - DNA, 25 bp, Homo sapien
tgctgaccgctgagcatggggcact

SEQ ID NO: 4662955 - DNA, 25 bp, Homo sapien
tgcctttcacccctgctgaccgctg

SEQ ID NO: 4662956 - DNA, 25 bp, Homo sapien
acccctgctgaccgctgagcatggg

SEQ ID NO: 4662957 - DNA, 25 bp, Homo sapien
agactggcccctcagccctccgcct

SEQ ID NO: 4662958 - DNA, 25 bp, Homo sapien
tggactcagacatagcttcacctcc

SEQ ID NO: 4662959 - DNA, 25 bp, Homo sapien
atagcttcacctccgcacacccagg

SEQ ID NO: 4662960 - DNA, 25 bp, Homo sapien
tctgcgtgcccaccttacagagtcc

SEQ ID NO: 4662961 - DNA, 25 bp, Homo sapien
gcactgttaatacatgctttatggg

SEQ ID NO: 4662962 - DNA, 25 bp, Homo sapien
ggagctcagaagattctcacatgtg

SEQ ID NO: 4662963 - DNA, 25 bp, Homo sapien
ggacgattcacacatgttaagagca

SEQ ID NO: 4662964 - DNA, 25 bp, Homo sapien
cataaatgttcacttggagctcaga

SEQ ID NO: 4662965 - DNA, 25 bp, Homo sapien
gcaccaatgatgatggctccaggta

SEQ ID NO: 4662966 - DNA, 25 bp, Homo sapien
cacggtgatgttgctgtcagcgttg

SEQ ID NO: 4662967 - DNA, 25 bp, Homo sapien
ccacatcggggtgctccacggtgat

SEQ ID NO: 4662968 - DNA, 25 bp, Homo sapien
caccaatgatgatggctccaggtac

SEQ ID NO: 4662969 - DNA, 25 bp, Homo sapien
tacaaaaagttgctgacgggcggat

SEQ ID NO: 4662970 - DNA, 25 bp, Homo sapien
gaccctgcgattgtgtgtccactgt

SEQ ID NO: 4662971 - DNA, 25 bp, Homo sapien
tcaggcagtgcctcatatgcatggg

SEQ ID NO: 4662972 - DNA, 25 bp, Homo sapien
caccatggaaactgtcagggatgtc

SEQ ID NO: 4662973 - DNA, 25 bp, Homo sapien
tggacatggagggtcatcaggcaga

SEQ ID NO: 4662974 - DNA, 25 bp, Homo sapien
tcatcaggcagaggccagccaagtt

SEQ ID NO: 4662975 - DNA, 25 bp, Homo sapien
ctggacatggagggtcatcaggcag

SEQ ID NO: 4662976 - DNA, 25 bp, Homo sapien
tcaggcagaggccagccaagttcat

SEQ ID NO: 4662977 - DNA, 25 bp, Homo sapien
atgggctcacaccaaggacagacgc

SEQ ID NO: 4662978 - DNA, 25 bp, Homo sapien
ggacagacgcattcacaaacgacag

SEQ ID NO: 4662979 - DNA, 25 bp, Homo sapien
tcacaaacgacaggtggctctcact

SEQ ID NO: 4662980 - DNA, 25 bp, Homo sapien
cggcaggactgtgaccacggatgtc

SEQ ID NO: 4662981 - DNA, 25 bp, Homo sapien
ctgctgcagaacctgaggcagctga

SEQ ID NO: 4662982 - DNA, 25 bp, Homo sapien
aggctgctgcagaacctgaggcagc

SEQ ID NO: 4662983 - DNA, 25 bp, Homo sapien
ctgcagaacctgaggcagctgaacc

SEQ ID NO: 4662984 - DNA, 25 bp, Homo sapien
tggctccccaggctgctgcagaacc

SEQ ID NO: 4662985 - DNA, 25 bp, Homo sapien
accgggtcccagtgaagggacagag

SEQ ID NO: 4662986 - DNA, 25 bp, Homo sapien
gaccgggtcccagtgaagggacaga

SEQ ID NO: 4662987 - DNA, 25 bp, Homo sapien
ccgggtcccagtgaagggacagagg

SEQ ID NO: 4662988 - DNA, 25 bp, Homo sapien
taagcttaccattactgtagctgag

SEQ ID NO: 4662989 - DNA, 25 bp, Homo sapien
gggccataagaacagcaccaggctg

SEQ ID NO: 4662990 - DNA, 25 bp, Homo sapien
gggagggatactcattgcggttatc

SEQ ID NO: 4662991 - DNA, 25 bp, Homo sapien
gtagctgagcagaataaaaagaggt

SEQ ID NO: 4662992 - DNA, 25 bp, Homo sapien
tgtctgcaactggagccgtgtggcc

SEQ ID NO: 4662993 - DNA, 25 bp, Homo sapien
tctgcaactggagccgtgtggccat

SEQ ID NO: 4662994 - DNA, 25 bp, Homo sapien
ctgtctgcaactggagccgtgtggc

SEQ ID NO: 4662995 - DNA, 25 bp, Homo sapien
gtctgcaactggagccgtgtggcca

SEQ ID NO: 4662996 - DNA, 25 bp, Homo sapien
gtgggcagcacagccatggcctgca

SEQ ID NO: 4662997 - DNA, 25 bp, Homo sapien
cagtgggcagcacagccatggcctg

SEQ ID NO: 4662998 - DNA, 25 bp, Homo sapien
gggcagtgggcagcacagccatggc

SEQ ID NO: 4662999 - DNA, 25 bp, Homo sapien
gggcagcacagccatggcctgcagc

SEQ ID NO: 4663000 - DNA, 25 bp, Homo sapien
taaagattttaagtggatcaagatc

SEQ ID NO: 4663001 - DNA, 25 bp, Homo sapien
gactttatctggtgcatctgagaaa

SEQ ID NO: 4663002 - DNA, 25 bp, Homo sapien
tgcctgtgcccatggcaccgagtaa

SEQ ID NO: 4663003 - DNA, 25 bp, Homo sapien
tctgagaaactattgaaaggagcca

SEQ ID NO: 4663004 - DNA, 25 bp, Homo sapien
tgcttctccttgtcacgtctggtct

SEQ ID NO: 4663005 - DNA, 25 bp, Homo sapien
gaaggtctcaccacagctcttacag

SEQ ID NO: 4663006 - DNA, 25 bp, Homo sapien
gccccacacagcttgcagtgatgcc

SEQ ID NO: 4663007 - DNA, 25 bp, Homo sapien
cgtctggtcttagaggatagttttc

SEQ ID NO: 4663008 - DNA, 25 bp, Homo sapien
gatcaggaagcccttccgtgcaggg

SEQ ID NO: 4663009 - DNA, 25 bp, Homo sapien
caaggaatgaggactatcatctcct

SEQ ID NO: 4663010 - DNA, 25 bp, Homo sapien
gacaggacagttttgcactcaaggg

SEQ ID NO: 4663011 - DNA, 25 bp, Homo sapien
gatttgattctacttcggacaggac

SEQ ID NO: 4663012 - DNA, 25 bp, Homo sapien
tccaggagtcttgtgtgcgtgggag

SEQ ID NO: 4663013 - DNA, 25 bp, Homo sapien
ttctgtcctggagggtccagagtcc

SEQ ID NO: 4663014 - DNA, 25 bp, Homo sapien
accagaaaccacctctcacccctca

SEQ ID NO: 4663015 - DNA, 25 bp, Homo sapien
gaagagtgtgaagagccaccaagca

SEQ ID NO: 4663016 - DNA, 25 bp, Homo sapien
ctctgccggctgttctcggccttga

SEQ ID NO: 4663017 - DNA, 25 bp, Homo sapien
tgccggctgttctcggccttgaact

SEQ ID NO: 4663018 - DNA, 25 bp, Homo sapien
gctgttctcggccttgaactcggag

SEQ ID NO: 4663019 - DNA, 25 bp, Homo sapien
tctcggccttgaactcggagcactt

SEQ ID NO: 4663020 - DNA, 25 bp, Homo sapien
tctgtgctctcaggggccactggct

SEQ ID NO: 4663021 - DNA, 25 bp, Homo sapien
ctctgtgctctcaggggccactggc

SEQ ID NO: 4663022 - DNA, 25 bp, Homo sapien
tcaggggccactggctgtgtcagga

SEQ ID NO: 4663023 - DNA, 25 bp, Homo sapien
ggggccactggctgtgtcaggaaac

SEQ ID NO: 4663024 - DNA, 25 bp, Homo sapien
cagggacactccgaaagcagaggca

SEQ ID NO: 4663025 - DNA, 25 bp, Homo sapien
ggtcccagggacactccgaaagcag

SEQ ID NO: 4663026 - DNA, 25 bp, Homo sapien
tatcctggtcccagggacactccga

SEQ ID NO: 4663027 - DNA, 25 bp, Homo sapien
gacactccgaaagcagaggcagctg

SEQ ID NO: 4663028 - DNA, 25 bp, Homo sapien
gaagggcagtatctcccctcaggtg

SEQ ID NO: 4663029 - DNA, 25 bp, Homo sapien
tcctggatgcaaatggttcccaagc

SEQ ID NO: 4663030 - DNA, 25 bp, Homo sapien
gatcttccgagtgtgttcccagcct

SEQ ID NO: 4663031 - DNA, 25 bp, Homo sapien
caaccaggtgaccaggagtgacact

SEQ ID NO: 4663032 - DNA, 25 bp, Homo sapien
catccatatgctgggtcaggacaca

SEQ ID NO: 4663033 - DNA, 25 bp, Homo sapien
cagtggtcacccctgttctgaggag

SEQ ID NO: 4663034 - DNA, 25 bp, Homo sapien
gagatcaacactagaagcttcccag

SEQ ID NO: 4663035 - DNA, 25 bp, Homo sapien
cagcaagtacctgagggtgggtcac

SEQ ID NO: 4663036 - DNA, 25 bp, Homo sapien
acacctcgctccaggtctcaccgct

SEQ ID NO: 4663037 - DNA, 25 bp, Homo sapien
aggtctcaccgctctctgacagccg

SEQ ID NO: 4663038 - DNA, 25 bp, Homo sapien
ctccaggtctcaccgctctctgaca

SEQ ID NO: 4663039 - DNA, 25 bp, Homo sapien
tcgctccaggtctcaccgctctctg

SEQ ID NO: 4663040 - DNA, 25 bp, Homo sapien
gactccatggccttctttgggctgt

SEQ ID NO: 4663041 - DNA, 25 bp, Homo sapien
ccagactccatggccttctttgggc

SEQ ID NO: 4663042 - DNA, 25 bp, Homo sapien
agactccatggccttctttgggctg

SEQ ID NO: 4663043 - DNA, 25 bp, Homo sapien
ctccatggccttctttgggctgtct

SEQ ID NO: 4663044 - DNA, 25 bp, Homo sapien
gtgcttagggtttccagccactgct

SEQ ID NO: 4663045 - DNA, 25 bp, Homo sapien
cagcagtgcttagggtttccagcca

SEQ ID NO: 4663046 - DNA, 25 bp, Homo sapien
aggaggcgctcaggtaccaggactg

SEQ ID NO: 4663047 - DNA, 25 bp, Homo sapien
ggtccggcacactcagtttgcagct

SEQ ID NO: 4663048 - DNA, 25 bp, Homo sapien
ggcgctcttcatggggcctccaaca

SEQ ID NO: 4663049 - DNA, 25 bp, Homo sapien
acagcacaggtccaatgtggtggtg

SEQ ID NO: 4663050 - DNA, 25 bp, Homo sapien
ggctcttagccaaaacttgctgggt

SEQ ID NO: 4663051 - DNA, 25 bp, Homo sapien
tggccagtggttgcccctctctggg

SEQ ID NO: 4663052 - DNA, 25 bp, Homo sapien
agcatcaccacacggcccatatgga

SEQ ID NO: 4663053 - DNA, 25 bp, Homo sapien
cacggcccatatggatgatggttac

SEQ ID NO: 4663054 - DNA, 25 bp, Homo sapien
cgctgcagaccagcaggatgtggct

SEQ ID NO: 4663055 - DNA, 25 bp, Homo sapien
tgatggttactttggcagtcggccc

SEQ ID NO: 4663056 - DNA, 25 bp, Homo sapien
ggtgggaagcaagtcacgattcagc

SEQ ID NO: 4663057 - DNA, 25 bp, Homo sapien
gtggttatttaggaaccatgagtcc

SEQ ID NO: 4663058 - DNA, 25 bp, Homo sapien
atctcatgcgcctgccactcagtgg

SEQ ID NO: 4663059 - DNA, 25 bp, Homo sapien
agcagagcttctgagcgtggttatt

SEQ ID NO: 4663060 - DNA, 25 bp, Homo sapien
tatttatgcagataagcactgtgtg

SEQ ID NO: 4663061 - DNA, 25 bp, Homo sapien
atttatgcagataagcactgtgtgc

SEQ ID NO: 4663062 - DNA, 25 bp, Homo sapien
ctttatcagccagcccaccttgtgg

SEQ ID NO: 4663063 - DNA, 25 bp, Homo sapien
ccctttatcagccagcccaccttgt

SEQ ID NO: 4663064 - DNA, 25 bp, Homo sapien
tgtgtggccgatgtgattccatcac

SEQ ID NO: 4663065 - DNA, 25 bp, Homo sapien
gtggccgatgtgattccatcaccct

SEQ ID NO: 4663066 - DNA, 25 bp, Homo sapien
gagccgattgagacgctgctgtgca

SEQ ID NO: 4663067 - DNA, 25 bp, Homo sapien
tgaaagggtctgattccatctcccc

SEQ ID NO: 4663068 - DNA, 25 bp, Homo sapien
cagtttccttagtgtgaagtgggac

SEQ ID NO: 4663069 - DNA, 25 bp, Homo sapien
aacatccagcatagcatgggaagct

SEQ ID NO: 4663070 - DNA, 25 bp, Homo sapien
taggggatgaatgtgagtcagagct

SEQ ID NO: 4663071 - DNA, 25 bp, Homo sapien
gatgaatgtgagtcagagctcagct

SEQ ID NO: 4663072 - DNA, 25 bp, Homo sapien
ctgtaggggatgaatgtgagtcaga

SEQ ID NO: 4663073 - DNA, 25 bp, Homo sapien
ggggatgaatgtgagtcagagctca

SEQ ID NO: 4663074 - DNA, 25 bp, Homo sapien
tgtgtgagggagcggctccggcact

SEQ ID NO: 4663075 - DNA, 25 bp, Homo sapien
gtgtgagggagcggctccggcactg

SEQ ID NO: 4663076 - DNA, 25 bp, Homo sapien
aggcaccggctgggcccaaagctct

SEQ ID NO: 4663077 - DNA, 25 bp, Homo sapien
cgctgcctgcatggacatagtgttt

SEQ ID NO: 4663078 - DNA, 25 bp, Homo sapien
gcttcagagccaaccgccgctggcc

SEQ ID NO: 4663079 - DNA, 25 bp, Homo sapien
tgaggcccagaaagtacggtgtctt

SEQ ID NO: 4663080 - DNA, 25 bp, Homo sapien
tgaatgatgttgtgggcagggagca

SEQ ID NO: 4663081 - DNA, 25 bp, Homo sapien
cccatagtaacgatgtgaatgatgt

SEQ ID NO: 4663082 - DNA, 25 bp, Homo sapien
atccttcacccatagtaacgatgtg

SEQ ID NO: 4663083 - DNA, 25 bp, Homo sapien
ctgcttcaatctggcgcgagaggga

SEQ ID NO: 4663084 - DNA, 25 bp, Homo sapien
gaggtacactggagcccgtggcttc

SEQ ID NO: 4663085 - DNA, 25 bp, Homo sapien
tctaacaaccctggaactgagggag

SEQ ID NO: 4663086 - DNA, 25 bp, Homo sapien
aggtacactggagcccgtggcttcc

SEQ ID NO: 4663087 - DNA, 25 bp, Homo sapien
tggaggtacactggagcccgtggct

SEQ ID NO: 4663088 - DNA, 25 bp, Homo sapien
tgctactaggagaacacgcctaagg

SEQ ID NO: 4663089 - DNA, 25 bp, Homo sapien
tcatttcatgactccgggaagaggg

SEQ ID NO: 4663090 - DNA, 25 bp, Homo sapien
tctccatgcaggtgagggcagtagc

SEQ ID NO: 4663091 - DNA, 25 bp, Homo sapien
gggcagtagccctttcctgtgaggt

SEQ ID NO: 4663092 - DNA, 25 bp, Homo sapien
cctcacttcctggtacaaaatctgt

SEQ ID NO: 4663093 - DNA, 25 bp, Homo sapien
ttcttccctgagtgtatctctcctc

SEQ ID NO: 4663094 - DNA, 25 bp, Homo sapien
caagaccgttttgaatgctctaggg

SEQ ID NO: 4663095 - DNA, 25 bp, Homo sapien
gggctactgtacaaattaattctct

SEQ ID NO: 4663096 - DNA, 25 bp, Homo sapien
gagctgttcccagttaagctggcag

SEQ ID NO: 4663097 - DNA, 25 bp, Homo sapien
caaccaagcataggatttcaggtgg

SEQ ID NO: 4663098 - DNA, 25 bp, Homo sapien
caagggcagcccgaggcttaatgct

SEQ ID NO: 4663099 - DNA, 25 bp, Homo sapien
gttaagcttctttgatgcccggcac

SEQ ID NO: 4663100 - DNA, 25 bp, Homo sapien
tccatttgcaactgggagcacacag

SEQ ID NO: 4663101 - DNA, 25 bp, Homo sapien
ccatttgcaactgggagcacacagt

SEQ ID NO: 4663102 - DNA, 25 bp, Homo sapien
cccttgttgtcttcggttctcactg

SEQ ID NO: 4663103 - DNA, 25 bp, Homo sapien
cttgttgtcttcggttctcactgag

SEQ ID NO: 4663104 - DNA, 25 bp, Homo sapien
ccttgttgtcttcggttctcactga

SEQ ID NO: 4663105 - DNA, 25 bp, Homo sapien
gcccttgttgtcttcggttctcact

SEQ ID NO: 4663106 - DNA, 25 bp, Homo sapien
cgcccacacgttggactggggccga

SEQ ID NO: 4663107 - DNA, 25 bp, Homo sapien
ccacgcccacacgttggactggggc

SEQ ID NO: 4663108 - DNA, 25 bp, Homo sapien
agaccacgcccacacgttggactgg

SEQ ID NO: 4663109 - DNA, 25 bp, Homo sapien
gaccacgcccacacgttggactggg

SEQ ID NO: 4663110 - DNA, 25 bp, Homo sapien
cgctccgaggcgcttggcggggtct

SEQ ID NO: 4663111 - DNA, 25 bp, Homo sapien
tgcgcgctccgaggcgcttggcggg

SEQ ID NO: 4663112 - DNA, 25 bp, Homo sapien
ctgcgcgctccgaggcgcttggcgg

SEQ ID NO: 4663113 - DNA, 25 bp, Homo sapien
cgaggcgcttggcggggtctgccag

SEQ ID NO: 4663114 - DNA, 25 bp, Homo sapien
gccttgccacggagggtggcggccg

SEQ ID NO: 4663115 - DNA, 25 bp, Homo sapien
tccctggggcaggcgtggtgacccc

SEQ ID NO: 4663116 - DNA, 25 bp, Homo sapien
ccttgccacggagggtggcggccgc

SEQ ID NO: 4663117 - DNA, 25 bp, Homo sapien
ggcaggcgtggtgaccccggcccgc

SEQ ID NO: 4663118 - DNA, 25 bp, Homo sapien
ggtgttttagtgtcaaatcctctcc

SEQ ID NO: 4663119 - DNA, 25 bp, Homo sapien
agtggtgttttagtgtcaaatcctc

SEQ ID NO: 4663120 - DNA, 25 bp, Homo sapien
tcagtggtgttttagtgtcaaatcc

SEQ ID NO: 4663121 - DNA, 25 bp, Homo sapien
ggtcagtggtgttttagtgtcaaat

SEQ ID NO: 4663122 - DNA, 25 bp, Homo sapien
attgaatctactgtattctccaaac

SEQ ID NO: 4663123 - DNA, 25 bp, Homo sapien
tggtataacttattactggttatca

SEQ ID NO: 4663124 - DNA, 25 bp, Homo sapien
ccccttggatacattgtatctacta

SEQ ID NO: 4663125 - DNA, 25 bp, Homo sapien
caggcatgcactgaggggtcctgga

SEQ ID NO: 4663126 - DNA, 25 bp, Homo sapien
ctcacatcatcgcaagaagggtgag

SEQ ID NO: 4663127 - DNA, 25 bp, Homo sapien
catcatcgcaagaagggtgagtacc

SEQ ID NO: 4663128 - DNA, 25 bp, Homo sapien
tcatcgcaagaagggtgagtaccgt

SEQ ID NO: 4663129 - DNA, 25 bp, Homo sapien
cacatcatcgcaagaagggtgagta

SEQ ID NO: 4663130 - DNA, 25 bp, Homo sapien
ccatcacaaggcctatgtttttcat

SEQ ID NO: 4663131 - DNA, 25 bp, Homo sapien
tccatcacaaggcctatgtttttca

SEQ ID NO: 4663132 - DNA, 25 bp, Homo sapien
gcagcagtggtgaagggccacctga

SEQ ID NO: 4663133 - DNA, 25 bp, Homo sapien
agcagtggtgaagggccacctgagc

SEQ ID NO: 4663134 - DNA, 25 bp, Homo sapien
cagtggtgaagggccacctgagcat

SEQ ID NO: 4663135 - DNA, 25 bp, Homo sapien
gaggcagcagtggtgaagggccacc

SEQ ID NO: 4663136 - DNA, 25 bp, Homo sapien
gggacaacgcagagctggatccctc

SEQ ID NO: 4663137 - DNA, 25 bp, Homo sapien
gctggatccctccatgaagtacact

SEQ ID NO: 4663138 - DNA, 25 bp, Homo sapien
ttggatgctctagaggtcacatggg

SEQ ID NO: 4663139 - DNA, 25 bp, Homo sapien
gctccaaaggccattggatgctcta

SEQ ID NO: 4663140 - DNA, 25 bp, Homo sapien
ggtagccgcagcttagcgcacgtgc

SEQ ID NO: 4663141 - DNA, 25 bp, Homo sapien
cagaccccaccatctggtggttgga

SEQ ID NO: 4663142 - DNA, 25 bp, Homo sapien
ggcagcggaacatgagcacggtccc

SEQ ID NO: 4663143 - DNA, 25 bp, Homo sapien
ccacgaaggacttggaaggttgctt

SEQ ID NO: 4663144 - DNA, 25 bp, Homo sapien
catgctgggcactgaaaagggacta

SEQ ID NO: 4663145 - DNA, 25 bp, Homo sapien
taaagttggccatgtgcacctgtac

SEQ ID NO: 4663146 - DNA, 25 bp, Homo sapien
tgttctggctaaaaaaggcctcgga

SEQ ID NO: 4663147 - DNA, 25 bp, Homo sapien
tagacagtactgaggaggccttgcc

SEQ ID NO: 4663148 - DNA, 25 bp, Homo sapien
ctcctgggcgaggtttgcccagatt

SEQ ID NO: 4663149 - DNA, 25 bp, Homo sapien
ccagatttgcttggcccaggggttg

SEQ ID NO: 4663150 - DNA, 25 bp, Homo sapien
gctcctgggcgaggtttgcccagat

SEQ ID NO: 4663151 - DNA, 25 bp, Homo sapien
ccaaaggtctcgtgtggtggcacca

SEQ ID NO: 4663152 - DNA, 25 bp, Homo sapien
gatcacggccaccttgaagccaaag

SEQ ID NO: 4663153 - DNA, 25 bp, Homo sapien
gctcacaatggaggcgatcacggcc

SEQ ID NO: 4663154 - DNA, 25 bp, Homo sapien
ggccatggacatgagcaggatgatg

SEQ ID NO: 4663155 - DNA, 25 bp, Homo sapien
ctgggcccgctcacgggtttgttga

SEQ ID NO: 4663156 - DNA, 25 bp, Homo sapien
tgaagctgtggttgtcgtgcgcctg

SEQ ID NO: 4663157 - DNA, 25 bp, Homo sapien
cttgaggccaaggtatgcggcctgc

SEQ ID NO: 4663158 - DNA, 25 bp, Homo sapien
gctcacgggtttgttgaagtgcttg

SEQ ID NO: 4663159 - DNA, 25 bp, Homo sapien
gcttgctggtgctctcaccatggtc

SEQ ID NO: 4663160 - DNA, 25 bp, Homo sapien
gccagcttgctggtgctctcaccat

SEQ ID NO: 4663161 - DNA, 25 bp, Homo sapien
tggccagcttgctggtgctctcacc

SEQ ID NO: 4663162 - DNA, 25 bp, Homo sapien
cagcttgctggtgctctcaccatgg

SEQ ID NO: 4663163 - DNA, 25 bp, Homo sapien
ggagccactgaggcttagagctctg

SEQ ID NO: 4663164 - DNA, 25 bp, Homo sapien
agccactgaggcttagagctctggg

SEQ ID NO: 4663165 - DNA, 25 bp, Homo sapien
gccactgaggcttagagctctgggg

SEQ ID NO: 4663166 - DNA, 25 bp, Homo sapien
ctgcgggctgttgtggcattcctgt

SEQ ID NO: 4663167 - DNA, 25 bp, Homo sapien
tatgctgcgggctgttgtggcattc

SEQ ID NO: 4663168 - DNA, 25 bp, Homo sapien
cctagggcatatgctgcgggctgtt

SEQ ID NO: 4663169 - DNA, 25 bp, Homo sapien
tcaccctagggcatatgctgcgggc

SEQ ID NO: 4663170 - DNA, 25 bp, Homo sapien
catgggcaccagcctcactgcgtgg

SEQ ID NO: 4663171 - DNA, 25 bp, Homo sapien
tcatcagtctcgagctgggcgcatg

SEQ ID NO: 4663172 - DNA, 25 bp, Homo sapien
cctcagtagtggtttcaagtagtcc

SEQ ID NO: 4663173 - DNA, 25 bp, Homo sapien
ggatatgccggaacagaacactccc

SEQ ID NO: 4663174 - DNA, 25 bp, Homo sapien
ttggatgtcagctcggcccctcaag

SEQ ID NO: 4663175 - DNA, 25 bp, Homo sapien
ttaaaggaatgctagttagtgggag

SEQ ID NO: 4663176 - DNA, 25 bp, Homo sapien
ttgctgaaaagaagtttattgctat

SEQ ID NO: 4663177 - DNA, 25 bp, Homo sapien
ttcccagtctctttaaaggaatgct

SEQ ID NO: 4663178 - DNA, 25 bp, Homo sapien
tacaaaactagatttgcttaaaaca

SEQ ID NO: 4663179 - DNA, 25 bp, Homo sapien
accctccatgggtccttgcttggaa

SEQ ID NO: 4663180 - DNA, 25 bp, Homo sapien
cagaaccctccatgggtccttgctt

SEQ ID NO: 4663181 - DNA, 25 bp, Homo sapien
cctccatgggtccttgcttggaagc

SEQ ID NO: 4663182 - DNA, 25 bp, Homo sapien
aaccctccatgggtccttgcttgga

SEQ ID NO: 4663183 - DNA, 25 bp, Homo sapien
ggccagccccccggctttggctgtg

SEQ ID NO: 4663184 - DNA, 25 bp, Homo sapien
cgcgggccgtgctcgcccgcccctt

SEQ ID NO: 4663185 - DNA, 25 bp, Homo sapien
cgtgctcgcccgccccttttggcta

SEQ ID NO: 4663186 - DNA, 25 bp, Homo sapien
ccgcccgcgggccgtgctcgcccgc

SEQ ID NO: 4663187 - DNA, 25 bp, Homo sapien
gccgtgctcgcccgccccttttggc

SEQ ID NO: 4663188 - DNA, 25 bp, Homo sapien
gccgcccgcagtccccagcggtctg

SEQ ID NO: 4663189 - DNA, 25 bp, Homo sapien
tgccgcccagccgaccccgtgccca

SEQ ID NO: 4663190 - DNA, 25 bp, Homo sapien
gccgcccagccgaccccgtgcccac

SEQ ID NO: 4663191 - DNA, 25 bp, Homo sapien
ctgccgcccagccgaccccgtgccc

SEQ ID NO: 4663192 - DNA, 25 bp, Homo sapien
ccctgccgcccagccgaccccgtgc

SEQ ID NO: 4663193 - DNA, 25 bp, Homo sapien
accgacagctgacgggccaaggtca

SEQ ID NO: 4663194 - DNA, 25 bp, Homo sapien
gcctgcaggcgactcgcaaggcagc

SEQ ID NO: 4663195 - DNA, 25 bp, Homo sapien
caccgacagctgacgggccaaggtc

SEQ ID NO: 4663196 - DNA, 25 bp, Homo sapien
gcgcggcctgcaggcgactcgcaag

SEQ ID NO: 4663197 - DNA, 25 bp, Homo sapien
ttctaccacctcctactctttcaga

SEQ ID NO: 4663198 - DNA, 25 bp, Homo sapien
caaattccccaccacgggacacaca

SEQ ID NO: 4663199 - DNA, 25 bp, Homo sapien
ccggcaccgcctcggctggcacggc

SEQ ID NO: 4663200 - DNA, 25 bp, Homo sapien
acttcgcgggggtgcactcgcgcac

SEQ ID NO: 4663201 - DNA, 25 bp, Homo sapien
acaggaatcacatgccgccgaggaa

SEQ ID NO: 4663202 - DNA, 25 bp, Homo sapien
tgtttccgtggccagaatcacagca

SEQ ID NO: 4663203 - DNA, 25 bp, Homo sapien
cgtcgtggaccaccgaaggagtctg

SEQ ID NO: 4663204 - DNA, 25 bp, Homo sapien
caggaccgctgtgaattctctccgg

SEQ ID NO: 4663205 - DNA, 25 bp, Homo sapien
tccagggtccccttatgcaaggaag

SEQ ID NO: 4663206 - DNA, 25 bp, Homo sapien
caaggtgaggcctatagtcagagcc

SEQ ID NO: 4663207 - DNA, 25 bp, Homo sapien
tagcgtggagcacaacaaccttggg

SEQ ID NO: 4663208 - DNA, 25 bp, Homo sapien
tgagactcaagagagcgagcaccga

SEQ ID NO: 4663209 - DNA, 25 bp, Homo sapien
gagggctggcgcaaggcaggacccc

SEQ ID NO: 4663210 - DNA, 25 bp, Homo sapien
ctgctcacagcgagggctggcgcaa

SEQ ID NO: 4663211 - DNA, 25 bp, Homo sapien
cgcaaggcaggaccccagttggtgc

SEQ ID NO: 4663212 - DNA, 25 bp, Homo sapien
ctggcgcaaggcaggaccccagttg

SEQ ID NO: 4663213 - DNA, 25 bp, Homo sapien
tcctctcccgaatttcttccaggaa

SEQ ID NO: 4663214 - DNA, 25 bp, Homo sapien
tcagcgttctgcaggcactggctca

SEQ ID NO: 4663215 - DNA, 25 bp, Homo sapien
tccacctggttaattcatgttcacc

SEQ ID NO: 4663216 - DNA, 25 bp, Homo sapien
ctgttctacgtgcaaaaggccttcc

SEQ ID NO: 4663217 - DNA, 25 bp, Homo sapien
gtggttgcgagttgtgcacacaaac

SEQ ID NO: 4663218 - DNA, 25 bp, Homo sapien
tggttgcgagttgtgcacacaaaca

SEQ ID NO: 4663219 - DNA, 25 bp, Homo sapien
tgtggttgcgagttgtgcacacaaa

SEQ ID NO: 4663220 - DNA, 25 bp, Homo sapien
ctgtggttgcgagttgtgcacacaa

SEQ ID NO: 4663221 - DNA, 25 bp, Homo sapien
caggccgcacggtccggaggctgaa

SEQ ID NO: 4663222 - DNA, 25 bp, Homo sapien
ccatgagtcaccatgagccgtgagt

SEQ ID NO: 4663223 - DNA, 25 bp, Homo sapien
gagtcaccatgagccgtgagtcagc

SEQ ID NO: 4663224 - DNA, 25 bp, Homo sapien
tggcacaggccgcacggtccggagg

SEQ ID NO: 4663225 - DNA, 25 bp, Homo sapien
aagacacacatatgggtcactggca

SEQ ID NO: 4663226 - DNA, 25 bp, Homo sapien
tatacaactagccatcaagcacaca

SEQ ID NO: 4663227 - DNA, 25 bp, Homo sapien
caatgtggtactatcataaagacac

SEQ ID NO: 4663228 - DNA, 25 bp, Homo sapien
ggattagtatccttactccataaag

SEQ ID NO: 4663229 - DNA, 25 bp, Homo sapien
caggagggtgaacctgcagaatcac

SEQ ID NO: 4663230 - DNA, 25 bp, Homo sapien
ggagggtgaacctgcagaatcacag

SEQ ID NO: 4663231 - DNA, 25 bp, Homo sapien
gagggtgaacctgcagaatcacagc

SEQ ID NO: 4663232 - DNA, 25 bp, Homo sapien
gggtgaacctgcagaatcacagcca

SEQ ID NO: 4663233 - DNA, 25 bp, Homo sapien
gatctgtgggtagtaacggttcagc

SEQ ID NO: 4663234 - DNA, 25 bp, Homo sapien
actcaagcgcccatggcctgtcagg

SEQ ID NO: 4663235 - DNA, 25 bp, Homo sapien
caggaaaggcgtgtcctgcaccagg

SEQ ID NO: 4663236 - DNA, 25 bp, Homo sapien
caccaggcggtcacaataggtctga

SEQ ID NO: 4663237 - DNA, 25 bp, Homo sapien
tgggccaacctcattgttccaggag

SEQ ID NO: 4663238 - DNA, 25 bp, Homo sapien
ctgagccagtagcagggcccgtgtt

SEQ ID NO: 4663239 - DNA, 25 bp, Homo sapien
tcctgttctgttgtgggccaacctc

SEQ ID NO: 4663240 - DNA, 25 bp, Homo sapien
attgttccaggagatgccccaaccc

SEQ ID NO: 4663241 - DNA, 25 bp, Homo sapien
tgtgtggttctcaaggtcagtggac

SEQ ID NO: 4663242 - DNA, 25 bp, Homo sapien
tggtgacatcattccaagtgttggg

SEQ ID NO: 4663243 - DNA, 25 bp, Homo sapien
catatcattctacatggccacaggg

SEQ ID NO: 4663244 - DNA, 25 bp, Homo sapien
caggctgggagtggtcacaaagaaa

SEQ ID NO: 4663245 - DNA, 25 bp, Homo sapien
ccagggaagatcaggccaggggggc

SEQ ID NO: 4663246 - DNA, 25 bp, Homo sapien
cagggaagatcaggccaggggggct

SEQ ID NO: 4663247 - DNA, 25 bp, Homo sapien
gccgcacacgcaaggatgccttggg

SEQ ID NO: 4663248 - DNA, 25 bp, Homo sapien
cagagccgcacacgcaaggatgcct

SEQ ID NO: 4663249 - DNA, 25 bp, Homo sapien
gtcacagagccgcacacgcaaggat

SEQ ID NO: 4663250 - DNA, 25 bp, Homo sapien
gagccgcacacgcaaggatgccttg

SEQ ID NO: 4663251 - DNA, 25 bp, Homo sapien
ggtagaactcctggcagtcccgctc

SEQ ID NO: 4663252 - DNA, 25 bp, Homo sapien
tacagggctcggtagaactcctggc

SEQ ID NO: 4663253 - DNA, 25 bp, Homo sapien
ggctcggtagaactcctggcagtcc

SEQ ID NO: 4663254 - DNA, 25 bp, Homo sapien
gcatggatatacagggctcggtaga

SEQ ID NO: 4663255 - DNA, 25 bp, Homo sapien
cacagacatgaagggatccccgtgg

SEQ ID NO: 4663256 - DNA, 25 bp, Homo sapien
ccaagcatgcatggttggtgatgtg

SEQ ID NO: 4663257 - DNA, 25 bp, Homo sapien
tccatgccatcaacggcaggctggg

SEQ ID NO: 4663258 - DNA, 25 bp, Homo sapien
caagagtggacgtataagatgcccc

SEQ ID NO: 4663259 - DNA, 25 bp, Homo sapien
gcatagttagtcaacgggcagggcc

SEQ ID NO: 4663260 - DNA, 25 bp, Homo sapien
gatcgctgcaatgaaagggtccgtc

SEQ ID NO: 4663261 - DNA, 25 bp, Homo sapien
cacagaggcgtcagatcagagttgc

SEQ ID NO: 4663262 - DNA, 25 bp, Homo sapien
tatggaaacacccacacgtgtgcag

SEQ ID NO: 4663263 - DNA, 25 bp, Homo sapien
ctggctgcccgagtctagctctgtg

SEQ ID NO: 4663264 - DNA, 25 bp, Homo sapien
tctagctctgtgcaatctgagttct

SEQ ID NO: 4663265 - DNA, 25 bp, Homo sapien
ccctgttactcagctcgccgctctg

SEQ ID NO: 4663266 - DNA, 25 bp, Homo sapien
cgagtctagctctgtgcaatctgag

SEQ ID NO: 4663267 - DNA, 25 bp, Homo sapien
gagaaaccagcgtgaacagggctcc

SEQ ID NO: 4663268 - DNA, 25 bp, Homo sapien
agagcccccaaacgagcaccttagg

SEQ ID NO: 4663269 - DNA, 25 bp, Homo sapien
gctgaggtgctgcctgaagagcccc

SEQ ID NO: 4663270 - DNA, 25 bp, Homo sapien
agaagcccctgaggcggagatggag

SEQ ID NO: 4663271 - DNA, 25 bp, Homo sapien
ctggcggatagcagtacaggagcag

SEQ ID NO: 4663272 - DNA, 25 bp, Homo sapien
gcggatagcagtacaggagcagggc

SEQ ID NO: 4663273 - DNA, 25 bp, Homo sapien
cggatagcagtacaggagcagggcc

SEQ ID NO: 4663274 - DNA, 25 bp, Homo sapien
tggcggatagcagtacaggagcagg

SEQ ID NO: 4663275 - DNA, 25 bp, Homo sapien
cagggtgctccctcccggtcatggt

SEQ ID NO: 4663276 - DNA, 25 bp, Homo sapien
tgtttccatccctcctgcgggggtg

SEQ ID NO: 4663277 - DNA, 25 bp, Homo sapien
cagaggtgaattctgtgtttccatc

SEQ ID NO: 4663278 - DNA, 25 bp, Homo sapien
aggggaggcaaaagctcaagaacca

SEQ ID NO: 4663279 - DNA, 25 bp, Homo sapien
ggctgacatgtctgtcgatgatgac

SEQ ID NO: 4663280 - DNA, 25 bp, Homo sapien
catgtctgtcgatgatgacaggcga

SEQ ID NO: 4663281 - DNA, 25 bp, Homo sapien
tgtcgatgatgacaggcgagaaacc

SEQ ID NO: 4663282 - DNA, 25 bp, Homo sapien
acaggcgagaaaccgaggacgcgcc

SEQ ID NO: 4663283 - DNA, 25 bp, Homo sapien
tcgaggactctttggttgagtggca

SEQ ID NO: 4663284 - DNA, 25 bp, Homo sapien
ttaatatggtcagcaccttgtaagg

SEQ ID NO: 4663285 - DNA, 25 bp, Homo sapien
caccttgtaaggtgaaggtgtgttt

SEQ ID NO: 4663286 - DNA, 25 bp, Homo sapien
ttggcgggccggctcgaggactctt

SEQ ID NO: 4663287 - DNA, 25 bp, Homo sapien
tagaggaaacactaactccaggtgc

SEQ ID NO: 4663288 - DNA, 25 bp, Homo sapien
cttccagccagtgaacagccgggtt

SEQ ID NO: 4663289 - DNA, 25 bp, Homo sapien
cctgcaaggtagtgctagggtcccc

SEQ ID NO: 4663290 - DNA, 25 bp, Homo sapien
tgggtgttcctcgactgccagagtc

SEQ ID NO: 4663291 - DNA, 25 bp, Homo sapien
ctgtgtctgggctgacatcaggtct

SEQ ID NO: 4663292 - DNA, 25 bp, Homo sapien
gttcctcggatggatgagtggcccc

SEQ ID NO: 4663293 - DNA, 25 bp, Homo sapien
ggctgacatcaggtctgcatagccc

SEQ ID NO: 4663294 - DNA, 25 bp, Homo sapien
tccagctcccgttcctcggatggat

SEQ ID NO: 4663295 - DNA, 25 bp, Homo sapien
cctgtgagggccgtagaccttgtat

SEQ ID NO: 4663296 - DNA, 25 bp, Homo sapien
ggcgtcagaagcacacggttctggc

SEQ ID NO: 4663297 - DNA, 25 bp, Homo sapien
gccttctccagaatcttggcttggg

SEQ ID NO: 4663298 - DNA, 25 bp, Homo sapien
taaagcccacgctctttgtcaggct

SEQ ID NO: 4663299 - DNA, 25 bp, Homo sapien
tttggccctacggatggccactggc

SEQ ID NO: 4663300 - DNA, 25 bp, Homo sapien
tgtgcccagagaagggtctcgaccc

SEQ ID NO: 4663301 - DNA, 25 bp, Homo sapien
cacacagcaggtccgtggatgggct

SEQ ID NO: 4663302 - DNA, 25 bp, Homo sapien
gccacaatagcccagagggtcagaa

SEQ ID NO: 4663303 - DNA, 25 bp, Homo sapien
gggacgtcccgctctaggccaagtc

SEQ ID NO: 4663304 - DNA, 25 bp, Homo sapien
ccttcccgccccatcagggtcagaa

SEQ ID NO: 4663305 - DNA, 25 bp, Homo sapien
cccaccgctgcatgatcttgccagg

SEQ ID NO: 4663306 - DNA, 25 bp, Homo sapien
gcatgatcttgccaggccctgtcct

SEQ ID NO: 4663307 - DNA, 25 bp, Homo sapien
tcacccagatgtatggtaatctaat

SEQ ID NO: 4663308 - DNA, 25 bp, Homo sapien
taatctaatgataattccagtatgc

SEQ ID NO: 4663309 - DNA, 25 bp, Homo sapien
tctgttctgctcctcacccagatgt

SEQ ID NO: 4663310 - DNA, 25 bp, Homo sapien
tatggtaatctaatgataattccag

SEQ ID NO: 4663311 - DNA, 25 bp, Homo sapien
cctctgaggttcacggttgctgtta

SEQ ID NO: 4663312 - DNA, 25 bp, Homo sapien
tgcctctgaggttcacggttgctgt

SEQ ID NO: 4663313 - DNA, 25 bp, Homo sapien
ggctgcctctgaggttcacggttgc

SEQ ID NO: 4663314 - DNA, 25 bp, Homo sapien
ccttggctgcctctgaggttcacgg

SEQ ID NO: 4663315 - DNA, 25 bp, Homo sapien
ggtgggcacctgtaatcccagctac

SEQ ID NO: 4663316 - DNA, 25 bp, Homo sapien
aggagttcgaggccagcatggtgaa

SEQ ID NO: 4663317 - DNA, 25 bp, Homo sapien
catggtgaaacccgtctctactaaa

SEQ ID NO: 4663318 - DNA, 25 bp, Homo sapien
aatacacaaattagctgggcgtggt

SEQ ID NO: 4663319 - DNA, 25 bp, Homo sapien
gggcaagttggtattggctgctgac

SEQ ID NO: 4663320 - DNA, 25 bp, Homo sapien
cagcagatccactttcaaggtgact

SEQ ID NO: 4663321 - DNA, 25 bp, Homo sapien
tccccaagggattggttctcctcag

SEQ ID NO: 4663322 - DNA, 25 bp, Homo sapien
caagagagactcaacaggatggttc

SEQ ID NO: 4663323 - DNA, 25 bp, Homo sapien
gtatctccacgaccagaggcctcat

SEQ ID NO: 4663324 - DNA, 25 bp, Homo sapien
tccgtatctccacgaccagaggcct

SEQ ID NO: 4663325 - DNA, 25 bp, Homo sapien
cgtatctccacgaccagaggcctca

SEQ ID NO: 4663326 - DNA, 25 bp, Homo sapien
ctccgtatctccacgaccagaggcc

SEQ ID NO: 4663327 - DNA, 25 bp, Homo sapien
ggcactgtggaactggggccccgcc

SEQ ID NO: 4663328 - DNA, 25 bp, Homo sapien
cacgggtttgcctggcccgggctag

SEQ ID NO: 4663329 - DNA, 25 bp, Homo sapien
cccgggctagtctgcagccgctgct

SEQ ID NO: 4663330 - DNA, 25 bp, Homo sapien
cgccggccaggtatgcagcgagtct

SEQ ID NO: 4663331 - DNA, 25 bp, Homo sapien
tgtgtcatcagggataggaaacaca

SEQ ID NO: 4663332 - DNA, 25 bp, Homo sapien
aggaagacatagaggagtatctctg

SEQ ID NO: 4663333 - DNA, 25 bp, Homo sapien
cattccacgactcagttgggcccat

SEQ ID NO: 4663334 - DNA, 25 bp, Homo sapien
gagcctctgtggtgtaaaaggcttg

SEQ ID NO: 4663335 - DNA, 25 bp, Homo sapien
cctggccattccacgactcagttgg

SEQ ID NO: 4663336 - DNA, 25 bp, Homo sapien
tctgtggtgtaaaaggcttgtccca

SEQ ID NO: 4663337 - DNA, 25 bp, Homo sapien
agctggttctgatggcaggcgccaa

SEQ ID NO: 4663338 - DNA, 25 bp, Homo sapien
tggttctgatggcaggcgccaataa

SEQ ID NO: 4663339 - DNA, 25 bp, Homo sapien
gctggttctgatggcaggcgccaat

SEQ ID NO: 4663340 - DNA, 25 bp, Homo sapien
gttctgatggcaggcgccaataatc

SEQ ID NO: 4663341 - DNA, 25 bp, Homo sapien
ctgggcctcagcaagcaacaggacc

SEQ ID NO: 4663342 - DNA, 25 bp, Homo sapien
gctccatgcagatgcagttccagga

SEQ ID NO: 4663343 - DNA, 25 bp, Homo sapien
ctgctccatgcagatgcagttccag

SEQ ID NO: 4663344 - DNA, 25 bp, Homo sapien
gggcctcagcaagcaacaggaccat

SEQ ID NO: 4663345 - DNA, 25 bp, Homo sapien
ccagccagtaggcacgtgcaggcac

SEQ ID NO: 4663346 - DNA, 25 bp, Homo sapien
cagccagtaggcacgtgcaggcaca

SEQ ID NO: 4663347 - DNA, 25 bp, Homo sapien
agccagtaggcacgtgcaggcacac

SEQ ID NO: 4663348 - DNA, 25 bp, Homo sapien
cctgcgggccggctacctgggctcc

SEQ ID NO: 4663349 - DNA, 25 bp, Homo sapien
acccgcggttctttgctcgaggtag

SEQ ID NO: 4663350 - DNA, 25 bp, Homo sapien
ttgctcgaggtagcgctcctgtcct

SEQ ID NO: 4663351 - DNA, 25 bp, Homo sapien
ttctttggaacgccccgcagggctg

SEQ ID NO: 4663352 - DNA, 25 bp, Homo sapien
gggcgtgcgaggcgggagagatcac

SEQ ID NO: 4663353 - DNA, 25 bp, Homo sapien
ggcgtgcgaggcgggagagatcacg

SEQ ID NO: 4663354 - DNA, 25 bp, Homo sapien
agggcgtgcgaggcgggagagatca

SEQ ID NO: 4663355 - DNA, 25 bp, Homo sapien
cagggcgtgcgaggcgggagagatc

SEQ ID NO: 4663356 - DNA, 25 bp, Homo sapien
cagacgggaccagaggcttgggttg

SEQ ID NO: 4663357 - DNA, 25 bp, Homo sapien
gccctaagcccgcaacctgcccagc

SEQ ID NO: 4663358 - DNA, 25 bp, Homo sapien
cggatgagacaacgccgccctaagc

SEQ ID NO: 4663359 - DNA, 25 bp, Homo sapien
ctgcccaggccgccggatgagacaa

SEQ ID NO: 4663360 - DNA, 25 bp, Homo sapien
cagcgtgccggggacgtctcggcgg

SEQ ID NO: 4663361 - DNA, 25 bp, Homo sapien
gccggggacgtctcggcggccgcca

SEQ ID NO: 4663362 - DNA, 25 bp, Homo sapien
gtgccggggacgtctcggcggccgc

SEQ ID NO: 4663363 - DNA, 25 bp, Homo sapien
gcgtgccggggacgtctcggcggcc

SEQ ID NO: 4663364 - DNA, 25 bp, Homo sapien
atgaggcggcgcgtcttgcagagca

SEQ ID NO: 4663365 - DNA, 25 bp, Homo sapien
tccgcgggcgcgctccgcgatgagg

SEQ ID NO: 4663366 - DNA, 25 bp, Homo sapien
cacgctgcgccgcagaaagcgctgg

SEQ ID NO: 4663367 - DNA, 25 bp, Homo sapien
ctcctggtccgactctaccacgctg

SEQ ID NO: 4663368 - DNA, 25 bp, Homo sapien
ctgcgatggggtccgggccgggctc

SEQ ID NO: 4663369 - DNA, 25 bp, Homo sapien
gggtccgggccgggctcctgcgtgc

SEQ ID NO: 4663370 - DNA, 25 bp, Homo sapien
cgggctcctgcgtgcccacgggctc

SEQ ID NO: 4663371 - DNA, 25 bp, Homo sapien
tgcccacgggctcggggccggcgtc

SEQ ID NO: 4663372 - DNA, 25 bp, Homo sapien
tgtcgaacttgaggaagcggccgtc

SEQ ID NO: 4663373 - DNA, 25 bp, Homo sapien
cgcggcccagctcgatgtcgaactt

SEQ ID NO: 4663374 - DNA, 25 bp, Homo sapien
cacggccttgaggtcgtcctcgtcg

SEQ ID NO: 4663375 - DNA, 25 bp, Homo sapien
tgtagaccgtcttgaaggaaccgcg

SEQ ID NO: 4663376 - DNA, 25 bp, Homo sapien
cctgggtcattaaagtaggtcatcg

SEQ ID NO: 4663377 - DNA, 25 bp, Homo sapien
ccctgggtcattaaagtaggtcatc

SEQ ID NO: 4663378 - DNA, 25 bp, Homo sapien
ttgaagcctccacactgttttgcaa

SEQ ID NO: 4663379 - DNA, 25 bp, Homo sapien
gggtcattaaagtaggtcatcggga

SEQ ID NO: 4663380 - DNA, 25 bp, Homo sapien
agaagtctctgcaggtatccctgct

SEQ ID NO: 4663381 - DNA, 25 bp, Homo sapien
tcagttctccagggaggccccccag

SEQ ID NO: 4663382 - DNA, 25 bp, Homo sapien
cagttctccagggaggccccccagc

SEQ ID NO: 4663383 - DNA, 25 bp, Homo sapien
aggccatactcagcgagtctcctct

SEQ ID NO: 4663384 - DNA, 25 bp, Homo sapien
acccacttggcacaggccatactca

SEQ ID NO: 4663385 - DNA, 25 bp, Homo sapien
gatgacgggccagctcagcactggc

SEQ ID NO: 4663386 - DNA, 25 bp, Homo sapien
gcatcatccactcccagacccagga

SEQ ID NO: 4663387 - DNA, 25 bp, Homo sapien
tgactatgggcatagaagggctgca

SEQ ID NO: 4663388 - DNA, 25 bp, Homo sapien
ctatgggcatagaagggctgcagct

SEQ ID NO: 4663389 - DNA, 25 bp, Homo sapien
gatgactatgggcatagaagggctg

SEQ ID NO: 4663390 - DNA, 25 bp, Homo sapien
aagatgactatgggcatagaagggc

SEQ ID NO: 4663391 - DNA, 25 bp, Homo sapien
gaggccgtcggcagatcagccacac

SEQ ID NO: 4663392 - DNA, 25 bp, Homo sapien
tgcatgaggccgtcggcagatcagc

SEQ ID NO: 4663393 - DNA, 25 bp, Homo sapien
gggacagtgcatgaggccgtcggca

SEQ ID NO: 4663394 - DNA, 25 bp, Homo sapien
acagtgcatgaggccgtcggcagat

SEQ ID NO: 4663395 - DNA, 25 bp, Homo sapien
tccatcagcacgaatagccccacct

SEQ ID NO: 4663396 - DNA, 25 bp, Homo sapien
ccctccatcagcacgaatagcccca

SEQ ID NO: 4663397 - DNA, 25 bp, Homo sapien
tcagcacgaatagccccacctccct

SEQ ID NO: 4663398 - DNA, 25 bp, Homo sapien
acctccctcgacaccccactgtcct

SEQ ID NO: 4663399 - DNA, 25 bp, Homo sapien
acccacgcgcacaggaaggcgagtt

SEQ ID NO: 4663400 - DNA, 25 bp, Homo sapien
gctgatgtgcggcaggcttgagtgc

SEQ ID NO: 4663401 - DNA, 25 bp, Homo sapien
ccagcacctgggttcaatgggccca

SEQ ID NO: 4663402 - DNA, 25 bp, Homo sapien
tgagagcaaaggtcacgaggctgat

SEQ ID NO: 4663403 - DNA, 25 bp, Homo sapien
cagagtggagcctgcgggctcacaa

SEQ ID NO: 4663404 - DNA, 25 bp, Homo sapien
cctggtatgatctcagcaggctcag

SEQ ID NO: 4663405 - DNA, 25 bp, Homo sapien
ctgcgggctcacaaggaaagggcct

SEQ ID NO: 4663406 - DNA, 25 bp, Homo sapien
gaaagggcctggtatgatctcagca

SEQ ID NO: 4663407 - DNA, 25 bp, Homo sapien
aatgcaccgcttgcccttggcgctg

SEQ ID NO: 4663408 - DNA, 25 bp, Homo sapien
ctgaggtcatcagctccgtcaccag

SEQ ID NO: 4663409 - DNA, 25 bp, Homo sapien
gtcaccagcacaatgcaccgcttgc

SEQ ID NO: 4663410 - DNA, 25 bp, Homo sapien
tcccagaagtcgtagaagcgcacga

SEQ ID NO: 4663411 - DNA, 25 bp, Homo sapien
aagtcgccaatcttcacagacccag

SEQ ID NO: 4663412 - DNA, 25 bp, Homo sapien
gacccagttggtccggtgatgaaaa

SEQ ID NO: 4663413 - DNA, 25 bp, Homo sapien
cagcaggcccttcaggatctgccgg

SEQ ID NO: 4663414 - DNA, 25 bp, Homo sapien
caaatgacgctcttttcagagtggc

SEQ ID NO: 4663415 - DNA, 25 bp, Homo sapien
gcccagcttctcatgggctccaagg

SEQ ID NO: 4663416 - DNA, 25 bp, Homo sapien
tgctgcccagcttctcatgggctcc

SEQ ID NO: 4663417 - DNA, 25 bp, Homo sapien
ctgcccagcttctcatgggctccaa

SEQ ID NO: 4663418 - DNA, 25 bp, Homo sapien
ccagcttctcatgggctccaagggc

SEQ ID NO: 4663419 - DNA, 25 bp, Homo sapien
tgatccagcaactcgaaacttcgtt

SEQ ID NO: 4663420 - DNA, 25 bp, Homo sapien
ggagtggagaccctcacctatatac

SEQ ID NO: 4663421 - DNA, 25 bp, Homo sapien
gcaaccatgcgggtcacaaggtctc

SEQ ID NO: 4663422 - DNA, 25 bp, Homo sapien
tcctgagtaggagatcacaagcctc

SEQ ID NO: 4663423 - DNA, 25 bp, Homo sapien
tactgaaaatttgctgcactagcaa

SEQ ID NO: 4663424 - DNA, 25 bp, Homo sapien
tagatttcagtcttaggcacacaga

SEQ ID NO: 4663425 - DNA, 25 bp, Homo sapien
aaattgggacaagaatatggtttag

SEQ ID NO: 4663426 - DNA, 25 bp, Homo sapien
catgagaaacaacaggagctgagtg

SEQ ID NO: 4663427 - DNA, 25 bp, Homo sapien
acaggtgtgctttacagacagggtt

SEQ ID NO: 4663428 - DNA, 25 bp, Homo sapien
cacaggtgtgctttacagacagggt

SEQ ID NO: 4663429 - DNA, 25 bp, Homo sapien
gggacacaggtgtgctttacagaca

SEQ ID NO: 4663430 - DNA, 25 bp, Homo sapien
gacacaggtgtgctttacagacagg

SEQ ID NO: 4663431 - DNA, 25 bp, Homo sapien
gggccgcattctggcactccgagta

SEQ ID NO: 4663432 - DNA, 25 bp, Homo sapien
atctcgggcgccatgaactcgggag

SEQ ID NO: 4663433 - DNA, 25 bp, Homo sapien
tcccaaaggcatagacgtccacgga

SEQ ID NO: 4663434 - DNA, 25 bp, Homo sapien
tccacggactcatcgtagtgctcct

SEQ ID NO: 4663435 - DNA, 25 bp, Homo sapien
tttgcagatacactccccaataatc

SEQ ID NO: 4663436 - DNA, 25 bp, Homo sapien
gatacactccccaataatctccttg

SEQ ID NO: 4663437 - DNA, 25 bp, Homo sapien
actttctcaaagctggccggcttga

SEQ ID NO: 4663438 - DNA, 25 bp, Homo sapien
tttctcaaagctggccggcttgata

SEQ ID NO: 4663439 - DNA, 25 bp, Homo sapien
cacccagagcctcagggcgatggtg

SEQ ID NO: 4663440 - DNA, 25 bp, Homo sapien
tcctctgcgaagaaggcgtggctca

SEQ ID NO: 4663441 - DNA, 25 bp, Homo sapien
gatggtggacttcctgccgtggtcc

SEQ ID NO: 4663442 - DNA, 25 bp, Homo sapien
tcgaaggtgaactctatggctccat

SEQ ID NO: 4663443 - DNA, 25 bp, Homo sapien
gctgtacatagcctatgcagcatct

SEQ ID NO: 4663444 - DNA, 25 bp, Homo sapien
aatgaatgtgtgaacggacagctgt

SEQ ID NO: 4663445 - DNA, 25 bp, Homo sapien
ctcactcggcacttgctatttgcaa

SEQ ID NO: 4663446 - DNA, 25 bp, Homo sapien
ttacatcggcagagaaatggtgcac

SEQ ID NO: 4663447 - DNA, 25 bp, Homo sapien
gatcttgacgtcactctcgtggaag

SEQ ID NO: 4663448 - DNA, 25 bp, Homo sapien
gatggacttggccacgatcttgacg

SEQ ID NO: 4663449 - DNA, 25 bp, Homo sapien
gccactggatcaaggccacgcggtc

SEQ ID NO: 4663450 - DNA, 25 bp, Homo sapien
gcctgtgcatggtaggtcacctgga

SEQ ID NO: 4663451 - DNA, 25 bp, Homo sapien
catgtatgaatgcagacatgtgtgc

SEQ ID NO: 4663452 - DNA, 25 bp, Homo sapien
tgcaggtgttcacgtgtggtagcca

SEQ ID NO: 4663453 - DNA, 25 bp, Homo sapien
tatgtgtgcctatgggtgttctatg

SEQ ID NO: 4663454 - DNA, 25 bp, Homo sapien
caggctgggcgtgcctgtgtacaca

SEQ ID NO: 4663455 - DNA, 25 bp, Homo sapien
tacggtgtgcctgggaacatcttca

SEQ ID NO: 4663456 - DNA, 25 bp, Homo sapien
caaagggcccaaacatgtcaaggtg

SEQ ID NO: 4663457 - DNA, 25 bp, Homo sapien
tcagggcgggtacatcgtgccaatc

SEQ ID NO: 4663458 - DNA, 25 bp, Homo sapien
tataagaggcgagggtgtctcagca

SEQ ID NO: 4663459 - DNA, 25 bp, Homo sapien
ggacggcgctgcgtcggcaagggag

SEQ ID NO: 4663460 - DNA, 25 bp, Homo sapien
gggagccaagcatcacgctctgctg

SEQ ID NO: 4663461 - DNA, 25 bp, Homo sapien
tgcgagtctgagtacacggtagagc

SEQ ID NO: 4663462 - DNA, 25 bp, Homo sapien
ctggccgctgtcgaaggtgctgtcc

SEQ ID NO: 4663463 - DNA, 25 bp, Homo sapien
ctgggcctggcttttgaatgtctcc

SEQ ID NO: 4663464 - DNA, 25 bp, Homo sapien
tggacagcccatcacagaatttaga

SEQ ID NO: 4663465 - DNA, 25 bp, Homo sapien
tgaccacaatgcagtgcagcctgga

SEQ ID NO: 4663466 - DNA, 25 bp, Homo sapien
tcagggccctcagaccaggtaatgg

SEQ ID NO: 4663467 - DNA, 25 bp, Homo sapien
ccacaggagagggacttggcccagt

SEQ ID NO: 4663468 - DNA, 25 bp, Homo sapien
ggccaggagtgcctcatgtggtatc

SEQ ID NO: 4663469 - DNA, 25 bp, Homo sapien
catgggaagccctaacctaggctga

SEQ ID NO: 4663470 - DNA, 25 bp, Homo sapien
tgtggtatcacatggcatgggaagc

SEQ ID NO: 4663471 - DNA, 25 bp, Homo sapien
tgatgtccctgctcaggtgtgctgg

SEQ ID NO: 4663472 - DNA, 25 bp, Homo sapien
cctgctcaggtgtgctggtttccac

SEQ ID NO: 4663473 - DNA, 25 bp, Homo sapien
tgctcaggtgtgctggtttccacac

SEQ ID NO: 4663474 - DNA, 25 bp, Homo sapien
tgtccctgctcaggtgtgctggttt

SEQ ID NO: 4663475 - DNA, 25 bp, Homo sapien
ggcccctggtccaaggtgactgtac

SEQ ID NO: 4663476 - DNA, 25 bp, Homo sapien
catcctttttgagtaagttgtctct

SEQ ID NO: 4663477 - DNA, 25 bp, Homo sapien
caggcccctggtccaaggtgactgt

SEQ ID NO: 4663478 - DNA, 25 bp, Homo sapien
ctcaggcccctggtccaaggtgact

SEQ ID NO: 4663479 - DNA, 25 bp, Homo sapien
gggcactgtacacagcccaggagct

SEQ ID NO: 4663480 - DNA, 25 bp, Homo sapien
gcctggagcaagtggcctcgtgctc

SEQ ID NO: 4663481 - DNA, 25 bp, Homo sapien
cctggcagcctggagcaagtggcct

SEQ ID NO: 4663482 - DNA, 25 bp, Homo sapien
tgggcactgtacacagcccaggagc

SEQ ID NO: 4663483 - DNA, 25 bp, Homo sapien
cgggacagagcccaccggcaagcca

SEQ ID NO: 4663484 - DNA, 25 bp, Homo sapien
ggacagagcccaccggcaagccagg

SEQ ID NO: 4663485 - DNA, 25 bp, Homo sapien
ggggccgggacagagcccaccggca

SEQ ID NO: 4663486 - DNA, 25 bp, Homo sapien
ggccgggacagagcccaccggcaag

SEQ ID NO: 4663487 - DNA, 25 bp, Homo sapien
agcacgggggcgaagctcatggccg

SEQ ID NO: 4663488 - DNA, 25 bp, Homo sapien
cgaagctcatggccggatccgggaa

SEQ ID NO: 4663489 - DNA, 25 bp, Homo sapien
ctcatggccggatccgggaagtgct

SEQ ID NO: 4663490 - DNA, 25 bp, Homo sapien
gggcgaagctcatggccggatccgg

SEQ ID NO: 4663491 - DNA, 25 bp, Homo sapien
ctggagggggaccacgggctgtggg

SEQ ID NO: 4663492 - DNA, 25 bp, Homo sapien
gctggagggggaccacgggctgtgg

SEQ ID NO: 4663493 - DNA, 25 bp, Homo sapien
tgcaggggcgcctgtggcatctgga

SEQ ID NO: 4663494 - DNA, 25 bp, Homo sapien
gctgcaggggcgcctgtggcatctg

SEQ ID NO: 4663495 - DNA, 25 bp, Homo sapien
tctggaggggcttcagctgagcggg

SEQ ID NO: 4663496 - DNA, 25 bp, Homo sapien
gaggggcttcagctgagcgggggcc

SEQ ID NO: 4663497 - DNA, 25 bp, Homo sapien
acatgcacagacaaccccctctgtg

SEQ ID NO: 4663498 - DNA, 25 bp, Homo sapien
gggtgtcctagtgcaccagccaggg

SEQ ID NO: 4663499 - DNA, 25 bp, Homo sapien
tgtcctagtgcaccagccagggcct

SEQ ID NO: 4663500 - DNA, 25 bp, Homo sapien
agcccaaccccaggtcacaggtcac

SEQ ID NO: 4663501 - DNA, 25 bp, Homo sapien
agggaggccgtcgattcccgccagg

SEQ ID NO: 4663502 - DNA, 25 bp, Homo sapien
ctcggcaagatcacggctggagaga

SEQ ID NO: 4663503 - DNA, 25 bp, Homo sapien
gcacagtcgcggtcggcaggtctgg

SEQ ID NO: 4663504 - DNA, 25 bp, Homo sapien
acggctggagagaaatactgaggtg

SEQ ID NO: 4663505 - DNA, 25 bp, Homo sapien
ggcaaggctggggacgcagggggga

SEQ ID NO: 4663506 - DNA, 25 bp, Homo sapien
gggacgcaggggggagtggggcagc

SEQ ID NO: 4663507 - DNA, 25 bp, Homo sapien
caaggctggggacgcaggggggagt

SEQ ID NO: 4663508 - DNA, 25 bp, Homo sapien
ctgcagaggcaaggctggggacgca

SEQ ID NO: 4663509 - DNA, 25 bp, Homo sapien
gatagtggccggtgcatttggcaca

SEQ ID NO: 4663510 - DNA, 25 bp, Homo sapien
atttggcacaatggtccggcagggc

SEQ ID NO: 4663511 - DNA, 25 bp, Homo sapien
agggacgtcagtaggcgccatctgt

SEQ ID NO: 4663512 - DNA, 25 bp, Homo sapien
cagaatgaatggacagggcagccac

SEQ ID NO: 4663513 - DNA, 25 bp, Homo sapien
ggaggggtggccctcatattctgca

SEQ ID NO: 4663514 - DNA, 25 bp, Homo sapien
ggcagcacgggttgtgggggcagtg

SEQ ID NO: 4663515 - DNA, 25 bp, Homo sapien
cagcacgggttgtgggggcagtgtg

SEQ ID NO: 4663516 - DNA, 25 bp, Homo sapien
gcagcacgggttgtgggggcagtgt

SEQ ID NO: 4663517 - DNA, 25 bp, Homo sapien
ctccctggtgtagcagctggagcag

SEQ ID NO: 4663518 - DNA, 25 bp, Homo sapien
ggccgtgtgggttgcgggggcaaca

SEQ ID NO: 4663519 - DNA, 25 bp, Homo sapien
tcagggcgcacaggcagtgccggct

SEQ ID NO: 4663520 - DNA, 25 bp, Homo sapien
cagcacaggttgtgggggcagcatg

SEQ ID NO: 4663521 - DNA, 25 bp, Homo sapien
cagagtgtgcatagggcctcagagc

SEQ ID NO: 4663522 - DNA, 25 bp, Homo sapien
atctggcccccggtcagagtgtgca

SEQ ID NO: 4663523 - DNA, 25 bp, Homo sapien
ctcctggagggcgactgcggcttag

SEQ ID NO: 4663524 - DNA, 25 bp, Homo sapien
gcgactgcggcttaggcttggcttt

SEQ ID NO: 4663525 - DNA, 25 bp, Homo sapien
tgagcggcgacgtccacagcatagg

SEQ ID NO: 4663526 - DNA, 25 bp, Homo sapien
tctgggtgggcacactctgcacaga

SEQ ID NO: 4663527 - DNA, 25 bp, Homo sapien
tggactggttccaccgtcagctgga

SEQ ID NO: 4663528 - DNA, 25 bp, Homo sapien
cgagaggaccgcagccggtggcaca

SEQ ID NO: 4663529 - DNA, 25 bp, Homo sapien
gaggccgggcggcttgtcctgtgag

SEQ ID NO: 4663530 - DNA, 25 bp, Homo sapien
aggccgggcggcttgtcctgtgagg

SEQ ID NO: 4663531 - DNA, 25 bp, Homo sapien
ggcggcttgtcctgtgaggcctgct

SEQ ID NO: 4663532 - DNA, 25 bp, Homo sapien
ccgggcggcttgtcctgtgaggcct

SEQ ID NO: 4663533 - DNA, 25 bp, Homo sapien
cacgcgtggacctgcggtggtgttt

SEQ ID NO: 4663534 - DNA, 25 bp, Homo sapien
tccaaaggcgccttcacagctgtca

SEQ ID NO: 4663535 - DNA, 25 bp, Homo sapien
gccgggagcgcgcacgcgtggacct

SEQ ID NO: 4663536 - DNA, 25 bp, Homo sapien
cggtggtgttttcgggctgccctgc

SEQ ID NO: 4663537 - DNA, 25 bp, Homo sapien
ttcaagatggtaagccggggccggc

SEQ ID NO: 4663538 - DNA, 25 bp, Homo sapien
tcaagatggtaagccggggccggct

SEQ ID NO: 4663539 - DNA, 25 bp, Homo sapien
agatggtaagccggggccggctggc

SEQ ID NO: 4663540 - DNA, 25 bp, Homo sapien
caagatggtaagccggggccggctg

SEQ ID NO: 4663541 - DNA, 25 bp, Homo sapien
tggcaatttcatcgggtgcgtcccc

SEQ ID NO: 4663542 - DNA, 25 bp, Homo sapien
gcgtccccgtccaagtcgaacttga

SEQ ID NO: 4663543 - DNA, 25 bp, Homo sapien
aaggtcaccatcttgtggttgtgcg

SEQ ID NO: 4663544 - DNA, 25 bp, Homo sapien
tgtggttgtgcgtctccagctggca

SEQ ID NO: 4663545 - DNA, 25 bp, Homo sapien
agcctgaatgccacgaagcctccag

SEQ ID NO: 4663546 - DNA, 25 bp, Homo sapien
cgtggcctgatgtccaacgagcagc

SEQ ID NO: 4663547 - DNA, 25 bp, Homo sapien
ttgaccttcaactatggcccgggca

SEQ ID NO: 4663548 - DNA, 25 bp, Homo sapien
ggagatgtccacagtctccaacttt

SEQ ID NO: 4663549 - DNA, 25 bp, Homo sapien
ctggtccctgggtcggagccacggt

SEQ ID NO: 4663550 - DNA, 25 bp, Homo sapien
aggtgctgaggtgtggcgggctggt

SEQ ID NO: 4663551 - DNA, 25 bp, Homo sapien
catctgctcgatgaacgtttcccgc

SEQ ID NO: 4663552 - DNA, 25 bp, Homo sapien
gccacggtcggcgtctgtgtcctcg

SEQ ID NO: 4663553 - DNA, 25 bp, Homo sapien
ttctgctgatacacgggggcgttgg

SEQ ID NO: 4663554 - DNA, 25 bp, Homo sapien
tctgctgatacacgggggcgttggc

SEQ ID NO: 4663555 - DNA, 25 bp, Homo sapien
ggggcgttggcttgggattgtcggc

SEQ ID NO: 4663556 - DNA, 25 bp, Homo sapien
cgttggcttgggattgtcggctctc

SEQ ID NO: 4663557 - DNA, 25 bp, Homo sapien
aacccctggtaatatgctgagtggg

SEQ ID NO: 4663558 - DNA, 25 bp, Homo sapien
cctcgcgtaggcttggttcctggga

SEQ ID NO: 4663559 - DNA, 25 bp, Homo sapien
ggcaccatccatgaaggccgtgatg

SEQ ID NO: 4663560 - DNA, 25 bp, Homo sapien
gatgccggttgcaggtgacagctcc

SEQ ID NO: 4663561 - DNA, 25 bp, Homo sapien
ttggctggcttctggcggcagggag

SEQ ID NO: 4663562 - DNA, 25 bp, Homo sapien
gaaccacctcttcccggtgtgcagg

SEQ ID NO: 4663563 - DNA, 25 bp, Homo sapien
cttagaggaagtgggggcgaagatt

SEQ ID NO: 4663564 - DNA, 25 bp, Homo sapien
ccaccggacagatgatgaaccacct

SEQ ID NO: 4663565 - DNA, 25 bp, Homo sapien
ggaggggcttgtgtgggcgcctgct

SEQ ID NO: 4663566 - DNA, 25 bp, Homo sapien
gaggggcttgtgtgggcgcctgctg

SEQ ID NO: 4663567 - DNA, 25 bp, Homo sapien
ggctgggtcatgcacagaaggaggc

SEQ ID NO: 4663568 - DNA, 25 bp, Homo sapien
cggctgggtcatgcacagaaggagg

SEQ ID NO: 4663569 - DNA, 25 bp, Homo sapien
ctctgcgccatgggagacagggcag

SEQ ID NO: 4663570 - DNA, 25 bp, Homo sapien
gctttgactgagctgattcagcaga

SEQ ID NO: 4663571 - DNA, 25 bp, Homo sapien
ctttgactgagctgattcagcagaa

SEQ ID NO: 4663572 - DNA, 25 bp, Homo sapien
tgctttgactgagctgattcagcag

SEQ ID NO: 4663573 - DNA, 25 bp, Homo sapien
ggacagcggagctcttcaacacaca

SEQ ID NO: 4663574 - DNA, 25 bp, Homo sapien
caaggagttgccaggttaacactgt

SEQ ID NO: 4663575 - DNA, 25 bp, Homo sapien
tgttggcatctgtacaggcaggtgc

SEQ ID NO: 4663576 - DNA, 25 bp, Homo sapien
taatgggagtcactggaagcacatg

SEQ ID NO: 4663577 - DNA, 25 bp, Homo sapien
taattttagagtaggtgtgcagccc

SEQ ID NO: 4663578 - DNA, 25 bp, Homo sapien
gaactcgaggagaagaatagtctat

SEQ ID NO: 4663579 - DNA, 25 bp, Homo sapien
tgtgcagcccatgaattcccttagt

SEQ ID NO: 4663580 - DNA, 25 bp, Homo sapien
tgagaatggccttacttcagcttca

SEQ ID NO: 4663581 - DNA, 25 bp, Homo sapien
tgcatggtctgtctttcaccatcct

SEQ ID NO: 4663582 - DNA, 25 bp, Homo sapien
cccagcattcttttgatttgtgttt

SEQ ID NO: 4663583 - DNA, 25 bp, Homo sapien
ctttcagttcatcagtattgttgta

SEQ ID NO: 4663584 - DNA, 25 bp, Homo sapien
tctaatagatagcatgtacttagct

SEQ ID NO: 4663585 - DNA, 25 bp, Homo sapien
tatctatcgagagtgttggagtctc

SEQ ID NO: 4663586 - DNA, 25 bp, Homo sapien
atattaattgttccatacgtacttg

SEQ ID NO: 4663587 - DNA, 25 bp, Homo sapien
cactgtatcggagaacatacttgac

SEQ ID NO: 4663588 - DNA, 25 bp, Homo sapien
ttttctcatctaagcattttagtac

SEQ ID NO: 4663589 - DNA, 25 bp, Homo sapien
tgttttagatatcacagctttctgc

SEQ ID NO: 4663590 - DNA, 25 bp, Homo sapien
cacccggccttatgtgctttcttta

SEQ ID NO: 4663591 - DNA, 25 bp, Homo sapien
tgctttctttagtattggtattttg

SEQ ID NO: 4663592 - DNA, 25 bp, Homo sapien
gttttagatatcacagctttctgct

SEQ ID NO: 4663593 - DNA, 25 bp, Homo sapien
gaactccgccttggaaattcttgac

SEQ ID NO: 4663594 - DNA, 25 bp, Homo sapien
cagtgctctgcgaaatcatccaggg

SEQ ID NO: 4663595 - DNA, 25 bp, Homo sapien
tagggctaattatcctccaggactg

SEQ ID NO: 4663596 - DNA, 25 bp, Homo sapien
gatccttcgtggtgggtcattcctc

SEQ ID NO: 4663597 - DNA, 25 bp, Homo sapien
caaacatctgtaggttgtgtgggtt

SEQ ID NO: 4663598 - DNA, 25 bp, Homo sapien
ggatgatcaactgttacaaagctga

SEQ ID NO: 4663599 - DNA, 25 bp, Homo sapien
tgctgacccaaggttacataaattt

SEQ ID NO: 4663600 - DNA, 25 bp, Homo sapien
tgtgtgggttgatttccagactatt

SEQ ID NO: 4663601 - DNA, 25 bp, Homo sapien
tactgatctacttgggttaaaacta

SEQ ID NO: 4663602 - DNA, 25 bp, Homo sapien
ccacaagtgtggaggttatctgcta

SEQ ID NO: 4663603 - DNA, 25 bp, Homo sapien
ctgctattctacgagtctcacaggg

SEQ ID NO: 4663604 - DNA, 25 bp, Homo sapien
tactaaagatttctatgtgttctcc

SEQ ID NO: 4663605 - DNA, 25 bp, Homo sapien
tcccctgcaatatctaggacacagg

SEQ ID NO: 4663606 - DNA, 25 bp, Homo sapien
cagatttacctgcatgaagcagggc

SEQ ID NO: 4663607 - DNA, 25 bp, Homo sapien
caaaaagtggtcagggcattggctc

SEQ ID NO: 4663608 - DNA, 25 bp, Homo sapien
cattggctcttaaactgggctgcag

SEQ ID NO: 4663609 - DNA, 25 bp, Homo sapien
agctggtctttatagggcgctgaat

SEQ ID NO: 4663610 - DNA, 25 bp, Homo sapien
ctgactggctagaaagctgggttgt

SEQ ID NO: 4663611 - DNA, 25 bp, Homo sapien
tgggttgttccttcgaggacagctg

SEQ ID NO: 4663612 - DNA, 25 bp, Homo sapien
tgttccttcgaggacagctggtctt

SEQ ID NO: 4663613 - DNA, 25 bp, Homo sapien
gagacgtctcgagctcactggtcag

SEQ ID NO: 4663614 - DNA, 25 bp, Homo sapien
tggcagttcctgacgctggctctgg

SEQ ID NO: 4663615 - DNA, 25 bp, Homo sapien
gcctggctggcagttcctgacgctg

SEQ ID NO: 4663616 - DNA, 25 bp, Homo sapien
ggcctcgtgagtctccgctagtggc

SEQ ID NO: 4663617 - DNA, 25 bp, Homo sapien
ctggagtgcaaggtgctaggcccac

SEQ ID NO: 4663618 - DNA, 25 bp, Homo sapien
gagcaggttgacccaaggcgggctg

SEQ ID NO: 4663619 - DNA, 25 bp, Homo sapien
aggttgacccaaggcgggctgtggg

SEQ ID NO: 4663620 - DNA, 25 bp, Homo sapien
gcaggttgacccaaggcgggctgtg

SEQ ID NO: 4663621 - DNA, 25 bp, Homo sapien
gccccaggggtgggcttgggagctg

SEQ ID NO: 4663622 - DNA, 25 bp, Homo sapien
gggaggtggccaggctgacggcccc

SEQ ID NO: 4663623 - DNA, 25 bp, Homo sapien
ccaggggtgggcttgggagctggga

SEQ ID NO: 4663624 - DNA, 25 bp, Homo sapien
ctgggaggtggccaggctgacggcc

SEQ ID NO: 4663625 - DNA, 25 bp, Homo sapien
gctcttgatggtgctgtccacaaag

SEQ ID NO: 4663626 - DNA, 25 bp, Homo sapien
tggtagagcagagtccgcagcttct

SEQ ID NO: 4663627 - DNA, 25 bp, Homo sapien
ttctcgtccaggctcttgatggtgc

SEQ ID NO: 4663628 - DNA, 25 bp, Homo sapien
cccatccgactccagggccgagggt

SEQ ID NO: 4663629 - DNA, 25 bp, Homo sapien
tgagaccgcctccttaggcactggg

SEQ ID NO: 4663630 - DNA, 25 bp, Homo sapien
gagaccgcctccttaggcactgggg

SEQ ID NO: 4663631 - DNA, 25 bp, Homo sapien
gaccgcctccttaggcactgggggc

SEQ ID NO: 4663632 - DNA, 25 bp, Homo sapien
cctgagaccgcctccttaggcactg

SEQ ID NO: 4663633 - DNA, 25 bp, Homo sapien
cccctcgagtgggggccagttctga

SEQ ID NO: 4663634 - DNA, 25 bp, Homo sapien
cacggcccctcgagtgggggccagt

SEQ ID NO: 4663635 - DNA, 25 bp, Homo sapien
ccctcgagtgggggccagttctgac

SEQ ID NO: 4663636 - DNA, 25 bp, Homo sapien
gcccctcgagtgggggccagttctg

SEQ ID NO: 4663637 - DNA, 25 bp, Homo sapien
tcattgacgaggacgtgccctgctc

SEQ ID NO: 4663638 - DNA, 25 bp, Homo sapien
cattgacgaggacgtgccctgctcc

SEQ ID NO: 4663639 - DNA, 25 bp, Homo sapien
tgaacgcagggttcagcaggaagct

SEQ ID NO: 4663640 - DNA, 25 bp, Homo sapien
cttgtgaacgcagggttcagcagga

SEQ ID NO: 4663641 - DNA, 25 bp, Homo sapien
aacgcagggttcagcaggaagctgt

SEQ ID NO: 4663642 - DNA, 25 bp, Homo sapien
tgtgaacgcagggttcagcaggaag

SEQ ID NO: 4663643 - DNA, 25 bp, Homo sapien
gctctgctatagctgaagtaaggct

SEQ ID NO: 4663644 - DNA, 25 bp, Homo sapien
caccgcactgctctgctatagctga

SEQ ID NO: 4663645 - DNA, 25 bp, Homo sapien
gcactgctctgctatagctgaagta

SEQ ID NO: 4663646 - DNA, 25 bp, Homo sapien
tttttgtgggcatcttgtaaccttg

SEQ ID NO: 4663647 - DNA, 25 bp, Homo sapien
tgggaacatcagaaacgttactggg

SEQ ID NO: 4663648 - DNA, 25 bp, Homo sapien
gtcatagcctagcatactcctggga

SEQ ID NO: 4663649 - DNA, 25 bp, Homo sapien
cctagcatactcctgggagacgact

SEQ ID NO: 4663650 - DNA, 25 bp, Homo sapien
cttccatctctgtcatagcctagca

SEQ ID NO: 4663651 - DNA, 25 bp, Homo sapien
tgccttccatctctgtcatagccta

SEQ ID NO: 4663652 - DNA, 25 bp, Homo sapien
aagcggagatgaagaggtttcatgt

SEQ ID NO: 4663653 - DNA, 25 bp, Homo sapien
gcggagatgaagaggtttcatgtga

SEQ ID NO: 4663654 - DNA, 25 bp, Homo sapien
gatgaagaggtttcatgtgaacatc

SEQ ID NO: 4663655 - DNA, 25 bp, Homo sapien
atgaagaggtttcatgtgaacatca

SEQ ID NO: 4663656 - DNA, 25 bp, Homo sapien
tccacacgtgcaggtctcacaaaag

SEQ ID NO: 4663657 - DNA, 25 bp, Homo sapien
cactgtgcccatgtcactcggcggg

SEQ ID NO: 4663658 - DNA, 25 bp, Homo sapien
cacgtgcaggtctcacaaaagcagg

SEQ ID NO: 4663659 - DNA, 25 bp, Homo sapien
tgggctccacacgtgcaggtctcac

SEQ ID NO: 4663660 - DNA, 25 bp, Homo sapien
ggaccccaaagctcgagcgccgagt

SEQ ID NO: 4663661 - DNA, 25 bp, Homo sapien
gaccccaaagctcgagcgccgagtg

SEQ ID NO: 4663662 - DNA, 25 bp, Homo sapien
gggaccccaaagctcgagcgccgag

SEQ ID NO: 4663663 - DNA, 25 bp, Homo sapien
accccaaagctcgagcgccgagtgt

SEQ ID NO: 4663664 - DNA, 25 bp, Homo sapien
ctgagtgctgaccaccgagaaacgg

SEQ ID NO: 4663665 - DNA, 25 bp, Homo sapien
aaggcggtggccttcttcacgaagt

SEQ ID NO: 4663666 - DNA, 25 bp, Homo sapien
gagaaacggcccacagtcttggctg

SEQ ID NO: 4663667 - DNA, 25 bp, Homo sapien
tatgtcagcatcctcgagctccgaa

SEQ ID NO: 4663668 - DNA, 25 bp, Homo sapien
tgcagctccgagatctccttcaggt

SEQ ID NO: 4663669 - DNA, 25 bp, Homo sapien
tgccgtgtggaagaagcccacgttg

SEQ ID NO: 4663670 - DNA, 25 bp, Homo sapien
ccaggcggcggtacagagcttcgat

SEQ ID NO: 4663671 - DNA, 25 bp, Homo sapien
ttgctggtttttctccggcggccag

SEQ ID NO: 4663672 - DNA, 25 bp, Homo sapien
ttccaggtccgagggtgtcacacct

SEQ ID NO: 4663673 - DNA, 25 bp, Homo sapien
tctctgcatgaggacggaggaccag

SEQ ID NO: 4663674 - DNA, 25 bp, Homo sapien
gagtctcaggcccaacgctgagcag

SEQ ID NO: 4663675 - DNA, 25 bp, Homo sapien
agataaccccgagtggtcttccagg

SEQ ID NO: 4663676 - DNA, 25 bp, Homo sapien
aagcagccaccatccgtccacgcag

SEQ ID NO: 4663677 - DNA, 25 bp, Homo sapien
agccaccatccgtccacgcagtgcc

SEQ ID NO: 4663678 - DNA, 25 bp, Homo sapien
cagccaccatccgtccacgcagtgc

SEQ ID NO: 4663679 - DNA, 25 bp, Homo sapien
agcagccaccatccgtccacgcagt

SEQ ID NO: 4663680 - DNA, 25 bp, Homo sapien
catgcagggacgtgggctggtggct

SEQ ID NO: 4663681 - DNA, 25 bp, Homo sapien
gccactcaatgactaggtgtcacct

SEQ ID NO: 4663682 - DNA, 25 bp, Homo sapien
gtcacctttaacaagactgggagat

SEQ ID NO: 4663683 - DNA, 25 bp, Homo sapien
ctaacgacagctgctcggctggcac

SEQ ID NO: 4663684 - DNA, 25 bp, Homo sapien
cactgccgtgctggacttgtgttga

SEQ ID NO: 4663685 - DNA, 25 bp, Homo sapien
aagaaagtgcccagtctctaccagc

SEQ ID NO: 4663686 - DNA, 25 bp, Homo sapien
tatagtgagcttatggtggcttgcc

SEQ ID NO: 4663687 - DNA, 25 bp, Homo sapien
ccgtgtggattgagtctgttctgcc

SEQ ID NO: 4663688 - DNA, 25 bp, Homo sapien
gcctccatcactggctaagccggag

SEQ ID NO: 4663689 - DNA, 25 bp, Homo sapien
gcccggacggagcagggctgctggg

SEQ ID NO: 4663690 - DNA, 25 bp, Homo sapien
ggtccttagcgggagggcctctgct

SEQ ID NO: 4663691 - DNA, 25 bp, Homo sapien
tgggcagggtccttagcgggagggc

SEQ ID NO: 4663692 - DNA, 25 bp, Homo sapien
gtggctagcacatgctcggagacag

SEQ ID NO: 4663693 - DNA, 25 bp, Homo sapien
gctagcacatgctcggagacaggca

SEQ ID NO: 4663694 - DNA, 25 bp, Homo sapien
gcacatgctcggagacaggcaagct

SEQ ID NO: 4663695 - DNA, 25 bp, Homo sapien
agcacatgctcggagacaggcaagc

SEQ ID NO: 4663696 - DNA, 25 bp, Homo sapien
ctggcgccggagcacacagccggat

SEQ ID NO: 4663697 - DNA, 25 bp, Homo sapien
tgagctgcttacaagcaagacttgg

SEQ ID NO: 4663698 - DNA, 25 bp, Homo sapien
tcctttcatccaaagactacacctt

SEQ ID NO: 4663699 - DNA, 25 bp, Homo sapien
tctacacaacacgggcgtgctcctg

SEQ ID NO: 4663700 - DNA, 25 bp, Homo sapien
cggtgtttagcaccatctggctccg

SEQ ID NO: 4663701 - DNA, 25 bp, Homo sapien
cagctcgaaagctgtgccctcgtcc

SEQ ID NO: 4663702 - DNA, 25 bp, Homo sapien
tggaaggacccggtgtttagcacca

SEQ ID NO: 4663703 - DNA, 25 bp, Homo sapien
gtccacgcagcgttgacgagagaat

SEQ ID NO: 4663704 - DNA, 25 bp, Homo sapien
cactcatcaagtacaggttgctgcg

SEQ ID NO: 4663705 - DNA, 25 bp, Homo sapien
ttcatggtcaccatgatttctctgg

SEQ ID NO: 4663706 - DNA, 25 bp, Homo sapien
cagcctcgtcacttaacatccacgg

SEQ ID NO: 4663707 - DNA, 25 bp, Homo sapien
gccactgaccatgtaatgggaagga

SEQ ID NO: 4663708 - DNA, 25 bp, Homo sapien
ctctcagacgttgggtggtaaaccg

SEQ ID NO: 4663709 - DNA, 25 bp, Homo sapien
cactctctcagacgttgggtggtaa

SEQ ID NO: 4663710 - DNA, 25 bp, Homo sapien
tcactctctcagacgttgggtggta

SEQ ID NO: 4663711 - DNA, 25 bp, Homo sapien
ctctctcagacgttgggtggtaaac

SEQ ID NO: 4663712 - DNA, 25 bp, Homo sapien
gaatcgagcacgaggtttgctacta

SEQ ID NO: 4663713 - DNA, 25 bp, Homo sapien
cgaggtttgctactagacttatagg

SEQ ID NO: 4663714 - DNA, 25 bp, Homo sapien
tacgggtccactgaggaatcgagca

SEQ ID NO: 4663715 - DNA, 25 bp, Homo sapien
gatggacacagatacgggtccactg

SEQ ID NO: 4663716 - DNA, 25 bp, Homo sapien
tccctgcggtcatgggaggtcacag

SEQ ID NO: 4663717 - DNA, 25 bp, Homo sapien
ggtggccgtcactctcctatttggg

SEQ ID NO: 4663718 - DNA, 25 bp, Homo sapien
aaactgcgtgctttgggatggcccc

SEQ ID NO: 4663719 - DNA, 25 bp, Homo sapien
cactggccgatcgtcctgagggtta

SEQ ID NO: 4663720 - DNA, 25 bp, Homo sapien
cctggacctgcgatcagagctggga

SEQ ID NO: 4663721 - DNA, 25 bp, Homo sapien
gcgactctgatcttgcagggactca

SEQ ID NO: 4663722 - DNA, 25 bp, Homo sapien
agaacaccatcaaacaggccggctg

SEQ ID NO: 4663723 - DNA, 25 bp, Homo sapien
tcggcctgagttgtgcatcctggac

SEQ ID NO: 4663724 - DNA, 25 bp, Homo sapien
gaccacagggttaggcagaacagca

SEQ ID NO: 4663725 - DNA, 25 bp, Homo sapien
agcaaaagtcgtcagtgtgcaggga

SEQ ID NO: 4663726 - DNA, 25 bp, Homo sapien
actgggacacgctaccacactaagc

SEQ ID NO: 4663727 - DNA, 25 bp, Homo sapien
gaaaaagaaacgacacaagaccaca

SEQ ID NO: 4663728 - DNA, 25 bp, Homo sapien
tgcctaggcagagacgcttcagggc

SEQ ID NO: 4663729 - DNA, 25 bp, Homo sapien
gtgcgctagccacgagaaagcccat

SEQ ID NO: 4663730 - DNA, 25 bp, Homo sapien
cgcgggaaccctgatgtgcgctagc

SEQ ID NO: 4663731 - DNA, 25 bp, Homo sapien
cgagaaagcccatgcgatgagagag

SEQ ID NO: 4663732 - DNA, 25 bp, Homo sapien
cccatgcgatgagagaggacaaagg

SEQ ID NO: 4663733 - DNA, 25 bp, Homo sapien
tgatcggcaatttgcgggtgttccg

SEQ ID NO: 4663734 - DNA, 25 bp, Homo sapien
gaaaaggagccaattaatgatcggc

SEQ ID NO: 4663735 - DNA, 25 bp, Homo sapien
aaggataagcccgttagatgtgaac

SEQ ID NO: 4663736 - DNA, 25 bp, Homo sapien
tggcgagaccgcacaaactctaggc

SEQ ID NO: 4663737 - DNA, 25 bp, Homo sapien
gcatctctcctcgtggggaggcact

SEQ ID NO: 4663738 - DNA, 25 bp, Homo sapien
ttaggacttcaaggaaatactcatt

SEQ ID NO: 4663739 - DNA, 25 bp, Homo sapien
gcactcatctttaggacttcaagga

SEQ ID NO: 4663740 - DNA, 25 bp, Homo sapien
gggaggcactcatctttaggacttc

SEQ ID NO: 4663741 - DNA, 25 bp, Homo sapien
tgtgcatcctcagccgtaacatgag

SEQ ID NO: 4663742 - DNA, 25 bp, Homo sapien
tgcctagagtcaggttcctcgggct

SEQ ID NO: 4663743 - DNA, 25 bp, Homo sapien
gaccagcgcattcgcattcgaggaa

SEQ ID NO: 4663744 - DNA, 25 bp, Homo sapien
acatagaaattgtcctgaccagcgc

SEQ ID NO: 4663745 - DNA, 25 bp, Homo sapien
agagctcaggaaactcctggcacag

SEQ ID NO: 4663746 - DNA, 25 bp, Homo sapien
cagacacactgggcttcggagtcat

SEQ ID NO: 4663747 - DNA, 25 bp, Homo sapien
acagccagacacactgggcttcgga

SEQ ID NO: 4663748 - DNA, 25 bp, Homo sapien
gaaactcctggcacagccagacaca

SEQ ID NO: 4663749 - DNA, 25 bp, Homo sapien
aggccaggattggtgacgccacaca

SEQ ID NO: 4663750 - DNA, 25 bp, Homo sapien
gggctggccgcattcattcttacgt

SEQ ID NO: 4663751 - DNA, 25 bp, Homo sapien
ccttgcttcaagaggcggtcggatt

SEQ ID NO: 4663752 - DNA, 25 bp, Homo sapien
agacaatggtctcacttgggccagg

SEQ ID NO: 4663753 - DNA, 25 bp, Homo sapien
ggggccaggctgctggtggaggacc

SEQ ID NO: 4663754 - DNA, 25 bp, Homo sapien
ctggggccaggctgctggtggagga

SEQ ID NO: 4663755 - DNA, 25 bp, Homo sapien
ctggacgtgcagggcgggctggggg

SEQ ID NO: 4663756 - DNA, 25 bp, Homo sapien
ctgggggcctggctcagggcctggg

SEQ ID NO: 4663757 - DNA, 25 bp, Homo sapien
tgaaggtacccttcttgttgttgct

SEQ ID NO: 4663758 - DNA, 25 bp, Homo sapien
accgtcttgctcgtccactcgtcca

SEQ ID NO: 4663759 - DNA, 25 bp, Homo sapien
tgcaggtcgtccgtgaaggtaccct

SEQ ID NO: 4663760 - DNA, 25 bp, Homo sapien
ttcagctggttgagcgtgggcttca

SEQ ID NO: 4663761 - DNA, 25 bp, Homo sapien
tcgcgctgacatcaaacaagttagg

SEQ ID NO: 4663762 - DNA, 25 bp, Homo sapien
cccacattggctcaggtgcgtgtga

SEQ ID NO: 4663763 - DNA, 25 bp, Homo sapien
tctgtaaagtggacaagcctagttc

SEQ ID NO: 4663764 - DNA, 25 bp, Homo sapien
ttgggtgacatgcacacctgccctg

SEQ ID NO: 4663765 - DNA, 25 bp, Homo sapien
tgacaaaaacatgcccaaggaagcc

SEQ ID NO: 4663766 - DNA, 25 bp, Homo sapien
taaatgtgctcgaagaactgaagga

SEQ ID NO: 4663767 - DNA, 25 bp, Homo sapien
ggttcaccggcagatctgagcaggc

SEQ ID NO: 4663768 - DNA, 25 bp, Homo sapien
cagttttcaacaacgtctgctggga

SEQ ID NO: 4663769 - DNA, 25 bp, Homo sapien
agcctccttagtagctgtaactata

SEQ ID NO: 4663770 - DNA, 25 bp, Homo sapien
ctccttagtagctgtaactataggt

SEQ ID NO: 4663771 - DNA, 25 bp, Homo sapien
gcctccttagtagctgtaactatag

SEQ ID NO: 4663772 - DNA, 25 bp, Homo sapien
ccttagtagctgtaactataggtat

SEQ ID NO: 4663773 - DNA, 25 bp, Homo sapien
aaggtgcctccatgcttccagtcga

SEQ ID NO: 4663774 - DNA, 25 bp, Homo sapien
tacacgtggctgcaatcagctggcc

SEQ ID NO: 4663775 - DNA, 25 bp, Homo sapien
gaaggtcctctatggaaccgacagc

SEQ ID NO: 4663776 - DNA, 25 bp, Homo sapien
tggaaatcaagctcggcagtcaggg

SEQ ID NO: 4663777 - DNA, 25 bp, Homo sapien
cacggacagggtcggggcggctccg

SEQ ID NO: 4663778 - DNA, 25 bp, Homo sapien
ccactcctgctcgaggtgcggtcat

SEQ ID NO: 4663779 - DNA, 25 bp, Homo sapien
ctggtgtgggcacggacagggtcgg

SEQ ID NO: 4663780 - DNA, 25 bp, Homo sapien
ctgggggcagacgtggcatccccac

SEQ ID NO: 4663781 - DNA, 25 bp, Homo sapien
caggcctctgtactgacccagaggc

SEQ ID NO: 4663782 - DNA, 25 bp, Homo sapien
aggcctctgtactgacccagaggca

SEQ ID NO: 4663783 - DNA, 25 bp, Homo sapien
ctgtgcccccagctggcccacctgg

SEQ ID NO: 4663784 - DNA, 25 bp, Homo sapien
cctgtgcccccagctggcccacctg

SEQ ID NO: 4663785 - DNA, 25 bp, Homo sapien
ctggggggtgttccagctgccctgt

SEQ ID NO: 4663786 - DNA, 25 bp, Homo sapien
gggtgttccagctgccctgtgcccc

SEQ ID NO: 4663787 - DNA, 25 bp, Homo sapien
ccacaggtggctgcaagaagactgg

SEQ ID NO: 4663788 - DNA, 25 bp, Homo sapien
ctaggagcgaacagggtctgaagcc

SEQ ID NO: 4663789 - DNA, 25 bp, Homo sapien
gtctgaagccgcaaaggaagcagtc

SEQ ID NO: 4663790 - DNA, 25 bp, Homo sapien
ctcggaggccaaaccacacctggtt

SEQ ID NO: 4663791 - DNA, 25 bp, Homo sapien
ggactcggaggccaaaccacacctg

SEQ ID NO: 4663792 - DNA, 25 bp, Homo sapien
tgcagggtgacgacaaggttctaac

SEQ ID NO: 4663793 - DNA, 25 bp, Homo sapien
ttcatcagggaacggaaaagctggc

SEQ ID NO: 4663794 - DNA, 25 bp, Homo sapien
gggaaccggcactctactgaggaca

SEQ ID NO: 4663795 - DNA, 25 bp, Homo sapien
tgctcacctaacgttttctggcgga

SEQ ID NO: 4663796 - DNA, 25 bp, Homo sapien
ccacttcactcaaggaacagggcaa

SEQ ID NO: 4663797 - DNA, 25 bp, Homo sapien
aaatctcttacgacagcatcgtgcc

SEQ ID NO: 4663798 - DNA, 25 bp, Homo sapien
gcatcgtgccctggcagaagattct

SEQ ID NO: 4663799 - DNA, 25 bp, Homo sapien
caccatgtacaaggaagggattcac

SEQ ID NO: 4663800 - DNA, 25 bp, Homo sapien
ggttgctttggattttatatggata

SEQ ID NO: 4663801 - DNA, 25 bp, Homo sapien
ccctaggaggctggttgctttggat

SEQ ID NO: 4663802 - DNA, 25 bp, Homo sapien
ctccctaggaggctggttgctttgg

SEQ ID NO: 4663803 - DNA, 25 bp, Homo sapien
ggattttatatggatagagggtaag

SEQ ID NO: 4663804 - DNA, 25 bp, Homo sapien
tgactgtgggcccaccgcagtgctg

SEQ ID NO: 4663805 - DNA, 25 bp, Homo sapien
actgtgggcccaccgcagtgctggc

SEQ ID NO: 4663806 - DNA, 25 bp, Homo sapien
acaaaaccgcgcagctgactgtggg

SEQ ID NO: 4663807 - DNA, 25 bp, Homo sapien
ggaaaacaaaaccgcgcagctgact

SEQ ID NO: 4663808 - DNA, 25 bp, Homo sapien
cagtcaggcttctcactctcaggat

SEQ ID NO: 4663809 - DNA, 25 bp, Homo sapien
tcagtcaggcttctcactctcagga

SEQ ID NO: 4663810 - DNA, 25 bp, Homo sapien
ctggccctgagggtccgtcacttct

SEQ ID NO: 4663811 - DNA, 25 bp, Homo sapien
ggttacaaaacagcgtgaactggac

SEQ ID NO: 4663812 - DNA, 25 bp, Homo sapien
catttgtgtttccaattgtgaataa

SEQ ID NO: 4663813 - DNA, 25 bp, Homo sapien
cacttagacggcgtgaagtgggcct

SEQ ID NO: 4663814 - DNA, 25 bp, Homo sapien
catcagccggctggacagttttaca

SEQ ID NO: 4663815 - DNA, 25 bp, Homo sapien
tctggacccagcataaggctcctgt

SEQ ID NO: 4663816 - DNA, 25 bp, Homo sapien
gaacagggctatcctgagcatgcca

SEQ ID NO: 4663817 - DNA, 25 bp, Homo sapien
cctccaaggagccagtggtctcaga

SEQ ID NO: 4663818 - DNA, 25 bp, Homo sapien
gaggtcacccgcacacagcgggatg

SEQ ID NO: 4663819 - DNA, 25 bp, Homo sapien
gggatggcatctccgacactcccgt

SEQ ID NO: 4663820 - DNA, 25 bp, Homo sapien
cctgctgatcacacggagaagagcc

SEQ ID NO: 4663821 - DNA, 25 bp, Homo sapien
tcccgtggggaagcagcgtcactgt

SEQ ID NO: 4663822 - DNA, 25 bp, Homo sapien
cccagactgtgtgatagaacccaga

SEQ ID NO: 4663823 - DNA, 25 bp, Homo sapien
tttgaaaggcaaactgcggccgggc

SEQ ID NO: 4663824 - DNA, 25 bp, Homo sapien
ttcatctgcccaaaggagtctgcct

SEQ ID NO: 4663825 - DNA, 25 bp, Homo sapien
tgtgcagaatctcctcagagggtgc

SEQ ID NO: 4663826 - DNA, 25 bp, Homo sapien
gccctttagtaataagcacttttca

SEQ ID NO: 4663827 - DNA, 25 bp, Homo sapien
tttcagagaattgaagctgttcagc

SEQ ID NO: 4663828 - DNA, 25 bp, Homo sapien
cgcaatatcaccctggacactggaa

SEQ ID NO: 4663829 - DNA, 25 bp, Homo sapien
ggagatgaggcgcaatatcaccctg

SEQ ID NO: 4663830 - DNA, 25 bp, Homo sapien
actccacagaatcaggctgagcgcc

SEQ ID NO: 4663831 - DNA, 25 bp, Homo sapien
ctccacagaatcaggctgagcgcct

SEQ ID NO: 4663832 - DNA, 25 bp, Homo sapien
gagcgcctccctcataggaacagga

SEQ ID NO: 4663833 - DNA, 25 bp, Homo sapien
caggctgagcgcctccctcatagga

SEQ ID NO: 4663834 - DNA, 25 bp, Homo sapien
tctttgagggcaatagacaccacct

SEQ ID NO: 4663835 - DNA, 25 bp, Homo sapien
tgagaaggtcctcgcagaagcaatg

SEQ ID NO: 4663836 - DNA, 25 bp, Homo sapien
tcaactcgtgagcaaggtggacagc

SEQ ID NO: 4663837 - DNA, 25 bp, Homo sapien
tagtgccaagctcatgggataccgg

SEQ ID NO: 4663838 - DNA, 25 bp, Homo sapien
tatattagatgtacacttgacacgg

SEQ ID NO: 4663839 - DNA, 25 bp, Homo sapien
tttaactacaaggaactcatagccg

SEQ ID NO: 4663840 - DNA, 25 bp, Homo sapien
gacacaaaagaggtctcaagcagag

SEQ ID NO: 4663841 - DNA, 25 bp, Homo sapien
tactatagctagcttgtgaccacat

SEQ ID NO: 4663842 - DNA, 25 bp, Homo sapien
aaggttatcgtcagctttttggagc

SEQ ID NO: 4663843 - DNA, 25 bp, Homo sapien
ttctgccactggaatttgacctgct

SEQ ID NO: 4663844 - DNA, 25 bp, Homo sapien
gagtcttgtgttttgccatccttgt

SEQ ID NO: 4663845 - DNA, 25 bp, Homo sapien
tctgacctctcgcagtgcttattgt

SEQ ID NO: 4663846 - DNA, 25 bp, Homo sapien
ttggttacaaatgaggaatgtcagt

SEQ ID NO: 4663847 - DNA, 25 bp, Homo sapien
atgtcagttcagtttaccagtgact

SEQ ID NO: 4663848 - DNA, 25 bp, Homo sapien
aaatagagacctggtagagttttct

SEQ ID NO: 4663849 - DNA, 25 bp, Homo sapien
cagtttaccagtgacttcaaaatag

SEQ ID NO: 4663850 - DNA, 25 bp, Homo sapien
tgggctagtggcataacctgccttt

SEQ ID NO: 4663851 - DNA, 25 bp, Homo sapien
gtgggctagtggcataacctgcctt

SEQ ID NO: 4663852 - DNA, 25 bp, Homo sapien
tgcacaggactccacggtgtgtcac

SEQ ID NO: 4663853 - DNA, 25 bp, Homo sapien
gttcagttccttatgcaaatgcaca

SEQ ID NO: 4663854 - DNA, 25 bp, Homo sapien
gatcagtccttatgagccattttta

SEQ ID NO: 4663855 - DNA, 25 bp, Homo sapien
gcacacagacaaactgaattaagat

SEQ ID NO: 4663856 - DNA, 25 bp, Homo sapien
ctgccccctccaggtctttcctgcc

SEQ ID NO: 4663857 - DNA, 25 bp, Homo sapien
tgccccctccaggtctttcctgccc

SEQ ID NO: 4663858 - DNA, 25 bp, Homo sapien
gctctgccccctccaggtctttcct

SEQ ID NO: 4663859 - DNA, 25 bp, Homo sapien
cgggctctgccccctccaggtcttt

SEQ ID NO: 4663860 - DNA, 25 bp, Homo sapien
ctgtgcaaatgcgtaaagtccttag

SEQ ID NO: 4663861 - DNA, 25 bp, Homo sapien
tcgctgtgcaaatgcgtaaagtcct

SEQ ID NO: 4663862 - DNA, 25 bp, Homo sapien
gtgcaaatgcgtaaagtccttaggg

SEQ ID NO: 4663863 - DNA, 25 bp, Homo sapien
gctctcgctgtgcaaatgcgtaaag

SEQ ID NO: 4663864 - DNA, 25 bp, Homo sapien
tctgttctctccattcgtggacgtt

SEQ ID NO: 4663865 - DNA, 25 bp, Homo sapien
attcgtggacgttcctgcagcttgg

SEQ ID NO: 4663866 - DNA, 25 bp, Homo sapien
ttctctccattcgtggacgttcctg

SEQ ID NO: 4663867 - DNA, 25 bp, Homo sapien
catcttggtcagagtctctgttctc

SEQ ID NO: 4663868 - DNA, 25 bp, Homo sapien
gataacttgctaccattagaccagc

SEQ ID NO: 4663869 - DNA, 25 bp, Homo sapien
taacttgctaccattagaccagccc

SEQ ID NO: 4663870 - DNA, 25 bp, Homo sapien
agataacttgctaccattagaccag

SEQ ID NO: 4663871 - DNA, 25 bp, Homo sapien
ataacttgctaccattagaccagcc

SEQ ID NO: 4663872 - DNA, 25 bp, Homo sapien
tacaagaacgcagaaggcaaacagt

SEQ ID NO: 4663873 - DNA, 25 bp, Homo sapien
caggaggtccatggagcccagtggt

SEQ ID NO: 4663874 - DNA, 25 bp, Homo sapien
cagttggcaacctggttgatgatgg

SEQ ID NO: 4663875 - DNA, 25 bp, Homo sapien
aaacagttgcgtaggatcagagcca

SEQ ID NO: 4663876 - DNA, 25 bp, Homo sapien
gactaaggctaacgaggctgattgc

SEQ ID NO: 4663877 - DNA, 25 bp, Homo sapien
ccaaacagaaggcaacgcaggacct

SEQ ID NO: 4663878 - DNA, 25 bp, Homo sapien
ttttagcagaacacagagtctccca

SEQ ID NO: 4663879 - DNA, 25 bp, Homo sapien
tctgtacatgagctgaattccgtgc

SEQ ID NO: 4663880 - DNA, 25 bp, Homo sapien
ttatgaagccaatatctacatcttc

SEQ ID NO: 4663881 - DNA, 25 bp, Homo sapien
tatgaaaacactagccccaggcttg

SEQ ID NO: 4663882 - DNA, 25 bp, Homo sapien
cctcagatataggtgggagcacaca

SEQ ID NO: 4663883 - DNA, 25 bp, Homo sapien
ggagcacacaatcacccttctggaa

SEQ ID NO: 4663884 - DNA, 25 bp, Homo sapien
gaagcaagtctctcataccagaata

SEQ ID NO: 4663885 - DNA, 25 bp, Homo sapien
ccatatgggtgaaagcaaccagcac

SEQ ID NO: 4663886 - DNA, 25 bp, Homo sapien
tttgcagtcataccacacccatgtg

SEQ ID NO: 4663887 - DNA, 25 bp, Homo sapien
gaattccacaggtactttgcagtca

SEQ ID NO: 4663888 - DNA, 25 bp, Homo sapien
caatggacaaactgacagggactgc

SEQ ID NO: 4663889 - DNA, 25 bp, Homo sapien
gtcgggggcgcgctcatggccgccg

SEQ ID NO: 4663890 - DNA, 25 bp, Homo sapien
gggggcgcgctcatggccgccgcgg

SEQ ID NO: 4663891 - DNA, 25 bp, Homo sapien
tcgggggcgcgctcatggccgccgc

SEQ ID NO: 4663892 - DNA, 25 bp, Homo sapien
tgacccagtcggtgtagaagccgcc

SEQ ID NO: 4663893 - DNA, 25 bp, Homo sapien
cgagcgcgccgttgaagaagacgaa

SEQ ID NO: 4663894 - DNA, 25 bp, Homo sapien
tctggacatggctgacgatctgctg

SEQ ID NO: 4663895 - DNA, 25 bp, Homo sapien
ccaggtagccaagcatgtggttcca

SEQ ID NO: 4663896 - DNA, 25 bp, Homo sapien
taccaaaggcaagtcagtgcagctc

SEQ ID NO: 4663897 - DNA, 25 bp, Homo sapien
tatcccgtgtccagaaacctaagtg

SEQ ID NO: 4663898 - DNA, 25 bp, Homo sapien
cagtgttcccttgaaagtcgcttga

SEQ ID NO: 4663899 - DNA, 25 bp, Homo sapien
cctactaggtgtgcgaggcattcaa

SEQ ID NO: 4663900 - DNA, 25 bp, Homo sapien
aaatagccccagaattatgtttgct

SEQ ID NO: 4663901 - DNA, 25 bp, Homo sapien
taccctcagggaccaaggaagtaca

SEQ ID NO: 4663902 - DNA, 25 bp, Homo sapien
tcttgctattaatggtgctcctgcc

SEQ ID NO: 4663903 - DNA, 25 bp, Homo sapien
tttcaatcccttaaacagagaatgc

SEQ ID NO: 4663904 - DNA, 25 bp, Homo sapien
gtaaatcagacttcgaactatgagc

SEQ ID NO: 4663905 - DNA, 25 bp, Homo sapien
agacttcgaactatgagctgcctcc

SEQ ID NO: 4663906 - DNA, 25 bp, Homo sapien
aagggggtaaagtcatccaccagag

SEQ ID NO: 4663907 - DNA, 25 bp, Homo sapien
gggtaaagtcatccaccagaggtaa

SEQ ID NO: 4663908 - DNA, 25 bp, Homo sapien
gcacagtgcataatcagagtcatac

SEQ ID NO: 4663909 - DNA, 25 bp, Homo sapien
gagtcatacgcaaccaagccatgga

SEQ ID NO: 4663910 - DNA, 25 bp, Homo sapien
gaaaacgatttggattcaggtccag

SEQ ID NO: 4663911 - DNA, 25 bp, Homo sapien
ccggctcagttttagggcatgggca

SEQ ID NO: 4663912 - DNA, 25 bp, Homo sapien
tgtgtgtccaaaacagccccaaatc

SEQ ID NO: 4663913 - DNA, 25 bp, Homo sapien
taactgagcactagagaccacacag

SEQ ID NO: 4663914 - DNA, 25 bp, Homo sapien
tatagaatatatactgcaagggagc

SEQ ID NO: 4663915 - DNA, 25 bp, Homo sapien
tgcaagggagcacagtaactgagca

SEQ ID NO: 4663916 - DNA, 25 bp, Homo sapien
tctggaccaagtaaactccagtgaa

SEQ ID NO: 4663917 - DNA, 25 bp, Homo sapien
aaggaagccagatcttcatcaggca

SEQ ID NO: 4663918 - DNA, 25 bp, Homo sapien
ctttagtgaggctagtggatgttct

SEQ ID NO: 4663919 - DNA, 25 bp, Homo sapien
gaccaagtaaactccagtgaaagga

SEQ ID NO: 4663920 - DNA, 25 bp, Homo sapien
gaacttcaattaacactaacatgta

SEQ ID NO: 4663921 - DNA, 25 bp, Homo sapien
cccctcctgctatgacaatataggt

SEQ ID NO: 4663922 - DNA, 25 bp, Homo sapien
tctttggagggttcacagaattcag

SEQ ID NO: 4663923 - DNA, 25 bp, Homo sapien
tacctttcaggcccctaatattata

SEQ ID NO: 4663924 - DNA, 25 bp, Homo sapien
tggtgacggtgacttaggtgcatcc

SEQ ID NO: 4663925 - DNA, 25 bp, Homo sapien
tatggtggtcccatagcatccgggc

SEQ ID NO: 4663926 - DNA, 25 bp, Homo sapien
gcatccgggctacaagttcctccga

SEQ ID NO: 4663927 - DNA, 25 bp, Homo sapien
tagaaaccacgtgcaggatggagac

SEQ ID NO: 4663928 - DNA, 25 bp, Homo sapien
aatgattccaactcgctgtagactc

SEQ ID NO: 4663929 - DNA, 25 bp, Homo sapien
tagactcaagcgatcatagcatttg

SEQ ID NO: 4663930 - DNA, 25 bp, Homo sapien
tctcaaagcctccatgtatgtcaca

SEQ ID NO: 4663931 - DNA, 25 bp, Homo sapien
caatttcctgaaacggccacagcca

SEQ ID NO: 4663932 - DNA, 25 bp, Homo sapien
aaatgactcctctgatgcatctggg

SEQ ID NO: 4663933 - DNA, 25 bp, Homo sapien
ggacagaattcactactctagtaag

SEQ ID NO: 4663934 - DNA, 25 bp, Homo sapien
cgggctgggatcctcccgagagcct

SEQ ID NO: 4663935 - DNA, 25 bp, Homo sapien
tacatttcatcaggctagaactgcc

SEQ ID NO: 4663936 - DNA, 25 bp, Homo sapien
cacttgtaagatcttggccctaaga

SEQ ID NO: 4663937 - DNA, 25 bp, Homo sapien
gccgttcacgttctgaagctcaaga

SEQ ID NO: 4663938 - DNA, 25 bp, Homo sapien
cagtaccaggctaatctgaatgcag

SEQ ID NO: 4663939 - DNA, 25 bp, Homo sapien
gaaattcaacaaggagctaccatct

SEQ ID NO: 4663940 - DNA, 25 bp, Homo sapien
ctatggcatccaagtcagaggtgtc

SEQ ID NO: 4663941 - DNA, 25 bp, Homo sapien
tgtcctgaatgttgcgtacatagtc

SEQ ID NO: 4663942 - DNA, 25 bp, Homo sapien
cactacgtcgcaaggtggcaagacc

SEQ ID NO: 4663943 - DNA, 25 bp, Homo sapien
cgtacatagtcagcaacggctttga

SEQ ID NO: 4663944 - DNA, 25 bp, Homo sapien
tatccaattgctctcttaaatcgaa

SEQ ID NO: 4663945 - DNA, 25 bp, Homo sapien
tgctctcttaaatcgaataactttg

SEQ ID NO: 4663946 - DNA, 25 bp, Homo sapien
ttaaatcgaataactttgtcatctg

SEQ ID NO: 4663947 - DNA, 25 bp, Homo sapien
tagtcgctgaataatatccaattgc

SEQ ID NO: 4663948 - DNA, 25 bp, Homo sapien
ctaagtaatgtggtggatgaaatga

SEQ ID NO: 4663949 - DNA, 25 bp, Homo sapien
tgtggtggatgaaatgacataggct

SEQ ID NO: 4663950 - DNA, 25 bp, Homo sapien
taatgtggtggatgaaatgacatag

SEQ ID NO: 4663951 - DNA, 25 bp, Homo sapien
ggtggatgaaatgacataggcttac

SEQ ID NO: 4663952 - DNA, 25 bp, Homo sapien
tacgccttctcttttaatattcaca

SEQ ID NO: 4663953 - DNA, 25 bp, Homo sapien
cttttaatattcacataatgacccc

SEQ ID NO: 4663954 - DNA, 25 bp, Homo sapien
ttaatattcacataatgaccccatt

SEQ ID NO: 4663955 - DNA, 25 bp, Homo sapien
atacgccttctcttttaatattcac

SEQ ID NO: 4663956 - DNA, 25 bp, Homo sapien
ctgttattcttataggcagaattac

SEQ ID NO: 4663957 - DNA, 25 bp, Homo sapien
gacagtatctactatcagacagtat

SEQ ID NO: 4663958 - DNA, 25 bp, Homo sapien
tgagaagaataatgacagtatctac

SEQ ID NO: 4663959 - DNA, 25 bp, Homo sapien
gaataatgacagtatctactatcag

SEQ ID NO: 4663960 - DNA, 25 bp, Homo sapien
aactagaacggcataatcctgtggc

SEQ ID NO: 4663961 - DNA, 25 bp, Homo sapien
caggttctccacacggtgaacaaga

SEQ ID NO: 4663962 - DNA, 25 bp, Homo sapien
tggacaatactaaggcaacaggttc

SEQ ID NO: 4663963 - DNA, 25 bp, Homo sapien
tcagtgccaggtagtatcaaagggc

SEQ ID NO: 4663964 - DNA, 25 bp, Homo sapien
ccccaggggcgccatctctttatcc

SEQ ID NO: 4663965 - DNA, 25 bp, Homo sapien
tctttatcctccgcttccaccacca

SEQ ID NO: 4663966 - DNA, 25 bp, Homo sapien
atctctttatcctccgcttccacca

SEQ ID NO: 4663967 - DNA, 25 bp, Homo sapien
cccaggggcgccatctctttatcct

SEQ ID NO: 4663968 - DNA, 25 bp, Homo sapien
aaactcactgaaaatggagcgaaag

SEQ ID NO: 4663969 - DNA, 25 bp, Homo sapien
aaaatggagcgaaaggtcgcagagc

SEQ ID NO: 4663970 - DNA, 25 bp, Homo sapien
tacttcacactaactaccacaaact

SEQ ID NO: 4663971 - DNA, 25 bp, Homo sapien
agcgaaaggtcgcagagcagacgct

SEQ ID NO: 4663972 - DNA, 25 bp, Homo sapien
caggcattccaaacggaccgggtct

SEQ ID NO: 4663973 - DNA, 25 bp, Homo sapien
aggcattccaaacggaccgggtctg

SEQ ID NO: 4663974 - DNA, 25 bp, Homo sapien
gaggaggaacatgcggcggcaccat

SEQ ID NO: 4663975 - DNA, 25 bp, Homo sapien
agagaggtctgcggaatgttgagca

SEQ ID NO: 4663976 - DNA, 25 bp, Homo sapien
gagaggtctgcggaatgttgagcat

SEQ ID NO: 4663977 - DNA, 25 bp, Homo sapien
cagagaggtctgcggaatgttgagc

SEQ ID NO: 4663978 - DNA, 25 bp, Homo sapien
gcagagaggtctgcggaatgttgag

SEQ ID NO: 4663979 - DNA, 25 bp, Homo sapien
cccctgggctgggcacctgtggggc

SEQ ID NO: 4663980 - DNA, 25 bp, Homo sapien
gccccctgggctgggcacctgtggg

SEQ ID NO: 4663981 - DNA, 25 bp, Homo sapien
gggcgccccctgggctgggcacctg

SEQ ID NO: 4663982 - DNA, 25 bp, Homo sapien
gcgccccctgggctgggcacctgtg

SEQ ID NO: 4663983 - DNA, 25 bp, Homo sapien
cagagaggctgtacgggtatggacc

SEQ ID NO: 4663984 - DNA, 25 bp, Homo sapien
ggctcagagaggctgtacgggtatg

SEQ ID NO: 4663985 - DNA, 25 bp, Homo sapien
agagaggctgtacgggtatggaccc

SEQ ID NO: 4663986 - DNA, 25 bp, Homo sapien
ctcagagaggctgtacgggtatgga

SEQ ID NO: 4663987 - DNA, 25 bp, Homo sapien
cagcggcgtgtgcttcccttcgtga

SEQ ID NO: 4663988 - DNA, 25 bp, Homo sapien
tcccgctcgtgtccaaagtgagagg

SEQ ID NO: 4663989 - DNA, 25 bp, Homo sapien
tgccctcgtcgttgtcggaagatga

SEQ ID NO: 4663990 - DNA, 25 bp, Homo sapien
cggaagatgacgatgtagaagagcc

SEQ ID NO: 4663991 - DNA, 25 bp, Homo sapien
cacaaaccagttcttgtcaaattcc

SEQ ID NO: 4663992 - DNA, 25 bp, Homo sapien
tcacacaaaccagttcttgtcaaat

SEQ ID NO: 4663993 - DNA, 25 bp, Homo sapien
attcctccccagaaagtttcctgtg

SEQ ID NO: 4663994 - DNA, 25 bp, Homo sapien
ccagaaagtttcctgtggctccagg

SEQ ID NO: 4663995 - DNA, 25 bp, Homo sapien
gcagggtgtcccacattattccttc

SEQ ID NO: 4663996 - DNA, 25 bp, Homo sapien
ggtatcactgaacgtacactacaga

SEQ ID NO: 4663997 - DNA, 25 bp, Homo sapien
tctagaaggccaatcgcctccgcta

SEQ ID NO: 4663998 - DNA, 25 bp, Homo sapien
ggtcacaccttgctatgcatctaga

SEQ ID NO: 4663999 - DNA, 25 bp, Homo sapien
tggagcagagcacgatggaattctc

SEQ ID NO: 4664000 - DNA, 25 bp, Homo sapien
agcagagcacgatggaattctcttt

SEQ ID NO: 4664001 - DNA, 25 bp, Homo sapien
gagcagagcacgatggaattctctt

SEQ ID NO: 4664002 - DNA, 25 bp, Homo sapien
ggagcagagcacgatggaattctct

SEQ ID NO: 4664003 - DNA, 25 bp, Homo sapien
taccttctgaaaaccagtgctggcc

SEQ ID NO: 4664004 - DNA, 25 bp, Homo sapien
ccttcgactataaggttccatgccc

SEQ ID NO: 4664005 - DNA, 25 bp, Homo sapien
tctgaaaaccagtgctggccatagg

SEQ ID NO: 4664006 - DNA, 25 bp, Homo sapien
ggttccatgcccaaactaccttctg

SEQ ID NO: 4664007 - DNA, 25 bp, Homo sapien
cctgggtctcctcgtgcctgaggct

SEQ ID NO: 4664008 - DNA, 25 bp, Homo sapien
gtctcctcgtgcctgaggctctgag

SEQ ID NO: 4664009 - DNA, 25 bp, Homo sapien
gccaatcttgttcccgctgatatgg

SEQ ID NO: 4664010 - DNA, 25 bp, Homo sapien
ggctctgagtggcttcccgtcttct

SEQ ID NO: 4664011 - DNA, 25 bp, Homo sapien
tgatggactgctgcgaggcagtaga

SEQ ID NO: 4664012 - DNA, 25 bp, Homo sapien
agtgatggactgctgcgaggcagta

SEQ ID NO: 4664013 - DNA, 25 bp, Homo sapien
gtgatggactgctgcgaggcagtag

SEQ ID NO: 4664014 - DNA, 25 bp, Homo sapien
gatggactgctgcgaggcagtagaa

SEQ ID NO: 4664015 - DNA, 25 bp, Homo sapien
aagaggcagtggacgagccttctgc

SEQ ID NO: 4664016 - DNA, 25 bp, Homo sapien
gaagaggcagtggacgagccttctg

SEQ ID NO: 4664017 - DNA, 25 bp, Homo sapien
ccttgccttcggctagttggcttcc

SEQ ID NO: 4664018 - DNA, 25 bp, Homo sapien
ctggtgggcatcgacaggaggcacg

SEQ ID NO: 4664019 - DNA, 25 bp, Homo sapien
gcttcccttgccttcggctagttgg

SEQ ID NO: 4664020 - DNA, 25 bp, Homo sapien
gaggcacgggattggctggacagtg

SEQ ID NO: 4664021 - DNA, 25 bp, Homo sapien
aagatgtaggggtacatcagcccct

SEQ ID NO: 4664022 - DNA, 25 bp, Homo sapien
cacctcaggtgcgacggggggcagg

SEQ ID NO: 4664023 - DNA, 25 bp, Homo sapien
acatggaagatgtaggggtacatca

SEQ ID NO: 4664024 - DNA, 25 bp, Homo sapien
ctcggccactctcagcacctcaggt

SEQ ID NO: 4664025 - DNA, 25 bp, Homo sapien
catcaaataacagaagccactccag

SEQ ID NO: 4664026 - DNA, 25 bp, Homo sapien
tgtttcaagtagattagtaagacag

SEQ ID NO: 4664027 - DNA, 25 bp, Homo sapien
ataggaatggccactcatcaaataa

SEQ ID NO: 4664028 - DNA, 25 bp, Homo sapien
gaaagtgaactttgtttcaagtaga

SEQ ID NO: 4664029 - DNA, 25 bp, Homo sapien
gatctgagcaaatagtactggctac

SEQ ID NO: 4664030 - DNA, 25 bp, Homo sapien
gatagcaataaaccagttctgcagg

SEQ ID NO: 4664031 - DNA, 25 bp, Homo sapien
catagatacatttgagacaccaaga

SEQ ID NO: 4664032 - DNA, 25 bp, Homo sapien
agtcagttaacagttgaagtccacc

SEQ ID NO: 4664033 - DNA, 25 bp, Homo sapien
ctgtaaatgtcttagcctgggcaat

SEQ ID NO: 4664034 - DNA, 25 bp, Homo sapien
cagtgtggacataacaggtagctcc

SEQ ID NO: 4664035 - DNA, 25 bp, Homo sapien
gtgttctaacactctcatctaggga

SEQ ID NO: 4664036 - DNA, 25 bp, Homo sapien
taccagagccattcagcttatagga

SEQ ID NO: 4664037 - DNA, 25 bp, Homo sapien
gaactggcctatagagcagagcggc

SEQ ID NO: 4664038 - DNA, 25 bp, Homo sapien
caggactccgtaaacatactgacga

SEQ ID NO: 4664039 - DNA, 25 bp, Homo sapien
aacatactgacgaactggcctatag

SEQ ID NO: 4664040 - DNA, 25 bp, Homo sapien
tgctttctgccaaactaaacaggac

SEQ ID NO: 4664041 - DNA, 25 bp, Homo sapien
aacaatggattgttacagtacatac

SEQ ID NO: 4664042 - DNA, 25 bp, Homo sapien
taagagcctttaccctggcctactg

SEQ ID NO: 4664043 - DNA, 25 bp, Homo sapien
cctcctttacacagaggcactcggg

SEQ ID NO: 4664044 - DNA, 25 bp, Homo sapien
caagagattacgaggtaccgaggaa

SEQ ID NO: 4664045 - DNA, 25 bp, Homo sapien
catggtatctccaaccactgaagac

SEQ ID NO: 4664046 - DNA, 25 bp, Homo sapien
ccaaggaaaggtagtgagaactgct

SEQ ID NO: 4664047 - DNA, 25 bp, Homo sapien
tcaggacaactatcaccaaggaaag

SEQ ID NO: 4664048 - DNA, 25 bp, Homo sapien
tcttttgagagcaaatggatcacac

SEQ ID NO: 4664049 - DNA, 25 bp, Homo sapien
gtgcgctgaaactgaggacaaagga

SEQ ID NO: 4664050 - DNA, 25 bp, Homo sapien
gatgtcacaggatttgggactagac

SEQ ID NO: 4664051 - DNA, 25 bp, Homo sapien
aagccactgcagtgcgctgaaactg

SEQ ID NO: 4664052 - DNA, 25 bp, Homo sapien
agctgcaacacccaggatgtcacag

SEQ ID NO: 4664053 - DNA, 25 bp, Homo sapien
tttgctatgtaaaggtaactctgtt

SEQ ID NO: 4664054 - DNA, 25 bp, Homo sapien
tcaacctgaggtgatcattggaaat

SEQ ID NO: 4664055 - DNA, 25 bp, Homo sapien
aggagtttgctatgtaaaggtaact

SEQ ID NO: 4664056 - DNA, 25 bp, Homo sapien
agcacagaagccacaaagcctgttc

SEQ ID NO: 4664057 - DNA, 25 bp, Homo sapien
gaaaagccattgaggcatgtaacca

SEQ ID NO: 4664058 - DNA, 25 bp, Homo sapien
ccaagaggcaccctgaaggaggaaa

SEQ ID NO: 4664059 - DNA, 25 bp, Homo sapien
gaagaaactcgccacagcatctgta

SEQ ID NO: 4664060 - DNA, 25 bp, Homo sapien
ggcttcaaagccaggagttcttgcg

SEQ ID NO: 4664061 - DNA, 25 bp, Homo sapien
ttaagcagccccagcgtgtaggtag

SEQ ID NO: 4664062 - DNA, 25 bp, Homo sapien
tcaggctgatacgtctgtaagcacc

SEQ ID NO: 4664063 - DNA, 25 bp, Homo sapien
tgtaagcaccctctgtaattctcaa

SEQ ID NO: 4664064 - DNA, 25 bp, Homo sapien
gaaactcaaaagctcaaggattggc

SEQ ID NO: 4664065 - DNA, 25 bp, Homo sapien
cagagaggggttagtgtcctctttc

SEQ ID NO: 4664066 - DNA, 25 bp, Homo sapien
tgacaagaacagcaagtccaattca

SEQ ID NO: 4664067 - DNA, 25 bp, Homo sapien
gtgtcctctttcacagcactaagca

SEQ ID NO: 4664068 - DNA, 25 bp, Homo sapien
cactaagcatgttgttgcccacatg

SEQ ID NO: 4664069 - DNA, 25 bp, Homo sapien
tggtgctgtgtctccagactcgaca

SEQ ID NO: 4664070 - DNA, 25 bp, Homo sapien
acactcctgagagccgaaactggac

SEQ ID NO: 4664071 - DNA, 25 bp, Homo sapien
cagactcgacacagcccagaaagaa

SEQ ID NO: 4664072 - DNA, 25 bp, Homo sapien
tcctagaagggctcggaactgtcct

SEQ ID NO: 4664073 - DNA, 25 bp, Homo sapien
gtatcctcagaaatatgcactccag

SEQ ID NO: 4664074 - DNA, 25 bp, Homo sapien
caaggccctagattgcagagtgaag

SEQ ID NO: 4664075 - DNA, 25 bp, Homo sapien
actctccacattagagctcagaggg

SEQ ID NO: 4664076 - DNA, 25 bp, Homo sapien
tagtcctaatgcatggtatcctcag

SEQ ID NO: 4664077 - DNA, 25 bp, Homo sapien
aagcatatcctgtcgttggacgcac

SEQ ID NO: 4664078 - DNA, 25 bp, Homo sapien
catatcctgtcgttggacgcacaat

SEQ ID NO: 4664079 - DNA, 25 bp, Homo sapien
agcatatcctgtcgttggacgcaca

SEQ ID NO: 4664080 - DNA, 25 bp, Homo sapien
gaagcatatcctgtcgttggacgca

SEQ ID NO: 4664081 - DNA, 25 bp, Homo sapien
ttgtaagctgcccattctttaatga

SEQ ID NO: 4664082 - DNA, 25 bp, Homo sapien
gcggttcttgtcctctaccgcctta

SEQ ID NO: 4664083 - DNA, 25 bp, Homo sapien
gaaggccctcatcctgcggttcttg

SEQ ID NO: 4664084 - DNA, 25 bp, Homo sapien
ggcaagagcttcaaccagttccggg

SEQ ID NO: 4664085 - DNA, 25 bp, Homo sapien
taagagcggctgagaacttaactct

SEQ ID NO: 4664086 - DNA, 25 bp, Homo sapien
tgaacaccttgctggatacagagta

SEQ ID NO: 4664087 - DNA, 25 bp, Homo sapien
cctggttaagagtcaagataagagc

SEQ ID NO: 4664088 - DNA, 25 bp, Homo sapien
tcagaattcaacttcgccaggacag

SEQ ID NO: 4664089 - DNA, 25 bp, Homo sapien
aggcatctagctcctgacgccgaag

SEQ ID NO: 4664090 - DNA, 25 bp, Homo sapien
ctggagctgatcaggctcgtagagt

SEQ ID NO: 4664091 - DNA, 25 bp, Homo sapien
aggatgcgtgctcccggccactgca

SEQ ID NO: 4664092 - DNA, 25 bp, Homo sapien
agctgatcaggctcgtagagtttgg

SEQ ID NO: 4664093 - DNA, 25 bp, Homo sapien
ccacacaattgaggagggtcactta

SEQ ID NO: 4664094 - DNA, 25 bp, Homo sapien
gatggcaccacacactagcaaaagt

SEQ ID NO: 4664095 - DNA, 25 bp, Homo sapien
tagtgggcatacctgatacctggcg

SEQ ID NO: 4664096 - DNA, 25 bp, Homo sapien
gaaaggacctgacttagcaccagcc

SEQ ID NO: 4664097 - DNA, 25 bp, Homo sapien
tcaatctgatgatagctgagaggat

SEQ ID NO: 4664098 - DNA, 25 bp, Homo sapien
ggaactgtcgacctccagacaagca

SEQ ID NO: 4664099 - DNA, 25 bp, Homo sapien
gaagcacttacaggtgtaggctgct

SEQ ID NO: 4664100 - DNA, 25 bp, Homo sapien
tgtaggctgctcttattaaagggaa

SEQ ID NO: 4664101 - DNA, 25 bp, Homo sapien
ccggcaaacggctatctgcattgcc

SEQ ID NO: 4664102 - DNA, 25 bp, Homo sapien
tacttttagtagagtcaggttttca

SEQ ID NO: 4664103 - DNA, 25 bp, Homo sapien
atttttgtacttttagtagagtcag

SEQ ID NO: 4664104 - DNA, 25 bp, Homo sapien
tacgtagagcccacgcttctagtgt

SEQ ID NO: 4664105 - DNA, 25 bp, Homo sapien
cttctatacgtagagcccacgcttc

SEQ ID NO: 4664106 - DNA, 25 bp, Homo sapien
tctatacgtagagcccacgcttcta

SEQ ID NO: 4664107 - DNA, 25 bp, Homo sapien
tatacgtagagcccacgcttctagt

SEQ ID NO: 4664108 - DNA, 25 bp, Homo sapien
tacatccaaggacaacagtgttccc

SEQ ID NO: 4664109 - DNA, 25 bp, Homo sapien
tccactcatgaagagagctgatagc

SEQ ID NO: 4664110 - DNA, 25 bp, Homo sapien
accatcacagaggtcaatgagtggg

SEQ ID NO: 4664111 - DNA, 25 bp, Homo sapien
gcatcatttgcaaacaaggccatgt

SEQ ID NO: 4664112 - DNA, 25 bp, Homo sapien
gaagctgagcccctcgaggacgctc

SEQ ID NO: 4664113 - DNA, 25 bp, Homo sapien
gggaaagggagcgtgtggctctgcc

SEQ ID NO: 4664114 - DNA, 25 bp, Homo sapien
tcgaggacgctctggcgcatcttct

SEQ ID NO: 4664115 - DNA, 25 bp, Homo sapien
aggtggcggcgggaaagggagcgtg

SEQ ID NO: 4664116 - DNA, 25 bp, Homo sapien
gtgtcccgatgctgccgccacacgg

SEQ ID NO: 4664117 - DNA, 25 bp, Homo sapien
ggctccgcagtgtcccgatgctgcc

SEQ ID NO: 4664118 - DNA, 25 bp, Homo sapien
ctgttgctaccgtttccccataggg

SEQ ID NO: 4664119 - DNA, 25 bp, Homo sapien
ggcacggtaagggcctgttgctacc

SEQ ID NO: 4664120 - DNA, 25 bp, Homo sapien
acacgaggcgatggtcaggttaccc

SEQ ID NO: 4664121 - DNA, 25 bp, Homo sapien
tgcacagaaaggttctgttctaggt

SEQ ID NO: 4664122 - DNA, 25 bp, Homo sapien
ggttctgttctaggtggacactcag

SEQ ID NO: 4664123 - DNA, 25 bp, Homo sapien
actcagtggtctaccctgaaaggag

SEQ ID NO: 4664124 - DNA, 25 bp, Homo sapien
gaaagaaacgccactattagcagct

SEQ ID NO: 4664125 - DNA, 25 bp, Homo sapien
aggagcagtcacagagcagagtagc

SEQ ID NO: 4664126 - DNA, 25 bp, Homo sapien
cagagtagcacactgcaggaggctg

SEQ ID NO: 4664127 - DNA, 25 bp, Homo sapien
ctgacccgtcgccaaatctgcaagt

SEQ ID NO: 4664128 - DNA, 25 bp, Homo sapien
tagaatttccataagcagagtcaca

SEQ ID NO: 4664129 - DNA, 25 bp, Homo sapien
agtggccagcagctactatactagg

SEQ ID NO: 4664130 - DNA, 25 bp, Homo sapien
actaggcagtgcaaatctgagttcc

SEQ ID NO: 4664131 - DNA, 25 bp, Homo sapien
gtattttacatgttctagccagagc

SEQ ID NO: 4664132 - DNA, 25 bp, Homo sapien
tttctagtttgcctccctgagaagg

SEQ ID NO: 4664133 - DNA, 25 bp, Homo sapien
cctctagctggtcctccgacagaaa

SEQ ID NO: 4664134 - DNA, 25 bp, Homo sapien
tcccagcccaatggccaaccacagt

SEQ ID NO: 4664135 - DNA, 25 bp, Homo sapien
agcccaatggccaaccacagtgcca

SEQ ID NO: 4664136 - DNA, 25 bp, Homo sapien
atgaaaaaggacaacagtaaacact

SEQ ID NO: 4664137 - DNA, 25 bp, Homo sapien
taaatctgttacagacaacatttaa

SEQ ID NO: 4664138 - DNA, 25 bp, Homo sapien
atcttacgttttatgaagcactgaa

SEQ ID NO: 4664139 - DNA, 25 bp, Homo sapien
tccaatcttacgttttatgaagcac

SEQ ID NO: 4664140 - DNA, 25 bp, Homo sapien
ggtggaaataactcctcttggacgc

SEQ ID NO: 4664141 - DNA, 25 bp, Homo sapien
ctggggtggaaataactcctcttgg

SEQ ID NO: 4664142 - DNA, 25 bp, Homo sapien
tggggtggaaataactcctcttgga

SEQ ID NO: 4664143 - DNA, 25 bp, Homo sapien
aattgctgcctggtttttgtaacct

SEQ ID NO: 4664144 - DNA, 25 bp, Homo sapien
cctggtttttgtaacctctgccata

SEQ ID NO: 4664145 - DNA, 25 bp, Homo sapien
ttgctgcctggtttttgtaacctct

SEQ ID NO: 4664146 - DNA, 25 bp, Homo sapien
ctgcctggtttttgtaacctctgcc

SEQ ID NO: 4664147 - DNA, 25 bp, Homo sapien
gatggagatgtgacccttgcctaag

SEQ ID NO: 4664148 - DNA, 25 bp, Homo sapien
acaaagatggtggtaccttccagca

SEQ ID NO: 4664149 - DNA, 25 bp, Homo sapien
tttacagacgagaacaggaaccttc

SEQ ID NO: 4664150 - DNA, 25 bp, Homo sapien
taaaaatatagcaggaccgctgggc

SEQ ID NO: 4664151 - DNA, 25 bp, Homo sapien
ttagaccagggctcctcaaccttag

SEQ ID NO: 4664152 - DNA, 25 bp, Homo sapien
gaaatctgcactgataattgccacg

SEQ ID NO: 4664153 - DNA, 25 bp, Homo sapien
ggctgtcccacacaccgtagggtgt

SEQ ID NO: 4664154 - DNA, 25 bp, Homo sapien
gcatatgatacgctggctctgtcca

SEQ ID NO: 4664155 - DNA, 25 bp, Homo sapien
cagctgggtccttctaaccctgtct

SEQ ID NO: 4664156 - DNA, 25 bp, Homo sapien
tagatgctctacctgtctcagtcag

SEQ ID NO: 4664157 - DNA, 25 bp, Homo sapien
gagctctgtctaatcctttgtatgg

SEQ ID NO: 4664158 - DNA, 25 bp, Homo sapien
tttgctttgacttttgggcggtaga

SEQ ID NO: 4664159 - DNA, 25 bp, Homo sapien
ggatgccaattttggcctaatgaca

SEQ ID NO: 4664160 - DNA, 25 bp, Homo sapien
aggatgccaattttggcctaatgac

SEQ ID NO: 4664161 - DNA, 25 bp, Homo sapien
aacagaagagagaggatgccaattt

SEQ ID NO: 4664162 - DNA, 25 bp, Homo sapien
ataaacagaagagagaggatgccaa

SEQ ID NO: 4664163 - DNA, 25 bp, Homo sapien
aggacaacaaatgagaaggtggttt

SEQ ID NO: 4664164 - DNA, 25 bp, Homo sapien
tgaaggacaacaaatgagaaggtgg

SEQ ID NO: 4664165 - DNA, 25 bp, Homo sapien
ctgtttaaaatgaaggacaacaaat

SEQ ID NO: 4664166 - DNA, 25 bp, Homo sapien
tttaaaatgaaggacaacaaatgag

SEQ ID NO: 4664167 - DNA, 25 bp, Homo sapien
tggcgtcacccgtgctcccgttcat

SEQ ID NO: 4664168 - DNA, 25 bp, Homo sapien
ctgcggcaagcgctgtctgtactta

SEQ ID NO: 4664169 - DNA, 25 bp, Homo sapien
gtcacccgtgctcccgttcatctgg

SEQ ID NO: 4664170 - DNA, 25 bp, Homo sapien
gcttctctgcggcaagcgctgtctg

SEQ ID NO: 4664171 - DNA, 25 bp, Homo sapien
caatttgtttcctgctacagaaggg

SEQ ID NO: 4664172 - DNA, 25 bp, Homo sapien
cacaatccatgagttagggcaaaac

SEQ ID NO: 4664173 - DNA, 25 bp, Homo sapien
cacagatgcatggtattagtcacga

SEQ ID NO: 4664174 - DNA, 25 bp, Homo sapien
gatcctacttagctcttgcgggcag

SEQ ID NO: 4664175 - DNA, 25 bp, Homo sapien
caagtgaatttaaaagccacgccat

SEQ ID NO: 4664176 - DNA, 25 bp, Homo sapien
tccccttggttgcttgaaactgagc

SEQ ID NO: 4664177 - DNA, 25 bp, Homo sapien
cagtagttgtttcgatttgaattaa

SEQ ID NO: 4664178 - DNA, 25 bp, Homo sapien
atgtccctctaagccggaaacctgg

SEQ ID NO: 4664179 - DNA, 25 bp, Homo sapien
ttctgtaagtctgctttatcaaaca

SEQ ID NO: 4664180 - DNA, 25 bp, Homo sapien
tgtaagtctgctttatcaaacagaa

SEQ ID NO: 4664181 - DNA, 25 bp, Homo sapien
aaacgtggtggagtcaaatttattg

SEQ ID NO: 4664182 - DNA, 25 bp, Homo sapien
aacgtggtggagtcaaatttattgc

SEQ ID NO: 4664183 - DNA, 25 bp, Homo sapien
ggctgttttaagattgttcattgtt

SEQ ID NO: 4664184 - DNA, 25 bp, Homo sapien
tgcgctgcccgggtcggtccgggcc

SEQ ID NO: 4664185 - DNA, 25 bp, Homo sapien
aggcgcgtccacacaatgccgggcg

SEQ ID NO: 4664186 - DNA, 25 bp, Homo sapien
ccgcgcgcgggacacaaaagggaat

SEQ ID NO: 4664187 - DNA, 25 bp, Homo sapien
ggctcagggcgctagtgtgcgcggg

SEQ ID NO: 4664188 - DNA, 25 bp, Homo sapien
agtccttgcaggcgtcgcactcgat

SEQ ID NO: 4664189 - DNA, 25 bp, Homo sapien
aggggagccggcagacgcagtacac

SEQ ID NO: 4664190 - DNA, 25 bp, Homo sapien
cttgcaggcgtcgcactcgatcatg

SEQ ID NO: 4664191 - DNA, 25 bp, Homo sapien
tcatgaagcgggtaacgtcgtaggg

SEQ ID NO: 4664192 - DNA, 25 bp, Homo sapien
tccttagggagcataagatcatgtc

SEQ ID NO: 4664193 - DNA, 25 bp, Homo sapien
cttccttagggagcataagatcatg

SEQ ID NO: 4664194 - DNA, 25 bp, Homo sapien
ccccatcttccttagggagcataag

SEQ ID NO: 4664195 - DNA, 25 bp, Homo sapien
ttagggagcataagatcatgtcaaa

SEQ ID NO: 4664196 - DNA, 25 bp, Homo sapien
gacagggtgacccacactatctgcc

SEQ ID NO: 4664197 - DNA, 25 bp, Homo sapien
atctgcccctcgcagtcgacgtggg

SEQ ID NO: 4664198 - DNA, 25 bp, Homo sapien
gacgtgggaaccaaacatgatgaat

SEQ ID NO: 4664199 - DNA, 25 bp, Homo sapien
gacagaggccctagctgcttctgtg

SEQ ID NO: 4664200 - DNA, 25 bp, Homo sapien
tctgggaggtgagtgtgtccacctg

SEQ ID NO: 4664201 - DNA, 25 bp, Homo sapien
gggaggtgagtgtgtccacctgctg

SEQ ID NO: 4664202 - DNA, 25 bp, Homo sapien
ctctgggaggtgagtgtgtccacct

SEQ ID NO: 4664203 - DNA, 25 bp, Homo sapien
aggtgagtgtgtccacctgctgcag

SEQ ID NO: 4664204 - DNA, 25 bp, Homo sapien
aggatccaagtcacatgccttcaca

SEQ ID NO: 4664205 - DNA, 25 bp, Homo sapien
cacagacggccaatggcagggtcaa

SEQ ID NO: 4664206 - DNA, 25 bp, Homo sapien
ccttcaccaggatccaagtcacatg

SEQ ID NO: 4664207 - DNA, 25 bp, Homo sapien
ggtcaagggctacccagcagacagg

SEQ ID NO: 4664208 - DNA, 25 bp, Homo sapien
ccctctatcccgcagtcccatggtc

SEQ ID NO: 4664209 - DNA, 25 bp, Homo sapien
tctatcccgcagtcccatggtcccc

SEQ ID NO: 4664210 - DNA, 25 bp, Homo sapien
ccaacacaacgccaccaggcacaaa

SEQ ID NO: 4664211 - DNA, 25 bp, Homo sapien
aacacaacgccaccaggcacaaaga

SEQ ID NO: 4664212 - DNA, 25 bp, Homo sapien
gggctactgacacaactctacaact

SEQ ID NO: 4664213 - DNA, 25 bp, Homo sapien
tttctgtcttcattagaaagcacca

SEQ ID NO: 4664214 - DNA, 25 bp, Homo sapien
aagcaccagggctactgacacaact

SEQ ID NO: 4664215 - DNA, 25 bp, Homo sapien
ccagggctactgacacaactctaca

SEQ ID NO: 4664216 - DNA, 25 bp, Homo sapien
tgggatggtaccagctagggcctct

SEQ ID NO: 4664217 - DNA, 25 bp, Homo sapien
tgtgagccaaggtgcaaggccacgt

SEQ ID NO: 4664218 - DNA, 25 bp, Homo sapien
aatacttctaacaacagccaggtgg

SEQ ID NO: 4664219 - DNA, 25 bp, Homo sapien
caccggatgaactgcaggtggcaga

SEQ ID NO: 4664220 - DNA, 25 bp, Homo sapien
catggagatggacacgggactagct

SEQ ID NO: 4664221 - DNA, 25 bp, Homo sapien
agatggacacgggactagctcgctg

SEQ ID NO: 4664222 - DNA, 25 bp, Homo sapien
acccatggagatggacacgggacta

SEQ ID NO: 4664223 - DNA, 25 bp, Homo sapien
ggacacgggactagctcgctgagac

SEQ ID NO: 4664224 - DNA, 25 bp, Homo sapien
tgagggccgtggacgtcctatcttt

SEQ ID NO: 4664225 - DNA, 25 bp, Homo sapien
gtggacgtcctatctttcttggcct

SEQ ID NO: 4664226 - DNA, 25 bp, Homo sapien
ggccgtggacgtcctatctttcttg

SEQ ID NO: 4664227 - DNA, 25 bp, Homo sapien
agcatgagggccgtggacgtcctat

SEQ ID NO: 4664228 - DNA, 25 bp, Homo sapien
ccataaggtctgcatcgtgggtgaa

SEQ ID NO: 4664229 - DNA, 25 bp, Homo sapien
tccacaactggacttaagcagggag

SEQ ID NO: 4664230 - DNA, 25 bp, Homo sapien
tgaatctgcagatgacgggtgtccc

SEQ ID NO: 4664231 - DNA, 25 bp, Homo sapien
tgtcctacaggagtccagagccagc

SEQ ID NO: 4664232 - DNA, 25 bp, Homo sapien
aaaaaagggatgacatgtacagaac

SEQ ID NO: 4664233 - DNA, 25 bp, Homo sapien
gaatactcttctgactctcaaaaat

SEQ ID NO: 4664234 - DNA, 25 bp, Homo sapien
gccaagaatactcttctgactctca

SEQ ID NO: 4664235 - DNA, 25 bp, Homo sapien
taaatctgtatagaatgcaagtcaa

SEQ ID NO: 4664236 - DNA, 25 bp, Homo sapien
tgctgtttggagtcccccaggtgtc

SEQ ID NO: 4664237 - DNA, 25 bp, Homo sapien
tggagtcccccaggtgtctcataag

SEQ ID NO: 4664238 - DNA, 25 bp, Homo sapien
gagtcccccaggtgtctcataagga

SEQ ID NO: 4664239 - DNA, 25 bp, Homo sapien
gtcccccaggtgtctcataaggaac

SEQ ID NO: 4664240 - DNA, 25 bp, Homo sapien
gcaggcatagagcacgggccacggg

SEQ ID NO: 4664241 - DNA, 25 bp, Homo sapien
caggcatggcacacaggccaccagg

SEQ ID NO: 4664242 - DNA, 25 bp, Homo sapien
atggagcacgggctaccggaagcca

SEQ ID NO: 4664243 - DNA, 25 bp, Homo sapien
cagcaggcgtggagcacaggccacc

SEQ ID NO: 4664244 - DNA, 25 bp, Homo sapien
tgagtttcttcctgcgacaacagaa

SEQ ID NO: 4664245 - DNA, 25 bp, Homo sapien
tgttggccgaagtgcaaacttcagg

SEQ ID NO: 4664246 - DNA, 25 bp, Homo sapien
tcttcctgcgacaacagaagcttgt

SEQ ID NO: 4664247 - DNA, 25 bp, Homo sapien
gacaacagaagcttgttggccgaag

SEQ ID NO: 4664248 - DNA, 25 bp, Homo sapien
attcccagatatccacgtgcttgtg

SEQ ID NO: 4664249 - DNA, 25 bp, Homo sapien
ctgcaggaagcccatcgtgggccac

SEQ ID NO: 4664250 - DNA, 25 bp, Homo sapien
tgggcaattcccagatatccacgtg

SEQ ID NO: 4664251 - DNA, 25 bp, Homo sapien
tcccagatatccacgtgcttgtggc

SEQ ID NO: 4664252 - DNA, 25 bp, Homo sapien
cattcttatgttcccatctctccca

SEQ ID NO: 4664253 - DNA, 25 bp, Homo sapien
ccatagccacccatccagctcatcc

SEQ ID NO: 4664254 - DNA, 25 bp, Homo sapien
taccatagccacccatccagctcat

SEQ ID NO: 4664255 - DNA, 25 bp, Homo sapien
cataccatagccacccatccagctc

SEQ ID NO: 4664256 - DNA, 25 bp, Homo sapien
accatagccacccatccagctcatc

SEQ ID NO: 4664257 - DNA, 25 bp, Homo sapien
cacagtttgggcagtggtatatgtc

SEQ ID NO: 4664258 - DNA, 25 bp, Homo sapien
ggtatatgtcgatgtcgggcgcctc

SEQ ID NO: 4664259 - DNA, 25 bp, Homo sapien
atatgtcgatgtcgggcgcctcctc

SEQ ID NO: 4664260 - DNA, 25 bp, Homo sapien
ttcccatgggttttctcacagtttg

SEQ ID NO: 4664261 - DNA, 25 bp, Homo sapien
aacctgcacagggtgaaccaagcct

SEQ ID NO: 4664262 - DNA, 25 bp, Homo sapien
gaacctgcacagggtgaaccaagcc

SEQ ID NO: 4664263 - DNA, 25 bp, Homo sapien
tgaacctgcacagggtgaaccaagc

SEQ ID NO: 4664264 - DNA, 25 bp, Homo sapien
tcagcactgtctgctagtctagaat

SEQ ID NO: 4664265 - DNA, 25 bp, Homo sapien
tttagctgcaatcaagggcaggttg

SEQ ID NO: 4664266 - DNA, 25 bp, Homo sapien
tagctgcaatcaagggcaggttggg

SEQ ID NO: 4664267 - DNA, 25 bp, Homo sapien
gggcagctggccgtaggagacagga

SEQ ID NO: 4664268 - DNA, 25 bp, Homo sapien
ggcttgacgtcaggcgcttgccccg

SEQ ID NO: 4664269 - DNA, 25 bp, Homo sapien
tgtttgtgccaggtccgcttcttct

SEQ ID NO: 4664270 - DNA, 25 bp, Homo sapien
ttgccccgggccgtgtttgtgccag

SEQ ID NO: 4664271 - DNA, 25 bp, Homo sapien
ggccgtgtttgtgccaggtccgctt

SEQ ID NO: 4664272 - DNA, 25 bp, Homo sapien
ggaaaggtccggctccgcagctcct

SEQ ID NO: 4664273 - DNA, 25 bp, Homo sapien
gggaaaggtccggctccgcagctcc

SEQ ID NO: 4664274 - DNA, 25 bp, Homo sapien
ctgggaaaggtccggctccgcagct

SEQ ID NO: 4664275 - DNA, 25 bp, Homo sapien
tgggaaaggtccggctccgcagctc

SEQ ID NO: 4664276 - DNA, 25 bp, Homo sapien
agacatgaggacaacgcctgcctgg

SEQ ID NO: 4664277 - DNA, 25 bp, Homo sapien
acatgaggacaacgcctgcctgggc

SEQ ID NO: 4664278 - DNA, 25 bp, Homo sapien
aggagccgctcccggctgtgtcctt

SEQ ID NO: 4664279 - DNA, 25 bp, Homo sapien
aaggagacatgaggacaacgcctgc

SEQ ID NO: 4664280 - DNA, 25 bp, Homo sapien
ccacgtagttctcgacgtcactgac

SEQ ID NO: 4664281 - DNA, 25 bp, Homo sapien
tagttctcgacgtcactgacataga

SEQ ID NO: 4664282 - DNA, 25 bp, Homo sapien
tctcgacgtcactgacatagaacgt

SEQ ID NO: 4664283 - DNA, 25 bp, Homo sapien
cgacgtcactgacatagaacgtggg

SEQ ID NO: 4664284 - DNA, 25 bp, Homo sapien
cggttggtgctgtagtaatagtcca

SEQ ID NO: 4664285 - DNA, 25 bp, Homo sapien
cccgcttgcggttggtgctgtagta

SEQ ID NO: 4664286 - DNA, 25 bp, Homo sapien
cagagaactcgaggttggtgacgtt

SEQ ID NO: 4664287 - DNA, 25 bp, Homo sapien
cgggtgtcagagaactcgaggttgg

SEQ ID NO: 4664288 - DNA, 25 bp, Homo sapien
tccatgagcgaatgtgagggtcaga

SEQ ID NO: 4664289 - DNA, 25 bp, Homo sapien
tgagtgtgactgcaccacacgttgg

SEQ ID NO: 4664290 - DNA, 25 bp, Homo sapien
taagcgtgaatgttgtgtgtccgga

SEQ ID NO: 4664291 - DNA, 25 bp, Homo sapien
cagggccaagaccagaggaggcttt

SEQ ID NO: 4664292 - DNA, 25 bp, Homo sapien
caagtgtgtccatgaatgcccgtgg

SEQ ID NO: 4664293 - DNA, 25 bp, Homo sapien
gcagggctgacgacaactagtgcca

SEQ ID NO: 4664294 - DNA, 25 bp, Homo sapien
gaccgggccaaccaaggtgtatctg

SEQ ID NO: 4664295 - DNA, 25 bp, Homo sapien
tgcccgtgggtgtatcgcatgtcta

SEQ ID NO: 4664296 - DNA, 25 bp, Homo sapien
tgcccctttgcacgtgttatgtgct

SEQ ID NO: 4664297 - DNA, 25 bp, Homo sapien
tacggtgagtgagtgttctggatct

SEQ ID NO: 4664298 - DNA, 25 bp, Homo sapien
tgctttcaggaagtaggcatgacgg

SEQ ID NO: 4664299 - DNA, 25 bp, Homo sapien
ggaaacgatgaagactaaagccatc

SEQ ID NO: 4664300 - DNA, 25 bp, Homo sapien
gctcttggcatagttttgtattctc

SEQ ID NO: 4664301 - DNA, 25 bp, Homo sapien
caccatgcacaaccatattaccttt

SEQ ID NO: 4664302 - DNA, 25 bp, Homo sapien
caaccatattacctttttgtggctc

SEQ ID NO: 4664303 - DNA, 25 bp, Homo sapien
ttttgtggctcttggcatagttttg

SEQ ID NO: 4664304 - DNA, 25 bp, Homo sapien
acagagcaggcatctctccggtctg

SEQ ID NO: 4664305 - DNA, 25 bp, Homo sapien
agagcaggcatctctccggtctggg

SEQ ID NO: 4664306 - DNA, 25 bp, Homo sapien
ccggtctgggggtacattggtcact

SEQ ID NO: 4664307 - DNA, 25 bp, Homo sapien
tctctccggtctgggggtacattgg

SEQ ID NO: 4664308 - DNA, 25 bp, Homo sapien
gagagggttccctgccacaagggcc

SEQ ID NO: 4664309 - DNA, 25 bp, Homo sapien
gcacgttccaaactagcacccttct

SEQ ID NO: 4664310 - DNA, 25 bp, Homo sapien
gtctgggcacatcacggcccacagg

SEQ ID NO: 4664311 - DNA, 25 bp, Homo sapien
tttaaatctccagcacgttccaaac

SEQ ID NO: 4664312 - DNA, 25 bp, Homo sapien
ttctacccatgacagtttctttaca

SEQ ID NO: 4664313 - DNA, 25 bp, Homo sapien
tccttcacgcagattaggcagtact

SEQ ID NO: 4664314 - DNA, 25 bp, Homo sapien
ggccagtagttttctacccatgaca

SEQ ID NO: 4664315 - DNA, 25 bp, Homo sapien
gcagattaggcagtacttggtcact

SEQ ID NO: 4664316 - DNA, 25 bp, Homo sapien
ccatggcaaggcagaggtgccccga

SEQ ID NO: 4664317 - DNA, 25 bp, Homo sapien
tcatggccatggcaaggcagaggtg

SEQ ID NO: 4664318 - DNA, 25 bp, Homo sapien
tggccatggcaaggcagaggtgccc

SEQ ID NO: 4664319 - DNA, 25 bp, Homo sapien
catggccatggcaaggcagaggtgc

SEQ ID NO: 4664320 - DNA, 25 bp, Homo sapien
ctgccaagagagcctgttggcagag

SEQ ID NO: 4664321 - DNA, 25 bp, Homo sapien
agagcctgttggcagagccgcccat

SEQ ID NO: 4664322 - DNA, 25 bp, Homo sapien
caagagagcctgttggcagagccgc

SEQ ID NO: 4664323 - DNA, 25 bp, Homo sapien
gccaagagagcctgttggcagagcc

SEQ ID NO: 4664324 - DNA, 25 bp, Homo sapien
tggttagaggcagaccgccagcgct

SEQ ID NO: 4664325 - DNA, 25 bp, Homo sapien
gttagaggcagaccgccagcgctca

SEQ ID NO: 4664326 - DNA, 25 bp, Homo sapien
tgtggttagaggcagaccgccagcg

SEQ ID NO: 4664327 - DNA, 25 bp, Homo sapien
ctgtggttagaggcagaccgccagc

SEQ ID NO: 4664328 - DNA, 25 bp, Homo sapien
ggctgtggaggaaatgtcccgcgaa

SEQ ID NO: 4664329 - DNA, 25 bp, Homo sapien
tgtggaggaaatgtcccgcgaaggc

SEQ ID NO: 4664330 - DNA, 25 bp, Homo sapien
gctgtggaggaaatgtcccgcgaag

SEQ ID NO: 4664331 - DNA, 25 bp, Homo sapien
tggaggaaatgtcccgcgaaggcca

SEQ ID NO: 4664332 - DNA, 25 bp, Homo sapien
cagcacgcagtttcaaagttgggaa

SEQ ID NO: 4664333 - DNA, 25 bp, Homo sapien
cccatgtaccagcacgcagtttcaa

SEQ ID NO: 4664334 - DNA, 25 bp, Homo sapien
taccagcacgcagtttcaaagttgg

SEQ ID NO: 4664335 - DNA, 25 bp, Homo sapien
catgtaccagcacgcagtttcaaag

SEQ ID NO: 4664336 - DNA, 25 bp, Homo sapien
cttcgtccacgatcggaaagcacca

SEQ ID NO: 4664337 - DNA, 25 bp, Homo sapien
cgtccacgatcggaaagcaccattg

SEQ ID NO: 4664338 - DNA, 25 bp, Homo sapien
tccacgatcggaaagcaccattgag

SEQ ID NO: 4664339 - DNA, 25 bp, Homo sapien
cgatcggaaagcaccattgagaatt

SEQ ID NO: 4664340 - DNA, 25 bp, Homo sapien
aaggtttgaagtgctccgggagctc

SEQ ID NO: 4664341 - DNA, 25 bp, Homo sapien
tctttggccaggtctttgattagct

SEQ ID NO: 4664342 - DNA, 25 bp, Homo sapien
tcactgagccggatctctttggcca

SEQ ID NO: 4664343 - DNA, 25 bp, Homo sapien
ctttgattagctgtgaaggtttgaa

SEQ ID NO: 4664344 - DNA, 25 bp, Homo sapien
cacttccggtcggacggctttggag

SEQ ID NO: 4664345 - DNA, 25 bp, Homo sapien
tccggtcggacggctttggaggcat

SEQ ID NO: 4664346 - DNA, 25 bp, Homo sapien
ccggtcggacggctttggaggcatt

SEQ ID NO: 4664347 - DNA, 25 bp, Homo sapien
attcacttccggtcggacggctttg

SEQ ID NO: 4664348 - DNA, 25 bp, Homo sapien
gacactttctccaggagggattgag

SEQ ID NO: 4664349 - DNA, 25 bp, Homo sapien
gcatcttcacagttttgggagtctt

SEQ ID NO: 4664350 - DNA, 25 bp, Homo sapien
gattttggatggcttgggcatcttc

SEQ ID NO: 4664351 - DNA, 25 bp, Homo sapien
ctcaatgggagacgggggctcctcc

SEQ ID NO: 4664352 - DNA, 25 bp, Homo sapien
tgaggctgactcccgggacttcttc

SEQ ID NO: 4664353 - DNA, 25 bp, Homo sapien
gtgaggctgactcccgggacttctt

SEQ ID NO: 4664354 - DNA, 25 bp, Homo sapien
ctgcatgtgaaccacatctttgttg

SEQ ID NO: 4664355 - DNA, 25 bp, Homo sapien
tgcatgtgaaccacatctttgttgg

SEQ ID NO: 4664356 - DNA, 25 bp, Homo sapien
tcagtaaggagtcaggtttgctgtt

SEQ ID NO: 4664357 - DNA, 25 bp, Homo sapien
cttccatcttcagtaaggagtcagg

SEQ ID NO: 4664358 - DNA, 25 bp, Homo sapien
ctcttccatcttcagtaaggagtca

SEQ ID NO: 4664359 - DNA, 25 bp, Homo sapien
tccatcttcagtaaggagtcaggtt

SEQ ID NO: 4664360 - DNA, 25 bp, Homo sapien
cgaggagtttcttgttggagaaaga

SEQ ID NO: 4664361 - DNA, 25 bp, Homo sapien
ctttgtttccagctagaggcgactt

SEQ ID NO: 4664362 - DNA, 25 bp, Homo sapien
agaaaaagagaacttattgtctttg

SEQ ID NO: 4664363 - DNA, 25 bp, Homo sapien
ccgaggagtttcttgttggagaaag

SEQ ID NO: 4664364 - DNA, 25 bp, Homo sapien
gtcatccgacacgtactcatactca

SEQ ID NO: 4664365 - DNA, 25 bp, Homo sapien
gatcttgagctcaccgtcatccgac

SEQ ID NO: 4664366 - DNA, 25 bp, Homo sapien
ttgagctcaccgtcatccgacacgt

SEQ ID NO: 4664367 - DNA, 25 bp, Homo sapien
aactcgtcgatcttgagctcaccgt

SEQ ID NO: 4664368 - DNA, 25 bp, Homo sapien
ctttggcttcgtgacaggcgtgggc

SEQ ID NO: 4664369 - DNA, 25 bp, Homo sapien
tttggcttcgtgacaggcgtgggca

SEQ ID NO: 4664370 - DNA, 25 bp, Homo sapien
ttggcttcgtgacaggcgtgggcag

SEQ ID NO: 4664371 - DNA, 25 bp, Homo sapien
cgatgtgcagcgaaccctcgtccga

SEQ ID NO: 4664372 - DNA, 25 bp, Homo sapien
ttgactctggcattgcggccgggct

SEQ ID NO: 4664373 - DNA, 25 bp, Homo sapien
aaccctcgtccgaggagtcatcact

SEQ ID NO: 4664374 - DNA, 25 bp, Homo sapien
gcaggtccaagatgccagctgccga

SEQ ID NO: 4664375 - DNA, 25 bp, Homo sapien
gggttgtactccagcgcgccaacct

SEQ ID NO: 4664376 - DNA, 25 bp, Homo sapien
gctggggttgtactccagcgcgcca

SEQ ID NO: 4664377 - DNA, 25 bp, Homo sapien
ctgctggggttgtactccagcgcgc

SEQ ID NO: 4664378 - DNA, 25 bp, Homo sapien
tggggttgtactccagcgcgccaac

SEQ ID NO: 4664379 - DNA, 25 bp, Homo sapien
ggctgtgtggagcagctagcagcat

SEQ ID NO: 4664380 - DNA, 25 bp, Homo sapien
ccactgaacaagcttggggctgtgt

SEQ ID NO: 4664381 - DNA, 25 bp, Homo sapien
catggccctgggttgcccatggatt

SEQ ID NO: 4664382 - DNA, 25 bp, Homo sapien
tggagcagctagcagcatggccctg

SEQ ID NO: 4664383 - DNA, 25 bp, Homo sapien
atctccgcagaagcaggctctccca

SEQ ID NO: 4664384 - DNA, 25 bp, Homo sapien
gagccagccagagcacgcagcttgc

SEQ ID NO: 4664385 - DNA, 25 bp, Homo sapien
aggccctgccccgacccctcaactg

SEQ ID NO: 4664386 - DNA, 25 bp, Homo sapien
ttgccctgcatcctctggcaggccc

SEQ ID NO: 4664387 - DNA, 25 bp, Homo sapien
gctgcatctacacctgtacctactc

SEQ ID NO: 4664388 - DNA, 25 bp, Homo sapien
ccacagctgcatctacacctgtacc

SEQ ID NO: 4664389 - DNA, 25 bp, Homo sapien
acagctgcatctacacctgtaccta

SEQ ID NO: 4664390 - DNA, 25 bp, Homo sapien
tgcatctacacctgtacctactccc

SEQ ID NO: 4664391 - DNA, 25 bp, Homo sapien
tccacacccacacctgcatctacac

SEQ ID NO: 4664392 - DNA, 25 bp, Homo sapien
ctgtacctacatccacacccacacc

SEQ ID NO: 4664393 - DNA, 25 bp, Homo sapien
tgtacctacatccacacccacacct

SEQ ID NO: 4664394 - DNA, 25 bp, Homo sapien
acacccacacctgcatctacacctg

SEQ ID NO: 4664395 - DNA, 25 bp, Homo sapien
cccacacccacatctgcatctacac

SEQ ID NO: 4664396 - DNA, 25 bp, Homo sapien
ctgaccctactcccacacccacatc

SEQ ID NO: 4664397 - DNA, 25 bp, Homo sapien
tgaccctactcccacacccacatct

SEQ ID NO: 4664398 - DNA, 25 bp, Homo sapien
actcccacacccacatctgcatcta

SEQ ID NO: 4664399 - DNA, 25 bp, Homo sapien
tgcatctacacctgtgcctactccc

SEQ ID NO: 4664400 - DNA, 25 bp, Homo sapien
gcatctacacctgtgcctactccca

SEQ ID NO: 4664401 - DNA, 25 bp, Homo sapien
ctacacctgtgcctactcccacacc

SEQ ID NO: 4664402 - DNA, 25 bp, Homo sapien
atctacacctgtgcctactcccaca

SEQ ID NO: 4664403 - DNA, 25 bp, Homo sapien
tgcatctacacctgtgcctactccc

SEQ ID NO: 4664404 - DNA, 25 bp, Homo sapien
ctacacctgtgcctactcccacacc

SEQ ID NO: 4664405 - DNA, 25 bp, Homo sapien
atctacacctgtgcctactcccaca

SEQ ID NO: 4664406 - DNA, 25 bp, Homo sapien
tctacacctgtgcctactcccacac

SEQ ID NO: 4664407 - DNA, 25 bp, Homo sapien
tccatctacactggtgcctacacct

SEQ ID NO: 4664408 - DNA, 25 bp, Homo sapien
atctacactggtgcctacacctaca

SEQ ID NO: 4664409 - DNA, 25 bp, Homo sapien
ctccatctacactggtgcctacacc

SEQ ID NO: 4664410 - DNA, 25 bp, Homo sapien
acacctatacctacccccacacctg

SEQ ID NO: 4664411 - DNA, 25 bp, Homo sapien
gccatggacagcattccctgaatgg

SEQ ID NO: 4664412 - DNA, 25 bp, Homo sapien
ccatggacagcattccctgaatggc

SEQ ID NO: 4664413 - DNA, 25 bp, Homo sapien
tagtcgtccaggtcgacactgttct

SEQ ID NO: 4664414 - DNA, 25 bp, Homo sapien
caggtggtcctgctcttcctcgtag

SEQ ID NO: 4664415 - DNA, 25 bp, Homo sapien
agtccttgaagcaggcatccaggtg

SEQ ID NO: 4664416 - DNA, 25 bp, Homo sapien
ttcctcgtagtcgtccaggtcgaca

SEQ ID NO: 4664417 - DNA, 25 bp, Homo sapien
atggagcttgagatccccagaggcc

SEQ ID NO: 4664418 - DNA, 25 bp, Homo sapien
taagggctgccctccgtacatctgt

SEQ ID NO: 4664419 - DNA, 25 bp, Homo sapien
cctccgtacatctgttcatggagct

SEQ ID NO: 4664420 - DNA, 25 bp, Homo sapien
tcatggagcttgagatccccagagg

SEQ ID NO: 4664421 - DNA, 25 bp, Homo sapien
tcatctgactccagtgaggggtaaa

SEQ ID NO: 4664422 - DNA, 25 bp, Homo sapien
ctgttgggctgtagggagcgtcgtc

SEQ ID NO: 4664423 - DNA, 25 bp, Homo sapien
tagggagcgtcgtctgagcctttcc

SEQ ID NO: 4664424 - DNA, 25 bp, Homo sapien
ggacttaaagatggggttgtcttca

SEQ ID NO: 4664425 - DNA, 25 bp, Homo sapien
acagcctgtccacccctcctggttt

SEQ ID NO: 4664426 - DNA, 25 bp, Homo sapien
tggaaaagaagggccagccccctca

SEQ ID NO: 4664427 - DNA, 25 bp, Homo sapien
caagctgtaggccacagcctgtcca

SEQ ID NO: 4664428 - DNA, 25 bp, Homo sapien
agggccagccccctcaagctgtagg

SEQ ID NO: 4664429 - DNA, 25 bp, Homo sapien
gccgccagcccggtctcgatggaag

SEQ ID NO: 4664430 - DNA, 25 bp, Homo sapien
cgtgtaccctcacgcacaggcctgt

SEQ ID NO: 4664431 - DNA, 25 bp, Homo sapien
cctgtcttggcaccgatgggccgac

SEQ ID NO: 4664432 - DNA, 25 bp, Homo sapien
gtctcgatggaagccacccgtgtac

SEQ ID NO: 4664433 - DNA, 25 bp, Homo sapien
agggacctggctgccgtgtgtcctt

SEQ ID NO: 4664434 - DNA, 25 bp, Homo sapien
acctggctgccgtgtgtccttctcg

SEQ ID NO: 4664435 - DNA, 25 bp, Homo sapien
ctgccgtgtgtccttctcgcccctc

SEQ ID NO: 4664436 - DNA, 25 bp, Homo sapien
ggctgccgtgtgtccttctcgcccc

SEQ ID NO: 4664437 - DNA, 25 bp, Homo sapien
aggtggtgttaggagtcagcttcct

SEQ ID NO: 4664438 - DNA, 25 bp, Homo sapien
ccggggtggtagaggctggcgtggt

SEQ ID NO: 4664439 - DNA, 25 bp, Homo sapien
ggaggccggggtggtagaggctggc

SEQ ID NO: 4664440 - DNA, 25 bp, Homo sapien
ggccggggtggtagaggctggcgtg

SEQ ID NO: 4664441 - DNA, 25 bp, Homo sapien
tgtgtactcatggtccgccaggctg

SEQ ID NO: 4664442 - DNA, 25 bp, Homo sapien
tgtactcatggtccgccaggctgct

SEQ ID NO: 4664443 - DNA, 25 bp, Homo sapien
cgccaggctgctgctatgcgactca

SEQ ID NO: 4664444 - DNA, 25 bp, Homo sapien
aggctgctgctatgcgactcaggcg

SEQ ID NO: 4664445 - DNA, 25 bp, Homo sapien
ggagacgatgcggagggccgcctct

SEQ ID NO: 4664446 - DNA, 25 bp, Homo sapien
ttggcagcggtgttgttgtttggag

SEQ ID NO: 4664447 - DNA, 25 bp, Homo sapien
ctttggcagcggtgttgttgtttgg

SEQ ID NO: 4664448 - DNA, 25 bp, Homo sapien
ttgttgtttggagacgatgcggagg

SEQ ID NO: 4664449 - DNA, 25 bp, Homo sapien
gtcctgtactgtgggatacgctcac

SEQ ID NO: 4664450 - DNA, 25 bp, Homo sapien
gtgggatacgctcacacaaagatgc

SEQ ID NO: 4664451 - DNA, 25 bp, Homo sapien
agcaccccgtgctgcatcactcagt

SEQ ID NO: 4664452 - DNA, 25 bp, Homo sapien
gcacgcccactgagcagaaggatga

SEQ ID NO: 4664453 - DNA, 25 bp, Homo sapien
cggtcgccatgccctttttcgtacg

SEQ ID NO: 4664454 - DNA, 25 bp, Homo sapien
ttggcggtcgccatgccctttttcg

SEQ ID NO: 4664455 - DNA, 25 bp, Homo sapien
cttggcggtcgccatgccctttttc

SEQ ID NO: 4664456 - DNA, 25 bp, Homo sapien
ggcggtcgccatgccctttttcgta

SEQ ID NO: 4664457 - DNA, 25 bp, Homo sapien
gagaagtgccgaccgtaagtcctcg

SEQ ID NO: 4664458 - DNA, 25 bp, Homo sapien
gaccccaagatgtggctgagccctt

SEQ ID NO: 4664459 - DNA, 25 bp, Homo sapien
cagggccgcttttctgggacagatc

SEQ ID NO: 4664460 - DNA, 25 bp, Homo sapien
ccggctgaagggacagacgcttgtt

SEQ ID NO: 4664461 - DNA, 25 bp, Homo sapien
tgatgtccaggttagattatataaa

SEQ ID NO: 4664462 - DNA, 25 bp, Homo sapien
aacaccagttctgaataagcctggg

SEQ ID NO: 4664463 - DNA, 25 bp, Homo sapien
gactgcgtccctccaaacaggacaa

SEQ ID NO: 4664464 - DNA, 25 bp, Homo sapien
taatagccacgataaactttgttag

SEQ ID NO: 4664465 - DNA, 25 bp, Homo sapien
agttgccttagacctcatggactcg

SEQ ID NO: 4664466 - DNA, 25 bp, Homo sapien
tagacctcatggactcgatacaaga

SEQ ID NO: 4664467 - DNA, 25 bp, Homo sapien
actttgatctaagttgccttagacc

SEQ ID NO: 4664468 - DNA, 25 bp, Homo sapien
cctcatggactcgatacaagagtaa

SEQ ID NO: 4664469 - DNA, 25 bp, Homo sapien
caggccatcaccactctcgataagg

SEQ ID NO: 4664470 - DNA, 25 bp, Homo sapien
tgcaggccatcaccactctcgataa

SEQ ID NO: 4664471 - DNA, 25 bp, Homo sapien
agtgccaggtccacccacggaagct

SEQ ID NO: 4664472 - DNA, 25 bp, Homo sapien
cacggaagctctcgggccaggcctg

SEQ ID NO: 4664473 - DNA, 25 bp, Homo sapien
aaccaggggtattgctgtattttat

SEQ ID NO: 4664474 - DNA, 25 bp, Homo sapien
tggggtgcacgctctctttctgctc

SEQ ID NO: 4664475 - DNA, 25 bp, Homo sapien
gggtattgctgtattttataggcag

SEQ ID NO: 4664476 - DNA, 25 bp, Homo sapien
acccacatcagcaccagaagtgggg

SEQ ID NO: 4664477 - DNA, 25 bp, Homo sapien
taagatgattgtccccactggggtc

SEQ ID NO: 4664478 - DNA, 25 bp, Homo sapien
tctgtaatcctgatggcgctggaag

SEQ ID NO: 4664479 - DNA, 25 bp, Homo sapien
tgtaatcctgatggcgctggaaggt

SEQ ID NO: 4664480 - DNA, 25 bp, Homo sapien
tcctgatggcgctggaaggtaagat

SEQ ID NO: 4664481 - DNA, 25 bp, Homo sapien
tgggtttgcagctcatcaatccaag

SEQ ID NO: 4664482 - DNA, 25 bp, Homo sapien
gcagctcatcaatccaaggaggaca

SEQ ID NO: 4664483 - DNA, 25 bp, Homo sapien
gaacatattccagcattgcacctgg

SEQ ID NO: 4664484 - DNA, 25 bp, Homo sapien
gatctggtagattgggaacatattc

SEQ ID NO: 4664485 - DNA, 25 bp, Homo sapien
gatggaggtccctgatccggaggga

SEQ ID NO: 4664486 - DNA, 25 bp, Homo sapien
tcaggcttggatttccaaacacagg

SEQ ID NO: 4664487 - DNA, 25 bp, Homo sapien
gactggatgcgggtttccttcccca

SEQ ID NO: 4664488 - DNA, 25 bp, Homo sapien
gaagccctggcagttttaggacagg

SEQ ID NO: 4664489 - DNA, 25 bp, Homo sapien
gggccaggtcctccttatagatcca

SEQ ID NO: 4664490 - DNA, 25 bp, Homo sapien
ttgatctgccgcctgttgactgaga

SEQ ID NO: 4664491 - DNA, 25 bp, Homo sapien
tgttgactgagaccaaggagaggat

SEQ ID NO: 4664492 - DNA, 25 bp, Homo sapien
gggtcagagggttggccttggcagt

SEQ ID NO: 4664493 - DNA, 25 bp, Homo sapien
cctcattccagagcagtgtgatgtt

SEQ ID NO: 4664494 - DNA, 25 bp, Homo sapien
tcattccagagcagtgtgatgtttc

SEQ ID NO: 4664495 - DNA, 25 bp, Homo sapien
tcacctcattccagagcagtgtgat

SEQ ID NO: 4664496 - DNA, 25 bp, Homo sapien
cattccagagcagtgtgatgtttcc

SEQ ID NO: 4664497 - DNA, 25 bp, Homo sapien
atgcccaccgttacataaataccca

SEQ ID NO: 4664498 - DNA, 25 bp, Homo sapien
atttccttgcatcggctgcttgaaa

SEQ ID NO: 4664499 - DNA, 25 bp, Homo sapien
accatgcccaccgttacataaatac

SEQ ID NO: 4664500 - DNA, 25 bp, Homo sapien
aaaccatgcccaccgttacataaat

SEQ ID NO: 4664501 - DNA, 25 bp, Homo sapien
ccaaagaggcctaatcgaaagtaat

SEQ ID NO: 4664502 - DNA, 25 bp, Homo sapien
tttctactccaaagaggcctaatcg

SEQ ID NO: 4664503 - DNA, 25 bp, Homo sapien
tctactccaaagaggcctaatcgaa

SEQ ID NO: 4664504 - DNA, 25 bp, Homo sapien
ctccaaagaggcctaatcgaaagta

SEQ ID NO: 4664505 - DNA, 25 bp, Homo sapien
tgcagcacgtcttggtgttgaggtg

SEQ ID NO: 4664506 - DNA, 25 bp, Homo sapien
ccttgtgcagcacgtcttggtgttg

SEQ ID NO: 4664507 - DNA, 25 bp, Homo sapien
accccctcccttgtgcagcacgtct

SEQ ID NO: 4664508 - DNA, 25 bp, Homo sapien
cagcctgtggactccatttgagatc

SEQ ID NO: 4664509 - DNA, 25 bp, Homo sapien
gtggtgacctgcaatcttggagttc

SEQ ID NO: 4664510 - DNA, 25 bp, Homo sapien
tggtggtgacctgcaatcttggagt

SEQ ID NO: 4664511 - DNA, 25 bp, Homo sapien
ggtgacctgcaatcttggagttcct

SEQ ID NO: 4664512 - DNA, 25 bp, Homo sapien
ttctggtggtgacctgcaatcttgg

SEQ ID NO: 4664513 - DNA, 25 bp, Homo sapien
gattgtattgcaggaggatgtttag

SEQ ID NO: 4664514 - DNA, 25 bp, Homo sapien
tccactcttttctgacttgcataga

SEQ ID NO: 4664515 - DNA, 25 bp, Homo sapien
taccaagggaattacctgaggattg

SEQ ID NO: 4664516 - DNA, 25 bp, Homo sapien
tgcagagactctggatatgttttga

SEQ ID NO: 4664517 - DNA, 25 bp, Homo sapien
ccttgatgctaatcgtaagataccc

SEQ ID NO: 4664518 - DNA, 25 bp, Homo sapien
acatctacctttagtgcaccttcga

SEQ ID NO: 4664519 - DNA, 25 bp, Homo sapien
tagtgcaccttcgatgcaagacggt

SEQ ID NO: 4664520 - DNA, 25 bp, Homo sapien
taagatacccatctctggtgtcgtg

SEQ ID NO: 4664521 - DNA, 25 bp, Homo sapien
gccccagccgtctgaatgtccaggg

SEQ ID NO: 4664522 - DNA, 25 bp, Homo sapien
gcaaaggccccagccgtctgaatgt

SEQ ID NO: 4664523 - DNA, 25 bp, Homo sapien
cagcaaaggccccagccgtctgaat

SEQ ID NO: 4664524 - DNA, 25 bp, Homo sapien
aaggccccagccgtctgaatgtcca

SEQ ID NO: 4664525 - DNA, 25 bp, Homo sapien
gcaggtgccgttggcggcttgctgg

SEQ ID NO: 4664526 - DNA, 25 bp, Homo sapien
cctgcaggtgccgttggcggcttgc

SEQ ID NO: 4664527 - DNA, 25 bp, Homo sapien
ttagcgagtggctgcaaaagtggct

SEQ ID NO: 4664528 - DNA, 25 bp, Homo sapien
atgcctgcaggtgccgttggcggct

SEQ ID NO: 4664529 - DNA, 25 bp, Homo sapien
tcacggaaagccctcatgtgtttag

SEQ ID NO: 4664530 - DNA, 25 bp, Homo sapien
agcccacagaggctttcacggaaag

SEQ ID NO: 4664531 - DNA, 25 bp, Homo sapien
gagaactggttgcacatcctagagg

SEQ ID NO: 4664532 - DNA, 25 bp, Homo sapien
aaggtgggctgcacttagtgccagc

SEQ ID NO: 4664533 - DNA, 25 bp, Homo sapien
ctgcaacttgggagctgaagccctg

SEQ ID NO: 4664534 - DNA, 25 bp, Homo sapien
tgcaacttgggagctgaagccctgg

SEQ ID NO: 4664535 - DNA, 25 bp, Homo sapien
gcaacttgggagctgaagccctggc

SEQ ID NO: 4664536 - DNA, 25 bp, Homo sapien
tggcacagcctgtgcgcggtgcatt

SEQ ID NO: 4664537 - DNA, 25 bp, Homo sapien
aagggtgcctgtggactttggcaca

SEQ ID NO: 4664538 - DNA, 25 bp, Homo sapien
cattgtgttctccaaccggaacggg

SEQ ID NO: 4664539 - DNA, 25 bp, Homo sapien
tgaagagggcgcgatgatggaggcc

SEQ ID NO: 4664540 - DNA, 25 bp, Homo sapien
gccgcctgccggtgacgtctggcct

SEQ ID NO: 4664541 - DNA, 25 bp, Homo sapien
gcctgccggtgacgtctggcctccg

SEQ ID NO: 4664542 - DNA, 25 bp, Homo sapien
tgccggtgacgtctggcctccgttt

SEQ ID NO: 4664543 - DNA, 25 bp, Homo sapien
cgccgcctgccggtgacgtctggcc

SEQ ID NO: 4664544 - DNA, 25 bp, Homo sapien
ttcccgtgcaggtgcgaggcctcgc

SEQ ID NO: 4664545 - DNA, 25 bp, Homo sapien
tcccgtgcaggtgcgaggcctcgcg

SEQ ID NO: 4664546 - DNA, 25 bp, Homo sapien
gaagaaggatcatcaggacattggg

SEQ ID NO: 4664547 - DNA, 25 bp, Homo sapien
ctccgagaggccacccggcttggct

SEQ ID NO: 4664548 - DNA, 25 bp, Homo sapien
ctggctgcggtgtcttggtcagcac

SEQ ID NO: 4664549 - DNA, 25 bp, Homo sapien
agtccacggcgcaggctggctgcgg

SEQ ID NO: 4664550 - DNA, 25 bp, Homo sapien
tgctggcagcctccggtgactgctg

SEQ ID NO: 4664551 - DNA, 25 bp, Homo sapien
actggtaatacccaactatggccat

SEQ ID NO: 4664552 - DNA, 25 bp, Homo sapien
gactgctgaggtgtactggtaatac

SEQ ID NO: 4664553 - DNA, 25 bp, Homo sapien
gaggtgtactggtaatacccaacta

SEQ ID NO: 4664554 - DNA, 25 bp, Homo sapien
gcgcttactcttccaagatgggaat

SEQ ID NO: 4664555 - DNA, 25 bp, Homo sapien
tggacaatcccctgcgcttactctt

SEQ ID NO: 4664556 - DNA, 25 bp, Homo sapien
aattccagtgggcaaaaggcaacat

SEQ ID NO: 4664557 - DNA, 25 bp, Homo sapien
gtactgaaggacttggcttcgctgg

SEQ ID NO: 4664558 - DNA, 25 bp, Homo sapien
gattggaaggcagattctgtgagtc

SEQ ID NO: 4664559 - DNA, 25 bp, Homo sapien
gcaaaggagtagaagcagcactgag

SEQ ID NO: 4664560 - DNA, 25 bp, Homo sapien
gtagaagcagcactgagattggaag

SEQ ID NO: 4664561 - DNA, 25 bp, Homo sapien
gattctgtgagtccaaatgcaccca

SEQ ID NO: 4664562 - DNA, 25 bp, Homo sapien
gatgggtctatatcaaatatggcga

SEQ ID NO: 4664563 - DNA, 25 bp, Homo sapien
caaacacccaaggtatggacctgtc

SEQ ID NO: 4664564 - DNA, 25 bp, Homo sapien
tgtggttgtccaaatacaaacaccc

SEQ ID NO: 4664565 - DNA, 25 bp, Homo sapien
caagcagcatccaggtggtgaaggt

SEQ ID NO: 4664566 - DNA, 25 bp, Homo sapien
ttgggcacctctatcactgggtcct

SEQ ID NO: 4664567 - DNA, 25 bp, Homo sapien
cttgggcacctctatcactgggtcc

SEQ ID NO: 4664568 - DNA, 25 bp, Homo sapien
gcatggcccgatttgtgcaatcctt

SEQ ID NO: 4664569 - DNA, 25 bp, Homo sapien
tgtgctcagtacaccagggtgccca

SEQ ID NO: 4664570 - DNA, 25 bp, Homo sapien
cagcctgggcttcacggctaatggc

SEQ ID NO: 4664571 - DNA, 25 bp, Homo sapien
tgcaatcctttgcttccccgtagcg

SEQ ID NO: 4664572 - DNA, 25 bp, Homo sapien
gtagagggaggatcaaaacatgcca

SEQ ID NO: 4664573 - DNA, 25 bp, Homo sapien
catccttcatagcaaacagtctgcc

SEQ ID NO: 4664574 - DNA, 25 bp, Homo sapien
gagggaggatcaaaacatgccagga

SEQ ID NO: 4664575 - DNA, 25 bp, Homo sapien
gcatccttcatagcaaacagtctgc

SEQ ID NO: 4664576 - DNA, 25 bp, Homo sapien
cgctgtttacgttatgtgattgagg

SEQ ID NO: 4664577 - DNA, 25 bp, Homo sapien
tgtgtaacgcattatgaagaaagcc

SEQ ID NO: 4664578 - DNA, 25 bp, Homo sapien
cttaaaaagccctcgtttatcgctg

SEQ ID NO: 4664579 - DNA, 25 bp, Homo sapien
gtttctgtgacgaatattacctcaa

SEQ ID NO: 4664580 - DNA, 25 bp, Homo sapien
ataaagccttccattttctggaagc

SEQ ID NO: 4664581 - DNA, 25 bp, Homo sapien
tctggaagccttctgtttgtccacc

SEQ ID NO: 4664582 - DNA, 25 bp, Homo sapien
tctgtttgtccacctgtggtccctg

SEQ ID NO: 4664583 - DNA, 25 bp, Homo sapien
gccttctgtttgtccacctgtggtc

SEQ ID NO: 4664584 - DNA, 25 bp, Homo sapien
gatatagattcaggattgggggttt

SEQ ID NO: 4664585 - DNA, 25 bp, Homo sapien
gggatatagattcaggattgggggt

SEQ ID NO: 4664586 - DNA, 25 bp, Homo sapien
tgggggatatagattcaggattggg

SEQ ID NO: 4664587 - DNA, 25 bp, Homo sapien
gatgtgggggatatagattcaggat

SEQ ID NO: 4664588 - DNA, 25 bp, Homo sapien
gataggggagtggatttcaccttga

SEQ ID NO: 4664589 - DNA, 25 bp, Homo sapien
gggctgataggggagtggatttcac

SEQ ID NO: 4664590 - DNA, 25 bp, Homo sapien
tcaggggctgataggggagtggatt

SEQ ID NO: 4664591 - DNA, 25 bp, Homo sapien
ctgataggggagtggatttcacctt

SEQ ID NO: 4664592 - DNA, 25 bp, Homo sapien
tccccatccttcaggtgtagacgca

SEQ ID NO: 4664593 - DNA, 25 bp, Homo sapien
catccttcaggtgtagacgcaaagt

SEQ ID NO: 4664594 - DNA, 25 bp, Homo sapien
caggtgtagacgcaaagtgggttcc

SEQ ID NO: 4664595 - DNA, 25 bp, Homo sapien
tccttcaggtgtagacgcaaagtgg

SEQ ID NO: 4664596 - DNA, 25 bp, Homo sapien
gagcctgagttgagggctggtgtga

SEQ ID NO: 4664597 - DNA, 25 bp, Homo sapien
tcagtaaccaatcccagaagcagag

SEQ ID NO: 4664598 - DNA, 25 bp, Homo sapien
aagcagagcctgagttgagggctgg

SEQ ID NO: 4664599 - DNA, 25 bp, Homo sapien
gagttgagggctggtgtgaaggtga

SEQ ID NO: 4664600 - DNA, 25 bp, Homo sapien
ctgggcattgcactctgctgtctgg

SEQ ID NO: 4664601 - DNA, 25 bp, Homo sapien
gctgtactggctattgaccagcaca

SEQ ID NO: 4664602 - DNA, 25 bp, Homo sapien
agcccctctcattgctgtactggct

SEQ ID NO: 4664603 - DNA, 25 bp, Homo sapien
tgtactggctattgaccagcacacc

SEQ ID NO: 4664604 - DNA, 25 bp, Homo sapien
gtactggctattgaccagcacacct

SEQ ID NO: 4664605 - DNA, 25 bp, Homo sapien
tgcatcagcacccggtgggcctctt

SEQ ID NO: 4664606 - DNA, 25 bp, Homo sapien
tcggcctgcatcagcacccggtggg

SEQ ID NO: 4664607 - DNA, 25 bp, Homo sapien
cctgcaggcgctgagatgttagaat

SEQ ID NO: 4664608 - DNA, 25 bp, Homo sapien
tctggggtcggcctgcatcagcacc

SEQ ID NO: 4664609 - DNA, 25 bp, Homo sapien
ccagtgaccagggtgcaggcattga

SEQ ID NO: 4664610 - DNA, 25 bp, Homo sapien
tcctggcgggagaatgttctgaccc

SEQ ID NO: 4664611 - DNA, 25 bp, Homo sapien
gctgaacgccttgtaaggaaagagc

SEQ ID NO: 4664612 - DNA, 25 bp, Homo sapien
tgggtaaaagggaggccagtgacca

SEQ ID NO: 4664613 - DNA, 25 bp, Homo sapien
ctggtgggtgtggacataggcactc

SEQ ID NO: 4664614 - DNA, 25 bp, Homo sapien
tgggtgtggacataggcactcagga

SEQ ID NO: 4664615 - DNA, 25 bp, Homo sapien
cagcaaagggcaactggtgggtgtg

SEQ ID NO: 4664616 - DNA, 25 bp, Homo sapien
cacagcaaagggcaactggtgggtg

SEQ ID NO: 4664617 - DNA, 25 bp, Homo sapien
tgctgctattattagctcccggacc

SEQ ID NO: 4664618 - DNA, 25 bp, Homo sapien
agtgagctgatggatggaaacgccc

SEQ ID NO: 4664619 - DNA, 25 bp, Homo sapien
gagctgatggatggaaacgccctcc

SEQ ID NO: 4664620 - DNA, 25 bp, Homo sapien
cccggaccgtgctggcctctgaggt

SEQ ID NO: 4664621 - DNA, 25 bp, Homo sapien
ggacctgaggcagtcaggttgctcc

SEQ ID NO: 4664622 - DNA, 25 bp, Homo sapien
acctgaggcagtcaggttgctccat

SEQ ID NO: 4664623 - DNA, 25 bp, Homo sapien
ttccaggacctgaggcagtcaggtt

SEQ ID NO: 4664624 - DNA, 25 bp, Homo sapien
caggacctgaggcagtcaggttgct

SEQ ID NO: 4664625 - DNA, 25 bp, Homo sapien
tgagctctgattgggtgaactttgt

SEQ ID NO: 4664626 - DNA, 25 bp, Homo sapien
gtcttgtgcattcgtggcctatcat

SEQ ID NO: 4664627 - DNA, 25 bp, Homo sapien
ttgtcttgtgcattcgtggcctatc

SEQ ID NO: 4664628 - DNA, 25 bp, Homo sapien
cgacgccagccgaggctctgagtga

SEQ ID NO: 4664629 - DNA, 25 bp, Homo sapien
ttcggcaaaaagaatttggagttga

SEQ ID NO: 4664630 - DNA, 25 bp, Homo sapien
tcaaggctgcgtgcaccggtcagtg

SEQ ID NO: 4664631 - DNA, 25 bp, Homo sapien
tgagcttaattactgcgaaacctaa

SEQ ID NO: 4664632 - DNA, 25 bp, Homo sapien
cttgccgcacatgtaccggatgagc

SEQ ID NO: 4664633 - DNA, 25 bp, Homo sapien
tactgcgaaacctaattcttcaagg

SEQ ID NO: 4664634 - DNA, 25 bp, Homo sapien
gaggtgtccgccagaccctcagact

SEQ ID NO: 4664635 - DNA, 25 bp, Homo sapien
agttgctccagcattgcccgctgct

SEQ ID NO: 4664636 - DNA, 25 bp, Homo sapien
gaagttgctccagcattgcccgctg

SEQ ID NO: 4664637 - DNA, 25 bp, Homo sapien
atggaggtgtccgccagaccctcag

SEQ ID NO: 4664638 - DNA, 25 bp, Homo sapien
caatagcagtcggagtgtgggacct

SEQ ID NO: 4664639 - DNA, 25 bp, Homo sapien
attgaccatcaacctccatgccggg

SEQ ID NO: 4664640 - DNA, 25 bp, Homo sapien
gacatggtcagagtcctatccagga

SEQ ID NO: 4664641 - DNA, 25 bp, Homo sapien
gccgcgtttctaaggttgcagcaat

SEQ ID NO: 4664642 - DNA, 25 bp, Homo sapien
gatcttcaaggagaccttggacatc

SEQ ID NO: 4664643 - DNA, 25 bp, Homo sapien
cctgatcttcaaggagaccttggac

SEQ ID NO: 4664644 - DNA, 25 bp, Homo sapien
ttcctgatcttcaaggagaccttgg

SEQ ID NO: 4664645 - DNA, 25 bp, Homo sapien
tgatcttcaaggagaccttggacat

SEQ ID NO: 4664646 - DNA, 25 bp, Homo sapien
gaggacagtcgcaggcgtagtcgcg

SEQ ID NO: 4664647 - DNA, 25 bp, Homo sapien
agtcgcaggcgtagtcgcgagcggg

SEQ ID NO: 4664648 - DNA, 25 bp, Homo sapien
gcagcgcgaggacagtcgcaggcgt

SEQ ID NO: 4664649 - DNA, 25 bp, Homo sapien
ccccgcagcgcgaggacagtcgcag

SEQ ID NO: 4664650 - DNA, 25 bp, Homo sapien
caccgagcgctgaggttgtctctct

SEQ ID NO: 4664651 - DNA, 25 bp, Homo sapien
tgaaggaaaggtcccttggatccca

SEQ ID NO: 4664652 - DNA, 25 bp, Homo sapien
tgcaggcagcagtcgcatccttcat

SEQ ID NO: 4664653 - DNA, 25 bp, Homo sapien
catccttcatttcaggcccgggact

SEQ ID NO: 4664654 - DNA, 25 bp, Homo sapien
gaagttgggcctcaaatgagggaga

SEQ ID NO: 4664655 - DNA, 25 bp, Homo sapien
ctgtgctccttgccgggacagggaa

SEQ ID NO: 4664656 - DNA, 25 bp, Homo sapien
gggaacgcagaggcagaccgagtcc

SEQ ID NO: 4664657 - DNA, 25 bp, Homo sapien
tcagtggggaagttgggcctcaaat

SEQ ID NO: 4664658 - DNA, 25 bp, Homo sapien
tgccttgctgttctggacctagtgg

SEQ ID NO: 4664659 - DNA, 25 bp, Homo sapien
tggcattttcccaaggtgccttgct

SEQ ID NO: 4664660 - DNA, 25 bp, Homo sapien
gaaggcaaccttcagcagattagct

SEQ ID NO: 4664661 - DNA, 25 bp, Homo sapien
tagctgccttgcgaatctttggcat

SEQ ID NO: 4664662 - DNA, 25 bp, Homo sapien
taatcctctccatttgaaaggacag

SEQ ID NO: 4664663 - DNA, 25 bp, Homo sapien
ctctccatttgaaaggacaggaagt

SEQ ID NO: 4664664 - DNA, 25 bp, Homo sapien
ccatttgaaaggacaggaagtgaag

SEQ ID NO: 4664665 - DNA, 25 bp, Homo sapien
ctccatttgaaaggacaggaagtga

SEQ ID NO: 4664666 - DNA, 25 bp, Homo sapien
tttccgcaggatactcagggcggcg

SEQ ID NO: 4664667 - DNA, 25 bp, Homo sapien
acattttccgcaggatactcagggc

SEQ ID NO: 4664668 - DNA, 25 bp, Homo sapien
tcacattttccgcaggatactcagg

SEQ ID NO: 4664669 - DNA, 25 bp, Homo sapien
cattttccgcaggatactcagggcg

SEQ ID NO: 4664670 - DNA, 25 bp, Homo sapien
cccgcgggtccttgcagcagcaatg

SEQ ID NO: 4664671 - DNA, 25 bp, Homo sapien
cagcgcggtagcccgcccgcgggtc

SEQ ID NO: 4664672 - DNA, 25 bp, Homo sapien
gtagcccgcccgcgggtccttgcag

SEQ ID NO: 4664673 - DNA, 25 bp, Homo sapien
cagcagcaatggctccccagagttc

SEQ ID NO: 4664674 - DNA, 25 bp, Homo sapien
tgggaagtcgaggacgcaaggtttg

SEQ ID NO: 4664675 - DNA, 25 bp, Homo sapien
aagtcgaggacgcaaggtttggaca

SEQ ID NO: 4664676 - DNA, 25 bp, Homo sapien
ggcggatgggaagtcgaggacgcaa

SEQ ID NO: 4664677 - DNA, 25 bp, Homo sapien
ttatgaggcggatgggaagtcgagg

SEQ ID NO: 4664678 - DNA, 25 bp, Homo sapien
caagataagcggaacgcgggcagtt

SEQ ID NO: 4664679 - DNA, 25 bp, Homo sapien
tttcctccggctctgtcgaaggcag

SEQ ID NO: 4664680 - DNA, 25 bp, Homo sapien
tgcaggatcctaggaatcgcttcca

SEQ ID NO: 4664681 - DNA, 25 bp, Homo sapien
cggtggagcagcttctgaatccgca

SEQ ID NO: 4664682 - DNA, 25 bp, Homo sapien
actctcgtgggtggaagcgacctca

SEQ ID NO: 4664683 - DNA, 25 bp, Homo sapien
aacggcctgcgcagaccttttcagc

SEQ ID NO: 4664684 - DNA, 25 bp, Homo sapien
caacccagggaagtcggacctctgg

SEQ ID NO: 4664685 - DNA, 25 bp, Homo sapien
actgccaggctacggactctcgtgg

SEQ ID NO: 4664686 - DNA, 25 bp, Homo sapien
tgaggccgtacatggtaaactgagg

SEQ ID NO: 4664687 - DNA, 25 bp, Homo sapien
tctctggagccaaaggtcagcatct

SEQ ID NO: 4664688 - DNA, 25 bp, Homo sapien
ttcaccagtagtggcaggaccaaag

SEQ ID NO: 4664689 - DNA, 25 bp, Homo sapien
ttctctccaaacagacctaagggct

SEQ ID NO: 4664690 - DNA, 25 bp, Homo sapien
gacccattttgaggatgtgagaccc

SEQ ID NO: 4664691 - DNA, 25 bp, Homo sapien
gagaaaccaccactaggctatgccc

SEQ ID NO: 4664692 - DNA, 25 bp, Homo sapien
tgacagctgatgaacagtgtgatcc

SEQ ID NO: 4664693 - DNA, 25 bp, Homo sapien
ggtagcttctgttagggcccaaata

SEQ ID NO: 4664694 - DNA, 25 bp, Homo sapien
agcattctcgaagggtccacactcg

SEQ ID NO: 4664695 - DNA, 25 bp, Homo sapien
ctgggccaagggagcattctcgaag

SEQ ID NO: 4664696 - DNA, 25 bp, Homo sapien
cgcctgtgcgggtcgcaaacaccat

SEQ ID NO: 4664697 - DNA, 25 bp, Homo sapien
tcggaaggccgaagctgtatgctcg

SEQ ID NO: 4664698 - DNA, 25 bp, Homo sapien
gacctaagctgttaacactagcaag

SEQ ID NO: 4664699 - DNA, 25 bp, Homo sapien
agctcatctcgaggtcccctgtgtg

SEQ ID NO: 4664700 - DNA, 25 bp, Homo sapien
gctgagtcaccacaatagggccatg

SEQ ID NO: 4664701 - DNA, 25 bp, Homo sapien
cactagcaaggagaaagattcacct

SEQ ID NO: 4664702 - DNA, 25 bp, Homo sapien
ggcagaacgtggcatctcacaggct

SEQ ID NO: 4664703 - DNA, 25 bp, Homo sapien
gcatctcacaggctgtgtcaggcat

SEQ ID NO: 4664704 - DNA, 25 bp, Homo sapien
catctcacaggctgtgtcaggcatc

SEQ ID NO: 4664705 - DNA, 25 bp, Homo sapien
cctggctggcagaacgtggcatctc

SEQ ID NO: 4664706 - DNA, 25 bp, Homo sapien
acagttcgtgccaaggactattagc

SEQ ID NO: 4664707 - DNA, 25 bp, Homo sapien
tactattagaagtagggtcggctgg

SEQ ID NO: 4664708 - DNA, 25 bp, Homo sapien
gtgccaaggactattagcgttctcc

SEQ ID NO: 4664709 - DNA, 25 bp, Homo sapien
ttcgtgccaaggactattagcgttc

SEQ ID NO: 4664710 - DNA, 25 bp, Homo sapien
cccatcacaggtgtggaggcccagg

SEQ ID NO: 4664711 - DNA, 25 bp, Homo sapien
tgtggaggcccaggataaaaaagtg

SEQ ID NO: 4664712 - DNA, 25 bp, Homo sapien
tgtctccaggccatatcagagaact

SEQ ID NO: 4664713 - DNA, 25 bp, Homo sapien
aaagtggttttgtggatgggtccag

SEQ ID NO: 4664714 - DNA, 25 bp, Homo sapien
cgtgacgagagcggtggctctgggc

SEQ ID NO: 4664715 - DNA, 25 bp, Homo sapien
tgacgagagcggtggctctgggcat

SEQ ID NO: 4664716 - DNA, 25 bp, Homo sapien
gtgacgagagcggtggctctgggca

SEQ ID NO: 4664717 - DNA, 25 bp, Homo sapien
gcaggacgcgccgtccgtgtcacaa

SEQ ID NO: 4664718 - DNA, 25 bp, Homo sapien
gagggtctgtgggtagcgggcccga

SEQ ID NO: 4664719 - DNA, 25 bp, Homo sapien
ttttcccgctcgagattccaagccc

SEQ ID NO: 4664720 - DNA, 25 bp, Homo sapien
cacaagtcgtctgcggtcggcggac

SEQ ID NO: 4664721 - DNA, 25 bp, Homo sapien
ttccagcggcagttgagaggcactc

SEQ ID NO: 4664722 - DNA, 25 bp, Homo sapien
catctgaatgtgagaccctcaaatc

SEQ ID NO: 4664723 - DNA, 25 bp, Homo sapien
aaaatctgagatcgcttccagcggc

SEQ ID NO: 4664724 - DNA, 25 bp, Homo sapien
taaactttagtttcaagctcacgac

SEQ ID NO: 4664725 - DNA, 25 bp, Homo sapien
ttttattggcgtctgtgtaagagaa

SEQ ID NO: 4664726 - DNA, 25 bp, Homo sapien
tgccttcttcttaatgccagcaaag

SEQ ID NO: 4664727 - DNA, 25 bp, Homo sapien
tgagataagctatcatttttctttc

SEQ ID NO: 4664728 - DNA, 25 bp, Homo sapien
gcctttgtttttattggcgtctgtg

SEQ ID NO: 4664729 - DNA, 25 bp, Homo sapien
gactaggctcaactggccagaccaa

SEQ ID NO: 4664730 - DNA, 25 bp, Homo sapien
cctgagctggcatggtaaagaagtc

SEQ ID NO: 4664731 - DNA, 25 bp, Homo sapien
gcaatcagtagaggcccagtttacc

SEQ ID NO: 4664732 - DNA, 25 bp, Homo sapien
catgatggcccagatatctacaggt

SEQ ID NO: 4664733 - DNA, 25 bp, Homo sapien
tccatatggcaaaaacatgagtctc

SEQ ID NO: 4664734 - DNA, 25 bp, Homo sapien
cacaggtggcttatttgattgaaac

SEQ ID NO: 4664735 - DNA, 25 bp, Homo sapien
tttttcccacaagcagccacaggtg

SEQ ID NO: 4664736 - DNA, 25 bp, Homo sapien
gcaaagacaatgaggtagacaaagt

SEQ ID NO: 4664737 - DNA, 25 bp, Homo sapien
tcctaaagcctaccgaaaacatgtc

SEQ ID NO: 4664738 - DNA, 25 bp, Homo sapien
gaggatgagttatgactggttcacc

SEQ ID NO: 4664739 - DNA, 25 bp, Homo sapien
gacagtctcccctgtagaccatggg

SEQ ID NO: 4664740 - DNA, 25 bp, Homo sapien
tataggtaccctcgtgacacaactg

SEQ ID NO: 4664741 - DNA, 25 bp, Homo sapien
aatatggttgttcattctgaggcaa

SEQ ID NO: 4664742 - DNA, 25 bp, Homo sapien
agaatatggttgttcattctgaggc

SEQ ID NO: 4664743 - DNA, 25 bp, Homo sapien
cattctgaggcaagactcctgcagc

SEQ ID NO: 4664744 - DNA, 25 bp, Homo sapien
tctgaggcaagactcctgcagccat

SEQ ID NO: 4664745 - DNA, 25 bp, Homo sapien
gtggtggtagcaagaccagcaatat

SEQ ID NO: 4664746 - DNA, 25 bp, Homo sapien
agcaggatagtcaacattcccattt

SEQ ID NO: 4664747 - DNA, 25 bp, Homo sapien
gaagcaggatagtcaacattcccat

SEQ ID NO: 4664748 - DNA, 25 bp, Homo sapien
tttcccaatcccctggtgtcaatgg

SEQ ID NO: 4664749 - DNA, 25 bp, Homo sapien
agaatgagggggtgtgaagcaggat

SEQ ID NO: 4664750 - DNA, 25 bp, Homo sapien
agcaaaaagctactaggcagacttc

SEQ ID NO: 4664751 - DNA, 25 bp, Homo sapien
tttctgtccaagtagagttgcccca

SEQ ID NO: 4664752 - DNA, 25 bp, Homo sapien
catccttacgtcttagaaactctgg

SEQ ID NO: 4664753 - DNA, 25 bp, Homo sapien
gagagactgtctaaggacctcagga

SEQ ID NO: 4664754 - DNA, 25 bp, Homo sapien
caatattccatgtagggtcaccctg

SEQ ID NO: 4664755 - DNA, 25 bp, Homo sapien
cccacacaggtgttatctggctcag

SEQ ID NO: 4664756 - DNA, 25 bp, Homo sapien
aacctgacccaagctctgatgcctg

SEQ ID NO: 4664757 - DNA, 25 bp, Homo sapien
ggaatgttctaataacctgggccag

SEQ ID NO: 4664758 - DNA, 25 bp, Homo sapien
catgattagactcggaagcccttgc

SEQ ID NO: 4664759 - DNA, 25 bp, Homo sapien
caagagtttaccctgatgctaccaa

SEQ ID NO: 4664760 - DNA, 25 bp, Homo sapien
ttataactctgtgagaagcctgggc

SEQ ID NO: 4664761 - DNA, 25 bp, Homo sapien
gccattagagtgttactgctgccag

SEQ ID NO: 4664762 - DNA, 25 bp, Homo sapien
gtctaaggaagtcaagcctaacgca

SEQ ID NO: 4664763 - DNA, 25 bp, Homo sapien
gaagtcaagcctaacgcaaacagga

SEQ ID NO: 4664764 - DNA, 25 bp, Homo sapien
tgaccctgtgtcaatgtctaaggaa

SEQ ID NO: 4664765 - DNA, 25 bp, Homo sapien
cgcaaacaggattctgcaaggtgaa

SEQ ID NO: 4664766 - DNA, 25 bp, Homo sapien
gaacatgaacttactggcaggaggc

SEQ ID NO: 4664767 - DNA, 25 bp, Homo sapien
atgcagccatggaagaaagcacagc

SEQ ID NO: 4664768 - DNA, 25 bp, Homo sapien
cacttttgtcgaataagacagggac

SEQ ID NO: 4664769 - DNA, 25 bp, Homo sapien
cacagaatcccgatttggtgtccaa

SEQ ID NO: 4664770 - DNA, 25 bp, Homo sapien
actcactcagtgaggaactttcact

SEQ ID NO: 4664771 - DNA, 25 bp, Homo sapien
ctgggaggcaagagccggaggcagg

SEQ ID NO: 4664772 - DNA, 25 bp, Homo sapien
cactcactcagtgaggaactttcac

SEQ ID NO: 4664773 - DNA, 25 bp, Homo sapien
ccactcactcagtgaggaactttca

SEQ ID NO: 4664774 - DNA, 25 bp, Homo sapien
aggaagcgcacggctgagggccgcc

SEQ ID NO: 4664775 - DNA, 25 bp, Homo sapien
gggccgcctggttgcatcctgcacc

SEQ ID NO: 4664776 - DNA, 25 bp, Homo sapien
gctgaggaagcgcacggctgagggc

SEQ ID NO: 4664777 - DNA, 25 bp, Homo sapien
ccgcctggttgcatcctgcacctgc

SEQ ID NO: 4664778 - DNA, 25 bp, Homo sapien
gagaggacgaggacagcagcttcgt

SEQ ID NO: 4664779 - DNA, 25 bp, Homo sapien
gggtctgaggtggagtgccggcggc

SEQ ID NO: 4664780 - DNA, 25 bp, Homo sapien
ggtctgaggtggagtgccggcggcc

SEQ ID NO: 4664781 - DNA, 25 bp, Homo sapien
agaggacgaggacagcagcttcgtg

SEQ ID NO: 4664782 - DNA, 25 bp, Homo sapien
aagttgggtttccctctgcatggct

SEQ ID NO: 4664783 - DNA, 25 bp, Homo sapien
gttgggtttccctctgcatggctga

SEQ ID NO: 4664784 - DNA, 25 bp, Homo sapien
agttgggtttccctctgcatggctg

SEQ ID NO: 4664785 - DNA, 25 bp, Homo sapien
ccagcgggctgggttctcatacttg

SEQ ID NO: 4664786 - DNA, 25 bp, Homo sapien
gccacacgccatggaacatgccatg

SEQ ID NO: 4664787 - DNA, 25 bp, Homo sapien
cttttgtgtactttggtgttggacg

SEQ ID NO: 4664788 - DNA, 25 bp, Homo sapien
gaatgacatgccgtaaacgctcccc

SEQ ID NO: 4664789 - DNA, 25 bp, Homo sapien
tgggcgggccatggccagtatatta

SEQ ID NO: 4664790 - DNA, 25 bp, Homo sapien
tgatgtggtacttctccaggagctc

SEQ ID NO: 4664791 - DNA, 25 bp, Homo sapien
catggccagtatattatcagtgacc

SEQ ID NO: 4664792 - DNA, 25 bp, Homo sapien
ctgaggaactgatcaatgatgtggt

SEQ ID NO: 4664793 - DNA, 25 bp, Homo sapien
aaagcctcaggaaggtatgtgaagc

SEQ ID NO: 4664794 - DNA, 25 bp, Homo sapien
tagcatgctcaccagggcgctggag

SEQ ID NO: 4664795 - DNA, 25 bp, Homo sapien
gggttcccacagctagcatgctcac

SEQ ID NO: 4664796 - DNA, 25 bp, Homo sapien
ggaaggtatgtgaagccactttctt

SEQ ID NO: 4664797 - DNA, 25 bp, Homo sapien
tcgaccaagccctgcatgacaatgg

SEQ ID NO: 4664798 - DNA, 25 bp, Homo sapien
taatccttccatccgaaattgtaga

SEQ ID NO: 4664799 - DNA, 25 bp, Homo sapien
tgtcatcaccttcaccatatctagg

SEQ ID NO: 4664800 - DNA, 25 bp, Homo sapien
gtaagagacgctacaccataatcct

SEQ ID NO: 4664801 - DNA, 25 bp, Homo sapien
caagagaatatattgcggagaggag

SEQ ID NO: 4664802 - DNA, 25 bp, Homo sapien
tctggtttgtatggaattgggtcgc

SEQ ID NO: 4664803 - DNA, 25 bp, Homo sapien
tgcccgcacaaatataattgcttgg

SEQ ID NO: 4664804 - DNA, 25 bp, Homo sapien
taaattcccttacacagaggagctg

SEQ ID NO: 4664805 - DNA, 25 bp, Homo sapien
tgagtcactgtagctgagccgcctt

SEQ ID NO: 4664806 - DNA, 25 bp, Homo sapien
cgtgtttcagaagtcgtgcctcata

SEQ ID NO: 4664807 - DNA, 25 bp, Homo sapien
aagtgtgctgcgaaccaaggcttcc

SEQ ID NO: 4664808 - DNA, 25 bp, Homo sapien
ggttaggcgggttggacacatcact

SEQ ID NO: 4664809 - DNA, 25 bp, Homo sapien
catggaaaattggtgacccattatc

SEQ ID NO: 4664810 - DNA, 25 bp, Homo sapien
acagtgagacacttgctggtgagca

SEQ ID NO: 4664811 - DNA, 25 bp, Homo sapien
gagcagggtttggatccttatggac

SEQ ID NO: 4664812 - DNA, 25 bp, Homo sapien
caacaccatgagttttacactgaca

SEQ ID NO: 4664813 - DNA, 25 bp, Homo sapien
cagactgtaatgcagagtgtgaagc

SEQ ID NO: 4664814 - DNA, 25 bp, Homo sapien
ttaaatttgctagggctttggccgc

SEQ ID NO: 4664815 - DNA, 25 bp, Homo sapien
cctgggtttcatgttcaaccaagaa

SEQ ID NO: 4664816 - DNA, 25 bp, Homo sapien
gaactgtgctttgggactggagcca

SEQ ID NO: 4664817 - DNA, 25 bp, Homo sapien
catatctataattaaattaagtact

SEQ ID NO: 4664818 - DNA, 25 bp, Homo sapien
ttcccacatatctataattaaatta

SEQ ID NO: 4664819 - DNA, 25 bp, Homo sapien
cccacatatctataattaaattaag

SEQ ID NO: 4664820 - DNA, 25 bp, Homo sapien
cacatatctataattaaattaagta

SEQ ID NO: 4664821 - DNA, 25 bp, Homo sapien
taaccttcatgacctttagcatcct

SEQ ID NO: 4664822 - DNA, 25 bp, Homo sapien
gctgggcagaactgacactaatcaa

SEQ ID NO: 4664823 - DNA, 25 bp, Homo sapien
tctccagggaggttagccaagaatc

SEQ ID NO: 4664824 - DNA, 25 bp, Homo sapien
aacacatgtgctgtaccctgactct

SEQ ID NO: 4664825 - DNA, 25 bp, Homo sapien
ttaaagcttatagcacagggaaagg

SEQ ID NO: 4664826 - DNA, 25 bp, Homo sapien
tgcccacaagagtgaaagactcagg

SEQ ID NO: 4664827 - DNA, 25 bp, Homo sapien
gctggacactggactaagacactga

SEQ ID NO: 4664828 - DNA, 25 bp, Homo sapien
ctgcatgattcttgcgctgcccaca

SEQ ID NO: 4664829 - DNA, 25 bp, Homo sapien
aagggtccctctcgccacatattct

SEQ ID NO: 4664830 - DNA, 25 bp, Homo sapien
gctccatctcgggaattaagctctt

SEQ ID NO: 4664831 - DNA, 25 bp, Homo sapien
tctgctcgcctgtcaaccaacatgt

SEQ ID NO: 4664832 - DNA, 25 bp, Homo sapien
aaaaaagtgcttctgcggcatctgc

SEQ ID NO: 4664833 - DNA, 25 bp, Homo sapien
caggaaaatagctatgttataactt

SEQ ID NO: 4664834 - DNA, 25 bp, Homo sapien
gcatcatatccgttaagagtcaata

SEQ ID NO: 4664835 - DNA, 25 bp, Homo sapien
ttaactggtcctacagccactttac

SEQ ID NO: 4664836 - DNA, 25 bp, Homo sapien
ggactatggatagttctcgttttta

SEQ ID NO: 4664837 - DNA, 25 bp, Homo sapien
cacatccacgggaattgtctgcagg

SEQ ID NO: 4664838 - DNA, 25 bp, Homo sapien
ggttcactatgcagtgcaacacgca

SEQ ID NO: 4664839 - DNA, 25 bp, Homo sapien
cactatgcagtgcaacacgcagaga

SEQ ID NO: 4664840 - DNA, 25 bp, Homo sapien
tctgcaggttcactatgcagtgcaa

SEQ ID NO: 4664841 - DNA, 25 bp, Homo sapien
tagaggaggacggtgacctctggat

SEQ ID NO: 4664842 - DNA, 25 bp, Homo sapien
gaggacggtgacctctggattctga

SEQ ID NO: 4664843 - DNA, 25 bp, Homo sapien
ggacggtgacctctggattctgatt

SEQ ID NO: 4664844 - DNA, 25 bp, Homo sapien
aggaggacggtgacctctggattct

SEQ ID NO: 4664845 - DNA, 25 bp, Homo sapien
ttccagcgtgtgcttaaatattttc

SEQ ID NO: 4664846 - DNA, 25 bp, Homo sapien
tccagcgtgtgcttaaatattttct

SEQ ID NO: 4664847 - DNA, 25 bp, Homo sapien
attttcttcagggtgttgtaaactg

SEQ ID NO: 4664848 - DNA, 25 bp, Homo sapien
ttcttcagggtgttgtaaactgttg

SEQ ID NO: 4664849 - DNA, 25 bp, Homo sapien
cccaaatgaggcctactgagatgag

SEQ ID NO: 4664850 - DNA, 25 bp, Homo sapien
gggccacgctgctcatgctaataca

SEQ ID NO: 4664851 - DNA, 25 bp, Homo sapien
caggccaggcacttgaaaataagac

SEQ ID NO: 4664852 - DNA, 25 bp, Homo sapien
taagacatttcagggatgggcaacc

SEQ ID NO: 4664853 - DNA, 25 bp, Homo sapien
gccgacaactcaatctgcctattag

SEQ ID NO: 4664854 - DNA, 25 bp, Homo sapien
catcagatgtcctagagcatcaagg

SEQ ID NO: 4664855 - DNA, 25 bp, Homo sapien
gcatcaaggtaaagaagtacaggac

SEQ ID NO: 4664856 - DNA, 25 bp, Homo sapien
gaaggagtctgcactaactagagct

SEQ ID NO: 4664857 - DNA, 25 bp, Homo sapien
tctagagatcgggtaagcaggagcc

SEQ ID NO: 4664858 - DNA, 25 bp, Homo sapien
cattttaatcaagaaagccgagagg

SEQ ID NO: 4664859 - DNA, 25 bp, Homo sapien
aaaaccagaggctactgtcagacca

SEQ ID NO: 4664860 - DNA, 25 bp, Homo sapien
aaataatgacccactgagaaacagg

SEQ ID NO: 4664861 - DNA, 25 bp, Homo sapien
tcacacagcagggtattccaacaga

SEQ ID NO: 4664862 - DNA, 25 bp, Homo sapien
cacagcagggtattccaacagacct

SEQ ID NO: 4664863 - DNA, 25 bp, Homo sapien
cacctcacacagcagggtattccaa

SEQ ID NO: 4664864 - DNA, 25 bp, Homo sapien
acaaccagaaaggacatctacaccg

SEQ ID NO: 4664865 - DNA, 25 bp, Homo sapien
atcacaaccggcctacatacttttt

SEQ ID NO: 4664866 - DNA, 25 bp, Homo sapien
cattctttacatggctggaccaaga

SEQ ID NO: 4664867 - DNA, 25 bp, Homo sapien
catggctggactgaaaattgtccaa

SEQ ID NO: 4664868 - DNA, 25 bp, Homo sapien
agttaagagaaaccacacaggggag

SEQ ID NO: 4664869 - DNA, 25 bp, Homo sapien
taatcttatcaaatggtggcctggc

SEQ ID NO: 4664870 - DNA, 25 bp, Homo sapien
ggtggcctggccacaccgtgtgcta

SEQ ID NO: 4664871 - DNA, 25 bp, Homo sapien
cacaccgtgtgctatcttctaaaca

SEQ ID NO: 4664872 - DNA, 25 bp, Homo sapien
catactaatcttatcaaatggtggc

SEQ ID NO: 4664873 - DNA, 25 bp, Homo sapien
catgaactaaacacctcccgaaagg

SEQ ID NO: 4664874 - DNA, 25 bp, Homo sapien
gaaaatgtcatggacaagcgctgct

SEQ ID NO: 4664875 - DNA, 25 bp, Homo sapien
ctaattagggtgacaacagaggtac

SEQ ID NO: 4664876 - DNA, 25 bp, Homo sapien
tcagattagaattgggaccacctca

SEQ ID NO: 4664877 - DNA, 25 bp, Homo sapien
caggagaatacacacagcattgttc

SEQ ID NO: 4664878 - DNA, 25 bp, Homo sapien
gagcagtgggaactctcatttactg

SEQ ID NO: 4664879 - DNA, 25 bp, Homo sapien
gaggtactatctcataccaactgag

SEQ ID NO: 4664880 - DNA, 25 bp, Homo sapien
tcttgcacatgtatacccagagaca

SEQ ID NO: 4664881 - DNA, 25 bp, Homo sapien
actgaaaccctagtgcactgttggt

SEQ ID NO: 4664882 - DNA, 25 bp, Homo sapien
ctgaaaccctagtgcactgttggtg

SEQ ID NO: 4664883 - DNA, 25 bp, Homo sapien
tcatatccatgaggaaggctattat

SEQ ID NO: 4664884 - DNA, 25 bp, Homo sapien
aactgaaaccctagtgcactgttgg

SEQ ID NO: 4664885 - DNA, 25 bp, Homo sapien
cacgggcaggacagtgttgcaccca

SEQ ID NO: 4664886 - DNA, 25 bp, Homo sapien
acacgggcaggacagtgttgcaccc

SEQ ID NO: 4664887 - DNA, 25 bp, Homo sapien
ggcaggacagtgttgcacccagcgg

SEQ ID NO: 4664888 - DNA, 25 bp, Homo sapien
aggacagtgttgcacccagcggctc

SEQ ID NO: 4664889 - DNA, 25 bp, Homo sapien
cagtgcaggcaacgtaagcagctcc

SEQ ID NO: 4664890 - DNA, 25 bp, Homo sapien
agcagtgcaggcaacgtaagcagct

SEQ ID NO: 4664891 - DNA, 25 bp, Homo sapien
agtgcaggcaacgtaagcagctcca

SEQ ID NO: 4664892 - DNA, 25 bp, Homo sapien
gtgcaggcaacgtaagcagctccat

SEQ ID NO: 4664893 - DNA, 25 bp, Homo sapien
tacacactggacaacagaaccatcc

SEQ ID NO: 4664894 - DNA, 25 bp, Homo sapien
tttcctacacactggacaacagaac

SEQ ID NO: 4664895 - DNA, 25 bp, Homo sapien
tcctacacactggacaacagaacca

SEQ ID NO: 4664896 - DNA, 25 bp, Homo sapien
acactggacaacagaaccatccctg

SEQ ID NO: 4664897 - DNA, 25 bp, Homo sapien
aaatccaggctcaacaaaatttctg

SEQ ID NO: 4664898 - DNA, 25 bp, Homo sapien
tgcgaagacctccagtgtacttcct

SEQ ID NO: 4664899 - DNA, 25 bp, Homo sapien
caggttccttatgggctcccggagt

SEQ ID NO: 4664900 - DNA, 25 bp, Homo sapien
caaaatttctgcgaagacctccagt

SEQ ID NO: 4664901 - DNA, 25 bp, Homo sapien
tccccggtgtgaagtgtctcaagta

SEQ ID NO: 4664902 - DNA, 25 bp, Homo sapien
cctgcaatccatttgttcccctgcc

SEQ ID NO: 4664903 - DNA, 25 bp, Homo sapien
gatttttccacgcttttcacacatc

SEQ ID NO: 4664904 - DNA, 25 bp, Homo sapien
cacatctgagcgagctggttttgct

SEQ ID NO: 4664905 - DNA, 25 bp, Homo sapien
ccccagagagcttgaatatcctgca

SEQ ID NO: 4664906 - DNA, 25 bp, Homo sapien
cacatcagcaatcttggctacctgg

SEQ ID NO: 4664907 - DNA, 25 bp, Homo sapien
gagcttgaatatcctgcatattggc

SEQ ID NO: 4664908 - DNA, 25 bp, Homo sapien
ttctgtgtacacatcagcaatcttg

SEQ ID NO: 4664909 - DNA, 25 bp, Homo sapien
aaacattgtcttcctgttaatgtgg

SEQ ID NO: 4664910 - DNA, 25 bp, Homo sapien
ggacaggagaggaaccattcaagcc

SEQ ID NO: 4664911 - DNA, 25 bp, Homo sapien
caggagaggaaccattcaagccata

SEQ ID NO: 4664912 - DNA, 25 bp, Homo sapien
tgttggcctagtgctctgaagagaa

SEQ ID NO: 4664913 - DNA, 25 bp, Homo sapien
tggacaggtctgatgagcctctctg

SEQ ID NO: 4664914 - DNA, 25 bp, Homo sapien
tgtggatgccgctgatcaggcagtt

SEQ ID NO: 4664915 - DNA, 25 bp, Homo sapien
tctccaactcggaggcatgctccag

SEQ ID NO: 4664916 - DNA, 25 bp, Homo sapien
tgatcatggtccttgtgctggtggt

SEQ ID NO: 4664917 - DNA, 25 bp, Homo sapien
ttagtgcctgatagacatgttgtcc

SEQ ID NO: 4664918 - DNA, 25 bp, Homo sapien
tgccatcgtgcatgagcctcttcat

SEQ ID NO: 4664919 - DNA, 25 bp, Homo sapien
gggaccatgccatcgtgcatgagcc

SEQ ID NO: 4664920 - DNA, 25 bp, Homo sapien
catctccgtcctgaactttttgtcc

SEQ ID NO: 4664921 - DNA, 25 bp, Homo sapien
tgaggttagttgaattcaaggatgc

SEQ ID NO: 4664922 - DNA, 25 bp, Homo sapien
tacgttatggtagaacaaatgatcc

SEQ ID NO: 4664923 - DNA, 25 bp, Homo sapien
gaaggccaactgtgcttaacagaag

SEQ ID NO: 4664924 - DNA, 25 bp, Homo sapien
ccaacttgtattcattacgttatgg

SEQ ID NO: 4664925 - DNA, 25 bp, Homo sapien
gcatactctaccttttaagcactta

SEQ ID NO: 4664926 - DNA, 25 bp, Homo sapien
caaagtagctcaaaaagttcacaag

SEQ ID NO: 4664927 - DNA, 25 bp, Homo sapien
tttctgagctaagacatttccctac

SEQ ID NO: 4664928 - DNA, 25 bp, Homo sapien
tgtttcatacgctgtaatcaaacac

SEQ ID NO: 4664929 - DNA, 25 bp, Homo sapien
gttatctcccagtggtgggtgtgac

SEQ ID NO: 4664930 - DNA, 25 bp, Homo sapien
gtatagttatctcctgaacagggta

SEQ ID NO: 4664931 - DNA, 25 bp, Homo sapien
gattgtatagttatctcctgaacag

SEQ ID NO: 4664932 - DNA, 25 bp, Homo sapien
tatctcctgaacagggtaaaatcac

SEQ ID NO: 4664933 - DNA, 25 bp, Homo sapien
tgaacagggtaaaatcactacccca

SEQ ID NO: 4664934 - DNA, 25 bp, Homo sapien
taaagtctggctcaatcaacctatc

SEQ ID NO: 4664935 - DNA, 25 bp, Homo sapien
caaaagggcctggtcctctatgaag

SEQ ID NO: 4664936 - DNA, 25 bp, Homo sapien
tgtaccaggatgtaaggcaataaac

SEQ ID NO: 4664937 - DNA, 25 bp, Homo sapien
gcagtgcttacaacattctccaaga

SEQ ID NO: 4664938 - DNA, 25 bp, Homo sapien
gtgagcaaaggtagaacccagagcc

SEQ ID NO: 4664939 - DNA, 25 bp, Homo sapien
agcaaaggtagaacccagagcccat

SEQ ID NO: 4664940 - DNA, 25 bp, Homo sapien
cagtgagcaaaggtagaacccagag

SEQ ID NO: 4664941 - DNA, 25 bp, Homo sapien
tgagcaaaggtagaacccagagccc

SEQ ID NO: 4664942 - DNA, 25 bp, Homo sapien
gatacgtttccaactgaaggtggca

SEQ ID NO: 4664943 - DNA, 25 bp, Homo sapien
gaaaagtaccaatggcactgcacag

SEQ ID NO: 4664944 - DNA, 25 bp, Homo sapien
tctgacattttcgagtgatcccact

SEQ ID NO: 4664945 - DNA, 25 bp, Homo sapien
tatggtttgcccatcggaggaaagc

SEQ ID NO: 4664946 - DNA, 25 bp, Homo sapien
tgaaaagttatctggccatatgacc

SEQ ID NO: 4664947 - DNA, 25 bp, Homo sapien
cacgtattactggagtcgctgactt

SEQ ID NO: 4664948 - DNA, 25 bp, Homo sapien
gctggtcttctacttggcagatgca

SEQ ID NO: 4664949 - DNA, 25 bp, Homo sapien
ccatatgaccttggtaaaaagccac

SEQ ID NO: 4664950 - DNA, 25 bp, Homo sapien
ggcagcaggtcgtatagttacctcc

SEQ ID NO: 4664951 - DNA, 25 bp, Homo sapien
gaaaggcagcaggtcgtatagttac

SEQ ID NO: 4664952 - DNA, 25 bp, Homo sapien
cctaagaaaggcagcaggtcgtata

SEQ ID NO: 4664953 - DNA, 25 bp, Homo sapien
caaaatccctgccctaaaactatgc

SEQ ID NO: 4664954 - DNA, 25 bp, Homo sapien
tccagtgacaccaaaagggagacac

SEQ ID NO: 4664955 - DNA, 25 bp, Homo sapien
tataatcactaacgcaaacactgct

SEQ ID NO: 4664956 - DNA, 25 bp, Homo sapien
tacataccataatgagcagcagctc

SEQ ID NO: 4664957 - DNA, 25 bp, Homo sapien
cagaagacaaacctagaaaagcagc

SEQ ID NO: 4664958 - DNA, 25 bp, Homo sapien
gtatgcagtgtttttattgaaaaga

SEQ ID NO: 4664959 - DNA, 25 bp, Homo sapien
aagtatgcagtgtttttattgaaaa

SEQ ID NO: 4664960 - DNA, 25 bp, Homo sapien
tgaaaagatgtataacttttaacaa

SEQ ID NO: 4664961 - DNA, 25 bp, Homo sapien
tttaacaaaatatgtaacactatta

SEQ ID NO: 4664962 - DNA, 25 bp, Homo sapien
cagggtcctgctacagatgtcagag

SEQ ID NO: 4664963 - DNA, 25 bp, Homo sapien
tgttcatgctcacgttcagggtcct

SEQ ID NO: 4664964 - DNA, 25 bp, Homo sapien
taagccataggcttcttcctgatgg

SEQ ID NO: 4664965 - DNA, 25 bp, Homo sapien
gatgtcagagatccattgtctacca

SEQ ID NO: 4664966 - DNA, 25 bp, Homo sapien
ggcaaccagtgaagtgcttaacgaa

SEQ ID NO: 4664967 - DNA, 25 bp, Homo sapien
gcaaaagcagttaggtgatgccaca

SEQ ID NO: 4664968 - DNA, 25 bp, Homo sapien
cagggatctgcattcctagtgtggc

SEQ ID NO: 4664969 - DNA, 25 bp, Homo sapien
tatctgtgctggaagttctaaggca

SEQ ID NO: 4664970 - DNA, 25 bp, Homo sapien
tagcggctgctagtgaacactatag

SEQ ID NO: 4664971 - DNA, 25 bp, Homo sapien
tgaacactataggtgagagacctgc

SEQ ID NO: 4664972 - DNA, 25 bp, Homo sapien
tgagttctgagcttacacggcctgg

SEQ ID NO: 4664973 - DNA, 25 bp, Homo sapien
gaggcagctatgttccttcctgaaa

SEQ ID NO: 4664974 - DNA, 25 bp, Homo sapien
tagtctccagcacagaccgagggaa

SEQ ID NO: 4664975 - DNA, 25 bp, Homo sapien
tgattctacgtcacagagggcctca

SEQ ID NO: 4664976 - DNA, 25 bp, Homo sapien
ccactgtgagccaggtgaaaaattg

SEQ ID NO: 4664977 - DNA, 25 bp, Homo sapien
gagggcctcacggaagtcaactagc

SEQ ID NO: 4664978 - DNA, 25 bp, Homo sapien
gcaaccccaaaatggactaacagag

SEQ ID NO: 4664979 - DNA, 25 bp, Homo sapien
tcttgaggcctcacaggagcagctg

SEQ ID NO: 4664980 - DNA, 25 bp, Homo sapien
tacatctcgtttcatgtgacctctg

SEQ ID NO: 4664981 - DNA, 25 bp, Homo sapien
cagagggactttctgtagagttcca

SEQ ID NO: 4664982 - DNA, 25 bp, Homo sapien
caagttcaccccgtgaatgaggaga

SEQ ID NO: 4664983 - DNA, 25 bp, Homo sapien
catcaggagctaatagtgctggcca

SEQ ID NO: 4664984 - DNA, 25 bp, Homo sapien
caagggcctagaaagcaacaaggga

SEQ ID NO: 4664985 - DNA, 25 bp, Homo sapien
tggacagtgtgctcttataaaacct

SEQ ID NO: 4664986 - DNA, 25 bp, Homo sapien
ggtgacacatcttacatgtgtgtgt

SEQ ID NO: 4664987 - DNA, 25 bp, Homo sapien
catcatgtttatgagatacaaaagg

SEQ ID NO: 4664988 - DNA, 25 bp, Homo sapien
tcatgtttatgagatacaaaaggat

SEQ ID NO: 4664989 - DNA, 25 bp, Homo sapien
tgtcataacaaggattgatggtgac

SEQ ID NO: 4664990 - DNA, 25 bp, Homo sapien
gttcctcagttcagttaagatgtcc

SEQ ID NO: 4664991 - DNA, 25 bp, Homo sapien
tcctcagttcagttaagatgtccat

SEQ ID NO: 4664992 - DNA, 25 bp, Homo sapien
cttgttcctcagttcagttaagatg

SEQ ID NO: 4664993 - DNA, 25 bp, Homo sapien
tgttcctcagttcagttaagatgtc

SEQ ID NO: 4664994 - DNA, 25 bp, Homo sapien
gtcatccttgcacaggggccatgct

SEQ ID NO: 4664995 - DNA, 25 bp, Homo sapien
aggggccatgctaatcttctctgtt

SEQ ID NO: 4664996 - DNA, 25 bp, Homo sapien
cacaggggccatgctaatcttctct

SEQ ID NO: 4664997 - DNA, 25 bp, Homo sapien
tatggaagtcttcatgaatttgtgt

SEQ ID NO: 4664998 - DNA, 25 bp, Homo sapien
ggcaccagggtgtcttaatactgct

SEQ ID NO: 4664999 - DNA, 25 bp, Homo sapien
tcttgctaggtaatggtgaaagtcc

SEQ ID NO: 4665000 - DNA, 25 bp, Homo sapien
tgaatcttcactaggtctcctctgg

SEQ ID NO: 4665001 - DNA, 25 bp, Homo sapien
tcattactgctaggtgggacaggag

SEQ ID NO: 4665002 - DNA, 25 bp, Homo sapien
tttgcaatgttttcatactgagaag

SEQ ID NO: 4665003 - DNA, 25 bp, Homo sapien
ccccgtctcgagcggggtgcggtgg

SEQ ID NO: 4665004 - DNA, 25 bp, Homo sapien
accccgtctcgagcggggtgcggtg

SEQ ID NO: 4665005 - DNA, 25 bp, Homo sapien
gccagccgtggagtcctcatataat

SEQ ID NO: 4665006 - DNA, 25 bp, Homo sapien
gtcagaacccggcagtagatctcgc

SEQ ID NO: 4665007 - DNA, 25 bp, Homo sapien
gttgagatataccatgccagccgtg

SEQ ID NO: 4665008 - DNA, 25 bp, Homo sapien
cagtcagttgcacagtccaggtggg

SEQ ID NO: 4665009 - DNA, 25 bp, Homo sapien
gctgcgttcgatgctccgtaacaac

SEQ ID NO: 4665010 - DNA, 25 bp, Homo sapien
cactactatgtttcagcaggcgctg

SEQ ID NO: 4665011 - DNA, 25 bp, Homo sapien
tggcaggtcaggtctcactaagaac

SEQ ID NO: 4665012 - DNA, 25 bp, Homo sapien
gactgctactgggaacaaattgaac

SEQ ID NO: 4665013 - DNA, 25 bp, Homo sapien
tagaggagagtcaagttgcagaggc

SEQ ID NO: 4665014 - DNA, 25 bp, Homo sapien
ctagaggagagtcaagttgcagagg

SEQ ID NO: 4665015 - DNA, 25 bp, Homo sapien
atccctgctctctggagtactcttc

SEQ ID NO: 4665016 - DNA, 25 bp, Homo sapien
ttctttgcccttgcacgagagtatg

SEQ ID NO: 4665017 - DNA, 25 bp, Homo sapien
tgtttctttgcccttgcacgagagt

SEQ ID NO: 4665018 - DNA, 25 bp, Homo sapien
tgtgtttctttgcccttgcacgaga

SEQ ID NO: 4665019 - DNA, 25 bp, Homo sapien
ctttgcccttgcacgagagtatgaa

SEQ ID NO: 4665020 - DNA, 25 bp, Homo sapien
gacgcctacttctcggctaaaatga

SEQ ID NO: 4665021 - DNA, 25 bp, Homo sapien
ggacagcaggaaacagtaacactag

SEQ ID NO: 4665022 - DNA, 25 bp, Homo sapien
taacactagcttcggaatagcagcc

SEQ ID NO: 4665023 - DNA, 25 bp, Homo sapien
ttgagaatgcaaagtcccgagtgac

SEQ ID NO: 4665024 - DNA, 25 bp, Homo sapien
ttcaattcgtccttctcacctaaca

SEQ ID NO: 4665025 - DNA, 25 bp, Homo sapien
cttcaattcgtccttctcacctaac

SEQ ID NO: 4665026 - DNA, 25 bp, Homo sapien
tctatacggcaagctgactaaactt

SEQ ID NO: 4665027 - DNA, 25 bp, Homo sapien
tattttaacttcagtgaccatatgt

SEQ ID NO: 4665028 - DNA, 25 bp, Homo sapien
catgctatgacatatgatacaattg

SEQ ID NO: 4665029 - DNA, 25 bp, Homo sapien
cagtgaccatatgttcatgctatga

SEQ ID NO: 4665030 - DNA, 25 bp, Homo sapien
tctgagcagaactcaatagcttcca

SEQ ID NO: 4665031 - DNA, 25 bp, Homo sapien
gtcctctgagcagaactcaatagct

SEQ ID NO: 4665032 - DNA, 25 bp, Homo sapien
atagcttccactccttctgggtgaa

SEQ ID NO: 4665033 - DNA, 25 bp, Homo sapien
cctctgagcagaactcaatagcttc

SEQ ID NO: 4665034 - DNA, 25 bp, Homo sapien
ccagggagaccagatggctgtagtt

SEQ ID NO: 4665035 - DNA, 25 bp, Homo sapien
tggctgtagttctccagcatcacct

SEQ ID NO: 4665036 - DNA, 25 bp, Homo sapien
gctgtagttctccagcatcacctcc

SEQ ID NO: 4665037 - DNA, 25 bp, Homo sapien
agggagaccagatggctgtagttct

SEQ ID NO: 4665038 - DNA, 25 bp, Homo sapien
cagaatctgaaaccttaaacaggcc

SEQ ID NO: 4665039 - DNA, 25 bp, Homo sapien
tgaaaccttaaacaggccagcctta

SEQ ID NO: 4665040 - DNA, 25 bp, Homo sapien
atctgaaaccttaaacaggccagcc

SEQ ID NO: 4665041 - DNA, 25 bp, Homo sapien
aagcagaatctgaaaccttaaacag

SEQ ID NO: 4665042 - DNA, 25 bp, Homo sapien
tggcagcttgctatgtaagagctta

SEQ ID NO: 4665043 - DNA, 25 bp, Homo sapien
tgctatgtaagagcttaaaataccc

SEQ ID NO: 4665044 - DNA, 25 bp, Homo sapien
cagcttgctatgtaagagcttaaaa

SEQ ID NO: 4665045 - DNA, 25 bp, Homo sapien
ctatgtaagagcttaaaatacccac

SEQ ID NO: 4665046 - DNA, 25 bp, Homo sapien
gtccagaagatgttcgttctcctct

SEQ ID NO: 4665047 - DNA, 25 bp, Homo sapien
tctctccaaggttcgtcgccttgct

SEQ ID NO: 4665048 - DNA, 25 bp, Homo sapien
tccaaggttcgtcgccttgctccag

SEQ ID NO: 4665049 - DNA, 25 bp, Homo sapien
aaggtccagaagatgttcgttctcc

SEQ ID NO: 4665050 - DNA, 25 bp, Homo sapien
ctcactgccctgcaccctcgcttgc

SEQ ID NO: 4665051 - DNA, 25 bp, Homo sapien
gcacctcaaagatagcccctccttc

SEQ ID NO: 4665052 - DNA, 25 bp, Homo sapien
agtggcctaggaggcctgaagaaga

SEQ ID NO: 4665053 - DNA, 25 bp, Homo sapien
cctcaaagatagcccctccttcctt

SEQ ID NO: 4665054 - DNA, 25 bp, Homo sapien
agcacctcaaagatagcccctcctt

SEQ ID NO: 4665055 - DNA, 25 bp, Homo sapien
tgaagatcatgccaaccacatgagc

SEQ ID NO: 4665056 - DNA, 25 bp, Homo sapien
agcccaagaatggagaaatcctgaa

SEQ ID NO: 4665057 - DNA, 25 bp, Homo sapien
gacaggtactgttttgaagatcatg

SEQ ID NO: 4665058 - DNA, 25 bp, Homo sapien
gaatgtgctcgagaaaggaagccaa

SEQ ID NO: 4665059 - DNA, 25 bp, Homo sapien
cccaaggaggcatacaagaatacag

SEQ ID NO: 4665060 - DNA, 25 bp, Homo sapien
tatctcttagggtacagggctgccc

SEQ ID NO: 4665061 - DNA, 25 bp, Homo sapien
gaggaacgggacacaatcaggaaaa

SEQ ID NO: 4665062 - DNA, 25 bp, Homo sapien
gaggtctcacaatcccaaatgttgg

SEQ ID NO: 4665063 - DNA, 25 bp, Homo sapien
tggagtctcgcactgttgcctgggc

SEQ ID NO: 4665064 - DNA, 25 bp, Homo sapien
atggggtttcactatgttggccaga

SEQ ID NO: 4665065 - DNA, 25 bp, Homo sapien
cgcctcccgagttcacgcgatcctc

SEQ ID NO: 4665066 - DNA, 25 bp, Homo sapien
caccacactcggctagttttttttg

SEQ ID NO: 4665067 - DNA, 25 bp, Homo sapien
tgctgtttatgcaagagccaagaac

SEQ ID NO: 4665068 - DNA, 25 bp, Homo sapien
catggattgtaatacctgcccagca

SEQ ID NO: 4665069 - DNA, 25 bp, Homo sapien
gaaagtcttggtcagaatcaccaca

SEQ ID NO: 4665070 - DNA, 25 bp, Homo sapien
gagaaacatttgttcggcctgctgt

SEQ ID NO: 4665071 - DNA, 25 bp, Homo sapien
agtttccacgtatgactgctccaga

SEQ ID NO: 4665072 - DNA, 25 bp, Homo sapien
tctagttggaagtcacctcctgcag

SEQ ID NO: 4665073 - DNA, 25 bp, Homo sapien
cacttagcgcatattgtctgaggag

SEQ ID NO: 4665074 - DNA, 25 bp, Homo sapien
taagtcccagtctatagtttccacg

SEQ ID NO: 4665075 - DNA, 25 bp, Homo sapien
aaggagggctatcttctggcgaaag

SEQ ID NO: 4665076 - DNA, 25 bp, Homo sapien
taaggtctgatctctggcaaaagcc

SEQ ID NO: 4665077 - DNA, 25 bp, Homo sapien
gaccttttggcgaaagctgtgccca

SEQ ID NO: 4665078 - DNA, 25 bp, Homo sapien
tgagggtgaccttctgaccaaagcc

SEQ ID NO: 4665079 - DNA, 25 bp, Homo sapien
ccagacttggtcctcctgtgtctat

SEQ ID NO: 4665080 - DNA, 25 bp, Homo sapien
tatgcaagtgagacttctggctaaa

SEQ ID NO: 4665081 - DNA, 25 bp, Homo sapien
gggtaggagctgatgaccagacttg

SEQ ID NO: 4665082 - DNA, 25 bp, Homo sapien
ctccccagaatgggtccgctgatgt

SEQ ID NO: 4665083 - DNA, 25 bp, Homo sapien
ccagcttcacactcacggggaaagg

SEQ ID NO: 4665084 - DNA, 25 bp, Homo sapien
gcttcacactcacggggaaaggaaa

SEQ ID NO: 4665085 - DNA, 25 bp, Homo sapien
cagcttcacactcacggggaaagga

SEQ ID NO: 4665086 - DNA, 25 bp, Homo sapien
cttcacactcacggggaaaggaaag

SEQ ID NO: 4665087 - DNA, 25 bp, Homo sapien
tcttgaaagaacactagggtgtggc

SEQ ID NO: 4665088 - DNA, 25 bp, Homo sapien
gcctgtccgcattgcaaaaaatgag

SEQ ID NO: 4665089 - DNA, 25 bp, Homo sapien
gacttgcccaaattgcgttctagtg

SEQ ID NO: 4665090 - DNA, 25 bp, Homo sapien
tgtggctggacaaccatgtgataaa

SEQ ID NO: 4665091 - DNA, 25 bp, Homo sapien
catgatcaatgaaggaaagcaactc

SEQ ID NO: 4665092 - DNA, 25 bp, Homo sapien
tacaaaggaccactgtgcagaaagt

SEQ ID NO: 4665093 - DNA, 25 bp, Homo sapien
ccatatcaggaaagtggaacatctg

SEQ ID NO: 4665094 - DNA, 25 bp, Homo sapien
ggcgctcacggctagatacgaattt

SEQ ID NO: 4665095 - DNA, 25 bp, Homo sapien
acacacgcttcccttgtgacttcag

SEQ ID NO: 4665096 - DNA, 25 bp, Homo sapien
ttcagctctggccactggataactc

SEQ ID NO: 4665097 - DNA, 25 bp, Homo sapien
tgaaaatgtgttgataagggctgtc

SEQ ID NO: 4665098 - DNA, 25 bp, Homo sapien
aactcgctgaggcaaaatggcttca

SEQ ID NO: 4665099 - DNA, 25 bp, Homo sapien
gctgtgactgccagagcactggtcc

SEQ ID NO: 4665100 - DNA, 25 bp, Homo sapien
tccacagtctgagttctgattcctc

SEQ ID NO: 4665101 - DNA, 25 bp, Homo sapien
tcaggaccgctgtgactgccagagc

SEQ ID NO: 4665102 - DNA, 25 bp, Homo sapien
ttgttggctcaggaccgctgtgact

SEQ ID NO: 4665103 - DNA, 25 bp, Homo sapien
atcatgccccgccccaatacttact

SEQ ID NO: 4665104 - DNA, 25 bp, Homo sapien
gagccatcatgccccgccccaatac

SEQ ID NO: 4665105 - DNA, 25 bp, Homo sapien
ccatcatgccccgccccaatactta

SEQ ID NO: 4665106 - DNA, 25 bp, Homo sapien
catgccccgccccaatacttacttt

SEQ ID NO: 4665107 - DNA, 25 bp, Homo sapien
taaagagaggaaccacattactggg

SEQ ID NO: 4665108 - DNA, 25 bp, Homo sapien
cagaagaatactagaacatattaat

SEQ ID NO: 4665109 - DNA, 25 bp, Homo sapien
gctaaatctggccactatgttcttt

SEQ ID NO: 4665110 - DNA, 25 bp, Homo sapien
taatatatctctggaaagatgaaaa

SEQ ID NO: 4665111 - DNA, 25 bp, Homo sapien
gcatgaccaggaggcgattaccttc

SEQ ID NO: 4665112 - DNA, 25 bp, Homo sapien
caatgaggtcgtccgtgagaacttc

SEQ ID NO: 4665113 - DNA, 25 bp, Homo sapien
tgattttacgaggacaggagctact

SEQ ID NO: 4665114 - DNA, 25 bp, Homo sapien
tgttgaccagcggaagcatgaccag

SEQ ID NO: 4665115 - DNA, 25 bp, Homo sapien
tcactgttccttaggaaccggtcca

SEQ ID NO: 4665116 - DNA, 25 bp, Homo sapien
caaacttgtgtgccgaggagactcc

SEQ ID NO: 4665117 - DNA, 25 bp, Homo sapien
ggtgcttgtgggctttgttccctcc

SEQ ID NO: 4665118 - DNA, 25 bp, Homo sapien
cggtgcttgtgggctttgttccctc

SEQ ID NO: 4665119 - DNA, 25 bp, Homo sapien
cccagcccgaggcctttgcggaggc

SEQ ID NO: 4665120 - DNA, 25 bp, Homo sapien
tgcaacctggacactcctatagcta

SEQ ID NO: 4665121 - DNA, 25 bp, Homo sapien
ccagcccgaggcctttgcggaggct

SEQ ID NO: 4665122 - DNA, 25 bp, Homo sapien
ccagaggaagtgaaagttaagctga

SEQ ID NO: 4665123 - DNA, 25 bp, Homo sapien
caggtgaagggcagtaatccaggta

SEQ ID NO: 4665124 - DNA, 25 bp, Homo sapien
gaggtggcattcagccaggtgaagg

SEQ ID NO: 4665125 - DNA, 25 bp, Homo sapien
gattcctgtggacttatgttttcta

SEQ ID NO: 4665126 - DNA, 25 bp, Homo sapien
gccccaccatgtcagatgcagctgt

SEQ ID NO: 4665127 - DNA, 25 bp, Homo sapien
gcgtgccccaccatgtcagatgcag

SEQ ID NO: 4665128 - DNA, 25 bp, Homo sapien
accatgtcagatgcagctgtagaca

SEQ ID NO: 4665129 - DNA, 25 bp, Homo sapien
tgtcagatgcagctgtagacaccag

SEQ ID NO: 4665130 - DNA, 25 bp, Homo sapien
ccaaaacagcgaaagcattcagttg

SEQ ID NO: 4665131 - DNA, 25 bp, Homo sapien
aaaacagcgaaagcattcagttgaa

SEQ ID NO: 4665132 - DNA, 25 bp, Homo sapien
aacagcgaaagcattcagttgaaaa

SEQ ID NO: 4665133 - DNA, 25 bp, Homo sapien
cagcgaaagcattcagttgaaaata

SEQ ID NO: 4665134 - DNA, 25 bp, Homo sapien
ggctgcagttcaggggcacaatctt

SEQ ID NO: 4665135 - DNA, 25 bp, Homo sapien
tgcccaggctgcagttcaggggcac

SEQ ID NO: 4665136 - DNA, 25 bp, Homo sapien
tcaggcatgcaccaccatgcccggc

SEQ ID NO: 4665137 - DNA, 25 bp, Homo sapien
ttcaggcatgcaccaccatgcccgg

SEQ ID NO: 4665138 - DNA, 25 bp, Homo sapien
gaagtcactgtcaaaagtcatgggc

SEQ ID NO: 4665139 - DNA, 25 bp, Homo sapien
tgtgcctgacgctacggaagatacc

SEQ ID NO: 4665140 - DNA, 25 bp, Homo sapien
tgtaacgtgtctagcaccatctgag

SEQ ID NO: 4665141 - DNA, 25 bp, Homo sapien
gaagtcgagtctgttaggaggcccc

SEQ ID NO: 4665142 - DNA, 25 bp, Homo sapien
gagtcattgagtcattagggcaaac

SEQ ID NO: 4665143 - DNA, 25 bp, Homo sapien
cacatagcagtaagtggtgccagga

SEQ ID NO: 4665144 - DNA, 25 bp, Homo sapien
catttattgagacatgacaggccaa

SEQ ID NO: 4665145 - DNA, 25 bp, Homo sapien
ggcctcaagtcaattctgtctcgca

SEQ ID NO: 4665146 - DNA, 25 bp, Homo sapien
aagctgcggatcaggctagcagaag

SEQ ID NO: 4665147 - DNA, 25 bp, Homo sapien
tgcggatcaggctagcagaagaccg

SEQ ID NO: 4665148 - DNA, 25 bp, Homo sapien
cgcagctccaggaaccgaccactta

SEQ ID NO: 4665149 - DNA, 25 bp, Homo sapien
aggctagcagaagaccgcagctcca

SEQ ID NO: 4665150 - DNA, 25 bp, Homo sapien
tccacgctcatgccgcggccatgcc

SEQ ID NO: 4665151 - DNA, 25 bp, Homo sapien
ggacgacggcgacgccgcggaggcg

SEQ ID NO: 4665152 - DNA, 25 bp, Homo sapien
ggcgctccgggacgacggcgacgcc

SEQ ID NO: 4665153 - DNA, 25 bp, Homo sapien
ctcgggctccgacgccgccttctcc

SEQ ID NO: 4665154 - DNA, 25 bp, Homo sapien
gcgcgcccgcgcgcttctccggcat

SEQ ID NO: 4665155 - DNA, 25 bp, Homo sapien
ggcctgcgcgcccgcgcgcttctcc

SEQ ID NO: 4665156 - DNA, 25 bp, Homo sapien
gctccccgcggcctgcgcgcccgcg

SEQ ID NO: 4665157 - DNA, 25 bp, Homo sapien
ccaggtgctccccgcggcctgcgcg

SEQ ID NO: 4665158 - DNA, 25 bp, Homo sapien
tgttttccatgtagacttggagaga

SEQ ID NO: 4665159 - DNA, 25 bp, Homo sapien
atgtagacttggagagaaactgcgc

SEQ ID NO: 4665160 - DNA, 25 bp, Homo sapien
ctgttttccatgtagacttggagag

SEQ ID NO: 4665161 - DNA, 25 bp, Homo sapien
ttccatgtagacttggagagaaact

SEQ ID NO: 4665162 - DNA, 25 bp, Homo sapien
gcagcaaggcgctgcccggcatctg

SEQ ID NO: 4665163 - DNA, 25 bp, Homo sapien
ctccgacgccgggagaacacggaag

SEQ ID NO: 4665164 - DNA, 25 bp, Homo sapien
cccgtcgacggtctgattcaaatgc

SEQ ID NO: 4665165 - DNA, 25 bp, Homo sapien
caacttccccgtcgacggtctgatt

SEQ ID NO: 4665166 - DNA, 25 bp, Homo sapien
gaccacggcctagagagaatgtatt

SEQ ID NO: 4665167 - DNA, 25 bp, Homo sapien
catttgacgagggacttgcatccca

SEQ ID NO: 4665168 - DNA, 25 bp, Homo sapien
taagtttagggaagttgggcacatg

SEQ ID NO: 4665169 - DNA, 25 bp, Homo sapien
gagaatgaaaagatggaccacggcc

SEQ ID NO: 4665170 - DNA, 25 bp, Homo sapien
ctctgtggtcttgtcccaatagtgc

SEQ ID NO: 4665171 - DNA, 25 bp, Homo sapien
tgtcccaatagtgccttacagtaag

SEQ ID NO: 4665172 - DNA, 25 bp, Homo sapien
ggtcttgtcccaatagtgccttaca

SEQ ID NO: 4665173 - DNA, 25 bp, Homo sapien
cccaatagtgccttacagtaagttc

SEQ ID NO: 4665174 - DNA, 25 bp, Homo sapien
tggatcctggttacagggttagtct

SEQ ID NO: 4665175 - DNA, 25 bp, Homo sapien
gaaaagcaccttactctacaaacag

SEQ ID NO: 4665176 - DNA, 25 bp, Homo sapien
gacttagatgtcctggcaacacctt

SEQ ID NO: 4665177 - DNA, 25 bp, Homo sapien
ggtaaacatttatcacacaaacgag

SEQ ID NO: 4665178 - DNA, 25 bp, Homo sapien
tcctgaagaacaatcatgagcatag

SEQ ID NO: 4665179 - DNA, 25 bp, Homo sapien
taggtcaagaccctggtccagaagc

SEQ ID NO: 4665180 - DNA, 25 bp, Homo sapien
tccagccaatctttttccactaggt

SEQ ID NO: 4665181 - DNA, 25 bp, Homo sapien
caaacttgtctaaacttgtgaagaa

SEQ ID NO: 4665182 - DNA, 25 bp, Homo sapien
tatcagctgaaagagcctgaaagaa

SEQ ID NO: 4665183 - DNA, 25 bp, Homo sapien
tagagttgagcacatcattatgaac

SEQ ID NO: 4665184 - DNA, 25 bp, Homo sapien
tgtttcctcacactctatcagctga

SEQ ID NO: 4665185 - DNA, 25 bp, Homo sapien
gatggtcacaaatggaaatacttac

SEQ ID NO: 4665186 - DNA, 25 bp, Homo sapien
ccagttttagttggtcgaggaggca

SEQ ID NO: 4665187 - DNA, 25 bp, Homo sapien
cgaggaggcagattcgaaactgatc

SEQ ID NO: 4665188 - DNA, 25 bp, Homo sapien
catttgacaatgagaccccagacac

SEQ ID NO: 4665189 - DNA, 25 bp, Homo sapien
tctttcctcaggcaacggactgaaa

SEQ ID NO: 4665190 - DNA, 25 bp, Homo sapien
ggaaattagcattgctacaaaactt

SEQ ID NO: 4665191 - DNA, 25 bp, Homo sapien
taaaccaggaaattagcattgctac

SEQ ID NO: 4665192 - DNA, 25 bp, Homo sapien
caggaaattagcattgctacaaaac

SEQ ID NO: 4665193 - DNA, 25 bp, Homo sapien
accaggaaattagcattgctacaaa

SEQ ID NO: 4665194 - DNA, 25 bp, Homo sapien
gccccacgcaaagaattcaaggaag

SEQ ID NO: 4665195 - DNA, 25 bp, Homo sapien
tgacaatagcagcatggtacacact

SEQ ID NO: 4665196 - DNA, 25 bp, Homo sapien
aatagcagcatggtacacacttggt

SEQ ID NO: 4665197 - DNA, 25 bp, Homo sapien
cccacgcaaagaattcaaggaagat

SEQ ID NO: 4665198 - DNA, 25 bp, Homo sapien
ctttacaccttgaatgagaccattc

SEQ ID NO: 4665199 - DNA, 25 bp, Homo sapien
gagtggggcactcaaaaaagagagc

SEQ ID NO: 4665200 - DNA, 25 bp, Homo sapien
gaatacagtgccgaggagaaagggc

SEQ ID NO: 4665201 - DNA, 25 bp, Homo sapien
ggcttcctcccccacacatcagaca

SEQ ID NO: 4665202 - DNA, 25 bp, Homo sapien
atcagacagggcaccaatgagtggg

SEQ ID NO: 4665203 - DNA, 25 bp, Homo sapien
tgagtgacatcagctacataggcaa

SEQ ID NO: 4665204 - DNA, 25 bp, Homo sapien
aacgtgaccgagaagactccagaca

SEQ ID NO: 4665205 - DNA, 25 bp, Homo sapien
aatataacagaaaacgtgaccgaga

SEQ ID NO: 4665206 - DNA, 25 bp, Homo sapien
tgtacttcgctcgtgctcctgagtg

SEQ ID NO: 4665207 - DNA, 25 bp, Homo sapien
gtcttcttcgaagctttcctatcag

SEQ ID NO: 4665208 - DNA, 25 bp, Homo sapien
tcaaactactgatgtctaaagtcaa

SEQ ID NO: 4665209 - DNA, 25 bp, Homo sapien
cctttttagggcatgacatgagagg

SEQ ID NO: 4665210 - DNA, 25 bp, Homo sapien
catcacgactctgaagatgcccctt

SEQ ID NO: 4665211 - DNA, 25 bp, Homo sapien
aacgaggctgtctccgtaactggca

SEQ ID NO: 4665212 - DNA, 25 bp, Homo sapien
ccaatggccgggctgctgacaagac

SEQ ID NO: 4665213 - DNA, 25 bp, Homo sapien
ctgacaagactagccgcaaaggtgg

SEQ ID NO: 4665214 - DNA, 25 bp, Homo sapien
tggcagaaagatatgctccaatggc

SEQ ID NO: 4665215 - DNA, 25 bp, Homo sapien
cgcaaaagggtctgcttgtttccaa

SEQ ID NO: 4665216 - DNA, 25 bp, Homo sapien
caaaagggtctgcttgtttccaaga

SEQ ID NO: 4665217 - DNA, 25 bp, Homo sapien
gagctccccaggaaaccggtctcat

SEQ ID NO: 4665218 - DNA, 25 bp, Homo sapien
ttccaagaaatctgagctccccagg

SEQ ID NO: 4665219 - DNA, 25 bp, Homo sapien
tgcttggcttagaaagacatttagg

SEQ ID NO: 4665220 - DNA, 25 bp, Homo sapien
tttgcttggcttagaaagacattta

SEQ ID NO: 4665221 - DNA, 25 bp, Homo sapien
catttgcttggcttagaaagacatt

SEQ ID NO: 4665222 - DNA, 25 bp, Homo sapien
gcttagaaagacatttaggaaagta

SEQ ID NO: 4665223 - DNA, 25 bp, Homo sapien
aatgttgccaatgttctgggacatc

SEQ ID NO: 4665224 - DNA, 25 bp, Homo sapien
gttgccaatgttctgggacatcagc

SEQ ID NO: 4665225 - DNA, 25 bp, Homo sapien
gccaatacacattaatgttgccaat

SEQ ID NO: 4665226 - DNA, 25 bp, Homo sapien
aaatgccaatacacattaatgttgc

SEQ ID NO: 4665227 - DNA, 25 bp, Homo sapien
gacagtagaatcttttccaactttc

SEQ ID NO: 4665228 - DNA, 25 bp, Homo sapien
cacggtgatgcagattagtaagaca

SEQ ID NO: 4665229 - DNA, 25 bp, Homo sapien
tagtaagacagtagaatcttttcca

SEQ ID NO: 4665230 - DNA, 25 bp, Homo sapien
tcaggaaggtatgaaagaaacacgg

SEQ ID NO: 4665231 - DNA, 25 bp, Homo sapien
ctgcctgagatagagaaaaaaactt

SEQ ID NO: 4665232 - DNA, 25 bp, Homo sapien
gatagagaaaaaaacttgaatactg

SEQ ID NO: 4665233 - DNA, 25 bp, Homo sapien
tagagaaaaaaacttgaatactgtc

SEQ ID NO: 4665234 - DNA, 25 bp, Homo sapien
agaaaaaaacttgaatactgtccag

SEQ ID NO: 4665235 - DNA, 25 bp, Homo sapien
tactgaaggtgcctcagcaagctgg

SEQ ID NO: 4665236 - DNA, 25 bp, Homo sapien
cagttgagctatgacctactgaagg

SEQ ID NO: 4665237 - DNA, 25 bp, Homo sapien
aagctggcttcaatcagacctggaa

SEQ ID NO: 4665238 - DNA, 25 bp, Homo sapien
cagcagctttatgcacaactgtcaa

SEQ ID NO: 4665239 - DNA, 25 bp, Homo sapien
gagcatgtcgtcaaggttcacctat

SEQ ID NO: 4665240 - DNA, 25 bp, Homo sapien
tagcagccattaggagttctactcc

SEQ ID NO: 4665241 - DNA, 25 bp, Homo sapien
catacaatgtgcagtactttgtgac

SEQ ID NO: 4665242 - DNA, 25 bp, Homo sapien
cgttagtctacttcctgtccctatg

SEQ ID NO: 4665243 - DNA, 25 bp, Homo sapien
ttgctcattagcaaagccagtggct

SEQ ID NO: 4665244 - DNA, 25 bp, Homo sapien
gatgctgccaatacagcattgctca

SEQ ID NO: 4665245 - DNA, 25 bp, Homo sapien
tgctgaaagctgaacctatataacc

SEQ ID NO: 4665246 - DNA, 25 bp, Homo sapien
taagaaatcgttataagcaggcaca

SEQ ID NO: 4665247 - DNA, 25 bp, Homo sapien
atgaatgctgcaattttaacagatc

SEQ ID NO: 4665248 - DNA, 25 bp, Homo sapien
gaatgctgcaattttaacagatcca

SEQ ID NO: 4665249 - DNA, 25 bp, Homo sapien
aatgctgcaattttaacagatccaa

SEQ ID NO: 4665250 - DNA, 25 bp, Homo sapien
gctgcaattttaacagatccaaaac

SEQ ID NO: 4665251 - DNA, 25 bp, Homo sapien
ccacaatagacagaattcctaccat

SEQ ID NO: 4665252 - DNA, 25 bp, Homo sapien
gagccacaatagacagaattcctac

SEQ ID NO: 4665253 - DNA, 25 bp, Homo sapien
ctgagccacaatagacagaattcct

SEQ ID NO: 4665254 - DNA, 25 bp, Homo sapien
gccacaatagacagaattcctacca

SEQ ID NO: 4665255 - DNA, 25 bp, Homo sapien
tgtggcttcctgtgaaactatggtt

SEQ ID NO: 4665256 - DNA, 25 bp, Homo sapien
gcttcctgtgaaactatggttatca

SEQ ID NO: 4665257 - DNA, 25 bp, Homo sapien
cctgtgaaactatggttatcaggat

SEQ ID NO: 4665258 - DNA, 25 bp, Homo sapien
tgtgaaactatggttatcaggatat

SEQ ID NO: 4665259 - DNA, 25 bp, Homo sapien
caaaaccgtaccaggctaactggag

SEQ ID NO: 4665260 - DNA, 25 bp, Homo sapien
ctgtgatccaaaaccgtaccaggct

SEQ ID NO: 4665261 - DNA, 25 bp, Homo sapien
ccaggctaactggagcatctggaag

SEQ ID NO: 4665262 - DNA, 25 bp, Homo sapien
cttatttcctaatgatctcatcaag

SEQ ID NO: 4665263 - DNA, 25 bp, Homo sapien
cacgagaatctaagagtgaggctta

SEQ ID NO: 4665264 - DNA, 25 bp, Homo sapien
taaggaacaattccgtgaaagtcca

SEQ ID NO: 4665265 - DNA, 25 bp, Homo sapien
gcatctgtctggcagttcacgagaa

SEQ ID NO: 4665266 - DNA, 25 bp, Homo sapien
gcaatgttgaatacaccaaaccagc

SEQ ID NO: 4665267 - DNA, 25 bp, Homo sapien
actgattgccggaaacgtgatgctg

SEQ ID NO: 4665268 - DNA, 25 bp, Homo sapien
gacgagggcactgattgccggaaac

SEQ ID NO: 4665269 - DNA, 25 bp, Homo sapien
ctgactctgcattccgagagacgag

SEQ ID NO: 4665270 - DNA, 25 bp, Homo sapien
tctgcattccgagagacgagggcac

SEQ ID NO: 4665271 - DNA, 25 bp, Homo sapien
tgttagaattcaatttcgggcccaa

SEQ ID NO: 4665272 - DNA, 25 bp, Homo sapien
tatgaagccatacagtgctggcccc

SEQ ID NO: 4665273 - DNA, 25 bp, Homo sapien
caactcagtcagttccacatggaac

SEQ ID NO: 4665274 - DNA, 25 bp, Homo sapien
cccaggccattgcatagtcctctta

SEQ ID NO: 4665275 - DNA, 25 bp, Homo sapien
gcaaaactgtaagcttgtaagcaac

SEQ ID NO: 4665276 - DNA, 25 bp, Homo sapien
cagatcatgcacctttgtacatgaa

SEQ ID NO: 4665277 - DNA, 25 bp, Homo sapien
ggcaaactccactagagcttggtgt

SEQ ID NO: 4665278 - DNA, 25 bp, Homo sapien
aattccagctttgtatagatatggc

SEQ ID NO: 4665279 - DNA, 25 bp, Homo sapien
tactgtgtttttgaactccactggc

SEQ ID NO: 4665280 - DNA, 25 bp, Homo sapien
taaggactatacatgccccaaataa

SEQ ID NO: 4665281 - DNA, 25 bp, Homo sapien
caaatgaagagagctcccagatgct

SEQ ID NO: 4665282 - DNA, 25 bp, Homo sapien
tcttgcagtagtggctcaatgtcct

SEQ ID NO: 4665283 - DNA, 25 bp, Homo sapien
tgcgtattcccatgcgattcaaaag

SEQ ID NO: 4665284 - DNA, 25 bp, Homo sapien
tgagtttcaccttgggagttgcaca

SEQ ID NO: 4665285 - DNA, 25 bp, Homo sapien
ggtgctctgttaaaggtgggcccta

SEQ ID NO: 4665286 - DNA, 25 bp, Homo sapien
tggccctgaaggatgccgctagcgt

SEQ ID NO: 4665287 - DNA, 25 bp, Homo sapien
cccaaaagagcaatactatttgctt

SEQ ID NO: 4665288 - DNA, 25 bp, Homo sapien
tacaactcagtttaattgaaagcca

SEQ ID NO: 4665289 - DNA, 25 bp, Homo sapien
acataccttttgcatcagctgaaag

SEQ ID NO: 4665290 - DNA, 25 bp, Homo sapien
tcagctgaaagattacaactcagtt

SEQ ID NO: 4665291 - DNA, 25 bp, Homo sapien
tttctgctggtactgttccgtcatt

SEQ ID NO: 4665292 - DNA, 25 bp, Homo sapien
ctgttccgtcattgccctctaaaga

SEQ ID NO: 4665293 - DNA, 25 bp, Homo sapien
ggtactgttccgtcattgccctcta

SEQ ID NO: 4665294 - DNA, 25 bp, Homo sapien
tactgttccgtcattgccctctaaa

SEQ ID NO: 4665295 - DNA, 25 bp, Homo sapien
ggagatggagcccatccaggccaat

SEQ ID NO: 4665296 - DNA, 25 bp, Homo sapien
tggagcccatccaggccaatatggt

SEQ ID NO: 4665297 - DNA, 25 bp, Homo sapien
gtgtggtggcgtgtgtcccagctac

SEQ ID NO: 4665298 - DNA, 25 bp, Homo sapien
gatggagcccatccaggccaatatg

SEQ ID NO: 4665299 - DNA, 25 bp, Homo sapien
ttcaacggactcctcatctacaacg

SEQ ID NO: 4665300 - DNA, 25 bp, Homo sapien
caacggactcctcatctacaacggg

SEQ ID NO: 4665301 - DNA, 25 bp, Homo sapien
ctcaagagctgacatgaagaatgtc

SEQ ID NO: 4665302 - DNA, 25 bp, Homo sapien
acggactcctcatctacaacgggca

SEQ ID NO: 4665303 - DNA, 25 bp, Homo sapien
ttcaaaggaaagggtggaaactgca

SEQ ID NO: 4665304 - DNA, 25 bp, Homo sapien
ttagtatttgtgctgtcaaagcgag

SEQ ID NO: 4665305 - DNA, 25 bp, Homo sapien
agtatttgtgctgtcaaagcgagca

SEQ ID NO: 4665306 - DNA, 25 bp, Homo sapien
tagtatttgtgctgtcaaagcgagc

SEQ ID NO: 4665307 - DNA, 25 bp, Homo sapien
tatttgtgctgtcaaagcgagcact

SEQ ID NO: 4665308 - DNA, 25 bp, Homo sapien
ccattccctccagaactggacaatt

SEQ ID NO: 4665309 - DNA, 25 bp, Homo sapien
ccctccagaactggacaattaaaat

SEQ ID NO: 4665310 - DNA, 25 bp, Homo sapien
gattttcaagttccattccctccag

SEQ ID NO: 4665311 - DNA, 25 bp, Homo sapien
tccagaactggacaattaaaatgtt

SEQ ID NO: 4665312 - DNA, 25 bp, Homo sapien
caatggttgagctcagtgcacttac

SEQ ID NO: 4665313 - DNA, 25 bp, Homo sapien
ccaatggttgagctcagtgcactta

SEQ ID NO: 4665314 - DNA, 25 bp, Homo sapien
attacatctggacagtggatctcaa

SEQ ID NO: 4665315 - DNA, 25 bp, Homo sapien
ttacatctggacagtggatctcaag

SEQ ID NO: 4665316 - DNA, 25 bp, Homo sapien
acatctggacagtggatctcaagag

SEQ ID NO: 4665317 - DNA, 25 bp, Homo sapien
tacatctggacagtggatctcaaga

SEQ ID NO: 4665318 - DNA, 25 bp, Homo sapien
tgcggtcttgtgctctggtacttga

SEQ ID NO: 4665319 - DNA, 25 bp, Homo sapien
gcggtcttgtgctctggtacttgag

SEQ ID NO: 4665320 - DNA, 25 bp, Homo sapien
actgcggtcttgtgctctggtactt

SEQ ID NO: 4665321 - DNA, 25 bp, Homo sapien
ctactgcggtcttgtgctctggtac

SEQ ID NO: 4665322 - DNA, 25 bp, Homo sapien
ggtgtgagaaccagtcattgcttca

SEQ ID NO: 4665323 - DNA, 25 bp, Homo sapien
tgtgagaaccagtcattgcttcatt

SEQ ID NO: 4665324 - DNA, 25 bp, Homo sapien
tgggtgtgagaaccagtcattgctt

SEQ ID NO: 4665325 - DNA, 25 bp, Homo sapien
ctgggtgtgagaaccagtcattgct

SEQ ID NO: 4665326 - DNA, 25 bp, Homo sapien
gagtgatttgagacagtacttgatt

SEQ ID NO: 4665327 - DNA, 25 bp, Homo sapien
gccagagtgatttgagacagtactt

SEQ ID NO: 4665328 - DNA, 25 bp, Homo sapien
ctccattaatgccagagtgatttga

SEQ ID NO: 4665329 - DNA, 25 bp, Homo sapien
ttaatgccagagtgatttgagacag

SEQ ID NO: 4665330 - DNA, 25 bp, Homo sapien
agtgcagtagctggatctcagctta

SEQ ID NO: 4665331 - DNA, 25 bp, Homo sapien
gtgcagtagctggatctcagcttac

SEQ ID NO: 4665332 - DNA, 25 bp, Homo sapien
ttcaatgcctgtgccgtagtggttc

SEQ ID NO: 4665333 - DNA, 25 bp, Homo sapien
aatgcctgtgccgtagtggttcatc

SEQ ID NO: 4665334 - DNA, 25 bp, Homo sapien
ccgtagtggttcatctttatacctg

SEQ ID NO: 4665335 - DNA, 25 bp, Homo sapien
cctgtgccgtagtggttcatcttta

SEQ ID NO: 4665336 - DNA, 25 bp, Homo sapien
tgaggttctttatcataatgcccat

SEQ ID NO: 4665337 - DNA, 25 bp, Homo sapien
tccagccgcgctgcaatgtccaccg

SEQ ID NO: 4665338 - DNA, 25 bp, Homo sapien
gctcaatagaaacacacggaaacct

SEQ ID NO: 4665339 - DNA, 25 bp, Homo sapien
acggtgccgcggctcaagcctccag

SEQ ID NO: 4665340 - DNA, 25 bp, Homo sapien
aaaaaacgtaactctgcttcagcat

SEQ ID NO: 4665341 - DNA, 25 bp, Homo sapien
ctctatctatcccaaaactatcttc

SEQ ID NO: 4665342 - DNA, 25 bp, Homo sapien
tatcccaaaactatcttcttcttcc

SEQ ID NO: 4665343 - DNA, 25 bp, Homo sapien
tctatctatcccaaaactatcttct

SEQ ID NO: 4665344 - DNA, 25 bp, Homo sapien
atctatcccaaaactatcttcttct

SEQ ID NO: 4665345 - DNA, 25 bp, Homo sapien
agctagcgagtttgaccccacatgc

SEQ ID NO: 4665346 - DNA, 25 bp, Homo sapien
atcaggcaggcagctagcgagtttg

SEQ ID NO: 4665347 - DNA, 25 bp, Homo sapien
tctgtttgtcttgcaccttgtctaa

SEQ ID NO: 4665348 - DNA, 25 bp, Homo sapien
ttgtcttgcaccttgtctaaggacc

SEQ ID NO: 4665349 - DNA, 25 bp, Homo sapien
tatgaatgcaatcccgtggcctaca

SEQ ID NO: 4665350 - DNA, 25 bp, Homo sapien
cctgtactggacgtgaagcccgagg

SEQ ID NO: 4665351 - DNA, 25 bp, Homo sapien
gcctacatcattgagcaggcaggag

SEQ ID NO: 4665352 - DNA, 25 bp, Homo sapien
agcccgaggcaattcaccagcgagt

SEQ ID NO: 4665353 - DNA, 25 bp, Homo sapien
tgaccaaaatggcagtaaatacccc

SEQ ID NO: 4665354 - DNA, 25 bp, Homo sapien
tgagggcaccttacactgaccaaaa

SEQ ID NO: 4665355 - DNA, 25 bp, Homo sapien
taatgagggacagaactatctgccc

SEQ ID NO: 4665356 - DNA, 25 bp, Homo sapien
gaaaggctgcacatagctgggtcaa

SEQ ID NO: 4665357 - DNA, 25 bp, Homo sapien
tcctgaaaacattaatctgcgggtg

SEQ ID NO: 4665358 - DNA, 25 bp, Homo sapien
cagttgggttcaccataaatgagga

SEQ ID NO: 4665359 - DNA, 25 bp, Homo sapien
tgagaacttgggagatacacacagt

SEQ ID NO: 4665360 - DNA, 25 bp, Homo sapien
tcctgtgtgggctccatatggtccc

SEQ ID NO: 4665361 - DNA, 25 bp, Homo sapien
tcctagtgactgagacagacatgag

SEQ ID NO: 4665362 - DNA, 25 bp, Homo sapien
ggtatctgccacaagctgatcccat

SEQ ID NO: 4665363 - DNA, 25 bp, Homo sapien
cactgacttgtttctgacagggaca

SEQ ID NO: 4665364 - DNA, 25 bp, Homo sapien
gcaacacctctgctatgtggagtca

SEQ ID NO: 4665365 - DNA, 25 bp, Homo sapien
cagtagcttatggaggcagcattcc

SEQ ID NO: 4665366 - DNA, 25 bp, Homo sapien
agtggtctcgcaacatggccggtct

SEQ ID NO: 4665367 - DNA, 25 bp, Homo sapien
ttccctggtgggtcaaactgagcct

SEQ ID NO: 4665368 - DNA, 25 bp, Homo sapien
catccagcggaggtagcttgtggca

SEQ ID NO: 4665369 - DNA, 25 bp, Homo sapien
taatcctgaaagttgtagccagcac

SEQ ID NO: 4665370 - DNA, 25 bp, Homo sapien
caaaaaagacattagctggagaggg

SEQ ID NO: 4665371 - DNA, 25 bp, Homo sapien
gaggaggagcgtcccttaactctat

SEQ ID NO: 4665372 - DNA, 25 bp, Homo sapien
ggatgtcctcactcgccactgttac

SEQ ID NO: 4665373 - DNA, 25 bp, Homo sapien
tcactgacctataaaagctggcttc

SEQ ID NO: 4665374 - DNA, 25 bp, Homo sapien
tggaagctgtccacgtggctaactt

SEQ ID NO: 4665375 - DNA, 25 bp, Homo sapien
tatgtaaccagtcccagagaagatg

SEQ ID NO: 4665376 - DNA, 25 bp, Homo sapien
aataatgagtcttgtctcgcgccag

SEQ ID NO: 4665377 - DNA, 25 bp, Homo sapien
ggagaattgcctctacctggacctt

SEQ ID NO: 4665378 - DNA, 25 bp, Homo sapien
ggtgtatgagaagcactctgcccag

SEQ ID NO: 4665379 - DNA, 25 bp, Homo sapien
gcaccttacattcctagagagcaga

SEQ ID NO: 4665380 - DNA, 25 bp, Homo sapien
cgtgctcgagttcctgaaggtgtat

SEQ ID NO: 4665381 - DNA, 25 bp, Homo sapien
aacattcaaagtaccattcagcttg

SEQ ID NO: 4665382 - DNA, 25 bp, Homo sapien
gaatgcccccctagagatcttcctg

SEQ ID NO: 4665383 - DNA, 25 bp, Homo sapien
ccattcttacgaaaaacattcaaag

SEQ ID NO: 4665384 - DNA, 25 bp, Homo sapien
taaattaaccatctagcctctcatc

SEQ ID NO: 4665385 - DNA, 25 bp, Homo sapien
gtatttagtagagataggacttcac

SEQ ID NO: 4665386 - DNA, 25 bp, Homo sapien
aggctggtctcaattttctgacctc

SEQ ID NO: 4665387 - DNA, 25 bp, Homo sapien
gagataggacttcaccatattggtc

SEQ ID NO: 4665388 - DNA, 25 bp, Homo sapien
tctcaattttctgacctcaggggat

SEQ ID NO: 4665389 - DNA, 25 bp, Homo sapien
ctttgtgtggtagccgaggactctg

SEQ ID NO: 4665390 - DNA, 25 bp, Homo sapien
tctgtgtcagcgaccgttttccggg

SEQ ID NO: 4665391 - DNA, 25 bp, Homo sapien
tgaaaacgtacactcgaaaagggca

SEQ ID NO: 4665392 - DNA, 25 bp, Homo sapien
gattaaggattcagacgtgggccct

SEQ ID NO: 4665393 - DNA, 25 bp, Homo sapien
tcctcctggtgtttctcaatgcgtc

SEQ ID NO: 4665394 - DNA, 25 bp, Homo sapien
caatgcgtcattccaggtgaaggtg

SEQ ID NO: 4665395 - DNA, 25 bp, Homo sapien
cctggtgtttctcaatgcgtcattc

SEQ ID NO: 4665396 - DNA, 25 bp, Homo sapien
gtttctcaatgcgtcattccaggtg

SEQ ID NO: 4665397 - DNA, 25 bp, Homo sapien
gatagtgtggttttgtgatccacac

SEQ ID NO: 4665398 - DNA, 25 bp, Homo sapien
ctggttacaccaggatccacgggct

SEQ ID NO: 4665399 - DNA, 25 bp, Homo sapien
ggttacaccaggatccacgggctgg

SEQ ID NO: 4665400 - DNA, 25 bp, Homo sapien
tactgagtggatagtgtggttttgt

SEQ ID NO: 4665401 - DNA, 25 bp, Homo sapien
tacttagggctccttcaagatggta

SEQ ID NO: 4665402 - DNA, 25 bp, Homo sapien
caatcatttgtggttctttcagtac

SEQ ID NO: 4665403 - DNA, 25 bp, Homo sapien
tttcagtacttagggctccttcaag

SEQ ID NO: 4665404 - DNA, 25 bp, Homo sapien
ttgtggttctttcagtacttagggc

SEQ ID NO: 4665405 - DNA, 25 bp, Homo sapien
gacattcagtggtgtacttccctcg

SEQ ID NO: 4665406 - DNA, 25 bp, Homo sapien
cctgcagtgtaggtgttattgtaac

SEQ ID NO: 4665407 - DNA, 25 bp, Homo sapien
caaagagaagtgaatgcccatattc

SEQ ID NO: 4665408 - DNA, 25 bp, Homo sapien
ggcttcacagagtctgtttacaaag

SEQ ID NO: 4665409 - DNA, 25 bp, Homo sapien
tgatgaccagctctacttctaacag

SEQ ID NO: 4665410 - DNA, 25 bp, Homo sapien
actgatgaccagctctacttctaac

SEQ ID NO: 4665411 - DNA, 25 bp, Homo sapien
gatactgatgaccagctctacttct

SEQ ID NO: 4665412 - DNA, 25 bp, Homo sapien
ttagatactgatgaccagctctact

SEQ ID NO: 4665413 - DNA, 25 bp, Homo sapien
atttctgggtaactggtggcatctc

SEQ ID NO: 4665414 - DNA, 25 bp, Homo sapien
gcaaattcccatgctcatcctgcag

SEQ ID NO: 4665415 - DNA, 25 bp, Homo sapien
tacggcgatatgagaatgctggctg

SEQ ID NO: 4665416 - DNA, 25 bp, Homo sapien
gaggacagcgataaatctcggcagc

SEQ ID NO: 4665417 - DNA, 25 bp, Homo sapien
tgtctcagccgcgtcccacgggtca

SEQ ID NO: 4665418 - DNA, 25 bp, Homo sapien
tctcagccgcgtcccacgggtcacc

SEQ ID NO: 4665419 - DNA, 25 bp, Homo sapien
tcagccgcgtcccacgggtcaccac

SEQ ID NO: 4665420 - DNA, 25 bp, Homo sapien
ctgtctcagccgcgtcccacgggtc

SEQ ID NO: 4665421 - DNA, 25 bp, Homo sapien
tccccgtcgccttcagaacggaatg

SEQ ID NO: 4665422 - DNA, 25 bp, Homo sapien
agaacggaatgatgctgtccccgcc

SEQ ID NO: 4665423 - DNA, 25 bp, Homo sapien
tgcgggtcctcgctggtcgagcaaa

SEQ ID NO: 4665424 - DNA, 25 bp, Homo sapien
gggtcctcgctggtcgagcaaaagt

SEQ ID NO: 4665425 - DNA, 25 bp, Homo sapien
ttcctctgactctatggcagtggtt

SEQ ID NO: 4665426 - DNA, 25 bp, Homo sapien
ccggttcaagcaattcgcctgcctc

SEQ ID NO: 4665427 - DNA, 25 bp, Homo sapien
acgaagtttcgctcttgtcccccag

SEQ ID NO: 4665428 - DNA, 25 bp, Homo sapien
cggttcaagcaattcgcctgcctca

SEQ ID NO: 4665429 - DNA, 25 bp, Homo sapien
tctcagatggggtttcctatctgcc

SEQ ID NO: 4665430 - DNA, 25 bp, Homo sapien
ttcctatctgccttaatcttccaga

SEQ ID NO: 4665431 - DNA, 25 bp, Homo sapien
gatgtcacaaattatggttcctttc

SEQ ID NO: 4665432 - DNA, 25 bp, Homo sapien
aatcataaatagctgcttatcaaag

SEQ ID NO: 4665433 - DNA, 25 bp, Homo sapien
gcttcacaagtatgtggctggtgtt

SEQ ID NO: 4665434 - DNA, 25 bp, Homo sapien
ccaaatccagtacatagtgcttcac

SEQ ID NO: 4665435 - DNA, 25 bp, Homo sapien
tatggtcccctcaatgacttgactt

SEQ ID NO: 4665436 - DNA, 25 bp, Homo sapien
tgttggccatgagaggcaggtcatc

SEQ ID NO: 4665437 - DNA, 25 bp, Homo sapien
cagtactttgagctagaaatcccag

SEQ ID NO: 4665438 - DNA, 25 bp, Homo sapien
tttgtcacgggaatatggcagggtt

SEQ ID NO: 4665439 - DNA, 25 bp, Homo sapien
gaaacaaccgtgagctcaggagacc

SEQ ID NO: 4665440 - DNA, 25 bp, Homo sapien
gagaaggtccttgcatttgtcacgg

SEQ ID NO: 4665441 - DNA, 25 bp, Homo sapien
cctggctgcagcgagcgtaatagtc

SEQ ID NO: 4665442 - DNA, 25 bp, Homo sapien
tctgaggtccatgtaaccgatcgcc

SEQ ID NO: 4665443 - DNA, 25 bp, Homo sapien
tcagtgtcaaagaggagttccccac

SEQ ID NO: 4665444 - DNA, 25 bp, Homo sapien
tgcaagctccaagtgtcagtgtcaa

SEQ ID NO: 4665445 - DNA, 25 bp, Homo sapien
gaagacacaggagcatctctgcaga

SEQ ID NO: 4665446 - DNA, 25 bp, Homo sapien
gcagagccggtctcatgtttgaaag

SEQ ID NO: 4665447 - DNA, 25 bp, Homo sapien
gaggctacttgggtaatgtcacaga

SEQ ID NO: 4665448 - DNA, 25 bp, Homo sapien
tccccgcagcgtacaagattaacag

SEQ ID NO: 4665449 - DNA, 25 bp, Homo sapien
ctaaatgtatcctctagaaaacgac

SEQ ID NO: 4665450 - DNA, 25 bp, Homo sapien
tatcctctagaaaacgacacctcca

SEQ ID NO: 4665451 - DNA, 25 bp, Homo sapien
cttctcctcgaacgaaaacccagcg

SEQ ID NO: 4665452 - DNA, 25 bp, Homo sapien
gaaaacgacacctccatcaattcct

SEQ ID NO: 4665453 - DNA, 25 bp, Homo sapien
taagcaattgccgaagaccactgct

SEQ ID NO: 4665454 - DNA, 25 bp, Homo sapien
aaatcactacgcttttgtactgagg

SEQ ID NO: 4665455 - DNA, 25 bp, Homo sapien
ccagctaacagaggtcaacgttcct

SEQ ID NO: 4665456 - DNA, 25 bp, Homo sapien
tacaacgctataaaagaaggctccc

SEQ ID NO: 4665457 - DNA, 25 bp, Homo sapien
tctctttctcacttgagatacagat

SEQ ID NO: 4665458 - DNA, 25 bp, Homo sapien
gaagccactaatggaacttaaaaga

SEQ ID NO: 4665459 - DNA, 25 bp, Homo sapien
taagtgacgtgaagatcaaattcaa

SEQ ID NO: 4665460 - DNA, 25 bp, Homo sapien
aatatacttgaaagctttgcataca

SEQ ID NO: 4665461 - DNA, 25 bp, Homo sapien
caagtgataagatggatggcaaagc

SEQ ID NO: 4665462 - DNA, 25 bp, Homo sapien
tcaagtgataagatggatggcaaag

SEQ ID NO: 4665463 - DNA, 25 bp, Homo sapien
aagtgataagatggatggcaaagct

SEQ ID NO: 4665464 - DNA, 25 bp, Homo sapien
agtgataagatggatggcaaagcta

SEQ ID NO: 4665465 - DNA, 25 bp, Homo sapien
ttgtttatgggagatcccacagtat

SEQ ID NO: 4665466 - DNA, 25 bp, Homo sapien
gagatcccacagtataaacacatgg

SEQ ID NO: 4665467 - DNA, 25 bp, Homo sapien
ctggcatggaaaaagggccctgttg

SEQ ID NO: 4665468 - DNA, 25 bp, Homo sapien
tggcatggaaaaagggccctgttgt

SEQ ID NO: 4665469 - DNA, 25 bp, Homo sapien
cttcccaaagctgcgttggtttggc

SEQ ID NO: 4665470 - DNA, 25 bp, Homo sapien
caaagctgcgttggtttggcagaat

SEQ ID NO: 4665471 - DNA, 25 bp, Homo sapien
aaagatgcagctgctcgaactgtag

SEQ ID NO: 4665472 - DNA, 25 bp, Homo sapien
cagctgctcgaactgtagcctgcca

SEQ ID NO: 4665473 - DNA, 25 bp, Homo sapien
acatgtgtgcaatacataaataagc

SEQ ID NO: 4665474 - DNA, 25 bp, Homo sapien
taagcaaagaacacatgtacagtac

SEQ ID NO: 4665475 - DNA, 25 bp, Homo sapien
tgtttattgggttcctgggtccaca

SEQ ID NO: 4665476 - DNA, 25 bp, Homo sapien
tgggtccacatgtgtgcaatacata

SEQ ID NO: 4665477 - DNA, 25 bp, Homo sapien
gtctcccatgactgctccataaaaa

SEQ ID NO: 4665478 - DNA, 25 bp, Homo sapien
ttttctactggaaacataatgagag

SEQ ID NO: 4665479 - DNA, 25 bp, Homo sapien
ccatgactgctccataaaaactttc

SEQ ID NO: 4665480 - DNA, 25 bp, Homo sapien
caatgtctcccatgactgctccata

SEQ ID NO: 4665481 - DNA, 25 bp, Homo sapien
ggctggcattggcatagttacatag

SEQ ID NO: 4665482 - DNA, 25 bp, Homo sapien
tacatagtaataccagcttgagcac

SEQ ID NO: 4665483 - DNA, 25 bp, Homo sapien
cagcatcccactgcaattgtgaagg

SEQ ID NO: 4665484 - DNA, 25 bp, Homo sapien
caaatcatttgatgaccatgtctcc

SEQ ID NO: 4665485 - DNA, 25 bp, Homo sapien
gttggcagggacgatgagaacatcc

SEQ ID NO: 4665486 - DNA, 25 bp, Homo sapien
gggatcagccgcagaagggtctctt

SEQ ID NO: 4665487 - DNA, 25 bp, Homo sapien
aaagacccgatgaggaatgatctcc

SEQ ID NO: 4665488 - DNA, 25 bp, Homo sapien
agagaacgggtgtgctcccagaaca

SEQ ID NO: 4665489 - DNA, 25 bp, Homo sapien
tagcccctccattctaatcaaatga

SEQ ID NO: 4665490 - DNA, 25 bp, Homo sapien
cagcaatgagatgtccaagcatgag

SEQ ID NO: 4665491 - DNA, 25 bp, Homo sapien
aatcaaatgactgctctgacagagc

SEQ ID NO: 4665492 - DNA, 25 bp, Homo sapien
caagtgccacaatggaacaacatac

SEQ ID NO: 4665493 - DNA, 25 bp, Homo sapien
tgagaatggacaagacagctggtca

SEQ ID NO: 4665494 - DNA, 25 bp, Homo sapien
gaccaagtcatgttactgtgcccag

SEQ ID NO: 4665495 - DNA, 25 bp, Homo sapien
cagagcctgatgctataacctttgg

SEQ ID NO: 4665496 - DNA, 25 bp, Homo sapien
aaaaatagtagcacgtgactcctcc

SEQ ID NO: 4665497 - DNA, 25 bp, Homo sapien
tcattagccagtcgggagatggtat

SEQ ID NO: 4665498 - DNA, 25 bp, Homo sapien
agcagctgctaagccaatcaggttc

SEQ ID NO: 4665499 - DNA, 25 bp, Homo sapien
cagccatggagaattctgctcaaga

SEQ ID NO: 4665500 - DNA, 25 bp, Homo sapien
ccaggtgttctgatagcttcagcca

SEQ ID NO: 4665501 - DNA, 25 bp, Homo sapien
ctgagaaagaaacgacaacaataac

SEQ ID NO: 4665502 - DNA, 25 bp, Homo sapien
tatgcagcacatcggagaaagtaga

SEQ ID NO: 4665503 - DNA, 25 bp, Homo sapien
gagaagagttataccacacaacagg

SEQ ID NO: 4665504 - DNA, 25 bp, Homo sapien
tggcagccatggtgaattcaaaggc

SEQ ID NO: 4665505 - DNA, 25 bp, Homo sapien
caaaataatcctggccaagggcttt

SEQ ID NO: 4665506 - DNA, 25 bp, Homo sapien
ggtattgtcaagacgaacaaaataa

SEQ ID NO: 4665507 - DNA, 25 bp, Homo sapien
caaagtggtattgtcaagacgaaca

SEQ ID NO: 4665508 - DNA, 25 bp, Homo sapien
attgtcaagacgaacaaaataatcc

SEQ ID NO: 4665509 - DNA, 25 bp, Homo sapien
tttgtcgagtgagttcttggctttg

SEQ ID NO: 4665510 - DNA, 25 bp, Homo sapien
ctgtccgttgatacatgtttgtcga

SEQ ID NO: 4665511 - DNA, 25 bp, Homo sapien
tgcgctttcaataggatgttctaag

SEQ ID NO: 4665512 - DNA, 25 bp, Homo sapien
ccctttccaactgcgctttcaatag

SEQ ID NO: 4665513 - DNA, 25 bp, Homo sapien
caggacacagcagtcaacggcagag

SEQ ID NO: 4665514 - DNA, 25 bp, Homo sapien
ggggatagagcactgactgcaaagc

SEQ ID NO: 4665515 - DNA, 25 bp, Homo sapien
aggacacagcagtcaacggcagagc

SEQ ID NO: 4665516 - DNA, 25 bp, Homo sapien
aacggcagagctggggatagagcac

SEQ ID NO: 4665517 - DNA, 25 bp, Homo sapien
gcaggagttgccctggctccccgca

SEQ ID NO: 4665518 - DNA, 25 bp, Homo sapien
ggcgggcaggagttgccctggctcc

SEQ ID NO: 4665519 - DNA, 25 bp, Homo sapien
cacacacttggtcttcttagccttc

SEQ ID NO: 4665520 - DNA, 25 bp, Homo sapien
tgctggccacacacttggtcttctt

SEQ ID NO: 4665521 - DNA, 25 bp, Homo sapien
caggagtcatcctcagtcgatttga

SEQ ID NO: 4665522 - DNA, 25 bp, Homo sapien
catctcaaagggtcctcaggagtca

SEQ ID NO: 4665523 - DNA, 25 bp, Homo sapien
caacgatggtaatcatctcaaaggg

SEQ ID NO: 4665524 - DNA, 25 bp, Homo sapien
tcttagagtatccaaagaggcaggg

SEQ ID NO: 4665525 - DNA, 25 bp, Homo sapien
gatcctgtttcgagctgaatttgac

SEQ ID NO: 4665526 - DNA, 25 bp, Homo sapien
tctgcaaatgctctcaataacacac

SEQ ID NO: 4665527 - DNA, 25 bp, Homo sapien
gaatgcatccatcatttcaaggagc

SEQ ID NO: 4665528 - DNA, 25 bp, Homo sapien
gattaactgagctatgcagcaacca

SEQ ID NO: 4665529 - DNA, 25 bp, Homo sapien
tcccaacatgtagggccagagggac

SEQ ID NO: 4665530 - DNA, 25 bp, Homo sapien
tgtgtcccaacatgtagggccagag

SEQ ID NO: 4665531 - DNA, 25 bp, Homo sapien
tgtcccaacatgtagggccagaggg

SEQ ID NO: 4665532 - DNA, 25 bp, Homo sapien
cccaacatgtagggccagagggaca

SEQ ID NO: 4665533 - DNA, 25 bp, Homo sapien
tgttctttgctcctaaacgagaagc

SEQ ID NO: 4665534 - DNA, 25 bp, Homo sapien
gctcctaaacgagaagccacagaaa

SEQ ID NO: 4665535 - DNA, 25 bp, Homo sapien
tttgctcctaaacgagaagccacag

SEQ ID NO: 4665536 - DNA, 25 bp, Homo sapien
tctttgctcctaaacgagaagccac

SEQ ID NO: 4665537 - DNA, 25 bp, Homo sapien
tctgctggggcctggtttctggctt

SEQ ID NO: 4665538 - DNA, 25 bp, Homo sapien
tttttctgctggggcctggtttctg

SEQ ID NO: 4665539 - DNA, 25 bp, Homo sapien
cctggtttctggcttgctcaatgtc

SEQ ID NO: 4665540 - DNA, 25 bp, Homo sapien
tgcttttttctgctggggcctggtt

SEQ ID NO: 4665541 - DNA, 25 bp, Homo sapien
tctgggttccactatacagtagggt

SEQ ID NO: 4665542 - DNA, 25 bp, Homo sapien
gtaacttgtaccctggcctcacagg

SEQ ID NO: 4665543 - DNA, 25 bp, Homo sapien
cagcaaccctaggaacagaccatct

SEQ ID NO: 4665544 - DNA, 25 bp, Homo sapien
tggatttgtctggtaccccagtgtc

SEQ ID NO: 4665545 - DNA, 25 bp, Homo sapien
acccggcccagactcaatacattta

SEQ ID NO: 4665546 - DNA, 25 bp, Homo sapien
cacccggcccagactcaatacattt

SEQ ID NO: 4665547 - DNA, 25 bp, Homo sapien
agccaaaagttgtcatgatatccga

SEQ ID NO: 4665548 - DNA, 25 bp, Homo sapien
tcagctgaccaaatactagccaaga

SEQ ID NO: 4665549 - DNA, 25 bp, Homo sapien
cattagttaggcttgtgtaaacaca

SEQ ID NO: 4665550 - DNA, 25 bp, Homo sapien
tcctctgaaactgcgaaagcacctg

SEQ ID NO: 4665551 - DNA, 25 bp, Homo sapien
acactcagcaggtgtggacgtgtgc

SEQ ID NO: 4665552 - DNA, 25 bp, Homo sapien
agacactcagcaggtgtggacgtgt

SEQ ID NO: 4665553 - DNA, 25 bp, Homo sapien
actcagcaggtgtggacgtgtgcat

SEQ ID NO: 4665554 - DNA, 25 bp, Homo sapien
cagacactcagcaggtgtggacgtg

SEQ ID NO: 4665555 - DNA, 25 bp, Homo sapien
tgaagaaaaaaacctgtgctaacac

SEQ ID NO: 4665556 - DNA, 25 bp, Homo sapien
ccgccacactgaagaaaaaaacctg

SEQ ID NO: 4665557 - DNA, 25 bp, Homo sapien
cactgaagaaaaaaacctgtgctaa

SEQ ID NO: 4665558 - DNA, 25 bp, Homo sapien
gaaaaaaacctgtgctaacactata

SEQ ID NO: 4665559 - DNA, 25 bp, Homo sapien
cctggcgtctccttgatctcatggg

SEQ ID NO: 4665560 - DNA, 25 bp, Homo sapien
ctagcttttatacctgagtccttac

SEQ ID NO: 4665561 - DNA, 25 bp, Homo sapien
gggtagtaaatagctatttggccca

SEQ ID NO: 4665562 - DNA, 25 bp, Homo sapien
tatttttactgagactacctagctt

SEQ ID NO: 4665563 - DNA, 25 bp, Homo sapien
cagatgctagaggtgtgtctaccag

SEQ ID NO: 4665564 - DNA, 25 bp, Homo sapien
tacaataatatgtccagagcaggaa

SEQ ID NO: 4665565 - DNA, 25 bp, Homo sapien
caagcacctggtaagtggccaagct

SEQ ID NO: 4665566 - DNA, 25 bp, Homo sapien
tagtactgtctgttgggccatgagc

SEQ ID NO: 4665567 - DNA, 25 bp, Homo sapien
ttccaaagctgttgtcaatatggct

SEQ ID NO: 4665568 - DNA, 25 bp, Homo sapien
attaatcctaccaaagcaaatcgga

SEQ ID NO: 4665569 - DNA, 25 bp, Homo sapien
gcaaatcggaaatttccaaagctgt

SEQ ID NO: 4665570 - DNA, 25 bp, Homo sapien
gaaaggaatattaagtcgttggaga

SEQ ID NO: 4665571 - DNA, 25 bp, Homo sapien
gttctgcatcatatactggggtttg

SEQ ID NO: 4665572 - DNA, 25 bp, Homo sapien
catgaaatgataagcctgtacttgc

SEQ ID NO: 4665573 - DNA, 25 bp, Homo sapien
taagcctgtacttgcaagttcacct

SEQ ID NO: 4665574 - DNA, 25 bp, Homo sapien
tcagcctcactttgggtccttgttc

SEQ ID NO: 4665575 - DNA, 25 bp, Homo sapien
gtgaaaaccaacgtaaatgatgtct

SEQ ID NO: 4665576 - DNA, 25 bp, Homo sapien
acgtaaatgatgtcttaacatagct

SEQ ID NO: 4665577 - DNA, 25 bp, Homo sapien
gacttgcttagtcccaggagttgga

SEQ ID NO: 4665578 - DNA, 25 bp, Homo sapien
tacgccagtgtacgcagtgagatcc

SEQ ID NO: 4665579 - DNA, 25 bp, Homo sapien
gctataatcacaccagggtacgcca

SEQ ID NO: 4665580 - DNA, 25 bp, Homo sapien
ggccagacgtggtagctcagctaca

SEQ ID NO: 4665581 - DNA, 25 bp, Homo sapien
atgcagagttctggttcatcagccc

SEQ ID NO: 4665582 - DNA, 25 bp, Homo sapien
ttggccagagctccccgtacgtcag

SEQ ID NO: 4665583 - DNA, 25 bp, Homo sapien
gccatccatatgcagagttctggtt

SEQ ID NO: 4665584 - DNA, 25 bp, Homo sapien
gaagcctcctcgagagccacaattt

SEQ ID NO: 4665585 - DNA, 25 bp, Homo sapien
gacaatggcctagtccaatcagggc

SEQ ID NO: 4665586 - DNA, 25 bp, Homo sapien
gaacacccttatgaaggccagccag

SEQ ID NO: 4665587 - DNA, 25 bp, Homo sapien
tagggcagcgatcctttgaagccaa

SEQ ID NO: 4665588 - DNA, 25 bp, Homo sapien
gaaagaggaacagcccacatgtgca

SEQ ID NO: 4665589 - DNA, 25 bp, Homo sapien
catgcactcatgagccccgggtttg

SEQ ID NO: 4665590 - DNA, 25 bp, Homo sapien
actggactagaaacaatgcccctgg

SEQ ID NO: 4665591 - DNA, 25 bp, Homo sapien
ttcctagtgggttgggaccaagcca

SEQ ID NO: 4665592 - DNA, 25 bp, Homo sapien
tccaaagatgtcaggtgcttcccaa

SEQ ID NO: 4665593 - DNA, 25 bp, Homo sapien
tttttcttgctcaattaaactctgt

SEQ ID NO: 4665594 - DNA, 25 bp, Homo sapien
tcttgctcaattaaactctgttaaa

SEQ ID NO: 4665595 - DNA, 25 bp, Homo sapien
tttcttgctcaattaaactctgtta

SEQ ID NO: 4665596 - DNA, 25 bp, Homo sapien
ttttttcttgctcaattaaactctg

SEQ ID NO: 4665597 - DNA, 25 bp, Homo sapien
ggactctggagcaagaaaaaaccca

SEQ ID NO: 4665598 - DNA, 25 bp, Homo sapien
ggtggccttagctgaacattttgag

SEQ ID NO: 4665599 - DNA, 25 bp, Homo sapien
ggccacactgtttcaccactaaagg

SEQ ID NO: 4665600 - DNA, 25 bp, Homo sapien
tctgttagtctaccaataagcctcc

SEQ ID NO: 4665601 - DNA, 25 bp, Homo sapien
caaaggcttcggattggggcttctt

SEQ ID NO: 4665602 - DNA, 25 bp, Homo sapien
catctgtctcagaatcaggagggca

SEQ ID NO: 4665603 - DNA, 25 bp, Homo sapien
tcttctcgccatctgtctcagaatc

SEQ ID NO: 4665604 - DNA, 25 bp, Homo sapien
atcaggagggcaaaggcttcggatt

SEQ ID NO: 4665605 - DNA, 25 bp, Homo sapien
cgtcctattttctctagaagtattt

SEQ ID NO: 4665606 - DNA, 25 bp, Homo sapien
agaaatatcacttcgtcctattttc

SEQ ID NO: 4665607 - DNA, 25 bp, Homo sapien
tatcacttcgtcctattttctctag

SEQ ID NO: 4665608 - DNA, 25 bp, Homo sapien
cacttcgtcctattttctctagaag

SEQ ID NO: 4665609 - DNA, 25 bp, Homo sapien
tcccagaatcgcagatctatccaga

SEQ ID NO: 4665610 - DNA, 25 bp, Homo sapien
tcgcagatctatccagaactcaaag

SEQ ID NO: 4665611 - DNA, 25 bp, Homo sapien
ttaaagtcagttcccagaatcgcag

SEQ ID NO: 4665612 - DNA, 25 bp, Homo sapien
tcactgcaaagcttcgtgattttgt

SEQ ID NO: 4665613 - DNA, 25 bp, Homo sapien
caactaggcaattggtatttgagac

SEQ ID NO: 4665614 - DNA, 25 bp, Homo sapien
atgacacacagatacagagccccag

SEQ ID NO: 4665615 - DNA, 25 bp, Homo sapien
tcttgggtaaattctcaactaggca

SEQ ID NO: 4665616 - DNA, 25 bp, Homo sapien
taatcactagtactaatgtcttggg

SEQ ID NO: 4665617 - DNA, 25 bp, Homo sapien
gatgaggatgacacctgctatcaca

SEQ ID NO: 4665618 - DNA, 25 bp, Homo sapien
caaccaattcgattactgtaaagag

SEQ ID NO: 4665619 - DNA, 25 bp, Homo sapien
gcctgctgcctgttatgatctttga

SEQ ID NO: 4665620 - DNA, 25 bp, Homo sapien
cactggcaggtgatatttttacaag

SEQ ID NO: 4665621 - DNA, 25 bp, Homo sapien
gtcttagcctccctgggattgcagg

SEQ ID NO: 4665622 - DNA, 25 bp, Homo sapien
cacccagctaattagctcactgtaa

SEQ ID NO: 4665623 - DNA, 25 bp, Homo sapien
cttagcctccctgggattgcaggta

SEQ ID NO: 4665624 - DNA, 25 bp, Homo sapien
ctgtcttagcctccctgggattgca

SEQ ID NO: 4665625 - DNA, 25 bp, Homo sapien
catgtatgcagtgggtaggtattcc

SEQ ID NO: 4665626 - DNA, 25 bp, Homo sapien
caaataatacccagtgccccatgtg

SEQ ID NO: 4665627 - DNA, 25 bp, Homo sapien
aatttagttgggctcttgggcagct

SEQ ID NO: 4665628 - DNA, 25 bp, Homo sapien
tcacagatgccgagattcagagctc

SEQ ID NO: 4665629 - DNA, 25 bp, Homo sapien
tttgagatggacgtcacacacgtca

SEQ ID NO: 4665630 - DNA, 25 bp, Homo sapien
gttgactgcgatgccttctctctgg

SEQ ID NO: 4665631 - DNA, 25 bp, Homo sapien
gctgacaaatggctacccttaagtt

SEQ ID NO: 4665632 - DNA, 25 bp, Homo sapien
gatctagggcagacatcagcgtatg

SEQ ID NO: 4665633 - DNA, 25 bp, Homo sapien
caatcagggcgatgatgtttgttcc

SEQ ID NO: 4665634 - DNA, 25 bp, Homo sapien
atcagggcgatgatgtttgttccca

SEQ ID NO: 4665635 - DNA, 25 bp, Homo sapien
cccaatcagggcgatgatgtttgtt

SEQ ID NO: 4665636 - DNA, 25 bp, Homo sapien
tccccaatcagggcgatgatgtttg

SEQ ID NO: 4665637 - DNA, 25 bp, Homo sapien
gctgctctgccttagcctgggggtg

SEQ ID NO: 4665638 - DNA, 25 bp, Homo sapien
gttctgccggttatggtcatcaaaa

SEQ ID NO: 4665639 - DNA, 25 bp, Homo sapien
ggcaggttctgccggttatggtcat

SEQ ID NO: 4665640 - DNA, 25 bp, Homo sapien
caggttctgccggttatggtcatca

SEQ ID NO: 4665641 - DNA, 25 bp, Homo sapien
aaccgtagactcgtagtagcctggg

SEQ ID NO: 4665642 - DNA, 25 bp, Homo sapien
taagggtcttataatcatgagcagc

SEQ ID NO: 4665643 - DNA, 25 bp, Homo sapien
agtccagcaggatagatagttctaa

SEQ ID NO: 4665644 - DNA, 25 bp, Homo sapien
taaactggacaagtgaaaccgtaga

SEQ ID NO: 4665645 - DNA, 25 bp, Homo sapien
tctcaaaaaacacaagccctcttgc

SEQ ID NO: 4665646 - DNA, 25 bp, Homo sapien
actcccgtgttgtcattcttcccca

SEQ ID NO: 4665647 - DNA, 25 bp, Homo sapien
gcagccacactcccgtgttgtcatt

SEQ ID NO: 4665648 - DNA, 25 bp, Homo sapien
gggcaggaaagtgatatttcaaatc

SEQ ID NO: 4665649 - DNA, 25 bp, Homo sapien
ccctgacaagcctcactggaaaact

SEQ ID NO: 4665650 - DNA, 25 bp, Homo sapien
agccggcctgccggcgatcagtctt

SEQ ID NO: 4665651 - DNA, 25 bp, Homo sapien
ggcgatcagtcttccccctgacaag

SEQ ID NO: 4665652 - DNA, 25 bp, Homo sapien
ttggaactgtgctcatggtccgagc

SEQ ID NO: 4665653 - DNA, 25 bp, Homo sapien
aaatgcacagagtcttgttagagcc

SEQ ID NO: 4665654 - DNA, 25 bp, Homo sapien
aaaatgcacagagtcttgttagagc

SEQ ID NO: 4665655 - DNA, 25 bp, Homo sapien
cagagtcttgttagagcctgtcctc

SEQ ID NO: 4665656 - DNA, 25 bp, Homo sapien
aatgcacagagtcttgttagagcct

SEQ ID NO: 4665657 - DNA, 25 bp, Homo sapien
cacatcctccaagtgagtggcgaag

SEQ ID NO: 4665658 - DNA, 25 bp, Homo sapien
gcatgggcaatttcatggcagaggc

SEQ ID NO: 4665659 - DNA, 25 bp, Homo sapien
gatggctaggccaaaccaggcatgg

SEQ ID NO: 4665660 - DNA, 25 bp, Homo sapien
gatggttccctcctgtcaagatgct

SEQ ID NO: 4665661 - DNA, 25 bp, Homo sapien
ctggtctggagagagtgggcttccc

SEQ ID NO: 4665662 - DNA, 25 bp, Homo sapien
cttgggaccatttccactttgatct

SEQ ID NO: 4665663 - DNA, 25 bp, Homo sapien
tgggcttcccttgggaccatttcca

SEQ ID NO: 4665664 - DNA, 25 bp, Homo sapien
tctggagagagtgggcttcccttgg

SEQ ID NO: 4665665 - DNA, 25 bp, Homo sapien
gaggcgacgccagcgcagacaagcc

SEQ ID NO: 4665666 - DNA, 25 bp, Homo sapien
ctggaggcgacgccagcgcagacaa

SEQ ID NO: 4665667 - DNA, 25 bp, Homo sapien
cgacgccagcgcagacaagccctca

SEQ ID NO: 4665668 - DNA, 25 bp, Homo sapien
gctcccgggcctcatagggggccag

SEQ ID NO: 4665669 - DNA, 25 bp, Homo sapien
atctcctcgggggagcattgcatct

SEQ ID NO: 4665670 - DNA, 25 bp, Homo sapien
ttaacacctgcatctcctcggggga

SEQ ID NO: 4665671 - DNA, 25 bp, Homo sapien
cttaacacctgcatctcctcggggg

SEQ ID NO: 4665672 - DNA, 25 bp, Homo sapien
cctcgggggagcattgcatctcgtc

SEQ ID NO: 4665673 - DNA, 25 bp, Homo sapien
tgaaagcacttaggcagaagctgcc

SEQ ID NO: 4665674 - DNA, 25 bp, Homo sapien
ggagactgttaacctgccagcaaga

SEQ ID NO: 4665675 - DNA, 25 bp, Homo sapien
gcctttcggaagctgccatgcatct

SEQ ID NO: 4665676 - DNA, 25 bp, Homo sapien
gatctcaagagaagcttccactgca

SEQ ID NO: 4665677 - DNA, 25 bp, Homo sapien
tcaggtgagggactgccacaaaagc

SEQ ID NO: 4665678 - DNA, 25 bp, Homo sapien
gcaaagggcagacctcgaaggagat

SEQ ID NO: 4665679 - DNA, 25 bp, Homo sapien
gcatgatgctgtcacctgctcggag

SEQ ID NO: 4665680 - DNA, 25 bp, Homo sapien
cataatctggtgactgtcagggcac

SEQ ID NO: 4665681 - DNA, 25 bp, Homo sapien
cattaggatagggtctgagagtttc

SEQ ID NO: 4665682 - DNA, 25 bp, Homo sapien
gagggacagcagcttacattaggat

SEQ ID NO: 4665683 - DNA, 25 bp, Homo sapien
gcagcaaggcaaggatattctaaat

SEQ ID NO: 4665684 - DNA, 25 bp, Homo sapien
ctgggaaggcaatgcaatctgtgct

SEQ ID NO: 4665685 - DNA, 25 bp, Homo sapien
taggtatagcatcctcccatcaaga

SEQ ID NO: 4665686 - DNA, 25 bp, Homo sapien
tataatgaatcagtgctacacggag

SEQ ID NO: 4665687 - DNA, 25 bp, Homo sapien
cactcttcacaggtcgcttgttagt

SEQ ID NO: 4665688 - DNA, 25 bp, Homo sapien
ccatttctggctagctgagagctct

SEQ ID NO: 4665689 - DNA, 25 bp, Homo sapien
catccaacgctggaaatggccccgt

SEQ ID NO: 4665690 - DNA, 25 bp, Homo sapien
gatgattgttgatcaaccccaccag

SEQ ID NO: 4665691 - DNA, 25 bp, Homo sapien
catgtctcctccagatgattgttga

SEQ ID NO: 4665692 - DNA, 25 bp, Homo sapien
tgggtctcatccaaacctcggaggt

SEQ ID NO: 4665693 - DNA, 25 bp, Homo sapien
gcagcactcttcctctcacactccc

SEQ ID NO: 4665694 - DNA, 25 bp, Homo sapien
cagcagcactcttcctctcacactc

SEQ ID NO: 4665695 - DNA, 25 bp, Homo sapien
tcctctcacactcccagcagtcagc

SEQ ID NO: 4665696 - DNA, 25 bp, Homo sapien
tccagcagcactcttcctctcacac

SEQ ID NO: 4665697 - DNA, 25 bp, Homo sapien
ttccagttcccaatgacgccttcag

SEQ ID NO: 4665698 - DNA, 25 bp, Homo sapien
ggttgcccagccctaagacaggcag

SEQ ID NO: 4665699 - DNA, 25 bp, Homo sapien
tctgaactcaaactaggttgcccag

SEQ ID NO: 4665700 - DNA, 25 bp, Homo sapien
gaaagcccatcacccactgtctggg

SEQ ID NO: 4665701 - DNA, 25 bp, Homo sapien
tgtgtggccagttttgtctttactg

SEQ ID NO: 4665702 - DNA, 25 bp, Homo sapien
tgcttgataacagatgctcccgagt

SEQ ID NO: 4665703 - DNA, 25 bp, Homo sapien
catgaagatcttctccggattaagt

SEQ ID NO: 4665704 - DNA, 25 bp, Homo sapien
tgctcccgagtcacttgtgtggcca

SEQ ID NO: 4665705 - DNA, 25 bp, Homo sapien
gcaagaaaccgaagaaggaagtagc

SEQ ID NO: 4665706 - DNA, 25 bp, Homo sapien
tggcaagaaaccgaagaaggaagta

SEQ ID NO: 4665707 - DNA, 25 bp, Homo sapien
actgctcatgttctagggctgtcac

SEQ ID NO: 4665708 - DNA, 25 bp, Homo sapien
caagagatgagtaaaacgtgggaaa

SEQ ID NO: 4665709 - DNA, 25 bp, Homo sapien
ctggcaagagatgagtaaaacgtgg

SEQ ID NO: 4665710 - DNA, 25 bp, Homo sapien
gaggatgactctcttcggtgaactg

SEQ ID NO: 4665711 - DNA, 25 bp, Homo sapien
tctccagtagcatttgaaggaaatc

SEQ ID NO: 4665712 - DNA, 25 bp, Homo sapien
ttcttctggaatgttctccagtagc

SEQ ID NO: 4665713 - DNA, 25 bp, Homo sapien
tgttctccagtagcatttgaaggaa

SEQ ID NO: 4665714 - DNA, 25 bp, Homo sapien
aatgttctccagtagcatttgaagg

SEQ ID NO: 4665715 - DNA, 25 bp, Homo sapien
aactgcttcattctgtgagaggacc

SEQ ID NO: 4665716 - DNA, 25 bp, Homo sapien
cacttagacaaagttttatccaggg

SEQ ID NO: 4665717 - DNA, 25 bp, Homo sapien
tgcatgaagaaatcccatatgtctg

SEQ ID NO: 4665718 - DNA, 25 bp, Homo sapien
cagccacatgtgatgggatttttgc

SEQ ID NO: 4665719 - DNA, 25 bp, Homo sapien
ggataaggcatattcatcgcacaca

SEQ ID NO: 4665720 - DNA, 25 bp, Homo sapien
acgatgaaatctaaggacccaggca

SEQ ID NO: 4665721 - DNA, 25 bp, Homo sapien
agtgctttgaaaggaactatttggt

SEQ ID NO: 4665722 - DNA, 25 bp, Homo sapien
tgggaaagccagtttcgggaggata

SEQ ID NO: 4665723 - DNA, 25 bp, Homo sapien
ccagtcacatgagaccgctcctctt

SEQ ID NO: 4665724 - DNA, 25 bp, Homo sapien
agtcacatgagaccgctcctcttca

SEQ ID NO: 4665725 - DNA, 25 bp, Homo sapien
ttacagaaagggcagcgctcccctg

SEQ ID NO: 4665726 - DNA, 25 bp, Homo sapien
agcccagtcacatgagaccgctcct

SEQ ID NO: 4665727 - DNA, 25 bp, Homo sapien
tttggtattccggaactctcaagcc

SEQ ID NO: 4665728 - DNA, 25 bp, Homo sapien
ttccggaactctcaagccagtcttg

SEQ ID NO: 4665729 - DNA, 25 bp, Homo sapien
caagccagtcttggtagatgttttc

SEQ ID NO: 4665730 - DNA, 25 bp, Homo sapien
gatgttttcaacagacagctcaagc

SEQ ID NO: 4665731 - DNA, 25 bp, Homo sapien
ttgatttggcgaaggggcctgggct

SEQ ID NO: 4665732 - DNA, 25 bp, Homo sapien
tcccagggcctaggcttgccatggc

SEQ ID NO: 4665733 - DNA, 25 bp, Homo sapien
gacttcccagggcctaggcttgcca

SEQ ID NO: 4665734 - DNA, 25 bp, Homo sapien
ttcccagggcctaggcttgccatgg

SEQ ID NO: 4665735 - DNA, 25 bp, Homo sapien
gcttatggttgctgatggctgacat

SEQ ID NO: 4665736 - DNA, 25 bp, Homo sapien
gcaaactgtccttttttaggaatga

SEQ ID NO: 4665737 - DNA, 25 bp, Homo sapien
gaatgagcttatggttgctgatggc

SEQ ID NO: 4665738 - DNA, 25 bp, Homo sapien
tttttaggaatgagcttatggttgc

SEQ ID NO: 4665739 - DNA, 25 bp, Homo sapien
aggactggaccaaagaaataatttg

SEQ ID NO: 4665740 - DNA, 25 bp, Homo sapien
ctcccagaaggactggaccaaagaa

SEQ ID NO: 4665741 - DNA, 25 bp, Homo sapien
ttcctcccagaaggactggaccaaa

SEQ ID NO: 4665742 - DNA, 25 bp, Homo sapien
tcctcccagaaggactggaccaaag

SEQ ID NO: 4665743 - DNA, 25 bp, Homo sapien
tgagcgggcgaatctccagaatgcc

SEQ ID NO: 4665744 - DNA, 25 bp, Homo sapien
tgctattgcaccagtccaagcgaaa

SEQ ID NO: 4665745 - DNA, 25 bp, Homo sapien
aaatacctgtgcaccgacagtcgtg

SEQ ID NO: 4665746 - DNA, 25 bp, Homo sapien
tgctggtagcctcaaatagcaggcc

SEQ ID NO: 4665747 - DNA, 25 bp, Homo sapien
caggaactggcggctgagcacttcc

SEQ ID NO: 4665748 - DNA, 25 bp, Homo sapien
gccgctgctgtgatgattttgccag

SEQ ID NO: 4665749 - DNA, 25 bp, Homo sapien
gccaggaactggcggctgagcactt

SEQ ID NO: 4665750 - DNA, 25 bp, Homo sapien
ggaactggcggctgagcacttcctc

SEQ ID NO: 4665751 - DNA, 25 bp, Homo sapien
tcatttcccatcttctctctcctcc

SEQ ID NO: 4665752 - DNA, 25 bp, Homo sapien
acagactccttaccaagcaccagtg

SEQ ID NO: 4665753 - DNA, 25 bp, Homo sapien
ccagtgaaaagtagacagctgccat

SEQ ID NO: 4665754 - DNA, 25 bp, Homo sapien
gatgtgtgacaagaacgctggcctt

SEQ ID NO: 4665755 - DNA, 25 bp, Homo sapien
aagaacagggtcttttgctgaatga

SEQ ID NO: 4665756 - DNA, 25 bp, Homo sapien
gctttactacagtaagtccaatttg

SEQ ID NO: 4665757 - DNA, 25 bp, Homo sapien
cagtaagtccaatttggcagatggc

SEQ ID NO: 4665758 - DNA, 25 bp, Homo sapien
tccaatttggcagatggcagacaca

SEQ ID NO: 4665759 - DNA, 25 bp, Homo sapien
tggcagacacaatgttgggcaggat

SEQ ID NO: 4665760 - DNA, 25 bp, Homo sapien
gatttcatatcgcttggcccctagg

SEQ ID NO: 4665761 - DNA, 25 bp, Homo sapien
aagtattgaagcacccctaccagag

SEQ ID NO: 4665762 - DNA, 25 bp, Homo sapien
tacagcaaggtataaggagcacaca

SEQ ID NO: 4665763 - DNA, 25 bp, Homo sapien
gatgagtaagacgttgtccctgtcc

SEQ ID NO: 4665764 - DNA, 25 bp, Homo sapien
tgctgggtcttgaccatccctttaa

SEQ ID NO: 4665765 - DNA, 25 bp, Homo sapien
aatggagacatcaggaatttatccc

SEQ ID NO: 4665766 - DNA, 25 bp, Homo sapien
tacacagaggagcttaatggagaca

SEQ ID NO: 4665767 - DNA, 25 bp, Homo sapien
caactttgccatggagtattttaca

SEQ ID NO: 4665768 - DNA, 25 bp, Homo sapien
caagattttcctccacccgccaaag

SEQ ID NO: 4665769 - DNA, 25 bp, Homo sapien
tttataaaaatgtgcgataccccaa

SEQ ID NO: 4665770 - DNA, 25 bp, Homo sapien
aaatgtgcgataccccaagattttc

SEQ ID NO: 4665771 - DNA, 25 bp, Homo sapien
aaaggccttctcatccgcatcagca

SEQ ID NO: 4665772 - DNA, 25 bp, Homo sapien
gcggccggggaggacgcagcggcgg

SEQ ID NO: 4665773 - DNA, 25 bp, Homo sapien
gacacagtcaagtttaccgcgggag

SEQ ID NO: 4665774 - DNA, 25 bp, Homo sapien
acacagtcaagtttaccgcgggagc

SEQ ID NO: 4665775 - DNA, 25 bp, Homo sapien
ggacacagtcaagtttaccgcggga

SEQ ID NO: 4665776 - DNA, 25 bp, Homo sapien
gaggacacagtcaagtttaccgcgg

SEQ ID NO: 4665777 - DNA, 25 bp, Homo sapien
acttgccgcgcaagcccgcactccg

SEQ ID NO: 4665778 - DNA, 25 bp, Homo sapien
gccccggcgcgacgctccctctgca

SEQ ID NO: 4665779 - DNA, 25 bp, Homo sapien
gcacttgccgcgcaagcccgcactc

SEQ ID NO: 4665780 - DNA, 25 bp, Homo sapien
ctcggcgcgcacttgccgcgcaagc

SEQ ID NO: 4665781 - DNA, 25 bp, Homo sapien
cttctccctgcgcttccgttttcgg

SEQ ID NO: 4665782 - DNA, 25 bp, Homo sapien
ggttcactccaatccatttcgtgac

SEQ ID NO: 4665783 - DNA, 25 bp, Homo sapien
cttccttctccctgcgcttccgttt

SEQ ID NO: 4665784 - DNA, 25 bp, Homo sapien
tcggggtctccggttcactccaatc

SEQ ID NO: 4665785 - DNA, 25 bp, Homo sapien
catactgaaattctaaacttgggca

SEQ ID NO: 4665786 - DNA, 25 bp, Homo sapien
cagtaaataaaattcctcctagtgt

SEQ ID NO: 4665787 - DNA, 25 bp, Homo sapien
gggcaaacaaatttctcatctgctt

SEQ ID NO: 4665788 - DNA, 25 bp, Homo sapien
gtccaaacttctgcaaagtaacata

SEQ ID NO: 4665789 - DNA, 25 bp, Homo sapien
caaacaactatattcgcaggctggt

SEQ ID NO: 4665790 - DNA, 25 bp, Homo sapien
ggacgctgcaatgcccatactaagg

SEQ ID NO: 4665791 - DNA, 25 bp, Homo sapien
gctttgtgcacattctcggacgctg

SEQ ID NO: 4665792 - DNA, 25 bp, Homo sapien
agaagctgccctctggtatcctgac

SEQ ID NO: 4665793 - DNA, 25 bp, Homo sapien
caactgaagtgacatatatgaccct

SEQ ID NO: 4665794 - DNA, 25 bp, Homo sapien
ttcaactgaagtgacatatatgacc

SEQ ID NO: 4665795 - DNA, 25 bp, Homo sapien
ttattcttcaactgaagtgacatat

SEQ ID NO: 4665796 - DNA, 25 bp, Homo sapien
tcttcaactgaagtgacatatatga

SEQ ID NO: 4665797 - DNA, 25 bp, Homo sapien
cagaaaactcaagtctgttccaaat

SEQ ID NO: 4665798 - DNA, 25 bp, Homo sapien
ctcaagtctgttccaaatcacaact

SEQ ID NO: 4665799 - DNA, 25 bp, Homo sapien
cattaaacacaacttaccataccat

SEQ ID NO: 4665800 - DNA, 25 bp, Homo sapien
cacaacttaccataccatgctgagg

SEQ ID NO: 4665801 - DNA, 25 bp, Homo sapien
ggttctgctttccacacggcaggaa

SEQ ID NO: 4665802 - DNA, 25 bp, Homo sapien
agtccgtcctctcactagagcactg

SEQ ID NO: 4665803 - DNA, 25 bp, Homo sapien
agagtccgtcctctcactagagcac

SEQ ID NO: 4665804 - DNA, 25 bp, Homo sapien
aggttctgctttccacacggcagga

SEQ ID NO: 4665805 - DNA, 25 bp, Homo sapien
tgcctactactcagcaccttcgaga

SEQ ID NO: 4665806 - DNA, 25 bp, Homo sapien
gcttccccttgtgagttcactgaaa

SEQ ID NO: 4665807 - DNA, 25 bp, Homo sapien
aaacaaacatccctggaagatgccg

SEQ ID NO: 4665808 - DNA, 25 bp, Homo sapien
tcgttattttaacccacagctgagc

SEQ ID NO: 4665809 - DNA, 25 bp, Homo sapien
gaccactcgcttggaaacgctaata

SEQ ID NO: 4665810 - DNA, 25 bp, Homo sapien
taacaattggaacactgagtagctc

SEQ ID NO: 4665811 - DNA, 25 bp, Homo sapien
tatatagactaggaagggtgcttcc

SEQ ID NO: 4665812 - DNA, 25 bp, Homo sapien
tcagtcataccaggagaacaagggc

SEQ ID NO: 4665813 - DNA, 25 bp, Homo sapien
gcacgatctaggcttatagcaacat

SEQ ID NO: 4665814 - DNA, 25 bp, Homo sapien
taggcttatagcaacattcgcctcc

SEQ ID NO: 4665815 - DNA, 25 bp, Homo sapien
gatctaggcttatagcaacattcgc

SEQ ID NO: 4665816 - DNA, 25 bp, Homo sapien
tatagcaacattcgcctcccaggct

SEQ ID NO: 4665817 - DNA, 25 bp, Homo sapien
ggtagcctcgggtaaaaatgcatca

SEQ ID NO: 4665818 - DNA, 25 bp, Homo sapien
aagaccaggcatggaaactctagcc

SEQ ID NO: 4665819 - DNA, 25 bp, Homo sapien
tgtcagcaggacttctataataggt

SEQ ID NO: 4665820 - DNA, 25 bp, Homo sapien
gtgtgtttgatctccccatggccag

SEQ ID NO: 4665821 - DNA, 25 bp, Homo sapien
gactacaaatggatacaaggaactt

SEQ ID NO: 4665822 - DNA, 25 bp, Homo sapien
gacatttcagtcaacgatgggtcac

SEQ ID NO: 4665823 - DNA, 25 bp, Homo sapien
aactggactgtcgtatcaggtacac

SEQ ID NO: 4665824 - DNA, 25 bp, Homo sapien
taagagcgagactcagaatcaccat

SEQ ID NO: 4665825 - DNA, 25 bp, Homo sapien
gctgctatacttgctgccggctgaa

SEQ ID NO: 4665826 - DNA, 25 bp, Homo sapien
tcacaggatgacatgcggttgcaca

SEQ ID NO: 4665827 - DNA, 25 bp, Homo sapien
ccaatttggagacgggacaaggaca

SEQ ID NO: 4665828 - DNA, 25 bp, Homo sapien
tactagctgccttagagaagtcccc

SEQ ID NO: 4665829 - DNA, 25 bp, Homo sapien
cacatgcatctatggaggacctcta

SEQ ID NO: 4665830 - DNA, 25 bp, Homo sapien
tcttcctgatggtctgtgcagcacc

SEQ ID NO: 4665831 - DNA, 25 bp, Homo sapien
ggtatttgcaaaagctccaacagcc

SEQ ID NO: 4665832 - DNA, 25 bp, Homo sapien
cagcaccatggtaccaagatgagat

SEQ ID NO: 4665833 - DNA, 25 bp, Homo sapien
ctggaacccaaagcagctctgcctc

SEQ ID NO: 4665834 - DNA, 25 bp, Homo sapien
gaacccaaagcagctctgcctccat

SEQ ID NO: 4665835 - DNA, 25 bp, Homo sapien
acccaaagcagctctgcctccatgc

SEQ ID NO: 4665836 - DNA, 25 bp, Homo sapien
tggaacccaaagcagctctgcctcc

SEQ ID NO: 4665837 - DNA, 25 bp, Homo sapien
gtgtctgtgccccacaatacaacaa

SEQ ID NO: 4665838 - DNA, 25 bp, Homo sapien
gtctgtgccccacaatacaacaaag

SEQ ID NO: 4665839 - DNA, 25 bp, Homo sapien
ctccctcagtgtctgtgccccacaa

SEQ ID NO: 4665840 - DNA, 25 bp, Homo sapien
ctcagtgtctgtgccccacaataca

SEQ ID NO: 4665841 - DNA, 25 bp, Homo sapien
cacagttggtctataacaagcatca

SEQ ID NO: 4665842 - DNA, 25 bp, Homo sapien
cagtttacttctagcccaaatggaa

SEQ ID NO: 4665843 - DNA, 25 bp, Homo sapien
tgtgtctagtctacaaaggatggcc

SEQ ID NO: 4665844 - DNA, 25 bp, Homo sapien
aatttgacatcaacccgtgcagtga

SEQ ID NO: 4665845 - DNA, 25 bp, Homo sapien
ctgaaactataggcgtgagccatca

SEQ ID NO: 4665846 - DNA, 25 bp, Homo sapien
tgctgaaactataggcgtgagccat

SEQ ID NO: 4665847 - DNA, 25 bp, Homo sapien
gctgaaactataggcgtgagccatc

SEQ ID NO: 4665848 - DNA, 25 bp, Homo sapien
ttttgccctgccagtaacacagaga

SEQ ID NO: 4665849 - DNA, 25 bp, Homo sapien
tgaatcagctcagtacttgcctttt

SEQ ID NO: 4665850 - DNA, 25 bp, Homo sapien
ttgatctggcctatgaacaaacagc

SEQ ID NO: 4665851 - DNA, 25 bp, Homo sapien
tctgccagttgtgttagagagaaaa

SEQ ID NO: 4665852 - DNA, 25 bp, Homo sapien
tggtacatcactaatcctctgctgg

SEQ ID NO: 4665853 - DNA, 25 bp, Homo sapien
caagctacacatgcatgctggtaca

SEQ ID NO: 4665854 - DNA, 25 bp, Homo sapien
ggtaatgctattgttgaccaagtca

SEQ ID NO: 4665855 - DNA, 25 bp, Homo sapien
gaggacaaaggccaattagactctc

SEQ ID NO: 4665856 - DNA, 25 bp, Homo sapien
tccagaaaccaaggcgtcggtcaga

SEQ ID NO: 4665857 - DNA, 25 bp, Homo sapien
caagagttagatgcacacagcgatg

SEQ ID NO: 4665858 - DNA, 25 bp, Homo sapien
tcttccataaacgagggcagttctc

SEQ ID NO: 4665859 - DNA, 25 bp, Homo sapien
aaccaagagcaagagtcctgtagca

SEQ ID NO: 4665860 - DNA, 25 bp, Homo sapien
ctgtaacagtgtatgatctcaaaac

SEQ ID NO: 4665861 - DNA, 25 bp, Homo sapien
gagaaggaataacactgaagtccac

SEQ ID NO: 4665862 - DNA, 25 bp, Homo sapien
gaagtccacacgtttataatatgcc

SEQ ID NO: 4665863 - DNA, 25 bp, Homo sapien
ccctctagacacctggaacatcatt

SEQ ID NO: 4665864 - DNA, 25 bp, Homo sapien
ggaagtagcaatgggccacgtctgc

SEQ ID NO: 4665865 - DNA, 25 bp, Homo sapien
tagcaatgggccacgtctgcagtgg

SEQ ID NO: 4665866 - DNA, 25 bp, Homo sapien
aaggaagtagcaatgggccacgtct

SEQ ID NO: 4665867 - DNA, 25 bp, Homo sapien
agtagcaatgggccacgtctgcagt

SEQ ID NO: 4665868 - DNA, 25 bp, Homo sapien
gacaaggcactgagccgtatccagc

SEQ ID NO: 4665869 - DNA, 25 bp, Homo sapien
cactgagccgtatccagcactgttg

SEQ ID NO: 4665870 - DNA, 25 bp, Homo sapien
aggcactgagccgtatccagcactg

SEQ ID NO: 4665871 - DNA, 25 bp, Homo sapien
acaaggcactgagccgtatccagca

SEQ ID NO: 4665872 - DNA, 25 bp, Homo sapien
tcctatcaatcaatccaatgcagcg

SEQ ID NO: 4665873 - DNA, 25 bp, Homo sapien
caggatccgctttatctcagtgtgc

SEQ ID NO: 4665874 - DNA, 25 bp, Homo sapien
caatgcagcgattagaggaaatccc

SEQ ID NO: 4665875 - DNA, 25 bp, Homo sapien
tctgtatcagcaaaccaggatccgc

SEQ ID NO: 4665876 - DNA, 25 bp, Homo sapien
ctaggcttagggaaaatgagatcac

SEQ ID NO: 4665877 - DNA, 25 bp, Homo sapien
tctattcaagaaaactcagtgtgac

SEQ ID NO: 4665878 - DNA, 25 bp, Homo sapien
tgtgaccaccatcacggaaacctct

SEQ ID NO: 4665879 - DNA, 25 bp, Homo sapien
taaagccatgtaaatcactagacag

SEQ ID NO: 4665880 - DNA, 25 bp, Homo sapien
cctgaattcatcgagctttggtgct

SEQ ID NO: 4665881 - DNA, 25 bp, Homo sapien
caacaactttaaggtgtcaaggaga

SEQ ID NO: 4665882 - DNA, 25 bp, Homo sapien
cactctctttaactgaatgcggtaa

SEQ ID NO: 4665883 - DNA, 25 bp, Homo sapien
tgcggtaatacttttgacaacaact

SEQ ID NO: 4665884 - DNA, 25 bp, Homo sapien
cgagcttgctgctagcaataagaag

SEQ ID NO: 4665885 - DNA, 25 bp, Homo sapien
gtacaacttctaagaatcttaatgt

SEQ ID NO: 4665886 - DNA, 25 bp, Homo sapien
caacttctaagaatcttaatgtaag

SEQ ID NO: 4665887 - DNA, 25 bp, Homo sapien
tgctgctagcaataagaagatgtac

SEQ ID NO: 4665888 - DNA, 25 bp, Homo sapien
aaggaaacacatcaatcatgcaata

SEQ ID NO: 4665889 - DNA, 25 bp, Homo sapien
gaaaaggaaacacatcaatcatgca

SEQ ID NO: 4665890 - DNA, 25 bp, Homo sapien
tgtgggaaaaggaaacacatcaatc

SEQ ID NO: 4665891 - DNA, 25 bp, Homo sapien
gggaaaaggaaacacatcaatcatg

SEQ ID NO: 4665892 - DNA, 25 bp, Homo sapien
tacgtgcaactgttcctgtcaatgg

SEQ ID NO: 4665893 - DNA, 25 bp, Homo sapien
tgtcaatggacaaacaagcctgtgg

SEQ ID NO: 4665894 - DNA, 25 bp, Homo sapien
tattagcaggatcacatatcgtggg

SEQ ID NO: 4665895 - DNA, 25 bp, Homo sapien
gaggctgggcactacattttacaga

SEQ ID NO: 4665896 - DNA, 25 bp, Homo sapien
catttggcattgctgtcactggagc

SEQ ID NO: 4665897 - DNA, 25 bp, Homo sapien
tgcccatcagcaataggcgtcctgg

SEQ ID NO: 4665898 - DNA, 25 bp, Homo sapien
ggctttccaggtacaatctttgagg

SEQ ID NO: 4665899 - DNA, 25 bp, Homo sapien
caagctgggtgtcgctctgtcatgt

SEQ ID NO: 4665900 - DNA, 25 bp, Homo sapien
tacactgattaaagcgcaagtcact

SEQ ID NO: 4665901 - DNA, 25 bp, Homo sapien
caagtcactcttgctacaaaggagt

SEQ ID NO: 4665902 - DNA, 25 bp, Homo sapien
aagaactggtaaaacgtgagagcct

SEQ ID NO: 4665903 - DNA, 25 bp, Homo sapien
aactggctaagttcctgaatggcac

SEQ ID NO: 4665904 - DNA, 25 bp, Homo sapien
gggccaccgcgtcttgatcaaatct

SEQ ID NO: 4665905 - DNA, 25 bp, Homo sapien
ggccgaggcaaagcgtgtcaatgaa

SEQ ID NO: 4665906 - DNA, 25 bp, Homo sapien
gctagataggaggtctacgggcctt

SEQ ID NO: 4665907 - DNA, 25 bp, Homo sapien
gctgcttttatagcgccacggaggc

SEQ ID NO: 4665908 - DNA, 25 bp, Homo sapien
aggcccgccgggtgcaggggcgcgc

SEQ ID NO: 4665909 - DNA, 25 bp, Homo sapien
gcagccgccccaaggcgtccccagc

SEQ ID NO: 4665910 - DNA, 25 bp, Homo sapien
cgacccctgtccgcagtggacgcag

SEQ ID NO: 4665911 - DNA, 25 bp, Homo sapien
gtggacgcagcggaggcccgccggg

SEQ ID NO: 4665912 - DNA, 25 bp, Homo sapien
cgttgttcaaagtggaggtggcggc

SEQ ID NO: 4665913 - DNA, 25 bp, Homo sapien
ccaaagcaaatccccgaacaccact

SEQ ID NO: 4665914 - DNA, 25 bp, Homo sapien
ttgttcaaagtggaggtggcggcgc

SEQ ID NO: 4665915 - DNA, 25 bp, Homo sapien
caaatccccgaacaccactctccat

SEQ ID NO: 4665916 - DNA, 25 bp, Homo sapien
ggcggagagcctgcgctgttctggt

SEQ ID NO: 4665917 - DNA, 25 bp, Homo sapien
gagcctgcgctgttctggtcccggc

SEQ ID NO: 4665918 - DNA, 25 bp, Homo sapien
gcgtgggcggagagcctgcgctgtt

SEQ ID NO: 4665919 - DNA, 25 bp, Homo sapien
caggcgtgggcggagagcctgcgct

SEQ ID NO: 4665920 - DNA, 25 bp, Homo sapien
gtccctgcgtgtcacctgggcggcg

SEQ ID NO: 4665921 - DNA, 25 bp, Homo sapien
gtagccactcagcaacgtcccaaag

SEQ ID NO: 4665922 - DNA, 25 bp, Homo sapien
cttggaagcaagaaagcacaagcag

SEQ ID NO: 4665923 - DNA, 25 bp, Homo sapien
aaagcgcgcccgagggacatagcag

SEQ ID NO: 4665924 - DNA, 25 bp, Homo sapien
caattccgacgcctatgcccttgaa

SEQ ID NO: 4665925 - DNA, 25 bp, Homo sapien
gcacgaaatcacaattccgacgcct

SEQ ID NO: 4665926 - DNA, 25 bp, Homo sapien
gaaatcacaattccgacgcctatgc

SEQ ID NO: 4665927 - DNA, 25 bp, Homo sapien
aaacacgcacgaaatcacaattccg

SEQ ID NO: 4665928 - DNA, 25 bp, Homo sapien
cctgagcccgcaaggtatgtcactt

SEQ ID NO: 4665929 - DNA, 25 bp, Homo sapien
gatagccccagaacgtgtgtttgcc

SEQ ID NO: 4665930 - DNA, 25 bp, Homo sapien
tggctgcagaaatcccaagcctgag

SEQ ID NO: 4665931 - DNA, 25 bp, Homo sapien
tgctggatttgtccttcgtgtgaac

SEQ ID NO: 4665932 - DNA, 25 bp, Homo sapien
gctcctctctgtggagcccagccct

SEQ ID NO: 4665933 - DNA, 25 bp, Homo sapien
tcctctctgtggagcccagccctct

SEQ ID NO: 4665934 - DNA, 25 bp, Homo sapien
tctctgtggagcccagccctctccc

SEQ ID NO: 4665935 - DNA, 25 bp, Homo sapien
ggctgctcctctctgtggagcccag

SEQ ID NO: 4665936 - DNA, 25 bp, Homo sapien
aacaagtaagagctaactctgacag

SEQ ID NO: 4665937 - DNA, 25 bp, Homo sapien
ttcacagtatagattctcatctcgg

SEQ ID NO: 4665938 - DNA, 25 bp, Homo sapien
gagcacagatcctcaaaaagtaaag

SEQ ID NO: 4665939 - DNA, 25 bp, Homo sapien
ctcatctcggaatttaacaagtaag

SEQ ID NO: 4665940 - DNA, 25 bp, Homo sapien
caatgtctgcaagaatagctgtcaa

SEQ ID NO: 4665941 - DNA, 25 bp, Homo sapien
taaacgacttaatgcccaatatagt

SEQ ID NO: 4665942 - DNA, 25 bp, Homo sapien
caacttaaaaagtttcataggccag

SEQ ID NO: 4665943 - DNA, 25 bp, Homo sapien
tatgtacagaaaataggatcctctc

SEQ ID NO: 4665944 - DNA, 25 bp, Homo sapien
taagtgtgcaccgagaaacctatca

SEQ ID NO: 4665945 - DNA, 25 bp, Homo sapien
tgaaccaggcaactggaaaccaggg

SEQ ID NO: 4665946 - DNA, 25 bp, Homo sapien
tgctctaacaaagtactgaaccagg

SEQ ID NO: 4665947 - DNA, 25 bp, Homo sapien
ttctctaaagctggcccggtaggta

SEQ ID NO: 4665948 - DNA, 25 bp, Homo sapien
acagtgagacctcgctccctaccca

SEQ ID NO: 4665949 - DNA, 25 bp, Homo sapien
tgagctatgattaatccagtagact

SEQ ID NO: 4665950 - DNA, 25 bp, Homo sapien
gcttttgccacaagtggtagctcac

SEQ ID NO: 4665951 - DNA, 25 bp, Homo sapien
gattaatccagtagacttcagcctg

SEQ ID NO: 4665952 - DNA, 25 bp, Homo sapien
gaagaccacccacgcaactgaggtt

SEQ ID NO: 4665953 - DNA, 25 bp, Homo sapien
gacatgtcccatgactgaccttgca

SEQ ID NO: 4665954 - DNA, 25 bp, Homo sapien
gagaccagcaaatggcaacatccaa

SEQ ID NO: 4665955 - DNA, 25 bp, Homo sapien
tcagaaaatgccacggacatgtccc

SEQ ID NO: 4665956 - DNA, 25 bp, Homo sapien
tgctccaagagatgctccagaagca

SEQ ID NO: 4665957 - DNA, 25 bp, Homo sapien
ctgatcctggaggtggtatgtcctc

SEQ ID NO: 4665958 - DNA, 25 bp, Homo sapien
aagagatgctccagaagcaagacca

SEQ ID NO: 4665959 - DNA, 25 bp, Homo sapien
tctgctccaagagatgctccagaag

SEQ ID NO: 4665960 - DNA, 25 bp, Homo sapien
tcaatagtttgggactgcaatggga

SEQ ID NO: 4665961 - DNA, 25 bp, Homo sapien
agcacttagttcttcactcatacag

SEQ ID NO: 4665962 - DNA, 25 bp, Homo sapien
gggacctgctggttaaactccgaga

SEQ ID NO: 4665963 - DNA, 25 bp, Homo sapien
gcaatgggatcaccattcttcaaca

SEQ ID NO: 4665964 - DNA, 25 bp, Homo sapien
gatagtattcagaaccctggcccca

SEQ ID NO: 4665965 - DNA, 25 bp, Homo sapien
tagcctgggatggtttgcctactcc

SEQ ID NO: 4665966 - DNA, 25 bp, Homo sapien
tgtactagagatctgccccgttagc

SEQ ID NO: 4665967 - DNA, 25 bp, Homo sapien
gaggcagcaagcttacccttctgga

SEQ ID NO: 4665968 - DNA, 25 bp, Homo sapien
aattccaccattacacgcagagcag

SEQ ID NO: 4665969 - DNA, 25 bp, Homo sapien
tgggaacgtgcttccgcaagctgac

SEQ ID NO: 4665970 - DNA, 25 bp, Homo sapien
tgaagtccagacagatccacctctc

SEQ ID NO: 4665971 - DNA, 25 bp, Homo sapien
tgaggttctcacagcctgaagtcca

SEQ ID NO: 4665972 - DNA, 25 bp, Homo sapien
tccttgctctagaatgggtgcccaa

SEQ ID NO: 4665973 - DNA, 25 bp, Homo sapien
tttgggccagctttagcacgactcc

SEQ ID NO: 4665974 - DNA, 25 bp, Homo sapien
cagaggtgctccttaatgctagtcc

SEQ ID NO: 4665975 - DNA, 25 bp, Homo sapien
tcccagagcacaacatacacagtgg

SEQ ID NO: 4665976 - DNA, 25 bp, Homo sapien
tagaagagcgtcaacatgcagggag

SEQ ID NO: 4665977 - DNA, 25 bp, Homo sapien
tgtgaaaacctacatacaagctcgg

SEQ ID NO: 4665978 - DNA, 25 bp, Homo sapien
tacccaagaggttccatggagctga

SEQ ID NO: 4665979 - DNA, 25 bp, Homo sapien
taacccactgtgtcttgactcccgg

SEQ ID NO: 4665980 - DNA, 25 bp, Homo sapien
ccgctgccggtgctgacgctgggca

SEQ ID NO: 4665981 - DNA, 25 bp, Homo sapien
cgctgccggtgctgacgctgggcag

SEQ ID NO: 4665982 - DNA, 25 bp, Homo sapien
ctcacctatcaaggatgtgctcatc

SEQ ID NO: 4665983 - DNA, 25 bp, Homo sapien
tgcataaaatcctttctagtaactg

SEQ ID NO: 4665984 - DNA, 25 bp, Homo sapien
caccttaagcttccgaaagtgttgg

SEQ ID NO: 4665985 - DNA, 25 bp, Homo sapien
cctttctagtaactgtctattcata

SEQ ID NO: 4665986 - DNA, 25 bp, Homo sapien
tgtttttcctattggatcactggct

SEQ ID NO: 4665987 - DNA, 25 bp, Homo sapien
gtctcttctggtcgccagccacccc

SEQ ID NO: 4665988 - DNA, 25 bp, Homo sapien
tgtctcttctggtcgccagccaccc

SEQ ID NO: 4665989 - DNA, 25 bp, Homo sapien
tcttctggtcgccagccaccccgca

SEQ ID NO: 4665990 - DNA, 25 bp, Homo sapien
ctggtcgccagccaccccgcagcat

SEQ ID NO: 4665991 - DNA, 25 bp, Homo sapien
gtttttcagaatccagtcccctgcc

SEQ ID NO: 4665992 - DNA, 25 bp, Homo sapien
tctacaagaagattcacctaccact

SEQ ID NO: 4665993 - DNA, 25 bp, Homo sapien
gcactctcagttataccacgtcaac

SEQ ID NO: 4665994 - DNA, 25 bp, Homo sapien
tactccatcactgaaccaacatcag

SEQ ID NO: 4665995 - DNA, 25 bp, Homo sapien
ctcttcaaatctccggacacagtgg

SEQ ID NO: 4665996 - DNA, 25 bp, Homo sapien
gacacagtggaagagtccgatgcca

SEQ ID NO: 4665997 - DNA, 25 bp, Homo sapien
ggcagaaccacctgcgcaaggtatt

SEQ ID NO: 4665998 - DNA, 25 bp, Homo sapien
aaggtattccccacatcccggagca

SEQ ID NO: 4665999 - DNA, 25 bp, Homo sapien
tgcaggaattcggaaggaaccccca

SEQ ID NO: 4666000 - DNA, 25 bp, Homo sapien
cgtgaacttgtgcttaacaatgagt

SEQ ID NO: 4666001 - DNA, 25 bp, Homo sapien
tgagttcacaccaccgatggcgaac

SEQ ID NO: 4666002 - DNA, 25 bp, Homo sapien
acaatgagttcacaccaccgatggc

SEQ ID NO: 4666003 - DNA, 25 bp, Homo sapien
cacttttgtaggctttcgtgaactt

SEQ ID NO: 4666004 - DNA, 25 bp, Homo sapien
aattatttgttatgaaagagatact

SEQ ID NO: 4666005 - DNA, 25 bp, Homo sapien
tactgagaacgtggattcctgtgtg

SEQ ID NO: 4666006 - DNA, 25 bp, Homo sapien
gattcctgtgtgaagtgcagggaca

SEQ ID NO: 4666007 - DNA, 25 bp, Homo sapien
gcctttacagaatccccatctgctg

SEQ ID NO: 4666008 - DNA, 25 bp, Homo sapien
agcatcggatgacgtgtgggccaca

SEQ ID NO: 4666009 - DNA, 25 bp, Homo sapien
tgttggtgacctgacacactgcgga

SEQ ID NO: 4666010 - DNA, 25 bp, Homo sapien
tgaaatcagggatctaccccacggc

SEQ ID NO: 4666011 - DNA, 25 bp, Homo sapien
tcagaggcggccaatgaaggtctcc

SEQ ID NO: 4666012 - DNA, 25 bp, Homo sapien
tggcattacagacacgggactcctg

SEQ ID NO: 4666013 - DNA, 25 bp, Homo sapien
tggttcccagaattaccacgcggag

SEQ ID NO: 4666014 - DNA, 25 bp, Homo sapien
cgcggagagcctgtgtggcattaca

SEQ ID NO: 4666015 - DNA, 25 bp, Homo sapien
cccgcaaagtgtgtccctaggagta

SEQ ID NO: 4666016 - DNA, 25 bp, Homo sapien
tagaaattgcaaagaccccagagaa

SEQ ID NO: 4666017 - DNA, 25 bp, Homo sapien
ccatgatggccgtgtcaggaacgct

SEQ ID NO: 4666018 - DNA, 25 bp, Homo sapien
tgagcaggcattcccaccatgatgg

SEQ ID NO: 4666019 - DNA, 25 bp, Homo sapien
tttcactggtgacagaacgatgagc

SEQ ID NO: 4666020 - DNA, 25 bp, Homo sapien
acgcacacatgagctcagtctgtgc

SEQ ID NO: 4666021 - DNA, 25 bp, Homo sapien
acacgcacacatgagctcagtctgt

SEQ ID NO: 4666022 - DNA, 25 bp, Homo sapien
cacgcacacatgagctcagtctgtg

SEQ ID NO: 4666023 - DNA, 25 bp, Homo sapien
tcaccatcagctccccgtagaggta

SEQ ID NO: 4666024 - DNA, 25 bp, Homo sapien
tgggctgaggacctatccatctgct

SEQ ID NO: 4666025 - DNA, 25 bp, Homo sapien
atctgctccttggtccgctcgaagc

SEQ ID NO: 4666026 - DNA, 25 bp, Homo sapien
cgctcgaagcacctacgggcgagct

SEQ ID NO: 4666027 - DNA, 25 bp, Homo sapien
cactgattactattatgaggccggc

SEQ ID NO: 4666028 - DNA, 25 bp, Homo sapien
gcaaaaagtaggacctgccctcaag

SEQ ID NO: 4666029 - DNA, 25 bp, Homo sapien
aattccccataaagagtggcgaggg

SEQ ID NO: 4666030 - DNA, 25 bp, Homo sapien
caaaatagtgccaaggagtgccgct

SEQ ID NO: 4666031 - DNA, 25 bp, Homo sapien
taatcttaagtcacaaatcagcatg

SEQ ID NO: 4666032 - DNA, 25 bp, Homo sapien
gttgcgtggtaatccctggcaatgt

SEQ ID NO: 4666033 - DNA, 25 bp, Homo sapien
ccaaggtcgtggttgcgtggtaatc

SEQ ID NO: 4666034 - DNA, 25 bp, Homo sapien
tcagcatgccaggaacccaagcagc

SEQ ID NO: 4666035 - DNA, 25 bp, Homo sapien
ccaaagaagagctacgagatgcacc

SEQ ID NO: 4666036 - DNA, 25 bp, Homo sapien
agtgagcgcgaccacggtttctgga

SEQ ID NO: 4666037 - DNA, 25 bp, Homo sapien
tgggcataaataaagggacggtgac

SEQ ID NO: 4666038 - DNA, 25 bp, Homo sapien
tgttctccaatctgcagtgagcgcg

SEQ ID NO: 4666039 - DNA, 25 bp, Homo sapien
caaagcggaaaccaatcactgttca

SEQ ID NO: 4666040 - DNA, 25 bp, Homo sapien
gtgaacaaagcggaaaccaatcact

SEQ ID NO: 4666041 - DNA, 25 bp, Homo sapien
taagctctgcaccttgttagagagg

SEQ ID NO: 4666042 - DNA, 25 bp, Homo sapien
cagctaagctctgcaccttgttaga

SEQ ID NO: 4666043 - DNA, 25 bp, Homo sapien
tctcttcaggtgcagaacttagcca

SEQ ID NO: 4666044 - DNA, 25 bp, Homo sapien
aatacaagagagagttcaccgcgcc

SEQ ID NO: 4666045 - DNA, 25 bp, Homo sapien
tcagacagatgtccgattagtgcat

SEQ ID NO: 4666046 - DNA, 25 bp, Homo sapien
catggctagcattcccagcaggaga

SEQ ID NO: 4666047 - DNA, 25 bp, Homo sapien
tctgtggacagacttaaggactcag

SEQ ID NO: 4666048 - DNA, 25 bp, Homo sapien
gggcaccgtctgctggcgcaggaga

SEQ ID NO: 4666049 - DNA, 25 bp, Homo sapien
gtccaatcgacagcccggagaagca

SEQ ID NO: 4666050 - DNA, 25 bp, Homo sapien
tggcgcaggagacgcgaaggcctgg

SEQ ID NO: 4666051 - DNA, 25 bp, Homo sapien
gcgggtccaatcgacagcccggaga

SEQ ID NO: 4666052 - DNA, 25 bp, Homo sapien
aaaatgagaactgatatcagctcag

SEQ ID NO: 4666053 - DNA, 25 bp, Homo sapien
agaactgatatcagctcagtaggca

SEQ ID NO: 4666054 - DNA, 25 bp, Homo sapien
tgagaactgatatcagctcagtagg

SEQ ID NO: 4666055 - DNA, 25 bp, Homo sapien
gtaaaatgagaactgatatcagctc

SEQ ID NO: 4666056 - DNA, 25 bp, Homo sapien
agacacgaaggctttttgctcaagg

SEQ ID NO: 4666057 - DNA, 25 bp, Homo sapien
acacgaaggctttttgctcaagggc

SEQ ID NO: 4666058 - DNA, 25 bp, Homo sapien
cacgaaggctttttgctcaagggct

SEQ ID NO: 4666059 - DNA, 25 bp, Homo sapien
gaaggctttttgctcaagggctcga

SEQ ID NO: 4666060 - DNA, 25 bp, Homo sapien
taacattgattacccagtcaccggg

SEQ ID NO: 4666061 - DNA, 25 bp, Homo sapien
taggagtacccatttcagacacgca

SEQ ID NO: 4666062 - DNA, 25 bp, Homo sapien
ggaattcttgtgagcgcgcacctct

SEQ ID NO: 4666063 - DNA, 25 bp, Homo sapien
ccatttcagtctccgggacgggtca

SEQ ID NO: 4666064 - DNA, 25 bp, Homo sapien
gaggctgcgtttacgagaatctgcc

SEQ ID NO: 4666065 - DNA, 25 bp, Homo sapien
tgctgagcagaccaatgtaaaatgt

SEQ ID NO: 4666066 - DNA, 25 bp, Homo sapien
ttatagaaatatccgcatccagcca

SEQ ID NO: 4666067 - DNA, 25 bp, Homo sapien
tgatgtccagggtcagttcgagcct

SEQ ID NO: 4666068 - DNA, 25 bp, Homo sapien
tgttcttttaaatggcgcccactgg

SEQ ID NO: 4666069 - DNA, 25 bp, Homo sapien
cctgttcttttaaatggcgcccact

SEQ ID NO: 4666070 - DNA, 25 bp, Homo sapien
taatatatcttagattctcatcctg

SEQ ID NO: 4666071 - DNA, 25 bp, Homo sapien
tcatcctgttcttttaaatggcgcc

SEQ ID NO: 4666072 - DNA, 25 bp, Homo sapien
tttaaacagtatgaaatttagaagc

SEQ ID NO: 4666073 - DNA, 25 bp, Homo sapien
aaacagtatgaaatttagaagcaaa

SEQ ID NO: 4666074 - DNA, 25 bp, Homo sapien
cagtatgaaatttagaagcaaacac

SEQ ID NO: 4666075 - DNA, 25 bp, Homo sapien
agtatgaaatttagaagcaaacacg

SEQ ID NO: 4666076 - DNA, 25 bp, Homo sapien
taatgagatccatggtagagcccca

SEQ ID NO: 4666077 - DNA, 25 bp, Homo sapien
gcagagagcaaatcctaagaacgtt

SEQ ID NO: 4666078 - DNA, 25 bp, Homo sapien
cacgcaaaggcatgtgacagcagag

SEQ ID NO: 4666079 - DNA, 25 bp, Homo sapien
tgtgttcaggtgcactcatgctcag

SEQ ID NO: 4666080 - DNA, 25 bp, Homo sapien
cgccagggtggagacggtaatcaac

SEQ ID NO: 4666081 - DNA, 25 bp, Homo sapien
gccgttaaacgctgccctgaaggga

SEQ ID NO: 4666082 - DNA, 25 bp, Homo sapien
caccctccgtgtataaagcagggcc

SEQ ID NO: 4666083 - DNA, 25 bp, Homo sapien
gaggccaggcaccatctgtaacttt

SEQ ID NO: 4666084 - DNA, 25 bp, Homo sapien
gtgatgcggccaaggcgagcagcgc

SEQ ID NO: 4666085 - DNA, 25 bp, Homo sapien
ccctctgggaggcatgagtgatgcg

SEQ ID NO: 4666086 - DNA, 25 bp, Homo sapien
tctgggaggcatgagtgatgcggcc

SEQ ID NO: 4666087 - DNA, 25 bp, Homo sapien
ggcatgagtgatgcggccaaggcga

SEQ ID NO: 4666088 - DNA, 25 bp, Homo sapien
tcgatttcggcaaagcctgggcagg

SEQ ID NO: 4666089 - DNA, 25 bp, Homo sapien
tgttgccttcgatttcggcaaagcc

SEQ ID NO: 4666090 - DNA, 25 bp, Homo sapien
ccctcttgttgccttcgatttcggc

SEQ ID NO: 4666091 - DNA, 25 bp, Homo sapien
gaaggaatggcatccgagatgctgg

SEQ ID NO: 4666092 - DNA, 25 bp, Homo sapien
tggcactgaagtgcctgctggcttc

SEQ ID NO: 4666093 - DNA, 25 bp, Homo sapien
ttgccggtggtgctttctgggcagc

SEQ ID NO: 4666094 - DNA, 25 bp, Homo sapien
gggacgtggcactgaagtgcctgct

SEQ ID NO: 4666095 - DNA, 25 bp, Homo sapien
gactgtccctctggggacgtggcac

SEQ ID NO: 4666096 - DNA, 25 bp, Homo sapien
tataacatgcttcgtgccatcatga

SEQ ID NO: 4666097 - DNA, 25 bp, Homo sapien
tataacatgcttcgtgctcatggtc

SEQ ID NO: 4666098 - DNA, 25 bp, Homo sapien
tccactgaagatctggaaaattcca

SEQ ID NO: 4666099 - DNA, 25 bp, Homo sapien
taacaaacatgcttcgtcagaggtg

SEQ ID NO: 4666100 - DNA, 25 bp, Homo sapien
gctcgttaggaaatggcaccgctca

SEQ ID NO: 4666101 - DNA, 25 bp, Homo sapien
ttatgagtctaaggctgttggcagc

SEQ ID NO: 4666102 - DNA, 25 bp, Homo sapien
taatcaccttgcaaactagagcccc

SEQ ID NO: 4666103 - DNA, 25 bp, Homo sapien
tatggtccgtccctggacaaaggac

SEQ ID NO: 4666104 - DNA, 25 bp, Homo sapien
gaaccagggccaggagattgtctcc

SEQ ID NO: 4666105 - DNA, 25 bp, Homo sapien
cgaatccgagtcatgagggtggccc

SEQ ID NO: 4666106 - DNA, 25 bp, Homo sapien
gccgggcctgactgaaacgtgaatg

SEQ ID NO: 4666107 - DNA, 25 bp, Homo sapien
gccaactcgagaggaatattcccag

SEQ ID NO: 4666108 - DNA, 25 bp, Homo sapien
aggtcagttcctggcatggtgccct

SEQ ID NO: 4666109 - DNA, 25 bp, Homo sapien
aaggtcagttcctggcatggtgccc

SEQ ID NO: 4666110 - DNA, 25 bp, Homo sapien
gaccccatcttagggattattggac

SEQ ID NO: 4666111 - DNA, 25 bp, Homo sapien
taaaggcatagcctcctaaaccctg

SEQ ID NO: 4666112 - DNA, 25 bp, Homo sapien
cagacataaaggaagatagacccca

SEQ ID NO: 4666113 - DNA, 25 bp, Homo sapien
catgagcatggacggcctctgaagg

SEQ ID NO: 4666114 - DNA, 25 bp, Homo sapien
tatgcatgtgccaatacctgtatcg

SEQ ID NO: 4666115 - DNA, 25 bp, Homo sapien
gaaactcctacacagtagggtggaa

SEQ ID NO: 4666116 - DNA, 25 bp, Homo sapien
gatgaataggcatgcgcatgtatgc

SEQ ID NO: 4666117 - DNA, 25 bp, Homo sapien
cctctacctctctagggaaggagat

SEQ ID NO: 4666118 - DNA, 25 bp, Homo sapien
taattgggttcatgtgaagtagaac

SEQ ID NO: 4666119 - DNA, 25 bp, Homo sapien
aaatgctgaaatacctaacatctca

SEQ ID NO: 4666120 - DNA, 25 bp, Homo sapien
tcacaacggctttggcaagtctttc

SEQ ID NO: 4666121 - DNA, 25 bp, Homo sapien
gaagtagaactcataaagacatcaa

SEQ ID NO: 4666122 - DNA, 25 bp, Homo sapien
cacactgggtcctggtgtgaggcaa

SEQ ID NO: 4666123 - DNA, 25 bp, Homo sapien
tgccaatgcctgcataggtatctgt

SEQ ID NO: 4666124 - DNA, 25 bp, Homo sapien
tcttcctagagctggacctgagtgc

SEQ ID NO: 4666125 - DNA, 25 bp, Homo sapien
catatttggtagatgcgtgaccctc

SEQ ID NO: 4666126 - DNA, 25 bp, Homo sapien
cagcctttggcttcgtgggctcaag

SEQ ID NO: 4666127 - DNA, 25 bp, Homo sapien
aagttagctgggctgtagcaagctg

SEQ ID NO: 4666128 - DNA, 25 bp, Homo sapien
cctggagaagttagctgggctgtag

SEQ ID NO: 4666129 - DNA, 25 bp, Homo sapien
agctgggctgtagcaagctgcgcta

SEQ ID NO: 4666130 - DNA, 25 bp, Homo sapien
agttcgtgtcgcaaataggctgcac

SEQ ID NO: 4666131 - DNA, 25 bp, Homo sapien
tccaatgatgaatttgttaatagcc

SEQ ID NO: 4666132 - DNA, 25 bp, Homo sapien
cattgggcacagttcgtgtcgcaaa

SEQ ID NO: 4666133 - DNA, 25 bp, Homo sapien
gcacagttcgtgtcgcaaataggct

SEQ ID NO: 4666134 - DNA, 25 bp, Homo sapien
ggcttcacaagatcgattcctgact

SEQ ID NO: 4666135 - DNA, 25 bp, Homo sapien
agtccttgtgggcttcacaagatcg

SEQ ID NO: 4666136 - DNA, 25 bp, Homo sapien
tcagtccttgtgggcttcacaagat

SEQ ID NO: 4666137 - DNA, 25 bp, Homo sapien
cttcacaagatcgattcctgactac

SEQ ID NO: 4666138 - DNA, 25 bp, Homo sapien
tgtagagtatgtcacggcccctgtg

SEQ ID NO: 4666139 - DNA, 25 bp, Homo sapien
caatgaccaattagagggacctcgt

SEQ ID NO: 4666140 - DNA, 25 bp, Homo sapien
taaatcaagatctgtctgccccgtg

SEQ ID NO: 4666141 - DNA, 25 bp, Homo sapien
aacagggacctttgctaccagcgag

SEQ ID NO: 4666142 - DNA, 25 bp, Homo sapien
gcgttttcagtacagcagtggttcg

SEQ ID NO: 4666143 - DNA, 25 bp, Homo sapien
ggagaccaccgtatgcacttgtatg

SEQ ID NO: 4666144 - DNA, 25 bp, Homo sapien
cattaccgaataaacaggctgcagg

SEQ ID NO: 4666145 - DNA, 25 bp, Homo sapien
ggaataagctgcctgtaacccctgc

SEQ ID NO: 4666146 - DNA, 25 bp, Homo sapien
ttcttggcattgttcggtttcccaa

SEQ ID NO: 4666147 - DNA, 25 bp, Homo sapien
gatgtcaccgacagcagtgaaagcc

SEQ ID NO: 4666148 - DNA, 25 bp, Homo sapien
aattagaaggatgttatgttttcca

SEQ ID NO: 4666149 - DNA, 25 bp, Homo sapien
cttaaaaaccgatgtcaccgacagc

SEQ ID NO: 4666150 - DNA, 25 bp, Homo sapien
tgagaaatcactggccaggcgacgt

SEQ ID NO: 4666151 - DNA, 25 bp, Homo sapien
gctaatccataagggacagactgtc

SEQ ID NO: 4666152 - DNA, 25 bp, Homo sapien
gcaagttccccaagcagtggcgtaa

SEQ ID NO: 4666153 - DNA, 25 bp, Homo sapien
catggacactttcccgtaggcggaa

SEQ ID NO: 4666154 - DNA, 25 bp, Homo sapien
gaaacccattggtctgtcttgcact

SEQ ID NO: 4666155 - DNA, 25 bp, Homo sapien
tagtagccattgcagatcattgtgg

SEQ ID NO: 4666156 - DNA, 25 bp, Homo sapien
tccagccccacatagatagtaattg

SEQ ID NO: 4666157 - DNA, 25 bp, Homo sapien
caggtaggccccagcgactattgtt

SEQ ID NO: 4666158 - DNA, 25 bp, Homo sapien
ccatcaagcttttctcagaattcat

SEQ ID NO: 4666159 - DNA, 25 bp, Homo sapien
taccatcaagcttttctcagaattc

SEQ ID NO: 4666160 - DNA, 25 bp, Homo sapien
accatcaagcttttctcagaattca

SEQ ID NO: 4666161 - DNA, 25 bp, Homo sapien
ctaccatcaagcttttctcagaatt

SEQ ID NO: 4666162 - DNA, 25 bp, Homo sapien
gaaatggcgtagtttggaacaagag

SEQ ID NO: 4666163 - DNA, 25 bp, Homo sapien
gcgtagtttggaacaagagagctca

SEQ ID NO: 4666164 - DNA, 25 bp, Homo sapien
aatggcgtagtttggaacaagagag

SEQ ID NO: 4666165 - DNA, 25 bp, Homo sapien
tggcgtagtttggaacaagagagct

SEQ ID NO: 4666166 - DNA, 25 bp, Homo sapien
tgaggtgaatgttgactgatggatc

SEQ ID NO: 4666167 - DNA, 25 bp, Homo sapien
gcagtgtgtatgtactccctacacc

SEQ ID NO: 4666168 - DNA, 25 bp, Homo sapien
caatgtaagaagaaccataggagac

SEQ ID NO: 4666169 - DNA, 25 bp, Homo sapien
tacatgtcaggtaaagacttggatt

SEQ ID NO: 4666170 - DNA, 25 bp, Homo sapien
agatggcacgctggcttgtacctga

SEQ ID NO: 4666171 - DNA, 25 bp, Homo sapien
tccgccttcgcaagttcagtggagt

SEQ ID NO: 4666172 - DNA, 25 bp, Homo sapien
tcagtggagtccagcagtaagcgca

SEQ ID NO: 4666173 - DNA, 25 bp, Homo sapien
gagaacaccaccaacatggagacga

SEQ ID NO: 4666174 - DNA, 25 bp, Homo sapien
tggcttgctaagagcaccaagtgct

SEQ ID NO: 4666175 - DNA, 25 bp, Homo sapien
ccatcctggcttgctaagagcacca

SEQ ID NO: 4666176 - DNA, 25 bp, Homo sapien
gctaagagcaccaagtgctctccct

SEQ ID NO: 4666177 - DNA, 25 bp, Homo sapien
tcctggcttgctaagagcaccaagt

SEQ ID NO: 4666178 - DNA, 25 bp, Homo sapien
tgcctggagcttgaatgcttgattt

SEQ ID NO: 4666179 - DNA, 25 bp, Homo sapien
ctcagtgtcttgggggaattctgga

SEQ ID NO: 4666180 - DNA, 25 bp, Homo sapien
tggagagtctgaacggctccccgat

SEQ ID NO: 4666181 - DNA, 25 bp, Homo sapien
acctcttgcctggagcttgaatgct

SEQ ID NO: 4666182 - DNA, 25 bp, Homo sapien
tcagaagtcagggataaggcggcca

SEQ ID NO: 4666183 - DNA, 25 bp, Homo sapien
catctcatcaagacagttctgaggg

SEQ ID NO: 4666184 - DNA, 25 bp, Homo sapien
gctggaggacaatgtgggctttgat

SEQ ID NO: 4666185 - DNA, 25 bp, Homo sapien
tggcacatgtctggacgttagaggc

SEQ ID NO: 4666186 - DNA, 25 bp, Homo sapien
cgtgtgttgaccacccagtgttctt

SEQ ID NO: 4666187 - DNA, 25 bp, Homo sapien
cagtcagcctggttgtgcgaatgga

SEQ ID NO: 4666188 - DNA, 25 bp, Homo sapien
gaatggaggtcgtgttccttagcac

SEQ ID NO: 4666189 - DNA, 25 bp, Homo sapien
gggttccactctttgcacaggcacc

SEQ ID NO: 4666190 - DNA, 25 bp, Homo sapien
ttcctccacacccagaccatgttcc

SEQ ID NO: 4666191 - DNA, 25 bp, Homo sapien
acccagaccatgttccaagccacaa

SEQ ID NO: 4666192 - DNA, 25 bp, Homo sapien
atgttccaagccacaacccattgct

SEQ ID NO: 4666193 - DNA, 25 bp, Homo sapien
tgagcaaaacccacaacccttcctc

SEQ ID NO: 4666194 - DNA, 25 bp, Homo sapien
ctgtcccagcgacatcacacatgca

SEQ ID NO: 4666195 - DNA, 25 bp, Homo sapien
cctgtcccagcgacatcacacatgc

SEQ ID NO: 4666196 - DNA, 25 bp, Homo sapien
ttttctctactccttccccagtcac

SEQ ID NO: 4666197 - DNA, 25 bp, Homo sapien
tttttctctactccttccccagtca

SEQ ID NO: 4666198 - DNA, 25 bp, Homo sapien
ctccggttttcagtcttggctcctc

SEQ ID NO: 4666199 - DNA, 25 bp, Homo sapien
tcctgagaaacgctgacttaggccc

SEQ ID NO: 4666200 - DNA, 25 bp, Homo sapien
cctccggttttcagtcttggctcct

SEQ ID NO: 4666201 - DNA, 25 bp, Homo sapien
agaaacgctgacttaggccctccgg

SEQ ID NO: 4666202 - DNA, 25 bp, Homo sapien
tctttatgggaccaagcagtgtaag

SEQ ID NO: 4666203 - DNA, 25 bp, Homo sapien
ttatgggaccaagcagtgtaagttg

SEQ ID NO: 4666204 - DNA, 25 bp, Homo sapien
cttctttatgggaccaagcagtgta

SEQ ID NO: 4666205 - DNA, 25 bp, Homo sapien
tttatgggaccaagcagtgtaagtt

SEQ ID NO: 4666206 - DNA, 25 bp, Homo sapien
cactttataggagcagagacactcc

SEQ ID NO: 4666207 - DNA, 25 bp, Homo sapien
gaaatccagcaatgacgcgggtcac

SEQ ID NO: 4666208 - DNA, 25 bp, Homo sapien
ttgtaattgacatgagaaatccagc

SEQ ID NO: 4666209 - DNA, 25 bp, Homo sapien
ggcccaagtggacagctgcacttta

SEQ ID NO: 4666210 - DNA, 25 bp, Homo sapien
ggcagtgtgtgtgcatcctggagat

SEQ ID NO: 4666211 - DNA, 25 bp, Homo sapien
atcctggagatgtacaggtgcagcc

SEQ ID NO: 4666212 - DNA, 25 bp, Homo sapien
cacacagtgccagggcgggcagtgt

SEQ ID NO: 4666213 - DNA, 25 bp, Homo sapien
ccacacagtgccagggcgggcagtg

SEQ ID NO: 4666214 - DNA, 25 bp, Homo sapien
gcttgacatggctgaagcaccgtgg

SEQ ID NO: 4666215 - DNA, 25 bp, Homo sapien
gatgtccttggtcgttgtccctgct

SEQ ID NO: 4666216 - DNA, 25 bp, Homo sapien
catagcaacacgatgtctacctggt

SEQ ID NO: 4666217 - DNA, 25 bp, Homo sapien
tctgggaacaagtgaaggtgactac

SEQ ID NO: 4666218 - DNA, 25 bp, Homo sapien
ggtccgcagacatttcaggcaggcc

SEQ ID NO: 4666219 - DNA, 25 bp, Homo sapien
ggccagtcccgttgcaagagcacaa

SEQ ID NO: 4666220 - DNA, 25 bp, Homo sapien
gttgcaagagcacaagtaaacagca

SEQ ID NO: 4666221 - DNA, 25 bp, Homo sapien
aggcaggccagtcccgttgcaagag

SEQ ID NO: 4666222 - DNA, 25 bp, Homo sapien
taatcatcatgcttcccatagtgtg

SEQ ID NO: 4666223 - DNA, 25 bp, Homo sapien
cgcgctggcagataccgagatccag

SEQ ID NO: 4666224 - DNA, 25 bp, Homo sapien
tggcagataccgagatccagcacac

SEQ ID NO: 4666225 - DNA, 25 bp, Homo sapien
cgagatccagcacactctttaatca

SEQ ID NO: 4666226 - DNA, 25 bp, Homo sapien
caaataatcttcaaggactttgatc

SEQ ID NO: 4666227 - DNA, 25 bp, Homo sapien
tgcaaataatcttcaaggactttga

SEQ ID NO: 4666228 - DNA, 25 bp, Homo sapien
aataatcttcaaggactttgatcac

SEQ ID NO: 4666229 - DNA, 25 bp, Homo sapien
ataatcttcaaggactttgatcact

SEQ ID NO: 4666230 - DNA, 25 bp, Homo sapien
tctagacagttatgaggtgggagta

SEQ ID NO: 4666231 - DNA, 25 bp, Homo sapien
tgcctatgtcaagtttatgaagatt

SEQ ID NO: 4666232 - DNA, 25 bp, Homo sapien
gctcgttgaacataatttcagacag

SEQ ID NO: 4666233 - DNA, 25 bp, Homo sapien
tgggagtagagggtctagatttcca

SEQ ID NO: 4666234 - DNA, 25 bp, Homo sapien
ctgtcatgctccgcatgcccctgct

SEQ ID NO: 4666235 - DNA, 25 bp, Homo sapien
gtcatgctccgcatgcccctgcttc

SEQ ID NO: 4666236 - DNA, 25 bp, Homo sapien
ctccgcatgcccctgcttccgccct

SEQ ID NO: 4666237 - DNA, 25 bp, Homo sapien
catgctccgcatgcccctgcttccg

SEQ ID NO: 4666238 - DNA, 25 bp, Homo sapien
tcatcatgcatcaggtgcatttccc

SEQ ID NO: 4666239 - DNA, 25 bp, Homo sapien
catcatgcatcaggtgcatttccca

SEQ ID NO: 4666240 - DNA, 25 bp, Homo sapien
atcatgcatcaggtgcatttcccac

SEQ ID NO: 4666241 - DNA, 25 bp, Homo sapien
tcatgcatcaggtgcatttcccact

SEQ ID NO: 4666242 - DNA, 25 bp, Homo sapien
tttgccaggcacaactatagaggct

SEQ ID NO: 4666243 - DNA, 25 bp, Homo sapien
ccagggcctgccaaatgtaagagga

SEQ ID NO: 4666244 - DNA, 25 bp, Homo sapien
ttttactgacaaccttgaatgtgcc

SEQ ID NO: 4666245 - DNA, 25 bp, Homo sapien
tacagttcagagacgaagttccggg

SEQ ID NO: 4666246 - DNA, 25 bp, Homo sapien
gccagattgctccagattgagaaat

SEQ ID NO: 4666247 - DNA, 25 bp, Homo sapien
gaattgagcaagtcccaaacatgct

SEQ ID NO: 4666248 - DNA, 25 bp, Homo sapien
cttcctcagttaccaagcaagcctg

SEQ ID NO: 4666249 - DNA, 25 bp, Homo sapien
tacttggatttagccactgtgagca

SEQ ID NO: 4666250 - DNA, 25 bp, Homo sapien
catatctaatgccatacagcagtgc

SEQ ID NO: 4666251 - DNA, 25 bp, Homo sapien
taggtgaggtaaggtccgctcccag

SEQ ID NO: 4666252 - DNA, 25 bp, Homo sapien
gctgcatagataatggtaaactttc

SEQ ID NO: 4666253 - DNA, 25 bp, Homo sapien
tagaaggagagaagcaacggagaat

SEQ ID NO: 4666254 - DNA, 25 bp, Homo sapien
agcaggtgaatatcccattgtcagg

SEQ ID NO: 4666255 - DNA, 25 bp, Homo sapien
aaatgtcgatacacttaggcatagc

SEQ ID NO: 4666256 - DNA, 25 bp, Homo sapien
cacttaggcatagctggaaatgtac

SEQ ID NO: 4666257 - DNA, 25 bp, Homo sapien
ccattgtcaggagagcaagctgatt

SEQ ID NO: 4666258 - DNA, 25 bp, Homo sapien
gctcattgagtcctgaagtaggcca

SEQ ID NO: 4666259 - DNA, 25 bp, Homo sapien
taagttgagaaattgcgagggcctc

SEQ ID NO: 4666260 - DNA, 25 bp, Homo sapien
tctgaagaacagctaggagagcaag

SEQ ID NO: 4666261 - DNA, 25 bp, Homo sapien
cagtctgactggtgatatcgttaca

SEQ ID NO: 4666262 - DNA, 25 bp, Homo sapien
tgtgaattccaaaagataccagtct

SEQ ID NO: 4666263 - DNA, 25 bp, Homo sapien
tttgtgtcccgaagttggtgcctga

SEQ ID NO: 4666264 - DNA, 25 bp, Homo sapien
aaaattcagcagtgcggcgggagca

SEQ ID NO: 4666265 - DNA, 25 bp, Homo sapien
ggctacctactgtgctagtccagat

SEQ ID NO: 4666266 - DNA, 25 bp, Homo sapien
ttctggcttccatgggtgatgaagg

SEQ ID NO: 4666267 - DNA, 25 bp, Homo sapien
agtgtcagagcctgtgaaggcctgc

SEQ ID NO: 4666268 - DNA, 25 bp, Homo sapien
ttgctgaatatcctgcctgccctgg

SEQ ID NO: 4666269 - DNA, 25 bp, Homo sapien
tgcacctgttgagaggcagccttcc

SEQ ID NO: 4666270 - DNA, 25 bp, Homo sapien
cagtagccgtacaggtaagataggg

SEQ ID NO: 4666271 - DNA, 25 bp, Homo sapien
ttatatgtctgcttcgggtgacact

SEQ ID NO: 4666272 - DNA, 25 bp, Homo sapien
tgacactgtcttattcctccgtgaa

SEQ ID NO: 4666273 - DNA, 25 bp, Homo sapien
gaataatgaattgaacgtctctccc

SEQ ID NO: 4666274 - DNA, 25 bp, Homo sapien
ggaggccgcgggctgctgcgtcacc

SEQ ID NO: 4666275 - DNA, 25 bp, Homo sapien
aggccgcgggctgctgcgtcacccc

SEQ ID NO: 4666276 - DNA, 25 bp, Homo sapien
gccgccatggctcccgcagggcggc

SEQ ID NO: 4666277 - DNA, 25 bp, Homo sapien
gaggccgccatggctcccgcagggc

SEQ ID NO: 4666278 - DNA, 25 bp, Homo sapien
gctggatcagctcccccgccagcac

SEQ ID NO: 4666279 - DNA, 25 bp, Homo sapien
ctcgctcacctactgctggatcagc

SEQ ID NO: 4666280 - DNA, 25 bp, Homo sapien
actgctggatcagctcccccgccag

SEQ ID NO: 4666281 - DNA, 25 bp, Homo sapien
tcgctcacctactgctggatcagct

SEQ ID NO: 4666282 - DNA, 25 bp, Homo sapien
attgactgtgctatactgcatgcgg

SEQ ID NO: 4666283 - DNA, 25 bp, Homo sapien
gactgtgctatactgcatgcggtgg

SEQ ID NO: 4666284 - DNA, 25 bp, Homo sapien
ctgtgctatactgcatgcggtggct

SEQ ID NO: 4666285 - DNA, 25 bp, Homo sapien
ttcttattattggattgactgtgct

SEQ ID NO: 4666286 - DNA, 25 bp, Homo sapien
ttgaggctatctcggtgatgttgta

SEQ ID NO: 4666287 - DNA, 25 bp, Homo sapien
ggctatctcggtgatgttgtaagaa

SEQ ID NO: 4666288 - DNA, 25 bp, Homo sapien
gctatctcggtgatgttgtaagaaa

SEQ ID NO: 4666289 - DNA, 25 bp, Homo sapien
cttttgaggctatctcggtgatgtt

SEQ ID NO: 4666290 - DNA, 25 bp, Homo sapien
agaaaactgcatcacgggtagttta

SEQ ID NO: 4666291 - DNA, 25 bp, Homo sapien
gaaaactgcatcacgggtagtttaa

SEQ ID NO: 4666292 - DNA, 25 bp, Homo sapien
acaccacaggctgggctgaggagtc

SEQ ID NO: 4666293 - DNA, 25 bp, Homo sapien
taacaccacaggctgggctgaggag

SEQ ID NO: 4666294 - DNA, 25 bp, Homo sapien
ctaacaccacaggctgggctgagga

SEQ ID NO: 4666295 - DNA, 25 bp, Homo sapien
accacaggctgggctgaggagtcgg

SEQ ID NO: 4666296 - DNA, 25 bp, Homo sapien
taagtgcacagcccctgtggcagag

SEQ ID NO: 4666297 - DNA, 25 bp, Homo sapien
ccctgtggcagagccctgatcaaca

SEQ ID NO: 4666298 - DNA, 25 bp, Homo sapien
cagcaacaggatcagcaatttagaa

SEQ ID NO: 4666299 - DNA, 25 bp, Homo sapien
acaggatcagcaatttagaaaagaa

SEQ ID NO: 4666300 - DNA, 25 bp, Homo sapien
ctcaacagcaacaggatcagcaatt

SEQ ID NO: 4666301 - DNA, 25 bp, Homo sapien
caacaggatcagcaatttagaaaag

SEQ ID NO: 4666302 - DNA, 25 bp, Homo sapien
tcacttgaacaccagtacttattgg

SEQ ID NO: 4666303 - DNA, 25 bp, Homo sapien
aagttcacttgaacaccagtactta

SEQ ID NO: 4666304 - DNA, 25 bp, Homo sapien
gttcacttgaacaccagtacttatt

SEQ ID NO: 4666305 - DNA, 25 bp, Homo sapien
ttcacttgaacaccagtacttattg

SEQ ID NO: 4666306 - DNA, 25 bp, Homo sapien
gtctgcacgttgattgaagaaatgc

SEQ ID NO: 4666307 - DNA, 25 bp, Homo sapien
gaaacaggtgtccataaatgcatca

SEQ ID NO: 4666308 - DNA, 25 bp, Homo sapien
taccttagagctgggcaaaaatgtc

SEQ ID NO: 4666309 - DNA, 25 bp, Homo sapien
gcataagacagatctgtctgcacgt

SEQ ID NO: 4666310 - DNA, 25 bp, Homo sapien
gtcatccgttggactttgtatccca

SEQ ID NO: 4666311 - DNA, 25 bp, Homo sapien
ggtcatccgttggactttgtatccc

SEQ ID NO: 4666312 - DNA, 25 bp, Homo sapien
ctctgctactaaactgttgcttata

SEQ ID NO: 4666313 - DNA, 25 bp, Homo sapien
tctctgctactaaactgttgcttat

SEQ ID NO: 4666314 - DNA, 25 bp, Homo sapien
tatatctttaacagtggagattcct

SEQ ID NO: 4666315 - DNA, 25 bp, Homo sapien
gttgtttgagtttcgttgttggtga

SEQ ID NO: 4666316 - DNA, 25 bp, Homo sapien
tatctttaacagtggagattccttc

SEQ ID NO: 4666317 - DNA, 25 bp, Homo sapien
ctttaacagtggagattccttcagt

SEQ ID NO: 4666318 - DNA, 25 bp, Homo sapien
acaaaaggcaaagaactgcaaagaa

SEQ ID NO: 4666319 - DNA, 25 bp, Homo sapien
catatcgaaatccatacacttgaaa

SEQ ID NO: 4666320 - DNA, 25 bp, Homo sapien
cttcatatcgaaatccatacacttg

SEQ ID NO: 4666321 - DNA, 25 bp, Homo sapien
tgtcttcatatcgaaatccatacac

SEQ ID NO: 4666322 - DNA, 25 bp, Homo sapien
tatcgaaatccatacacttgaaata

SEQ ID NO: 4666323 - DNA, 25 bp, Homo sapien
tcttggcagctagtgtaaatgatgg

SEQ ID NO: 4666324 - DNA, 25 bp, Homo sapien
tcctctcattctgacgtgggagcac

SEQ ID NO: 4666325 - DNA, 25 bp, Homo sapien
taccagggtgggataaccacatatc

SEQ ID NO: 4666326 - DNA, 25 bp, Homo sapien
ccagtcgctgatgtgtctcttggca

SEQ ID NO: 4666327 - DNA, 25 bp, Homo sapien
gactcctccagagcgaggttgtgca

SEQ ID NO: 4666328 - DNA, 25 bp, Homo sapien
ttgtgcacacatgcgcgcgccttct

SEQ ID NO: 4666329 - DNA, 25 bp, Homo sapien
tccagagcgaggttgtgcacacatg

SEQ ID NO: 4666330 - DNA, 25 bp, Homo sapien
ctggccgtgactcctccagagcgag

SEQ ID NO: 4666331 - DNA, 25 bp, Homo sapien
tgacttctccggtgaaggttgtcgt

SEQ ID NO: 4666332 - DNA, 25 bp, Homo sapien
ccggtgaaggttgtcgtgcgcgcac

SEQ ID NO: 4666333 - DNA, 25 bp, Homo sapien
acttctccggtgaaggttgtcgtgc

SEQ ID NO: 4666334 - DNA, 25 bp, Homo sapien
ttctccggtgaaggttgtcgtgcgc

SEQ ID NO: 4666335 - DNA, 25 bp, Homo sapien
cagccaaagtgcgaatgcccagtga

SEQ ID NO: 4666336 - DNA, 25 bp, Homo sapien
gaatgcccagtgacacaatgaagag

SEQ ID NO: 4666337 - DNA, 25 bp, Homo sapien
taggtaaagggatgactgttgcaag

SEQ ID NO: 4666338 - DNA, 25 bp, Homo sapien
ggatatggggcaatcctgtggacaa

SEQ ID NO: 4666339 - DNA, 25 bp, Homo sapien
tggatgtccccgacccgtgctcggt

SEQ ID NO: 4666340 - DNA, 25 bp, Homo sapien
tcacgttggcctccactggctgtag

SEQ ID NO: 4666341 - DNA, 25 bp, Homo sapien
tcggtctgtcagtttggtcccagtc

SEQ ID NO: 4666342 - DNA, 25 bp, Homo sapien
acacagggcctgttctatgtatccg

SEQ ID NO: 4666343 - DNA, 25 bp, Homo sapien
acctctgtgatcctgcccattaact

SEQ ID NO: 4666344 - DNA, 25 bp, Homo sapien
tgcttcccacaaacagggcagaatg

SEQ ID NO: 4666345 - DNA, 25 bp, Homo sapien
tcagtgcttcccacaaacagggcag

SEQ ID NO: 4666346 - DNA, 25 bp, Homo sapien
tggtccttctgaccttgctcaaaat

SEQ ID NO: 4666347 - DNA, 25 bp, Homo sapien
tccaacatataatagtggaattggg

SEQ ID NO: 4666348 - DNA, 25 bp, Homo sapien
cttgttattaagctcctggaccaga

SEQ ID NO: 4666349 - DNA, 25 bp, Homo sapien
tattaagctcctggaccagactgaa

SEQ ID NO: 4666350 - DNA, 25 bp, Homo sapien
ccagactgaagtccaacatataata

SEQ ID NO: 4666351 - DNA, 25 bp, Homo sapien
tgtaaccgcagggagcgcaaacagg

SEQ ID NO: 4666352 - DNA, 25 bp, Homo sapien
cgcagggagcgcaaacaggccgtta

SEQ ID NO: 4666353 - DNA, 25 bp, Homo sapien
gcaaacaggccgttacgcatgtgtc

SEQ ID NO: 4666354 - DNA, 25 bp, Homo sapien
ggagcgcaaacaggccgttacgcat

SEQ ID NO: 4666355 - DNA, 25 bp, Homo sapien
tcccgtcttcgtgcgctggtggaaa

SEQ ID NO: 4666356 - DNA, 25 bp, Homo sapien
aagccttttagacctgggccatcaa

SEQ ID NO: 4666357 - DNA, 25 bp, Homo sapien
gggccatcaacgaaggtctctatag

SEQ ID NO: 4666358 - DNA, 25 bp, Homo sapien
tctctatagggactaccaggaccgg

SEQ ID NO: 4666359 - DNA, 25 bp, Homo sapien
gagtccgtccccgtgagggccgctc

SEQ ID NO: 4666360 - DNA, 25 bp, Homo sapien
ctgaagacagcagttccgggaaccg

SEQ ID NO: 4666361 - DNA, 25 bp, Homo sapien
cgggaaccgcgacgacagcatcgaa

SEQ ID NO: 4666362 - DNA, 25 bp, Homo sapien
agcagttccgggaaccgcgacgaca

SEQ ID NO: 4666363 - DNA, 25 bp, Homo sapien
tgggagcttccccacggacactttc

SEQ ID NO: 4666364 - DNA, 25 bp, Homo sapien
gctgtggccttcggtcctcgagctc

SEQ ID NO: 4666365 - DNA, 25 bp, Homo sapien
cactttcgggcatctaagcgatccg

SEQ ID NO: 4666366 - DNA, 25 bp, Homo sapien
tcagaagatatgctctggactccaa

SEQ ID NO: 4666367 - DNA, 25 bp, Homo sapien
tgcttccaaacgtttttccaacaga

SEQ ID NO: 4666368 - DNA, 25 bp, Homo sapien
tcagtgtgctagctggcctttgtgc

SEQ ID NO: 4666369 - DNA, 25 bp, Homo sapien
agctggcctttgtgcttccaaacgt

SEQ ID NO: 4666370 - DNA, 25 bp, Homo sapien
tgtgcttccaaacgtttttccaaca

SEQ ID NO: 4666371 - DNA, 25 bp, Homo sapien
ttccatagggtgctatatagacgta

SEQ ID NO: 4666372 - DNA, 25 bp, Homo sapien
tgctatatagacgtaagcaagccat

SEQ ID NO: 4666373 - DNA, 25 bp, Homo sapien
tgtttgctttccgtccttccatagg

SEQ ID NO: 4666374 - DNA, 25 bp, Homo sapien
gatttgtcaattactgtttgctttc

SEQ ID NO: 4666375 - DNA, 25 bp, Homo sapien
tcagattgctcagaaaggcgtatca

SEQ ID NO: 4666376 - DNA, 25 bp, Homo sapien
tctggtgcgttcacacggtcttcag

SEQ ID NO: 4666377 - DNA, 25 bp, Homo sapien
gccagtagacgcagagcccactgtg

SEQ ID NO: 4666378 - DNA, 25 bp, Homo sapien
tggttctgcaagagcacacatcggg

SEQ ID NO: 4666379 - DNA, 25 bp, Homo sapien
aaaatgaacgtgatacctggaaggg

SEQ ID NO: 4666380 - DNA, 25 bp, Homo sapien
tggaaaatgaacgtgatacctggaa

SEQ ID NO: 4666381 - DNA, 25 bp, Homo sapien
cactatattgtgaccttgacaatga

SEQ ID NO: 4666382 - DNA, 25 bp, Homo sapien
agggcagccactatattgtgacctt

SEQ ID NO: 4666383 - DNA, 25 bp, Homo sapien
tggtgcgtctgcattgggccctgcc

SEQ ID NO: 4666384 - DNA, 25 bp, Homo sapien
gtgcgtctgcattgggccctgccca

SEQ ID NO: 4666385 - DNA, 25 bp, Homo sapien
ctggtgcgtctgcattgggccctgc

SEQ ID NO: 4666386 - DNA, 25 bp, Homo sapien
gcgtctgcattgggccctgcccagg

SEQ ID NO: 4666387 - DNA, 25 bp, Homo sapien
ttctcaggccctctgaatctgccag

SEQ ID NO: 4666388 - DNA, 25 bp, Homo sapien
atctgccagcagaatctctttccca

SEQ ID NO: 4666389 - DNA, 25 bp, Homo sapien
cgcctggttgctgagaagggattca

SEQ ID NO: 4666390 - DNA, 25 bp, Homo sapien
tgctgagaagggattcattctcagg

SEQ ID NO: 4666391 - DNA, 25 bp, Homo sapien
agtgaaagtagtgcaaagtccagaa

SEQ ID NO: 4666392 - DNA, 25 bp, Homo sapien
gcaatcgttacagttcagagtgaaa

SEQ ID NO: 4666393 - DNA, 25 bp, Homo sapien
agtgattgactcttccggcgaagga

SEQ ID NO: 4666394 - DNA, 25 bp, Homo sapien
cactgtactaggcaactgtgtagaa

SEQ ID NO: 4666395 - DNA, 25 bp, Homo sapien
tgggcaaagctgtcaatgttattca

SEQ ID NO: 4666396 - DNA, 25 bp, Homo sapien
caggccagcagctcgtaaacagggt

SEQ ID NO: 4666397 - DNA, 25 bp, Homo sapien
ctggcaaggatgcaaacagcaggcc

SEQ ID NO: 4666398 - DNA, 25 bp, Homo sapien
ggttttagcctttagctcatctaag

SEQ ID NO: 4666399 - DNA, 25 bp, Homo sapien
ctggggaggcaaagatatggaggct

SEQ ID NO: 4666400 - DNA, 25 bp, Homo sapien
agcctccaagatgggagccaggatc

SEQ ID NO: 4666401 - DNA, 25 bp, Homo sapien
tccaagatgggagccaggatcaggc

SEQ ID NO: 4666402 - DNA, 25 bp, Homo sapien
aggcaaagatatggaggcttcagcc

SEQ ID NO: 4666403 - DNA, 25 bp, Homo sapien
cccatactgccccttgagttccctg

SEQ ID NO: 4666404 - DNA, 25 bp, Homo sapien
agcctttacctggtgtcaagcgagg

SEQ ID NO: 4666405 - DNA, 25 bp, Homo sapien
gccaagcctttacctggtgtcaagc

SEQ ID NO: 4666406 - DNA, 25 bp, Homo sapien
ccgtgggtgtcagacacccccccat

SEQ ID NO: 4666407 - DNA, 25 bp, Homo sapien
ctgctttgctgactcactctcttct

SEQ ID NO: 4666408 - DNA, 25 bp, Homo sapien
agtgatgcactgtctgctttgctga

SEQ ID NO: 4666409 - DNA, 25 bp, Homo sapien
tttaggtcccacagtgatgcactgt

SEQ ID NO: 4666410 - DNA, 25 bp, Homo sapien
tgatgcactgtctgctttgctgact

SEQ ID NO: 4666411 - DNA, 25 bp, Homo sapien
ttggagatttcggtggttccatcat

SEQ ID NO: 4666412 - DNA, 25 bp, Homo sapien
gtttggagatttcggtggttccatc

SEQ ID NO: 4666413 - DNA, 25 bp, Homo sapien
tggagatttcggtggttccatcatg

SEQ ID NO: 4666414 - DNA, 25 bp, Homo sapien
tgtttggagatttcggtggttccat

SEQ ID NO: 4666415 - DNA, 25 bp, Homo sapien
ggccacatggaacactctgtttttg

SEQ ID NO: 4666416 - DNA, 25 bp, Homo sapien
cagaaagaggcaaaagcgattgggc

SEQ ID NO: 4666417 - DNA, 25 bp, Homo sapien
gattgggcccgacctctcccagtga

SEQ ID NO: 4666418 - DNA, 25 bp, Homo sapien
tagaagcataaccttatccaacaga

SEQ ID NO: 4666419 - DNA, 25 bp, Homo sapien
ggcttggagtggactccccgtgagc

SEQ ID NO: 4666420 - DNA, 25 bp, Homo sapien
gtcaaggcaaatgggctcagccgct

SEQ ID NO: 4666421 - DNA, 25 bp, Homo sapien
aggcttggagtggactccccgtgag

SEQ ID NO: 4666422 - DNA, 25 bp, Homo sapien
aaggcaaatgggctcagccgctgtt

SEQ ID NO: 4666423 - DNA, 25 bp, Homo sapien
ctttgctcaaaacggaccccaacag

SEQ ID NO: 4666424 - DNA, 25 bp, Homo sapien
ggaactccagcgtctcctttgctca

SEQ ID NO: 4666425 - DNA, 25 bp, Homo sapien
ttgctcaaaacggaccccaacagct

SEQ ID NO: 4666426 - DNA, 25 bp, Homo sapien
ctttcccatgggaactccagcgtct

SEQ ID NO: 4666427 - DNA, 25 bp, Homo sapien
ttccagttgcctgactgcctcttca

SEQ ID NO: 4666428 - DNA, 25 bp, Homo sapien
tccagttgcctgactgcctcttcac

SEQ ID NO: 4666429 - DNA, 25 bp, Homo sapien
cttccagttgcctgactgcctcttc

SEQ ID NO: 4666430 - DNA, 25 bp, Homo sapien
cgcgcggcggctcatggatttttta

SEQ ID NO: 4666431 - DNA, 25 bp, Homo sapien
cggcggctcatggattttttaaggt

SEQ ID NO: 4666432 - DNA, 25 bp, Homo sapien
cgcgcgcggcggctcatggattttt

SEQ ID NO: 4666433 - DNA, 25 bp, Homo sapien
taaggtaaaacgtacatacagtaga

SEQ ID NO: 4666434 - DNA, 25 bp, Homo sapien
tcggctggccgcatcggggacaggg

SEQ ID NO: 4666435 - DNA, 25 bp, Homo sapien
gccgcatcggggacagggaacaggt

SEQ ID NO: 4666436 - DNA, 25 bp, Homo sapien
cataaacccgaagcagacctccccg

SEQ ID NO: 4666437 - DNA, 25 bp, Homo sapien
gctcggctggccgcatcggggacag

SEQ ID NO: 4666438 - DNA, 25 bp, Homo sapien
tgtagtgaaaaccctgccttcctcg

SEQ ID NO: 4666439 - DNA, 25 bp, Homo sapien
tttgtgtcctagtctatcagcccca

SEQ ID NO: 4666440 - DNA, 25 bp, Homo sapien
ctgtagtgaaaaccctgccttcctc

SEQ ID NO: 4666441 - DNA, 25 bp, Homo sapien
atggggaaacaagctcaggggggcg

SEQ ID NO: 4666442 - DNA, 25 bp, Homo sapien
acaagctcaggggggcgaaccaggg

SEQ ID NO: 4666443 - DNA, 25 bp, Homo sapien
agctcaggggggcgaaccagggtag

SEQ ID NO: 4666444 - DNA, 25 bp, Homo sapien
gaaacaagctcaggggggcgaacca

SEQ ID NO: 4666445 - DNA, 25 bp, Homo sapien
cagtatttactgtagaacgttgttc

SEQ ID NO: 4666446 - DNA, 25 bp, Homo sapien
agctcgtattatttcttcataggaa

SEQ ID NO: 4666447 - DNA, 25 bp, Homo sapien
aaacaaaggaggtgacggccagtga

SEQ ID NO: 4666448 - DNA, 25 bp, Homo sapien
tgactgtgtgccaaacagtatttac

SEQ ID NO: 4666449 - DNA, 25 bp, Homo sapien
gctggtggcatttaaacgctggaga

SEQ ID NO: 4666450 - DNA, 25 bp, Homo sapien
gacagatttcgttttgagctggtgg

SEQ ID NO: 4666451 - DNA, 25 bp, Homo sapien
gaatagaaaccacggttgatgaacc

SEQ ID NO: 4666452 - DNA, 25 bp, Homo sapien
gagaaggtgtcgacctgggatcaat

SEQ ID NO: 4666453 - DNA, 25 bp, Homo sapien
gcagcaatgccaatagaaatctgtc

SEQ ID NO: 4666454 - DNA, 25 bp, Homo sapien
gctccctctccctaaggcttgtcct

SEQ ID NO: 4666455 - DNA, 25 bp, Homo sapien
taaaaacactgatggttggacccca

SEQ ID NO: 4666456 - DNA, 25 bp, Homo sapien
gccaatagaaatctgtccatgataa

SEQ ID NO: 4666457 - DNA, 25 bp, Homo sapien
catttacattaaggactcatggtag

SEQ ID NO: 4666458 - DNA, 25 bp, Homo sapien
ttctattggaaacattacagctatg

SEQ ID NO: 4666459 - DNA, 25 bp, Homo sapien
tagtagtcatcaagtcttttgacag

SEQ ID NO: 4666460 - DNA, 25 bp, Homo sapien
caattttggtggaaatgagtttgtg

SEQ ID NO: 4666461 - DNA, 25 bp, Homo sapien
cagggaagcacccagtgtcggctcc

SEQ ID NO: 4666462 - DNA, 25 bp, Homo sapien
gagaccagcacatgtcagggaagca

SEQ ID NO: 4666463 - DNA, 25 bp, Homo sapien
gggctccctcatctcgtaaccagag

SEQ ID NO: 4666464 - DNA, 25 bp, Homo sapien
tttgctctgaggtgtgggctccctc

SEQ ID NO: 4666465 - DNA, 25 bp, Homo sapien
gaacctcagggtatggagctcacat

SEQ ID NO: 4666466 - DNA, 25 bp, Homo sapien
caaattcaagagtggatgtggccct

SEQ ID NO: 4666467 - DNA, 25 bp, Homo sapien
gagaattcggtgacatgcctagtgc

SEQ ID NO: 4666468 - DNA, 25 bp, Homo sapien
cattgtgatggatgctggaacctca

SEQ ID NO: 4666469 - DNA, 25 bp, Homo sapien
tcctcccaccagctaattgtgtgac

SEQ ID NO: 4666470 - DNA, 25 bp, Homo sapien
gaatattgggtgactctaattcacc

SEQ ID NO: 4666471 - DNA, 25 bp, Homo sapien
taagcccatcgacatcagccaggta

SEQ ID NO: 4666472 - DNA, 25 bp, Homo sapien
tggaggctgcttgacagcgtgtgac

SEQ ID NO: 4666473 - DNA, 25 bp, Homo sapien
agccggagtgattaactctaacggg

SEQ ID NO: 4666474 - DNA, 25 bp, Homo sapien
tctaacggggctgtcccttggttgc

SEQ ID NO: 4666475 - DNA, 25 bp, Homo sapien
ccttggttgccgtgggatgcccagc

SEQ ID NO: 4666476 - DNA, 25 bp, Homo sapien
tctgtgaagccggagtgattaactc

SEQ ID NO: 4666477 - DNA, 25 bp, Homo sapien
cggtcttttgcgtgttcagcttcaa

SEQ ID NO: 4666478 - DNA, 25 bp, Homo sapien
cactgacgtgtttcatggactttta

SEQ ID NO: 4666479 - DNA, 25 bp, Homo sapien
tgtggctgcactacttcagagactg

SEQ ID NO: 4666480 - DNA, 25 bp, Homo sapien
tagattagaatgtaacactgacgtg

SEQ ID NO: 4666481 - DNA, 25 bp, Homo sapien
gcaccacccgagtgagagacgggct

SEQ ID NO: 4666482 - DNA, 25 bp, Homo sapien
ggtcagcctttatggcaccacccga

SEQ ID NO: 4666483 - DNA, 25 bp, Homo sapien
gacgggctggaccttacggacattg

SEQ ID NO: 4666484 - DNA, 25 bp, Homo sapien
tcttctgttccaggtagtggtgatc

SEQ ID NO: 4666485 - DNA, 25 bp, Homo sapien
cgaagcagtcctctgattgggcgga

SEQ ID NO: 4666486 - DNA, 25 bp, Homo sapien
tcaagatgctggttccgatgacccc

SEQ ID NO: 4666487 - DNA, 25 bp, Homo sapien
cacagctttgcccatgaaacgcaga

SEQ ID NO: 4666488 - DNA, 25 bp, Homo sapien
ttatatcgacgcgaggacaggagac

SEQ ID NO: 4666489 - DNA, 25 bp, Homo sapien
cacccaggctgtaagatgtttcatt

SEQ ID NO: 4666490 - DNA, 25 bp, Homo sapien
caatgcgaaaaagaagagctgcttc

SEQ ID NO: 4666491 - DNA, 25 bp, Homo sapien
tgtccccaaaagaggatgacgctga

SEQ ID NO: 4666492 - DNA, 25 bp, Homo sapien
gggaattgttgctgacaccttttta

SEQ ID NO: 4666493 - DNA, 25 bp, Homo sapien
ggccagggagcctgcgtgcgaaggt

SEQ ID NO: 4666494 - DNA, 25 bp, Homo sapien
gagcctgcgtgcgaaggtggagact

SEQ ID NO: 4666495 - DNA, 25 bp, Homo sapien
tgcgtgcgaaggtggagactcgcat

SEQ ID NO: 4666496 - DNA, 25 bp, Homo sapien
tgcgaaggtggagactcgcattgtc

SEQ ID NO: 4666497 - DNA, 25 bp, Homo sapien
tccagctaatcctgatggcaacaaa

SEQ ID NO: 4666498 - DNA, 25 bp, Homo sapien
tgctgacccggtgatgaaacttcct

SEQ ID NO: 4666499 - DNA, 25 bp, Homo sapien
ggtccttatgtactggcccctaatc

SEQ ID NO: 4666500 - DNA, 25 bp, Homo sapien
caaaatcatgaaagtggcccccagt

SEQ ID NO: 4666501 - DNA, 25 bp, Homo sapien
tgcatgatgcgggaatttattgcta

SEQ ID NO: 4666502 - DNA, 25 bp, Homo sapien
tggtgttgacagaatatagttcaca

SEQ ID NO: 4666503 - DNA, 25 bp, Homo sapien
ttttggttggtggctataagaagtg

SEQ ID NO: 4666504 - DNA, 25 bp, Homo sapien
tgaaatgcatgatgcgggaatttat

SEQ ID NO: 4666505 - DNA, 25 bp, Homo sapien
ccagttctgtgcaagagggactgct

SEQ ID NO: 4666506 - DNA, 25 bp, Homo sapien
tctcttgttggtgaatacgccaaac

SEQ ID NO: 4666507 - DNA, 25 bp, Homo sapien
tggtgaatacgccaaacagaagaga

SEQ ID NO: 4666508 - DNA, 25 bp, Homo sapien
aacagatacggctttgatgggacag

SEQ ID NO: 4666509 - DNA, 25 bp, Homo sapien
tgttgcggaccgaaaccagttgact

SEQ ID NO: 4666510 - DNA, 25 bp, Homo sapien
gattagcataattagcaccgagcag

SEQ ID NO: 4666511 - DNA, 25 bp, Homo sapien
gaggcgctggactgctaaatgcaac

SEQ ID NO: 4666512 - DNA, 25 bp, Homo sapien
tgcaaccatttttcgcagcagcgag

SEQ ID NO: 4666513 - DNA, 25 bp, Homo sapien
gaagtaagaagtctgctaatgatga

SEQ ID NO: 4666514 - DNA, 25 bp, Homo sapien
ggatgtagcccacgatatgttctga

SEQ ID NO: 4666515 - DNA, 25 bp, Homo sapien
taatgatgattgttcggagctgaga

SEQ ID NO: 4666516 - DNA, 25 bp, Homo sapien
cctccggtataacgtgtcgtacgat

SEQ ID NO: 4666517 - DNA, 25 bp, Homo sapien
tcctccgtgagaggaagccctcccg

SEQ ID NO: 4666518 - DNA, 25 bp, Homo sapien
ctcctccgtgagaggaagccctccc

SEQ ID NO: 4666519 - DNA, 25 bp, Homo sapien
cctccgtgagaggaagccctcccgg

SEQ ID NO: 4666520 - DNA, 25 bp, Homo sapien
gaggaggaagctctgcgggattctc

SEQ ID NO: 4666521 - DNA, 25 bp, Homo sapien
agctctgcgggattctctcagtggg

SEQ ID NO: 4666522 - DNA, 25 bp, Homo sapien
aggaggaagctctgcgggattctct

SEQ ID NO: 4666523 - DNA, 25 bp, Homo sapien
gctctgcgggattctctcagtggga

SEQ ID NO: 4666524 - DNA, 25 bp, Homo sapien
gattttggccgactctgaagcttta

SEQ ID NO: 4666525 - DNA, 25 bp, Homo sapien
cagtgagtggagcacaaaccatggc

SEQ ID NO: 4666526 - DNA, 25 bp, Homo sapien
cacgagaggtcttggttgacatcca

SEQ ID NO: 4666527 - DNA, 25 bp, Homo sapien
ccagtgggcacatggagcttggcta

SEQ ID NO: 4666528 - DNA, 25 bp, Homo sapien
gaaataagtcttggtcccctgtgct

SEQ ID NO: 4666529 - DNA, 25 bp, Homo sapien
ttcaagccagctgtgggagatacta

SEQ ID NO: 4666530 - DNA, 25 bp, Homo sapien
gagatactagatacagagctgccat

SEQ ID NO: 4666531 - DNA, 25 bp, Homo sapien
tcttggcagaagatgtgattcccct

SEQ ID NO: 4666532 - DNA, 25 bp, Homo sapien
ccttcgcggtgggattaaaagcagc

SEQ ID NO: 4666533 - DNA, 25 bp, Homo sapien
tgatagagatattcgccagcgcaca

SEQ ID NO: 4666534 - DNA, 25 bp, Homo sapien
aagttcttggttgtgggcctcctca

SEQ ID NO: 4666535 - DNA, 25 bp, Homo sapien
tatgttgttccaaagagcgctcgcc

SEQ ID NO: 4666536 - DNA, 25 bp, Homo sapien
gcagcctgcggccagcagcgtcctc

SEQ ID NO: 4666537 - DNA, 25 bp, Homo sapien
ggcagcggctgtatcggtgccccgg

SEQ ID NO: 4666538 - DNA, 25 bp, Homo sapien
agcagcggctggtctgtcaaccgga

SEQ ID NO: 4666539 - DNA, 25 bp, Homo sapien
tggcctcggctggtaacgccgccga

SEQ ID NO: 4666540 - DNA, 25 bp, Homo sapien
tgcacacactgggttgcctacctgg

SEQ ID NO: 4666541 - DNA, 25 bp, Homo sapien
tatcttaatgcgaggcgttgttccc

SEQ ID NO: 4666542 - DNA, 25 bp, Homo sapien
tgagtaatttctgccctccgcgagc

SEQ ID NO: 4666543 - DNA, 25 bp, Homo sapien
cgtgtctaccgcgaggcaaatgttc

SEQ ID NO: 4666544 - DNA, 25 bp, Homo sapien
tgttttcaatgaatccagcatcggg

SEQ ID NO: 4666545 - DNA, 25 bp, Homo sapien
tcctaccgcagggaggaacgtaata

SEQ ID NO: 4666546 - DNA, 25 bp, Homo sapien
cccgggatgccttggtgacactgga

SEQ ID NO: 4666547 - DNA, 25 bp, Homo sapien
cagaatccacctcaaagggtcgcgt

SEQ ID NO: 4666548 - DNA, 25 bp, Homo sapien
ttatcgctgggaatgtcgcactcgc

SEQ ID NO: 4666549 - DNA, 25 bp, Homo sapien
taagggcagattgattaggaacaac

SEQ ID NO: 4666550 - DNA, 25 bp, Homo sapien
ttaacaaacccggtgtggcacagca

SEQ ID NO: 4666551 - DNA, 25 bp, Homo sapien
ggcatgcatattaaagccgacaatg

SEQ ID NO: 4666552 - DNA, 25 bp, Homo sapien
catgactgggagaccaaaatgacaa

SEQ ID NO: 4666553 - DNA, 25 bp, Homo sapien
ccatggatatttgtagtattggaac

SEQ ID NO: 4666554 - DNA, 25 bp, Homo sapien
aatccggagagcttaaggcatctgc

SEQ ID NO: 4666555 - DNA, 25 bp, Homo sapien
tgagaagtcttggatcatgactggg

SEQ ID NO: 4666556 - DNA, 25 bp, Homo sapien
tcataactccaccaagtctggcttc

SEQ ID NO: 4666557 - DNA, 25 bp, Homo sapien
ataactccaccaagtctggcttcca

SEQ ID NO: 4666558 - DNA, 25 bp, Homo sapien
aagtctggcttccacaattgcttac

SEQ ID NO: 4666559 - DNA, 25 bp, Homo sapien
ccaagtctggcttccacaattgctt

SEQ ID NO: 4666560 - DNA, 25 bp, Homo sapien
ttgtagctgctgaatctccccccac

SEQ ID NO: 4666561 - DNA, 25 bp, Homo sapien
gtagctgctgaatctccccccaccc

SEQ ID NO: 4666562 - DNA, 25 bp, Homo sapien
tgtagctgctgaatctccccccacc

SEQ ID NO: 4666563 - DNA, 25 bp, Homo sapien
ttgacaagttggctagagctgttcc

SEQ ID NO: 4666564 - DNA, 25 bp, Homo sapien
acaagttggctagagctgttccctt

SEQ ID NO: 4666565 - DNA, 25 bp, Homo sapien
tattttgacaagttggctagagctg

SEQ ID NO: 4666566 - DNA, 25 bp, Homo sapien
ttttgacaagttggctagagctgtt

SEQ ID NO: 4666567 - DNA, 25 bp, Homo sapien
catgcaggacccaatagcagagatc

SEQ ID NO: 4666568 - DNA, 25 bp, Homo sapien
ccagcagtgggtcaaagggatcatg

SEQ ID NO: 4666569 - DNA, 25 bp, Homo sapien
aaaaatgccagtgctcccgggtttg

SEQ ID NO: 4666570 - DNA, 25 bp, Homo sapien
gaatggtgtgcctcctagcaaacgc

SEQ ID NO: 4666571 - DNA, 25 bp, Homo sapien
cccaggagggctaagatagtggttt

SEQ ID NO: 4666572 - DNA, 25 bp, Homo sapien
agtctgtgggttcctcggagagatt

SEQ ID NO: 4666573 - DNA, 25 bp, Homo sapien
cggagagattgtaggagcaatagtc

SEQ ID NO: 4666574 - DNA, 25 bp, Homo sapien
gagcaatagtcagtggattccaagc

SEQ ID NO: 4666575 - DNA, 25 bp, Homo sapien
gcttccatcagcgtattgaatttgg

SEQ ID NO: 4666576 - DNA, 25 bp, Homo sapien
ccatcagcgtattgaatttggaaag

SEQ ID NO: 4666577 - DNA, 25 bp, Homo sapien
taaactctgaggaaagcgatgaggg

SEQ ID NO: 4666578 - DNA, 25 bp, Homo sapien
ctaatccctagcattaaatccaggg

SEQ ID NO: 4666579 - DNA, 25 bp, Homo sapien
ctgaacaggctccggttttccaggg

SEQ ID NO: 4666580 - DNA, 25 bp, Homo sapien
actgaacaggctccggttttccagg

SEQ ID NO: 4666581 - DNA, 25 bp, Homo sapien
tactgaacaggctccggttttccag

SEQ ID NO: 4666582 - DNA, 25 bp, Homo sapien
ctactgaacaggctccggttttcca

SEQ ID NO: 4666583 - DNA, 25 bp, Homo sapien
cacatttcagggatgctaataaggt

SEQ ID NO: 4666584 - DNA, 25 bp, Homo sapien
aatgggttaaatctctcatagcaca

SEQ ID NO: 4666585 - DNA, 25 bp, Homo sapien
ccttgggccatcaaggaaatcttca

SEQ ID NO: 4666586 - DNA, 25 bp, Homo sapien
tgtgctgagagtatcccttgggcca

SEQ ID NO: 4666587 - DNA, 25 bp, Homo sapien
cacaggttaacgctcctatttcctg

SEQ ID NO: 4666588 - DNA, 25 bp, Homo sapien
gtgtctggcaaaggccgccaaccat

SEQ ID NO: 4666589 - DNA, 25 bp, Homo sapien
gaccaagaccagaagggcgagtgtc

SEQ ID NO: 4666590 - DNA, 25 bp, Homo sapien
cagcacacaggttaacgctcctatt

SEQ ID NO: 4666591 - DNA, 25 bp, Homo sapien
ctgctctctgcgccctgagtgggag

SEQ ID NO: 4666592 - DNA, 25 bp, Homo sapien
tgctctctgcgccctgagtgggagc

SEQ ID NO: 4666593 - DNA, 25 bp, Homo sapien
tcctaggtgggcttctaagtgggcc

SEQ ID NO: 4666594 - DNA, 25 bp, Homo sapien
gatgccaggagctccgctgctgatt

SEQ ID NO: 4666595 - DNA, 25 bp, Homo sapien
ggcctcctaggtgggcttctaagtg

SEQ ID NO: 4666596 - DNA, 25 bp, Homo sapien
gtgggcccaggactcagcatctgag

SEQ ID NO: 4666597 - DNA, 25 bp, Homo sapien
cagcgagtcataggcagcgcaagat

SEQ ID NO: 4666598 - DNA, 25 bp, Homo sapien
ggagcaagaagactgcacagcgagt

SEQ ID NO: 4666599 - DNA, 25 bp, Homo sapien
gcacggggagcaagaagactgcaca

SEQ ID NO: 4666600 - DNA, 25 bp, Homo sapien
gaagactgcacagcgagtcataggc

SEQ ID NO: 4666601 - DNA, 25 bp, Homo sapien
caaatcccacgttgggacattgacc

SEQ ID NO: 4666602 - DNA, 25 bp, Homo sapien
tctgcgggtaaaagcctctgcctca

SEQ ID NO: 4666603 - DNA, 25 bp, Homo sapien
gcctcaaagtgagcaacaaatccca

SEQ ID NO: 4666604 - DNA, 25 bp, Homo sapien
cccactgagttggacctcaggcctt

SEQ ID NO: 4666605 - DNA, 25 bp, Homo sapien
gaggcgctacagagcatgccgtgct

SEQ ID NO: 4666606 - DNA, 25 bp, Homo sapien
gagcttggacactgaggcgctacag

SEQ ID NO: 4666607 - DNA, 25 bp, Homo sapien
gggattcgctgaagagcttggacac

SEQ ID NO: 4666608 - DNA, 25 bp, Homo sapien
gagcatgccgtgctcaccaatgtcc

SEQ ID NO: 4666609 - DNA, 25 bp, Homo sapien
ctgcattcacctgcatttcagaagc

SEQ ID NO: 4666610 - DNA, 25 bp, Homo sapien
gtatgaatagggagacccaccggga

SEQ ID NO: 4666611 - DNA, 25 bp, Homo sapien
cttgcgaagcatagaagttccctag

SEQ ID NO: 4666612 - DNA, 25 bp, Homo sapien
ttccagagtccaagcaacagtatga

SEQ ID NO: 4666613 - DNA, 25 bp, Homo sapien
cctaggtcaaggcttacagactcaa

SEQ ID NO: 4666614 - DNA, 25 bp, Homo sapien
gcactaaacagactccatagtcatt

SEQ ID NO: 4666615 - DNA, 25 bp, Homo sapien
tctgactgcaagaaggggacgcaga

SEQ ID NO: 4666616 - DNA, 25 bp, Homo sapien
ggtaagagcacacgtcaactgtggg

SEQ ID NO: 4666617 - DNA, 25 bp, Homo sapien
tcagcagaaagcgagacaactcctg

SEQ ID NO: 4666618 - DNA, 25 bp, Homo sapien
ggaacagccagacaccttccattct

SEQ ID NO: 4666619 - DNA, 25 bp, Homo sapien
agtgtctaaaatagagcggcttggg

SEQ ID NO: 4666620 - DNA, 25 bp, Homo sapien
aagtgtctaaaatagagcggcttgg

SEQ ID NO: 4666621 - DNA, 25 bp, Homo sapien
ccagcagcgggggaacagccagaca

SEQ ID NO: 4666622 - DNA, 25 bp, Homo sapien
ctgaggcacccacttccaagagcgc

SEQ ID NO: 4666623 - DNA, 25 bp, Homo sapien
atttaaattcctgagggattgatct

SEQ ID NO: 4666624 - DNA, 25 bp, Homo sapien
cgcctggtgacagcaacttcaatgt

SEQ ID NO: 4666625 - DNA, 25 bp, Homo sapien
tcatcaccagcctaagggtcaggcc

SEQ ID NO: 4666626 - DNA, 25 bp, Homo sapien
cagcaactgtaactgtcctctgcac

SEQ ID NO: 4666627 - DNA, 25 bp, Homo sapien
gcccagcaactgtaactgtcctctg

SEQ ID NO: 4666628 - DNA, 25 bp, Homo sapien
cccagcaactgtaactgtcctctgc

SEQ ID NO: 4666629 - DNA, 25 bp, Homo sapien
ccagcaactgtaactgtcctctgca

SEQ ID NO: 4666630 - DNA, 25 bp, Homo sapien
tacttgttcattggttatccatcca

SEQ ID NO: 4666631 - DNA, 25 bp, Homo sapien
acagtttttgaaaacctgccatgtg

SEQ ID NO: 4666632 - DNA, 25 bp, Homo sapien
tcaagcactgcacaagatcacactg

SEQ ID NO: 4666633 - DNA, 25 bp, Homo sapien
catccaatgcgcttattgacagttt

SEQ ID NO: 4666634 - DNA, 25 bp, Homo sapien
tgcatttgtttcaccaagagtggtt

SEQ ID NO: 4666635 - DNA, 25 bp, Homo sapien
gagaattgggtttggaagtggcgta

SEQ ID NO: 4666636 - DNA, 25 bp, Homo sapien
ctggagagaattgggtttggaagtg

SEQ ID NO: 4666637 - DNA, 25 bp, Homo sapien
aaggggagatgataagtgcatttgt

SEQ ID NO: 4666638 - DNA, 25 bp, Homo sapien
tgtggccgtgtgtcctggtttagaa

SEQ ID NO: 4666639 - DNA, 25 bp, Homo sapien
cctctttgaagttaggtgtggccgt

SEQ ID NO: 4666640 - DNA, 25 bp, Homo sapien
tctttgaagttaggtgtggccgtgt

SEQ ID NO: 4666641 - DNA, 25 bp, Homo sapien
cgtgtgtcctggtttagaatcaggc

SEQ ID NO: 4666642 - DNA, 25 bp, Homo sapien
caacgcagcgctgagcaattgcatt

SEQ ID NO: 4666643 - DNA, 25 bp, Homo sapien
ccctagcaacgcagcgctgagcaat

SEQ ID NO: 4666644 - DNA, 25 bp, Homo sapien
actggtggagttgacggtgcctcac

SEQ ID NO: 4666645 - DNA, 25 bp, Homo sapien
tcacaagacgggcatgcacctacac

SEQ ID NO: 4666646 - DNA, 25 bp, Homo sapien
ctctgagcagatgtgagatacacca

SEQ ID NO: 4666647 - DNA, 25 bp, Homo sapien
cagccatcccatggaatcggcttgg

SEQ ID NO: 4666648 - DNA, 25 bp, Homo sapien
catgagctcaatcttgtctcctgga

SEQ ID NO: 4666649 - DNA, 25 bp, Homo sapien
gccatcccatggaatcggcttgggt

SEQ ID NO: 4666650 - DNA, 25 bp, Homo sapien
ccgacccaccgtccccagagtgtga

SEQ ID NO: 4666651 - DNA, 25 bp, Homo sapien
tacttggattgtaaacttccctgca

SEQ ID NO: 4666652 - DNA, 25 bp, Homo sapien
catatcagtgagctaacgggttggc

SEQ ID NO: 4666653 - DNA, 25 bp, Homo sapien
tttcaaaaccattgatgccctgatt

SEQ ID NO: 4666654 - DNA, 25 bp, Homo sapien
tctgaacatgggtctggtacttgga

SEQ ID NO: 4666655 - DNA, 25 bp, Homo sapien
gttttgtcttctggatgctagaaac

SEQ ID NO: 4666656 - DNA, 25 bp, Homo sapien
ccagaaggttttgtcttctggatgc

SEQ ID NO: 4666657 - DNA, 25 bp, Homo sapien
tttgtcttctggatgctagaaacat

SEQ ID NO: 4666658 - DNA, 25 bp, Homo sapien
tgtcttctggatgctagaaacatac

SEQ ID NO: 4666659 - DNA, 25 bp, Homo sapien
caaatgaagccaccagtgcagacga

SEQ ID NO: 4666660 - DNA, 25 bp, Homo sapien
gattgattacttctatcactagatt

SEQ ID NO: 4666661 - DNA, 25 bp, Homo sapien
tgtgtattttgactaaccatgggaa

SEQ ID NO: 4666662 - DNA, 25 bp, Homo sapien
tcaggtattccttagattgattact

SEQ ID NO: 4666663 - DNA, 25 bp, Homo sapien
caggtgccggctggcatcggctgtt

SEQ ID NO: 4666664 - DNA, 25 bp, Homo sapien
tgctccacaggtgccggctggcatc

SEQ ID NO: 4666665 - DNA, 25 bp, Homo sapien
gccggctggcatcggctgttttccc

SEQ ID NO: 4666666 - DNA, 25 bp, Homo sapien
gtgctccacaggtgccggctggcat

SEQ ID NO: 4666667 - DNA, 25 bp, Homo sapien
tgtttcccagatgccgggccagaag

SEQ ID NO: 4666668 - DNA, 25 bp, Homo sapien
ttcccagatgccgggccagaagatt

SEQ ID NO: 4666669 - DNA, 25 bp, Homo sapien
tgaaggtcccaggtaagtagggcca

SEQ ID NO: 4666670 - DNA, 25 bp, Homo sapien
tttagcataaagattgtttcccaga

SEQ ID NO: 4666671 - DNA, 25 bp, Homo sapien
tgtctgcagtttgacctgaatgctg

SEQ ID NO: 4666672 - DNA, 25 bp, Homo sapien
tacgtccaattgtctgcagtttgac

SEQ ID NO: 4666673 - DNA, 25 bp, Homo sapien
atgggtggtccagggctattacttc

SEQ ID NO: 4666674 - DNA, 25 bp, Homo sapien
tttggaaggtggtcaaatgagctac

SEQ ID NO: 4666675 - DNA, 25 bp, Homo sapien
agggccccaagcatctgctatcgag

SEQ ID NO: 4666676 - DNA, 25 bp, Homo sapien
tcatcatttcacaatcaaggttggt

SEQ ID NO: 4666677 - DNA, 25 bp, Homo sapien
tttcatggcctgagcttggatgtgg

SEQ ID NO: 4666678 - DNA, 25 bp, Homo sapien
atggcctcacagacctgcggcagaa

SEQ ID NO: 4666679 - DNA, 25 bp, Homo sapien
gatcctccatccgtttctctgcgtg

SEQ ID NO: 4666680 - DNA, 25 bp, Homo sapien
tcattcttagagcagcacccaagcc

SEQ ID NO: 4666681 - DNA, 25 bp, Homo sapien
tatgctgcaccgtaaaattgattcc

SEQ ID NO: 4666682 - DNA, 25 bp, Homo sapien
tctctgcgtgctgtgttatgctgca

SEQ ID NO: 4666683 - DNA, 25 bp, Homo sapien
ctaggtgaccgaaggccaccttcat

SEQ ID NO: 4666684 - DNA, 25 bp, Homo sapien
gttctgtacctccacgtccaggaaa

SEQ ID NO: 4666685 - DNA, 25 bp, Homo sapien
ccaggaaacggtcagcaaggagcct

SEQ ID NO: 4666686 - DNA, 25 bp, Homo sapien
actcggcccaggtcgttctgtacct

SEQ ID NO: 4666687 - DNA, 25 bp, Homo sapien
cttcgctggtcgctttcactcggcc

SEQ ID NO: 4666688 - DNA, 25 bp, Homo sapien
agtccggagaaggtggagaccccag

SEQ ID NO: 4666689 - DNA, 25 bp, Homo sapien
ctgtctccagccctacgggctcccg

SEQ ID NO: 4666690 - DNA, 25 bp, Homo sapien
ggggactgtgccgtccgcagcggct

SEQ ID NO: 4666691 - DNA, 25 bp, Homo sapien
ccacggagtccggagaaggtggaga

SEQ ID NO: 4666692 - DNA, 25 bp, Homo sapien
aagggcggtgcgggcctcccacgcg

SEQ ID NO: 4666693 - DNA, 25 bp, Homo sapien
ggcggtgcgggcctcccacgcgcac

SEQ ID NO: 4666694 - DNA, 25 bp, Homo sapien
agggcggtgcgggcctcccacgcgc

SEQ ID NO: 4666695 - DNA, 25 bp, Homo sapien
gggcggtgcgggcctcccacgcgca

SEQ ID NO: 4666696 - DNA, 25 bp, Homo sapien
ctctggcctctggccgaacctggct

SEQ ID NO: 4666697 - DNA, 25 bp, Homo sapien
gcccagcatttccaagcgggcctgt

SEQ ID NO: 4666698 - DNA, 25 bp, Homo sapien
ctgggcgcccagcatttccaagcgg

SEQ ID NO: 4666699 - DNA, 25 bp, Homo sapien
cagcatttccaagcgggcctgtggg

SEQ ID NO: 4666700 - DNA, 25 bp, Homo sapien
ggcatccagaaactgcaacagagat

SEQ ID NO: 4666701 - DNA, 25 bp, Homo sapien
acaaagagccccaggttatcatggg

SEQ ID NO: 4666702 - DNA, 25 bp, Homo sapien
caaagggacatgaataccagatctg

SEQ ID NO: 4666703 - DNA, 25 bp, Homo sapien
gaatctacttgtgcacgttggccag

SEQ ID NO: 4666704 - DNA, 25 bp, Homo sapien
aaaaatgcacatcgctttcaaaagg

SEQ ID NO: 4666705 - DNA, 25 bp, Homo sapien
ttgggagcctctcacgtgtgaaatt

SEQ ID NO: 4666706 - DNA, 25 bp, Homo sapien
ttagaatctctcgtgaataagaatg

SEQ ID NO: 4666707 - DNA, 25 bp, Homo sapien
taatatgtggagaggtcaaaaatgc

SEQ ID NO: 4666708 - DNA, 25 bp, Homo sapien
tttccttgatctgagtggagcacaa

SEQ ID NO: 4666709 - DNA, 25 bp, Homo sapien
cttatttgccaggtaagagctgagg

SEQ ID NO: 4666710 - DNA, 25 bp, Homo sapien
gaaccagtgggctgtacagacagca

SEQ ID NO: 4666711 - DNA, 25 bp, Homo sapien
gcacaatcgatgctgctggtcctag

SEQ ID NO: 4666712 - DNA, 25 bp, Homo sapien
gactgaatagatcccattccctgat

SEQ ID NO: 4666713 - DNA, 25 bp, Homo sapien
cctgatctctttagaaatggttcca

SEQ ID NO: 4666714 - DNA, 25 bp, Homo sapien
gatcccattccctgatacttcctga

SEQ ID NO: 4666715 - DNA, 25 bp, Homo sapien
aggtaaccgaaagactgaatagatc

SEQ ID NO: 4666716 - DNA, 25 bp, Homo sapien
gatgcaggttccatggatagcaagg

SEQ ID NO: 4666717 - DNA, 25 bp, Homo sapien
ctggatatgtagatgcaggttccat

SEQ ID NO: 4666718 - DNA, 25 bp, Homo sapien
tccatggatagcaaggctgactttc

SEQ ID NO: 4666719 - DNA, 25 bp, Homo sapien
gatagcaaggctgactttcagcttc

SEQ ID NO: 4666720 - DNA, 25 bp, Homo sapien
ctgtccaagttacagctggctttgc

SEQ ID NO: 4666721 - DNA, 25 bp, Homo sapien
ttgaaaggtcagcataatcagcccc

SEQ ID NO: 4666722 - DNA, 25 bp, Homo sapien
cattgccaagaagggttgaaaggtc

SEQ ID NO: 4666723 - DNA, 25 bp, Homo sapien
acaaaatgttgctctagctgcggct

SEQ ID NO: 4666724 - DNA, 25 bp, Homo sapien
gaatagagatcgtccctttctctcc

SEQ ID NO: 4666725 - DNA, 25 bp, Homo sapien
gccaactattgaccccttgtctagg

SEQ ID NO: 4666726 - DNA, 25 bp, Homo sapien
tctggtgaacagaaattccttgggt

SEQ ID NO: 4666727 - DNA, 25 bp, Homo sapien
agagccagcggtttcatcaagccaa

SEQ ID NO: 4666728 - DNA, 25 bp, Homo sapien
ttcatcaaaatgagcatggcctccc

SEQ ID NO: 4666729 - DNA, 25 bp, Homo sapien
atcaaaatgagcatggcctcccccc

SEQ ID NO: 4666730 - DNA, 25 bp, Homo sapien
ctgcttcatcaaaatgagcatggcc

SEQ ID NO: 4666731 - DNA, 25 bp, Homo sapien
atgagcatggcctcccccctttcca

SEQ ID NO: 4666732 - DNA, 25 bp, Homo sapien
catgcacaggccaattctcatcctg

SEQ ID NO: 4666733 - DNA, 25 bp, Homo sapien
acaggccaattctcatcctgctggg

SEQ ID NO: 4666734 - DNA, 25 bp, Homo sapien
tctccatgcacaggccaattctcat

SEQ ID NO: 4666735 - DNA, 25 bp, Homo sapien
ctttgcccctgctgttcccagacag

SEQ ID NO: 4666736 - DNA, 25 bp, Homo sapien
ctgaataggaacagactaagaaatc

SEQ ID NO: 4666737 - DNA, 25 bp, Homo sapien
cctggctgtctgtcggcaggaggga

SEQ ID NO: 4666738 - DNA, 25 bp, Homo sapien
tccctgaataggaacagactaagaa

SEQ ID NO: 4666739 - DNA, 25 bp, Homo sapien
cttccctgaataggaacagactaag

SEQ ID NO: 4666740 - DNA, 25 bp, Homo sapien
acaggcatcgaaaacccggcctagc

SEQ ID NO: 4666741 - DNA, 25 bp, Homo sapien
tcccgggctgttttcaggagcagct

SEQ ID NO: 4666742 - DNA, 25 bp, Homo sapien
caaacagccctcataaaaccacaga

SEQ ID NO: 4666743 - DNA, 25 bp, Homo sapien
agtggagtgctcagtgcagcgggcg

SEQ ID NO: 4666744 - DNA, 25 bp, Homo sapien
tgccgaggactccagcgaaagcttg

SEQ ID NO: 4666745 - DNA, 25 bp, Homo sapien
aaaagattttacagccgcccacctg

SEQ ID NO: 4666746 - DNA, 25 bp, Homo sapien
aaatttaccagatacgaacagggag

SEQ ID NO: 4666747 - DNA, 25 bp, Homo sapien
cctggaccatgggtactgccggtcg

SEQ ID NO: 4666748 - DNA, 25 bp, Homo sapien
caagtaagtaaagagcgcagcgtag

SEQ ID NO: 4666749 - DNA, 25 bp, Homo sapien
caaagcttgtgactctgctgggcag

SEQ ID NO: 4666750 - DNA, 25 bp, Homo sapien
aaatccatggcggacaaaggctggc

SEQ ID NO: 4666751 - DNA, 25 bp, Homo sapien
tagggctgatcatgcagggaccacc

SEQ ID NO: 4666752 - DNA, 25 bp, Homo sapien
tctttaccatccagatcacagggtc

SEQ ID NO: 4666753 - DNA, 25 bp, Homo sapien
gcagttttcaaccacccaaatggag

SEQ ID NO: 4666754 - DNA, 25 bp, Homo sapien
ctgctgtgtggatgacgatatggcc

SEQ ID NO: 4666755 - DNA, 25 bp, Homo sapien
aacacctcagaaagtccgtagtcca

SEQ ID NO: 4666756 - DNA, 25 bp, Homo sapien
gacacagtctcaacctcgtgggact

SEQ ID NO: 4666757 - DNA, 25 bp, Homo sapien
ggtgctatcgagttatgctgctgca

SEQ ID NO: 4666758 - DNA, 25 bp, Homo sapien
tgggcacgccgctaatatatgaagc

SEQ ID NO: 4666759 - DNA, 25 bp, Homo sapien
tatgaagccccgcttaagtccggag

SEQ ID NO: 4666760 - DNA, 25 bp, Homo sapien
gcactgtgtattgcttgaatgctca

SEQ ID NO: 4666761 - DNA, 25 bp, Homo sapien
catgcagtatgcgtttgtaattcag

SEQ ID NO: 4666762 - DNA, 25 bp, Homo sapien
gaatgctcagggctgcgttcaacta

SEQ ID NO: 4666763 - DNA, 25 bp, Homo sapien
caaatgtggcaaagcatgatatctt

SEQ ID NO: 4666764 - DNA, 25 bp, Homo sapien
tccacaacatcttgcagcagacgga

SEQ ID NO: 4666765 - DNA, 25 bp, Homo sapien
gatgtagatccacaacatcttgcag

SEQ ID NO: 4666766 - DNA, 25 bp, Homo sapien
catcttgcagcagacggaaatagga

SEQ ID NO: 4666767 - DNA, 25 bp, Homo sapien
tttggatgtagatccacaacatctt

SEQ ID NO: 4666768 - DNA, 25 bp, Homo sapien
cattctgatccattgtacaccacgg

SEQ ID NO: 4666769 - DNA, 25 bp, Homo sapien
taagtcggcattgatgctcaaccga

SEQ ID NO: 4666770 - DNA, 25 bp, Homo sapien
gatgtgcgaatcctttaagtcggca

SEQ ID NO: 4666771 - DNA, 25 bp, Homo sapien
tcccaatgccttcaagatgtgcgaa

SEQ ID NO: 4666772 - DNA, 25 bp, Homo sapien
cagcggcctaaggagggctgccttc

SEQ ID NO: 4666773 - DNA, 25 bp, Homo sapien
gaccaaatccttccgcattcctagg

SEQ ID NO: 4666774 - DNA, 25 bp, Homo sapien
cattcctaggtggagagagagccca

SEQ ID NO: 4666775 - DNA, 25 bp, Homo sapien
tacttgctcggaaggaggaactggc

SEQ ID NO: 4666776 - DNA, 25 bp, Homo sapien
cagcagaggtgcatgcgttctggaa

SEQ ID NO: 4666777 - DNA, 25 bp, Homo sapien
agcagcagaggtgcatgcgttctgg

SEQ ID NO: 4666778 - DNA, 25 bp, Homo sapien
agaggtgcatgcgttctggaaggta

SEQ ID NO: 4666779 - DNA, 25 bp, Homo sapien
aggtgcatgcgttctggaaggtaaa

SEQ ID NO: 4666780 - DNA, 25 bp, Homo sapien
tccaaatcttgagccctacccaaat

SEQ ID NO: 4666781 - DNA, 25 bp, Homo sapien
ttccaaatcttgagccctacccaaa

SEQ ID NO: 4666782 - DNA, 25 bp, Homo sapien
gataaaatattggtcgtatttccta

SEQ ID NO: 4666783 - DNA, 25 bp, Homo sapien
gtcgtatttcctaggggcttcacgc

SEQ ID NO: 4666784 - DNA, 25 bp, Homo sapien
attctgccatgtttgaacacctgtg

SEQ ID NO: 4666785 - DNA, 25 bp, Homo sapien
tggcaaaacaatcagctcatacatc

SEQ ID NO: 4666786 - DNA, 25 bp, Homo sapien
catgtttgaacacctgtgtagcagg

SEQ ID NO: 4666787 - DNA, 25 bp, Homo sapien
gaacacctgtgtagcaggtggcaaa

SEQ ID NO: 4666788 - DNA, 25 bp, Homo sapien
gtgtcttggctaattaatgcatatc

SEQ ID NO: 4666789 - DNA, 25 bp, Homo sapien
tataccacgtctggaatgtagtgct

SEQ ID NO: 4666790 - DNA, 25 bp, Homo sapien
gtgctagtatagcttgtgtcttggc

SEQ ID NO: 4666791 - DNA, 25 bp, Homo sapien
cccagggttgtaaggcatcttgcat

SEQ ID NO: 4666792 - DNA, 25 bp, Homo sapien
ggagactatcccaatgcagaagttc

SEQ ID NO: 4666793 - DNA, 25 bp, Homo sapien
ggttttggccatagcaactttggtg

SEQ ID NO: 4666794 - DNA, 25 bp, Homo sapien
cagcaatgactgtgtctgtgatgac

SEQ ID NO: 4666795 - DNA, 25 bp, Homo sapien
acttcggtggcataactgatgctca

SEQ ID NO: 4666796 - DNA, 25 bp, Homo sapien
ccaaataggcactcgtacgtgttgc

SEQ ID NO: 4666797 - DNA, 25 bp, Homo sapien
tacagcctagagaacacaggtggtc

SEQ ID NO: 4666798 - DNA, 25 bp, Homo sapien
catattaaagatgcaagtggtccca

SEQ ID NO: 4666799 - DNA, 25 bp, Homo sapien
tttgggccacatttagaggagccag

SEQ ID NO: 4666800 - DNA, 25 bp, Homo sapien
tctctcaagggcctgctaaatggct

SEQ ID NO: 4666801 - DNA, 25 bp, Homo sapien
gactcagacagttggagaaacccat

SEQ ID NO: 4666802 - DNA, 25 bp, Homo sapien
tccttgattaatgggcaaacacacc

SEQ ID NO: 4666803 - DNA, 25 bp, Homo sapien
gctggtcatgcctcctttgtgtaca

SEQ ID NO: 4666804 - DNA, 25 bp, Homo sapien
aaagcccgcttttcagtcagcggca

SEQ ID NO: 4666805 - DNA, 25 bp, Homo sapien
tagatttccaccttgcatgcaaaag

SEQ ID NO: 4666806 - DNA, 25 bp, Homo sapien
accttgcatgcaaaagcccgctttt

SEQ ID NO: 4666807 - DNA, 25 bp, Homo sapien
actgaatatagatttccaccttgca

SEQ ID NO: 4666808 - DNA, 25 bp, Homo sapien
ccaacttagtagcaaattggtctac

SEQ ID NO: 4666809 - DNA, 25 bp, Homo sapien
tggcatcgctggaatattgcagtaa

SEQ ID NO: 4666810 - DNA, 25 bp, Homo sapien
agattgtgacttggcatcgctggaa

SEQ ID NO: 4666811 - DNA, 25 bp, Homo sapien
aaccaacttagtagcaaattggtct

SEQ ID NO: 4666812 - DNA, 25 bp, Homo sapien
ttctgctgcccctcatatactgaag

SEQ ID NO: 4666813 - DNA, 25 bp, Homo sapien
cagacgattagtaaagacatgaact

SEQ ID NO: 4666814 - DNA, 25 bp, Homo sapien
tacacgttgtgctcagtatgatgct

SEQ ID NO: 4666815 - DNA, 25 bp, Homo sapien
tcttgatatttacacgttgtgctca

SEQ ID NO: 4666816 - DNA, 25 bp, Homo sapien
tgatgttgtccagccctgatcttgg

SEQ ID NO: 4666817 - DNA, 25 bp, Homo sapien
acaacaggcttctatcttgctccaa

SEQ ID NO: 4666818 - DNA, 25 bp, Homo sapien
gactcaacgcttaggcactctagca

SEQ ID NO: 4666819 - DNA, 25 bp, Homo sapien
cagtctctagaatcaaaccaggtat

SEQ ID NO: 4666820 - DNA, 25 bp, Homo sapien
tcatattttcaagactgttaacacc

SEQ ID NO: 4666821 - DNA, 25 bp, Homo sapien
cagattatttgacagactggttgaa

SEQ ID NO: 4666822 - DNA, 25 bp, Homo sapien
tttgatattcacaaccaggagagga

SEQ ID NO: 4666823 - DNA, 25 bp, Homo sapien
caataaggccttgtatggctgtgaa

SEQ ID NO: 4666824 - DNA, 25 bp, Homo sapien
actgagcccgggagcatcttcaggg

SEQ ID NO: 4666825 - DNA, 25 bp, Homo sapien
tagacggatccgtaagtggctcccg

SEQ ID NO: 4666826 - DNA, 25 bp, Homo sapien
ttcgttgaacgcgagagaacgctga

SEQ ID NO: 4666827 - DNA, 25 bp, Homo sapien
catctgacgtttctggcggttcgtt

SEQ ID NO: 4666828 - DNA, 25 bp, Homo sapien
ttgtcattgggatctcgcgagaacg

SEQ ID NO: 4666829 - DNA, 25 bp, Homo sapien
gaacgggctcccgaattgtcattgg

SEQ ID NO: 4666830 - DNA, 25 bp, Homo sapien
ggtgttcacctagttctctcgggct

SEQ ID NO: 4666831 - DNA, 25 bp, Homo sapien
tttctgtgggcggagcaatcttccc

SEQ ID NO: 4666832 - DNA, 25 bp, Homo sapien
ggggccgagcccggctgcatgtaac

SEQ ID NO: 4666833 - DNA, 25 bp, Homo sapien
gaggggccgagcccggctgcatgta

SEQ ID NO: 4666834 - DNA, 25 bp, Homo sapien
ggggaggggccgagcccggctgcat

SEQ ID NO: 4666835 - DNA, 25 bp, Homo sapien
ggccgagcccggctgcatgtaacac

SEQ ID NO: 4666836 - DNA, 25 bp, Homo sapien
tgaggtttccgcgcggggctgtggc

SEQ ID NO: 4666837 - DNA, 25 bp, Homo sapien
tgcctgaggtttccgcgcggggctg

SEQ ID NO: 4666838 - DNA, 25 bp, Homo sapien
ggggctgtggcgccgacggatccat

SEQ ID NO: 4666839 - DNA, 25 bp, Homo sapien
tttgcctgaggtttccgcgcggggc

SEQ ID NO: 4666840 - DNA, 25 bp, Homo sapien
gatgaggagcctgcccaaagttgct

SEQ ID NO: 4666841 - DNA, 25 bp, Homo sapien
tcatttgggtgccagaaggcatccc

SEQ ID NO: 4666842 - DNA, 25 bp, Homo sapien
gagtgcttaatatgggccacacgcg

SEQ ID NO: 4666843 - DNA, 25 bp, Homo sapien
gcaagaacctagtaatgaacccagt

SEQ ID NO: 4666844 - DNA, 25 bp, Homo sapien
ctcggggccctggagctttctgctc

SEQ ID NO: 4666845 - DNA, 25 bp, Homo sapien
cggggccctggagctttctgctcct

SEQ ID NO: 4666846 - DNA, 25 bp, Homo sapien
agctttctgctccttccaccaattt

SEQ ID NO: 4666847 - DNA, 25 bp, Homo sapien
ctttctgctccttccaccaatttcc

SEQ ID NO: 4666848 - DNA, 25 bp, Homo sapien
aaaggcctcctcaagcattcctcaa

SEQ ID NO: 4666849 - DNA, 25 bp, Homo sapien
tccctctttcactccaaaggcctcc

SEQ ID NO: 4666850 - DNA, 25 bp, Homo sapien
aagcattcctcaagggtgttcccac

SEQ ID NO: 4666851 - DNA, 25 bp, Homo sapien
tcctcaagcattcctcaagggtgtt

SEQ ID NO: 4666852 - DNA, 25 bp, Homo sapien
aaaaactgcattggaagaagagtgc

SEQ ID NO: 4666853 - DNA, 25 bp, Homo sapien
ttgagttcggataatttctaggacg

SEQ ID NO: 4666854 - DNA, 25 bp, Homo sapien
tctcagataagtgtacagcatgtgc

SEQ ID NO: 4666855 - DNA, 25 bp, Homo sapien
cacaaatccttgatatcttgcgaga

SEQ ID NO: 4666856 - DNA, 25 bp, Homo sapien
aagttttccattatctggagaaggg

SEQ ID NO: 4666857 - DNA, 25 bp, Homo sapien
tataagacgactgcaaatgacttgc

SEQ ID NO: 4666858 - DNA, 25 bp, Homo sapien
taaggaatagagtctccattgtcag

SEQ ID NO: 4666859 - DNA, 25 bp, Homo sapien
gatgatggaaattttcggtttggga

SEQ ID NO: 4666860 - DNA, 25 bp, Homo sapien
ccaagtcccatgtcatcacccagaa

SEQ ID NO: 4666861 - DNA, 25 bp, Homo sapien
aagtcccatgtcatcacccagaatg

SEQ ID NO: 4666862 - DNA, 25 bp, Homo sapien
catgtcatcacccagaatgcaccct

SEQ ID NO: 4666863 - DNA, 25 bp, Homo sapien
gtcccatgtcatcacccagaatgca

SEQ ID NO: 4666864 - DNA, 25 bp, Homo sapien
tgagacattgtcctcaactttgagg

SEQ ID NO: 4666865 - DNA, 25 bp, Homo sapien
tctagttagtgagacaaacacaaac

SEQ ID NO: 4666866 - DNA, 25 bp, Homo sapien
cacaaaatagctatcgtaacagcag

SEQ ID NO: 4666867 - DNA, 25 bp, Homo sapien
tagtatccactcatgtacacagtaa

SEQ ID NO: 4666868 - DNA, 25 bp, Homo sapien
taacttaatcacaaactaggcacac

SEQ ID NO: 4666869 - DNA, 25 bp, Homo sapien
taaggaaagctaaagaccctgtagc

SEQ ID NO: 4666870 - DNA, 25 bp, Homo sapien
gcagcttctgacaggactcccaata

SEQ ID NO: 4666871 - DNA, 25 bp, Homo sapien
tcttcttggatcacaaacctctttg

SEQ ID NO: 4666872 - DNA, 25 bp, Homo sapien
tctgatgaatgagaggcctggtgtc

SEQ ID NO: 4666873 - DNA, 25 bp, Homo sapien
tgtctgaattctacgatctggtgag

SEQ ID NO: 4666874 - DNA, 25 bp, Homo sapien
tacaggccggcatgctaaatgatag

SEQ ID NO: 4666875 - DNA, 25 bp, Homo sapien
tctgcactgcctaggcttgaaggaa

SEQ ID NO: 4666876 - DNA, 25 bp, Homo sapien
tttctctaaagatctacaaagggcc

SEQ ID NO: 4666877 - DNA, 25 bp, Homo sapien
tgaatggggacaatccttatgtacc

SEQ ID NO: 4666878 - DNA, 25 bp, Homo sapien
taaaacttaactttcgtgcatcaaa

SEQ ID NO: 4666879 - DNA, 25 bp, Homo sapien
gtaccaacataaaaagatctccaag

SEQ ID NO: 4666880 - DNA, 25 bp, Homo sapien
tttcaatatcctcacgagttccctt

SEQ ID NO: 4666881 - DNA, 25 bp, Homo sapien
tcctcacgagttccctttttatgca

SEQ ID NO: 4666882 - DNA, 25 bp, Homo sapien
tcaatatcctcacgagttccctttt

SEQ ID NO: 4666883 - DNA, 25 bp, Homo sapien
tcacgagttccctttttatgcaaaa

SEQ ID NO: 4666884 - DNA, 25 bp, Homo sapien
cctggcccaaaggaacacttatagc

SEQ ID NO: 4666885 - DNA, 25 bp, Homo sapien
aaagacagggtattcttatggtgcg

SEQ ID NO: 4666886 - DNA, 25 bp, Homo sapien
caaaggaacacttatagctttaagg

SEQ ID NO: 4666887 - DNA, 25 bp, Homo sapien
ttatggtgcgcaggccggtctcaaa

SEQ ID NO: 4666888 - DNA, 25 bp, Homo sapien
tcagacgagatgtggtgtgttcaga

SEQ ID NO: 4666889 - DNA, 25 bp, Homo sapien
cagacgagatgtggtgtgttcagag

SEQ ID NO: 4666890 - DNA, 25 bp, Homo sapien
cactattcctatcctgttaagttta

SEQ ID NO: 4666891 - DNA, 25 bp, Homo sapien
tgttaccactattcctatcctgtta

SEQ ID NO: 4666892 - DNA, 25 bp, Homo sapien
taccactattcctatcctgttaagt

SEQ ID NO: 4666893 - DNA, 25 bp, Homo sapien
tccctgttaccactattcctatcct

SEQ ID NO: 4666894 - DNA, 25 bp, Homo sapien
ccacgtgttcttgaaatatatggtc

SEQ ID NO: 4666895 - DNA, 25 bp, Homo sapien
acaagcaggccacgtgttcttgaaa

SEQ ID NO: 4666896 - DNA, 25 bp, Homo sapien
tcagatactctcagttaaagaactg

SEQ ID NO: 4666897 - DNA, 25 bp, Homo sapien
gatactctcagttaaagaactggaa

SEQ ID NO: 4666898 - DNA, 25 bp, Homo sapien
ttcatccttccagttgtagaggaca

SEQ ID NO: 4666899 - DNA, 25 bp, Homo sapien
agttcatccaggcataagcgtagtg

SEQ ID NO: 4666900 - DNA, 25 bp, Homo sapien
gaaatatccccaggtgtccaattca

SEQ ID NO: 4666901 - DNA, 25 bp, Homo sapien
gaaagaggagcaactattaagaaca

SEQ ID NO: 4666902 - DNA, 25 bp, Homo sapien
cacacattgctagctggagtaaaac

SEQ ID NO: 4666903 - DNA, 25 bp, Homo sapien
tgcatgtgcacctcataaaagagct

SEQ ID NO: 4666904 - DNA, 25 bp, Homo sapien
taaaatcagtagttgcccaaggtga

SEQ ID NO: 4666905 - DNA, 25 bp, Homo sapien
tgtataataccattgacatgctccg

SEQ ID NO: 4666906 - DNA, 25 bp, Homo sapien
tcagataaaacatcaagataagaga

SEQ ID NO: 4666907 - DNA, 25 bp, Homo sapien
ttccagtgaggccaatgcggacatt

SEQ ID NO: 4666908 - DNA, 25 bp, Homo sapien
aacttctgttactctagcttttgga

SEQ ID NO: 4666909 - DNA, 25 bp, Homo sapien
tcttgattctatgagcttcatccac

SEQ ID NO: 4666910 - DNA, 25 bp, Homo sapien
caatgcggacattacatttcaaagc

SEQ ID NO: 4666911 - DNA, 25 bp, Homo sapien
gcttcttgaagtaggtcccactccc

SEQ ID NO: 4666912 - DNA, 25 bp, Homo sapien
ctttgttgccgtgtgtctctgacca

SEQ ID NO: 4666913 - DNA, 25 bp, Homo sapien
taagagtcttggtgcgcctgagaaa

SEQ ID NO: 4666914 - DNA, 25 bp, Homo sapien
caagtctttgcatggcctttcggcc

SEQ ID NO: 4666915 - DNA, 25 bp, Homo sapien
tcagcttgtctcatcatgtctacag

SEQ ID NO: 4666916 - DNA, 25 bp, Homo sapien
ctcagcttgtctcatcatgtctaca

SEQ ID NO: 4666917 - DNA, 25 bp, Homo sapien
tctcagcttgtctcatcatgtctac

SEQ ID NO: 4666918 - DNA, 25 bp, Homo sapien
atctcagcttgtctcatcatgtcta

SEQ ID NO: 4666919 - DNA, 25 bp, Homo sapien
ggaaatctgtcaaagaacaatacac

SEQ ID NO: 4666920 - DNA, 25 bp, Homo sapien
gaaatctgtcaaagaacaatacacc

SEQ ID NO: 4666921 - DNA, 25 bp, Homo sapien
aatctgtcaaagaacaatacaccat

SEQ ID NO: 4666922 - DNA, 25 bp, Homo sapien
actgtttgatagacagctttctgga

SEQ ID NO: 4666923 - DNA, 25 bp, Homo sapien
cagaagattgaagtatcaaagtcac

SEQ ID NO: 4666924 - DNA, 25 bp, Homo sapien
aaggctcagaagattgaagtatcaa

SEQ ID NO: 4666925 - DNA, 25 bp, Homo sapien
ctcagaagattgaagtatcaaagtc

SEQ ID NO: 4666926 - DNA, 25 bp, Homo sapien
ggctcagaagattgaagtatcaaag

SEQ ID NO: 4666927 - DNA, 25 bp, Homo sapien
tctccttttttggccactcctacag

SEQ ID NO: 4666928 - DNA, 25 bp, Homo sapien
ttctccttttttggccactcctaca

SEQ ID NO: 4666929 - DNA, 25 bp, Homo sapien
ctccttttttggccactcctacagg

SEQ ID NO: 4666930 - DNA, 25 bp, Homo sapien
taactgagatacaaggttttcactg

SEQ ID NO: 4666931 - DNA, 25 bp, Homo sapien
ggtaactgagatacaaggttttcac

SEQ ID NO: 4666932 - DNA, 25 bp, Homo sapien
cttctgaaggactgtaaggtaactg

SEQ ID NO: 4666933 - DNA, 25 bp, Homo sapien
ctgaaggactgtaaggtaactgaga

SEQ ID NO: 4666934 - DNA, 25 bp, Homo sapien
gttgtttggaagtactagcagcttg

SEQ ID NO: 4666935 - DNA, 25 bp, Homo sapien
gaagtactagcagcttgcagtagcg

SEQ ID NO: 4666936 - DNA, 25 bp, Homo sapien
cagcttgcagtagcgcgacatggtt

SEQ ID NO: 4666937 - DNA, 25 bp, Homo sapien
tgcagtagcgcgacatggttagcta

SEQ ID NO: 4666938 - DNA, 25 bp, Homo sapien
gaaagtgtttcaaaggctgcatctt

SEQ ID NO: 4666939 - DNA, 25 bp, Homo sapien
ccactgtatttagggtcagaaagtg

SEQ ID NO: 4666940 - DNA, 25 bp, Homo sapien
aatctggaaaatacctgatcacata

SEQ ID NO: 4666941 - DNA, 25 bp, Homo sapien
tacctgatcacatatccttttgata

SEQ ID NO: 4666942 - DNA, 25 bp, Homo sapien
caaggttggagaacttagccttact

SEQ ID NO: 4666943 - DNA, 25 bp, Homo sapien
tccctcggtaacacattaccaagag

SEQ ID NO: 4666944 - DNA, 25 bp, Homo sapien
gacatacagaccttgcccatcttaa

SEQ ID NO: 4666945 - DNA, 25 bp, Homo sapien
caactttacgatctagttctgcaag

SEQ ID NO: 4666946 - DNA, 25 bp, Homo sapien
attagggtttattcattgtgttaca

SEQ ID NO: 4666947 - DNA, 25 bp, Homo sapien
tgttacatagttcacgggttttgac

SEQ ID NO: 4666948 - DNA, 25 bp, Homo sapien
cattagggtttattcattgtgttac

SEQ ID NO: 4666949 - DNA, 25 bp, Homo sapien
acattagggtttattcattgtgtta

SEQ ID NO: 4666950 - DNA, 25 bp, Homo sapien
ttttcctgcaatgatttaaaagctg

SEQ ID NO: 4666951 - DNA, 25 bp, Homo sapien
ctgcaatgatttaaaagctgctgaa

SEQ ID NO: 4666952 - DNA, 25 bp, Homo sapien
aatgatttaaaagctgctgaaggac

SEQ ID NO: 4666953 - DNA, 25 bp, Homo sapien
gtttttcctgcaatgatttaaaagc

SEQ ID NO: 4666954 - DNA, 25 bp, Homo sapien
tgtaaggtgtcatgtaggcatatgc

SEQ ID NO: 4666955 - DNA, 25 bp, Homo sapien
gctggccaatcaaggatatacttta

SEQ ID NO: 4666956 - DNA, 25 bp, Homo sapien
cctactgtgtagataagagaaaatg

SEQ ID NO: 4666957 - DNA, 25 bp, Homo sapien
tatgcctcaaaagttgaggctggcc

SEQ ID NO: 4666958 - DNA, 25 bp, Homo sapien
cagtactgctgtagcacgtcaagca

SEQ ID NO: 4666959 - DNA, 25 bp, Homo sapien
taacatcttgtgtactgttgaactc

SEQ ID NO: 4666960 - DNA, 25 bp, Homo sapien
gtacttccatcaagtcgtcggtaat

SEQ ID NO: 4666961 - DNA, 25 bp, Homo sapien
gcccagacgccatacagtactgctg

SEQ ID NO: 4666962 - DNA, 25 bp, Homo sapien
acttaagacattgaaatttcggtca

SEQ ID NO: 4666963 - DNA, 25 bp, Homo sapien
gcttctaaataagcatagccattaa

SEQ ID NO: 4666964 - DNA, 25 bp, Homo sapien
ataaacccagacttctaagaggaat

SEQ ID NO: 4666965 - DNA, 25 bp, Homo sapien
agaggaattcaatgttgataaagga

SEQ ID NO: 4666966 - DNA, 25 bp, Homo sapien
tcaatggcttgaagatcattggctg

SEQ ID NO: 4666967 - DNA, 25 bp, Homo sapien
tacaacaacattggcaccgacaaaa

SEQ ID NO: 4666968 - DNA, 25 bp, Homo sapien
tccaagtaggatcaaataatacaac

SEQ ID NO: 4666969 - DNA, 25 bp, Homo sapien
aaaattgaggcctagtccaccagcc

SEQ ID NO: 4666970 - DNA, 25 bp, Homo sapien
tcacaacttggccaactgctagctt

SEQ ID NO: 4666971 - DNA, 25 bp, Homo sapien
tggccaactgctagcttttggccca

SEQ ID NO: 4666972 - DNA, 25 bp, Homo sapien
attcacaacttggccaactgctagc

SEQ ID NO: 4666973 - DNA, 25 bp, Homo sapien
aacttggccaactgctagcttttgg

SEQ ID NO: 4666974 - DNA, 25 bp, Homo sapien
ctaggggcattgtcagtaagcagtt

SEQ ID NO: 4666975 - DNA, 25 bp, Homo sapien
caaaagtacaacttgatccatgggc

SEQ ID NO: 4666976 - DNA, 25 bp, Homo sapien
catcagaacacttgggtgactaggg

SEQ ID NO: 4666977 - DNA, 25 bp, Homo sapien
atggatgttgtgttactgcataaac

SEQ ID NO: 4666978 - DNA, 25 bp, Homo sapien
aattagcagggtgtgtcttgagcct

SEQ ID NO: 4666979 - DNA, 25 bp, Homo sapien
catcctgcctgggtatgctgccatc

SEQ ID NO: 4666980 - DNA, 25 bp, Homo sapien
gcaacaatttagtcacatcatcagg

SEQ ID NO: 4666981 - DNA, 25 bp, Homo sapien
gcaaactggtaaggaagaccttcac

SEQ ID NO: 4666982 - DNA, 25 bp, Homo sapien
cactcttggagtatttaagacactt

SEQ ID NO: 4666983 - DNA, 25 bp, Homo sapien
tttcctcactagttctttctctgtg

SEQ ID NO: 4666984 - DNA, 25 bp, Homo sapien
actctcatcttgctcatatatcctt

SEQ ID NO: 4666985 - DNA, 25 bp, Homo sapien
tatttaagacacttgttgtaaagtc

SEQ ID NO: 4666986 - DNA, 25 bp, Homo sapien
tgggcctccataacgtacatattgg

SEQ ID NO: 4666987 - DNA, 25 bp, Homo sapien
ctcactgggtttatactatctggac

SEQ ID NO: 4666988 - DNA, 25 bp, Homo sapien
cactgcaccagggataggattcctt

SEQ ID NO: 4666989 - DNA, 25 bp, Homo sapien
ttccttacagggctggtctagtggt

SEQ ID NO: 4666990 - DNA, 25 bp, Homo sapien
ttctctcctacaatgtgtttgggtt

SEQ ID NO: 4666991 - DNA, 25 bp, Homo sapien
tttctctcctacaatgtgtttgggt

SEQ ID NO: 4666992 - DNA, 25 bp, Homo sapien
tcgaggacatcttggatcctgcaaa

SEQ ID NO: 4666993 - DNA, 25 bp, Homo sapien
tggatcctgcaaatctcacatctcc

SEQ ID NO: 4666994 - DNA, 25 bp, Homo sapien
aatggacttttactcgaggacatct

SEQ ID NO: 4666995 - DNA, 25 bp, Homo sapien
caccaggggtaaggtactgcattct

SEQ ID NO: 4666996 - DNA, 25 bp, Homo sapien
ggatatcagcctaagcactttgaca

SEQ ID NO: 4666997 - DNA, 25 bp, Homo sapien
tctacattgtccaatcctatatgct

SEQ ID NO: 4666998 - DNA, 25 bp, Homo sapien
ctgcttgtatatctgtcgtaaatac

SEQ ID NO: 4666999 - DNA, 25 bp, Homo sapien
tcgtaaatacatgatttcctccaca

SEQ ID NO: 4667000 - DNA, 25 bp, Homo sapien
tttgaagaggttatggatcccaaaa

SEQ ID NO: 4667001 - DNA, 25 bp, Homo sapien
tatggatcccaaaaagctctccttg

SEQ ID NO: 4667002 - DNA, 25 bp, Homo sapien
ttcaaaatatcgtttggcattttca

SEQ ID NO: 4667003 - DNA, 25 bp, Homo sapien
tccaggatgtccttcgtaagacaag

SEQ ID NO: 4667004 - DNA, 25 bp, Homo sapien
catctgtatgctgaggatgaacaca

SEQ ID NO: 4667005 - DNA, 25 bp, Homo sapien
ggagttcatactacccagcatatac

SEQ ID NO: 4667006 - DNA, 25 bp, Homo sapien
catgagagtacatctcagggagtat

SEQ ID NO: 4667007 - DNA, 25 bp, Homo sapien
catctataccatgaggaggttgaaa

SEQ ID NO: 4667008 - DNA, 25 bp, Homo sapien
catccatggtctactgtttaacttg

SEQ ID NO: 4667009 - DNA, 25 bp, Homo sapien
catacgattcctgacattgcatggt

SEQ ID NO: 4667010 - DNA, 25 bp, Homo sapien
ccacctccggtcaagatggtttaag

SEQ ID NO: 4667011 - DNA, 25 bp, Homo sapien
tcaaggacaggaaccaattgctcct

SEQ ID NO: 4667012 - DNA, 25 bp, Homo sapien
caagacaaatgtagggcatggatgg

SEQ ID NO: 4667013 - DNA, 25 bp, Homo sapien
ggatggtcctgtcattaataaacac

SEQ ID NO: 4667014 - DNA, 25 bp, Homo sapien
ttttggcccaaagcagcatgaatct

SEQ ID NO: 4667015 - DNA, 25 bp, Homo sapien
cagtggcacgataaacaagggaact

SEQ ID NO: 4667016 - DNA, 25 bp, Homo sapien
tcttctcttttactcataccctgta

SEQ ID NO: 4667017 - DNA, 25 bp, Homo sapien
gataaatggccactccagtcttaag

SEQ ID NO: 4667018 - DNA, 25 bp, Homo sapien
tcttaaagctgttgaaactccgtta

SEQ ID NO: 4667019 - DNA, 25 bp, Homo sapien
actccgttattatagataaatggcc

SEQ ID NO: 4667020 - DNA, 25 bp, Homo sapien
aaagaaaaattgcatgcagcttgct

SEQ ID NO: 4667021 - DNA, 25 bp, Homo sapien
atgcaaatagctatgcaacacaggg

SEQ ID NO: 4667022 - DNA, 25 bp, Homo sapien
gcaacaaccagataaacaacagcaa

SEQ ID NO: 4667023 - DNA, 25 bp, Homo sapien
caatgcatgctattcttggagctaa

SEQ ID NO: 4667024 - DNA, 25 bp, Homo sapien
tggctgtcatgatccctgcttctac

SEQ ID NO: 4667025 - DNA, 25 bp, Homo sapien
ccctctttcaaccatgttgtggctg

SEQ ID NO: 4667026 - DNA, 25 bp, Homo sapien
ggctgtcatgatccctgcttctact

SEQ ID NO: 4667027 - DNA, 25 bp, Homo sapien
ctttcaaccatgttgtggctgtcat

SEQ ID NO: 4667028 - DNA, 25 bp, Homo sapien
aaaggccgataggatcttgatcacc

SEQ ID NO: 4667029 - DNA, 25 bp, Homo sapien
gaggctctactagtaaaatattgcg

SEQ ID NO: 4667030 - DNA, 25 bp, Homo sapien
tttggtggtacatgagatgacaagc

SEQ ID NO: 4667031 - DNA, 25 bp, Homo sapien
caaggtaaagaattcaagactggaa

SEQ ID NO: 4667032 - DNA, 25 bp, Homo sapien
tgcttaagaattactggagtttact

SEQ ID NO: 4667033 - DNA, 25 bp, Homo sapien
gaattactggagtttactgtcatct

SEQ ID NO: 4667034 - DNA, 25 bp, Homo sapien
catctagcagatgcttccaatcacg

SEQ ID NO: 4667035 - DNA, 25 bp, Homo sapien
ggagtttactgtcatctagcagatg

SEQ ID NO: 4667036 - DNA, 25 bp, Homo sapien
gcttctaagatgcaaggacacataa

SEQ ID NO: 4667037 - DNA, 25 bp, Homo sapien
cacaaagtggagtgtttggcttcta

SEQ ID NO: 4667038 - DNA, 25 bp, Homo sapien
tggcctcgaaagtgaaaagcataca

SEQ ID NO: 4667039 - DNA, 25 bp, Homo sapien
ggacacataattctggcctcgaaag

SEQ ID NO: 4667040 - DNA, 25 bp, Homo sapien
tggaagctttacttgaatcgggtgc

SEQ ID NO: 4667041 - DNA, 25 bp, Homo sapien
acactggagtaaggtaagctgtcct

SEQ ID NO: 4667042 - DNA, 25 bp, Homo sapien
tattgtgtaggacagatgacatcac

SEQ ID NO: 4667043 - DNA, 25 bp, Homo sapien
tcctcagatccttccaagggtggct

SEQ ID NO: 4667044 - DNA, 25 bp, Homo sapien
caataaactgagagttatgatcctc

SEQ ID NO: 4667045 - DNA, 25 bp, Homo sapien
tatttttcttattatggctaggcaa

SEQ ID NO: 4667046 - DNA, 25 bp, Homo sapien
aaactgaagtggctgacggataaac

SEQ ID NO: 4667047 - DNA, 25 bp, Homo sapien
tctcttaaacctcaatgaactagct

SEQ ID NO: 4667048 - DNA, 25 bp, Homo sapien
atttatccattgattcatacgactg

SEQ ID NO: 4667049 - DNA, 25 bp, Homo sapien
gattcatacgactgctcttgattaa

SEQ ID NO: 4667050 - DNA, 25 bp, Homo sapien
cattgattcatacgactgctcttga

SEQ ID NO: 4667051 - DNA, 25 bp, Homo sapien
tatccattgattcatacgactgctc

SEQ ID NO: 4667052 - DNA, 25 bp, Homo sapien
agcaatatggttccataaaaacaca

SEQ ID NO: 4667053 - DNA, 25 bp, Homo sapien
caaatatgttagtctgggttacctt

SEQ ID NO: 4667054 - DNA, 25 bp, Homo sapien
aatatgttagtctgggttaccttgg

SEQ ID NO: 4667055 - DNA, 25 bp, Homo sapien
aaagcaatatggttccataaaaaca

SEQ ID NO: 4667056 - DNA, 25 bp, Homo sapien
aaatacgtcatgtgctgcccatcgg

SEQ ID NO: 4667057 - DNA, 25 bp, Homo sapien
gcaaacagctatgttagcaggcagc

SEQ ID NO: 4667058 - DNA, 25 bp, Homo sapien
gcccatcggctcatgtgattttcag

SEQ ID NO: 4667059 - DNA, 25 bp, Homo sapien
tctggtttgagtgaatataagccac

SEQ ID NO: 4667060 - DNA, 25 bp, Homo sapien
tggacctcccatttagtggctttaa

SEQ ID NO: 4667061 - DNA, 25 bp, Homo sapien
gctgctagcaatggtgccatgggaa

SEQ ID NO: 4667062 - DNA, 25 bp, Homo sapien
cactgaaatgagtgtttctgcagac

SEQ ID NO: 4667063 - DNA, 25 bp, Homo sapien
gctgtatcaattactgactgaagtc

SEQ ID NO: 4667064 - DNA, 25 bp, Homo sapien
tattgacgcgatatgatgaaatcag

SEQ ID NO: 4667065 - DNA, 25 bp, Homo sapien
caccagctgcaaaacctctgagtaa

SEQ ID NO: 4667066 - DNA, 25 bp, Homo sapien
aagatgatgagtgtgtttcaatgat

SEQ ID NO: 4667067 - DNA, 25 bp, Homo sapien
cctcattaaaggtgctgaagtaata

SEQ ID NO: 4667068 - DNA, 25 bp, Homo sapien
ttttctaacactatgattgagtctc

SEQ ID NO: 4667069 - DNA, 25 bp, Homo sapien
actgtaacatcggtgggaggtctga

SEQ ID NO: 4667070 - DNA, 25 bp, Homo sapien
gaaaagattctagattgagccccag

SEQ ID NO: 4667071 - DNA, 25 bp, Homo sapien
gacttcaggatcaagaagtttgcag

SEQ ID NO: 4667072 - DNA, 25 bp, Homo sapien
cagactctatggtattctttagaaa

SEQ ID NO: 4667073 - DNA, 25 bp, Homo sapien
taggatcttatctaggattatggtg

SEQ ID NO: 4667074 - DNA, 25 bp, Homo sapien
taattactgtatatggaaaaactct

SEQ ID NO: 4667075 - DNA, 25 bp, Homo sapien
tgaaatactggtacactgtggcaac

SEQ ID NO: 4667076 - DNA, 25 bp, Homo sapien
taatccaggttttactacaaagcga

SEQ ID NO: 4667077 - DNA, 25 bp, Homo sapien
caaagcgacccgttatttctctgtc

SEQ ID NO: 4667078 - DNA, 25 bp, Homo sapien
ttgactatgacagctggcaggaaac

SEQ ID NO: 4667079 - DNA, 25 bp, Homo sapien
tagtttcttagagttggtcacagtc

SEQ ID NO: 4667080 - DNA, 25 bp, Homo sapien
aatggttgtagggactggcctcacg

SEQ ID NO: 4667081 - DNA, 25 bp, Homo sapien
gactggcatagagaatgggcactaa

SEQ ID NO: 4667082 - DNA, 25 bp, Homo sapien
taactttacattagctgccagccag

SEQ ID NO: 4667083 - DNA, 25 bp, Homo sapien
gaacctgaaactgagtgatccctga

SEQ ID NO: 4667084 - DNA, 25 bp, Homo sapien
cggtcttctcactagctgccaaaca

SEQ ID NO: 4667085 - DNA, 25 bp, Homo sapien
tgttgtccaatgtaagtctgcctgg

SEQ ID NO: 4667086 - DNA, 25 bp, Homo sapien
taagtctgcctggtcagtccggtct

SEQ ID NO: 4667087 - DNA, 25 bp, Homo sapien
tggtcagtccggtcttctcactagc

SEQ ID NO: 4667088 - DNA, 25 bp, Homo sapien
atgctgccttcactcggttgctggc

SEQ ID NO: 4667089 - DNA, 25 bp, Homo sapien
tgctgccttcactcggttgctggcc

SEQ ID NO: 4667090 - DNA, 25 bp, Homo sapien
ctttgtgtgtggcaatgtatctgca

SEQ ID NO: 4667091 - DNA, 25 bp, Homo sapien
gctgccttcactcggttgctggcct

SEQ ID NO: 4667092 - DNA, 25 bp, Homo sapien
aggtggtctggtttgtatggtagac

SEQ ID NO: 4667093 - DNA, 25 bp, Homo sapien
gtggtctggtttgtatggtagactt

SEQ ID NO: 4667094 - DNA, 25 bp, Homo sapien
ggtggtctggtttgtatggtagact

SEQ ID NO: 4667095 - DNA, 25 bp, Homo sapien
tggtctggtttgtatggtagacttt

SEQ ID NO: 4667096 - DNA, 25 bp, Homo sapien
attcttcaagtatagtattgtcaga

SEQ ID NO: 4667097 - DNA, 25 bp, Homo sapien
ttcttcaagtatagtattgtcagag

SEQ ID NO: 4667098 - DNA, 25 bp, Homo sapien
taatgagctacatttcctttgagaa

SEQ ID NO: 4667099 - DNA, 25 bp, Homo sapien
gtcagttatggttataattcaagta

SEQ ID NO: 4667100 - DNA, 25 bp, Homo sapien
agatgtcagttatggttataattca

SEQ ID NO: 4667101 - DNA, 25 bp, Homo sapien
tacatattttactaatgagctacat

SEQ ID NO: 4667102 - DNA, 25 bp, Homo sapien
tctggtcccattaagcttgctttcc

SEQ ID NO: 4667103 - DNA, 25 bp, Homo sapien
ggcttcagttctcaactcattgaga

SEQ ID NO: 4667104 - DNA, 25 bp, Homo sapien
tctccctctgaacttatggcttcag

SEQ ID NO: 4667105 - DNA, 25 bp, Homo sapien
agagcgtggcctgtggtttgggtac

SEQ ID NO: 4667106 - DNA, 25 bp, Homo sapien
tacagcattgtgtccattccaaaag

SEQ ID NO: 4667107 - DNA, 25 bp, Homo sapien
caacatctgatctggtgccggagct

SEQ ID NO: 4667108 - DNA, 25 bp, Homo sapien
tgccggagctgaaggatttcatcag

SEQ ID NO: 4667109 - DNA, 25 bp, Homo sapien
gctcaagatgcgtatgcagcatgct

SEQ ID NO: 4667110 - DNA, 25 bp, Homo sapien
agggtgcatgtacaggctcaggtcc

SEQ ID NO: 4667111 - DNA, 25 bp, Homo sapien
taatgatgagtgaggaagtctccca

SEQ ID NO: 4667112 - DNA, 25 bp, Homo sapien
gaaagggtgtctcttcctgacaagt

SEQ ID NO: 4667113 - DNA, 25 bp, Homo sapien
tacttgggctagacaaatgcatgaa

SEQ ID NO: 4667114 - DNA, 25 bp, Homo sapien
gagccaatttatgactgacatgagg

SEQ ID NO: 4667115 - DNA, 25 bp, Homo sapien
gagtgaggcctctacccttatgcta

SEQ ID NO: 4667116 - DNA, 25 bp, Homo sapien
tagagtccacagaaggtaatcttgt

SEQ ID NO: 4667117 - DNA, 25 bp, Homo sapien
cattttatcctagtagagtgaggcc

SEQ ID NO: 4667118 - DNA, 25 bp, Homo sapien
gaagacgagttaaaataagaggcca

SEQ ID NO: 4667119 - DNA, 25 bp, Homo sapien
gcaaattcgtttacagaagacgagt

SEQ ID NO: 4667120 - DNA, 25 bp, Homo sapien
tggcattggttatatgtttagcaaa

SEQ ID NO: 4667121 - DNA, 25 bp, Homo sapien
tttctgtcgttcttctgatgtggca

SEQ ID NO: 4667122 - DNA, 25 bp, Homo sapien
gatgtcacagtatcttcggatgcct

SEQ ID NO: 4667123 - DNA, 25 bp, Homo sapien
tgttgaattgtgacacagaatccac

SEQ ID NO: 4667124 - DNA, 25 bp, Homo sapien
caatctcttgagtagaactaacagg

SEQ ID NO: 4667125 - DNA, 25 bp, Homo sapien
tatcagatttcttccgggtgcgctg

SEQ ID NO: 4667126 - DNA, 25 bp, Homo sapien
gaatagaggtatcaccaagtaagct

SEQ ID NO: 4667127 - DNA, 25 bp, Homo sapien
aaatgcccgttcttgtgaggtcctg

SEQ ID NO: 4667128 - DNA, 25 bp, Homo sapien
cagttgtgtgggactgttcccatga

SEQ ID NO: 4667129 - DNA, 25 bp, Homo sapien
taaaaaggtcatcaagaatagaggt

SEQ ID NO: 4667130 - DNA, 25 bp, Homo sapien
tctctccttttaaagggtgctgcta

SEQ ID NO: 4667131 - DNA, 25 bp, Homo sapien
cacagagtctctattactgccaagt

SEQ ID NO: 4667132 - DNA, 25 bp, Homo sapien
agggtgctgctagaggtgctttttc

SEQ ID NO: 4667133 - DNA, 25 bp, Homo sapien
agtctgtgagtttactaagactctc

SEQ ID NO: 4667134 - DNA, 25 bp, Homo sapien
tgcgttttcatctgtatcacttggg

SEQ ID NO: 4667135 - DNA, 25 bp, Homo sapien
tattggttgcgttttcatctgtatc

SEQ ID NO: 4667136 - DNA, 25 bp, Homo sapien
tttcatctgtatcacttgggctaaa

SEQ ID NO: 4667137 - DNA, 25 bp, Homo sapien
actctgtgtattggttgcgttttca

SEQ ID NO: 4667138 - DNA, 25 bp, Homo sapien
taaactggaaggacactcatgctga

SEQ ID NO: 4667139 - DNA, 25 bp, Homo sapien
cagacatgattcagcctatgagcca

SEQ ID NO: 4667140 - DNA, 25 bp, Homo sapien
tatgagccattaggagagcgaagca

SEQ ID NO: 4667141 - DNA, 25 bp, Homo sapien
gtggaatccagtgccgtaaacagtg

SEQ ID NO: 4667142 - DNA, 25 bp, Homo sapien
tcaagctcctagcacagaacacagg

SEQ ID NO: 4667143 - DNA, 25 bp, Homo sapien
ggtcctgcctacagcatgcacatgt

SEQ ID NO: 4667144 - DNA, 25 bp, Homo sapien
tttcattcaccggtagctctgcctt

SEQ ID NO: 4667145 - DNA, 25 bp, Homo sapien
tctgccttacctgtagagctcaagc

SEQ ID NO: 4667146 - DNA, 25 bp, Homo sapien
tacatcctgagtacacggaagccct

SEQ ID NO: 4667147 - DNA, 25 bp, Homo sapien
tgtgaactaactgaaggacagctgc

SEQ ID NO: 4667148 - DNA, 25 bp, Homo sapien
tttagcacagccagttcccggctca

SEQ ID NO: 4667149 - DNA, 25 bp, Homo sapien
tctctcctcaacttgatagcagtgc

SEQ ID NO: 4667150 - DNA, 25 bp, Homo sapien
acttggccgatcagtcccttgagaa

SEQ ID NO: 4667151 - DNA, 25 bp, Homo sapien
gaacacatatgtactgagtcatgac

SEQ ID NO: 4667152 - DNA, 25 bp, Homo sapien
tctagggcaaaacattgctctaaag

SEQ ID NO: 4667153 - DNA, 25 bp, Homo sapien
tccaatcatatatgtacgaacacat

SEQ ID NO: 4667154 - DNA, 25 bp, Homo sapien
cactgtggatcttaaccatgggcca

SEQ ID NO: 4667155 - DNA, 25 bp, Homo sapien
taccatctggtaagtctggacacaa

SEQ ID NO: 4667156 - DNA, 25 bp, Homo sapien
tagaaggcccctcaatggcaaaaca

SEQ ID NO: 4667157 - DNA, 25 bp, Homo sapien
gctgatcacattgtaggctgaaaac

SEQ ID NO: 4667158 - DNA, 25 bp, Homo sapien
ttgcagggagtccactccacctgac

SEQ ID NO: 4667159 - DNA, 25 bp, Homo sapien
agggagtccactccacctgacagtt

SEQ ID NO: 4667160 - DNA, 25 bp, Homo sapien
gacagtttccgttctgaaacaggct

SEQ ID NO: 4667161 - DNA, 25 bp, Homo sapien
tcaatggttgtaccaaatctttcca

SEQ ID NO: 4667162 - DNA, 25 bp, Homo sapien
gctgtaagagaaccctgaggaattc

SEQ ID NO: 4667163 - DNA, 25 bp, Homo sapien
gagtgttcagccagaaacggtatca

SEQ ID NO: 4667164 - DNA, 25 bp, Homo sapien
taaggcctcctagaagcactgggca

SEQ ID NO: 4667165 - DNA, 25 bp, Homo sapien
gaaagtggcttatgaaccatcccag

SEQ ID NO: 4667166 - DNA, 25 bp, Homo sapien
tcagcctgggagaatggcggcatct

SEQ ID NO: 4667167 - DNA, 25 bp, Homo sapien
ggtttcccagtgaccggagagcagc

SEQ ID NO: 4667168 - DNA, 25 bp, Homo sapien
tggtgcagacaacgggcccttcttt

SEQ ID NO: 4667169 - DNA, 25 bp, Homo sapien
caggcaggtgatggtcttcctggcc

SEQ ID NO: 4667170 - DNA, 25 bp, Homo sapien
gctgtcctggcgcagtcctcgttta

SEQ ID NO: 4667171 - DNA, 25 bp, Homo sapien
ggcgcagtcctcgtttaggtgctca

SEQ ID NO: 4667172 - DNA, 25 bp, Homo sapien
agtcctcgtttaggtgctcagaagc

SEQ ID NO: 4667173 - DNA, 25 bp, Homo sapien
cctggcgcagtcctcgtttaggtgc

SEQ ID NO: 4667174 - DNA, 25 bp, Homo sapien
ctttctagaatgttgttgatctctc

SEQ ID NO: 4667175 - DNA, 25 bp, Homo sapien
ccctggacacctgttgatacctctt

SEQ ID NO: 4667176 - DNA, 25 bp, Homo sapien
ggaccacatctttatctggtgtccc

SEQ ID NO: 4667177 - DNA, 25 bp, Homo sapien
gcatcctgcagatagtagattcgac

SEQ ID NO: 4667178 - DNA, 25 bp, Homo sapien
tgtcttggccacaccatcctctgtg

SEQ ID NO: 4667179 - DNA, 25 bp, Homo sapien
cactgtggagtgactcagcaccagc

SEQ ID NO: 4667180 - DNA, 25 bp, Homo sapien
aagggcagagaggatctagccaaca

SEQ ID NO: 4667181 - DNA, 25 bp, Homo sapien
gggcagagaggatctagccaacaag

SEQ ID NO: 4667182 - DNA, 25 bp, Homo sapien
taagggcagagaggatctagccaac

SEQ ID NO: 4667183 - DNA, 25 bp, Homo sapien
ctaagggcagagaggatctagccaa

SEQ ID NO: 4667184 - DNA, 25 bp, Homo sapien
cattgtccttgtgaaagcccttggc

SEQ ID NO: 4667185 - DNA, 25 bp, Homo sapien
ggttaagcacatagggacagatccc

SEQ ID NO: 4667186 - DNA, 25 bp, Homo sapien
gagatatgcagagctccgagggcac

SEQ ID NO: 4667187 - DNA, 25 bp, Homo sapien
catgagaattggttcacacgaggaa

SEQ ID NO: 4667188 - DNA, 25 bp, Homo sapien
ccatgggccacgcatacggacataa

SEQ ID NO: 4667189 - DNA, 25 bp, Homo sapien
cacgcatacggacataagagtcatg

SEQ ID NO: 4667190 - DNA, 25 bp, Homo sapien
tgggccacgcatacggacataagag

SEQ ID NO: 4667191 - DNA, 25 bp, Homo sapien
tacggacataagagtcatggcaggg

SEQ ID NO: 4667192 - DNA, 25 bp, Homo sapien
cagcctggccatcgagggaattgag

SEQ ID NO: 4667193 - DNA, 25 bp, Homo sapien
ccctgatggcttctatagagctaag

SEQ ID NO: 4667194 - DNA, 25 bp, Homo sapien
ggaagctatgctaacttgacagaac

SEQ ID NO: 4667195 - DNA, 25 bp, Homo sapien
gctcaggtctatgatgtcatttcca

SEQ ID NO: 4667196 - DNA, 25 bp, Homo sapien
tggagcagttgcttatgtcaaatcc

SEQ ID NO: 4667197 - DNA, 25 bp, Homo sapien
gcagttgcttatgtcaaatccgtca

SEQ ID NO: 4667198 - DNA, 25 bp, Homo sapien
gagcagttgcttatgtcaaatccgt

SEQ ID NO: 4667199 - DNA, 25 bp, Homo sapien
tgcatggagcagttgcttatgtcaa

SEQ ID NO: 4667200 - DNA, 25 bp, Homo sapien
agcttcgccgcgctcctgacttctt

SEQ ID NO: 4667201 - DNA, 25 bp, Homo sapien
ccttgttggctgagcggttcacgaa

SEQ ID NO: 4667202 - DNA, 25 bp, Homo sapien
tcttgccttgttggctgagcggttc

SEQ ID NO: 4667203 - DNA, 25 bp, Homo sapien
cgccgcgctcctgacttcttgcctt

SEQ ID NO: 4667204 - DNA, 25 bp, Homo sapien
ccagaaagccacttccagctggtgg

SEQ ID NO: 4667205 - DNA, 25 bp, Homo sapien
tggcccatgagaacgactgacttta

SEQ ID NO: 4667206 - DNA, 25 bp, Homo sapien
ctggcagacagggagcccattcagg

SEQ ID NO: 4667207 - DNA, 25 bp, Homo sapien
gcgctgacttgactctggcccatga

SEQ ID NO: 4667208 - DNA, 25 bp, Homo sapien
tatcggagcagactgaacttcctgg

SEQ ID NO: 4667209 - DNA, 25 bp, Homo sapien
ttggcagggtttccctaatggaatc

SEQ ID NO: 4667210 - DNA, 25 bp, Homo sapien
ggtttccctaatggaatctccagag

SEQ ID NO: 4667211 - DNA, 25 bp, Homo sapien
ggctatttgtccgtgaacccataat

SEQ ID NO: 4667212 - DNA, 25 bp, Homo sapien
tcaccagtcccagggggcggtatgg

SEQ ID NO: 4667213 - DNA, 25 bp, Homo sapien
gcctgaggatgtctgcaaactgctc

SEQ ID NO: 4667214 - DNA, 25 bp, Homo sapien
caaagtttgagttgcagtaacaatg

SEQ ID NO: 4667215 - DNA, 25 bp, Homo sapien
tttgagttgcagtaacaatggtccc

SEQ ID NO: 4667216 - DNA, 25 bp, Homo sapien
cgtcctgtgtgccttggctgcctcc

SEQ ID NO: 4667217 - DNA, 25 bp, Homo sapien
cacgtggacgcagctctgagtttgt

SEQ ID NO: 4667218 - DNA, 25 bp, Homo sapien
tggcccgccggagggatgaccagcc

SEQ ID NO: 4667219 - DNA, 25 bp, Homo sapien
ccatctggcgactctggcatcgtga

SEQ ID NO: 4667220 - DNA, 25 bp, Homo sapien
caagttgggctaacatcggaggagc

SEQ ID NO: 4667221 - DNA, 25 bp, Homo sapien
aaaaatgtcgggctcggctgacaca

SEQ ID NO: 4667222 - DNA, 25 bp, Homo sapien
tgaagatacaggctctagtcccgcc

SEQ ID NO: 4667223 - DNA, 25 bp, Homo sapien
gaagagtgttctccccggaatgtgg

SEQ ID NO: 4667224 - DNA, 25 bp, Homo sapien
gagacagagaagatattccaataag

SEQ ID NO: 4667225 - DNA, 25 bp, Homo sapien
ttggggttggctgtacttgttcagc

SEQ ID NO: 4667226 - DNA, 25 bp, Homo sapien
tcagctctggtgcaagaatataaaa

SEQ ID NO: 4667227 - DNA, 25 bp, Homo sapien
gttcagctctggtgcaagaatataa

SEQ ID NO: 4667228 - DNA, 25 bp, Homo sapien
gtggttgccagacaagcgagccaga

SEQ ID NO: 4667229 - DNA, 25 bp, Homo sapien
atcgaggagcgtgccagatctcagg

SEQ ID NO: 4667230 - DNA, 25 bp, Homo sapien
tctagcaaatatcgcaggagcactg

SEQ ID NO: 4667231 - DNA, 25 bp, Homo sapien
gcccatttataggtaggaagtagcc

SEQ ID NO: 4667232 - DNA, 25 bp, Homo sapien
catgattagaacaggaactaccgta

SEQ ID NO: 4667233 - DNA, 25 bp, Homo sapien
tactgagtatgtcattgccatgatt

SEQ ID NO: 4667234 - DNA, 25 bp, Homo sapien
aactaccgtactttctgggatgtcg

SEQ ID NO: 4667235 - DNA, 25 bp, Homo sapien
gggatgtcggaaaatgcagatacag

SEQ ID NO: 4667236 - DNA, 25 bp, Homo sapien
tcctgttgctaacaggcctgatttt

SEQ ID NO: 4667237 - DNA, 25 bp, Homo sapien
cctgttgctaacaggcctgattttt

SEQ ID NO: 4667238 - DNA, 25 bp, Homo sapien
cactctaggctgaatgtatgggaac

SEQ ID NO: 4667239 - DNA, 25 bp, Homo sapien
tatagatcccacaggtgacacatgc

SEQ ID NO: 4667240 - DNA, 25 bp, Homo sapien
gatgaaaagccttgacgcagagtca

SEQ ID NO: 4667241 - DNA, 25 bp, Homo sapien
caaagcctccggttccaaagtgtca

SEQ ID NO: 4667242 - DNA, 25 bp, Homo sapien
tggagacagcgtgttgaagtccgca

SEQ ID NO: 4667243 - DNA, 25 bp, Homo sapien
aaggctctgctcagggcactccggg

SEQ ID NO: 4667244 - DNA, 25 bp, Homo sapien
cccagcgattccctgagtgtgaggc

SEQ ID NO: 4667245 - DNA, 25 bp, Homo sapien
ggcaaaagccgtcctgggaaccaca

SEQ ID NO: 4667246 - DNA, 25 bp, Homo sapien
ggtgtctctgacttaggaatgtgcc

SEQ ID NO: 4667247 - DNA, 25 bp, Homo sapien
cgatgataaagacacactagaagct

SEQ ID NO: 4667248 - DNA, 25 bp, Homo sapien
tgtgccttcccagaacttcggcaag

SEQ ID NO: 4667249 - DNA, 25 bp, Homo sapien
agaacttcggcaagggcatctgtag

SEQ ID NO: 4667250 - DNA, 25 bp, Homo sapien
taaggcaaagcgcttgcacatgaag

SEQ ID NO: 4667251 - DNA, 25 bp, Homo sapien
aggcaaagcgcttgcacatgaagtc

SEQ ID NO: 4667252 - DNA, 25 bp, Homo sapien
tcattaaggcaaagcgcttgcacat

SEQ ID NO: 4667253 - DNA, 25 bp, Homo sapien
tgcatttgctgcagtactcattaag

SEQ ID NO: 4667254 - DNA, 25 bp, Homo sapien
ctcacgggtcatgggggtcatgtcc

SEQ ID NO: 4667255 - DNA, 25 bp, Homo sapien
gggactgcatgtgagaggtgcctga

SEQ ID NO: 4667256 - DNA, 25 bp, Homo sapien
gcctgaagcagagcggtttacggca

SEQ ID NO: 4667257 - DNA, 25 bp, Homo sapien
gcacactctagaggagagggggact

SEQ ID NO: 4667258 - DNA, 25 bp, Homo sapien
acacacgaagcccgcatgcagcaat

SEQ ID NO: 4667259 - DNA, 25 bp, Homo sapien
cacgaagcccgcatgcagcaattct

SEQ ID NO: 4667260 - DNA, 25 bp, Homo sapien
gaacacacgaagcccgcatgcagca

SEQ ID NO: 4667261 - DNA, 25 bp, Homo sapien
acacgaagcccgcatgcagcaattc

SEQ ID NO: 4667262 - DNA, 25 bp, Homo sapien
agagaatgtggttaagtgatatgcc

SEQ ID NO: 4667263 - DNA, 25 bp, Homo sapien
ttaggctgccatccgtgggaacctc

SEQ ID NO: 4667264 - DNA, 25 bp, Homo sapien
gtgaacagtcttagcaacactattt

SEQ ID NO: 4667265 - DNA, 25 bp, Homo sapien
caaggcagtctcctcattagccatg

SEQ ID NO: 4667266 - DNA, 25 bp, Homo sapien
gctctggggcctcgagaaaatccaa

SEQ ID NO: 4667267 - DNA, 25 bp, Homo sapien
gcagcacagatttcattctaggttt

SEQ ID NO: 4667268 - DNA, 25 bp, Homo sapien
ccaaagccacaggttgtagcaggca

SEQ ID NO: 4667269 - DNA, 25 bp, Homo sapien
aggcagcacagatttcattctaggt

SEQ ID NO: 4667270 - DNA, 25 bp, Homo sapien
tactttatcaccaccccagggagcc

SEQ ID NO: 4667271 - DNA, 25 bp, Homo sapien
atcaccaccccagggagccggtaca

SEQ ID NO: 4667272 - DNA, 25 bp, Homo sapien
ttatcaccaccccagggagccggta

SEQ ID NO: 4667273 - DNA, 25 bp, Homo sapien
ctttatcaccaccccagggagccgg

SEQ ID NO: 4667274 - DNA, 25 bp, Homo sapien
tgcctgactcacaagcagaaggcag

SEQ ID NO: 4667275 - DNA, 25 bp, Homo sapien
tgcacgttggcttccccgtgttcca

SEQ ID NO: 4667276 - DNA, 25 bp, Homo sapien
caaagcttgtgagctctcattttga

SEQ ID NO: 4667277 - DNA, 25 bp, Homo sapien
gagcccatggcgcatggacgtcatg

SEQ ID NO: 4667278 - DNA, 25 bp, Homo sapien
cagagtgccattcggaaaacttcct

SEQ ID NO: 4667279 - DNA, 25 bp, Homo sapien
cttcccacgcagagtgccattcgga

SEQ ID NO: 4667280 - DNA, 25 bp, Homo sapien
gcgtgcacgtgcacaagctccttcc

SEQ ID NO: 4667281 - DNA, 25 bp, Homo sapien
cacgcagagtgccattcggaaaact

SEQ ID NO: 4667282 - DNA, 25 bp, Homo sapien
ctatagttgagaagcgcctcctgaa

SEQ ID NO: 4667283 - DNA, 25 bp, Homo sapien
tcagggggtgcaacagtgagcagtg

SEQ ID NO: 4667284 - DNA, 25 bp, Homo sapien
taaaaggctcagctagacctttcca

SEQ ID NO: 4667285 - DNA, 25 bp, Homo sapien
gaggggacacgttcagttgtcacac

SEQ ID NO: 4667286 - DNA, 25 bp, Homo sapien
agaggagccacctctattctcccaa

SEQ ID NO: 4667287 - DNA, 25 bp, Homo sapien
ttcaatcccagggagacacgacctc

SEQ ID NO: 4667288 - DNA, 25 bp, Homo sapien
gagctgggcatttgcgctacacgga

SEQ ID NO: 4667289 - DNA, 25 bp, Homo sapien
tcctgtaagtaatggcgccagggcc

SEQ ID NO: 4667290 - DNA, 25 bp, Homo sapien
aacatgggactctggccatgaacac

SEQ ID NO: 4667291 - DNA, 25 bp, Homo sapien
agtagtcagagattctaaggttggc

SEQ ID NO: 4667292 - DNA, 25 bp, Homo sapien
caattaggacgggtttcactgcaag

SEQ ID NO: 4667293 - DNA, 25 bp, Homo sapien
cagagattctaaggttggcctgatc

SEQ ID NO: 4667294 - DNA, 25 bp, Homo sapien
gcaagtcaagcctctagtagtcaga

SEQ ID NO: 4667295 - DNA, 25 bp, Homo sapien
tctctaactcgatacaggatcttca

SEQ ID NO: 4667296 - DNA, 25 bp, Homo sapien
ttctctaactcgatacaggatcttc

SEQ ID NO: 4667297 - DNA, 25 bp, Homo sapien
ctctaactcgatacaggatcttcat

SEQ ID NO: 4667298 - DNA, 25 bp, Homo sapien
cagctgttggctggcaaaccagacc

SEQ ID NO: 4667299 - DNA, 25 bp, Homo sapien
gccacagctgttggctggcaaacca

SEQ ID NO: 4667300 - DNA, 25 bp, Homo sapien
cacagctgttggctggcaaaccaga

SEQ ID NO: 4667301 - DNA, 25 bp, Homo sapien
cagacccccgcgtcgtttcttccat

SEQ ID NO: 4667302 - DNA, 25 bp, Homo sapien
gaaggagcaggaactaagctgcatg

SEQ ID NO: 4667303 - DNA, 25 bp, Homo sapien
ggctcctgccggcttccttgcttgg

SEQ ID NO: 4667304 - DNA, 25 bp, Homo sapien
tgcttggtccagatgctctagggct

SEQ ID NO: 4667305 - DNA, 25 bp, Homo sapien
tagggcttccgcgttagcttggctg

SEQ ID NO: 4667306 - DNA, 25 bp, Homo sapien
cactgttcgggatgctcttttccag

SEQ ID NO: 4667307 - DNA, 25 bp, Homo sapien
ccactgttcgggatgctcttttcca

SEQ ID NO: 4667308 - DNA, 25 bp, Homo sapien
tccactgttcgggatgctcttttcc

SEQ ID NO: 4667309 - DNA, 25 bp, Homo sapien
tcagttcacaggtgactcctggcct

SEQ ID NO: 4667310 - DNA, 25 bp, Homo sapien
gagacgagtttgtgggtccaccttc

SEQ ID NO: 4667311 - DNA, 25 bp, Homo sapien
tgtgtgccctcgcattgctggttag

SEQ ID NO: 4667312 - DNA, 25 bp, Homo sapien
tgctggttagcttcattaggagacg

SEQ ID NO: 4667313 - DNA, 25 bp, Homo sapien
gttctcatctgcaggcattcaccct

SEQ ID NO: 4667314 - DNA, 25 bp, Homo sapien
tctgccacagaacctgccttggcca

SEQ ID NO: 4667315 - DNA, 25 bp, Homo sapien
caccgcggctggttctcatctgcag

SEQ ID NO: 4667316 - DNA, 25 bp, Homo sapien
acactgttcctttctgggcaccgcg

SEQ ID NO: 4667317 - DNA, 25 bp, Homo sapien
tagaatagtcatggtgctgaggcct

SEQ ID NO: 4667318 - DNA, 25 bp, Homo sapien
cagcccctatacaagagagagtcaa

SEQ ID NO: 4667319 - DNA, 25 bp, Homo sapien
cctgaagcagggtatccactgggac

SEQ ID NO: 4667320 - DNA, 25 bp, Homo sapien
cctgaagagagttctgagcaggagc

SEQ ID NO: 4667321 - DNA, 25 bp, Homo sapien
ccacaggctgacttcgttcgtgctg

SEQ ID NO: 4667322 - DNA, 25 bp, Homo sapien
gacttgacggttgtctctgtgcaga

SEQ ID NO: 4667323 - DNA, 25 bp, Homo sapien
gctccggttacagccacaggctcct

SEQ ID NO: 4667324 - DNA, 25 bp, Homo sapien
gacttcgttcgtgctgttcctgctc

SEQ ID NO: 4667325 - DNA, 25 bp, Homo sapien
ttagagtcacccgattgtgctgctt

SEQ ID NO: 4667326 - DNA, 25 bp, Homo sapien
tgtgctgcttacatccctccagggc

SEQ ID NO: 4667327 - DNA, 25 bp, Homo sapien
attgtgctgcttacatccctccagg

SEQ ID NO: 4667328 - DNA, 25 bp, Homo sapien
agagtcacccgattgtgctgcttac

SEQ ID NO: 4667329 - DNA, 25 bp, Homo sapien
tctttcctggttcccaaagggctga

SEQ ID NO: 4667330 - DNA, 25 bp, Homo sapien
caaagaaacaaatacgtgggtgtct

SEQ ID NO: 4667331 - DNA, 25 bp, Homo sapien
caaatacgtgggtgtctttcctggt

SEQ ID NO: 4667332 - DNA, 25 bp, Homo sapien
tgctgccaaagaaacaaatacgtgg

SEQ ID NO: 4667333 - DNA, 25 bp, Homo sapien
tggagatcccaaagagagcctgtgc

SEQ ID NO: 4667334 - DNA, 25 bp, Homo sapien
gcaaattcctggtcaattatttcag

SEQ ID NO: 4667335 - DNA, 25 bp, Homo sapien
cactgggacctgaatcaactcttga

SEQ ID NO: 4667336 - DNA, 25 bp, Homo sapien
ccagttcacagtgactgcctgcttc

SEQ ID NO: 4667337 - DNA, 25 bp, Homo sapien
tgtagcacgactaagaaaagaactt

SEQ ID NO: 4667338 - DNA, 25 bp, Homo sapien
gcagggtgtgggtagggtagagaac

SEQ ID NO: 4667339 - DNA, 25 bp, Homo sapien
gttttgatgacatgtagcacgacta

SEQ ID NO: 4667340 - DNA, 25 bp, Homo sapien
acttctaggccagtccagtggtgca

SEQ ID NO: 4667341 - DNA, 25 bp, Homo sapien
caggaagtggagccagttctgccag

SEQ ID NO: 4667342 - DNA, 25 bp, Homo sapien
gccaggtcctcccattcagatggtg

SEQ ID NO: 4667343 - DNA, 25 bp, Homo sapien
gaagtggagccagttctgccaggtc

SEQ ID NO: 4667344 - DNA, 25 bp, Homo sapien
tggagccagttctgccaggtcctcc

SEQ ID NO: 4667345 - DNA, 25 bp, Homo sapien
ccctgtttcccactgtgtgcagatg

SEQ ID NO: 4667346 - DNA, 25 bp, Homo sapien
aaatgccaagatctgcgggggtctg

SEQ ID NO: 4667347 - DNA, 25 bp, Homo sapien
cctgtttcccactgtgtgcagatga

SEQ ID NO: 4667348 - DNA, 25 bp, Homo sapien
ctctttggaggaaatgccaagatct

SEQ ID NO: 4667349 - DNA, 25 bp, Homo sapien
tggcaattggggcagagtttgcatc

SEQ ID NO: 4667350 - DNA, 25 bp, Homo sapien
atcttggagctggaaccttggcggc

SEQ ID NO: 4667351 - DNA, 25 bp, Homo sapien
aagacagccactcccttggcaattg

SEQ ID NO: 4667352 - DNA, 25 bp, Homo sapien
ccttggcggcccctgagcacagtgt

SEQ ID NO: 4667353 - DNA, 25 bp, Homo sapien
tctcaaaacgttccaatacatcagg

SEQ ID NO: 4667354 - DNA, 25 bp, Homo sapien
tacatcaggtaatctatgtgactcc

SEQ ID NO: 4667355 - DNA, 25 bp, Homo sapien
tccctgggagtttctagttgcctta

SEQ ID NO: 4667356 - DNA, 25 bp, Homo sapien
tatcaggtattctactcagttctcc

SEQ ID NO: 4667357 - DNA, 25 bp, Homo sapien
atttgggttctagctgcatagccca

SEQ ID NO: 4667358 - DNA, 25 bp, Homo sapien
aggattagcaactttctgggccttc

SEQ ID NO: 4667359 - DNA, 25 bp, Homo sapien
ctggggtctggactaggattagcaa

SEQ ID NO: 4667360 - DNA, 25 bp, Homo sapien
gtctggactaggattagcaactttc

SEQ ID NO: 4667361 - DNA, 25 bp, Homo sapien
agttgcaaatgcacccatggcgggc

SEQ ID NO: 4667362 - DNA, 25 bp, Homo sapien
ccacgaggatttgccaggagtctgc

SEQ ID NO: 4667363 - DNA, 25 bp, Homo sapien
tgatgcatagaaccaatagcgcttg

SEQ ID NO: 4667364 - DNA, 25 bp, Homo sapien
gaggagggactcctatacacacagt

SEQ ID NO: 4667365 - DNA, 25 bp, Homo sapien
cattgcaagtctgatgggttttaca

SEQ ID NO: 4667366 - DNA, 25 bp, Homo sapien
ggttttacagaaggttgcaatggga

SEQ ID NO: 4667367 - DNA, 25 bp, Homo sapien
tgtttaagtcgcaactgagaactcc

SEQ ID NO: 4667368 - DNA, 25 bp, Homo sapien
gatcaaaggcttcccaaataagtca

SEQ ID NO: 4667369 - DNA, 25 bp, Homo sapien
tatgagggcaaaaggtaagtaccag

SEQ ID NO: 4667370 - DNA, 25 bp, Homo sapien
gatttgcagataatcgtagcccact

SEQ ID NO: 4667371 - DNA, 25 bp, Homo sapien
gaagggtacaggttggctctatcgc

SEQ ID NO: 4667372 - DNA, 25 bp, Homo sapien
cattgaccaggcagtagtatgaggg

SEQ ID NO: 4667373 - DNA, 25 bp, Homo sapien
ctacaattctacacgttcaccaaat

SEQ ID NO: 4667374 - DNA, 25 bp, Homo sapien
caattctacacgttcaccaaatgtg

SEQ ID NO: 4667375 - DNA, 25 bp, Homo sapien
attctacacgttcaccaaatgtggg

SEQ ID NO: 4667376 - DNA, 25 bp, Homo sapien
tacaattctacacgttcaccaaatg

SEQ ID NO: 4667377 - DNA, 25 bp, Homo sapien
ctccttctcccgcaataaaggagac

SEQ ID NO: 4667378 - DNA, 25 bp, Homo sapien
cttctcccgcaataaaggagacccg

SEQ ID NO: 4667379 - DNA, 25 bp, Homo sapien
cccagagccccttctttttgatgag

SEQ ID NO: 4667380 - DNA, 25 bp, Homo sapien
ccagagccccttctttttgatgaga

SEQ ID NO: 4667381 - DNA, 25 bp, Homo sapien
agagctctggaattacacacaggag

SEQ ID NO: 4667382 - DNA, 25 bp, Homo sapien
ccagagctctggaattacacacagg

SEQ ID NO: 4667383 - DNA, 25 bp, Homo sapien
tgtgcccggtctatcttgacttttt

SEQ ID NO: 4667384 - DNA, 25 bp, Homo sapien
cagagctctggaattacacacagga

SEQ ID NO: 4667385 - DNA, 25 bp, Homo sapien
tccagatccgtgtttcggaataggc

SEQ ID NO: 4667386 - DNA, 25 bp, Homo sapien
ttcttgtccagatccgtgtttcgga

SEQ ID NO: 4667387 - DNA, 25 bp, Homo sapien
tgtccagatccgtgtttcggaatag

SEQ ID NO: 4667388 - DNA, 25 bp, Homo sapien
cagatccgtgtttcggaataggcat

SEQ ID NO: 4667389 - DNA, 25 bp, Homo sapien
tttacattgccctcgtctccctgag

SEQ ID NO: 4667390 - DNA, 25 bp, Homo sapien
agtgataactgaggcttcttaggac

SEQ ID NO: 4667391 - DNA, 25 bp, Homo sapien
tcccacgaagaataatcaagtgagg

SEQ ID NO: 4667392 - DNA, 25 bp, Homo sapien
gacaatataatgcaagagaaacact

SEQ ID NO: 4667393 - DNA, 25 bp, Homo sapien
cggctctggtctagtgtgctccagc

SEQ ID NO: 4667394 - DNA, 25 bp, Homo sapien
cggctttcaggacgccacttcgaca

SEQ ID NO: 4667395 - DNA, 25 bp, Homo sapien
tcagcctgagcatgaagggggtcca

SEQ ID NO: 4667396 - DNA, 25 bp, Homo sapien
ctacctccgagggagatcgggccag

SEQ ID NO: 4667397 - DNA, 25 bp, Homo sapien
cagagcctttacgtgatggtaccac

SEQ ID NO: 4667398 - DNA, 25 bp, Homo sapien
gtccagtggctgcagagcctttacg

SEQ ID NO: 4667399 - DNA, 25 bp, Homo sapien
tggtaccactgtaatagcagtgacc

SEQ ID NO: 4667400 - DNA, 25 bp, Homo sapien
gggtcttcatgccatcttgggtggg

SEQ ID NO: 4667401 - DNA, 25 bp, Homo sapien
aacataggtccttcctccaccagta

SEQ ID NO: 4667402 - DNA, 25 bp, Homo sapien
gccagaaagtctgttagggagatag

SEQ ID NO: 4667403 - DNA, 25 bp, Homo sapien
cttttttgctgaggccgccgtgttg

SEQ ID NO: 4667404 - DNA, 25 bp, Homo sapien
tagggagatagtcttccccttcttc

SEQ ID NO: 4667405 - DNA, 25 bp, Homo sapien
tcatccgtttcatcagctcagctga

SEQ ID NO: 4667406 - DNA, 25 bp, Homo sapien
aggtcatccgtttcatcagctcagc

SEQ ID NO: 4667407 - DNA, 25 bp, Homo sapien
ggtcatccgtttcatcagctcagct

SEQ ID NO: 4667408 - DNA, 25 bp, Homo sapien
tccaggtcatccgtttcatcagctc

SEQ ID NO: 4667409 - DNA, 25 bp, Homo sapien
ctgtgccaagttgtcgaaacatctc

SEQ ID NO: 4667410 - DNA, 25 bp, Homo sapien
gggaagatggctccggtcgatattg

SEQ ID NO: 4667411 - DNA, 25 bp, Homo sapien
aagatggctccggtcgatattgggt

SEQ ID NO: 4667412 - DNA, 25 bp, Homo sapien
ttggagacgccctatacacatcgtc

SEQ ID NO: 4667413 - DNA, 25 bp, Homo sapien
aacggtcaattggagacgccctata

SEQ ID NO: 4667414 - DNA, 25 bp, Homo sapien
tgggttcacatggtaaacgcactgc

SEQ ID NO: 4667415 - DNA, 25 bp, Homo sapien
gagactcttccttgagactcagggc

SEQ ID NO: 4667416 - DNA, 25 bp, Homo sapien
gactcagggcactaagcagggaatc

SEQ ID NO: 4667417 - DNA, 25 bp, Homo sapien
cctcactggattgctgggttcacat

SEQ ID NO: 4667418 - DNA, 25 bp, Homo sapien
atcacggccaaaagaacaatcatcc

SEQ ID NO: 4667419 - DNA, 25 bp, Homo sapien
cttctaggtgggtagtcatcaaagc

SEQ ID NO: 4667420 - DNA, 25 bp, Homo sapien
aagaacaatcatccctgtctttatc

SEQ ID NO: 4667421 - DNA, 25 bp, Homo sapien
cggccaaaagaacaatcatccctgt

SEQ ID NO: 4667422 - DNA, 25 bp, Homo sapien
cggtctgaatcataacgatctcgat

SEQ ID NO: 4667423 - DNA, 25 bp, Homo sapien
ccggtctgaatcataacgatctcga

SEQ ID NO: 4667424 - DNA, 25 bp, Homo sapien
ccatcccgataccggtctgaatcat

SEQ ID NO: 4667425 - DNA, 25 bp, Homo sapien
tcccgataccggtctgaatcataac

SEQ ID NO: 4667426 - DNA, 25 bp, Homo sapien
agcgatcccggccaccatatggatc

SEQ ID NO: 4667427 - DNA, 25 bp, Homo sapien
tgcctcggtcatcatagcgatcccg

SEQ ID NO: 4667428 - DNA, 25 bp, Homo sapien
tatggatccatatcccggcgttggc

SEQ ID NO: 4667429 - DNA, 25 bp, Homo sapien
tcccggccaccatatggatccatat

SEQ ID NO: 4667430 - DNA, 25 bp, Homo sapien
catatcggtcttcatagtggtcccc

SEQ ID NO: 4667431 - DNA, 25 bp, Homo sapien
ctgtcatatcggtcttcatagtggt

SEQ ID NO: 4667432 - DNA, 25 bp, Homo sapien
gtcatatcggtcttcatagtggtcc

SEQ ID NO: 4667433 - DNA, 25 bp, Homo sapien
atatcggtcttcatagtggtccccg

SEQ ID NO: 4667434 - DNA, 25 bp, Homo sapien
ggagctccaagaccgatcatcccgt

SEQ ID NO: 4667435 - DNA, 25 bp, Homo sapien
ctggagctccaagaccgatcatccc

SEQ ID NO: 4667436 - DNA, 25 bp, Homo sapien
tataatcatccagagagtaatcatc

SEQ ID NO: 4667437 - DNA, 25 bp, Homo sapien
tcatccagagagtaatcatctctgg

SEQ ID NO: 4667438 - DNA, 25 bp, Homo sapien
cccctccaaagatagaagcagctcg

SEQ ID NO: 4667439 - DNA, 25 bp, Homo sapien
tccaaagatagaagcagctcgagtg

SEQ ID NO: 4667440 - DNA, 25 bp, Homo sapien
cctccaaagatagaagcagctcgag

SEQ ID NO: 4667441 - DNA, 25 bp, Homo sapien
ccaaagatagaagcagctcgagtgg

SEQ ID NO: 4667442 - DNA, 25 bp, Homo sapien
gctggcattacctttaggggctgat

SEQ ID NO: 4667443 - DNA, 25 bp, Homo sapien
tggcattacctttaggggctgatca

SEQ ID NO: 4667444 - DNA, 25 bp, Homo sapien
gcattacctttaggggctgatcagg

SEQ ID NO: 4667445 - DNA, 25 bp, Homo sapien
gagggttagaacttcgcttcaccca

SEQ ID NO: 4667446 - DNA, 25 bp, Homo sapien
ctattcggcataatcttctccctca

SEQ ID NO: 4667447 - DNA, 25 bp, Homo sapien
gcagaactgaacttggaagctggat

SEQ ID NO: 4667448 - DNA, 25 bp, Homo sapien
tgcagatctggagtcttgatccttt

SEQ ID NO: 4667449 - DNA, 25 bp, Homo sapien
ccatcaacagagagagcagcatact

SEQ ID NO: 4667450 - DNA, 25 bp, Homo sapien
atttgctctcgaatgttccagggtg

SEQ ID NO: 4667451 - DNA, 25 bp, Homo sapien
tcttgtctggatagaggttttgatt

SEQ ID NO: 4667452 - DNA, 25 bp, Homo sapien
ttgtcttgtctggatagaggttttg

SEQ ID NO: 4667453 - DNA, 25 bp, Homo sapien
ggttttgatttgctctcgaatgttc

SEQ ID NO: 4667454 - DNA, 25 bp, Homo sapien
ctgtcccgttcaatcaaggcaactt

SEQ ID NO: 4667455 - DNA, 25 bp, Homo sapien
gtcccgttcaatcaaggcaacttga

SEQ ID NO: 4667456 - DNA, 25 bp, Homo sapien
caatcaaggcaacttgaaagtctct

SEQ ID NO: 4667457 - DNA, 25 bp, Homo sapien
ccgttcaatcaaggcaacttgaaag

SEQ ID NO: 4667458 - DNA, 25 bp, Homo sapien
cacagcttgcaaatttgactctcca

SEQ ID NO: 4667459 - DNA, 25 bp, Homo sapien
cttgcaaatttgactctccatagtg

SEQ ID NO: 4667460 - DNA, 25 bp, Homo sapien
tcacagcttgcaaatttgactctcc

SEQ ID NO: 4667461 - DNA, 25 bp, Homo sapien
cagcttgcaaatttgactctccata

SEQ ID NO: 4667462 - DNA, 25 bp, Homo sapien
attgtctggactgtctcagcaagct

SEQ ID NO: 4667463 - DNA, 25 bp, Homo sapien
ccattgtctggactgtctcagcaag

SEQ ID NO: 4667464 - DNA, 25 bp, Homo sapien
cattgtctggactgtctcagcaagc

SEQ ID NO: 4667465 - DNA, 25 bp, Homo sapien
catctcctgggtgaaaatattgcca

SEQ ID NO: 4667466 - DNA, 25 bp, Homo sapien
tctcttgggcaaacctcatacttat

SEQ ID NO: 4667467 - DNA, 25 bp, Homo sapien
ccagtgttcccaccatttggaaaag

SEQ ID NO: 4667468 - DNA, 25 bp, Homo sapien
gatgttactgtcacagattagtagc

SEQ ID NO: 4667469 - DNA, 25 bp, Homo sapien
ggactgcctcttgtacctggaagca

SEQ ID NO: 4667470 - DNA, 25 bp, Homo sapien
gcacccgcagaggtctttgttggag

SEQ ID NO: 4667471 - DNA, 25 bp, Homo sapien
gaaagcgtggttatcatacctgctg

SEQ ID NO: 4667472 - DNA, 25 bp, Homo sapien
tcctgacttggattggaaagcgtgg

SEQ ID NO: 4667473 - DNA, 25 bp, Homo sapien
gtggctgaggttgagagatcaggca

SEQ ID NO: 4667474 - DNA, 25 bp, Homo sapien
gagagatcaggcatgtggtcatcct

SEQ ID NO: 4667475 - DNA, 25 bp, Homo sapien
tgaggttgagagatcaggcatgtgg

SEQ ID NO: 4667476 - DNA, 25 bp, Homo sapien
gttgagagatcaggcatgtggtcat

SEQ ID NO: 4667477 - DNA, 25 bp, Homo sapien
tatgcctttttgcaacagctggggc

SEQ ID NO: 4667478 - DNA, 25 bp, Homo sapien
tgtctagtgaacaattgatggttgc

SEQ ID NO: 4667479 - DNA, 25 bp, Homo sapien
aattgatggttgcttcccagtatct

SEQ ID NO: 4667480 - DNA, 25 bp, Homo sapien
ctagaggtggtgtctagtgaacaat

SEQ ID NO: 4667481 - DNA, 25 bp, Homo sapien
gaacaattgatggttgcttcccagt

SEQ ID NO: 4667482 - DNA, 25 bp, Homo sapien
cctgcaggagggcgcaggcatgcat

SEQ ID NO: 4667483 - DNA, 25 bp, Homo sapien
gtctcggccgatcgcctggcagttg

SEQ ID NO: 4667484 - DNA, 25 bp, Homo sapien
ccttctgggtctcggccgatcgcct

SEQ ID NO: 4667485 - DNA, 25 bp, Homo sapien
ccgatcgcctggcagttgggctcgt

SEQ ID NO: 4667486 - DNA, 25 bp, Homo sapien
tgggtctcggccgatcgcctggcag

SEQ ID NO: 4667487 - DNA, 25 bp, Homo sapien
ctgcccacaggaaggagtcactttc

SEQ ID NO: 4667488 - DNA, 25 bp, Homo sapien
tatccagggtgagggcatacaaact

SEQ ID NO: 4667489 - DNA, 25 bp, Homo sapien
tgccacagtcacgaagctttcttag

SEQ ID NO: 4667490 - DNA, 25 bp, Homo sapien
gaaggaagacgttcacagcatcgca

SEQ ID NO: 4667491 - DNA, 25 bp, Homo sapien
cagggacttccttgcctactctcaa

SEQ ID NO: 4667492 - DNA, 25 bp, Homo sapien
ttacactcatgacccagttcaatgg

SEQ ID NO: 4667493 - DNA, 25 bp, Homo sapien
tgccatttacactcatgacccagtt

SEQ ID NO: 4667494 - DNA, 25 bp, Homo sapien
cagttcaatggttgctgtcttccag

SEQ ID NO: 4667495 - DNA, 25 bp, Homo sapien
ctttgaagagtcattgttgggagaa

SEQ ID NO: 4667496 - DNA, 25 bp, Homo sapien
ccagtgtggtcaattgggaggaacc

SEQ ID NO: 4667497 - DNA, 25 bp, Homo sapien
gaacctccatagacttctgctgaca

SEQ ID NO: 4667498 - DNA, 25 bp, Homo sapien
ttgttgggagaatttcccagtgtgg

SEQ ID NO: 4667499 - DNA, 25 bp, Homo sapien
tggtgtcatatctacaaattctgtg

SEQ ID NO: 4667500 - DNA, 25 bp, Homo sapien
tttctttcatgctcttatcagggtc

SEQ ID NO: 4667501 - DNA, 25 bp, Homo sapien
ttcatgctcttatcagggtcttgag

SEQ ID NO: 4667502 - DNA, 25 bp, Homo sapien
tgcctaaccctaggtcacaagtaat

SEQ ID NO: 4667503 - DNA, 25 bp, Homo sapien
tttggaaacaacacatgtctcttca

SEQ ID NO: 4667504 - DNA, 25 bp, Homo sapien
aagaagtattggcagctgttgctgg

SEQ ID NO: 4667505 - DNA, 25 bp, Homo sapien
aaatgaggtgattatgggctgctgc

SEQ ID NO: 4667506 - DNA, 25 bp, Homo sapien
ggctccctggggtgtcatccctttc

SEQ ID NO: 4667507 - DNA, 25 bp, Homo sapien
tgctccaagaagtattggcagctgt

SEQ ID NO: 4667508 - DNA, 25 bp, Homo sapien
cagaagccggccgttttgatagacg

SEQ ID NO: 4667509 - DNA, 25 bp, Homo sapien
ttgtttctgcggaaaagtgctgggc

SEQ ID NO: 4667510 - DNA, 25 bp, Homo sapien
gccgcagagtccctttcggatggca

SEQ ID NO: 4667511 - DNA, 25 bp, Homo sapien
tttgatagacgtgttccctctgcgt

SEQ ID NO: 4667512 - DNA, 25 bp, Homo sapien
ccaggcggtgaggagtccagcacaa

SEQ ID NO: 4667513 - DNA, 25 bp, Homo sapien
aggcggtgaggagtccagcacaacc

SEQ ID NO: 4667514 - DNA, 25 bp, Homo sapien
ggtagccaggcggtgaggagtccag

SEQ ID NO: 4667515 - DNA, 25 bp, Homo sapien
ccagcacaaccttttcctcaccagt

SEQ ID NO: 4667516 - DNA, 25 bp, Homo sapien
tagcgcccactatgccttggagttg

SEQ ID NO: 4667517 - DNA, 25 bp, Homo sapien
gcaaggaatctttcaaggcccgtac

SEQ ID NO: 4667518 - DNA, 25 bp, Homo sapien
aagctcaagttttcctctggttgga

SEQ ID NO: 4667519 - DNA, 25 bp, Homo sapien
taatctatacctttctgtgactgac

SEQ ID NO: 4667520 - DNA, 25 bp, Homo sapien
tttgatccacatagacctctggctg

SEQ ID NO: 4667521 - DNA, 25 bp, Homo sapien
gatgccctgtggtccatgacggtcc

SEQ ID NO: 4667522 - DNA, 25 bp, Homo sapien
tgacttggccagtggataccctgat

SEQ ID NO: 4667523 - DNA, 25 bp, Homo sapien
tatctctacatcagcaccaacgtgg

SEQ ID NO: 4667524 - DNA, 25 bp, Homo sapien
catatggaatcaaggtaaggccttc

SEQ ID NO: 4667525 - DNA, 25 bp, Homo sapien
tggcggtcagctaactcagggactg

SEQ ID NO: 4667526 - DNA, 25 bp, Homo sapien
gatgacacagctaattctgaaacat

SEQ ID NO: 4667527 - DNA, 25 bp, Homo sapien
ctttggccttctcttgtagatgaca

SEQ ID NO: 4667528 - DNA, 25 bp, Homo sapien
agtccatggggttgcctcttccttc

SEQ ID NO: 4667529 - DNA, 25 bp, Homo sapien
ttcagagaacatttcagtccatggg

SEQ ID NO: 4667530 - DNA, 25 bp, Homo sapien
tgcggtcaattctacttcagagaac

SEQ ID NO: 4667531 - DNA, 25 bp, Homo sapien
gcctgccaggcctgattgcggtcaa

SEQ ID NO: 4667532 - DNA, 25 bp, Homo sapien
tgtaacatcacctccgtagtcaagg

SEQ ID NO: 4667533 - DNA, 25 bp, Homo sapien
tagcaccaactactttccaggagaa

SEQ ID NO: 4667534 - DNA, 25 bp, Homo sapien
gatgaaaccgttcagacatgcactt

SEQ ID NO: 4667535 - DNA, 25 bp, Homo sapien
gaaccacacttagttgagaggccat

SEQ ID NO: 4667536 - DNA, 25 bp, Homo sapien
cgtgtgccatcacgctcagttattt

SEQ ID NO: 4667537 - DNA, 25 bp, Homo sapien
attcataattcagcttcttatgtgt

SEQ ID NO: 4667538 - DNA, 25 bp, Homo sapien
tgccatcacgctcagttatttattt

SEQ ID NO: 4667539 - DNA, 25 bp, Homo sapien
cagcttcttatgtgttttctataat

SEQ ID NO: 4667540 - DNA, 25 bp, Homo sapien
agcagaaggctccatcgtcaaagca

SEQ ID NO: 4667541 - DNA, 25 bp, Homo sapien
aggctccatcgtcaaagcagctgag

SEQ ID NO: 4667542 - DNA, 25 bp, Homo sapien
ctgaaccaagtcttggcagcagaag

SEQ ID NO: 4667543 - DNA, 25 bp, Homo sapien
tttctactgcctgaaccaagtcttg

SEQ ID NO: 4667544 - DNA, 25 bp, Homo sapien
tctctttcctggcctagcagttctc

SEQ ID NO: 4667545 - DNA, 25 bp, Homo sapien
cactgccatcggaagacagtgccat

SEQ ID NO: 4667546 - DNA, 25 bp, Homo sapien
tctgtcattgctaactgagatgtca

SEQ ID NO: 4667547 - DNA, 25 bp, Homo sapien
tttggacatcactgccatcggaaga

SEQ ID NO: 4667548 - DNA, 25 bp, Homo sapien
ttatgtgaatctcttgcagacaccg

SEQ ID NO: 4667549 - DNA, 25 bp, Homo sapien
cttgcagacaccgtaccactggatc

SEQ ID NO: 4667550 - DNA, 25 bp, Homo sapien
tgaatctcttgcagacaccgtacca

SEQ ID NO: 4667551 - DNA, 25 bp, Homo sapien
ccagcttatgtgaatctcttgcaga

SEQ ID NO: 4667552 - DNA, 25 bp, Homo sapien
tgtcccaaatctgcagtgtaggctg

SEQ ID NO: 4667553 - DNA, 25 bp, Homo sapien
ggagtagctgggtatcatgacctag

SEQ ID NO: 4667554 - DNA, 25 bp, Homo sapien
gaaacacaatgttcaccgctacaga

SEQ ID NO: 4667555 - DNA, 25 bp, Homo sapien
taaggccctcagctgacgagacgag

SEQ ID NO: 4667556 - DNA, 25 bp, Homo sapien
tgatattttgcacacctcttgccat

SEQ ID NO: 4667557 - DNA, 25 bp, Homo sapien
ttgatattttgcacacctcttgcca

SEQ ID NO: 4667558 - DNA, 25 bp, Homo sapien
ggcgacaccttacctgtggaaagca

SEQ ID NO: 4667559 - DNA, 25 bp, Homo sapien
cccctgggcaagtgagagcatctgc

SEQ ID NO: 4667560 - DNA, 25 bp, Homo sapien
tcaaaataagccactgggactcggt

SEQ ID NO: 4667561 - DNA, 25 bp, Homo sapien
tcaagaaatgtactcgggcgacacc

SEQ ID NO: 4667562 - DNA, 25 bp, Homo sapien
gtgttaacctttgtgcccactaggc

SEQ ID NO: 4667563 - DNA, 25 bp, Homo sapien
tgcccactaggctcggcatgcaggg

SEQ ID NO: 4667564 - DNA, 25 bp, Homo sapien
tgtggactaagccagctttgaaagg

SEQ ID NO: 4667565 - DNA, 25 bp, Homo sapien
ctgccctcctcctataaagtggagg

SEQ ID NO: 4667566 - DNA, 25 bp, Homo sapien
acggttctgtgcagctattacaatt

SEQ ID NO: 4667567 - DNA, 25 bp, Homo sapien
tgatgtactccacggttctgtgcag

SEQ ID NO: 4667568 - DNA, 25 bp, Homo sapien
ggtttctgctgatgtactccacggt

SEQ ID NO: 4667569 - DNA, 25 bp, Homo sapien
ggttctgtgcagctattacaattca

SEQ ID NO: 4667570 - DNA, 25 bp, Homo sapien
ctgtgctggtgcataggcggcctgc

SEQ ID NO: 4667571 - DNA, 25 bp, Homo sapien
gggtctgagtggctccggggcaggt

SEQ ID NO: 4667572 - DNA, 25 bp, Homo sapien
tctgggtctgagtggctccggggca

SEQ ID NO: 4667573 - DNA, 25 bp, Homo sapien
ggatgggatggtcccctctgacagc

SEQ ID NO: 4667574 - DNA, 25 bp, Homo sapien
aaaagactcacgttccaacagtaag

SEQ ID NO: 4667575 - DNA, 25 bp, Homo sapien
ctggttaactgggactaggagcgat

SEQ ID NO: 4667576 - DNA, 25 bp, Homo sapien
cttggaaaatactcagcgggtgaac

SEQ ID NO: 4667577 - DNA, 25 bp, Homo sapien
tatttgaatcactgcaataggttca

SEQ ID NO: 4667578 - DNA, 25 bp, Homo sapien
ctggaaaccatcatacttgggtgat

SEQ ID NO: 4667579 - DNA, 25 bp, Homo sapien
ttctggaaaccatcatacttgggtg

SEQ ID NO: 4667580 - DNA, 25 bp, Homo sapien
aaccatcatacttgggtgattttgt

SEQ ID NO: 4667581 - DNA, 25 bp, Homo sapien
gaaaccatcatacttgggtgatttt

SEQ ID NO: 4667582 - DNA, 25 bp, Homo sapien
gctcagggtcgcatctagaagcagg

SEQ ID NO: 4667583 - DNA, 25 bp, Homo sapien
tctgttgactatgcgctgagctgca

SEQ ID NO: 4667584 - DNA, 25 bp, Homo sapien
catttggcagccctggcagtctgtt

SEQ ID NO: 4667585 - DNA, 25 bp, Homo sapien
tgcgctgagctgcatcgtggaatct

SEQ ID NO: 4667586 - DNA, 25 bp, Homo sapien
atcaggagtggccacagctcgggtc

SEQ ID NO: 4667587 - DNA, 25 bp, Homo sapien
caggagtggccacagctcgggtcat

SEQ ID NO: 4667588 - DNA, 25 bp, Homo sapien
tgtatcaggagtggccacagctcgg

SEQ ID NO: 4667589 - DNA, 25 bp, Homo sapien
actgtatcaggagtggccacagctc

SEQ ID NO: 4667590 - DNA, 25 bp, Homo sapien
ggcctttgaaggctgtgaactgtga

SEQ ID NO: 4667591 - DNA, 25 bp, Homo sapien
tttgaaggctgtgaactgtgagaac

SEQ ID NO: 4667592 - DNA, 25 bp, Homo sapien
ctggttggacagagaggcctttgaa

SEQ ID NO: 4667593 - DNA, 25 bp, Homo sapien
cctttgaaggctgtgaactgtgaga

SEQ ID NO: 4667594 - DNA, 25 bp, Homo sapien
cacccagcgagctgaaaacagggat

SEQ ID NO: 4667595 - DNA, 25 bp, Homo sapien
gacagattctttcatacacccagcg

SEQ ID NO: 4667596 - DNA, 25 bp, Homo sapien
gaaagtcgttctcttcctgagcgcg

SEQ ID NO: 4667597 - DNA, 25 bp, Homo sapien
catgttcaacggtcaggtactcctg

SEQ ID NO: 4667598 - DNA, 25 bp, Homo sapien
tatgaaagaagatacgatagttacg

SEQ ID NO: 4667599 - DNA, 25 bp, Homo sapien
gactatagcatctgaattatcttgg

SEQ ID NO: 4667600 - DNA, 25 bp, Homo sapien
aaaacaacactcatcagtcttggga

SEQ ID NO: 4667601 - DNA, 25 bp, Homo sapien
tccaaaaatcccaatgtgtcatagt

SEQ ID NO: 4667602 - DNA, 25 bp, Homo sapien
tttgtaaatatggactgcacagtac

SEQ ID NO: 4667603 - DNA, 25 bp, Homo sapien
catattgtgggaagctagattttgc

SEQ ID NO: 4667604 - DNA, 25 bp, Homo sapien
gcacagtacagggtagaaaactaca

SEQ ID NO: 4667605 - DNA, 25 bp, Homo sapien
tggaagcagttctcacaggaagcac

SEQ ID NO: 4667606 - DNA, 25 bp, Homo sapien
gtaaaatcccgtcattacactctag

SEQ ID NO: 4667607 - DNA, 25 bp, Homo sapien
tggtaaaatcccgtcattacactct

SEQ ID NO: 4667608 - DNA, 25 bp, Homo sapien
ggtaaaatcccgtcattacactcta

SEQ ID NO: 4667609 - DNA, 25 bp, Homo sapien
taaaatcccgtcattacactctagc

SEQ ID NO: 4667610 - DNA, 25 bp, Homo sapien
tggactgtagtagcaggattattag

SEQ ID NO: 4667611 - DNA, 25 bp, Homo sapien
tgtagtagcaggattattagctcat

SEQ ID NO: 4667612 - DNA, 25 bp, Homo sapien
actgtagtagcaggattattagctc

SEQ ID NO: 4667613 - DNA, 25 bp, Homo sapien
tagtagcaggattattagctcattg

SEQ ID NO: 4667614 - DNA, 25 bp, Homo sapien
gctctcaattttcgggtctcaaaga

SEQ ID NO: 4667615 - DNA, 25 bp, Homo sapien
ggtgtaattcaatatattcgttctg

SEQ ID NO: 4667616 - DNA, 25 bp, Homo sapien
gtaatccaaacggtatccatagcgt

SEQ ID NO: 4667617 - DNA, 25 bp, Homo sapien
ccaaacggtatccatagcgtttacg

SEQ ID NO: 4667618 - DNA, 25 bp, Homo sapien
acggtatccatagcgtttacggtgt

SEQ ID NO: 4667619 - DNA, 25 bp, Homo sapien
agcatggcgctgtttatgttaaagc

SEQ ID NO: 4667620 - DNA, 25 bp, Homo sapien
tcagcatggcgctgtttatgttaaa

SEQ ID NO: 4667621 - DNA, 25 bp, Homo sapien
gcgctgtttatgttaaagcttagcc

SEQ ID NO: 4667622 - DNA, 25 bp, Homo sapien
catggcgctgtttatgttaaagctt

SEQ ID NO: 4667623 - DNA, 25 bp, Homo sapien
tattggaaagtactttagctcgaga

SEQ ID NO: 4667624 - DNA, 25 bp, Homo sapien
gctccctgtggagtcttttcatcat

SEQ ID NO: 4667625 - DNA, 25 bp, Homo sapien
aagtactttagctcgagattgtccc

SEQ ID NO: 4667626 - DNA, 25 bp, Homo sapien
tcgtttctgtttaatcatattggaa

SEQ ID NO: 4667627 - DNA, 25 bp, Homo sapien
cttccatgccttctttcctgttcga

SEQ ID NO: 4667628 - DNA, 25 bp, Homo sapien
tgccttctttcctgttcgaataact

SEQ ID NO: 4667629 - DNA, 25 bp, Homo sapien
gaataacttttaatacttctgcttc

SEQ ID NO: 4667630 - DNA, 25 bp, Homo sapien
gttagtaactatcctcttccatgcc

SEQ ID NO: 4667631 - DNA, 25 bp, Homo sapien
gctgctcatcacacgagtgcttagc

SEQ ID NO: 4667632 - DNA, 25 bp, Homo sapien
tcttgctcttttgattgttcctgcc

SEQ ID NO: 4667633 - DNA, 25 bp, Homo sapien
gagtgcttagcactgttggcatata

SEQ ID NO: 4667634 - DNA, 25 bp, Homo sapien
ggaacacctactagcttattttggc

SEQ ID NO: 4667635 - DNA, 25 bp, Homo sapien
agccccggcttcagcgacttcatgg

SEQ ID NO: 4667636 - DNA, 25 bp, Homo sapien
tcagcgacttcatggtgtacccgtg

SEQ ID NO: 4667637 - DNA, 25 bp, Homo sapien
tggtgtcggtcatcaggacgacccc

SEQ ID NO: 4667638 - DNA, 25 bp, Homo sapien
ccgatcaagccaacgtgcggcggtg

SEQ ID NO: 4667639 - DNA, 25 bp, Homo sapien
tatggtcgctgaagtcgcctgtgaa

SEQ ID NO: 4667640 - DNA, 25 bp, Homo sapien
catgtgctatggtcgctgaagtcgc

SEQ ID NO: 4667641 - DNA, 25 bp, Homo sapien
gtgctatggtcgctgaagtcgcctg

SEQ ID NO: 4667642 - DNA, 25 bp, Homo sapien
ggtcgctgaagtcgcctgtgaaagc

SEQ ID NO: 4667643 - DNA, 25 bp, Homo sapien
gcggccaggacccatgccgcccgct

SEQ ID NO: 4667644 - DNA, 25 bp, Homo sapien
acgcgagcgcgtctcagcgaagccg

SEQ ID NO: 4667645 - DNA, 25 bp, Homo sapien
gggagggcagcccacgcgagcgcgt

SEQ ID NO: 4667646 - DNA, 25 bp, Homo sapien
cgcgaccactgcgggcccgggaggg

SEQ ID NO: 4667647 - DNA, 25 bp, Homo sapien
ctgatggaagcggttggccaccacg

SEQ ID NO: 4667648 - DNA, 25 bp, Homo sapien
gccgaaactctcctgcatcgcggcg

SEQ ID NO: 4667649 - DNA, 25 bp, Homo sapien
agccacgggactccccagagcgccc

SEQ ID NO: 4667650 - DNA, 25 bp, Homo sapien
accacgcagccgaaactctcctgca

SEQ ID NO: 4667651 - DNA, 25 bp, Homo sapien
gtcgcgcctcttgcgctgcagctgc

SEQ ID NO: 4667652 - DNA, 25 bp, Homo sapien
tcgtcgcgcctcttgcgctgcagct

SEQ ID NO: 4667653 - DNA, 25 bp, Homo sapien
gcctcgtcgcgcctcttgcgctgca

SEQ ID NO: 4667654 - DNA, 25 bp, Homo sapien
gccgccgcctcgtcgcgcctcttgc

SEQ ID NO: 4667655 - DNA, 25 bp, Homo sapien
cgccgggaggctcttgcgctccttc

SEQ ID NO: 4667656 - DNA, 25 bp, Homo sapien
gcccccggggctatcgggccgctga

SEQ ID NO: 4667657 - DNA, 25 bp, Homo sapien
ggggctatcgggccgctgagcgacg

SEQ ID NO: 4667658 - DNA, 25 bp, Homo sapien
cccggggctatcgggccgctgagcg

SEQ ID NO: 4667659 - DNA, 25 bp, Homo sapien
gacccacctgcctcgacctgccaaa

SEQ ID NO: 4667660 - DNA, 25 bp, Homo sapien
ggcctgtgccaccacgctcaggtaa

SEQ ID NO: 4667661 - DNA, 25 bp, Homo sapien
tgacccacctgcctcgacctgccaa

SEQ ID NO: 4667662 - DNA, 25 bp, Homo sapien
gccaccacgctcaggtaattttctg

SEQ ID NO: 4667663 - DNA, 25 bp, Homo sapien
acaggtaaatcttaaccggtctcat

SEQ ID NO: 4667664 - DNA, 25 bp, Homo sapien
caggtaaatcttaaccggtctcatt

SEQ ID NO: 4667665 - DNA, 25 bp, Homo sapien
tacaggtaaatcttaaccggtctca

SEQ ID NO: 4667666 - DNA, 25 bp, Homo sapien
tacattgtggagaactttgtcacat

SEQ ID NO: 4667667 - DNA, 25 bp, Homo sapien
ccacattagttgtatagctatgaca

SEQ ID NO: 4667668 - DNA, 25 bp, Homo sapien
gatctcctctcactatgtgcaatat

SEQ ID NO: 4667669 - DNA, 25 bp, Homo sapien
gtttgaagccatctaatacttggta

SEQ ID NO: 4667670 - DNA, 25 bp, Homo sapien
aatcaaagcagagagctggaacaca

SEQ ID NO: 4667671 - DNA, 25 bp, Homo sapien
aaagcagagagctggaacacaacat

SEQ ID NO: 4667672 - DNA, 25 bp, Homo sapien
gaaaatcaaagcagagagctggaac

SEQ ID NO: 4667673 - DNA, 25 bp, Homo sapien
tcaaagcagagagctggaacacaac

SEQ ID NO: 4667674 - DNA, 25 bp, Homo sapien
tcagctctttcgagcatcccctccg

SEQ ID NO: 4667675 - DNA, 25 bp, Homo sapien
ggcccacggctgtcattccatcctt

SEQ ID NO: 4667676 - DNA, 25 bp, Homo sapien
tattccctgtaggatctccgctcag

SEQ ID NO: 4667677 - DNA, 25 bp, Homo sapien
ctgtctcatagggtcggtattccct

SEQ ID NO: 4667678 - DNA, 25 bp, Homo sapien
tctctggtcaaaagcgtcaaaaact

SEQ ID NO: 4667679 - DNA, 25 bp, Homo sapien
aaattctcgctttcctctctggtca

SEQ ID NO: 4667680 - DNA, 25 bp, Homo sapien
tgtctcgatcaaacctatcacctgg

SEQ ID NO: 4667681 - DNA, 25 bp, Homo sapien
acgtcctctcaacggtctgtctcga

SEQ ID NO: 4667682 - DNA, 25 bp, Homo sapien
cacatccacccatgttgtcttcagt

SEQ ID NO: 4667683 - DNA, 25 bp, Homo sapien
cacccatgttgtcttcagttctgac

SEQ ID NO: 4667684 - DNA, 25 bp, Homo sapien
caggttcgaactccacatccaccca

SEQ ID NO: 4667685 - DNA, 25 bp, Homo sapien
cgatccccaggttcgaactccacat

SEQ ID NO: 4667686 - DNA, 25 bp, Homo sapien
cagacaccaggaaggcatcatccct

SEQ ID NO: 4667687 - DNA, 25 bp, Homo sapien
agacaccaggaaggcatcatccctc

SEQ ID NO: 4667688 - DNA, 25 bp, Homo sapien
cctgcagcatgccctacctcttctt

SEQ ID NO: 4667689 - DNA, 25 bp, Homo sapien
gacaccaggaaggcatcatccctcc

SEQ ID NO: 4667690 - DNA, 25 bp, Homo sapien
tcaaataggaatactcgactacagc

SEQ ID NO: 4667691 - DNA, 25 bp, Homo sapien
ttgtccttaaatccagttattgctg

SEQ ID NO: 4667692 - DNA, 25 bp, Homo sapien
cagttattgctgtcagcgtcttcaa

SEQ ID NO: 4667693 - DNA, 25 bp, Homo sapien
ggaatactcgactacagcaaagccc

SEQ ID NO: 4667694 - DNA, 25 bp, Homo sapien
actgtgggttcctccatcggtgcag

SEQ ID NO: 4667695 - DNA, 25 bp, Homo sapien
ctgtgggttcctccatcggtgcagt

SEQ ID NO: 4667696 - DNA, 25 bp, Homo sapien
gcagatagtttgtattactgtttgc

SEQ ID NO: 4667697 - DNA, 25 bp, Homo sapien
acgctcagagatcctggcagctctt

SEQ ID NO: 4667698 - DNA, 25 bp, Homo sapien
atattcctgagtagggaaacgctca

SEQ ID NO: 4667699 - DNA, 25 bp, Homo sapien
ttattgcagatagtttgtattactg

SEQ ID NO: 4667700 - DNA, 25 bp, Homo sapien
tcagaggagccagattcacacagac

SEQ ID NO: 4667701 - DNA, 25 bp, Homo sapien
taagctgagttagcctctgacccgg

SEQ ID NO: 4667702 - DNA, 25 bp, Homo sapien
gatgataacaaccttctggagccag

SEQ ID NO: 4667703 - DNA, 25 bp, Homo sapien
tctttatgaacagccaagcgtggtg

SEQ ID NO: 4667704 - DNA, 25 bp, Homo sapien
atactttttgatggtactaaaatgt

SEQ ID NO: 4667705 - DNA, 25 bp, Homo sapien
ctataaagagatatataatcataaa

SEQ ID NO: 4667706 - DNA, 25 bp, Homo sapien
tataaagagatatataatcataaag

SEQ ID NO: 4667707 - DNA, 25 bp, Homo sapien
ataaagagatatataatcataaaga

SEQ ID NO: 4667708 - DNA, 25 bp, Homo sapien
tggtttccggatgttaaactcaggc

SEQ ID NO: 4667709 - DNA, 25 bp, Homo sapien
gacttgtgaatcaccacggctttgg

SEQ ID NO: 4667710 - DNA, 25 bp, Homo sapien
aatcaccacggctttggaaggaaca

SEQ ID NO: 4667711 - DNA, 25 bp, Homo sapien
tgtattttgacttgtgaatcaccac

SEQ ID NO: 4667712 - DNA, 25 bp, Homo sapien
aaagtaaagattacctctacatacg

SEQ ID NO: 4667713 - DNA, 25 bp, Homo sapien
catttcacttccagtaaggtaaaag

SEQ ID NO: 4667714 - DNA, 25 bp, Homo sapien
tctacatacgaaatgcaatgcttac

SEQ ID NO: 4667715 - DNA, 25 bp, Homo sapien
tgttccattttcaagacagaagtgg

SEQ ID NO: 4667716 - DNA, 25 bp, Homo sapien
tatgctgctagatgtttccccgaaa

SEQ ID NO: 4667717 - DNA, 25 bp, Homo sapien
gaaacctctccctgcaaaactgaag

SEQ ID NO: 4667718 - DNA, 25 bp, Homo sapien
cataatgggaatgcttcagtggacc

SEQ ID NO: 4667719 - DNA, 25 bp, Homo sapien
cgtaagccgtgagcaataaggcctc

SEQ ID NO: 4667720 - DNA, 25 bp, Homo sapien
gaccaaatttctatcagctgagcag

SEQ ID NO: 4667721 - DNA, 25 bp, Homo sapien
taaactgatgaacccaagatctggc

SEQ ID NO: 4667722 - DNA, 25 bp, Homo sapien
gaaaacacctcccagagattgccag

SEQ ID NO: 4667723 - DNA, 25 bp, Homo sapien
aatattctgggagacctctggagcc

SEQ ID NO: 4667724 - DNA, 25 bp, Homo sapien
acagcatcaaacacgcacaagtcca

SEQ ID NO: 4667725 - DNA, 25 bp, Homo sapien
cacagccatccccacactcatctgg

SEQ ID NO: 4667726 - DNA, 25 bp, Homo sapien
acagccatccccacactcatctggc

SEQ ID NO: 4667727 - DNA, 25 bp, Homo sapien
attacagcatcaaacacgcacaagt

SEQ ID NO: 4667728 - DNA, 25 bp, Homo sapien
tccacgcccaggacgagggaggtta

SEQ ID NO: 4667729 - DNA, 25 bp, Homo sapien
tctgctctgggtccatagttctctg

SEQ ID NO: 4667730 - DNA, 25 bp, Homo sapien
aacatgggaatcgtcctcatagtca

SEQ ID NO: 4667731 - DNA, 25 bp, Homo sapien
cattggcgggtttccggaaaacatg

SEQ ID NO: 4667732 - DNA, 25 bp, Homo sapien
gccaaaccgtcaatacagacaccta

SEQ ID NO: 4667733 - DNA, 25 bp, Homo sapien
ttcgccaaaccgtcaatacagacac

SEQ ID NO: 4667734 - DNA, 25 bp, Homo sapien
cttctttcgccaaaccgtcaataca

SEQ ID NO: 4667735 - DNA, 25 bp, Homo sapien
tctttcgccaaaccgtcaatacaga

SEQ ID NO: 4667736 - DNA, 25 bp, Homo sapien
ggccacagtaagcaaaacgtcaggt

SEQ ID NO: 4667737 - DNA, 25 bp, Homo sapien
agagctagaatcaggcagccttggc

SEQ ID NO: 4667738 - DNA, 25 bp, Homo sapien
tacagaacggtctctaggcaagatg

SEQ ID NO: 4667739 - DNA, 25 bp, Homo sapien
tttctctctgatcccgggagtgcct

SEQ ID NO: 4667740 - DNA, 25 bp, Homo sapien
agtgagaatacagccgcacacggag

SEQ ID NO: 4667741 - DNA, 25 bp, Homo sapien
gaaaagaaactcctttgctccgaga

SEQ ID NO: 4667742 - DNA, 25 bp, Homo sapien
cacacggagatcaggcttcaatgaa

SEQ ID NO: 4667743 - DNA, 25 bp, Homo sapien
accttgatcggtctaggagatgtga

SEQ ID NO: 4667744 - DNA, 25 bp, Homo sapien
gctgatttccaatgaataagtgtcc

SEQ ID NO: 4667745 - DNA, 25 bp, Homo sapien
taccacattaggaagcacctactac

SEQ ID NO: 4667746 - DNA, 25 bp, Homo sapien
aaagcagccgctgaccgatagccac

SEQ ID NO: 4667747 - DNA, 25 bp, Homo sapien
cgtaaaccggtaatgagcaaaagca

SEQ ID NO: 4667748 - DNA, 25 bp, Homo sapien
ttctccctgggatgaacctcaatgg

SEQ ID NO: 4667749 - DNA, 25 bp, Homo sapien
aacaaggacttggattgggaaacag

SEQ ID NO: 4667750 - DNA, 25 bp, Homo sapien
tggcactggatctcagagtggtttc

SEQ ID NO: 4667751 - DNA, 25 bp, Homo sapien
tggatgagcaaagggaacaaggact

SEQ ID NO: 4667752 - DNA, 25 bp, Homo sapien
cagcgcagggaaatcttccgggtca

SEQ ID NO: 4667753 - DNA, 25 bp, Homo sapien
caagacagcgcagggaaatcttccg

SEQ ID NO: 4667754 - DNA, 25 bp, Homo sapien
gacagcgcagggaaatcttccgggt

SEQ ID NO: 4667755 - DNA, 25 bp, Homo sapien
tcaagacagcgcagggaaatcttcc

SEQ ID NO: 4667756 - DNA, 25 bp, Homo sapien
ttggtctccgaaaactcagctgtga

SEQ ID NO: 4667757 - DNA, 25 bp, Homo sapien
cttcttgggaaatggcctgctctcg

SEQ ID NO: 4667758 - DNA, 25 bp, Homo sapien
ttggcccagctggaaaagtctcccc

SEQ ID NO: 4667759 - DNA, 25 bp, Homo sapien
tggagaagcccctctaacagctcag

SEQ ID NO: 4667760 - DNA, 25 bp, Homo sapien
tttgtacgcagctgccgaactctga

SEQ ID NO: 4667761 - DNA, 25 bp, Homo sapien
tacaacttttgctcaagccgagggc

SEQ ID NO: 4667762 - DNA, 25 bp, Homo sapien
ccagctctgttcagggtgggactcc

SEQ ID NO: 4667763 - DNA, 25 bp, Homo sapien
cacttgggttccagttcaaagccac

SEQ ID NO: 4667764 - DNA, 25 bp, Homo sapien
aacaaaatcatgaccgactgctgtg

SEQ ID NO: 4667765 - DNA, 25 bp, Homo sapien
gctatcacccaaagcaaacatcctt

SEQ ID NO: 4667766 - DNA, 25 bp, Homo sapien
aagtaggctatcacccaaagcaaac

SEQ ID NO: 4667767 - DNA, 25 bp, Homo sapien
gagaccaaaagtaggctatcaccca

SEQ ID NO: 4667768 - DNA, 25 bp, Homo sapien
caaaagtaggctatcacccaaagca

SEQ ID NO: 4667769 - DNA, 25 bp, Homo sapien
aagtcagcgagagctagccctggta

SEQ ID NO: 4667770 - DNA, 25 bp, Homo sapien
gggctatgtacaacctggcacgatc

SEQ ID NO: 4667771 - DNA, 25 bp, Homo sapien
tagcccattacaggttcagaacgtg

SEQ ID NO: 4667772 - DNA, 25 bp, Homo sapien
tgactgtcccaacggcatgctggtg

SEQ ID NO: 4667773 - DNA, 25 bp, Homo sapien
gaaggctgttcacatgggccacggt

SEQ ID NO: 4667774 - DNA, 25 bp, Homo sapien
ttctgtgtctacagcggaggccgcc

SEQ ID NO: 4667775 - DNA, 25 bp, Homo sapien
cacagtacagtttcagaggacagca

SEQ ID NO: 4667776 - DNA, 25 bp, Homo sapien
gaagctcccatgtgctggaatggca

SEQ ID NO: 4667777 - DNA, 25 bp, Homo sapien
gttgctctgacgcaagacccgtggc

SEQ ID NO: 4667778 - DNA, 25 bp, Homo sapien
cgcaagacccgtggccagtatccat

SEQ ID NO: 4667779 - DNA, 25 bp, Homo sapien
tctgacgcaagacccgtggccagta

SEQ ID NO: 4667780 - DNA, 25 bp, Homo sapien
ttcctcactgttgctctgacgcaag

SEQ ID NO: 4667781 - DNA, 25 bp, Homo sapien
gagttagcggcccaggaagctagtc

SEQ ID NO: 4667782 - DNA, 25 bp, Homo sapien
ccaagtttgccttgcggttgagagt

SEQ ID NO: 4667783 - DNA, 25 bp, Homo sapien
ggctgacggccgttctgggccccaa

SEQ ID NO: 4667784 - DNA, 25 bp, Homo sapien
aggctggagggtaacggctgacggc

SEQ ID NO: 4667785 - DNA, 25 bp, Homo sapien
agagaagccgcctcggtgctctcgg

SEQ ID NO: 4667786 - DNA, 25 bp, Homo sapien
ccccgggagcgggtccgctgcacct

SEQ ID NO: 4667787 - DNA, 25 bp, Homo sapien
tcgcttccaatgccgcttgtcctgg

SEQ ID NO: 4667788 - DNA, 25 bp, Homo sapien
ttgtcctgggcagtacacaggacag

SEQ ID NO: 4667789 - DNA, 25 bp, Homo sapien
actcggtgccaccggacggtccagg

SEQ ID NO: 4667790 - DNA, 25 bp, Homo sapien
tactcggtgccaccggacggtccag

SEQ ID NO: 4667791 - DNA, 25 bp, Homo sapien
ctactcggtgccaccggacggtcca

SEQ ID NO: 4667792 - DNA, 25 bp, Homo sapien
tcggtgccaccggacggtccaggcc

SEQ ID NO: 4667793 - DNA, 25 bp, Homo sapien
aaattgaccggcatcatgagagacg

SEQ ID NO: 4667794 - DNA, 25 bp, Homo sapien
catttttgcctgtgccgggagcatg

SEQ ID NO: 4667795 - DNA, 25 bp, Homo sapien
caaggcgtgcgccagattagtaggc

SEQ ID NO: 4667796 - DNA, 25 bp, Homo sapien
aatgccctcctaagccacaaggcgt

SEQ ID NO: 4667797 - DNA, 25 bp, Homo sapien
ggaggctgcccattgtttggttgcc

SEQ ID NO: 4667798 - DNA, 25 bp, Homo sapien
ggttgccagtcatacaaattaaaat

SEQ ID NO: 4667799 - DNA, 25 bp, Homo sapien
tggaagatgttgcaagtcgttcctt

SEQ ID NO: 4667800 - DNA, 25 bp, Homo sapien
ttgcaagtcgttcctttttctgtcc

SEQ ID NO: 4667801 - DNA, 25 bp, Homo sapien
cgaggagccctccagattggaagtg

SEQ ID NO: 4667802 - DNA, 25 bp, Homo sapien
gatcgattcaaacgcttctccttga

SEQ ID NO: 4667803 - DNA, 25 bp, Homo sapien
gactcagtgctctgttgggatctct

SEQ ID NO: 4667804 - DNA, 25 bp, Homo sapien
gaaaacgaaatgatcgattcaaacg

SEQ ID NO: 4667805 - DNA, 25 bp, Homo sapien
ttaatgatcctttgaaattccagat

SEQ ID NO: 4667806 - DNA, 25 bp, Homo sapien
aatattaatgatcctttgaaattcc

SEQ ID NO: 4667807 - DNA, 25 bp, Homo sapien
ttaaaatattaatgatcctttgaaa

SEQ ID NO: 4667808 - DNA, 25 bp, Homo sapien
aattccagatattttcccacttgtc

SEQ ID NO: 4667809 - DNA, 25 bp, Homo sapien
aacctaaatctcatgtggccacagg

SEQ ID NO: 4667810 - DNA, 25 bp, Homo sapien
agctgtgccacatcgaaacctaaat

SEQ ID NO: 4667811 - DNA, 25 bp, Homo sapien
tttctcacagaagatgactatcccc

SEQ ID NO: 4667812 - DNA, 25 bp, Homo sapien
cgtgtatccatttgaagctgtgcca

SEQ ID NO: 4667813 - DNA, 25 bp, Homo sapien
ataggagtgatgtcttaactatttg

SEQ ID NO: 4667814 - DNA, 25 bp, Homo sapien
aaaaaataggagtgatgtcttaact

SEQ ID NO: 4667815 - DNA, 25 bp, Homo sapien
ctgaaaaaataggagtgatgtctta

SEQ ID NO: 4667816 - DNA, 25 bp, Homo sapien
taggagtgatgtcttaactatttgt

SEQ ID NO: 4667817 - DNA, 25 bp, Homo sapien
tctgcggcacatgggaacttgacct

SEQ ID NO: 4667818 - DNA, 25 bp, Homo sapien
caacgtagcaggtttaccagttcct

SEQ ID NO: 4667819 - DNA, 25 bp, Homo sapien
gaagactccacccaaactcgctttg

SEQ ID NO: 4667820 - DNA, 25 bp, Homo sapien
tggtttgtcatcatctctgcggcac

SEQ ID NO: 4667821 - DNA, 25 bp, Homo sapien
tcagtaatctggactgaatgttgaa

SEQ ID NO: 4667822 - DNA, 25 bp, Homo sapien
gtcagtaatctggactgaatgttga

SEQ ID NO: 4667823 - DNA, 25 bp, Homo sapien
gtaatctggactgaatgttgaaatg

SEQ ID NO: 4667824 - DNA, 25 bp, Homo sapien
cagtaatctggactgaatgttgaaa

SEQ ID NO: 4667825 - DNA, 25 bp, Homo sapien
atgtcactctagtaacctgaactcc

SEQ ID NO: 4667826 - DNA, 25 bp, Homo sapien
tggttcctggttgcagcaagcatct

SEQ ID NO: 4667827 - DNA, 25 bp, Homo sapien
agtggttcctggttgcagcaagcat

SEQ ID NO: 4667828 - DNA, 25 bp, Homo sapien
tcatgtcactctagtaacctgaact

SEQ ID NO: 4667829 - DNA, 25 bp, Homo sapien
ttacagaagagtagagtccgggagc

SEQ ID NO: 4667830 - DNA, 25 bp, Homo sapien
tacagaagagtagagtccgggagcc

SEQ ID NO: 4667831 - DNA, 25 bp, Homo sapien
gaagagtagagtccgggagcctggc

SEQ ID NO: 4667832 - DNA, 25 bp, Homo sapien
cagaagagtagagtccgggagcctg

SEQ ID NO: 4667833 - DNA, 25 bp, Homo sapien
ttttgggcataaagacttgtttggc

SEQ ID NO: 4667834 - DNA, 25 bp, Homo sapien
cacctggctggagatcggtgacaca

SEQ ID NO: 4667835 - DNA, 25 bp, Homo sapien
ggtgtgggaattgcttaaaatgtcc

SEQ ID NO: 4667836 - DNA, 25 bp, Homo sapien
taatggtgtcttgtttcatgactga

SEQ ID NO: 4667837 - DNA, 25 bp, Homo sapien
ggacatttatgttcgagacctggct

SEQ ID NO: 4667838 - DNA, 25 bp, Homo sapien
cagtatacatagtgcatagttgccc

SEQ ID NO: 4667839 - DNA, 25 bp, Homo sapien
tctcagagtaccgaggctccaagga

SEQ ID NO: 4667840 - DNA, 25 bp, Homo sapien
tccggagtggacagccagtatacat

SEQ ID NO: 4667841 - DNA, 25 bp, Homo sapien
tacttctggtgcctagtgtggttcc

SEQ ID NO: 4667842 - DNA, 25 bp, Homo sapien
catctggtggattgtttgtgactac

SEQ ID NO: 4667843 - DNA, 25 bp, Homo sapien
aaggtgggcttcactgttcctctca

SEQ ID NO: 4667844 - DNA, 25 bp, Homo sapien
cagatagctgctgtaagtgtcccgt

SEQ ID NO: 4667845 - DNA, 25 bp, Homo sapien
aagtggtgtatttctttacatttgc

SEQ ID NO: 4667846 - DNA, 25 bp, Homo sapien
tactaaagtggtgtatttctttaca

SEQ ID NO: 4667847 - DNA, 25 bp, Homo sapien
gtggtgtatttctttacatttgcca

SEQ ID NO: 4667848 - DNA, 25 bp, Homo sapien
ctaaagtggtgtatttctttacatt

SEQ ID NO: 4667849 - DNA, 25 bp, Homo sapien
tggtcctcatgagcctttatgggtg

SEQ ID NO: 4667850 - DNA, 25 bp, Homo sapien
cagcagatgtaaagcccaggatgcc

SEQ ID NO: 4667851 - DNA, 25 bp, Homo sapien
tgggaaggcgacatcagggatactt

SEQ ID NO: 4667852 - DNA, 25 bp, Homo sapien
gggcatcctcaggagcgcgacagca

SEQ ID NO: 4667853 - DNA, 25 bp, Homo sapien
ctaggggtgctggccttggaagctc

SEQ ID NO: 4667854 - DNA, 25 bp, Homo sapien
ggggtgctggccttggaagctctca

SEQ ID NO: 4667855 - DNA, 25 bp, Homo sapien
ggtgctggccttggaagctctcagc

SEQ ID NO: 4667856 - DNA, 25 bp, Homo sapien
tgctggccttggaagctctcagctg

SEQ ID NO: 4667857 - DNA, 25 bp, Homo sapien
atgacagcagccgagaccattgcgt

SEQ ID NO: 4667858 - DNA, 25 bp, Homo sapien
cgggcactctgatagcctgctacat

SEQ ID NO: 4667859 - DNA, 25 bp, Homo sapien
gcctacgtctgtagttcccagggaa

SEQ ID NO: 4667860 - DNA, 25 bp, Homo sapien
cattgcgtgggtcaggatctgcaga

SEQ ID NO: 4667861 - DNA, 25 bp, Homo sapien
agcactggggagatgattcctcaaa

SEQ ID NO: 4667862 - DNA, 25 bp, Homo sapien
cttgagcagacttgctccccagcac

SEQ ID NO: 4667863 - DNA, 25 bp, Homo sapien
tgagcagacttgctccccagcactg

SEQ ID NO: 4667864 - DNA, 25 bp, Homo sapien
aacagcagcacttcatgtggcagca

SEQ ID NO: 4667865 - DNA, 25 bp, Homo sapien
tgactgtgggatatggagctgattg

SEQ ID NO: 4667866 - DNA, 25 bp, Homo sapien
aggcggctccatgggccctcagtgt

SEQ ID NO: 4667867 - DNA, 25 bp, Homo sapien
caaagggcaacaggtgtaaatggta

SEQ ID NO: 4667868 - DNA, 25 bp, Homo sapien
gcactggtggaaatcaggagaccaa

SEQ ID NO: 4667869 - DNA, 25 bp, Homo sapien
gactacagcgtgaagaacctctctg

SEQ ID NO: 4667870 - DNA, 25 bp, Homo sapien
tggacaaagtctggatggctgaagt

SEQ ID NO: 4667871 - DNA, 25 bp, Homo sapien
gggtcaattgctgtctctggtcaga

SEQ ID NO: 4667872 - DNA, 25 bp, Homo sapien
gttccatctaggagagagtgctcct

SEQ ID NO: 4667873 - DNA, 25 bp, Homo sapien
aagctttcccagacgtattggtgtt

SEQ ID NO: 4667874 - DNA, 25 bp, Homo sapien
cataagctttcccagacgtattggt

SEQ ID NO: 4667875 - DNA, 25 bp, Homo sapien
ctcttggtgtttctcgtacttgcag

SEQ ID NO: 4667876 - DNA, 25 bp, Homo sapien
taagctttcccagacgtattggtgt

SEQ ID NO: 4667877 - DNA, 25 bp, Homo sapien
gtagcaggtagatgagagatctcct

SEQ ID NO: 4667878 - DNA, 25 bp, Homo sapien
caaaggtttatgttttatggcacta

SEQ ID NO: 4667879 - DNA, 25 bp, Homo sapien
aagtgcccaactactttggcaaagg

SEQ ID NO: 4667880 - DNA, 25 bp, Homo sapien
cacaacagtggttctttacatttgc

SEQ ID NO: 4667881 - DNA, 25 bp, Homo sapien
ctggcttggaggtgcccctagtctg

SEQ ID NO: 4667882 - DNA, 25 bp, Homo sapien
tggaggtgcccctagtctgggcccc

SEQ ID NO: 4667883 - DNA, 25 bp, Homo sapien
gggtggcctcggcacttgtccccag

SEQ ID NO: 4667884 - DNA, 25 bp, Homo sapien
tcctgcgtgtgggtggcctcggcac

SEQ ID NO: 4667885 - DNA, 25 bp, Homo sapien
cccctctgcggagcgtttgggcact

SEQ ID NO: 4667886 - DNA, 25 bp, Homo sapien
tcctttaatcgctaaggagctttcc

SEQ ID NO: 4667887 - DNA, 25 bp, Homo sapien
gagcccttttgctcgaagtccttta

SEQ ID NO: 4667888 - DNA, 25 bp, Homo sapien
tctgacgcatgtcccctctgcggag

SEQ ID NO: 4667889 - DNA, 25 bp, Homo sapien
tgatgaacagttcttcctctgctcc

SEQ ID NO: 4667890 - DNA, 25 bp, Homo sapien
taatgagctgaatacaatacgcgac

SEQ ID NO: 4667891 - DNA, 25 bp, Homo sapien
tttgagtgggtaatgctgctgccgc

SEQ ID NO: 4667892 - DNA, 25 bp, Homo sapien
gacactaaactctccatcatcgttg

SEQ ID NO: 4667893 - DNA, 25 bp, Homo sapien
accacactgaacagggatgcagagg

SEQ ID NO: 4667894 - DNA, 25 bp, Homo sapien
acggtggatcttgtcctggcaggaa

SEQ ID NO: 4667895 - DNA, 25 bp, Homo sapien
taaccttatatctgtgctgggacgg

SEQ ID NO: 4667896 - DNA, 25 bp, Homo sapien
tcagagcactagctaccaatgctgt

SEQ ID NO: 4667897 - DNA, 25 bp, Homo sapien
agctagctgatggagccgtcccttg

SEQ ID NO: 4667898 - DNA, 25 bp, Homo sapien
gagctagctgatggagccgtccctt

SEQ ID NO: 4667899 - DNA, 25 bp, Homo sapien
ctgcagagagctgaatgttactgct

SEQ ID NO: 4667900 - DNA, 25 bp, Homo sapien
cagagagctgaatgttactgctgtg

SEQ ID NO: 4667901 - DNA, 25 bp, Homo sapien
aagcagcacactcctttgctgaaag

SEQ ID NO: 4667902 - DNA, 25 bp, Homo sapien
gagagctgaatgttactgctgtgga

SEQ ID NO: 4667903 - DNA, 25 bp, Homo sapien
tattgtaagttcttagctggttccc

SEQ ID NO: 4667904 - DNA, 25 bp, Homo sapien
tgtgtcctggtagggcatttttgac

SEQ ID NO: 4667905 - DNA, 25 bp, Homo sapien
gttccctctcaaccattatccttaa

SEQ ID NO: 4667906 - DNA, 25 bp, Homo sapien
tgacagggcggatttgttagaagca

SEQ ID NO: 4667907 - DNA, 25 bp, Homo sapien
aatcgactctactccagcatgaggg

SEQ ID NO: 4667908 - DNA, 25 bp, Homo sapien
tgttctggatcacagcaacacgagt

SEQ ID NO: 4667909 - DNA, 25 bp, Homo sapien
catgagggagagattcttttccaac

SEQ ID NO: 4667910 - DNA, 25 bp, Homo sapien
ttggcagagccgttgcccctgtggt

SEQ ID NO: 4667911 - DNA, 25 bp, Homo sapien
agtggacatacagagtagttgggca

SEQ ID NO: 4667912 - DNA, 25 bp, Homo sapien
tggacatacagagtagttgggcaca

SEQ ID NO: 4667913 - DNA, 25 bp, Homo sapien
gtggacatacagagtagttgggcac

SEQ ID NO: 4667914 - DNA, 25 bp, Homo sapien
tctatgcttgcttaattcttcaaca

SEQ ID NO: 4667915 - DNA, 25 bp, Homo sapien
tcaggcactccaacaccacgtggag

SEQ ID NO: 4667916 - DNA, 25 bp, Homo sapien
tcaggaattgaagcccatcatagtg

SEQ ID NO: 4667917 - DNA, 25 bp, Homo sapien
gttatagtagattatccagtttcag

SEQ ID NO: 4667918 - DNA, 25 bp, Homo sapien
gctcgtcgacctcgccgggtgtgaa

SEQ ID NO: 4667919 - DNA, 25 bp, Homo sapien
tgctcgcggcgctgctcgtcgacct

SEQ ID NO: 4667920 - DNA, 25 bp, Homo sapien
gctgctcgtcgacctcgccgggtgt

SEQ ID NO: 4667921 - DNA, 25 bp, Homo sapien
gcgctgctcgtcgacctcgccgggt

SEQ ID NO: 4667922 - DNA, 25 bp, Homo sapien
taatgattagcaagtataatactgc

SEQ ID NO: 4667923 - DNA, 25 bp, Homo sapien
tagttatgcattcctagagaactgc

SEQ ID NO: 4667924 - DNA, 25 bp, Homo sapien
cagaaatcctgatgaaaagtatagc

SEQ ID NO: 4667925 - DNA, 25 bp, Homo sapien
gagaactgctatttctcaccctcaa

SEQ ID NO: 4667926 - DNA, 25 bp, Homo sapien
gaacctgttgaattgcatgctggga

SEQ ID NO: 4667927 - DNA, 25 bp, Homo sapien
cttcccagcctttgaggagttaggg

SEQ ID NO: 4667928 - DNA, 25 bp, Homo sapien
aatatcctcgtgcagtgtctaacct

SEQ ID NO: 4667929 - DNA, 25 bp, Homo sapien
catgctgggaagcatcagttgtcaa

SEQ ID NO: 4667930 - DNA, 25 bp, Homo sapien
tataaggaacctatggctaaggacc

SEQ ID NO: 4667931 - DNA, 25 bp, Homo sapien
taaactctgatcaggtgacatgcac

SEQ ID NO: 4667932 - DNA, 25 bp, Homo sapien
tcaaagaagacaaacttgaaaggga

SEQ ID NO: 4667933 - DNA, 25 bp, Homo sapien
aaaacaacaactctgattaaagtgt

SEQ ID NO: 4667934 - DNA, 25 bp, Homo sapien
cgcaatcttggttcagtgcaagctc

SEQ ID NO: 4667935 - DNA, 25 bp, Homo sapien
ggcgcaatcttggttcagtgcaagc

SEQ ID NO: 4667936 - DNA, 25 bp, Homo sapien
tggcgcaatcttggttcagtgcaag

SEQ ID NO: 4667937 - DNA, 25 bp, Homo sapien
cacctttcgccccagcatgagaact

SEQ ID NO: 4667938 - DNA, 25 bp, Homo sapien
ctcatttggatttggctcctgcaga

SEQ ID NO: 4667939 - DNA, 25 bp, Homo sapien
tgagaactcgatttcccgcagtcgc

SEQ ID NO: 4667940 - DNA, 25 bp, Homo sapien
ctgctcatttggatttggctcctgc

SEQ ID NO: 4667941 - DNA, 25 bp, Homo sapien
ctgttaagacccgagacattcctgt

SEQ ID NO: 4667942 - DNA, 25 bp, Homo sapien
gacccgagacattcctgtttcgctc

SEQ ID NO: 4667943 - DNA, 25 bp, Homo sapien
cctgtttcgctcaggttaaaactct

SEQ ID NO: 4667944 - DNA, 25 bp, Homo sapien
tcctgtttcgctcaggttaaaactc

SEQ ID NO: 4667945 - DNA, 25 bp, Homo sapien
aaatcctcgctgtgtgtgacgcgtc

SEQ ID NO: 4667946 - DNA, 25 bp, Homo sapien
cacccagacgtctgccgtgggagat

SEQ ID NO: 4667947 - DNA, 25 bp, Homo sapien
aactggcattcgcacacccagacgt

SEQ ID NO: 4667948 - DNA, 25 bp, Homo sapien
gagattcgcctcttccgagcgggcg

SEQ ID NO: 4667949 - DNA, 25 bp, Homo sapien
tttactgaactttccgttctctgaa

SEQ ID NO: 4667950 - DNA, 25 bp, Homo sapien
tactgaactttccgttctctgaacc

SEQ ID NO: 4667951 - DNA, 25 bp, Homo sapien
ttactgaactttccgttctctgaac

SEQ ID NO: 4667952 - DNA, 25 bp, Homo sapien
caatattttagctgctgcatccctc

SEQ ID NO: 4667953 - DNA, 25 bp, Homo sapien
caaagcaatattttagctgctgcat

SEQ ID NO: 4667954 - DNA, 25 bp, Homo sapien
aagcaatattttagctgctgcatcc

SEQ ID NO: 4667955 - DNA, 25 bp, Homo sapien
gcaatattttagctgctgcatccct

SEQ ID NO: 4667956 - DNA, 25 bp, Homo sapien
tcaaggagcatgacagcagacagtg

SEQ ID NO: 4667957 - DNA, 25 bp, Homo sapien
ttatatccctcaggcctgcacatgc

SEQ ID NO: 4667958 - DNA, 25 bp, Homo sapien
gcagacagtgctctgtagacccacg

SEQ ID NO: 4667959 - DNA, 25 bp, Homo sapien
gtgctctgtagacccacgtccatta

SEQ ID NO: 4667960 - DNA, 25 bp, Homo sapien
tgtgcaacaagtatacaatgcgtaa

SEQ ID NO: 4667961 - DNA, 25 bp, Homo sapien
tagtcaccctgtagtgctagagaac

SEQ ID NO: 4667962 - DNA, 25 bp, Homo sapien
gggtaattaacgtatccaacatctc

SEQ ID NO: 4667963 - DNA, 25 bp, Homo sapien
tttgggtatcccacagcccctagta

SEQ ID NO: 4667964 - DNA, 25 bp, Homo sapien
cctcagttcttggatattgtttttc

SEQ ID NO: 4667965 - DNA, 25 bp, Homo sapien
attatcagtcattattgtctcaagt

SEQ ID NO: 4667966 - DNA, 25 bp, Homo sapien
tatactcaagcttggacattctttc

SEQ ID NO: 4667967 - DNA, 25 bp, Homo sapien
tccttggatacatttagcctcctag

SEQ ID NO: 4667968 - DNA, 25 bp, Homo sapien
gacttgggaaactgaactctcgctt

SEQ ID NO: 4667969 - DNA, 25 bp, Homo sapien
ccaaccaagggtaatgacagtgcat

SEQ ID NO: 4667970 - DNA, 25 bp, Homo sapien
tgcaatggcaagctatctaccgaag

SEQ ID NO: 4667971 - DNA, 25 bp, Homo sapien
cagacaaaggatctcaaaggcaggg

SEQ ID NO: 4667972 - DNA, 25 bp, Homo sapien
ctgagtcaggtgctgcagtgtagac

SEQ ID NO: 4667973 - DNA, 25 bp, Homo sapien
tgcaacacactccacctcttctgag

SEQ ID NO: 4667974 - DNA, 25 bp, Homo sapien
cctagcctggtggtactaagaggga

SEQ ID NO: 4667975 - DNA, 25 bp, Homo sapien
agtgtagacgcacagtgggccttga

SEQ ID NO: 4667976 - DNA, 25 bp, Homo sapien
gagtaaggccatataccacagcgct

SEQ ID NO: 4667977 - DNA, 25 bp, Homo sapien
tgactactgaaacaacccgctgtgt

SEQ ID NO: 4667978 - DNA, 25 bp, Homo sapien
taaaatgacctcatgatgggcctgc

SEQ ID NO: 4667979 - DNA, 25 bp, Homo sapien
gcaatactcggatctgtcgctggct

SEQ ID NO: 4667980 - DNA, 25 bp, Homo sapien
tgttggggggctcccgagacttctc

SEQ ID NO: 4667981 - DNA, 25 bp, Homo sapien
agcccgcaagggcagttgtacaggc

SEQ ID NO: 4667982 - DNA, 25 bp, Homo sapien
cctctacatctgtggggaaccagga

SEQ ID NO: 4667983 - DNA, 25 bp, Homo sapien
aggcacaagccgagcactccacgct

SEQ ID NO: 4667984 - DNA, 25 bp, Homo sapien
gttgccggcatcagaaacgctctta

SEQ ID NO: 4667985 - DNA, 25 bp, Homo sapien
agcactctggcgtctggcacgttcg

SEQ ID NO: 4667986 - DNA, 25 bp, Homo sapien
gagctggaacttagccagggctcca

SEQ ID NO: 4667987 - DNA, 25 bp, Homo sapien
ggcacgttcgttgccggcatcagaa

SEQ ID NO: 4667988 - DNA, 25 bp, Homo sapien
tctagccaagaggatcaagaattgc

SEQ ID NO: 4667989 - DNA, 25 bp, Homo sapien
caagaattgcttctggccatgcaaa

SEQ ID NO: 4667990 - DNA, 25 bp, Homo sapien
tggaggtggccaaatcttcgaatct

SEQ ID NO: 4667991 - DNA, 25 bp, Homo sapien
aaatcttggacctgctcctgtttgc

SEQ ID NO: 4667992 - DNA, 25 bp, Homo sapien
ttttggtgactcacctgtgacagtg

SEQ ID NO: 4667993 - DNA, 25 bp, Homo sapien
gcaaaacactcaggctgcaccactt

SEQ ID NO: 4667994 - DNA, 25 bp, Homo sapien
gtctctcatgggagaaaatccacag

SEQ ID NO: 4667995 - DNA, 25 bp, Homo sapien
tccctggacaaggtactgaacctct

SEQ ID NO: 4667996 - DNA, 25 bp, Homo sapien
taaatacagtaccctcactgaaaat

SEQ ID NO: 4667997 - DNA, 25 bp, Homo sapien
cataaatacagtaccctcactgaaa

SEQ ID NO: 4667998 - DNA, 25 bp, Homo sapien
ccctcactgaaaatacttgcacact

SEQ ID NO: 4667999 - DNA, 25 bp, Homo sapien
ggtctccataaatacagtaccctca

SEQ ID NO: 4668000 - DNA, 25 bp, Homo sapien
caagtggtccgactaacgacaagag

SEQ ID NO: 4668001 - DNA, 25 bp, Homo sapien
aagtggtccgactaacgacaagaga

SEQ ID NO: 4668002 - DNA, 25 bp, Homo sapien
tggtccgactaacgacaagagactt

SEQ ID NO: 4668003 - DNA, 25 bp, Homo sapien
gtccgactaacgacaagagacttga

SEQ ID NO: 4668004 - DNA, 25 bp, Homo sapien
gaactgaaaatctaatatagccaaa

SEQ ID NO: 4668005 - DNA, 25 bp, Homo sapien
taatatagccaaagtagggttgccc

SEQ ID NO: 4668006 - DNA, 25 bp, Homo sapien
tgaactacaagggaactgaaaatct

SEQ ID NO: 4668007 - DNA, 25 bp, Homo sapien
agacagatacatgaactacaaggga

SEQ ID NO: 4668008 - DNA, 25 bp, Homo sapien
cactgagtcctgcagaggtgcttca

SEQ ID NO: 4668009 - DNA, 25 bp, Homo sapien
actgagtcctgcagaggtgcttcag

SEQ ID NO: 4668010 - DNA, 25 bp, Homo sapien
cttggtttccacagcagtttttctc

SEQ ID NO: 4668011 - DNA, 25 bp, Homo sapien
cttcttggtttccacagcagttttt

SEQ ID NO: 4668012 - DNA, 25 bp, Homo sapien
ctcaatgcacaattttatatgctgt

SEQ ID NO: 4668013 - DNA, 25 bp, Homo sapien
tcaatgcacaattttatatgctgtg

SEQ ID NO: 4668014 - DNA, 25 bp, Homo sapien
caattttatatgctgtgatctctgg

SEQ ID NO: 4668015 - DNA, 25 bp, Homo sapien
tgcacaattttatatgctgtgatct

SEQ ID NO: 4668016 - DNA, 25 bp, Homo sapien
gggtttgctttctcatagaccacct

SEQ ID NO: 4668017 - DNA, 25 bp, Homo sapien
catacaccacgtccttgctgcgctg

SEQ ID NO: 4668018 - DNA, 25 bp, Homo sapien
tcccatacaccacgtccttgctgcg

SEQ ID NO: 4668019 - DNA, 25 bp, Homo sapien
agatcccatacaccacgtccttgct

SEQ ID NO: 4668020 - DNA, 25 bp, Homo sapien
caatctaggcaggactttataatct

SEQ ID NO: 4668021 - DNA, 25 bp, Homo sapien
ctggcaatctaggcaggactttata

SEQ ID NO: 4668022 - DNA, 25 bp, Homo sapien
atctaggcaggactttataatcttg

SEQ ID NO: 4668023 - DNA, 25 bp, Homo sapien
ggcaatctaggcaggactttataat

SEQ ID NO: 4668024 - DNA, 25 bp, Homo sapien
ctcaatgcctccttgtatttctgaa

SEQ ID NO: 4668025 - DNA, 25 bp, Homo sapien
tcttctttctccacccaggactcac

SEQ ID NO: 4668026 - DNA, 25 bp, Homo sapien
ctgcaagccttgttgctcaatgcct

SEQ ID NO: 4668027 - DNA, 25 bp, Homo sapien
atgcctccttgtatttctgaatgag

SEQ ID NO: 4668028 - DNA, 25 bp, Homo sapien
tctgtaaggccatcagggtacgcat

SEQ ID NO: 4668029 - DNA, 25 bp, Homo sapien
ttctctgtaaggccatcagggtacg

SEQ ID NO: 4668030 - DNA, 25 bp, Homo sapien
gtaaggccatcagggtacgcatgct

SEQ ID NO: 4668031 - DNA, 25 bp, Homo sapien
aacaattccttccaaatgggcagct

SEQ ID NO: 4668032 - DNA, 25 bp, Homo sapien
tggacccagtttctgcttgatgttc

SEQ ID NO: 4668033 - DNA, 25 bp, Homo sapien
gacccagtttctgcttgatgttccc

SEQ ID NO: 4668034 - DNA, 25 bp, Homo sapien
cccagtttctgcttgatgttcccac

SEQ ID NO: 4668035 - DNA, 25 bp, Homo sapien
tcattggacccagtttctgcttgat

SEQ ID NO: 4668036 - DNA, 25 bp, Homo sapien
aaaagggttgctgctatctctttcc

SEQ ID NO: 4668037 - DNA, 25 bp, Homo sapien
tgtcaaaagggttgctgctatctct

SEQ ID NO: 4668038 - DNA, 25 bp, Homo sapien
catcattgtcaaaagggttgctgct

SEQ ID NO: 4668039 - DNA, 25 bp, Homo sapien
tgctatctctttcctcagtgagttc

SEQ ID NO: 4668040 - DNA, 25 bp, Homo sapien
tcagagtctgccagttcatcatccc

SEQ ID NO: 4668041 - DNA, 25 bp, Homo sapien
agagtctgccagttcatcatcccca

SEQ ID NO: 4668042 - DNA, 25 bp, Homo sapien
gagtctgccagttcatcatccccac

SEQ ID NO: 4668043 - DNA, 25 bp, Homo sapien
ttcagagtctgccagttcatcatcc

SEQ ID NO: 4668044 - DNA, 25 bp, Homo sapien
aatcttccagctcatcatgaaacaa

SEQ ID NO: 4668045 - DNA, 25 bp, Homo sapien
ctatagatccaaatcataaaaatct

SEQ ID NO: 4668046 - DNA, 25 bp, Homo sapien
cataaaaatcttccagctcatcatg

SEQ ID NO: 4668047 - DNA, 25 bp, Homo sapien
aaaatcttccagctcatcatgaaac

SEQ ID NO: 4668048 - DNA, 25 bp, Homo sapien
gaccagttcacacgccacacaaggt

SEQ ID NO: 4668049 - DNA, 25 bp, Homo sapien
tggggtcagcagaccagttcacacg

SEQ ID NO: 4668050 - DNA, 25 bp, Homo sapien
gcagaccagttcacacgccacacaa

SEQ ID NO: 4668051 - DNA, 25 bp, Homo sapien
gggtcagcagaccagttcacacgcc

SEQ ID NO: 4668052 - DNA, 25 bp, Homo sapien
aggcctacctaggagagaacacagg

SEQ ID NO: 4668053 - DNA, 25 bp, Homo sapien
aatttttacaacacctggagttgat

SEQ ID NO: 4668054 - DNA, 25 bp, Homo sapien
cagggaaaataacacactcctcggg

SEQ ID NO: 4668055 - DNA, 25 bp, Homo sapien
gataggcctacctaggagagaacac

SEQ ID NO: 4668056 - DNA, 25 bp, Homo sapien
gtaattctccagcaccacgtctctg

SEQ ID NO: 4668057 - DNA, 25 bp, Homo sapien
agtcacatcctggaatgactgacgc

SEQ ID NO: 4668058 - DNA, 25 bp, Homo sapien
tgtacagggtcctctcaacaaggcc

SEQ ID NO: 4668059 - DNA, 25 bp, Homo sapien
cactgagacgaggtggctgtaattc

SEQ ID NO: 4668060 - DNA, 25 bp, Homo sapien
ttacttctggtagaaatcttcccta

SEQ ID NO: 4668061 - DNA, 25 bp, Homo sapien
tgtttataaatttaatcccagtgag

SEQ ID NO: 4668062 - DNA, 25 bp, Homo sapien
tctggtagaaatcttccctactaca

SEQ ID NO: 4668063 - DNA, 25 bp, Homo sapien
ttcttcattgtgggatttatctgat

SEQ ID NO: 4668064 - DNA, 25 bp, Homo sapien
ctaccccatatagatggaagagtgg

SEQ ID NO: 4668065 - DNA, 25 bp, Homo sapien
cacattccactaccccatatagatg

SEQ ID NO: 4668066 - DNA, 25 bp, Homo sapien
catatagatggaagagtggttgttg

SEQ ID NO: 4668067 - DNA, 25 bp, Homo sapien
gaaatccacattccactaccccata

SEQ ID NO: 4668068 - DNA, 25 bp, Homo sapien
tctaggtgctgctcaagagtcagcc

SEQ ID NO: 4668069 - DNA, 25 bp, Homo sapien
ccaaacagaagaataggtctctagg

SEQ ID NO: 4668070 - DNA, 25 bp, Homo sapien
gaagactttgatcaagccttgctct

SEQ ID NO: 4668071 - DNA, 25 bp, Homo sapien
gagtcagccagacactcttaacttg

SEQ ID NO: 4668072 - DNA, 25 bp, Homo sapien
caggtaccaggcaactaagggacca

SEQ ID NO: 4668073 - DNA, 25 bp, Homo sapien
taactcttagagacagcaaagggcc

SEQ ID NO: 4668074 - DNA, 25 bp, Homo sapien
tcaaccttaatcatccagggccagg

SEQ ID NO: 4668075 - DNA, 25 bp, Homo sapien
tcctttagttgagagcccaccagaa

SEQ ID NO: 4668076 - DNA, 25 bp, Homo sapien
gctttattgaatccatgcccaaggc

SEQ ID NO: 4668077 - DNA, 25 bp, Homo sapien
ctttgggccagtagagtatactaca

SEQ ID NO: 4668078 - DNA, 25 bp, Homo sapien
gcaacatcttactagttcctgtggg

SEQ ID NO: 4668079 - DNA, 25 bp, Homo sapien
caggacacctagatttagctaatgg

SEQ ID NO: 4668080 - DNA, 25 bp, Homo sapien
tggtaagtaatgacagaacacagac

SEQ ID NO: 4668081 - DNA, 25 bp, Homo sapien
caaacagctgtcatagaagagaacc

SEQ ID NO: 4668082 - DNA, 25 bp, Homo sapien
cagacgtcggttcacagagttcgcc

SEQ ID NO: 4668083 - DNA, 25 bp, Homo sapien
tttcaacagaaaggcacacctcact

SEQ ID NO: 4668084 - DNA, 25 bp, Homo sapien
cctctatctatccagttaggaaaat

SEQ ID NO: 4668085 - DNA, 25 bp, Homo sapien
tttaatcataaaggagttggtgctg

SEQ ID NO: 4668086 - DNA, 25 bp, Homo sapien
tgttgagtctattccaaaattcctg

SEQ ID NO: 4668087 - DNA, 25 bp, Homo sapien
tagataatgtcaagacctagactgt

SEQ ID NO: 4668088 - DNA, 25 bp, Homo sapien
taagcatagagaagttgtaaccaag

SEQ ID NO: 4668089 - DNA, 25 bp, Homo sapien
ggtttctgattccatgagtgttcac

SEQ ID NO: 4668090 - DNA, 25 bp, Homo sapien
cataggtaaacagggatttttgcag

SEQ ID NO: 4668091 - DNA, 25 bp, Homo sapien
tttatgtaaaggtcagaagcaggca

SEQ ID NO: 4668092 - DNA, 25 bp, Homo sapien
tagaaagaccatcttctgtcaactg

SEQ ID NO: 4668093 - DNA, 25 bp, Homo sapien
ggtataaggtgagtgtcaaggttca

SEQ ID NO: 4668094 - DNA, 25 bp, Homo sapien
caagtgacttgtatgcgggtctaat

SEQ ID NO: 4668095 - DNA, 25 bp, Homo sapien
caaggttcatatttccatacggata

SEQ ID NO: 4668096 - DNA, 25 bp, Homo sapien
cctctgtatgagtctatgtccaaat

SEQ ID NO: 4668097 - DNA, 25 bp, Homo sapien
gtatgagtctatgtccaaattttct

SEQ ID NO: 4668098 - DNA, 25 bp, Homo sapien
tttcctctgtatgagtctatgtcca

SEQ ID NO: 4668099 - DNA, 25 bp, Homo sapien
tcatctttcctctgtatgagtctat

SEQ ID NO: 4668100 - DNA, 25 bp, Homo sapien
gggggccgggtgaagtctgagatca

SEQ ID NO: 4668101 - DNA, 25 bp, Homo sapien
gatcaagatgtcatcgggggccggg

SEQ ID NO: 4668102 - DNA, 25 bp, Homo sapien
agatcaagatgtcaacaggggccgg

SEQ ID NO: 4668103 - DNA, 25 bp, Homo sapien
tttcccaccattctggagaccagaa

SEQ ID NO: 4668104 - DNA, 25 bp, Homo sapien
tgtgacactgaacactgtgggccaa

SEQ ID NO: 4668105 - DNA, 25 bp, Homo sapien
caggtcttgatttgcccaaccagcg

SEQ ID NO: 4668106 - DNA, 25 bp, Homo sapien
caccagacttggtgatgtcgccaca

SEQ ID NO: 4668107 - DNA, 25 bp, Homo sapien
ccagggcttccaaacagatgcagaa

SEQ ID NO: 4668108 - DNA, 25 bp, Homo sapien
tgttttcaaacgtcttccgcggctc

SEQ ID NO: 4668109 - DNA, 25 bp, Homo sapien
caggacggtccatgttattacgcca

SEQ ID NO: 4668110 - DNA, 25 bp, Homo sapien
gctttctgtaaccacacgctgcatt

SEQ ID NO: 4668111 - DNA, 25 bp, Homo sapien
gaacccgggctccagttatcaggac

SEQ ID NO: 4668112 - DNA, 25 bp, Homo sapien
cctgtaacctttgggctatagtaga

SEQ ID NO: 4668113 - DNA, 25 bp, Homo sapien
tgtggaagtgcctgtaacctttggg

SEQ ID NO: 4668114 - DNA, 25 bp, Homo sapien
tcaccaggtgcttacagagattgtc

SEQ ID NO: 4668115 - DNA, 25 bp, Homo sapien
cagaaccgctctcctattttccgtg

SEQ ID NO: 4668116 - DNA, 25 bp, Homo sapien
caataaatgtggtttatatgtcaca

SEQ ID NO: 4668117 - DNA, 25 bp, Homo sapien
aattcagcatccctccaggttaaaa

SEQ ID NO: 4668118 - DNA, 25 bp, Homo sapien
aagtctggtgcaatgtacacaaatc

SEQ ID NO: 4668119 - DNA, 25 bp, Homo sapien
attcaagtctggtgcaatgtacaca

SEQ ID NO: 4668120 - DNA, 25 bp, Homo sapien
caaagctagtcaaaaacaataacca

SEQ ID NO: 4668121 - DNA, 25 bp, Homo sapien
tgaaggagaatgagacacatacaca

SEQ ID NO: 4668122 - DNA, 25 bp, Homo sapien
actgaaggagaatgagacacataca

SEQ ID NO: 4668123 - DNA, 25 bp, Homo sapien
gaaaaatctcaaattaatagcctaa

SEQ ID NO: 4668124 - DNA, 25 bp, Homo sapien
ttatccattttgcattgagtttgtg

SEQ ID NO: 4668125 - DNA, 25 bp, Homo sapien
cttttgatgtgatatccaaagaata

SEQ ID NO: 4668126 - DNA, 25 bp, Homo sapien
gaataatttccaaggccattgtcaa

SEQ ID NO: 4668127 - DNA, 25 bp, Homo sapien
tgtgcagaagcttgggcttattttt

SEQ ID NO: 4668128 - DNA, 25 bp, Homo sapien
tggtgcttctgcgttcacaaatagc

SEQ ID NO: 4668129 - DNA, 25 bp, Homo sapien
ccgccgccagattagttgcaggttt

SEQ ID NO: 4668130 - DNA, 25 bp, Homo sapien
tggagctcacatctatggaaacctg

SEQ ID NO: 4668131 - DNA, 25 bp, Homo sapien
tgtaactagagctagagccacccac

SEQ ID NO: 4668132 - DNA, 25 bp, Homo sapien
cttcagagttcccttagtgcagctg

SEQ ID NO: 4668133 - DNA, 25 bp, Homo sapien
tgcagctgcacaactcagactccat

SEQ ID NO: 4668134 - DNA, 25 bp, Homo sapien
cccatgctgatgatatagggctcat

SEQ ID NO: 4668135 - DNA, 25 bp, Homo sapien
ggtgacagcctctaatgcacccatg

SEQ ID NO: 4668136 - DNA, 25 bp, Homo sapien
caaatataggctactgtcgtgtgcc

SEQ ID NO: 4668137 - DNA, 25 bp, Homo sapien
gtagcatttggtataaacactgcca

SEQ ID NO: 4668138 - DNA, 25 bp, Homo sapien
caaggcgcaaaggtcaaagtagcat

SEQ ID NO: 4668139 - DNA, 25 bp, Homo sapien
cactgccaggaacatcgacatcatt

SEQ ID NO: 4668140 - DNA, 25 bp, Homo sapien
gatcaattaaatcatcagaactcaa

SEQ ID NO: 4668141 - DNA, 25 bp, Homo sapien
gatgttatataacccctcacttctt

SEQ ID NO: 4668142 - DNA, 25 bp, Homo sapien
cttttccttttgttggcagtaccat

SEQ ID NO: 4668143 - DNA, 25 bp, Homo sapien
gccttaaggcactgaagatcaatta

SEQ ID NO: 4668144 - DNA, 25 bp, Homo sapien
gaaaccactagagtctgtgacagtg

SEQ ID NO: 4668145 - DNA, 25 bp, Homo sapien
agaaaccactagagtctgtgacagt

SEQ ID NO: 4668146 - DNA, 25 bp, Homo sapien
tgagctggatctggtgatgtcatta

SEQ ID NO: 4668147 - DNA, 25 bp, Homo sapien
tgatccacccgccagaatgagctgg

SEQ ID NO: 4668148 - DNA, 25 bp, Homo sapien
cagggctcacagagcgtcatcagca

SEQ ID NO: 4668149 - DNA, 25 bp, Homo sapien
gaactgcttatatgagaggaagacc

SEQ ID NO: 4668150 - DNA, 25 bp, Homo sapien
tcacacgcctgcctcgggatgtgga

SEQ ID NO: 4668151 - DNA, 25 bp, Homo sapien
aactatccttgctagggaaacacag

SEQ ID NO: 4668152 - DNA, 25 bp, Homo sapien
ttgaacaaatatacgcatgctaaag

SEQ ID NO: 4668153 - DNA, 25 bp, Homo sapien
aagacttaacagagcatttcacggg

SEQ ID NO: 4668154 - DNA, 25 bp, Homo sapien
tatttaagaggaagtactggtgtct

SEQ ID NO: 4668155 - DNA, 25 bp, Homo sapien
gaagggccatgagggaacatcacct

SEQ ID NO: 4668156 - DNA, 25 bp, Homo sapien
gatgttcctaagatccgcactgacg

SEQ ID NO: 4668157 - DNA, 25 bp, Homo sapien
tccagggtggtccacgcatgacagt

SEQ ID NO: 4668158 - DNA, 25 bp, Homo sapien
taacttggtaaaggcatgtctccca

SEQ ID NO: 4668159 - DNA, 25 bp, Homo sapien
aacaggagcctcagataacttggta

SEQ ID NO: 4668160 - DNA, 25 bp, Homo sapien
aaccctattgatcatattgtggcag

SEQ ID NO: 4668161 - DNA, 25 bp, Homo sapien
caaagtttgacttgacatactggaa

SEQ ID NO: 4668162 - DNA, 25 bp, Homo sapien
ggaattaatccacacgactttgaaa

SEQ ID NO: 4668163 - DNA, 25 bp, Homo sapien
gctccgagggtgttatgagagtcac

SEQ ID NO: 4668164 - DNA, 25 bp, Homo sapien
tagaatttggtatcttccgtagcgt

SEQ ID NO: 4668165 - DNA, 25 bp, Homo sapien
gaaactgacatttgtgcccattgga

SEQ ID NO: 4668166 - DNA, 25 bp, Homo sapien
gcccattggaggcaaatgtagaatt

SEQ ID NO: 4668167 - DNA, 25 bp, Homo sapien
aacaggagtcacctggacagggtgg

SEQ ID NO: 4668168 - DNA, 25 bp, Homo sapien
accagcgtctccaaacccagctccc

SEQ ID NO: 4668169 - DNA, 25 bp, Homo sapien
agcgtctccaaacccagctccccac

SEQ ID NO: 4668170 - DNA, 25 bp, Homo sapien
cagaccagcgtctccaaacccagct

SEQ ID NO: 4668171 - DNA, 25 bp, Homo sapien
tcagaccagcgtctccaaacccagc

SEQ ID NO: 4668172 - DNA, 25 bp, Homo sapien
agaaggaaattttggcacatggatg

SEQ ID NO: 4668173 - DNA, 25 bp, Homo sapien
gcagccaatcgggatcttgaaacta

SEQ ID NO: 4668174 - DNA, 25 bp, Homo sapien
tatccaacaatgcagttaagaggcc

SEQ ID NO: 4668175 - DNA, 25 bp, Homo sapien
taaagctgccagagtctgcggtgga

SEQ ID NO: 4668176 - DNA, 25 bp, Homo sapien
tttctccctctaagacatatgtggc

SEQ ID NO: 4668177 - DNA, 25 bp, Homo sapien
cattcccgttagcaggggcgtctct

SEQ ID NO: 4668178 - DNA, 25 bp, Homo sapien
cattttccgcctctttcacaacttc

SEQ ID NO: 4668179 - DNA, 25 bp, Homo sapien
ttttcctcattagcattcccgttag

SEQ ID NO: 4668180 - DNA, 25 bp, Homo sapien
tcttccattttccgcctctttcaca

SEQ ID NO: 4668181 - DNA, 25 bp, Homo sapien
ctcttcctcaccatcaccttctttt

SEQ ID NO: 4668182 - DNA, 25 bp, Homo sapien
ccatcctcttcctcaccatcacctt

SEQ ID NO: 4668183 - DNA, 25 bp, Homo sapien
ctcagcttcctcttcatctccatcc

SEQ ID NO: 4668184 - DNA, 25 bp, Homo sapien
atcctcttcctcaccatcaccttct

SEQ ID NO: 4668185 - DNA, 25 bp, Homo sapien
tcttcagctgcccgcttgcctgtag

SEQ ID NO: 4668186 - DNA, 25 bp, Homo sapien
cagctgcccgcttgcctgtagcaga

SEQ ID NO: 4668187 - DNA, 25 bp, Homo sapien
ttcagctgcccgcttgcctgtagca

SEQ ID NO: 4668188 - DNA, 25 bp, Homo sapien
catcttcagctgcccgcttgcctgt

SEQ ID NO: 4668189 - DNA, 25 bp, Homo sapien
tgtctagtcatccttgtcggtcttc

SEQ ID NO: 4668190 - DNA, 25 bp, Homo sapien
ttttttgctgtctagtcatccttgt

SEQ ID NO: 4668191 - DNA, 25 bp, Homo sapien
gtcggtcttctgcttcttggtatcg

SEQ ID NO: 4668192 - DNA, 25 bp, Homo sapien
ccttttttgctgtctagtcatcctt

SEQ ID NO: 4668193 - DNA, 25 bp, Homo sapien
ctaacaatatgtacaaaaatataaa

SEQ ID NO: 4668194 - DNA, 25 bp, Homo sapien
aatcagccgggtgtcgtggcgggcg

SEQ ID NO: 4668195 - DNA, 25 bp, Homo sapien
atgtaaattaaaaatacaagcaaat

SEQ ID NO: 4668196 - DNA, 25 bp, Homo sapien
agaaaaaaagcaggccgggcgcgat

SEQ ID NO: 4668197 - DNA, 25 bp, Homo sapien
ccgagatcattaaaggtggctgacc

SEQ ID NO: 4668198 - DNA, 25 bp, Homo sapien
agtcagaagtaggacggagaacggt

SEQ ID NO: 4668199 - DNA, 25 bp, Homo sapien
ggtcatccgagatcattaaaggtgg

SEQ ID NO: 4668200 - DNA, 25 bp, Homo sapien
tcagaagtaggacggagaacggtcc

SEQ ID NO: 4668201 - DNA, 25 bp, Homo sapien
tagtggccctgacaacaggtagccg

SEQ ID NO: 4668202 - DNA, 25 bp, Homo sapien
cagattatggatggatgcccctccc

SEQ ID NO: 4668203 - DNA, 25 bp, Homo sapien
tttacctagacaaacagtgccacag

SEQ ID NO: 4668204 - DNA, 25 bp, Homo sapien
gacggaaagactgaacccagcagag

SEQ ID NO: 4668205 - DNA, 25 bp, Homo sapien
tgaggccaacaagggagtctcctcg

SEQ ID NO: 4668206 - DNA, 25 bp, Homo sapien
ggatgtggaattctccgtccctttc

SEQ ID NO: 4668207 - DNA, 25 bp, Homo sapien
gcaccggtgagtgaactgctgacca

SEQ ID NO: 4668208 - DNA, 25 bp, Homo sapien
tctttcttagtgtcaagttcaggac

SEQ ID NO: 4668209 - DNA, 25 bp, Homo sapien
ttgaggccctaggccgtcatagacg

SEQ ID NO: 4668210 - DNA, 25 bp, Homo sapien
ggccctaggccgtcatagacgtgaa

SEQ ID NO: 4668211 - DNA, 25 bp, Homo sapien
ccctaggccgtcatagacgtgaagg

SEQ ID NO: 4668212 - DNA, 25 bp, Homo sapien
gaggccctaggccgtcatagacgtg

SEQ ID NO: 4668213 - DNA, 25 bp, Homo sapien
agttgcagaaaacgtaacaggccac

SEQ ID NO: 4668214 - DNA, 25 bp, Homo sapien
agagttgcagaaaacgtaacaggcc

SEQ ID NO: 4668215 - DNA, 25 bp, Homo sapien
gagttgcagaaaacgtaacaggcca

SEQ ID NO: 4668216 - DNA, 25 bp, Homo sapien
gttgcagaaaacgtaacaggccaca

SEQ ID NO: 4668217 - DNA, 25 bp, Homo sapien
tctgagacaagcaaggatgctaacc

SEQ ID NO: 4668218 - DNA, 25 bp, Homo sapien
caaggatgctaaccaccaatgtccc

SEQ ID NO: 4668219 - DNA, 25 bp, Homo sapien
caagcaaggatgctaaccaccaatg

SEQ ID NO: 4668220 - DNA, 25 bp, Homo sapien
gagacaagcaaggatgctaaccacc

SEQ ID NO: 4668221 - DNA, 25 bp, Homo sapien
gttagaaatccacaacccacgtcca

SEQ ID NO: 4668222 - DNA, 25 bp, Homo sapien
ttagaaatccacaacccacgtccat

SEQ ID NO: 4668223 - DNA, 25 bp, Homo sapien
gagtgacctgactcagcagatcctc

SEQ ID NO: 4668224 - DNA, 25 bp, Homo sapien
ggcagcttccgcaatgaaaaaagtc

SEQ ID NO: 4668225 - DNA, 25 bp, Homo sapien
gataatttgcatataaacaggtttg

SEQ ID NO: 4668226 - DNA, 25 bp, Homo sapien
agcagatcctcctgagtccaagtgg

SEQ ID NO: 4668227 - DNA, 25 bp, Homo sapien
gaagacacggcacagggctcaggct

SEQ ID NO: 4668228 - DNA, 25 bp, Homo sapien
caggtgcctgaagacacggcacagg

SEQ ID NO: 4668229 - DNA, 25 bp, Homo sapien
cttccaggtgcctgaagacacggca

SEQ ID NO: 4668230 - DNA, 25 bp, Homo sapien
gtgcctgaagacacggcacagggct

SEQ ID NO: 4668231 - DNA, 25 bp, Homo sapien
aaagtacagaggacgggccacgagc

SEQ ID NO: 4668232 - DNA, 25 bp, Homo sapien
caaagtacagaggacgggccacgag

SEQ ID NO: 4668233 - DNA, 25 bp, Homo sapien
ctcccaagccgtgggtcagggatga

SEQ ID NO: 4668234 - DNA, 25 bp, Homo sapien
tgagtctctcggtggcttggtggct

SEQ ID NO: 4668235 - DNA, 25 bp, Homo sapien
agggatgagtctctcggtggcttgg

SEQ ID NO: 4668236 - DNA, 25 bp, Homo sapien
aggcatctcccaagccgtgggtcag

SEQ ID NO: 4668237 - DNA, 25 bp, Homo sapien
tctgcagcttgcaagtgtccctgag

SEQ ID NO: 4668238 - DNA, 25 bp, Homo sapien
tcagatgctctgttcctccacggca

SEQ ID NO: 4668239 - DNA, 25 bp, Homo sapien
acggcagagtcgctccactagagag

SEQ ID NO: 4668240 - DNA, 25 bp, Homo sapien
ggagtcccaacagctgagggcatgt

SEQ ID NO: 4668241 - DNA, 25 bp, Homo sapien
ctcttgggtttacaggagtcgtccg

SEQ ID NO: 4668242 - DNA, 25 bp, Homo sapien
ggaggaaccactgcagtcacgaggg

SEQ ID NO: 4668243 - DNA, 25 bp, Homo sapien
ccactgcagtcacgaggggcggcct

SEQ ID NO: 4668244 - DNA, 25 bp, Homo sapien
cacctgggcagaggtaacgggcacc

SEQ ID NO: 4668245 - DNA, 25 bp, Homo sapien
ccagagtcggaagttctcatagaca

SEQ ID NO: 4668246 - DNA, 25 bp, Homo sapien
tgctgccagagtcggaagttctcat

SEQ ID NO: 4668247 - DNA, 25 bp, Homo sapien
gccaggggcttgtagtgctgccaga

SEQ ID NO: 4668248 - DNA, 25 bp, Homo sapien
agtgctgccagagtcggaagttctc

SEQ ID NO: 4668249 - DNA, 25 bp, Homo sapien
ggcttccgccgggccagggatcgga

SEQ ID NO: 4668250 - DNA, 25 bp, Homo sapien
gtgggcttccgccgggccagggatc

SEQ ID NO: 4668251 - DNA, 25 bp, Homo sapien
cttccgccgggccagggatcggaga

SEQ ID NO: 4668252 - DNA, 25 bp, Homo sapien
ccgggccagggatcggagaactggg

SEQ ID NO: 4668253 - DNA, 25 bp, Homo sapien
aaagttgctcgtgtgctgccattcc

SEQ ID NO: 4668254 - DNA, 25 bp, Homo sapien
gtcaaagttgctcgtgtgctgccat

SEQ ID NO: 4668255 - DNA, 25 bp, Homo sapien
caaagttgctcgtgtgctgccattc

SEQ ID NO: 4668256 - DNA, 25 bp, Homo sapien
tcaaagttgctcgtgtgctgccatt

SEQ ID NO: 4668257 - DNA, 25 bp, Homo sapien
ctggctgcttgaccacctcaggggc

SEQ ID NO: 4668258 - DNA, 25 bp, Homo sapien
tgtcctgttggagggagcaaatccc

SEQ ID NO: 4668259 - DNA, 25 bp, Homo sapien
ggtcaatacccaacatacagtcccg

SEQ ID NO: 4668260 - DNA, 25 bp, Homo sapien
catacagtcccggaagctgtcctgt

SEQ ID NO: 4668261 - DNA, 25 bp, Homo sapien
tccccctcttgaagggaagcatggg

SEQ ID NO: 4668262 - DNA, 25 bp, Homo sapien
gcttcgtgatcacgggccacccatg

SEQ ID NO: 4668263 - DNA, 25 bp, Homo sapien
tgcttcgtgatcacgggccacccat

SEQ ID NO: 4668264 - DNA, 25 bp, Homo sapien
gtgatcacgggccacccatgaagta

SEQ ID NO: 4668265 - DNA, 25 bp, Homo sapien
tcacgggccacccatgaagtaggta

SEQ ID NO: 4668266 - DNA, 25 bp, Homo sapien
agggaggaggatgggtgtggtgagg

SEQ ID NO: 4668267 - DNA, 25 bp, Homo sapien
gaggaggatgggtgtggtgagggcc

SEQ ID NO: 4668268 - DNA, 25 bp, Homo sapien
aggatgggtgtggtgagggccgctc

SEQ ID NO: 4668269 - DNA, 25 bp, Homo sapien
gaggatgggtgtggtgagggccgct

SEQ ID NO: 4668270 - DNA, 25 bp, Homo sapien
cagtcggggccttggggccatcctt

SEQ ID NO: 4668271 - DNA, 25 bp, Homo sapien
gggccatccttgctgggaaggtaca

SEQ ID NO: 4668272 - DNA, 25 bp, Homo sapien
gccttggggccatccttgctgggaa

SEQ ID NO: 4668273 - DNA, 25 bp, Homo sapien
gcagtcggggccttggggccatcct

SEQ ID NO: 4668274 - DNA, 25 bp, Homo sapien
tgggccttggtctccgctggcctct

SEQ ID NO: 4668275 - DNA, 25 bp, Homo sapien
gtgggccttggtctccgctggcctc

SEQ ID NO: 4668276 - DNA, 25 bp, Homo sapien
gggccttggtctccgctggcctctg

SEQ ID NO: 4668277 - DNA, 25 bp, Homo sapien
ggcccgggtctgaggtcatcccgtc

SEQ ID NO: 4668278 - DNA, 25 bp, Homo sapien
cgggtctgaggtcatcccgtcctct

SEQ ID NO: 4668279 - DNA, 25 bp, Homo sapien
cccgggtctgaggtcatcccgtcct

SEQ ID NO: 4668280 - DNA, 25 bp, Homo sapien
aggcccgggtctgaggtcatcccgt

SEQ ID NO: 4668281 - DNA, 25 bp, Homo sapien
caagaaatccatctgtggatctggg

SEQ ID NO: 4668282 - DNA, 25 bp, Homo sapien
ccaagaaatccatctgtggatctgg

SEQ ID NO: 4668283 - DNA, 25 bp, Homo sapien
ctgggcaagggtgagtccttcctcc

SEQ ID NO: 4668284 - DNA, 25 bp, Homo sapien
gggttcccctccctctgctgctcta

SEQ ID NO: 4668285 - DNA, 25 bp, Homo sapien
ctgggttcccctccctctgctgctc

SEQ ID NO: 4668286 - DNA, 25 bp, Homo sapien
ggttcccctccctctgctgctctac

SEQ ID NO: 4668287 - DNA, 25 bp, Homo sapien
tgggttcccctccctctgctgctct

SEQ ID NO: 4668288 - DNA, 25 bp, Homo sapien
gagcagggcccagaatggtggagac

SEQ ID NO: 4668289 - DNA, 25 bp, Homo sapien
tggcgctgccccaggtgtgagcagg

SEQ ID NO: 4668290 - DNA, 25 bp, Homo sapien
gtgtgagcagggcccagaatggtgg

SEQ ID NO: 4668291 - DNA, 25 bp, Homo sapien
gtgagcagggcccagaatggtggag

SEQ ID NO: 4668292 - DNA, 25 bp, Homo sapien
ggtcagggacctctctcgctgcttc

SEQ ID NO: 4668293 - DNA, 25 bp, Homo sapien
cacgctgaccctttgttgggggtca

SEQ ID NO: 4668294 - DNA, 25 bp, Homo sapien
atgccagtgcgcactctgccctgtc

SEQ ID NO: 4668295 - DNA, 25 bp, Homo sapien
caacctggccgtgccatgtcgaggg

SEQ ID NO: 4668296 - DNA, 25 bp, Homo sapien
cctgggggagtcctgacatcccaaa

SEQ ID NO: 4668297 - DNA, 25 bp, Homo sapien
gactctccagggagacccaaggcgt

SEQ ID NO: 4668298 - DNA, 25 bp, Homo sapien
caaggcgtccttggtccccaggccg

SEQ ID NO: 4668299 - DNA, 25 bp, Homo sapien
aggttggccggacagccttcagcct

SEQ ID NO: 4668300 - DNA, 25 bp, Homo sapien
gaccatgccagggagttccgtctcc

SEQ ID NO: 4668301 - DNA, 25 bp, Homo sapien
cctgtggtgggaacccacgacatag

SEQ ID NO: 4668302 - DNA, 25 bp, Homo sapien
cacgacatagaccatgccagggagt

SEQ ID NO: 4668303 - DNA, 25 bp, Homo sapien
tgggaacccacgacatagaccatgc

SEQ ID NO: 4668304 - DNA, 25 bp, Homo sapien
ccagtgcccgtgctcttcctgatga

SEQ ID NO: 4668305 - DNA, 25 bp, Homo sapien
ccatgtggacggtcacctcaacgtc

SEQ ID NO: 4668306 - DNA, 25 bp, Homo sapien
tccatcccaggattttccagggata

SEQ ID NO: 4668307 - DNA, 25 bp, Homo sapien
cccatgtccatgttgcaggcagctg

SEQ ID NO: 4668308 - DNA, 25 bp, Homo sapien
gaacccaaacatggctccctttgtc

SEQ ID NO: 4668309 - DNA, 25 bp, Homo sapien
ccagagagaacccaaacatggctcc

SEQ ID NO: 4668310 - DNA, 25 bp, Homo sapien
tggggccagagagaacccaaacatg

SEQ ID NO: 4668311 - DNA, 25 bp, Homo sapien
cagatggggccagagagaacccaaa

SEQ ID NO: 4668312 - DNA, 25 bp, Homo sapien
tcccaaaggcgaaagcgggtggcag

SEQ ID NO: 4668313 - DNA, 25 bp, Homo sapien
ttcccaaaggcgaaagcgggtggca

SEQ ID NO: 4668314 - DNA, 25 bp, Homo sapien
aaagcgggtggcaggcctccgacac

SEQ ID NO: 4668315 - DNA, 25 bp, Homo sapien
ccaaaccaggtgactctcactaaca

SEQ ID NO: 4668316 - DNA, 25 bp, Homo sapien
tggccgggtatcagccgattggcca

SEQ ID NO: 4668317 - DNA, 25 bp, Homo sapien
caaaccaggtgactctcactaacat

SEQ ID NO: 4668318 - DNA, 25 bp, Homo sapien
agccctggccgggtatcagccgatt

SEQ ID NO: 4668319 - DNA, 25 bp, Homo sapien
gaagctcccattcgtgaggaatgca

SEQ ID NO: 4668320 - DNA, 25 bp, Homo sapien
catggcccagctagctcagatgaca

SEQ ID NO: 4668321 - DNA, 25 bp, Homo sapien
taacatggcccacgtctatgtggtg

SEQ ID NO: 4668322 - DNA, 25 bp, Homo sapien
tcagatgacacacgatggtcccagt

SEQ ID NO: 4668323 - DNA, 25 bp, Homo sapien
taactattacaaagcagttgtgctt

SEQ ID NO: 4668324 - DNA, 25 bp, Homo sapien
catgtaaattatatttgcagagcac

SEQ ID NO: 4668325 - DNA, 25 bp, Homo sapien
accagtttggacagttgtcattata

SEQ ID NO: 4668326 - DNA, 25 bp, Homo sapien
tgactgcttgttttgagtcacatgt

SEQ ID NO: 4668327 - DNA, 25 bp, Homo sapien
aattacaggtaattgagggatcaga

SEQ ID NO: 4668328 - DNA, 25 bp, Homo sapien
tgctctcttttttgagtgccccact

SEQ ID NO: 4668329 - DNA, 25 bp, Homo sapien
gagtgccccactcattggtgccctg

SEQ ID NO: 4668330 - DNA, 25 bp, Homo sapien
agtacaatgaattagagctaatgca

SEQ ID NO: 4668331 - DNA, 25 bp, Homo sapien
gaacaattctagattgttgagaaac

SEQ ID NO: 4668332 - DNA, 25 bp, Homo sapien
tctagattgttgagaaaccttttgt

SEQ ID NO: 4668333 - DNA, 25 bp, Homo sapien
tctgaacaattctagattgttgaga

SEQ ID NO: 4668334 - DNA, 25 bp, Homo sapien
caattctagattgttgagaaacctt

SEQ ID NO: 4668335 - DNA, 25 bp, Homo sapien
cttgagacggtacacaatgcgcagg

SEQ ID NO: 4668336 - DNA, 25 bp, Homo sapien
actgagcagcttgccgggcaggcca

SEQ ID NO: 4668337 - DNA, 25 bp, Homo sapien
aggccatgtggcatattggtgggat

SEQ ID NO: 4668338 - DNA, 25 bp, Homo sapien
tggcatattggtgggatggctacca

SEQ ID NO: 4668339 - DNA, 25 bp, Homo sapien
ctcatacagccagtaacttggcctt

SEQ ID NO: 4668340 - DNA, 25 bp, Homo sapien
ctactctcatacagccagtaacttg

SEQ ID NO: 4668341 - DNA, 25 bp, Homo sapien
tcatacagccagtaacttggccttc

SEQ ID NO: 4668342 - DNA, 25 bp, Homo sapien
tctcatacagccagtaacttggcct

SEQ ID NO: 4668343 - DNA, 25 bp, Homo sapien
tcgttgttgagctcctctgaacgtt

SEQ ID NO: 4668344 - DNA, 25 bp, Homo sapien
agggacactcgtcctggcactaggt

SEQ ID NO: 4668345 - DNA, 25 bp, Homo sapien
gttgttgagctcctctgaacgttcc

SEQ ID NO: 4668346 - DNA, 25 bp, Homo sapien
accagggacactcgtcctggcacta

SEQ ID NO: 4668347 - DNA, 25 bp, Homo sapien
tcagtggacggacacagagtgtcca

SEQ ID NO: 4668348 - DNA, 25 bp, Homo sapien
ttcacaagtaggatgcacatgaggg

SEQ ID NO: 4668349 - DNA, 25 bp, Homo sapien
ggtgcaacccatacctctgttgaag

SEQ ID NO: 4668350 - DNA, 25 bp, Homo sapien
ctgcttcctgagtttcacaagtagg

SEQ ID NO: 4668351 - DNA, 25 bp, Homo sapien
tggcctaatccaccagtctgccact

SEQ ID NO: 4668352 - DNA, 25 bp, Homo sapien
gcctaatccaccagtctgccactag

SEQ ID NO: 4668353 - DNA, 25 bp, Homo sapien
tacatccctggcctaatccaccagt

SEQ ID NO: 4668354 - DNA, 25 bp, Homo sapien
aatccaccagtctgccactagtctt

SEQ ID NO: 4668355 - DNA, 25 bp, Homo sapien
ccctagatgggaggtatgcacctcc

SEQ ID NO: 4668356 - DNA, 25 bp, Homo sapien
gctttcactgtgatgcttccatgcc

SEQ ID NO: 4668357 - DNA, 25 bp, Homo sapien
ttcctagttgctgctgagttcccca

SEQ ID NO: 4668358 - DNA, 25 bp, Homo sapien
tccatgccctttgagccctgagtgc

SEQ ID NO: 4668359 - DNA, 25 bp, Homo sapien
agataaaccagttgaatcattgagg

SEQ ID NO: 4668360 - DNA, 25 bp, Homo sapien
aattattgttatacacagctttatg

SEQ ID NO: 4668361 - DNA, 25 bp, Homo sapien
gaatcattgaggatccaagttgaga

SEQ ID NO: 4668362 - DNA, 25 bp, Homo sapien
cagctttatgatatcaaagactcat

SEQ ID NO: 4668363 - DNA, 25 bp, Homo sapien
gacgcagggcctgatgccagcttca

SEQ ID NO: 4668364 - DNA, 25 bp, Homo sapien
gaccatgacgcagggcctgatgcca

SEQ ID NO: 4668365 - DNA, 25 bp, Homo sapien
ccatgacgcagggcctgatgccagc

SEQ ID NO: 4668366 - DNA, 25 bp, Homo sapien
atgacgcagggcctgatgccagctt

SEQ ID NO: 4668367 - DNA, 25 bp, Homo sapien
cccagtgcagtaggatcaaggcctc

SEQ ID NO: 4668368 - DNA, 25 bp, Homo sapien
agtgcagtaggatcaaggcctccct

SEQ ID NO: 4668369 - DNA, 25 bp, Homo sapien
cagcaccatgtcctaacggtgcagg

SEQ ID NO: 4668370 - DNA, 25 bp, Homo sapien
ctcagcaccatgtcctaacggtgca

SEQ ID NO: 4668371 - DNA, 25 bp, Homo sapien
cttcttggcactgcgggccacctca

SEQ ID NO: 4668372 - DNA, 25 bp, Homo sapien
gcactgcgggccacctcatcttccg

SEQ ID NO: 4668373 - DNA, 25 bp, Homo sapien
ttggcactgcgggccacctcatctt

SEQ ID NO: 4668374 - DNA, 25 bp, Homo sapien
ttcttggcactgcgggccacctcat

SEQ ID NO: 4668375 - DNA, 25 bp, Homo sapien
gtgctccggccgtgttcttctcctg

SEQ ID NO: 4668376 - DNA, 25 bp, Homo sapien
tcctgtggaccgcagtaattccaga

SEQ ID NO: 4668377 - DNA, 25 bp, Homo sapien
acaaacccagtgctccggccgtgtt

SEQ ID NO: 4668378 - DNA, 25 bp, Homo sapien
actctgcttgagactaacattaagt

SEQ ID NO: 4668379 - DNA, 25 bp, Homo sapien
tcacttgatggcttatctggtaact

SEQ ID NO: 4668380 - DNA, 25 bp, Homo sapien
cacttgatggcttatctggtaactt

SEQ ID NO: 4668381 - DNA, 25 bp, Homo sapien
tcattgcaggttctatttgcttttc

SEQ ID NO: 4668382 - DNA, 25 bp, Homo sapien
cttgatggcttatctggtaactttt

SEQ ID NO: 4668383 - DNA, 25 bp, Homo sapien
tttctgccgcttacattgccgccgg

SEQ ID NO: 4668384 - DNA, 25 bp, Homo sapien
gtcttatcctttctgccgcttacat

SEQ ID NO: 4668385 - DNA, 25 bp, Homo sapien
tgtcttatcctttctgccgcttaca

SEQ ID NO: 4668386 - DNA, 25 bp, Homo sapien
gccgcttacattgccgccggagcta

SEQ ID NO: 4668387 - DNA, 25 bp, Homo sapien
ctggatctattgcttcctcagttcg

SEQ ID NO: 4668388 - DNA, 25 bp, Homo sapien
tattgcttcctcagttcgagatcct

SEQ ID NO: 4668389 - DNA, 25 bp, Homo sapien
aggaatattcccacacggtgcattt

SEQ ID NO: 4668390 - DNA, 25 bp, Homo sapien
cctgtacttcatccgcacagaatca

SEQ ID NO: 4668391 - DNA, 25 bp, Homo sapien
tgtgacttcatcctccgtggctctg

SEQ ID NO: 4668392 - DNA, 25 bp, Homo sapien
ggaacctggagccacaagtcttcat

SEQ ID NO: 4668393 - DNA, 25 bp, Homo sapien
gatactcactaaaagctggttgcgc

SEQ ID NO: 4668394 - DNA, 25 bp, Homo sapien
taaacacttattggcctgaccggct

SEQ ID NO: 4668395 - DNA, 25 bp, Homo sapien
tcagagaagtcagggggtgttgtca

SEQ ID NO: 4668396 - DNA, 25 bp, Homo sapien
gtcagagaagtcagggggtgttgtc

SEQ ID NO: 4668397 - DNA, 25 bp, Homo sapien
agaagtcagggggtgttgtcagagc

SEQ ID NO: 4668398 - DNA, 25 bp, Homo sapien
tcagggggtgttgtcagagcaagtt

SEQ ID NO: 4668399 - DNA, 25 bp, Homo sapien
cagcctgctgggttgtgtaacccac

SEQ ID NO: 4668400 - DNA, 25 bp, Homo sapien
gctgcttatgatttgcttcgttgta

SEQ ID NO: 4668401 - DNA, 25 bp, Homo sapien
atgagaccggaaccatcacgactgc

SEQ ID NO: 4668402 - DNA, 25 bp, Homo sapien
tgagttgagccagtggctacttggt

SEQ ID NO: 4668403 - DNA, 25 bp, Homo sapien
ttttctggttctcatgagttgagcc

SEQ ID NO: 4668404 - DNA, 25 bp, Homo sapien
gtcagacacccctttgcagacagtg

SEQ ID NO: 4668405 - DNA, 25 bp, Homo sapien
tcagttcattgacagggccttaatt

SEQ ID NO: 4668406 - DNA, 25 bp, Homo sapien
aattgttgggaccttgtcagacacc

SEQ ID NO: 4668407 - DNA, 25 bp, Homo sapien
gacagtgtcactgagactgcggctg

SEQ ID NO: 4668408 - DNA, 25 bp, Homo sapien
tgcgtaagactccacaggagcgggc

SEQ ID NO: 4668409 - DNA, 25 bp, Homo sapien
gccccttgcgtaagactccacagga

SEQ ID NO: 4668410 - DNA, 25 bp, Homo sapien
ccttgcgtaagactccacaggagcg

SEQ ID NO: 4668411 - DNA, 25 bp, Homo sapien
gagtcagccccttgcgtaagactcc

SEQ ID NO: 4668412 - DNA, 25 bp, Homo sapien
gcttaaggctgtatgacagtttgtc

SEQ ID NO: 4668413 - DNA, 25 bp, Homo sapien
ctgaatttccatcagccgcaggctt

SEQ ID NO: 4668414 - DNA, 25 bp, Homo sapien
tctgaatttccatcagccgcaggct

SEQ ID NO: 4668415 - DNA, 25 bp, Homo sapien
ttgcttaaggctgtatgacagtttg

SEQ ID NO: 4668416 - DNA, 25 bp, Homo sapien
ctgggaagcgagaggccagccctgc

SEQ ID NO: 4668417 - DNA, 25 bp, Homo sapien
ttctcatttccagtgataatgcctc

SEQ ID NO: 4668418 - DNA, 25 bp, Homo sapien
gccctgctcggatcctttctcattt

SEQ ID NO: 4668419 - DNA, 25 bp, Homo sapien
gccagccctgctcggatcctttctc

SEQ ID NO: 4668420 - DNA, 25 bp, Homo sapien
ctgctgaggctggatttcttcttac

SEQ ID NO: 4668421 - DNA, 25 bp, Homo sapien
ggagcagggaacaaacccacggctg

SEQ ID NO: 4668422 - DNA, 25 bp, Homo sapien
tcgtcattcaggagctcttcgggac

SEQ ID NO: 4668423 - DNA, 25 bp, Homo sapien
gacacgcctgcagtgttgcagacag

SEQ ID NO: 4668424 - DNA, 25 bp, Homo sapien
gctcttcgggacacgcctgcagtgt

SEQ ID NO: 4668425 - DNA, 25 bp, Homo sapien
cgttttgtctcgtcattcaggagct

SEQ ID NO: 4668426 - DNA, 25 bp, Homo sapien
cccttttgaattcagggactcatag

SEQ ID NO: 4668427 - DNA, 25 bp, Homo sapien
taccatcattgtaccttgaaagaaa

SEQ ID NO: 4668428 - DNA, 25 bp, Homo sapien
aatacctgtaccatcattgtacctt

SEQ ID NO: 4668429 - DNA, 25 bp, Homo sapien
tcccttttgaattcagggactcata

SEQ ID NO: 4668430 - DNA, 25 bp, Homo sapien
gatgctggaaacttgtagaggctca

SEQ ID NO: 4668431 - DNA, 25 bp, Homo sapien
gagaagtcaaatagtcaggatcagg

SEQ ID NO: 4668432 - DNA, 25 bp, Homo sapien
tgaactagagaccttttgaaaccaa

SEQ ID NO: 4668433 - DNA, 25 bp, Homo sapien
ggctcatgattgaaaggcctgaaac

SEQ ID NO: 4668434 - DNA, 25 bp, Homo sapien
cggcaccaaatttcatgtgtgtccg

SEQ ID NO: 4668435 - DNA, 25 bp, Homo sapien
caaatttcatgtgtgtccgtgtgaa

SEQ ID NO: 4668436 - DNA, 25 bp, Homo sapien
gcaccaaatttcatgtgtgtccgtg

SEQ ID NO: 4668437 - DNA, 25 bp, Homo sapien
cacggcaccaaatttcatgtgtgtc

SEQ ID NO: 4668438 - DNA, 25 bp, Homo sapien
atcagttaaggtgggacaaagcata

SEQ ID NO: 4668439 - DNA, 25 bp, Homo sapien
aaggtgctcagtgggcaggagtggg

SEQ ID NO: 4668440 - DNA, 25 bp, Homo sapien
ttaaggtgggacaaagcatattcac

SEQ ID NO: 4668441 - DNA, 25 bp, Homo sapien
cagttaaggtgggacaaagcatatt

SEQ ID NO: 4668442 - DNA, 25 bp, Homo sapien
tctcatcaggtggaatgagaaactg

SEQ ID NO: 4668443 - DNA, 25 bp, Homo sapien
atatggaggacccgccctggcacca

SEQ ID NO: 4668444 - DNA, 25 bp, Homo sapien
acaattttctatgaagggggccagc

SEQ ID NO: 4668445 - DNA, 25 bp, Homo sapien
gtttctcatcaggtggaatgagaaa

SEQ ID NO: 4668446 - DNA, 25 bp, Homo sapien
gacagccagtgggtgagtgcgtgga

SEQ ID NO: 4668447 - DNA, 25 bp, Homo sapien
cagccagtgggtgagtgcgtggagg

SEQ ID NO: 4668448 - DNA, 25 bp, Homo sapien
acagccagtgggtgagtgcgtggag

SEQ ID NO: 4668449 - DNA, 25 bp, Homo sapien
aatacaaaaattagccgggcgtgat

SEQ ID NO: 4668450 - DNA, 25 bp, Homo sapien
tactggggaggctgaggcaggagaa

SEQ ID NO: 4668451 - DNA, 25 bp, Homo sapien
ggtgggcgcctgtaatcccagctac

SEQ ID NO: 4668452 - DNA, 25 bp, Homo sapien
caagatgctgaaaccccgtctacga

SEQ ID NO: 4668453 - DNA, 25 bp, Homo sapien
ccatccctcgaagccaccgttgctt

SEQ ID NO: 4668454 - DNA, 25 bp, Homo sapien
agcgcgcttatcagctccgccaccg

SEQ ID NO: 4668455 - DNA, 25 bp, Homo sapien
ctgccagagctgctactagcgcgct

SEQ ID NO: 4668456 - DNA, 25 bp, Homo sapien
gagctgctactagcgcgcttatcag

SEQ ID NO: 4668457 - DNA, 25 bp, Homo sapien
gggcggacacgcagtaaccacagga

SEQ ID NO: 4668458 - DNA, 25 bp, Homo sapien
gaccctgggtcccaatcaggtgctg

SEQ ID NO: 4668459 - DNA, 25 bp, Homo sapien
ggaccctgggtcccaatcaggtgct

SEQ ID NO: 4668460 - DNA, 25 bp, Homo sapien
aatactggggcggacacgcagtaac

SEQ ID NO: 4668461 - DNA, 25 bp, Homo sapien
tctgttccaaagccttagtcagttc

SEQ ID NO: 4668462 - DNA, 25 bp, Homo sapien
gataatattgtgcatcatctggttt

SEQ ID NO: 4668463 - DNA, 25 bp, Homo sapien
aataagctctttgacgataatattg

SEQ ID NO: 4668464 - DNA, 25 bp, Homo sapien
aagctctttgacgataatattgtgc

SEQ ID NO: 4668465 - DNA, 25 bp, Homo sapien
tccagtcactgaaattagcatctgc

SEQ ID NO: 4668466 - DNA, 25 bp, Homo sapien
tctgagcttcgacaccttttaatcc

SEQ ID NO: 4668467 - DNA, 25 bp, Homo sapien
cattctgagcttcgacaccttttaa

SEQ ID NO: 4668468 - DNA, 25 bp, Homo sapien
gcttcgacaccttttaatccagtca

SEQ ID NO: 4668469 - DNA, 25 bp, Homo sapien
gagcatcatgcccagataccccatt

SEQ ID NO: 4668470 - DNA, 25 bp, Homo sapien
taaaacaacatttccacaagggcaa

SEQ ID NO: 4668471 - DNA, 25 bp, Homo sapien
gaaaaggaggctattttgcttctaa

SEQ ID NO: 4668472 - DNA, 25 bp, Homo sapien
attacattatcactaggattcttta

SEQ ID NO: 4668473 - DNA, 25 bp, Homo sapien
gtggcctacatcaccaatccctgga

SEQ ID NO: 4668474 - DNA, 25 bp, Homo sapien
tatgcccattgtgaccctggagaaa

SEQ ID NO: 4668475 - DNA, 25 bp, Homo sapien
tagggattagagatgtcctcaaagc

SEQ ID NO: 4668476 - DNA, 25 bp, Homo sapien
tggattactacgatctcacctagag

SEQ ID NO: 4668477 - DNA, 25 bp, Homo sapien
ttctgaccagtcctgatgtttccaa

SEQ ID NO: 4668478 - DNA, 25 bp, Homo sapien
caaggcactggggttttcaggactg

SEQ ID NO: 4668479 - DNA, 25 bp, Homo sapien
tgtccttctgaccagtcctgatgtt

SEQ ID NO: 4668480 - DNA, 25 bp, Homo sapien
ggttttcaggactggataagactgt

SEQ ID NO: 4668481 - DNA, 25 bp, Homo sapien
agcagcgagggccagtaaaacacga

SEQ ID NO: 4668482 - DNA, 25 bp, Homo sapien
aaaacacgagggtctcataattctc

SEQ ID NO: 4668483 - DNA, 25 bp, Homo sapien
gaaggcaaggcacagcagcgagggc

SEQ ID NO: 4668484 - DNA, 25 bp, Homo sapien
gggccagtaaaacacgagggtctca

SEQ ID NO: 4668485 - DNA, 25 bp, Homo sapien
ggtgcacttccaggacagatttttc

SEQ ID NO: 4668486 - DNA, 25 bp, Homo sapien
ctccctggtgcacttccaggacaga

SEQ ID NO: 4668487 - DNA, 25 bp, Homo sapien
gtatcctcaggagctgcttgacgtg

SEQ ID NO: 4668488 - DNA, 25 bp, Homo sapien
tatcctcaggagctgcttgacgtgc

SEQ ID NO: 4668489 - DNA, 25 bp, Homo sapien
tgaatgccaacacaatggttccaat

SEQ ID NO: 4668490 - DNA, 25 bp, Homo sapien
gcagatgaatgccaacacaatggtt

SEQ ID NO: 4668491 - DNA, 25 bp, Homo sapien
aatgccaacacaatggttccaatca

SEQ ID NO: 4668492 - DNA, 25 bp, Homo sapien
gatgaatgccaacacaatggttcca

SEQ ID NO: 4668493 - DNA, 25 bp, Homo sapien
caggacccctgaatggttcgtgaag

SEQ ID NO: 4668494 - DNA, 25 bp, Homo sapien
aacacgcagaactcgatgacaatga

SEQ ID NO: 4668495 - DNA, 25 bp, Homo sapien
ttggtgacactgatcagctctttca

SEQ ID NO: 4668496 - DNA, 25 bp, Homo sapien
gttcgtgaaggtgatgtagctttcc

SEQ ID NO: 4668497 - DNA, 25 bp, Homo sapien
tagctcacacacgtgagatacgcgg

SEQ ID NO: 4668498 - DNA, 25 bp, Homo sapien
aaatgtggaacagatagctcacaca

SEQ ID NO: 4668499 - DNA, 25 bp, Homo sapien
gggcaaaatggtcgccacccagact

SEQ ID NO: 4668500 - DNA, 25 bp, Homo sapien
gatacgcgggcaaaatggtcgccac

SEQ ID NO: 4668501 - DNA, 25 bp, Homo sapien
aagggcagcctggacgggaatgcag

SEQ ID NO: 4668502 - DNA, 25 bp, Homo sapien
gtgctcaaatgtctcagtgaatatc

SEQ ID NO: 4668503 - DNA, 25 bp, Homo sapien
tgcagcttcctttgcatcgtgcttg

SEQ ID NO: 4668504 - DNA, 25 bp, Homo sapien
atgtctcagtgaatatctcccagcc

SEQ ID NO: 4668505 - DNA, 25 bp, Homo sapien
tgacacaatgctagtgctctacagt

SEQ ID NO: 4668506 - DNA, 25 bp, Homo sapien
aaaaactacaatgctgacacaatgc

SEQ ID NO: 4668507 - DNA, 25 bp, Homo sapien
ctgtatgtaggttggaataataaaa

SEQ ID NO: 4668508 - DNA, 25 bp, Homo sapien
tttgtagcgtgtttctcatccttgg

SEQ ID NO: 4668509 - DNA, 25 bp, Homo sapien
gacgaggccgggttatggaacttca

SEQ ID NO: 4668510 - DNA, 25 bp, Homo sapien
catgctctccgacgaggccgggtta

SEQ ID NO: 4668511 - DNA, 25 bp, Homo sapien
agaaaatgtttatctcctgcccata

SEQ ID NO: 4668512 - DNA, 25 bp, Homo sapien
aaaatgtttatctcctgcccatagc

SEQ ID NO: 4668513 - DNA, 25 bp, Homo sapien
ctatttgccagccagagtaccttgc

SEQ ID NO: 4668514 - DNA, 25 bp, Homo sapien
agccagagtaccttgcaatggccac

SEQ ID NO: 4668515 - DNA, 25 bp, Homo sapien
tgccagccagagtaccttgcaatgg

SEQ ID NO: 4668516 - DNA, 25 bp, Homo sapien
tttgccagccagagtaccttgcaat

SEQ ID NO: 4668517 - DNA, 25 bp, Homo sapien
gccacataggctctgtaccatgtga

SEQ ID NO: 4668518 - DNA, 25 bp, Homo sapien
tgtaccatgtgaatgatgaggtagc

SEQ ID NO: 4668519 - DNA, 25 bp, Homo sapien
tctgtaccatgtgaatgatgaggta

SEQ ID NO: 4668520 - DNA, 25 bp, Homo sapien
tgattgccatgccacataggctctg

SEQ ID NO: 4668521 - DNA, 25 bp, Homo sapien
ccctggtttggacgatgggtagcac

SEQ ID NO: 4668522 - DNA, 25 bp, Homo sapien
gcccagcccttgcagcatttccagg

SEQ ID NO: 4668523 - DNA, 25 bp, Homo sapien
gccctggtttggacgatgggtagca

SEQ ID NO: 4668524 - DNA, 25 bp, Homo sapien
gcttccttccatcatactgtcttgc

SEQ ID NO: 4668525 - DNA, 25 bp, Homo sapien
cagagaagtggaataacttacccca

SEQ ID NO: 4668526 - DNA, 25 bp, Homo sapien
atgtcaatgacaggatacccgccca

SEQ ID NO: 4668527 - DNA, 25 bp, Homo sapien
caccccatacatggttgtgagggca

SEQ ID NO: 4668528 - DNA, 25 bp, Homo sapien
caggatttcactgatgtccctttca

SEQ ID NO: 4668529 - DNA, 25 bp, Homo sapien
gagcagtttaacaggttgggaatta

SEQ ID NO: 4668530 - DNA, 25 bp, Homo sapien
ccaggatttcactgatgtccctttc

SEQ ID NO: 4668531 - DNA, 25 bp, Homo sapien
gtggggccatcctgaggcagccttt

SEQ ID NO: 4668532 - DNA, 25 bp, Homo sapien
gaggcagccttttcccttctgccag

SEQ ID NO: 4668533 - DNA, 25 bp, Homo sapien
ctgaaacacagggtggggccatcct

SEQ ID NO: 4668534 - DNA, 25 bp, Homo sapien
gggccatcctgaggcagccttttcc

SEQ ID NO: 4668535 - DNA, 25 bp, Homo sapien
catgagacccacaacgatggatatt

SEQ ID NO: 4668536 - DNA, 25 bp, Homo sapien
gaagaagctggcagcgatacacatc

SEQ ID NO: 4668537 - DNA, 25 bp, Homo sapien
tacacatctgcaggatcatgagacc

SEQ ID NO: 4668538 - DNA, 25 bp, Homo sapien
gcttctgcttgtcagccgtgcccag

SEQ ID NO: 4668539 - DNA, 25 bp, Homo sapien
gatccttggagtttgaggcttcctg

SEQ ID NO: 4668540 - DNA, 25 bp, Homo sapien
tacaggtccaggctcaaagctttgt

SEQ ID NO: 4668541 - DNA, 25 bp, Homo sapien
gataaggaatttcacagggctgcag

SEQ ID NO: 4668542 - DNA, 25 bp, Homo sapien
cactgtctgttgcacgagggaccta

SEQ ID NO: 4668543 - DNA, 25 bp, Homo sapien
gccacatgccgaggaggcaactgat

SEQ ID NO: 4668544 - DNA, 25 bp, Homo sapien
gatggtcctgtcgatgcgggcaatc

SEQ ID NO: 4668545 - DNA, 25 bp, Homo sapien
cagcagcacgttgtagaagaacaga

SEQ ID NO: 4668546 - DNA, 25 bp, Homo sapien
tcatagccactctgcatgatggtcc

SEQ ID NO: 4668547 - DNA, 25 bp, Homo sapien
aagctgacaagcacagggttgatgt

SEQ ID NO: 4668548 - DNA, 25 bp, Homo sapien
tgtagagcatcccaatccatgcact

SEQ ID NO: 4668549 - DNA, 25 bp, Homo sapien
acagggttgatgtgataatggtcca

SEQ ID NO: 4668550 - DNA, 25 bp, Homo sapien
gatgtgataatggtccatgtagagc

SEQ ID NO: 4668551 - DNA, 25 bp, Homo sapien
tgccgattgatttaggcaccagtat

SEQ ID NO: 4668552 - DNA, 25 bp, Homo sapien
ctgccgattgatttaggcaccagta

SEQ ID NO: 4668553 - DNA, 25 bp, Homo sapien
gcgtaggttcaaacaggagccgtta

SEQ ID NO: 4668554 - DNA, 25 bp, Homo sapien
gaatccagcgtaggttcaaacagga

SEQ ID NO: 4668555 - DNA, 25 bp, Homo sapien
cagggagcctcagggtatttacttc

SEQ ID NO: 4668556 - DNA, 25 bp, Homo sapien
gggtctgaatccagcgtaggttcaa

SEQ ID NO: 4668557 - DNA, 25 bp, Homo sapien
agagcagacagactgaaggagtgag

SEQ ID NO: 4668558 - DNA, 25 bp, Homo sapien
agcagacagactgaaggagtgaggg

SEQ ID NO: 4668559 - DNA, 25 bp, Homo sapien
cagacagactgaaggagtgaggggt

SEQ ID NO: 4668560 - DNA, 25 bp, Homo sapien
ctaggatagaatcagagcagacaga

SEQ ID NO: 4668561 - DNA, 25 bp, Homo sapien
tccgagcatgccatcagaatttggg

SEQ ID NO: 4668562 - DNA, 25 bp, Homo sapien
tgtgccatcccatttcattgcaggg

SEQ ID NO: 4668563 - DNA, 25 bp, Homo sapien
tcgattagggtctgcaacaggaacc

SEQ ID NO: 4668564 - DNA, 25 bp, Homo sapien
ggctgcctacccacaatggatagtg

SEQ ID NO: 4668565 - DNA, 25 bp, Homo sapien
tagagttctgtaccccgacatgtca

SEQ ID NO: 4668566 - DNA, 25 bp, Homo sapien
tatcttcagacaggtggcttttcca

SEQ ID NO: 4668567 - DNA, 25 bp, Homo sapien
ggacaaatgtccaagcctcctggca

SEQ ID NO: 4668568 - DNA, 25 bp, Homo sapien
catgaaatgtggttaagtactgggc

SEQ ID NO: 4668569 - DNA, 25 bp, Homo sapien
caattcacggcaaggtttcccatgg

SEQ ID NO: 4668570 - DNA, 25 bp, Homo sapien
tcaaagctggaaggtatgccttgcc

SEQ ID NO: 4668571 - DNA, 25 bp, Homo sapien
catatagtgggttggatcacagaca

SEQ ID NO: 4668572 - DNA, 25 bp, Homo sapien
tagcatgatctccaaactcccagga

SEQ ID NO: 4668573 - DNA, 25 bp, Homo sapien
tatggcaggtctattagtgaaaaac

SEQ ID NO: 4668574 - DNA, 25 bp, Homo sapien
aatgaggttgcctttatcagtgatc

SEQ ID NO: 4668575 - DNA, 25 bp, Homo sapien
tcattaagcttcttgggcgtgtaga

SEQ ID NO: 4668576 - DNA, 25 bp, Homo sapien
caacttggctataatgtgtttcagc

SEQ ID NO: 4668577 - DNA, 25 bp, Homo sapien
tgtgtcctgcttaagaaatccttgc

SEQ ID NO: 4668578 - DNA, 25 bp, Homo sapien
tgacctgggccgcttactgaaaaga

SEQ ID NO: 4668579 - DNA, 25 bp, Homo sapien
caatatctggtagtgtaagtcctcc

SEQ ID NO: 4668580 - DNA, 25 bp, Homo sapien
tctttgcactagcagcacacacagc

SEQ ID NO: 4668581 - DNA, 25 bp, Homo sapien
gaaccatctgacctgtgactagcca

SEQ ID NO: 4668582 - DNA, 25 bp, Homo sapien
gaacgtgcctagtaagcagtaccca

SEQ ID NO: 4668583 - DNA, 25 bp, Homo sapien
gaatctagaccctgtaattcaagtc

SEQ ID NO: 4668584 - DNA, 25 bp, Homo sapien
tgaattatctgaaaggaacgtgcct

SEQ ID NO: 4668585 - DNA, 25 bp, Homo sapien
agcgacaactgcagctggacgccca

SEQ ID NO: 4668586 - DNA, 25 bp, Homo sapien
gcgacaactgcagctggacgcccat

SEQ ID NO: 4668587 - DNA, 25 bp, Homo sapien
ccagggccggtccagcgacaactgc

SEQ ID NO: 4668588 - DNA, 25 bp, Homo sapien
agccagggccggtccagcgacaact

SEQ ID NO: 4668589 - DNA, 25 bp, Homo sapien
cttgtgcttcactctgccatgctct

SEQ ID NO: 4668590 - DNA, 25 bp, Homo sapien
ctgggaacgcgaataatacaggatt

SEQ ID NO: 4668591 - DNA, 25 bp, Homo sapien
tcagatgagctctgaactcgagcag

SEQ ID NO: 4668592 - DNA, 25 bp, Homo sapien
gatgagctctgaactcgagcaggag

SEQ ID NO: 4668593 - DNA, 25 bp, Homo sapien
ctcagatgagctctgaactcgagca

SEQ ID NO: 4668594 - DNA, 25 bp, Homo sapien
cagatgagctctgaactcgagcagg

SEQ ID NO: 4668595 - DNA, 25 bp, Homo sapien
ggctggatgcccctgccgggaagcc

SEQ ID NO: 4668596 - DNA, 25 bp, Homo sapien
tccaggaaacgcgtctaggctttgg

SEQ ID NO: 4668597 - DNA, 25 bp, Homo sapien
tgccgggaagccgtcgtccaggaaa

SEQ ID NO: 4668598 - DNA, 25 bp, Homo sapien
taggctttggtgtctcaattccaat

SEQ ID NO: 4668599 - DNA, 25 bp, Homo sapien
gctttcccattcggaacctgggtca

SEQ ID NO: 4668600 - DNA, 25 bp, Homo sapien
gctggtaggctttcccattcggaac

SEQ ID NO: 4668601 - DNA, 25 bp, Homo sapien
agaaaagcgggacagagggcggctc

SEQ ID NO: 4668602 - DNA, 25 bp, Homo sapien
aagcgggacagagggcggctcctac

SEQ ID NO: 4668603 - DNA, 25 bp, Homo sapien
agggggatggagaaaagcgggacag

SEQ ID NO: 4668604 - DNA, 25 bp, Homo sapien
ggagaaaagcgggacagagggcggc

SEQ ID NO: 4668605 - DNA, 25 bp, Homo sapien
aggctgtgcatccacttctgctgtc

SEQ ID NO: 4668606 - DNA, 25 bp, Homo sapien
cagggtcacagaacgctctgcagcc

SEQ ID NO: 4668607 - DNA, 25 bp, Homo sapien
ggagaacagggttttccatgatcca

SEQ ID NO: 4668608 - DNA, 25 bp, Homo sapien
tcatgggtatcctgccactcttcag

SEQ ID NO: 4668609 - DNA, 25 bp, Homo sapien
gggtgggccagtggatttttctatc

SEQ ID NO: 4668610 - DNA, 25 bp, Homo sapien
ctcgagtctgggcttgggtgggcca

SEQ ID NO: 4668611 - DNA, 25 bp, Homo sapien
tttctatctgttgggagttcagagc

SEQ ID NO: 4668612 - DNA, 25 bp, Homo sapien
ttcagagcatgagggtcaggagttt

SEQ ID NO: 4668613 - DNA, 25 bp, Homo sapien
ctgggacatcaggctgcctgtaacc

SEQ ID NO: 4668614 - DNA, 25 bp, Homo sapien
aggctgcctgtaaccctggatgccc

SEQ ID NO: 4668615 - DNA, 25 bp, Homo sapien
ggctgcctgtaaccctggatgccca

SEQ ID NO: 4668616 - DNA, 25 bp, Homo sapien
ggacatcaggctgcctgtaaccctg

SEQ ID NO: 4668617 - DNA, 25 bp, Homo sapien
gccatccatggcagctctggcacat

SEQ ID NO: 4668618 - DNA, 25 bp, Homo sapien
cataagggcaccaaggggtggttct

SEQ ID NO: 4668619 - DNA, 25 bp, Homo sapien
catggcagctctggcacataagggc

SEQ ID NO: 4668620 - DNA, 25 bp, Homo sapien
gagtgaagtcccagctcctgatgcc

SEQ ID NO: 4668621 - DNA, 25 bp, Homo sapien
gtatccatgagaccccgcacttctc

SEQ ID NO: 4668622 - DNA, 25 bp, Homo sapien
atggtgttctcactctctcgggctt

SEQ ID NO: 4668623 - DNA, 25 bp, Homo sapien
atgagaccccgcacttctcgggcag

SEQ ID NO: 4668624 - DNA, 25 bp, Homo sapien
ctcgggcagcgatggtgttctcact

SEQ ID NO: 4668625 - DNA, 25 bp, Homo sapien
tgcctttgaaaggtgctggtgctta

SEQ ID NO: 4668626 - DNA, 25 bp, Homo sapien
ctttgaaaggtgctggtgcttatct

SEQ ID NO: 4668627 - DNA, 25 bp, Homo sapien
cctttgaaaggtgctggtgcttatc

SEQ ID NO: 4668628 - DNA, 25 bp, Homo sapien
gcctttgaaaggtgctggtgcttat

SEQ ID NO: 4668629 - DNA, 25 bp, Homo sapien
ggccagagcgctctcgtagctcttc

SEQ ID NO: 4668630 - DNA, 25 bp, Homo sapien
aaagctggccagagcgctctcgtag

SEQ ID NO: 4668631 - DNA, 25 bp, Homo sapien
ctgaaagctggccagagcgctctcg

SEQ ID NO: 4668632 - DNA, 25 bp, Homo sapien
cctcctgaaagctggccagagcgct

SEQ ID NO: 4668633 - DNA, 25 bp, Homo sapien
tgggcccttatgcaccaagtcaggt

SEQ ID NO: 4668634 - DNA, 25 bp, Homo sapien
ccatgtcgtctaaggctctgtgagc

SEQ ID NO: 4668635 - DNA, 25 bp, Homo sapien
tgacctgtagggcttttccaagaac

SEQ ID NO: 4668636 - DNA, 25 bp, Homo sapien
cactcagagagggttccatgtcgtc

SEQ ID NO: 4668637 - DNA, 25 bp, Homo sapien
ttggatggtgtagtcctcaaggttg

SEQ ID NO: 4668638 - DNA, 25 bp, Homo sapien
tccacctttaggaagagacggttca

SEQ ID NO: 4668639 - DNA, 25 bp, Homo sapien
cagactcagtcagcttcttcaaaaa

SEQ ID NO: 4668640 - DNA, 25 bp, Homo sapien
atttcttcatcagactcagtcagct

SEQ ID NO: 4668641 - DNA, 25 bp, Homo sapien
gcaggcccagccacgaagggacccc

SEQ ID NO: 4668642 - DNA, 25 bp, Homo sapien
gtcaggctaggagccggtgggaggc

SEQ ID NO: 4668643 - DNA, 25 bp, Homo sapien
acgcagagaagtttgggtcaggcta

SEQ ID NO: 4668644 - DNA, 25 bp, Homo sapien
gaagtttgggtcaggctaggagccg

SEQ ID NO: 4668645 - DNA, 25 bp, Homo sapien
ctacgcagagaagtttgggtcaggc

SEQ ID NO: 4668646 - DNA, 25 bp, Homo sapien
ttaatctcctgcttccggagcagta

SEQ ID NO: 4668647 - DNA, 25 bp, Homo sapien
gttcgggagaactccagcgagtgca

SEQ ID NO: 4668648 - DNA, 25 bp, Homo sapien
tgcttccggagcagtaaccgcccgg

SEQ ID NO: 4668649 - DNA, 25 bp, Homo sapien
ttatcggttcgggagaactccagcg

SEQ ID NO: 4668650 - DNA, 25 bp, Homo sapien
catttatcagcctgtacacttcggg

SEQ ID NO: 4668651 - DNA, 25 bp, Homo sapien
ggaagttttctctatgacttctgca

SEQ ID NO: 4668652 - DNA, 25 bp, Homo sapien
tgcatatttcttcaacacgcttttt

SEQ ID NO: 4668653 - DNA, 25 bp, Homo sapien
cacttcgggccgcatgaggtaggaa

SEQ ID NO: 4668654 - DNA, 25 bp, Homo sapien
cttggagacatcatgaacaaccttg

SEQ ID NO: 4668655 - DNA, 25 bp, Homo sapien
gacagagccaagaggcaggctcagc

SEQ ID NO: 4668656 - DNA, 25 bp, Homo sapien
tgctaggggcatggacaggggaaag

SEQ ID NO: 4668657 - DNA, 25 bp, Homo sapien
aagaggcaggctcagcaatgggcac

SEQ ID NO: 4668658 - DNA, 25 bp, Homo sapien
gtccaccaagccttgccagcggtgg

SEQ ID NO: 4668659 - DNA, 25 bp, Homo sapien
ttccggttgcccagcagggcatagt

SEQ ID NO: 4668660 - DNA, 25 bp, Homo sapien
ctgggcgagagccttccggttgccc

SEQ ID NO: 4668661 - DNA, 25 bp, Homo sapien
gagagccttccggttgcccagcagg

SEQ ID NO: 4668662 - DNA, 25 bp, Homo sapien
atgacctctagctccttcgtcacag

SEQ ID NO: 4668663 - DNA, 25 bp, Homo sapien
tcacagccgggggagtatggatact

SEQ ID NO: 4668664 - DNA, 25 bp, Homo sapien
cagccgcctttgctgcaggacgttc

SEQ ID NO: 4668665 - DNA, 25 bp, Homo sapien
ggacgttctgggtcttcagcatgac

SEQ ID NO: 4668666 - DNA, 25 bp, Homo sapien
cctgcagcaaatgggccatggcctt

SEQ ID NO: 4668667 - DNA, 25 bp, Homo sapien
tgggccatggcctttcttgtgagtg

SEQ ID NO: 4668668 - DNA, 25 bp, Homo sapien
caagttgcttggcagctacactaag

SEQ ID NO: 4668669 - DNA, 25 bp, Homo sapien
tctgcttagtctgaaggatgccttg

SEQ ID NO: 4668670 - DNA, 25 bp, Homo sapien
agggagttgagggaagaatgccact

SEQ ID NO: 4668671 - DNA, 25 bp, Homo sapien
cagggggatggcagctaggtataga

SEQ ID NO: 4668672 - DNA, 25 bp, Homo sapien
ggggatggcagctaggtatagattt

SEQ ID NO: 4668673 - DNA, 25 bp, Homo sapien
gggatggcagctaggtatagattta

SEQ ID NO: 4668674 - DNA, 25 bp, Homo sapien
agggggatggcagctaggtatagat

SEQ ID NO: 4668675 - DNA, 25 bp, Homo sapien
gataagcaactctggtttagtgctg

SEQ ID NO: 4668676 - DNA, 25 bp, Homo sapien
taggataagcaactctggtttagtg

SEQ ID NO: 4668677 - DNA, 25 bp, Homo sapien
taagcaactctggtttagtgctgct

SEQ ID NO: 4668678 - DNA, 25 bp, Homo sapien
gtctaggataagcaactctggttta

SEQ ID NO: 4668679 - DNA, 25 bp, Homo sapien
ttctcatacagcaggcggatccgca

SEQ ID NO: 4668680 - DNA, 25 bp, Homo sapien
tctcatacagcaggcggatccgcat

SEQ ID NO: 4668681 - DNA, 25 bp, Homo sapien
tggagtgctcccaccatctggaaga

SEQ ID NO: 4668682 - DNA, 25 bp, Homo sapien
cactttgccctggagtgctcccacc

SEQ ID NO: 4668683 - DNA, 25 bp, Homo sapien
cagtgaaggctttccagtccagcag

SEQ ID NO: 4668684 - DNA, 25 bp, Homo sapien
gaagaagaactggttcaccagggtc

SEQ ID NO: 4668685 - DNA, 25 bp, Homo sapien
ccagtggaacagtccccagcacgca

SEQ ID NO: 4668686 - DNA, 25 bp, Homo sapien
cagtggaacagtccccagcacgcac

SEQ ID NO: 4668687 - DNA, 25 bp, Homo sapien
atcctgtgctccacaaaagtctctg

SEQ ID NO: 4668688 - DNA, 25 bp, Homo sapien
gaagaagatggagtttgggccattc

SEQ ID NO: 4668689 - DNA, 25 bp, Homo sapien
catctctagacatatcctgtgctcc

SEQ ID NO: 4668690 - DNA, 25 bp, Homo sapien
caagtcccatctctagacatatcct

SEQ ID NO: 4668691 - DNA, 25 bp, Homo sapien
ctgccactctgtctgatctgccaga

SEQ ID NO: 4668692 - DNA, 25 bp, Homo sapien
gatctgccagagtctcgaaggattt

SEQ ID NO: 4668693 - DNA, 25 bp, Homo sapien
tgccactctgtctgatctgccagag

SEQ ID NO: 4668694 - DNA, 25 bp, Homo sapien
gtctgatctgccagagtctcgaagg

SEQ ID NO: 4668695 - DNA, 25 bp, Homo sapien
tgcaccaacagctcgctctggtgtg

SEQ ID NO: 4668696 - DNA, 25 bp, Homo sapien
ggaaatacttgaagaggtgtgaact

SEQ ID NO: 4668697 - DNA, 25 bp, Homo sapien
ccagctcctgcaccaacagctcgct

SEQ ID NO: 4668698 - DNA, 25 bp, Homo sapien
cacagttgtaccacctcctggaaat

SEQ ID NO: 4668699 - DNA, 25 bp, Homo sapien
acatggagccccgggtgtgggtctc

SEQ ID NO: 4668700 - DNA, 25 bp, Homo sapien
atggagccccgggtgtgggtctcac

SEQ ID NO: 4668701 - DNA, 25 bp, Homo sapien
catggagccccgggtgtgggtctca

SEQ ID NO: 4668702 - DNA, 25 bp, Homo sapien
cttctcaccagtcgtgcttgaaatc

SEQ ID NO: 4668703 - DNA, 25 bp, Homo sapien
ttctcaccagtcgtgcttgaaatca

SEQ ID NO: 4668704 - DNA, 25 bp, Homo sapien
tttccaggtgaaacgccagtgtttc

SEQ ID NO: 4668705 - DNA, 25 bp, Homo sapien
actttgctgcctcagttggtccaag

SEQ ID NO: 4668706 - DNA, 25 bp, Homo sapien
caagagcctatcgaggtgggcctcc

SEQ ID NO: 4668707 - DNA, 25 bp, Homo sapien
cagttggtccaagagcctatcgagg

SEQ ID NO: 4668708 - DNA, 25 bp, Homo sapien
ctcagagaagtagaccaaggctcat

SEQ ID NO: 4668709 - DNA, 25 bp, Homo sapien
tcaaactcgcaaatgccccaaggtc

SEQ ID NO: 4668710 - DNA, 25 bp, Homo sapien
tgaacagtccttacagaatcagctg

SEQ ID NO: 4668711 - DNA, 25 bp, Homo sapien
taatgctgtcctcgaacttgacggt

SEQ ID NO: 4668712 - DNA, 25 bp, Homo sapien
tgttcaaagatttcacgcacaaaga

SEQ ID NO: 4668713 - DNA, 25 bp, Homo sapien
tcagcatgatcgctgggtactccat

SEQ ID NO: 4668714 - DNA, 25 bp, Homo sapien
gcacaaagaagtattggctgagggc

SEQ ID NO: 4668715 - DNA, 25 bp, Homo sapien
taggagttgagttctttcagcatga

SEQ ID NO: 4668716 - DNA, 25 bp, Homo sapien
tttgaaaatgacttctccagccaag

SEQ ID NO: 4668717 - DNA, 25 bp, Homo sapien
ctggttgcctgaatttgaaaatgac

SEQ ID NO: 4668718 - DNA, 25 bp, Homo sapien
tgaaaatgacttctccagccaagtt

SEQ ID NO: 4668719 - DNA, 25 bp, Homo sapien
aatttgaaaatgacttctccagcca

SEQ ID NO: 4668720 - DNA, 25 bp, Homo sapien
gagacaatttactgatgctgcctgg

SEQ ID NO: 4668721 - DNA, 25 bp, Homo sapien
cccaacccacaaacgcgtaagagtg

SEQ ID NO: 4668722 - DNA, 25 bp, Homo sapien
gataaacaccaaagcacaaggagag

SEQ ID NO: 4668723 - DNA, 25 bp, Homo sapien
ctgttgatgataaacaccaaagcac

SEQ ID NO: 4668724 - DNA, 25 bp, Homo sapien
catgtcctctttagacccttgcttc

SEQ ID NO: 4668725 - DNA, 25 bp, Homo sapien
tctttagacccttgcttcttcctca

SEQ ID NO: 4668726 - DNA, 25 bp, Homo sapien
gtcctctttagacccttgcttcttc

SEQ ID NO: 4668727 - DNA, 25 bp, Homo sapien
gtcatgtcctctttagacccttgct

SEQ ID NO: 4668728 - DNA, 25 bp, Homo sapien
tcttcagttatgaaggactccattt

SEQ ID NO: 4668729 - DNA, 25 bp, Homo sapien
tccctgaatagagccttctttggac

SEQ ID NO: 4668730 - DNA, 25 bp, Homo sapien
tcatccatcttagcatgcagtggag

SEQ ID NO: 4668731 - DNA, 25 bp, Homo sapien
cttagcatgcagtggagattttttc

SEQ ID NO: 4668732 - DNA, 25 bp, Homo sapien
attctcctcattcagggatgggttt

SEQ ID NO: 4668733 - DNA, 25 bp, Homo sapien
cctcattcagggatgggtttaagga

SEQ ID NO: 4668734 - DNA, 25 bp, Homo sapien
tgggtttaaggagccctctctttca

SEQ ID NO: 4668735 - DNA, 25 bp, Homo sapien
tctcctcattcagggatgggtttaa

SEQ ID NO: 4668736 - DNA, 25 bp, Homo sapien
tcacccacagataaactctcttgct

SEQ ID NO: 4668737 - DNA, 25 bp, Homo sapien
gagaagtgtgcattcatggataacc

SEQ ID NO: 4668738 - DNA, 25 bp, Homo sapien
agagttgcttcggaggtgtacataa

SEQ ID NO: 4668739 - DNA, 25 bp, Homo sapien
gctgctaagacaacagagagttgct

SEQ ID NO: 4668740 - DNA, 25 bp, Homo sapien
ggtgtacataattctaccctttgaa

SEQ ID NO: 4668741 - DNA, 25 bp, Homo sapien
cgcatgcgcaagtttcagtagccaa

SEQ ID NO: 4668742 - DNA, 25 bp, Homo sapien
acgcatgcgcaagtttcagtagcca

SEQ ID NO: 4668743 - DNA, 25 bp, Homo sapien
tattttatgagagttacttccctgc

SEQ ID NO: 4668744 - DNA, 25 bp, Homo sapien
gaatatgttttgaggacaagattta

SEQ ID NO: 4668745 - DNA, 25 bp, Homo sapien
tcttctgcaattctatgattatgaa

SEQ ID NO: 4668746 - DNA, 25 bp, Homo sapien
gaaattcaacttattgttctgtgat

SEQ ID NO: 4668747 - DNA, 25 bp, Homo sapien
gtcctcatagtatatctcctctaga

SEQ ID NO: 4668748 - DNA, 25 bp, Homo sapien
tcatagtatatctcctctagaccct

SEQ ID NO: 4668749 - DNA, 25 bp, Homo sapien
tctagaccctcttccttgtcttctt

SEQ ID NO: 4668750 - DNA, 25 bp, Homo sapien
cctcatagtatatctcctctagacc

SEQ ID NO: 4668751 - DNA, 25 bp, Homo sapien
gaatgggacttcctacaatgctctt

SEQ ID NO: 4668752 - DNA, 25 bp, Homo sapien
tggaatgggacttcctacaatgctc

SEQ ID NO: 4668753 - DNA, 25 bp, Homo sapien
aatgggacttcctacaatgctcttc

SEQ ID NO: 4668754 - DNA, 25 bp, Homo sapien
atgggacttcctacaatgctcttct

SEQ ID NO: 4668755 - DNA, 25 bp, Homo sapien
taatttctaaaattagtctcgatgg

SEQ ID NO: 4668756 - DNA, 25 bp, Homo sapien
gcactggaagtgtcgttgatgaaca

SEQ ID NO: 4668757 - DNA, 25 bp, Homo sapien
gtctcgatggaattgtcacttgttc

SEQ ID NO: 4668758 - DNA, 25 bp, Homo sapien
acttggcactggaagtgtcgttgat

SEQ ID NO: 4668759 - DNA, 25 bp, Homo sapien
ttcaccttgtttacaaaactcagaa

SEQ ID NO: 4668760 - DNA, 25 bp, Homo sapien
cattgattttggtggccacggtgac

SEQ ID NO: 4668761 - DNA, 25 bp, Homo sapien
ctgccctgacgttgtggatgtcttt

SEQ ID NO: 4668762 - DNA, 25 bp, Homo sapien
tgttgagggaacactggtcaaacca

SEQ ID NO: 4668763 - DNA, 25 bp, Homo sapien
ttctcaaggtgctcgaagaagccag

SEQ ID NO: 4668764 - DNA, 25 bp, Homo sapien
gtatagggtcacacggtcacaggag

SEQ ID NO: 4668765 - DNA, 25 bp, Homo sapien
cacaggagttgaaactgagagcttc

SEQ ID NO: 4668766 - DNA, 25 bp, Homo sapien
tatgagcttgcctctagaacatcca

SEQ ID NO: 4668767 - DNA, 25 bp, Homo sapien
taatggctaccacttttggaggctg

SEQ ID NO: 4668768 - DNA, 25 bp, Homo sapien
catgtcatagatcttaaggcggaag

SEQ ID NO: 4668769 - DNA, 25 bp, Homo sapien
ggaactggcagaacatcagccgctt

SEQ ID NO: 4668770 - DNA, 25 bp, Homo sapien
ggcagaacatcagccgcttcttctt

SEQ ID NO: 4668771 - DNA, 25 bp, Homo sapien
tgctccatgtcatagatcttaaggc

SEQ ID NO: 4668772 - DNA, 25 bp, Homo sapien
tagctaagcaactcctggtgcagtg

SEQ ID NO: 4668773 - DNA, 25 bp, Homo sapien
cctgggtgacatcaacatagctaag

SEQ ID NO: 4668774 - DNA, 25 bp, Homo sapien
tttgagtagcggagtttgcccagac

SEQ ID NO: 4668775 - DNA, 25 bp, Homo sapien
tctcctccaagtactgccggaagct

SEQ ID NO: 4668776 - DNA, 25 bp, Homo sapien
gacagaattggtcccaggctattgt

SEQ ID NO: 4668777 - DNA, 25 bp, Homo sapien
tctacctaaaggctggatcctccag

SEQ ID NO: 4668778 - DNA, 25 bp, Homo sapien
ggctatttaagcttcaaccacctgg

SEQ ID NO: 4668779 - DNA, 25 bp, Homo sapien
ccacctggtctttgtttgagtttca

SEQ ID NO: 4668780 - DNA, 25 bp, Homo sapien
ctttcaaccaactctatccgggcag

SEQ ID NO: 4668781 - DNA, 25 bp, Homo sapien
tcaaccaactctatccgggcagctt

SEQ ID NO: 4668782 - DNA, 25 bp, Homo sapien
cagtcgggaacacagtgaattgatt

SEQ ID NO: 4668783 - DNA, 25 bp, Homo sapien
ggtccaggtactcattctccaactt

SEQ ID NO: 4668784 - DNA, 25 bp, Homo sapien
cagacaggttatggaatttgctttc

SEQ ID NO: 4668785 - DNA, 25 bp, Homo sapien
tctatgaaaataaggtccacagaca

SEQ ID NO: 4668786 - DNA, 25 bp, Homo sapien
ttttcacttgcagattcgtcagcaa

SEQ ID NO: 4668787 - DNA, 25 bp, Homo sapien
gcaaccgctggattttctctatgaa

SEQ ID NO: 4668788 - DNA, 25 bp, Homo sapien
tttatcttgttctgaagctgttgca

SEQ ID NO: 4668789 - DNA, 25 bp, Homo sapien
tctgaagctgttgcagagagaaatt

SEQ ID NO: 4668790 - DNA, 25 bp, Homo sapien
ttgtttgcgaattggattttgccac

SEQ ID NO: 4668791 - DNA, 25 bp, Homo sapien
cctggactcttgacaagtttttatc

SEQ ID NO: 4668792 - DNA, 25 bp, Homo sapien
gatatatctttattattcacatgca

SEQ ID NO: 4668793 - DNA, 25 bp, Homo sapien
tattattcacatgcagaatctattg

SEQ ID NO: 4668794 - DNA, 25 bp, Homo sapien
tcacatgcagaatctattgaacact

SEQ ID NO: 4668795 - DNA, 25 bp, Homo sapien
ctttattattcacatgcagaatcta

SEQ ID NO: 4668796 - DNA, 25 bp, Homo sapien
agggagatcaggcaagtcacaggca

SEQ ID NO: 4668797 - DNA, 25 bp, Homo sapien
ggcaaaatataggagccacccttcc

SEQ ID NO: 4668798 - DNA, 25 bp, Homo sapien
ccctgctcctcattagggggctcat

SEQ ID NO: 4668799 - DNA, 25 bp, Homo sapien
attagggggctcataagggagatca

SEQ ID NO: 4668800 - DNA, 25 bp, Homo sapien
aagtttggacgaagctgaggagttc

SEQ ID NO: 4668801 - DNA, 25 bp, Homo sapien
taaggtactgaatcctctggctcag

SEQ ID NO: 4668802 - DNA, 25 bp, Homo sapien
ctgcagttaaggtactgaatcctct

SEQ ID NO: 4668803 - DNA, 25 bp, Homo sapien
ttccttccaagtttggacgaagctg

SEQ ID NO: 4668804 - DNA, 25 bp, Homo sapien
cctgccaccctatcccattccttac

SEQ ID NO: 4668805 - DNA, 25 bp, Homo sapien
cctttcctgccaccctatcccattc

SEQ ID NO: 4668806 - DNA, 25 bp, Homo sapien
ttcctgccaccctatcccattcctt

SEQ ID NO: 4668807 - DNA, 25 bp, Homo sapien
tttcctgccaccctatcccattcct

SEQ ID NO: 4668808 - DNA, 25 bp, Homo sapien
tcttctggccatgttcggggaacgg

SEQ ID NO: 4668809 - DNA, 25 bp, Homo sapien
tctggccatgttcggggaacggacc

SEQ ID NO: 4668810 - DNA, 25 bp, Homo sapien
ttcggggaacggaccatgggagatg

SEQ ID NO: 4668811 - DNA, 25 bp, Homo sapien
ctcttctggccatgttcggggaacg

SEQ ID NO: 4668812 - DNA, 25 bp, Homo sapien
gactcaggggtgaccacgtccagct

SEQ ID NO: 4668813 - DNA, 25 bp, Homo sapien
tcagctgggtgaaggactcaggggt

SEQ ID NO: 4668814 - DNA, 25 bp, Homo sapien
aagggcttctgaagatgtcaggatg

SEQ ID NO: 4668815 - DNA, 25 bp, Homo sapien
cacagctgggtcctcaatcaggggc

SEQ ID NO: 4668816 - DNA, 25 bp, Homo sapien
ctgtctgggacggatctttgtcaca

SEQ ID NO: 4668817 - DNA, 25 bp, Homo sapien
gacggatctttgtcacaatggtggg

SEQ ID NO: 4668818 - DNA, 25 bp, Homo sapien
ggatctttgtcacaatggtgggttg

SEQ ID NO: 4668819 - DNA, 25 bp, Homo sapien
tctgggacggatctttgtcacaatg

SEQ ID NO: 4668820 - DNA, 25 bp, Homo sapien
actgctgccccgagacccacaggcc

SEQ ID NO: 4668821 - DNA, 25 bp, Homo sapien
ggacaggaggtgagcacacagcacc

SEQ ID NO: 4668822 - DNA, 25 bp, Homo sapien
ctttgggtgacgagggcccaggaca

SEQ ID NO: 4668823 - DNA, 25 bp, Homo sapien
gacccacaggcccatgcgcctctac

SEQ ID NO: 4668824 - DNA, 25 bp, Homo sapien
ttctggctggcaccgatgtcgcttg

SEQ ID NO: 4668825 - DNA, 25 bp, Homo sapien
ggctggcaccgatgtcgcttgaagc

SEQ ID NO: 4668826 - DNA, 25 bp, Homo sapien
ctggctggcaccgatgtcgcttgaa

SEQ ID NO: 4668827 - DNA, 25 bp, Homo sapien
tggctggcaccgatgtcgcttgaag

SEQ ID NO: 4668828 - DNA, 25 bp, Homo sapien
aactgctgaaacccaaccacagctg

SEQ ID NO: 4668829 - DNA, 25 bp, Homo sapien
taactgctgaaacccaaccacagct

SEQ ID NO: 4668830 - DNA, 25 bp, Homo sapien
ttaactgctgaaacccaaccacagc

SEQ ID NO: 4668831 - DNA, 25 bp, Homo sapien
tcttaaccaccttaactgctgaaac

SEQ ID NO: 4668832 - DNA, 25 bp, Homo sapien
acaaaggtgggtgggtggtctggag

SEQ ID NO: 4668833 - DNA, 25 bp, Homo sapien
gacaaaggtgggtgggtggtctgga

SEQ ID NO: 4668834 - DNA, 25 bp, Homo sapien
caaaggtgggtgggtggtctggagg

SEQ ID NO: 4668835 - DNA, 25 bp, Homo sapien
ctgtgggacaaaggtgggtgggtgg

SEQ ID NO: 4668836 - DNA, 25 bp, Homo sapien
ccaagcacccggtactttctctcca

SEQ ID NO: 4668837 - DNA, 25 bp, Homo sapien
aagcacccggtactttctctccatt

SEQ ID NO: 4668838 - DNA, 25 bp, Homo sapien
tgttgggcttggggtgcggtgtgaa

SEQ ID NO: 4668839 - DNA, 25 bp, Homo sapien
gttgggcttggggtgcggtgtgaag

SEQ ID NO: 4668840 - DNA, 25 bp, Homo sapien
tttttcccctcagctgagtcacatt

SEQ ID NO: 4668841 - DNA, 25 bp, Homo sapien
tgatttttcccctcagctgagtcac

SEQ ID NO: 4668842 - DNA, 25 bp, Homo sapien
ttcccctcagctgagtcacatttgc

SEQ ID NO: 4668843 - DNA, 25 bp, Homo sapien
gatttttcccctcagctgagtcaca

SEQ ID NO: 4668844 - DNA, 25 bp, Homo sapien
ctggagttacaataaaggaaaagag

SEQ ID NO: 4668845 - DNA, 25 bp, Homo sapien
tggagttacaataaaggaaaagaga

SEQ ID NO: 4668846 - DNA, 25 bp, Homo sapien
agttgaacagcttttgttttaatca

SEQ ID NO: 4668847 - DNA, 25 bp, Homo sapien
ccaagttcatgacccccagagacga

SEQ ID NO: 4668848 - DNA, 25 bp, Homo sapien
gatctctgacatagtgggagtggga

SEQ ID NO: 4668849 - DNA, 25 bp, Homo sapien
acatagtgggagtgggagctccttt

SEQ ID NO: 4668850 - DNA, 25 bp, Homo sapien
tgaccttggaattttgcttgtttgc

SEQ ID NO: 4668851 - DNA, 25 bp, Homo sapien
ggtgttccctcggtggatccctgaa

SEQ ID NO: 4668852 - DNA, 25 bp, Homo sapien
cagtgcctggagtttctagctagaa

SEQ ID NO: 4668853 - DNA, 25 bp, Homo sapien
ccgggcagtgcctcgattagctgaa

SEQ ID NO: 4668854 - DNA, 25 bp, Homo sapien
catggcagtgcctgtaccgggcagt

SEQ ID NO: 4668855 - DNA, 25 bp, Homo sapien
cagaggagggtcaagatgatcccct

SEQ ID NO: 4668856 - DNA, 25 bp, Homo sapien
aggagggtcaagatgatccccttaa

SEQ ID NO: 4668857 - DNA, 25 bp, Homo sapien
gaggagggtcaagatgatcccctta

SEQ ID NO: 4668858 - DNA, 25 bp, Homo sapien
ccagaggagggtcaagatgatcccc

SEQ ID NO: 4668859 - DNA, 25 bp, Homo sapien
ctgtggaagtgacacgagcagacac

SEQ ID NO: 4668860 - DNA, 25 bp, Homo sapien
gaagtgacacgagcagacactcctc

SEQ ID NO: 4668861 - DNA, 25 bp, Homo sapien
tgcccgtgtcgcctccctgggccca

SEQ ID NO: 4668862 - DNA, 25 bp, Homo sapien
tccttccctgtctgcccgtgtcgcc

SEQ ID NO: 4668863 - DNA, 25 bp, Homo sapien
gaccatgtgcgggtgaggactccat

SEQ ID NO: 4668864 - DNA, 25 bp, Homo sapien
ggcccttgctcctgggatccaccag

SEQ ID NO: 4668865 - DNA, 25 bp, Homo sapien
gagggtgaccatgtgcgggtgagga

SEQ ID NO: 4668866 - DNA, 25 bp, Homo sapien
cacactccctagcctttgctcgtgg

SEQ ID NO: 4668867 - DNA, 25 bp, Homo sapien
gagttgtggtacttatttgcctggc

SEQ ID NO: 4668868 - DNA, 25 bp, Homo sapien
ggtgtcacacatgcagtcaggcctg

SEQ ID NO: 4668869 - DNA, 25 bp, Homo sapien
ttttgctaatgttctcggcgcactg

SEQ ID NO: 4668870 - DNA, 25 bp, Homo sapien
tggctctgatactccaggatctttt

SEQ ID NO: 4668871 - DNA, 25 bp, Homo sapien
tagcattttccaagcccatttgacc

SEQ ID NO: 4668872 - DNA, 25 bp, Homo sapien
ctcaagttcacctgggagtcagcaa

SEQ ID NO: 4668873 - DNA, 25 bp, Homo sapien
caagtctgtgtgaggaacttaatcc

SEQ ID NO: 4668874 - DNA, 25 bp, Homo sapien
taattccctgtacatgccaagtctg

SEQ ID NO: 4668875 - DNA, 25 bp, Homo sapien
tttccagtggtgttccttgaaattc

SEQ ID NO: 4668876 - DNA, 25 bp, Homo sapien
gttcctcgaactgtcctcggatctc

SEQ ID NO: 4668877 - DNA, 25 bp, Homo sapien
aaatctcctgatctggatccgtaat

SEQ ID NO: 4668878 - DNA, 25 bp, Homo sapien
tgctgttcctcgaactgtcctcgga

SEQ ID NO: 4668879 - DNA, 25 bp, Homo sapien
tctccttgttcatcctaatcatgct

SEQ ID NO: 4668880 - DNA, 25 bp, Homo sapien
catcctaatcatgctgtccagctct

SEQ ID NO: 4668881 - DNA, 25 bp, Homo sapien
cctcttcacttaagtgtagagactc

SEQ ID NO: 4668882 - DNA, 25 bp, Homo sapien
gtccaagatttagatggagcttctg

SEQ ID NO: 4668883 - DNA, 25 bp, Homo sapien
agtgctgctaggagaggatcatccc

SEQ ID NO: 4668884 - DNA, 25 bp, Homo sapien
tgtgtccaagtaaccagcatctggc

SEQ ID NO: 4668885 - DNA, 25 bp, Homo sapien
gacccaagccattatatccactgtg

SEQ ID NO: 4668886 - DNA, 25 bp, Homo sapien
aatgattcagaaacggccaagggac

SEQ ID NO: 4668887 - DNA, 25 bp, Homo sapien
aacctggacatcgtcaatggtgacc

SEQ ID NO: 4668888 - DNA, 25 bp, Homo sapien
tggccaagttggttatgaaaacctg

SEQ ID NO: 4668889 - DNA, 25 bp, Homo sapien
cagtaggaacttctcggtgaaggtg

SEQ ID NO: 4668890 - DNA, 25 bp, Homo sapien
cacctcatccaactgcagtaggaac

SEQ ID NO: 4668891 - DNA, 25 bp, Homo sapien
taggccaaacgtctacacactcaga

SEQ ID NO: 4668892 - DNA, 25 bp, Homo sapien
tgacaaattgttccctatgacagcg

SEQ ID NO: 4668893 - DNA, 25 bp, Homo sapien
tatgacagcggtatccatgtacgct

SEQ ID NO: 4668894 - DNA, 25 bp, Homo sapien
tagaattagacgtgctaggccaaac

SEQ ID NO: 4668895 - DNA, 25 bp, Homo sapien
tggtccaaagttcaatagcaaaggg

SEQ ID NO: 4668896 - DNA, 25 bp, Homo sapien
cagggaaatcaggtcgcaaaagcgc

SEQ ID NO: 4668897 - DNA, 25 bp, Homo sapien
tattacattatggtgtgcagcaact

SEQ ID NO: 4668898 - DNA, 25 bp, Homo sapien
tgatccagacatcgcacttctagga

SEQ ID NO: 4668899 - DNA, 25 bp, Homo sapien
tgcctgttctccctggggtctcgac

SEQ ID NO: 4668900 - DNA, 25 bp, Homo sapien
cccaaacaaggctcacctttgacag

SEQ ID NO: 4668901 - DNA, 25 bp, Homo sapien
gcgctgatttcccaaacaaggctca

SEQ ID NO: 4668902 - DNA, 25 bp, Homo sapien
tgatttcccaaacaaggctcacctt

SEQ ID NO: 4668903 - DNA, 25 bp, Homo sapien
cacttggagttatggcaggctgagc

SEQ ID NO: 4668904 - DNA, 25 bp, Homo sapien
cagcctgagatcgagggatttcccc

SEQ ID NO: 4668905 - DNA, 25 bp, Homo sapien
taggctagctcatatgggttccgaa

SEQ ID NO: 4668906 - DNA, 25 bp, Homo sapien
tgagtccccggatatggttcataga

SEQ ID NO: 4668907 - DNA, 25 bp, Homo sapien
ggagagcccagcgagtttccttcgt

SEQ ID NO: 4668908 - DNA, 25 bp, Homo sapien
tgcttccacgttcaatcaggggttt

SEQ ID NO: 4668909 - DNA, 25 bp, Homo sapien
gagtttccttcgtatgagcattgat

SEQ ID NO: 4668910 - DNA, 25 bp, Homo sapien
tgagcattgataatttctgtttggg

SEQ ID NO: 4668911 - DNA, 25 bp, Homo sapien
atggtgacttcggtgggtttgatcc

SEQ ID NO: 4668912 - DNA, 25 bp, Homo sapien
caggtacacagcatctcgggcttcc

SEQ ID NO: 4668913 - DNA, 25 bp, Homo sapien
gacttcggtgggtttgatccctggc

SEQ ID NO: 4668914 - DNA, 25 bp, Homo sapien
ttttggtggtggaaatcgatgatgt

SEQ ID NO: 4668915 - DNA, 25 bp, Homo sapien
tgagcctcctttatctgagatgtac

SEQ ID NO: 4668916 - DNA, 25 bp, Homo sapien
acacatacaggccttggatagtgtg

SEQ ID NO: 4668917 - DNA, 25 bp, Homo sapien
ggatagtgtgcagggactgcttcca

SEQ ID NO: 4668918 - DNA, 25 bp, Homo sapien
ccagctgtccttccagcgctgagcc

SEQ ID NO: 4668919 - DNA, 25 bp, Homo sapien
tataagaaagtgtttattcatggtg

SEQ ID NO: 4668920 - DNA, 25 bp, Homo sapien
taagaaagtgtttattcatggtggg

SEQ ID NO: 4668921 - DNA, 25 bp, Homo sapien
tgtataagaaagtgtttattcatgg

SEQ ID NO: 4668922 - DNA, 25 bp, Homo sapien
agtgtttattcatggtggggcggag

SEQ ID NO: 4668923 - DNA, 25 bp, Homo sapien
tcgctggtaaagctacagtgcccgg

SEQ ID NO: 4668924 - DNA, 25 bp, Homo sapien
tttttcaagatgacgtgccctgccc

SEQ ID NO: 4668925 - DNA, 25 bp, Homo sapien
gctctggtgcctatttgaagtgact

SEQ ID NO: 4668926 - DNA, 25 bp, Homo sapien
catgctgtgtcctgttcgctggtaa

SEQ ID NO: 4668927 - DNA, 25 bp, Homo sapien
gccttctttctaggagccctgcatg

SEQ ID NO: 4668928 - DNA, 25 bp, Homo sapien
catgaactgagttagtggactgggc

SEQ ID NO: 4668929 - DNA, 25 bp, Homo sapien
ccttgtccgacagaggcgatctggt

SEQ ID NO: 4668930 - DNA, 25 bp, Homo sapien
taatgtgggaggatgtcatctctgc

SEQ ID NO: 4668931 - DNA, 25 bp, Homo sapien
gctgagagtctcagtcctctaacca

SEQ ID NO: 4668932 - DNA, 25 bp, Homo sapien
cagatggaggcgatacttagggcaa

SEQ ID NO: 4668933 - DNA, 25 bp, Homo sapien
ataacttagttatcaactccttggg

SEQ ID NO: 4668934 - DNA, 25 bp, Homo sapien
ggatacagacaaacaaccagatgga

SEQ ID NO: 4668935 - DNA, 25 bp, Homo sapien
gaagtcttagtccagtttctaggag

SEQ ID NO: 4668936 - DNA, 25 bp, Homo sapien
tggtgcatgacctttactttctgac

SEQ ID NO: 4668937 - DNA, 25 bp, Homo sapien
aagaggtgcagacagagacccttgg

SEQ ID NO: 4668938 - DNA, 25 bp, Homo sapien
gttatacattaaccagactctctgc

SEQ ID NO: 4668939 - DNA, 25 bp, Homo sapien
cttggtgcgattttctggtgtgttc

SEQ ID NO: 4668940 - DNA, 25 bp, Homo sapien
ggctatttcaaaccactgtcagata

SEQ ID NO: 4668941 - DNA, 25 bp, Homo sapien
tctggcatcttggtattcacacata

SEQ ID NO: 4668942 - DNA, 25 bp, Homo sapien
gtctgttctcatccaagttgagatc

SEQ ID NO: 4668943 - DNA, 25 bp, Homo sapien
tcggcaaacctcctcttaggcggtc

SEQ ID NO: 4668944 - DNA, 25 bp, Homo sapien
gcgtcgcgcccaccgtattgatgag

SEQ ID NO: 4668945 - DNA, 25 bp, Homo sapien
agagagcccctcaccgagtcttgag

SEQ ID NO: 4668946 - DNA, 25 bp, Homo sapien
aggattatccagatgcgattgaggc

SEQ ID NO: 4668947 - DNA, 25 bp, Homo sapien
ccagcaatgggtcatagtggtggct

SEQ ID NO: 4668948 - DNA, 25 bp, Homo sapien
gctggcccatcgcactggctggtag

SEQ ID NO: 4668949 - DNA, 25 bp, Homo sapien
tgagcaggtccctggcttgggtccc

SEQ ID NO: 4668950 - DNA, 25 bp, Homo sapien
gcttgatgaggtggcagattgagca

SEQ ID NO: 4668951 - DNA, 25 bp, Homo sapien
aagtccacagtcaagatgctggcat

SEQ ID NO: 4668952 - DNA, 25 bp, Homo sapien
aggctgggaagtccacagtcaagat

SEQ ID NO: 4668953 - DNA, 25 bp, Homo sapien
gctgggaagtccacagtcaagatgc

SEQ ID NO: 4668954 - DNA, 25 bp, Homo sapien
tgggaagtccacagtcaagatgctg

SEQ ID NO: 4668955 - DNA, 25 bp, Homo sapien
agggccccttgagcatgcctggcca

SEQ ID NO: 4668956 - DNA, 25 bp, Homo sapien
tagacattctgctagggagttgaaa

SEQ ID NO: 4668957 - DNA, 25 bp, Homo sapien
gttctagacattctgctagggagtt

SEQ ID NO: 4668958 - DNA, 25 bp, Homo sapien
cattctgctagggagttgaaagcag

SEQ ID NO: 4668959 - DNA, 25 bp, Homo sapien
gacattctgctagggagttgaaagc

SEQ ID NO: 4668960 - DNA, 25 bp, Homo sapien
cccgcggcttgggaatcacctcaag

SEQ ID NO: 4668961 - DNA, 25 bp, Homo sapien
cctggtggacaacgcaggtacgcgc

SEQ ID NO: 4668962 - DNA, 25 bp, Homo sapien
caaacagttcaactcctgcacatta

SEQ ID NO: 4668963 - DNA, 25 bp, Homo sapien
acctagcggtttctgcgcgtgccca

SEQ ID NO: 4668964 - DNA, 25 bp, Homo sapien
cccacggcccgtccccgcgtctctg

SEQ ID NO: 4668965 - DNA, 25 bp, Homo sapien
tcatgtcatcagtttaagttgtcga

SEQ ID NO: 4668966 - DNA, 25 bp, Homo sapien
cagtttaagttgtcgagtggcacta

SEQ ID NO: 4668967 - DNA, 25 bp, Homo sapien
catgtcatcagtttaagttgtcgag

SEQ ID NO: 4668968 - DNA, 25 bp, Homo sapien
tcatcagtttaagttgtcgagtggc

SEQ ID NO: 4668969 - DNA, 25 bp, Homo sapien
tccagtctccagtcaaggatctgta

SEQ ID NO: 4668970 - DNA, 25 bp, Homo sapien
tgctggcacacttctcagataggct

SEQ ID NO: 4668971 - DNA, 25 bp, Homo sapien
gcagaacagctcgtagcatctttga

SEQ ID NO: 4668972 - DNA, 25 bp, Homo sapien
tagtctctatcctgaccactgctgg

SEQ ID NO: 4668973 - DNA, 25 bp, Homo sapien
ttagaactcctttgacgagccacaa

SEQ ID NO: 4668974 - DNA, 25 bp, Homo sapien
tcactctcatctgacaattaacttg

SEQ ID NO: 4668975 - DNA, 25 bp, Homo sapien
ctcctttgacgagccacaagctgag

SEQ ID NO: 4668976 - DNA, 25 bp, Homo sapien
tctgacaattaacttgacgcccggt

SEQ ID NO: 4668977 - DNA, 25 bp, Homo sapien
gcatcaggcttaactccaacagagt

SEQ ID NO: 4668978 - DNA, 25 bp, Homo sapien
tcatttccaagagttgtgtgtagca

SEQ ID NO: 4668979 - DNA, 25 bp, Homo sapien
tgtctcttaacggtgctggattagg

SEQ ID NO: 4668980 - DNA, 25 bp, Homo sapien
tttgccaacagaaaaatttgaagca

SEQ ID NO: 4668981 - DNA, 25 bp, Homo sapien
aaacttctgtgagtcagaggccaaa

SEQ ID NO: 4668982 - DNA, 25 bp, Homo sapien
cctagattcaccaaacttctgtgag

SEQ ID NO: 4668983 - DNA, 25 bp, Homo sapien
accaaacttctgtgagtcagaggcc

SEQ ID NO: 4668984 - DNA, 25 bp, Homo sapien
gattcaccaaacttctgtgagtcag

SEQ ID NO: 4668985 - DNA, 25 bp, Homo sapien
acaggctgtgggcttgatgtagtcc

SEQ ID NO: 4668986 - DNA, 25 bp, Homo sapien
tctgagctaccttataaaaccatag

SEQ ID NO: 4668987 - DNA, 25 bp, Homo sapien
ccatcgattgtagtttgccaccctc

SEQ ID NO: 4668988 - DNA, 25 bp, Homo sapien
tgccaccctctgagctaccttataa

SEQ ID NO: 4668989 - DNA, 25 bp, Homo sapien
agaggttcttgagagatgcatctgc

SEQ ID NO: 4668990 - DNA, 25 bp, Homo sapien
tggttgaagggacgcctttgggcta

SEQ ID NO: 4668991 - DNA, 25 bp, Homo sapien
catctgcaaaggtggttgaagggac

SEQ ID NO: 4668992 - DNA, 25 bp, Homo sapien
gttcttgagagatgcatctgcaaag

SEQ ID NO: 4668993 - DNA, 25 bp, Homo sapien
ttataagtgtaagaggcaggaggct

SEQ ID NO: 4668994 - DNA, 25 bp, Homo sapien
gcgattttgaacctcatccatttta

SEQ ID NO: 4668995 - DNA, 25 bp, Homo sapien
gtgcaaatatgaggccagtgttcaa

SEQ ID NO: 4668996 - DNA, 25 bp, Homo sapien
ggaagcttagatatccaaatgccat

SEQ ID NO: 4668997 - DNA, 25 bp, Homo sapien
agaactgacatatgttaatcttaag

SEQ ID NO: 4668998 - DNA, 25 bp, Homo sapien
tacaacacaggagaaccttcaactt

SEQ ID NO: 4668999 - DNA, 25 bp, Homo sapien
agtgtttactggtaacagttcaatc

SEQ ID NO: 4669000 - DNA, 25 bp, Homo sapien
attaaaatggcaaagctatcagtgt

SEQ ID NO: 4669001 - DNA, 25 bp, Homo sapien
tatgtagaggaccagcaattttggg

SEQ ID NO: 4669002 - DNA, 25 bp, Homo sapien
cctggatctgcgcaactagtgtata

SEQ ID NO: 4669003 - DNA, 25 bp, Homo sapien
taactgtttgcctgagttctgcgag

SEQ ID NO: 4669004 - DNA, 25 bp, Homo sapien
gtattaaattagagggcacccagct

SEQ ID NO: 4669005 - DNA, 25 bp, Homo sapien
gaaactactttcagtggacgataac

SEQ ID NO: 4669006 - DNA, 25 bp, Homo sapien
agtgggtggtagaaactactttcag

SEQ ID NO: 4669007 - DNA, 25 bp, Homo sapien
caatactttctctgaagtgggtggt

SEQ ID NO: 4669008 - DNA, 25 bp, Homo sapien
ctactttcagtggacgataacccat

SEQ ID NO: 4669009 - DNA, 25 bp, Homo sapien
tagctagaggtctatttcgttaatc

SEQ ID NO: 4669010 - DNA, 25 bp, Homo sapien
actgctcttggattcgtcgattttt

SEQ ID NO: 4669011 - DNA, 25 bp, Homo sapien
ctcttggattcgtcgattttttgga

SEQ ID NO: 4669012 - DNA, 25 bp, Homo sapien
gaggtctatttcgttaatcttcaaa

SEQ ID NO: 4669013 - DNA, 25 bp, Homo sapien
ataaagaagtaaatcttggccacca

SEQ ID NO: 4669014 - DNA, 25 bp, Homo sapien
gaagtaaatcttggccaccactgca

SEQ ID NO: 4669015 - DNA, 25 bp, Homo sapien
aagaagtaaatcttggccaccactg

SEQ ID NO: 4669016 - DNA, 25 bp, Homo sapien
gtaaatcttggccaccactgcaagg

SEQ ID NO: 4669017 - DNA, 25 bp, Homo sapien
ctgttggacaccctttcaacggtgg

SEQ ID NO: 4669018 - DNA, 25 bp, Homo sapien
tgtgtatttcaccagcaggtctgcc

SEQ ID NO: 4669019 - DNA, 25 bp, Homo sapien
tgctttcggaagtgcactggcccaa

SEQ ID NO: 4669020 - DNA, 25 bp, Homo sapien
cattaaaggaggaactgttatgtcc

SEQ ID NO: 4669021 - DNA, 25 bp, Homo sapien
tcagaatcctaaagaattagaaaat

SEQ ID NO: 4669022 - DNA, 25 bp, Homo sapien
cagaatcctaaagaattagaaaatg

SEQ ID NO: 4669023 - DNA, 25 bp, Homo sapien
agaatcctaaagaattagaaaatga

SEQ ID NO: 4669024 - DNA, 25 bp, Homo sapien
gaatcctaaagaattagaaaatgaa

SEQ ID NO: 4669025 - DNA, 25 bp, Homo sapien
gatgccagtacagaacagggttcag

SEQ ID NO: 4669026 - DNA, 25 bp, Homo sapien
ccatatttgagatgagggttctgcc

SEQ ID NO: 4669027 - DNA, 25 bp, Homo sapien
taatttctgagacaagggattccca

SEQ ID NO: 4669028 - DNA, 25 bp, Homo sapien
gggttctgccatagtaccctccagg

SEQ ID NO: 4669029 - DNA, 25 bp, Homo sapien
ctgggtgctcaactggcagaggcct

SEQ ID NO: 4669030 - DNA, 25 bp, Homo sapien
tgggcctccccctagtgctgctatg

SEQ ID NO: 4669031 - DNA, 25 bp, Homo sapien
gatgagaaatggcttgggatctgca

SEQ ID NO: 4669032 - DNA, 25 bp, Homo sapien
gaagatggacggtgttggatgaggc

SEQ ID NO: 4669033 - DNA, 25 bp, Homo sapien
aggcactgccttgaatgcagttgca

SEQ ID NO: 4669034 - DNA, 25 bp, Homo sapien
gctttgcaaatactaaggcactgcc

SEQ ID NO: 4669035 - DNA, 25 bp, Homo sapien
catttgctgggacctagagtctcac

SEQ ID NO: 4669036 - DNA, 25 bp, Homo sapien
ggatgtgtatgtgtcactgagccag

SEQ ID NO: 4669037 - DNA, 25 bp, Homo sapien
cctttaggactatttctatgtattc

SEQ ID NO: 4669038 - DNA, 25 bp, Homo sapien
caagtaggcctgtacagctctaaga

SEQ ID NO: 4669039 - DNA, 25 bp, Homo sapien
ccaggctccaagtaggcctgtacag

SEQ ID NO: 4669040 - DNA, 25 bp, Homo sapien
tgtacagctctaagaaatggttcct

SEQ ID NO: 4669041 - DNA, 25 bp, Homo sapien
aggaggagacgtggaaaatggagac

SEQ ID NO: 4669042 - DNA, 25 bp, Homo sapien
tggaaaatggagacaccaagggagg

SEQ ID NO: 4669043 - DNA, 25 bp, Homo sapien
agagaggaggagacgtggaaaatgg

SEQ ID NO: 4669044 - DNA, 25 bp, Homo sapien
ggaaaatggagacaccaagggaggc

SEQ ID NO: 4669045 - DNA, 25 bp, Homo sapien
caaacatttggtccaacatatccca

SEQ ID NO: 4669046 - DNA, 25 bp, Homo sapien
caacgagagggcataacaggaagca

SEQ ID NO: 4669047 - DNA, 25 bp, Homo sapien
tggagcaatccagacaacgagaggg

SEQ ID NO: 4669048 - DNA, 25 bp, Homo sapien
tatcccacaacaaaggaaacgtgga

SEQ ID NO: 4669049 - DNA, 25 bp, Homo sapien
aactgcccaacattcacagcctgga

SEQ ID NO: 4669050 - DNA, 25 bp, Homo sapien
tcctgagcagcagaatagtctttgc

SEQ ID NO: 4669051 - DNA, 25 bp, Homo sapien
gtaaccaggcgtcctcctcggcatt

SEQ ID NO: 4669052 - DNA, 25 bp, Homo sapien
cctcggcatttacggccagcaactg

SEQ ID NO: 4669053 - DNA, 25 bp, Homo sapien
ttttgttctcttctgttgagatgac

SEQ ID NO: 4669054 - DNA, 25 bp, Homo sapien
tattttgttctcttctgttgagatg

SEQ ID NO: 4669055 - DNA, 25 bp, Homo sapien
ctttattttgttctcttctgttgag

SEQ ID NO: 4669056 - DNA, 25 bp, Homo sapien
tttattttgttctcttctgttgaga

SEQ ID NO: 4669057 - DNA, 25 bp, Homo sapien
atccacgaatgtagccaagcccaga

SEQ ID NO: 4669058 - DNA, 25 bp, Homo sapien
gaagcaagtggcaaacgggcccact

SEQ ID NO: 4669059 - DNA, 25 bp, Homo sapien
cactggccttttcaagagggtggag

SEQ ID NO: 4669060 - DNA, 25 bp, Homo sapien
cagaagagtctgctgatggaagcaa

SEQ ID NO: 4669061 - DNA, 25 bp, Homo sapien
tctgcatgttatttgggtgttccaa

SEQ ID NO: 4669062 - DNA, 25 bp, Homo sapien
ttctctgcatgttatttgggtgttc

SEQ ID NO: 4669063 - DNA, 25 bp, Homo sapien
atttctctgcatgttatttgggtgt

SEQ ID NO: 4669064 - DNA, 25 bp, Homo sapien
ctctgcatgttatttgggtgttcca

SEQ ID NO: 4669065 - DNA, 25 bp, Homo sapien
tttgctctgtgagggctcagtagtc

SEQ ID NO: 4669066 - DNA, 25 bp, Homo sapien
atcagggccagtagtcacataatct

SEQ ID NO: 4669067 - DNA, 25 bp, Homo sapien
taatctggcataaggccccagtcca

SEQ ID NO: 4669068 - DNA, 25 bp, Homo sapien
tctgtgagggctcagtagtctctct

SEQ ID NO: 4669069 - DNA, 25 bp, Homo sapien
ctaaaaccatagtcaacatagcata

SEQ ID NO: 4669070 - DNA, 25 bp, Homo sapien
taaaaccatagtcaacatagcatac

SEQ ID NO: 4669071 - DNA, 25 bp, Homo sapien
cgggtttaatttgtatgctttgctt

SEQ ID NO: 4669072 - DNA, 25 bp, Homo sapien
tcgggtttaatttgtatgctttgct

SEQ ID NO: 4669073 - DNA, 25 bp, Homo sapien
ttcgggtttaatttgtatgctttgc

SEQ ID NO: 4669074 - DNA, 25 bp, Homo sapien
cttcgggtttaatttgtatgctttg

SEQ ID NO: 4669075 - DNA, 25 bp, Homo sapien
cagggtcatcgcttaggacttccaa

SEQ ID NO: 4669076 - DNA, 25 bp, Homo sapien
tcacatatagccttcaagcaggtgg

SEQ ID NO: 4669077 - DNA, 25 bp, Homo sapien
tctcctgaggtatcgtacagaacaa

SEQ ID NO: 4669078 - DNA, 25 bp, Homo sapien
tgcaggtgaacctctagtgacttgt

SEQ ID NO: 4669079 - DNA, 25 bp, Homo sapien
tgtcccatcagagcaaatattagtt

SEQ ID NO: 4669080 - DNA, 25 bp, Homo sapien
tgagcttgttcagacccttacaagg

SEQ ID NO: 4669081 - DNA, 25 bp, Homo sapien
cacctggcagtagagtgtcccatca

SEQ ID NO: 4669082 - DNA, 25 bp, Homo sapien
tatcttacgtagaaggtcactgagc

SEQ ID NO: 4669083 - DNA, 25 bp, Homo sapien
cccacagaagggtaatgaaacaaag

SEQ ID NO: 4669084 - DNA, 25 bp, Homo sapien
ccacagaagggtaatgaaacaaagc

SEQ ID NO: 4669085 - DNA, 25 bp, Homo sapien
cacagaagggtaatgaaacaaagca

SEQ ID NO: 4669086 - DNA, 25 bp, Homo sapien
gtgtgtgccacctcaaactagatga

SEQ ID NO: 4669087 - DNA, 25 bp, Homo sapien
agggatatactctcaatggaaggca

SEQ ID NO: 4669088 - DNA, 25 bp, Homo sapien
aggatctgacactgccccatgaagc

SEQ ID NO: 4669089 - DNA, 25 bp, Homo sapien
tatgtatgtaccctggaagacacag

SEQ ID NO: 4669090 - DNA, 25 bp, Homo sapien
ttccctgagctctgacacttttaca

SEQ ID NO: 4669091 - DNA, 25 bp, Homo sapien
tttccctgagctctgacacttttac

SEQ ID NO: 4669092 - DNA, 25 bp, Homo sapien
tccctgagctctgacacttttacag

SEQ ID NO: 4669093 - DNA, 25 bp, Homo sapien
aggtcactttagagcaggcagcaca

SEQ ID NO: 4669094 - DNA, 25 bp, Homo sapien
gcagcacacttgaatatctgcaggg

SEQ ID NO: 4669095 - DNA, 25 bp, Homo sapien
ggaggtcactttagagcaggcagca

SEQ ID NO: 4669096 - DNA, 25 bp, Homo sapien
gcaggcagcacacttgaatatctgc

SEQ ID NO: 4669097 - DNA, 25 bp, Homo sapien
tggtaccaagatagacagcaagcaa

SEQ ID NO: 4669098 - DNA, 25 bp, Homo sapien
taataacgacaatcacagttcctgg

SEQ ID NO: 4669099 - DNA, 25 bp, Homo sapien
tactcctttatgagccagggcttac

SEQ ID NO: 4669100 - DNA, 25 bp, Homo sapien
ccgtacaatacttctgcatgacagg

SEQ ID NO: 4669101 - DNA, 25 bp, Homo sapien
tccacatgccaatagattgtggaag

SEQ ID NO: 4669102 - DNA, 25 bp, Homo sapien
aaacagaatctcttaaccacagcac

SEQ ID NO: 4669103 - DNA, 25 bp, Homo sapien
tacagtccgagcaattcaaaacaga

SEQ ID NO: 4669104 - DNA, 25 bp, Homo sapien
tgtggaagatctgctaaacagcact

SEQ ID NO: 4669105 - DNA, 25 bp, Homo sapien
gagaaagcgctcgtatggtccacca

SEQ ID NO: 4669106 - DNA, 25 bp, Homo sapien
tatgtggcgctcttcagacacgctg

SEQ ID NO: 4669107 - DNA, 25 bp, Homo sapien
aaataaacatgtgcgatccctctgg

SEQ ID NO: 4669108 - DNA, 25 bp, Homo sapien
gcgattaatactgcgatgagggtca

SEQ ID NO: 4669109 - DNA, 25 bp, Homo sapien
tatgttgactaattcgtgtttgcca

SEQ ID NO: 4669110 - DNA, 25 bp, Homo sapien
tgccataatccagctcatacacaga

SEQ ID NO: 4669111 - DNA, 25 bp, Homo sapien
cgtgtttgccataatccagctcata

SEQ ID NO: 4669112 - DNA, 25 bp, Homo sapien
cagataccagtccattggtcaggat

SEQ ID NO: 4669113 - DNA, 25 bp, Homo sapien
ctgtgactgcttggaagggcagctt

SEQ ID NO: 4669114 - DNA, 25 bp, Homo sapien
caagttgagctgtgactgcttggaa

SEQ ID NO: 4669115 - DNA, 25 bp, Homo sapien
tgcttggaagggcagctttcggaac

SEQ ID NO: 4669116 - DNA, 25 bp, Homo sapien
cttggaagggcagctttcggaacat

SEQ ID NO: 4669117 - DNA, 25 bp, Homo sapien
caacgatgtgtccactaagtagacc

SEQ ID NO: 4669118 - DNA, 25 bp, Homo sapien
tgatttcgaaacaccatagaagcct

SEQ ID NO: 4669119 - DNA, 25 bp, Homo sapien
tcccaagggttagcattttcaatga

SEQ ID NO: 4669120 - DNA, 25 bp, Homo sapien
tccaggtatcggtgtctggcaacga

SEQ ID NO: 4669121 - DNA, 25 bp, Homo sapien
ttaattaacttttgaaagctctatc

SEQ ID NO: 4669122 - DNA, 25 bp, Homo sapien
aacttttgaaagctctatcagatac

SEQ ID NO: 4669123 - DNA, 25 bp, Homo sapien
aattaacttttgaaagctctatcag

SEQ ID NO: 4669124 - DNA, 25 bp, Homo sapien
ttaacttttgaaagctctatcagat

SEQ ID NO: 4669125 - DNA, 25 bp, Homo sapien
aaaaatctgaattagttgtcaaggt

SEQ ID NO: 4669126 - DNA, 25 bp, Homo sapien
tattcttttcaatcccccacagcag

SEQ ID NO: 4669127 - DNA, 25 bp, Homo sapien
gcagtcagagccatgtagcagagtt

SEQ ID NO: 4669128 - DNA, 25 bp, Homo sapien
cagcagtcagagccatgtagcagag

SEQ ID NO: 4669129 - DNA, 25 bp, Homo sapien
cgggcggcgggcagatggacgcggg

SEQ ID NO: 4669130 - DNA, 25 bp, Homo sapien
cgggcagatggacgcgggcggaggc

SEQ ID NO: 4669131 - DNA, 25 bp, Homo sapien
gcggacgcgggctgcggaacaggcg

SEQ ID NO: 4669132 - DNA, 25 bp, Homo sapien
cggacgcgggctgcggaacaggcgc

SEQ ID NO: 4669133 - DNA, 25 bp, Homo sapien
attcagacacggaggagcttgggcc

SEQ ID NO: 4669134 - DNA, 25 bp, Homo sapien
tatccgacggccttagtgagtccca

SEQ ID NO: 4669135 - DNA, 25 bp, Homo sapien
gttggaggacgcatcataggcccga

SEQ ID NO: 4669136 - DNA, 25 bp, Homo sapien
gatatagaccgggaaactgtggcca

SEQ ID NO: 4669137 - DNA, 25 bp, Homo sapien
gagaagtagcttgaggcccggtctt

SEQ ID NO: 4669138 - DNA, 25 bp, Homo sapien
gcccggtcttagaggctaatgaatc

SEQ ID NO: 4669139 - DNA, 25 bp, Homo sapien
cagagatacatcattgggtggttcc

SEQ ID NO: 4669140 - DNA, 25 bp, Homo sapien
cactgaaggccgaaagaacagcagg

SEQ ID NO: 4669141 - DNA, 25 bp, Homo sapien
tgcacacttctgagtggttttgatg

SEQ ID NO: 4669142 - DNA, 25 bp, Homo sapien
acacttctgagtggttttgatgtct

SEQ ID NO: 4669143 - DNA, 25 bp, Homo sapien
tcaggtgtctcaggttcccatccca

SEQ ID NO: 4669144 - DNA, 25 bp, Homo sapien
cacacttctgagtggttttgatgtc

SEQ ID NO: 4669145 - DNA, 25 bp, Homo sapien
gatggcagagccctagatgaggtct

SEQ ID NO: 4669146 - DNA, 25 bp, Homo sapien
tagagaccagctattgttaacagac

SEQ ID NO: 4669147 - DNA, 25 bp, Homo sapien
taagccgggaagtagtgagcacctg

SEQ ID NO: 4669148 - DNA, 25 bp, Homo sapien
cacctgtctctataggctgtgagca

SEQ ID NO: 4669149 - DNA, 25 bp, Homo sapien
tgagattcacctgtgctactgtgtg

SEQ ID NO: 4669150 - DNA, 25 bp, Homo sapien
aacagtttgttctttctcattgatg

SEQ ID NO: 4669151 - DNA, 25 bp, Homo sapien
tgctaggtcatagagtgggcatatg

SEQ ID NO: 4669152 - DNA, 25 bp, Homo sapien
caacaatgtatgatagttccagctg

SEQ ID NO: 4669153 - DNA, 25 bp, Homo sapien
acattcctgttgttgtgcaaccgtc

SEQ ID NO: 4669154 - DNA, 25 bp, Homo sapien
tagttgcacagttctgcggcattaa

SEQ ID NO: 4669155 - DNA, 25 bp, Homo sapien
ttgcacagttctgcggcattaagta

SEQ ID NO: 4669156 - DNA, 25 bp, Homo sapien
atttttagttgcacagttctgcggc

SEQ ID NO: 4669157 - DNA, 25 bp, Homo sapien
ccttgatgacgcattattcttggcc

SEQ ID NO: 4669158 - DNA, 25 bp, Homo sapien
tcccactccttgcagcgaagctctc

SEQ ID NO: 4669159 - DNA, 25 bp, Homo sapien
tcctttctgaatcctcccaggtctc

SEQ ID NO: 4669160 - DNA, 25 bp, Homo sapien
tattcttggcccacctgtttctctg

SEQ ID NO: 4669161 - DNA, 25 bp, Homo sapien
cattcacaggtgcagcttttttggg

SEQ ID NO: 4669162 - DNA, 25 bp, Homo sapien
gggacagcttgtgctgcccatgaga

SEQ ID NO: 4669163 - DNA, 25 bp, Homo sapien
cataataacatggaactgggacagg

SEQ ID NO: 4669164 - DNA, 25 bp, Homo sapien
tagggcttccctaaggaccttatca

SEQ ID NO: 4669165 - DNA, 25 bp, Homo sapien
gccaacaggagatctcaggctctga

SEQ ID NO: 4669166 - DNA, 25 bp, Homo sapien
tggtttttaaactatgccaacagga

SEQ ID NO: 4669167 - DNA, 25 bp, Homo sapien
tggctggtttttaaactatgccaac

SEQ ID NO: 4669168 - DNA, 25 bp, Homo sapien
tttttaaactatgccaacaggagat

SEQ ID NO: 4669169 - DNA, 25 bp, Homo sapien
tgctctggtatcgacgaaaaaacct

SEQ ID NO: 4669170 - DNA, 25 bp, Homo sapien
acagctgacagtgctctggtatcga

SEQ ID NO: 4669171 - DNA, 25 bp, Homo sapien
ttggcttttcctaagtgaagccagg

SEQ ID NO: 4669172 - DNA, 25 bp, Homo sapien
gacagtgctctggtatcgacgaaaa

SEQ ID NO: 4669173 - DNA, 25 bp, Homo sapien
tgtctgtgtctcctgaatttctgtg

SEQ ID NO: 4669174 - DNA, 25 bp, Homo sapien
ctgtgtctcctgaatttctgtgctg

SEQ ID NO: 4669175 - DNA, 25 bp, Homo sapien
cgtggaagaacttgtctgtgtctcc

SEQ ID NO: 4669176 - DNA, 25 bp, Homo sapien
tgtctcctgaatttctgtgctgagt

SEQ ID NO: 4669177 - DNA, 25 bp, Homo sapien
atccaggtcacggtatttctctagt

SEQ ID NO: 4669178 - DNA, 25 bp, Homo sapien
tctctagttctcgtctgtacgacat

SEQ ID NO: 4669179 - DNA, 25 bp, Homo sapien
ggtcacggtatttctctagttctcg

SEQ ID NO: 4669180 - DNA, 25 bp, Homo sapien
ggtatttctctagttctcgtctgta

SEQ ID NO: 4669181 - DNA, 25 bp, Homo sapien
tcagcaagttgagccccaggtgctc

SEQ ID NO: 4669182 - DNA, 25 bp, Homo sapien
tttgaaatccgagtctccgtgcctg

SEQ ID NO: 4669183 - DNA, 25 bp, Homo sapien
tgggtcctgcgaccgtcagcaagtt

SEQ ID NO: 4669184 - DNA, 25 bp, Homo sapien
tgtccctccagtagcacaagtggag

SEQ ID NO: 4669185 - DNA, 25 bp, Homo sapien
agctgctgtccccaattgggttttg

SEQ ID NO: 4669186 - DNA, 25 bp, Homo sapien
tattatgaaagatgtcagagttggg

SEQ ID NO: 4669187 - DNA, 25 bp, Homo sapien
ccattggcttttccacccagctgct

SEQ ID NO: 4669188 - DNA, 25 bp, Homo sapien
gggagagggacatattatgaaagat

SEQ ID NO: 4669189 - DNA, 25 bp, Homo sapien
gaagtcatacgctggaccgagagcc

SEQ ID NO: 4669190 - DNA, 25 bp, Homo sapien
ttgaagtcatacgctggaccgagag

SEQ ID NO: 4669191 - DNA, 25 bp, Homo sapien
tcccacctgactgccgtcctctggg

SEQ ID NO: 4669192 - DNA, 25 bp, Homo sapien
gaccgagagcccaggactcttgact

SEQ ID NO: 4669193 - DNA, 25 bp, Homo sapien
cccctgtgtaggggaccagatcttc

SEQ ID NO: 4669194 - DNA, 25 bp, Homo sapien
cttgcttttccaagtgatccaagag

SEQ ID NO: 4669195 - DNA, 25 bp, Homo sapien
cgtgggcgccttggtggtctgatcc

SEQ ID NO: 4669196 - DNA, 25 bp, Homo sapien
gaccagatcttctcggtccttaaac

SEQ ID NO: 4669197 - DNA, 25 bp, Homo sapien
gataggagtctttcctcagtctacc

SEQ ID NO: 4669198 - DNA, 25 bp, Homo sapien
tgctgatttgagtggataggagtct

SEQ ID NO: 4669199 - DNA, 25 bp, Homo sapien
aataatcaggacatcctagtgaaag

SEQ ID NO: 4669200 - DNA, 25 bp, Homo sapien
caaagtcctgatgtcgttattaaca

SEQ ID NO: 4669201 - DNA, 25 bp, Homo sapien
tccctcacaccatcctccaggtcct

SEQ ID NO: 4669202 - DNA, 25 bp, Homo sapien
ccttccccatccctcacaccatcct

SEQ ID NO: 4669203 - DNA, 25 bp, Homo sapien
cgttcagactcccttccccatccct

SEQ ID NO: 4669204 - DNA, 25 bp, Homo sapien
ttccccatccctcacaccatcctcc

SEQ ID NO: 4669205 - DNA, 25 bp, Homo sapien
cagctctgcccagtccagagctgga

SEQ ID NO: 4669206 - DNA, 25 bp, Homo sapien
ggaggagtggcaggactgatttctg

SEQ ID NO: 4669207 - DNA, 25 bp, Homo sapien
ggagtggcaggactgatttctgtac

SEQ ID NO: 4669208 - DNA, 25 bp, Homo sapien
ctagagagctttccccagctctgcc

SEQ ID NO: 4669209 - DNA, 25 bp, Homo sapien
agtggcttctgcttaggaacccaga

SEQ ID NO: 4669210 - DNA, 25 bp, Homo sapien
ttctgcttaggaacccagacctttc

SEQ ID NO: 4669211 - DNA, 25 bp, Homo sapien
tctgcatctgaagcatttgccaagg

SEQ ID NO: 4669212 - DNA, 25 bp, Homo sapien
ggttccagcgtcacactttccagca

SEQ ID NO: 4669213 - DNA, 25 bp, Homo sapien
ctgtggggatggaacaccacagcag

SEQ ID NO: 4669214 - DNA, 25 bp, Homo sapien
tgtggggatggaacaccacagcagt

SEQ ID NO: 4669215 - DNA, 25 bp, Homo sapien
gggatggaacaccacagcagtggga

SEQ ID NO: 4669216 - DNA, 25 bp, Homo sapien
atggaacaccacagcagtgggacag

SEQ ID NO: 4669217 - DNA, 25 bp, Homo sapien
agtgcacaaggtgccggatgtggcc

SEQ ID NO: 4669218 - DNA, 25 bp, Homo sapien
agagagcacagtaggtggggaggga

SEQ ID NO: 4669219 - DNA, 25 bp, Homo sapien
gcacaaggtgccggatgtggccaga

SEQ ID NO: 4669220 - DNA, 25 bp, Homo sapien
tgcacaaggtgccggatgtggccag

SEQ ID NO: 4669221 - DNA, 25 bp, Homo sapien
tcatttgataatccctttgagctgc

SEQ ID NO: 4669222 - DNA, 25 bp, Homo sapien
gtcatttgataatccctttgagctg

SEQ ID NO: 4669223 - DNA, 25 bp, Homo sapien
cggcagtcatttgataatccctttg

SEQ ID NO: 4669224 - DNA, 25 bp, Homo sapien
cacagaaacgtagcacagagttgca

SEQ ID NO: 4669225 - DNA, 25 bp, Homo sapien
cagacttcggcagcatattgcgtcg

SEQ ID NO: 4669226 - DNA, 25 bp, Homo sapien
ggtggtcaaaagtgttcagtccctc

SEQ ID NO: 4669227 - DNA, 25 bp, Homo sapien
caaatgacaggcatccaaggttagc

SEQ ID NO: 4669228 - DNA, 25 bp, Homo sapien
agcacacggaagtagccagaagcca

SEQ ID NO: 4669229 - DNA, 25 bp, Homo sapien
gcctggctaagcctgtctctgatag

SEQ ID NO: 4669230 - DNA, 25 bp, Homo sapien
gcctgtctctgatagctgcaagacc

SEQ ID NO: 4669231 - DNA, 25 bp, Homo sapien
ctaagcacacggaagtagccagaag

SEQ ID NO: 4669232 - DNA, 25 bp, Homo sapien
tcaggacgcagagagataacagcac

SEQ ID NO: 4669233 - DNA, 25 bp, Homo sapien
ggtgggagaaactggctccagccca

SEQ ID NO: 4669234 - DNA, 25 bp, Homo sapien
tgctcctggataagatacaccctgc

SEQ ID NO: 4669235 - DNA, 25 bp, Homo sapien
ccactggcagggtagcaggacaggt

SEQ ID NO: 4669236 - DNA, 25 bp, Homo sapien
ctgccttggcagagttcactcattt

SEQ ID NO: 4669237 - DNA, 25 bp, Homo sapien
cctgccttggcagagttcactcatt

SEQ ID NO: 4669238 - DNA, 25 bp, Homo sapien
tgccttggcagagttcactcatttg

SEQ ID NO: 4669239 - DNA, 25 bp, Homo sapien
gccttggcagagttcactcatttgg

SEQ ID NO: 4669240 - DNA, 25 bp, Homo sapien
gttacacgagactgctgggagacca

SEQ ID NO: 4669241 - DNA, 25 bp, Homo sapien
taatttaggctgcatctacgtgggc

SEQ ID NO: 4669242 - DNA, 25 bp, Homo sapien
tgagagtcgaaaaccacaagatgag

SEQ ID NO: 4669243 - DNA, 25 bp, Homo sapien
tgaatcagatcaccaagaaggagtc

SEQ ID NO: 4669244 - DNA, 25 bp, Homo sapien
gctggcacatccagctcaacgtggc

SEQ ID NO: 4669245 - DNA, 25 bp, Homo sapien
acgtggccaaaccagaatggctctt

SEQ ID NO: 4669246 - DNA, 25 bp, Homo sapien
tttccagtgacagcctctttctttg

SEQ ID NO: 4669247 - DNA, 25 bp, Homo sapien
tttctttggaaggctctctttccat

SEQ ID NO: 4669248 - DNA, 25 bp, Homo sapien
ttgagcccctccttgttcatgatgg

SEQ ID NO: 4669249 - DNA, 25 bp, Homo sapien
tgagcccctccttgttcatgatgga

SEQ ID NO: 4669250 - DNA, 25 bp, Homo sapien
cagggcctggtagtactgctggtta

SEQ ID NO: 4669251 - DNA, 25 bp, Homo sapien
ttactcatgagcgtgtgcatgccca

SEQ ID NO: 4669252 - DNA, 25 bp, Homo sapien
cctctacgtctgttgaatttggttc

SEQ ID NO: 4669253 - DNA, 25 bp, Homo sapien
tcgttgttctttatccgttccagcg

SEQ ID NO: 4669254 - DNA, 25 bp, Homo sapien
ccggatattattgaggttaacttct

SEQ ID NO: 4669255 - DNA, 25 bp, Homo sapien
ttggttcttcgtcgggcacaggctt

SEQ ID NO: 4669256 - DNA, 25 bp, Homo sapien
gtcattactccgtgtccccacgatg

SEQ ID NO: 4669257 - DNA, 25 bp, Homo sapien
attactccgtgtccccacgatgctg

SEQ ID NO: 4669258 - DNA, 25 bp, Homo sapien
gggtcattactccgtgtccccacga

SEQ ID NO: 4669259 - DNA, 25 bp, Homo sapien
gccacggggtcattactccgtgtcc

SEQ ID NO: 4669260 - DNA, 25 bp, Homo sapien
catagtagcatacagggcatgtggc

SEQ ID NO: 4669261 - DNA, 25 bp, Homo sapien
ggatgtgcttggtttctgacccatg

SEQ ID NO: 4669262 - DNA, 25 bp, Homo sapien
catgacatagtagcatacagggcat

SEQ ID NO: 4669263 - DNA, 25 bp, Homo sapien
ggccagaatggatgtgcttggtttc

SEQ ID NO: 4669264 - DNA, 25 bp, Homo sapien
ctgagaggctagctcccaggaagcc

SEQ ID NO: 4669265 - DNA, 25 bp, Homo sapien
ccccgggatggcatgtcagctttct

SEQ ID NO: 4669266 - DNA, 25 bp, Homo sapien
agtgcccttcacttcagtgtgcccc

SEQ ID NO: 4669267 - DNA, 25 bp, Homo sapien
tgttttgaaatcatcgccccctcct

SEQ ID NO: 4669268 - DNA, 25 bp, Homo sapien
ccagaaatgaagttggattccacat

SEQ ID NO: 4669269 - DNA, 25 bp, Homo sapien
ttctaccaggcgcagaatcccagct

SEQ ID NO: 4669270 - DNA, 25 bp, Homo sapien
cattcagtgtcttcaacaccttgtt

SEQ ID NO: 4669271 - DNA, 25 bp, Homo sapien
agtgttgtatgggagggcttctacc

SEQ ID NO: 4669272 - DNA, 25 bp, Homo sapien
ctgaggagaccgttgcccatctcac

SEQ ID NO: 4669273 - DNA, 25 bp, Homo sapien
gataaaatgattgacccacagaagt

SEQ ID NO: 4669274 - DNA, 25 bp, Homo sapien
ctgatgatacccacattctgtaggg

SEQ ID NO: 4669275 - DNA, 25 bp, Homo sapien
catgctgcagtggaataagtgtgag

SEQ ID NO: 4669276 - DNA, 25 bp, Homo sapien
agagctgaaagagttgccccgcaga

SEQ ID NO: 4669277 - DNA, 25 bp, Homo sapien
ctgctgcatgcctttgttccatctg

SEQ ID NO: 4669278 - DNA, 25 bp, Homo sapien
ggctgggattcacatgagtagccaa

SEQ ID NO: 4669279 - DNA, 25 bp, Homo sapien
tgggattcacatgagtagccaatcc

SEQ ID NO: 4669280 - DNA, 25 bp, Homo sapien
gattcacatgagtagccaatcccag

SEQ ID NO: 4669281 - DNA, 25 bp, Homo sapien
ttccctggccgtataaggagaaaga

SEQ ID NO: 4669282 - DNA, 25 bp, Homo sapien
aactgtgtcctgagccagctccgtg

SEQ ID NO: 4669283 - DNA, 25 bp, Homo sapien
tgagccagctccgtgtcaccctggg

SEQ ID NO: 4669284 - DNA, 25 bp, Homo sapien
ctgggcagaactccccaagtccctt

SEQ ID NO: 4669285 - DNA, 25 bp, Homo sapien
gcgggttgccactgcgttatccggc

SEQ ID NO: 4669286 - DNA, 25 bp, Homo sapien
agctttgctagttatgtgtccggaa

SEQ ID NO: 4669287 - DNA, 25 bp, Homo sapien
ttgccactgcgttatccggcagcct

SEQ ID NO: 4669288 - DNA, 25 bp, Homo sapien
aaagtttccacagtgcggaagtgga

SEQ ID NO: 4669289 - DNA, 25 bp, Homo sapien
tcagactgggctcagaaagctggcc

SEQ ID NO: 4669290 - DNA, 25 bp, Homo sapien
tccttggaggactcagcacagccct

SEQ ID NO: 4669291 - DNA, 25 bp, Homo sapien
tgggaagaggtcaggtcggtccttg

SEQ ID NO: 4669292 - DNA, 25 bp, Homo sapien
cagagggacactggtgaaattccac

SEQ ID NO: 4669293 - DNA, 25 bp, Homo sapien
tcgagaactacgtgaagaatgcaga

SEQ ID NO: 4669294 - DNA, 25 bp, Homo sapien
tggagctgaaaaccaaggctcgaga

SEQ ID NO: 4669295 - DNA, 25 bp, Homo sapien
acgtgaagaatgcagaagcctcagg

SEQ ID NO: 4669296 - DNA, 25 bp, Homo sapien
aaccaaggctcgagaactacgtgaa

SEQ ID NO: 4669297 - DNA, 25 bp, Homo sapien
gagaagttgaaaggtcacacggcca

SEQ ID NO: 4669298 - DNA, 25 bp, Homo sapien
cattcaatcatctagtcctaaggag

SEQ ID NO: 4669299 - DNA, 25 bp, Homo sapien
gcaggtgcccaagtaagagctccac

SEQ ID NO: 4669300 - DNA, 25 bp, Homo sapien
tagcctcctctccaagagtagggaa

SEQ ID NO: 4669301 - DNA, 25 bp, Homo sapien
gttcatcattgcgttggatgcccga

SEQ ID NO: 4669302 - DNA, 25 bp, Homo sapien
tcattgcgttggatgcccgaagccg

SEQ ID NO: 4669303 - DNA, 25 bp, Homo sapien
ccttgctgggtaaagtggtagccga

SEQ ID NO: 4669304 - DNA, 25 bp, Homo sapien
ccgaatttgagaagtgttgcgtttt

SEQ ID NO: 4669305 - DNA, 25 bp, Homo sapien
gaagaggaaaatactcccggcgaga

SEQ ID NO: 4669306 - DNA, 25 bp, Homo sapien
gcttgtgaacaaccggcatctgcaa

SEQ ID NO: 4669307 - DNA, 25 bp, Homo sapien
acacttaagtgtgctctgggcccag

SEQ ID NO: 4669308 - DNA, 25 bp, Homo sapien
caatgtgaagtctcctaggctcaga

SEQ ID NO: 4669309 - DNA, 25 bp, Homo sapien
gaagtattagagatgccctggcagc

SEQ ID NO: 4669310 - DNA, 25 bp, Homo sapien
gagatgtcaagagacgacctcctga

SEQ ID NO: 4669311 - DNA, 25 bp, Homo sapien
tcccaggtggcaactaacaggtcag

SEQ ID NO: 4669312 - DNA, 25 bp, Homo sapien
tgaatgccagaagggctctccagtc

SEQ ID NO: 4669313 - DNA, 25 bp, Homo sapien
agacaccactccggcacttgggaat

SEQ ID NO: 4669314 - DNA, 25 bp, Homo sapien
ctagacaccactccggcacttggga

SEQ ID NO: 4669315 - DNA, 25 bp, Homo sapien
gacaccactccggcacttgggaatg

SEQ ID NO: 4669316 - DNA, 25 bp, Homo sapien
acaccactccggcacttgggaatga

SEQ ID NO: 4669317 - DNA, 25 bp, Homo sapien
gaagagtgtgccgtttctgtgtcac

SEQ ID NO: 4669318 - DNA, 25 bp, Homo sapien
caggtcatcaatagaacacatccag

SEQ ID NO: 4669319 - DNA, 25 bp, Homo sapien
acacagcaaggccattgaaactggg

SEQ ID NO: 4669320 - DNA, 25 bp, Homo sapien
cagttcaaaggcatggactccaccg

SEQ ID NO: 4669321 - DNA, 25 bp, Homo sapien
tatacaggcgtaaggtcagcagcaa

SEQ ID NO: 4669322 - DNA, 25 bp, Homo sapien
gatcccaagagacgcacatgatgtt

SEQ ID NO: 4669323 - DNA, 25 bp, Homo sapien
tgaagtctctaagctgggccattac

SEQ ID NO: 4669324 - DNA, 25 bp, Homo sapien
ttacagttcagtgcgcaggccttca

SEQ ID NO: 4669325 - DNA, 25 bp, Homo sapien
taaatcagccctccatgtacgcagg

SEQ ID NO: 4669326 - DNA, 25 bp, Homo sapien
gagccacagtttttagatcagcacc

SEQ ID NO: 4669327 - DNA, 25 bp, Homo sapien
gagtgttcatactgtggagcccgct

SEQ ID NO: 4669328 - DNA, 25 bp, Homo sapien
tcttgcagcatgtgcgacagcctgt

SEQ ID NO: 4669329 - DNA, 25 bp, Homo sapien
atgagcctgcctttgacatgtatca

SEQ ID NO: 4669330 - DNA, 25 bp, Homo sapien
tgaattaaaggcatccaggcacata

SEQ ID NO: 4669331 - DNA, 25 bp, Homo sapien
tggccacatggatctcctcccagta

SEQ ID NO: 4669332 - DNA, 25 bp, Homo sapien
tactttgtgactcccatgagcctgc

SEQ ID NO: 4669333 - DNA, 25 bp, Homo sapien
gatcctggccttgaaaaactcacca

SEQ ID NO: 4669334 - DNA, 25 bp, Homo sapien
aaactatactaatagcctcctgttg

SEQ ID NO: 4669335 - DNA, 25 bp, Homo sapien
tatcaggtttttattgccagataca

SEQ ID NO: 4669336 - DNA, 25 bp, Homo sapien
aattccagaggacaaatttctgact

SEQ ID NO: 4669337 - DNA, 25 bp, Homo sapien
tgcaagggtctaaataccaggaggc

SEQ ID NO: 4669338 - DNA, 25 bp, Homo sapien
tctaggagagaactatgcaagggtc

SEQ ID NO: 4669339 - DNA, 25 bp, Homo sapien
ggatcttaactacttgcaacagcta

SEQ ID NO: 4669340 - DNA, 25 bp, Homo sapien
tattggtcacgtagactaacctcag

SEQ ID NO: 4669341 - DNA, 25 bp, Homo sapien
gtgacttagtcttatatcctgagaa

SEQ ID NO: 4669342 - DNA, 25 bp, Homo sapien
cataaaactagaagcccctgtggaa

SEQ ID NO: 4669343 - DNA, 25 bp, Homo sapien
gtgagacttctattagccataaacc

SEQ ID NO: 4669344 - DNA, 25 bp, Homo sapien
gaaatctaattgcaggcctttgccc

SEQ ID NO: 4669345 - DNA, 25 bp, Homo sapien
tccgggcttgccggctggccgtcat

SEQ ID NO: 4669346 - DNA, 25 bp, Homo sapien
ccttggtatggaaaggccggccctg

SEQ ID NO: 4669347 - DNA, 25 bp, Homo sapien
cctgacgcgagcgtgcggctccggg

SEQ ID NO: 4669348 - DNA, 25 bp, Homo sapien
ttggtatggaaaggccggccctgac

SEQ ID NO: 4669349 - DNA, 25 bp, Homo sapien
acttccggagcttggtgacgtcacg

SEQ ID NO: 4669350 - DNA, 25 bp, Homo sapien
gcggtaagcgctgcaggaactgtct

SEQ ID NO: 4669351 - DNA, 25 bp, Homo sapien
tcagtgggctacgaacgtctggcac

SEQ ID NO: 4669352 - DNA, 25 bp, Homo sapien
cagtgacaattgctaggcggagaca

SEQ ID NO: 4669353 - DNA, 25 bp, Homo sapien
cgtcgttctcgtcgctgtgccgccg

SEQ ID NO: 4669354 - DNA, 25 bp, Homo sapien
cgtcgctgtgccgccgccgcgacat

SEQ ID NO: 4669355 - DNA, 25 bp, Homo sapien
tcgttctcgtcgctgtgccgccgcc

SEQ ID NO: 4669356 - DNA, 25 bp, Homo sapien
ctcgtcgctgtgccgccgccgcgac

SEQ ID NO: 4669357 - DNA, 25 bp, Homo sapien
ggagcggcctccgtggccgggccgc

SEQ ID NO: 4669358 - DNA, 25 bp, Homo sapien
tctatggtagttcccaaggcaagaa

SEQ ID NO: 4669359 - DNA, 25 bp, Homo sapien
cactcagacagacttggctagtata

SEQ ID NO: 4669360 - DNA, 25 bp, Homo sapien
gaattcgctcaatgtaccctgaaga

SEQ ID NO: 4669361 - DNA, 25 bp, Homo sapien
cctgaagaaaacgtatctatggtag

SEQ ID NO: 4669362 - DNA, 25 bp, Homo sapien
attaaagattccaaatgatcttcag

SEQ ID NO: 4669363 - DNA, 25 bp, Homo sapien
tttacatattaaagattccaaatga

SEQ ID NO: 4669364 - DNA, 25 bp, Homo sapien
catattaaagattccaaatgatctt

SEQ ID NO: 4669365 - DNA, 25 bp, Homo sapien
ttcatttgcatcagaggtctttctc

SEQ ID NO: 4669366 - DNA, 25 bp, Homo sapien
ctcttgtagttaggaagatcagctt

SEQ ID NO: 4669367 - DNA, 25 bp, Homo sapien
caagccttctaggttgctctccaaa

SEQ ID NO: 4669368 - DNA, 25 bp, Homo sapien
accagccaagccttctaggttgctc

SEQ ID NO: 4669369 - DNA, 25 bp, Homo sapien
tacaaagaagccttaagatcttgct

SEQ ID NO: 4669370 - DNA, 25 bp, Homo sapien
gattcataaatcttttgcatacata

SEQ ID NO: 4669371 - DNA, 25 bp, Homo sapien
ggattcataaatcttttgcatacat

SEQ ID NO: 4669372 - DNA, 25 bp, Homo sapien
attcataaatcttttgcatacatac

SEQ ID NO: 4669373 - DNA, 25 bp, Homo sapien
ctggattcataaatcttttgcatac

SEQ ID NO: 4669374 - DNA, 25 bp, Homo sapien
gcattcagtagtccaactaatgttg

SEQ ID NO: 4669375 - DNA, 25 bp, Homo sapien
caaatacacggcttcattataattg

SEQ ID NO: 4669376 - DNA, 25 bp, Homo sapien
cagcttctcaggtaataggcgtgca

SEQ ID NO: 4669377 - DNA, 25 bp, Homo sapien
ttctttaagttgacgaatcatggct

SEQ ID NO: 4669378 - DNA, 25 bp, Homo sapien
cttcttcctgagttacgcttacaaa

SEQ ID NO: 4669379 - DNA, 25 bp, Homo sapien
tcacaagatcagataaaaaacggac

SEQ ID NO: 4669380 - DNA, 25 bp, Homo sapien
ttgatggggcggcaatcacatgaca

SEQ ID NO: 4669381 - DNA, 25 bp, Homo sapien
tgagttacgcttacaaaattttcaa

SEQ ID NO: 4669382 - DNA, 25 bp, Homo sapien
gatgacagaaatgcatacacatacc

SEQ ID NO: 4669383 - DNA, 25 bp, Homo sapien
gcatctttcttttcgtacaactcct

SEQ ID NO: 4669384 - DNA, 25 bp, Homo sapien
tacaactcctttccaacccagggca

SEQ ID NO: 4669385 - DNA, 25 bp, Homo sapien
tgttggcaaagatgcggtccatctc

SEQ ID NO: 4669386 - DNA, 25 bp, Homo sapien
tggtttatcagcagtccatacctgt

SEQ ID NO: 4669387 - DNA, 25 bp, Homo sapien
gtaacatgggtacatgagtcttttg

SEQ ID NO: 4669388 - DNA, 25 bp, Homo sapien
tacctgtaacatgggtacatgagtc

SEQ ID NO: 4669389 - DNA, 25 bp, Homo sapien
gcagtccatacctgtaacatgggta

SEQ ID NO: 4669390 - DNA, 25 bp, Homo sapien
gataaggtcttaggatgtgccgttc

SEQ ID NO: 4669391 - DNA, 25 bp, Homo sapien
gttcctgccagcgatcctttttcaa

SEQ ID NO: 4669392 - DNA, 25 bp, Homo sapien
acacaggatgctgtcaaaggcaaga

SEQ ID NO: 4669393 - DNA, 25 bp, Homo sapien
ccttggcattgggtacactgaatct

SEQ ID NO: 4669394 - DNA, 25 bp, Homo sapien
cttccagtgggacttaatgatgcag

SEQ ID NO: 4669395 - DNA, 25 bp, Homo sapien
tgcagtgaagattctcttctattac

SEQ ID NO: 4669396 - DNA, 25 bp, Homo sapien
ccagtgggacttaatgatgcagtga

SEQ ID NO: 4669397 - DNA, 25 bp, Homo sapien
tccttccagtgggacttaatgatgc

SEQ ID NO: 4669398 - DNA, 25 bp, Homo sapien
ttcaaggggatcttgttcttccctg

SEQ ID NO: 4669399 - DNA, 25 bp, Homo sapien
tcttccctggatagctcactaactg

SEQ ID NO: 4669400 - DNA, 25 bp, Homo sapien
tggatagctcactaactgtgcagca

SEQ ID NO: 4669401 - DNA, 25 bp, Homo sapien
tcaactatgtggtagttcaagggga

SEQ ID NO: 4669402 - DNA, 25 bp, Homo sapien
caattcaatccaactgctatctttg

SEQ ID NO: 4669403 - DNA, 25 bp, Homo sapien
gcacttctattagaaagaccttaac

SEQ ID NO: 4669404 - DNA, 25 bp, Homo sapien
gctatctttgcacttctattagaaa

SEQ ID NO: 4669405 - DNA, 25 bp, Homo sapien
caaaagaatcatgagtcacaattca

SEQ ID NO: 4669406 - DNA, 25 bp, Homo sapien
gggtgctggaagttgaaacagctct

SEQ ID NO: 4669407 - DNA, 25 bp, Homo sapien
tgtgtacatcacatcaatgtgaggg

SEQ ID NO: 4669408 - DNA, 25 bp, Homo sapien
gtgctggaagttgaaacagctctgc

SEQ ID NO: 4669409 - DNA, 25 bp, Homo sapien
caatgaggagtgttgtgtacatcac

SEQ ID NO: 4669410 - DNA, 25 bp, Homo sapien
tgaactccctgacccaaatagtgaa

SEQ ID NO: 4669411 - DNA, 25 bp, Homo sapien
tgaatctgacctgcatacactcgtg

SEQ ID NO: 4669412 - DNA, 25 bp, Homo sapien
cactgctgaatgacaacgaaggatt

SEQ ID NO: 4669413 - DNA, 25 bp, Homo sapien
tccatacgcacaggcatacattgtt

SEQ ID NO: 4669414 - DNA, 25 bp, Homo sapien
ctgtctacacaggtagtgttcattg

SEQ ID NO: 4669415 - DNA, 25 bp, Homo sapien
gtgttcattgtgtccaaacgcatgt

SEQ ID NO: 4669416 - DNA, 25 bp, Homo sapien
gttcattgtgtccaaacgcatgtat

SEQ ID NO: 4669417 - DNA, 25 bp, Homo sapien
gtctacacaggtagtgttcattgtg

SEQ ID NO: 4669418 - DNA, 25 bp, Homo sapien
tcccagctccaacggaactggaagt

SEQ ID NO: 4669419 - DNA, 25 bp, Homo sapien
aatcttcccagctccaacggaactg

SEQ ID NO: 4669420 - DNA, 25 bp, Homo sapien
cagctccaacggaactggaagttac

SEQ ID NO: 4669421 - DNA, 25 bp, Homo sapien
ctggaagttacttagatgatgagaa

SEQ ID NO: 4669422 - DNA, 25 bp, Homo sapien
tctagaacttctcttacaaacttcg

SEQ ID NO: 4669423 - DNA, 25 bp, Homo sapien
ctagaacttctcttacaaacttcgg

SEQ ID NO: 4669424 - DNA, 25 bp, Homo sapien
aggatcttgactaagacaatctgac

SEQ ID NO: 4669425 - DNA, 25 bp, Homo sapien
tgggactttcaggatcttgactaag

SEQ ID NO: 4669426 - DNA, 25 bp, Homo sapien
taatatacgctgatggtaagacaac

SEQ ID NO: 4669427 - DNA, 25 bp, Homo sapien
tctaatatacgctgatggtaagaca

SEQ ID NO: 4669428 - DNA, 25 bp, Homo sapien
ggtaggaggaacaatatctaatata

SEQ ID NO: 4669429 - DNA, 25 bp, Homo sapien
caatatctaatatacgctgatggta

SEQ ID NO: 4669430 - DNA, 25 bp, Homo sapien
tgaagtctgagtctcaacaaggtaa

SEQ ID NO: 4669431 - DNA, 25 bp, Homo sapien
tctttcctcgggaccgtggaaatga

SEQ ID NO: 4669432 - DNA, 25 bp, Homo sapien
caacaaggtaatggctgccaacttc

SEQ ID NO: 4669433 - DNA, 25 bp, Homo sapien
ttttttgctgagtccacaagcttga

SEQ ID NO: 4669434 - DNA, 25 bp, Homo sapien
gcaacagaatgtccaggaagagaat

SEQ ID NO: 4669435 - DNA, 25 bp, Homo sapien
gggcaacagaatgtccaggaagaga

SEQ ID NO: 4669436 - DNA, 25 bp, Homo sapien
ctaaacagagggcaacagaatgtcc

SEQ ID NO: 4669437 - DNA, 25 bp, Homo sapien
cagagggcaacagaatgtccaggaa

SEQ ID NO: 4669438 - DNA, 25 bp, Homo sapien
catcatcctggttaggatttggtac

SEQ ID NO: 4669439 - DNA, 25 bp, Homo sapien
cgtcgtcatcatcctggttaggatt

SEQ ID NO: 4669440 - DNA, 25 bp, Homo sapien
gctgaagatttcatcattggttgcc

SEQ ID NO: 4669441 - DNA, 25 bp, Homo sapien
tttggtacatctttcagaatgctga

SEQ ID NO: 4669442 - DNA, 25 bp, Homo sapien
gtgtagcagagtctgtacaaagact

SEQ ID NO: 4669443 - DNA, 25 bp, Homo sapien
tttgcaagagcactgaaggagtggc

SEQ ID NO: 4669444 - DNA, 25 bp, Homo sapien
tttggctgccaagtgtagcagagtc

SEQ ID NO: 4669445 - DNA, 25 bp, Homo sapien
caatgggttaaaactgaatccttca

SEQ ID NO: 4669446 - DNA, 25 bp, Homo sapien
atatgactgtcccaaaaacctaggt

SEQ ID NO: 4669447 - DNA, 25 bp, Homo sapien
gcgtgactcccaacagtgtagctga

SEQ ID NO: 4669448 - DNA, 25 bp, Homo sapien
gatatttagcgtgggaacttccaac

SEQ ID NO: 4669449 - DNA, 25 bp, Homo sapien
cttcagatgccaacctttgcgtgac

SEQ ID NO: 4669450 - DNA, 25 bp, Homo sapien
cctcaaacataactcttagcacatg

SEQ ID NO: 4669451 - DNA, 25 bp, Homo sapien
tccagacctcaaacataactcttag

SEQ ID NO: 4669452 - DNA, 25 bp, Homo sapien
ctgtggatggttcctccagacctca

SEQ ID NO: 4669453 - DNA, 25 bp, Homo sapien
cagctagggttttgaagacttcatg

SEQ ID NO: 4669454 - DNA, 25 bp, Homo sapien
ctggtaaagtcacgagatagttctg

SEQ ID NO: 4669455 - DNA, 25 bp, Homo sapien
gctacggcagcacaatcaactattt

SEQ ID NO: 4669456 - DNA, 25 bp, Homo sapien
tatttgtgtacgaatcatcttatcc

SEQ ID NO: 4669457 - DNA, 25 bp, Homo sapien
gaagagaagatccaatttgctacgg

SEQ ID NO: 4669458 - DNA, 25 bp, Homo sapien
tacgaattgtagagtgcaaaatttc

SEQ ID NO: 4669459 - DNA, 25 bp, Homo sapien
cgaattgtagagtgcaaaatttccc

SEQ ID NO: 4669460 - DNA, 25 bp, Homo sapien
cttacgaattgtagagtgcaaaatt

SEQ ID NO: 4669461 - DNA, 25 bp, Homo sapien
acgaattgtagagtgcaaaatttcc

SEQ ID NO: 4669462 - DNA, 25 bp, Homo sapien
ccgtttgtgttgcctagcaagtttc

SEQ ID NO: 4669463 - DNA, 25 bp, Homo sapien
ctgaaatataacgaggaaaagattc

SEQ ID NO: 4669464 - DNA, 25 bp, Homo sapien
tgtcactgcttctgtcgtcatcatc

SEQ ID NO: 4669465 - DNA, 25 bp, Homo sapien
caagaaccccgtctttcctgtcact

SEQ ID NO: 4669466 - DNA, 25 bp, Homo sapien
cctgaagtcgttctatttgttcctc

SEQ ID NO: 4669467 - DNA, 25 bp, Homo sapien
tgctcggtcaagatcatgataaacc

SEQ ID NO: 4669468 - DNA, 25 bp, Homo sapien
ccatggtgttaatacactggtccca

SEQ ID NO: 4669469 - DNA, 25 bp, Homo sapien
gctgcagcctctctatacagttctt

SEQ ID NO: 4669470 - DNA, 25 bp, Homo sapien
tcgcatcgtactaggtgctcggtca

SEQ ID NO: 4669471 - DNA, 25 bp, Homo sapien
tctttgtggctgagaatagtgttat

SEQ ID NO: 4669472 - DNA, 25 bp, Homo sapien
gagaatagtgttattacctaatcga

SEQ ID NO: 4669473 - DNA, 25 bp, Homo sapien
tagtgttattacctaatcgaagttc

SEQ ID NO: 4669474 - DNA, 25 bp, Homo sapien
tgtggctgagaatagtgttattacc

SEQ ID NO: 4669475 - DNA, 25 bp, Homo sapien
catgtactgctggattatttggtga

SEQ ID NO: 4669476 - DNA, 25 bp, Homo sapien
taattcagcagtgaagagaaggttc

SEQ ID NO: 4669477 - DNA, 25 bp, Homo sapien
tggaacacggccaagatatgagggt

SEQ ID NO: 4669478 - DNA, 25 bp, Homo sapien
cagggtcaccatgtactgctggatt

SEQ ID NO: 4669479 - DNA, 25 bp, Homo sapien
tactgggtagctgggtaaacccatc

SEQ ID NO: 4669480 - DNA, 25 bp, Homo sapien
agtcacattactgccgttaggaagt

SEQ ID NO: 4669481 - DNA, 25 bp, Homo sapien
tcatccccgagctgtgaaaagttat

SEQ ID NO: 4669482 - DNA, 25 bp, Homo sapien
taaggttgacctctagtgtttcaca

SEQ ID NO: 4669483 - DNA, 25 bp, Homo sapien
cgaaaacatttagccaagaacctgg

SEQ ID NO: 4669484 - DNA, 25 bp, Homo sapien
tactatacaggaaacaagctcagga

SEQ ID NO: 4669485 - DNA, 25 bp, Homo sapien
gacaaataaccccaaggctagagga

SEQ ID NO: 4669486 - DNA, 25 bp, Homo sapien
tactgaggatgtctgcgttccaccc

SEQ ID NO: 4669487 - DNA, 25 bp, Homo sapien
aggaagacaaggggctggtcttgcc

SEQ ID NO: 4669488 - DNA, 25 bp, Homo sapien
gctatattcttatgaagctagagaa

SEQ ID NO: 4669489 - DNA, 25 bp, Homo sapien
atgctatattcttatgaagctagag

SEQ ID NO: 4669490 - DNA, 25 bp, Homo sapien
cgcccagcccatatgctatattctt

SEQ ID NO: 4669491 - DNA, 25 bp, Homo sapien
tgcgcccagcccatatgctatattc

SEQ ID NO: 4669492 - DNA, 25 bp, Homo sapien
gaatgtggatcaaacataactagcc

SEQ ID NO: 4669493 - DNA, 25 bp, Homo sapien
cattatacatgaagagaggaccaag

SEQ ID NO: 4669494 - DNA, 25 bp, Homo sapien
ttaaccaccaatagcccactgctga

SEQ ID NO: 4669495 - DNA, 25 bp, Homo sapien
gctgacaccccgcacagtaaaaaat

SEQ ID NO: 4669496 - DNA, 25 bp, Homo sapien
gacagagcaggaccacatcagcgaa

SEQ ID NO: 4669497 - DNA, 25 bp, Homo sapien
agagcaggaccacatcagcgaacag

SEQ ID NO: 4669498 - DNA, 25 bp, Homo sapien
taaagctgctagactgggacagagc

SEQ ID NO: 4669499 - DNA, 25 bp, Homo sapien
tttttccatacactaaagctgctag

SEQ ID NO: 4669500 - DNA, 25 bp, Homo sapien
tctgtatgaacttcattactgggga

SEQ ID NO: 4669501 - DNA, 25 bp, Homo sapien
tttattgcaaggtatgatgtacagt

SEQ ID NO: 4669502 - DNA, 25 bp, Homo sapien
gtatgaacttcattactggggacag

SEQ ID NO: 4669503 - DNA, 25 bp, Homo sapien
tgtctgtatgaacttcattactggg

SEQ ID NO: 4669504 - DNA, 25 bp, Homo sapien
acttactagctgtggaccgtgggta

SEQ ID NO: 4669505 - DNA, 25 bp, Homo sapien
tgagcatgtattaccaaggccacta

SEQ ID NO: 4669506 - DNA, 25 bp, Homo sapien
gggcataatcatctcaaaggactgt

SEQ ID NO: 4669507 - DNA, 25 bp, Homo sapien
tacataggttggcaaggtcccttcc

SEQ ID NO: 4669508 - DNA, 25 bp, Homo sapien
tctagtcatgtgttttttaggacga

SEQ ID NO: 4669509 - DNA, 25 bp, Homo sapien
taggacgatttctgtctccacgatg

SEQ ID NO: 4669510 - DNA, 25 bp, Homo sapien
atagcaatggtggtgcaccactgta

SEQ ID NO: 4669511 - DNA, 25 bp, Homo sapien
ggaactactgctggaaaaagcccta

SEQ ID NO: 4669512 - DNA, 25 bp, Homo sapien
tagaagatgacatgtaccgtaagac

SEQ ID NO: 4669513 - DNA, 25 bp, Homo sapien
cgtaagacttgtactatgtgtggcc

SEQ ID NO: 4669514 - DNA, 25 bp, Homo sapien
tgtgtggccatgaactgacatatga

SEQ ID NO: 4669515 - DNA, 25 bp, Homo sapien
catcaacatgagtatggaccagaag

SEQ ID NO: 4669516 - DNA, 25 bp, Homo sapien
ggagggcattccagatctatatcta

SEQ ID NO: 4669517 - DNA, 25 bp, Homo sapien
gaacactgccttatacatagccctg

SEQ ID NO: 4669518 - DNA, 25 bp, Homo sapien
tccagaccaaaaactatctagaggt

SEQ ID NO: 4669519 - DNA, 25 bp, Homo sapien
ccaaggtcttcagaatatgagagga

SEQ ID NO: 4669520 - DNA, 25 bp, Homo sapien
aggctcaggtaatcctcccaaagtg

SEQ ID NO: 4669521 - DNA, 25 bp, Homo sapien
caggctcaggtaatcctcccaaagt

SEQ ID NO: 4669522 - DNA, 25 bp, Homo sapien
tccagtctaggattgggtattggct

SEQ ID NO: 4669523 - DNA, 25 bp, Homo sapien
tggttttagtacacagggctgagtc

SEQ ID NO: 4669524 - DNA, 25 bp, Homo sapien
ggataataatacaaagggccactca

SEQ ID NO: 4669525 - DNA, 25 bp, Homo sapien
tgcccagtagaatccccttcaaggt

SEQ ID NO: 4669526 - DNA, 25 bp, Homo sapien
cttataaacacttcagcatgtttct

SEQ ID NO: 4669527 - DNA, 25 bp, Homo sapien
aacaatggcattcgactgggagcag

SEQ ID NO: 4669528 - DNA, 25 bp, Homo sapien
gcagacattgtgattcttataaaca

SEQ ID NO: 4669529 - DNA, 25 bp, Homo sapien
acatattttgccaagccatttaagt

SEQ ID NO: 4669530 - DNA, 25 bp, Homo sapien
taggccttcagtactgcgtaggacc

SEQ ID NO: 4669531 - DNA, 25 bp, Homo sapien
gcagtccttagttaatagcttccag

SEQ ID NO: 4669532 - DNA, 25 bp, Homo sapien
tgtgaaattctaggccaatggaact

SEQ ID NO: 4669533 - DNA, 25 bp, Homo sapien
cagaagcagcattgggtttccatga

SEQ ID NO: 4669534 - DNA, 25 bp, Homo sapien
tagttttgcatatgcttcacagtca

SEQ ID NO: 4669535 - DNA, 25 bp, Homo sapien
tttttcaaacaataaggtctcactc

SEQ ID NO: 4669536 - DNA, 25 bp, Homo sapien
tggcttttgcttacagagtgtggaa

SEQ ID NO: 4669537 - DNA, 25 bp, Homo sapien
gagccacctcttaaatttattgtga

SEQ ID NO: 4669538 - DNA, 25 bp, Homo sapien
gcattgcatacatgctgataagcta

SEQ ID NO: 4669539 - DNA, 25 bp, Homo sapien
tatgaaccactttgatttgccaact

SEQ ID NO: 4669540 - DNA, 25 bp, Homo sapien
tatgtaatatgcgaagaatgtggga

SEQ ID NO: 4669541 - DNA, 25 bp, Homo sapien
gccaacttgtgataactgcaggtac

SEQ ID NO: 4669542 - DNA, 25 bp, Homo sapien
actcttgcttatggtagactgccag

SEQ ID NO: 4669543 - DNA, 25 bp, Homo sapien
gataccactttgactatcactagcc

SEQ ID NO: 4669544 - DNA, 25 bp, Homo sapien
tgtaaaagggagtgacagtttgaaa

SEQ ID NO: 4669545 - DNA, 25 bp, Homo sapien
tctcttcattctaatgcatcctggt

SEQ ID NO: 4669546 - DNA, 25 bp, Homo sapien
gaaggatgtaactatgatctaaggt

SEQ ID NO: 4669547 - DNA, 25 bp, Homo sapien
tgctttggtaaatcacttatatgta

SEQ ID NO: 4669548 - DNA, 25 bp, Homo sapien
cagtgagggtactttcacactcttt

SEQ ID NO: 4669549 - DNA, 25 bp, Homo sapien
tatttgttcataagtttggcagcca

SEQ ID NO: 4669550 - DNA, 25 bp, Homo sapien
gcagttgttcaggttttgcacggtc

SEQ ID NO: 4669551 - DNA, 25 bp, Homo sapien
caggcagttgttcaggttttgcacg

SEQ ID NO: 4669552 - DNA, 25 bp, Homo sapien
tacaggtgctcctggattttactct

SEQ ID NO: 4669553 - DNA, 25 bp, Homo sapien
ccaggcagttgttcaggttttgcac

SEQ ID NO: 4669554 - DNA, 25 bp, Homo sapien
tctgagtcctcaggccctcaatggt

SEQ ID NO: 4669555 - DNA, 25 bp, Homo sapien
gatctgagtcctcaggccctcaatg

SEQ ID NO: 4669556 - DNA, 25 bp, Homo sapien
agcaagaccagcattgtcaatctgc

SEQ ID NO: 4669557 - DNA, 25 bp, Homo sapien
tgaagatctgagtcctcaggccctc

SEQ ID NO: 4669558 - DNA, 25 bp, Homo sapien
ggcgcatggccagctctgtctcata

SEQ ID NO: 4669559 - DNA, 25 bp, Homo sapien
ctccggagcccatggatgtggctct

SEQ ID NO: 4669560 - DNA, 25 bp, Homo sapien
atgtggctctccacagactggcgca

SEQ ID NO: 4669561 - DNA, 25 bp, Homo sapien
tggctctccacagactggcgcatgg

SEQ ID NO: 4669562 - DNA, 25 bp, Homo sapien
tgagagcttcgatctctgtctccag

SEQ ID NO: 4669563 - DNA, 25 bp, Homo sapien
tccttgagagcttcgatctctgtct

SEQ ID NO: 4669564 - DNA, 25 bp, Homo sapien
gctcctccttgagagcttcgatctc

SEQ ID NO: 4669565 - DNA, 25 bp, Homo sapien
ctcctccttgagagcttcgatctct

SEQ ID NO: 4669566 - DNA, 25 bp, Homo sapien
ctccgtgagcatcatcccagcagct

SEQ ID NO: 4669567 - DNA, 25 bp, Homo sapien
ccgtgagcatcatcccagcagctcc

SEQ ID NO: 4669568 - DNA, 25 bp, Homo sapien
cagctccaacctcggtggactgcgt

SEQ ID NO: 4669569 - DNA, 25 bp, Homo sapien
gctccaacctcggtggactgcgtgg

SEQ ID NO: 4669570 - DNA, 25 bp, Homo sapien
ttgatcttcaaggactggactatac

SEQ ID NO: 4669571 - DNA, 25 bp, Homo sapien
aggttgatcttcaaggactggacta

SEQ ID NO: 4669572 - DNA, 25 bp, Homo sapien
gatcttcaaggactggactatacat

SEQ ID NO: 4669573 - DNA, 25 bp, Homo sapien
ggttgatcttcaaggactggactat

SEQ ID NO: 4669574 - DNA, 25 bp, Homo sapien
cctctgcaaggcatagcgggcctcg

SEQ ID NO: 4669575 - DNA, 25 bp, Homo sapien
ctctgcaaggcatagcgggcctcga

SEQ ID NO: 4669576 - DNA, 25 bp, Homo sapien
cagaactttggtgtcgttggtcaga

SEQ ID NO: 4669577 - DNA, 25 bp, Homo sapien
gaactttggtgtcgttggtcagaca

SEQ ID NO: 4669578 - DNA, 25 bp, Homo sapien
ctgcttctgctggcttaatgtctca

SEQ ID NO: 4669579 - DNA, 25 bp, Homo sapien
gcttctgctggcttaatgtctcaga

SEQ ID NO: 4669580 - DNA, 25 bp, Homo sapien
attggcctcctgctccccaaagtgt

SEQ ID NO: 4669581 - DNA, 25 bp, Homo sapien
ttattggcctcctgctccccaaagt

SEQ ID NO: 4669582 - DNA, 25 bp, Homo sapien
ttggcctcctgctccccaaagtgta

SEQ ID NO: 4669583 - DNA, 25 bp, Homo sapien
tggcctcctgctccccaaagtgtac

SEQ ID NO: 4669584 - DNA, 25 bp, Homo sapien
cagtggtggatgaagtgtcaatcag

SEQ ID NO: 4669585 - DNA, 25 bp, Homo sapien
ggatgaagtgtcaatcagcagcatt

SEQ ID NO: 4669586 - DNA, 25 bp, Homo sapien
gcagcattggctggatatgagtcca

SEQ ID NO: 4669587 - DNA, 25 bp, Homo sapien
cagcagcattggctggatatgagtc

SEQ ID NO: 4669588 - DNA, 25 bp, Homo sapien
tcaccctgttgctgcttccgtcttt

SEQ ID NO: 4669589 - DNA, 25 bp, Homo sapien
ttccgtctttagcttctgagagatg

SEQ ID NO: 4669590 - DNA, 25 bp, Homo sapien
ccgtctttagcttctgagagatggg

SEQ ID NO: 4669591 - DNA, 25 bp, Homo sapien
tgcttccgtctttagcttctgagag

SEQ ID NO: 4669592 - DNA, 25 bp, Homo sapien
ctttgaaacaattgtgtagttttca

SEQ ID NO: 4669593 - DNA, 25 bp, Homo sapien
agttttcagttttatgtcatcacca

SEQ ID NO: 4669594 - DNA, 25 bp, Homo sapien
ttatgtcatcaccaccagcatagag

SEQ ID NO: 4669595 - DNA, 25 bp, Homo sapien
gttttatgtcatcaccaccagcata

SEQ ID NO: 4669596 - DNA, 25 bp, Homo sapien
tgccccgataccacataccagttct

SEQ ID NO: 4669597 - DNA, 25 bp, Homo sapien
tctgcctgccccgataccacatacc

SEQ ID NO: 4669598 - DNA, 25 bp, Homo sapien
ctcattcacttcagctaggactgtg

SEQ ID NO: 4669599 - DNA, 25 bp, Homo sapien
cattcacttcagctaggactgtgct

SEQ ID NO: 4669600 - DNA, 25 bp, Homo sapien
ctggaaattctgcactagaccctgc

SEQ ID NO: 4669601 - DNA, 25 bp, Homo sapien
aatcacacgatctggaaattctgca

SEQ ID NO: 4669602 - DNA, 25 bp, Homo sapien
agcagaactctgaatcacacgatct

SEQ ID NO: 4669603 - DNA, 25 bp, Homo sapien
gcactagaccctgctgtaaattttc

SEQ ID NO: 4669604 - DNA, 25 bp, Homo sapien
ctttgggcgagtccccagcacaatg

SEQ ID NO: 4669605 - DNA, 25 bp, Homo sapien
ctgtgagcagataaccggcagcact

SEQ ID NO: 4669606 - DNA, 25 bp, Homo sapien
cgtcaccgggcgtcggattcccgcg

SEQ ID NO: 4669607 - DNA, 25 bp, Homo sapien
cagggattcgccctgaagccttgca

SEQ ID NO: 4669608 - DNA, 25 bp, Homo sapien
gctgaaactccgtgtgccgatgacc

SEQ ID NO: 4669609 - DNA, 25 bp, Homo sapien
gaaagactccggcactcgggctgaa

SEQ ID NO: 4669610 - DNA, 25 bp, Homo sapien
cctgccttttgtgcagatctctgca

SEQ ID NO: 4669611 - DNA, 25 bp, Homo sapien
tgaccctggccttgtcccgggaggc

SEQ ID NO: 4669612 - DNA, 25 bp, Homo sapien
catgtgattgatgcaggtcctaccc

SEQ ID NO: 4669613 - DNA, 25 bp, Homo sapien
ggataacatgagaaccctccacgtg

SEQ ID NO: 4669614 - DNA, 25 bp, Homo sapien
tctcttttctggaggacggaagtcc

SEQ ID NO: 4669615 - DNA, 25 bp, Homo sapien
tccacgtgaggatagccctagatct

SEQ ID NO: 4669616 - DNA, 25 bp, Homo sapien
gaagaggaggtccattgtgacccta

SEQ ID NO: 4669617 - DNA, 25 bp, Homo sapien
gggccatggtctgtctcctaaggtg

SEQ ID NO: 4669618 - DNA, 25 bp, Homo sapien
cattatatgtcacccgatagccctg

SEQ ID NO: 4669619 - DNA, 25 bp, Homo sapien
gaccctaggctttctccactggttg

SEQ ID NO: 4669620 - DNA, 25 bp, Homo sapien
tgagagtggatgcttgtttcctgga

SEQ ID NO: 4669621 - DNA, 25 bp, Homo sapien
gacacgtcaaaggagatcaaactgg

SEQ ID NO: 4669622 - DNA, 25 bp, Homo sapien
cggtgagactggctgacatcaggaa

SEQ ID NO: 4669623 - DNA, 25 bp, Homo sapien
caaactgggcgtagactcggtgaga

SEQ ID NO: 4669624 - DNA, 25 bp, Homo sapien
cactggcccctttcgatagagccag

SEQ ID NO: 4669625 - DNA, 25 bp, Homo sapien
ccctttcgatagagccagcggcagg

SEQ ID NO: 4669626 - DNA, 25 bp, Homo sapien
ctggctgctcagatcagagtaggac

SEQ ID NO: 4669627 - DNA, 25 bp, Homo sapien
gagtaggaccccatgactatttccc

SEQ ID NO: 4669628 - DNA, 25 bp, Homo sapien
cctttgtccgtagcagcttggagtt

SEQ ID NO: 4669629 - DNA, 25 bp, Homo sapien
gggtttttgcagatagttgccctca

SEQ ID NO: 4669630 - DNA, 25 bp, Homo sapien
catcggcagcagacatgacaatcag

SEQ ID NO: 4669631 - DNA, 25 bp, Homo sapien
cagacatgacaatcagcgcctttgt

SEQ ID NO: 4669632 - DNA, 25 bp, Homo sapien
tagatggtgtaagagttgagattca

SEQ ID NO: 4669633 - DNA, 25 bp, Homo sapien
cccaaagtcactaaaatattctaca

SEQ ID NO: 4669634 - DNA, 25 bp, Homo sapien
tcaagttgttttagatggtgtaaga

SEQ ID NO: 4669635 - DNA, 25 bp, Homo sapien
cagttaatgatctacttcaagttgt

SEQ ID NO: 4669636 - DNA, 25 bp, Homo sapien
ggtggctggtgtgtagcgctccctg

SEQ ID NO: 4669637 - DNA, 25 bp, Homo sapien
agccctggcgaggccaaactgtcca

SEQ ID NO: 4669638 - DNA, 25 bp, Homo sapien
cttgggtggctggtgtgtagcgctc

SEQ ID NO: 4669639 - DNA, 25 bp, Homo sapien
tggtgtgtagcgctccctgccttcc

SEQ ID NO: 4669640 - DNA, 25 bp, Homo sapien
ccgcgtctgatccgacccaggcggg

SEQ ID NO: 4669641 - DNA, 25 bp, Homo sapien
cgcgtctgatccgacccaggcgggc

SEQ ID NO: 4669642 - DNA, 25 bp, Homo sapien
cgggcgggcgggagttcagctgtgg

SEQ ID NO: 4669643 - DNA, 25 bp, Homo sapien
ggagttcagctgtggcggcgggcat

SEQ ID NO: 4669644 - DNA, 25 bp, Homo sapien
atctcctcggggcatttcctatctc

SEQ ID NO: 4669645 - DNA, 25 bp, Homo sapien
cgtttggatcaaaaccatacacaaa

SEQ ID NO: 4669646 - DNA, 25 bp, Homo sapien
tcctcggggcatttcctatctcttc

SEQ ID NO: 4669647 - DNA, 25 bp, Homo sapien
aaaatctcctcggggcatttcctat

SEQ ID NO: 4669648 - DNA, 25 bp, Homo sapien
taaagacgacgcaggataggtaacc

SEQ ID NO: 4669649 - DNA, 25 bp, Homo sapien
tatttagggataggccaatcaccac

SEQ ID NO: 4669650 - DNA, 25 bp, Homo sapien
caactgtgtggtagaggtagccgct

SEQ ID NO: 4669651 - DNA, 25 bp, Homo sapien
gacccggtgtgtggaaacgctcaaa

SEQ ID NO: 4669652 - DNA, 25 bp, Homo sapien
tggtctccggctgaagggtcccttg

SEQ ID NO: 4669653 - DNA, 25 bp, Homo sapien
gattactgcctaggttgtgcgcgca

SEQ ID NO: 4669654 - DNA, 25 bp, Homo sapien
tgcccgctagtttaggattactgcc

SEQ ID NO: 4669655 - DNA, 25 bp, Homo sapien
ctcgtgaccgggactggactctggt

SEQ ID NO: 4669656 - DNA, 25 bp, Homo sapien
tctggatccccgcggctgtcggggg

SEQ ID NO: 4669657 - DNA, 25 bp, Homo sapien
tggatccccgcggctgtcggggggc

SEQ ID NO: 4669658 - DNA, 25 bp, Homo sapien
ctggcgtccccggaacggacgctcg

SEQ ID NO: 4669659 - DNA, 25 bp, Homo sapien
ctggatccccgcggctgtcgggggg

SEQ ID NO: 4669660 - DNA, 25 bp, Homo sapien
gcggcggcccgctctcggcagtcat

SEQ ID NO: 4669661 - DNA, 25 bp, Homo sapien
gctcttccttcacggtagccagcac

SEQ ID NO: 4669662 - DNA, 25 bp, Homo sapien
cgcgctcttccttcacggtagccag

SEQ ID NO: 4669663 - DNA, 25 bp, Homo sapien
cgccgcgctcttccttcacggtagc

SEQ ID NO: 4669664 - DNA, 25 bp, Homo sapien
cgctcttccttcacggtagccagca

SEQ ID NO: 4669665 - DNA, 25 bp, Homo sapien
gtagaaggggaagcgctcggtgatg

SEQ ID NO: 4669666 - DNA, 25 bp, Homo sapien
gcgcgtgcgcgatggccatggcgat

SEQ ID NO: 4669667 - DNA, 25 bp, Homo sapien
cctcgcgcgggatcttgaggaagca

SEQ ID NO: 4669668 - DNA, 25 bp, Homo sapien
cggccggcctcgcgcgggatcttga

SEQ ID NO: 4669669 - DNA, 25 bp, Homo sapien
gtcaagcgcccagtagttgccctta

SEQ ID NO: 4669670 - DNA, 25 bp, Homo sapien
ccgccgcgtcgtgcatgtaagccgg

SEQ ID NO: 4669671 - DNA, 25 bp, Homo sapien
tctcgaacatgtcctccgcgttggg

SEQ ID NO: 4669672 - DNA, 25 bp, Homo sapien
agaggtccgagcgcttgaagcgctt

SEQ ID NO: 4669673 - DNA, 25 bp, Homo sapien
ctgcatagacggcgcccgggtaggg

SEQ ID NO: 4669674 - DNA, 25 bp, Homo sapien
tgcatagacggcgcccgggtagggg

SEQ ID NO: 4669675 - DNA, 25 bp, Homo sapien
atggcggacacgaaccgatctatcc

SEQ ID NO: 4669676 - DNA, 25 bp, Homo sapien
tatcccaccgggataagcggcagca

SEQ ID NO: 4669677 - DNA, 25 bp, Homo sapien
tagaagtccaccgtggtctccacgc

SEQ ID NO: 4669678 - DNA, 25 bp, Homo sapien
cgccagggttgtagcaggctcccag

SEQ ID NO: 4669679 - DNA, 25 bp, Homo sapien
ttaaaggcactagaggacgaaccgc

SEQ ID NO: 4669680 - DNA, 25 bp, Homo sapien
taccagaaagcatcccgtttgaggg

SEQ ID NO: 4669681 - DNA, 25 bp, Homo sapien
tttaagaagaaaggcgctgccgcag

SEQ ID NO: 4669682 - DNA, 25 bp, Homo sapien
cgtttacagagtacaccgggtgcct

SEQ ID NO: 4669683 - DNA, 25 bp, Homo sapien
tagtgagcctgctacttaagcaaga

SEQ ID NO: 4669684 - DNA, 25 bp, Homo sapien
ctactgaaaggcgtcaccaacgggc

SEQ ID NO: 4669685 - DNA, 25 bp, Homo sapien
tcttcgtgaacaggatagtgcagtc

SEQ ID NO: 4669686 - DNA, 25 bp, Homo sapien
tgaaccaagttcacatgtcttcgtg

SEQ ID NO: 4669687 - DNA, 25 bp, Homo sapien
gcgaattctaacgagccttgggcaa

SEQ ID NO: 4669688 - DNA, 25 bp, Homo sapien
cattttcgcggtgaacgacctcggg

SEQ ID NO: 4669689 - DNA, 25 bp, Homo sapien
gcagttgggctcaaaccgtacagaa

SEQ ID NO: 4669690 - DNA, 25 bp, Homo sapien
aaatacatgatacagctctagggcg

SEQ ID NO: 4669691 - DNA, 25 bp, Homo sapien
tgtcattgtcacagtcacccataca

SEQ ID NO: 4669692 - DNA, 25 bp, Homo sapien
gtcattgtcacagtcacccatacag

SEQ ID NO: 4669693 - DNA, 25 bp, Homo sapien
atgtcattgtcacagtcacccatac

SEQ ID NO: 4669694 - DNA, 25 bp, Homo sapien
gctcttgacctggatacactttgca

SEQ ID NO: 4669695 - DNA, 25 bp, Homo sapien
aaatcctttatggtgccagcccagg

SEQ ID NO: 4669696 - DNA, 25 bp, Homo sapien
catgccttttatagggtcagggaaa

SEQ ID NO: 4669697 - DNA, 25 bp, Homo sapien
ttagagtctccgtggcaagtccctg

SEQ ID NO: 4669698 - DNA, 25 bp, Homo sapien
ggaaatgcaccctctttgctgctcc

SEQ ID NO: 4669699 - DNA, 25 bp, Homo sapien
tcagcaaatgatagtccaaaggcca

SEQ ID NO: 4669700 - DNA, 25 bp, Homo sapien
gcctgttttggcactacctgagatc

SEQ ID NO: 4669701 - DNA, 25 bp, Homo sapien
tggtgggtaaagctgaacatactca

SEQ ID NO: 4669702 - DNA, 25 bp, Homo sapien
tgggcctaaccaccacttagaagag

SEQ ID NO: 4669703 - DNA, 25 bp, Homo sapien
taactcattacctttgaaccagcct

SEQ ID NO: 4669704 - DNA, 25 bp, Homo sapien
aaagtagaacaaaaagttcaatctg

SEQ ID NO: 4669705 - DNA, 25 bp, Homo sapien
gtagtgagaagaggggaaaagtaga

SEQ ID NO: 4669706 - DNA, 25 bp, Homo sapien
gagataactcattacctttgaacca

SEQ ID NO: 4669707 - DNA, 25 bp, Homo sapien
tatagggaccaagtcatatgctgag

SEQ ID NO: 4669708 - DNA, 25 bp, Homo sapien
gggtctaataatagtatcaagtcaa

SEQ ID NO: 4669709 - DNA, 25 bp, Homo sapien
gtcaaataagtcatagccagtaggt

SEQ ID NO: 4669710 - DNA, 25 bp, Homo sapien
gattacaatatccagtggtgggtct

SEQ ID NO: 4669711 - DNA, 25 bp, Homo sapien
gaccccttgaagaacgctcttatag

SEQ ID NO: 4669712 - DNA, 25 bp, Homo sapien
gaagaacgctcttatagtgacccat

SEQ ID NO: 4669713 - DNA, 25 bp, Homo sapien
ttgaagaacgctcttatagtgaccc

SEQ ID NO: 4669714 - DNA, 25 bp, Homo sapien
aacacaggaccccttgaagaacgct

SEQ ID NO: 4669715 - DNA, 25 bp, Homo sapien
cccagcagaccgtgtggccacacaa

SEQ ID NO: 4669716 - DNA, 25 bp, Homo sapien
ccagcagaccgtgtggccacacaag

SEQ ID NO: 4669717 - DNA, 25 bp, Homo sapien
agaccgtgtggccacacaagcccat

SEQ ID NO: 4669718 - DNA, 25 bp, Homo sapien
agcagaccgtgtggccacacaagcc

SEQ ID NO: 4669719 - DNA, 25 bp, Homo sapien
cagactgttttggtaatcagaacaa

SEQ ID NO: 4669720 - DNA, 25 bp, Homo sapien
cattcactgaggctctctacatcgc

SEQ ID NO: 4669721 - DNA, 25 bp, Homo sapien
gaggctctctacatcgcagtatcgc

SEQ ID NO: 4669722 - DNA, 25 bp, Homo sapien
cactcctccagactgttttggtaat

SEQ ID NO: 4669723 - DNA, 25 bp, Homo sapien
gggcggctgatgtaagacctttctc

SEQ ID NO: 4669724 - DNA, 25 bp, Homo sapien
cggaggcgcgagatgtgaagaagcc

SEQ ID NO: 4669725 - DNA, 25 bp, Homo sapien
tgggaagctttgcagtccggctgcg

SEQ ID NO: 4669726 - DNA, 25 bp, Homo sapien
gccggggacaggctttgacgttcac

SEQ ID NO: 4669727 - DNA, 25 bp, Homo sapien
gagccaagttactcacgggagcgga

SEQ ID NO: 4669728 - DNA, 25 bp, Homo sapien
tggagcgcagcgctgggctcactac

SEQ ID NO: 4669729 - DNA, 25 bp, Homo sapien
tcggaagggtttgctagcggcggag

SEQ ID NO: 4669730 - DNA, 25 bp, Homo sapien
tgcactgcgcttaaaccggcgacgc

SEQ ID NO: 4669731 - DNA, 25 bp, Homo sapien
agctgccggggtccggttcctcagc

SEQ ID NO: 4669732 - DNA, 25 bp, Homo sapien
ggttcctcagctccaggtggatcct

SEQ ID NO: 4669733 - DNA, 25 bp, Homo sapien
ccaggtggatcctcctcttcatgtc

SEQ ID NO: 4669734 - DNA, 25 bp, Homo sapien
agctccaggtggatcctcctcttca

SEQ ID NO: 4669735 - DNA, 25 bp, Homo sapien
acccgccaacatggcgctgcggcgg

SEQ ID NO: 4669736 - DNA, 25 bp, Homo sapien
ggccggctcaccaggcgcagggaga

SEQ ID NO: 4669737 - DNA, 25 bp, Homo sapien
cagggagacgggcacccgccaacat

SEQ ID NO: 4669738 - DNA, 25 bp, Homo sapien
aaggccaagctcgtgggccggctca

SEQ ID NO: 4669739 - DNA, 25 bp, Homo sapien
tttaggtatctctgccattcttccc

SEQ ID NO: 4669740 - DNA, 25 bp, Homo sapien
ctttaggtatctctgccattcttcc

SEQ ID NO: 4669741 - DNA, 25 bp, Homo sapien
tgagatcaagcctacatttattaaa

SEQ ID NO: 4669742 - DNA, 25 bp, Homo sapien
aactgagatcaagcctacatttatt

SEQ ID NO: 4669743 - DNA, 25 bp, Homo sapien
ctgagatcaagcctacatttattaa

SEQ ID NO: 4669744 - DNA, 25 bp, Homo sapien
aaactgagatcaagcctacatttat

SEQ ID NO: 4669745 - DNA, 25 bp, Homo sapien
acccactccacctgctgtaaaacca

SEQ ID NO: 4669746 - DNA, 25 bp, Homo sapien
ccatgactggcctcatgtattatac

SEQ ID NO: 4669747 - DNA, 25 bp, Homo sapien
tattatacttaacccactccacctg

SEQ ID NO: 4669748 - DNA, 25 bp, Homo sapien
ggcctcatgtattatacttaaccca

SEQ ID NO: 4669749 - DNA, 25 bp, Homo sapien
gtccagacctccaaagattctattt

SEQ ID NO: 4669750 - DNA, 25 bp, Homo sapien
cagctaacatgtccagacctccaaa

SEQ ID NO: 4669751 - DNA, 25 bp, Homo sapien
tacaattttagttagggcacagaca

SEQ ID NO: 4669752 - DNA, 25 bp, Homo sapien
caatgcagctactttcagggaagac

SEQ ID NO: 4669753 - DNA, 25 bp, Homo sapien
aacttcctgggtatcaagcggtctt

SEQ ID NO: 4669754 - DNA, 25 bp, Homo sapien
gaagacaggagtcaatatgggctga

SEQ ID NO: 4669755 - DNA, 25 bp, Homo sapien
taagtaacaaatccatctcttgaag

SEQ ID NO: 4669756 - DNA, 25 bp, Homo sapien
tccatctcttgaagaggtaaaattc

SEQ ID NO: 4669757 - DNA, 25 bp, Homo sapien
ccatctcttgaagaggtaaaattct

SEQ ID NO: 4669758 - DNA, 25 bp, Homo sapien
caaaggaatataagtaacaaatcca

SEQ ID NO: 4669759 - DNA, 25 bp, Homo sapien
tgaagaaaaggatcaaaaaccacaa

SEQ ID NO: 4669760 - DNA, 25 bp, Homo sapien
ctgaagaaaaggatcaaaaaccaca

SEQ ID NO: 4669761 - DNA, 25 bp, Homo sapien
tcggcatctgagtcaggtgcttcct

SEQ ID NO: 4669762 - DNA, 25 bp, Homo sapien
tcggtcatagccatccaagtaggta

SEQ ID NO: 4669763 - DNA, 25 bp, Homo sapien
aggtgcttcctggtcctctcggtca

SEQ ID NO: 4669764 - DNA, 25 bp, Homo sapien
gacactctctcggtagtcattcagg

SEQ ID NO: 4669765 - DNA, 25 bp, Homo sapien
acatccaatagcttttatcagaggc

SEQ ID NO: 4669766 - DNA, 25 bp, Homo sapien
tggcaagcctgtaagagcaagcggt

SEQ ID NO: 4669767 - DNA, 25 bp, Homo sapien
gggcaggccatgcactgactaaaaa

SEQ ID NO: 4669768 - DNA, 25 bp, Homo sapien
tgtaaatacagatgaggcttcctca

SEQ ID NO: 4669769 - DNA, 25 bp, Homo sapien
tggagcccagacagtaatgtgagca

SEQ ID NO: 4669770 - DNA, 25 bp, Homo sapien
tgttggatagcttgttgccacatat

SEQ ID NO: 4669771 - DNA, 25 bp, Homo sapien
gctccatctgtgcatatacgacaca

SEQ ID NO: 4669772 - DNA, 25 bp, Homo sapien
tggcagccgctccatctgtgcatat

SEQ ID NO: 4669773 - DNA, 25 bp, Homo sapien
cctgatatgtaatcgttcaaaagac

SEQ ID NO: 4669774 - DNA, 25 bp, Homo sapien
cagaagcgacctctctgactcgagt

SEQ ID NO: 4669775 - DNA, 25 bp, Homo sapien
tgtgaatcaggagataagtatctac

SEQ ID NO: 4669776 - DNA, 25 bp, Homo sapien
caagtacctactcagtgtcaggccc

SEQ ID NO: 4669777 - DNA, 25 bp, Homo sapien
cccaagatgatgactgtagtgcagt

SEQ ID NO: 4669778 - DNA, 25 bp, Homo sapien
tggtcatatgtcaatggaagggaaa

SEQ ID NO: 4669779 - DNA, 25 bp, Homo sapien
tactggctcttgcacatgtggctgt

SEQ ID NO: 4669780 - DNA, 25 bp, Homo sapien
cctttactggctcttgcacatgtgg

SEQ ID NO: 4669781 - DNA, 25 bp, Homo sapien
ggctcttgcacatgtggctgttctt

SEQ ID NO: 4669782 - DNA, 25 bp, Homo sapien
atgtcctttactggctcttgcacat

SEQ ID NO: 4669783 - DNA, 25 bp, Homo sapien
atcaaactcctcttcttcaccatcc

SEQ ID NO: 4669784 - DNA, 25 bp, Homo sapien
cttcatcaaactcctcttcttcacc

SEQ ID NO: 4669785 - DNA, 25 bp, Homo sapien
tcatcaaactcctcttcttcaccat

SEQ ID NO: 4669786 - DNA, 25 bp, Homo sapien
ttcttcaccatcctcatcgtcctcg

SEQ ID NO: 4669787 - DNA, 25 bp, Homo sapien
tcctcactgacttcatcgtcgtcct

SEQ ID NO: 4669788 - DNA, 25 bp, Homo sapien
cgtcctcatccccttctacatcttc

SEQ ID NO: 4669789 - DNA, 25 bp, Homo sapien
atcgtcgtcctcatccccttctaca

SEQ ID NO: 4669790 - DNA, 25 bp, Homo sapien
ctcactgacttcatcgtcgtcctca

SEQ ID NO: 4669791 - DNA, 25 bp, Homo sapien
tcttcttcatcaagtccaaattctt

SEQ ID NO: 4669792 - DNA, 25 bp, Homo sapien
tcttcatcaagtccaaattcttctt

SEQ ID NO: 4669793 - DNA, 25 bp, Homo sapien
ttcttcatcaagtccaaattcttct

SEQ ID NO: 4669794 - DNA, 25 bp, Homo sapien
catcttcttcatcaagtccaaattc

SEQ ID NO: 4669795 - DNA, 25 bp, Homo sapien
accagggtaatatctagtgtaaatg

SEQ ID NO: 4669796 - DNA, 25 bp, Homo sapien
gtgaacacctgattttctgagacac

SEQ ID NO: 4669797 - DNA, 25 bp, Homo sapien
ccagggtaatatctagtgtaaatgt

SEQ ID NO: 4669798 - DNA, 25 bp, Homo sapien
acagtgaacacctgattttctgaga

SEQ ID NO: 4669799 - DNA, 25 bp, Homo sapien
tccttcatcatctgtttctctcttc

SEQ ID NO: 4669800 - DNA, 25 bp, Homo sapien
cttctccttcatcatctgtttctct

SEQ ID NO: 4669801 - DNA, 25 bp, Homo sapien
ttctccttcatcatctgtttctctc

SEQ ID NO: 4669802 - DNA, 25 bp, Homo sapien
tctccttcatcatctgtttctctct

SEQ ID NO: 4669803 - DNA, 25 bp, Homo sapien
ggaaggcggaatgtcacaggaacta

SEQ ID NO: 4669804 - DNA, 25 bp, Homo sapien
gaactattctttggctctttgggtg

SEQ ID NO: 4669805 - DNA, 25 bp, Homo sapien
ccacaagcttggtggtagattacca

SEQ ID NO: 4669806 - DNA, 25 bp, Homo sapien
tagattaccaagagggactacatgg

SEQ ID NO: 4669807 - DNA, 25 bp, Homo sapien
gcaagaatcttacacaaaaacctaa

SEQ ID NO: 4669808 - DNA, 25 bp, Homo sapien
gctatccacgctacagcaagaatct

SEQ ID NO: 4669809 - DNA, 25 bp, Homo sapien
cagacggttgactcaccaatcacag

SEQ ID NO: 4669810 - DNA, 25 bp, Homo sapien
atctcagtgtaactggtagccacag

SEQ ID NO: 4669811 - DNA, 25 bp, Homo sapien
tttttggcagttgtcacataaaatg

SEQ ID NO: 4669812 - DNA, 25 bp, Homo sapien
ttttttggcagttgtcacataaaat

SEQ ID NO: 4669813 - DNA, 25 bp, Homo sapien
tgtcttggcaacaaaccatactgtg

SEQ ID NO: 4669814 - DNA, 25 bp, Homo sapien
catgcttcagactagtggaaagccc

SEQ ID NO: 4669815 - DNA, 25 bp, Homo sapien
tgagttgacctcaggcagtgcctac

SEQ ID NO: 4669816 - DNA, 25 bp, Homo sapien
taaggacacacttaggctacagaag

SEQ ID NO: 4669817 - DNA, 25 bp, Homo sapien
ggtgcagtatcttacacaaggtggt

SEQ ID NO: 4669818 - DNA, 25 bp, Homo sapien
aatgccaggaacaggacgactcaac

SEQ ID NO: 4669819 - DNA, 25 bp, Homo sapien
tttgtgcatttccacgctggccact

SEQ ID NO: 4669820 - DNA, 25 bp, Homo sapien
gtaggtagtgtagcccagataggaa

SEQ ID NO: 4669821 - DNA, 25 bp, Homo sapien
ggctggctgcagcttaagtctacta

SEQ ID NO: 4669822 - DNA, 25 bp, Homo sapien
ctgcagagcaactgtttggctggct

SEQ ID NO: 4669823 - DNA, 25 bp, Homo sapien
ccaaactgtcaacacggcggtatca

SEQ ID NO: 4669824 - DNA, 25 bp, Homo sapien
ggcggtatcatcaggctcattaaaa

SEQ ID NO: 4669825 - DNA, 25 bp, Homo sapien
tggctctgaggacttccacactcac

SEQ ID NO: 4669826 - DNA, 25 bp, Homo sapien
aattggctctgaggacttccacact

SEQ ID NO: 4669827 - DNA, 25 bp, Homo sapien
ctaattggctctgaggacttccaca

SEQ ID NO: 4669828 - DNA, 25 bp, Homo sapien
ttggctctgaggacttccacactca

SEQ ID NO: 4669829 - DNA, 25 bp, Homo sapien
gaagcaggaaacaatggccccatgt

SEQ ID NO: 4669830 - DNA, 25 bp, Homo sapien
gcaggaaacaatggccccatgttcc

SEQ ID NO: 4669831 - DNA, 25 bp, Homo sapien
gaaacaatggccccatgttccagca

SEQ ID NO: 4669832 - DNA, 25 bp, Homo sapien
ggaaacaatggccccatgttccagc

SEQ ID NO: 4669833 - DNA, 25 bp, Homo sapien
tggcaggatggttgtaggtaggatc

SEQ ID NO: 4669834 - DNA, 25 bp, Homo sapien
ttgtaggtaggatctggacaggtag

SEQ ID NO: 4669835 - DNA, 25 bp, Homo sapien
acaggtagctgtcgggggaactagg

SEQ ID NO: 4669836 - DNA, 25 bp, Homo sapien
aggactgagcttggcaggatggttg

SEQ ID NO: 4669837 - DNA, 25 bp, Homo sapien
agaagcagggctcaggcagttcagt

SEQ ID NO: 4669838 - DNA, 25 bp, Homo sapien
atcactccctttgtcagaagcaggg

SEQ ID NO: 4669839 - DNA, 25 bp, Homo sapien
cagggctcaggcagttcagtggctg

SEQ ID NO: 4669840 - DNA, 25 bp, Homo sapien
ctccctttgtcagaagcagggctca

SEQ ID NO: 4669841 - DNA, 25 bp, Homo sapien
caaggttacattactgggaaattca

SEQ ID NO: 4669842 - DNA, 25 bp, Homo sapien
gttctccctgggattcacggaagca

SEQ ID NO: 4669843 - DNA, 25 bp, Homo sapien
caggtgctaccaaagttagcagtca

SEQ ID NO: 4669844 - DNA, 25 bp, Homo sapien
cattaggaagctacactaggtgcag

SEQ ID NO: 4669845 - DNA, 25 bp, Homo sapien
gccactttatatccagactgttaag

SEQ ID NO: 4669846 - DNA, 25 bp, Homo sapien
gagaaaccatcaaccttatatgaga

SEQ ID NO: 4669847 - DNA, 25 bp, Homo sapien
tgaatacatcctagtacagccactt

SEQ ID NO: 4669848 - DNA, 25 bp, Homo sapien
tctgagggtttttgagacgctgaga

SEQ ID NO: 4669849 - DNA, 25 bp, Homo sapien
tttatatcatccttacatggggcca

SEQ ID NO: 4669850 - DNA, 25 bp, Homo sapien
atatcatccttacatggggccatgc

SEQ ID NO: 4669851 - DNA, 25 bp, Homo sapien
tatatcatccttacatggggccatg

SEQ ID NO: 4669852 - DNA, 25 bp, Homo sapien
atttttatatcatccttacatgggg

SEQ ID NO: 4669853 - DNA, 25 bp, Homo sapien
tcagttaaggaaccatttggagtac

SEQ ID NO: 4669854 - DNA, 25 bp, Homo sapien
accatttggagtaccttcccagcac

SEQ ID NO: 4669855 - DNA, 25 bp, Homo sapien
tggagtaccttcccagcactgaacc

SEQ ID NO: 4669856 - DNA, 25 bp, Homo sapien
tttggagtaccttcccagcactgaa

SEQ ID NO: 4669857 - DNA, 25 bp, Homo sapien
gccttttgagccaggctaggctcag

SEQ ID NO: 4669858 - DNA, 25 bp, Homo sapien
ttttgagccaggctaggctcagaaa

SEQ ID NO: 4669859 - DNA, 25 bp, Homo sapien
gtttagttgagaaatgaacaatcca

SEQ ID NO: 4669860 - DNA, 25 bp, Homo sapien
caatccatgaactggggagcctttt

SEQ ID NO: 4669861 - DNA, 25 bp, Homo sapien
aattcaatcccggacccagtccaat

SEQ ID NO: 4669862 - DNA, 25 bp, Homo sapien
ttaccagatctaattcaatcccgga

SEQ ID NO: 4669863 - DNA, 25 bp, Homo sapien
gatctaattcaatcccggacccagt

SEQ ID NO: 4669864 - DNA, 25 bp, Homo sapien
gacccagtccaatttctgttgtgat

SEQ ID NO: 4669865 - DNA, 25 bp, Homo sapien
cttacgcatgtataagtcagaagga

SEQ ID NO: 4669866 - DNA, 25 bp, Homo sapien
cagggccctaatacttacgcatgta

SEQ ID NO: 4669867 - DNA, 25 bp, Homo sapien
tgtaagacttcgctgcttccagggc

SEQ ID NO: 4669868 - DNA, 25 bp, Homo sapien
actcttctgcatatcaacagacatc

SEQ ID NO: 4669869 - DNA, 25 bp, Homo sapien
aggagaaatgctatgaacaagacag

SEQ ID NO: 4669870 - DNA, 25 bp, Homo sapien
tgtgactagcccatcatccatggga

SEQ ID NO: 4669871 - DNA, 25 bp, Homo sapien
catttttagaccagatctcagatcc

SEQ ID NO: 4669872 - DNA, 25 bp, Homo sapien
aaagcaatccaaagctaaccagccc

SEQ ID NO: 4669873 - DNA, 25 bp, Homo sapien
aaaagctgctcaattcgtgacttgc

SEQ ID NO: 4669874 - DNA, 25 bp, Homo sapien
actggagtctctatgcctaccctgg

SEQ ID NO: 4669875 - DNA, 25 bp, Homo sapien
cagactgtagcccatatctgtgcca

SEQ ID NO: 4669876 - DNA, 25 bp, Homo sapien
tcttctaccacaaagctgcactgga

SEQ ID NO: 4669877 - DNA, 25 bp, Homo sapien
tattggctgtcctggctagtctggt

SEQ ID NO: 4669878 - DNA, 25 bp, Homo sapien
ttcacatgggaggttacctgtggta

SEQ ID NO: 4669879 - DNA, 25 bp, Homo sapien
gtcctggctagtctggtaataaaag

SEQ ID NO: 4669880 - DNA, 25 bp, Homo sapien
gctgtcctggctagtctggtaataa

SEQ ID NO: 4669881 - DNA, 25 bp, Homo sapien
gcttgctgtcccagagcgtggtctc

SEQ ID NO: 4669882 - DNA, 25 bp, Homo sapien
tgttctgtgagcaacgctgcgagac

SEQ ID NO: 4669883 - DNA, 25 bp, Homo sapien
caaagcctcactaccagtctgggtc

SEQ ID NO: 4669884 - DNA, 25 bp, Homo sapien
gaccatcgcggtatccgtgcgtgca

SEQ ID NO: 4669885 - DNA, 25 bp, Homo sapien
tctcggcaatgatgaagcacgggtg

SEQ ID NO: 4669886 - DNA, 25 bp, Homo sapien
tggctacgtccaggtcgccctggtg

SEQ ID NO: 4669887 - DNA, 25 bp, Homo sapien
cctggtggttctggccgatctcggc

SEQ ID NO: 4669888 - DNA, 25 bp, Homo sapien
cttggccatgcggatcatgcgcttg

SEQ ID NO: 4669889 - DNA, 25 bp, Homo sapien
tgccagaggcagtgaagaagatccc

SEQ ID NO: 4669890 - DNA, 25 bp, Homo sapien
ccagatgtcgtttgtgctccccgta

SEQ ID NO: 4669891 - DNA, 25 bp, Homo sapien
tctggaacttagcacaatcagcccc

SEQ ID NO: 4669892 - DNA, 25 bp, Homo sapien
caggaatgcttcgaggtgtatggcc

SEQ ID NO: 4669893 - DNA, 25 bp, Homo sapien
tggtctgctaaagtgacaaatgaca

SEQ ID NO: 4669894 - DNA, 25 bp, Homo sapien
tctgctaaagtgacaaatgacagag

SEQ ID NO: 4669895 - DNA, 25 bp, Homo sapien
ggtctgctaaagtgacaaatgacag

SEQ ID NO: 4669896 - DNA, 25 bp, Homo sapien
ttggtctgctaaagtgacaaatgac

SEQ ID NO: 4669897 - DNA, 25 bp, Homo sapien
gctttggcgcctgctagcctctcca

SEQ ID NO: 4669898 - DNA, 25 bp, Homo sapien
gggctttggcgcctgctagcctctc

SEQ ID NO: 4669899 - DNA, 25 bp, Homo sapien
tggcgcctgctagcctctccagtag

SEQ ID NO: 4669900 - DNA, 25 bp, Homo sapien
tttggcgcctgctagcctctccagt

SEQ ID NO: 4669901 - DNA, 25 bp, Homo sapien
ttaaaacaatggcatccttcccaca

SEQ ID NO: 4669902 - DNA, 25 bp, Homo sapien
aaacaatggcatccttcccacagat

SEQ ID NO: 4669903 - DNA, 25 bp, Homo sapien
catcaagcccggccagagacaatgt

SEQ ID NO: 4669904 - DNA, 25 bp, Homo sapien
cccggccagagacaatgtgttttta

SEQ ID NO: 4669905 - DNA, 25 bp, Homo sapien
tgctaactagccctaagacagaact

SEQ ID NO: 4669906 - DNA, 25 bp, Homo sapien
gcccaccagggcataaacagaagca

SEQ ID NO: 4669907 - DNA, 25 bp, Homo sapien
caaactctgattggtctaggaccga

SEQ ID NO: 4669908 - DNA, 25 bp, Homo sapien
tgtgaaagcttacctacagaggctg

SEQ ID NO: 4669909 - DNA, 25 bp, Homo sapien
tcaatgtctctgaatggtgactcag

SEQ ID NO: 4669910 - DNA, 25 bp, Homo sapien
agtgagttgctcacacttgatcaca

SEQ ID NO: 4669911 - DNA, 25 bp, Homo sapien
gatcacatgggcacaaatctttccc

SEQ ID NO: 4669912 - DNA, 25 bp, Homo sapien
atcaaaagtcgaaaaaatcaatgtc

SEQ ID NO: 4669913 - DNA, 25 bp, Homo sapien
catcttaggcagtagagggacgctc

SEQ ID NO: 4669914 - DNA, 25 bp, Homo sapien
ctttgctggctacaggaatctggaa

SEQ ID NO: 4669915 - DNA, 25 bp, Homo sapien
tactcggccaaacgagcaggaaaag

SEQ ID NO: 4669916 - DNA, 25 bp, Homo sapien
tctacataaggatccatggctggca

SEQ ID NO: 4669917 - DNA, 25 bp, Homo sapien
ccagataaggaaaattattagtgtc

SEQ ID NO: 4669918 - DNA, 25 bp, Homo sapien
acattcagttcatgcaggaattcaa

SEQ ID NO: 4669919 - DNA, 25 bp, Homo sapien
aaaaatggaacattcagttcatgca

SEQ ID NO: 4669920 - DNA, 25 bp, Homo sapien
gtgtctccagatccaactttgaaaa

SEQ ID NO: 4669921 - DNA, 25 bp, Homo sapien
aacacatcccaactgctggtctcat

SEQ ID NO: 4669922 - DNA, 25 bp, Homo sapien
tctttagaggttctgactctcccca

SEQ ID NO: 4669923 - DNA, 25 bp, Homo sapien
catcattcaactgaactccacagac

SEQ ID NO: 4669924 - DNA, 25 bp, Homo sapien
cagcactttctctttagaggttctg

SEQ ID NO: 4669925 - DNA, 25 bp, Homo sapien
cattgactgcatcccactggagatc

SEQ ID NO: 4669926 - DNA, 25 bp, Homo sapien
actgcatcccactggagatcaccat

SEQ ID NO: 4669927 - DNA, 25 bp, Homo sapien
gactgcatcccactggagatcacca

SEQ ID NO: 4669928 - DNA, 25 bp, Homo sapien
ttgactgcatcccactggagatcac

SEQ ID NO: 4669929 - DNA, 25 bp, Homo sapien
agatgacccgcaggttgacgtcctc

SEQ ID NO: 4669930 - DNA, 25 bp, Homo sapien
tatgcgctggtacactgcaagaagc

SEQ ID NO: 4669931 - DNA, 25 bp, Homo sapien
cctcaggctggagcgggtatgcgct

SEQ ID NO: 4669932 - DNA, 25 bp, Homo sapien
tgaggggcttcacgatctgataaac

SEQ ID NO: 4669933 - DNA, 25 bp, Homo sapien
gcggccacagatatcgctatgcctg

SEQ ID NO: 4669934 - DNA, 25 bp, Homo sapien
cagaataccctatgggaatgtcagg

SEQ ID NO: 4669935 - DNA, 25 bp, Homo sapien
gcgaggccgagtggtcactcccctt

SEQ ID NO: 4669936 - DNA, 25 bp, Homo sapien
caggtcttgtccaaagttatgtgac

SEQ ID NO: 4669937 - DNA, 25 bp, Homo sapien
gagcccagacttgacttattccagg

SEQ ID NO: 4669938 - DNA, 25 bp, Homo sapien
tgacacgggtgggagcacattcact

SEQ ID NO: 4669939 - DNA, 25 bp, Homo sapien
ttctggtacctcagggaacaccgtg

SEQ ID NO: 4669940 - DNA, 25 bp, Homo sapien
taatgtgaccctaggtggccagaga

SEQ ID NO: 4669941 - DNA, 25 bp, Homo sapien
aaggtccctgatcagtcttccccag

SEQ ID NO: 4669942 - DNA, 25 bp, Homo sapien
cagtaccttgggagcaggcactctg

SEQ ID NO: 4669943 - DNA, 25 bp, Homo sapien
ggaggagcctttacaacaaagtgca

SEQ ID NO: 4669944 - DNA, 25 bp, Homo sapien
gctatgtaggcggagccaggttcaa

SEQ ID NO: 4669945 - DNA, 25 bp, Homo sapien
gaatggtgccttccggaattttcac

SEQ ID NO: 4669946 - DNA, 25 bp, Homo sapien
tgagcatgtccattgttagaatggt

SEQ ID NO: 4669947 - DNA, 25 bp, Homo sapien
catgtccattgttagaatggtgcct

SEQ ID NO: 4669948 - DNA, 25 bp, Homo sapien
tagaatggtgccttccggaattttc

SEQ ID NO: 4669949 - DNA, 25 bp, Homo sapien
taaagatgtcttcaggaggatagcc

SEQ ID NO: 4669950 - DNA, 25 bp, Homo sapien
tatctaccaattcttccatgatggt

SEQ ID NO: 4669951 - DNA, 25 bp, Homo sapien
tggtgtcatcctcttcaacagtgac

SEQ ID NO: 4669952 - DNA, 25 bp, Homo sapien
tcttgcccactagattaaagatgtc

SEQ ID NO: 4669953 - DNA, 25 bp, Homo sapien
taagacttgatttttttgccatgat

SEQ ID NO: 4669954 - DNA, 25 bp, Homo sapien
ttaagacttgatttttttgccatga

SEQ ID NO: 4669955 - DNA, 25 bp, Homo sapien
tgttgccaaggaaacccagagtgcc

SEQ ID NO: 4669956 - DNA, 25 bp, Homo sapien
ttttgggaaggaatcagcaggtgac

SEQ ID NO: 4669957 - DNA, 25 bp, Homo sapien
agagcacccttagatccagatgttg

SEQ ID NO: 4669958 - DNA, 25 bp, Homo sapien
aagcagagctgcgtaaagttacccc

SEQ ID NO: 4669959 - DNA, 25 bp, Homo sapien
tactgagtggctgttataaattcac

SEQ ID NO: 4669960 - DNA, 25 bp, Homo sapien
cgtgccttgagttactgtctactac

SEQ ID NO: 4669961 - DNA, 25 bp, Homo sapien
gaactttcagtagatcattcacact

SEQ ID NO: 4669962 - DNA, 25 bp, Homo sapien
ccagacttctaggactataggttag

SEQ ID NO: 4669963 - DNA, 25 bp, Homo sapien
taaaatgccactgttacaccacaca

SEQ ID NO: 4669964 - DNA, 25 bp, Homo sapien
taaggcagataacctcttatcagtt

SEQ ID NO: 4669965 - DNA, 25 bp, Homo sapien
tcttatctatgcttgagccacatgg

SEQ ID NO: 4669966 - DNA, 25 bp, Homo sapien
tattctttgggctttatgtacagtg

SEQ ID NO: 4669967 - DNA, 25 bp, Homo sapien
ccatgtggagggtctagtcttcccc

SEQ ID NO: 4669968 - DNA, 25 bp, Homo sapien
tagagttttgtgtaccttgacctag

SEQ ID NO: 4669969 - DNA, 25 bp, Homo sapien
tgagcagatatggtttgagggcccc

SEQ ID NO: 4669970 - DNA, 25 bp, Homo sapien
ccccaagaattaggacccatgtgga

SEQ ID NO: 4669971 - DNA, 25 bp, Homo sapien
gcttttaattgaaaccgtgcctgaa

SEQ ID NO: 4669972 - DNA, 25 bp, Homo sapien
tttctgttgactcaggaactttctg

SEQ ID NO: 4669973 - DNA, 25 bp, Homo sapien
tgagaatgaggacagcactaggaga

SEQ ID NO: 4669974 - DNA, 25 bp, Homo sapien
tttggcaggtatccaccttaacgct

SEQ ID NO: 4669975 - DNA, 25 bp, Homo sapien
tcattgactgccaagcggtagaggt

SEQ ID NO: 4669976 - DNA, 25 bp, Homo sapien
aggtcaggcaggcattacagtcccc

SEQ ID NO: 4669977 - DNA, 25 bp, Homo sapien
gaatcaaagacctagcctcagagaa

SEQ ID NO: 4669978 - DNA, 25 bp, Homo sapien
gcagcagagctctacaggataggct

SEQ ID NO: 4669979 - DNA, 25 bp, Homo sapien
atcttttgatattgccgctttgagg

SEQ ID NO: 4669980 - DNA, 25 bp, Homo sapien
gatattgccgctttgaggaaaaata

SEQ ID NO: 4669981 - DNA, 25 bp, Homo sapien
aaaggaccatgaacactttgtgctt

SEQ ID NO: 4669982 - DNA, 25 bp, Homo sapien
aaggaccatgaacactttgtgcttc

SEQ ID NO: 4669983 - DNA, 25 bp, Homo sapien
ccgccaagccggcctgggcgtgcat

SEQ ID NO: 4669984 - DNA, 25 bp, Homo sapien
tccccgccaagccggcctgggcgtg

SEQ ID NO: 4669985 - DNA, 25 bp, Homo sapien
gcctcagcttcctggtacaggaaac

SEQ ID NO: 4669986 - DNA, 25 bp, Homo sapien
agcttcctggtacaggaaacggtgg

SEQ ID NO: 4669987 - DNA, 25 bp, Homo sapien
ttaggcccccagcaagctgtggtcc

SEQ ID NO: 4669988 - DNA, 25 bp, Homo sapien
ccagcaagctgtggtccgacctgct

SEQ ID NO: 4669989 - DNA, 25 bp, Homo sapien
ccccagcaagctgtggtccgacctg

SEQ ID NO: 4669990 - DNA, 25 bp, Homo sapien
ggcccccagcaagctgtggtccgac

SEQ ID NO: 4669991 - DNA, 25 bp, Homo sapien
ttaccttttggagcgcaggtcccca

SEQ ID NO: 4669992 - DNA, 25 bp, Homo sapien
actgcgggcaggagtaccccgtgaa

SEQ ID NO: 4669993 - DNA, 25 bp, Homo sapien
cagattgagctggacctgaaccgga

SEQ ID NO: 4669994 - DNA, 25 bp, Homo sapien
gaacaccggcctcgtgtctggaggt

SEQ ID NO: 4669995 - DNA, 25 bp, Homo sapien
tccctgtccggcatgtctgtgcctt

SEQ ID NO: 4669996 - DNA, 25 bp, Homo sapien
tctgtgccttccctagagctggaag

SEQ ID NO: 4669997 - DNA, 25 bp, Homo sapien
ctggaagcagggtatcttatgtgac

SEQ ID NO: 4669998 - DNA, 25 bp, Homo sapien
gagccaagacgagcactcaaggtag

SEQ ID NO: 4669999 - DNA, 25 bp, Homo sapien
agggaacaagcagcccatcgggtgc

SEQ ID NO: 4670000 - DNA, 25 bp, Homo sapien
gtgactatgcgaactaccagggaag

SEQ ID NO: 4670001 - DNA, 25 bp, Homo sapien
tgcccgcggttaacctaactcagtg

SEQ ID NO: 4670002 - DNA, 25 bp, Homo sapien
catcgggtgcaagaaagcactatct

SEQ ID NO: 4670003 - DNA, 25 bp, Homo sapien
catttgagtgagtggcttttgttgc

SEQ ID NO: 4670004 - DNA, 25 bp, Homo sapien
tctctgtgtaggcatttgagtgagt

SEQ ID NO: 4670005 - DNA, 25 bp, Homo sapien
tgtaggcatttgagtgagtggcttt

SEQ ID NO: 4670006 - DNA, 25 bp, Homo sapien
tgtattctctgtgtaggcatttgag

SEQ ID NO: 4670007 - DNA, 25 bp, Homo sapien
tgacacccattgctggcttcccaga

SEQ ID NO: 4670008 - DNA, 25 bp, Homo sapien
tcccagacagccaatctgattgact

SEQ ID NO: 4670009 - DNA, 25 bp, Homo sapien
tcagagtatccgaggtcccaggtta

SEQ ID NO: 4670010 - DNA, 25 bp, Homo sapien
tatccgaggtcccaggttaaacaca

SEQ ID NO: 4670011 - DNA, 25 bp, Homo sapien
gagaggaagactagggtagccagtg

SEQ ID NO: 4670012 - DNA, 25 bp, Homo sapien
gagggctgagcggaagagaggaaga

SEQ ID NO: 4670013 - DNA, 25 bp, Homo sapien
tcatctgaaaacttcagcgccattg

SEQ ID NO: 4670014 - DNA, 25 bp, Homo sapien
tgttgctggcaggtcgagagagggc

SEQ ID NO: 4670015 - DNA, 25 bp, Homo sapien
caacgaggcttttcataattgaaca

SEQ ID NO: 4670016 - DNA, 25 bp, Homo sapien
cctgacgatgggactcatgtctgct

SEQ ID NO: 4670017 - DNA, 25 bp, Homo sapien
gaatgggcttcaacgaggcttttca

SEQ ID NO: 4670018 - DNA, 25 bp, Homo sapien
agcagttcctccctgtagctcagaa

SEQ ID NO: 4670019 - DNA, 25 bp, Homo sapien
gattcctccatgtagagaaatttag

SEQ ID NO: 4670020 - DNA, 25 bp, Homo sapien
caggattcctccatgtagagaaatt

SEQ ID NO: 4670021 - DNA, 25 bp, Homo sapien
attcctccatgtagagaaatttagt

SEQ ID NO: 4670022 - DNA, 25 bp, Homo sapien
ccaaagtgaattggaggcactctgc

SEQ ID NO: 4670023 - DNA, 25 bp, Homo sapien
tttgtaccaaacagtgaagccgccc

SEQ ID NO: 4670024 - DNA, 25 bp, Homo sapien
gaagccgccctgatccgtgaggtat

SEQ ID NO: 4670025 - DNA, 25 bp, Homo sapien
ggttgaactaaaacacctgtcctgc

SEQ ID NO: 4670026 - DNA, 25 bp, Homo sapien
aatgactgtatgtcttcccgtgaag

SEQ ID NO: 4670027 - DNA, 25 bp, Homo sapien
gtttatgactaaaatcccactgcca

SEQ ID NO: 4670028 - DNA, 25 bp, Homo sapien
ttcagccagctcatgtcaacaaaag

SEQ ID NO: 4670029 - DNA, 25 bp, Homo sapien
gggtccaccccactgccagatgttt

SEQ ID NO: 4670030 - DNA, 25 bp, Homo sapien
aagggtggtgttaccagcttgctgc

SEQ ID NO: 4670031 - DNA, 25 bp, Homo sapien
gttgatgctatcagagaaacacaca

SEQ ID NO: 4670032 - DNA, 25 bp, Homo sapien
tgcatgtctgatgagcaagattagg

SEQ ID NO: 4670033 - DNA, 25 bp, Homo sapien
gagcaagattaggtatgtccataaa

SEQ ID NO: 4670034 - DNA, 25 bp, Homo sapien
tcacgagagattgcagttgatttca

SEQ ID NO: 4670035 - DNA, 25 bp, Homo sapien
tgatttcatcttccttgttggcttc

SEQ ID NO: 4670036 - DNA, 25 bp, Homo sapien
cacgagagattgcagttgatttcat

SEQ ID NO: 4670037 - DNA, 25 bp, Homo sapien
atcttccttgttggcttcccttatg

SEQ ID NO: 4670038 - DNA, 25 bp, Homo sapien
tctgatagcgtttactcactttgtg

SEQ ID NO: 4670039 - DNA, 25 bp, Homo sapien
taagtgttctgtgcgttctgactgc

SEQ ID NO: 4670040 - DNA, 25 bp, Homo sapien
tacattgagcaaatctataagcacc

SEQ ID NO: 4670041 - DNA, 25 bp, Homo sapien
taataaccctgcagttgtctctaag

SEQ ID NO: 4670042 - DNA, 25 bp, Homo sapien
acactccagggagttgcttaccgtc

SEQ ID NO: 4670043 - DNA, 25 bp, Homo sapien
ccaacggttcaggaatcagaagctg

SEQ ID NO: 4670044 - DNA, 25 bp, Homo sapien
acacctgcagttactcgtagctccc

SEQ ID NO: 4670045 - DNA, 25 bp, Homo sapien
cacactccaacggttcaggaatcag

SEQ ID NO: 4670046 - DNA, 25 bp, Homo sapien
ctgcagttactcgtagctccccttg

SEQ ID NO: 4670047 - DNA, 25 bp, Homo sapien
gctcacacgatgttccagccaggtc

SEQ ID NO: 4670048 - DNA, 25 bp, Homo sapien
tgatgtcaaccagccaaaagcgatg

SEQ ID NO: 4670049 - DNA, 25 bp, Homo sapien
cagctgaggtcatgacagaaacggc

SEQ ID NO: 4670050 - DNA, 25 bp, Homo sapien
aagcgggctcaagacagacctagta

SEQ ID NO: 4670051 - DNA, 25 bp, Homo sapien
gatcgcattggctactgaggtttgt

SEQ ID NO: 4670052 - DNA, 25 bp, Homo sapien
atcgcattggctactgaggtttgtg

SEQ ID NO: 4670053 - DNA, 25 bp, Homo sapien
tgatcgcattggctactgaggtttg

SEQ ID NO: 4670054 - DNA, 25 bp, Homo sapien
cgcattggctactgaggtttgtgca

SEQ ID NO: 4670055 - DNA, 25 bp, Homo sapien
cactcaagctgtgaggatcctggaa

SEQ ID NO: 4670056 - DNA, 25 bp, Homo sapien
gatcctggaacatagcgttgactga

SEQ ID NO: 4670057 - DNA, 25 bp, Homo sapien
aggtcctcagagtggagtccttctc

SEQ ID NO: 4670058 - DNA, 25 bp, Homo sapien
atggaccccgctcagagaggctagg

SEQ ID NO: 4670059 - DNA, 25 bp, Homo sapien
ccattggcatcaacaatccccagga

SEQ ID NO: 4670060 - DNA, 25 bp, Homo sapien
ccaggaacctgccacgtgcttgctt

SEQ ID NO: 4670061 - DNA, 25 bp, Homo sapien
ggcatcaacaatccccaggaacctg

SEQ ID NO: 4670062 - DNA, 25 bp, Homo sapien
ttggcatcaacaatccccaggaacc

SEQ ID NO: 4670063 - DNA, 25 bp, Homo sapien
gctgccagcctcagtacaggctgct

SEQ ID NO: 4670064 - DNA, 25 bp, Homo sapien
gtacaggctgctggcaggactatgc

SEQ ID NO: 4670065 - DNA, 25 bp, Homo sapien
acaggctgctggcaggactatgctc

SEQ ID NO: 4670066 - DNA, 25 bp, Homo sapien
aggctgctggcaggactatgctcat

SEQ ID NO: 4670067 - DNA, 25 bp, Homo sapien
tccaactgatgctgcccgtgtggga

SEQ ID NO: 4670068 - DNA, 25 bp, Homo sapien
ccaggagctctctaaggcctgttca

SEQ ID NO: 4670069 - DNA, 25 bp, Homo sapien
tgctgccagggcaagtatcccagtg

SEQ ID NO: 4670070 - DNA, 25 bp, Homo sapien
gcacagtccatggagtgcaccatca

SEQ ID NO: 4670071 - DNA, 25 bp, Homo sapien
gtgcccgtcttgtctcccggtcagc

SEQ ID NO: 4670072 - DNA, 25 bp, Homo sapien
ttgccttcaggtaggtctacttcag

SEQ ID NO: 4670073 - DNA, 25 bp, Homo sapien
cgtcttgtctcccggtcagcctgag

SEQ ID NO: 4670074 - DNA, 25 bp, Homo sapien
cttcaggtaggtctacttcagaggg

SEQ ID NO: 4670075 - DNA, 25 bp, Homo sapien
gggtatcaactattgtgagcagcaa

SEQ ID NO: 4670076 - DNA, 25 bp, Homo sapien
tgattaaaactttggattgttccac

SEQ ID NO: 4670077 - DNA, 25 bp, Homo sapien
gagcagcaactgaacaccaccttct

SEQ ID NO: 4670078 - DNA, 25 bp, Homo sapien
aatcctggggtatcaactattgtga

SEQ ID NO: 4670079 - DNA, 25 bp, Homo sapien
acgtccgttcacatgcgattctgca

SEQ ID NO: 4670080 - DNA, 25 bp, Homo sapien
tagtcgattgtaaggctgccagcaa

SEQ ID NO: 4670081 - DNA, 25 bp, Homo sapien
gcatttacgtagtcctcaagtttat

SEQ ID NO: 4670082 - DNA, 25 bp, Homo sapien
caggcatctgacgtccgttcacatg

SEQ ID NO: 4670083 - DNA, 25 bp, Homo sapien
caatgaagtataaacaacgctacac

SEQ ID NO: 4670084 - DNA, 25 bp, Homo sapien
gcaatgaagtataaacaacgctaca

SEQ ID NO: 4670085 - DNA, 25 bp, Homo sapien
aggagcaatgaagtataaacaacgc

SEQ ID NO: 4670086 - DNA, 25 bp, Homo sapien
gagcaatgaagtataaacaacgcta

SEQ ID NO: 4670087 - DNA, 25 bp, Homo sapien
tgtttcatgcaaacgcttcataaac

SEQ ID NO: 4670088 - DNA, 25 bp, Homo sapien
caatattcaatggtttaagtccatg

SEQ ID NO: 4670089 - DNA, 25 bp, Homo sapien
aacgcttcataaactcaatattcaa

SEQ ID NO: 4670090 - DNA, 25 bp, Homo sapien
tcaatattcaatggtttaagtccat

SEQ ID NO: 4670091 - DNA, 25 bp, Homo sapien
tcttctgtggcaataagtgagatga

SEQ ID NO: 4670092 - DNA, 25 bp, Homo sapien
tgtgtcttctgtggcaataagtgag

SEQ ID NO: 4670093 - DNA, 25 bp, Homo sapien
tctgtggcaataagtgagatgatac

SEQ ID NO: 4670094 - DNA, 25 bp, Homo sapien
actgttagcattcctctggtgtgag

SEQ ID NO: 4670095 - DNA, 25 bp, Homo sapien
ccaacaggtaaatggtcctttatct

SEQ ID NO: 4670096 - DNA, 25 bp, Homo sapien
ctaccacaccaacaggtaaatggtc

SEQ ID NO: 4670097 - DNA, 25 bp, Homo sapien
taccacaccaacaggtaaatggtcc

SEQ ID NO: 4670098 - DNA, 25 bp, Homo sapien
cacaccaacaggtaaatggtccttt

SEQ ID NO: 4670099 - DNA, 25 bp, Homo sapien
gccattaactttgatgatagtatta

SEQ ID NO: 4670100 - DNA, 25 bp, Homo sapien
cattaactttgatgatagtattact

SEQ ID NO: 4670101 - DNA, 25 bp, Homo sapien
ttaactttgatgatagtattactac

SEQ ID NO: 4670102 - DNA, 25 bp, Homo sapien
tttgccattaactttgatgatagta

SEQ ID NO: 4670103 - DNA, 25 bp, Homo sapien
tttcaacttcagcaataccccaagg

SEQ ID NO: 4670104 - DNA, 25 bp, Homo sapien
acttcagcaataccccaaggatgct

SEQ ID NO: 4670105 - DNA, 25 bp, Homo sapien
caataccccaaggatgctgctttcc

SEQ ID NO: 4670106 - DNA, 25 bp, Homo sapien
ctgcatgtgtgttcttatcaacata

SEQ ID NO: 4670107 - DNA, 25 bp, Homo sapien
agggctcttggtcagctgcccttta

SEQ ID NO: 4670108 - DNA, 25 bp, Homo sapien
ccggagggctcttggtcagctgccc

SEQ ID NO: 4670109 - DNA, 25 bp, Homo sapien
ccatttgtgccggagggctcttggt

SEQ ID NO: 4670110 - DNA, 25 bp, Homo sapien
atttgtgccggagggctcttggtca

SEQ ID NO: 4670111 - DNA, 25 bp, Homo sapien
gcaactaatacgtaactggtggtca

SEQ ID NO: 4670112 - DNA, 25 bp, Homo sapien
ggcatattggcaactaatacgtaac

SEQ ID NO: 4670113 - DNA, 25 bp, Homo sapien
tattggcaactaatacgtaactggt

SEQ ID NO: 4670114 - DNA, 25 bp, Homo sapien
agctggcatattggcaactaatacg

SEQ ID NO: 4670115 - DNA, 25 bp, Homo sapien
gctaaatgcagaatggtgacttttt

SEQ ID NO: 4670116 - DNA, 25 bp, Homo sapien
tacagctaaatgcagaatggtgact

SEQ ID NO: 4670117 - DNA, 25 bp, Homo sapien
ctaaatgcagaatggtgactttttt

SEQ ID NO: 4670118 - DNA, 25 bp, Homo sapien
cagctaaatgcagaatggtgacttt

SEQ ID NO: 4670119 - DNA, 25 bp, Homo sapien
aattttggacaataagggcatgtct

SEQ ID NO: 4670120 - DNA, 25 bp, Homo sapien
taagggcatgtctaaaacctgcagc

SEQ ID NO: 4670121 - DNA, 25 bp, Homo sapien
gggcatgtctaaaacctgcagccat

SEQ ID NO: 4670122 - DNA, 25 bp, Homo sapien
ggacaataagggcatgtctaaaacc

SEQ ID NO: 4670123 - DNA, 25 bp, Homo sapien
actacagcaagtcaaccaattagga

SEQ ID NO: 4670124 - DNA, 25 bp, Homo sapien
gtagggttgatagccagcagcaaga

SEQ ID NO: 4670125 - DNA, 25 bp, Homo sapien
tcaaccaattaggaacaagtgtagg

SEQ ID NO: 4670126 - DNA, 25 bp, Homo sapien
gttgtattatctttggtttccagac

SEQ ID NO: 4670127 - DNA, 25 bp, Homo sapien
tggctttccttggtacccctgagca

SEQ ID NO: 4670128 - DNA, 25 bp, Homo sapien
ggtacccctgagcacccaacccaga

SEQ ID NO: 4670129 - DNA, 25 bp, Homo sapien
ggctttccttggtacccctgagcac

SEQ ID NO: 4670130 - DNA, 25 bp, Homo sapien
tccttggtacccctgagcacccaac

SEQ ID NO: 4670131 - DNA, 25 bp, Homo sapien
tcagggccctcaatcagaagcaaga

SEQ ID NO: 4670132 - DNA, 25 bp, Homo sapien
aatcttggttccatgggcacaaggc

SEQ ID NO: 4670133 - DNA, 25 bp, Homo sapien
ttcatttgctgaccagagtccccac

SEQ ID NO: 4670134 - DNA, 25 bp, Homo sapien
tcccaatggaaaccctaaaggctca

SEQ ID NO: 4670135 - DNA, 25 bp, Homo sapien
caaatgcttggtgttgcttcagata

SEQ ID NO: 4670136 - DNA, 25 bp, Homo sapien
cattttaggccactgcatcgcagag

SEQ ID NO: 4670137 - DNA, 25 bp, Homo sapien
tctagaacttataatgagccaagcc

SEQ ID NO: 4670138 - DNA, 25 bp, Homo sapien
gaaattagtgctcgttgactgactg

SEQ ID NO: 4670139 - DNA, 25 bp, Homo sapien
tgtaacttctgtgctggttcagccc

SEQ ID NO: 4670140 - DNA, 25 bp, Homo sapien
ccatgaaacacaggcagcatctgaa

SEQ ID NO: 4670141 - DNA, 25 bp, Homo sapien
tgaagctgatcccacacccttatgg

SEQ ID NO: 4670142 - DNA, 25 bp, Homo sapien
aaatcggcccaccagtggctgaggc

SEQ ID NO: 4670143 - DNA, 25 bp, Homo sapien
tgcagtcctcactcaagaaaggcgg

SEQ ID NO: 4670144 - DNA, 25 bp, Homo sapien
ctttggttctgacttagacttcgtt

SEQ ID NO: 4670145 - DNA, 25 bp, Homo sapien
tgacttagacttcgtttcaaatttg

SEQ ID NO: 4670146 - DNA, 25 bp, Homo sapien
acaagtttaacattgatcaagaagg

SEQ ID NO: 4670147 - DNA, 25 bp, Homo sapien
gaaggcaagcccttctctgataaaa

SEQ ID NO: 4670148 - DNA, 25 bp, Homo sapien
cctgaaatgacctgagggcccctct

SEQ ID NO: 4670149 - DNA, 25 bp, Homo sapien
agccactcatgggccttcacagact

SEQ ID NO: 4670150 - DNA, 25 bp, Homo sapien
ttagccactcatgggccttcacaga

SEQ ID NO: 4670151 - DNA, 25 bp, Homo sapien
cttagccactcatgggccttcacag

SEQ ID NO: 4670152 - DNA, 25 bp, Homo sapien
cactcatgggccttcacagactctt

SEQ ID NO: 4670153 - DNA, 25 bp, Homo sapien
gcttgtacttaatgcgccctggaag

SEQ ID NO: 4670154 - DNA, 25 bp, Homo sapien
ggaagcagaactgttcccagggctg

SEQ ID NO: 4670155 - DNA, 25 bp, Homo sapien
tgttgagtggtcaagcagcttgtac

SEQ ID NO: 4670156 - DNA, 25 bp, Homo sapien
gagccttgctttttgatggatttca

SEQ ID NO: 4670157 - DNA, 25 bp, Homo sapien
gggtctgtgttagtgctagggcagg

SEQ ID NO: 4670158 - DNA, 25 bp, Homo sapien
gctgaggagtctgttgccaatgtcc

SEQ ID NO: 4670159 - DNA, 25 bp, Homo sapien
gagtctgttgccaatgtccagctga

SEQ ID NO: 4670160 - DNA, 25 bp, Homo sapien
gcatagagactgctgaggagtctgt

SEQ ID NO: 4670161 - DNA, 25 bp, Homo sapien
tcactgaaggcctacttttgatgcc

SEQ ID NO: 4670162 - DNA, 25 bp, Homo sapien
aaatgccgttgggtggtagaagtat

SEQ ID NO: 4670163 - DNA, 25 bp, Homo sapien
ccttaaagcggcaaatttgaaggtg

SEQ ID NO: 4670164 - DNA, 25 bp, Homo sapien
tgccgttgggtggtagaagtatatc

SEQ ID NO: 4670165 - DNA, 25 bp, Homo sapien
atgtcaaaacgtggagatgcatctt

SEQ ID NO: 4670166 - DNA, 25 bp, Homo sapien
ttgcggactttcctttgggctctgt

SEQ ID NO: 4670167 - DNA, 25 bp, Homo sapien
gttgcggactttcctttgggctctg

SEQ ID NO: 4670168 - DNA, 25 bp, Homo sapien
cctctgagctgtaaaggaggctcta

SEQ ID NO: 4670169 - DNA, 25 bp, Homo sapien
aaattgagtcttcctgactggtgag

SEQ ID NO: 4670170 - DNA, 25 bp, Homo sapien
agctctgccctttcatcactgagag

SEQ ID NO: 4670171 - DNA, 25 bp, Homo sapien
aatctgcctttgaaactgacctgga

SEQ ID NO: 4670172 - DNA, 25 bp, Homo sapien
tctggttcctcctccttcaagcctc

SEQ ID NO: 4670173 - DNA, 25 bp, Homo sapien
tggttcctcctccttcaagcctctt

SEQ ID NO: 4670174 - DNA, 25 bp, Homo sapien
ctcctccttcaagcctcttccatcc

SEQ ID NO: 4670175 - DNA, 25 bp, Homo sapien
ctggcctgccttcctctggttcctc

SEQ ID NO: 4670176 - DNA, 25 bp, Homo sapien
ggcaggctttccagcgaagcacctc

SEQ ID NO: 4670177 - DNA, 25 bp, Homo sapien
gcacctcgcaggaaaggtgccaccg

SEQ ID NO: 4670178 - DNA, 25 bp, Homo sapien
tcgcaggaaaggtgccaccgcgttg

SEQ ID NO: 4670179 - DNA, 25 bp, Homo sapien
cagcgaagcacctcgcaggaaaggt

SEQ ID NO: 4670180 - DNA, 25 bp, Homo sapien
tctggaagaaaatcgtagttgttca

SEQ ID NO: 4670181 - DNA, 25 bp, Homo sapien
ctggaagaaaatcgtagttgttcat

SEQ ID NO: 4670182 - DNA, 25 bp, Homo sapien
ctctggaagaaaatcgtagttgttc

SEQ ID NO: 4670183 - DNA, 25 bp, Homo sapien
ggaatctgacactgtacttcctgcc

SEQ ID NO: 4670184 - DNA, 25 bp, Homo sapien
ggtgtgtagaccctttcccagagca

SEQ ID NO: 4670185 - DNA, 25 bp, Homo sapien
cagtgggtgtgtagaccctttccca

SEQ ID NO: 4670186 - DNA, 25 bp, Homo sapien
acagcagtgggtgtgtagacccttt

SEQ ID NO: 4670187 - DNA, 25 bp, Homo sapien
gccttgaggaaagcccagaattcca

SEQ ID NO: 4670188 - DNA, 25 bp, Homo sapien
cagctggccttgaggaaagcccaga

SEQ ID NO: 4670189 - DNA, 25 bp, Homo sapien
cttgatcagggcagttttgggagga

SEQ ID NO: 4670190 - DNA, 25 bp, Homo sapien
tcagggcagttttgggaggaggtgg

SEQ ID NO: 4670191 - DNA, 25 bp, Homo sapien
tccgcaaagtcctggcttctagcct

SEQ ID NO: 4670192 - DNA, 25 bp, Homo sapien
tagccttgctgtcggcaaagagttt

SEQ ID NO: 4670193 - DNA, 25 bp, Homo sapien
gcttctagccttgctgtcggcaaag

SEQ ID NO: 4670194 - DNA, 25 bp, Homo sapien
gcctccgcaaagtcctggcttctag

SEQ ID NO: 4670195 - DNA, 25 bp, Homo sapien
catctgtcttcatcaatgcccgtgt

SEQ ID NO: 4670196 - DNA, 25 bp, Homo sapien
tcatcaatgcccgtgttccacagct

SEQ ID NO: 4670197 - DNA, 25 bp, Homo sapien
tgtcttcatcaatgcccgtgttcca

SEQ ID NO: 4670198 - DNA, 25 bp, Homo sapien
gcccgtgttccacagctgctggcgg

SEQ ID NO: 4670199 - DNA, 25 bp, Homo sapien
tgagtccgaagatgagtgttccctg

SEQ ID NO: 4670200 - DNA, 25 bp, Homo sapien
ctatgggtgccctcgaggcagctga

SEQ ID NO: 4670201 - DNA, 25 bp, Homo sapien
gtgttccctgaagcgcccaggcgtt

SEQ ID NO: 4670202 - DNA, 25 bp, Homo sapien
caggcgttggcatggacatccactt

SEQ ID NO: 4670203 - DNA, 25 bp, Homo sapien
gaaagagcactggacatagacctag

SEQ ID NO: 4670204 - DNA, 25 bp, Homo sapien
cctagtgctgcgtgatgttgagcac

SEQ ID NO: 4670205 - DNA, 25 bp, Homo sapien
acctcaaagatggttgcccatttta

SEQ ID NO: 4670206 - DNA, 25 bp, Homo sapien
ccttttcacactgtggagcggtgca

SEQ ID NO: 4670207 - DNA, 25 bp, Homo sapien
gttccctttgctcgggatgcccact

SEQ ID NO: 4670208 - DNA, 25 bp, Homo sapien
gacggcattcattggtagtacttct

SEQ ID NO: 4670209 - DNA, 25 bp, Homo sapien
ggatgcccacttcacgtcgacggca

SEQ ID NO: 4670210 - DNA, 25 bp, Homo sapien
cgtcacactgctgtgccttagtcat

SEQ ID NO: 4670211 - DNA, 25 bp, Homo sapien
tagctctgagaggtcaagcactgaa

SEQ ID NO: 4670212 - DNA, 25 bp, Homo sapien
taatgcacggtttgcaataagatcg

SEQ ID NO: 4670213 - DNA, 25 bp, Homo sapien
tatgtaaaaggcctgacttcgacgg

SEQ ID NO: 4670214 - DNA, 25 bp, Homo sapien
taagatcgcaacacacagccttggt

SEQ ID NO: 4670215 - DNA, 25 bp, Homo sapien
ccgccaactgcagccagcgatctgc

SEQ ID NO: 4670216 - DNA, 25 bp, Homo sapien
gcgcccgccaactgcagccagcgat

SEQ ID NO: 4670217 - DNA, 25 bp, Homo sapien
gcccgccaactgcagccagcgatct

SEQ ID NO: 4670218 - DNA, 25 bp, Homo sapien
cgccaactgcagccagcgatctgcg

SEQ ID NO: 4670219 - DNA, 25 bp, Homo sapien
acgctgcgcccgcagcaccgagccc

SEQ ID NO: 4670220 - DNA, 25 bp, Homo sapien
ggccaacgccagtagcgccaggagc

SEQ ID NO: 4670221 - DNA, 25 bp, Homo sapien
gtagcgccaggagcaccaacagcgc

SEQ ID NO: 4670222 - DNA, 25 bp, Homo sapien
ccgcgccgcagttcccgcgggcagc

SEQ ID NO: 4670223 - DNA, 25 bp, Homo sapien
ttaatctggtgcagccgcacgctct

SEQ ID NO: 4670224 - DNA, 25 bp, Homo sapien
gctgaggtagatgttaatctggtgc

SEQ ID NO: 4670225 - DNA, 25 bp, Homo sapien
caggcggcggtgcagtgagatgcgg

SEQ ID NO: 4670226 - DNA, 25 bp, Homo sapien
tagatgttaatctggtgcagccgca

SEQ ID NO: 4670227 - DNA, 25 bp, Homo sapien
ctctggctgggtaagaataacccaa

SEQ ID NO: 4670228 - DNA, 25 bp, Homo sapien
tggctgggtaagaataacccaacag

SEQ ID NO: 4670229 - DNA, 25 bp, Homo sapien
tctctggctgggtaagaataaccca

SEQ ID NO: 4670230 - DNA, 25 bp, Homo sapien
tctggctgggtaagaataacccaac

SEQ ID NO: 4670231 - DNA, 25 bp, Homo sapien
gcctctatcgactcaaaaagcagta

SEQ ID NO: 4670232 - DNA, 25 bp, Homo sapien
taaaagttaatgattgtcagtttgg

SEQ ID NO: 4670233 - DNA, 25 bp, Homo sapien
gaaaagcctctatcgactcaaaaag

SEQ ID NO: 4670234 - DNA, 25 bp, Homo sapien
gggaaaagcctctatcgactcaaaa

SEQ ID NO: 4670235 - DNA, 25 bp, Homo sapien
cagcccctcctgatcttcttttatc

SEQ ID NO: 4670236 - DNA, 25 bp, Homo sapien
ccagcccctcctgatcttcttttat

SEQ ID NO: 4670237 - DNA, 25 bp, Homo sapien
tttatctttatattaaggttatcac

SEQ ID NO: 4670238 - DNA, 25 bp, Homo sapien
tattaaggttatcacataaatgtct

SEQ ID NO: 4670239 - DNA, 25 bp, Homo sapien
tacagcggaacttcaggaactcagg

SEQ ID NO: 4670240 - DNA, 25 bp, Homo sapien
aatacagcggaacttcaggaactca

SEQ ID NO: 4670241 - DNA, 25 bp, Homo sapien
agcggaacttcaggaactcaggatc

SEQ ID NO: 4670242 - DNA, 25 bp, Homo sapien
gcaaatacagcggaacttcaggaac

SEQ ID NO: 4670243 - DNA, 25 bp, Homo sapien
gatatccggggatgtctcaaggaca

SEQ ID NO: 4670244 - DNA, 25 bp, Homo sapien
ctgtccgaaggagagttgaccaggc

SEQ ID NO: 4670245 - DNA, 25 bp, Homo sapien
ctctatcactgtagtcatctacaag

SEQ ID NO: 4670246 - DNA, 25 bp, Homo sapien
tacaaggatcacttcttctagcagg

SEQ ID NO: 4670247 - DNA, 25 bp, Homo sapien
tcccagagccctggccgggactcac

SEQ ID NO: 4670248 - DNA, 25 bp, Homo sapien
cagaaggacaggctcttcccagagc

SEQ ID NO: 4670249 - DNA, 25 bp, Homo sapien
ctacagaaggacaggctcttcccag

SEQ ID NO: 4670250 - DNA, 25 bp, Homo sapien
ttcccagagccctggccgggactca

SEQ ID NO: 4670251 - DNA, 25 bp, Homo sapien
gggtcaccgtgacaatctcggagga

SEQ ID NO: 4670252 - DNA, 25 bp, Homo sapien
aacaaagcaacaggggtcaccgtga

SEQ ID NO: 4670253 - DNA, 25 bp, Homo sapien
tgacaatctcggaggagcgcctcat

SEQ ID NO: 4670254 - DNA, 25 bp, Homo sapien
tcaccgtgacaatctcggaggagcg

SEQ ID NO: 4670255 - DNA, 25 bp, Homo sapien
tgggcagtcccgaaagctcattggc

SEQ ID NO: 4670256 - DNA, 25 bp, Homo sapien
cccttcgtggcactcacagtgacag

SEQ ID NO: 4670257 - DNA, 25 bp, Homo sapien
attggccaagcgctccttcaggtgc

SEQ ID NO: 4670258 - DNA, 25 bp, Homo sapien
ctctctcttgttggcgcggatcagg

SEQ ID NO: 4670259 - DNA, 25 bp, Homo sapien
tgggcaagttctagctggcccctgg

SEQ ID NO: 4670260 - DNA, 25 bp, Homo sapien
cagctcccccaggaactgatggctt

SEQ ID NO: 4670261 - DNA, 25 bp, Homo sapien
gcttgtgatcaagctggctggaacc

SEQ ID NO: 4670262 - DNA, 25 bp, Homo sapien
caagttctagctggcccctggcaaa

SEQ ID NO: 4670263 - DNA, 25 bp, Homo sapien
gcacccaagacatccatccgtctct

SEQ ID NO: 4670264 - DNA, 25 bp, Homo sapien
cacccaagacatccatccgtctctc

SEQ ID NO: 4670265 - DNA, 25 bp, Homo sapien
tccccaggtattcgaaggtgttcca

SEQ ID NO: 4670266 - DNA, 25 bp, Homo sapien
gggattgcatccgtatcctctccct

SEQ ID NO: 4670267 - DNA, 25 bp, Homo sapien
tcaggaactgtgtgccacgtgaaca

SEQ ID NO: 4670268 - DNA, 25 bp, Homo sapien
ctccagtcgaaaccgccgatctggg

SEQ ID NO: 4670269 - DNA, 25 bp, Homo sapien
aggtcacttcctgctccgatccctt

SEQ ID NO: 4670270 - DNA, 25 bp, Homo sapien
gctccgatcccttcagtggcttcta

SEQ ID NO: 4670271 - DNA, 25 bp, Homo sapien
ttcctgctccgatcccttcagtggc

SEQ ID NO: 4670272 - DNA, 25 bp, Homo sapien
gatcccttcagtggcttctacctgc

SEQ ID NO: 4670273 - DNA, 25 bp, Homo sapien
aaaaaagtatgatatccttatttca

SEQ ID NO: 4670274 - DNA, 25 bp, Homo sapien
ctaaaaaagtatgatatccttattt

SEQ ID NO: 4670275 - DNA, 25 bp, Homo sapien
taaaaaagtatgatatccttatttc

SEQ ID NO: 4670276 - DNA, 25 bp, Homo sapien
atatttcttactcacagcaaacagc

SEQ ID NO: 4670277 - DNA, 25 bp, Homo sapien
cataagaccccagatattcaaaata

SEQ ID NO: 4670278 - DNA, 25 bp, Homo sapien
tcctgtatcataagaccccagatat

SEQ ID NO: 4670279 - DNA, 25 bp, Homo sapien
tgtatcataagaccccagatattca

SEQ ID NO: 4670280 - DNA, 25 bp, Homo sapien
gggatgagctgcgggtccatagtat

SEQ ID NO: 4670281 - DNA, 25 bp, Homo sapien
aaaggagaggccaggtggtgagcag

SEQ ID NO: 4670282 - DNA, 25 bp, Homo sapien
gcacacagagaaaaggagaggccag

SEQ ID NO: 4670283 - DNA, 25 bp, Homo sapien
gcaggggatgagctgcgggtccata

SEQ ID NO: 4670284 - DNA, 25 bp, Homo sapien
catgggtgtgtttccagaaccccac

SEQ ID NO: 4670285 - DNA, 25 bp, Homo sapien
catggccaacatgggaacatgggtg

SEQ ID NO: 4670286 - DNA, 25 bp, Homo sapien
ggaacatgggtgtgtttccagaacc

SEQ ID NO: 4670287 - DNA, 25 bp, Homo sapien
caacatgggaacatgggtgtgtttc

SEQ ID NO: 4670288 - DNA, 25 bp, Homo sapien
ggttgcgatggtagtagagctcttt

SEQ ID NO: 4670289 - DNA, 25 bp, Homo sapien
gtagtagagctctttaaattcatcc

SEQ ID NO: 4670290 - DNA, 25 bp, Homo sapien
tggccagagccttgttgcgggagta

SEQ ID NO: 4670291 - DNA, 25 bp, Homo sapien
cagagccttgttgcgggagtaggga

SEQ ID NO: 4670292 - DNA, 25 bp, Homo sapien
agccagctttgatggagcattcgtc

SEQ ID NO: 4670293 - DNA, 25 bp, Homo sapien
cagctttgatggagcattcgtcgca

SEQ ID NO: 4670294 - DNA, 25 bp, Homo sapien
tttgatggagcattcgtcgcatgcc

SEQ ID NO: 4670295 - DNA, 25 bp, Homo sapien
tgatggagcattcgtcgcatgccag

SEQ ID NO: 4670296 - DNA, 25 bp, Homo sapien
aaccacttgaagtctttacactgga

SEQ ID NO: 4670297 - DNA, 25 bp, Homo sapien
tcctcaggcacatgcagttctggat

SEQ ID NO: 4670298 - DNA, 25 bp, Homo sapien
agtctttacactggagcttgtcccg

SEQ ID NO: 4670299 - DNA, 25 bp, Homo sapien
tgcagttctggatacacagtctcca

SEQ ID NO: 4670300 - DNA, 25 bp, Homo sapien
acctggtgtcccacaatctggtttt

SEQ ID NO: 4670301 - DNA, 25 bp, Homo sapien
ggcccatcccatgacagaggtacag

SEQ ID NO: 4670302 - DNA, 25 bp, Homo sapien
caaagcagtagtctgttagtccttt

SEQ ID NO: 4670303 - DNA, 25 bp, Homo sapien
tcatcgggagggttatagtcaaagc

SEQ ID NO: 4670304 - DNA, 25 bp, Homo sapien
tgcaagatgaacttctgattctctg

SEQ ID NO: 4670305 - DNA, 25 bp, Homo sapien
ggctggtgggtgttatagcgtattt

SEQ ID NO: 4670306 - DNA, 25 bp, Homo sapien
catgataagggtatccattcctgct

SEQ ID NO: 4670307 - DNA, 25 bp, Homo sapien
cagtttcttcgcagagatgcatgat

SEQ ID NO: 4670308 - DNA, 25 bp, Homo sapien
agtgtccactaccattccttgaggg

SEQ ID NO: 4670309 - DNA, 25 bp, Homo sapien
tttggctaacatccttacacttggg

SEQ ID NO: 4670310 - DNA, 25 bp, Homo sapien
agctgtttccatgtcggtgcctgca

SEQ ID NO: 4670311 - DNA, 25 bp, Homo sapien
caccaggactatgccagagagaacg

SEQ ID NO: 4670312 - DNA, 25 bp, Homo sapien
gcaacgaacttaatcatggctgagc

SEQ ID NO: 4670313 - DNA, 25 bp, Homo sapien
taggtcaactcattccgtgcagggt

SEQ ID NO: 4670314 - DNA, 25 bp, Homo sapien
tatctcagcaagtctctctctcagg

SEQ ID NO: 4670315 - DNA, 25 bp, Homo sapien
cagtgggttatatgccttgtgccaa

SEQ ID NO: 4670316 - DNA, 25 bp, Homo sapien
ggtaagtgtcttccgtgtaacgcag

SEQ ID NO: 4670317 - DNA, 25 bp, Homo sapien
gcttgtacaggctgcgtcccgcttg

SEQ ID NO: 4670318 - DNA, 25 bp, Homo sapien
tgtaacgcagcaactcaggactgtc

SEQ ID NO: 4670319 - DNA, 25 bp, Homo sapien
gcctctcacaggaccgatggtgcca

SEQ ID NO: 4670320 - DNA, 25 bp, Homo sapien
gatccgagttggtgcagtctcgtaa

SEQ ID NO: 4670321 - DNA, 25 bp, Homo sapien
ggaacgaaactgtcactcgactcct

SEQ ID NO: 4670322 - DNA, 25 bp, Homo sapien
gaagaaccatttctgatgatccgag

SEQ ID NO: 4670323 - DNA, 25 bp, Homo sapien
tggacacatttcttggactgttcgt

SEQ ID NO: 4670324 - DNA, 25 bp, Homo sapien
caaagcaatgcagcctagtttttgg

SEQ ID NO: 4670325 - DNA, 25 bp, Homo sapien
taagtctttgttgggcagagtcctg

SEQ ID NO: 4670326 - DNA, 25 bp, Homo sapien
taacatcttacgattaccctttgaa

SEQ ID NO: 4670327 - DNA, 25 bp, Homo sapien
cgatgggctccttgatacacgaggc

SEQ ID NO: 4670328 - DNA, 25 bp, Homo sapien
tacagtgcggcattgttagaagttc

SEQ ID NO: 4670329 - DNA, 25 bp, Homo sapien
tcaggttgacaaaatctcagggttg

SEQ ID NO: 4670330 - DNA, 25 bp, Homo sapien
tcagggttggtctgggatcattcac

SEQ ID NO: 4670331 - DNA, 25 bp, Homo sapien
gaagttcgctctcaagttgactcag

SEQ ID NO: 4670332 - DNA, 25 bp, Homo sapien
ctggactttgggtaacagaaactgt

SEQ ID NO: 4670333 - DNA, 25 bp, Homo sapien
gagactattgcacgctgcttgccca

SEQ ID NO: 4670334 - DNA, 25 bp, Homo sapien
agcagagactattgcacgctgcttg

SEQ ID NO: 4670335 - DNA, 25 bp, Homo sapien
attgcacgctgcttgcccagtcctt

SEQ ID NO: 4670336 - DNA, 25 bp, Homo sapien
caggaagaggacaacccaacgagtc

SEQ ID NO: 4670337 - DNA, 25 bp, Homo sapien
aacccaacgagtcatccagttatgc

SEQ ID NO: 4670338 - DNA, 25 bp, Homo sapien
gaggacaacccaacgagtcatccag

SEQ ID NO: 4670339 - DNA, 25 bp, Homo sapien
tcatccagttatgctttggaaaaaa

SEQ ID NO: 4670340 - DNA, 25 bp, Homo sapien
tgtcacccttggacaatgcaagctc

SEQ ID NO: 4670341 - DNA, 25 bp, Homo sapien
ttgtcacccttggacaatgcaagct

SEQ ID NO: 4670342 - DNA, 25 bp, Homo sapien
tcttgtcacccttggacaatgcaag

SEQ ID NO: 4670343 - DNA, 25 bp, Homo sapien
cttcttgtcacccttggacaatgca

SEQ ID NO: 4670344 - DNA, 25 bp, Homo sapien
caaagcacttcacgatcttgccagc

SEQ ID NO: 4670345 - DNA, 25 bp, Homo sapien
atgctgcacactgtctggcttgatg

SEQ ID NO: 4670346 - DNA, 25 bp, Homo sapien
cagaggaacttcctggccacgaggt

SEQ ID NO: 4670347 - DNA, 25 bp, Homo sapien
cgaggtggaatctcttctgctcaaa

SEQ ID NO: 4670348 - DNA, 25 bp, Homo sapien
tagctcggacgtgaagccctgttgg

SEQ ID NO: 4670349 - DNA, 25 bp, Homo sapien
tccagacatggttgcaatgtaatgt

SEQ ID NO: 4670350 - DNA, 25 bp, Homo sapien
ggtggccctgcttacgacttcctgt

SEQ ID NO: 4670351 - DNA, 25 bp, Homo sapien
tgtaatgtggcagcaagctagcatt

SEQ ID NO: 4670352 - DNA, 25 bp, Homo sapien
aagctcacggactgcagggactgtg

SEQ ID NO: 4670353 - DNA, 25 bp, Homo sapien
aggaccacaagctcacggactgcag

SEQ ID NO: 4670354 - DNA, 25 bp, Homo sapien
actgcagggactgtgtccaattctg

SEQ ID NO: 4670355 - DNA, 25 bp, Homo sapien
gcagggactgtgtccaattctggta

SEQ ID NO: 4670356 - DNA, 25 bp, Homo sapien
tatttcacgtagacgttgggtgcag

SEQ ID NO: 4670357 - DNA, 25 bp, Homo sapien
cactgtatttcacgtagacgttggg

SEQ ID NO: 4670358 - DNA, 25 bp, Homo sapien
gggttgatctgcactgtatttcacg

SEQ ID NO: 4670359 - DNA, 25 bp, Homo sapien
ggcagttgggttgatctgcactgta

SEQ ID NO: 4670360 - DNA, 25 bp, Homo sapien
tccctcatcagtgcaccagacaatg

SEQ ID NO: 4670361 - DNA, 25 bp, Homo sapien
caaaacgccacacgtttgggctgct

SEQ ID NO: 4670362 - DNA, 25 bp, Homo sapien
cagacaatgactgccgcttccacag

SEQ ID NO: 4670363 - DNA, 25 bp, Homo sapien
accacacaaggaggcctgtcaaaga

SEQ ID NO: 4670364 - DNA, 25 bp, Homo sapien
taagacaactaaggaatcttctagg

SEQ ID NO: 4670365 - DNA, 25 bp, Homo sapien
gaaataagacaactaaggaatcttc

SEQ ID NO: 4670366 - DNA, 25 bp, Homo sapien
agaaataagacaactaaggaatctt

SEQ ID NO: 4670367 - DNA, 25 bp, Homo sapien
gacaactaaggaatcttctaggtac

SEQ ID NO: 4670368 - DNA, 25 bp, Homo sapien
caatcaattacgggtaaaactggca

SEQ ID NO: 4670369 - DNA, 25 bp, Homo sapien
atcaattacgggtaaaactggcagt

SEQ ID NO: 4670370 - DNA, 25 bp, Homo sapien
cagggactccaatcaattacgggta

SEQ ID NO: 4670371 - DNA, 25 bp, Homo sapien
ctccaatcaattacgggtaaaactg

SEQ ID NO: 4670372 - DNA, 25 bp, Homo sapien
gtaggagatgccaataaacgctgga

SEQ ID NO: 4670373 - DNA, 25 bp, Homo sapien
aacagctcaggtagtaggagatgcc

SEQ ID NO: 4670374 - DNA, 25 bp, Homo sapien
tttgttccctgcctaaaacagctca

SEQ ID NO: 4670375 - DNA, 25 bp, Homo sapien
tgcctaaaacagctcaggtagtagg

SEQ ID NO: 4670376 - DNA, 25 bp, Homo sapien
atgtaacctgcgaggaaagccccgc

SEQ ID NO: 4670377 - DNA, 25 bp, Homo sapien
gcggcggcgggcagaatcccggctc

SEQ ID NO: 4670378 - DNA, 25 bp, Homo sapien
gagtcacccgcgctctgaaacccga

SEQ ID NO: 4670379 - DNA, 25 bp, Homo sapien
acccgcggctgccttatgtaacctg

SEQ ID NO: 4670380 - DNA, 25 bp, Homo sapien
ggaggacgaagggtcgctgagcgct

SEQ ID NO: 4670381 - DNA, 25 bp, Homo sapien
ggagccccggaaggcgcgcggctag

SEQ ID NO: 4670382 - DNA, 25 bp, Homo sapien
cgttggagcttagcggaggacgaag

SEQ ID NO: 4670383 - DNA, 25 bp, Homo sapien
ctagtcgagcagagcgttggagctt

SEQ ID NO: 4670384 - DNA, 25 bp, Homo sapien
agcagacaccagcactgcccgttgt

SEQ ID NO: 4670385 - DNA, 25 bp, Homo sapien
cgagagcagcatcagcagacaccag

SEQ ID NO: 4670386 - DNA, 25 bp, Homo sapien
agagcagcatcagcagacaccagca

SEQ ID NO: 4670387 - DNA, 25 bp, Homo sapien
gacaccagcactgcccgttgttcct

SEQ ID NO: 4670388 - DNA, 25 bp, Homo sapien
ggtgacagcagggaggggcgtggag

SEQ ID NO: 4670389 - DNA, 25 bp, Homo sapien
tgacagcagggaggggcgtggagac

SEQ ID NO: 4670390 - DNA, 25 bp, Homo sapien
tgggtgacagcagggaggggcgtgg

SEQ ID NO: 4670391 - DNA, 25 bp, Homo sapien
ctgggtgacagcagggaggggcgtg

SEQ ID NO: 4670392 - DNA, 25 bp, Homo sapien
aagccagccagcacgcacaacctaa

SEQ ID NO: 4670393 - DNA, 25 bp, Homo sapien
cagcacgcacaacctaagctgctgg

SEQ ID NO: 4670394 - DNA, 25 bp, Homo sapien
aacctaagctgctggcgctgggtgc

SEQ ID NO: 4670395 - DNA, 25 bp, Homo sapien
gcacaacctaagctgctggcgctgg

SEQ ID NO: 4670396 - DNA, 25 bp, Homo sapien
tgtccctcccggtgttcatgcttcg

SEQ ID NO: 4670397 - DNA, 25 bp, Homo sapien
gccccagatgtccctcccggtgttc

SEQ ID NO: 4670398 - DNA, 25 bp, Homo sapien
agatgtccctcccggtgttcatgct

SEQ ID NO: 4670399 - DNA, 25 bp, Homo sapien
ccagatgtccctcccggtgttcatg

SEQ ID NO: 4670400 - DNA, 25 bp, Homo sapien
gcaggcagaactctggacccatttt

SEQ ID NO: 4670401 - DNA, 25 bp, Homo sapien
tgcaggcagaactctggacccattt

SEQ ID NO: 4670402 - DNA, 25 bp, Homo sapien
gtgcaggcagaactctggacccatt

SEQ ID NO: 4670403 - DNA, 25 bp, Homo sapien
gggatagtagggagagtcgatccag

SEQ ID NO: 4670404 - DNA, 25 bp, Homo sapien
tcagggatagtagggagagtcgatc

SEQ ID NO: 4670405 - DNA, 25 bp, Homo sapien
tagtagggagagtcgatccagagac

SEQ ID NO: 4670406 - DNA, 25 bp, Homo sapien
caatggcattcagggatagtaggga

SEQ ID NO: 4670407 - DNA, 25 bp, Homo sapien
tagatgttgacctggatctgctcta

SEQ ID NO: 4670408 - DNA, 25 bp, Homo sapien
ggatctgctctaaccctagactttt

SEQ ID NO: 4670409 - DNA, 25 bp, Homo sapien
tgttgacctggatctgctctaaccc

SEQ ID NO: 4670410 - DNA, 25 bp, Homo sapien
gacctggatctgctctaaccctaga

SEQ ID NO: 4670411 - DNA, 25 bp, Homo sapien
ccactaagattgtagttggagagga

SEQ ID NO: 4670412 - DNA, 25 bp, Homo sapien
aagtcagaactagctagccactaag

SEQ ID NO: 4670413 - DNA, 25 bp, Homo sapien
tctctgagctagacaatcaagtcag

SEQ ID NO: 4670414 - DNA, 25 bp, Homo sapien
tgccaacttgaactgtgaccatgag

SEQ ID NO: 4670415 - DNA, 25 bp, Homo sapien
gaagcaagaagattgagtggcaaga

SEQ ID NO: 4670416 - DNA, 25 bp, Homo sapien
gacagacctgtgtgctgatgtcaag

SEQ ID NO: 4670417 - DNA, 25 bp, Homo sapien
ctgtggtgagaatttcacatatgaa

SEQ ID NO: 4670418 - DNA, 25 bp, Homo sapien
gctagaagattactgtggctgcagt

SEQ ID NO: 4670419 - DNA, 25 bp, Homo sapien
acagtctccaaatgtttgctggagg

SEQ ID NO: 4670420 - DNA, 25 bp, Homo sapien
caaggcgacacaggactgctggcag

SEQ ID NO: 4670421 - DNA, 25 bp, Homo sapien
tagaccagggggtttcaagcagtat

SEQ ID NO: 4670422 - DNA, 25 bp, Homo sapien
ccgtcaggcccagcattccaaggcg

SEQ ID NO: 4670423 - DNA, 25 bp, Homo sapien
ctggacatggatgctctacagccca

SEQ ID NO: 4670424 - DNA, 25 bp, Homo sapien
gggctgcattagaagtcctctctgt

SEQ ID NO: 4670425 - DNA, 25 bp, Homo sapien
tctgggggctgcattagaagtcctc

SEQ ID NO: 4670426 - DNA, 25 bp, Homo sapien
tgggggctgcattagaagtcctctc

SEQ ID NO: 4670427 - DNA, 25 bp, Homo sapien
ctctgggggctgcattagaagtcct

SEQ ID NO: 4670428 - DNA, 25 bp, Homo sapien
cttgcagggagaaatggtggagctc

SEQ ID NO: 4670429 - DNA, 25 bp, Homo sapien
ttgcagggagaaatggtggagctcc

SEQ ID NO: 4670430 - DNA, 25 bp, Homo sapien
gcagggagaaatggtggagctccat

SEQ ID NO: 4670431 - DNA, 25 bp, Homo sapien
tgcagggagaaatggtggagctcca

SEQ ID NO: 4670432 - DNA, 25 bp, Homo sapien
agctgcgtgaggtccaggtgaccct

SEQ ID NO: 4670433 - DNA, 25 bp, Homo sapien
ccgatgagctgcgtgaggtccaggt

SEQ ID NO: 4670434 - DNA, 25 bp, Homo sapien
tgagctgcgtgaggtccaggtgacc

SEQ ID NO: 4670435 - DNA, 25 bp, Homo sapien
gatgagctgcgtgaggtccaggtga

SEQ ID NO: 4670436 - DNA, 25 bp, Homo sapien
gacaatcatggcgaagcggttccac

SEQ ID NO: 4670437 - DNA, 25 bp, Homo sapien
tgtgggtcatcacaggcaccgagaa

SEQ ID NO: 4670438 - DNA, 25 bp, Homo sapien
tccgtgtagtagaggatgatccgct

SEQ ID NO: 4670439 - DNA, 25 bp, Homo sapien
cacagttcacgaggagggtcacttc

SEQ ID NO: 4670440 - DNA, 25 bp, Homo sapien
tcggggtgcacggtgagctgctgga

SEQ ID NO: 4670441 - DNA, 25 bp, Homo sapien
ggggtcggggtgcacggtgagctgc

SEQ ID NO: 4670442 - DNA, 25 bp, Homo sapien
ggtgcacggtgagctgctggaggga

SEQ ID NO: 4670443 - DNA, 25 bp, Homo sapien
cctggggtcggggtgcacggtgagc

SEQ ID NO: 4670444 - DNA, 25 bp, Homo sapien
taagatctcagctactccgtctgcc

SEQ ID NO: 4670445 - DNA, 25 bp, Homo sapien
tgagtgtaggtgacggcttctaaga

SEQ ID NO: 4670446 - DNA, 25 bp, Homo sapien
taggtgacggcttctaagatctcag

SEQ ID NO: 4670447 - DNA, 25 bp, Homo sapien
gcttctaagatctcagctactccgt

SEQ ID NO: 4670448 - DNA, 25 bp, Homo sapien
tggaggtgtgtttatgggttcaact

SEQ ID NO: 4670449 - DNA, 25 bp, Homo sapien
ttggaggtgtgtttatgggttcaac

SEQ ID NO: 4670450 - DNA, 25 bp, Homo sapien
gagttggaggtgtgtttatgggttc

SEQ ID NO: 4670451 - DNA, 25 bp, Homo sapien
atggagttggaggtgtgtttatggg

SEQ ID NO: 4670452 - DNA, 25 bp, Homo sapien
tggatgatgctcatgttggtggttt

SEQ ID NO: 4670453 - DNA, 25 bp, Homo sapien
tggccagcacgggtcgagcactctc

SEQ ID NO: 4670454 - DNA, 25 bp, Homo sapien
ggtgccgtgcaagcagccgattgcc

SEQ ID NO: 4670455 - DNA, 25 bp, Homo sapien
gccgattgcctgtcctccaaggact

SEQ ID NO: 4670456 - DNA, 25 bp, Homo sapien
gggtcgagcactctcgtcttccctg

SEQ ID NO: 4670457 - DNA, 25 bp, Homo sapien
gtgtgtcattcaggatctcaccaga

SEQ ID NO: 4670458 - DNA, 25 bp, Homo sapien
agtgtgtcattcaggatctcaccag

SEQ ID NO: 4670459 - DNA, 25 bp, Homo sapien
gtcagtaatggggtcaccatccaca

SEQ ID NO: 4670460 - DNA, 25 bp, Homo sapien
ctgagccgctgtcagtaatggggtc

SEQ ID NO: 4670461 - DNA, 25 bp, Homo sapien
catagagagggttggtcccccggtg

SEQ ID NO: 4670462 - DNA, 25 bp, Homo sapien
ttctccgtggacatagagagggttg

SEQ ID NO: 4670463 - DNA, 25 bp, Homo sapien
tgggttctccgtggacatagagagg

SEQ ID NO: 4670464 - DNA, 25 bp, Homo sapien
agcagtgctgatgggcacctcggcc

SEQ ID NO: 4670465 - DNA, 25 bp, Homo sapien
tctgggcggacatggagaggtccag

SEQ ID NO: 4670466 - DNA, 25 bp, Homo sapien
gctaaacgctcttcattatctggac

SEQ ID NO: 4670467 - DNA, 25 bp, Homo sapien
ttccccaggcatgctggcgagtgcc

SEQ ID NO: 4670468 - DNA, 25 bp, Homo sapien
ttccccgaggctctgggcggacatg

SEQ ID NO: 4670469 - DNA, 25 bp, Homo sapien
tttttcagaaagagggatgctcagg

SEQ ID NO: 4670470 - DNA, 25 bp, Homo sapien
acaaagtgaagggaatcaggaaatg

SEQ ID NO: 4670471 - DNA, 25 bp, Homo sapien
aaagctttcatatgagcaagttgtc

SEQ ID NO: 4670472 - DNA, 25 bp, Homo sapien
taaaatggtctttccagagattggg

SEQ ID NO: 4670473 - DNA, 25 bp, Homo sapien
taaatgggagaatgagtttcctcag

SEQ ID NO: 4670474 - DNA, 25 bp, Homo sapien
catgacatgcagcaaccctacaggg

SEQ ID NO: 4670475 - DNA, 25 bp, Homo sapien
ttcaggaagtgcatataggagctgg

SEQ ID NO: 4670476 - DNA, 25 bp, Homo sapien
cattttgcacctcccagctgaaagg

SEQ ID NO: 4670477 - DNA, 25 bp, Homo sapien
tgagggacacttcggttgcagctgc

SEQ ID NO: 4670478 - DNA, 25 bp, Homo sapien
ctcatcctcaaaagtactgagggac

SEQ ID NO: 4670479 - DNA, 25 bp, Homo sapien
agtactgagggacacttcggttgca

SEQ ID NO: 4670480 - DNA, 25 bp, Homo sapien
tcaaaagtactgagggacacttcgg

SEQ ID NO: 4670481 - DNA, 25 bp, Homo sapien
tggagtgatccatctttcaggagcc

SEQ ID NO: 4670482 - DNA, 25 bp, Homo sapien
gaggggctcctctgttgtggctgct

SEQ ID NO: 4670483 - DNA, 25 bp, Homo sapien
gggagggctgccggactcttcaccc

SEQ ID NO: 4670484 - DNA, 25 bp, Homo sapien
tggctgctgccaagtcttcttcatc

SEQ ID NO: 4670485 - DNA, 25 bp, Homo sapien
ttgcggacaggagtgaggtcacatt

SEQ ID NO: 4670486 - DNA, 25 bp, Homo sapien
atcaacgaatgaatgcaagacaact

SEQ ID NO: 4670487 - DNA, 25 bp, Homo sapien
tatctacaagtgtcctgactgaggg

SEQ ID NO: 4670488 - DNA, 25 bp, Homo sapien
gctatgtgtccagtcaatgagtgaa

SEQ ID NO: 4670489 - DNA, 25 bp, Homo sapien
cttctcaaagctgaaaacatcaagg

SEQ ID NO: 4670490 - DNA, 25 bp, Homo sapien
cagactgacttctcaaagctgaaaa

SEQ ID NO: 4670491 - DNA, 25 bp, Homo sapien
gacttctcaaagctgaaaacatcaa

SEQ ID NO: 4670492 - DNA, 25 bp, Homo sapien
tctcaaagctgaaaacatcaagggt

SEQ ID NO: 4670493 - DNA, 25 bp, Homo sapien
cttttctcctttgggcccagcctgt

SEQ ID NO: 4670494 - DNA, 25 bp, Homo sapien
tcattcccacatgttctctttgagc

SEQ ID NO: 4670495 - DNA, 25 bp, Homo sapien
tgtcctttcattcccacatgttctc

SEQ ID NO: 4670496 - DNA, 25 bp, Homo sapien
ccagcctgtcctttcattcccacat

SEQ ID NO: 4670497 - DNA, 25 bp, Homo sapien
gtccaacaggcccagaaggttcagg

SEQ ID NO: 4670498 - DNA, 25 bp, Homo sapien
tgggtccaacaggcccagaaggttc

SEQ ID NO: 4670499 - DNA, 25 bp, Homo sapien
ggagggccaggaagctcctccccag

SEQ ID NO: 4670500 - DNA, 25 bp, Homo sapien
cgtgggtccaacaggcccagaaggt

SEQ ID NO: 4670501 - DNA, 25 bp, Homo sapien
accagagccagagccgacgtccgag

SEQ ID NO: 4670502 - DNA, 25 bp, Homo sapien
gccgacgtccgagccccagcctagg

SEQ ID NO: 4670503 - DNA, 25 bp, Homo sapien
tgctcactgcccaccaggtcaccag

SEQ ID NO: 4670504 - DNA, 25 bp, Homo sapien
gctcactgcccaccaggtcaccaga

SEQ ID NO: 4670505 - DNA, 25 bp, Homo sapien
tccaggagatccagggggtcccatg

SEQ ID NO: 4670506 - DNA, 25 bp, Homo sapien
ccagggggtcccatgaaaacatcag

SEQ ID NO: 4670507 - DNA, 25 bp, Homo sapien
ggaatcccaggtaagccaggtggcc

SEQ ID NO: 4670508 - DNA, 25 bp, Homo sapien
cgggggcccaggttcaccagcaggt

SEQ ID NO: 4670509 - DNA, 25 bp, Homo sapien
ctggggaacatcagtgacaatcaac

SEQ ID NO: 4670510 - DNA, 25 bp, Homo sapien
gggaacatcagtgacaatcaaccca

SEQ ID NO: 4670511 - DNA, 25 bp, Homo sapien
gaacatcagtgacaatcaacccaca

SEQ ID NO: 4670512 - DNA, 25 bp, Homo sapien
catcagtgacaatcaacccacaaca

SEQ ID NO: 4670513 - DNA, 25 bp, Homo sapien
ggccggtggctccatcaactccagg

SEQ ID NO: 4670514 - DNA, 25 bp, Homo sapien
aaggccggtggctccatcaactcca

SEQ ID NO: 4670515 - DNA, 25 bp, Homo sapien
gtggctccatcaactccaggctgtc

SEQ ID NO: 4670516 - DNA, 25 bp, Homo sapien
cggtggctccatcaactccaggctg

SEQ ID NO: 4670517 - DNA, 25 bp, Homo sapien
gcccgaaggcacttccacaaagtcc

SEQ ID NO: 4670518 - DNA, 25 bp, Homo sapien
cagcccgaaggcacttccacaaagt

SEQ ID NO: 4670519 - DNA, 25 bp, Homo sapien
cgaaggcacttccacaaagtcccat

SEQ ID NO: 4670520 - DNA, 25 bp, Homo sapien
ccgaaggcacttccacaaagtccca

SEQ ID NO: 4670521 - DNA, 25 bp, Homo sapien
ctgagccattaggccctcttgctcc

SEQ ID NO: 4670522 - DNA, 25 bp, Homo sapien
cttttcaccaactgagccattaggc

SEQ ID NO: 4670523 - DNA, 25 bp, Homo sapien
ttttcaccaactgagccattaggcc

SEQ ID NO: 4670524 - DNA, 25 bp, Homo sapien
caactgagccattaggccctcttgc

SEQ ID NO: 4670525 - DNA, 25 bp, Homo sapien
atccaagtcccattgtgcatccagg

SEQ ID NO: 4670526 - DNA, 25 bp, Homo sapien
agtcccattgtgcatccagggcctg

SEQ ID NO: 4670527 - DNA, 25 bp, Homo sapien
gtaagcctctgttgccagggtcacc

SEQ ID NO: 4670528 - DNA, 25 bp, Homo sapien
gggtccaggtaagcctctgttgcca

SEQ ID NO: 4670529 - DNA, 25 bp, Homo sapien
cattcaatagctgggtgcttccaga

SEQ ID NO: 4670530 - DNA, 25 bp, Homo sapien
attcaatagctgggtgcttccagag

SEQ ID NO: 4670531 - DNA, 25 bp, Homo sapien
ttcattcaatagctgggtgcttcca

SEQ ID NO: 4670532 - DNA, 25 bp, Homo sapien
ggttcattcaatagctgggtgcttc

SEQ ID NO: 4670533 - DNA, 25 bp, Homo sapien
attagacaagaccttgatgtgccca

SEQ ID NO: 4670534 - DNA, 25 bp, Homo sapien
ttagacaagaccttgatgtgcccag

SEQ ID NO: 4670535 - DNA, 25 bp, Homo sapien
tcatgaatccatgggtgatattgat

SEQ ID NO: 4670536 - DNA, 25 bp, Homo sapien
gaaattcatgaatccatgggtgata

SEQ ID NO: 4670537 - DNA, 25 bp, Homo sapien
gtccgagaaattcatgaatccatgg

SEQ ID NO: 4670538 - DNA, 25 bp, Homo sapien
aatccatgggtgatattgatcaagg

SEQ ID NO: 4670539 - DNA, 25 bp, Homo sapien
attctggggcagctgtagataccaa

SEQ ID NO: 4670540 - DNA, 25 bp, Homo sapien
ttctggggcagctgtagataccaac

SEQ ID NO: 4670541 - DNA, 25 bp, Homo sapien
cacgctggattaggagcggcatttc

SEQ ID NO: 4670542 - DNA, 25 bp, Homo sapien
cttccaaaggcctcagcatgttccc

SEQ ID NO: 4670543 - DNA, 25 bp, Homo sapien
ctgtgacacaccaaagatagagcac

SEQ ID NO: 4670544 - DNA, 25 bp, Homo sapien
agatagagcacgctggattaggagc

SEQ ID NO: 4670545 - DNA, 25 bp, Homo sapien
cctggcagcccaggcaacccgtccg

SEQ ID NO: 4670546 - DNA, 25 bp, Homo sapien
tcctggcagcccaggcaacccgtcc

SEQ ID NO: 4670547 - DNA, 25 bp, Homo sapien
gcagcccaggcaacccgtccggccc

SEQ ID NO: 4670548 - DNA, 25 bp, Homo sapien
tggcagcccaggcaacccgtccggc

SEQ ID NO: 4670549 - DNA, 25 bp, Homo sapien
tgctctgaaatgtgccccaggtctt

SEQ ID NO: 4670550 - DNA, 25 bp, Homo sapien
gaatcatggtcagagtcatggtcac

SEQ ID NO: 4670551 - DNA, 25 bp, Homo sapien
gtcacaatcgtggtcatggttgcca

SEQ ID NO: 4670552 - DNA, 25 bp, Homo sapien
gaacacaggaccactcatttagagg

SEQ ID NO: 4670553 - DNA, 25 bp, Homo sapien
tgttctccttttagtcctggaaagc

SEQ ID NO: 4670554 - DNA, 25 bp, Homo sapien
tctccttttagtcctggaaagccag

SEQ ID NO: 4670555 - DNA, 25 bp, Homo sapien
ttctccttttagtcctggaaagcca

SEQ ID NO: 4670556 - DNA, 25 bp, Homo sapien
ctgttctccttttagtcctggaaag

SEQ ID NO: 4670557 - DNA, 25 bp, Homo sapien
ctttccagaggaatgtcctctgtca

SEQ ID NO: 4670558 - DNA, 25 bp, Homo sapien
agaggaatgtcctctgtcaggatgg

SEQ ID NO: 4670559 - DNA, 25 bp, Homo sapien
tccagaggaatgtcctctgtcagga

SEQ ID NO: 4670560 - DNA, 25 bp, Homo sapien
ctctgtcaggatggcacccggctct

SEQ ID NO: 4670561 - DNA, 25 bp, Homo sapien
cctggggctccatgcattccaggtt

SEQ ID NO: 4670562 - DNA, 25 bp, Homo sapien
ctggggctccatgcattccaggttc

SEQ ID NO: 4670563 - DNA, 25 bp, Homo sapien
tcctggggctccatgcattccaggt

SEQ ID NO: 4670564 - DNA, 25 bp, Homo sapien
tcctttatgtcctggtggtcctttg

SEQ ID NO: 4670565 - DNA, 25 bp, Homo sapien
tctcctttatgtcctggtggtcctt

SEQ ID NO: 4670566 - DNA, 25 bp, Homo sapien
ccaaattctcctttatgtcctggtg

SEQ ID NO: 4670567 - DNA, 25 bp, Homo sapien
aattctcctttatgtcctggtggtc

SEQ ID NO: 4670568 - DNA, 25 bp, Homo sapien
ctgcataatgacccctggatctcct

SEQ ID NO: 4670569 - DNA, 25 bp, Homo sapien
ctggatctcctttggtacccttgag

SEQ ID NO: 4670570 - DNA, 25 bp, Homo sapien
cctttgatgttaatcacagctccag

SEQ ID NO: 4670571 - DNA, 25 bp, Homo sapien
tcctttgatgttaatcacagctcca

SEQ ID NO: 4670572 - DNA, 25 bp, Homo sapien
cagtgtggtcggacgggtattggga

SEQ ID NO: 4670573 - DNA, 25 bp, Homo sapien
ccccactgggttttctcacagaaat

SEQ ID NO: 4670574 - DNA, 25 bp, Homo sapien
tgaaaagtgatgagctctggactcc

SEQ ID NO: 4670575 - DNA, 25 bp, Homo sapien
gactcccaggatgagcagtatcaac

SEQ ID NO: 4670576 - DNA, 25 bp, Homo sapien
cgtgaaaagtgatgagctctggact

SEQ ID NO: 4670577 - DNA, 25 bp, Homo sapien
gagctctggactcccaggatgagca

SEQ ID NO: 4670578 - DNA, 25 bp, Homo sapien
ctgggctccctggtcgcctttttct

SEQ ID NO: 4670579 - DNA, 25 bp, Homo sapien
tgggctccctggtcgcctttttctc

SEQ ID NO: 4670580 - DNA, 25 bp, Homo sapien
gtcgcatttgttctcaggagcaaaa

SEQ ID NO: 4670581 - DNA, 25 bp, Homo sapien
aaaaatcaaaggcaagattgagaac

SEQ ID NO: 4670582 - DNA, 25 bp, Homo sapien
aatcaaaggcaagattgagaacaag

SEQ ID NO: 4670583 - DNA, 25 bp, Homo sapien
tctcagtcgcatttgttctcaggag

SEQ ID NO: 4670584 - DNA, 25 bp, Homo sapien
ttcagaaagtgtctcaggtaagcta

SEQ ID NO: 4670585 - DNA, 25 bp, Homo sapien
tgtctcaggtaagctagatcaagtg

SEQ ID NO: 4670586 - DNA, 25 bp, Homo sapien
gaaagtgtctcaggtaagctagatc

SEQ ID NO: 4670587 - DNA, 25 bp, Homo sapien
aggtaagctagatcaagtggaggac

SEQ ID NO: 4670588 - DNA, 25 bp, Homo sapien
gtaagagtgggatgaactcagtctc

SEQ ID NO: 4670589 - DNA, 25 bp, Homo sapien
gagaacacaggaatatttcagtaag

SEQ ID NO: 4670590 - DNA, 25 bp, Homo sapien
tttcagtaagagtgggatgaactca

SEQ ID NO: 4670591 - DNA, 25 bp, Homo sapien
gaacacaggaatatttcagtaagag

SEQ ID NO: 4670592 - DNA, 25 bp, Homo sapien
tcacctttgaaccccttgtctccat

SEQ ID NO: 4670593 - DNA, 25 bp, Homo sapien
cacctttgaaccccttgtctccatt

SEQ ID NO: 4670594 - DNA, 25 bp, Homo sapien
cgggcctggatttccgggcaggcct

SEQ ID NO: 4670595 - DNA, 25 bp, Homo sapien
tggatttccgggcaggcctggaggc

SEQ ID NO: 4670596 - DNA, 25 bp, Homo sapien
cctggatttccgggcaggcctggag

SEQ ID NO: 4670597 - DNA, 25 bp, Homo sapien
agccgggcctggatttccgggcagg

SEQ ID NO: 4670598 - DNA, 25 bp, Homo sapien
ctgctcccaggatagctggaggtcc

SEQ ID NO: 4670599 - DNA, 25 bp, Homo sapien
gcccaggcagaccaggagcacctgg

SEQ ID NO: 4670600 - DNA, 25 bp, Homo sapien
gtccttggggcccaacgactgtctc

SEQ ID NO: 4670601 - DNA, 25 bp, Homo sapien
ggcccaggatcaccaggtcttccaa

SEQ ID NO: 4670602 - DNA, 25 bp, Homo sapien
caagggcactgtttacggcactaac

SEQ ID NO: 4670603 - DNA, 25 bp, Homo sapien
cttgaacacaatggtagggacagca

SEQ ID NO: 4670604 - DNA, 25 bp, Homo sapien
tagggacagcatgaacaagggcact

SEQ ID NO: 4670605 - DNA, 25 bp, Homo sapien
catgaacaagggcactgtttacggc

SEQ ID NO: 4670606 - DNA, 25 bp, Homo sapien
caggtttctggatccgggaagccct

SEQ ID NO: 4670607 - DNA, 25 bp, Homo sapien
aggtttctggatccgggaagccctg

SEQ ID NO: 4670608 - DNA, 25 bp, Homo sapien
cagccatctctaacacgaatgaaaa

SEQ ID NO: 4670609 - DNA, 25 bp, Homo sapien
aatgttccttctataaccaaatgcg

SEQ ID NO: 4670610 - DNA, 25 bp, Homo sapien
aactcagtgctgtccctcaggtaga

SEQ ID NO: 4670611 - DNA, 25 bp, Homo sapien
aaccaaatgcgctttctgcagcatg

SEQ ID NO: 4670612 - DNA, 25 bp, Homo sapien
gttgctggaaagcgcagggggtgga

SEQ ID NO: 4670613 - DNA, 25 bp, Homo sapien
agggctgtcggcaggaatggggatc

SEQ ID NO: 4670614 - DNA, 25 bp, Homo sapien
gggtggagggctgtcggcaggaatg

SEQ ID NO: 4670615 - DNA, 25 bp, Homo sapien
gtggagggctgtcggcaggaatggg

SEQ ID NO: 4670616 - DNA, 25 bp, Homo sapien
gcaggcttctcataattggcacttg

SEQ ID NO: 4670617 - DNA, 25 bp, Homo sapien
agcaggcttctcataattggcactt

SEQ ID NO: 4670618 - DNA, 25 bp, Homo sapien
taattggcacttgaaatagggtttg

SEQ ID NO: 4670619 - DNA, 25 bp, Homo sapien
ttggcacttgaaatagggtttggtg

SEQ ID NO: 4670620 - DNA, 25 bp, Homo sapien
caaatgggaagataagaatgctcgg

SEQ ID NO: 4670621 - DNA, 25 bp, Homo sapien
gaaaatcagctcgaatgtccccaga

SEQ ID NO: 4670622 - DNA, 25 bp, Homo sapien
cacaatggtggacagatcttgcaaa

SEQ ID NO: 4670623 - DNA, 25 bp, Homo sapien
aatgctcggtaggtggacaacagtc

SEQ ID NO: 4670624 - DNA, 25 bp, Homo sapien
caagaaggatctgtcattatgtctc

SEQ ID NO: 4670625 - DNA, 25 bp, Homo sapien
gaatatgcatattgaactgacctcc

SEQ ID NO: 4670626 - DNA, 25 bp, Homo sapien
gacctccgtggccagaaaaaattga

SEQ ID NO: 4670627 - DNA, 25 bp, Homo sapien
cgaccatcaaaggagtatattggaa

SEQ ID NO: 4670628 - DNA, 25 bp, Homo sapien
cgcggttcgccatgcttcacagtag

SEQ ID NO: 4670629 - DNA, 25 bp, Homo sapien
tcctagcgtctgtcatgaaactgtt

SEQ ID NO: 4670630 - DNA, 25 bp, Homo sapien
gacaattagccgattagcacagctg

SEQ ID NO: 4670631 - DNA, 25 bp, Homo sapien
gaaactgttttcgatacataggaca

SEQ ID NO: 4670632 - DNA, 25 bp, Homo sapien
gaatgccatggcctttgttttcaac

SEQ ID NO: 4670633 - DNA, 25 bp, Homo sapien
gtttctgtgtacgaacagcagttgc

SEQ ID NO: 4670634 - DNA, 25 bp, Homo sapien
aacctatgttgggatgcgttcacac

SEQ ID NO: 4670635 - DNA, 25 bp, Homo sapien
cagcagttgcaaatgatggatgtac

SEQ ID NO: 4670636 - DNA, 25 bp, Homo sapien
cacaagtggcaggattagcaaaccc

SEQ ID NO: 4670637 - DNA, 25 bp, Homo sapien
caaatgaagaaagcacccggaaaag

SEQ ID NO: 4670638 - DNA, 25 bp, Homo sapien
ttcagttctctgatcatcgcctggg

SEQ ID NO: 4670639 - DNA, 25 bp, Homo sapien
gcccaaagtcatgccctgagacggt

SEQ ID NO: 4670640 - DNA, 25 bp, Homo sapien
caccgcaccaaacttcttttgttca

SEQ ID NO: 4670641 - DNA, 25 bp, Homo sapien
ttttgatggggatagtgtctcatta

SEQ ID NO: 4670642 - DNA, 25 bp, Homo sapien
tgaacttccaggcttaagagatcct

SEQ ID NO: 4670643 - DNA, 25 bp, Homo sapien
cttttgttcactggtacttctcttc

SEQ ID NO: 4670644 - DNA, 25 bp, Homo sapien
tgctggtgctctacctcaatactca

SEQ ID NO: 4670645 - DNA, 25 bp, Homo sapien
gctggtgctctacctcaatactcat

SEQ ID NO: 4670646 - DNA, 25 bp, Homo sapien
aaggtggttgggcttggtcccatga

SEQ ID NO: 4670647 - DNA, 25 bp, Homo sapien
tccagaggactgaccagcatttgaa

SEQ ID NO: 4670648 - DNA, 25 bp, Homo sapien
agaaggtggttgggcttggtcccat

SEQ ID NO: 4670649 - DNA, 25 bp, Homo sapien
ccagaggactgaccagcatttgaat

SEQ ID NO: 4670650 - DNA, 25 bp, Homo sapien
gcagccctccttcccaatcttcatg

SEQ ID NO: 4670651 - DNA, 25 bp, Homo sapien
ctccttcccaatcttcatgagatgc

SEQ ID NO: 4670652 - DNA, 25 bp, Homo sapien
cctgcagccctccttcccaatcttc

SEQ ID NO: 4670653 - DNA, 25 bp, Homo sapien
gccctccttcccaatcttcatgaga

SEQ ID NO: 4670654 - DNA, 25 bp, Homo sapien
gagtcactgggtgagcattttcccc

SEQ ID NO: 4670655 - DNA, 25 bp, Homo sapien
gatagcaggaatcagaatggttctg

SEQ ID NO: 4670656 - DNA, 25 bp, Homo sapien
gcactactttagagtcactgggtga

SEQ ID NO: 4670657 - DNA, 25 bp, Homo sapien
gccaatttgtgcactactttagagt

SEQ ID NO: 4670658 - DNA, 25 bp, Homo sapien
ctgttacgtagaacagagaatattt

SEQ ID NO: 4670659 - DNA, 25 bp, Homo sapien
cagagaatatttttccgcagaacct

SEQ ID NO: 4670660 - DNA, 25 bp, Homo sapien
gaacagagaatatttttccgcagaa

SEQ ID NO: 4670661 - DNA, 25 bp, Homo sapien
aattttattttctgtgtcatttgag

SEQ ID NO: 4670662 - DNA, 25 bp, Homo sapien
gactagtcctttcttcagacacaaa

SEQ ID NO: 4670663 - DNA, 25 bp, Homo sapien
cttccctctgcgacgccaaaatgag

SEQ ID NO: 4670664 - DNA, 25 bp, Homo sapien
cctgtcagactagtcctttcttcag

SEQ ID NO: 4670665 - DNA, 25 bp, Homo sapien
ctctgcgacgccaaaatgagctcca

SEQ ID NO: 4670666 - DNA, 25 bp, Homo sapien
cgcgccgctgcctcaccccagcaaa

SEQ ID NO: 4670667 - DNA, 25 bp, Homo sapien
tgcctcaccccagcaaacctcgcct

SEQ ID NO: 4670668 - DNA, 25 bp, Homo sapien
tcaccccagcaaacctcgcctcgcc

SEQ ID NO: 4670669 - DNA, 25 bp, Homo sapien
agcaaacctcgcctcgccccacctc

SEQ ID NO: 4670670 - DNA, 25 bp, Homo sapien
gcggagcagcgaccgccgcctccat

SEQ ID NO: 4670671 - DNA, 25 bp, Homo sapien
ggggacgcggagcagcgaccgccgc

SEQ ID NO: 4670672 - DNA, 25 bp, Homo sapien
acgcggagcagcgaccgccgcctcc

SEQ ID NO: 4670673 - DNA, 25 bp, Homo sapien
ggacgcggagcagcgaccgccgcct

SEQ ID NO: 4670674 - DNA, 25 bp, Homo sapien
cacggctctgccagtccccgccggc

SEQ ID NO: 4670675 - DNA, 25 bp, Homo sapien
ccacggctctgccagtccccgccgg

SEQ ID NO: 4670676 - DNA, 25 bp, Homo sapien
ctccccagacgcacgaaagaagaaa

SEQ ID NO: 4670677 - DNA, 25 bp, Homo sapien
tccccagacgcacgaaagaagaaac

SEQ ID NO: 4670678 - DNA, 25 bp, Homo sapien
tcaacaatgtgctaagagtcggaat

SEQ ID NO: 4670679 - DNA, 25 bp, Homo sapien
gtttcctctaatgcaggcccacgtg

SEQ ID NO: 4670680 - DNA, 25 bp, Homo sapien
taatagcggtgtggaaatgttacct

SEQ ID NO: 4670681 - DNA, 25 bp, Homo sapien
taaagaccaattgctcatcagacga

SEQ ID NO: 4670682 - DNA, 25 bp, Homo sapien
gaccatcttccaaactactataggc

SEQ ID NO: 4670683 - DNA, 25 bp, Homo sapien
actataggcctacttttctcaatca

SEQ ID NO: 4670684 - DNA, 25 bp, Homo sapien
tctcaatcaataagtatataccagg

SEQ ID NO: 4670685 - DNA, 25 bp, Homo sapien
tttcaacaacaaagcggatcatcta

SEQ ID NO: 4670686 - DNA, 25 bp, Homo sapien
tactgagtgcctaggatgcaccagg

SEQ ID NO: 4670687 - DNA, 25 bp, Homo sapien
ttagtgaacaaaacgaagacatcca

SEQ ID NO: 4670688 - DNA, 25 bp, Homo sapien
ggcactttccatacacttgagatac

SEQ ID NO: 4670689 - DNA, 25 bp, Homo sapien
cattatccagcctaaaaaagcttgg

SEQ ID NO: 4670690 - DNA, 25 bp, Homo sapien
taatgtgttcatacttggatcagag

SEQ ID NO: 4670691 - DNA, 25 bp, Homo sapien
gcaataaccccttaccacttggaga

SEQ ID NO: 4670692 - DNA, 25 bp, Homo sapien
gaatcagattattgccagatccagc

SEQ ID NO: 4670693 - DNA, 25 bp, Homo sapien
aaatgtcctagccttacatcagctg

SEQ ID NO: 4670694 - DNA, 25 bp, Homo sapien
ccacgtgctgaacaaagagacccaa

SEQ ID NO: 4670695 - DNA, 25 bp, Homo sapien
tactcaaatcaacaaccacgtgctg

SEQ ID NO: 4670696 - DNA, 25 bp, Homo sapien
tgacaaacatgaccagactctggcc

SEQ ID NO: 4670697 - DNA, 25 bp, Homo sapien
caatgctgtgttaatctgccaacgc

SEQ ID NO: 4670698 - DNA, 25 bp, Homo sapien
gcagtttgcttcactacagctgaaa

SEQ ID NO: 4670699 - DNA, 25 bp, Homo sapien
ggaaacactctgcttggcttactta

SEQ ID NO: 4670700 - DNA, 25 bp, Homo sapien
ctatgcaaagtcaagcagagtgttg

SEQ ID NO: 4670701 - DNA, 25 bp, Homo sapien
tacaaacatgtaccaacaggcaagt

SEQ ID NO: 4670702 - DNA, 25 bp, Homo sapien
ggctacccagggttaattcacaagc

SEQ ID NO: 4670703 - DNA, 25 bp, Homo sapien
ggttgcctcatttcagtacgtctcg

SEQ ID NO: 4670704 - DNA, 25 bp, Homo sapien
tacgtctcgaggtcacatatggaag

SEQ ID NO: 4670705 - DNA, 25 bp, Homo sapien
aattctatctaatgccagggctacc

SEQ ID NO: 4670706 - DNA, 25 bp, Homo sapien
cctttcaatatgttccatagtgctc

SEQ ID NO: 4670707 - DNA, 25 bp, Homo sapien
tctcctttcaatatgttccatagtg

SEQ ID NO: 4670708 - DNA, 25 bp, Homo sapien
tcaatatgttccatagtgctctttg

SEQ ID NO: 4670709 - DNA, 25 bp, Homo sapien
aatatgttccatagtgctctttgca

SEQ ID NO: 4670710 - DNA, 25 bp, Homo sapien
tgtctagtttaaacctatcttctta

SEQ ID NO: 4670711 - DNA, 25 bp, Homo sapien
ctctctgtctagtttaaacctatct

SEQ ID NO: 4670712 - DNA, 25 bp, Homo sapien
tctgtctagtttaaacctatcttct

SEQ ID NO: 4670713 - DNA, 25 bp, Homo sapien
ctctgtctagtttaaacctatcttc

SEQ ID NO: 4670714 - DNA, 25 bp, Homo sapien
ttataataataatgtctttcatgac

SEQ ID NO: 4670715 - DNA, 25 bp, Homo sapien
ctttcatgaccttggtctttacata

SEQ ID NO: 4670716 - DNA, 25 bp, Homo sapien
ctctcaccattataataataatgtc

SEQ ID NO: 4670717 - DNA, 25 bp, Homo sapien
catgaccttggtctttacatatacc

SEQ ID NO: 4670718 - DNA, 25 bp, Homo sapien
gctgatgagataagggctaaacacc

SEQ ID NO: 4670719 - DNA, 25 bp, Homo sapien
gcaaatgctatctagggccacacac

SEQ ID NO: 4670720 - DNA, 25 bp, Homo sapien
ccatggctcccctatgctgatgaga

SEQ ID NO: 4670721 - DNA, 25 bp, Homo sapien
ggtcacagcacttgaagagctccaa

SEQ ID NO: 4670722 - DNA, 25 bp, Homo sapien
gctaactccctgaagagctaacttg

SEQ ID NO: 4670723 - DNA, 25 bp, Homo sapien
ggcaggatagacagagctaactccc

SEQ ID NO: 4670724 - DNA, 25 bp, Homo sapien
cctgaagagctaacttgctgtacaa

SEQ ID NO: 4670725 - DNA, 25 bp, Homo sapien
gacagagctaactccctgaagagct

SEQ ID NO: 4670726 - DNA, 25 bp, Homo sapien
tccttgaggccagatacctgtatta

SEQ ID NO: 4670727 - DNA, 25 bp, Homo sapien
gaatggccatctatgacgtgaacag

SEQ ID NO: 4670728 - DNA, 25 bp, Homo sapien
tctctgatgaagttaagtgctctcc

SEQ ID NO: 4670729 - DNA, 25 bp, Homo sapien
gagtctaggtacacggaatggccat

SEQ ID NO: 4670730 - DNA, 25 bp, Homo sapien
gatctttatggctcaaccccaggag

SEQ ID NO: 4670731 - DNA, 25 bp, Homo sapien
ggaagccaagcagactacacctgta

SEQ ID NO: 4670732 - DNA, 25 bp, Homo sapien
gactggcagcaaaatactagcttca

SEQ ID NO: 4670733 - DNA, 25 bp, Homo sapien
tctggataatggagtaacggaaaca

SEQ ID NO: 4670734 - DNA, 25 bp, Homo sapien
agagcccatctgtcacacaagtaaa

SEQ ID NO: 4670735 - DNA, 25 bp, Homo sapien
gagcccatctgtcacacaagtaaaa

SEQ ID NO: 4670736 - DNA, 25 bp, Homo sapien
caatggtcctgattgcagcaatatg

SEQ ID NO: 4670737 - DNA, 25 bp, Homo sapien
tgaagagggtgcacatacaaacggc

SEQ ID NO: 4670738 - DNA, 25 bp, Homo sapien
acatgctgttgtgtataactttgtc

SEQ ID NO: 4670739 - DNA, 25 bp, Homo sapien
tacaaacggcctatctcgaggaatt

SEQ ID NO: 4670740 - DNA, 25 bp, Homo sapien
tcttgcctctaaacggaatgagctg

SEQ ID NO: 4670741 - DNA, 25 bp, Homo sapien
ggaggcaggatcttggttactctta

SEQ ID NO: 4670742 - DNA, 25 bp, Homo sapien
gagctggattagacaatttttatga

SEQ ID NO: 4670743 - DNA, 25 bp, Homo sapien
aatcacagagtatgaagagtttttc

SEQ ID NO: 4670744 - DNA, 25 bp, Homo sapien
caggttcaaagattgttgtgcctca

SEQ ID NO: 4670745 - DNA, 25 bp, Homo sapien
cctcccaggttcaaagattgttgtg

SEQ ID NO: 4670746 - DNA, 25 bp, Homo sapien
ttcaaagattgttgtgcctcagcca

SEQ ID NO: 4670747 - DNA, 25 bp, Homo sapien
tcaaagattgttgtgcctcagccac

SEQ ID NO: 4670748 - DNA, 25 bp, Homo sapien
ctttaattagcacaaggcctggacc

SEQ ID NO: 4670749 - DNA, 25 bp, Homo sapien
caactttgagtggagagtgagcaac

SEQ ID NO: 4670750 - DNA, 25 bp, Homo sapien
gcattatcatgctgaacaggtggag

SEQ ID NO: 4670751 - DNA, 25 bp, Homo sapien
gccttttccttctgcgctacagcag

SEQ ID NO: 4670752 - DNA, 25 bp, Homo sapien
gagaaataaggtgacttcttcacaa

SEQ ID NO: 4670753 - DNA, 25 bp, Homo sapien
aaggtgacttcttcacaaggttttg

SEQ ID NO: 4670754 - DNA, 25 bp, Homo sapien
cattataactgcagatgctttcatc

SEQ ID NO: 4670755 - DNA, 25 bp, Homo sapien
acaaagatattgtagtccgaccaac

SEQ ID NO: 4670756 - DNA, 25 bp, Homo sapien
catgcacccttgtacactgaactta

SEQ ID NO: 4670757 - DNA, 25 bp, Homo sapien
tgaacttagttgtggcaagaaggct

SEQ ID NO: 4670758 - DNA, 25 bp, Homo sapien
tctttcaggaagagtccatgcaccc

SEQ ID NO: 4670759 - DNA, 25 bp, Homo sapien
gaaagcaacctttaacaactgtgaa

SEQ ID NO: 4670760 - DNA, 25 bp, Homo sapien
taggcctccttttatgcacaccagc

SEQ ID NO: 4670761 - DNA, 25 bp, Homo sapien
ggccagtacatgctcatagcaagaa

SEQ ID NO: 4670762 - DNA, 25 bp, Homo sapien
tgccgccaatatcataggaccttcc

SEQ ID NO: 4670763 - DNA, 25 bp, Homo sapien
tcattacaaggccaactgccgccaa

SEQ ID NO: 4670764 - DNA, 25 bp, Homo sapien
gaaataaacatcaacaacgacaaaa

SEQ ID NO: 4670765 - DNA, 25 bp, Homo sapien
gagtgaaataaacatcaacaacgac

SEQ ID NO: 4670766 - DNA, 25 bp, Homo sapien
ctcgagtgaaataaacatcaacaac

SEQ ID NO: 4670767 - DNA, 25 bp, Homo sapien
ataaacatcaacaacgacaaaaaca

SEQ ID NO: 4670768 - DNA, 25 bp, Homo sapien
gatgcagacgaagcacactggtcca

SEQ ID NO: 4670769 - DNA, 25 bp, Homo sapien
cggttgtggcagatatagaccatca

SEQ ID NO: 4670770 - DNA, 25 bp, Homo sapien
taaaagggcgatctaatgaagggtc

SEQ ID NO: 4670771 - DNA, 25 bp, Homo sapien
tcttcatttggcactcgatggtgaa

SEQ ID NO: 4670772 - DNA, 25 bp, Homo sapien
tgctatgccaaaatccaccttggga

SEQ ID NO: 4670773 - DNA, 25 bp, Homo sapien
ccttgggatgactctgacaattagc

SEQ ID NO: 4670774 - DNA, 25 bp, Homo sapien
cctgaatagaatgggttagctgcag

SEQ ID NO: 4670775 - DNA, 25 bp, Homo sapien
ccaggcctatacgaaagacaatttc

SEQ ID NO: 4670776 - DNA, 25 bp, Homo sapien
ttattgtctgctgctataaatccca

SEQ ID NO: 4670777 - DNA, 25 bp, Homo sapien
tagaggagaatatcttaacagcaac

SEQ ID NO: 4670778 - DNA, 25 bp, Homo sapien
aatagttctcgcaattgttctctga

SEQ ID NO: 4670779 - DNA, 25 bp, Homo sapien
cacgaacgttcttctctagaggaga

SEQ ID NO: 4670780 - DNA, 25 bp, Homo sapien
tgccaacatggtagagtttgaaacc

SEQ ID NO: 4670781 - DNA, 25 bp, Homo sapien
tgtaacttggaatgtgacaaaatcc

SEQ ID NO: 4670782 - DNA, 25 bp, Homo sapien
gacaaaatccagaccctgggtgagg

SEQ ID NO: 4670783 - DNA, 25 bp, Homo sapien
taccttcatatgaaccagtgagaag

SEQ ID NO: 4670784 - DNA, 25 bp, Homo sapien
tcaaaaagggatccatgctcatgat

SEQ ID NO: 4670785 - DNA, 25 bp, Homo sapien
cgccgtggacagagcaagttttatc

SEQ ID NO: 4670786 - DNA, 25 bp, Homo sapien
ccagagctgagtccaagtaccattg

SEQ ID NO: 4670787 - DNA, 25 bp, Homo sapien
tgaagatgggcaagaccgctcgccg

SEQ ID NO: 4670788 - DNA, 25 bp, Homo sapien
agcttaaataatagaactgcttata

SEQ ID NO: 4670789 - DNA, 25 bp, Homo sapien
taaagcttaaataatagaactgctt

SEQ ID NO: 4670790 - DNA, 25 bp, Homo sapien
tttaaagcttaaataatagaactgc

SEQ ID NO: 4670791 - DNA, 25 bp, Homo sapien
gcttaaataatagaactgcttatag

SEQ ID NO: 4670792 - DNA, 25 bp, Homo sapien
gagcaatatcaatggtatctgtggc

SEQ ID NO: 4670793 - DNA, 25 bp, Homo sapien
agttccattcttctttaccaagata

SEQ ID NO: 4670794 - DNA, 25 bp, Homo sapien
caaatctctatgagcaatggctggc

SEQ ID NO: 4670795 - DNA, 25 bp, Homo sapien
tcttactgccagtcctaagtctgca

SEQ ID NO: 4670796 - DNA, 25 bp, Homo sapien
taacctcctcaaggtggtttcctca

SEQ ID NO: 4670797 - DNA, 25 bp, Homo sapien
tctcaagcagcttgcacctaataga

SEQ ID NO: 4670798 - DNA, 25 bp, Homo sapien
tattaggcactgtgatggatgctgg

SEQ ID NO: 4670799 - DNA, 25 bp, Homo sapien
tgaggatctaccatgtattaggcac

SEQ ID NO: 4670800 - DNA, 25 bp, Homo sapien
taagcccattgcatagatgtcagca

SEQ ID NO: 4670801 - DNA, 25 bp, Homo sapien
gaacatcgtcgagcaatttcccaga

SEQ ID NO: 4670802 - DNA, 25 bp, Homo sapien
tttatggaatcatcgagaacttcag

SEQ ID NO: 4670803 - DNA, 25 bp, Homo sapien
gtcagcacgtttgaaggattcaaaa

SEQ ID NO: 4670804 - DNA, 25 bp, Homo sapien
aggtttcatcgcctttgttttctct

SEQ ID NO: 4670805 - DNA, 25 bp, Homo sapien
taggctagagctgtgcatgtgcaca

SEQ ID NO: 4670806 - DNA, 25 bp, Homo sapien
tgccatctgtttgggatatttggcc

SEQ ID NO: 4670807 - DNA, 25 bp, Homo sapien
gaaggtacaagatcataataaggca

SEQ ID NO: 4670808 - DNA, 25 bp, Homo sapien
ggcagttggtaatcttcatgaattc

SEQ ID NO: 4670809 - DNA, 25 bp, Homo sapien
catttcttcaactgatgggtcagaa

SEQ ID NO: 4670810 - DNA, 25 bp, Homo sapien
taatccgcaatgctgtaagcctagc

SEQ ID NO: 4670811 - DNA, 25 bp, Homo sapien
gcctagctgctccattggcatacca

SEQ ID NO: 4670812 - DNA, 25 bp, Homo sapien
cttcctgttgactgagttgcgataa

SEQ ID NO: 4670813 - DNA, 25 bp, Homo sapien
tggcataccaacattctctcataat

SEQ ID NO: 4670814 - DNA, 25 bp, Homo sapien
tagtgcacagaaaggacccacatgg

SEQ ID NO: 4670815 - DNA, 25 bp, Homo sapien
gacagaggatccaccgaacgtttac

SEQ ID NO: 4670816 - DNA, 25 bp, Homo sapien
gtgataaaatgcattggtcccctgg

SEQ ID NO: 4670817 - DNA, 25 bp, Homo sapien
taaagtcgaagtcttgcctcagagc

SEQ ID NO: 4670818 - DNA, 25 bp, Homo sapien
tcttataggcgatacaactggccac

SEQ ID NO: 4670819 - DNA, 25 bp, Homo sapien
tataggcgatacaactggccactgt

SEQ ID NO: 4670820 - DNA, 25 bp, Homo sapien
ggcgatacaactggccactgtttct

SEQ ID NO: 4670821 - DNA, 25 bp, Homo sapien
tgtcttataggcgatacaactggcc

SEQ ID NO: 4670822 - DNA, 25 bp, Homo sapien
tattacagcagaattacaggctcag

SEQ ID NO: 4670823 - DNA, 25 bp, Homo sapien
gggattcttgatggccatggcactg

SEQ ID NO: 4670824 - DNA, 25 bp, Homo sapien
ttaatgtcctagaagtccagcactc

SEQ ID NO: 4670825 - DNA, 25 bp, Homo sapien
tgataaagcctaaagaatcctgcac

SEQ ID NO: 4670826 - DNA, 25 bp, Homo sapien
cttttggaatattactacaaataca

SEQ ID NO: 4670827 - DNA, 25 bp, Homo sapien
tcttttggaatattactacaaatac

SEQ ID NO: 4670828 - DNA, 25 bp, Homo sapien
gtagtgttaggacttaacataagca

SEQ ID NO: 4670829 - DNA, 25 bp, Homo sapien
actgtagtgttaggacttaacataa

SEQ ID NO: 4670830 - DNA, 25 bp, Homo sapien
cgtatacactttattttaaaatatg

SEQ ID NO: 4670831 - DNA, 25 bp, Homo sapien
acactttattttaaaatatgccact

SEQ ID NO: 4670832 - DNA, 25 bp, Homo sapien
actttattttaaaatatgccactgg

SEQ ID NO: 4670833 - DNA, 25 bp, Homo sapien
tttattttaaaatatgccactggca

SEQ ID NO: 4670834 - DNA, 25 bp, Homo sapien
cccaggagactaacaaatgtgctga

SEQ ID NO: 4670835 - DNA, 25 bp, Homo sapien
ggcactccccgaacacgctataata

SEQ ID NO: 4670836 - DNA, 25 bp, Homo sapien
tattgtaacttgcactaggcagggt

SEQ ID NO: 4670837 - DNA, 25 bp, Homo sapien
tctacagcaactacatatggcatga

SEQ ID NO: 4670838 - DNA, 25 bp, Homo sapien
tagatcctttgatttctctcggcaa

SEQ ID NO: 4670839 - DNA, 25 bp, Homo sapien
tgcacatatcttgaaagtccgttgg

SEQ ID NO: 4670840 - DNA, 25 bp, Homo sapien
gacagaacctccatgacaacattga

SEQ ID NO: 4670841 - DNA, 25 bp, Homo sapien
tcctgttgctgtatatgactgacta

SEQ ID NO: 4670842 - DNA, 25 bp, Homo sapien
aagttgcaaacgaagactccactgg

SEQ ID NO: 4670843 - DNA, 25 bp, Homo sapien
cagattcctggcgttttgaacagag

SEQ ID NO: 4670844 - DNA, 25 bp, Homo sapien
cagtctggttgattgtggacggcaa

SEQ ID NO: 4670845 - DNA, 25 bp, Homo sapien
gaaggtcgtaactgcaagttgtcca

SEQ ID NO: 4670846 - DNA, 25 bp, Homo sapien
cgtagccaaataaaccagtcagtgc

SEQ ID NO: 4670847 - DNA, 25 bp, Homo sapien
tcctccccgggttgcttatcagatg

SEQ ID NO: 4670848 - DNA, 25 bp, Homo sapien
ggaagagaagctcctatgctgcaca

SEQ ID NO: 4670849 - DNA, 25 bp, Homo sapien
ttgtaaacagaaccgctccctccaa

SEQ ID NO: 4670850 - DNA, 25 bp, Homo sapien
tgagttcagacctactaaagtggtt

SEQ ID NO: 4670851 - DNA, 25 bp, Homo sapien
gaaacagcacctgtctagaacggtc

SEQ ID NO: 4670852 - DNA, 25 bp, Homo sapien
tctctgcttggactcgaaagtccat

SEQ ID NO: 4670853 - DNA, 25 bp, Homo sapien
cattctgccatgtaggtgcctgcca

SEQ ID NO: 4670854 - DNA, 25 bp, Homo sapien
cagtgatggccgtccttgtaccgaa

SEQ ID NO: 4670855 - DNA, 25 bp, Homo sapien
tagagattatccagtctgacccgcc

SEQ ID NO: 4670856 - DNA, 25 bp, Homo sapien
tccacagatgagacagtcgaggccc

SEQ ID NO: 4670857 - DNA, 25 bp, Homo sapien
cagacgggaagaacgctggcatcaa

SEQ ID NO: 4670858 - DNA, 25 bp, Homo sapien
ggccatgtgggaattcctggatctc

SEQ ID NO: 4670859 - DNA, 25 bp, Homo sapien
ctctatccaggaattggatatccat

SEQ ID NO: 4670860 - DNA, 25 bp, Homo sapien
attgatataagtcaagtagttctcc

SEQ ID NO: 4670861 - DNA, 25 bp, Homo sapien
tgtgctgtcccctaattgatataag

SEQ ID NO: 4670862 - DNA, 25 bp, Homo sapien
tttctgatatggtaccagcatagtg

SEQ ID NO: 4670863 - DNA, 25 bp, Homo sapien
atgaccctgggtgcttatgttcccc

SEQ ID NO: 4670864 - DNA, 25 bp, Homo sapien
tttggtgcggaaggtaattggtctg

SEQ ID NO: 4670865 - DNA, 25 bp, Homo sapien
catagtgacgggaagaatgaccctg

SEQ ID NO: 4670866 - DNA, 25 bp, Homo sapien
cataatgcactcgactcagctggca

SEQ ID NO: 4670867 - DNA, 25 bp, Homo sapien
tcttgccctggcagcattggaacaa

SEQ ID NO: 4670868 - DNA, 25 bp, Homo sapien
aatgcgtctgtttgggtgagatgcc

SEQ ID NO: 4670869 - DNA, 25 bp, Homo sapien
aacccatcttgtgaaggtgactggc

SEQ ID NO: 4670870 - DNA, 25 bp, Homo sapien
gcaaaatgattctgtaccaaaaagg

SEQ ID NO: 4670871 - DNA, 25 bp, Homo sapien
ggagtactataaaatgagggtgcca

SEQ ID NO: 4670872 - DNA, 25 bp, Homo sapien
catgtgcatctgtatcacaggagta

SEQ ID NO: 4670873 - DNA, 25 bp, Homo sapien
catgttagttcatgctgcactacca

SEQ ID NO: 4670874 - DNA, 25 bp, Homo sapien
tgcctggatccatagcgagagtgct

SEQ ID NO: 4670875 - DNA, 25 bp, Homo sapien
gagagcagggctattgtagttccca

SEQ ID NO: 4670876 - DNA, 25 bp, Homo sapien
aacttgagtcttgaatgtgagccac

SEQ ID NO: 4670877 - DNA, 25 bp, Homo sapien
taccgatatgttaccaaactgctgg

SEQ ID NO: 4670878 - DNA, 25 bp, Homo sapien
tagaggaatacaccacaggcatggc

SEQ ID NO: 4670879 - DNA, 25 bp, Homo sapien
tcttaaacgactatacagggcccca

SEQ ID NO: 4670880 - DNA, 25 bp, Homo sapien
gaaaagctggatgacctagtcccca

SEQ ID NO: 4670881 - DNA, 25 bp, Homo sapien
tacagctgcgtggaagattgacatc

SEQ ID NO: 4670882 - DNA, 25 bp, Homo sapien
caaatatgtcgtttgaggaaattcc

SEQ ID NO: 4670883 - DNA, 25 bp, Homo sapien
tttgtccgccttggatattaaccat

SEQ ID NO: 4670884 - DNA, 25 bp, Homo sapien
caagtttgcctaccaaggaggctgt

SEQ ID NO: 4670885 - DNA, 25 bp, Homo sapien
tatgatagagcctcttactccatgc

SEQ ID NO: 4670886 - DNA, 25 bp, Homo sapien
tctgcggttcgcaaagatcggaact

SEQ ID NO: 4670887 - DNA, 25 bp, Homo sapien
gagtaactcgcgtgttgtcttcccg

SEQ ID NO: 4670888 - DNA, 25 bp, Homo sapien
tgagcgagcctgtggttctctaact

SEQ ID NO: 4670889 - DNA, 25 bp, Homo sapien
gagagaagaccttccctgtctgcgg

SEQ ID NO: 4670890 - DNA, 25 bp, Homo sapien
gaagtagagacctccggcctccttc

SEQ ID NO: 4670891 - DNA, 25 bp, Homo sapien
tcagaaagtccaatccctaccgaag

SEQ ID NO: 4670892 - DNA, 25 bp, Homo sapien
cagaaagtccaatccctaccgaagg

SEQ ID NO: 4670893 - DNA, 25 bp, Homo sapien
ccgaaagaccggcagctggcgagac

SEQ ID NO: 4670894 - DNA, 25 bp, Homo sapien
atgagggtggcaaggcgctgacgcg

SEQ ID NO: 4670895 - DNA, 25 bp, Homo sapien
gagcccccgaaagaccggcagctgg

SEQ ID NO: 4670896 - DNA, 25 bp, Homo sapien
tgacgcggacggatagaaagttacg

SEQ ID NO: 4670897 - DNA, 25 bp, Homo sapien
tagtgccactgggggtcggaccagg

SEQ ID NO: 4670898 - DNA, 25 bp, Homo sapien
ttagtgccactgggggtcggaccag

SEQ ID NO: 4670899 - DNA, 25 bp, Homo sapien
gggagagcgccctgaggatcccacg

SEQ ID NO: 4670900 - DNA, 25 bp, Homo sapien
gcccgggcggccactgctttgctgg

SEQ ID NO: 4670901 - DNA, 25 bp, Homo sapien
cgcccgggcggccactgctttgctg

SEQ ID NO: 4670902 - DNA, 25 bp, Homo sapien
tttgctgggagagcgccctgaggat

SEQ ID NO: 4670903 - DNA, 25 bp, Homo sapien
ccagatggaaatgtgagtgcaaacc

SEQ ID NO: 4670904 - DNA, 25 bp, Homo sapien
taacagcagagcgaacgatggactg

SEQ ID NO: 4670905 - DNA, 25 bp, Homo sapien
gagtagtgccctaaactgagcaacg

SEQ ID NO: 4670906 - DNA, 25 bp, Homo sapien
tatctccgagtctggaagcgaacga

SEQ ID NO: 4670907 - DNA, 25 bp, Homo sapien
gaggcagagacggaggatcacaagg

SEQ ID NO: 4670908 - DNA, 25 bp, Homo sapien
agtgctggatcataggacagcaaag

SEQ ID NO: 4670909 - DNA, 25 bp, Homo sapien
tggatcataggacagcaaagaaaga

SEQ ID NO: 4670910 - DNA, 25 bp, Homo sapien
gctggatcataggacagcaaagaaa

SEQ ID NO: 4670911 - DNA, 25 bp, Homo sapien
cttatggtgggtacctgggatagaa

SEQ ID NO: 4670912 - DNA, 25 bp, Homo sapien
gagcaggttctctgttaaagtctaa

SEQ ID NO: 4670913 - DNA, 25 bp, Homo sapien
ggatagaaatgacttgagcaggttc

SEQ ID NO: 4670914 - DNA, 25 bp, Homo sapien
aacaacttggttgcttgattccttc

SEQ ID NO: 4670915 - DNA, 25 bp, Homo sapien
gaagtttccatgcatgtgttcaaga

SEQ ID NO: 4670916 - DNA, 25 bp, Homo sapien
aagtttccatgcatgtgttcaagat

SEQ ID NO: 4670917 - DNA, 25 bp, Homo sapien
gacatgttttccattcctgcacgaa

SEQ ID NO: 4670918 - DNA, 25 bp, Homo sapien
tataagttaaaccacagcctgatac

SEQ ID NO: 4670919 - DNA, 25 bp, Homo sapien
aagcagaaccattcccaaggaaccg

SEQ ID NO: 4670920 - DNA, 25 bp, Homo sapien
tcctcatgaacatcccaatgacagg

SEQ ID NO: 4670921 - DNA, 25 bp, Homo sapien
tggagtacagtagtacaatttctgc

SEQ ID NO: 4670922 - DNA, 25 bp, Homo sapien
agtacagtagtacaatttctgctca

SEQ ID NO: 4670923 - DNA, 25 bp, Homo sapien
ggagtacagtagtacaatttctgct

SEQ ID NO: 4670924 - DNA, 25 bp, Homo sapien
tacagtagtacaatttctgctcact

SEQ ID NO: 4670925 - DNA, 25 bp, Homo sapien
taaaatgccctgaatccatacaagc

SEQ ID NO: 4670926 - DNA, 25 bp, Homo sapien
gctgatcttaaaatggctactttaa

SEQ ID NO: 4670927 - DNA, 25 bp, Homo sapien
taagctttaattatatccagggccc

SEQ ID NO: 4670928 - DNA, 25 bp, Homo sapien
cagggcccaagatagagtatacact

SEQ ID NO: 4670929 - DNA, 25 bp, Homo sapien
caggtggctgaacctagctctgacc

SEQ ID NO: 4670930 - DNA, 25 bp, Homo sapien
tgccaatgcatacaataaccctgaa

SEQ ID NO: 4670931 - DNA, 25 bp, Homo sapien
taagtgcctacctgatgccaatgca

SEQ ID NO: 4670932 - DNA, 25 bp, Homo sapien
gataaccacaatgaactaagtgcct

SEQ ID NO: 4670933 - DNA, 25 bp, Homo sapien
atcttctgtgtagaatcgccacatc

SEQ ID NO: 4670934 - DNA, 25 bp, Homo sapien
tcttctgtgtagaatcgccacatcc

SEQ ID NO: 4670935 - DNA, 25 bp, Homo sapien
aacgagtgtacttgccccaaatgtg

SEQ ID NO: 4670936 - DNA, 25 bp, Homo sapien
gtgtacttgccccaaatgtgcaaca

SEQ ID NO: 4670937 - DNA, 25 bp, Homo sapien
acgagtgtacttgccccaaatgtgc

SEQ ID NO: 4670938 - DNA, 25 bp, Homo sapien
gagtgtacttgccccaaatgtgcaa

SEQ ID NO: 4670939 - DNA, 25 bp, Homo sapien
cactatacttttggtccaagaaatg

SEQ ID NO: 4670940 - DNA, 25 bp, Homo sapien
attgataaatcccctgtaaaacagc

SEQ ID NO: 4670941 - DNA, 25 bp, Homo sapien
tgaattaaaaagtttattagccata

SEQ ID NO: 4670942 - DNA, 25 bp, Homo sapien
gccatagaaaaaaactgattcctca

SEQ ID NO: 4670943 - DNA, 25 bp, Homo sapien
gaaaaaaactgattcctcaaaatca

SEQ ID NO: 4670944 - DNA, 25 bp, Homo sapien
tttattagccatagaaaaaaactga

SEQ ID NO: 4670945 - DNA, 25 bp, Homo sapien
tattcaccagacatatttgctacat

SEQ ID NO: 4670946 - DNA, 25 bp, Homo sapien
aaggcagaaagactaagggccctag

SEQ ID NO: 4670947 - DNA, 25 bp, Homo sapien
catgtgaggaactgtcaatccaaca

SEQ ID NO: 4670948 - DNA, 25 bp, Homo sapien
tttacttacaaatctaaaggcagaa

SEQ ID NO: 4670949 - DNA, 25 bp, Homo sapien
gctttatgggaatcaagagcatggc

SEQ ID NO: 4670950 - DNA, 25 bp, Homo sapien
gccctcctccggcatttgaagagag

SEQ ID NO: 4670951 - DNA, 25 bp, Homo sapien
ggagctccacatgcttgacagtatt

SEQ ID NO: 4670952 - DNA, 25 bp, Homo sapien
gatgccaacatttgcatgatttcaa

SEQ ID NO: 4670953 - DNA, 25 bp, Homo sapien
aacaatccttgggtatagtaacagg

SEQ ID NO: 4670954 - DNA, 25 bp, Homo sapien
ctgaattgagggttgcggcaaacac

SEQ ID NO: 4670955 - DNA, 25 bp, Homo sapien
tgcaaagatacatccagagctgaat

SEQ ID NO: 4670956 - DNA, 25 bp, Homo sapien
ggtggtaaatttcacaacagtggga

SEQ ID NO: 4670957 - DNA, 25 bp, Homo sapien
tactatcatcagcttatgtgaaaat

SEQ ID NO: 4670958 - DNA, 25 bp, Homo sapien
tcgctagccattccttgttcttgtt

SEQ ID NO: 4670959 - DNA, 25 bp, Homo sapien
gcaattactatcatcagcttatgtg

SEQ ID NO: 4670960 - DNA, 25 bp, Homo sapien
aaaagccctactggagcctcgctag

SEQ ID NO: 4670961 - DNA, 25 bp, Homo sapien
tttggtgccaggctgatattgcatt

SEQ ID NO: 4670962 - DNA, 25 bp, Homo sapien
cattcttcgcagaatgatttctgtg

SEQ ID NO: 4670963 - DNA, 25 bp, Homo sapien
tttctgtgtagtaactcagaggaca

SEQ ID NO: 4670964 - DNA, 25 bp, Homo sapien
tgcctgagccattcttcgcagaatg

SEQ ID NO: 4670965 - DNA, 25 bp, Homo sapien
actgcagatgtccaaaaccaactca

SEQ ID NO: 4670966 - DNA, 25 bp, Homo sapien
cactgcagatgtccaaaaccaactc

SEQ ID NO: 4670967 - DNA, 25 bp, Homo sapien
taattctgatgctactggacatccc

SEQ ID NO: 4670968 - DNA, 25 bp, Homo sapien
tggacatcccaattgaacatcctcc

SEQ ID NO: 4670969 - DNA, 25 bp, Homo sapien
cttgggtggtaattctgatgctact

SEQ ID NO: 4670970 - DNA, 25 bp, Homo sapien
tgatgctactggacatcccaattga

SEQ ID NO: 4670971 - DNA, 25 bp, Homo sapien
gctcccctgccagactcattgctca

SEQ ID NO: 4670972 - DNA, 25 bp, Homo sapien
ctcccctgccagactcattgctcac

SEQ ID NO: 4670973 - DNA, 25 bp, Homo sapien
ggctcccctgccagactcattgctc

SEQ ID NO: 4670974 - DNA, 25 bp, Homo sapien
ccttgaacaatcttgatgatgggaa

SEQ ID NO: 4670975 - DNA, 25 bp, Homo sapien
tggtacctccaaaacgtctctgaac

SEQ ID NO: 4670976 - DNA, 25 bp, Homo sapien
tttgtggtgcacagaactgcatctc

SEQ ID NO: 4670977 - DNA, 25 bp, Homo sapien
cacggtcatctagcaaaccttgaac

SEQ ID NO: 4670978 - DNA, 25 bp, Homo sapien
agcgggctccattctggtgggctgc

SEQ ID NO: 4670979 - DNA, 25 bp, Homo sapien
ctccattctggtgggctgcagcgcc

SEQ ID NO: 4670980 - DNA, 25 bp, Homo sapien
cagcgggctccattctggtgggctg

SEQ ID NO: 4670981 - DNA, 25 bp, Homo sapien
gggctccattctggtgggctgcagc

SEQ ID NO: 4670982 - DNA, 25 bp, Homo sapien
gccagatcagccaaacaaccgtggc

SEQ ID NO: 4670983 - DNA, 25 bp, Homo sapien
accaaggatgtagcttctggaggga

SEQ ID NO: 4670984 - DNA, 25 bp, Homo sapien
cctcttcaaccaaggatgtagcttc

SEQ ID NO: 4670985 - DNA, 25 bp, Homo sapien
ccaaacaaccgtggccatcaatggg

SEQ ID NO: 4670986 - DNA, 25 bp, Homo sapien
ctttgttcaagagacttccactcac

SEQ ID NO: 4670987 - DNA, 25 bp, Homo sapien
tcctttgttcaagagacttccactc

SEQ ID NO: 4670988 - DNA, 25 bp, Homo sapien
cttcctttgttcaagagacttccac

SEQ ID NO: 4670989 - DNA, 25 bp, Homo sapien
cctttgttcaagagacttccactca

SEQ ID NO: 4670990 - DNA, 25 bp, Homo sapien
ggcatttgacagacccacagcttcc

SEQ ID NO: 4670991 - DNA, 25 bp, Homo sapien
gggaaatggcatttgacagacccac

SEQ ID NO: 4670992 - DNA, 25 bp, Homo sapien
tggcatttgacagacccacagcttc

SEQ ID NO: 4670993 - DNA, 25 bp, Homo sapien
aaatggcatttgacagacccacagc

SEQ ID NO: 4670994 - DNA, 25 bp, Homo sapien
agatccccaactgggatgactgatc

SEQ ID NO: 4670995 - DNA, 25 bp, Homo sapien
tcgtttctgccttcacgtctggaag

SEQ ID NO: 4670996 - DNA, 25 bp, Homo sapien
tcacgtctggaaggtccagatcccc

SEQ ID NO: 4670997 - DNA, 25 bp, Homo sapien
tcaatgtgatgaatgggctcttcgt

SEQ ID NO: 4670998 - DNA, 25 bp, Homo sapien
tgatggaggcaggagtcgaaacagg

SEQ ID NO: 4670999 - DNA, 25 bp, Homo sapien
tggaggcaggagtcgaaacaggcag

SEQ ID NO: 4671000 - DNA, 25 bp, Homo sapien
tgagccaggtggatattccagaagg

SEQ ID NO: 4671001 - DNA, 25 bp, Homo sapien
tggatattccagaaggagtagacat

SEQ ID NO: 4671002 - DNA, 25 bp, Homo sapien
agacgccaggcccactcacgtaggt

SEQ ID NO: 4671003 - DNA, 25 bp, Homo sapien
ttgtgcggcttaggtcatccccgta

SEQ ID NO: 4671004 - DNA, 25 bp, Homo sapien
gcggcttaggtcatccccgtacttc

SEQ ID NO: 4671005 - DNA, 25 bp, Homo sapien
ctcagtctttgtgcggcttaggtca

SEQ ID NO: 4671006 - DNA, 25 bp, Homo sapien
gtctttgtgcggcttaggtcatccc

SEQ ID NO: 4671007 - DNA, 25 bp, Homo sapien
gctcggcatctgtgatggcggcctc

SEQ ID NO: 4671008 - DNA, 25 bp, Homo sapien
ctgctcggcatctgtgatggcggcc

SEQ ID NO: 4671009 - DNA, 25 bp, Homo sapien
cagggaagccctctggcctttgagg

SEQ ID NO: 4671010 - DNA, 25 bp, Homo sapien
ggccctcggtctcagcctggagcca

SEQ ID NO: 4671011 - DNA, 25 bp, Homo sapien
agctgccccatcatgtcctgcttgg

SEQ ID NO: 4671012 - DNA, 25 bp, Homo sapien
acgcagctgccccatcatgtcctgc

SEQ ID NO: 4671013 - DNA, 25 bp, Homo sapien
actcacgcagctgccccatcatgtc

SEQ ID NO: 4671014 - DNA, 25 bp, Homo sapien
gtactcacgcagctgccccatcatg

SEQ ID NO: 4671015 - DNA, 25 bp, Homo sapien
gactcggactccagcttgccatcat

SEQ ID NO: 4671016 - DNA, 25 bp, Homo sapien
actccagcttgccatcatgggtctc

SEQ ID NO: 4671017 - DNA, 25 bp, Homo sapien
agcccaggcggtagatgatgccggg

SEQ ID NO: 4671018 - DNA, 25 bp, Homo sapien
tctcgatgtccagggtaagcccgac

SEQ ID NO: 4671019 - DNA, 25 bp, Homo sapien
aagcaagctgtgctattctcactgt

SEQ ID NO: 4671020 - DNA, 25 bp, Homo sapien
gttctccgatgcaaattttgagaag

SEQ ID NO: 4671021 - DNA, 25 bp, Homo sapien
aacatgaatctttgttctccgatgc

SEQ ID NO: 4671022 - DNA, 25 bp, Homo sapien
gcaagctgtgctattctcactgttt

SEQ ID NO: 4671023 - DNA, 25 bp, Homo sapien
gattccagggccctgactgggctat

SEQ ID NO: 4671024 - DNA, 25 bp, Homo sapien
ggattccgagctgcaagctcagatt

SEQ ID NO: 4671025 - DNA, 25 bp, Homo sapien
ccttgctttgctccaagagaagtgg

SEQ ID NO: 4671026 - DNA, 25 bp, Homo sapien
ttccagggccctgactgggctatgt

SEQ ID NO: 4671027 - DNA, 25 bp, Homo sapien
agcctgctgctagccagagcctgta

SEQ ID NO: 4671028 - DNA, 25 bp, Homo sapien
ctgtgcagcctgctgctagccagag

SEQ ID NO: 4671029 - DNA, 25 bp, Homo sapien
agccagagcctgtatttctgtagag

SEQ ID NO: 4671030 - DNA, 25 bp, Homo sapien
tgattcaaccttgcgtgtatgttta

SEQ ID NO: 4671031 - DNA, 25 bp, Homo sapien
gaagcaacatcctgctcaccagcgt

SEQ ID NO: 4671032 - DNA, 25 bp, Homo sapien
aaaggaaagatgattcaaccttgcg

SEQ ID NO: 4671033 - DNA, 25 bp, Homo sapien
gccgctgagcagtagaagcatggca

SEQ ID NO: 4671034 - DNA, 25 bp, Homo sapien
gaagctgatggacttgtggatttga

SEQ ID NO: 4671035 - DNA, 25 bp, Homo sapien
tgctcatggacatagcaggactggt

SEQ ID NO: 4671036 - DNA, 25 bp, Homo sapien
ttgctgatctgtgccctgctcatgg

SEQ ID NO: 4671037 - DNA, 25 bp, Homo sapien
ggatttgagatctcagcaaaacatc

SEQ ID NO: 4671038 - DNA, 25 bp, Homo sapien
tgctgccttggcagagtgtctccag

SEQ ID NO: 4671039 - DNA, 25 bp, Homo sapien
cagcagtggtcacaaagcgcagagt

SEQ ID NO: 4671040 - DNA, 25 bp, Homo sapien
gcctaaaattctgcgaggacttgga

SEQ ID NO: 4671041 - DNA, 25 bp, Homo sapien
tatgtggcccttctgtgatcaaaac

SEQ ID NO: 4671042 - DNA, 25 bp, Homo sapien
cttctttcattgctatcctgcatct

SEQ ID NO: 4671043 - DNA, 25 bp, Homo sapien
atcccagatactccaaagtccttgc

SEQ ID NO: 4671044 - DNA, 25 bp, Homo sapien
tccacttctgtctgacagatactca

SEQ ID NO: 4671045 - DNA, 25 bp, Homo sapien
accagaccatcaacatcccagatac

SEQ ID NO: 4671046 - DNA, 25 bp, Homo sapien
aaggagattccataccctgtctgga

SEQ ID NO: 4671047 - DNA, 25 bp, Homo sapien
gcttggaaccttccgtgcctgttta

SEQ ID NO: 4671048 - DNA, 25 bp, Homo sapien
ttcggcacacacactaagacttcct

SEQ ID NO: 4671049 - DNA, 25 bp, Homo sapien
agctgtgagttccaggcttggaacc

SEQ ID NO: 4671050 - DNA, 25 bp, Homo sapien
caaatttgagcccatacccttcggc

SEQ ID NO: 4671051 - DNA, 25 bp, Homo sapien
catccagtgtccctcatggaaaggc

SEQ ID NO: 4671052 - DNA, 25 bp, Homo sapien
gaggtagacagagctattggcagct

SEQ ID NO: 4671053 - DNA, 25 bp, Homo sapien
gtgtccctcatggaaaggctggaag

SEQ ID NO: 4671054 - DNA, 25 bp, Homo sapien
cagaggtagacagagctattggcag

SEQ ID NO: 4671055 - DNA, 25 bp, Homo sapien
aaggctcccacagagatgtcatgtg

SEQ ID NO: 4671056 - DNA, 25 bp, Homo sapien
atgtgaaggcttctcaggctgagcc

SEQ ID NO: 4671057 - DNA, 25 bp, Homo sapien
tcccacagagatgtcatgtgaaggc

SEQ ID NO: 4671058 - DNA, 25 bp, Homo sapien
gtcatgtgaaggcttctcaggctga

SEQ ID NO: 4671059 - DNA, 25 bp, Homo sapien
agccacacagtgtcgagtggctact

SEQ ID NO: 4671060 - DNA, 25 bp, Homo sapien
gaggcagccacacagtgtcgagtgg

SEQ ID NO: 4671061 - DNA, 25 bp, Homo sapien
ggcagccacacagtgtcgagtggct

SEQ ID NO: 4671062 - DNA, 25 bp, Homo sapien
gcagccacacagtgtcgagtggcta

SEQ ID NO: 4671063 - DNA, 25 bp, Homo sapien
gtgggggctcggcattggtccctgg

SEQ ID NO: 4671064 - DNA, 25 bp, Homo sapien
agcccagaagcttgacccctgtggg

SEQ ID NO: 4671065 - DNA, 25 bp, Homo sapien
gcatgattcttgcctgctcagcagg

SEQ ID NO: 4671066 - DNA, 25 bp, Homo sapien
cccctgtgggggctcggcattggtc

SEQ ID NO: 4671067 - DNA, 25 bp, Homo sapien
gcttgcgttttccagtgggatgctc

SEQ ID NO: 4671068 - DNA, 25 bp, Homo sapien
gcgttttccagtgggatgctctcca

SEQ ID NO: 4671069 - DNA, 25 bp, Homo sapien
ttgcgttttccagtgggatgctctc

SEQ ID NO: 4671070 - DNA, 25 bp, Homo sapien
gtgcttgcgttttccagtgggatgc

SEQ ID NO: 4671071 - DNA, 25 bp, Homo sapien
atctatggcgagcaacgactcccgg

SEQ ID NO: 4671072 - DNA, 25 bp, Homo sapien
agggtccagccactttgtcacaagc

SEQ ID NO: 4671073 - DNA, 25 bp, Homo sapien
tggctccgtccctctccaataacat

SEQ ID NO: 4671074 - DNA, 25 bp, Homo sapien
caagctacatctatggcgagcaacg

SEQ ID NO: 4671075 - DNA, 25 bp, Homo sapien
ctgtgccatccaagcactgcctgcc

SEQ ID NO: 4671076 - DNA, 25 bp, Homo sapien
tgtgccatccaagcactgcctgccc

SEQ ID NO: 4671077 - DNA, 25 bp, Homo sapien
gtgccatccaagcactgcctgccct

SEQ ID NO: 4671078 - DNA, 25 bp, Homo sapien
ctggagaaagtcccgcagcccagag

SEQ ID NO: 4671079 - DNA, 25 bp, Homo sapien
tggagaaagtcccgcagcccagagt

SEQ ID NO: 4671080 - DNA, 25 bp, Homo sapien
ggagaaagtcccgcagcccagagtc

SEQ ID NO: 4671081 - DNA, 25 bp, Homo sapien
aaacgcgttccttctgctcagtctg

SEQ ID NO: 4671082 - DNA, 25 bp, Homo sapien
gctcagtctgttcccgttttgacaa

SEQ ID NO: 4671083 - DNA, 25 bp, Homo sapien
tctggatctgctgcgtactgccctg

SEQ ID NO: 4671084 - DNA, 25 bp, Homo sapien
ggctctggtctcagcacaaacgcgt

SEQ ID NO: 4671085 - DNA, 25 bp, Homo sapien
ccacgtgctgggctgtgaactgttc

SEQ ID NO: 4671086 - DNA, 25 bp, Homo sapien
gctgggctgtgaactgttcttggca

SEQ ID NO: 4671087 - DNA, 25 bp, Homo sapien
ggctgtgaactgttcttggcaccta

SEQ ID NO: 4671088 - DNA, 25 bp, Homo sapien
cgtgctgggctgtgaactgttcttg

SEQ ID NO: 4671089 - DNA, 25 bp, Homo sapien
agtaagccgaaaccgctactatatt

SEQ ID NO: 4671090 - DNA, 25 bp, Homo sapien
agccgaaaccgctactatatttaca

SEQ ID NO: 4671091 - DNA, 25 bp, Homo sapien
gctccgtagtaagccgaaaccgcta

SEQ ID NO: 4671092 - DNA, 25 bp, Homo sapien
cgtagtaagccgaaaccgctactat

SEQ ID NO: 4671093 - DNA, 25 bp, Homo sapien
cggcatcgccgagacaaggctagat

SEQ ID NO: 4671094 - DNA, 25 bp, Homo sapien
ggctagatccttttcagcacagcga

SEQ ID NO: 4671095 - DNA, 25 bp, Homo sapien
tgctgcacacaggacgcaatgcctg

SEQ ID NO: 4671096 - DNA, 25 bp, Homo sapien
gaaatcccagatgaaagtgagcggc

SEQ ID NO: 4671097 - DNA, 25 bp, Homo sapien
tggctctgcattttggaaaggtggt

SEQ ID NO: 4671098 - DNA, 25 bp, Homo sapien
ggagcaggtcagtgaaacatgataa

SEQ ID NO: 4671099 - DNA, 25 bp, Homo sapien
aacatgataagggcattggcattca

SEQ ID NO: 4671100 - DNA, 25 bp, Homo sapien
catgataagggcattggcattcagt

SEQ ID NO: 4671101 - DNA, 25 bp, Homo sapien
cctgtgtaggcaccgtataggatag

SEQ ID NO: 4671102 - DNA, 25 bp, Homo sapien
cttcagaccctgtgtaggcaccgta

SEQ ID NO: 4671103 - DNA, 25 bp, Homo sapien
agaccctgtgtaggcaccgtatagg

SEQ ID NO: 4671104 - DNA, 25 bp, Homo sapien
tgtaggcaccgtataggatagggta

SEQ ID NO: 4671105 - DNA, 25 bp, Homo sapien
cacaatgacagtccaacttctgcca

SEQ ID NO: 4671106 - DNA, 25 bp, Homo sapien
cagcctggctatcagcatatccact

SEQ ID NO: 4671107 - DNA, 25 bp, Homo sapien
tccttccttggttcacaatgacagt

SEQ ID NO: 4671108 - DNA, 25 bp, Homo sapien
cagtcctgactgtcattcaagcctt

SEQ ID NO: 4671109 - DNA, 25 bp, Homo sapien
cactagttctgctgtatcctgggaa

SEQ ID NO: 4671110 - DNA, 25 bp, Homo sapien
ggccatccactagttctgctgtatc

SEQ ID NO: 4671111 - DNA, 25 bp, Homo sapien
catccactagttctgctgtatcctg

SEQ ID NO: 4671112 - DNA, 25 bp, Homo sapien
gttctgctgtatcctgggaacctgc

SEQ ID NO: 4671113 - DNA, 25 bp, Homo sapien
taggaactcaggttcaatgatgtct

SEQ ID NO: 4671114 - DNA, 25 bp, Homo sapien
ggaactcaggttcaatgatgtctta

SEQ ID NO: 4671115 - DNA, 25 bp, Homo sapien
aactcaggttcaatgatgtcttaga

SEQ ID NO: 4671116 - DNA, 25 bp, Homo sapien
gaactcaggttcaatgatgtcttag

SEQ ID NO: 4671117 - DNA, 25 bp, Homo sapien
ttgcctctctgggaaaactaaatga

SEQ ID NO: 4671118 - DNA, 25 bp, Homo sapien
caacctgaggcatatttgagaactc

SEQ ID NO: 4671119 - DNA, 25 bp, Homo sapien
acacgtccctctaattaaaagctgg

SEQ ID NO: 4671120 - DNA, 25 bp, Homo sapien
gcccggtccaggttaaaggatatca

SEQ ID NO: 4671121 - DNA, 25 bp, Homo sapien
tcacgggtcccacaatgcttagaat

SEQ ID NO: 4671122 - DNA, 25 bp, Homo sapien
acaatgcttagaatgatgcactgcc

SEQ ID NO: 4671123 - DNA, 25 bp, Homo sapien
tagatccaatatatccctgttcacg

SEQ ID NO: 4671124 - DNA, 25 bp, Homo sapien
ccattttgtgggaacttagatccaa

SEQ ID NO: 4671125 - DNA, 25 bp, Homo sapien
gccttcagcaatcctggagagtctc

SEQ ID NO: 4671126 - DNA, 25 bp, Homo sapien
gcagccttcagcaatcctggagagt

SEQ ID NO: 4671127 - DNA, 25 bp, Homo sapien
cagccttcagcaatcctggagagtc

SEQ ID NO: 4671128 - DNA, 25 bp, Homo sapien
ccttcagcaatcctggagagtctca

SEQ ID NO: 4671129 - DNA, 25 bp, Homo sapien
ctgcaaagcacaaacctttccaaag

SEQ ID NO: 4671130 - DNA, 25 bp, Homo sapien
cactttgccattgcattgaaggtcc

SEQ ID NO: 4671131 - DNA, 25 bp, Homo sapien
tatccataaccactttgccattgca

SEQ ID NO: 4671132 - DNA, 25 bp, Homo sapien
tttggattatccataaccactttgc

SEQ ID NO: 4671133 - DNA, 25 bp, Homo sapien
gcattgaaggtccttcagaacaagt

SEQ ID NO: 4671134 - DNA, 25 bp, Homo sapien
ctgttctctgttgatgcttggccgg

SEQ ID NO: 4671135 - DNA, 25 bp, Homo sapien
ttggccggctcctggtccatgtctc

SEQ ID NO: 4671136 - DNA, 25 bp, Homo sapien
tctctgttgatgcttggccggctcc

SEQ ID NO: 4671137 - DNA, 25 bp, Homo sapien
cagctcattcccaactcaaaccatc

SEQ ID NO: 4671138 - DNA, 25 bp, Homo sapien
atatttaccgaacaccttgcctgtg

SEQ ID NO: 4671139 - DNA, 25 bp, Homo sapien
gaacaccttgcctgtgcaaggccaa

SEQ ID NO: 4671140 - DNA, 25 bp, Homo sapien
ccttgcctgtgcaaggccaaccaag

SEQ ID NO: 4671141 - DNA, 25 bp, Homo sapien
taccgaacaccttgcctgtgcaagg

SEQ ID NO: 4671142 - DNA, 25 bp, Homo sapien
catctgaaagagctgctctatctca

SEQ ID NO: 4671143 - DNA, 25 bp, Homo sapien
tagcaccatctgaaagagctgctct

SEQ ID NO: 4671144 - DNA, 25 bp, Homo sapien
gcaccatctgaaagagctgctctat

SEQ ID NO: 4671145 - DNA, 25 bp, Homo sapien
caccatctgaaagagctgctctatc

SEQ ID NO: 4671146 - DNA, 25 bp, Homo sapien
attgctcctgctgaccggaaggcca

SEQ ID NO: 4671147 - DNA, 25 bp, Homo sapien
tgctcctgaacagcctgcggcaatg

SEQ ID NO: 4671148 - DNA, 25 bp, Homo sapien
gccagtgaccgctgctcctgaacag

SEQ ID NO: 4671149 - DNA, 25 bp, Homo sapien
acctggtcctgctactattgctcct

SEQ ID NO: 4671150 - DNA, 25 bp, Homo sapien
caaggagcctaaagctgtaacactg

SEQ ID NO: 4671151 - DNA, 25 bp, Homo sapien
gtcctgagggcaaggagcctaaagc

SEQ ID NO: 4671152 - DNA, 25 bp, Homo sapien
gggcaaggagcctaaagctgtaaca

SEQ ID NO: 4671153 - DNA, 25 bp, Homo sapien
tgagggcaaggagcctaaagctgta

SEQ ID NO: 4671154 - DNA, 25 bp, Homo sapien
catactggggtctgcacaagatttc

SEQ ID NO: 4671155 - DNA, 25 bp, Homo sapien
gaacaagcatactggggtctgcaca

SEQ ID NO: 4671156 - DNA, 25 bp, Homo sapien
gaataaatgaacaagcatactgggg

SEQ ID NO: 4671157 - DNA, 25 bp, Homo sapien
ctgttttatctgcataatgaataaa

SEQ ID NO: 4671158 - DNA, 25 bp, Homo sapien
tgagaagaagtctaaatggcccaaa

SEQ ID NO: 4671159 - DNA, 25 bp, Homo sapien
ctgagaagaagtctaaatggcccaa

SEQ ID NO: 4671160 - DNA, 25 bp, Homo sapien
gagaagaagtctaaatggcccaaac

SEQ ID NO: 4671161 - DNA, 25 bp, Homo sapien
ttgacccagtaacttcagctgcatg

SEQ ID NO: 4671162 - DNA, 25 bp, Homo sapien
aacttcagctgcatgattgcagagc

SEQ ID NO: 4671163 - DNA, 25 bp, Homo sapien
ttgcagagctgtgctagcatgagga

SEQ ID NO: 4671164 - DNA, 25 bp, Homo sapien
agctgtgctagcatgaggacaatgc

SEQ ID NO: 4671165 - DNA, 25 bp, Homo sapien
tatattgccactttcctgggaggct

SEQ ID NO: 4671166 - DNA, 25 bp, Homo sapien
tgcagggcggccttgcggtgacagt

SEQ ID NO: 4671167 - DNA, 25 bp, Homo sapien
ttgcagccctcttaggacaggtgct

SEQ ID NO: 4671168 - DNA, 25 bp, Homo sapien
ggtgacagtggtcgccccgctgaat

SEQ ID NO: 4671169 - DNA, 25 bp, Homo sapien
tttagggggacacatgtccttcaga

SEQ ID NO: 4671170 - DNA, 25 bp, Homo sapien
ctccctttctgtaccagaggccgag

SEQ ID NO: 4671171 - DNA, 25 bp, Homo sapien
ggccgagtgtggttttagccacact

SEQ ID NO: 4671172 - DNA, 25 bp, Homo sapien
tttagccacactttagggggacaca

SEQ ID NO: 4671173 - DNA, 25 bp, Homo sapien
ggcacgaggaattcatctgtggttg

SEQ ID NO: 4671174 - DNA, 25 bp, Homo sapien
ttcagtgccttttcaatccagttgc

SEQ ID NO: 4671175 - DNA, 25 bp, Homo sapien
ctcctgcagacctgagagatggatc

SEQ ID NO: 4671176 - DNA, 25 bp, Homo sapien
aatccagttgctggattccactggc

SEQ ID NO: 4671177 - DNA, 25 bp, Homo sapien
acacttcgtcgccagcagtgaggcc

SEQ ID NO: 4671178 - DNA, 25 bp, Homo sapien
gactaagacgacaccacattttgcc

SEQ ID NO: 4671179 - DNA, 25 bp, Homo sapien
tgaggccctgaatgatggccaccct

SEQ ID NO: 4671180 - DNA, 25 bp, Homo sapien
tggcatatggacacttcgtcgccag

SEQ ID NO: 4671181 - DNA, 25 bp, Homo sapien
agcaggtaccttgtactgtggaaga

SEQ ID NO: 4671182 - DNA, 25 bp, Homo sapien
atcttcaacagtggagatctctggg

SEQ ID NO: 4671183 - DNA, 25 bp, Homo sapien
tttggtgagcaggtaccttgtactg

SEQ ID NO: 4671184 - DNA, 25 bp, Homo sapien
aacagtgtgaggaacgaatgaagtg

SEQ ID NO: 4671185 - DNA, 25 bp, Homo sapien
gttaccatggctgtgtaaacttgca

SEQ ID NO: 4671186 - DNA, 25 bp, Homo sapien
aggtatgggcttgagaatcctgccc

SEQ ID NO: 4671187 - DNA, 25 bp, Homo sapien
taaacttgcagagagatagggatca

SEQ ID NO: 4671188 - DNA, 25 bp, Homo sapien
ctgccccagggtagctaacagttac

SEQ ID NO: 4671189 - DNA, 25 bp, Homo sapien
ccctgagaaatcttcagggaagctg

SEQ ID NO: 4671190 - DNA, 25 bp, Homo sapien
gaggattcccacaagtaggggtagc

SEQ ID NO: 4671191 - DNA, 25 bp, Homo sapien
aaatcttcagggaagctggtgtcgg

SEQ ID NO: 4671192 - DNA, 25 bp, Homo sapien
gattcccacaagtaggggtagcagc

SEQ ID NO: 4671193 - DNA, 25 bp, Homo sapien
ccaaatatccccagtggggacctgg

SEQ ID NO: 4671194 - DNA, 25 bp, Homo sapien
caaggtttttgaagacacaagtggg

SEQ ID NO: 4671195 - DNA, 25 bp, Homo sapien
ggactgcgaacaaggtttttgaaga

SEQ ID NO: 4671196 - DNA, 25 bp, Homo sapien
tccaaatatccccagtggggacctg

SEQ ID NO: 4671197 - DNA, 25 bp, Homo sapien
tttttacatcttgatcatcctccga

SEQ ID NO: 4671198 - DNA, 25 bp, Homo sapien
tgatcatcctccgatctccattgtc

SEQ ID NO: 4671199 - DNA, 25 bp, Homo sapien
tacatcttgatcatcctccgatctc

SEQ ID NO: 4671200 - DNA, 25 bp, Homo sapien
tcttgatcatcctccgatctccatt

SEQ ID NO: 4671201 - DNA, 25 bp, Homo sapien
agctgtggaaagcctgccttaatag

SEQ ID NO: 4671202 - DNA, 25 bp, Homo sapien
aggacagctgtggaaagcctgcctt

SEQ ID NO: 4671203 - DNA, 25 bp, Homo sapien
gacagctgtggaaagcctgccttaa

SEQ ID NO: 4671204 - DNA, 25 bp, Homo sapien
tgtggaaagcctgccttaatagtca

SEQ ID NO: 4671205 - DNA, 25 bp, Homo sapien
agtggagcaccaagtgccttttgct

SEQ ID NO: 4671206 - DNA, 25 bp, Homo sapien
aattagcactctcagtaagtccgtg

SEQ ID NO: 4671207 - DNA, 25 bp, Homo sapien
tcttcctatggagtttgggtatggg

SEQ ID NO: 4671208 - DNA, 25 bp, Homo sapien
aaggctgatcctctctcaagcttca

SEQ ID NO: 4671209 - DNA, 25 bp, Homo sapien
gccagggagcacatttcctgtctat

SEQ ID NO: 4671210 - DNA, 25 bp, Homo sapien
ggagcacatttcctgtctattcttc

SEQ ID NO: 4671211 - DNA, 25 bp, Homo sapien
agccagggagcacatttcctgtcta

SEQ ID NO: 4671212 - DNA, 25 bp, Homo sapien
cagggagcacatttcctgtctattc

SEQ ID NO: 4671213 - DNA, 25 bp, Homo sapien
tcagcactgggactctgctctgctc

SEQ ID NO: 4671214 - DNA, 25 bp, Homo sapien
gcactgggactctgctctgctcaaa

SEQ ID NO: 4671215 - DNA, 25 bp, Homo sapien
ctgctctgctcaaagggcaccggca

SEQ ID NO: 4671216 - DNA, 25 bp, Homo sapien
tgctctgctcaaagggcaccggcac

SEQ ID NO: 4671217 - DNA, 25 bp, Homo sapien
gaaagatcctccatatacacagcgg

SEQ ID NO: 4671218 - DNA, 25 bp, Homo sapien
ggattccctcaaagaggatttccca

SEQ ID NO: 4671219 - DNA, 25 bp, Homo sapien
gagggagtcagcttggagtcatcct

SEQ ID NO: 4671220 - DNA, 25 bp, Homo sapien
gggaagcttcactcacatcaggcgg

SEQ ID NO: 4671221 - DNA, 25 bp, Homo sapien
tgaagttctgtagcacagaatttaa

SEQ ID NO: 4671222 - DNA, 25 bp, Homo sapien
gaagttctgtagcacagaatttaat

SEQ ID NO: 4671223 - DNA, 25 bp, Homo sapien
ttaagagaaccattcaggcaatttg

SEQ ID NO: 4671224 - DNA, 25 bp, Homo sapien
aagagaaccattcaggcaatttgac

SEQ ID NO: 4671225 - DNA, 25 bp, Homo sapien
taagagaaccattcaggcaatttga

SEQ ID NO: 4671226 - DNA, 25 bp, Homo sapien
tttttctccctactgagagagggag

SEQ ID NO: 4671227 - DNA, 25 bp, Homo sapien
ttttttctccctactgagagaggga

SEQ ID NO: 4671228 - DNA, 25 bp, Homo sapien
ttttctccctactgagagagggagc

SEQ ID NO: 4671229 - DNA, 25 bp, Homo sapien
tgatcaagcactctgtagcaccttg

SEQ ID NO: 4671230 - DNA, 25 bp, Homo sapien
taggcatctgaatatatgatagaga

SEQ ID NO: 4671231 - DNA, 25 bp, Homo sapien
tttggctgcattcccaacataggca

SEQ ID NO: 4671232 - DNA, 25 bp, Homo sapien
accaatggtcaaggcgggaatgtga

SEQ ID NO: 4671233 - DNA, 25 bp, Homo sapien
gcatttttcagagtatggccagcag

SEQ ID NO: 4671234 - DNA, 25 bp, Homo sapien
gctacttgaatgtaattagaaccat

SEQ ID NO: 4671235 - DNA, 25 bp, Homo sapien
ctgctacttgaatgtaattagaacc

SEQ ID NO: 4671236 - DNA, 25 bp, Homo sapien
atttttcagagtatggccagcagcc

SEQ ID NO: 4671237 - DNA, 25 bp, Homo sapien
gggacttggccctggatgataatct

SEQ ID NO: 4671238 - DNA, 25 bp, Homo sapien
ttgtaccaacagtagcaaagaatca

SEQ ID NO: 4671239 - DNA, 25 bp, Homo sapien
gaaaaactctgtggctacaaggtag

SEQ ID NO: 4671240 - DNA, 25 bp, Homo sapien
aagctgagtctctgttgtttgtacc

SEQ ID NO: 4671241 - DNA, 25 bp, Homo sapien
gagaggatgctctttggaattaggt

SEQ ID NO: 4671242 - DNA, 25 bp, Homo sapien
ctttggaattaggttctggactctc

SEQ ID NO: 4671243 - DNA, 25 bp, Homo sapien
gggagaggatgctctttggaattag

SEQ ID NO: 4671244 - DNA, 25 bp, Homo sapien
tggaattaggttctggactctcttt

SEQ ID NO: 4671245 - DNA, 25 bp, Homo sapien
tgcttcccaccggcaccaaaggagg

SEQ ID NO: 4671246 - DNA, 25 bp, Homo sapien
ctgcttcccaccggcaccaaaggag

SEQ ID NO: 4671247 - DNA, 25 bp, Homo sapien
atgcttcagggcacaaaggcagcca

SEQ ID NO: 4671248 - DNA, 25 bp, Homo sapien
agggatgcttcagggcacaaaggca

SEQ ID NO: 4671249 - DNA, 25 bp, Homo sapien
tgcttcagggcacaaaggcagccac

SEQ ID NO: 4671250 - DNA, 25 bp, Homo sapien
ctgagggatgcttcagggcacaaag

SEQ ID NO: 4671251 - DNA, 25 bp, Homo sapien
ggacacagtccagtgcagtatgagg

SEQ ID NO: 4671252 - DNA, 25 bp, Homo sapien
cagtaggactttgcaaagacaggag

SEQ ID NO: 4671253 - DNA, 25 bp, Homo sapien
aggagacactttccagtaggacttt

SEQ ID NO: 4671254 - DNA, 25 bp, Homo sapien
cagtccagtgcagtatgaggagaca

SEQ ID NO: 4671255 - DNA, 25 bp, Homo sapien
tctctaaaccaaaggtgtagttcac

SEQ ID NO: 4671256 - DNA, 25 bp, Homo sapien
ccaaaggtgtagttcactctctggg

SEQ ID NO: 4671257 - DNA, 25 bp, Homo sapien
tgacttctctaaaccaaaggtgtag

SEQ ID NO: 4671258 - DNA, 25 bp, Homo sapien
ctggtgacttctctaaaccaaaggt

SEQ ID NO: 4671259 - DNA, 25 bp, Homo sapien
tatcttagagtcacaagggctaatg

SEQ ID NO: 4671260 - DNA, 25 bp, Homo sapien
catatattccctggcacgctgacca

SEQ ID NO: 4671261 - DNA, 25 bp, Homo sapien
aacttggaaggccatacctcatcga

SEQ ID NO: 4671262 - DNA, 25 bp, Homo sapien
catgctgcagagattaaggctgcct

SEQ ID NO: 4671263 - DNA, 25 bp, Homo sapien
gatgtcgccgtgttttagcctggaa

SEQ ID NO: 4671264 - DNA, 25 bp, Homo sapien
ttccatctcgtttccaagcagatgt

SEQ ID NO: 4671265 - DNA, 25 bp, Homo sapien
gctaatctgtctggaatttctgccc

SEQ ID NO: 4671266 - DNA, 25 bp, Homo sapien
aagatactataaatttgctctggaa

SEQ ID NO: 4671267 - DNA, 25 bp, Homo sapien
ataaggacacccagtgttaaagcaa

SEQ ID NO: 4671268 - DNA, 25 bp, Homo sapien
ggacacccagtgttaaagcaatgaa

SEQ ID NO: 4671269 - DNA, 25 bp, Homo sapien
gaatttctatacctatgcagttcag

SEQ ID NO: 4671270 - DNA, 25 bp, Homo sapien
tgaatttctatacctatgcagttca

SEQ ID NO: 4671271 - DNA, 25 bp, Homo sapien
cccagaagagactatccttgttgga

SEQ ID NO: 4671272 - DNA, 25 bp, Homo sapien
caaattaggcccagaagagactatc

SEQ ID NO: 4671273 - DNA, 25 bp, Homo sapien
tgtgaatgtcaaagaaactatcttc

SEQ ID NO: 4671274 - DNA, 25 bp, Homo sapien
tccttgttggagtgtgaatgtcaaa

SEQ ID NO: 4671275 - DNA, 25 bp, Homo sapien
tctgactgttaaaatccaagccttc

SEQ ID NO: 4671276 - DNA, 25 bp, Homo sapien
tcctttttgattccccccagccagc

SEQ ID NO: 4671277 - DNA, 25 bp, Homo sapien
ttctgactgttaaaatccaagcctt

SEQ ID NO: 4671278 - DNA, 25 bp, Homo sapien
gttggctttcagagggtagccagca

SEQ ID NO: 4671279 - DNA, 25 bp, Homo sapien
tagccagcatgagtgtaagtgtttg

SEQ ID NO: 4671280 - DNA, 25 bp, Homo sapien
gaaattcctgattgtctaggagcaa

SEQ ID NO: 4671281 - DNA, 25 bp, Homo sapien
gacaggagtgtgtttacaatgacag

SEQ ID NO: 4671282 - DNA, 25 bp, Homo sapien
gaagtaagacatattcagatctgtg

SEQ ID NO: 4671283 - DNA, 25 bp, Homo sapien
ctgtgtgttacagacatccttctaa

SEQ ID NO: 4671284 - DNA, 25 bp, Homo sapien
agcagagctgggaaagcttgaaggc

SEQ ID NO: 4671285 - DNA, 25 bp, Homo sapien
ctaaggcaggcaatgagtaggatga

SEQ ID NO: 4671286 - DNA, 25 bp, Homo sapien
tcaaaactgtagaggtgagtgctaa

SEQ ID NO: 4671287 - DNA, 25 bp, Homo sapien
tgagtgctaaacagacctgcgcagc

SEQ ID NO: 4671288 - DNA, 25 bp, Homo sapien
cctgcgcagctactctagggtaaaa

SEQ ID NO: 4671289 - DNA, 25 bp, Homo sapien
tcatgtaaagtgttcaaggcatcag

SEQ ID NO: 4671290 - DNA, 25 bp, Homo sapien
tcacgttggggtagaattcagagac

SEQ ID NO: 4671291 - DNA, 25 bp, Homo sapien
cacgttggggtagaattcagagact

SEQ ID NO: 4671292 - DNA, 25 bp, Homo sapien
acgttggggtagaattcagagactt

SEQ ID NO: 4671293 - DNA, 25 bp, Homo sapien
ttagttgatccttctactttcttct

SEQ ID NO: 4671294 - DNA, 25 bp, Homo sapien
cagccatttagtgggagagctcttt

SEQ ID NO: 4671295 - DNA, 25 bp, Homo sapien
acagccatttagtgggagagctctt

SEQ ID NO: 4671296 - DNA, 25 bp, Homo sapien
ctcttttagttgatccttctacttt

SEQ ID NO: 4671297 - DNA, 25 bp, Homo sapien
catacatgagagtatcctggagatc

SEQ ID NO: 4671298 - DNA, 25 bp, Homo sapien
tcattccttgatacccactgctgtt

SEQ ID NO: 4671299 - DNA, 25 bp, Homo sapien
tatagctccttgaatcttgactgtc

SEQ ID NO: 4671300 - DNA, 25 bp, Homo sapien
gatggaagaaatggactcttgactc

SEQ ID NO: 4671301 - DNA, 25 bp, Homo sapien
tgcagactgagaaattgtaaacctc

SEQ ID NO: 4671302 - DNA, 25 bp, Homo sapien
gatccacgtggaagctgagccttgc

SEQ ID NO: 4671303 - DNA, 25 bp, Homo sapien
tccgaacgagtaggcaaaccaggct

SEQ ID NO: 4671304 - DNA, 25 bp, Homo sapien
taaacctcacaatcgagagagctgc

SEQ ID NO: 4671305 - DNA, 25 bp, Homo sapien
tcccagccagaagtagcacggtctt

SEQ ID NO: 4671306 - DNA, 25 bp, Homo sapien
ccagccagaagtagcacggtcttca

SEQ ID NO: 4671307 - DNA, 25 bp, Homo sapien
atcccagccagaagtagcacggtct

SEQ ID NO: 4671308 - DNA, 25 bp, Homo sapien
cagccagaagtagcacggtcttcaa

SEQ ID NO: 4671309 - DNA, 25 bp, Homo sapien
ccgtgaaggggtctgatgctcagta

SEQ ID NO: 4671310 - DNA, 25 bp, Homo sapien
gtaacttgaggtgcccctgcagcat

SEQ ID NO: 4671311 - DNA, 25 bp, Homo sapien
tgctcagtaacttgaggtgcccctg

SEQ ID NO: 4671312 - DNA, 25 bp, Homo sapien
ctgatgctcagtaacttgaggtgcc

SEQ ID NO: 4671313 - DNA, 25 bp, Homo sapien
tatacaaattactcttggaatccct

SEQ ID NO: 4671314 - DNA, 25 bp, Homo sapien
tatgctggtgtatctctgtatgaaa

SEQ ID NO: 4671315 - DNA, 25 bp, Homo sapien
cacacgtaagtggaataatcacaat

SEQ ID NO: 4671316 - DNA, 25 bp, Homo sapien
tatatgcccctgtgtgggtggtctc

SEQ ID NO: 4671317 - DNA, 25 bp, Homo sapien
ctgaaatccctgtacccctgaattg

SEQ ID NO: 4671318 - DNA, 25 bp, Homo sapien
tttctgaaatccctgtacccctgaa

SEQ ID NO: 4671319 - DNA, 25 bp, Homo sapien
cctttctgaaatccctgtacccctg

SEQ ID NO: 4671320 - DNA, 25 bp, Homo sapien
tctgaaatccctgtacccctgaatt

SEQ ID NO: 4671321 - DNA, 25 bp, Homo sapien
cagctagaggcatgtgatgttctga

SEQ ID NO: 4671322 - DNA, 25 bp, Homo sapien
ctgagggggcagctagaggcatgtg

SEQ ID NO: 4671323 - DNA, 25 bp, Homo sapien
ccagggatcttcaataagttcctca

SEQ ID NO: 4671324 - DNA, 25 bp, Homo sapien
ttccagggatcttcaataagttcct

SEQ ID NO: 4671325 - DNA, 25 bp, Homo sapien
tttattcctacaccctttcctgcgc

SEQ ID NO: 4671326 - DNA, 25 bp, Homo sapien
tgcattttccccgacaagtgcctgg

SEQ ID NO: 4671327 - DNA, 25 bp, Homo sapien
ccatttgaccttggctggagcttgc

SEQ ID NO: 4671328 - DNA, 25 bp, Homo sapien
ttccccgacaagtgcctggcaacag

SEQ ID NO: 4671329 - DNA, 25 bp, Homo sapien
gactgacagccttatctttttgacc

SEQ ID NO: 4671330 - DNA, 25 bp, Homo sapien
tcttctgcccgtgatagttctttca

SEQ ID NO: 4671331 - DNA, 25 bp, Homo sapien
aggcagcagagatgggactgaagtg

SEQ ID NO: 4671332 - DNA, 25 bp, Homo sapien
tgggggcttcttctgcccgtgatag

SEQ ID NO: 4671333 - DNA, 25 bp, Homo sapien
caggaggtaagcgaggatgtaagtc

SEQ ID NO: 4671334 - DNA, 25 bp, Homo sapien
ggaggtaagcgaggatgtaagtcat

SEQ ID NO: 4671335 - DNA, 25 bp, Homo sapien
aggaggtaagcgaggatgtaagtca

SEQ ID NO: 4671336 - DNA, 25 bp, Homo sapien
cctatgaaccgaatcttcctatgaa

SEQ ID NO: 4671337 - DNA, 25 bp, Homo sapien
tctgctacacctgacatctgttgtt

SEQ ID NO: 4671338 - DNA, 25 bp, Homo sapien
ctttcctatgaaccgaatcttccta

SEQ ID NO: 4671339 - DNA, 25 bp, Homo sapien
ttcttgaaatgttctgctacacctg

SEQ ID NO: 4671340 - DNA, 25 bp, Homo sapien
atgccttattagctgatgatggctt

SEQ ID NO: 4671341 - DNA, 25 bp, Homo sapien
aatgccttattagctgatgatggct

SEQ ID NO: 4671342 - DNA, 25 bp, Homo sapien
ttcattctgttttgagacctgcgca

SEQ ID NO: 4671343 - DNA, 25 bp, Homo sapien
tttcattctgttttgagacctgcgc

SEQ ID NO: 4671344 - DNA, 25 bp, Homo sapien
cattctgttttgagacctgcgcatc

SEQ ID NO: 4671345 - DNA, 25 bp, Homo sapien
tctgttttgagacctgcgcatccat

SEQ ID NO: 4671346 - DNA, 25 bp, Homo sapien
agctgtaggtatgggtagatggagc

SEQ ID NO: 4671347 - DNA, 25 bp, Homo sapien
tattagtctttaggtagactttgga

SEQ ID NO: 4671348 - DNA, 25 bp, Homo sapien
tgaagaaaggatccggtatcttgcc

SEQ ID NO: 4671349 - DNA, 25 bp, Homo sapien
gaaaggatccggtatcttgccaaaa

SEQ ID NO: 4671350 - DNA, 25 bp, Homo sapien
ggtgaagaaaggatccggtatcttg

SEQ ID NO: 4671351 - DNA, 25 bp, Homo sapien
agaggtgaagaaaggatccggtatc

SEQ ID NO: 4671352 - DNA, 25 bp, Homo sapien
caatgcaaggttcgctggagtcaca

SEQ ID NO: 4671353 - DNA, 25 bp, Homo sapien
gcttcacgcagccaaaaaggtggcc

SEQ ID NO: 4671354 - DNA, 25 bp, Homo sapien
tgcagccgtagattggcttcacgca

SEQ ID NO: 4671355 - DNA, 25 bp, Homo sapien
aaagcaaggagtacatgcagccgta

SEQ ID NO: 4671356 - DNA, 25 bp, Homo sapien
tcaagtcattgttagtgggctacag

SEQ ID NO: 4671357 - DNA, 25 bp, Homo sapien
ggacactctgtagctatctaggcat

SEQ ID NO: 4671358 - DNA, 25 bp, Homo sapien
cacttggccttcagggagaatgcgt

SEQ ID NO: 4671359 - DNA, 25 bp, Homo sapien
aaagttctgtggttagcacttggcc

SEQ ID NO: 4671360 - DNA, 25 bp, Homo sapien
gtgtgacgtgcactaatttttccag

SEQ ID NO: 4671361 - DNA, 25 bp, Homo sapien
tcttggtgtgacgtgcactaatttt

SEQ ID NO: 4671362 - DNA, 25 bp, Homo sapien
caattcaccaaaccattgtggctcc

SEQ ID NO: 4671363 - DNA, 25 bp, Homo sapien
tttccagacttgaccaattcaccaa

SEQ ID NO: 4671364 - DNA, 25 bp, Homo sapien
gactactccaataagcctcttgcct

SEQ ID NO: 4671365 - DNA, 25 bp, Homo sapien
tgctgctgcaggactactccaataa

SEQ ID NO: 4671366 - DNA, 25 bp, Homo sapien
tgcaggactactccaataagcctct

SEQ ID NO: 4671367 - DNA, 25 bp, Homo sapien
tgctgcaggactactccaataagcc

SEQ ID NO: 4671368 - DNA, 25 bp, Homo sapien
gtaggatgccaccttgtttgtcctg

SEQ ID NO: 4671369 - DNA, 25 bp, Homo sapien
agcactgctgtggtccctaccttca

SEQ ID NO: 4671370 - DNA, 25 bp, Homo sapien
gctctgtagtccttgttgtagtctg

SEQ ID NO: 4671371 - DNA, 25 bp, Homo sapien
ccctctttggtaggatgccaccttg

SEQ ID NO: 4671372 - DNA, 25 bp, Homo sapien
tgttcaggtcaacctgatctcctct

SEQ ID NO: 4671373 - DNA, 25 bp, Homo sapien
actccggttactctggttctctctg

SEQ ID NO: 4671374 - DNA, 25 bp, Homo sapien
gatataatggtcttcttgtgatgat

SEQ ID NO: 4671375 - DNA, 25 bp, Homo sapien
tgggaaagtgccctgggtcttactc

SEQ ID NO: 4671376 - DNA, 25 bp, Homo sapien
gaactggaggatcttgggtagcagg

SEQ ID NO: 4671377 - DNA, 25 bp, Homo sapien
tcttgggtagcaggggtagatccat

SEQ ID NO: 4671378 - DNA, 25 bp, Homo sapien
ttccatatttacacgagcagcaggg

SEQ ID NO: 4671379 - DNA, 25 bp, Homo sapien
catgaaccagcctagataattccat

SEQ ID NO: 4671380 - DNA, 25 bp, Homo sapien
ggcctggatacgacacacatcagtt

SEQ ID NO: 4671381 - DNA, 25 bp, Homo sapien
cattggccggaactagatgcgttac

SEQ ID NO: 4671382 - DNA, 25 bp, Homo sapien
ggatccaccattccctagggccttg

SEQ ID NO: 4671383 - DNA, 25 bp, Homo sapien
cacaggtgtggtaacagtctcattt

SEQ ID NO: 4671384 - DNA, 25 bp, Homo sapien
cgagtcgcgtgggggcggagctgcc

SEQ ID NO: 4671385 - DNA, 25 bp, Homo sapien
ccagccccgagtcgcgtgggggcgg

SEQ ID NO: 4671386 - DNA, 25 bp, Homo sapien
ggacgtcacggaggagccgaggcgg

SEQ ID NO: 4671387 - DNA, 25 bp, Homo sapien
accacttcctgagtgccggggatac

SEQ ID NO: 4671388 - DNA, 25 bp, Homo sapien
gccgcagatagcggagtaggttccc

SEQ ID NO: 4671389 - DNA, 25 bp, Homo sapien
cgatgttactaaattcggcggttgg

SEQ ID NO: 4671390 - DNA, 25 bp, Homo sapien
gcgtgattgacgcaggcgatgttac

SEQ ID NO: 4671391 - DNA, 25 bp, Homo sapien
cacgcgaggcgcgtgattgacgcag

SEQ ID NO: 4671392 - DNA, 25 bp, Homo sapien
accagcccgaagacgccctgaggtg

SEQ ID NO: 4671393 - DNA, 25 bp, Homo sapien
cagccggtgcagaaggcgtctggca

SEQ ID NO: 4671394 - DNA, 25 bp, Homo sapien
gaaggcgtctggcaccagcccgaag

SEQ ID NO: 4671395 - DNA, 25 bp, Homo sapien
cagtgacctggcagccggtgcagaa

SEQ ID NO: 4671396 - DNA, 25 bp, Homo sapien
gctcttccgaaagggaaggctccgc

SEQ ID NO: 4671397 - DNA, 25 bp, Homo sapien
tgtcaggctcgggtggagtagagtt

SEQ ID NO: 4671398 - DNA, 25 bp, Homo sapien
aggagtgctgctggcgcgcctccga

SEQ ID NO: 4671399 - DNA, 25 bp, Homo sapien
aggctgccccgaggcacggagccag

SEQ ID NO: 4671400 - DNA, 25 bp, Homo sapien
tgcgggagggtgcagcggcctgccc

SEQ ID NO: 4671401 - DNA, 25 bp, Homo sapien
tgcgtctgcgggagggtgcagcggc

SEQ ID NO: 4671402 - DNA, 25 bp, Homo sapien
ttctctttttgcagcggaaccgctc

SEQ ID NO: 4671403 - DNA, 25 bp, Homo sapien
gaaccgctcgccagggcgtgcgtct

SEQ ID NO: 4671404 - DNA, 25 bp, Homo sapien
tctgtgtgtgcgagtgagggagcgg

SEQ ID NO: 4671405 - DNA, 25 bp, Homo sapien
gagcgggtgtgagcgcgtctgtgta

SEQ ID NO: 4671406 - DNA, 25 bp, Homo sapien
cctgtgtgcgcgcttgtgtctgtgt

SEQ ID NO: 4671407 - DNA, 25 bp, Homo sapien
gagagcgaagtgtgtgtgcggagcc

SEQ ID NO: 4671408 - DNA, 25 bp, Homo sapien
gccggcaccgtcagcgttgcaaagt

SEQ ID NO: 4671409 - DNA, 25 bp, Homo sapien
tccacggccactgccggcaccgtca

SEQ ID NO: 4671410 - DNA, 25 bp, Homo sapien
actgccggcaccgtcagcgttgcaa

SEQ ID NO: 4671411 - DNA, 25 bp, Homo sapien
caccgtcagcgttgcaaagtgagcc

SEQ ID NO: 4671412 - DNA, 25 bp, Homo sapien
tagagcgagtttctagagagctgtc

SEQ ID NO: 4671413 - DNA, 25 bp, Homo sapien
ggatgctgcgatcccgactcatggg

SEQ ID NO: 4671414 - DNA, 25 bp, Homo sapien
actcatgggagagcacagccgagag

SEQ ID NO: 4671415 - DNA, 25 bp, Homo sapien
gagctgtcccgaaatctgcactggg

SEQ ID NO: 4671416 - DNA, 25 bp, Homo sapien
catgacaactagagccgaaataccc

SEQ ID NO: 4671417 - DNA, 25 bp, Homo sapien
gaattacatcgctggagccgctata

SEQ ID NO: 4671418 - DNA, 25 bp, Homo sapien
gagccgctatagcacaaatcccggt

SEQ ID NO: 4671419 - DNA, 25 bp, Homo sapien
gaggcttttcgcctcttcgagtggg

SEQ ID NO: 4671420 - DNA, 25 bp, Homo sapien
gaaaagtgtaaaccggcatgtcagc

SEQ ID NO: 4671421 - DNA, 25 bp, Homo sapien
tccaaaagcgcgagttctgtccgtg

SEQ ID NO: 4671422 - DNA, 25 bp, Homo sapien
tctgtccgtgaaaaagcatgccttt

SEQ ID NO: 4671423 - DNA, 25 bp, Homo sapien
cagtgtgcgggagtcgccaattaca

SEQ ID NO: 4671424 - DNA, 25 bp, Homo sapien
gtgcctttggaagtcagtctccgca

SEQ ID NO: 4671425 - DNA, 25 bp, Homo sapien
actgccccgaggcttccaacaggtt

SEQ ID NO: 4671426 - DNA, 25 bp, Homo sapien
agtcagtctccgcaggctgcgctcg

SEQ ID NO: 4671427 - DNA, 25 bp, Homo sapien
gccccgaggcttccaacaggttgga

SEQ ID NO: 4671428 - DNA, 25 bp, Homo sapien
ctacaggcaaggtgaaagaggacat

SEQ ID NO: 4671429 - DNA, 25 bp, Homo sapien
gaagcgccggcagtgctgcccggca

SEQ ID NO: 4671430 - DNA, 25 bp, Homo sapien
agagtgtaggaggagcggacgtccg

SEQ ID NO: 4671431 - DNA, 25 bp, Homo sapien
tatcttgcgcgctgaatggtggggc

SEQ ID NO: 4671432 - DNA, 25 bp, Homo sapien
gacgtccggcgaggcgaagcgccgg

SEQ ID NO: 4671433 - DNA, 25 bp, Homo sapien
gcattatctatggtgcccacacagg

SEQ ID NO: 4671434 - DNA, 25 bp, Homo sapien
agccacctgtgttgtgaaattcgcg

SEQ ID NO: 4671435 - DNA, 25 bp, Homo sapien
taactcttacatgtgcacactggct

SEQ ID NO: 4671436 - DNA, 25 bp, Homo sapien
cactcagtagcaacagggtgtggta

SEQ ID NO: 4671437 - DNA, 25 bp, Homo sapien
cttgacttgaaaaaaggtgatgagg

SEQ ID NO: 4671438 - DNA, 25 bp, Homo sapien
tgacttgaaaaaaggtgatgagggc

SEQ ID NO: 4671439 - DNA, 25 bp, Homo sapien
tcttgacttgaaaaaaggtgatgag

SEQ ID NO: 4671440 - DNA, 25 bp, Homo sapien
aatcttgacttgaaaaaaggtgatg

SEQ ID NO: 4671441 - DNA, 25 bp, Homo sapien
ttccaaatctgattgagtcatgcat

SEQ ID NO: 4671442 - DNA, 25 bp, Homo sapien
tttccaaatctgattgagtcatgca

SEQ ID NO: 4671443 - DNA, 25 bp, Homo sapien
catttccaaatctgattgagtcatg

SEQ ID NO: 4671444 - DNA, 25 bp, Homo sapien
ccacatttccaaatctgattgagtc

SEQ ID NO: 4671445 - DNA, 25 bp, Homo sapien
aaggtgtgactaatagagaagtgaa

SEQ ID NO: 4671446 - DNA, 25 bp, Homo sapien
gcctctttggagtctatggtgtaaa

SEQ ID NO: 4671447 - DNA, 25 bp, Homo sapien
tggtgtaaaaggtgtgactaataga

SEQ ID NO: 4671448 - DNA, 25 bp, Homo sapien
aaaccaggtgcttaacgcctctttg

SEQ ID NO: 4671449 - DNA, 25 bp, Homo sapien
gacataggcccaggaaattgactcg

SEQ ID NO: 4671450 - DNA, 25 bp, Homo sapien
tctggtagcatagacacaaagcccc

SEQ ID NO: 4671451 - DNA, 25 bp, Homo sapien
taccctgtgagagatttagtggcca

SEQ ID NO: 4671452 - DNA, 25 bp, Homo sapien
tatgagtgccaattgaggttgccca

SEQ ID NO: 4671453 - DNA, 25 bp, Homo sapien
tcatgatctccgtggtgtattccga

SEQ ID NO: 4671454 - DNA, 25 bp, Homo sapien
ctatattgggcttggacgcagggca

SEQ ID NO: 4671455 - DNA, 25 bp, Homo sapien
cgccgcataactggaacctggaggg

SEQ ID NO: 4671456 - DNA, 25 bp, Homo sapien
tattccgagctgtatgtctgcgccg

SEQ ID NO: 4671457 - DNA, 25 bp, Homo sapien
tcaagggccgctgcatttggtacac

SEQ ID NO: 4671458 - DNA, 25 bp, Homo sapien
tttggtacacgcaggaaggcttgag

SEQ ID NO: 4671459 - DNA, 25 bp, Homo sapien
tagccgtgatctcagtgctgccaag

SEQ ID NO: 4671460 - DNA, 25 bp, Homo sapien
tagccctccacgaaggtactgatgc

SEQ ID NO: 4671461 - DNA, 25 bp, Homo sapien
atggtgatggtagctgggcgcccgc

SEQ ID NO: 4671462 - DNA, 25 bp, Homo sapien
ggtgatggtagctgggcgcccgccc

SEQ ID NO: 4671463 - DNA, 25 bp, Homo sapien
ggtgatggtgatggtagctgggcgc

SEQ ID NO: 4671464 - DNA, 25 bp, Homo sapien
tgatggtgatggtagctgggcgccc

SEQ ID NO: 4671465 - DNA, 25 bp, Homo sapien
ctggaggaatggatggctgctgatg

SEQ ID NO: 4671466 - DNA, 25 bp, Homo sapien
gggaccgccttcatcggcgggtcca

SEQ ID NO: 4671467 - DNA, 25 bp, Homo sapien
gggtcgtagccgaggtggtggccgc

SEQ ID NO: 4671468 - DNA, 25 bp, Homo sapien
agcccgtacgggtggctctcaagcg

SEQ ID NO: 4671469 - DNA, 25 bp, Homo sapien
tgaagtggaagagcgggaagcgcgc

SEQ ID NO: 4671470 - DNA, 25 bp, Homo sapien
tcgcaggttcgcacgccgtagtgct

SEQ ID NO: 4671471 - DNA, 25 bp, Homo sapien
cgcaggttcgcacgccgtagtgctg

SEQ ID NO: 4671472 - DNA, 25 bp, Homo sapien
ggcacacgtgccctcgccagacgac

SEQ ID NO: 4671473 - DNA, 25 bp, Homo sapien
cagacgacgagctcctgctgggcgg

SEQ ID NO: 4671474 - DNA, 25 bp, Homo sapien
tctatcttctatggaaagaggcagc

SEQ ID NO: 4671475 - DNA, 25 bp, Homo sapien
aaatttctccgttaggcctatgagg

SEQ ID NO: 4671476 - DNA, 25 bp, Homo sapien
gaattatgtctacacctggcaccgc

SEQ ID NO: 4671477 - DNA, 25 bp, Homo sapien
tcacgcaaacgtgggttggcatcct

SEQ ID NO: 4671478 - DNA, 25 bp, Homo sapien
aataatttgtgtgggtttgtaaatg

SEQ ID NO: 4671479 - DNA, 25 bp, Homo sapien
aggataaggaataatttgtgtgggt

SEQ ID NO: 4671480 - DNA, 25 bp, Homo sapien
ctagaggataaggaataatttgtgt

SEQ ID NO: 4671481 - DNA, 25 bp, Homo sapien
agaggataaggaataatttgtgtgg

SEQ ID NO: 4671482 - DNA, 25 bp, Homo sapien
ccagtcagcatcctgctttctcttt

SEQ ID NO: 4671483 - DNA, 25 bp, Homo sapien
tgtttctcccaccatagtaggtgat

SEQ ID NO: 4671484 - DNA, 25 bp, Homo sapien
aagccactgggtaaaacctgctccg

SEQ ID NO: 4671485 - DNA, 25 bp, Homo sapien
aaagccaacctatgtcaagtctaag

SEQ ID NO: 4671486 - DNA, 25 bp, Homo sapien
taccacttagggtgaaactgttcag

SEQ ID NO: 4671487 - DNA, 25 bp, Homo sapien
taatacaagatagtcaactgatagt

SEQ ID NO: 4671488 - DNA, 25 bp, Homo sapien
tataatacaagatagtcaactgata

SEQ ID NO: 4671489 - DNA, 25 bp, Homo sapien
atataatacaagatagtcaactgat

SEQ ID NO: 4671490 - DNA, 25 bp, Homo sapien
aatacaagatagtcaactgatagtt

SEQ ID NO: 4671491 - DNA, 25 bp, Homo sapien
tatttgccaggcaaacatattttgc

SEQ ID NO: 4671492 - DNA, 25 bp, Homo sapien
ggtttcgacgtctcttgtctactgg

SEQ ID NO: 4671493 - DNA, 25 bp, Homo sapien
taccattccaacactgagacacttc

SEQ ID NO: 4671494 - DNA, 25 bp, Homo sapien
gacagtactgacatcggtttcgacg

SEQ ID NO: 4671495 - DNA, 25 bp, Homo sapien
ctggaataatcaagatctctgggtg

SEQ ID NO: 4671496 - DNA, 25 bp, Homo sapien
ctctgggtgttgagtctgttaaagc

SEQ ID NO: 4671497 - DNA, 25 bp, Homo sapien
cattcatcatgcagattggaggaga

SEQ ID NO: 4671498 - DNA, 25 bp, Homo sapien
taaagctcggacaagggcattcatc

SEQ ID NO: 4671499 - DNA, 25 bp, Homo sapien
attactagtagccataaatagagac

SEQ ID NO: 4671500 - DNA, 25 bp, Homo sapien
tagtagccataaatagagaccctga

SEQ ID NO: 4671501 - DNA, 25 bp, Homo sapien
tcttattactagtagccataaatag

SEQ ID NO: 4671502 - DNA, 25 bp, Homo sapien
gtagccataaatagagaccctgatc

SEQ ID NO: 4671503 - DNA, 25 bp, Homo sapien
aaatgaagcgagaaatatagaaaaa

SEQ ID NO: 4671504 - DNA, 25 bp, Homo sapien
ttttcattggcacaaccaccaggaa

SEQ ID NO: 4671505 - DNA, 25 bp, Homo sapien
actgtcagggtcacttgttaaggca

SEQ ID NO: 4671506 - DNA, 25 bp, Homo sapien
caacaatgtgtatgacaggtgcagc

SEQ ID NO: 4671507 - DNA, 25 bp, Homo sapien
aaattatttgctgcaatggatgcac

SEQ ID NO: 4671508 - DNA, 25 bp, Homo sapien
gcttgaaacactgattagacctggg

SEQ ID NO: 4671509 - DNA, 25 bp, Homo sapien
gaagcttggtatttaggagcccaga

SEQ ID NO: 4671510 - DNA, 25 bp, Homo sapien
taggcccgcatgattccaaagaagc

SEQ ID NO: 4671511 - DNA, 25 bp, Homo sapien
ttgccatagggcaaaagagtgaccc

SEQ ID NO: 4671512 - DNA, 25 bp, Homo sapien
taatgtctgatcttctttggggaga

SEQ ID NO: 4671513 - DNA, 25 bp, Homo sapien
tcaggaggttgtagaattgttgcac

SEQ ID NO: 4671514 - DNA, 25 bp, Homo sapien
cagcttctggatacatcaatggagg

SEQ ID NO: 4671515 - DNA, 25 bp, Homo sapien
gggagatcagtaaatcccggaatct

SEQ ID NO: 4671516 - DNA, 25 bp, Homo sapien
ggctcagctctggtgtacactagat

SEQ ID NO: 4671517 - DNA, 25 bp, Homo sapien
tactggcactctagttgtaactcca

SEQ ID NO: 4671518 - DNA, 25 bp, Homo sapien
gaataggacatatatggcacctgcc

SEQ ID NO: 4671519 - DNA, 25 bp, Homo sapien
tctcagagtataaaacatggaccct

SEQ ID NO: 4671520 - DNA, 25 bp, Homo sapien
gcttggatatcaaggttcaggctct

SEQ ID NO: 4671521 - DNA, 25 bp, Homo sapien
ctgacaggcaggctaaggcttggat

SEQ ID NO: 4671522 - DNA, 25 bp, Homo sapien
tctttaatagagtcgagccactccc

SEQ ID NO: 4671523 - DNA, 25 bp, Homo sapien
tgaagtcgatgcaggacaagtccat

SEQ ID NO: 4671524 - DNA, 25 bp, Homo sapien
caccagcatggcacatgtatacata

SEQ ID NO: 4671525 - DNA, 25 bp, Homo sapien
ctaatgctagatgacacattagtgg

SEQ ID NO: 4671526 - DNA, 25 bp, Homo sapien
tgtatacatatgtaactaacctgca

SEQ ID NO: 4671527 - DNA, 25 bp, Homo sapien
agatgacacattagtgggtgcagcg

SEQ ID NO: 4671528 - DNA, 25 bp, Homo sapien
ggagacaccaagtcttccagcttca

SEQ ID NO: 4671529 - DNA, 25 bp, Homo sapien
ccaggaccttggactcggtgggctc

SEQ ID NO: 4671530 - DNA, 25 bp, Homo sapien
tgcatagctcttcgactctctttgg

SEQ ID NO: 4671531 - DNA, 25 bp, Homo sapien
ggcccagggtgcagatcttcctcag

SEQ ID NO: 4671532 - DNA, 25 bp, Homo sapien
cctaaaagtcttggatgggccatac

SEQ ID NO: 4671533 - DNA, 25 bp, Homo sapien
tttaagacacatcctaccctggcga

SEQ ID NO: 4671534 - DNA, 25 bp, Homo sapien
cacggaatgttgaaacgcagcccac

SEQ ID NO: 4671535 - DNA, 25 bp, Homo sapien
gagtaactcttcacccttcaatggg

SEQ ID NO: 4671536 - DNA, 25 bp, Homo sapien
tttcagcattactaagcctttaaaa

SEQ ID NO: 4671537 - DNA, 25 bp, Homo sapien
tcagcattactaagcctttaaaaaa

SEQ ID NO: 4671538 - DNA, 25 bp, Homo sapien
tttggggatgtgcttaagagttcac

SEQ ID NO: 4671539 - DNA, 25 bp, Homo sapien
gggatgtgcttaagagttcacagca

SEQ ID NO: 4671540 - DNA, 25 bp, Homo sapien
ctcttccctagaatctgggtgggtt

SEQ ID NO: 4671541 - DNA, 25 bp, Homo sapien
gccacagccagcatcaactgcaaag

SEQ ID NO: 4671542 - DNA, 25 bp, Homo sapien
ggaaaaccaaagtagctcatacaga

SEQ ID NO: 4671543 - DNA, 25 bp, Homo sapien
gataaagtttcaccaccaccaagct

SEQ ID NO: 4671544 - DNA, 25 bp, Homo sapien
cgctcgaggccggtcggtgggcacg

SEQ ID NO: 4671545 - DNA, 25 bp, Homo sapien
gaggccggtcggtgggcacggcgca

SEQ ID NO: 4671546 - DNA, 25 bp, Homo sapien
gcaggcgcaggagcgacggggcggg

SEQ ID NO: 4671547 - DNA, 25 bp, Homo sapien
ccggggcgctcgaggccggtcggtg

SEQ ID NO: 4671548 - DNA, 25 bp, Homo sapien
aaccacctctgggtttggcgagcag

SEQ ID NO: 4671549 - DNA, 25 bp, Homo sapien
ttctgaaaaacaggaggagccacca

SEQ ID NO: 4671550 - DNA, 25 bp, Homo sapien
tggcgctcgcacttcggatccaatg

SEQ ID NO: 4671551 - DNA, 25 bp, Homo sapien
cgtcgcgtcattcctcgcagtgtca

SEQ ID NO: 4671552 - DNA, 25 bp, Homo sapien
tcccacttttcaggatactagtggc

SEQ ID NO: 4671553 - DNA, 25 bp, Homo sapien
tccggcccgccgcttaatgtttctg

SEQ ID NO: 4671554 - DNA, 25 bp, Homo sapien
tgtttctgacttatggaagagatac

SEQ ID NO: 4671555 - DNA, 25 bp, Homo sapien
tagtggcgcccgatttcttccggcc

SEQ ID NO: 4671556 - DNA, 25 bp, Homo sapien
gtgggtatatattagtagtaggtat

SEQ ID NO: 4671557 - DNA, 25 bp, Homo sapien
ttttgtgggtatatattagtagtag

SEQ ID NO: 4671558 - DNA, 25 bp, Homo sapien
gatatttgagttattttgatacagg

SEQ ID NO: 4671559 - DNA, 25 bp, Homo sapien
atatttgagttattttgatacaggc

SEQ ID NO: 4671560 - DNA, 25 bp, Homo sapien
aaaatgttgtatgacctccctggta

SEQ ID NO: 4671561 - DNA, 25 bp, Homo sapien
aaaaaatgttgtatgacctccctgg

SEQ ID NO: 4671562 - DNA, 25 bp, Homo sapien
aaaaatgttgtatgacctccctggt

SEQ ID NO: 4671563 - DNA, 25 bp, Homo sapien
gctggttcaagacggcgtaatttca

SEQ ID NO: 4671564 - DNA, 25 bp, Homo sapien
ttctggatagctggttcaagacggc

SEQ ID NO: 4671565 - DNA, 25 bp, Homo sapien
tcttaatgaatttctggatagctgg

SEQ ID NO: 4671566 - DNA, 25 bp, Homo sapien
tgttgggattactatcttaatgaat

SEQ ID NO: 4671567 - DNA, 25 bp, Homo sapien
cttcttttaaattcatattggatga

SEQ ID NO: 4671568 - DNA, 25 bp, Homo sapien
tcttcttttaaattcatattggatg

SEQ ID NO: 4671569 - DNA, 25 bp, Homo sapien
caatttcccttcagtctgactttct

SEQ ID NO: 4671570 - DNA, 25 bp, Homo sapien
cttcaatttcccttcagtctgactt

SEQ ID NO: 4671571 - DNA, 25 bp, Homo sapien
taggtcctgataagaggccaactgt

SEQ ID NO: 4671572 - DNA, 25 bp, Homo sapien
ggaagaccttccttaagctgagtga

SEQ ID NO: 4671573 - DNA, 25 bp, Homo sapien
tctcgttcagcaagaatataccctt

SEQ ID NO: 4671574 - DNA, 25 bp, Homo sapien
ggagcactcagtctaattttagcag

SEQ ID NO: 4671575 - DNA, 25 bp, Homo sapien
tacccatgtgatattcctgcccata

SEQ ID NO: 4671576 - DNA, 25 bp, Homo sapien
cctgcccatatactccctgaaccta

SEQ ID NO: 4671577 - DNA, 25 bp, Homo sapien
caagtactacgctcactacctggtg

SEQ ID NO: 4671578 - DNA, 25 bp, Homo sapien
aaatgtgaatgttcaagtactacgc

SEQ ID NO: 4671579 - DNA, 25 bp, Homo sapien
tcctcgttctgcacattcttaaaat

SEQ ID NO: 4671580 - DNA, 25 bp, Homo sapien
catttttgatactttacacattccc

SEQ ID NO: 4671581 - DNA, 25 bp, Homo sapien
aaaattccctcatatatgcatagaa

SEQ ID NO: 4671582 - DNA, 25 bp, Homo sapien
tttcatttgataggaaccataggaa

SEQ ID NO: 4671583 - DNA, 25 bp, Homo sapien
tacgtcctgcattgatatgctcttc

SEQ ID NO: 4671584 - DNA, 25 bp, Homo sapien
ctgaactgtacgtcctgcattgata

SEQ ID NO: 4671585 - DNA, 25 bp, Homo sapien
gcattgatatgctcttcatgcaact

SEQ ID NO: 4671586 - DNA, 25 bp, Homo sapien
atgctcttcatgcaacttgtcccag

SEQ ID NO: 4671587 - DNA, 25 bp, Homo sapien
aatatgtatggcatgtgattcagca

SEQ ID NO: 4671588 - DNA, 25 bp, Homo sapien
ttcatactgatttagcagaaaaaat

SEQ ID NO: 4671589 - DNA, 25 bp, Homo sapien
attgcttgtgagagtataagtctgt

SEQ ID NO: 4671590 - DNA, 25 bp, Homo sapien
aatgtatcctcaagtaaatagtaac

SEQ ID NO: 4671591 - DNA, 25 bp, Homo sapien
ctgcctgttgccaccagccaaaatg

SEQ ID NO: 4671592 - DNA, 25 bp, Homo sapien
gccacagactgagcagcgctatagt

SEQ ID NO: 4671593 - DNA, 25 bp, Homo sapien
tcaaaaaggttttgcccccatgatg

SEQ ID NO: 4671594 - DNA, 25 bp, Homo sapien
tcacagggcattgagtagtgcactc

SEQ ID NO: 4671595 - DNA, 25 bp, Homo sapien
ccacagttgatgaaatccttggaga

SEQ ID NO: 4671596 - DNA, 25 bp, Homo sapien
atccttggagaaggctcaaatgtag

SEQ ID NO: 4671597 - DNA, 25 bp, Homo sapien
gaaatccttggagaaggctcaaatg

SEQ ID NO: 4671598 - DNA, 25 bp, Homo sapien
ttgttccacagttgatgaaatcctt

SEQ ID NO: 4671599 - DNA, 25 bp, Homo sapien
caaaggaggctgtagcaaagtttct

SEQ ID NO: 4671600 - DNA, 25 bp, Homo sapien
tcatggatctggtcaaaggaggctg

SEQ ID NO: 4671601 - DNA, 25 bp, Homo sapien
gaagtactaggtcatcctttcggac

SEQ ID NO: 4671602 - DNA, 25 bp, Homo sapien
tgctgatgcttcttctttaacagga

SEQ ID NO: 4671603 - DNA, 25 bp, Homo sapien
tcagtatctactcaaggaggtgatc

SEQ ID NO: 4671604 - DNA, 25 bp, Homo sapien
aattaactgcactactgtgactgag

SEQ ID NO: 4671605 - DNA, 25 bp, Homo sapien
gatgatggcttaactcccattgtag

SEQ ID NO: 4671606 - DNA, 25 bp, Homo sapien
tgaagtcccactccataagcatagc

SEQ ID NO: 4671607 - DNA, 25 bp, Homo sapien
ttgtcactactcttctcctcaatct

SEQ ID NO: 4671608 - DNA, 25 bp, Homo sapien
tgtcactactcttctcctcaatctt

SEQ ID NO: 4671609 - DNA, 25 bp, Homo sapien
aaatggctacaaatactatctatcc

SEQ ID NO: 4671610 - DNA, 25 bp, Homo sapien
tctatccaatctgaataactagggc

SEQ ID NO: 4671611 - DNA, 25 bp, Homo sapien
agaaaactattctacttggccaatg

SEQ ID NO: 4671612 - DNA, 25 bp, Homo sapien
taactagggctaaatgtggaagaag

SEQ ID NO: 4671613 - DNA, 25 bp, Homo sapien
tctaaggtttcccacgattctgcag

SEQ ID NO: 4671614 - DNA, 25 bp, Homo sapien
tcttgaggaatttcaggtaaggcat

SEQ ID NO: 4671615 - DNA, 25 bp, Homo sapien
gcatatatctgagtcaaactctgag

SEQ ID NO: 4671616 - DNA, 25 bp, Homo sapien
tcagcttcagtagtatgaaatgctc

SEQ ID NO: 4671617 - DNA, 25 bp, Homo sapien
tttatgcctcacaactaccaaaaag

SEQ ID NO: 4671618 - DNA, 25 bp, Homo sapien
cactaggagagagaagtcagtgacc

SEQ ID NO: 4671619 - DNA, 25 bp, Homo sapien
agtcagtgaccagttggctaagttc

SEQ ID NO: 4671620 - DNA, 25 bp, Homo sapien
gaccagttggctaagttcaattaag

SEQ ID NO: 4671621 - DNA, 25 bp, Homo sapien
attcactaggagagagaagtcagtg

SEQ ID NO: 4671622 - DNA, 25 bp, Homo sapien
caagtgtaatcgtaaagcctcaggg

SEQ ID NO: 4671623 - DNA, 25 bp, Homo sapien
caaaataattccagcaagagggagg

SEQ ID NO: 4671624 - DNA, 25 bp, Homo sapien
aaatctcagcaaacgccactatgtg

SEQ ID NO: 4671625 - DNA, 25 bp, Homo sapien
tattatatgtgctcagatcaagggc

SEQ ID NO: 4671626 - DNA, 25 bp, Homo sapien
gggtactgcagccttgccatcttaa

SEQ ID NO: 4671627 - DNA, 25 bp, Homo sapien
caaaggaattatgagtgagcggtcc

SEQ ID NO: 4671628 - DNA, 25 bp, Homo sapien
ctgataagccatgtcgaaaggacaa

SEQ ID NO: 4671629 - DNA, 25 bp, Homo sapien
ggaacaagactacaatacggtttga

SEQ ID NO: 4671630 - DNA, 25 bp, Homo sapien
cagcactgttgacatggtctgcaat

SEQ ID NO: 4671631 - DNA, 25 bp, Homo sapien
actgttgacatggtctgcaatgctg

SEQ ID NO: 4671632 - DNA, 25 bp, Homo sapien
gcactgttgacatggtctgcaatgc

SEQ ID NO: 4671633 - DNA, 25 bp, Homo sapien
cagcagcactgttgacatggtctgc

SEQ ID NO: 4671634 - DNA, 25 bp, Homo sapien
acacttttaccctctgcaaatattc

SEQ ID NO: 4671635 - DNA, 25 bp, Homo sapien
caccaagtgcagctgcaattcctgc

SEQ ID NO: 4671636 - DNA, 25 bp, Homo sapien
cccgatgagtgcacctgccacaggc

SEQ ID NO: 4671637 - DNA, 25 bp, Homo sapien
taccattcccccgatgagtgcacct

SEQ ID NO: 4671638 - DNA, 25 bp, Homo sapien
aattttccacctgtgaagcccaaca

SEQ ID NO: 4671639 - DNA, 25 bp, Homo sapien
tgcaatagggttcgccaatggactc

SEQ ID NO: 4671640 - DNA, 25 bp, Homo sapien
tgacggagtgtccaacagcagcaaa

SEQ ID NO: 4671641 - DNA, 25 bp, Homo sapien
ccattatgtagtcgacctgtgctcc

SEQ ID NO: 4671642 - DNA, 25 bp, Homo sapien
tcctcaggatagacatgttggcacc

SEQ ID NO: 4671643 - DNA, 25 bp, Homo sapien
gatatatcacccctcaaaactggaa

SEQ ID NO: 4671644 - DNA, 25 bp, Homo sapien
ataattacaagggagggacagcaca

SEQ ID NO: 4671645 - DNA, 25 bp, Homo sapien
tagacatgcagttgggctgggccat

SEQ ID NO: 4671646 - DNA, 25 bp, Homo sapien
cattccccgggtctgagtcttgcat

SEQ ID NO: 4671647 - DNA, 25 bp, Homo sapien
taaaatgcctggtgaagtgcctggc

SEQ ID NO: 4671648 - DNA, 25 bp, Homo sapien
ggtgtccaatatcacaggtgtccaa

SEQ ID NO: 4671649 - DNA, 25 bp, Homo sapien
gagagataccaataccaagtgtgag

SEQ ID NO: 4671650 - DNA, 25 bp, Homo sapien
tataatgaatccctagtgctgccgc

SEQ ID NO: 4671651 - DNA, 25 bp, Homo sapien
tgcactctgatggaagacaaacgtt

SEQ ID NO: 4671652 - DNA, 25 bp, Homo sapien
tcttagagcacttaagggagggcag

SEQ ID NO: 4671653 - DNA, 25 bp, Homo sapien
taagtacctgtgaaccacagccacg

SEQ ID NO: 4671654 - DNA, 25 bp, Homo sapien
catatggcagcaacgaaggacaaag

SEQ ID NO: 4671655 - DNA, 25 bp, Homo sapien
cattgggccttttctcgtgctgacc

SEQ ID NO: 4671656 - DNA, 25 bp, Homo sapien
gcaggtggcttgacagggcctaaca

SEQ ID NO: 4671657 - DNA, 25 bp, Homo sapien
gaaagaccatgagccttagcaggtg

SEQ ID NO: 4671658 - DNA, 25 bp, Homo sapien
gatacaagttttaggctcgtccaag

SEQ ID NO: 4671659 - DNA, 25 bp, Homo sapien
taggtacggctcaaacaccacatgt

SEQ ID NO: 4671660 - DNA, 25 bp, Homo sapien
tattagaacaggaacaaagagggca

SEQ ID NO: 4671661 - DNA, 25 bp, Homo sapien
tatttttctatgtatggccccagca

SEQ ID NO: 4671662 - DNA, 25 bp, Homo sapien
tgatgtgatccctgtcctgaaagca

SEQ ID NO: 4671663 - DNA, 25 bp, Homo sapien
cattatttgaagaccctgaagacag

SEQ ID NO: 4671664 - DNA, 25 bp, Homo sapien
aaaccatggagaatgtaaggtgaca

SEQ ID NO: 4671665 - DNA, 25 bp, Homo sapien
gatttcaaggttgttagacccacac

SEQ ID NO: 4671666 - DNA, 25 bp, Homo sapien
gactggaaatgagcaaacgtactgc

SEQ ID NO: 4671667 - DNA, 25 bp, Homo sapien
tctgagcaaaggtatgaaacagcct

SEQ ID NO: 4671668 - DNA, 25 bp, Homo sapien
gaatagtgtggaagcacgtctcaaa

SEQ ID NO: 4671669 - DNA, 25 bp, Homo sapien
gaagaacacggttgagtccccagaa

SEQ ID NO: 4671670 - DNA, 25 bp, Homo sapien
gaggatgcaagaccagactgaagaa

SEQ ID NO: 4671671 - DNA, 25 bp, Homo sapien
tccttccagaaactagcacccagtg

SEQ ID NO: 4671672 - DNA, 25 bp, Homo sapien
tctattgagggatcgagatgagctt

SEQ ID NO: 4671673 - DNA, 25 bp, Homo sapien
tgtagcaagcccaagatgtagcaag

SEQ ID NO: 4671674 - DNA, 25 bp, Homo sapien
tttctccccgactcaaaatgcattg

SEQ ID NO: 4671675 - DNA, 25 bp, Homo sapien
agagggtctgaagttcttgcatcag

SEQ ID NO: 4671676 - DNA, 25 bp, Homo sapien
gagggtctgaagttcttgcatcagc

SEQ ID NO: 4671677 - DNA, 25 bp, Homo sapien
ggtctgaagttcttgcatcagcttg

SEQ ID NO: 4671678 - DNA, 25 bp, Homo sapien
gggtctgaagttcttgcatcagctt

SEQ ID NO: 4671679 - DNA, 25 bp, Homo sapien
tgtagcagtattgttcataatcacc

SEQ ID NO: 4671680 - DNA, 25 bp, Homo sapien
ggctgaatcccaaatgcaataatgc

SEQ ID NO: 4671681 - DNA, 25 bp, Homo sapien
taacctggcatttattctagacaaa

SEQ ID NO: 4671682 - DNA, 25 bp, Homo sapien
tgataatacaaggtattcatgagga

SEQ ID NO: 4671683 - DNA, 25 bp, Homo sapien
tgatggattacaacactcgatacag

SEQ ID NO: 4671684 - DNA, 25 bp, Homo sapien
gaaagagtaggtacatagagccatg

SEQ ID NO: 4671685 - DNA, 25 bp, Homo sapien
tgctgctgaaggaaatccaagacaa

SEQ ID NO: 4671686 - DNA, 25 bp, Homo sapien
ccaaaataaacgaggaagtatactg

SEQ ID NO: 4671687 - DNA, 25 bp, Homo sapien
caaagtcagactaggacactacaag

SEQ ID NO: 4671688 - DNA, 25 bp, Homo sapien
attacagggtaatatccttgataaa

SEQ ID NO: 4671689 - DNA, 25 bp, Homo sapien
aactagagaccctggttatggtcaa

SEQ ID NO: 4671690 - DNA, 25 bp, Homo sapien
caccggcctgggagaacactcttaa

SEQ ID NO: 4671691 - DNA, 25 bp, Homo sapien
tggtgtgaatacagaactgtctccc

SEQ ID NO: 4671692 - DNA, 25 bp, Homo sapien
gagacagagactgctcacgaaaagc

SEQ ID NO: 4671693 - DNA, 25 bp, Homo sapien
catctgacagttgctgggagacaga

SEQ ID NO: 4671694 - DNA, 25 bp, Homo sapien
tagctcagtgtctggtaaagcccga

SEQ ID NO: 4671695 - DNA, 25 bp, Homo sapien
gctggccacatggtcgtaactggta

SEQ ID NO: 4671696 - DNA, 25 bp, Homo sapien
ataaggcatgcctcgagtccacgga

SEQ ID NO: 4671697 - DNA, 25 bp, Homo sapien
gatgtctcaccaagaagtcccgtgt

SEQ ID NO: 4671698 - DNA, 25 bp, Homo sapien
gagttcaaagtgtccagctggcaac

SEQ ID NO: 4671699 - DNA, 25 bp, Homo sapien
gctgcagtcatagtacaatgtaacc

SEQ ID NO: 4671700 - DNA, 25 bp, Homo sapien
gactactgaaagagtcctgttaaga

SEQ ID NO: 4671701 - DNA, 25 bp, Homo sapien
gcctgattctattttccagtgctct

SEQ ID NO: 4671702 - DNA, 25 bp, Homo sapien
ctggcctgattctattttccagtgc

SEQ ID NO: 4671703 - DNA, 25 bp, Homo sapien
aggctttcggccgcacatccttctg

SEQ ID NO: 4671704 - DNA, 25 bp, Homo sapien
caggtcagaccccacggcgctgaag

SEQ ID NO: 4671705 - DNA, 25 bp, Homo sapien
tgaagctagccgagcccctcaaaag

SEQ ID NO: 4671706 - DNA, 25 bp, Homo sapien
cggtacactatatccagccaggtca

SEQ ID NO: 4671707 - DNA, 25 bp, Homo sapien
tgcctacaaggaccagagaggtaac

SEQ ID NO: 4671708 - DNA, 25 bp, Homo sapien
cacgccaatcgctgttactcctggg

SEQ ID NO: 4671709 - DNA, 25 bp, Homo sapien
tagggagtcacagaatcacggtaaa

SEQ ID NO: 4671710 - DNA, 25 bp, Homo sapien
gatttcaccaaaaagcaggtcacgc

SEQ ID NO: 4671711 - DNA, 25 bp, Homo sapien
gacgtggaccagttcattccttctt

SEQ ID NO: 4671712 - DNA, 25 bp, Homo sapien
taggagttttgacgtggaccagttc

SEQ ID NO: 4671713 - DNA, 25 bp, Homo sapien
cataggagttttgacgtggaccagt

SEQ ID NO: 4671714 - DNA, 25 bp, Homo sapien
gttttgacgtggaccagttcattcc

SEQ ID NO: 4671715 - DNA, 25 bp, Homo sapien
acaatgattcagacaatgagcgcat

SEQ ID NO: 4671716 - DNA, 25 bp, Homo sapien
gaaacaatgattcagacaatgagcg

SEQ ID NO: 4671717 - DNA, 25 bp, Homo sapien
aacaatgattcagacaatgagcgca

SEQ ID NO: 4671718 - DNA, 25 bp, Homo sapien
aaacaatgattcagacaatgagcgc

SEQ ID NO: 4671719 - DNA, 25 bp, Homo sapien
tatctccattaacggcagcagcatg

SEQ ID NO: 4671720 - DNA, 25 bp, Homo sapien
taatgatgaaccagcaaacagcagg

SEQ ID NO: 4671721 - DNA, 25 bp, Homo sapien
gagcctctgtagagcacccttatct

SEQ ID NO: 4671722 - DNA, 25 bp, Homo sapien
catggacttgtgatgctaatgatga

SEQ ID NO: 4671723 - DNA, 25 bp, Homo sapien
acaccagtagaagttcctggagaaa

SEQ ID NO: 4671724 - DNA, 25 bp, Homo sapien
tacggtacaccagtagaagttcctg

SEQ ID NO: 4671725 - DNA, 25 bp, Homo sapien
cggtacaccagtagaagttcctgga

SEQ ID NO: 4671726 - DNA, 25 bp, Homo sapien
ggtacaccagtagaagttcctggag

SEQ ID NO: 4671727 - DNA, 25 bp, Homo sapien
gacatacttctccatggaaacagag

SEQ ID NO: 4671728 - DNA, 25 bp, Homo sapien
cgatttaattcgttgtgtatgtaga

SEQ ID NO: 4671729 - DNA, 25 bp, Homo sapien
tccaggacaatgggcagcacagaaa

SEQ ID NO: 4671730 - DNA, 25 bp, Homo sapien
tggagtcaaacacatcactgacata

SEQ ID NO: 4671731 - DNA, 25 bp, Homo sapien
gctagtttctgaataatgagggtac

SEQ ID NO: 4671732 - DNA, 25 bp, Homo sapien
cacttaggtcctgtcttgagtagct

SEQ ID NO: 4671733 - DNA, 25 bp, Homo sapien
aaagcagcattcaacctcacttagg

SEQ ID NO: 4671734 - DNA, 25 bp, Homo sapien
cagtaactgagcgaggtctgtgcct

SEQ ID NO: 4671735 - DNA, 25 bp, Homo sapien
taattgattaggctcctcagggtca

SEQ ID NO: 4671736 - DNA, 25 bp, Homo sapien
taataggcaactcaccttcaaggac

SEQ ID NO: 4671737 - DNA, 25 bp, Homo sapien
gacacagaactttaggtcaatcctg

SEQ ID NO: 4671738 - DNA, 25 bp, Homo sapien
tcagggtcaaagcagagtcagcatc

SEQ ID NO: 4671739 - DNA, 25 bp, Homo sapien
ggaactatggtcacaagagtaagtg

SEQ ID NO: 4671740 - DNA, 25 bp, Homo sapien
taggttaagcaaagatagtagtagc

SEQ ID NO: 4671741 - DNA, 25 bp, Homo sapien
tttacactttctgcctagagagaca

SEQ ID NO: 4671742 - DNA, 25 bp, Homo sapien
tcctaactcgagcttatccaacctg

SEQ ID NO: 4671743 - DNA, 25 bp, Homo sapien
aagtggtgttctcccaaactgatct

SEQ ID NO: 4671744 - DNA, 25 bp, Homo sapien
actgatcttctttgtctttaagagc

SEQ ID NO: 4671745 - DNA, 25 bp, Homo sapien
gtggtgttctcccaaactgatcttc

SEQ ID NO: 4671746 - DNA, 25 bp, Homo sapien
cttctttgtctttaagagcagagtt

SEQ ID NO: 4671747 - DNA, 25 bp, Homo sapien
agggctgttctctggctatggtcag

SEQ ID NO: 4671748 - DNA, 25 bp, Homo sapien
atctgtcagccaacacgcaatacat

SEQ ID NO: 4671749 - DNA, 25 bp, Homo sapien
ggtcagttttattcacatctgctcc

SEQ ID NO: 4671750 - DNA, 25 bp, Homo sapien
catctgcacaatccaatctgtcagc

SEQ ID NO: 4671751 - DNA, 25 bp, Homo sapien
tcttcaaggaaattttacttctcac

SEQ ID NO: 4671752 - DNA, 25 bp, Homo sapien
cttcaaacaatgtatatagtatttt

SEQ ID NO: 4671753 - DNA, 25 bp, Homo sapien
agtttaaaataagccattatggcca

SEQ ID NO: 4671754 - DNA, 25 bp, Homo sapien
ttaaaataagccattatggccagaa

SEQ ID NO: 4671755 - DNA, 25 bp, Homo sapien
ttagtttaaaataagccattatggc

SEQ ID NO: 4671756 - DNA, 25 bp, Homo sapien
tcctgcctgtgctgattgttctcaa

SEQ ID NO: 4671757 - DNA, 25 bp, Homo sapien
gatcctgcctgtgctgattgttctc

SEQ ID NO: 4671758 - DNA, 25 bp, Homo sapien
ttagatcctgcctgtgctgattgtt

SEQ ID NO: 4671759 - DNA, 25 bp, Homo sapien
tagatcctgcctgtgctgattgttc

SEQ ID NO: 4671760 - DNA, 25 bp, Homo sapien
gtttctcttctttgaatgattgtag

SEQ ID NO: 4671761 - DNA, 25 bp, Homo sapien
ctcttctttgaatgattgtagtctc

SEQ ID NO: 4671762 - DNA, 25 bp, Homo sapien
ttctcttctttgaatgattgtagtc

SEQ ID NO: 4671763 - DNA, 25 bp, Homo sapien
ttacgtgtttctcttctttgaatga

SEQ ID NO: 4671764 - DNA, 25 bp, Homo sapien
catggataccagaattaagtgggac

SEQ ID NO: 4671765 - DNA, 25 bp, Homo sapien
tcagaaggttcactaaacaaaggga

SEQ ID NO: 4671766 - DNA, 25 bp, Homo sapien
gacagagagcagatactaaatggcc

SEQ ID NO: 4671767 - DNA, 25 bp, Homo sapien
caaaggctccctagtattcaggatc

SEQ ID NO: 4671768 - DNA, 25 bp, Homo sapien
caaaaagagctacttgcctggagct

SEQ ID NO: 4671769 - DNA, 25 bp, Homo sapien
tccagagaagtgaacatgtgccaaa

SEQ ID NO: 4671770 - DNA, 25 bp, Homo sapien
caaaataactaagccaagcagcaca

SEQ ID NO: 4671771 - DNA, 25 bp, Homo sapien
gctccagcctagtagaaaagagaca

SEQ ID NO: 4671772 - DNA, 25 bp, Homo sapien
tcagtaacatggaaacagcgtacct

SEQ ID NO: 4671773 - DNA, 25 bp, Homo sapien
cctgaaaagtttcagaggtattctt

SEQ ID NO: 4671774 - DNA, 25 bp, Homo sapien
ttcctgaaaagtttcagaggtattc

SEQ ID NO: 4671775 - DNA, 25 bp, Homo sapien
aacatggaaacagcgtaccttgaaa

SEQ ID NO: 4671776 - DNA, 25 bp, Homo sapien
tcccttaattccatgccctgacctc

SEQ ID NO: 4671777 - DNA, 25 bp, Homo sapien
tgccccgatcccttaattccatgcc

SEQ ID NO: 4671778 - DNA, 25 bp, Homo sapien
cccgatcccttaattccatgccctg

SEQ ID NO: 4671779 - DNA, 25 bp, Homo sapien
gatcccttaattccatgccctgacc

SEQ ID NO: 4671780 - DNA, 25 bp, Homo sapien
tattattcatccatatgttagctat

SEQ ID NO: 4671781 - DNA, 25 bp, Homo sapien
gctatatattgtcaactagaagctt

SEQ ID NO: 4671782 - DNA, 25 bp, Homo sapien
catgtgacagcttggatgaacctca

SEQ ID NO: 4671783 - DNA, 25 bp, Homo sapien
gcttattctaatatactacctctgt

SEQ ID NO: 4671784 - DNA, 25 bp, Homo sapien
tatatcatttttcacttgtgcaggc

SEQ ID NO: 4671785 - DNA, 25 bp, Homo sapien
gcaatttagataactatcccaggag

SEQ ID NO: 4671786 - DNA, 25 bp, Homo sapien
cacagttccctagttttccattgta

SEQ ID NO: 4671787 - DNA, 25 bp, Homo sapien
tcccaggagcagagtatgaaaaaac

SEQ ID NO: 4671788 - DNA, 25 bp, Homo sapien
ggaataataatcatcctgattccct

SEQ ID NO: 4671789 - DNA, 25 bp, Homo sapien
agtgttgacaatattcacactatag

SEQ ID NO: 4671790 - DNA, 25 bp, Homo sapien
taataatcatcctgattccctctca

SEQ ID NO: 4671791 - DNA, 25 bp, Homo sapien
gaaaaatgtcgtgcccaagtgttga

SEQ ID NO: 4671792 - DNA, 25 bp, Homo sapien
ttaagtcttgcttcacatgtcacca

SEQ ID NO: 4671793 - DNA, 25 bp, Homo sapien
aatgaatgctcttccctcaggtgtt

SEQ ID NO: 4671794 - DNA, 25 bp, Homo sapien
gttcacatggctaaagttctcacct

SEQ ID NO: 4671795 - DNA, 25 bp, Homo sapien
ttgcaaaaattctaggcatgctccc

SEQ ID NO: 4671796 - DNA, 25 bp, Homo sapien
gagatgactgacaaagtgacaggaa

SEQ ID NO: 4671797 - DNA, 25 bp, Homo sapien
caatttaaagcatgcacctgtgtgc

SEQ ID NO: 4671798 - DNA, 25 bp, Homo sapien
gttttccttacaccgagattcttca

SEQ ID NO: 4671799 - DNA, 25 bp, Homo sapien
ctttgagatatagtgtaatgcctga

SEQ ID NO: 4671800 - DNA, 25 bp, Homo sapien
agcacaagagcatatattagaagaa

SEQ ID NO: 4671801 - DNA, 25 bp, Homo sapien
tatgaaacatatgaagggtaaacca

SEQ ID NO: 4671802 - DNA, 25 bp, Homo sapien
cttaatactatctgaagcacaagag

SEQ ID NO: 4671803 - DNA, 25 bp, Homo sapien
ggtaaaccagaaatcaatatagttg

SEQ ID NO: 4671804 - DNA, 25 bp, Homo sapien
tatgctatgcccttattgagtgaca

SEQ ID NO: 4671805 - DNA, 25 bp, Homo sapien
gagataatagaattcccctgatcag

SEQ ID NO: 4671806 - DNA, 25 bp, Homo sapien
ttctggagtgctaaagctttttgca

SEQ ID NO: 4671807 - DNA, 25 bp, Homo sapien
tatcctatgaggtcttcactaaaca

SEQ ID NO: 4671808 - DNA, 25 bp, Homo sapien
tgtagctagtagagccactcagagc

SEQ ID NO: 4671809 - DNA, 25 bp, Homo sapien
gagaagtctccagagttatgaggca

SEQ ID NO: 4671810 - DNA, 25 bp, Homo sapien
gaatatgcttgctgaatgagctccc

SEQ ID NO: 4671811 - DNA, 25 bp, Homo sapien
cagaggctaccctggttagaaatca

SEQ ID NO: 4671812 - DNA, 25 bp, Homo sapien
ccttatggaagtgaagtagaacaac

SEQ ID NO: 4671813 - DNA, 25 bp, Homo sapien
cagacttgcaagtcagccttatgga

SEQ ID NO: 4671814 - DNA, 25 bp, Homo sapien
caggaagggactctattgactaata

SEQ ID NO: 4671815 - DNA, 25 bp, Homo sapien
ttttgagcccaaattactgaggaat

SEQ ID NO: 4671816 - DNA, 25 bp, Homo sapien
tatcctaggaggatgccaggaaacc

SEQ ID NO: 4671817 - DNA, 25 bp, Homo sapien
tggtagcagtgagcaccctagatcc

SEQ ID NO: 4671818 - DNA, 25 bp, Homo sapien
tggacatagcagatagcaagtaagc

SEQ ID NO: 4671819 - DNA, 25 bp, Homo sapien
tactaggctcatgtcaaatggatca

SEQ ID NO: 4671820 - DNA, 25 bp, Homo sapien
taatctaacccaacatgatggtggc

SEQ ID NO: 4671821 - DNA, 25 bp, Homo sapien
cattctggttgatatgttgggcata

SEQ ID NO: 4671822 - DNA, 25 bp, Homo sapien
tcctttaaagggtctggagcagagg

SEQ ID NO: 4671823 - DNA, 25 bp, Homo sapien
cactgcgctcaactggaaaatcctt

SEQ ID NO: 4671824 - DNA, 25 bp, Homo sapien
ccataaatgtaaaggagtacagcgt

SEQ ID NO: 4671825 - DNA, 25 bp, Homo sapien
gcaatcctgtcacttgctaaggaag

SEQ ID NO: 4671826 - DNA, 25 bp, Homo sapien
gactgagttggacatgataccattg

SEQ ID NO: 4671827 - DNA, 25 bp, Homo sapien
cagcgtaagtatgtagggatataca

SEQ ID NO: 4671828 - DNA, 25 bp, Homo sapien
ggtagtattaagagctccatagatt

SEQ ID NO: 4671829 - DNA, 25 bp, Homo sapien
gctccatagattagagaacgagcta

SEQ ID NO: 4671830 - DNA, 25 bp, Homo sapien
cttgcagaggtagtattaagagctc

SEQ ID NO: 4671831 - DNA, 25 bp, Homo sapien
tagagaacgagctaactcatttttc

SEQ ID NO: 4671832 - DNA, 25 bp, Homo sapien
tacttccacagatagagctctagaa

SEQ ID NO: 4671833 - DNA, 25 bp, Homo sapien
gtttagatcaagcaaagcaagttct

SEQ ID NO: 4671834 - DNA, 25 bp, Homo sapien
ggctgaccttaccatttcctatgag

SEQ ID NO: 4671835 - DNA, 25 bp, Homo sapien
tagaagaactgcatgaaatctgaga

SEQ ID NO: 4671836 - DNA, 25 bp, Homo sapien
tcaccgttagaaagaagcagagcct

SEQ ID NO: 4671837 - DNA, 25 bp, Homo sapien
gctaagattcataagtaagggtcca

SEQ ID NO: 4671838 - DNA, 25 bp, Homo sapien
ttttacatgctcaagggccttatca

SEQ ID NO: 4671839 - DNA, 25 bp, Homo sapien
gcagagcctaagtcatgaatctagg

SEQ ID NO: 4671840 - DNA, 25 bp, Homo sapien
tcttccttttttgcggtgctcttct

SEQ ID NO: 4671841 - DNA, 25 bp, Homo sapien
ttgtagctaagattcaggatgctgt

SEQ ID NO: 4671842 - DNA, 25 bp, Homo sapien
catctgtttcttgaccaggactttg

SEQ ID NO: 4671843 - DNA, 25 bp, Homo sapien
attcaggatgctgtaaagttcttgc

SEQ ID NO: 4671844 - DNA, 25 bp, Homo sapien
ggtctggttgctctgcattgaaagg

SEQ ID NO: 4671845 - DNA, 25 bp, Homo sapien
tctgagtgttcaggaatggctgttc

SEQ ID NO: 4671846 - DNA, 25 bp, Homo sapien
tctggttgccccaggccgaactgct

SEQ ID NO: 4671847 - DNA, 25 bp, Homo sapien
gctgttctaggactggatgttccag

SEQ ID NO: 4671848 - DNA, 25 bp, Homo sapien
taaaccaggcaaactagtactgatg

SEQ ID NO: 4671849 - DNA, 25 bp, Homo sapien
agtactgatgtcattgtgatgtagc

SEQ ID NO: 4671850 - DNA, 25 bp, Homo sapien
tacagcttaatccttcaccttaata

SEQ ID NO: 4671851 - DNA, 25 bp, Homo sapien
tgtagcaaatacaagaccgctgtct

SEQ ID NO: 4671852 - DNA, 25 bp, Homo sapien
ctggctgcagtagctttgctgaatt

SEQ ID NO: 4671853 - DNA, 25 bp, Homo sapien
tctggctgcagtagctttgctgaat

SEQ ID NO: 4671854 - DNA, 25 bp, Homo sapien
tggctgcagtagctttgctgaattg

SEQ ID NO: 4671855 - DNA, 25 bp, Homo sapien
cctggttattttgcctattcgttga

SEQ ID NO: 4671856 - DNA, 25 bp, Homo sapien
acctggttattttgcctattcgttg

SEQ ID NO: 4671857 - DNA, 25 bp, Homo sapien
tgctttactatattggatcatgtct

SEQ ID NO: 4671858 - DNA, 25 bp, Homo sapien
tactgaagagtatgttgtcacctgt

SEQ ID NO: 4671859 - DNA, 25 bp, Homo sapien
gcatgtgcctattgatactgaagag

SEQ ID NO: 4671860 - DNA, 25 bp, Homo sapien
ggaaagatagttttaccagatacag

SEQ ID NO: 4671861 - DNA, 25 bp, Homo sapien
tatagactatgtaccaggactgtgg

SEQ ID NO: 4671862 - DNA, 25 bp, Homo sapien
cagaatcaagagtccctacaaggta

SEQ ID NO: 4671863 - DNA, 25 bp, Homo sapien
ctgaaatctcagaagggccatgcct

SEQ ID NO: 4671864 - DNA, 25 bp, Homo sapien
gagatttcagctactacccaaggca

SEQ ID NO: 4671865 - DNA, 25 bp, Homo sapien
aaacctgaggtaatcgcagtttaca

SEQ ID NO: 4671866 - DNA, 25 bp, Homo sapien
gaaggataaagcacacgtgtcaaaa

SEQ ID NO: 4671867 - DNA, 25 bp, Homo sapien
aaagaagaaaacagtgatcagcctg

SEQ ID NO: 4671868 - DNA, 25 bp, Homo sapien
cagcctgcacctcttaaacctgagg

SEQ ID NO: 4671869 - DNA, 25 bp, Homo sapien
aaggcaacatctttagttgctctaa

SEQ ID NO: 4671870 - DNA, 25 bp, Homo sapien
caacatctttagttgctctaaggct

SEQ ID NO: 4671871 - DNA, 25 bp, Homo sapien
atctttagttgctctaaggctgaac

SEQ ID NO: 4671872 - DNA, 25 bp, Homo sapien
tagttgctctaaggctgaactcttc

SEQ ID NO: 4671873 - DNA, 25 bp, Homo sapien
tacaggcacaagtaggggatgattg

SEQ ID NO: 4671874 - DNA, 25 bp, Homo sapien
gagaaaaggcgaagttatatctact

SEQ ID NO: 4671875 - DNA, 25 bp, Homo sapien
agttatatctactggaatgggacac

SEQ ID NO: 4671876 - DNA, 25 bp, Homo sapien
acattaactatgtggccaaagaagg

SEQ ID NO: 4671877 - DNA, 25 bp, Homo sapien
tcctgtatgaagcagtttgcttact

SEQ ID NO: 4671878 - DNA, 25 bp, Homo sapien
tgaagcagtttgcttactaactgtg

SEQ ID NO: 4671879 - DNA, 25 bp, Homo sapien
gccaccttcagaaagggttcatttc

SEQ ID NO: 4671880 - DNA, 25 bp, Homo sapien
acactcctgtatgaagcagtttgct

SEQ ID NO: 4671881 - DNA, 25 bp, Homo sapien
gggtaactactgagctatagacaca

SEQ ID NO: 4671882 - DNA, 25 bp, Homo sapien
gatattcaatcagacagtcatttcg

SEQ ID NO: 4671883 - DNA, 25 bp, Homo sapien
tcattgagccttgttatgaagcaga

SEQ ID NO: 4671884 - DNA, 25 bp, Homo sapien
gcagataacagtacaatgctcgtac

SEQ ID NO: 4671885 - DNA, 25 bp, Homo sapien
caagagggcaccctgctctaaattt

SEQ ID NO: 4671886 - DNA, 25 bp, Homo sapien
tcctcaagagggcaccctgctctaa

SEQ ID NO: 4671887 - DNA, 25 bp, Homo sapien
gggcaccctgctctaaatttcttgc

SEQ ID NO: 4671888 - DNA, 25 bp, Homo sapien
gagggcaccctgctctaaatttctt

SEQ ID NO: 4671889 - DNA, 25 bp, Homo sapien
agaagtgccaaacacttagggctcc

SEQ ID NO: 4671890 - DNA, 25 bp, Homo sapien
cctgtgccgggtggtcaagtgcaaa

SEQ ID NO: 4671891 - DNA, 25 bp, Homo sapien
agtgcaaaggagtcatctcttccag

SEQ ID NO: 4671892 - DNA, 25 bp, Homo sapien
gcatccagtttgctctgcgtgtaag

SEQ ID NO: 4671893 - DNA, 25 bp, Homo sapien
gatctttatggttggctgcccagtg

SEQ ID NO: 4671894 - DNA, 25 bp, Homo sapien
cactgtgtgaacagcacttggatct

SEQ ID NO: 4671895 - DNA, 25 bp, Homo sapien
gcagcttcacatgctcagggttatt

SEQ ID NO: 4671896 - DNA, 25 bp, Homo sapien
ggaatcccaatgttagaatcatgct

SEQ ID NO: 4671897 - DNA, 25 bp, Homo sapien
cataagacgttatattgcagctttc

SEQ ID NO: 4671898 - DNA, 25 bp, Homo sapien
caaagtgaagaggagttcgaccctc

SEQ ID NO: 4671899 - DNA, 25 bp, Homo sapien
cctcgtagtcttgccagttcagtaa

SEQ ID NO: 4671900 - DNA, 25 bp, Homo sapien
gcagctttcatatgaggtcaagaca

SEQ ID NO: 4671901 - DNA, 25 bp, Homo sapien
gatgggatagttccagacttatttc

SEQ ID NO: 4671902 - DNA, 25 bp, Homo sapien
agttactctgagcagcatagtgcaa

SEQ ID NO: 4671903 - DNA, 25 bp, Homo sapien
ggatagttccagacttatttctttc

SEQ ID NO: 4671904 - DNA, 25 bp, Homo sapien
catagtgcaaaggtgtggctccttg

SEQ ID NO: 4671905 - DNA, 25 bp, Homo sapien
tgcatccttggatgaatctggttct

SEQ ID NO: 4671906 - DNA, 25 bp, Homo sapien
ggttcttgatggtcattcatactca

SEQ ID NO: 4671907 - DNA, 25 bp, Homo sapien
catccttggatgaatctggttcttg

SEQ ID NO: 4671908 - DNA, 25 bp, Homo sapien
cttgatggtcattcatactcaggaa

SEQ ID NO: 4671909 - DNA, 25 bp, Homo sapien
gagctactgtgtccggcctgatagt

SEQ ID NO: 4671910 - DNA, 25 bp, Homo sapien
gtatagtggcgctatcctggctcat

SEQ ID NO: 4671911 - DNA, 25 bp, Homo sapien
attataatttgatgaaacgaagggt

SEQ ID NO: 4671912 - DNA, 25 bp, Homo sapien
aaacgaagggtttcactatgcatac

SEQ ID NO: 4671913 - DNA, 25 bp, Homo sapien
atatctatgtccgattttaagctca

SEQ ID NO: 4671914 - DNA, 25 bp, Homo sapien
gctcagcatagttctaaggacatca

SEQ ID NO: 4671915 - DNA, 25 bp, Homo sapien
gccagctgcccacataaaggatgtt

SEQ ID NO: 4671916 - DNA, 25 bp, Homo sapien
tcagccatgttaatatctatgtccg

SEQ ID NO: 4671917 - DNA, 25 bp, Homo sapien
agtggagtatgtttcataacatcag

SEQ ID NO: 4671918 - DNA, 25 bp, Homo sapien
catctcacaggctcggaaaagtgga

SEQ ID NO: 4671919 - DNA, 25 bp, Homo sapien
gtaataacttcacggtgctgacatg

SEQ ID NO: 4671920 - DNA, 25 bp, Homo sapien
cattattttccagtaataacttcac

SEQ ID NO: 4671921 - DNA, 25 bp, Homo sapien
tatagcctccatatgctgcacactg

SEQ ID NO: 4671922 - DNA, 25 bp, Homo sapien
ctgccatgcagttgatatagcctcc

SEQ ID NO: 4671923 - DNA, 25 bp, Homo sapien
ccagtgctgcccaatgtagaagaga

SEQ ID NO: 4671924 - DNA, 25 bp, Homo sapien
ctttgtcttgaatgttagggtctgc

SEQ ID NO: 4671925 - DNA, 25 bp, Homo sapien
tgacaagagttcctgaaggaagcag

SEQ ID NO: 4671926 - DNA, 25 bp, Homo sapien
tggtactagccactacaaaagcatg

SEQ ID NO: 4671927 - DNA, 25 bp, Homo sapien
tttgttagcaccaggcctgcctgac

SEQ ID NO: 4671928 - DNA, 25 bp, Homo sapien
attttgttagcaccaggcctgcctg

SEQ ID NO: 4671929 - DNA, 25 bp, Homo sapien
taaacaagaggaactcactacaggt

SEQ ID NO: 4671930 - DNA, 25 bp, Homo sapien
caccagataacttcaagaggaaatt

SEQ ID NO: 4671931 - DNA, 25 bp, Homo sapien
cactacaggtcctacaggcataaaa

SEQ ID NO: 4671932 - DNA, 25 bp, Homo sapien
aaagtacaacttaccaagctgaaag

SEQ ID NO: 4671933 - DNA, 25 bp, Homo sapien
tgcaggaccaatgcaaagctgttct

SEQ ID NO: 4671934 - DNA, 25 bp, Homo sapien
agcagcaaagtctagcagtaattta

SEQ ID NO: 4671935 - DNA, 25 bp, Homo sapien
catcaaggtatccattgttgcagga

SEQ ID NO: 4671936 - DNA, 25 bp, Homo sapien
gtaatttaatggcatcaaggtatcc

SEQ ID NO: 4671937 - DNA, 25 bp, Homo sapien
tagcaggagccattttagttagagc

SEQ ID NO: 4671938 - DNA, 25 bp, Homo sapien
gacctaggtcagagggattgtcaga

SEQ ID NO: 4671939 - DNA, 25 bp, Homo sapien
gaggcatgtgaactccatcttaaag

SEQ ID NO: 4671940 - DNA, 25 bp, Homo sapien
tctgagatggacgtagagaagtccc

SEQ ID NO: 4671941 - DNA, 25 bp, Homo sapien
tattttaggacagcttcatttgcca

SEQ ID NO: 4671942 - DNA, 25 bp, Homo sapien
cagggaccatctgagaggcatctac

SEQ ID NO: 4671943 - DNA, 25 bp, Homo sapien
gaactaagataacatgtctcccagt

SEQ ID NO: 4671944 - DNA, 25 bp, Homo sapien
tcaggatgactctgaccagccaaac

SEQ ID NO: 4671945 - DNA, 25 bp, Homo sapien
cttgtaccctttgtagacagcttgg

SEQ ID NO: 4671946 - DNA, 25 bp, Homo sapien
tggcgctcaccaagcaaagcataat

SEQ ID NO: 4671947 - DNA, 25 bp, Homo sapien
gggcaccgtgctccaacatgaactg

SEQ ID NO: 4671948 - DNA, 25 bp, Homo sapien
gaactggatcacttcatggcgctca

SEQ ID NO: 4671949 - DNA, 25 bp, Homo sapien
caatctggtgatgttcacgggagca

SEQ ID NO: 4671950 - DNA, 25 bp, Homo sapien
ctttgtgagcagatgagtcagacac

SEQ ID NO: 4671951 - DNA, 25 bp, Homo sapien
gaaaatgtcgtgtgtcttaggacct

SEQ ID NO: 4671952 - DNA, 25 bp, Homo sapien
gatcctctcccacgaaatgcatatg

SEQ ID NO: 4671953 - DNA, 25 bp, Homo sapien
taatgggcttccaatttagtctggt

SEQ ID NO: 4671954 - DNA, 25 bp, Homo sapien
gacacaacgctgcttcacattgctg

SEQ ID NO: 4671955 - DNA, 25 bp, Homo sapien
gctcttcagaggcttacaggataag

SEQ ID NO: 4671956 - DNA, 25 bp, Homo sapien
gaggagtttccagactatcagctga

SEQ ID NO: 4671957 - DNA, 25 bp, Homo sapien
caaatctgaggaaacatgctgctcc

SEQ ID NO: 4671958 - DNA, 25 bp, Homo sapien
tgcaaatctgaggaaacatgctgct

SEQ ID NO: 4671959 - DNA, 25 bp, Homo sapien
tgctgggcacatcctgggtgctagg

SEQ ID NO: 4671960 - DNA, 25 bp, Homo sapien
tggagggctccgcctagagaccctc

SEQ ID NO: 4671961 - DNA, 25 bp, Homo sapien
catttggccttctggagtttgttcc

SEQ ID NO: 4671962 - DNA, 25 bp, Homo sapien
ggacacaagcagattggcctttaga

SEQ ID NO: 4671963 - DNA, 25 bp, Homo sapien
cacaagcagattggcctttagaatg

SEQ ID NO: 4671964 - DNA, 25 bp, Homo sapien
gcagattggcctttagaatgttctc

SEQ ID NO: 4671965 - DNA, 25 bp, Homo sapien
gattggcctttagaatgttctctgg

SEQ ID NO: 4671966 - DNA, 25 bp, Homo sapien
gaactcctggatgcctgcttccatc

SEQ ID NO: 4671967 - DNA, 25 bp, Homo sapien
ctggacttctcaacagagggaactc

SEQ ID NO: 4671968 - DNA, 25 bp, Homo sapien
gagggaactcctggatgcctgcttc

SEQ ID NO: 4671969 - DNA, 25 bp, Homo sapien
tctggacttctcaacagagggaact

SEQ ID NO: 4671970 - DNA, 25 bp, Homo sapien
caccctgatacaggagggctgcttc

SEQ ID NO: 4671971 - DNA, 25 bp, Homo sapien
ggttctgtgtcatgccgcctgctgg

SEQ ID NO: 4671972 - DNA, 25 bp, Homo sapien
tgctgggcttccagtggctatcgtg

SEQ ID NO: 4671973 - DNA, 25 bp, Homo sapien
tatcgtgcggtggaaggcttgcagc

SEQ ID NO: 4671974 - DNA, 25 bp, Homo sapien
gcaaatgtgaatagagccctcctgt

SEQ ID NO: 4671975 - DNA, 25 bp, Homo sapien
ctctgagctcttgagtgcgcctttt

SEQ ID NO: 4671976 - DNA, 25 bp, Homo sapien
ttgtttcttggtgtacgatggtggg

SEQ ID NO: 4671977 - DNA, 25 bp, Homo sapien
gcggctagaaccagccggagagcac

SEQ ID NO: 4671978 - DNA, 25 bp, Homo sapien
atattcacactctgcccagagaggg

SEQ ID NO: 4671979 - DNA, 25 bp, Homo sapien
ggtgctggatcagtctccttagata

SEQ ID NO: 4671980 - DNA, 25 bp, Homo sapien
aaagtcctcggacagggtagatgtc

SEQ ID NO: 4671981 - DNA, 25 bp, Homo sapien
tccttagatacctgaaagtcctcgg

SEQ ID NO: 4671982 - DNA, 25 bp, Homo sapien
cttgttctttttgcgaaacagctcc

SEQ ID NO: 4671983 - DNA, 25 bp, Homo sapien
cttcctccttcgttctctctgaatt

SEQ ID NO: 4671984 - DNA, 25 bp, Homo sapien
ttcgccaggcgcgctggatgactgc

SEQ ID NO: 4671985 - DNA, 25 bp, Homo sapien
ttcgttctctctgaattatctgcag

SEQ ID NO: 4671986 - DNA, 25 bp, Homo sapien
tcagacagtcggagaaggagacatt

SEQ ID NO: 4671987 - DNA, 25 bp, Homo sapien
tagccagtgcatgtcccacagagtg

SEQ ID NO: 4671988 - DNA, 25 bp, Homo sapien
tctggcgtggtaaaccttgctggct

SEQ ID NO: 4671989 - DNA, 25 bp, Homo sapien
cacttgcaggacagcgcttcaggct

SEQ ID NO: 4671990 - DNA, 25 bp, Homo sapien
ctggaggagcaatgctgtagactct

SEQ ID NO: 4671991 - DNA, 25 bp, Homo sapien
gaggagcaatgctgtagactcttgc

SEQ ID NO: 4671992 - DNA, 25 bp, Homo sapien
gctgcttcatatgccgaaggtggga

SEQ ID NO: 4671993 - DNA, 25 bp, Homo sapien
ctccaagctgcttcatatgccgaag

SEQ ID NO: 4671994 - DNA, 25 bp, Homo sapien
catagatttgcttaagcactgagtg

SEQ ID NO: 4671995 - DNA, 25 bp, Homo sapien
agtgcttggtggactttgtgcctga

SEQ ID NO: 4671996 - DNA, 25 bp, Homo sapien
ccttggatggactcttgggggcctt

SEQ ID NO: 4671997 - DNA, 25 bp, Homo sapien
ggactttgtgcctgaggtgcccttg

SEQ ID NO: 4671998 - DNA, 25 bp, Homo sapien
tctgatgtggtactctgggggtact

SEQ ID NO: 4671999 - DNA, 25 bp, Homo sapien
ctctgggggtacttgtgaactacaa

SEQ ID NO: 4672000 - DNA, 25 bp, Homo sapien
attctgatgtggtactctgggggta

SEQ ID NO: 4672001 - DNA, 25 bp, Homo sapien
gtactctgggggtacttgtgaacta

SEQ ID NO: 4672002 - DNA, 25 bp, Homo sapien
tgtattttcccttcgtgagaacaac

SEQ ID NO: 4672003 - DNA, 25 bp, Homo sapien
ctgagttgagacgcagcacagaaga

SEQ ID NO: 4672004 - DNA, 25 bp, Homo sapien
gatgtattttcccttcgtgagaaca

SEQ ID NO: 4672005 - DNA, 25 bp, Homo sapien
gatgatgtattttcccttcgtgaga

SEQ ID NO: 4672006 - DNA, 25 bp, Homo sapien
aaggaaaatgcttccccatgttctt

SEQ ID NO: 4672007 - DNA, 25 bp, Homo sapien
taatttgcctcttagggagacagat

SEQ ID NO: 4672008 - DNA, 25 bp, Homo sapien
cagatgttggctacagtaataatcc

SEQ ID NO: 4672009 - DNA, 25 bp, Homo sapien
cctcttagggagacagatgttggct

SEQ ID NO: 4672010 - DNA, 25 bp, Homo sapien
taatcccatgaaatcaaatgaccat

SEQ ID NO: 4672011 - DNA, 25 bp, Homo sapien
tatgagggaaagcacgcacagctga

SEQ ID NO: 4672012 - DNA, 25 bp, Homo sapien
gctgagcctgggctgtacatgctct

SEQ ID NO: 4672013 - DNA, 25 bp, Homo sapien
taagtaaaacactcttgtcttggtg

SEQ ID NO: 4672014 - DNA, 25 bp, Homo sapien
tgtatgagggaaagcacgcacagct

SEQ ID NO: 4672015 - DNA, 25 bp, Homo sapien
gacagcaatgaacttatcacccata

SEQ ID NO: 4672016 - DNA, 25 bp, Homo sapien
tgctgacagcaatgaacttatcacc

SEQ ID NO: 4672017 - DNA, 25 bp, Homo sapien
gctgacagcaatgaacttatcaccc

SEQ ID NO: 4672018 - DNA, 25 bp, Homo sapien
agctgctgacagcaatgaacttatc

SEQ ID NO: 4672019 - DNA, 25 bp, Homo sapien
ggggggagcgtgttgccatagccac

SEQ ID NO: 4672020 - DNA, 25 bp, Homo sapien
ctgacagtcattgttcaccttccca

SEQ ID NO: 4672021 - DNA, 25 bp, Homo sapien
ggaggcaggggggagcgtgttgcca

SEQ ID NO: 4672022 - DNA, 25 bp, Homo sapien
cccagctgcactctgttcctccagg

SEQ ID NO: 4672023 - DNA, 25 bp, Homo sapien
gatgggccagtttactgtagaggca

SEQ ID NO: 4672024 - DNA, 25 bp, Homo sapien
aagggaatagttcattggtgttgag

SEQ ID NO: 4672025 - DNA, 25 bp, Homo sapien
aggcaggatgacttaatataatagc

SEQ ID NO: 4672026 - DNA, 25 bp, Homo sapien
tcggtttaggctatccctgggatga

SEQ ID NO: 4672027 - DNA, 25 bp, Homo sapien
gattgcaggttataagaaaagttct

SEQ ID NO: 4672028 - DNA, 25 bp, Homo sapien
gttctcaaggagatgtatacactgt

SEQ ID NO: 4672029 - DNA, 25 bp, Homo sapien
agttctttgatcttccactgttctc

SEQ ID NO: 4672030 - DNA, 25 bp, Homo sapien
agatgtatacactgtaggttgctca

SEQ ID NO: 4672031 - DNA, 25 bp, Homo sapien
cacacgatacatggtcataggcggt

SEQ ID NO: 4672032 - DNA, 25 bp, Homo sapien
tgacgcctgagttagcaccttgctg

SEQ ID NO: 4672033 - DNA, 25 bp, Homo sapien
cattcagtgaagacgtggcggcaac

SEQ ID NO: 4672034 - DNA, 25 bp, Homo sapien
tattgatgtgtaggctggcttcccg

SEQ ID NO: 4672035 - DNA, 25 bp, Homo sapien
ctagcatgtgcaggagggaacagac

SEQ ID NO: 4672036 - DNA, 25 bp, Homo sapien
cgtgtatatcactgggcatccccaa

SEQ ID NO: 4672037 - DNA, 25 bp, Homo sapien
gctacagtgtattgaagaggccata

SEQ ID NO: 4672038 - DNA, 25 bp, Homo sapien
caggtagcatagtgatttgggtgca

SEQ ID NO: 4672039 - DNA, 25 bp, Homo sapien
gggcatcagagtcattcctacctag

SEQ ID NO: 4672040 - DNA, 25 bp, Homo sapien
taccggaggctttgcagtattagca

SEQ ID NO: 4672041 - DNA, 25 bp, Homo sapien
gaaagggatcccatacattgagtcc

SEQ ID NO: 4672042 - DNA, 25 bp, Homo sapien
ggtagtttctcagggtctcccgtgc

SEQ ID NO: 4672043 - DNA, 25 bp, Homo sapien
gttgttctctatcattaccatgctg

SEQ ID NO: 4672044 - DNA, 25 bp, Homo sapien
ttaattgtgtgaagaatgatgttgg

SEQ ID NO: 4672045 - DNA, 25 bp, Homo sapien
gtcaccttagttgaagatgagatag

SEQ ID NO: 4672046 - DNA, 25 bp, Homo sapien
tgttctctatcattaccatgctgtt

SEQ ID NO: 4672047 - DNA, 25 bp, Homo sapien
ggaattaccatatgtgcagtcaggg

SEQ ID NO: 4672048 - DNA, 25 bp, Homo sapien
gaggttttacccatctggccttgag

SEQ ID NO: 4672049 - DNA, 25 bp, Homo sapien
tgtcacttgaagtatggcccctaaa

SEQ ID NO: 4672050 - DNA, 25 bp, Homo sapien
taggctagctgcaaggtcacctgtc

SEQ ID NO: 4672051 - DNA, 25 bp, Homo sapien
aatacttaccatgggctggatttgg

SEQ ID NO: 4672052 - DNA, 25 bp, Homo sapien
cactaccacggtagtgtgaaagcat

SEQ ID NO: 4672053 - DNA, 25 bp, Homo sapien
taggtctctgtcatggctactcagc

SEQ ID NO: 4672054 - DNA, 25 bp, Homo sapien
taccagggttcagcaaagttctttc

SEQ ID NO: 4672055 - DNA, 25 bp, Homo sapien
taaatctaccgttaggaggatgggc

SEQ ID NO: 4672056 - DNA, 25 bp, Homo sapien
tattcaggctagagcttttagcgta

SEQ ID NO: 4672057 - DNA, 25 bp, Homo sapien
tgagcttcattagagctagccagag

SEQ ID NO: 4672058 - DNA, 25 bp, Homo sapien
gatgggctattagtaccaacctttg

SEQ ID NO: 4672059 - DNA, 25 bp, Homo sapien
gaagagagtactgctttgaattcct

SEQ ID NO: 4672060 - DNA, 25 bp, Homo sapien
tgttatagtacaaagcagggctccc

SEQ ID NO: 4672061 - DNA, 25 bp, Homo sapien
gaattcctagtactttctccctgct

SEQ ID NO: 4672062 - DNA, 25 bp, Homo sapien
aaaatataggcacatccagactcct

SEQ ID NO: 4672063 - DNA, 25 bp, Homo sapien
gcttaaagtcatagtttccgagaac

SEQ ID NO: 4672064 - DNA, 25 bp, Homo sapien
tggtagattgtaagccacttgaggg

SEQ ID NO: 4672065 - DNA, 25 bp, Homo sapien
caggcctggctgaaaaacgtttctt

SEQ ID NO: 4672066 - DNA, 25 bp, Homo sapien
ttccgagaacctgctgaagttgtta

SEQ ID NO: 4672067 - DNA, 25 bp, Homo sapien
catacacctgaacgatgacgtgctc

SEQ ID NO: 4672068 - DNA, 25 bp, Homo sapien
tactaaaacccatgagatacaggaa

SEQ ID NO: 4672069 - DNA, 25 bp, Homo sapien
caacctaacgttgcacttcagggaa

SEQ ID NO: 4672070 - DNA, 25 bp, Homo sapien
tagccggtagctagactaaggaaga

SEQ ID NO: 4672071 - DNA, 25 bp, Homo sapien
caggtatctgagagtatcacccaac

SEQ ID NO: 4672072 - DNA, 25 bp, Homo sapien
caagcaagaatatgcgccatttgtc

SEQ ID NO: 4672073 - DNA, 25 bp, Homo sapien
tatccacgcatacgttggtgaacat

SEQ ID NO: 4672074 - DNA, 25 bp, Homo sapien
catgcgtaagactatacaatggtga

SEQ ID NO: 4672075 - DNA, 25 bp, Homo sapien
tgttgctcatgttggaagtatcctc

SEQ ID NO: 4672076 - DNA, 25 bp, Homo sapien
ctggaagtgtgcttcataactgaca

SEQ ID NO: 4672077 - DNA, 25 bp, Homo sapien
gatatttgactctggtcactggaag

SEQ ID NO: 4672078 - DNA, 25 bp, Homo sapien
tgtatagatcccctatctcaggtag

SEQ ID NO: 4672079 - DNA, 25 bp, Homo sapien
cgctgcagcacgagcaaataaagaa

SEQ ID NO: 4672080 - DNA, 25 bp, Homo sapien
aaagtttacaagctactgccctccg

SEQ ID NO: 4672081 - DNA, 25 bp, Homo sapien
aagtgttatcccgttggctggctgg

SEQ ID NO: 4672082 - DNA, 25 bp, Homo sapien
cgatatcattcataccgctgcagca

SEQ ID NO: 4672083 - DNA, 25 bp, Homo sapien
ccagtactctgaaaagcgggtgctg

SEQ ID NO: 4672084 - DNA, 25 bp, Homo sapien
gaagagctgccgatcaacactggca

SEQ ID NO: 4672085 - DNA, 25 bp, Homo sapien
aaatgtgggtcgcagagtcccaacc

SEQ ID NO: 4672086 - DNA, 25 bp, Homo sapien
gcaagcaaacagaagagtgtcccgt

SEQ ID NO: 4672087 - DNA, 25 bp, Homo sapien
aagaagcagatactacttgtagaac

SEQ ID NO: 4672088 - DNA, 25 bp, Homo sapien
aactctaacctctcagaagggtatg

SEQ ID NO: 4672089 - DNA, 25 bp, Homo sapien
ggtatgctcctcaggcaggtactga

SEQ ID NO: 4672090 - DNA, 25 bp, Homo sapien
taggtattatggaggtaccaactgc

SEQ ID NO: 4672091 - DNA, 25 bp, Homo sapien
ttacaagtgttcaccaccatgcctg

SEQ ID NO: 4672092 - DNA, 25 bp, Homo sapien
gattacaagtgttcaccaccatgcc

SEQ ID NO: 4672093 - DNA, 25 bp, Homo sapien
caagtgttcaccaccatgcctgatt

SEQ ID NO: 4672094 - DNA, 25 bp, Homo sapien
tacaagtgttcaccaccatgcctga

SEQ ID NO: 4672095 - DNA, 25 bp, Homo sapien
gatgtcagatcacacaccacaagct

SEQ ID NO: 4672096 - DNA, 25 bp, Homo sapien
ggccttaaatatccttgcaccttgg

SEQ ID NO: 4672097 - DNA, 25 bp, Homo sapien
tggccacagcctaatctttaggagg

SEQ ID NO: 4672098 - DNA, 25 bp, Homo sapien
tttaggaggaaccaaatagcattgc

SEQ ID NO: 4672099 - DNA, 25 bp, Homo sapien
gaaaggcctattattctccttgctg

SEQ ID NO: 4672100 - DNA, 25 bp, Homo sapien
cttgctcttgaaaggcctattattc

SEQ ID NO: 4672101 - DNA, 25 bp, Homo sapien
ttgaaaggcctattattctccttgc

SEQ ID NO: 4672102 - DNA, 25 bp, Homo sapien
tttccttgctcttgaaaggcctatt

SEQ ID NO: 4672103 - DNA, 25 bp, Homo sapien
ttcgcctggtttcgggtccgagaga

SEQ ID NO: 4672104 - DNA, 25 bp, Homo sapien
ggcgtttgcggagcttcaggtgact

SEQ ID NO: 4672105 - DNA, 25 bp, Homo sapien
tccgagagagttttagcccggagtg

SEQ ID NO: 4672106 - DNA, 25 bp, Homo sapien
gagtgtgtgaatcgggccccacttc

SEQ ID NO: 4672107 - DNA, 25 bp, Homo sapien
gatccgcggcccaagcgggcagggt

SEQ ID NO: 4672108 - DNA, 25 bp, Homo sapien
gactgagcgtggtggggccgtcgcc

SEQ ID NO: 4672109 - DNA, 25 bp, Homo sapien
cacgatttgcgtcccccgggtctgg

SEQ ID NO: 4672110 - DNA, 25 bp, Homo sapien
ggtcggccgtgcacgatttgcgtcc

SEQ ID NO: 4672111 - DNA, 25 bp, Homo sapien
tatttgaaaacacgctccgggagct

SEQ ID NO: 4672112 - DNA, 25 bp, Homo sapien
tcgcttgtcttctcgggcttctcgc

SEQ ID NO: 4672113 - DNA, 25 bp, Homo sapien
tgcgatcacgtgagcacagcaggga

SEQ ID NO: 4672114 - DNA, 25 bp, Homo sapien
gcgcacgctgttgccccgtgggctt

SEQ ID NO: 4672115 - DNA, 25 bp, Homo sapien
gaaactgagatgttagggagaatcc

SEQ ID NO: 4672116 - DNA, 25 bp, Homo sapien
aaaagcatgctcagctataaccagg

SEQ ID NO: 4672117 - DNA, 25 bp, Homo sapien
gccatcatgccagtctttgtgaaga

SEQ ID NO: 4672118 - DNA, 25 bp, Homo sapien
agttacgggccggacttatgcgcca

SEQ ID NO: 4672119 - DNA, 25 bp, Homo sapien
atttgagatgaataagctgtaggaa

SEQ ID NO: 4672120 - DNA, 25 bp, Homo sapien
taagctgtaggaagagtagatttca

SEQ ID NO: 4672121 - DNA, 25 bp, Homo sapien
ctctgttttggacaagttgaccttg

SEQ ID NO: 4672122 - DNA, 25 bp, Homo sapien
tcatcagtagctctgttttggacaa

SEQ ID NO: 4672123 - DNA, 25 bp, Homo sapien
ggtgtagaaatcattttgtcaccca

SEQ ID NO: 4672124 - DNA, 25 bp, Homo sapien
tagaattagtatactcttagtaacc

SEQ ID NO: 4672125 - DNA, 25 bp, Homo sapien
agtaagcatggtgcccagtaggtag

SEQ ID NO: 4672126 - DNA, 25 bp, Homo sapien
ttataagtgagtacgtgcaggattc

SEQ ID NO: 4672127 - DNA, 25 bp, Homo sapien
aggaggtagaagttgcagtgagata

SEQ ID NO: 4672128 - DNA, 25 bp, Homo sapien
tatgatcatgccactgtactccagc

SEQ ID NO: 4672129 - DNA, 25 bp, Homo sapien
aggtagaagttgcagtgagatatga

SEQ ID NO: 4672130 - DNA, 25 bp, Homo sapien
agaagttgcagtgagatatgatcat

SEQ ID NO: 4672131 - DNA, 25 bp, Homo sapien
gaatcaccagaactcgaggcaggga

SEQ ID NO: 4672132 - DNA, 25 bp, Homo sapien
aatcaccagaactcgaggcagggag

SEQ ID NO: 4672133 - DNA, 25 bp, Homo sapien
tgagcagccaggtagagatgctcct

SEQ ID NO: 4672134 - DNA, 25 bp, Homo sapien
atgatgagcagccaggtagagatgc

SEQ ID NO: 4672135 - DNA, 25 bp, Homo sapien
cagatgatgagcagccaggtagaga

SEQ ID NO: 4672136 - DNA, 25 bp, Homo sapien
ccagacaatgggcgggtgggcaggg

SEQ ID NO: 4672137 - DNA, 25 bp, Homo sapien
gcacttgatggatacagcagttcat

SEQ ID NO: 4672138 - DNA, 25 bp, Homo sapien
gcacaacgactgtgctccctgcgta

SEQ ID NO: 4672139 - DNA, 25 bp, Homo sapien
ctgcgtacccgcacttgatggatac

SEQ ID NO: 4672140 - DNA, 25 bp, Homo sapien
tggcacaacgactgtgctccctgcg

SEQ ID NO: 4672141 - DNA, 25 bp, Homo sapien
caagcgcactgtgacccggaacttg

SEQ ID NO: 4672142 - DNA, 25 bp, Homo sapien
tgactaccgttcagcgtgtctccca

SEQ ID NO: 4672143 - DNA, 25 bp, Homo sapien
cactgtgacccggaacttgactacc

SEQ ID NO: 4672144 - DNA, 25 bp, Homo sapien
ggaacttgactaccgttcagcgtgt

SEQ ID NO: 4672145 - DNA, 25 bp, Homo sapien
cccaggacctgtctcggacactgtg

SEQ ID NO: 4672146 - DNA, 25 bp, Homo sapien
ggacctgtctcggacactgtgctga

SEQ ID NO: 4672147 - DNA, 25 bp, Homo sapien
tcggacactgtgctgactcatttgg

SEQ ID NO: 4672148 - DNA, 25 bp, Homo sapien
gctgactcatttggaattaatgcgt

SEQ ID NO: 4672149 - DNA, 25 bp, Homo sapien
tttgtcacacgggatttggcggcca

SEQ ID NO: 4672150 - DNA, 25 bp, Homo sapien
cacgagttagttcagtccaggtccc

SEQ ID NO: 4672151 - DNA, 25 bp, Homo sapien
ggagctcctgaagcggcccgaaaaa

SEQ ID NO: 4672152 - DNA, 25 bp, Homo sapien
ttgatacttgggacagcgaatcccc

SEQ ID NO: 4672153 - DNA, 25 bp, Homo sapien
gctcctctcgcaagcagggcggccg

SEQ ID NO: 4672154 - DNA, 25 bp, Homo sapien
ctgggctcctctcgcaagcagggcg

SEQ ID NO: 4672155 - DNA, 25 bp, Homo sapien
tcctctcgcaagcagggcggccggg

SEQ ID NO: 4672156 - DNA, 25 bp, Homo sapien
ctctcgcaagcagggcggccgggag

SEQ ID NO: 4672157 - DNA, 25 bp, Homo sapien
gggtcgcagcggctcggcccgaaaa

SEQ ID NO: 4672158 - DNA, 25 bp, Homo sapien
ctcggcccgaaaaccctccatgccg

SEQ ID NO: 4672159 - DNA, 25 bp, Homo sapien
gagtcccatcgcggcgcgcagaggc

SEQ ID NO: 4672160 - DNA, 25 bp, Homo sapien
ccagcctgcaaggccggggtcgcag

SEQ ID NO: 4672161 - DNA, 25 bp, Homo sapien
ctgaacagcctgttgggtattctgc

SEQ ID NO: 4672162 - DNA, 25 bp, Homo sapien
cagcccttgatcttccacaatacgt

SEQ ID NO: 4672163 - DNA, 25 bp, Homo sapien
agctgagaactgaacagcctgttgg

SEQ ID NO: 4672164 - DNA, 25 bp, Homo sapien
cttgatcttccacaatacgttaaca

SEQ ID NO: 4672165 - DNA, 25 bp, Homo sapien
attggccctgagttcccactggctc

SEQ ID NO: 4672166 - DNA, 25 bp, Homo sapien
ttggccctgagttcccactggctca

SEQ ID NO: 4672167 - DNA, 25 bp, Homo sapien
gattggccctgagttcccactggct

SEQ ID NO: 4672168 - DNA, 25 bp, Homo sapien
cttgttagatatagattggccctga

SEQ ID NO: 4672169 - DNA, 25 bp, Homo sapien
tttggcaggctttataatttcgttg

SEQ ID NO: 4672170 - DNA, 25 bp, Homo sapien
tggcaggctttataatttcgttgtt

SEQ ID NO: 4672171 - DNA, 25 bp, Homo sapien
agaagtatttggcaggctttataat

SEQ ID NO: 4672172 - DNA, 25 bp, Homo sapien
gtatttggcaggctttataatttcg

SEQ ID NO: 4672173 - DNA, 25 bp, Homo sapien
gagggctgacgctccgtttcacttt

SEQ ID NO: 4672174 - DNA, 25 bp, Homo sapien
gtattcgtgggccagcgcctgccag

SEQ ID NO: 4672175 - DNA, 25 bp, Homo sapien
tagttcgcgcatcacttttcttaca

SEQ ID NO: 4672176 - DNA, 25 bp, Homo sapien
gcttaagggcaatagttcgcgcatc

SEQ ID NO: 4672177 - DNA, 25 bp, Homo sapien
cacgcccacttctataagactttga

SEQ ID NO: 4672178 - DNA, 25 bp, Homo sapien
cagatacccagtgagagcgtgcaca

SEQ ID NO: 4672179 - DNA, 25 bp, Homo sapien
gaattaggaaaattggatttgatac

SEQ ID NO: 4672180 - DNA, 25 bp, Homo sapien
gaatgtcctatataatcctgagatc

SEQ ID NO: 4672181 - DNA, 25 bp, Homo sapien
cacactggaaatcgatgcatgaggt

SEQ ID NO: 4672182 - DNA, 25 bp, Homo sapien
taaactgtctgctaggaggtaccct

SEQ ID NO: 4672183 - DNA, 25 bp, Homo sapien
gaactcagggatcaaaactcagaca

SEQ ID NO: 4672184 - DNA, 25 bp, Homo sapien
gaaatcgatgtatgaggttcccaca

SEQ ID NO: 4672185 - DNA, 25 bp, Homo sapien
ctacctactagtattaacagattac

SEQ ID NO: 4672186 - DNA, 25 bp, Homo sapien
agagtaccagtaccctacctactag

SEQ ID NO: 4672187 - DNA, 25 bp, Homo sapien
aaaatgagtgaaatgaactcaaagt

SEQ ID NO: 4672188 - DNA, 25 bp, Homo sapien
ttttactgtatagaaagagtaccag

SEQ ID NO: 4672189 - DNA, 25 bp, Homo sapien
ttcctaccaagtcccagaaaggatg

SEQ ID NO: 4672190 - DNA, 25 bp, Homo sapien
ccagaaaggatgattgacaattcca

SEQ ID NO: 4672191 - DNA, 25 bp, Homo sapien
agtcccagaaaggatgattgacaat

SEQ ID NO: 4672192 - DNA, 25 bp, Homo sapien
taccaagtcccagaaaggatgattg

SEQ ID NO: 4672193 - DNA, 25 bp, Homo sapien
cctatgagcctcatgtggcttgtga

SEQ ID NO: 4672194 - DNA, 25 bp, Homo sapien
aatgtggtgtgcacaattatagcac

SEQ ID NO: 4672195 - DNA, 25 bp, Homo sapien
ggcttgtgacaactgtattagacag

SEQ ID NO: 4672196 - DNA, 25 bp, Homo sapien
tacacaagatgtaatgagggccata

SEQ ID NO: 4672197 - DNA, 25 bp, Homo sapien
ccaagggacagtgatcaagatgaca

SEQ ID NO: 4672198 - DNA, 25 bp, Homo sapien
cagggaggcctctagtggaatacta

SEQ ID NO: 4672199 - DNA, 25 bp, Homo sapien
ctagtgtgttcgaatgcagatggac

SEQ ID NO: 4672200 - DNA, 25 bp, Homo sapien
caaagctaagtatatccaagggaca

SEQ ID NO: 4672201 - DNA, 25 bp, Homo sapien
acagggctttaaactagagaggctc

SEQ ID NO: 4672202 - DNA, 25 bp, Homo sapien
cctaggaatggcactgtgctgcaaa

SEQ ID NO: 4672203 - DNA, 25 bp, Homo sapien
cacacatattagctccaatgaatag

SEQ ID NO: 4672204 - DNA, 25 bp, Homo sapien
tacacaccatgtaatctctctcaga

SEQ ID NO: 4672205 - DNA, 25 bp, Homo sapien
gatttcattccaggggatagttctg

SEQ ID NO: 4672206 - DNA, 25 bp, Homo sapien
tttgtggtacttctagtctcttttc

SEQ ID NO: 4672207 - DNA, 25 bp, Homo sapien
ttcctttctagttttggatctgaaa

SEQ ID NO: 4672208 - DNA, 25 bp, Homo sapien
gaagactggacacattagacatttt

SEQ ID NO: 4672209 - DNA, 25 bp, Homo sapien
aacagtgctctgtgtgggtaaccaa

SEQ ID NO: 4672210 - DNA, 25 bp, Homo sapien
gaaaaagtacttcggtgccatccag

SEQ ID NO: 4672211 - DNA, 25 bp, Homo sapien
cagggccctcaggtgtgagtttcaa

SEQ ID NO: 4672212 - DNA, 25 bp, Homo sapien
caaggcacaggacaaaggaatggga

SEQ ID NO: 4672213 - DNA, 25 bp, Homo sapien
caagctactcacatcctttataagg

SEQ ID NO: 4672214 - DNA, 25 bp, Homo sapien
cacaagctactcacatcctttataa

SEQ ID NO: 4672215 - DNA, 25 bp, Homo sapien
cacatcctttataaggtcatgcttt

SEQ ID NO: 4672216 - DNA, 25 bp, Homo sapien
tactcacatcctttataaggtcatg

SEQ ID NO: 4672217 - DNA, 25 bp, Homo sapien
ctgttattctgacagctgaacacga

SEQ ID NO: 4672218 - DNA, 25 bp, Homo sapien
catcgcacagttctctatttgaaac

SEQ ID NO: 4672219 - DNA, 25 bp, Homo sapien
ctgaacacgagggttcaggttgaga

SEQ ID NO: 4672220 - DNA, 25 bp, Homo sapien
tctttctcatcatcgcacagttctc

SEQ ID NO: 4672221 - DNA, 25 bp, Homo sapien
tgagcaacagcatcaccattggaga

SEQ ID NO: 4672222 - DNA, 25 bp, Homo sapien
gacagccactttccatgggacggca

SEQ ID NO: 4672223 - DNA, 25 bp, Homo sapien
taaagacctctagcaagttctgagc

SEQ ID NO: 4672224 - DNA, 25 bp, Homo sapien
gcagctctcacggaggttccctaaa

SEQ ID NO: 4672225 - DNA, 25 bp, Homo sapien
tacaggagaagctatactgcagctc

SEQ ID NO: 4672226 - DNA, 25 bp, Homo sapien
tgagcttagaattcaggccctgact

SEQ ID NO: 4672227 - DNA, 25 bp, Homo sapien
tccaaggcctataccacttatgtgg

SEQ ID NO: 4672228 - DNA, 25 bp, Homo sapien
gaaactgctgatctgccttggcact

SEQ ID NO: 4672229 - DNA, 25 bp, Homo sapien
cacctgccaaaatgccgactctgaa

SEQ ID NO: 4672230 - DNA, 25 bp, Homo sapien
ccttgcatctagtgaagttcctctg

SEQ ID NO: 4672231 - DNA, 25 bp, Homo sapien
ctctgaagacttagctccagtgcca

SEQ ID NO: 4672232 - DNA, 25 bp, Homo sapien
cttgaatcttcaacaggaccttgca

SEQ ID NO: 4672233 - DNA, 25 bp, Homo sapien
cacactgatctccctcgtgggtttg

SEQ ID NO: 4672234 - DNA, 25 bp, Homo sapien
acactgatctccctcgtgggtttgt

SEQ ID NO: 4672235 - DNA, 25 bp, Homo sapien
tgacatcccaccagctgcaatggag

SEQ ID NO: 4672236 - DNA, 25 bp, Homo sapien
ccagcagggagggtctaagtcagat

SEQ ID NO: 4672237 - DNA, 25 bp, Homo sapien
caaatgagtaggtgaacaaggaccc

SEQ ID NO: 4672238 - DNA, 25 bp, Homo sapien
tgtaattgacctgacactgcagaga

SEQ ID NO: 4672239 - DNA, 25 bp, Homo sapien
ggggaagctgttgtgagtgcagcag

SEQ ID NO: 4672240 - DNA, 25 bp, Homo sapien
aggggaagctgttgtgagtgcagca

SEQ ID NO: 4672241 - DNA, 25 bp, Homo sapien
gagaggggaagctgttgtgagtgca

SEQ ID NO: 4672242 - DNA, 25 bp, Homo sapien
gaggggaagctgttgtgagtgcagc

SEQ ID NO: 4672243 - DNA, 25 bp, Homo sapien
tctgagtcccatcaacacaaaaagc

SEQ ID NO: 4672244 - DNA, 25 bp, Homo sapien
gaagcaggtcatcactagtttggct

SEQ ID NO: 4672245 - DNA, 25 bp, Homo sapien
tggctagtctaaggttaaacattac

SEQ ID NO: 4672246 - DNA, 25 bp, Homo sapien
ccttgttgataccagatgttgaata

SEQ ID NO: 4672247 - DNA, 25 bp, Homo sapien
tgcagtcatggatcactgaagacct

SEQ ID NO: 4672248 - DNA, 25 bp, Homo sapien
caagggaggtagataagtattacac

SEQ ID NO: 4672249 - DNA, 25 bp, Homo sapien
tattacaccactttcacagatggag

SEQ ID NO: 4672250 - DNA, 25 bp, Homo sapien
gggcataatatacggcacaattagg

SEQ ID NO: 4672251 - DNA, 25 bp, Homo sapien
gcgctcgggacggagtcggcgggtc

SEQ ID NO: 4672252 - DNA, 25 bp, Homo sapien
ggtccgggcgcgtgcgagggtcgcg

SEQ ID NO: 4672253 - DNA, 25 bp, Homo sapien
tgcgcgcgagggtgcgagccggcgt

SEQ ID NO: 4672254 - DNA, 25 bp, Homo sapien
ctttgtgtccgtggccgttgccacc

SEQ ID NO: 4672255 - DNA, 25 bp, Homo sapien
tgagccggggagcagcccgtcagca

SEQ ID NO: 4672256 - DNA, 25 bp, Homo sapien
gagccggggagcagcccgtcagcat

SEQ ID NO: 4672257 - DNA, 25 bp, Homo sapien
gccgctgagccggggagcagcccgt

SEQ ID NO: 4672258 - DNA, 25 bp, Homo sapien
gctgagccggggagcagcccgtcag

SEQ ID NO: 4672259 - DNA, 25 bp, Homo sapien
tggacggcgggaagcgcagggagcc

SEQ ID NO: 4672260 - DNA, 25 bp, Homo sapien
ctggacggcgggaagcgcagggagc

SEQ ID NO: 4672261 - DNA, 25 bp, Homo sapien
ggacggcgggaagcgcagggagccg

SEQ ID NO: 4672262 - DNA, 25 bp, Homo sapien
acggcgggaagcgcagggagccgca

SEQ ID NO: 4672263 - DNA, 25 bp, Homo sapien
aagagcagaagcaccgacgtgtagc

SEQ ID NO: 4672264 - DNA, 25 bp, Homo sapien
gggctggttggacgcgcggctcccg

SEQ ID NO: 4672265 - DNA, 25 bp, Homo sapien
cgtgtagcagcagaaggcgagcgga

SEQ ID NO: 4672266 - DNA, 25 bp, Homo sapien
cagttgatgctcttgcctttgccgc

SEQ ID NO: 4672267 - DNA, 25 bp, Homo sapien
aggatgatgactcccaagcctcctc

SEQ ID NO: 4672268 - DNA, 25 bp, Homo sapien
gatgatgactcccaagcctcctccc

SEQ ID NO: 4672269 - DNA, 25 bp, Homo sapien
caggatgatgactcccaagcctcct

SEQ ID NO: 4672270 - DNA, 25 bp, Homo sapien
acaggatgatgactcccaagcctcc

SEQ ID NO: 4672271 - DNA, 25 bp, Homo sapien
ggggagaggtcactcccttgctccc

SEQ ID NO: 4672272 - DNA, 25 bp, Homo sapien
gggagaggtcactcccttgctcccc

SEQ ID NO: 4672273 - DNA, 25 bp, Homo sapien
ggagaggtcactcccttgctccccg

SEQ ID NO: 4672274 - DNA, 25 bp, Homo sapien
ccagtgttatccactaaagcctcag

SEQ ID NO: 4672275 - DNA, 25 bp, Homo sapien
tgttatccactaaagcctcagcaag

SEQ ID NO: 4672276 - DNA, 25 bp, Homo sapien
tccactaaagcctcagcaagctctt

SEQ ID NO: 4672277 - DNA, 25 bp, Homo sapien
tcctccccagtgttatccactaaag

SEQ ID NO: 4672278 - DNA, 25 bp, Homo sapien
aagtctaaagtccagaataagtgga

SEQ ID NO: 4672279 - DNA, 25 bp, Homo sapien
ctttaaccatattccctaagctaga

SEQ ID NO: 4672280 - DNA, 25 bp, Homo sapien
ttccctaagctagaaatgccccaca

SEQ ID NO: 4672281 - DNA, 25 bp, Homo sapien
tcttctacctctttaaccatattcc

SEQ ID NO: 4672282 - DNA, 25 bp, Homo sapien
tccctaagctagaaatgccccacat

SEQ ID NO: 4672283 - DNA, 25 bp, Homo sapien
tctttcatcgtaccgccaggctctt

SEQ ID NO: 4672284 - DNA, 25 bp, Homo sapien
tatctttcatcgtaccgccaggctc

SEQ ID NO: 4672285 - DNA, 25 bp, Homo sapien
ttatctttcatcgtaccgccaggct

SEQ ID NO: 4672286 - DNA, 25 bp, Homo sapien
ctttcatcgtaccgccaggctcttc

SEQ ID NO: 4672287 - DNA, 25 bp, Homo sapien
ccccttgtaaccaaacagtcttcat

SEQ ID NO: 4672288 - DNA, 25 bp, Homo sapien
ggtcaaagcaacctcagatccagtg

SEQ ID NO: 4672289 - DNA, 25 bp, Homo sapien
tctagagcagttgacacttctggcc

SEQ ID NO: 4672290 - DNA, 25 bp, Homo sapien
taaatcctccaatccttttcttgac

SEQ ID NO: 4672291 - DNA, 25 bp, Homo sapien
tctggcagcaacaactaggttcagg

SEQ ID NO: 4672292 - DNA, 25 bp, Homo sapien
gcagccttccagaatgatacgactt

SEQ ID NO: 4672293 - DNA, 25 bp, Homo sapien
tgctttctatgaacctgagctgccc

SEQ ID NO: 4672294 - DNA, 25 bp, Homo sapien
tatgagttagctaacactcacggag

SEQ ID NO: 4672295 - DNA, 25 bp, Homo sapien
gatttgctactttgagactcttgaa

SEQ ID NO: 4672296 - DNA, 25 bp, Homo sapien
tacagtggattgcaagctagaacct

SEQ ID NO: 4672297 - DNA, 25 bp, Homo sapien
gaataatcatccctgctaatgtgag

SEQ ID NO: 4672298 - DNA, 25 bp, Homo sapien
caggagtcacatttggtaaccccaa

SEQ ID NO: 4672299 - DNA, 25 bp, Homo sapien
tcaatcctaggtatagggattttcc

SEQ ID NO: 4672300 - DNA, 25 bp, Homo sapien
ggtctggttccaattactatcaaag

SEQ ID NO: 4672301 - DNA, 25 bp, Homo sapien
tgctttagctcttgaggctcaatcc

SEQ ID NO: 4672302 - DNA, 25 bp, Homo sapien
cacacttctgctaggaacttggaca

SEQ ID NO: 4672303 - DNA, 25 bp, Homo sapien
tccatatttacatgatgactcatca

SEQ ID NO: 4672304 - DNA, 25 bp, Homo sapien
tcttacgtcagactccctcacattt

SEQ ID NO: 4672305 - DNA, 25 bp, Homo sapien
acgtcagactccctcacatttaatt

SEQ ID NO: 4672306 - DNA, 25 bp, Homo sapien
gactcatcacaaactcttacgtcag

SEQ ID NO: 4672307 - DNA, 25 bp, Homo sapien
acaaaaataaattctcagaactagg

SEQ ID NO: 4672308 - DNA, 25 bp, Homo sapien
aaaataaattctcagaactaggcat

SEQ ID NO: 4672309 - DNA, 25 bp, Homo sapien
gcaacaaaaataaattctcagaact

SEQ ID NO: 4672310 - DNA, 25 bp, Homo sapien
aaagcaacaaaaataaattctcaga

SEQ ID NO: 4672311 - DNA, 25 bp, Homo sapien
cattcattttgataagtgtccccat

SEQ ID NO: 4672312 - DNA, 25 bp, Homo sapien
tctttctggtgcttacaagcagccc

SEQ ID NO: 4672313 - DNA, 25 bp, Homo sapien
tgtccccatttgatccacagacagg

SEQ ID NO: 4672314 - DNA, 25 bp, Homo sapien
ctgagaaagcattcattttgataag

SEQ ID NO: 4672315 - DNA, 25 bp, Homo sapien
tgcttccggaaggtaacctacgtca

SEQ ID NO: 4672316 - DNA, 25 bp, Homo sapien
gccttcctacaagagaggtctcgtc

SEQ ID NO: 4672317 - DNA, 25 bp, Homo sapien
cataataatttctccaagcacgtga

SEQ ID NO: 4672318 - DNA, 25 bp, Homo sapien
taatttgagactggaaagaacctcc

SEQ ID NO: 4672319 - DNA, 25 bp, Homo sapien
tccttctccagatccagatccatta

SEQ ID NO: 4672320 - DNA, 25 bp, Homo sapien
ccttctccagatccagatccattat

SEQ ID NO: 4672321 - DNA, 25 bp, Homo sapien
ctccttctccagatccagatccatt

SEQ ID NO: 4672322 - DNA, 25 bp, Homo sapien
tatggagtgaggtttcaggcagttt

SEQ ID NO: 4672323 - DNA, 25 bp, Homo sapien
ttctccaggagaccttcaaagtccc

SEQ ID NO: 4672324 - DNA, 25 bp, Homo sapien
tgaattgtactgaagtgggtgttct

SEQ ID NO: 4672325 - DNA, 25 bp, Homo sapien
gaaaggatcataactgtagtttcca

SEQ ID NO: 4672326 - DNA, 25 bp, Homo sapien
gcagggtccacacttggagtgtttt

SEQ ID NO: 4672327 - DNA, 25 bp, Homo sapien
gagtgttttctgtgaacttctgccc

SEQ ID NO: 4672328 - DNA, 25 bp, Homo sapien
tatatttgcagggtccacacttgga

SEQ ID NO: 4672329 - DNA, 25 bp, Homo sapien
tttctgtgaacttctgcccctgacc

SEQ ID NO: 4672330 - DNA, 25 bp, Homo sapien
gcaatgcgggctctttttcggttcc

SEQ ID NO: 4672331 - DNA, 25 bp, Homo sapien
attttgggctgagacagtcgggttt

SEQ ID NO: 4672332 - DNA, 25 bp, Homo sapien
caatgcgggctctttttcggttcca

SEQ ID NO: 4672333 - DNA, 25 bp, Homo sapien
tgagacagtcgggttttctagatat

SEQ ID NO: 4672334 - DNA, 25 bp, Homo sapien
taggaactcccatcagaagcacaca

SEQ ID NO: 4672335 - DNA, 25 bp, Homo sapien
caaaacagggattgttataggaact

SEQ ID NO: 4672336 - DNA, 25 bp, Homo sapien
taaaactgtatccactgcaatctat

SEQ ID NO: 4672337 - DNA, 25 bp, Homo sapien
aagatgcttctcgaacaaaacaggg

SEQ ID NO: 4672338 - DNA, 25 bp, Homo sapien
catctggtcgatattgtagtccatc

SEQ ID NO: 4672339 - DNA, 25 bp, Homo sapien
tctttcccaacaaactagtgtcatc

SEQ ID NO: 4672340 - DNA, 25 bp, Homo sapien
ctttcacatctggtcgatattgtag

SEQ ID NO: 4672341 - DNA, 25 bp, Homo sapien
cgatattgtagtccatcatctttct

SEQ ID NO: 4672342 - DNA, 25 bp, Homo sapien
tggtttccaatataaacatcttctc

SEQ ID NO: 4672343 - DNA, 25 bp, Homo sapien
gtggtttccaatataaacatcttct

SEQ ID NO: 4672344 - DNA, 25 bp, Homo sapien
atataaacatcttctctttgatcac

SEQ ID NO: 4672345 - DNA, 25 bp, Homo sapien
aaacatcttctctttgatcactagc

SEQ ID NO: 4672346 - DNA, 25 bp, Homo sapien
gatgcagtaaccattgaggttttca

SEQ ID NO: 4672347 - DNA, 25 bp, Homo sapien
gccttctgagtagaatagatgaatt

SEQ ID NO: 4672348 - DNA, 25 bp, Homo sapien
tctgagtagaatagatgaattcaca

SEQ ID NO: 4672349 - DNA, 25 bp, Homo sapien
ccatggatgcagtaaccattgaggt

SEQ ID NO: 4672350 - DNA, 25 bp, Homo sapien
gagcttttgcctacttggcactaca

SEQ ID NO: 4672351 - DNA, 25 bp, Homo sapien
tggcactacatagagaatactaaag

SEQ ID NO: 4672352 - DNA, 25 bp, Homo sapien
tgcaataagaacatgagtgagcttt

SEQ ID NO: 4672353 - DNA, 25 bp, Homo sapien
ggcaatctgtacagctccaataatt

SEQ ID NO: 4672354 - DNA, 25 bp, Homo sapien
gactgggaattagtccctgcccgta

SEQ ID NO: 4672355 - DNA, 25 bp, Homo sapien
gactgtatacagttctcagatccct

SEQ ID NO: 4672356 - DNA, 25 bp, Homo sapien
cagttctcagatccctaaattcctt

SEQ ID NO: 4672357 - DNA, 25 bp, Homo sapien
tgcttgtcgcccagatatacctgta

SEQ ID NO: 4672358 - DNA, 25 bp, Homo sapien
acaaatctcactgggttggaactgc

SEQ ID NO: 4672359 - DNA, 25 bp, Homo sapien
taccacgtttctcaacagcagtaca

SEQ ID NO: 4672360 - DNA, 25 bp, Homo sapien
gggacattctttaactctgctctca

SEQ ID NO: 4672361 - DNA, 25 bp, Homo sapien
cacagaagcccataaggaactgcca

SEQ ID NO: 4672362 - DNA, 25 bp, Homo sapien
ttgcttctgtcgacgtcctctattg

SEQ ID NO: 4672363 - DNA, 25 bp, Homo sapien
gcttctgtcgacgtcctctattgtt

SEQ ID NO: 4672364 - DNA, 25 bp, Homo sapien
gttttgcttctgtcgacgtcctcta

SEQ ID NO: 4672365 - DNA, 25 bp, Homo sapien
aggttttgcttctgtcgacgtcctc

SEQ ID NO: 4672366 - DNA, 25 bp, Homo sapien
ttctggatgacgtatctgaagtaaa

SEQ ID NO: 4672367 - DNA, 25 bp, Homo sapien
attctggatgacgtatctgaagtaa

SEQ ID NO: 4672368 - DNA, 25 bp, Homo sapien
tctggatgacgtatctgaagtaaaa

SEQ ID NO: 4672369 - DNA, 25 bp, Homo sapien
tccatgggtaaagaacaagtcttag

SEQ ID NO: 4672370 - DNA, 25 bp, Homo sapien
gctttacagttcatgcgataggcag

SEQ ID NO: 4672371 - DNA, 25 bp, Homo sapien
gaatacattctactcacacttcaga

SEQ ID NO: 4672372 - DNA, 25 bp, Homo sapien
tattctaaatacgagccaacagtac

SEQ ID NO: 4672373 - DNA, 25 bp, Homo sapien
cacccctagagaacggtcaagtatt

SEQ ID NO: 4672374 - DNA, 25 bp, Homo sapien
tatgtgactgttctgcaatctgaac

SEQ ID NO: 4672375 - DNA, 25 bp, Homo sapien
tcagcgtaagatgtcctaaccacaa

SEQ ID NO: 4672376 - DNA, 25 bp, Homo sapien
caggcaacagggttgtttaaagagt

SEQ ID NO: 4672377 - DNA, 25 bp, Homo sapien
catttgaagcagacccattatgttc

SEQ ID NO: 4672378 - DNA, 25 bp, Homo sapien
agcatttgaagcagacccattatgt

SEQ ID NO: 4672379 - DNA, 25 bp, Homo sapien
cagcatttgaagcagacccattatg

SEQ ID NO: 4672380 - DNA, 25 bp, Homo sapien
gcatttgaagcagacccattatgtt

SEQ ID NO: 4672381 - DNA, 25 bp, Homo sapien
tgcctgcacactgtccacgatggag

SEQ ID NO: 4672382 - DNA, 25 bp, Homo sapien
tgaaagcttcaacaggtcaatctgg

SEQ ID NO: 4672383 - DNA, 25 bp, Homo sapien
cacagtcacaatggtaagagcagcg

SEQ ID NO: 4672384 - DNA, 25 bp, Homo sapien
ccctgtattgctatgcgactgtgaa

SEQ ID NO: 4672385 - DNA, 25 bp, Homo sapien
cttcatccgaagacagatctactgg

SEQ ID NO: 4672386 - DNA, 25 bp, Homo sapien
gcctgacttcctaagcctggcagat

SEQ ID NO: 4672387 - DNA, 25 bp, Homo sapien
gatattatcaatgtgctccttgcct

SEQ ID NO: 4672388 - DNA, 25 bp, Homo sapien
gggatgtcggacaccgaaacttctc

SEQ ID NO: 4672389 - DNA, 25 bp, Homo sapien
ctgactgccttagcctctctctcct

SEQ ID NO: 4672390 - DNA, 25 bp, Homo sapien
tcagcctctcccctgactgtctcag

SEQ ID NO: 4672391 - DNA, 25 bp, Homo sapien
tctcctgactgccttagcctctctc

SEQ ID NO: 4672392 - DNA, 25 bp, Homo sapien
gcctctcccctgactgtctcagcct

SEQ ID NO: 4672393 - DNA, 25 bp, Homo sapien
ttcagccactgttcggtccttacct

SEQ ID NO: 4672394 - DNA, 25 bp, Homo sapien
tcagccactgttcggtccttacctt

SEQ ID NO: 4672395 - DNA, 25 bp, Homo sapien
gaggctgcgcatcttaaaagcttcc

SEQ ID NO: 4672396 - DNA, 25 bp, Homo sapien
tttcctgaggctgcgcatcttaaaa

SEQ ID NO: 4672397 - DNA, 25 bp, Homo sapien
ctcgtgttctggttcactgagctca

SEQ ID NO: 4672398 - DNA, 25 bp, Homo sapien
cttcatggggaggatacaccggcct

SEQ ID NO: 4672399 - DNA, 25 bp, Homo sapien
agagactcgctcctggcaatgatgt

SEQ ID NO: 4672400 - DNA, 25 bp, Homo sapien
ctactttcacctgagatttaaaagt

SEQ ID NO: 4672401 - DNA, 25 bp, Homo sapien
tgttttggacagctggaccctgaag

SEQ ID NO: 4672402 - DNA, 25 bp, Homo sapien
agttctcctgcaaatgacggccgca

SEQ ID NO: 4672403 - DNA, 25 bp, Homo sapien
gcatcagggccgactttagaaacat

SEQ ID NO: 4672404 - DNA, 25 bp, Homo sapien
tggacgatataacccacacatgagt

SEQ ID NO: 4672405 - DNA, 25 bp, Homo sapien
cccaaacatctgagtaactgagtca

SEQ ID NO: 4672406 - DNA, 25 bp, Homo sapien
gatgctgaatcagactcccaaaccc

SEQ ID NO: 4672407 - DNA, 25 bp, Homo sapien
ggatagctgatcgttgtcccaactc

SEQ ID NO: 4672408 - DNA, 25 bp, Homo sapien
gaaaatatgtgattaggcacccaag

SEQ ID NO: 4672409 - DNA, 25 bp, Homo sapien
aatcaggctatcacccactcagagg

SEQ ID NO: 4672410 - DNA, 25 bp, Homo sapien
cataatggtcattccgccgatttgg

SEQ ID NO: 4672411 - DNA, 25 bp, Homo sapien
ggaaagacctggatcatcgcgtgcc

SEQ ID NO: 4672412 - DNA, 25 bp, Homo sapien
tattcactacagaccagggactacc

SEQ ID NO: 4672413 - DNA, 25 bp, Homo sapien
tatctaatatgacagacatggaggg

SEQ ID NO: 4672414 - DNA, 25 bp, Homo sapien
caggttgtaataaaggtgttctcca

SEQ ID NO: 4672415 - DNA, 25 bp, Homo sapien
caagtacccgcaatgagatcaaggc

SEQ ID NO: 4672416 - DNA, 25 bp, Homo sapien
gggcctaagccacattcgccagctg

SEQ ID NO: 4672417 - DNA, 25 bp, Homo sapien
tgacagcatatgaatgtttccctct

SEQ ID NO: 4672418 - DNA, 25 bp, Homo sapien
gcagctgacagcatatgaatgtttc

SEQ ID NO: 4672419 - DNA, 25 bp, Homo sapien
tttcttggcagctgacagcatatga

SEQ ID NO: 4672420 - DNA, 25 bp, Homo sapien
catatgaatgtttccctctgaaatc

SEQ ID NO: 4672421 - DNA, 25 bp, Homo sapien
taatccaccatatgcacatgacttg

SEQ ID NO: 4672422 - DNA, 25 bp, Homo sapien
taccctccaataaaggtgtgtctga

SEQ ID NO: 4672423 - DNA, 25 bp, Homo sapien
tggtctcatcaagccacaggagtaa

SEQ ID NO: 4672424 - DNA, 25 bp, Homo sapien
ggatgctttagcagattatcgctgg

SEQ ID NO: 4672425 - DNA, 25 bp, Homo sapien
tctggcagctgaacccagttctaat

SEQ ID NO: 4672426 - DNA, 25 bp, Homo sapien
tttacctgaataagagccaaagaaa

SEQ ID NO: 4672427 - DNA, 25 bp, Homo sapien
tggataggttccaaactgcctgtgc

SEQ ID NO: 4672428 - DNA, 25 bp, Homo sapien
attttgatgctctaatctctggcag

SEQ ID NO: 4672429 - DNA, 25 bp, Homo sapien
ggacttggctaaaaccttgaattca

SEQ ID NO: 4672430 - DNA, 25 bp, Homo sapien
gaatcagtagtgaaacagaccatcc

SEQ ID NO: 4672431 - DNA, 25 bp, Homo sapien
tggatttgcaaagcaggacttggct

SEQ ID NO: 4672432 - DNA, 25 bp, Homo sapien
gcataatgctgcagtaccaaactaa

SEQ ID NO: 4672433 - DNA, 25 bp, Homo sapien
cgaaaagtatggctaagagaccaag

SEQ ID NO: 4672434 - DNA, 25 bp, Homo sapien
gcagcaccagctgtgtggagtccat

SEQ ID NO: 4672435 - DNA, 25 bp, Homo sapien
catacacgggtcgtaagacaagaga

SEQ ID NO: 4672436 - DNA, 25 bp, Homo sapien
agaagagctgcctcgaaaagtatgg

SEQ ID NO: 4672437 - DNA, 25 bp, Homo sapien
tcagccttctaggaactctccagga

SEQ ID NO: 4672438 - DNA, 25 bp, Homo sapien
tcagcttttgcttgaccgtccagca

SEQ ID NO: 4672439 - DNA, 25 bp, Homo sapien
gcttctgtggcaccatgtactcctg

SEQ ID NO: 4672440 - DNA, 25 bp, Homo sapien
tcagcagcagatcactccctggttc

SEQ ID NO: 4672441 - DNA, 25 bp, Homo sapien
actgaagaccatccatgcatgtaaa

SEQ ID NO: 4672442 - DNA, 25 bp, Homo sapien
gcgcagctggtaaccactttgtgag

SEQ ID NO: 4672443 - DNA, 25 bp, Homo sapien
catccatgcatgtaaacttggcgca

SEQ ID NO: 4672444 - DNA, 25 bp, Homo sapien
tatgtcctttttacaatcccaggca

SEQ ID NO: 4672445 - DNA, 25 bp, Homo sapien
caacctacagttgaagtgtaggttt

SEQ ID NO: 4672446 - DNA, 25 bp, Homo sapien
cctacagttgaagtgtaggtttcca

SEQ ID NO: 4672447 - DNA, 25 bp, Homo sapien
ctacagttgaagtgtaggtttccat

SEQ ID NO: 4672448 - DNA, 25 bp, Homo sapien
tcatcaatgtcaccacagagtcaaa

SEQ ID NO: 4672449 - DNA, 25 bp, Homo sapien
catttgaccattgcctggaaccaca

SEQ ID NO: 4672450 - DNA, 25 bp, Homo sapien
tgtgacaggtatatccaggatttca

SEQ ID NO: 4672451 - DNA, 25 bp, Homo sapien
tagccctaacaactgaccacatttg

SEQ ID NO: 4672452 - DNA, 25 bp, Homo sapien
tgcataacgtctagtctcactgctc

SEQ ID NO: 4672453 - DNA, 25 bp, Homo sapien
cttccttgcataacgtctagtctca

SEQ ID NO: 4672454 - DNA, 25 bp, Homo sapien
tccttgcataacgtctagtctcact

SEQ ID NO: 4672455 - DNA, 25 bp, Homo sapien
ccttgcataacgtctagtctcactg

SEQ ID NO: 4672456 - DNA, 25 bp, Homo sapien
caccactgagggtttcgcccatgga

SEQ ID NO: 4672457 - DNA, 25 bp, Homo sapien
gggagagtcccacgtacctcctgtg

SEQ ID NO: 4672458 - DNA, 25 bp, Homo sapien
gcaggaatgaagaccccttgccaca

SEQ ID NO: 4672459 - DNA, 25 bp, Homo sapien
tgaggcttggcataacagcaccttc

SEQ ID NO: 4672460 - DNA, 25 bp, Homo sapien
gcagcgctctgtaattgggtctaat

SEQ ID NO: 4672461 - DNA, 25 bp, Homo sapien
taatgggatcactgcggctgcgagc

SEQ ID NO: 4672462 - DNA, 25 bp, Homo sapien
gaaagcaacctatttcgggaatgat

SEQ ID NO: 4672463 - DNA, 25 bp, Homo sapien
gctttaatgacttcagtgagtggca

SEQ ID NO: 4672464 - DNA, 25 bp, Homo sapien
cattgaggtgctactagatgaggca

SEQ ID NO: 4672465 - DNA, 25 bp, Homo sapien
ggataccatgtgaactccctcttga

SEQ ID NO: 4672466 - DNA, 25 bp, Homo sapien
gccagctgcgtggtgccatttacca

SEQ ID NO: 4672467 - DNA, 25 bp, Homo sapien
aatgccagaagctagcggagaggcc

SEQ ID NO: 4672468 - DNA, 25 bp, Homo sapien
ggttcctttaaggtcatgatccagc

SEQ ID NO: 4672469 - DNA, 25 bp, Homo sapien
gccctgtagctgcatgattccctta

SEQ ID NO: 4672470 - DNA, 25 bp, Homo sapien
catgcccgtggccatgatgaggtac

SEQ ID NO: 4672471 - DNA, 25 bp, Homo sapien
tggagcctcatggttccctcatggc

SEQ ID NO: 4672472 - DNA, 25 bp, Homo sapien
tagagctgcatggtttccacatccc

SEQ ID NO: 4672473 - DNA, 25 bp, Homo sapien
tggttcctgatgtacgtggtgctgc

SEQ ID NO: 4672474 - DNA, 25 bp, Homo sapien
cagcccatggtgctgcatagtttcc

SEQ ID NO: 4672475 - DNA, 25 bp, Homo sapien
tagtttcctcataaccatggtgccc

SEQ ID NO: 4672476 - DNA, 25 bp, Homo sapien
tgacaagtggggcgatatcatcatc

SEQ ID NO: 4672477 - DNA, 25 bp, Homo sapien
gtcaatgacaagtggggcgatatca

SEQ ID NO: 4672478 - DNA, 25 bp, Homo sapien
cggcgggtgtggactgggcggcaga

SEQ ID NO: 4672479 - DNA, 25 bp, Homo sapien
gcggcgggtgtggactgggcggcag

SEQ ID NO: 4672480 - DNA, 25 bp, Homo sapien
ggggcctcagtcagctgcacgggtg

SEQ ID NO: 4672481 - DNA, 25 bp, Homo sapien
atgggggcctcagtcagctgcacgg

SEQ ID NO: 4672482 - DNA, 25 bp, Homo sapien
catgggggcctcagtcagctgcacg

SEQ ID NO: 4672483 - DNA, 25 bp, Homo sapien
cttgtggttcatgggggcctcagtc

SEQ ID NO: 4672484 - DNA, 25 bp, Homo sapien
ggccacgtatatggctggggtgttg

SEQ ID NO: 4672485 - DNA, 25 bp, Homo sapien
atggccacgtatatggctggggtgt

SEQ ID NO: 4672486 - DNA, 25 bp, Homo sapien
agggaccacaaggcctggatggcca

SEQ ID NO: 4672487 - DNA, 25 bp, Homo sapien
tctgggtcatcttcttgcagttggc

SEQ ID NO: 4672488 - DNA, 25 bp, Homo sapien
cccatccacggagtccatcatgatg

SEQ ID NO: 4672489 - DNA, 25 bp, Homo sapien
ccccatccacggagtccatcatgat

SEQ ID NO: 4672490 - DNA, 25 bp, Homo sapien
atgggggagggcatgccccttgtac

SEQ ID NO: 4672491 - DNA, 25 bp, Homo sapien
agccggccaggtccagatacaggat

SEQ ID NO: 4672492 - DNA, 25 bp, Homo sapien
tctgccctggtagtgaagctgtagc

SEQ ID NO: 4672493 - DNA, 25 bp, Homo sapien
gggcatgccccttgtacatgggcac

SEQ ID NO: 4672494 - DNA, 25 bp, Homo sapien
cagggcgacgtagcacagcttttcc

SEQ ID NO: 4672495 - DNA, 25 bp, Homo sapien
ggcgacgtagcacagcttttccttg

SEQ ID NO: 4672496 - DNA, 25 bp, Homo sapien
tccagggcgacgtagcacagctttt

SEQ ID NO: 4672497 - DNA, 25 bp, Homo sapien
acagcttttccttgatgtcatgcac

SEQ ID NO: 4672498 - DNA, 25 bp, Homo sapien
tcctgtcagggttgccagggttcat

SEQ ID NO: 4672499 - DNA, 25 bp, Homo sapien
cgaaggcagtttcgtgaatgccaca

SEQ ID NO: 4672500 - DNA, 25 bp, Homo sapien
tagtaccgtcagacagcactgggtt

SEQ ID NO: 4672501 - DNA, 25 bp, Homo sapien
tccatatctgatctgctggaaagtg

SEQ ID NO: 4672502 - DNA, 25 bp, Homo sapien
ggaggatgcttgctcaaacagactg

SEQ ID NO: 4672503 - DNA, 25 bp, Homo sapien
tacacatatacttgatgaatgcaca

SEQ ID NO: 4672504 - DNA, 25 bp, Homo sapien
tccaaaccacattcgttgatgatgt

SEQ ID NO: 4672505 - DNA, 25 bp, Homo sapien
tgtcattgcagctgcacagtcaaaa

SEQ ID NO: 4672506 - DNA, 25 bp, Homo sapien
tatgtttgatggcaattaggctaaa

SEQ ID NO: 4672507 - DNA, 25 bp, Homo sapien
gacacaaaagactttccatgaagga

SEQ ID NO: 4672508 - DNA, 25 bp, Homo sapien
gcacatgtacttatctctggcttag

SEQ ID NO: 4672509 - DNA, 25 bp, Homo sapien
gttcctagacacaaaagactttcca

SEQ ID NO: 4672510 - DNA, 25 bp, Homo sapien
catcatgtgtatgagttgttcctag

SEQ ID NO: 4672511 - DNA, 25 bp, Homo sapien
ggccttgactacaagaagcaccaat

SEQ ID NO: 4672512 - DNA, 25 bp, Homo sapien
tggccagaaaggtccccaataccat

SEQ ID NO: 4672513 - DNA, 25 bp, Homo sapien
gcaccaattgaagaaagcaggagcc

SEQ ID NO: 4672514 - DNA, 25 bp, Homo sapien
gagggatgctaggatttgcctctct

SEQ ID NO: 4672515 - DNA, 25 bp, Homo sapien
gtcccatgaagagaacgtgaggcat

SEQ ID NO: 4672516 - DNA, 25 bp, Homo sapien
ctgtggatgatggtcccatgaagag

SEQ ID NO: 4672517 - DNA, 25 bp, Homo sapien
ggatgatggtcccatgaagagaacg

SEQ ID NO: 4672518 - DNA, 25 bp, Homo sapien
tgatggtcccatgaagagaacgtga

SEQ ID NO: 4672519 - DNA, 25 bp, Homo sapien
ctgcaggcggctgtcccattttctg

SEQ ID NO: 4672520 - DNA, 25 bp, Homo sapien
agggcaactgcaggcggctgtccca

SEQ ID NO: 4672521 - DNA, 25 bp, Homo sapien
cagcagagtaaacccagcatgtagg

SEQ ID NO: 4672522 - DNA, 25 bp, Homo sapien
gctgtcaccaagcaatgtgaggcca

SEQ ID NO: 4672523 - DNA, 25 bp, Homo sapien
ccttacagggtagtatcctcattac

SEQ ID NO: 4672524 - DNA, 25 bp, Homo sapien
gagacagtcacgtgagtatctagaa

SEQ ID NO: 4672525 - DNA, 25 bp, Homo sapien
tttgaacaaagtcgagagaagggag

SEQ ID NO: 4672526 - DNA, 25 bp, Homo sapien
caccatcaacgaggttgagaggagg

SEQ ID NO: 4672527 - DNA, 25 bp, Homo sapien
tatgattgacttccaggagtgcacc

SEQ ID NO: 4672528 - DNA, 25 bp, Homo sapien
gatgcccccacagatcagagtagca

SEQ ID NO: 4672529 - DNA, 25 bp, Homo sapien
agtgcggcaagtacagagtgaccac

SEQ ID NO: 4672530 - DNA, 25 bp, Homo sapien
gcaggctcaggatcaaagcaaatga

SEQ ID NO: 4672531 - DNA, 25 bp, Homo sapien
ctagactccctgctgtgcatagcct

SEQ ID NO: 4672532 - DNA, 25 bp, Homo sapien
tctgtactttttatggaaaattgga

SEQ ID NO: 4672533 - DNA, 25 bp, Homo sapien
catagccttcttgataactccatct

SEQ ID NO: 4672534 - DNA, 25 bp, Homo sapien
tccctgctgtgcatagccttcttga

SEQ ID NO: 4672535 - DNA, 25 bp, Homo sapien
tattctctgcggcttaggttttgct

SEQ ID NO: 4672536 - DNA, 25 bp, Homo sapien
tctgtcactacattggatgtaatca

SEQ ID NO: 4672537 - DNA, 25 bp, Homo sapien
atatcttcccctgagtttctgtcac

SEQ ID NO: 4672538 - DNA, 25 bp, Homo sapien
gggatctattctctgcggcttaggt

SEQ ID NO: 4672539 - DNA, 25 bp, Homo sapien
actggagaaagagaactgccattgg

SEQ ID NO: 4672540 - DNA, 25 bp, Homo sapien
gttgatgggctggggcactgtcaca

SEQ ID NO: 4672541 - DNA, 25 bp, Homo sapien
ggagaaagagaactgccattggagg

SEQ ID NO: 4672542 - DNA, 25 bp, Homo sapien
agagaactgccattggagggttgat

SEQ ID NO: 4672543 - DNA, 25 bp, Homo sapien
cctgggagttagcaagatcaacctc

SEQ ID NO: 4672544 - DNA, 25 bp, Homo sapien
cctggaccaatccatccaccttctt

SEQ ID NO: 4672545 - DNA, 25 bp, Homo sapien
cttctacctgggagttagcaagatc

SEQ ID NO: 4672546 - DNA, 25 bp, Homo sapien
tacctgggagttagcaagatcaacc

SEQ ID NO: 4672547 - DNA, 25 bp, Homo sapien
aggatccaagattaacagaaggttt

SEQ ID NO: 4672548 - DNA, 25 bp, Homo sapien
tcaggatccaagattaacagaaggt

SEQ ID NO: 4672549 - DNA, 25 bp, Homo sapien
caggatccaagattaacagaaggtt

SEQ ID NO: 4672550 - DNA, 25 bp, Homo sapien
caggtccatagagaatataaaaggc

SEQ ID NO: 4672551 - DNA, 25 bp, Homo sapien
catactctggaaaacgcaaggaaac

SEQ ID NO: 4672552 - DNA, 25 bp, Homo sapien
ggaaactatgaggataaagtcactt

SEQ ID NO: 4672553 - DNA, 25 bp, Homo sapien
tttgtgtaaaggaatcatactctgg

SEQ ID NO: 4672554 - DNA, 25 bp, Homo sapien
tcaatgaagtagtcattgatcatga

SEQ ID NO: 4672555 - DNA, 25 bp, Homo sapien
gacctggtgtctaatacagccaaac

SEQ ID NO: 4672556 - DNA, 25 bp, Homo sapien
catgacaaaatctactttgccagag

SEQ ID NO: 4672557 - DNA, 25 bp, Homo sapien
agccctagagacctggtgtctaata

SEQ ID NO: 4672558 - DNA, 25 bp, Homo sapien
gactgttttgattctcccctctaag

SEQ ID NO: 4672559 - DNA, 25 bp, Homo sapien
tgactgttttgattctcccctctaa

SEQ ID NO: 4672560 - DNA, 25 bp, Homo sapien
ctgttttgattctcccctctaagtg

SEQ ID NO: 4672561 - DNA, 25 bp, Homo sapien
gatgactgttttgattctcccctct

SEQ ID NO: 4672562 - DNA, 25 bp, Homo sapien
catccatagtcttctgggtgtggca

SEQ ID NO: 4672563 - DNA, 25 bp, Homo sapien
ccagtttcccagagggtccatccat

SEQ ID NO: 4672564 - DNA, 25 bp, Homo sapien
gtccatccatagtcttctgggtgtg

SEQ ID NO: 4672565 - DNA, 25 bp, Homo sapien
ccatagtcttctgggtgtggcagtg

SEQ ID NO: 4672566 - DNA, 25 bp, Homo sapien
agggatgatgttctggagaccccca

SEQ ID NO: 4672567 - DNA, 25 bp, Homo sapien
ggatgatgttctggagacccccaag

SEQ ID NO: 4672568 - DNA, 25 bp, Homo sapien
atgatgttctggagacccccaaggc

SEQ ID NO: 4672569 - DNA, 25 bp, Homo sapien
tgatgttctggagacccccaaggcc

SEQ ID NO: 4672570 - DNA, 25 bp, Homo sapien
cagacagcaagtcagatccatgact

SEQ ID NO: 4672571 - DNA, 25 bp, Homo sapien
tttctccagacagcaagtcagatcc

SEQ ID NO: 4672572 - DNA, 25 bp, Homo sapien
acacattggtgatagggacatggaa

SEQ ID NO: 4672573 - DNA, 25 bp, Homo sapien
tgactgacacattggtgatagggac

SEQ ID NO: 4672574 - DNA, 25 bp, Homo sapien
taagtgtagcccaggatgctcttga

SEQ ID NO: 4672575 - DNA, 25 bp, Homo sapien
gatgctcttgagggggccctctgat

SEQ ID NO: 4672576 - DNA, 25 bp, Homo sapien
gctcttgagggggccctctgatgcc

SEQ ID NO: 4672577 - DNA, 25 bp, Homo sapien
caggatgctcttgagggggccctct

SEQ ID NO: 4672578 - DNA, 25 bp, Homo sapien
atagtggttttcaaaggcgatgctg

SEQ ID NO: 4672579 - DNA, 25 bp, Homo sapien
gtggttttcaaaggcgatgctggcc

SEQ ID NO: 4672580 - DNA, 25 bp, Homo sapien
ttttcaaaggcgatgctggccccag

SEQ ID NO: 4672581 - DNA, 25 bp, Homo sapien
aaatgagcttggtatagtggttttc

SEQ ID NO: 4672582 - DNA, 25 bp, Homo sapien
cgagtgatagacctcacaaatatca

SEQ ID NO: 4672583 - DNA, 25 bp, Homo sapien
agtgatagacctcacaaatatcatc

SEQ ID NO: 4672584 - DNA, 25 bp, Homo sapien
gtgatagacctcacaaatatcatct

SEQ ID NO: 4672585 - DNA, 25 bp, Homo sapien
gagtgatagacctcacaaatatcat

SEQ ID NO: 4672586 - DNA, 25 bp, Homo sapien
cagactagatctcaccgacagcatc

SEQ ID NO: 4672587 - DNA, 25 bp, Homo sapien
gatctcaccgacagcatcacacagg

SEQ ID NO: 4672588 - DNA, 25 bp, Homo sapien
gactagatctcaccgacagcatcac

SEQ ID NO: 4672589 - DNA, 25 bp, Homo sapien
tagatctcaccgacagcatcacaca

SEQ ID NO: 4672590 - DNA, 25 bp, Homo sapien
tctgtgcgcactcccaaagaatagc

SEQ ID NO: 4672591 - DNA, 25 bp, Homo sapien
cactgtccatgactggcagggataa

SEQ ID NO: 4672592 - DNA, 25 bp, Homo sapien
ggtgtatacagagcaccagggagca

SEQ ID NO: 4672593 - DNA, 25 bp, Homo sapien
caatattgagggcagtgaaacttcc

SEQ ID NO: 4672594 - DNA, 25 bp, Homo sapien
tctcccggtgtggttttagcgctgg

SEQ ID NO: 4672595 - DNA, 25 bp, Homo sapien
caggtcgccccgaactaaaatgagt

SEQ ID NO: 4672596 - DNA, 25 bp, Homo sapien
ctgcgggcaaccgagatgcgtctcc

SEQ ID NO: 4672597 - DNA, 25 bp, Homo sapien
ttggagaccgcttctgcctcgagtc

SEQ ID NO: 4672598 - DNA, 25 bp, Homo sapien
ggaggtgcgcgggatcacagatgcc

SEQ ID NO: 4672599 - DNA, 25 bp, Homo sapien
tgtgtccgtgtttgtgcgcgcgccc

SEQ ID NO: 4672600 - DNA, 25 bp, Homo sapien
cttgcgtgggagagcaagccggcga

SEQ ID NO: 4672601 - DNA, 25 bp, Homo sapien
agcttgcacagggtccaggtttcag

SEQ ID NO: 4672602 - DNA, 25 bp, Homo sapien
gtgcgccctactgggccgtccggct

SEQ ID NO: 4672603 - DNA, 25 bp, Homo sapien
gctcccgggagcgaggtacattcag

SEQ ID NO: 4672604 - DNA, 25 bp, Homo sapien
attcaggcggcggtccgagacacgc

SEQ ID NO: 4672605 - DNA, 25 bp, Homo sapien
agcggagcgtcctccagtgcgccct

SEQ ID NO: 4672606 - DNA, 25 bp, Homo sapien
gttgcagcccggaatgcagtcagga

SEQ ID NO: 4672607 - DNA, 25 bp, Homo sapien
ctcgacacccacaagcaaggcatgg

SEQ ID NO: 4672608 - DNA, 25 bp, Homo sapien
aacgcgtgcaggctcgcgttgcagc

SEQ ID NO: 4672609 - DNA, 25 bp, Homo sapien
tcaatctgacacctcgcaggaggcg

SEQ ID NO: 4672610 - DNA, 25 bp, Homo sapien
aggataaagccccgtcttcccactg

SEQ ID NO: 4672611 - DNA, 25 bp, Homo sapien
tcccagcgctgccgcgatggtgtgc

SEQ ID NO: 4672612 - DNA, 25 bp, Homo sapien
gagaggataaagccccgtcttccca

SEQ ID NO: 4672613 - DNA, 25 bp, Homo sapien
gcgctgccgcgatggtgtgcgtgaa

SEQ ID NO: 4672614 - DNA, 25 bp, Homo sapien
gagcttccggagtttacttctttca

SEQ ID NO: 4672615 - DNA, 25 bp, Homo sapien
ctggatctgagcttccggagtttac

SEQ ID NO: 4672616 - DNA, 25 bp, Homo sapien
gcagcaggcataagtactggatctg

SEQ ID NO: 4672617 - DNA, 25 bp, Homo sapien
gtactggatctgagcttccggagtt

SEQ ID NO: 4672618 - DNA, 25 bp, Homo sapien
tttagacagttatgagggaaggcct

SEQ ID NO: 4672619 - DNA, 25 bp, Homo sapien
tccagactgagctaacagcaaacgc

SEQ ID NO: 4672620 - DNA, 25 bp, Homo sapien
tgatgaacaactctcaggatcctgg

SEQ ID NO: 4672621 - DNA, 25 bp, Homo sapien
gaaggaggccggtcacaaataaaca

SEQ ID NO: 4672622 - DNA, 25 bp, Homo sapien
gaggacaccactgatactgctcggt

SEQ ID NO: 4672623 - DNA, 25 bp, Homo sapien
caagtgcaaggaggatgaatccaca

SEQ ID NO: 4672624 - DNA, 25 bp, Homo sapien
tcacctgaggtgaagcctggcagtc

SEQ ID NO: 4672625 - DNA, 25 bp, Homo sapien
tcagaaacgtatcactgggatggcc

SEQ ID NO: 4672626 - DNA, 25 bp, Homo sapien
ctttgtgtgaatcagcctgggagca

SEQ ID NO: 4672627 - DNA, 25 bp, Homo sapien
taggctgcctcttttcccgtgcatt

SEQ ID NO: 4672628 - DNA, 25 bp, Homo sapien
cctgggagcacggatacatgtaaat

SEQ ID NO: 4672629 - DNA, 25 bp, Homo sapien
gtttgcccatttaggcacccaataa

SEQ ID NO: 4672630 - DNA, 25 bp, Homo sapien
ccaagctgatatgggaccgctacct

SEQ ID NO: 4672631 - DNA, 25 bp, Homo sapien
aacagcaatatatcccacaacagtt

SEQ ID NO: 4672632 - DNA, 25 bp, Homo sapien
acagcaatatatcccacaacagtta

SEQ ID NO: 4672633 - DNA, 25 bp, Homo sapien
ccttcactgagctgaccaagtgggc

SEQ ID NO: 4672634 - DNA, 25 bp, Homo sapien
atgttggcgtctgagggagagcctt

SEQ ID NO: 4672635 - DNA, 25 bp, Homo sapien
tcacgacgagtcctctacattccag

SEQ ID NO: 4672636 - DNA, 25 bp, Homo sapien
cttccatatccgcatgtagatgttg

SEQ ID NO: 4672637 - DNA, 25 bp, Homo sapien
tcagaacaaggcttacaattgcaaa

SEQ ID NO: 4672638 - DNA, 25 bp, Homo sapien
ttaatgccacgtggaatcagaacaa

SEQ ID NO: 4672639 - DNA, 25 bp, Homo sapien
caatatcgcaatataaagcatctct

SEQ ID NO: 4672640 - DNA, 25 bp, Homo sapien
tgtgtcatcactgagaactcaggca

SEQ ID NO: 4672641 - DNA, 25 bp, Homo sapien
taaagcccacaggtcccagatggaa

SEQ ID NO: 4672642 - DNA, 25 bp, Homo sapien
gtcttatagagttctggagtcctca

SEQ ID NO: 4672643 - DNA, 25 bp, Homo sapien
ggaatatctggtgcacacatgggta

SEQ ID NO: 4672644 - DNA, 25 bp, Homo sapien
tacccccgataaccataagactgtg

SEQ ID NO: 4672645 - DNA, 25 bp, Homo sapien
gaggcaatgagatctgagttcacaa

SEQ ID NO: 4672646 - DNA, 25 bp, Homo sapien
actgcccttaaaggcatgttgaaat

SEQ ID NO: 4672647 - DNA, 25 bp, Homo sapien
gaaagcagactgcaccgagaacgag

SEQ ID NO: 4672648 - DNA, 25 bp, Homo sapien
tcatatcctgacagatcagcaggga

SEQ ID NO: 4672649 - DNA, 25 bp, Homo sapien
gcaaatactaggcaatagctgtctt

SEQ ID NO: 4672650 - DNA, 25 bp, Homo sapien
tcattaaaacctccctcaggtattc

SEQ ID NO: 4672651 - DNA, 25 bp, Homo sapien
tgcaaatactaggcaatagctgtct

SEQ ID NO: 4672652 - DNA, 25 bp, Homo sapien
aaatactaggcaatagctgtcttta

SEQ ID NO: 4672653 - DNA, 25 bp, Homo sapien
ttttatgctctccatcaaacctgag

SEQ ID NO: 4672654 - DNA, 25 bp, Homo sapien
tctttccagtcatacgatttttgca

SEQ ID NO: 4672655 - DNA, 25 bp, Homo sapien
aaatatttatgggatcttgatggct

SEQ ID NO: 4672656 - DNA, 25 bp, Homo sapien
gctgatcttcagtccatgttaaaca

SEQ ID NO: 4672657 - DNA, 25 bp, Homo sapien
taattgcctagtactgcatagtgcc

SEQ ID NO: 4672658 - DNA, 25 bp, Homo sapien
caggagccgcttgtgcacatagcta

SEQ ID NO: 4672659 - DNA, 25 bp, Homo sapien
cagtagactgccctaatgccatgaa

SEQ ID NO: 4672660 - DNA, 25 bp, Homo sapien
tgttcctaatcctcccaatttgcaa

SEQ ID NO: 4672661 - DNA, 25 bp, Homo sapien
cacaccatatagcaagactgcaccg

SEQ ID NO: 4672662 - DNA, 25 bp, Homo sapien
ctcacaccatatagcaagactgcac

SEQ ID NO: 4672663 - DNA, 25 bp, Homo sapien
tagcaagactgcaccgtcaaaaact

SEQ ID NO: 4672664 - DNA, 25 bp, Homo sapien
catatagcaagactgcaccgtcaaa

SEQ ID NO: 4672665 - DNA, 25 bp, Homo sapien
gggatgatggaataacttcgttgag

SEQ ID NO: 4672666 - DNA, 25 bp, Homo sapien
taaaacacgggatgatggaataact

SEQ ID NO: 4672667 - DNA, 25 bp, Homo sapien
aacacgggatgatggaataacttcg

SEQ ID NO: 4672668 - DNA, 25 bp, Homo sapien
acaaatataaaacacgggatgatgg

SEQ ID NO: 4672669 - DNA, 25 bp, Homo sapien
tgtcagggtaagctacagaagaact

SEQ ID NO: 4672670 - DNA, 25 bp, Homo sapien
gaaaatcttcggagactacagcttc

SEQ ID NO: 4672671 - DNA, 25 bp, Homo sapien
catgagagccactttgagattcacc

SEQ ID NO: 4672672 - DNA, 25 bp, Homo sapien
gcttcaggacaataggattttggcc

SEQ ID NO: 4672673 - DNA, 25 bp, Homo sapien
cccagaatggacacaactgagtaat

SEQ ID NO: 4672674 - DNA, 25 bp, Homo sapien
catgccaggcctagtgttaaggagg

SEQ ID NO: 4672675 - DNA, 25 bp, Homo sapien
tgtaaaatacttagctcggtgcctg

SEQ ID NO: 4672676 - DNA, 25 bp, Homo sapien
gaggtgggcctaactagtagaattc

SEQ ID NO: 4672677 - DNA, 25 bp, Homo sapien
gaggccctcaaggtgctgatctata

SEQ ID NO: 4672678 - DNA, 25 bp, Homo sapien
gatcctagtgcatcaaagaggccct

SEQ ID NO: 4672679 - DNA, 25 bp, Homo sapien
gagttgcagggtccaaggttcagcc

SEQ ID NO: 4672680 - DNA, 25 bp, Homo sapien
cattgggccacaggaaatgtattcc

SEQ ID NO: 4672681 - DNA, 25 bp, Homo sapien
ctgctggagttgcctttgtgttgct

SEQ ID NO: 4672682 - DNA, 25 bp, Homo sapien
catggaaaaatcttccgtggagacc

SEQ ID NO: 4672683 - DNA, 25 bp, Homo sapien
attgttgggcgtccctccttccagg

SEQ ID NO: 4672684 - DNA, 25 bp, Homo sapien
ccagttgtcttaaagcttggatcca

SEQ ID NO: 4672685 - DNA, 25 bp, Homo sapien
aacttgaggtctctctggtaaaaca

SEQ ID NO: 4672686 - DNA, 25 bp, Homo sapien
tagttccgctatatctttcgttaaa

SEQ ID NO: 4672687 - DNA, 25 bp, Homo sapien
tgctacacaccaatcatgtgccaag

SEQ ID NO: 4672688 - DNA, 25 bp, Homo sapien
ggatctctatggtctaaaattttat

SEQ ID NO: 4672689 - DNA, 25 bp, Homo sapien
cttttagctacatccattgctacct

SEQ ID NO: 4672690 - DNA, 25 bp, Homo sapien
tccattgctacctttccttttattc

SEQ ID NO: 4672691 - DNA, 25 bp, Homo sapien
ttagctacatccattgctacctttc

SEQ ID NO: 4672692 - DNA, 25 bp, Homo sapien
gctacatccattgctacctttcctt

SEQ ID NO: 4672693 - DNA, 25 bp, Homo sapien
gcagcggctctcctgatattggtat

SEQ ID NO: 4672694 - DNA, 25 bp, Homo sapien
gcttgtctgccttgtaacatctgtt

SEQ ID NO: 4672695 - DNA, 25 bp, Homo sapien
cctgatattggtattggcgagtgtg

SEQ ID NO: 4672696 - DNA, 25 bp, Homo sapien
agtgtgtgcttgcttgtctgccttg

SEQ ID NO: 4672697 - DNA, 25 bp, Homo sapien
cattagcagggcttcggagcagccc

SEQ ID NO: 4672698 - DNA, 25 bp, Homo sapien
gcagggcttcggagcagcccttgcc

SEQ ID NO: 4672699 - DNA, 25 bp, Homo sapien
agagacattagcagggcttcggagc

SEQ ID NO: 4672700 - DNA, 25 bp, Homo sapien
agcccttgcccctcagagcacactc

SEQ ID NO: 4672701 - DNA, 25 bp, Homo sapien
cctgggtaaggcttcattaagtctc

SEQ ID NO: 4672702 - DNA, 25 bp, Homo sapien
aagtagtaggcaagcagcactgtcc

SEQ ID NO: 4672703 - DNA, 25 bp, Homo sapien
ggtggcagccagcacacaatagagc

SEQ ID NO: 4672704 - DNA, 25 bp, Homo sapien
tctccgtcctgacagaagaatcctt

SEQ ID NO: 4672705 - DNA, 25 bp, Homo sapien
taccctgaactggttgattagccct

SEQ ID NO: 4672706 - DNA, 25 bp, Homo sapien
tgcccttaggtagattagaagcccc

SEQ ID NO: 4672707 - DNA, 25 bp, Homo sapien
tagtatccttatggcacccagcaca

SEQ ID NO: 4672708 - DNA, 25 bp, Homo sapien
tagcagggactacatcttaataact

SEQ ID NO: 4672709 - DNA, 25 bp, Homo sapien
aatacatggatatctcaccaataaa

SEQ ID NO: 4672710 - DNA, 25 bp, Homo sapien
tctccggtcagaattgttttctcct

SEQ ID NO: 4672711 - DNA, 25 bp, Homo sapien
tccggtcagaattgttttctcctga

SEQ ID NO: 4672712 - DNA, 25 bp, Homo sapien
tgaaatacatggatatctcaccaat

SEQ ID NO: 4672713 - DNA, 25 bp, Homo sapien
atcttatgatccttcgaagtaaggg

SEQ ID NO: 4672714 - DNA, 25 bp, Homo sapien
atgatccttcgaagtaaggggttca

SEQ ID NO: 4672715 - DNA, 25 bp, Homo sapien
tatgatccttcgaagtaaggggttc

SEQ ID NO: 4672716 - DNA, 25 bp, Homo sapien
tgatccttcgaagtaaggggttcag

SEQ ID NO: 4672717 - DNA, 25 bp, Homo sapien
gagagcttagttcagcaccatcttg

SEQ ID NO: 4672718 - DNA, 25 bp, Homo sapien
gaatctcagataactgctatgtggg

SEQ ID NO: 4672719 - DNA, 25 bp, Homo sapien
ttttattggcgtcccctgatgctcc

SEQ ID NO: 4672720 - DNA, 25 bp, Homo sapien
tactggatgggaagtctgtcaggaa

SEQ ID NO: 4672721 - DNA, 25 bp, Homo sapien
atcactagcacctcaggaattttca

SEQ ID NO: 4672722 - DNA, 25 bp, Homo sapien
taatcactagcacctcaggaatttt

SEQ ID NO: 4672723 - DNA, 25 bp, Homo sapien
attaatcactagcacctcaggaatt

SEQ ID NO: 4672724 - DNA, 25 bp, Homo sapien
cactagcacctcaggaattttcata

SEQ ID NO: 4672725 - DNA, 25 bp, Homo sapien
tatcatggctcccttaaaaatctgg

SEQ ID NO: 4672726 - DNA, 25 bp, Homo sapien
tgtgtaggaactttgtaagatctct

SEQ ID NO: 4672727 - DNA, 25 bp, Homo sapien
gcatgctgtattctgaccctcactt

SEQ ID NO: 4672728 - DNA, 25 bp, Homo sapien
gattaaggattaccaaaaggcttga

SEQ ID NO: 4672729 - DNA, 25 bp, Homo sapien
tccactccaaccagacaagttattg

SEQ ID NO: 4672730 - DNA, 25 bp, Homo sapien
tttccactccaaccagacaagttat

SEQ ID NO: 4672731 - DNA, 25 bp, Homo sapien
cactccaaccagacaagttattgca

SEQ ID NO: 4672732 - DNA, 25 bp, Homo sapien
cccactgcactatttctttcatttc

SEQ ID NO: 4672733 - DNA, 25 bp, Homo sapien
caattgcaaacttgcataatctgca

SEQ ID NO: 4672734 - DNA, 25 bp, Homo sapien
tgaactagatagtagtggcatcata

SEQ ID NO: 4672735 - DNA, 25 bp, Homo sapien
ctgggaagtgatcaaactctggaca

SEQ ID NO: 4672736 - DNA, 25 bp, Homo sapien
ggtataccctgtaagccaattgcaa

SEQ ID NO: 4672737 - DNA, 25 bp, Homo sapien
tctcatgatgctgaactctaactca

SEQ ID NO: 4672738 - DNA, 25 bp, Homo sapien
cttatttgaatgtcgctggcttatc

SEQ ID NO: 4672739 - DNA, 25 bp, Homo sapien
tgaactctaactcaccttatttgaa

SEQ ID NO: 4672740 - DNA, 25 bp, Homo sapien
tctgctctagcatcccttccttaga

SEQ ID NO: 4672741 - DNA, 25 bp, Homo sapien
ggattttcgtaaactgcgaatgctg

SEQ ID NO: 4672742 - DNA, 25 bp, Homo sapien
ttcgtaaactgcgaatgctgctgtc

SEQ ID NO: 4672743 - DNA, 25 bp, Homo sapien
gcggattttcgtaaactgcgaatgc

SEQ ID NO: 4672744 - DNA, 25 bp, Homo sapien
acagcggattttcgtaaactgcgaa

SEQ ID NO: 4672745 - DNA, 25 bp, Homo sapien
attctagttatatattcgtctacat

SEQ ID NO: 4672746 - DNA, 25 bp, Homo sapien
ttatatattcgtctacatttttttc

SEQ ID NO: 4672747 - DNA, 25 bp, Homo sapien
ctagttatatattcgtctacatttt

SEQ ID NO: 4672748 - DNA, 25 bp, Homo sapien
tatatattcgtctacatttttttca

SEQ ID NO: 4672749 - DNA, 25 bp, Homo sapien
tggacaagaactcaacaggaggtgg

SEQ ID NO: 4672750 - DNA, 25 bp, Homo sapien
taggaagcctgctaactagggactg

SEQ ID NO: 4672751 - DNA, 25 bp, Homo sapien
tagatccacgtgttctggagagcgt

SEQ ID NO: 4672752 - DNA, 25 bp, Homo sapien
caggcatgggcatttcgcattccaa

SEQ ID NO: 4672753 - DNA, 25 bp, Homo sapien
catataaggcggagtaaatgctcag

SEQ ID NO: 4672754 - DNA, 25 bp, Homo sapien
tgcacacagtcaggaagtatggcgt

SEQ ID NO: 4672755 - DNA, 25 bp, Homo sapien
tttggagggaaaggatctccgagcc

SEQ ID NO: 4672756 - DNA, 25 bp, Homo sapien
tataaactggtggtgcgcttggcag

SEQ ID NO: 4672757 - DNA, 25 bp, Homo sapien
tcagagacccggttgaggcctgtca

SEQ ID NO: 4672758 - DNA, 25 bp, Homo sapien
tcacgtccgagcagtggttccgata

SEQ ID NO: 4672759 - DNA, 25 bp, Homo sapien
gtgcagagagttccgaggcacagca

SEQ ID NO: 4672760 - DNA, 25 bp, Homo sapien
accggcttggccagtcgactgctct

SEQ ID NO: 4672761 - DNA, 25 bp, Homo sapien
ggaaggagatccttgcgttccttta

SEQ ID NO: 4672762 - DNA, 25 bp, Homo sapien
taggggtactccacggggatcctca

SEQ ID NO: 4672763 - DNA, 25 bp, Homo sapien
tgggaaagccattaggggtactcca

SEQ ID NO: 4672764 - DNA, 25 bp, Homo sapien
tgcacttaaggtttccagagggctt

SEQ ID NO: 4672765 - DNA, 25 bp, Homo sapien
tcaggtaacttcggtcatggacgca

SEQ ID NO: 4672766 - DNA, 25 bp, Homo sapien
caggtaacttcggtcatggacgcag

SEQ ID NO: 4672767 - DNA, 25 bp, Homo sapien
aggtaacttcggtcatggacgcaga

SEQ ID NO: 4672768 - DNA, 25 bp, Homo sapien
tatgtgcataggtaagcttaggcca

SEQ ID NO: 4672769 - DNA, 25 bp, Homo sapien
cttatacaggattggagagcccaga

SEQ ID NO: 4672770 - DNA, 25 bp, Homo sapien
tgtggactcggttcaaaggcatatc

SEQ ID NO: 4672771 - DNA, 25 bp, Homo sapien
taggtacggacaaaagagctccttc

SEQ ID NO: 4672772 - DNA, 25 bp, Homo sapien
gagatgccccttagctccaagtgga

SEQ ID NO: 4672773 - DNA, 25 bp, Homo sapien
gccatagtggtagggaatcagactc

SEQ ID NO: 4672774 - DNA, 25 bp, Homo sapien
gacttgacagatcagtgtgaggcct

SEQ ID NO: 4672775 - DNA, 25 bp, Homo sapien
tggcaggcaacccacatggaggagt

SEQ ID NO: 4672776 - DNA, 25 bp, Homo sapien
tatatcagaaaaccgcctcatggca

SEQ ID NO: 4672777 - DNA, 25 bp, Homo sapien
tcctaggaggatcacagggcattcc

SEQ ID NO: 4672778 - DNA, 25 bp, Homo sapien
cagatttaggtcatatggcagtcca

SEQ ID NO: 4672779 - DNA, 25 bp, Homo sapien
tgtgatacaccctattgctggccag

SEQ ID NO: 4672780 - DNA, 25 bp, Homo sapien
actgtctcccagtgatgtagacttg

SEQ ID NO: 4672781 - DNA, 25 bp, Homo sapien
ttttggcgctctaccagtttttgac

SEQ ID NO: 4672782 - DNA, 25 bp, Homo sapien
tagacttgatcccttttactgtggt

SEQ ID NO: 4672783 - DNA, 25 bp, Homo sapien
gggacctccagactccataacattg

SEQ ID NO: 4672784 - DNA, 25 bp, Homo sapien
tgtttctgtcatcccagaggaaaac

SEQ ID NO: 4672785 - DNA, 25 bp, Homo sapien
ctgtgtttgtttctgtcatcccaga

SEQ ID NO: 4672786 - DNA, 25 bp, Homo sapien
gtgtttgtttctgtcatcccagagg

SEQ ID NO: 4672787 - DNA, 25 bp, Homo sapien
gtttgtttctgtcatcccagaggaa

SEQ ID NO: 4672788 - DNA, 25 bp, Homo sapien
tgcagggcatctggaaaggctgctt

SEQ ID NO: 4672789 - DNA, 25 bp, Homo sapien
tttctgatacatctgcctgcagggc

SEQ ID NO: 4672790 - DNA, 25 bp, Homo sapien
ctgcagggcatctggaaaggctgct

SEQ ID NO: 4672791 - DNA, 25 bp, Homo sapien
ttctgatacatctgcctgcagggca

SEQ ID NO: 4672792 - DNA, 25 bp, Homo sapien
ttagacactgttccagaggaaactg

SEQ ID NO: 4672793 - DNA, 25 bp, Homo sapien
ccactgacttagaggaggagacaca

SEQ ID NO: 4672794 - DNA, 25 bp, Homo sapien
gagaccactgacttagaggaggaga

SEQ ID NO: 4672795 - DNA, 25 bp, Homo sapien
gaggaaactgtccagagaccactga

SEQ ID NO: 4672796 - DNA, 25 bp, Homo sapien
ccagtgctttgccagtgtcctaaat

SEQ ID NO: 4672797 - DNA, 25 bp, Homo sapien
tggtgaacaccttacgtccagtgct

SEQ ID NO: 4672798 - DNA, 25 bp, Homo sapien
tacctcccttgtatatggtgaacac

SEQ ID NO: 4672799 - DNA, 25 bp, Homo sapien
ggctatatcccttgatggtctatgg

SEQ ID NO: 4672800 - DNA, 25 bp, Homo sapien
cacgaggtctgaccgtattataagg

SEQ ID NO: 4672801 - DNA, 25 bp, Homo sapien
ataagtctcacgaggtctgaccgta

SEQ ID NO: 4672802 - DNA, 25 bp, Homo sapien
tctcacgaggtctgaccgtattata

SEQ ID NO: 4672803 - DNA, 25 bp, Homo sapien
agtctcacgaggtctgaccgtatta

SEQ ID NO: 4672804 - DNA, 25 bp, Homo sapien
cctgcaaagctatagcggcagtgct

SEQ ID NO: 4672805 - DNA, 25 bp, Homo sapien
tgtgacccagacgtaagacatggag

SEQ ID NO: 4672806 - DNA, 25 bp, Homo sapien
tagcggcagtgctgcccaagaccat

SEQ ID NO: 4672807 - DNA, 25 bp, Homo sapien
ggcctggaaaagactcaggacactc

SEQ ID NO: 4672808 - DNA, 25 bp, Homo sapien
gcccttgttgacattacagccatca

SEQ ID NO: 4672809 - DNA, 25 bp, Homo sapien
tattgtcactcacttggtagttttc

SEQ ID NO: 4672810 - DNA, 25 bp, Homo sapien
gatgcattctggacccaactattgt

SEQ ID NO: 4672811 - DNA, 25 bp, Homo sapien
attccaagcaaacacttgtttgacc

SEQ ID NO: 4672812 - DNA, 25 bp, Homo sapien
ggatatttgttgtgcccaaatttca

SEQ ID NO: 4672813 - DNA, 25 bp, Homo sapien
caagtagatgcaagcattatgcttc

SEQ ID NO: 4672814 - DNA, 25 bp, Homo sapien
ctgtcctcatgagagtatgatagtg

SEQ ID NO: 4672815 - DNA, 25 bp, Homo sapien
atgtgagatgcctcctcgctgttca

SEQ ID NO: 4672816 - DNA, 25 bp, Homo sapien
tgtgaccagtcaactctaagaagac

SEQ ID NO: 4672817 - DNA, 25 bp, Homo sapien
gacccacgatttgaggttacactgg

SEQ ID NO: 4672818 - DNA, 25 bp, Homo sapien
taggttgaaaatgccccttactgaa

SEQ ID NO: 4672819 - DNA, 25 bp, Homo sapien
taactaagactggaagagccttggt

SEQ ID NO: 4672820 - DNA, 25 bp, Homo sapien
ggtggacctgaatcatgcttcttca

SEQ ID NO: 4672821 - DNA, 25 bp, Homo sapien
aggtggacctgaatcatgcttcttc

SEQ ID NO: 4672822 - DNA, 25 bp, Homo sapien
gaatcatgcttcttcacttggaggg

SEQ ID NO: 4672823 - DNA, 25 bp, Homo sapien
gacctgaatcatgcttcttcacttg

SEQ ID NO: 4672824 - DNA, 25 bp, Homo sapien
cagatggtgagttttcaggcatcac

SEQ ID NO: 4672825 - DNA, 25 bp, Homo sapien
tacccctgtgagtgcacttgttgat

SEQ ID NO: 4672826 - DNA, 25 bp, Homo sapien
ttgttgatgagccagtgcatatccg

SEQ ID NO: 4672827 - DNA, 25 bp, Homo sapien
tgcatatccgagctacaggcctgat

SEQ ID NO: 4672828 - DNA, 25 bp, Homo sapien
gaccccattcattgaaaggcagctg

SEQ ID NO: 4672829 - DNA, 25 bp, Homo sapien
tctcggtctgagcacatggtgaagc

SEQ ID NO: 4672830 - DNA, 25 bp, Homo sapien
tggtgaagctctacggaaagttggc

SEQ ID NO: 4672831 - DNA, 25 bp, Homo sapien
gaaggtgtgcaatgcctcagatttc

SEQ ID NO: 4672832 - DNA, 25 bp, Homo sapien
gctatttgatactcatccctgttcc

SEQ ID NO: 4672833 - DNA, 25 bp, Homo sapien
aataggccaagtactcattgccaag

SEQ ID NO: 4672834 - DNA, 25 bp, Homo sapien
gatattttgccagtacttctagtga

SEQ ID NO: 4672835 - DNA, 25 bp, Homo sapien
tatgcatgcttatatttggtccaga

SEQ ID NO: 4672836 - DNA, 25 bp, Homo sapien
cctacgctgaaattttgggggcagg

SEQ ID NO: 4672837 - DNA, 25 bp, Homo sapien
acctacgctgaaattttgggggcag

SEQ ID NO: 4672838 - DNA, 25 bp, Homo sapien
tacaattactatggcatcatgctcc

SEQ ID NO: 4672839 - DNA, 25 bp, Homo sapien
ttgaccctaaacctaagaatgaaca

SEQ ID NO: 4672840 - DNA, 25 bp, Homo sapien
tacacagtgcaaaaatcctaaagct

SEQ ID NO: 4672841 - DNA, 25 bp, Homo sapien
tagttcttagagaattggtctgcca

SEQ ID NO: 4672842 - DNA, 25 bp, Homo sapien
tacattgacagtatatcgctttggg

SEQ ID NO: 4672843 - DNA, 25 bp, Homo sapien
taaagattacattgacagtatatcg

SEQ ID NO: 4672844 - DNA, 25 bp, Homo sapien
cgctttgggtagcataagcatttca

SEQ ID NO: 4672845 - DNA, 25 bp, Homo sapien
gacagtatatcgctttgggtagcat

SEQ ID NO: 4672846 - DNA, 25 bp, Homo sapien
ggcctacccggctgctggaaattag

SEQ ID NO: 4672847 - DNA, 25 bp, Homo sapien
gaaggcgtcacccagattcttcccg

SEQ ID NO: 4672848 - DNA, 25 bp, Homo sapien
tcgacgaatacgaggatccctggct

SEQ ID NO: 4672849 - DNA, 25 bp, Homo sapien
catatcagacgcgatccctggctgt

SEQ ID NO: 4672850 - DNA, 25 bp, Homo sapien
gctagtctggagcattacttatttt

SEQ ID NO: 4672851 - DNA, 25 bp, Homo sapien
gagaactcacaaatgagagagctag

SEQ ID NO: 4672852 - DNA, 25 bp, Homo sapien
tctcaggccgatttatcaagtctct

SEQ ID NO: 4672853 - DNA, 25 bp, Homo sapien
cacaagggaaggtcaaaaatggtgc

SEQ ID NO: 4672854 - DNA, 25 bp, Homo sapien
gggtaaaaaacacagccacatcctc

SEQ ID NO: 4672855 - DNA, 25 bp, Homo sapien
ctgggtaaaaaacacagccacatcc

SEQ ID NO: 4672856 - DNA, 25 bp, Homo sapien
ccacatcctcaaatgtcagcaaccc

SEQ ID NO: 4672857 - DNA, 25 bp, Homo sapien
cagccacatcctcaaatgtcagcaa

SEQ ID NO: 4672858 - DNA, 25 bp, Homo sapien
ctgagctgggtccagataatcccac

SEQ ID NO: 4672859 - DNA, 25 bp, Homo sapien
cagtgagaccaggtttccataattc

SEQ ID NO: 4672860 - DNA, 25 bp, Homo sapien
gtgagaccaggtttccataattctc

SEQ ID NO: 4672861 - DNA, 25 bp, Homo sapien
ccaggtttccataattctccatcat

SEQ ID NO: 4672862 - DNA, 25 bp, Homo sapien
agaccaggtttccataattctccat

SEQ ID NO: 4672863 - DNA, 25 bp, Homo sapien
taaggtcccaaaagagtctactgca

SEQ ID NO: 4672864 - DNA, 25 bp, Homo sapien
ccccaaggaaagagtacagactgag

SEQ ID NO: 4672865 - DNA, 25 bp, Homo sapien
tgacctgagtgtaggtaaggtcccc

SEQ ID NO: 4672866 - DNA, 25 bp, Homo sapien
cacagagcggtagctgatgacctga

SEQ ID NO: 4672867 - DNA, 25 bp, Homo sapien
cagaggctatacttggaaggtccta

SEQ ID NO: 4672868 - DNA, 25 bp, Homo sapien
gcatataatataggcctggctctgt

SEQ ID NO: 4672869 - DNA, 25 bp, Homo sapien
ggtatatctaccatcctcacagtaa

SEQ ID NO: 4672870 - DNA, 25 bp, Homo sapien
cagcagctgatatggctgaagacta

SEQ ID NO: 4672871 - DNA, 25 bp, Homo sapien
tctcaaagtgggtttcgccaaagaa

SEQ ID NO: 4672872 - DNA, 25 bp, Homo sapien
gactatccattagatctgggcttgg

SEQ ID NO: 4672873 - DNA, 25 bp, Homo sapien
catcctgtggtcatggccaattttt

SEQ ID NO: 4672874 - DNA, 25 bp, Homo sapien
gaaggcagactagtgaagtacatcc

SEQ ID NO: 4672875 - DNA, 25 bp, Homo sapien
taatctttggctccagtctttaggc

SEQ ID NO: 4672876 - DNA, 25 bp, Homo sapien
tctaagcctcaagtcatgttcctac

SEQ ID NO: 4672877 - DNA, 25 bp, Homo sapien
cacctgtagatttagcagctcccca

SEQ ID NO: 4672878 - DNA, 25 bp, Homo sapien
taggctgccaacacattatatatgc

SEQ ID NO: 4672879 - DNA, 25 bp, Homo sapien
tttaattatctcttgaaaggcacca

SEQ ID NO: 4672880 - DNA, 25 bp, Homo sapien
tatctcttgaaaggcaccatcatcc

SEQ ID NO: 4672881 - DNA, 25 bp, Homo sapien
aattatctcttgaaaggcaccatca

SEQ ID NO: 4672882 - DNA, 25 bp, Homo sapien
tctcttgaaaggcaccatcatccat

SEQ ID NO: 4672883 - DNA, 25 bp, Homo sapien
aattaacatggtcatcatcatctgc

SEQ ID NO: 4672884 - DNA, 25 bp, Homo sapien
taacatggtcatcatcatctgcttt

SEQ ID NO: 4672885 - DNA, 25 bp, Homo sapien
acatggtcatcatcatctgctttca

SEQ ID NO: 4672886 - DNA, 25 bp, Homo sapien
catggtcatcatcatctgctttcat

SEQ ID NO: 4672887 - DNA, 25 bp, Homo sapien
cagagttcatgggagcaacaaccaa

SEQ ID NO: 4672888 - DNA, 25 bp, Homo sapien
tctgcaacctgtggcgaaatctggt

SEQ ID NO: 4672889 - DNA, 25 bp, Homo sapien
tatagtacatctaggcccgcttcgg

SEQ ID NO: 4672890 - DNA, 25 bp, Homo sapien
caacaaccaaaaagggcagtctgtg

SEQ ID NO: 4672891 - DNA, 25 bp, Homo sapien
caagctgtgtttgcgtcgctgcaca

SEQ ID NO: 4672892 - DNA, 25 bp, Homo sapien
gcaagctgtgtttgcgtcgctgcac

SEQ ID NO: 4672893 - DNA, 25 bp, Homo sapien
ctgcagcaagctgtgtttgcgtcgc

SEQ ID NO: 4672894 - DNA, 25 bp, Homo sapien
cagcaagctgtgtttgcgtcgctgc

SEQ ID NO: 4672895 - DNA, 25 bp, Homo sapien
aatcagtctatcaaggaaaacaggg

SEQ ID NO: 4672896 - DNA, 25 bp, Homo sapien
caaccaaggtctttgaagcaaggag

SEQ ID NO: 4672897 - DNA, 25 bp, Homo sapien
taattaacagaagggaccagatgct

SEQ ID NO: 4672898 - DNA, 25 bp, Homo sapien
gaaacaaagtaagatgggcaaacaa

SEQ ID NO: 4672899 - DNA, 25 bp, Homo sapien
ttttacagttggctcctcatcctta

SEQ ID NO: 4672900 - DNA, 25 bp, Homo sapien
aactattacaccctgtggttccact

SEQ ID NO: 4672901 - DNA, 25 bp, Homo sapien
cacttttgattcttgtaactattac

SEQ ID NO: 4672902 - DNA, 25 bp, Homo sapien
ggctcctcatccttatctctgttca

SEQ ID NO: 4672903 - DNA, 25 bp, Homo sapien
tgaaatgggccttgcggacaaaacc

SEQ ID NO: 4672904 - DNA, 25 bp, Homo sapien
tgacgagtaaggttgcaaagctgac

SEQ ID NO: 4672905 - DNA, 25 bp, Homo sapien
tgctgaataagacccgagttccggc

SEQ ID NO: 4672906 - DNA, 25 bp, Homo sapien
gacaagactgcgctgttgactgaaa

SEQ ID NO: 4672907 - DNA, 25 bp, Homo sapien
gggcagttgtccactattcacagaa

SEQ ID NO: 4672908 - DNA, 25 bp, Homo sapien
taagggaagtcaaatgctcatgggc

SEQ ID NO: 4672909 - DNA, 25 bp, Homo sapien
gagccatactaaaactgcacttggg

SEQ ID NO: 4672910 - DNA, 25 bp, Homo sapien
tcatagatctgggaaccatcaggca

SEQ ID NO: 4672911 - DNA, 25 bp, Homo sapien
attagctcaagatggaataaagatt

SEQ ID NO: 4672912 - DNA, 25 bp, Homo sapien
gcaaaaattagctcaagatggaata

SEQ ID NO: 4672913 - DNA, 25 bp, Homo sapien
caccttatgcaaaaattagctcaag

SEQ ID NO: 4672914 - DNA, 25 bp, Homo sapien
atgcaaaaattagctcaagatggaa

SEQ ID NO: 4672915 - DNA, 25 bp, Homo sapien
aatagtaccccagaattttaggcag

SEQ ID NO: 4672916 - DNA, 25 bp, Homo sapien
gacaactcttgatctgcccttacag

SEQ ID NO: 4672917 - DNA, 25 bp, Homo sapien
ttcccaattcaccaagcaatcagga

SEQ ID NO: 4672918 - DNA, 25 bp, Homo sapien
ttttaggcagaatagtctccctagc

SEQ ID NO: 4672919 - DNA, 25 bp, Homo sapien
ttatttttgctacttgaatgtagaa

SEQ ID NO: 4672920 - DNA, 25 bp, Homo sapien
gatgatctactctccggacaccatt

SEQ ID NO: 4672921 - DNA, 25 bp, Homo sapien
gaccgtatttgggagctgatgatct

SEQ ID NO: 4672922 - DNA, 25 bp, Homo sapien
tcagaacaaggatctctaataatca

SEQ ID NO: 4672923 - DNA, 25 bp, Homo sapien
tgtgaaatgcctcactcatcaaaat

SEQ ID NO: 4672924 - DNA, 25 bp, Homo sapien
atgtgaaatgcctcactcatcaaaa

SEQ ID NO: 4672925 - DNA, 25 bp, Homo sapien
aatgtgaaatgcctcactcatcaaa

SEQ ID NO: 4672926 - DNA, 25 bp, Homo sapien
gaatgtgaaatgcctcactcatcaa

SEQ ID NO: 4672927 - DNA, 25 bp, Homo sapien
gctgcttgacgcaactatcaaactg

SEQ ID NO: 4672928 - DNA, 25 bp, Homo sapien
cgtggcttactatgcattcctcaag

SEQ ID NO: 4672929 - DNA, 25 bp, Homo sapien
tgtcccacttgtgcagtaaagcaaa

SEQ ID NO: 4672930 - DNA, 25 bp, Homo sapien
ccttgatgataaagggctgcttgac

SEQ ID NO: 4672931 - DNA, 25 bp, Homo sapien
gaaaatacgttcataagtcactggg

SEQ ID NO: 4672932 - DNA, 25 bp, Homo sapien
tactgcctgtgtgtaagaaaatacg

SEQ ID NO: 4672933 - DNA, 25 bp, Homo sapien
ggaattcatagagaggatactgcct

SEQ ID NO: 4672934 - DNA, 25 bp, Homo sapien
ttgaagctatcaagagccaaggcca

SEQ ID NO: 4672935 - DNA, 25 bp, Homo sapien
cagagatcttacagggcaaggtgac

SEQ ID NO: 4672936 - DNA, 25 bp, Homo sapien
tatgagagatctattaagcccacgg

SEQ ID NO: 4672937 - DNA, 25 bp, Homo sapien
tactctaagacctgggagaaagacc

SEQ ID NO: 4672938 - DNA, 25 bp, Homo sapien
cagggcacaggaaagatgacatttc

SEQ ID NO: 4672939 - DNA, 25 bp, Homo sapien
caaaggacagtatgttcacacgggt

SEQ ID NO: 4672940 - DNA, 25 bp, Homo sapien
gctagtcattggaatcaagccgcaa

SEQ ID NO: 4672941 - DNA, 25 bp, Homo sapien
tataaaccttcagctgctatcgggt

SEQ ID NO: 4672942 - DNA, 25 bp, Homo sapien
tcttctaggctaactgccaggcggc

SEQ ID NO: 4672943 - DNA, 25 bp, Homo sapien
gtatccccagcaatattcagcaaca

SEQ ID NO: 4672944 - DNA, 25 bp, Homo sapien
atagaaggggatggtatccccagca

SEQ ID NO: 4672945 - DNA, 25 bp, Homo sapien
ggtatccccagcaatattcagcaac

SEQ ID NO: 4672946 - DNA, 25 bp, Homo sapien
tggtatccccagcaatattcagcaa

SEQ ID NO: 4672947 - DNA, 25 bp, Homo sapien
tcatcaaggatggtgcttcccaagc

SEQ ID NO: 4672948 - DNA, 25 bp, Homo sapien
aaagcgcaggtcatcagggacatcc

SEQ ID NO: 4672949 - DNA, 25 bp, Homo sapien
aattgatcggacgttatggccagac

SEQ ID NO: 4672950 - DNA, 25 bp, Homo sapien
tgaggagacctagcttacatgatgg

SEQ ID NO: 4672951 - DNA, 25 bp, Homo sapien
aaaggaaaggtgcccactcaagaag

SEQ ID NO: 4672952 - DNA, 25 bp, Homo sapien
ggaaaggaaaggtgcccactcaaga

SEQ ID NO: 4672953 - DNA, 25 bp, Homo sapien
gaaaggaaaggtgcccactcaagaa

SEQ ID NO: 4672954 - DNA, 25 bp, Homo sapien
tttgggccaagaaggtatctaccga

SEQ ID NO: 4672955 - DNA, 25 bp, Homo sapien
gtttctcttatggacgggccctgca

SEQ ID NO: 4672956 - DNA, 25 bp, Homo sapien
tatgaagcgggccatggtaagatgc

SEQ ID NO: 4672957 - DNA, 25 bp, Homo sapien
gggcttgactttccaacacggagaa

SEQ ID NO: 4672958 - DNA, 25 bp, Homo sapien
cctgctaaagcccaacatggtgact

SEQ ID NO: 4672959 - DNA, 25 bp, Homo sapien
catcatgtttacctggagggcaccc

SEQ ID NO: 4672960 - DNA, 25 bp, Homo sapien
tacaaggccctgaatgaccatcatg

SEQ ID NO: 4672961 - DNA, 25 bp, Homo sapien
tgctggacatgcctgcaccaagaag

SEQ ID NO: 4672962 - DNA, 25 bp, Homo sapien
aaggcagtagctaggttctgaggca

SEQ ID NO: 4672963 - DNA, 25 bp, Homo sapien
ggacagctggagatccccaattaga

SEQ ID NO: 4672964 - DNA, 25 bp, Homo sapien
gcaactgttgaatctcctcctaagg

SEQ ID NO: 4672965 - DNA, 25 bp, Homo sapien
catactaaaatgtctctgggtccga

SEQ ID NO: 4672966 - DNA, 25 bp, Homo sapien
agcctcgctatccaggaaaacgcca

SEQ ID NO: 4672967 - DNA, 25 bp, Homo sapien
agtgtccatccagcctcgctatcca

SEQ ID NO: 4672968 - DNA, 25 bp, Homo sapien
tcgctatccaggaaaacgccaacgc

SEQ ID NO: 4672969 - DNA, 25 bp, Homo sapien
gcctcgctatccaggaaaacgccaa

SEQ ID NO: 4672970 - DNA, 25 bp, Homo sapien
ctttgggaagtggcgtgctgtgctg

SEQ ID NO: 4672971 - DNA, 25 bp, Homo sapien
gactttgggaagtggcgtgctgtgc

SEQ ID NO: 4672972 - DNA, 25 bp, Homo sapien
ttgggaagtggcgtgctgtgctgag

SEQ ID NO: 4672973 - DNA, 25 bp, Homo sapien
tgactttgggaagtggcgtgctgtg

SEQ ID NO: 4672974 - DNA, 25 bp, Homo sapien
gctaacgtggtacagacctttaatc

SEQ ID NO: 4672975 - DNA, 25 bp, Homo sapien
ggtgacatttgtgctaacgtggtac

SEQ ID NO: 4672976 - DNA, 25 bp, Homo sapien
tgtggtgaacattggcctgtgaccc

SEQ ID NO: 4672977 - DNA, 25 bp, Homo sapien
tgttttatgattaacagagaggtga

SEQ ID NO: 4672978 - DNA, 25 bp, Homo sapien
gaaatgtgagaatctctccacccta

SEQ ID NO: 4672979 - DNA, 25 bp, Homo sapien
tcagaggtaactccagagttgttac

SEQ ID NO: 4672980 - DNA, 25 bp, Homo sapien
taactccagagttgttactctttgt

SEQ ID NO: 4672981 - DNA, 25 bp, Homo sapien
gaggacagtatatattgcatacttc

SEQ ID NO: 4672982 - DNA, 25 bp, Homo sapien
taattcttgaatgcctactgcgtac

SEQ ID NO: 4672983 - DNA, 25 bp, Homo sapien
tactgcgtacagacactatacaact

SEQ ID NO: 4672984 - DNA, 25 bp, Homo sapien
agaagaaaataacggctcagacaag

SEQ ID NO: 4672985 - DNA, 25 bp, Homo sapien
tcatttaatggaccctagagctcca

SEQ ID NO: 4672986 - DNA, 25 bp, Homo sapien
caggaaaaacttgatggtggctgaa

SEQ ID NO: 4672987 - DNA, 25 bp, Homo sapien
ggacacctacgtctgctgacgcaag

SEQ ID NO: 4672988 - DNA, 25 bp, Homo sapien
gacacctacgtctgctgacgcaagt

SEQ ID NO: 4672989 - DNA, 25 bp, Homo sapien
cacctacgtctgctgacgcaagtca

SEQ ID NO: 4672990 - DNA, 25 bp, Homo sapien
caaggacacctacgtctgctgacgc

SEQ ID NO: 4672991 - DNA, 25 bp, Homo sapien
atagctaacaaaatgccttatacac

SEQ ID NO: 4672992 - DNA, 25 bp, Homo sapien
aaaaagtctccatagctaacaaaat

SEQ ID NO: 4672993 - DNA, 25 bp, Homo sapien
ctaaaaagtctccatagctaacaaa

SEQ ID NO: 4672994 - DNA, 25 bp, Homo sapien
agctaacaaaatgccttatacacat

SEQ ID NO: 4672995 - DNA, 25 bp, Homo sapien
gaagtgagatgcaggaaatccaaat

SEQ ID NO: 4672996 - DNA, 25 bp, Homo sapien
agtgagatgcaggaaatccaaatag

SEQ ID NO: 4672997 - DNA, 25 bp, Homo sapien
tgaagtgagatgcaggaaatccaaa

SEQ ID NO: 4672998 - DNA, 25 bp, Homo sapien
ctgaagtgagatgcaggaaatccaa

SEQ ID NO: 4672999 - DNA, 25 bp, Homo sapien
gagtggctccattcttcactttgtg

SEQ ID NO: 4673000 - DNA, 25 bp, Homo sapien
tctgggacttttagccaggcttcca

SEQ ID NO: 4673001 - DNA, 25 bp, Homo sapien
aaagtgtagttctggatttggtcag

SEQ ID NO: 4673002 - DNA, 25 bp, Homo sapien
ggctgcttgccccttgccagtctgg

SEQ ID NO: 4673003 - DNA, 25 bp, Homo sapien
agagttgaatttgtaggtgactgga

SEQ ID NO: 4673004 - DNA, 25 bp, Homo sapien
agggcagagagttgaatttgtaggt

SEQ ID NO: 4673005 - DNA, 25 bp, Homo sapien
cagagagttgaatttgtaggtgact

SEQ ID NO: 4673006 - DNA, 25 bp, Homo sapien
ggcagagagttgaatttgtaggtga

SEQ ID NO: 4673007 - DNA, 25 bp, Homo sapien
cttcttggatgcgagtatacaacct

SEQ ID NO: 4673008 - DNA, 25 bp, Homo sapien
tcttggatgcgagtatacaacctct

SEQ ID NO: 4673009 - DNA, 25 bp, Homo sapien
gatgcgagtatacaacctctgagat

SEQ ID NO: 4673010 - DNA, 25 bp, Homo sapien
gagtatacaacctctgagatgaact

SEQ ID NO: 4673011 - DNA, 25 bp, Homo sapien
tccctcataggtccaggatggataa

SEQ ID NO: 4673012 - DNA, 25 bp, Homo sapien
gggaccctcacttttgcagaatctc

SEQ ID NO: 4673013 - DNA, 25 bp, Homo sapien
tagacctgagtcaaaagggaccctc

SEQ ID NO: 4673014 - DNA, 25 bp, Homo sapien
gcagaatctctataggcagcttccc

SEQ ID NO: 4673015 - DNA, 25 bp, Homo sapien
gcttgtgagcagaaatactagtgtt

SEQ ID NO: 4673016 - DNA, 25 bp, Homo sapien
tgagcagaaatactagtgttggctt

SEQ ID NO: 4673017 - DNA, 25 bp, Homo sapien
tgtgagcagaaatactagtgttggc

SEQ ID NO: 4673018 - DNA, 25 bp, Homo sapien
cttgtgagcagaaatactagtgttg

SEQ ID NO: 4673019 - DNA, 25 bp, Homo sapien
tactgcagcttcaaatatcgtgtcc

SEQ ID NO: 4673020 - DNA, 25 bp, Homo sapien
ctgcagcttcaaatatcgtgtcctc

SEQ ID NO: 4673021 - DNA, 25 bp, Homo sapien
gaagtcatctaggacccagattctg

SEQ ID NO: 4673022 - DNA, 25 bp, Homo sapien
tgcaatgaagtcatctaggacccag

SEQ ID NO: 4673023 - DNA, 25 bp, Homo sapien
tgattgcgagttggatctggtctcc

SEQ ID NO: 4673024 - DNA, 25 bp, Homo sapien
gaagcttgctgatctgcaaatggag

SEQ ID NO: 4673025 - DNA, 25 bp, Homo sapien
ttgctccctcaaggtaagtgtcatc

SEQ ID NO: 4673026 - DNA, 25 bp, Homo sapien
gtcatcccttaaagcttgcctgctg

SEQ ID NO: 4673027 - DNA, 25 bp, Homo sapien
tgttctgtaaaaggcaccacgtgtc

SEQ ID NO: 4673028 - DNA, 25 bp, Homo sapien
gatgggaggatcacacagtgctgtc

SEQ ID NO: 4673029 - DNA, 25 bp, Homo sapien
cagtgctgtctgtaaattgccccaa

SEQ ID NO: 4673030 - DNA, 25 bp, Homo sapien
ccccagtgagggagttagcaacatg

SEQ ID NO: 4673031 - DNA, 25 bp, Homo sapien
tatgtaccagctattccagatgacc

SEQ ID NO: 4673032 - DNA, 25 bp, Homo sapien
caagccctgctagaataaagactga

SEQ ID NO: 4673033 - DNA, 25 bp, Homo sapien
tccagcttggaaatgagactcctca

SEQ ID NO: 4673034 - DNA, 25 bp, Homo sapien
ccatagaagacgcttggcaaacttt

SEQ ID NO: 4673035 - DNA, 25 bp, Homo sapien
aaaatcatggactgaagtcagaaga

SEQ ID NO: 4673036 - DNA, 25 bp, Homo sapien
ggtcatataatcactctgggtctca

SEQ ID NO: 4673037 - DNA, 25 bp, Homo sapien
agaagacctgaccttttatttcaga

SEQ ID NO: 4673038 - DNA, 25 bp, Homo sapien
ctctgccatggcctaacgacgtgac

SEQ ID NO: 4673039 - DNA, 25 bp, Homo sapien
ttggctttggtagcctcctggcagg

SEQ ID NO: 4673040 - DNA, 25 bp, Homo sapien
gagcttgtgactgccaaaaattttg

SEQ ID NO: 4673041 - DNA, 25 bp, Homo sapien
tatttagacatggttgcctgcaggt

SEQ ID NO: 4673042 - DNA, 25 bp, Homo sapien
agtttgccacaggtccggacctctc

SEQ ID NO: 4673043 - DNA, 25 bp, Homo sapien
agaacacgccccaggtggctgtttc

SEQ ID NO: 4673044 - DNA, 25 bp, Homo sapien
gcttccaggcaacgtaagaacacgc

SEQ ID NO: 4673045 - DNA, 25 bp, Homo sapien
gcagcttccaggcaacgtaagaaca

SEQ ID NO: 4673046 - DNA, 25 bp, Homo sapien
ttccaggcaacgtaagaacacgccc

SEQ ID NO: 4673047 - DNA, 25 bp, Homo sapien
tgttctgtagaatcggagctgtaat

SEQ ID NO: 4673048 - DNA, 25 bp, Homo sapien
gttattaggtcagctcataggtgcc

SEQ ID NO: 4673049 - DNA, 25 bp, Homo sapien
cataggtgccagtcagtccacagtg

SEQ ID NO: 4673050 - DNA, 25 bp, Homo sapien
tcggagctgtaatggtgtaactgtt

SEQ ID NO: 4673051 - DNA, 25 bp, Homo sapien
cctgggaaagtggtcgtgccattca

SEQ ID NO: 4673052 - DNA, 25 bp, Homo sapien
cataataaaagaggccgtagaggtg

SEQ ID NO: 4673053 - DNA, 25 bp, Homo sapien
tgttgggacgagaattggacctaga

SEQ ID NO: 4673054 - DNA, 25 bp, Homo sapien
tgttgcaatcagctggcttggaggt

SEQ ID NO: 4673055 - DNA, 25 bp, Homo sapien
ttagcaacacatgcgggtgtgtgtg

SEQ ID NO: 4673056 - DNA, 25 bp, Homo sapien
ggaccattagcaacacatgcgggtg

SEQ ID NO: 4673057 - DNA, 25 bp, Homo sapien
gcggaccattagcaacacatgcggg

SEQ ID NO: 4673058 - DNA, 25 bp, Homo sapien
accattagcaacacatgcgggtgtg

SEQ ID NO: 4673059 - DNA, 25 bp, Homo sapien
gtcagcgacagacactagatccagg

SEQ ID NO: 4673060 - DNA, 25 bp, Homo sapien
actgaggctcaagcgtggcagggac

SEQ ID NO: 4673061 - DNA, 25 bp, Homo sapien
aggctcaagcgtggcagggactgcc

SEQ ID NO: 4673062 - DNA, 25 bp, Homo sapien
actgcccaaggtcagcgacagacac

SEQ ID NO: 4673063 - DNA, 25 bp, Homo sapien
ttcctgccggaggattgcgaggacc

SEQ ID NO: 4673064 - DNA, 25 bp, Homo sapien
ccagctgcgctgacaggtcaataga

SEQ ID NO: 4673065 - DNA, 25 bp, Homo sapien
agagtcatcgcagagggcctgtgcc

SEQ ID NO: 4673066 - DNA, 25 bp, Homo sapien
cgcgtgccagtctgggtaagaccct

SEQ ID NO: 4673067 - DNA, 25 bp, Homo sapien
caaccgggtaggtttctgttgcgca

SEQ ID NO: 4673068 - DNA, 25 bp, Homo sapien
tggcgcggtggtcggagccctggac

SEQ ID NO: 4673069 - DNA, 25 bp, Homo sapien
tttctgttgcgcacgatctgcccag

SEQ ID NO: 4673070 - DNA, 25 bp, Homo sapien
tgcccagcccttctggcgcggtggt

SEQ ID NO: 4673071 - DNA, 25 bp, Homo sapien
gggccccggagatggcgcctccacc

SEQ ID NO: 4673072 - DNA, 25 bp, Homo sapien
agatggcgcctccaccgggatgagc

SEQ ID NO: 4673073 - DNA, 25 bp, Homo sapien
aggtgaggctccggcgcacacccaa

SEQ ID NO: 4673074 - DNA, 25 bp, Homo sapien
caccgggatgagctagccagcctgg

SEQ ID NO: 4673075 - DNA, 25 bp, Homo sapien
tttgcgtgacttgggggcgactcct

SEQ ID NO: 4673076 - DNA, 25 bp, Homo sapien
tcgcgggtcacatggcccgcctgag

SEQ ID NO: 4673077 - DNA, 25 bp, Homo sapien
tgcccatcagttggcgccttttgcc

SEQ ID NO: 4673078 - DNA, 25 bp, Homo sapien
cggtctctccgcagctcgcgggtca

SEQ ID NO: 4673079 - DNA, 25 bp, Homo sapien
ctgatgaaatataatgctggcttct

SEQ ID NO: 4673080 - DNA, 25 bp, Homo sapien
aatataatgctggcttctagtcccc

SEQ ID NO: 4673081 - DNA, 25 bp, Homo sapien
tgaaatataatgctggcttctagtc

SEQ ID NO: 4673082 - DNA, 25 bp, Homo sapien
gatgaaatataatgctggcttctag

SEQ ID NO: 4673083 - DNA, 25 bp, Homo sapien
ggtgtgaataagtctctatgtacac

SEQ ID NO: 4673084 - DNA, 25 bp, Homo sapien
gatatcgttccattggtgtgaataa

SEQ ID NO: 4673085 - DNA, 25 bp, Homo sapien
ttacacgcattgagagatatcgttc

SEQ ID NO: 4673086 - DNA, 25 bp, Homo sapien
cacgcattgagagatatcgttccat

SEQ ID NO: 4673087 - DNA, 25 bp, Homo sapien
catataattttcgtagccctgaaat

SEQ ID NO: 4673088 - DNA, 25 bp, Homo sapien
caggtgttggcaaatcaggcagtaa

SEQ ID NO: 4673089 - DNA, 25 bp, Homo sapien
aatgatgactatgttgcagtaaaac

SEQ ID NO: 4673090 - DNA, 25 bp, Homo sapien
cactgaacagaccttttagagcagg

SEQ ID NO: 4673091 - DNA, 25 bp, Homo sapien
tcattgctaattctacgggtaagtt

SEQ ID NO: 4673092 - DNA, 25 bp, Homo sapien
tcagatccagctcagctcatattct

SEQ ID NO: 4673093 - DNA, 25 bp, Homo sapien
tcactattgtagcagtacagcacag

SEQ ID NO: 4673094 - DNA, 25 bp, Homo sapien
cagctcatattctgaatcattgcta

SEQ ID NO: 4673095 - DNA, 25 bp, Homo sapien
ctcttttcatgcggctcttcttcct

SEQ ID NO: 4673096 - DNA, 25 bp, Homo sapien
ttcctcttttcatgcggctcttctt

SEQ ID NO: 4673097 - DNA, 25 bp, Homo sapien
cttcctcttttcatgcggctcttct

SEQ ID NO: 4673098 - DNA, 25 bp, Homo sapien
gagggcgactctaagctggacattt

SEQ ID NO: 4673099 - DNA, 25 bp, Homo sapien
ggaaatgacctaccctgagatgtgt

SEQ ID NO: 4673100 - DNA, 25 bp, Homo sapien
gagccaaggattttacccacactgg

SEQ ID NO: 4673101 - DNA, 25 bp, Homo sapien
ccaaaagagtacgtcactgaggaca

SEQ ID NO: 4673102 - DNA, 25 bp, Homo sapien
gggacatcccaagctagttatctgg

SEQ ID NO: 4673103 - DNA, 25 bp, Homo sapien
ggatggaaggatgccctaacaggaa

SEQ ID NO: 4673104 - DNA, 25 bp, Homo sapien
tcttttgggctcctcatggttttcc

SEQ ID NO: 4673105 - DNA, 25 bp, Homo sapien
tcctctacccctataagatcagatt

SEQ ID NO: 4673106 - DNA, 25 bp, Homo sapien
aaaatgctgtaggtgtggccaggtc

SEQ ID NO: 4673107 - DNA, 25 bp, Homo sapien
ttttctgaagactctgacagagcca

SEQ ID NO: 4673108 - DNA, 25 bp, Homo sapien
caaaatgctgtaggtgtggccaggt

SEQ ID NO: 4673109 - DNA, 25 bp, Homo sapien
caggattcatgttcttctggcctct

SEQ ID NO: 4673110 - DNA, 25 bp, Homo sapien
attatgattatgagaagtggcaaga

SEQ ID NO: 4673111 - DNA, 25 bp, Homo sapien
aaattatgattatgagaagtggcaa

SEQ ID NO: 4673112 - DNA, 25 bp, Homo sapien
aattatgattatgagaagtggcaag

SEQ ID NO: 4673113 - DNA, 25 bp, Homo sapien
cacctccattccccatgaaaaaaag

SEQ ID NO: 4673114 - DNA, 25 bp, Homo sapien
tttaggtttatgagcaattgcagat

SEQ ID NO: 4673115 - DNA, 25 bp, Homo sapien
taggtttatgagcaattgcagatac

SEQ ID NO: 4673116 - DNA, 25 bp, Homo sapien
ttatgagcaattgcagatacttcat

SEQ ID NO: 4673117 - DNA, 25 bp, Homo sapien
gtttatgagcaattgcagatacttc

SEQ ID NO: 4673118 - DNA, 25 bp, Homo sapien
agcagtagtatacggccaggaatcc

SEQ ID NO: 4673119 - DNA, 25 bp, Homo sapien
ggaatccacaaatgttcggaatctt

SEQ ID NO: 4673120 - DNA, 25 bp, Homo sapien
tccacaaatgttcggaatcttgcct

SEQ ID NO: 4673121 - DNA, 25 bp, Homo sapien
aaatgttcggaatcttgcctcatca

SEQ ID NO: 4673122 - DNA, 25 bp, Homo sapien
gaaaatccacatgggtagagattga

SEQ ID NO: 4673123 - DNA, 25 bp, Homo sapien
gattgagcgtctttcccaatgggca

SEQ ID NO: 4673124 - DNA, 25 bp, Homo sapien
atgagatggatcactaaattctaaa

SEQ ID NO: 4673125 - DNA, 25 bp, Homo sapien
ttcccaatgggcagtcaagatgatg

SEQ ID NO: 4673126 - DNA, 25 bp, Homo sapien
tagaactactgaatggcaagtaatg

SEQ ID NO: 4673127 - DNA, 25 bp, Homo sapien
ttagcaagcctttcattcatagaac

SEQ ID NO: 4673128 - DNA, 25 bp, Homo sapien
tctttggttcctctactcttagcaa

SEQ ID NO: 4673129 - DNA, 25 bp, Homo sapien
gccgaaaagcattgtatgagacaat

SEQ ID NO: 4673130 - DNA, 25 bp, Homo sapien
ctgagaacatgtgagtggggacaca

SEQ ID NO: 4673131 - DNA, 25 bp, Homo sapien
tgagaacatgtgagtggggacacac

SEQ ID NO: 4673132 - DNA, 25 bp, Homo sapien
taagatggtcaacaccagggaaaca

SEQ ID NO: 4673133 - DNA, 25 bp, Homo sapien
tggcagtggaacaccttgactatct

SEQ ID NO: 4673134 - DNA, 25 bp, Homo sapien
taaatgaagtaagatggtcaacacc

SEQ ID NO: 4673135 - DNA, 25 bp, Homo sapien
gaacaccttgactatcttggaaaga

SEQ ID NO: 4673136 - DNA, 25 bp, Homo sapien
acccgcggcggagacaaggcagaac

SEQ ID NO: 4673137 - DNA, 25 bp, Homo sapien
caaggcccgtgcagagattccagct

SEQ ID NO: 4673138 - DNA, 25 bp, Homo sapien
caaggcagaacttccgggaggcggg

SEQ ID NO: 4673139 - DNA, 25 bp, Homo sapien
agagattccagctctcacccctgac

SEQ ID NO: 4673140 - DNA, 25 bp, Homo sapien
aagttctttgaactggcgccgcgcg

SEQ ID NO: 4673141 - DNA, 25 bp, Homo sapien
gggccctaagcgtgatctaacctaa

SEQ ID NO: 4673142 - DNA, 25 bp, Homo sapien
tcagtaggacctcgcctggagagag

SEQ ID NO: 4673143 - DNA, 25 bp, Homo sapien
tcagcctcagcgtggataattgcag

SEQ ID NO: 4673144 - DNA, 25 bp, Homo sapien
ctggatccattaattccacaaccat

SEQ ID NO: 4673145 - DNA, 25 bp, Homo sapien
tttggcagaagaagacagtcgtttt

SEQ ID NO: 4673146 - DNA, 25 bp, Homo sapien
ttggcagaagaagacagtcgttttc

SEQ ID NO: 4673147 - DNA, 25 bp, Homo sapien
tgctcttttatttccaattcctgac

SEQ ID NO: 4673148 - DNA, 25 bp, Homo sapien
ccagctgctcttttatttccaattc

SEQ ID NO: 4673149 - DNA, 25 bp, Homo sapien
gctcttttatttccaattcctgaca

SEQ ID NO: 4673150 - DNA, 25 bp, Homo sapien
gttctccagctgctcttttatttcc

SEQ ID NO: 4673151 - DNA, 25 bp, Homo sapien
ttctcaggaggcatggaggtgccag

SEQ ID NO: 4673152 - DNA, 25 bp, Homo sapien
tgccttcttctcaggaggcatggag

SEQ ID NO: 4673153 - DNA, 25 bp, Homo sapien
ctgccttcttctcaggaggcatgga

SEQ ID NO: 4673154 - DNA, 25 bp, Homo sapien
ttcttctcaggaggcatggaggtgc

SEQ ID NO: 4673155 - DNA, 25 bp, Homo sapien
gaagagacacctcctagcttaattg

SEQ ID NO: 4673156 - DNA, 25 bp, Homo sapien
cgttgaagagacacctcctagctta

SEQ ID NO: 4673157 - DNA, 25 bp, Homo sapien
tgaagagacacctcctagcttaatt

SEQ ID NO: 4673158 - DNA, 25 bp, Homo sapien
gttgaagagacacctcctagcttaa

SEQ ID NO: 4673159 - DNA, 25 bp, Homo sapien
ggttgacaatcaatagtgaggcatc

SEQ ID NO: 4673160 - DNA, 25 bp, Homo sapien
cagtttttcaatgtgctcacgaagt

SEQ ID NO: 4673161 - DNA, 25 bp, Homo sapien
gttcatcttcaatggcctgccgctg

SEQ ID NO: 4673162 - DNA, 25 bp, Homo sapien
catcagtggcctgtcgtcgttccag

SEQ ID NO: 4673163 - DNA, 25 bp, Homo sapien
ggatgatacggatgttttcatcaaa

SEQ ID NO: 4673164 - DNA, 25 bp, Homo sapien
ggttctggttcaggcacaacaaggg

SEQ ID NO: 4673165 - DNA, 25 bp, Homo sapien
ctgctccagatcataacgtttaagg

SEQ ID NO: 4673166 - DNA, 25 bp, Homo sapien
tctgtgagtaggtctcccaagccct

SEQ ID NO: 4673167 - DNA, 25 bp, Homo sapien
cacaatctgggacacggctcggcgg

SEQ ID NO: 4673168 - DNA, 25 bp, Homo sapien
tagcttccgggataagagctccact

SEQ ID NO: 4673169 - DNA, 25 bp, Homo sapien
acacggctcggcgggaagactccac

SEQ ID NO: 4673170 - DNA, 25 bp, Homo sapien
agcttccgggataagagctccactt

SEQ ID NO: 4673171 - DNA, 25 bp, Homo sapien
tatgctcttatcacatattctcata

SEQ ID NO: 4673172 - DNA, 25 bp, Homo sapien
gcaagaatcatatgctcttatcaca

SEQ ID NO: 4673173 - DNA, 25 bp, Homo sapien
taacaaagcaagaatcatatgctct

SEQ ID NO: 4673174 - DNA, 25 bp, Homo sapien
ctgaataacaaagcaagaatcatat

SEQ ID NO: 4673175 - DNA, 25 bp, Homo sapien
catgccaccacacccggatgatttt

SEQ ID NO: 4673176 - DNA, 25 bp, Homo sapien
tccagggttcgagccgattctcctg

SEQ ID NO: 4673177 - DNA, 25 bp, Homo sapien
atgtcggacaggctggtctcaaact

SEQ ID NO: 4673178 - DNA, 25 bp, Homo sapien
ctgcctccagggttcgagccgattc

SEQ ID NO: 4673179 - DNA, 25 bp, Homo sapien
gaagaactatactttaatttagcat

SEQ ID NO: 4673180 - DNA, 25 bp, Homo sapien
agaagaactatactttaatttagca

SEQ ID NO: 4673181 - DNA, 25 bp, Homo sapien
catattctcctgtgcgaggaaagag

SEQ ID NO: 4673182 - DNA, 25 bp, Homo sapien
cctgtgcgaggaaagagttcagctc

SEQ ID NO: 4673183 - DNA, 25 bp, Homo sapien
gacatggtgcgatgcttttcctgaa

SEQ ID NO: 4673184 - DNA, 25 bp, Homo sapien
ttcctgaagaagatctgtcaattcc

SEQ ID NO: 4673185 - DNA, 25 bp, Homo sapien
ggcattatttgcacccaagtttaga

SEQ ID NO: 4673186 - DNA, 25 bp, Homo sapien
gctatgtgccctcagaataatcact

SEQ ID NO: 4673187 - DNA, 25 bp, Homo sapien
aaagtcatttaaggcctatcatcac

SEQ ID NO: 4673188 - DNA, 25 bp, Homo sapien
aaaatcccctatgatatgataggcc

SEQ ID NO: 4673189 - DNA, 25 bp, Homo sapien
gaattttgtcaatatcccactgcag

SEQ ID NO: 4673190 - DNA, 25 bp, Homo sapien
tccaggacagacactcgtgattcgg

SEQ ID NO: 4673191 - DNA, 25 bp, Homo sapien
tctgctaagtgtcggttgagtcgct

SEQ ID NO: 4673192 - DNA, 25 bp, Homo sapien
cactgcaggtcatcaatcatggact

SEQ ID NO: 4673193 - DNA, 25 bp, Homo sapien
ccatacaccttataacctttggaat

SEQ ID NO: 4673194 - DNA, 25 bp, Homo sapien
gatagtgattgtgccgccatacaga

SEQ ID NO: 4673195 - DNA, 25 bp, Homo sapien
gattgtgccgccatacagactgctc

SEQ ID NO: 4673196 - DNA, 25 bp, Homo sapien
cttccgagcattgatagtgattgtg

SEQ ID NO: 4673197 - DNA, 25 bp, Homo sapien
tttcattttgtgtagtgacctcctc

SEQ ID NO: 4673198 - DNA, 25 bp, Homo sapien
tctccagctcacagagacggttctg

SEQ ID NO: 4673199 - DNA, 25 bp, Homo sapien
gagacggttctgagccaactctttg

SEQ ID NO: 4673200 - DNA, 25 bp, Homo sapien
aaagtcttgccgaagtttctccagc

SEQ ID NO: 4673201 - DNA, 25 bp, Homo sapien
agctttcaacttttcgccattgggt

SEQ ID NO: 4673202 - DNA, 25 bp, Homo sapien
ctctggctaggacaaaagtaatgac

SEQ ID NO: 4673203 - DNA, 25 bp, Homo sapien
tctaacagttttttcgtggagcctg

SEQ ID NO: 4673204 - DNA, 25 bp, Homo sapien
gaatacgcagattcacaactatgta

SEQ ID NO: 4673205 - DNA, 25 bp, Homo sapien
tgctggtgggttcctctggtgccat

SEQ ID NO: 4673206 - DNA, 25 bp, Homo sapien
gtttccttaacgacttgctccactg

SEQ ID NO: 4673207 - DNA, 25 bp, Homo sapien
gaactgtgactgcatgcagcgatat

SEQ ID NO: 4673208 - DNA, 25 bp, Homo sapien
ggtccgagcctcatccaagtgtgct

SEQ ID NO: 4673209 - DNA, 25 bp, Homo sapien
acaaaagacaaggcaaggctattac

SEQ ID NO: 4673210 - DNA, 25 bp, Homo sapien
tacaaaagacaaggcaaggctatta

SEQ ID NO: 4673211 - DNA, 25 bp, Homo sapien
atacaaaagacaaggcaaggctatt

SEQ ID NO: 4673212 - DNA, 25 bp, Homo sapien
tttgtcaggcatatattaaaagacc

SEQ ID NO: 4673213 - DNA, 25 bp, Homo sapien
catcatattctatggattactctga

SEQ ID NO: 4673214 - DNA, 25 bp, Homo sapien
tctatacgtaatgaaaccagatatc

SEQ ID NO: 4673215 - DNA, 25 bp, Homo sapien
ttggaaactgacaggatactgaaaa

SEQ ID NO: 4673216 - DNA, 25 bp, Homo sapien
gcttcttatgaagactaacctcatc

SEQ ID NO: 4673217 - DNA, 25 bp, Homo sapien
gcaagggtctgctcaaattctatcc

SEQ ID NO: 4673218 - DNA, 25 bp, Homo sapien
tgcttgttcattggcagcaagggtc

SEQ ID NO: 4673219 - DNA, 25 bp, Homo sapien
tgggccaatgtatcttctagctgaa

SEQ ID NO: 4673220 - DNA, 25 bp, Homo sapien
ctactgatgaggtggcgcatctccc

SEQ ID NO: 4673221 - DNA, 25 bp, Homo sapien
caatttccgcttatatctcaggacc

SEQ ID NO: 4673222 - DNA, 25 bp, Homo sapien
cagctggtgattgtgattctggagg

SEQ ID NO: 4673223 - DNA, 25 bp, Homo sapien
gttcaggtcagactgggcttctctc

SEQ ID NO: 4673224 - DNA, 25 bp, Homo sapien
actgcaggagggcactaccactacg

SEQ ID NO: 4673225 - DNA, 25 bp, Homo sapien
aggagggcactaccactacgcaggc

SEQ ID NO: 4673226 - DNA, 25 bp, Homo sapien
gagggcactaccactacgcaggcgt

SEQ ID NO: 4673227 - DNA, 25 bp, Homo sapien
tgcaggagggcactaccactacgca

SEQ ID NO: 4673228 - DNA, 25 bp, Homo sapien
aggctcatccttcgggtcctcagta

SEQ ID NO: 4673229 - DNA, 25 bp, Homo sapien
aagtcctcagaatctggttttagct

SEQ ID NO: 4673230 - DNA, 25 bp, Homo sapien
tctggttttagctccgcaggctcat

SEQ ID NO: 4673231 - DNA, 25 bp, Homo sapien
ggactgggaggataagtcctcagaa

SEQ ID NO: 4673232 - DNA, 25 bp, Homo sapien
tagcttctgcttctctcgttctctc

SEQ ID NO: 4673233 - DNA, 25 bp, Homo sapien
tcgttcttcttcatcccgtttagac

SEQ ID NO: 4673234 - DNA, 25 bp, Homo sapien
tctccctcctttctcgttctcgttc

SEQ ID NO: 4673235 - DNA, 25 bp, Homo sapien
tttagcttctgcttctctcgttctc

SEQ ID NO: 4673236 - DNA, 25 bp, Homo sapien
ttccgtccatcatcatgtttgcctt

SEQ ID NO: 4673237 - DNA, 25 bp, Homo sapien
ttgagttcaatcttcaattgtttga

SEQ ID NO: 4673238 - DNA, 25 bp, Homo sapien
tgcttcctttttccgtccatcatca

SEQ ID NO: 4673239 - DNA, 25 bp, Homo sapien
gagttcaatcttcaattgtttgata

SEQ ID NO: 4673240 - DNA, 25 bp, Homo sapien
ttcctttggggcagaacggtacata

SEQ ID NO: 4673241 - DNA, 25 bp, Homo sapien
ccatcagctgaactttgtctctctg

SEQ ID NO: 4673242 - DNA, 25 bp, Homo sapien
ggggcagaacggtacatatccagca

SEQ ID NO: 4673243 - DNA, 25 bp, Homo sapien
ctttggggcagaacggtacatatcc

SEQ ID NO: 4673244 - DNA, 25 bp, Homo sapien
ctgcttggccatggctagcttcttc

SEQ ID NO: 4673245 - DNA, 25 bp, Homo sapien
ctttatcttccagatccttgagtct

SEQ ID NO: 4673246 - DNA, 25 bp, Homo sapien
ttgagtctttgccttagatcttcca

SEQ ID NO: 4673247 - DNA, 25 bp, Homo sapien
gctagcttcttctgtaggtattcta

SEQ ID NO: 4673248 - DNA, 25 bp, Homo sapien
tcagagtcaacacctggtctgccag

SEQ ID NO: 4673249 - DNA, 25 bp, Homo sapien
caaacggatattttgctcctgcatg

SEQ ID NO: 4673250 - DNA, 25 bp, Homo sapien
tctgattggacttgatacgctctga

SEQ ID NO: 4673251 - DNA, 25 bp, Homo sapien
ttctttaagcaacttatggatctga

SEQ ID NO: 4673252 - DNA, 25 bp, Homo sapien
cagtttccttactacctgtagctgg

SEQ ID NO: 4673253 - DNA, 25 bp, Homo sapien
tgtgccaatgttgctctgtaacaga

SEQ ID NO: 4673254 - DNA, 25 bp, Homo sapien
taaggcttgggtcctaagacccagc

SEQ ID NO: 4673255 - DNA, 25 bp, Homo sapien
tctctaaggcttgggtcctaagacc

SEQ ID NO: 4673256 - DNA, 25 bp, Homo sapien
gagccaactccagttgtgctttgag

SEQ ID NO: 4673257 - DNA, 25 bp, Homo sapien
agccaactccagttgtgctttgagg

SEQ ID NO: 4673258 - DNA, 25 bp, Homo sapien
tctcatcctgaaaatcatgtagctt

SEQ ID NO: 4673259 - DNA, 25 bp, Homo sapien
gcttcctgcgaagtctagagatgtc

SEQ ID NO: 4673260 - DNA, 25 bp, Homo sapien
catcacacttgggtacattgtctgg

SEQ ID NO: 4673261 - DNA, 25 bp, Homo sapien
cacttgggtacattgtctggtttct

SEQ ID NO: 4673262 - DNA, 25 bp, Homo sapien
tgtaatccttaatctcttccatcag

SEQ ID NO: 4673263 - DNA, 25 bp, Homo sapien
gatgcgatgaaaatcattggcacca

SEQ ID NO: 4673264 - DNA, 25 bp, Homo sapien
gcgggtgtcatagcgtgtcttcaca

SEQ ID NO: 4673265 - DNA, 25 bp, Homo sapien
gcaccaaaagcagcattacacttgg

SEQ ID NO: 4673266 - DNA, 25 bp, Homo sapien
ttacgcatgttacagcacggacagg

SEQ ID NO: 4673267 - DNA, 25 bp, Homo sapien
gaataagttcctgactagccagctc

SEQ ID NO: 4673268 - DNA, 25 bp, Homo sapien
ccaagtttatacagtgggctggaaa

SEQ ID NO: 4673269 - DNA, 25 bp, Homo sapien
tgctaaagtcatccagctactgaag

SEQ ID NO: 4673270 - DNA, 25 bp, Homo sapien
ttcttcaggaggaatggacaatcca

SEQ ID NO: 4673271 - DNA, 25 bp, Homo sapien
gaaaagagggatcacaacaaccctg

SEQ ID NO: 4673272 - DNA, 25 bp, Homo sapien
cctgctttaattcaagcttgtggag

SEQ ID NO: 4673273 - DNA, 25 bp, Homo sapien
agttctctccgtatcaaatttccag

SEQ ID NO: 4673274 - DNA, 25 bp, Homo sapien
tgtggagaacaaagtcctacagaaa

SEQ ID NO: 4673275 - DNA, 25 bp, Homo sapien
tatgtgcatcaaattccggcccttg

SEQ ID NO: 4673276 - DNA, 25 bp, Homo sapien
caaggaagcctacggatctggacag

SEQ ID NO: 4673277 - DNA, 25 bp, Homo sapien
taagtaagaaggtaagatccaagcc

SEQ ID NO: 4673278 - DNA, 25 bp, Homo sapien
ttatgcatgcctcagagcacacctg

SEQ ID NO: 4673279 - DNA, 25 bp, Homo sapien
gacatgggtttatctggcagtcctc

SEQ ID NO: 4673280 - DNA, 25 bp, Homo sapien
gaacaatatgtaacggcattccaca

SEQ ID NO: 4673281 - DNA, 25 bp, Homo sapien
gagtagcatatgcttccggcaagtg

SEQ ID NO: 4673282 - DNA, 25 bp, Homo sapien
ttctgcagatccactgggacatggg

SEQ ID NO: 4673283 - DNA, 25 bp, Homo sapien
cattttagttgtaggacagtgagca

SEQ ID NO: 4673284 - DNA, 25 bp, Homo sapien
tggagctggatgtcactcacatgca

SEQ ID NO: 4673285 - DNA, 25 bp, Homo sapien
cacagcttaaggtggatgacaaact

SEQ ID NO: 4673286 - DNA, 25 bp, Homo sapien
tgaagactacaggaaccactaaagg

SEQ ID NO: 4673287 - DNA, 25 bp, Homo sapien
ttaacaaccccacaagataggcact

SEQ ID NO: 4673288 - DNA, 25 bp, Homo sapien
gataggcactatagatgtagtctta

SEQ ID NO: 4673289 - DNA, 25 bp, Homo sapien
agtaggtaaatgagacctccagttt

SEQ ID NO: 4673290 - DNA, 25 bp, Homo sapien
ctgtaacaactaacatatattgggt

SEQ ID NO: 4673291 - DNA, 25 bp, Homo sapien
ctgccgcccctccctccgctcccct

SEQ ID NO: 4673292 - DNA, 25 bp, Homo sapien
tgccgcccctccctccgctcccctg

SEQ ID NO: 4673293 - DNA, 25 bp, Homo sapien
ctccctccgctcccctgcccttttg

SEQ ID NO: 4673294 - DNA, 25 bp, Homo sapien
gccgcccctccctccgctcccctgc

SEQ ID NO: 4673295 - DNA, 25 bp, Homo sapien
caagtatacagtgtccttggttgca

SEQ ID NO: 4673296 - DNA, 25 bp, Homo sapien
tgcagttcagtcattcggcgtatat

SEQ ID NO: 4673297 - DNA, 25 bp, Homo sapien
tgtttcatccttacactaggtctgt

SEQ ID NO: 4673298 - DNA, 25 bp, Homo sapien
tctgggatactgcagcgaataacac

SEQ ID NO: 4673299 - DNA, 25 bp, Homo sapien
gaaggatgtcaatcccggcttcccc

SEQ ID NO: 4673300 - DNA, 25 bp, Homo sapien
tacagaaggatgtcaatcccggctt

SEQ ID NO: 4673301 - DNA, 25 bp, Homo sapien
aggtacagaaggatgtcaatcccgg

SEQ ID NO: 4673302 - DNA, 25 bp, Homo sapien
gaaaacatactatatcaatgccttg

SEQ ID NO: 4673303 - DNA, 25 bp, Homo sapien
tgagatcatccagaggcgactgtca

SEQ ID NO: 4673304 - DNA, 25 bp, Homo sapien
aaattctgcgcggtatctgcctggt

SEQ ID NO: 4673305 - DNA, 25 bp, Homo sapien
tgtgtcatcttgaaaaacgccctga

SEQ ID NO: 4673306 - DNA, 25 bp, Homo sapien
tattctgcagaatagccgccaggca

SEQ ID NO: 4673307 - DNA, 25 bp, Homo sapien
tattgcaaacccagaatgacctggt

SEQ ID NO: 4673308 - DNA, 25 bp, Homo sapien
taatgaatgagctagtggaggcctg

SEQ ID NO: 4673309 - DNA, 25 bp, Homo sapien
gagtcagcactaatggacctgtcta

SEQ ID NO: 4673310 - DNA, 25 bp, Homo sapien
tgtaactatagcaggatctgtggcc

SEQ ID NO: 4673311 - DNA, 25 bp, Homo sapien
tcagctggctgttggatgatacaca

SEQ ID NO: 4673312 - DNA, 25 bp, Homo sapien
atttgacctcaaatacacattaaca

SEQ ID NO: 4673313 - DNA, 25 bp, Homo sapien
ttgaattttctgagacctatttgac

SEQ ID NO: 4673314 - DNA, 25 bp, Homo sapien
ttaacatatttatcattagcttcct

SEQ ID NO: 4673315 - DNA, 25 bp, Homo sapien
taacatatttatcattagcttcctt

SEQ ID NO: 4673316 - DNA, 25 bp, Homo sapien
tccacttagttctgtaactttgaag

SEQ ID NO: 4673317 - DNA, 25 bp, Homo sapien
acttagttctgtaactttgaagcag

SEQ ID NO: 4673318 - DNA, 25 bp, Homo sapien
ttgttcttccacttagttctgtaac

SEQ ID NO: 4673319 - DNA, 25 bp, Homo sapien
tcttccacttagttctgtaactttg

SEQ ID NO: 4673320 - DNA, 25 bp, Homo sapien
ggaaccattaggttctccttgcaga

SEQ ID NO: 4673321 - DNA, 25 bp, Homo sapien
cttcaggatttagccctgagctcaa

SEQ ID NO: 4673322 - DNA, 25 bp, Homo sapien
ccagctttcagaactacttcaggat

SEQ ID NO: 4673323 - DNA, 25 bp, Homo sapien
tgagctcaagccaggggaaccatta

SEQ ID NO: 4673324 - DNA, 25 bp, Homo sapien
tcagaatcacagccggaggtgaaag

SEQ ID NO: 4673325 - DNA, 25 bp, Homo sapien
agaatcacagccggaggtgaaaggc

SEQ ID NO: 4673326 - DNA, 25 bp, Homo sapien
cctcagaatcacagccggaggtgaa

SEQ ID NO: 4673327 - DNA, 25 bp, Homo sapien
aggcctcagaatcacagccggaggt

SEQ ID NO: 4673328 - DNA, 25 bp, Homo sapien
gccagggctcagcaacagggaggcg

SEQ ID NO: 4673329 - DNA, 25 bp, Homo sapien
gctcggagcagagccaccctttgct

SEQ ID NO: 4673330 - DNA, 25 bp, Homo sapien
agaactttggcgctcggagcagagc

SEQ ID NO: 4673331 - DNA, 25 bp, Homo sapien
gcagccaagcgacaggcaggcgcca

SEQ ID NO: 4673332 - DNA, 25 bp, Homo sapien
tgaatttctaagttggccctgagct

SEQ ID NO: 4673333 - DNA, 25 bp, Homo sapien
tgagcttcctggtaaagatagtgaa

SEQ ID NO: 4673334 - DNA, 25 bp, Homo sapien
taaagatagtgaaacaggtaatcag

SEQ ID NO: 4673335 - DNA, 25 bp, Homo sapien
ggtaatcagaaccaattatattgct

SEQ ID NO: 4673336 - DNA, 25 bp, Homo sapien
tttccagggctgctaaacaatcttc

SEQ ID NO: 4673337 - DNA, 25 bp, Homo sapien
tcaaagggcaagattctacaacagc

SEQ ID NO: 4673338 - DNA, 25 bp, Homo sapien
tcaacacagtccagtaaacccagct

SEQ ID NO: 4673339 - DNA, 25 bp, Homo sapien
tatattgtctgcaacctgactgggt

SEQ ID NO: 4673340 - DNA, 25 bp, Homo sapien
gagactcattctggtattgtgacct

SEQ ID NO: 4673341 - DNA, 25 bp, Homo sapien
gccaggaactcagctaagtgcatta

SEQ ID NO: 4673342 - DNA, 25 bp, Homo sapien
tgtgtgtgattgcaaccttccaggg

SEQ ID NO: 4673343 - DNA, 25 bp, Homo sapien
taaaagctaacacctcggagtgcac

SEQ ID NO: 4673344 - DNA, 25 bp, Homo sapien
gccaatatccttgagggtgacgtga

SEQ ID NO: 4673345 - DNA, 25 bp, Homo sapien
cagggagagccaaaaacacgtccaa

SEQ ID NO: 4673346 - DNA, 25 bp, Homo sapien
tagcactggatatcccagggagagc

SEQ ID NO: 4673347 - DNA, 25 bp, Homo sapien
tcctgggctgcaggtaggtaagtca

SEQ ID NO: 4673348 - DNA, 25 bp, Homo sapien
gtagtacatctttttacagccagtg

SEQ ID NO: 4673349 - DNA, 25 bp, Homo sapien
tctgcttccatagtaatagattctc

SEQ ID NO: 4673350 - DNA, 25 bp, Homo sapien
ctttttacagccagtgctcttcctg

SEQ ID NO: 4673351 - DNA, 25 bp, Homo sapien
tcaggagcaactggactgattccag

SEQ ID NO: 4673352 - DNA, 25 bp, Homo sapien
tgctgtcccccagtccatagctttt

SEQ ID NO: 4673353 - DNA, 25 bp, Homo sapien
taaccatggctctacacgaatctgc

SEQ ID NO: 4673354 - DNA, 25 bp, Homo sapien
tagcttttctatacgtccttgtgcc

SEQ ID NO: 4673355 - DNA, 25 bp, Homo sapien
gtgcctattatccacggcttctgct

SEQ ID NO: 4673356 - DNA, 25 bp, Homo sapien
tcatgcctttttcaagacttgacta

SEQ ID NO: 4673357 - DNA, 25 bp, Homo sapien
catgcctttttcaagacttgactac

SEQ ID NO: 4673358 - DNA, 25 bp, Homo sapien
tcaattttttcagagatcctactaa

SEQ ID NO: 4673359 - DNA, 25 bp, Homo sapien
agatcctactaaattcactttttgt

SEQ ID NO: 4673360 - DNA, 25 bp, Homo sapien
caggaaagtcctcaattttttcaga

SEQ ID NO: 4673361 - DNA, 25 bp, Homo sapien
ttttttcagagatcctactaaattc

SEQ ID NO: 4673362 - DNA, 25 bp, Homo sapien
gatggacagggggttatcccacttc

SEQ ID NO: 4673363 - DNA, 25 bp, Homo sapien
gagggacttcaagtttggctctgag

SEQ ID NO: 4673364 - DNA, 25 bp, Homo sapien
agattttttccatgggagttcattt

SEQ ID NO: 4673365 - DNA, 25 bp, Homo sapien
ggctgagcagattctgttctctgtt

SEQ ID NO: 4673366 - DNA, 25 bp, Homo sapien
tagttactttctagacacaaggagg

SEQ ID NO: 4673367 - DNA, 25 bp, Homo sapien
ttcttttatggtggcagcgaaagag

SEQ ID NO: 4673368 - DNA, 25 bp, Homo sapien
tgagggcattcaaccccttgcccct

SEQ ID NO: 4673369 - DNA, 25 bp, Homo sapien
ggtgagggcattcaaccccttgccc

SEQ ID NO: 4673370 - DNA, 25 bp, Homo sapien
cagttaggcttaagaccacagatgc

SEQ ID NO: 4673371 - DNA, 25 bp, Homo sapien
cagatgcccagtaatgaggtgagca

SEQ ID NO: 4673372 - DNA, 25 bp, Homo sapien
ccacagatgcccagtaatgaggtga

SEQ ID NO: 4673373 - DNA, 25 bp, Homo sapien
tcccagttaggcttaagaccacaga

SEQ ID NO: 4673374 - DNA, 25 bp, Homo sapien
agccaactgacttagtgggtgacag

SEQ ID NO: 4673375 - DNA, 25 bp, Homo sapien
taacggccttaacaagaccattgga

SEQ ID NO: 4673376 - DNA, 25 bp, Homo sapien
tgaatactggaaatcttaacggcct

SEQ ID NO: 4673377 - DNA, 25 bp, Homo sapien
gagatttcaggggagacaatggcca

SEQ ID NO: 4673378 - DNA, 25 bp, Homo sapien
aaatattgtggggtcgctggcccca

SEQ ID NO: 4673379 - DNA, 25 bp, Homo sapien
taatactgtctagcaaatattgtgg

SEQ ID NO: 4673380 - DNA, 25 bp, Homo sapien
gagaagcgtcaggatgaaacataat

SEQ ID NO: 4673381 - DNA, 25 bp, Homo sapien
ctcatgagaagcgtcaggatgaaac

SEQ ID NO: 4673382 - DNA, 25 bp, Homo sapien
gctgatactgctgtttcaaagacgc

SEQ ID NO: 4673383 - DNA, 25 bp, Homo sapien
ctaaattgctgatactgctgtttca

SEQ ID NO: 4673384 - DNA, 25 bp, Homo sapien
ttgctgatactgctgtttcaaagac

SEQ ID NO: 4673385 - DNA, 25 bp, Homo sapien
aaattgctgatactgctgtttcaaa

SEQ ID NO: 4673386 - DNA, 25 bp, Homo sapien
ggaaataaggatccacatctgagtt

SEQ ID NO: 4673387 - DNA, 25 bp, Homo sapien
caggaaataaggatccacatctgag

SEQ ID NO: 4673388 - DNA, 25 bp, Homo sapien
cacaggaaataaggatccacatctg

SEQ ID NO: 4673389 - DNA, 25 bp, Homo sapien
gaaataaggatccacatctgagttc

SEQ ID NO: 4673390 - DNA, 25 bp, Homo sapien
caaaggaccccgtatgcatccatca

SEQ ID NO: 4673391 - DNA, 25 bp, Homo sapien
tgcctccaaaggaccccgtatgcat

SEQ ID NO: 4673392 - DNA, 25 bp, Homo sapien
tccaaaggaccccgtatgcatccat

SEQ ID NO: 4673393 - DNA, 25 bp, Homo sapien
aaggaccccgtatgcatccatcaca

SEQ ID NO: 4673394 - DNA, 25 bp, Homo sapien
attctaagggagttattgcttgctt

SEQ ID NO: 4673395 - DNA, 25 bp, Homo sapien
ttctaagggagttattgcttgcttt

SEQ ID NO: 4673396 - DNA, 25 bp, Homo sapien
tgtgacaactcgtagcaatttgctg

SEQ ID NO: 4673397 - DNA, 25 bp, Homo sapien
ctccaggtactgtgttgtatcaggt

SEQ ID NO: 4673398 - DNA, 25 bp, Homo sapien
tttgactcattttccgtcacaatca

SEQ ID NO: 4673399 - DNA, 25 bp, Homo sapien
ctcaagctccaaatgccatttgact

SEQ ID NO: 4673400 - DNA, 25 bp, Homo sapien
gcccactggatttgcatggtttttc

SEQ ID NO: 4673401 - DNA, 25 bp, Homo sapien
ttgttgaatatctgagttgcccact

SEQ ID NO: 4673402 - DNA, 25 bp, Homo sapien
tctgagttgcccactggatttgcat

SEQ ID NO: 4673403 - DNA, 25 bp, Homo sapien
tgaatatctgagttgcccactggat

SEQ ID NO: 4673404 - DNA, 25 bp, Homo sapien
aaccctggccgagacactattttgg

SEQ ID NO: 4673405 - DNA, 25 bp, Homo sapien
tttgggctccctgatttcaaggtgt

SEQ ID NO: 4673406 - DNA, 25 bp, Homo sapien
gagacactattttgggctccctgat

SEQ ID NO: 4673407 - DNA, 25 bp, Homo sapien
tggccgtaagaaaccctggccgaga

SEQ ID NO: 4673408 - DNA, 25 bp, Homo sapien
tgactgcatcacagtacctactgac

SEQ ID NO: 4673409 - DNA, 25 bp, Homo sapien
ggctgttgactgcatcacagtacct

SEQ ID NO: 4673410 - DNA, 25 bp, Homo sapien
acagtacctactgacaacatcacag

SEQ ID NO: 4673411 - DNA, 25 bp, Homo sapien
gacaacatcacagtatgataccaca

SEQ ID NO: 4673412 - DNA, 25 bp, Homo sapien
gcagctgtgatgaggaatcccgcac

SEQ ID NO: 4673413 - DNA, 25 bp, Homo sapien
gctgtgatgaggaatcccgcacaca

SEQ ID NO: 4673414 - DNA, 25 bp, Homo sapien
ccttggctcattagatttcagtgca

SEQ ID NO: 4673415 - DNA, 25 bp, Homo sapien
gtgatgaggaatcccgcacacagga

SEQ ID NO: 4673416 - DNA, 25 bp, Homo sapien
ttcttcacccacaggccttaatgta

SEQ ID NO: 4673417 - DNA, 25 bp, Homo sapien
tcccttgaaatttcttcacccacag

SEQ ID NO: 4673418 - DNA, 25 bp, Homo sapien
ttcacccacaggccttaatgtacac

SEQ ID NO: 4673419 - DNA, 25 bp, Homo sapien
cacccacaggccttaatgtacacat

SEQ ID NO: 4673420 - DNA, 25 bp, Homo sapien
ctttgccacttaattgtcggaaact

SEQ ID NO: 4673421 - DNA, 25 bp, Homo sapien
catacttgtaattaactttgccact

SEQ ID NO: 4673422 - DNA, 25 bp, Homo sapien
tgccacttaattgtcggaaacttaa

SEQ ID NO: 4673423 - DNA, 25 bp, Homo sapien
tagcatacttgtaattaactttgcc

SEQ ID NO: 4673424 - DNA, 25 bp, Homo sapien
ggagtgtagcgggctccactctcat

SEQ ID NO: 4673425 - DNA, 25 bp, Homo sapien
tgggagtgtagcgggctccactctc

SEQ ID NO: 4673426 - DNA, 25 bp, Homo sapien
gggagtgtagcgggctccactctca

SEQ ID NO: 4673427 - DNA, 25 bp, Homo sapien
caaattaaggtgttctcagatagag

SEQ ID NO: 4673428 - DNA, 25 bp, Homo sapien
tgtgagcctaagtgtgtacaaagag

SEQ ID NO: 4673429 - DNA, 25 bp, Homo sapien
caggttggaggtctacattaggtaa

SEQ ID NO: 4673430 - DNA, 25 bp, Homo sapien
tgaagatagcatatggaggctggac

SEQ ID NO: 4673431 - DNA, 25 bp, Homo sapien
tcatgcaaagtaactgttctccatg

SEQ ID NO: 4673432 - DNA, 25 bp, Homo sapien
atgcaaagtaactgttctccatggg

SEQ ID NO: 4673433 - DNA, 25 bp, Homo sapien
tcgcacactgtacttctgtggacag

SEQ ID NO: 4673434 - DNA, 25 bp, Homo sapien
ttctttcttcgcacactgtacttct

SEQ ID NO: 4673435 - DNA, 25 bp, Homo sapien
gaaatgattcaccattgtgctgcca

SEQ ID NO: 4673436 - DNA, 25 bp, Homo sapien
cgagaaatgattcaccattgtgctg

SEQ ID NO: 4673437 - DNA, 25 bp, Homo sapien
ggcgagaaatgattcaccattgtgc

SEQ ID NO: 4673438 - DNA, 25 bp, Homo sapien
gaggcgagaaatgattcaccattgt

SEQ ID NO: 4673439 - DNA, 25 bp, Homo sapien
tactgctagaagagttgggttgtcc

SEQ ID NO: 4673440 - DNA, 25 bp, Homo sapien
caacaaaactatttgcagcaccgta

SEQ ID NO: 4673441 - DNA, 25 bp, Homo sapien
tctttctggatttggacattcgtac

SEQ ID NO: 4673442 - DNA, 25 bp, Homo sapien
tgtgaataccaatggcagcatgtct

SEQ ID NO: 4673443 - DNA, 25 bp, Homo sapien
gtctatgatatgactggctgtagca

SEQ ID NO: 4673444 - DNA, 25 bp, Homo sapien
ggtgatctttggtctatgatatgac

SEQ ID NO: 4673445 - DNA, 25 bp, Homo sapien
cacagggtaaactaggtgatctttg

SEQ ID NO: 4673446 - DNA, 25 bp, Homo sapien
tccacagggtaaactaggtgatctt

SEQ ID NO: 4673447 - DNA, 25 bp, Homo sapien
atttggctttccccatttcccatca

SEQ ID NO: 4673448 - DNA, 25 bp, Homo sapien
tttatcatacaaagcaatttggctt

SEQ ID NO: 4673449 - DNA, 25 bp, Homo sapien
atcatacaaagcaatttggctttcc

SEQ ID NO: 4673450 - DNA, 25 bp, Homo sapien
tttggctttccccatttcccatcat

SEQ ID NO: 4673451 - DNA, 25 bp, Homo sapien
caggggctggtactgatacgtctat

SEQ ID NO: 4673452 - DNA, 25 bp, Homo sapien
cctgagtctacaatatcagccccaa

SEQ ID NO: 4673453 - DNA, 25 bp, Homo sapien
gtactgatacgtctatttgtaatgg

SEQ ID NO: 4673454 - DNA, 25 bp, Homo sapien
tcctgagtctacaatatcagcccca

SEQ ID NO: 4673455 - DNA, 25 bp, Homo sapien
tcacgaattagagtgtcattcttgc

SEQ ID NO: 4673456 - DNA, 25 bp, Homo sapien
cttcacgaattagagtgtcattctt

SEQ ID NO: 4673457 - DNA, 25 bp, Homo sapien
acgaattagagtgtcattcttgctc

SEQ ID NO: 4673458 - DNA, 25 bp, Homo sapien
atgcttcacgaattagagtgtcatt

SEQ ID NO: 4673459 - DNA, 25 bp, Homo sapien
tcagcaatgaaggatttgtgaatcg

SEQ ID NO: 4673460 - DNA, 25 bp, Homo sapien
tgaggtacagaagcatccggatttg

SEQ ID NO: 4673461 - DNA, 25 bp, Homo sapien
tcggctacgggtctggtcacacctt

SEQ ID NO: 4673462 - DNA, 25 bp, Homo sapien
tgattgacacaagtgtcggctacgg

SEQ ID NO: 4673463 - DNA, 25 bp, Homo sapien
tacaacacagaattccttatattct

SEQ ID NO: 4673464 - DNA, 25 bp, Homo sapien
ccgctgtctttctctctagatacta

SEQ ID NO: 4673465 - DNA, 25 bp, Homo sapien
ttacaacacagaattccttatattc

SEQ ID NO: 4673466 - DNA, 25 bp, Homo sapien
ctgtctttctctctagatactaatt

SEQ ID NO: 4673467 - DNA, 25 bp, Homo sapien
tacacaccatgatgtacatgtagct

SEQ ID NO: 4673468 - DNA, 25 bp, Homo sapien
tgttacacaatacacaccatgatgt

SEQ ID NO: 4673469 - DNA, 25 bp, Homo sapien
tccaatctctgttacacaatacaca

SEQ ID NO: 4673470 - DNA, 25 bp, Homo sapien
tacacaatacacaccatgatgtaca

SEQ ID NO: 4673471 - DNA, 25 bp, Homo sapien
taggcgttgccaaaggtaggataaa

SEQ ID NO: 4673472 - DNA, 25 bp, Homo sapien
tagcaacaacaaggttccagtgacc

SEQ ID NO: 4673473 - DNA, 25 bp, Homo sapien
tatacgaatgactgacactttggac

SEQ ID NO: 4673474 - DNA, 25 bp, Homo sapien
ggcttagcagcagtattaggcgttg

SEQ ID NO: 4673475 - DNA, 25 bp, Homo sapien
ttctccctattgacatagatggtcc

SEQ ID NO: 4673476 - DNA, 25 bp, Homo sapien
ctattgacatagatggtccaggttc

SEQ ID NO: 4673477 - DNA, 25 bp, Homo sapien
ccctattgacatagatggtccaggt

SEQ ID NO: 4673478 - DNA, 25 bp, Homo sapien
ctttctccctattgacatagatggt

SEQ ID NO: 4673479 - DNA, 25 bp, Homo sapien
tatgtggaattcatacatatgcatg

SEQ ID NO: 4673480 - DNA, 25 bp, Homo sapien
gaggagccaaatgctcagtgggcta

SEQ ID NO: 4673481 - DNA, 25 bp, Homo sapien
catatgcatgaattcatccagaagt

SEQ ID NO: 4673482 - DNA, 25 bp, Homo sapien
aggagccaaatgctcagtgggctac

SEQ ID NO: 4673483 - DNA, 25 bp, Homo sapien
tgaaccactaaatccacacaccaga

SEQ ID NO: 4673484 - DNA, 25 bp, Homo sapien
agagtgggtttcaccggacaccaga

SEQ ID NO: 4673485 - DNA, 25 bp, Homo sapien
gataggtcctgaaaggtgaaccact

SEQ ID NO: 4673486 - DNA, 25 bp, Homo sapien
tatccaatttcaggtacaggcaaag

SEQ ID NO: 4673487 - DNA, 25 bp, Homo sapien
agggcacactgcataatagttgtca

SEQ ID NO: 4673488 - DNA, 25 bp, Homo sapien
ctgcttaagggatattaaccaaagc

SEQ ID NO: 4673489 - DNA, 25 bp, Homo sapien
taagggatattaaccaaagccacat

SEQ ID NO: 4673490 - DNA, 25 bp, Homo sapien
gatattaaccaaagccacatgtcag

SEQ ID NO: 4673491 - DNA, 25 bp, Homo sapien
tacatggcataaggaacagcagcca

SEQ ID NO: 4673492 - DNA, 25 bp, Homo sapien
agcagcagctgtagtaagatggcct

SEQ ID NO: 4673493 - DNA, 25 bp, Homo sapien
tgcctctttgacgatgggagcccaa

SEQ ID NO: 4673494 - DNA, 25 bp, Homo sapien
cagctgtagtaagatggcctcttct

SEQ ID NO: 4673495 - DNA, 25 bp, Homo sapien
cagcttttagatgcttgtgcatgag

SEQ ID NO: 4673496 - DNA, 25 bp, Homo sapien
tccagggatgccttgaatacatcag

SEQ ID NO: 4673497 - DNA, 25 bp, Homo sapien
tttagatgcttgtgcatgagtccag

SEQ ID NO: 4673498 - DNA, 25 bp, Homo sapien
tgaatacatcagcatgtttagaaca

SEQ ID NO: 4673499 - DNA, 25 bp, Homo sapien
gatatgccacttggatccaagtaca

SEQ ID NO: 4673500 - DNA, 25 bp, Homo sapien
acttggatccaagtacagtaaaatg

SEQ ID NO: 4673501 - DNA, 25 bp, Homo sapien
gccacttggatccaagtacagtaaa

SEQ ID NO: 4673502 - DNA, 25 bp, Homo sapien
ccagatatgccacttggatccaagt

SEQ ID NO: 4673503 - DNA, 25 bp, Homo sapien
tccagaccacactgactgcttttgt

SEQ ID NO: 4673504 - DNA, 25 bp, Homo sapien
tctgacaggtctcaaaaagaacagt

SEQ ID NO: 4673505 - DNA, 25 bp, Homo sapien
ttctgcagtccagggtcacaggaca

SEQ ID NO: 4673506 - DNA, 25 bp, Homo sapien
ggtgatatcatacagccaggccctg

SEQ ID NO: 4673507 - DNA, 25 bp, Homo sapien
tcttttcgtagagaagaaactcgga

SEQ ID NO: 4673508 - DNA, 25 bp, Homo sapien
tcgtagagaagaaactcggatgttc

SEQ ID NO: 4673509 - DNA, 25 bp, Homo sapien
gaagaaactcggatgttcttggaga

SEQ ID NO: 4673510 - DNA, 25 bp, Homo sapien
tagagaagaaactcggatgttcttg

SEQ ID NO: 4673511 - DNA, 25 bp, Homo sapien
agtagctttatccttagccaaaact

SEQ ID NO: 4673512 - DNA, 25 bp, Homo sapien
tcattttctgtcctataactttcat

SEQ ID NO: 4673513 - DNA, 25 bp, Homo sapien
cattttctgtcctataactttcatt

SEQ ID NO: 4673514 - DNA, 25 bp, Homo sapien
ctcattagtagctttatccttagcc

SEQ ID NO: 4673515 - DNA, 25 bp, Homo sapien
gttctgttgaagtcttttacaccta

SEQ ID NO: 4673516 - DNA, 25 bp, Homo sapien
tgttgaagtcttttacacctattaa

SEQ ID NO: 4673517 - DNA, 25 bp, Homo sapien
tcttttacacctattaaatattctc

SEQ ID NO: 4673518 - DNA, 25 bp, Homo sapien
tctgttgaagtcttttacacctatt

SEQ ID NO: 4673519 - DNA, 25 bp, Homo sapien
ccaattggatagacatttccagtgg

SEQ ID NO: 4673520 - DNA, 25 bp, Homo sapien
tagggctcgtaactcccaattggat

SEQ ID NO: 4673521 - DNA, 25 bp, Homo sapien
cagtgggttccaagccctcttcatt

SEQ ID NO: 4673522 - DNA, 25 bp, Homo sapien
tgttgttcatttcatagggctcgta

SEQ ID NO: 4673523 - DNA, 25 bp, Homo sapien
agttgaatatcatgccaggaaccat

SEQ ID NO: 4673524 - DNA, 25 bp, Homo sapien
tgatagttgaatatcatgccaggaa

SEQ ID NO: 4673525 - DNA, 25 bp, Homo sapien
caatgatagttgaatatcatgccag

SEQ ID NO: 4673526 - DNA, 25 bp, Homo sapien
atagttgaatatcatgccaggaacc

SEQ ID NO: 4673527 - DNA, 25 bp, Homo sapien
gctgaagttctctaattgttggatc

SEQ ID NO: 4673528 - DNA, 25 bp, Homo sapien
tctctcttggtgtagtctgttggtc

SEQ ID NO: 4673529 - DNA, 25 bp, Homo sapien
ggtggctgttatactgaattgcaag

SEQ ID NO: 4673530 - DNA, 25 bp, Homo sapien
ggctgtagcacttgaggaggaattt

SEQ ID NO: 4673531 - DNA, 25 bp, Homo sapien
acatccattgttaatgtgggtttga

SEQ ID NO: 4673532 - DNA, 25 bp, Homo sapien
gtacaaacggcatgtcactaatttt

SEQ ID NO: 4673533 - DNA, 25 bp, Homo sapien
cattgttaatgtgggtttgacgcca

SEQ ID NO: 4673534 - DNA, 25 bp, Homo sapien
aaaagtgggtacaaacggcatgtca

SEQ ID NO: 4673535 - DNA, 25 bp, Homo sapien
gaggaggtatcacagaatcaagatg

SEQ ID NO: 4673536 - DNA, 25 bp, Homo sapien
cagaatcaagatggatggttttaaa

SEQ ID NO: 4673537 - DNA, 25 bp, Homo sapien
acatgctgtgattatcaaagacttc

SEQ ID NO: 4673538 - DNA, 25 bp, Homo sapien
tatcacagaatcaagatggatggtt

SEQ ID NO: 4673539 - DNA, 25 bp, Homo sapien
tcagaaaatttataatcatggcgga

SEQ ID NO: 4673540 - DNA, 25 bp, Homo sapien
gagaggcctcagaaaatttataatc

SEQ ID NO: 4673541 - DNA, 25 bp, Homo sapien
gaaaatttataatcatggcggaagg

SEQ ID NO: 4673542 - DNA, 25 bp, Homo sapien
ctggagaggcctcagaaaatttata

SEQ ID NO: 4673543 - DNA, 25 bp, Homo sapien
tctaatataaacagtgcctgtcttc

SEQ ID NO: 4673544 - DNA, 25 bp, Homo sapien
tgaaggatctaatctaatataaaca

SEQ ID NO: 4673545 - DNA, 25 bp, Homo sapien
cacattttattgaatctgactgtgg

SEQ ID NO: 4673546 - DNA, 25 bp, Homo sapien
gtacactgtgatgaactaggtttga

SEQ ID NO: 4673547 - DNA, 25 bp, Homo sapien
tttggaaatggttgcatacataagg

SEQ ID NO: 4673548 - DNA, 25 bp, Homo sapien
gtgttttgctgttctatgccagtaa

SEQ ID NO: 4673549 - DNA, 25 bp, Homo sapien
ttcttgccaatttgcatgtgttttg

SEQ ID NO: 4673550 - DNA, 25 bp, Homo sapien
ctacaggatctggtaaggtgaattt

SEQ ID NO: 4673551 - DNA, 25 bp, Homo sapien
aatgatcacaggaattggtccataa

SEQ ID NO: 4673552 - DNA, 25 bp, Homo sapien
atcacaggaattggtccataatggc

SEQ ID NO: 4673553 - DNA, 25 bp, Homo sapien
ttattctccatagtaacctcagaaa

SEQ ID NO: 4673554 - DNA, 25 bp, Homo sapien
atttattctccatagtaacctcaga

SEQ ID NO: 4673555 - DNA, 25 bp, Homo sapien
tatcgatcctcttccatactacata

SEQ ID NO: 4673556 - DNA, 25 bp, Homo sapien
tctccatcgtgggttcttgaggact

SEQ ID NO: 4673557 - DNA, 25 bp, Homo sapien
tactacataccgctctacataacag

SEQ ID NO: 4673558 - DNA, 25 bp, Homo sapien
tttgcatttgtaactccgatctctc

SEQ ID NO: 4673559 - DNA, 25 bp, Homo sapien
gactccaaagcatattgtgtgtttc

SEQ ID NO: 4673560 - DNA, 25 bp, Homo sapien
caaacatacaacacagcatagtcaa

SEQ ID NO: 4673561 - DNA, 25 bp, Homo sapien
tctataattaaagtctctttctgag

SEQ ID NO: 4673562 - DNA, 25 bp, Homo sapien
tttctgagactccaaagcatattgt

SEQ ID NO: 4673563 - DNA, 25 bp, Homo sapien
gaagggcactccaagtgttgcatct

SEQ ID NO: 4673564 - DNA, 25 bp, Homo sapien
tcttgaagggcactccaagtgttgc

SEQ ID NO: 4673565 - DNA, 25 bp, Homo sapien
cactccaagtgttgcatctccatgg

SEQ ID NO: 4673566 - DNA, 25 bp, Homo sapien
gaatttctatcttgaagggcactcc

SEQ ID NO: 4673567 - DNA, 25 bp, Homo sapien
gatggagccagtcagcaaactgcat

SEQ ID NO: 4673568 - DNA, 25 bp, Homo sapien
aggatggagccagtcagcaaactgc

SEQ ID NO: 4673569 - DNA, 25 bp, Homo sapien
gaaggatggagccagtcagcaaact

SEQ ID NO: 4673570 - DNA, 25 bp, Homo sapien
ccggaaggatggagccagtcagcaa

SEQ ID NO: 4673571 - DNA, 25 bp, Homo sapien
tctccattgtcaggtgtcactgagg

SEQ ID NO: 4673572 - DNA, 25 bp, Homo sapien
agcagcatctccattgtcaggtgtc

SEQ ID NO: 4673573 - DNA, 25 bp, Homo sapien
cattgtcaggtgtcactgaggttaa

SEQ ID NO: 4673574 - DNA, 25 bp, Homo sapien
gcatctccattgtcaggtgtcactg

SEQ ID NO: 4673575 - DNA, 25 bp, Homo sapien
tcacccataccataagcattcaaga

SEQ ID NO: 4673576 - DNA, 25 bp, Homo sapien
cacccataccataagcattcaagat

SEQ ID NO: 4673577 - DNA, 25 bp, Homo sapien
ccttagacattgaatttgttctttt

SEQ ID NO: 4673578 - DNA, 25 bp, Homo sapien
caaaatcaaaagagagtcctggacc

SEQ ID NO: 4673579 - DNA, 25 bp, Homo sapien
tcaaaatcaaaagagagtcctggac

SEQ ID NO: 4673580 - DNA, 25 bp, Homo sapien
ctcaaaatcaaaagagagtcctgga

SEQ ID NO: 4673581 - DNA, 25 bp, Homo sapien
catttcacccagctccttttcaaga

SEQ ID NO: 4673582 - DNA, 25 bp, Homo sapien
caagatggagttgttctggtgtaaa

SEQ ID NO: 4673583 - DNA, 25 bp, Homo sapien
tttcaagatggagttgttctggtgt

SEQ ID NO: 4673584 - DNA, 25 bp, Homo sapien
tggagttgttctggtgtaaaagcct

SEQ ID NO: 4673585 - DNA, 25 bp, Homo sapien
tctttcacttcgtgttgtaagtagg

SEQ ID NO: 4673586 - DNA, 25 bp, Homo sapien
tgtaagtaggttccggcatcctgtg

SEQ ID NO: 4673587 - DNA, 25 bp, Homo sapien
gcatcctgtgtgctctggtagccta

SEQ ID NO: 4673588 - DNA, 25 bp, Homo sapien
tgctctggtagcctaagctgatcat

SEQ ID NO: 4673589 - DNA, 25 bp, Homo sapien
ggtatcggtctgaatccttggtgat

SEQ ID NO: 4673590 - DNA, 25 bp, Homo sapien
tggtatcggtctgaatccttggtga

SEQ ID NO: 4673591 - DNA, 25 bp, Homo sapien
cttccttggtgactaaacccatatt

SEQ ID NO: 4673592 - DNA, 25 bp, Homo sapien
tccttggtgactaaacccatatttc

SEQ ID NO: 4673593 - DNA, 25 bp, Homo sapien
cagatatattagagtgtaaatgtga

SEQ ID NO: 4673594 - DNA, 25 bp, Homo sapien
caatattagagatacctacttcccc

SEQ ID NO: 4673595 - DNA, 25 bp, Homo sapien
tattcaatattagagatacctactt

SEQ ID NO: 4673596 - DNA, 25 bp, Homo sapien
cctttacacagatatattagagtgt

SEQ ID NO: 4673597 - DNA, 25 bp, Homo sapien
tcaaatatgttaatccttccttcat

SEQ ID NO: 4673598 - DNA, 25 bp, Homo sapien
gatcaaatatgttaatccttccttc

SEQ ID NO: 4673599 - DNA, 25 bp, Homo sapien
cttcctgcactgagactttaaactg

SEQ ID NO: 4673600 - DNA, 25 bp, Homo sapien
gcactgagactttaaactgagaatg

SEQ ID NO: 4673601 - DNA, 25 bp, Homo sapien
gccttcctgcactgagactttaaac

SEQ ID NO: 4673602 - DNA, 25 bp, Homo sapien
cctgcactgagactttaaactgaga

SEQ ID NO: 4673603 - DNA, 25 bp, Homo sapien
cccatgatcactcatcttttctgtg

SEQ ID NO: 4673604 - DNA, 25 bp, Homo sapien
tgctgaggacggtcagctttttgtc

SEQ ID NO: 4673605 - DNA, 25 bp, Homo sapien
ttgtttactttgctgaggacggtca

SEQ ID NO: 4673606 - DNA, 25 bp, Homo sapien
tgcacaaaatacccatgatcactca

SEQ ID NO: 4673607 - DNA, 25 bp, Homo sapien
gctgcaaaagtttcacctgaagatt

SEQ ID NO: 4673608 - DNA, 25 bp, Homo sapien
ttcacctgaagattcgtagttcttt

SEQ ID NO: 4673609 - DNA, 25 bp, Homo sapien
ttgctgcaaaagtttcacctgaaga

SEQ ID NO: 4673610 - DNA, 25 bp, Homo sapien
tgctgcaaaagtttcacctgaagat

SEQ ID NO: 4673611 - DNA, 25 bp, Homo sapien
ctgcaggcacagaaatacggagagg

SEQ ID NO: 4673612 - DNA, 25 bp, Homo sapien
cacagaaatacggagaggaagaccc

SEQ ID NO: 4673613 - DNA, 25 bp, Homo sapien
agaaatacggagaggaagacccagg

SEQ ID NO: 4673614 - DNA, 25 bp, Homo sapien
ggcacagaaatacggagaggaagac

SEQ ID NO: 4673615 - DNA, 25 bp, Homo sapien
aaagttattactaggctcatcaggt

SEQ ID NO: 4673616 - DNA, 25 bp, Homo sapien
ggcagtctacagagatttccagttg

SEQ ID NO: 4673617 - DNA, 25 bp, Homo sapien
gattttgggtaatttggcagtctac

SEQ ID NO: 4673618 - DNA, 25 bp, Homo sapien
gaaatcggcactactttgataaccc

SEQ ID NO: 4673619 - DNA, 25 bp, Homo sapien
tatgtatcctctcatccattaggcc

SEQ ID NO: 4673620 - DNA, 25 bp, Homo sapien
tctggcctgaccactctgtcacttt

SEQ ID NO: 4673621 - DNA, 25 bp, Homo sapien
tctgcttgatactccttgtcacaca

SEQ ID NO: 4673622 - DNA, 25 bp, Homo sapien
caccagctgtttcgtctttgctatg

SEQ ID NO: 4673623 - DNA, 25 bp, Homo sapien
tgctattccagggtcgcatagcagt

SEQ ID NO: 4673624 - DNA, 25 bp, Homo sapien
tgagcacaggctgtgctattccagg

SEQ ID NO: 4673625 - DNA, 25 bp, Homo sapien
ttacccttttgagcacaggctgtgc

SEQ ID NO: 4673626 - DNA, 25 bp, Homo sapien
tgtgctattccagggtcgcatagca

SEQ ID NO: 4673627 - DNA, 25 bp, Homo sapien
cctctgcaatgaaagaatgaactgg

SEQ ID NO: 4673628 - DNA, 25 bp, Homo sapien
tcaggaagaattcaccctttgaagg

SEQ ID NO: 4673629 - DNA, 25 bp, Homo sapien
gacactgcttacattcctggccttc

SEQ ID NO: 4673630 - DNA, 25 bp, Homo sapien
ccctttgaaggactacagagttgct

SEQ ID NO: 4673631 - DNA, 25 bp, Homo sapien
atggacatttcacaacaacaaggaa

SEQ ID NO: 4673632 - DNA, 25 bp, Homo sapien
agtatccacttgcaccagccattta

SEQ ID NO: 4673633 - DNA, 25 bp, Homo sapien
gatggacatttcacaacaacaagga

SEQ ID NO: 4673634 - DNA, 25 bp, Homo sapien
cagtatccacttgcaccagccattt

SEQ ID NO: 4673635 - DNA, 25 bp, Homo sapien
tgtaaatgatagaattgaatcacct

SEQ ID NO: 4673636 - DNA, 25 bp, Homo sapien
gtaaatgatagaattgaatcacctt

SEQ ID NO: 4673637 - DNA, 25 bp, Homo sapien
tctctttgcttattgattcttcaaa

SEQ ID NO: 4673638 - DNA, 25 bp, Homo sapien
aatatgtcataataatttatgacca

SEQ ID NO: 4673639 - DNA, 25 bp, Homo sapien
gcttattgattcttcaaatatgtca

SEQ ID NO: 4673640 - DNA, 25 bp, Homo sapien
ctgatgtctctttgcttattgattc

SEQ ID NO: 4673641 - DNA, 25 bp, Homo sapien
gacttgccaggacttaagtattgta

SEQ ID NO: 4673642 - DNA, 25 bp, Homo sapien
cttaagtattgtaagttcaaactgg

SEQ ID NO: 4673643 - DNA, 25 bp, Homo sapien
tattgtaagttcaaactggtgatgt

SEQ ID NO: 4673644 - DNA, 25 bp, Homo sapien
tgtaagttcaaactggtgatgttga

SEQ ID NO: 4673645 - DNA, 25 bp, Homo sapien
tatcatatggcccaaagtttactct

SEQ ID NO: 4673646 - DNA, 25 bp, Homo sapien
tcatatggcccaaagtttactcttt

SEQ ID NO: 4673647 - DNA, 25 bp, Homo sapien
ttatcatatggcccaaagtttactc

SEQ ID NO: 4673648 - DNA, 25 bp, Homo sapien
catatggcccaaagtttactctttg

SEQ ID NO: 4673649 - DNA, 25 bp, Homo sapien
ataaaattaagcacacctgttttgt

SEQ ID NO: 4673650 - DNA, 25 bp, Homo sapien
tgggaaataacagggcaaagtgttg

SEQ ID NO: 4673651 - DNA, 25 bp, Homo sapien
gggcaaagtgttgctgattccatga

SEQ ID NO: 4673652 - DNA, 25 bp, Homo sapien
ccgtgttgtcccgtatttgagaagg

SEQ ID NO: 4673653 - DNA, 25 bp, Homo sapien
cgtgttgtcccgtatttgagaaggt

SEQ ID NO: 4673654 - DNA, 25 bp, Homo sapien
tttagaatccacctcgacagtacga

SEQ ID NO: 4673655 - DNA, 25 bp, Homo sapien
cagatggtctctcagaaattctcat

SEQ ID NO: 4673656 - DNA, 25 bp, Homo sapien
tccataatggttgtctacgatctcc

SEQ ID NO: 4673657 - DNA, 25 bp, Homo sapien
tacgagttggtttgagaggctgcct

SEQ ID NO: 4673658 - DNA, 25 bp, Homo sapien
ctgattccgaatctgttgtgtcctt

SEQ ID NO: 4673659 - DNA, 25 bp, Homo sapien
ttctgattccgaatctgttgtgtcc

SEQ ID NO: 4673660 - DNA, 25 bp, Homo sapien
ttaattctgattccgaatctgttgt

SEQ ID NO: 4673661 - DNA, 25 bp, Homo sapien
gttttaattctgattccgaatctgt

SEQ ID NO: 4673662 - DNA, 25 bp, Homo sapien
ttggcatccttcgattcatcacctt

SEQ ID NO: 4673663 - DNA, 25 bp, Homo sapien
tcttggcatccttcgattcatcacc

SEQ ID NO: 4673664 - DNA, 25 bp, Homo sapien
cttggcatccttcgattcatcacct

SEQ ID NO: 4673665 - DNA, 25 bp, Homo sapien
ctcagtatctttcttggcaactttc

SEQ ID NO: 4673666 - DNA, 25 bp, Homo sapien
gaatcagcagattctttctcagtat

SEQ ID NO: 4673667 - DNA, 25 bp, Homo sapien
ttcttggcatctttcgtggcgtcct

SEQ ID NO: 4673668 - DNA, 25 bp, Homo sapien
cactgtctgtactactgggcttctt

SEQ ID NO: 4673669 - DNA, 25 bp, Homo sapien
tcacaaattcagctgcagactacca

SEQ ID NO: 4673670 - DNA, 25 bp, Homo sapien
ggaagtggcacatccaacaaccata

SEQ ID NO: 4673671 - DNA, 25 bp, Homo sapien
taggctcatcgggtggtaatacatt

SEQ ID NO: 4673672 - DNA, 25 bp, Homo sapien
gatacaacatctgtctccttggatt

SEQ ID NO: 4673673 - DNA, 25 bp, Homo sapien
aggctgtagtaagcctgagatcatg

SEQ ID NO: 4673674 - DNA, 25 bp, Homo sapien
tgtagtaagcctgagatcatgtcac

SEQ ID NO: 4673675 - DNA, 25 bp, Homo sapien
ggtggaggctgtagtaagcctgaga

SEQ ID NO: 4673676 - DNA, 25 bp, Homo sapien
gctgtagtaagcctgagatcatgtc

SEQ ID NO: 4673677 - DNA, 25 bp, Homo sapien
tttctccagcaagaaatgccagcta

SEQ ID NO: 4673678 - DNA, 25 bp, Homo sapien
ccacttgtgataactttctccagca

SEQ ID NO: 4673679 - DNA, 25 bp, Homo sapien
tctccagcaagaaatgccagctatt

SEQ ID NO: 4673680 - DNA, 25 bp, Homo sapien
tctagggtaacctttccacttgtga

SEQ ID NO: 4673681 - DNA, 25 bp, Homo sapien
tcagagtcaaatgagatgctaaacc

SEQ ID NO: 4673682 - DNA, 25 bp, Homo sapien
aagggcatctaccaaatgctgaagg

SEQ ID NO: 4673683 - DNA, 25 bp, Homo sapien
ctggaacacaatcaaatcagagtca

SEQ ID NO: 4673684 - DNA, 25 bp, Homo sapien
tcccagaagcagtggtaaagtaaag

SEQ ID NO: 4673685 - DNA, 25 bp, Homo sapien
caattcgtaattagagctgtcaagc

SEQ ID NO: 4673686 - DNA, 25 bp, Homo sapien
caccaactgaatgagatgtttcact

SEQ ID NO: 4673687 - DNA, 25 bp, Homo sapien
tccagtgtggtgtaatgtccaatcc

SEQ ID NO: 4673688 - DNA, 25 bp, Homo sapien
ctttcatgacaggaagatcaccaac

SEQ ID NO: 4673689 - DNA, 25 bp, Homo sapien
atcttgatttaagaatctgtcaaac

SEQ ID NO: 4673690 - DNA, 25 bp, Homo sapien
tcttgatttaagaatctgtcaaaca

SEQ ID NO: 4673691 - DNA, 25 bp, Homo sapien
gcgataacttcataaatactttcac

SEQ ID NO: 4673692 - DNA, 25 bp, Homo sapien
tttggctttgcgataacttcataaa

SEQ ID NO: 4673693 - DNA, 25 bp, Homo sapien
taaccaggggaaaggagccttgcca

SEQ ID NO: 4673694 - DNA, 25 bp, Homo sapien
gagtcttccatggattggtagaatg

SEQ ID NO: 4673695 - DNA, 25 bp, Homo sapien
aagtttgaggcactgagagtcttcc

SEQ ID NO: 4673696 - DNA, 25 bp, Homo sapien
gccttgccatatacaggatgaagtt

SEQ ID NO: 4673697 - DNA, 25 bp, Homo sapien
cagtatgaattggactttgtcgttg

SEQ ID NO: 4673698 - DNA, 25 bp, Homo sapien
tgaattggactttgtcgttgtacct

SEQ ID NO: 4673699 - DNA, 25 bp, Homo sapien
cagttgtaccagtatgaattggact

SEQ ID NO: 4673700 - DNA, 25 bp, Homo sapien
tgtaccagtatgaattggactttgt

SEQ ID NO: 4673701 - DNA, 25 bp, Homo sapien
ttaatttcagccaaatgcctgtcaa

SEQ ID NO: 4673702 - DNA, 25 bp, Homo sapien
tcaatggtgactagttgtctggagt

SEQ ID NO: 4673703 - DNA, 25 bp, Homo sapien
ttggtggcttcataataattggtgg

SEQ ID NO: 4673704 - DNA, 25 bp, Homo sapien
agctgggtgctagaagactttcttc

SEQ ID NO: 4673705 - DNA, 25 bp, Homo sapien
tccaaagccggaaaaggatcctcta

SEQ ID NO: 4673706 - DNA, 25 bp, Homo sapien
gttcctctaaagtaatcgccatgcg

SEQ ID NO: 4673707 - DNA, 25 bp, Homo sapien
ggatcctctagtagccacggtgtgg

SEQ ID NO: 4673708 - DNA, 25 bp, Homo sapien
tttaatgtgtgttagctcccagcga

SEQ ID NO: 4673709 - DNA, 25 bp, Homo sapien
cgagaccagccagggtaacaaattg

SEQ ID NO: 4673710 - DNA, 25 bp, Homo sapien
gcttggagccagaggatcacttaag

SEQ ID NO: 4673711 - DNA, 25 bp, Homo sapien
aggtagaggttgcagagatcatgcc

SEQ ID NO: 4673712 - DNA, 25 bp, Homo sapien
aaacctgagactggtagtgggcttg

SEQ ID NO: 4673713 - DNA, 25 bp, Homo sapien
tgtagtcaaatgtaggatatgtaag

SEQ ID NO: 4673714 - DNA, 25 bp, Homo sapien
caaatgtaggatatgtaagtactcc

SEQ ID NO: 4673715 - DNA, 25 bp, Homo sapien
caacagtcacaatccatcctagtat

SEQ ID NO: 4673716 - DNA, 25 bp, Homo sapien
ctcaacagtcacaatccatcctagt

SEQ ID NO: 4673717 - DNA, 25 bp, Homo sapien
tcaccttggcaaccttaaacagtcc

SEQ ID NO: 4673718 - DNA, 25 bp, Homo sapien
ggacaaagcctttcagctcgcttca

SEQ ID NO: 4673719 - DNA, 25 bp, Homo sapien
agcctttcagctcgcttcaccttgg

SEQ ID NO: 4673720 - DNA, 25 bp, Homo sapien
cagagttgctggcacgaggacaaag

SEQ ID NO: 4673721 - DNA, 25 bp, Homo sapien
ctattagcacactttacaagaggga

SEQ ID NO: 4673722 - DNA, 25 bp, Homo sapien
gaggcacatcagttacgttggtcaa

SEQ ID NO: 4673723 - DNA, 25 bp, Homo sapien
gattgtaaaggattaactcagtcac

SEQ ID NO: 4673724 - DNA, 25 bp, Homo sapien
caatttagggcacggtctggttctg

SEQ ID NO: 4673725 - DNA, 25 bp, Homo sapien
atgactacatggctttgcagtctga

SEQ ID NO: 4673726 - DNA, 25 bp, Homo sapien
tgatgactacatggctttgcagtct

SEQ ID NO: 4673727 - DNA, 25 bp, Homo sapien
gactacatggctttgcagtctgaga

SEQ ID NO: 4673728 - DNA, 25 bp, Homo sapien
actacatggctttgcagtctgagat

SEQ ID NO: 4673729 - DNA, 25 bp, Homo sapien
ttgctcaacgtattccccaatgcta

SEQ ID NO: 4673730 - DNA, 25 bp, Homo sapien
tctgctgaattatcagcatccctca

SEQ ID NO: 4673731 - DNA, 25 bp, Homo sapien
ggccagcgaattgcatctgctgaat

SEQ ID NO: 4673732 - DNA, 25 bp, Homo sapien
taggtgactcatacagaggccagcg

SEQ ID NO: 4673733 - DNA, 25 bp, Homo sapien
catacagaggccagcgaattgcatc

SEQ ID NO: 4673734 - DNA, 25 bp, Homo sapien
tacactgggtcatagtgactatctc

SEQ ID NO: 4673735 - DNA, 25 bp, Homo sapien
aaaaataatcttacactgggtcata

SEQ ID NO: 4673736 - DNA, 25 bp, Homo sapien
tgctatagagatcagtgttgtcaga

SEQ ID NO: 4673737 - DNA, 25 bp, Homo sapien
ttccactgttgctactgctatagag

SEQ ID NO: 4673738 - DNA, 25 bp, Homo sapien
agtttgtaaaagaccgatttgatag

SEQ ID NO: 4673739 - DNA, 25 bp, Homo sapien
tgtcttcatgtaagtagtttgtaaa

SEQ ID NO: 4673740 - DNA, 25 bp, Homo sapien
tttgttcctgcatgtttgacggaca

SEQ ID NO: 4673741 - DNA, 25 bp, Homo sapien
tgtttgacggacaggagaagttgat

SEQ ID NO: 4673742 - DNA, 25 bp, Homo sapien
caatataagatgttgttatcactgc

SEQ ID NO: 4673743 - DNA, 25 bp, Homo sapien
gctgctccagcacctttgtttttaa

SEQ ID NO: 4673744 - DNA, 25 bp, Homo sapien
gcaaatcgcttttggcatatggaaa

SEQ ID NO: 4673745 - DNA, 25 bp, Homo sapien
caaagatctatatcattgttagcaa

SEQ ID NO: 4673746 - DNA, 25 bp, Homo sapien
agacgttgttttataaactctcaca

SEQ ID NO: 4673747 - DNA, 25 bp, Homo sapien
gctatttccgaaatcaaagacgttg

SEQ ID NO: 4673748 - DNA, 25 bp, Homo sapien
cagagtcttcacatggtacgctttc

SEQ ID NO: 4673749 - DNA, 25 bp, Homo sapien
tctcacacaggatatcagagtcttc

SEQ ID NO: 4673750 - DNA, 25 bp, Homo sapien
gacaggtgaaaactagctcgatgcc

SEQ ID NO: 4673751 - DNA, 25 bp, Homo sapien
acccagggctaagcgaggcctaggt

SEQ ID NO: 4673752 - DNA, 25 bp, Homo sapien
gatccctggttaacaaagtggctga

SEQ ID NO: 4673753 - DNA, 25 bp, Homo sapien
gatttttggcctctggtactgtaag

SEQ ID NO: 4673754 - DNA, 25 bp, Homo sapien
ggtgtcgtttatccggatgctgcat

SEQ ID NO: 4673755 - DNA, 25 bp, Homo sapien
taaaatatctaaccactaggtgtcg

SEQ ID NO: 4673756 - DNA, 25 bp, Homo sapien
tctaaccactaggtgtcgtttatcc

SEQ ID NO: 4673757 - DNA, 25 bp, Homo sapien
cactaggtgtcgtttatccggatgc

SEQ ID NO: 4673758 - DNA, 25 bp, Homo sapien
taggagatgttaccactctgcaaaa

SEQ ID NO: 4673759 - DNA, 25 bp, Homo sapien
ggagatgttaccactctgcaaaagt

SEQ ID NO: 4673760 - DNA, 25 bp, Homo sapien
cagtcagttgctccataggagatgt

SEQ ID NO: 4673761 - DNA, 25 bp, Homo sapien
cagttgctccataggagatgttacc

SEQ ID NO: 4673762 - DNA, 25 bp, Homo sapien
gtatttcatcctgtagtacgtgagc

SEQ ID NO: 4673763 - DNA, 25 bp, Homo sapien
gtacgtgagctgtataatgaactac

SEQ ID NO: 4673764 - DNA, 25 bp, Homo sapien
cagcttctgcagttctatagcaaaa

SEQ ID NO: 4673765 - DNA, 25 bp, Homo sapien
tccaattttccaagagatactctgg

SEQ ID NO: 4673766 - DNA, 25 bp, Homo sapien
gatctaaattttgccgtcgtaccca

SEQ ID NO: 4673767 - DNA, 25 bp, Homo sapien
gaaatgaatcattctgaacatttcg

SEQ ID NO: 4673768 - DNA, 25 bp, Homo sapien
cattctgaacatttcgagagtgcat

SEQ ID NO: 4673769 - DNA, 25 bp, Homo sapien
catttcgagagtgcattagggatct

SEQ ID NO: 4673770 - DNA, 25 bp, Homo sapien
tgcatatgttacactctccctctcc

SEQ ID NO: 4673771 - DNA, 25 bp, Homo sapien
tccttaatgaagtcaccaaaggttc

SEQ ID NO: 4673772 - DNA, 25 bp, Homo sapien
tgtttttgcatctcaagtaatgtcc

SEQ ID NO: 4673773 - DNA, 25 bp, Homo sapien
ctggatctatgaatggtgttgcata

SEQ ID NO: 4673774 - DNA, 25 bp, Homo sapien
gcggtgaggtgagggtagatattta

SEQ ID NO: 4673775 - DNA, 25 bp, Homo sapien
tgcagggcggtgaggtgagggtaga

SEQ ID NO: 4673776 - DNA, 25 bp, Homo sapien
tcaccagggtgcagggcggtgaggt

SEQ ID NO: 4673777 - DNA, 25 bp, Homo sapien
gtagatatttaacaaaagctgagtt

SEQ ID NO: 4673778 - DNA, 25 bp, Homo sapien
catcttcttcagtaacatttaataa

SEQ ID NO: 4673779 - DNA, 25 bp, Homo sapien
ttcatcttcttcagtaacatttaat

SEQ ID NO: 4673780 - DNA, 25 bp, Homo sapien
ccaatttcttgggttgaaaggtgtg

SEQ ID NO: 4673781 - DNA, 25 bp, Homo sapien
tttcttgggttgaaaggtgtgtgtg

SEQ ID NO: 4673782 - DNA, 25 bp, Homo sapien
catcccagcatagcgcttaaaactt

SEQ ID NO: 4673783 - DNA, 25 bp, Homo sapien
tcacatcccagcatagcgcttaaaa

SEQ ID NO: 4673784 - DNA, 25 bp, Homo sapien
cacatcccagcatagcgcttaaaac

SEQ ID NO: 4673785 - DNA, 25 bp, Homo sapien
tcccagcatagcgcttaaaacttag

SEQ ID NO: 4673786 - DNA, 25 bp, Homo sapien
cctgtttggattgcaaatgttcctg

SEQ ID NO: 4673787 - DNA, 25 bp, Homo sapien
tcctgtttggattgcaaatgttcct

SEQ ID NO: 4673788 - DNA, 25 bp, Homo sapien
agtgaaaatgctttgtccagcactg

SEQ ID NO: 4673789 - DNA, 25 bp, Homo sapien
tgaaaatgctttgtccagcactggg

SEQ ID NO: 4673790 - DNA, 25 bp, Homo sapien
agcactgggacgtttgcctaattgt

SEQ ID NO: 4673791 - DNA, 25 bp, Homo sapien
cgtttgcctaattgtccaccttcat

SEQ ID NO: 4673792 - DNA, 25 bp, Homo sapien
tcaaatcccagcacctccttatcat

SEQ ID NO: 4673793 - DNA, 25 bp, Homo sapien
taactttgctgtagattccattcat

SEQ ID NO: 4673794 - DNA, 25 bp, Homo sapien
catgtcttagggctccacactcaaa

SEQ ID NO: 4673795 - DNA, 25 bp, Homo sapien
tcttcatttatggtactgccatgtc

SEQ ID NO: 4673796 - DNA, 25 bp, Homo sapien
ttttggtcaagtgtcgaattcaggt

SEQ ID NO: 4673797 - DNA, 25 bp, Homo sapien
gagttctgtagttgtatgttagttt

SEQ ID NO: 4673798 - DNA, 25 bp, Homo sapien
ttagttttggtcaagtgtcgaattc

SEQ ID NO: 4673799 - DNA, 25 bp, Homo sapien
tctgttcgttttaggtgaagagttc

SEQ ID NO: 4673800 - DNA, 25 bp, Homo sapien
tatgaggccacttgataccatatgg

SEQ ID NO: 4673801 - DNA, 25 bp, Homo sapien
aactttgaatcctgaggaaagcagc

SEQ ID NO: 4673802 - DNA, 25 bp, Homo sapien
gaaagcagcgtattaactgaggcaa

SEQ ID NO: 4673803 - DNA, 25 bp, Homo sapien
tagtcagctggcatattcgatgtat

SEQ ID NO: 4673804 - DNA, 25 bp, Homo sapien
aggattcgttttcattatagccata

SEQ ID NO: 4673805 - DNA, 25 bp, Homo sapien
tttcattatagccatagttctccat

SEQ ID NO: 4673806 - DNA, 25 bp, Homo sapien
cgttttcattatagccatagttctc

SEQ ID NO: 4673807 - DNA, 25 bp, Homo sapien
gattcgttttcattatagccatagt

SEQ ID NO: 4673808 - DNA, 25 bp, Homo sapien
aagacacaaattttagcacaagata

SEQ ID NO: 4673809 - DNA, 25 bp, Homo sapien
cacaaattttagcacaagatattca

SEQ ID NO: 4673810 - DNA, 25 bp, Homo sapien
cagaggcaatgttggttttgtccat

SEQ ID NO: 4673811 - DNA, 25 bp, Homo sapien
gcaatgttggttttgtccatcagaa

SEQ ID NO: 4673812 - DNA, 25 bp, Homo sapien
ctttttccatcacaggaccttgact

SEQ ID NO: 4673813 - DNA, 25 bp, Homo sapien
tccatcacaggaccttgactaagca

SEQ ID NO: 4673814 - DNA, 25 bp, Homo sapien
ccatcacaggaccttgactaagcat

SEQ ID NO: 4673815 - DNA, 25 bp, Homo sapien
tttccatcacaggaccttgactaag

SEQ ID NO: 4673816 - DNA, 25 bp, Homo sapien
aggaaaaagtgttccaccatcatca

SEQ ID NO: 4673817 - DNA, 25 bp, Homo sapien
ggaaaaagtgttccaccatcatcag

SEQ ID NO: 4673818 - DNA, 25 bp, Homo sapien
aaggaaaaagtgttccaccatcatc

SEQ ID NO: 4673819 - DNA, 25 bp, Homo sapien
gaaaaagtgttccaccatcatcagt

SEQ ID NO: 4673820 - DNA, 25 bp, Homo sapien
caataatatggaattgctgctttaa

SEQ ID NO: 4673821 - DNA, 25 bp, Homo sapien
tgctgctttaatggaaggaggtaca

SEQ ID NO: 4673822 - DNA, 25 bp, Homo sapien
ctgctttaatggaaggaggtacagg

SEQ ID NO: 4673823 - DNA, 25 bp, Homo sapien
aattgctgctttaatggaaggaggt

SEQ ID NO: 4673824 - DNA, 25 bp, Homo sapien
ggttctctatgcagatcattaccca

SEQ ID NO: 4673825 - DNA, 25 bp, Homo sapien
ttgcttacggaaaacctgaaatatc

SEQ ID NO: 4673826 - DNA, 25 bp, Homo sapien
tctggttactagagatttagcagca

SEQ ID NO: 4673827 - DNA, 25 bp, Homo sapien
atcatattaggaaaactgcctctgg

SEQ ID NO: 4673828 - DNA, 25 bp, Homo sapien
aatatgaggcagtggttatgtgcag

SEQ ID NO: 4673829 - DNA, 25 bp, Homo sapien
tgaatatgaggcagtggttatgtgc

SEQ ID NO: 4673830 - DNA, 25 bp, Homo sapien
ggcagtggttatgtgcaggtgaaga

SEQ ID NO: 4673831 - DNA, 25 bp, Homo sapien
tgaggcagtggttatgtgcaggtga

SEQ ID NO: 4673832 - DNA, 25 bp, Homo sapien
gtcaggaactccccggtgtggccca

SEQ ID NO: 4673833 - DNA, 25 bp, Homo sapien
caggaactccccggtgtggcccaga

SEQ ID NO: 4673834 - DNA, 25 bp, Homo sapien
ctgtcaggaactccccggtgtggcc

SEQ ID NO: 4673835 - DNA, 25 bp, Homo sapien
ctccccggtgtggcccagaaacaca

SEQ ID NO: 4673836 - DNA, 25 bp, Homo sapien
ttctgtcctggactgttccttaaaa

SEQ ID NO: 4673837 - DNA, 25 bp, Homo sapien
tctgtcctggactgttccttaaaag

SEQ ID NO: 4673838 - DNA, 25 bp, Homo sapien
tctgagttggatctatcttaaaggg

SEQ ID NO: 4673839 - DNA, 25 bp, Homo sapien
ttctgagttggatctatcttaaagg

SEQ ID NO: 4673840 - DNA, 25 bp, Homo sapien
tcatcactttgctgataacttgcat

SEQ ID NO: 4673841 - DNA, 25 bp, Homo sapien
catgagatctatagcattcaggata

SEQ ID NO: 4673842 - DNA, 25 bp, Homo sapien
tcatgagatctatagcattcaggat

SEQ ID NO: 4673843 - DNA, 25 bp, Homo sapien
ttcatgagatctatagcattcagga

SEQ ID NO: 4673844 - DNA, 25 bp, Homo sapien
aaacaagctgctgatattggcctca

SEQ ID NO: 4673845 - DNA, 25 bp, Homo sapien
gactaaacctatccagactttccca

SEQ ID NO: 4673846 - DNA, 25 bp, Homo sapien
tgaatggcaaagactaaacctatcc

SEQ ID NO: 4673847 - DNA, 25 bp, Homo sapien
tcattgtcagacaccatggcaagat

SEQ ID NO: 4673848 - DNA, 25 bp, Homo sapien
cagtgcttaaggtaacggccaattg

SEQ ID NO: 4673849 - DNA, 25 bp, Homo sapien
ctcagtgcttaaggtaacggccaat

SEQ ID NO: 4673850 - DNA, 25 bp, Homo sapien
gtggctcagtgcttaaggtaacggc

SEQ ID NO: 4673851 - DNA, 25 bp, Homo sapien
ggctcagtgcttaaggtaacggcca

SEQ ID NO: 4673852 - DNA, 25 bp, Homo sapien
tttaatgcaagcaggcacgggttcc

SEQ ID NO: 4673853 - DNA, 25 bp, Homo sapien
cagcaggaccagtcaagtaggttgt

SEQ ID NO: 4673854 - DNA, 25 bp, Homo sapien
tatggcagatacctggactgaccgc

SEQ ID NO: 4673855 - DNA, 25 bp, Homo sapien
tcgctgtggcatatacgtacattcc

SEQ ID NO: 4673856 - DNA, 25 bp, Homo sapien
aggtcttcgaattccagaggttgca

SEQ ID NO: 4673857 - DNA, 25 bp, Homo sapien
catccaagggctttgactgagcttt

SEQ ID NO: 4673858 - DNA, 25 bp, Homo sapien
catgccttgctcatccaagggcttt

SEQ ID NO: 4673859 - DNA, 25 bp, Homo sapien
tcgaattccagaggttgcatgcctt

SEQ ID NO: 4673860 - DNA, 25 bp, Homo sapien
ttcccatgtttatcattgtgtaggg

SEQ ID NO: 4673861 - DNA, 25 bp, Homo sapien
tggtctcatcagtggtttgattctg

SEQ ID NO: 4673862 - DNA, 25 bp, Homo sapien
acagcacctctgaagaaaggcaatg

SEQ ID NO: 4673863 - DNA, 25 bp, Homo sapien
cattgtgtagggctacagtttctga

SEQ ID NO: 4673864 - DNA, 25 bp, Homo sapien
gccaagtcagcttggctcaggtaca

SEQ ID NO: 4673865 - DNA, 25 bp, Homo sapien
cagagataaggtcatctctacttct

SEQ ID NO: 4673866 - DNA, 25 bp, Homo sapien
tcaagatgcagtgggctgaattcag

SEQ ID NO: 4673867 - DNA, 25 bp, Homo sapien
tctataagcttacatgggtgaattt

SEQ ID NO: 4673868 - DNA, 25 bp, Homo sapien
catatccagatatactacagacaag

SEQ ID NO: 4673869 - DNA, 25 bp, Homo sapien
aattcatgtcatcttgattagctat

SEQ ID NO: 4673870 - DNA, 25 bp, Homo sapien
catcttgattagctattgtccttga

SEQ ID NO: 4673871 - DNA, 25 bp, Homo sapien
tatccagatatactacagacaagaa

SEQ ID NO: 4673872 - DNA, 25 bp, Homo sapien
cagaatggggatcaacgtctagatt

SEQ ID NO: 4673873 - DNA, 25 bp, Homo sapien
aagctttctatccagacagaatggg

SEQ ID NO: 4673874 - DNA, 25 bp, Homo sapien
tactgcaagctttctatccagacag

SEQ ID NO: 4673875 - DNA, 25 bp, Homo sapien
tagtggtctgttttgaattgtaacg

SEQ ID NO: 4673876 - DNA, 25 bp, Homo sapien
gggagccagcagacatcaatagcgg

SEQ ID NO: 4673877 - DNA, 25 bp, Homo sapien
tcaatagcggcattcaggcttttaa

SEQ ID NO: 4673878 - DNA, 25 bp, Homo sapien
taggacttttgttggcattggcatc

SEQ ID NO: 4673879 - DNA, 25 bp, Homo sapien
taaaatcattactgacaggaaacat

SEQ ID NO: 4673880 - DNA, 25 bp, Homo sapien
gacttgaggtcaagctggtttagca

SEQ ID NO: 4673881 - DNA, 25 bp, Homo sapien
tttggcaccacccagtaccggctga

SEQ ID NO: 4673882 - DNA, 25 bp, Homo sapien
gatgaagtggtctactgacttgagg

SEQ ID NO: 4673883 - DNA, 25 bp, Homo sapien
cccagtaccggctgatgaagtggtc

SEQ ID NO: 4673884 - DNA, 25 bp, Homo sapien
cctctgtaaccggttattcttctag

SEQ ID NO: 4673885 - DNA, 25 bp, Homo sapien
attcttctagatgcagcaataggag

SEQ ID NO: 4673886 - DNA, 25 bp, Homo sapien
ctgtaaccggttattcttctagatg

SEQ ID NO: 4673887 - DNA, 25 bp, Homo sapien
tctagatgcagcaataggagggctg

SEQ ID NO: 4673888 - DNA, 25 bp, Homo sapien
cttcacctggtgaaagaactcctga

SEQ ID NO: 4673889 - DNA, 25 bp, Homo sapien
ccacaagatgctgggtttgtacaga

SEQ ID NO: 4673890 - DNA, 25 bp, Homo sapien
cattggtggccataaccgttacttc

SEQ ID NO: 4673891 - DNA, 25 bp, Homo sapien
tactgggcctagtctaatggcactg

SEQ ID NO: 4673892 - DNA, 25 bp, Homo sapien
ctttggattgggtgagaactttagc

SEQ ID NO: 4673893 - DNA, 25 bp, Homo sapien
agtcagcgcccttgaagatgagtac

SEQ ID NO: 4673894 - DNA, 25 bp, Homo sapien
tgagaactttagctgtaggagagtc

SEQ ID NO: 4673895 - DNA, 25 bp, Homo sapien
tgctagttaaatggctgagattgag

SEQ ID NO: 4673896 - DNA, 25 bp, Homo sapien
taggtaaagtgagtcccttctacat

SEQ ID NO: 4673897 - DNA, 25 bp, Homo sapien
tcagcggagctaactgaagaatccc

SEQ ID NO: 4673898 - DNA, 25 bp, Homo sapien
gagaaacagatcaagggaagttcca

SEQ ID NO: 4673899 - DNA, 25 bp, Homo sapien
cacagtggtggccattttggattca

SEQ ID NO: 4673900 - DNA, 25 bp, Homo sapien
agacactgcgttccggcaggcttgg

SEQ ID NO: 4673901 - DNA, 25 bp, Homo sapien
aagacctgggtccggccagtgggca

SEQ ID NO: 4673902 - DNA, 25 bp, Homo sapien
ggtcccggcagggacaagccgctgc

SEQ ID NO: 4673903 - DNA, 25 bp, Homo sapien
cccaaagacactgcgttccggcagg

SEQ ID NO: 4673904 - DNA, 25 bp, Homo sapien
ctttgtcggtatgttaaggcctttg

SEQ ID NO: 4673905 - DNA, 25 bp, Homo sapien
attgtcaactatatataaggtagtg

SEQ ID NO: 4673906 - DNA, 25 bp, Homo sapien
tggatgtatcgcttccaggggctgt

SEQ ID NO: 4673907 - DNA, 25 bp, Homo sapien
ctatatataaggtagtgaggaataa

SEQ ID NO: 4673908 - DNA, 25 bp, Homo sapien
ttccaggggctgtctaataactcca

SEQ ID NO: 4673909 - DNA, 25 bp, Homo sapien
ttcctttgaatttcggcgcgagcaa

SEQ ID NO: 4673910 - DNA, 25 bp, Homo sapien
gcgaacttcaccatagcggctacaa

SEQ ID NO: 4673911 - DNA, 25 bp, Homo sapien
gggccgctacaaagcgaacttcacc

SEQ ID NO: 4673912 - DNA, 25 bp, Homo sapien
cgcgccggaactatttattcctttg

SEQ ID NO: 4673913 - DNA, 25 bp, Homo sapien
gcctcaggccaggggcttgacgcac

SEQ ID NO: 4673914 - DNA, 25 bp, Homo sapien
ctgcctcaggccaggggcttgacgc

SEQ ID NO: 4673915 - DNA, 25 bp, Homo sapien
tgcctcaggccaggggcttgacgca

SEQ ID NO: 4673916 - DNA, 25 bp, Homo sapien
cgctgcctcaggccaggggcttgac

SEQ ID NO: 4673917 - DNA, 25 bp, Homo sapien
ggcccaaccggccgtgctcacgcac

SEQ ID NO: 4673918 - DNA, 25 bp, Homo sapien
gcccggcccaaccggccgtgctcac

SEQ ID NO: 4673919 - DNA, 25 bp, Homo sapien
ggcccggcccaaccggccgtgctca

SEQ ID NO: 4673920 - DNA, 25 bp, Homo sapien
ccggcccaaccggccgtgctcacgc

SEQ ID NO: 4673921 - DNA, 25 bp, Homo sapien
tcaggcttttacctcgcttctccag

SEQ ID NO: 4673922 - DNA, 25 bp, Homo sapien
ctttatttctaaggatcacctaagg

SEQ ID NO: 4673923 - DNA, 25 bp, Homo sapien
gtccgtcattgcatccccgaattgt

SEQ ID NO: 4673924 - DNA, 25 bp, Homo sapien
cctactccaaggtcgaacagaagct

SEQ ID NO: 4673925 - DNA, 25 bp, Homo sapien
ctgtaagttcccgcagtgtcttcac

SEQ ID NO: 4673926 - DNA, 25 bp, Homo sapien
aagttcccgcagtgtcttcacctac

SEQ ID NO: 4673927 - DNA, 25 bp, Homo sapien
tgtaagttcccgcagtgtcttcacc

SEQ ID NO: 4673928 - DNA, 25 bp, Homo sapien
tgtctgtaagttcccgcagtgtctt

SEQ ID NO: 4673929 - DNA, 25 bp, Homo sapien
tacttaaagctgatattagacggtc

SEQ ID NO: 4673930 - DNA, 25 bp, Homo sapien
tagcttactctctactgcactcacg

SEQ ID NO: 4673931 - DNA, 25 bp, Homo sapien
tgaacacgaggcaaaaacagcaacg

SEQ ID NO: 4673932 - DNA, 25 bp, Homo sapien
caaatgtcaccttactggagtcctc

SEQ ID NO: 4673933 - DNA, 25 bp, Homo sapien
ataccaccacctaagtggaatgtaa

SEQ ID NO: 4673934 - DNA, 25 bp, Homo sapien
taccaccacctaagtggaatgtaaa

SEQ ID NO: 4673935 - DNA, 25 bp, Homo sapien
caggaatcaaacaggccacaaacca

SEQ ID NO: 4673936 - DNA, 25 bp, Homo sapien
gacaggaatcaaacaggccacaaac

SEQ ID NO: 4673937 - DNA, 25 bp, Homo sapien
tttcgatactgtcttgggtcagcaa

SEQ ID NO: 4673938 - DNA, 25 bp, Homo sapien
tcttgggtcagcaaacctctgacag

SEQ ID NO: 4673939 - DNA, 25 bp, Homo sapien
caatatgttggatttcccactacca

SEQ ID NO: 4673940 - DNA, 25 bp, Homo sapien
ccatttaagccagtgatagcattga

SEQ ID NO: 4673941 - DNA, 25 bp, Homo sapien
gcataggacttgaatccctctagaa

SEQ ID NO: 4673942 - DNA, 25 bp, Homo sapien
aaaccattgacttcggtcctctgag

SEQ ID NO: 4673943 - DNA, 25 bp, Homo sapien
tagacaaggttaggcagctgcatcc

SEQ ID NO: 4673944 - DNA, 25 bp, Homo sapien
tagtgtccattaagtagacaaggtt

SEQ ID NO: 4673945 - DNA, 25 bp, Homo sapien
taagtagacaaggttaggcagctgc

SEQ ID NO: 4673946 - DNA, 25 bp, Homo sapien
cattaagtagacaaggttaggcagc

SEQ ID NO: 4673947 - DNA, 25 bp, Homo sapien
tgtaaactaaatcttgtaaattaga

SEQ ID NO: 4673948 - DNA, 25 bp, Homo sapien
catgaacctcaaatcctaaaggact

SEQ ID NO: 4673949 - DNA, 25 bp, Homo sapien
cacagaggctttggtaataccagcc

SEQ ID NO: 4673950 - DNA, 25 bp, Homo sapien
taaaggactttgctttttgtcagaa

SEQ ID NO: 4673951 - DNA, 25 bp, Homo sapien
aacagaacagaagagatcctgtact

SEQ ID NO: 4673952 - DNA, 25 bp, Homo sapien
tgagggttgttaacattaaggccaa

SEQ ID NO: 4673953 - DNA, 25 bp, Homo sapien
cctgtactctggtgttgttggcatt

SEQ ID NO: 4673954 - DNA, 25 bp, Homo sapien
ggcattgactccattgattaaatat

SEQ ID NO: 4673955 - DNA, 25 bp, Homo sapien
catattcaatacttttgtaattcgg

SEQ ID NO: 4673956 - DNA, 25 bp, Homo sapien
tattcaatacttttgtaattcggcc

SEQ ID NO: 4673957 - DNA, 25 bp, Homo sapien
ctctggaggtttcatattcaatact

SEQ ID NO: 4673958 - DNA, 25 bp, Homo sapien
ctggaggtttcatattcaatacttt

SEQ ID NO: 4673959 - DNA, 25 bp, Homo sapien
tgtattcatacatcctggttccagc

SEQ ID NO: 4673960 - DNA, 25 bp, Homo sapien
gtattcatacatcctggttccagct

SEQ ID NO: 4673961 - DNA, 25 bp, Homo sapien
aatggttggagtaatctcttcttca

SEQ ID NO: 4673962 - DNA, 25 bp, Homo sapien
ttgaatggttggagtaatctcttct

SEQ ID NO: 4673963 - DNA, 25 bp, Homo sapien
tggttggagtaatctcttcttcaag

SEQ ID NO: 4673964 - DNA, 25 bp, Homo sapien
gaatggttggagtaatctcttcttc

SEQ ID NO: 4673965 - DNA, 25 bp, Homo sapien
ggtactccaagtaggacgatctttc

SEQ ID NO: 4673966 - DNA, 25 bp, Homo sapien
agcgtactttggtatcttcagccag

SEQ ID NO: 4673967 - DNA, 25 bp, Homo sapien
cttttaattcctcagctgagcgtac

SEQ ID NO: 4673968 - DNA, 25 bp, Homo sapien
taagcaatatataaacgactcaaat

SEQ ID NO: 4673969 - DNA, 25 bp, Homo sapien
tttagtattaactcgctgagcctct

SEQ ID NO: 4673970 - DNA, 25 bp, Homo sapien
cttgagatcaaatgcgctttgagat

SEQ ID NO: 4673971 - DNA, 25 bp, Homo sapien
agagcatcttctaaagatcgaagta

SEQ ID NO: 4673972 - DNA, 25 bp, Homo sapien
cttctaaagatcgaagtatacctcc

SEQ ID NO: 4673973 - DNA, 25 bp, Homo sapien
actggacaggccagcggaaacagca

SEQ ID NO: 4673974 - DNA, 25 bp, Homo sapien
ttttacaggccatcatttgaccagc

SEQ ID NO: 4673975 - DNA, 25 bp, Homo sapien
gaagggcatgcagtccatctgttat

SEQ ID NO: 4673976 - DNA, 25 bp, Homo sapien
gaccagcaagagttgcttctgctcc

SEQ ID NO: 4673977 - DNA, 25 bp, Homo sapien
tattctttaattcctgttgagcatg

SEQ ID NO: 4673978 - DNA, 25 bp, Homo sapien
ttgagcatgcttcaacttcatctga

SEQ ID NO: 4673979 - DNA, 25 bp, Homo sapien
ctagagcttcttgatccttcctgta

SEQ ID NO: 4673980 - DNA, 25 bp, Homo sapien
gcttctagagcttcttgatccttcc

SEQ ID NO: 4673981 - DNA, 25 bp, Homo sapien
gctgcctgcgcttttccaaaaggct

SEQ ID NO: 4673982 - DNA, 25 bp, Homo sapien
taccaatatcacgagacagctgcct

SEQ ID NO: 4673983 - DNA, 25 bp, Homo sapien
tgggaaatctggctaatagagcttc

SEQ ID NO: 4673984 - DNA, 25 bp, Homo sapien
tatgcaaatcgaagattgggaaatc

SEQ ID NO: 4673985 - DNA, 25 bp, Homo sapien
cactaattctaaagctgtggttgca

SEQ ID NO: 4673986 - DNA, 25 bp, Homo sapien
gagaagccacaagtcctttcacaca

SEQ ID NO: 4673987 - DNA, 25 bp, Homo sapien
caacattgtagagtcgttctccagc

SEQ ID NO: 4673988 - DNA, 25 bp, Homo sapien
tctttcacactaatcagagaagcca

SEQ ID NO: 4673989 - DNA, 25 bp, Homo sapien
tagtgtatcgacgtttcagttcccc

SEQ ID NO: 4673990 - DNA, 25 bp, Homo sapien
tattgagtggaattatagtgtatcg

SEQ ID NO: 4673991 - DNA, 25 bp, Homo sapien
tgagtggaattatagtgtatcgacg

SEQ ID NO: 4673992 - DNA, 25 bp, Homo sapien
gaattatagtgtatcgacgtttcag

SEQ ID NO: 4673993 - DNA, 25 bp, Homo sapien
aagattctgagcaactctcagagtt

SEQ ID NO: 4673994 - DNA, 25 bp, Homo sapien
gattctgagcaactctcagagtttc

SEQ ID NO: 4673995 - DNA, 25 bp, Homo sapien
agagtttctggtgcaatacatctgg

SEQ ID NO: 4673996 - DNA, 25 bp, Homo sapien
agtttctggtgcaatacatctggct

SEQ ID NO: 4673997 - DNA, 25 bp, Homo sapien
tatgccacagtacatactactactt

SEQ ID NO: 4673998 - DNA, 25 bp, Homo sapien
gccacagtacatactactacttttc

SEQ ID NO: 4673999 - DNA, 25 bp, Homo sapien
gatatgccacagtacatactactac

SEQ ID NO: 4674000 - DNA, 25 bp, Homo sapien
cagatatgccacagtacatactact

SEQ ID NO: 4674001 - DNA, 25 bp, Homo sapien
tcattatcctcttatcaaaggccac

SEQ ID NO: 4674002 - DNA, 25 bp, Homo sapien
aacacatcacctccgagagttacag

SEQ ID NO: 4674003 - DNA, 25 bp, Homo sapien
gtcccatgaggatcaaacacatcac

SEQ ID NO: 4674004 - DNA, 25 bp, Homo sapien
ggaaagagccacatgaacgttgtca

SEQ ID NO: 4674005 - DNA, 25 bp, Homo sapien
agttcatcctgaacatctttgagtt

SEQ ID NO: 4674006 - DNA, 25 bp, Homo sapien
tctttgagttcttgaaacttggtta

SEQ ID NO: 4674007 - DNA, 25 bp, Homo sapien
ggttaaaatggaagctgcctgggat

SEQ ID NO: 4674008 - DNA, 25 bp, Homo sapien
tctagagcccgcagctcattctctt

SEQ ID NO: 4674009 - DNA, 25 bp, Homo sapien
tgcctgaagatatacttgacagtac

SEQ ID NO: 4674010 - DNA, 25 bp, Homo sapien
tctggtcattgaaggtgaacaactc

SEQ ID NO: 4674011 - DNA, 25 bp, Homo sapien
tttgtaattctatccctgttctggc

SEQ ID NO: 4674012 - DNA, 25 bp, Homo sapien
taccttgagtattcttgcctgaaga

SEQ ID NO: 4674013 - DNA, 25 bp, Homo sapien
gcttgtgatatgagctttgctggag

SEQ ID NO: 4674014 - DNA, 25 bp, Homo sapien
gctttgctggagcttggtttgtaat

SEQ ID NO: 4674015 - DNA, 25 bp, Homo sapien
ttcttgttgcttgtgatatgagctt

SEQ ID NO: 4674016 - DNA, 25 bp, Homo sapien
gttgcttgtgatatgagctttgctg

SEQ ID NO: 4674017 - DNA, 25 bp, Homo sapien
tgtttttcaaagtctcctcactttc

SEQ ID NO: 4674018 - DNA, 25 bp, Homo sapien
tttagtgtttttcaaagtctcctca

SEQ ID NO: 4674019 - DNA, 25 bp, Homo sapien
tgcttttctttggatttctttagtg

SEQ ID NO: 4674020 - DNA, 25 bp, Homo sapien
agtgtttttcaaagtctcctcactt

SEQ ID NO: 4674021 - DNA, 25 bp, Homo sapien
tcattttattttccaatacttcata

SEQ ID NO: 4674022 - DNA, 25 bp, Homo sapien
tttcattttattttccaatacttca

SEQ ID NO: 4674023 - DNA, 25 bp, Homo sapien
tattttccaatacttcatatttttc

SEQ ID NO: 4674024 - DNA, 25 bp, Homo sapien
cattttattttccaatacttcatat

SEQ ID NO: 4674025 - DNA, 25 bp, Homo sapien
tttggcacaatccagttttttctga

SEQ ID NO: 4674026 - DNA, 25 bp, Homo sapien
ttcatcttcttgctagatgcatctg

SEQ ID NO: 4674027 - DNA, 25 bp, Homo sapien
ttggcacaatccagttttttctgag

SEQ ID NO: 4674028 - DNA, 25 bp, Homo sapien
ctttcatcttcttgctagatgcatc

SEQ ID NO: 4674029 - DNA, 25 bp, Homo sapien
tcaattctgatgaataaggtcaacc

SEQ ID NO: 4674030 - DNA, 25 bp, Homo sapien
gctctaccaccttcagctctatgtt

SEQ ID NO: 4674031 - DNA, 25 bp, Homo sapien
taaggtcaaccaatgatgctctacc

SEQ ID NO: 4674032 - DNA, 25 bp, Homo sapien
tctgagatcaattctgatgaataag

SEQ ID NO: 4674033 - DNA, 25 bp, Homo sapien
tccagttccagagtgatagcttcaa

SEQ ID NO: 4674034 - DNA, 25 bp, Homo sapien
gctgccattacttcaatctgacttt

SEQ ID NO: 4674035 - DNA, 25 bp, Homo sapien
tgtttgtaagatgtatgctctctct

SEQ ID NO: 4674036 - DNA, 25 bp, Homo sapien
gactttcataggatttgatagcttc

SEQ ID NO: 4674037 - DNA, 25 bp, Homo sapien
ctgatgttgtggtctaattccttaa

SEQ ID NO: 4674038 - DNA, 25 bp, Homo sapien
gccacttctgcatatttagctttaa

SEQ ID NO: 4674039 - DNA, 25 bp, Homo sapien
gctgttatcacctctttttgcttgg

SEQ ID NO: 4674040 - DNA, 25 bp, Homo sapien
catcttcagcctcccgtttatgttt

SEQ ID NO: 4674041 - DNA, 25 bp, Homo sapien
gtgcctaggcgactcatttttaaaa

SEQ ID NO: 4674042 - DNA, 25 bp, Homo sapien
ccgtgcctaggcgactcatttttaa

SEQ ID NO: 4674043 - DNA, 25 bp, Homo sapien
gccaccgtgcctaggcgactcattt

SEQ ID NO: 4674044 - DNA, 25 bp, Homo sapien
tttcattactgacaagaataaagat

SEQ ID NO: 4674045 - DNA, 25 bp, Homo sapien
ggttggccaaagaggtgtctctctg

SEQ ID NO: 4674046 - DNA, 25 bp, Homo sapien
gcattaatccagtcataatctttca

SEQ ID NO: 4674047 - DNA, 25 bp, Homo sapien
tacattcatagctctcatattgaca

SEQ ID NO: 4674048 - DNA, 25 bp, Homo sapien
ttttgaaatcataggcactattggg

SEQ ID NO: 4674049 - DNA, 25 bp, Homo sapien
ttggatttgtcattttctacaattc

SEQ ID NO: 4674050 - DNA, 25 bp, Homo sapien
aattttggatttgtcattttctaca

SEQ ID NO: 4674051 - DNA, 25 bp, Homo sapien
cttctatagttgtaagaattttgga

SEQ ID NO: 4674052 - DNA, 25 bp, Homo sapien
ctggtcaaggtcttctatagttgta

SEQ ID NO: 4674053 - DNA, 25 bp, Homo sapien
ccatgcaatatttagggcttggttt

SEQ ID NO: 4674054 - DNA, 25 bp, Homo sapien
cttttgccatgcaatatttagggct

SEQ ID NO: 4674055 - DNA, 25 bp, Homo sapien
ttgccatgcaatatttagggcttgg

SEQ ID NO: 4674056 - DNA, 25 bp, Homo sapien
atgcaatatttagggcttggttttt

SEQ ID NO: 4674057 - DNA, 25 bp, Homo sapien
tgaactccagaccatccaaaacagt

SEQ ID NO: 4674058 - DNA, 25 bp, Homo sapien
tgcaagcatagcattagcaccaggc

SEQ ID NO: 4674059 - DNA, 25 bp, Homo sapien
caaaacagtttgaccctctggtggt

SEQ ID NO: 4674060 - DNA, 25 bp, Homo sapien
caggtatttcccaaggcaaccttga

SEQ ID NO: 4674061 - DNA, 25 bp, Homo sapien
ccaaatccatgttagtttccaacac

SEQ ID NO: 4674062 - DNA, 25 bp, Homo sapien
cattttccttttgcctgagaacttc

SEQ ID NO: 4674063 - DNA, 25 bp, Homo sapien
tatgtagatccaaggttccatctgg

SEQ ID NO: 4674064 - DNA, 25 bp, Homo sapien
tgagaacttcctttaacctgtagta

SEQ ID NO: 4674065 - DNA, 25 bp, Homo sapien
tcataaggaacattaacaggtgtca

SEQ ID NO: 4674066 - DNA, 25 bp, Homo sapien
ctagggcttcggcaaatatagctaa

SEQ ID NO: 4674067 - DNA, 25 bp, Homo sapien
tattgggaactaaactgtggaatcc

SEQ ID NO: 4674068 - DNA, 25 bp, Homo sapien
gagaacaataattcaaggcctatgg

SEQ ID NO: 4674069 - DNA, 25 bp, Homo sapien
cggaagcatgctattttcatagaca

SEQ ID NO: 4674070 - DNA, 25 bp, Homo sapien
gctcattagagcctaggtagcaggt

SEQ ID NO: 4674071 - DNA, 25 bp, Homo sapien
tatgatcttggtaacagtaactgag

SEQ ID NO: 4674072 - DNA, 25 bp, Homo sapien
tgaataagttgtatagactatggcc

SEQ ID NO: 4674073 - DNA, 25 bp, Homo sapien
catggacagtattaatgacaaggcc

SEQ ID NO: 4674074 - DNA, 25 bp, Homo sapien
aaggctgcatctacctcatcaagga

SEQ ID NO: 4674075 - DNA, 25 bp, Homo sapien
gaatgtgtgaaatgagtacgcagca

SEQ ID NO: 4674076 - DNA, 25 bp, Homo sapien
caggtttgaagagaagcatggacag

SEQ ID NO: 4674077 - DNA, 25 bp, Homo sapien
tgtagaaacaccatccacaaacttg

SEQ ID NO: 4674078 - DNA, 25 bp, Homo sapien
gaaaagaacgtttgcattgttgaac

SEQ ID NO: 4674079 - DNA, 25 bp, Homo sapien
ttgaaaagaacgtttgcattgttga

SEQ ID NO: 4674080 - DNA, 25 bp, Homo sapien
aagaacgtttgcattgttgaacata

SEQ ID NO: 4674081 - DNA, 25 bp, Homo sapien
aaacttccacatgtgctcctttggg

SEQ ID NO: 4674082 - DNA, 25 bp, Homo sapien
ccacatgtgctcctttgggtggttt

SEQ ID NO: 4674083 - DNA, 25 bp, Homo sapien
ttaaacttccacatgtgctcctttg

SEQ ID NO: 4674084 - DNA, 25 bp, Homo sapien
acttccacatgtgctcctttgggtg

SEQ ID NO: 4674085 - DNA, 25 bp, Homo sapien
tagttaagagatgaggaatatatgc

SEQ ID NO: 4674086 - DNA, 25 bp, Homo sapien
ttagcttttacatatagaatcgggt

SEQ ID NO: 4674087 - DNA, 25 bp, Homo sapien
gatccctaatatataaaagacccgc

SEQ ID NO: 4674088 - DNA, 25 bp, Homo sapien
gaatcgggtatctcaggatccctaa

SEQ ID NO: 4674089 - DNA, 25 bp, Homo sapien
ggaatttcatccctttgaactggaa

SEQ ID NO: 4674090 - DNA, 25 bp, Homo sapien
catgtatcattaaaacgtagagacc

SEQ ID NO: 4674091 - DNA, 25 bp, Homo sapien
tctagtgatgacgtaccaaaaactg

SEQ ID NO: 4674092 - DNA, 25 bp, Homo sapien
tattctcatggtgttcgctagtgtc

SEQ ID NO: 4674093 - DNA, 25 bp, Homo sapien
aattcctcgattacaccatgctgac

SEQ ID NO: 4674094 - DNA, 25 bp, Homo sapien
tgggccctgacactcctaactgtat

SEQ ID NO: 4674095 - DNA, 25 bp, Homo sapien
gacaaaaatcaggaacgcacacaag

SEQ ID NO: 4674096 - DNA, 25 bp, Homo sapien
gacaagatttgtccatgggccctga

SEQ ID NO: 4674097 - DNA, 25 bp, Homo sapien
tcttcacatggttgaggttcttctt

SEQ ID NO: 4674098 - DNA, 25 bp, Homo sapien
taaggtaacattcacgttgtacata

SEQ ID NO: 4674099 - DNA, 25 bp, Homo sapien
caatgaatcctctcttcacatggtt

SEQ ID NO: 4674100 - DNA, 25 bp, Homo sapien
acgttgtacatactgctcatacagg

SEQ ID NO: 4674101 - DNA, 25 bp, Homo sapien
aaaagtcaaacgcatagaaccaggg

SEQ ID NO: 4674102 - DNA, 25 bp, Homo sapien
aatttggatttcacaggcagaggcc

SEQ ID NO: 4674103 - DNA, 25 bp, Homo sapien
gattatgccaccctattggaagaga

SEQ ID NO: 4674104 - DNA, 25 bp, Homo sapien
aaaaggtggctatggtattcccagc

SEQ ID NO: 4674105 - DNA, 25 bp, Homo sapien
ttctcatttctatgtccttcttgcc

SEQ ID NO: 4674106 - DNA, 25 bp, Homo sapien
tttctgacttcccaactgaaatctc

SEQ ID NO: 4674107 - DNA, 25 bp, Homo sapien
ctttctcatttctatgtccttcttg

SEQ ID NO: 4674108 - DNA, 25 bp, Homo sapien
tcatctaaatttctgacttcccaac

SEQ ID NO: 4674109 - DNA, 25 bp, Homo sapien
gctaacaagctctttatgaattcca

SEQ ID NO: 4674110 - DNA, 25 bp, Homo sapien
tgtagcacgattagaacaaacttgg

SEQ ID NO: 4674111 - DNA, 25 bp, Homo sapien
tatgaattccagagtgcccagtcga

SEQ ID NO: 4674112 - DNA, 25 bp, Homo sapien
gcccagtcgactggtagcatctgga

SEQ ID NO: 4674113 - DNA, 25 bp, Homo sapien
cgtttttcctccaaagtcagaagag

SEQ ID NO: 4674114 - DNA, 25 bp, Homo sapien
aagtcagaagagtgttgtcaaagcc

SEQ ID NO: 4674115 - DNA, 25 bp, Homo sapien
ccaaagtcagaagagtgttgtcaaa

SEQ ID NO: 4674116 - DNA, 25 bp, Homo sapien
tcctccaaagtcagaagagtgttgt

SEQ ID NO: 4674117 - DNA, 25 bp, Homo sapien
cactgaaagtcggtagcactgacat

SEQ ID NO: 4674118 - DNA, 25 bp, Homo sapien
cagtactgtgaaagatgttgaacgc

SEQ ID NO: 4674119 - DNA, 25 bp, Homo sapien
gacattgtagggactttcataccag

SEQ ID NO: 4674120 - DNA, 25 bp, Homo sapien
caaattcagcagacacactggtacc

SEQ ID NO: 4674121 - DNA, 25 bp, Homo sapien
ctcttctatgctgcacagcgagtgc

SEQ ID NO: 4674122 - DNA, 25 bp, Homo sapien
cttctatgctgcacagcgagtgcat

SEQ ID NO: 4674123 - DNA, 25 bp, Homo sapien
tcttctatgctgcacagcgagtgca

SEQ ID NO: 4674124 - DNA, 25 bp, Homo sapien
gacactggaggcatgctcttctatg

SEQ ID NO: 4674125 - DNA, 25 bp, Homo sapien
cacagtcgagtctggcagggtaatt

SEQ ID NO: 4674126 - DNA, 25 bp, Homo sapien
acagtcgagtctggcagggtaatta

SEQ ID NO: 4674127 - DNA, 25 bp, Homo sapien
cagtcgagtctggcagggtaattac

SEQ ID NO: 4674128 - DNA, 25 bp, Homo sapien
ttgtttgagacagaccgatggtact

SEQ ID NO: 4674129 - DNA, 25 bp, Homo sapien
taccagcagaaataaccgtcagcaa

SEQ ID NO: 4674130 - DNA, 25 bp, Homo sapien
tttgctaatggccagggagctttcc

SEQ ID NO: 4674131 - DNA, 25 bp, Homo sapien
cagccaggacttagaacttatttcg

SEQ ID NO: 4674132 - DNA, 25 bp, Homo sapien
caccgttaacatggctaaatctttc

SEQ ID NO: 4674133 - DNA, 25 bp, Homo sapien
tccatacaccgttaacatggctaaa

SEQ ID NO: 4674134 - DNA, 25 bp, Homo sapien
tcttactccatacaccgttaacatg

SEQ ID NO: 4674135 - DNA, 25 bp, Homo sapien
catacaccgttaacatggctaaatc

SEQ ID NO: 4674136 - DNA, 25 bp, Homo sapien
acttatttctcaaaggtggcattag

SEQ ID NO: 4674137 - DNA, 25 bp, Homo sapien
aacacttatttctcaaaggtggcat

SEQ ID NO: 4674138 - DNA, 25 bp, Homo sapien
taactctttgttattaagtatctgc

SEQ ID NO: 4674139 - DNA, 25 bp, Homo sapien
atttgctcaatgtataactctttgt

SEQ ID NO: 4674140 - DNA, 25 bp, Homo sapien
ctcatagagaccaccattcctttca

SEQ ID NO: 4674141 - DNA, 25 bp, Homo sapien
cttctcatagagaccaccattcctt

SEQ ID NO: 4674142 - DNA, 25 bp, Homo sapien
tcatttctttcctctagggactcct

SEQ ID NO: 4674143 - DNA, 25 bp, Homo sapien
catagagaccaccattcctttcatt

SEQ ID NO: 4674144 - DNA, 25 bp, Homo sapien
ggatttggacatatccacagtgatc

SEQ ID NO: 4674145 - DNA, 25 bp, Homo sapien
gaggatttggacatatccacagtga

SEQ ID NO: 4674146 - DNA, 25 bp, Homo sapien
atggaggatttggacatatccacag

SEQ ID NO: 4674147 - DNA, 25 bp, Homo sapien
ttggacatatccacagtgatctgag

SEQ ID NO: 4674148 - DNA, 25 bp, Homo sapien
tcattcaccttgaaagtaaaaatga

SEQ ID NO: 4674149 - DNA, 25 bp, Homo sapien
cattcaccttgaaagtaaaaatgac

SEQ ID NO: 4674150 - DNA, 25 bp, Homo sapien
attcaccttgaaagtaaaaatgaca

SEQ ID NO: 4674151 - DNA, 25 bp, Homo sapien
cattaccactctcgttggaacaggt

SEQ ID NO: 4674152 - DNA, 25 bp, Homo sapien
gaggaccctccaaacaattaggaca

SEQ ID NO: 4674153 - DNA, 25 bp, Homo sapien
cagttgaatacgagaaaaattggct

SEQ ID NO: 4674154 - DNA, 25 bp, Homo sapien
gaacaggtgttccaatcagactcat

SEQ ID NO: 4674155 - DNA, 25 bp, Homo sapien
tagcctcgaatatgcgtcacccaaa

SEQ ID NO: 4674156 - DNA, 25 bp, Homo sapien
tctgaaattcataaccactggatct

SEQ ID NO: 4674157 - DNA, 25 bp, Homo sapien
tggatagtccactctctcaatggct

SEQ ID NO: 4674158 - DNA, 25 bp, Homo sapien
ttgttttgagaagaccccacatagc

SEQ ID NO: 4674159 - DNA, 25 bp, Homo sapien
taagagataaggttccaggaggtga

SEQ ID NO: 4674160 - DNA, 25 bp, Homo sapien
ccagccggtgtaggcaacctgggtt

SEQ ID NO: 4674161 - DNA, 25 bp, Homo sapien
tcttcactgtgtagccataatctcc

SEQ ID NO: 4674162 - DNA, 25 bp, Homo sapien
gatggctcgctggtcataggtctcc

SEQ ID NO: 4674163 - DNA, 25 bp, Homo sapien
tcttcaaggaagagttaccatttgg

SEQ ID NO: 4674164 - DNA, 25 bp, Homo sapien
ctcctctttattccattgaccctgg

SEQ ID NO: 4674165 - DNA, 25 bp, Homo sapien
agtagactgtgatccttaggcagag

SEQ ID NO: 4674166 - DNA, 25 bp, Homo sapien
aggagctgatacaaggggcttcttg

SEQ ID NO: 4674167 - DNA, 25 bp, Homo sapien
gtctttgattccaccatagattttg

SEQ ID NO: 4674168 - DNA, 25 bp, Homo sapien
tgctttgtctttgattccaccatag

SEQ ID NO: 4674169 - DNA, 25 bp, Homo sapien
gctttgtctttgattccaccataga

SEQ ID NO: 4674170 - DNA, 25 bp, Homo sapien
tgattccaccatagattttgcttac

SEQ ID NO: 4674171 - DNA, 25 bp, Homo sapien
ttcccttggagtagcccacttctgg

SEQ ID NO: 4674172 - DNA, 25 bp, Homo sapien
gagtagcccacttctggagtatatt

SEQ ID NO: 4674173 - DNA, 25 bp, Homo sapien
gtagcccacttctggagtatattat

SEQ ID NO: 4674174 - DNA, 25 bp, Homo sapien
tcccttggagtagcccacttctgga

SEQ ID NO: 4674175 - DNA, 25 bp, Homo sapien
gttgcacctgattagaaattgctgg

SEQ ID NO: 4674176 - DNA, 25 bp, Homo sapien
tctttcccagatcatggacatgatc

SEQ ID NO: 4674177 - DNA, 25 bp, Homo sapien
tcaggaaacaactttatcccttctg

SEQ ID NO: 4674178 - DNA, 25 bp, Homo sapien
ctatggttgcacctgattagaaatt

SEQ ID NO: 4674179 - DNA, 25 bp, Homo sapien
gaaaggtctttggtgaagaatctga

SEQ ID NO: 4674180 - DNA, 25 bp, Homo sapien
ggatctttctctggacaatctttga

SEQ ID NO: 4674181 - DNA, 25 bp, Homo sapien
gaaagtttatcttctggccaaggct

SEQ ID NO: 4674182 - DNA, 25 bp, Homo sapien
gggagggttgtctacacttcatcct

SEQ ID NO: 4674183 - DNA, 25 bp, Homo sapien
ccttgatcgtctttggattcttctc

SEQ ID NO: 4674184 - DNA, 25 bp, Homo sapien
tattggaccttgatcgtctttggat

SEQ ID NO: 4674185 - DNA, 25 bp, Homo sapien
gatttggatctgtgagtattggacc

SEQ ID NO: 4674186 - DNA, 25 bp, Homo sapien
tctgtgagtattggaccttgatcgt

SEQ ID NO: 4674187 - DNA, 25 bp, Homo sapien
tgttacagcgtcttcctgcttggga

SEQ ID NO: 4674188 - DNA, 25 bp, Homo sapien
cacttttagaagcacacttgggtct

SEQ ID NO: 4674189 - DNA, 25 bp, Homo sapien
gactgtggttgaagatggcctccca

SEQ ID NO: 4674190 - DNA, 25 bp, Homo sapien
catgcttgtcttttgagggctcaca

SEQ ID NO: 4674191 - DNA, 25 bp, Homo sapien
tagcttggtggttagtttagtagac

SEQ ID NO: 4674192 - DNA, 25 bp, Homo sapien
gcatttgtctccaaagtcaactttg

SEQ ID NO: 4674193 - DNA, 25 bp, Homo sapien
tgagcagtcgatctttacagttaaa

SEQ ID NO: 4674194 - DNA, 25 bp, Homo sapien
cttcagggtgtttggaactttgagc

SEQ ID NO: 4674195 - DNA, 25 bp, Homo sapien
agcccagagtcaggaaaagaagtta

SEQ ID NO: 4674196 - DNA, 25 bp, Homo sapien
gaggatactgtaagtgttccactgt

SEQ ID NO: 4674197 - DNA, 25 bp, Homo sapien
cccagagtcaggaaaagaagttagg

SEQ ID NO: 4674198 - DNA, 25 bp, Homo sapien
aagaagttaggaggatactgtaagt

SEQ ID NO: 4674199 - DNA, 25 bp, Homo sapien
cgttatcacaatgatcttcctcctc

SEQ ID NO: 4674200 - DNA, 25 bp, Homo sapien
atcaccttcatttcattaaagaggt

SEQ ID NO: 4674201 - DNA, 25 bp, Homo sapien
tcatttcattaaagaggttagtcat

SEQ ID NO: 4674202 - DNA, 25 bp, Homo sapien
cttcatttcattaaagaggttagtc

SEQ ID NO: 4674203 - DNA, 25 bp, Homo sapien
tacctgaagattacgaacaagggtc

SEQ ID NO: 4674204 - DNA, 25 bp, Homo sapien
caagggtctgagaactatgggcttt

SEQ ID NO: 4674205 - DNA, 25 bp, Homo sapien
cagagtccaggagattaaaccagct

SEQ ID NO: 4674206 - DNA, 25 bp, Homo sapien
tacaaggaaccagtacagtgtgatg

SEQ ID NO: 4674207 - DNA, 25 bp, Homo sapien
ttggcccatatgtggatgcaatata

SEQ ID NO: 4674208 - DNA, 25 bp, Homo sapien
taatttttcatcatagaggtagtat

SEQ ID NO: 4674209 - DNA, 25 bp, Homo sapien
tctttcgagacaaaatgaccataat

SEQ ID NO: 4674210 - DNA, 25 bp, Homo sapien
ttcatcatagaggtagtatacatcc

SEQ ID NO: 4674211 - DNA, 25 bp, Homo sapien
cactaagcgtaatagggagtccgta

SEQ ID NO: 4674212 - DNA, 25 bp, Homo sapien
gtgacattgctctcactaagcgtaa

SEQ ID NO: 4674213 - DNA, 25 bp, Homo sapien
gagtccgtaagaagatctgtgtgtc

SEQ ID NO: 4674214 - DNA, 25 bp, Homo sapien
ttcttgggcatctgtcatctcctat

SEQ ID NO: 4674215 - DNA, 25 bp, Homo sapien
cgtagtttctagcaagagtagtaat

SEQ ID NO: 4674216 - DNA, 25 bp, Homo sapien
tagtaatgggtcacgggcaatgtct

SEQ ID NO: 4674217 - DNA, 25 bp, Homo sapien
tctccagtggccttcgtagtttcta

SEQ ID NO: 4674218 - DNA, 25 bp, Homo sapien
aagagtagtaatgggtcacgggcaa

SEQ ID NO: 4674219 - DNA, 25 bp, Homo sapien
gatgcctgccataatatgtcaccag

SEQ ID NO: 4674220 - DNA, 25 bp, Homo sapien
tgccaaagggagctgcttgcagtga

SEQ ID NO: 4674221 - DNA, 25 bp, Homo sapien
tcaccagctgacatgcaatcgcttc

SEQ ID NO: 4674222 - DNA, 25 bp, Homo sapien
tcgtggaggatactgcttggtcaca

SEQ ID NO: 4674223 - DNA, 25 bp, Homo sapien
tattttccagataggaggtatcgta

SEQ ID NO: 4674224 - DNA, 25 bp, Homo sapien
tttccagataggaggtatcgtatta

SEQ ID NO: 4674225 - DNA, 25 bp, Homo sapien
ttttccagataggaggtatcgtatt

SEQ ID NO: 4674226 - DNA, 25 bp, Homo sapien
ttccagataggaggtatcgtattac

SEQ ID NO: 4674227 - DNA, 25 bp, Homo sapien
gagcctcaggcccagtggttcgatg

SEQ ID NO: 4674228 - DNA, 25 bp, Homo sapien
agtggttcgatgataaactgactcg

SEQ ID NO: 4674229 - DNA, 25 bp, Homo sapien
caggcccagtggttcgatgataaac

SEQ ID NO: 4674230 - DNA, 25 bp, Homo sapien
gatgataaactgactcggtggtgga

SEQ ID NO: 4674231 - DNA, 25 bp, Homo sapien
ggtgtctgtccagtgagctttctat

SEQ ID NO: 4674232 - DNA, 25 bp, Homo sapien
cagagatcctgaagatatttgagtc

SEQ ID NO: 4674233 - DNA, 25 bp, Homo sapien
ttagtgtgtttgagctatacctagc

SEQ ID NO: 4674234 - DNA, 25 bp, Homo sapien
caatggtattagttctcctgcccta

SEQ ID NO: 4674235 - DNA, 25 bp, Homo sapien
tcagtgagaaagcagccatgcccaa

SEQ ID NO: 4674236 - DNA, 25 bp, Homo sapien
ttcagtgagaaagcagccatgccca

SEQ ID NO: 4674237 - DNA, 25 bp, Homo sapien
agaaagcagccatgcccaactcttt

SEQ ID NO: 4674238 - DNA, 25 bp, Homo sapien
agtgagaaagcagccatgcccaact

SEQ ID NO: 4674239 - DNA, 25 bp, Homo sapien
gagagggcacaacttttacgtacta

SEQ ID NO: 4674240 - DNA, 25 bp, Homo sapien
tggaactcatactctgggatctggg

SEQ ID NO: 4674241 - DNA, 25 bp, Homo sapien
tcttcacctcggtacaaggagaggg

SEQ ID NO: 4674242 - DNA, 25 bp, Homo sapien
cagaaaagaactgtgctggaactca

SEQ ID NO: 4674243 - DNA, 25 bp, Homo sapien
gggtcagcagttgcacatactccct

SEQ ID NO: 4674244 - DNA, 25 bp, Homo sapien
cacatagacgtcttggtagagaaac

SEQ ID NO: 4674245 - DNA, 25 bp, Homo sapien
ttccaactagaaaactctcccacat

SEQ ID NO: 4674246 - DNA, 25 bp, Homo sapien
tactcccttccgtagaagtagtgga

SEQ ID NO: 4674247 - DNA, 25 bp, Homo sapien
gctgctgactgccaaggcagaggag

SEQ ID NO: 4674248 - DNA, 25 bp, Homo sapien
agggccctctagggctgctgactgc

SEQ ID NO: 4674249 - DNA, 25 bp, Homo sapien
caaagggccctctagggctgctgac

SEQ ID NO: 4674250 - DNA, 25 bp, Homo sapien
aaagggccctctagggctgctgact

SEQ ID NO: 4674251 - DNA, 25 bp, Homo sapien
gaaatagtcacaggctgacacctga

SEQ ID NO: 4674252 - DNA, 25 bp, Homo sapien
agtggatgagaggaagccactattt

SEQ ID NO: 4674253 - DNA, 25 bp, Homo sapien
tatttcctggaaatagtcacaggct

SEQ ID NO: 4674254 - DNA, 25 bp, Homo sapien
tggatgagaggaagccactatttcc

SEQ ID NO: 4674255 - DNA, 25 bp, Homo sapien
tgcagatgatattggttccctcacc

SEQ ID NO: 4674256 - DNA, 25 bp, Homo sapien
atgggaaaatgcagatgatattggt

SEQ ID NO: 4674257 - DNA, 25 bp, Homo sapien
tccttttccagcgttggaatgaatt

SEQ ID NO: 4674258 - DNA, 25 bp, Homo sapien
ccttttccagcgttggaatgaattc

SEQ ID NO: 4674259 - DNA, 25 bp, Homo sapien
gatgctgtctatatggtctgtcaat

SEQ ID NO: 4674260 - DNA, 25 bp, Homo sapien
catccttccctgtacatatgcctgg

SEQ ID NO: 4674261 - DNA, 25 bp, Homo sapien
tatgcctggggtctatgatgctgtc

SEQ ID NO: 4674262 - DNA, 25 bp, Homo sapien
agtcctccacggcagagcagtcatc

SEQ ID NO: 4674263 - DNA, 25 bp, Homo sapien
tcatctctgaactttgcccagttcc

SEQ ID NO: 4674264 - DNA, 25 bp, Homo sapien
ctttttctcaattgtggtcactctt

SEQ ID NO: 4674265 - DNA, 25 bp, Homo sapien
tctttttctcaattgtggtcactct

SEQ ID NO: 4674266 - DNA, 25 bp, Homo sapien
cttgaggagcctaactaatgagatc

SEQ ID NO: 4674267 - DNA, 25 bp, Homo sapien
tgagatcttggatttgccactaacg

SEQ ID NO: 4674268 - DNA, 25 bp, Homo sapien
gaatagttgtgggaagactctgaag

SEQ ID NO: 4674269 - DNA, 25 bp, Homo sapien
taacgtttggcgaatagttgtggga

SEQ ID NO: 4674270 - DNA, 25 bp, Homo sapien
catagagttccatttgaggatctat

SEQ ID NO: 4674271 - DNA, 25 bp, Homo sapien
tctatggactgtggaggtaggaaaa

SEQ ID NO: 4674272 - DNA, 25 bp, Homo sapien
catttgaggatctatggactgtgga

SEQ ID NO: 4674273 - DNA, 25 bp, Homo sapien
tatggactgtggaggtaggaaaaat

SEQ ID NO: 4674274 - DNA, 25 bp, Homo sapien
taagctgcgactgagcccggtggct

SEQ ID NO: 4674275 - DNA, 25 bp, Homo sapien
tatagataagctgcgactgagcccg

SEQ ID NO: 4674276 - DNA, 25 bp, Homo sapien
aatatagataagctgcgactgagcc

SEQ ID NO: 4674277 - DNA, 25 bp, Homo sapien
agataagctgcgactgagcccggtg

SEQ ID NO: 4674278 - DNA, 25 bp, Homo sapien
accaccaaaatctatactgatcttt

SEQ ID NO: 4674279 - DNA, 25 bp, Homo sapien
aggttctgtgaagtaatccgaccac

SEQ ID NO: 4674280 - DNA, 25 bp, Homo sapien
tactcagggcctattattaaggcta

SEQ ID NO: 4674281 - DNA, 25 bp, Homo sapien
tattaaggctagtaccttggatggg

SEQ ID NO: 4674282 - DNA, 25 bp, Homo sapien
gcaagcacaccgcaaatatgatgac

SEQ ID NO: 4674283 - DNA, 25 bp, Homo sapien
acagatgtccaatttgccgggaaca

SEQ ID NO: 4674284 - DNA, 25 bp, Homo sapien
tgttgcccagcaaggtgatcaggta

SEQ ID NO: 4674285 - DNA, 25 bp, Homo sapien
tgatcaggtacatcagcaagcacac

SEQ ID NO: 4674286 - DNA, 25 bp, Homo sapien
ggcagaagaggagtaccagatgtcc

SEQ ID NO: 4674287 - DNA, 25 bp, Homo sapien
gcaccctgagaatgaaatagtgttt

SEQ ID NO: 4674288 - DNA, 25 bp, Homo sapien
agaagaggagtaccagatgtccaga

SEQ ID NO: 4674289 - DNA, 25 bp, Homo sapien
gagaggtacatctgagtggcgcacc

SEQ ID NO: 4674290 - DNA, 25 bp, Homo sapien
tgtgaatctacagcggagggcttca

SEQ ID NO: 4674291 - DNA, 25 bp, Homo sapien
tggagagagccgtcccatagaacaa

SEQ ID NO: 4674292 - DNA, 25 bp, Homo sapien
gatgatgctattaccacagagagac

SEQ ID NO: 4674293 - DNA, 25 bp, Homo sapien
ccatcaggtgggctgtgcacgttga

SEQ ID NO: 4674294 - DNA, 25 bp, Homo sapien
tccttaacccgctccatgtgtgtga

SEQ ID NO: 4674295 - DNA, 25 bp, Homo sapien
ttttgcttgtgctctcacgctcgct

SEQ ID NO: 4674296 - DNA, 25 bp, Homo sapien
tgacatgagatgacgaaccacaggt

SEQ ID NO: 4674297 - DNA, 25 bp, Homo sapien
ccagacaacgaaactacttcagtga

SEQ ID NO: 4674298 - DNA, 25 bp, Homo sapien
catcaccagtcgtttttacagctgc

SEQ ID NO: 4674299 - DNA, 25 bp, Homo sapien
aagcacagcatatccttgctgcaca

SEQ ID NO: 4674300 - DNA, 25 bp, Homo sapien
tacagctgcttttagccttaatttc

SEQ ID NO: 4674301 - DNA, 25 bp, Homo sapien
acatggccaagcacagcatatcctt

SEQ ID NO: 4674302 - DNA, 25 bp, Homo sapien
tcctccaccattagagcacatgaca

SEQ ID NO: 4674303 - DNA, 25 bp, Homo sapien
accattagagcacatgacactttga

SEQ ID NO: 4674304 - DNA, 25 bp, Homo sapien
tccaccattagagcacatgacactt

SEQ ID NO: 4674305 - DNA, 25 bp, Homo sapien
cgtcctccaccattagagcacatga

SEQ ID NO: 4674306 - DNA, 25 bp, Homo sapien
tgtgaatgatagaacaggaatatgt

SEQ ID NO: 4674307 - DNA, 25 bp, Homo sapien
gttaatacagtgtctgtgagagcta

SEQ ID NO: 4674308 - DNA, 25 bp, Homo sapien
gaatgatagaacaggaatatgttaa

SEQ ID NO: 4674309 - DNA, 25 bp, Homo sapien
aactctgtgaatgatagaacaggaa

SEQ ID NO: 4674310 - DNA, 25 bp, Homo sapien
tttgcaccatacacccagagaagga

SEQ ID NO: 4674311 - DNA, 25 bp, Homo sapien
tctgtcgacgtggaatcgttggtcc

SEQ ID NO: 4674312 - DNA, 25 bp, Homo sapien
tccaagcaggatcatcaggtacatc

SEQ ID NO: 4674313 - DNA, 25 bp, Homo sapien
gaacttgtgtagcaaacgtcgagga

SEQ ID NO: 4674314 - DNA, 25 bp, Homo sapien
tcaacagaggctttagactcaggct

SEQ ID NO: 4674315 - DNA, 25 bp, Homo sapien
ggaatcctcagaatagtggcaacaa

SEQ ID NO: 4674316 - DNA, 25 bp, Homo sapien
caaaagctgtctgcactactgagtc

SEQ ID NO: 4674317 - DNA, 25 bp, Homo sapien
ggtccagtgccatcgtgcctaagat

SEQ ID NO: 4674318 - DNA, 25 bp, Homo sapien
tttttcctacacagtatgtttttga

SEQ ID NO: 4674319 - DNA, 25 bp, Homo sapien
tttcctacacagtatgtttttgaca

SEQ ID NO: 4674320 - DNA, 25 bp, Homo sapien
ttttcctacacagtatgtttttgac

SEQ ID NO: 4674321 - DNA, 25 bp, Homo sapien
tggttaaagcccttggtcctagcgc

SEQ ID NO: 4674322 - DNA, 25 bp, Homo sapien
gcaatactgggatcaagaaaaggtc

SEQ ID NO: 4674323 - DNA, 25 bp, Homo sapien
tcttccctaaagtacatcgcgctga

SEQ ID NO: 4674324 - DNA, 25 bp, Homo sapien
catgaccccaggtttattcagcagt

SEQ ID NO: 4674325 - DNA, 25 bp, Homo sapien
gcatctccatataccggctggattc

SEQ ID NO: 4674326 - DNA, 25 bp, Homo sapien
catctccatataccggctggattcc

SEQ ID NO: 4674327 - DNA, 25 bp, Homo sapien
tgcatctccatataccggctggatt

SEQ ID NO: 4674328 - DNA, 25 bp, Homo sapien
tctccatataccggctggattccat

SEQ ID NO: 4674329 - DNA, 25 bp, Homo sapien
tctatagcatcaaatggaatgtcca

SEQ ID NO: 4674330 - DNA, 25 bp, Homo sapien
taatatttgcatcaagaattacacc

SEQ ID NO: 4674331 - DNA, 25 bp, Homo sapien
gcatcaagaattacaccatctatag

SEQ ID NO: 4674332 - DNA, 25 bp, Homo sapien
gaattacaccatctatagcatcaaa

SEQ ID NO: 4674333 - DNA, 25 bp, Homo sapien
tgcctctcttttagtgcttgtattt

SEQ ID NO: 4674334 - DNA, 25 bp, Homo sapien
gcttgcctctcttttagtgcttgta

SEQ ID NO: 4674335 - DNA, 25 bp, Homo sapien
ggtgaagttagtaacggttgctcta

SEQ ID NO: 4674336 - DNA, 25 bp, Homo sapien
tagtaacggttgctctacttttctc

SEQ ID NO: 4674337 - DNA, 25 bp, Homo sapien
acccaatagccagggctgaactaga

SEQ ID NO: 4674338 - DNA, 25 bp, Homo sapien
ggtgaagagcatagtatggcagaaa

SEQ ID NO: 4674339 - DNA, 25 bp, Homo sapien
tgaagagcatagtatggcagaaaca

SEQ ID NO: 4674340 - DNA, 25 bp, Homo sapien
gagctctttcaaaccaacccaatag

SEQ ID NO: 4674341 - DNA, 25 bp, Homo sapien
catctgaatacaaagtgccttgccc

SEQ ID NO: 4674342 - DNA, 25 bp, Homo sapien
ggtacatcactaagcacatcacgaa

SEQ ID NO: 4674343 - DNA, 25 bp, Homo sapien
tcttgggtaccctgaaagtccttgc

SEQ ID NO: 4674344 - DNA, 25 bp, Homo sapien
cggtggatcccatagtgtaagagac

SEQ ID NO: 4674345 - DNA, 25 bp, Homo sapien
taggagatacaaatcagcagtaatg

SEQ ID NO: 4674346 - DNA, 25 bp, Homo sapien
caaggaagtatctgtgcaagccagc

SEQ ID NO: 4674347 - DNA, 25 bp, Homo sapien
tagaaaggataaagatgtaggagat

SEQ ID NO: 4674348 - DNA, 25 bp, Homo sapien
aagggtaaccgtattgcaagaacag

SEQ ID NO: 4674349 - DNA, 25 bp, Homo sapien
gtgggctgagcaggtggaaaaggcc

SEQ ID NO: 4674350 - DNA, 25 bp, Homo sapien
tttttccttccttcagctgaattga

SEQ ID NO: 4674351 - DNA, 25 bp, Homo sapien
cctttttccttccttcagctgaatt

SEQ ID NO: 4674352 - DNA, 25 bp, Homo sapien
tttccttccttcagctgaattgatt

SEQ ID NO: 4674353 - DNA, 25 bp, Homo sapien
tagaacagggcaatcagtttgtcaa

SEQ ID NO: 4674354 - DNA, 25 bp, Homo sapien
gactatgccatagaacagggcaatc

SEQ ID NO: 4674355 - DNA, 25 bp, Homo sapien
cagtttgtcaaaagcagagtctttg

SEQ ID NO: 4674356 - DNA, 25 bp, Homo sapien
tgccatagaacagggcaatcagttt

SEQ ID NO: 4674357 - DNA, 25 bp, Homo sapien
tccagaaccagggtctactcattaa

SEQ ID NO: 4674358 - DNA, 25 bp, Homo sapien
tactcattaatttcctcatagctcc

SEQ ID NO: 4674359 - DNA, 25 bp, Homo sapien
cagggtctactcattaatttcctca

SEQ ID NO: 4674360 - DNA, 25 bp, Homo sapien
ttaatttcctcatagctccatgcac

SEQ ID NO: 4674361 - DNA, 25 bp, Homo sapien
cttgtgtgtatgctcctttcatgct

SEQ ID NO: 4674362 - DNA, 25 bp, Homo sapien
tttgacaccctgaactgagcctctc

SEQ ID NO: 4674363 - DNA, 25 bp, Homo sapien
ctcaaccaggtgctaggatccacac

SEQ ID NO: 4674364 - DNA, 25 bp, Homo sapien
ttcatgctgcttggactttgacacc

SEQ ID NO: 4674365 - DNA, 25 bp, Homo sapien
gggtatagacccagtaatggggatg

SEQ ID NO: 4674366 - DNA, 25 bp, Homo sapien
tctagttctacatccttgaggagtt

SEQ ID NO: 4674367 - DNA, 25 bp, Homo sapien
tagttctacatccttgaggagttgc

SEQ ID NO: 4674368 - DNA, 25 bp, Homo sapien
tatagacccagtaatggggatggct

SEQ ID NO: 4674369 - DNA, 25 bp, Homo sapien
ccccatggaatagaagatagacatt

SEQ ID NO: 4674370 - DNA, 25 bp, Homo sapien
gagggtcactagatacaccactaag

SEQ ID NO: 4674371 - DNA, 25 bp, Homo sapien
tgctaggagcacacactccgtggac

SEQ ID NO: 4674372 - DNA, 25 bp, Homo sapien
gacgtaagcccgatatccaggaagg

SEQ ID NO: 4674373 - DNA, 25 bp, Homo sapien
agagggtatctcaggaatttgctga

SEQ ID NO: 4674374 - DNA, 25 bp, Homo sapien
tgaagaggattgtccggtgaaacac

SEQ ID NO: 4674375 - DNA, 25 bp, Homo sapien
gaaatatctatgcaagccagaggca

SEQ ID NO: 4674376 - DNA, 25 bp, Homo sapien
gcatgagcattactaccccgcagaa

SEQ ID NO: 4674377 - DNA, 25 bp, Homo sapien
gaacaggtcaaccagtttctctgaa

SEQ ID NO: 4674378 - DNA, 25 bp, Homo sapien
tcttcataaccccaagcacctccat

SEQ ID NO: 4674379 - DNA, 25 bp, Homo sapien
ttcttcataaccccaagcacctcca

SEQ ID NO: 4674380 - DNA, 25 bp, Homo sapien
tgtacatgaactcaaagatgtcagg

SEQ ID NO: 4674381 - DNA, 25 bp, Homo sapien
tattttgtacatgaactcaaagatg

SEQ ID NO: 4674382 - DNA, 25 bp, Homo sapien
ctcatcatttttccagcaccagggt

SEQ ID NO: 4674383 - DNA, 25 bp, Homo sapien
tgaactcaaagatgtcaggttctca

SEQ ID NO: 4674384 - DNA, 25 bp, Homo sapien
ctggatattgggaaagccccaccag

SEQ ID NO: 4674385 - DNA, 25 bp, Homo sapien
aaagccccaccagaaagaattcagt

SEQ ID NO: 4674386 - DNA, 25 bp, Homo sapien
ggaaagccccaccagaaagaattca

SEQ ID NO: 4674387 - DNA, 25 bp, Homo sapien
ggatattgggaaagccccaccagaa

SEQ ID NO: 4674388 - DNA, 25 bp, Homo sapien
ggctgaaccgtagaataagatgacc

SEQ ID NO: 4674389 - DNA, 25 bp, Homo sapien
tagaagggccaaaatttcacaggta

SEQ ID NO: 4674390 - DNA, 25 bp, Homo sapien
taagacagcccaataatctcatcag

SEQ ID NO: 4674391 - DNA, 25 bp, Homo sapien
caatcgagtgcgctgaacaggtaga

SEQ ID NO: 4674392 - DNA, 25 bp, Homo sapien
caataaatgcagatgtctgctcagg

SEQ ID NO: 4674393 - DNA, 25 bp, Homo sapien
caggactttctttacagcctctttg

SEQ ID NO: 4674394 - DNA, 25 bp, Homo sapien
taaatgcagatgtctgctcaggact

SEQ ID NO: 4674395 - DNA, 25 bp, Homo sapien
gactttctttacagcctctttgacc

SEQ ID NO: 4674396 - DNA, 25 bp, Homo sapien
tattcttgacaatagtatatgcgtt

SEQ ID NO: 4674397 - DNA, 25 bp, Homo sapien
ttcttgacaatagtatatgcgtttt

SEQ ID NO: 4674398 - DNA, 25 bp, Homo sapien
cttgacaatagtatatgcgttttcc

SEQ ID NO: 4674399 - DNA, 25 bp, Homo sapien
tcttgacaatagtatatgcgttttc

SEQ ID NO: 4674400 - DNA, 25 bp, Homo sapien
cagcacttgtgcaattgtgtaggcc

SEQ ID NO: 4674401 - DNA, 25 bp, Homo sapien
tcactttcgtgaaaacatcagcgcg

SEQ ID NO: 4674402 - DNA, 25 bp, Homo sapien
gtgttttagttctatcccacttatg

SEQ ID NO: 4674403 - DNA, 25 bp, Homo sapien
ggccttagttaggagaacattcact

SEQ ID NO: 4674404 - DNA, 25 bp, Homo sapien
atcatagatcggttctcagtattgg

SEQ ID NO: 4674405 - DNA, 25 bp, Homo sapien
catcatagatcggttctcagtattg

SEQ ID NO: 4674406 - DNA, 25 bp, Homo sapien
catagatcggttctcagtattgggc

SEQ ID NO: 4674407 - DNA, 25 bp, Homo sapien
tcatagatcggttctcagtattggg

SEQ ID NO: 4674408 - DNA, 25 bp, Homo sapien
cccaaaccacgcattttctctggcc

SEQ ID NO: 4674409 - DNA, 25 bp, Homo sapien
tatccttgccccaaaccacgcattt

SEQ ID NO: 4674410 - DNA, 25 bp, Homo sapien
tgtctgaaaatagacagcagcgttc

SEQ ID NO: 4674411 - DNA, 25 bp, Homo sapien
cttgtctgaaaatagacagcagcgt

SEQ ID NO: 4674412 - DNA, 25 bp, Homo sapien
tcacggcagagtgatttgttgtctc

SEQ ID NO: 4674413 - DNA, 25 bp, Homo sapien
attcagtcacggcagagtgatttgt

SEQ ID NO: 4674414 - DNA, 25 bp, Homo sapien
cagtcacggcagagtgatttgttgt

SEQ ID NO: 4674415 - DNA, 25 bp, Homo sapien
cggcagagtgatttgttgtctccat

SEQ ID NO: 4674416 - DNA, 25 bp, Homo sapien
agagcaggaacagaaaaagctggag

SEQ ID NO: 4674417 - DNA, 25 bp, Homo sapien
gaggcagagcaggaacagaaaaagc

SEQ ID NO: 4674418 - DNA, 25 bp, Homo sapien
gcagagcaggaacagaaaaagctgg

SEQ ID NO: 4674419 - DNA, 25 bp, Homo sapien
gatgaggcagagcaggaacagaaaa

SEQ ID NO: 4674420 - DNA, 25 bp, Homo sapien
aatgaggaagctatttcccaggagg

SEQ ID NO: 4674421 - DNA, 25 bp, Homo sapien
gatgtgtaacagatgcccaagaatg

SEQ ID NO: 4674422 - DNA, 25 bp, Homo sapien
aaggagatggattttctctcagata

SEQ ID NO: 4674423 - DNA, 25 bp, Homo sapien
gatacaaatataataagcattggag

SEQ ID NO: 4674424 - DNA, 25 bp, Homo sapien
tacactcaatggagcccaagccaag

SEQ ID NO: 4674425 - DNA, 25 bp, Homo sapien
aatggagcccaagccaagggacaca

SEQ ID NO: 4674426 - DNA, 25 bp, Homo sapien
gaggatacactcaatggagcccaag

SEQ ID NO: 4674427 - DNA, 25 bp, Homo sapien
cacagccaggaggatacactcaatg

SEQ ID NO: 4674428 - DNA, 25 bp, Homo sapien
tcattgtcagaactgttcgcaatag

SEQ ID NO: 4674429 - DNA, 25 bp, Homo sapien
atttgcacatacagcactctgttca

SEQ ID NO: 4674430 - DNA, 25 bp, Homo sapien
gcaacatcattgtcagaactgttcg

SEQ ID NO: 4674431 - DNA, 25 bp, Homo sapien
ttgcacatacagcactctgttcatg

SEQ ID NO: 4674432 - DNA, 25 bp, Homo sapien
atttatggagatatctgagcatatg

SEQ ID NO: 4674433 - DNA, 25 bp, Homo sapien
agcatatgactttaagaagagccag

SEQ ID NO: 4674434 - DNA, 25 bp, Homo sapien
gatatctgagcatatgactttaaga

SEQ ID NO: 4674435 - DNA, 25 bp, Homo sapien
tatggagatatctgagcatatgact

SEQ ID NO: 4674436 - DNA, 25 bp, Homo sapien
taaaacaatacttgacactgtcatt

SEQ ID NO: 4674437 - DNA, 25 bp, Homo sapien
agaataaacacataggagataaaaa

SEQ ID NO: 4674438 - DNA, 25 bp, Homo sapien
aaaggctttctttcttccctcagca

SEQ ID NO: 4674439 - DNA, 25 bp, Homo sapien
tttctttcttccctcagcagaatta

SEQ ID NO: 4674440 - DNA, 25 bp, Homo sapien
ggctttctttcttccctcagcagaa

SEQ ID NO: 4674441 - DNA, 25 bp, Homo sapien
ctttcttccctcagcagaattaatt

SEQ ID NO: 4674442 - DNA, 25 bp, Homo sapien
ctgaaccatagaataagatgaccac

SEQ ID NO: 4674443 - DNA, 25 bp, Homo sapien
aataagatgaccacagtcaagtgcg

SEQ ID NO: 4674444 - DNA, 25 bp, Homo sapien
gaaccatagaataagatgaccacag

SEQ ID NO: 4674445 - DNA, 25 bp, Homo sapien
agaataagatgaccacagtcaagtg

SEQ ID NO: 4674446 - DNA, 25 bp, Homo sapien
ttcataagacaatccaatgatttca

SEQ ID NO: 4674447 - DNA, 25 bp, Homo sapien
gggttcattggggtgatcacttcat

SEQ ID NO: 4674448 - DNA, 25 bp, Homo sapien
ttccatagatgcacgtgtctgctga

SEQ ID NO: 4674449 - DNA, 25 bp, Homo sapien
ttttccatagatgcacgtgtctgct

SEQ ID NO: 4674450 - DNA, 25 bp, Homo sapien
gaagccattgcagtagcctatgtga

SEQ ID NO: 4674451 - DNA, 25 bp, Homo sapien
caacttgctactgcgatatagaacg

SEQ ID NO: 4674452 - DNA, 25 bp, Homo sapien
ccattcccgttgatacctgctgtaa

SEQ ID NO: 4674453 - DNA, 25 bp, Homo sapien
tagaacgttaacatgacctcagaaa

SEQ ID NO: 4674454 - DNA, 25 bp, Homo sapien
taataaatagtctgtgtaggaagca

SEQ ID NO: 4674455 - DNA, 25 bp, Homo sapien
ttaagtgtgcctgccaaataagact

SEQ ID NO: 4674456 - DNA, 25 bp, Homo sapien
ttcattatgaagagcagactatgct

SEQ ID NO: 4674457 - DNA, 25 bp, Homo sapien
gaagcattatgacattcttagacca

SEQ ID NO: 4674458 - DNA, 25 bp, Homo sapien
cggcgggtcccgtagcttggtgtct

SEQ ID NO: 4674459 - DNA, 25 bp, Homo sapien
aggcgcggcgggtcccgtagcttgg

SEQ ID NO: 4674460 - DNA, 25 bp, Homo sapien
gcgcggcgggtcccgtagcttggtg

SEQ ID NO: 4674461 - DNA, 25 bp, Homo sapien
gggctcggcggggtcagctccaccc

SEQ ID NO: 4674462 - DNA, 25 bp, Homo sapien
agaaaagcagccagccgtgtccttt

SEQ ID NO: 4674463 - DNA, 25 bp, Homo sapien
agactcctctgaaggtttcccgagt

SEQ ID NO: 4674464 - DNA, 25 bp, Homo sapien
aggagcggctcctggatcattggca

SEQ ID NO: 4674465 - DNA, 25 bp, Homo sapien
cagccgtgtcctttctgagactcct

SEQ ID NO: 4674466 - DNA, 25 bp, Homo sapien
agtcagggcgcttctgaggacgagc

SEQ ID NO: 4674467 - DNA, 25 bp, Homo sapien
gccagcgtccgtgaggccagcgccc

SEQ ID NO: 4674468 - DNA, 25 bp, Homo sapien
tccgtgaggccagcgcccgagtcag

SEQ ID NO: 4674469 - DNA, 25 bp, Homo sapien
agcgcccgagtcagggcgcttctga

SEQ ID NO: 4674470 - DNA, 25 bp, Homo sapien
ctcacgcgcgttccgggtacccctg

SEQ ID NO: 4674471 - DNA, 25 bp, Homo sapien
cggctgggggtattcccctagcagc

SEQ ID NO: 4674472 - DNA, 25 bp, Homo sapien
ggtattcccctagcagcggcctcct

SEQ ID NO: 4674473 - DNA, 25 bp, Homo sapien
ctgcccgcgagacgaccccggctgg

SEQ ID NO: 4674474 - DNA, 25 bp, Homo sapien
agcaaaaacgaaacagccggcgcca

SEQ ID NO: 4674475 - DNA, 25 bp, Homo sapien
ccacagcgccaggtgacaacatggg

SEQ ID NO: 4674476 - DNA, 25 bp, Homo sapien
gtggcttggaaagctacgactccac

SEQ ID NO: 4674477 - DNA, 25 bp, Homo sapien
cagccgcgacatagctgggcagcaa

SEQ ID NO: 4674478 - DNA, 25 bp, Homo sapien
gcaagcggctggttgacaattccct

SEQ ID NO: 4674479 - DNA, 25 bp, Homo sapien
gttagggcagaatcacaagctccat

SEQ ID NO: 4674480 - DNA, 25 bp, Homo sapien
aaagagtctgtctgtcatcgtccgg

SEQ ID NO: 4674481 - DNA, 25 bp, Homo sapien
tcttcaagggtctccgcgaaatgct

SEQ ID NO: 4674482 - DNA, 25 bp, Homo sapien
tgaagaagataagacaaatgtaaat

SEQ ID NO: 4674483 - DNA, 25 bp, Homo sapien
ctgaagaagataagacaaatgtaaa

SEQ ID NO: 4674484 - DNA, 25 bp, Homo sapien
gaagaagataagacaaatgtaaata

SEQ ID NO: 4674485 - DNA, 25 bp, Homo sapien
aagaagataagacaaatgtaaatat

SEQ ID NO: 4674486 - DNA, 25 bp, Homo sapien
catctttgagggcttaaggtaataa

SEQ ID NO: 4674487 - DNA, 25 bp, Homo sapien
tattccatcgtattgtctgggtccc

SEQ ID NO: 4674488 - DNA, 25 bp, Homo sapien
ctgggtcccgtagcaaaagatgagc

SEQ ID NO: 4674489 - DNA, 25 bp, Homo sapien
cagagtgagctgtccgaagatgagc

SEQ ID NO: 4674490 - DNA, 25 bp, Homo sapien
tcagcaatggtcattgatgccatat

SEQ ID NO: 4674491 - DNA, 25 bp, Homo sapien
gatgccatataagaaccttgtgtta

SEQ ID NO: 4674492 - DNA, 25 bp, Homo sapien
ttggagacaccaacgtaaacagatg

SEQ ID NO: 4674493 - DNA, 25 bp, Homo sapien
ccaacgtaaacagatgtgaccatct

SEQ ID NO: 4674494 - DNA, 25 bp, Homo sapien
ggaatgaggaattgttcttgccatt

SEQ ID NO: 4674495 - DNA, 25 bp, Homo sapien
ggctttccgaacttcagttcgatga

SEQ ID NO: 4674496 - DNA, 25 bp, Homo sapien
gcaccatggtaccagataagtaatc

SEQ ID NO: 4674497 - DNA, 25 bp, Homo sapien
tctcactctcttgtttatcaatgag

SEQ ID NO: 4674498 - DNA, 25 bp, Homo sapien
tgatcacttaagttctttagtattt

SEQ ID NO: 4674499 - DNA, 25 bp, Homo sapien
ttaaaggatggggtaagagctccca

SEQ ID NO: 4674500 - DNA, 25 bp, Homo sapien
catcaaaactcagtgactaagaagg

SEQ ID NO: 4674501 - DNA, 25 bp, Homo sapien
aatctgcaaggtctcaatttgaaaa

SEQ ID NO: 4674502 - DNA, 25 bp, Homo sapien
tccttgcccatgtttaagagtgagt

SEQ ID NO: 4674503 - DNA, 25 bp, Homo sapien
tttccaagcagtgatgtacacagag

SEQ ID NO: 4674504 - DNA, 25 bp, Homo sapien
gcaaagcaaagagtggacctgaagt

SEQ ID NO: 4674505 - DNA, 25 bp, Homo sapien
gcaatatccaatcacgtttctcagt

SEQ ID NO: 4674506 - DNA, 25 bp, Homo sapien
gtgctccgtactctgtgtggaacac

SEQ ID NO: 4674507 - DNA, 25 bp, Homo sapien
tgtagcctagattgacatgagcatg

SEQ ID NO: 4674508 - DNA, 25 bp, Homo sapien
tctgttgagtgctccgtactctgtg

SEQ ID NO: 4674509 - DNA, 25 bp, Homo sapien
tgagcatgaactgcccttttaaatg

SEQ ID NO: 4674510 - DNA, 25 bp, Homo sapien
aatttcatataagaagaaatggaca

SEQ ID NO: 4674511 - DNA, 25 bp, Homo sapien
tcatataagaagaaatggacaattg

SEQ ID NO: 4674512 - DNA, 25 bp, Homo sapien
tataagaagaaatggacaattgtac

SEQ ID NO: 4674513 - DNA, 25 bp, Homo sapien
atttcatataagaagaaatggacaa

SEQ ID NO: 4674514 - DNA, 25 bp, Homo sapien
gtgtcaggcctagttttaagcattt

SEQ ID NO: 4674515 - DNA, 25 bp, Homo sapien
cccaggcagtctgaatctgattatt

SEQ ID NO: 4674516 - DNA, 25 bp, Homo sapien
aagtaagtagtgtacctgggattca

SEQ ID NO: 4674517 - DNA, 25 bp, Homo sapien
aatactttcgatgacaactactgac

SEQ ID NO: 4674518 - DNA, 25 bp, Homo sapien
aattcctccttacagatacagcaac

SEQ ID NO: 4674519 - DNA, 25 bp, Homo sapien
tatgagtaaaaccaaatcagggtct

SEQ ID NO: 4674520 - DNA, 25 bp, Homo sapien
tgttaacagtatagagaaaacctct

SEQ ID NO: 4674521 - DNA, 25 bp, Homo sapien
taaaacagctagaggcacaatcaag

SEQ ID NO: 4674522 - DNA, 25 bp, Homo sapien
tgcagaaataaaccacaagtagctt

SEQ ID NO: 4674523 - DNA, 25 bp, Homo sapien
gaaataaaccacaagtagcttctaa

SEQ ID NO: 4674524 - DNA, 25 bp, Homo sapien
accacaagtagcttctaaaaaatat

SEQ ID NO: 4674525 - DNA, 25 bp, Homo sapien
acaagtagcttctaaaaaatatggc

SEQ ID NO: 4674526 - DNA, 25 bp, Homo sapien
tgggatcctcatgggacttatgtct

SEQ ID NO: 4674527 - DNA, 25 bp, Homo sapien
ctgggatcctcatgggacttatgtc

SEQ ID NO: 4674528 - DNA, 25 bp, Homo sapien
acttatgtctcccagctgcacgact

SEQ ID NO: 4674529 - DNA, 25 bp, Homo sapien
tgcacgactatctgcactctcattc

SEQ ID NO: 4674530 - DNA, 25 bp, Homo sapien
aataattcatgcctagtcaaacagc

SEQ ID NO: 4674531 - DNA, 25 bp, Homo sapien
catttcatagaaaggcatatagagt

SEQ ID NO: 4674532 - DNA, 25 bp, Homo sapien
gagttactgactgaaacacatttgt

SEQ ID NO: 4674533 - DNA, 25 bp, Homo sapien
attcatgcctagtcaaacagcttac

SEQ ID NO: 4674534 - DNA, 25 bp, Homo sapien
tttcagtggtgaaaacgatgtagga

SEQ ID NO: 4674535 - DNA, 25 bp, Homo sapien
gtggtgaaaacgatgtaggaatcag

SEQ ID NO: 4674536 - DNA, 25 bp, Homo sapien
cagtggtgaaaacgatgtaggaatc

SEQ ID NO: 4674537 - DNA, 25 bp, Homo sapien
tcagtggtgaaaacgatgtaggaat

SEQ ID NO: 4674538 - DNA, 25 bp, Homo sapien
tagcagacagatcctatagcagtta

SEQ ID NO: 4674539 - DNA, 25 bp, Homo sapien
cataatgcaagaaacatagcaaatt

SEQ ID NO: 4674540 - DNA, 25 bp, Homo sapien
tatttttaatgtatgacagacactg

SEQ ID NO: 4674541 - DNA, 25 bp, Homo sapien
gcagacagatcctatagcagttaat

SEQ ID NO: 4674542 - DNA, 25 bp, Homo sapien
aatgctgtcacaagcatggaaatgc

SEQ ID NO: 4674543 - DNA, 25 bp, Homo sapien
caagcatggaaatgctaccattatc

SEQ ID NO: 4674544 - DNA, 25 bp, Homo sapien
gtagaagagctattctgaaacaaat

SEQ ID NO: 4674545 - DNA, 25 bp, Homo sapien
taaagcaaagagttgtcagaataca

SEQ ID NO: 4674546 - DNA, 25 bp, Homo sapien
tttaataccaggacctaacagcatc

SEQ ID NO: 4674547 - DNA, 25 bp, Homo sapien
cattttccaagtaagtgacaaataa

SEQ ID NO: 4674548 - DNA, 25 bp, Homo sapien
tgttaaacaggatccgaaatgaagt

SEQ ID NO: 4674549 - DNA, 25 bp, Homo sapien
tggatgtctcaagtatctttgttaa

SEQ ID NO: 4674550 - DNA, 25 bp, Homo sapien
ttaaaacaaatggatgtctcaagta

SEQ ID NO: 4674551 - DNA, 25 bp, Homo sapien
gcatttccatatccatacagatttc

SEQ ID NO: 4674552 - DNA, 25 bp, Homo sapien
tagacaaaactcagagccaatgcct

SEQ ID NO: 4674553 - DNA, 25 bp, Homo sapien
aatccctgggagctagataaatgag

SEQ ID NO: 4674554 - DNA, 25 bp, Homo sapien
tgtatccagtgctggcccaactggg

SEQ ID NO: 4674555 - DNA, 25 bp, Homo sapien
gccaatgcctctaacttccgtgata

SEQ ID NO: 4674556 - DNA, 25 bp, Homo sapien
tcattcgctccgatgcgcagttgtg

SEQ ID NO: 4674557 - DNA, 25 bp, Homo sapien
tgtgtagattcgtaaatgtgcggcg

SEQ ID NO: 4674558 - DNA, 25 bp, Homo sapien
attcgtaaatgtgcggcggttgtgc

SEQ ID NO: 4674559 - DNA, 25 bp, Homo sapien
gatgcgcagttgtgtagattcgtaa

SEQ ID NO: 4674560 - DNA, 25 bp, Homo sapien
tctgaagtcttcccgagtggaaaaa

SEQ ID NO: 4674561 - DNA, 25 bp, Homo sapien
agaaaagcagccagccgagtccttt

SEQ ID NO: 4674562 - DNA, 25 bp, Homo sapien
ctctgaagtcttcccgagtggaaaa

SEQ ID NO: 4674563 - DNA, 25 bp, Homo sapien
cagccgagtcctttgtgagacttct

SEQ ID NO: 4674564 - DNA, 25 bp, Homo sapien
gcgagcgtccgtgaggcaagcgcct

SEQ ID NO: 4674565 - DNA, 25 bp, Homo sapien
cgagcgtccgtgaggcaagcgcctt

SEQ ID NO: 4674566 - DNA, 25 bp, Homo sapien
gcgccttggtcaggccgcttctgag

SEQ ID NO: 4674567 - DNA, 25 bp, Homo sapien
ggtcaggccgcttctgagaacgagc

SEQ ID NO: 4674568 - DNA, 25 bp, Homo sapien
gcatgtgacaatttcctgaggctca

SEQ ID NO: 4674569 - DNA, 25 bp, Homo sapien
gtgtatacacagaccactcccgtgg

SEQ ID NO: 4674570 - DNA, 25 bp, Homo sapien
taatgttcagtagcaaatgccctgt

SEQ ID NO: 4674571 - DNA, 25 bp, Homo sapien
tatcgcaacagtttcagtaggcatc

SEQ ID NO: 4674572 - DNA, 25 bp, Homo sapien
gttccatcgtattgtctagggcccg

SEQ ID NO: 4674573 - DNA, 25 bp, Homo sapien
ctagggcccgtagcaaaagatgaac

SEQ ID NO: 4674574 - DNA, 25 bp, Homo sapien
agtacgaaattcatagaacgttcca

SEQ ID NO: 4674575 - DNA, 25 bp, Homo sapien
cttaagattttccatgaacgcattc

SEQ ID NO: 4674576 - DNA, 25 bp, Homo sapien
tgtttggcaccttagttagtactca

SEQ ID NO: 4674577 - DNA, 25 bp, Homo sapien
tattatgtcgctggagatgccaaca

SEQ ID NO: 4674578 - DNA, 25 bp, Homo sapien
tcaagttactcatggtctaaaaggg

SEQ ID NO: 4674579 - DNA, 25 bp, Homo sapien
aacgtgcaaggccatatgggaaccc

SEQ ID NO: 4674580 - DNA, 25 bp, Homo sapien
cttacagttggctaaggctttccga

SEQ ID NO: 4674581 - DNA, 25 bp, Homo sapien
cgtctcttgtttatcaatgcgagcc

SEQ ID NO: 4674582 - DNA, 25 bp, Homo sapien
tctaatttggaccatggtatcaggt

SEQ ID NO: 4674583 - DNA, 25 bp, Homo sapien
ggctttccgaacttcagctcgatga

SEQ ID NO: 4674584 - DNA, 25 bp, Homo sapien
gacatgggcattaattgctctttca

SEQ ID NO: 4674585 - DNA, 25 bp, Homo sapien
aattgacatgggcattaattgctct

SEQ ID NO: 4674586 - DNA, 25 bp, Homo sapien
tgtagcctaaattgacatgggcatt

SEQ ID NO: 4674587 - DNA, 25 bp, Homo sapien
ggcattaattgctctttcaaatgca

SEQ ID NO: 4674588 - DNA, 25 bp, Homo sapien
ctctgttgagttctccatattctgt

SEQ ID NO: 4674589 - DNA, 25 bp, Homo sapien
tctccatattctgtgtggaaaacac

SEQ ID NO: 4674590 - DNA, 25 bp, Homo sapien
ttctccatattctgtgtggaaaaca

SEQ ID NO: 4674591 - DNA, 25 bp, Homo sapien
gagttctccatattctgtgtggaaa

SEQ ID NO: 4674592 - DNA, 25 bp, Homo sapien
cctaagtaacaaatcttcacatgta

SEQ ID NO: 4674593 - DNA, 25 bp, Homo sapien
aaatcttcacatgtaccccgtgaac

SEQ ID NO: 4674594 - DNA, 25 bp, Homo sapien
cccatgacatgggtttacctaagta

SEQ ID NO: 4674595 - DNA, 25 bp, Homo sapien
catgacatgggtttacctaagtaac

SEQ ID NO: 4674596 - DNA, 25 bp, Homo sapien
aaagaaccagattataacttttgtg

SEQ ID NO: 4674597 - DNA, 25 bp, Homo sapien
gaaaacctatatgcccaccaacaac

SEQ ID NO: 4674598 - DNA, 25 bp, Homo sapien
tgcccaccaacaacagattggataa

SEQ ID NO: 4674599 - DNA, 25 bp, Homo sapien
gacatgtgcacgtgaatgttcactg

SEQ ID NO: 4674600 - DNA, 25 bp, Homo sapien
taaaatgctgcaacaatgtgagaat

SEQ ID NO: 4674601 - DNA, 25 bp, Homo sapien
aaaagtaggtaaagggcatgaatag

SEQ ID NO: 4674602 - DNA, 25 bp, Homo sapien
cttaactgcctagataaacctttat

SEQ ID NO: 4674603 - DNA, 25 bp, Homo sapien
ctttatcaacatatggtgtgtttcc

SEQ ID NO: 4674604 - DNA, 25 bp, Homo sapien
gaatcagaaatgttgtcttattctt

SEQ ID NO: 4674605 - DNA, 25 bp, Homo sapien
cacaattaagactagacccgagttt

SEQ ID NO: 4674606 - DNA, 25 bp, Homo sapien
aggcacaattaagactagacccgag

SEQ ID NO: 4674607 - DNA, 25 bp, Homo sapien
gtgaatcagaaatgttgtcttattc

SEQ ID NO: 4674608 - DNA, 25 bp, Homo sapien
ctgggatcctcatgggacttatgtc

SEQ ID NO: 4674609 - DNA, 25 bp, Homo sapien
acttatgtctcccagctgcacgact

SEQ ID NO: 4674610 - DNA, 25 bp, Homo sapien
tgcacgactatctgcactctcattc

SEQ ID NO: 4674611 - DNA, 25 bp, Homo sapien
tgggatcctcatgggacttatgtct

SEQ ID NO: 4674612 - DNA, 25 bp, Homo sapien
tattctgctgagaaactaggtagtt

SEQ ID NO: 4674613 - DNA, 25 bp, Homo sapien
gagaaactaggtagttgacactttc

SEQ ID NO: 4674614 - DNA, 25 bp, Homo sapien
caggaatcagaagcatattctgctg

SEQ ID NO: 4674615 - DNA, 25 bp, Homo sapien
aatggtgaaaatgatgcaggaatca

SEQ ID NO: 4674616 - DNA, 25 bp, Homo sapien
cagacacatcttagagcagttaatg

SEQ ID NO: 4674617 - DNA, 25 bp, Homo sapien
agacacatcttagagcagttaatga

SEQ ID NO: 4674618 - DNA, 25 bp, Homo sapien
gcagacacatcttagagcagttaat

SEQ ID NO: 4674619 - DNA, 25 bp, Homo sapien
gacacatcttagagcagttaatgaa

SEQ ID NO: 4674620 - DNA, 25 bp, Homo sapien
cttaaagcagtggagaatatgtaac

SEQ ID NO: 4674621 - DNA, 25 bp, Homo sapien
acagatactgaaatgccaaggtgaa

SEQ ID NO: 4674622 - DNA, 25 bp, Homo sapien
gacaactacttctaatgtgtaacag

SEQ ID NO: 4674623 - DNA, 25 bp, Homo sapien
gcaagaagcacagcaaattaactaa

SEQ ID NO: 4674624 - DNA, 25 bp, Homo sapien
tatagacatgatgaaaagatagata

SEQ ID NO: 4674625 - DNA, 25 bp, Homo sapien
gacatgatgaaaagatagatatttt

SEQ ID NO: 4674626 - DNA, 25 bp, Homo sapien
tagacatgatgaaaagatagatatt

SEQ ID NO: 4674627 - DNA, 25 bp, Homo sapien
acatgatgaaaagatagatatttta

SEQ ID NO: 4674628 - DNA, 25 bp, Homo sapien
tttaacactgtgacccaattgcatt

SEQ ID NO: 4674629 - DNA, 25 bp, Homo sapien
aaatgtcccaagatctctgttagtg

SEQ ID NO: 4674630 - DNA, 25 bp, Homo sapien
ccttctcaggttcccagcatgctat

SEQ ID NO: 4674631 - DNA, 25 bp, Homo sapien
gggcaagcgtttccataaccataaa

SEQ ID NO: 4674632 - DNA, 25 bp, Homo sapien
taaggtactataacagtctgaagca

SEQ ID NO: 4674633 - DNA, 25 bp, Homo sapien
tgatgttcataaccctaaggtacta

SEQ ID NO: 4674634 - DNA, 25 bp, Homo sapien
taaatgtgagatgtcttaggcctct

SEQ ID NO: 4674635 - DNA, 25 bp, Homo sapien
gtgcctcaactatttcacataaatg

SEQ ID NO: 4674636 - DNA, 25 bp, Homo sapien
gccacatccttcagcaagtgagtgt

SEQ ID NO: 4674637 - DNA, 25 bp, Homo sapien
gggtgggaacttatgaagactcttc

SEQ ID NO: 4674638 - DNA, 25 bp, Homo sapien
tgttcaagtggagggtttgtctttg

SEQ ID NO: 4674639 - DNA, 25 bp, Homo sapien
cacgggcggttcatccacagtgaaa

SEQ ID NO: 4674640 - DNA, 25 bp, Homo sapien
tgtggcctgagcaaaacagaaacct

SEQ ID NO: 4674641 - DNA, 25 bp, Homo sapien
gactggaggagctatccacacacag

SEQ ID NO: 4674642 - DNA, 25 bp, Homo sapien
gaagggcagcacaccagttaagacc

SEQ ID NO: 4674643 - DNA, 25 bp, Homo sapien
cacacacagatagcatttgaagcca

SEQ ID NO: 4674644 - DNA, 25 bp, Homo sapien
taacaagagtaccatagacagggtg

SEQ ID NO: 4674645 - DNA, 25 bp, Homo sapien
tccaaatggagtagtgaggcacttc

SEQ ID NO: 4674646 - DNA, 25 bp, Homo sapien
gaaaagcctcttaggtcaggtctgg

SEQ ID NO: 4674647 - DNA, 25 bp, Homo sapien
gagtcattcatcgtgtattccagga

SEQ ID NO: 4674648 - DNA, 25 bp, Homo sapien
aacttcagttgccaccctagtcagg

SEQ ID NO: 4674649 - DNA, 25 bp, Homo sapien
gcaggagccttgtacacactctggg

SEQ ID NO: 4674650 - DNA, 25 bp, Homo sapien
ggcagaagcctgtgattcaaaaact

SEQ ID NO: 4674651 - DNA, 25 bp, Homo sapien
ttaccttaggatcctgggccaactg

SEQ ID NO: 4674652 - DNA, 25 bp, Homo sapien
tcatcattggccctcattccaagca

SEQ ID NO: 4674653 - DNA, 25 bp, Homo sapien
ttataccctaagatgaagctgtttt

SEQ ID NO: 4674654 - DNA, 25 bp, Homo sapien
aatgggatctatttttgcactggaa

SEQ ID NO: 4674655 - DNA, 25 bp, Homo sapien
gcactttacgctgtctgtaatggga

SEQ ID NO: 4674656 - DNA, 25 bp, Homo sapien
gaaaggacctcttctgaagctagaa

SEQ ID NO: 4674657 - DNA, 25 bp, Homo sapien
taactagtgatatggcatcgttgca

SEQ ID NO: 4674658 - DNA, 25 bp, Homo sapien
tatgagcaactccttacttcggttc

SEQ ID NO: 4674659 - DNA, 25 bp, Homo sapien
gaatattatataacccactgctgaa

SEQ ID NO: 4674660 - DNA, 25 bp, Homo sapien
tgtttatggcatttagtaccttcaa

SEQ ID NO: 4674661 - DNA, 25 bp, Homo sapien
cagggaaaacagctagcttgaaaac

SEQ ID NO: 4674662 - DNA, 25 bp, Homo sapien
caagaaagtataagggtcacaagtc

SEQ ID NO: 4674663 - DNA, 25 bp, Homo sapien
ggataccccattaaatctgacagtc

SEQ ID NO: 4674664 - DNA, 25 bp, Homo sapien
gaagctctttgcactaggatggcaa

SEQ ID NO: 4674665 - DNA, 25 bp, Homo sapien
cataggtccgtagtaaagtcttggg

SEQ ID NO: 4674666 - DNA, 25 bp, Homo sapien
caatggaaggttcaggtgccttggc

SEQ ID NO: 4674667 - DNA, 25 bp, Homo sapien
ccaagtcagtgcatttaggtgtcat

SEQ ID NO: 4674668 - DNA, 25 bp, Homo sapien
cattctgggaatagcaggcctagcg

SEQ ID NO: 4674669 - DNA, 25 bp, Homo sapien
tagtggaggcaacaaacgcaagctc

SEQ ID NO: 4674670 - DNA, 25 bp, Homo sapien
tagcagtggcagtaataaccagccc

SEQ ID NO: 4674671 - DNA, 25 bp, Homo sapien
tacaaattgactgagccaccgttag

SEQ ID NO: 4674672 - DNA, 25 bp, Homo sapien
tgggcgacgccattcagtcctaagg

SEQ ID NO: 4674673 - DNA, 25 bp, Homo sapien
tttacacatgagagctgggcgacgc

SEQ ID NO: 4674674 - DNA, 25 bp, Homo sapien
tgctttgctgttgcagatttcccac

SEQ ID NO: 4674675 - DNA, 25 bp, Homo sapien
tagtatatagataccccaacctgga

SEQ ID NO: 4674676 - DNA, 25 bp, Homo sapien
ttctttgccatcaggaggacagtgt

SEQ ID NO: 4674677 - DNA, 25 bp, Homo sapien
ctggtggcgctgactcaaggtttgc

SEQ ID NO: 4674678 - DNA, 25 bp, Homo sapien
gctgaccatcggtaaggactctggg

SEQ ID NO: 4674679 - DNA, 25 bp, Homo sapien
gaccatgagagtgacacgctgacca

SEQ ID NO: 4674680 - DNA, 25 bp, Homo sapien
ctggttgctcgccatgaagcactta

SEQ ID NO: 4674681 - DNA, 25 bp, Homo sapien
agtctggttgctcgccatgaagcac

SEQ ID NO: 4674682 - DNA, 25 bp, Homo sapien
tccagtctggttgctcgccatgaag

SEQ ID NO: 4674683 - DNA, 25 bp, Homo sapien
ctccagtctggttgctcgccatgaa

SEQ ID NO: 4674684 - DNA, 25 bp, Homo sapien
gctccgcatcctgtgacagaggtca

SEQ ID NO: 4674685 - DNA, 25 bp, Homo sapien
ttccagttacccgagcgaacacttg

SEQ ID NO: 4674686 - DNA, 25 bp, Homo sapien
tgaaacagcacgttcacgttcttga

SEQ ID NO: 4674687 - DNA, 25 bp, Homo sapien
tggagcaagtcagctttttcccctg

SEQ ID NO: 4674688 - DNA, 25 bp, Homo sapien
tgagctcagcaggtcaagtattttg

SEQ ID NO: 4674689 - DNA, 25 bp, Homo sapien
ctcagcaggtcaagtattttggtct

SEQ ID NO: 4674690 - DNA, 25 bp, Homo sapien
taattggtaggtcactgtttgctcc

SEQ ID NO: 4674691 - DNA, 25 bp, Homo sapien
ttacagaagctcttggctaattggt

SEQ ID NO: 4674692 - DNA, 25 bp, Homo sapien
agccttgccattgcttatgctggtc

SEQ ID NO: 4674693 - DNA, 25 bp, Homo sapien
tgttccccgtttccacacttagcga

SEQ ID NO: 4674694 - DNA, 25 bp, Homo sapien
gcgaggctcttgtccactgctacat

SEQ ID NO: 4674695 - DNA, 25 bp, Homo sapien
cacacttagcgaggctcttgtccac

SEQ ID NO: 4674696 - DNA, 25 bp, Homo sapien
ccgtttccacacttagcgaggctct

SEQ ID NO: 4674697 - DNA, 25 bp, Homo sapien
taaattcgagttgctttgcttcccc

SEQ ID NO: 4674698 - DNA, 25 bp, Homo sapien
ttgacacataataaattcgagttgc

SEQ ID NO: 4674699 - DNA, 25 bp, Homo sapien
tagtgaagctcatagcccacagttg

SEQ ID NO: 4674700 - DNA, 25 bp, Homo sapien
tttgccacttgttcggcctctctgg

SEQ ID NO: 4674701 - DNA, 25 bp, Homo sapien
gagagcccctgctgattgaccagag

SEQ ID NO: 4674702 - DNA, 25 bp, Homo sapien
cacttagacaactcctggctgtgca

SEQ ID NO: 4674703 - DNA, 25 bp, Homo sapien
cctctgtagcaagagacagcgtggt

SEQ ID NO: 4674704 - DNA, 25 bp, Homo sapien
gaaaggtagcaacaacccctgatca

SEQ ID NO: 4674705 - DNA, 25 bp, Homo sapien
gctgctccaaatggcttgtaagatt

SEQ ID NO: 4674706 - DNA, 25 bp, Homo sapien
gctccaaatggcttgtaagattttt

SEQ ID NO: 4674707 - DNA, 25 bp, Homo sapien
ccaaatggcttgtaagattttttgt

SEQ ID NO: 4674708 - DNA, 25 bp, Homo sapien
agctgctccaaatggcttgtaagat

SEQ ID NO: 4674709 - DNA, 25 bp, Homo sapien
tcaagaatttaagagcaccgtgact

SEQ ID NO: 4674710 - DNA, 25 bp, Homo sapien
agaatttaagagcaccgtgactgtg

SEQ ID NO: 4674711 - DNA, 25 bp, Homo sapien
caagaatttaagagcaccgtgactg

SEQ ID NO: 4674712 - DNA, 25 bp, Homo sapien
aagaatttaagagcaccgtgactgt

SEQ ID NO: 4674713 - DNA, 25 bp, Homo sapien
ttcacagttgatgccctgagcctgc

SEQ ID NO: 4674714 - DNA, 25 bp, Homo sapien
tcattacctgagagccaggtgtcgg

SEQ ID NO: 4674715 - DNA, 25 bp, Homo sapien
agacacagcgctagggttgtcctca

SEQ ID NO: 4674716 - DNA, 25 bp, Homo sapien
tgagcctgccatagcagacttgttt

SEQ ID NO: 4674717 - DNA, 25 bp, Homo sapien
agtaggggggcggtgtgttcaggtg

SEQ ID NO: 4674718 - DNA, 25 bp, Homo sapien
gccagaagtgtgcatatgtgctgac

SEQ ID NO: 4674719 - DNA, 25 bp, Homo sapien
ctgtgacacccaacggagtaggggg

SEQ ID NO: 4674720 - DNA, 25 bp, Homo sapien
gtgcaggtggaacaaggccagaagt

SEQ ID NO: 4674721 - DNA, 25 bp, Homo sapien
tagcatggcaaacagtcctccaagg

SEQ ID NO: 4674722 - DNA, 25 bp, Homo sapien
taaataagggtaactgctggatggg

SEQ ID NO: 4674723 - DNA, 25 bp, Homo sapien
ggatacacagaatgtagtatccctt

SEQ ID NO: 4674724 - DNA, 25 bp, Homo sapien
gtggctgggatacacagaatgtagt

SEQ ID NO: 4674725 - DNA, 25 bp, Homo sapien
gtaggagagcgtgcagcatattctg

SEQ ID NO: 4674726 - DNA, 25 bp, Homo sapien
tacacatctccagggcattgcttag

SEQ ID NO: 4674727 - DNA, 25 bp, Homo sapien
tattctgagcctgtatacacatctc

SEQ ID NO: 4674728 - DNA, 25 bp, Homo sapien
tcccagtggtaggagagcgtgcagc

SEQ ID NO: 4674729 - DNA, 25 bp, Homo sapien
ccacttgcaactcagatgggaccgg

SEQ ID NO: 4674730 - DNA, 25 bp, Homo sapien
tagtacgagctctggtgaccccagg

SEQ ID NO: 4674731 - DNA, 25 bp, Homo sapien
gggagacgatgtcctagtacgagct

SEQ ID NO: 4674732 - DNA, 25 bp, Homo sapien
tattgttttgtttcgaggccaagga

SEQ ID NO: 4674733 - DNA, 25 bp, Homo sapien
tgttcctctcgggtcctctgaggga

SEQ ID NO: 4674734 - DNA, 25 bp, Homo sapien
gggaatctccaaggcagtaggtcgc

SEQ ID NO: 4674735 - DNA, 25 bp, Homo sapien
taagatgttcctctcgggtcctctg

SEQ ID NO: 4674736 - DNA, 25 bp, Homo sapien
aagcagtaagatgttcctctcgggt

SEQ ID NO: 4674737 - DNA, 25 bp, Homo sapien
aggcccagtaccaagcagttcacat

SEQ ID NO: 4674738 - DNA, 25 bp, Homo sapien
tgctgatggacacccagatatgatc

SEQ ID NO: 4674739 - DNA, 25 bp, Homo sapien
cccagagcaactctataaggcagct

SEQ ID NO: 4674740 - DNA, 25 bp, Homo sapien
ttattgttggactatgaggaacaca

SEQ ID NO: 4674741 - DNA, 25 bp, Homo sapien
tgttctacttcctatggtaggcgca

SEQ ID NO: 4674742 - DNA, 25 bp, Homo sapien
gatgttttcgtcttgaatgttctac

SEQ ID NO: 4674743 - DNA, 25 bp, Homo sapien
tatggtaggcgcatatcctaaagta

SEQ ID NO: 4674744 - DNA, 25 bp, Homo sapien
tgtgacaaagaggtcccgaagactg

SEQ ID NO: 4674745 - DNA, 25 bp, Homo sapien
gcaggtaggatcttgctgacagcca

SEQ ID NO: 4674746 - DNA, 25 bp, Homo sapien
tccacattcctgcaacacagtggga

SEQ ID NO: 4674747 - DNA, 25 bp, Homo sapien
tctccttggcactgagaactaaagc

SEQ ID NO: 4674748 - DNA, 25 bp, Homo sapien
ggcactgagaactaaagcaggtagg

SEQ ID NO: 4674749 - DNA, 25 bp, Homo sapien
gtggctcaagcctataatcccagca

SEQ ID NO: 4674750 - DNA, 25 bp, Homo sapien
cattgaaaatcataggccgggcaca

SEQ ID NO: 4674751 - DNA, 25 bp, Homo sapien
tataatcccagcactttgggaggcc

SEQ ID NO: 4674752 - DNA, 25 bp, Homo sapien
acttcattgaaaatcataggccggg

SEQ ID NO: 4674753 - DNA, 25 bp, Homo sapien
gatccgcagattaaaggagccttct

SEQ ID NO: 4674754 - DNA, 25 bp, Homo sapien
cgccccgatccgcagattaaaggag

SEQ ID NO: 4674755 - DNA, 25 bp, Homo sapien
aacggcgccccgatccgcagattaa

SEQ ID NO: 4674756 - DNA, 25 bp, Homo sapien
gcagattaaaggagccttctcccct

SEQ ID NO: 4674757 - DNA, 25 bp, Homo sapien
ggcacttggccatccggaataaaac

SEQ ID NO: 4674758 - DNA, 25 bp, Homo sapien
taaccgtctggacttgtgtgacaga

SEQ ID NO: 4674759 - DNA, 25 bp, Homo sapien
tcttccgtccagctaggaatggcca

SEQ ID NO: 4674760 - DNA, 25 bp, Homo sapien
gagactgtcataggctcttaaccgt

SEQ ID NO: 4674761 - DNA, 25 bp, Homo sapien
tcaagggtttcaaacaggaggcaaa

SEQ ID NO: 4674762 - DNA, 25 bp, Homo sapien
gttcttccaagtagagcacacagct

SEQ ID NO: 4674763 - DNA, 25 bp, Homo sapien
gaagctcaatgtacccaaggaaccg

SEQ ID NO: 4674764 - DNA, 25 bp, Homo sapien
tccaatatagctgcaggaacgctgg

SEQ ID NO: 4674765 - DNA, 25 bp, Homo sapien
catatgcagtgtttctacccaggta

SEQ ID NO: 4674766 - DNA, 25 bp, Homo sapien
gaaaaacacgtcaggcagagtctgg

SEQ ID NO: 4674767 - DNA, 25 bp, Homo sapien
caggctggtacagaatgcaggcaca

SEQ ID NO: 4674768 - DNA, 25 bp, Homo sapien
tcaaagcttagggaacataccagag

SEQ ID NO: 4674769 - DNA, 25 bp, Homo sapien
tagggcttcttacgtaggttgcttc

SEQ ID NO: 4674770 - DNA, 25 bp, Homo sapien
gcaaaggaagctcttactctcagaa

SEQ ID NO: 4674771 - DNA, 25 bp, Homo sapien
tagatccagtgtgggtcctgtgcat

SEQ ID NO: 4674772 - DNA, 25 bp, Homo sapien
tatgcaccaggctaggcactcagga

SEQ ID NO: 4674773 - DNA, 25 bp, Homo sapien
tcaacttgaagaccgcaggtgtgtg

SEQ ID NO: 4674774 - DNA, 25 bp, Homo sapien
caacctaactagaggagcatcagtc

SEQ ID NO: 4674775 - DNA, 25 bp, Homo sapien
caggatcaacgtggagacctcaggt

SEQ ID NO: 4674776 - DNA, 25 bp, Homo sapien
taagacatagatcggaaagtgaccc

SEQ ID NO: 4674777 - DNA, 25 bp, Homo sapien
aatggagtggcgctaatcagggaaa

SEQ ID NO: 4674778 - DNA, 25 bp, Homo sapien
agcagctcgaggctcctaatggagt

SEQ ID NO: 4674779 - DNA, 25 bp, Homo sapien
tcctagaaattcctgggtgcattcc

SEQ ID NO: 4674780 - DNA, 25 bp, Homo sapien
gggctcctcaggcatgacatcctag

SEQ ID NO: 4674781 - DNA, 25 bp, Homo sapien
tcgggacagcctaggagccgtggct

SEQ ID NO: 4674782 - DNA, 25 bp, Homo sapien
atcccctcgggacagcctaggagcc

SEQ ID NO: 4674783 - DNA, 25 bp, Homo sapien
tctgacttcaaagccgttgccagct

SEQ ID NO: 4674784 - DNA, 25 bp, Homo sapien
ttcaaagccgttgccagctgggagg

SEQ ID NO: 4674785 - DNA, 25 bp, Homo sapien
ctttgtgtgtaggtcctggacttac

SEQ ID NO: 4674786 - DNA, 25 bp, Homo sapien
acttagcttgtcattggataggtgc

SEQ ID NO: 4674787 - DNA, 25 bp, Homo sapien
cattggataggtgctttgtgtgtag

SEQ ID NO: 4674788 - DNA, 25 bp, Homo sapien
ctgcctggacttagcttgtcattgg

SEQ ID NO: 4674789 - DNA, 25 bp, Homo sapien
ttctccatcttctatggtaagtggg

SEQ ID NO: 4674790 - DNA, 25 bp, Homo sapien
tgtggtggacacaggcttttattct

SEQ ID NO: 4674791 - DNA, 25 bp, Homo sapien
gagtttctgggagagtgtccttctc

SEQ ID NO: 4674792 - DNA, 25 bp, Homo sapien
tcacatccttgtactctcccttaag

SEQ ID NO: 4674793 - DNA, 25 bp, Homo sapien
ggaccagctcatatgaatcttgagc

SEQ ID NO: 4674794 - DNA, 25 bp, Homo sapien
ccagctcatatgaatcttgagcttc

SEQ ID NO: 4674795 - DNA, 25 bp, Homo sapien
gaccagctcatatgaatcttgagct

SEQ ID NO: 4674796 - DNA, 25 bp, Homo sapien
aggaccagctcatatgaatcttgag

SEQ ID NO: 4674797 - DNA, 25 bp, Homo sapien
gggcaaaagggaggcagtctcgtgg

SEQ ID NO: 4674798 - DNA, 25 bp, Homo sapien
gcaaaagggaggcagtctcgtggaa

SEQ ID NO: 4674799 - DNA, 25 bp, Homo sapien
aaaagggaggcagtctcgtggaaat

SEQ ID NO: 4674800 - DNA, 25 bp, Homo sapien
tcaagaaaggtctgtgggcaaaagg

SEQ ID NO: 4674801 - DNA, 25 bp, Homo sapien
ttgcaaggacgctgtgtgaaacagc

SEQ ID NO: 4674802 - DNA, 25 bp, Homo sapien
tcctattccttgtacagatcttgca

SEQ ID NO: 4674803 - DNA, 25 bp, Homo sapien
ctgtgtgaaacagcgttgttgcaac

SEQ ID NO: 4674804 - DNA, 25 bp, Homo sapien
caggagtgggacttagcatttgttc

SEQ ID NO: 4674805 - DNA, 25 bp, Homo sapien
tcatagcttttagtctctcctgggc

SEQ ID NO: 4674806 - DNA, 25 bp, Homo sapien
caaattccttcatagcttttagtct

SEQ ID NO: 4674807 - DNA, 25 bp, Homo sapien
gggttccccacatcaaattccttca

SEQ ID NO: 4674808 - DNA, 25 bp, Homo sapien
ggttccccacatcaaattccttcat

SEQ ID NO: 4674809 - DNA, 25 bp, Homo sapien
tctagagtctccaggcctatagcct

SEQ ID NO: 4674810 - DNA, 25 bp, Homo sapien
gccccattgggtgtctcatctaaat

SEQ ID NO: 4674811 - DNA, 25 bp, Homo sapien
aacaagtatatagaggagagacacc

SEQ ID NO: 4674812 - DNA, 25 bp, Homo sapien
ctggcttggaactcacagtaaagtt

SEQ ID NO: 4674813 - DNA, 25 bp, Homo sapien
cactcgccatgagaacctctttttc

SEQ ID NO: 4674814 - DNA, 25 bp, Homo sapien
ctcgccatgagaacctctttttcct

SEQ ID NO: 4674815 - DNA, 25 bp, Homo sapien
tcacactcgccatgagaacctcttt

SEQ ID NO: 4674816 - DNA, 25 bp, Homo sapien
cacactcgccatgagaacctctttt

SEQ ID NO: 4674817 - DNA, 25 bp, Homo sapien
aaaagagtgtctggattaagacggg

SEQ ID NO: 4674818 - DNA, 25 bp, Homo sapien
taaatatattctgttgtgatgggca

SEQ ID NO: 4674819 - DNA, 25 bp, Homo sapien
aaaagctactatcaatagaaaagag

SEQ ID NO: 4674820 - DNA, 25 bp, Homo sapien
ttaagacggggattgtggagaccta

SEQ ID NO: 4674821 - DNA, 25 bp, Homo sapien
ttttagaggaggtagcatttttctg

SEQ ID NO: 4674822 - DNA, 25 bp, Homo sapien
tagaggaggtagcatttttctgatc

SEQ ID NO: 4674823 - DNA, 25 bp, Homo sapien
gaggaggtagcatttttctgatcct

SEQ ID NO: 4674824 - DNA, 25 bp, Homo sapien
atcacttttagaggaggtagcattt

SEQ ID NO: 4674825 - DNA, 25 bp, Homo sapien
gggatccatatctccgcactctgta

SEQ ID NO: 4674826 - DNA, 25 bp, Homo sapien
ctcttcaatggctgactgtccaagg

SEQ ID NO: 4674827 - DNA, 25 bp, Homo sapien
caatggctgactgtccaaggtctgg

SEQ ID NO: 4674828 - DNA, 25 bp, Homo sapien
tatctccgcactctgtaacaacctt

SEQ ID NO: 4674829 - DNA, 25 bp, Homo sapien
caatgggtggcagatgtcgcagtca

SEQ ID NO: 4674830 - DNA, 25 bp, Homo sapien
agatcaaccaaatcatccctggtga

SEQ ID NO: 4674831 - DNA, 25 bp, Homo sapien
ctcttcgaccaagtgtgcggcttca

SEQ ID NO: 4674832 - DNA, 25 bp, Homo sapien
cttcgaccaagtgtgcggcttcagc

SEQ ID NO: 4674833 - DNA, 25 bp, Homo sapien
tgtcccccaactccaactccactta

SEQ ID NO: 4674834 - DNA, 25 bp, Homo sapien
ctgcactgtcccccaactccaactc

SEQ ID NO: 4674835 - DNA, 25 bp, Homo sapien
ctccaactccacttaaaagggacat

SEQ ID NO: 4674836 - DNA, 25 bp, Homo sapien
tttgcccacagctccctgcactgtc

SEQ ID NO: 4674837 - DNA, 25 bp, Homo sapien
tccaaggcagtcaggggtcatgtct

SEQ ID NO: 4674838 - DNA, 25 bp, Homo sapien
cctatcctgtcctaagccggctctt

SEQ ID NO: 4674839 - DNA, 25 bp, Homo sapien
gtcctaagccggctcttccaaggca

SEQ ID NO: 4674840 - DNA, 25 bp, Homo sapien
gttttgggacccgtggatccactgc

SEQ ID NO: 4674841 - DNA, 25 bp, Homo sapien
gatggacaggtttcatcctacaggc

SEQ ID NO: 4674842 - DNA, 25 bp, Homo sapien
tcgatcattactggcagcttcccat

SEQ ID NO: 4674843 - DNA, 25 bp, Homo sapien
gtgcctcttcgatcattactggcag

SEQ ID NO: 4674844 - DNA, 25 bp, Homo sapien
ggatggacaggtttcatcctacagg

SEQ ID NO: 4674845 - DNA, 25 bp, Homo sapien
tcaggcctgaatccccagttacagt

SEQ ID NO: 4674846 - DNA, 25 bp, Homo sapien
agtgattagtattcctcaggcctga

SEQ ID NO: 4674847 - DNA, 25 bp, Homo sapien
ctctgcgacaagtgattagtattcc

SEQ ID NO: 4674848 - DNA, 25 bp, Homo sapien
gaattggtagccatttaaacctgac

SEQ ID NO: 4674849 - DNA, 25 bp, Homo sapien
ttccttttgtccctatgctctttgc

SEQ ID NO: 4674850 - DNA, 25 bp, Homo sapien
tttgtccctatgctctttgctgctt

SEQ ID NO: 4674851 - DNA, 25 bp, Homo sapien
ccttttgtccctatgctctttgctg

SEQ ID NO: 4674852 - DNA, 25 bp, Homo sapien
cttttgtccctatgctctttgctgc

SEQ ID NO: 4674853 - DNA, 25 bp, Homo sapien
tctcagggcgttgagtcagccaggg

SEQ ID NO: 4674854 - DNA, 25 bp, Homo sapien
ccacccccttgattaagaccctcat

SEQ ID NO: 4674855 - DNA, 25 bp, Homo sapien
tccacccccttgattaagaccctca

SEQ ID NO: 4674856 - DNA, 25 bp, Homo sapien
tctgaatggtctttccaatccttcc

SEQ ID NO: 4674857 - DNA, 25 bp, Homo sapien
ttctgaatggtctttccaatccttc

SEQ ID NO: 4674858 - DNA, 25 bp, Homo sapien
ctgaatggtctttccaatccttccc

SEQ ID NO: 4674859 - DNA, 25 bp, Homo sapien
tgagtctctgctattagcctgtaca

SEQ ID NO: 4674860 - DNA, 25 bp, Homo sapien
acttggtcctgctctagtagcagta

SEQ ID NO: 4674861 - DNA, 25 bp, Homo sapien
tgtaggatcatctgcaacttctgat

SEQ ID NO: 4674862 - DNA, 25 bp, Homo sapien
tctctgctattagcctgtacaccac

SEQ ID NO: 4674863 - DNA, 25 bp, Homo sapien
aagcccaggtagcggtccaggccac

SEQ ID NO: 4674864 - DNA, 25 bp, Homo sapien
tcagaagcccaggtagcggtccagg

SEQ ID NO: 4674865 - DNA, 25 bp, Homo sapien
cagaagcccaggtagcggtccaggc

SEQ ID NO: 4674866 - DNA, 25 bp, Homo sapien
agaagcccaggtagcggtccaggcc

SEQ ID NO: 4674867 - DNA, 25 bp, Homo sapien
tcagttgtattcagtgctggggtaa

SEQ ID NO: 4674868 - DNA, 25 bp, Homo sapien
tcaggtagagggctggaccgctctc

SEQ ID NO: 4674869 - DNA, 25 bp, Homo sapien
ggtaagatcaagttgaaagttaggc

SEQ ID NO: 4674870 - DNA, 25 bp, Homo sapien
ccccggattctagccttaggtgatg

SEQ ID NO: 4674871 - DNA, 25 bp, Homo sapien
tcaatggtggatggaatggtcaggg

SEQ ID NO: 4674872 - DNA, 25 bp, Homo sapien
tcaacttgagtcaatggtggatgga

SEQ ID NO: 4674873 - DNA, 25 bp, Homo sapien
caacttgagtcaatggtggatggaa

SEQ ID NO: 4674874 - DNA, 25 bp, Homo sapien
acttgagtcaatggtggatggaatg

SEQ ID NO: 4674875 - DNA, 25 bp, Homo sapien
gactgaagtggctgtagcactaaag

SEQ ID NO: 4674876 - DNA, 25 bp, Homo sapien
tgaagtggctgtagcactaaagagt

SEQ ID NO: 4674877 - DNA, 25 bp, Homo sapien
tgactgaagtggctgtagcactaaa

SEQ ID NO: 4674878 - DNA, 25 bp, Homo sapien
ctgaagtggctgtagcactaaagag

SEQ ID NO: 4674879 - DNA, 25 bp, Homo sapien
gagttgggtcaacatgggactgaca

SEQ ID NO: 4674880 - DNA, 25 bp, Homo sapien
tgcctaaccatatattgcccacagc

SEQ ID NO: 4674881 - DNA, 25 bp, Homo sapien
gaatccttgctcaaattccaggcta

SEQ ID NO: 4674882 - DNA, 25 bp, Homo sapien
tgcccacagcaatattgaatccttg

SEQ ID NO: 4674883 - DNA, 25 bp, Homo sapien
aataattattcttcaccgcatttgc

SEQ ID NO: 4674884 - DNA, 25 bp, Homo sapien
caagtggctagttctggcaatgtgc

SEQ ID NO: 4674885 - DNA, 25 bp, Homo sapien
ccacgaccgcctggaaataattatt

SEQ ID NO: 4674886 - DNA, 25 bp, Homo sapien
tattcttcaccgcatttgcatgagc

SEQ ID NO: 4674887 - DNA, 25 bp, Homo sapien
agttatccaggctcgcaagtcaaag

SEQ ID NO: 4674888 - DNA, 25 bp, Homo sapien
ctccagaggaaagcgtacacaagaa

SEQ ID NO: 4674889 - DNA, 25 bp, Homo sapien
caggatcctgatggcttcttaccgc

SEQ ID NO: 4674890 - DNA, 25 bp, Homo sapien
ggattgcttccggatctaggaggca

SEQ ID NO: 4674891 - DNA, 25 bp, Homo sapien
gctagaggcaggcgccggccacatc

SEQ ID NO: 4674892 - DNA, 25 bp, Homo sapien
ctcaagaggcggcgcggctagaggc

SEQ ID NO: 4674893 - DNA, 25 bp, Homo sapien
cggcgacggcggctacgcgtctcct

SEQ ID NO: 4674894 - DNA, 25 bp, Homo sapien
gcggctacgcgtctcctgctctgct

SEQ ID NO: 4674895 - DNA, 25 bp, Homo sapien
ggagcccctcggcatgcgagccggc

SEQ ID NO: 4674896 - DNA, 25 bp, Homo sapien
ggcgcgcagctacgccccggagccc

SEQ ID NO: 4674897 - DNA, 25 bp, Homo sapien
ggcgcggcctggcaccgcacggcta

SEQ ID NO: 4674898 - DNA, 25 bp, Homo sapien
ggcctggcaccgcacggctaggcgg

SEQ ID NO: 4674899 - DNA, 25 bp, Homo sapien
gcggaggaggcggagctgcagcagc

SEQ ID NO: 4674900 - DNA, 25 bp, Homo sapien
gcgcggcggaggaggcggagctgca

SEQ ID NO: 4674901 - DNA, 25 bp, Homo sapien
cggcggaggaggcggagctgcagca

SEQ ID NO: 4674902 - DNA, 25 bp, Homo sapien
tgcgcggcggaggaggcggagctgc

SEQ ID NO: 4674903 - DNA, 25 bp, Homo sapien
gaggaggcgccagtgcagcctctac

SEQ ID NO: 4674904 - DNA, 25 bp, Homo sapien
gcgaggagcacagaaaacgggcggc

SEQ ID NO: 4674905 - DNA, 25 bp, Homo sapien
agaggaggcgccagtgcagcctcta

SEQ ID NO: 4674906 - DNA, 25 bp, Homo sapien
ctgcgaggagcacagaaaacgggcg

SEQ ID NO: 4674907 - DNA, 25 bp, Homo sapien
tacattgataaaacctgccagagct

SEQ ID NO: 4674908 - DNA, 25 bp, Homo sapien
gggtcaggtctagattcacattcga

SEQ ID NO: 4674909 - DNA, 25 bp, Homo sapien
ttacaaacagtagatgggtcaggtc

SEQ ID NO: 4674910 - DNA, 25 bp, Homo sapien
cacttgccagccagaggttcaaata

SEQ ID NO: 4674911 - DNA, 25 bp, Homo sapien
ttccccaaatgcaacataacatctc

SEQ ID NO: 4674912 - DNA, 25 bp, Homo sapien
accaactgttctttacactggaatt

SEQ ID NO: 4674913 - DNA, 25 bp, Homo sapien
aactgttctttacactggaattcct

SEQ ID NO: 4674914 - DNA, 25 bp, Homo sapien
tcaaatatgaatgccttccccaaat

SEQ ID NO: 4674915 - DNA, 25 bp, Homo sapien
cacttctatgtgtttgctcgtacca

SEQ ID NO: 4674916 - DNA, 25 bp, Homo sapien
taccattcccgcagactagagttcc

SEQ ID NO: 4674917 - DNA, 25 bp, Homo sapien
catcctttaagaccaaattccattc

SEQ ID NO: 4674918 - DNA, 25 bp, Homo sapien
cctttactgatattccaacgaagtc

SEQ ID NO: 4674919 - DNA, 25 bp, Homo sapien
tcaaccttaagtggaatttgggata

SEQ ID NO: 4674920 - DNA, 25 bp, Homo sapien
tcatcaaccttaagtggaatttggg

SEQ ID NO: 4674921 - DNA, 25 bp, Homo sapien
catcaaccttaagtggaatttggga

SEQ ID NO: 4674922 - DNA, 25 bp, Homo sapien
atcaaccttaagtggaatttgggat

SEQ ID NO: 4674923 - DNA, 25 bp, Homo sapien
gttgaagggcaaatctaaggagtcc

SEQ ID NO: 4674924 - DNA, 25 bp, Homo sapien
taaggagtcctaggtcagcagcaca

SEQ ID NO: 4674925 - DNA, 25 bp, Homo sapien
cctagactatcaataaggaggtaga

SEQ ID NO: 4674926 - DNA, 25 bp, Homo sapien
agtttctttgacaagcattacctca

SEQ ID NO: 4674927 - DNA, 25 bp, Homo sapien
aagtccacccaagaataagctgatc

SEQ ID NO: 4674928 - DNA, 25 bp, Homo sapien
tttaagatggcacatgtaagcctgg

SEQ ID NO: 4674929 - DNA, 25 bp, Homo sapien
aagcccctgatggaagccctatgtc

SEQ ID NO: 4674930 - DNA, 25 bp, Homo sapien
taagcctgggttacgaaatgaccag

SEQ ID NO: 4674931 - DNA, 25 bp, Homo sapien
aaatttgggagccaactcaataatt

SEQ ID NO: 4674932 - DNA, 25 bp, Homo sapien
tttgggagccaactcaataatttta

SEQ ID NO: 4674933 - DNA, 25 bp, Homo sapien
tgaaaaatttgggagccaactcaat

SEQ ID NO: 4674934 - DNA, 25 bp, Homo sapien
attgaaaaatttgggagccaactca

SEQ ID NO: 4674935 - DNA, 25 bp, Homo sapien
acagcatgcactcaattcttggtta

SEQ ID NO: 4674936 - DNA, 25 bp, Homo sapien
cagcatgcactcaattcttggttat

SEQ ID NO: 4674937 - DNA, 25 bp, Homo sapien
cacagcatgcactcaattcttggtt

SEQ ID NO: 4674938 - DNA, 25 bp, Homo sapien
gcatgcactcaattcttggttatta

SEQ ID NO: 4674939 - DNA, 25 bp, Homo sapien
tcatctataacatacagagatagtt

SEQ ID NO: 4674940 - DNA, 25 bp, Homo sapien
tctataacatacagagatagttcat

SEQ ID NO: 4674941 - DNA, 25 bp, Homo sapien
ttcatctataacatacagagatagt

SEQ ID NO: 4674942 - DNA, 25 bp, Homo sapien
catctataacatacagagatagttc

SEQ ID NO: 4674943 - DNA, 25 bp, Homo sapien
cagcggcttccattctcgtttggag

SEQ ID NO: 4674944 - DNA, 25 bp, Homo sapien
tgtgcagctacggtcctccagcggc

SEQ ID NO: 4674945 - DNA, 25 bp, Homo sapien
tccagcggcttccattctcgtttgg

SEQ ID NO: 4674946 - DNA, 25 bp, Homo sapien
agcagccatggtatgtctgtgcagc

SEQ ID NO: 4674947 - DNA, 25 bp, Homo sapien
cccttcatctccaatcgaaagatgc

SEQ ID NO: 4674948 - DNA, 25 bp, Homo sapien
tcatctccaatcgaaagatgccact

SEQ ID NO: 4674949 - DNA, 25 bp, Homo sapien
cttcatctccaatcgaaagatgcca

SEQ ID NO: 4674950 - DNA, 25 bp, Homo sapien
catctccaatcgaaagatgccactc

SEQ ID NO: 4674951 - DNA, 25 bp, Homo sapien
ggtcccttgatctctaattgaaaga

SEQ ID NO: 4674952 - DNA, 25 bp, Homo sapien
caggtcccttgatctctaattgaaa

SEQ ID NO: 4674953 - DNA, 25 bp, Homo sapien
ttgatctctaattgaaagatgccac

SEQ ID NO: 4674954 - DNA, 25 bp, Homo sapien
ccttgatctctaattgaaagatgcc

SEQ ID NO: 4674955 - DNA, 25 bp, Homo sapien
aaattctacatgtccacaactcatt

SEQ ID NO: 4674956 - DNA, 25 bp, Homo sapien
cattttctcattccacacttccctt

SEQ ID NO: 4674957 - DNA, 25 bp, Homo sapien
catgtccacaactcattttctcatt

SEQ ID NO: 4674958 - DNA, 25 bp, Homo sapien
cttccctttcctccatatactctat

SEQ ID NO: 4674959 - DNA, 25 bp, Homo sapien
tttcaatagccaacagtcactagtt

SEQ ID NO: 4674960 - DNA, 25 bp, Homo sapien
tcttactgcaaacactattccactg

SEQ ID NO: 4674961 - DNA, 25 bp, Homo sapien
ttgtctgctgaagggaacaaagagc

SEQ ID NO: 4674962 - DNA, 25 bp, Homo sapien
tgatacgataatgagcttctttttg

SEQ ID NO: 4674963 - DNA, 25 bp, Homo sapien
tgacactagtcttgctgctgcacct

SEQ ID NO: 4674964 - DNA, 25 bp, Homo sapien
ctgacactagtcttgctgctgcacc

SEQ ID NO: 4674965 - DNA, 25 bp, Homo sapien
atgccactgtttggtattgcttcca

SEQ ID NO: 4674966 - DNA, 25 bp, Homo sapien
catgccactgtttggtattgcttcc

SEQ ID NO: 4674967 - DNA, 25 bp, Homo sapien
gtccatgccactgtttggtattgct

SEQ ID NO: 4674968 - DNA, 25 bp, Homo sapien
ccatgccactgtttggtattgcttc

SEQ ID NO: 4674969 - DNA, 25 bp, Homo sapien
gcagattagagataagacgaccaag

SEQ ID NO: 4674970 - DNA, 25 bp, Homo sapien
gactgaataggtgaaacgggtccac

SEQ ID NO: 4674971 - DNA, 25 bp, Homo sapien
gaatagatacgctagcacaacagtc

SEQ ID NO: 4674972 - DNA, 25 bp, Homo sapien
tgtttcaagaattcagactggcaga

SEQ ID NO: 4674973 - DNA, 25 bp, Homo sapien
tcagtggccactaaagtcctattct

SEQ ID NO: 4674974 - DNA, 25 bp, Homo sapien
cagttttcatattggtacaatcccc

SEQ ID NO: 4674975 - DNA, 25 bp, Homo sapien
ctttaaagaaggtgatcagtggcca

SEQ ID NO: 4674976 - DNA, 25 bp, Homo sapien
tcccctaaataatcctctgcataag

SEQ ID NO: 4674977 - DNA, 25 bp, Homo sapien
tccttgccgcctagctgcatacatg

SEQ ID NO: 4674978 - DNA, 25 bp, Homo sapien
tgaactcccgcattttctaaggtac

SEQ ID NO: 4674979 - DNA, 25 bp, Homo sapien
tgctcgcagtattttccacagcaag

SEQ ID NO: 4674980 - DNA, 25 bp, Homo sapien
catgtcatctaattctgttaaacag

SEQ ID NO: 4674981 - DNA, 25 bp, Homo sapien
tttaacttagacatggcaaacatat

SEQ ID NO: 4674982 - DNA, 25 bp, Homo sapien
gctgtttaacttagacatggcaaac

SEQ ID NO: 4674983 - DNA, 25 bp, Homo sapien
gtttaacttagacatggcaaacata

SEQ ID NO: 4674984 - DNA, 25 bp, Homo sapien
aacttagacatggcaaacatataca

SEQ ID NO: 4674985 - DNA, 25 bp, Homo sapien
caagtccaggttgcatggatccaaa

SEQ ID NO: 4674986 - DNA, 25 bp, Homo sapien
tggacacgctgctacacacagtgct

SEQ ID NO: 4674987 - DNA, 25 bp, Homo sapien
aatcttccggtttatcaagtccagg

SEQ ID NO: 4674988 - DNA, 25 bp, Homo sapien
agtgctacagacttaatcttccggt

SEQ ID NO: 4674989 - DNA, 25 bp, Homo sapien
taaaaatactaacttccagagcaca

SEQ ID NO: 4674990 - DNA, 25 bp, Homo sapien
tcgatagactacatcaaagtcacct

SEQ ID NO: 4674991 - DNA, 25 bp, Homo sapien
tatttaacactagggcaaatttata

SEQ ID NO: 4674992 - DNA, 25 bp, Homo sapien
actcagtcagaattttgcccaggga

SEQ ID NO: 4674993 - DNA, 25 bp, Homo sapien
tatgctgagggcatggaacaacgga

SEQ ID NO: 4674994 - DNA, 25 bp, Homo sapien
tgtccacccagctagaagttgtacc

SEQ ID NO: 4674995 - DNA, 25 bp, Homo sapien
agaaggctagcatccccaactggaa

SEQ ID NO: 4674996 - DNA, 25 bp, Homo sapien
gaacaacggaacagggatactgcca

SEQ ID NO: 4674997 - DNA, 25 bp, Homo sapien
agggcatctctcctccagtgaacat

SEQ ID NO: 4674998 - DNA, 25 bp, Homo sapien
catagggcatctctcctccagtgaa

SEQ ID NO: 4674999 - DNA, 25 bp, Homo sapien
agcaggggaccatagggcatctctc

SEQ ID NO: 4675000 - DNA, 25 bp, Homo sapien
cagcaggggaccatagggcatctct

SEQ ID NO: 4675001 - DNA, 25 bp, Homo sapien
taactagacctgaacaggccacagt

SEQ ID NO: 4675002 - DNA, 25 bp, Homo sapien
tagacctgaacaggccacagtcagt

SEQ ID NO: 4675003 - DNA, 25 bp, Homo sapien
tcagtatcatattcacttagaagga

SEQ ID NO: 4675004 - DNA, 25 bp, Homo sapien
ctgaacaggccacagtcagtatcat

SEQ ID NO: 4675005 - DNA, 25 bp, Homo sapien
ccatcaacggtacacaaaggttccg

SEQ ID NO: 4675006 - DNA, 25 bp, Homo sapien
ccacgactggcagttcaccatattt

SEQ ID NO: 4675007 - DNA, 25 bp, Homo sapien
tattggtctaccgacattaggttgc

SEQ ID NO: 4675008 - DNA, 25 bp, Homo sapien
tattaactgcttaccagatatctga

SEQ ID NO: 4675009 - DNA, 25 bp, Homo sapien
tccaattcagatgcccatgctgaac

SEQ ID NO: 4675010 - DNA, 25 bp, Homo sapien
ttcagatgcccatgctgaacaatgg

SEQ ID NO: 4675011 - DNA, 25 bp, Homo sapien
tgaacaatggggacagtggagtgaa

SEQ ID NO: 4675012 - DNA, 25 bp, Homo sapien
tctattccaattcagatgcccatgc

SEQ ID NO: 4675013 - DNA, 25 bp, Homo sapien
aaggctttaggttgtagctacatag

SEQ ID NO: 4675014 - DNA, 25 bp, Homo sapien
gagatgtagtgtattcagaaggctt

SEQ ID NO: 4675015 - DNA, 25 bp, Homo sapien
aagattttggagatgtagtgtattc

SEQ ID NO: 4675016 - DNA, 25 bp, Homo sapien
aggttgtagctacatagggctgaac

SEQ ID NO: 4675017 - DNA, 25 bp, Homo sapien
ccaaaataaccaggaacaggcagtc

SEQ ID NO: 4675018 - DNA, 25 bp, Homo sapien
gatgcatgtgtgtaccaaaaactgg

SEQ ID NO: 4675019 - DNA, 25 bp, Homo sapien
tacccctaggacattgtgagatgca

SEQ ID NO: 4675020 - DNA, 25 bp, Homo sapien
caggcagtcctcaacatagtggcat

SEQ ID NO: 4675021 - DNA, 25 bp, Homo sapien
cctagtaacctttctggcatccaga

SEQ ID NO: 4675022 - DNA, 25 bp, Homo sapien
tctaaaagcactgtaagcatactgg

SEQ ID NO: 4675023 - DNA, 25 bp, Homo sapien
cagaggtgcccaaatacatgatgaa

SEQ ID NO: 4675024 - DNA, 25 bp, Homo sapien
gccaccatggttggcatttcaccaa

SEQ ID NO: 4675025 - DNA, 25 bp, Homo sapien
gctgaaagagtaggagtaagcactc

SEQ ID NO: 4675026 - DNA, 25 bp, Homo sapien
ggagtaagcactctgtaagtctctt

SEQ ID NO: 4675027 - DNA, 25 bp, Homo sapien
tccattggttagctgaaagagtagg

SEQ ID NO: 4675028 - DNA, 25 bp, Homo sapien
ttctccattggttagctgaaagagt

SEQ ID NO: 4675029 - DNA, 25 bp, Homo sapien
accctgcctgtaactccatctctct

SEQ ID NO: 4675030 - DNA, 25 bp, Homo sapien
ttgcaccctgcctgtaactccatct

SEQ ID NO: 4675031 - DNA, 25 bp, Homo sapien
cttgcaccctgcctgtaactccatc

SEQ ID NO: 4675032 - DNA, 25 bp, Homo sapien
gcaccctgcctgtaactccatctct

SEQ ID NO: 4675033 - DNA, 25 bp, Homo sapien
tgttccaacagaagacattacccgc

SEQ ID NO: 4675034 - DNA, 25 bp, Homo sapien
tcaacaaacagcataataggcagct

SEQ ID NO: 4675035 - DNA, 25 bp, Homo sapien
tcatgggtagtgatgcaaatcttac

SEQ ID NO: 4675036 - DNA, 25 bp, Homo sapien
gaatatggctgcaatacactccacc

SEQ ID NO: 4675037 - DNA, 25 bp, Homo sapien
tcctacttaatataaatgccacatc

SEQ ID NO: 4675038 - DNA, 25 bp, Homo sapien
ttactcctacttaatataaatgcca

SEQ ID NO: 4675039 - DNA, 25 bp, Homo sapien
aattactcctacttaatataaatgc

SEQ ID NO: 4675040 - DNA, 25 bp, Homo sapien
actcctacttaatataaatgccaca

SEQ ID NO: 4675041 - DNA, 25 bp, Homo sapien
cagcctgtgtaagacactattgtca

SEQ ID NO: 4675042 - DNA, 25 bp, Homo sapien
ttggcatagcaggaaatgttcacag

SEQ ID NO: 4675043 - DNA, 25 bp, Homo sapien
cattactccactaatcagcctgtgt

SEQ ID NO: 4675044 - DNA, 25 bp, Homo sapien
cactgacaaaggtgatcagggcctc

SEQ ID NO: 4675045 - DNA, 25 bp, Homo sapien
gaggtcaggggtcccaggtgaggag

SEQ ID NO: 4675046 - DNA, 25 bp, Homo sapien
tgaggtcaggggtcccaggtgagga

SEQ ID NO: 4675047 - DNA, 25 bp, Homo sapien
ggtcaggggtcccaggtgaggagac

SEQ ID NO: 4675048 - DNA, 25 bp, Homo sapien
tcaggggtcccaggtgaggagacct

SEQ ID NO: 4675049 - DNA, 25 bp, Homo sapien
tgacagtcagtcaagaagctaaatg

SEQ ID NO: 4675050 - DNA, 25 bp, Homo sapien
gaactccaaaggatggtccgactct

SEQ ID NO: 4675051 - DNA, 25 bp, Homo sapien
catcctgaagcctactatggccgaa

SEQ ID NO: 4675052 - DNA, 25 bp, Homo sapien
tatggccgaatttcctctgtctaat

SEQ ID NO: 4675053 - DNA, 25 bp, Homo sapien
tatgaccagaatcgttaagatccac

SEQ ID NO: 4675054 - DNA, 25 bp, Homo sapien
gttaagatccacacaagtactcttg

SEQ ID NO: 4675055 - DNA, 25 bp, Homo sapien
caagtactcttgatatatacctgat

SEQ ID NO: 4675056 - DNA, 25 bp, Homo sapien
caagtgaaccgagtatgaccagaat

SEQ ID NO: 4675057 - DNA, 25 bp, Homo sapien
acagccaccatagtacacctgtgcc

SEQ ID NO: 4675058 - DNA, 25 bp, Homo sapien
gattgtcttcagctatctgaagctg

SEQ ID NO: 4675059 - DNA, 25 bp, Homo sapien
gctgctcaggagtaacagtttcttt

SEQ ID NO: 4675060 - DNA, 25 bp, Homo sapien
tgaggagggcccgaagattgtcttc

SEQ ID NO: 4675061 - DNA, 25 bp, Homo sapien
tttgcgcataaccaacattatcagg

SEQ ID NO: 4675062 - DNA, 25 bp, Homo sapien
gatggtaagagcaacacgtttgcgc

SEQ ID NO: 4675063 - DNA, 25 bp, Homo sapien
gaagaccttgccagctacgtggaac

SEQ ID NO: 4675064 - DNA, 25 bp, Homo sapien
gaagtgtcatgatccagtacaccca

SEQ ID NO: 4675065 - DNA, 25 bp, Homo sapien
ccttgctcattctgaacaggactgc

SEQ ID NO: 4675066 - DNA, 25 bp, Homo sapien
cactgtcatctgctgacatgctaga

SEQ ID NO: 4675067 - DNA, 25 bp, Homo sapien
agaggcccagaaattttgaactcca

SEQ ID NO: 4675068 - DNA, 25 bp, Homo sapien
ccacatggtaccaccacatgtactg

SEQ ID NO: 4675069 - DNA, 25 bp, Homo sapien
cctaggtggtaacgaataaggcgat

SEQ ID NO: 4675070 - DNA, 25 bp, Homo sapien
tactgatgccaaaataggtgtaaat

SEQ ID NO: 4675071 - DNA, 25 bp, Homo sapien
tgccaccgtacctaggtggtaacga

SEQ ID NO: 4675072 - DNA, 25 bp, Homo sapien
acgaataaggcgatttactgatgcc

SEQ ID NO: 4675073 - DNA, 25 bp, Homo sapien
ttttgactaatgtgataatgaaaga

SEQ ID NO: 4675074 - DNA, 25 bp, Homo sapien
ctgactgtgaatatacataaggatc

SEQ ID NO: 4675075 - DNA, 25 bp, Homo sapien
ttgactaatgtgataatgaaagatc

SEQ ID NO: 4675076 - DNA, 25 bp, Homo sapien
ggatcattcgcggaattttgactaa

SEQ ID NO: 4675077 - DNA, 25 bp, Homo sapien
caaagcctccatacttgtccacttt

SEQ ID NO: 4675078 - DNA, 25 bp, Homo sapien
tcaaactgtcacatagaagacttca

SEQ ID NO: 4675079 - DNA, 25 bp, Homo sapien
aaatcacaatttatgcttcaaagcc

SEQ ID NO: 4675080 - DNA, 25 bp, Homo sapien
gaagtttataacacctgcaaggaac

SEQ ID NO: 4675081 - DNA, 25 bp, Homo sapien
aatgcaagatttcagcacacatcgt

SEQ ID NO: 4675082 - DNA, 25 bp, Homo sapien
tgcaagatttcagcacacatcgtgc

SEQ ID NO: 4675083 - DNA, 25 bp, Homo sapien
gatttcagcacacatcgtgcacaag

SEQ ID NO: 4675084 - DNA, 25 bp, Homo sapien
gcacacatcgtgcacaagcattttc

SEQ ID NO: 4675085 - DNA, 25 bp, Homo sapien
tctgtacatgtactccctaaaccta

SEQ ID NO: 4675086 - DNA, 25 bp, Homo sapien
tgagccttggtaagcatatacatta

SEQ ID NO: 4675087 - DNA, 25 bp, Homo sapien
gaaatagacatactttatcaaggca

SEQ ID NO: 4675088 - DNA, 25 bp, Homo sapien
actttatcaaggcacaatgtacaat

SEQ ID NO: 4675089 - DNA, 25 bp, Homo sapien
tcactgattaacatttagcccacgc

SEQ ID NO: 4675090 - DNA, 25 bp, Homo sapien
taaaggatgcctgttagcctacgca

SEQ ID NO: 4675091 - DNA, 25 bp, Homo sapien
ctggatacacaaaggtcaagatgac

SEQ ID NO: 4675092 - DNA, 25 bp, Homo sapien
ccaggagcaaggtgaaggatgacca

SEQ ID NO: 4675093 - DNA, 25 bp, Homo sapien
aatgacaaaggcatcctttgctgag

SEQ ID NO: 4675094 - DNA, 25 bp, Homo sapien
tgctgttgatagctgtggctgtgta

SEQ ID NO: 4675095 - DNA, 25 bp, Homo sapien
ctcctactgtgttgatggtagccac

SEQ ID NO: 4675096 - DNA, 25 bp, Homo sapien
gtagccactcgcaaagcattctcca

SEQ ID NO: 4675097 - DNA, 25 bp, Homo sapien
tgtcagctgaggcaattatagcaca

SEQ ID NO: 4675098 - DNA, 25 bp, Homo sapien
ggaggaccaaatgtaacacttaaca

SEQ ID NO: 4675099 - DNA, 25 bp, Homo sapien
taatactagtagctcaccttacagg

SEQ ID NO: 4675100 - DNA, 25 bp, Homo sapien
tttgaacggccacattctagttctc

SEQ ID NO: 4675101 - DNA, 25 bp, Homo sapien
tactctccaaatcttgcacattcac

SEQ ID NO: 4675102 - DNA, 25 bp, Homo sapien
ggttcttcatgctctcaccatgcca

SEQ ID NO: 4675103 - DNA, 25 bp, Homo sapien
ccgcgcctggtcattacttcaattt

SEQ ID NO: 4675104 - DNA, 25 bp, Homo sapien
tagaaaaaaggtatggctcaaacaa

SEQ ID NO: 4675105 - DNA, 25 bp, Homo sapien
ggtagttgagcagcataatcccagc

SEQ ID NO: 4675106 - DNA, 25 bp, Homo sapien
taaatagacaggaagcaatgagcga

SEQ ID NO: 4675107 - DNA, 25 bp, Homo sapien
catatagaattctctgccagggctc

SEQ ID NO: 4675108 - DNA, 25 bp, Homo sapien
gatcagaggcagcacccatactgtg

SEQ ID NO: 4675109 - DNA, 25 bp, Homo sapien
ctaaaataggaaacggcatttgaag

SEQ ID NO: 4675110 - DNA, 25 bp, Homo sapien
ataggaaacggcatttgaagtactt

SEQ ID NO: 4675111 - DNA, 25 bp, Homo sapien
taggaaacggcatttgaagtactta

SEQ ID NO: 4675112 - DNA, 25 bp, Homo sapien
aataggaaacggcatttgaagtact

SEQ ID NO: 4675113 - DNA, 25 bp, Homo sapien
gacagggtgtatcaaccagaaccta

SEQ ID NO: 4675114 - DNA, 25 bp, Homo sapien
gaacacgttactccataagcctcca

SEQ ID NO: 4675115 - DNA, 25 bp, Homo sapien
gaaatggactctgcaattcgctgat

SEQ ID NO: 4675116 - DNA, 25 bp, Homo sapien
gaacacattgatactgctaagcaca

SEQ ID NO: 4675117 - DNA, 25 bp, Homo sapien
tagctctctggaatcagcgacgcct

SEQ ID NO: 4675118 - DNA, 25 bp, Homo sapien
cgacgcctcccttaccagcttcttt

SEQ ID NO: 4675119 - DNA, 25 bp, Homo sapien
tctggaatcagcgacgcctccctta

SEQ ID NO: 4675120 - DNA, 25 bp, Homo sapien
catcggctttagctctctggaatca

SEQ ID NO: 4675121 - DNA, 25 bp, Homo sapien
tgccatccaagtgatgggtaagcac

SEQ ID NO: 4675122 - DNA, 25 bp, Homo sapien
tctcagttgtgacaagaattctgcc

SEQ ID NO: 4675123 - DNA, 25 bp, Homo sapien
aagtgaaattcttggagggcggcca

SEQ ID NO: 4675124 - DNA, 25 bp, Homo sapien
gcatgtcctgcgtgatacagataac

SEQ ID NO: 4675125 - DNA, 25 bp, Homo sapien
cctgccgagcactgacgaggatgct

SEQ ID NO: 4675126 - DNA, 25 bp, Homo sapien
cagtctgatgaaagccaaacactga

SEQ ID NO: 4675127 - DNA, 25 bp, Homo sapien
aaaccgtcagttcaagtgtacacca

SEQ ID NO: 4675128 - DNA, 25 bp, Homo sapien
ggacagcaatgtaagcagaaccata

SEQ ID NO: 4675129 - DNA, 25 bp, Homo sapien
tagtgacaatatccatgtgaaaagc

SEQ ID NO: 4675130 - DNA, 25 bp, Homo sapien
aattagaccaatatatgatagaggc

SEQ ID NO: 4675131 - DNA, 25 bp, Homo sapien
tataatatcaactaccagaaataat

SEQ ID NO: 4675132 - DNA, 25 bp, Homo sapien
taggaagtaattagaccaatatatg

SEQ ID NO: 4675133 - DNA, 25 bp, Homo sapien
catgcctagcctacttaaatgaact

SEQ ID NO: 4675134 - DNA, 25 bp, Homo sapien
cacaggcagcaagttggacaaactt

SEQ ID NO: 4675135 - DNA, 25 bp, Homo sapien
ttcctaagccatatgcggcccacag

SEQ ID NO: 4675136 - DNA, 25 bp, Homo sapien
tacattaaggatagctgatgggctt

SEQ ID NO: 4675137 - DNA, 25 bp, Homo sapien
tagtgaattcaaacagcagcaatgt

SEQ ID NO: 4675138 - DNA, 25 bp, Homo sapien
ctttcatctacagcaacaatatgtg

SEQ ID NO: 4675139 - DNA, 25 bp, Homo sapien
taaagaaggtactaaggtgctgaaa

SEQ ID NO: 4675140 - DNA, 25 bp, Homo sapien
actctaatcatgcatactatggaag

SEQ ID NO: 4675141 - DNA, 25 bp, Homo sapien
aagtttccttaactagcgagcctct

SEQ ID NO: 4675142 - DNA, 25 bp, Homo sapien
ccttaactagcgagcctctctcagg

SEQ ID NO: 4675143 - DNA, 25 bp, Homo sapien
agaacaaaaccggaagttctcatgt

SEQ ID NO: 4675144 - DNA, 25 bp, Homo sapien
caagaacaaaaccggaagttctcat

SEQ ID NO: 4675145 - DNA, 25 bp, Homo sapien
gagtataatcttagacaattaccat

SEQ ID NO: 4675146 - DNA, 25 bp, Homo sapien
cagagtataatcttagacaattacc

SEQ ID NO: 4675147 - DNA, 25 bp, Homo sapien
catacagagtataatcttagacaat

SEQ ID NO: 4675148 - DNA, 25 bp, Homo sapien
tacagagtataatcttagacaatta

SEQ ID NO: 4675149 - DNA, 25 bp, Homo sapien
caatgggtttccataaccgtcggct

SEQ ID NO: 4675150 - DNA, 25 bp, Homo sapien
tatatattgttttggaatgtcaatg

SEQ ID NO: 4675151 - DNA, 25 bp, Homo sapien
atgggtttccataaccgtcggctag

SEQ ID NO: 4675152 - DNA, 25 bp, Homo sapien
tttggaatgtcaatgggtttccata

SEQ ID NO: 4675153 - DNA, 25 bp, Homo sapien
cccacacacacaaatacatagttat

SEQ ID NO: 4675154 - DNA, 25 bp, Homo sapien
acacccacacacacaaatacatagt

SEQ ID NO: 4675155 - DNA, 25 bp, Homo sapien
acccacacacacaaatacatagtta

SEQ ID NO: 4675156 - DNA, 25 bp, Homo sapien
cacccacacacacaaatacatagtt

SEQ ID NO: 4675157 - DNA, 25 bp, Homo sapien
gacggaagttgccttgtaaaagcca

SEQ ID NO: 4675158 - DNA, 25 bp, Homo sapien
gccacccgtatgaaaggagtacatg

SEQ ID NO: 4675159 - DNA, 25 bp, Homo sapien
gacccactaggacttatgcatcagt

SEQ ID NO: 4675160 - DNA, 25 bp, Homo sapien
gaaagcatatgcctagtcttgaccc

SEQ ID NO: 4675161 - DNA, 25 bp, Homo sapien
tattgggcccaattgtatgtttcta

SEQ ID NO: 4675162 - DNA, 25 bp, Homo sapien
aaaactgattggagtaattccttat

SEQ ID NO: 4675163 - DNA, 25 bp, Homo sapien
aaaattcccatattgggcccaattg

SEQ ID NO: 4675164 - DNA, 25 bp, Homo sapien
taatgttggctgacaaatgtatgaa

SEQ ID NO: 4675165 - DNA, 25 bp, Homo sapien
agggaaaagtttgcatacgaaagat

SEQ ID NO: 4675166 - DNA, 25 bp, Homo sapien
aaagtttgcatacgaaagattatct

SEQ ID NO: 4675167 - DNA, 25 bp, Homo sapien
gtttgcatacgaaagattatctacc

SEQ ID NO: 4675168 - DNA, 25 bp, Homo sapien
ggaaaagtttgcatacgaaagatta

SEQ ID NO: 4675169 - DNA, 25 bp, Homo sapien
cttaaaggctaaactcgctgggtgc

SEQ ID NO: 4675170 - DNA, 25 bp, Homo sapien
gcttcctttcaaatcaggcacacaa

SEQ ID NO: 4675171 - DNA, 25 bp, Homo sapien
agcttcctttcaaatcaggcacaca

SEQ ID NO: 4675172 - DNA, 25 bp, Homo sapien
gctaaactcgctgggtgccccagct

SEQ ID NO: 4675173 - DNA, 25 bp, Homo sapien
cagtccatgatgcagggatgtccaa

SEQ ID NO: 4675174 - DNA, 25 bp, Homo sapien
catcaggtcactttggagggacacc

SEQ ID NO: 4675175 - DNA, 25 bp, Homo sapien
cactgacgttactctgaagccgaag

SEQ ID NO: 4675176 - DNA, 25 bp, Homo sapien
cactgtctagttctggtaggaggca

SEQ ID NO: 4675177 - DNA, 25 bp, Homo sapien
gtgagcgaatagcaataaggcagcc

SEQ ID NO: 4675178 - DNA, 25 bp, Homo sapien
tactaatgcactggtaagcctctca

SEQ ID NO: 4675179 - DNA, 25 bp, Homo sapien
tattcgggtatccacatttcacaga

SEQ ID NO: 4675180 - DNA, 25 bp, Homo sapien
tacaattgacaatagaggaccccaa

SEQ ID NO: 4675181 - DNA, 25 bp, Homo sapien
catggtggaaatagttgaagcctca

SEQ ID NO: 4675182 - DNA, 25 bp, Homo sapien
gctctaaagcagtttgggtccagaa

SEQ ID NO: 4675183 - DNA, 25 bp, Homo sapien
tgatcccagaattctaccttgcagg

SEQ ID NO: 4675184 - DNA, 25 bp, Homo sapien
ccttgcaggctaggagatctcttaa

SEQ ID NO: 4675185 - DNA, 25 bp, Homo sapien
tattgaaaagcgaaagcttaaagac

SEQ ID NO: 4675186 - DNA, 25 bp, Homo sapien
ttattgaaaagcgaaagcttaaaga

SEQ ID NO: 4675187 - DNA, 25 bp, Homo sapien
tgtcagatggaatgtatgaaaagaa

SEQ ID NO: 4675188 - DNA, 25 bp, Homo sapien
cagaaattaactgtggcaggtgcac

SEQ ID NO: 4675189 - DNA, 25 bp, Homo sapien
tttaaagtagcagtagaaaagcagt

SEQ ID NO: 4675190 - DNA, 25 bp, Homo sapien
gcaggtgcactgataagcctccaga

SEQ ID NO: 4675191 - DNA, 25 bp, Homo sapien
cacattctgtccatataatttacaa

SEQ ID NO: 4675192 - DNA, 25 bp, Homo sapien
tacaaagtggcaattgttcatgcaa

SEQ ID NO: 4675193 - DNA, 25 bp, Homo sapien
aaaacatggagtataagaatttggc

SEQ ID NO: 4675194 - DNA, 25 bp, Homo sapien
ggaagaaagggcactacagtatttc

SEQ ID NO: 4675195 - DNA, 25 bp, Homo sapien
caggtcagaaggtggtaagcatcat

SEQ ID NO: 4675196 - DNA, 25 bp, Homo sapien
gacttgggttcattagcccctgagg

SEQ ID NO: 4675197 - DNA, 25 bp, Homo sapien
tgagggccctgaaattctatgagca

SEQ ID NO: 4675198 - DNA, 25 bp, Homo sapien
caaaagtatctctagtggaggccta

SEQ ID NO: 4675199 - DNA, 25 bp, Homo sapien
cccagggagccttccatgtagatgc

SEQ ID NO: 4675200 - DNA, 25 bp, Homo sapien
tgccaactatggactacccttgagt

SEQ ID NO: 4675201 - DNA, 25 bp, Homo sapien
aacacacctccgtgatttatgcagg

SEQ ID NO: 4675202 - DNA, 25 bp, Homo sapien
gatgcagcacccttacctaatagta

SEQ ID NO: 4675203 - DNA, 25 bp, Homo sapien
gaaaagttaactgtccccatgtgat

SEQ ID NO: 4675204 - DNA, 25 bp, Homo sapien
tacacagctgcgagaaatcaagaca

SEQ ID NO: 4675205 - DNA, 25 bp, Homo sapien
ttaacacatgctcctgaaacgacag

SEQ ID NO: 4675206 - DNA, 25 bp, Homo sapien
gatacttagactggacttacgccct

SEQ ID NO: 4675207 - DNA, 25 bp, Homo sapien
tctgcactgtgtcaataatgaccgt

SEQ ID NO: 4675208 - DNA, 25 bp, Homo sapien
caaagctccgtttcatataggctga

SEQ ID NO: 4675209 - DNA, 25 bp, Homo sapien
gaaaacttagcattagatcagcact

SEQ ID NO: 4675210 - DNA, 25 bp, Homo sapien
taatgaccgtcacaaatactagggc

SEQ ID NO: 4675211 - DNA, 25 bp, Homo sapien
cacaaacgcactaaactcattacag

SEQ ID NO: 4675212 - DNA, 25 bp, Homo sapien
cagctactgcctaaatgatggcaca

SEQ ID NO: 4675213 - DNA, 25 bp, Homo sapien
tcattacagatccaggctccaattc

SEQ ID NO: 4675214 - DNA, 25 bp, Homo sapien
cacagtttcacaaacgcactaaact

SEQ ID NO: 4675215 - DNA, 25 bp, Homo sapien
tttcaggtacctttcagatgtgagg

SEQ ID NO: 4675216 - DNA, 25 bp, Homo sapien
cttcaatttgaggttaaatacagag

SEQ ID NO: 4675217 - DNA, 25 bp, Homo sapien
gttaaatacagagtacgctttccat

SEQ ID NO: 4675218 - DNA, 25 bp, Homo sapien
tttcacaggctctttaatcattagg

SEQ ID NO: 4675219 - DNA, 25 bp, Homo sapien
gggcttccactcagaggcctgtgtt

SEQ ID NO: 4675220 - DNA, 25 bp, Homo sapien
cgtatgctgaatgctcctggagagg

SEQ ID NO: 4675221 - DNA, 25 bp, Homo sapien
tactggctgatgactgtcgtatgct

SEQ ID NO: 4675222 - DNA, 25 bp, Homo sapien
caagcttctgtagaatgtactggct

SEQ ID NO: 4675223 - DNA, 25 bp, Homo sapien
gcctgcaagaccctcgagatctgat

SEQ ID NO: 4675224 - DNA, 25 bp, Homo sapien
gctagtgccctagttggaattctca

SEQ ID NO: 4675225 - DNA, 25 bp, Homo sapien
aagaccgttagggtggcctgcaaga

SEQ ID NO: 4675226 - DNA, 25 bp, Homo sapien
gagatctgatccctactgaccgctc

SEQ ID NO: 4675227 - DNA, 25 bp, Homo sapien
ttagcaagactgtttacaactctgc

SEQ ID NO: 4675228 - DNA, 25 bp, Homo sapien
tcctccctagggtttgtagttgctg

SEQ ID NO: 4675229 - DNA, 25 bp, Homo sapien
catcgaaaggttagccagaagcgaa

SEQ ID NO: 4675230 - DNA, 25 bp, Homo sapien
tttacttcctgcttgcatcgaaagg

SEQ ID NO: 4675231 - DNA, 25 bp, Homo sapien
taagacagttgattgaaagtctctg

SEQ ID NO: 4675232 - DNA, 25 bp, Homo sapien
gctactgaacccctcttagtgaatt

SEQ ID NO: 4675233 - DNA, 25 bp, Homo sapien
tcttctattaggtaaaacattgttc

SEQ ID NO: 4675234 - DNA, 25 bp, Homo sapien
ttgtccttcactttctttgtgtctt

SEQ ID NO: 4675235 - DNA, 25 bp, Homo sapien
acaggcgcctaccactatgccagct

SEQ ID NO: 4675236 - DNA, 25 bp, Homo sapien
atttttgtatctttagtatagacag

SEQ ID NO: 4675237 - DNA, 25 bp, Homo sapien
ggattacaggtgtgagccatcgtgc

SEQ ID NO: 4675238 - DNA, 25 bp, Homo sapien
ctttagtatagacagggtttcacca

SEQ ID NO: 4675239 - DNA, 25 bp, Homo sapien
caaattccctagtcaaaaagttcag

SEQ ID NO: 4675240 - DNA, 25 bp, Homo sapien
acagagaacaaattccctagtcaaa

SEQ ID NO: 4675241 - DNA, 25 bp, Homo sapien
cagagaacaaattccctagtcaaaa

SEQ ID NO: 4675242 - DNA, 25 bp, Homo sapien
ctgggaacttcagatctggcgatgt

SEQ ID NO: 4675243 - DNA, 25 bp, Homo sapien
ttttctgggaacttcagatctggcg

SEQ ID NO: 4675244 - DNA, 25 bp, Homo sapien
tcttttctgggaacttcagatctgg

SEQ ID NO: 4675245 - DNA, 25 bp, Homo sapien
cttttctgggaacttcagatctggc

SEQ ID NO: 4675246 - DNA, 25 bp, Homo sapien
cactgatatcaagggcaagatagaa

SEQ ID NO: 4675247 - DNA, 25 bp, Homo sapien
gatggctcactgatatcaagggcaa

SEQ ID NO: 4675248 - DNA, 25 bp, Homo sapien
tgatggctcactgatatcaagggca

SEQ ID NO: 4675249 - DNA, 25 bp, Homo sapien
ggctcactgatatcaagggcaagat

SEQ ID NO: 4675250 - DNA, 25 bp, Homo sapien
ttgagattttagtacgtgccactta

SEQ ID NO: 4675251 - DNA, 25 bp, Homo sapien
tttagtacgtgccacttattgctga

SEQ ID NO: 4675252 - DNA, 25 bp, Homo sapien
tacgtgccacttattgctgatcccc

SEQ ID NO: 4675253 - DNA, 25 bp, Homo sapien
gattttagtacgtgccacttattgc

SEQ ID NO: 4675254 - DNA, 25 bp, Homo sapien
tgtctccaggtgcttaaaacaggtc

SEQ ID NO: 4675255 - DNA, 25 bp, Homo sapien
tacagtcctaaccacaagatgccag

SEQ ID NO: 4675256 - DNA, 25 bp, Homo sapien
gggccggctcagtttgattatcaaa

SEQ ID NO: 4675257 - DNA, 25 bp, Homo sapien
gggagatccccttatcaactgtgta

SEQ ID NO: 4675258 - DNA, 25 bp, Homo sapien
tgggagaacctcatgtaaacaacct

SEQ ID NO: 4675259 - DNA, 25 bp, Homo sapien
agatcctgctcttcataatcgcaga

SEQ ID NO: 4675260 - DNA, 25 bp, Homo sapien
gattatttattagacagccgcactg

SEQ ID NO: 4675261 - DNA, 25 bp, Homo sapien
cagactctcaacagctggtgagtgg

SEQ ID NO: 4675262 - DNA, 25 bp, Homo sapien
tagcagagtcaaagtcgacagaccc

SEQ ID NO: 4675263 - DNA, 25 bp, Homo sapien
tgcttggcatggaacgggcactcaa

SEQ ID NO: 4675264 - DNA, 25 bp, Homo sapien
ccagtattggcgctagagtgagaaa

SEQ ID NO: 4675265 - DNA, 25 bp, Homo sapien
ttttgcgcctctaaagactccctgg

SEQ ID NO: 4675266 - DNA, 25 bp, Homo sapien
ggaagccacttgcatgtttatgagc

SEQ ID NO: 4675267 - DNA, 25 bp, Homo sapien
tgaggagttgactgctgatccagag

SEQ ID NO: 4675268 - DNA, 25 bp, Homo sapien
caaagacaagcaaattggctttgat

SEQ ID NO: 4675269 - DNA, 25 bp, Homo sapien
aggacagttgatttggcaggagaaa

SEQ ID NO: 4675270 - DNA, 25 bp, Homo sapien
ttggaaggctctctgaatctcctct

SEQ ID NO: 4675271 - DNA, 25 bp, Homo sapien
ggaaggctctctgaatctcctctcc

SEQ ID NO: 4675272 - DNA, 25 bp, Homo sapien
ctcctctccccaccgtcactcccat

SEQ ID NO: 4675273 - DNA, 25 bp, Homo sapien
gtttggaaggctctctgaatctcct

SEQ ID NO: 4675274 - DNA, 25 bp, Homo sapien
gtgcttcctggctctgcccctgctt

SEQ ID NO: 4675275 - DNA, 25 bp, Homo sapien
gcttcctggctctgcccctgcttgc

SEQ ID NO: 4675276 - DNA, 25 bp, Homo sapien
ttcctggctctgcccctgcttgcca

SEQ ID NO: 4675277 - DNA, 25 bp, Homo sapien
cagactgcgtgcttcctggctctgc

SEQ ID NO: 4675278 - DNA, 25 bp, Homo sapien
tgtctaccgctagtgcctctgcagg

SEQ ID NO: 4675279 - DNA, 25 bp, Homo sapien
tggtgctggagacggattagcccac

SEQ ID NO: 4675280 - DNA, 25 bp, Homo sapien
tttcctccagcgatagcggtctctc

SEQ ID NO: 4675281 - DNA, 25 bp, Homo sapien
actgctcccgggaagtagccgtgga

SEQ ID NO: 4675282 - DNA, 25 bp, Homo sapien
agggtgaaagggcggcccgcagaag

SEQ ID NO: 4675283 - DNA, 25 bp, Homo sapien
tgaaagggcggcccgcagaagggag

SEQ ID NO: 4675284 - DNA, 25 bp, Homo sapien
gtgaaagggcggcccgcagaaggga

SEQ ID NO: 4675285 - DNA, 25 bp, Homo sapien
ccagggtgaaagggcggcccgcaga

SEQ ID NO: 4675286 - DNA, 25 bp, Homo sapien
aggaggctcagcgagatcgcacacc

SEQ ID NO: 4675287 - DNA, 25 bp, Homo sapien
actgggctcgaacccgagacgacga

SEQ ID NO: 4675288 - DNA, 25 bp, Homo sapien
gcgagtggctaagcccactgggctc

SEQ ID NO: 4675289 - DNA, 25 bp, Homo sapien
acgacgaaccgtgtgaggaggctca

SEQ ID NO: 4675290 - DNA, 25 bp, Homo sapien
cagcacgctcgcagtctgcaggcat

SEQ ID NO: 4675291 - DNA, 25 bp, Homo sapien
gcctaaagcgctgcagagtggctga

SEQ ID NO: 4675292 - DNA, 25 bp, Homo sapien
ccgcatccgtgtgggcgcctcttag

SEQ ID NO: 4675293 - DNA, 25 bp, Homo sapien
tgcaggcatgaaaaccggcctaaag

SEQ ID NO: 4675294 - DNA, 25 bp, Homo sapien
cctaggctgcctaaactgttgggga

SEQ ID NO: 4675295 - DNA, 25 bp, Homo sapien
gattgtatgaaataatcatagggtt

SEQ ID NO: 4675296 - DNA, 25 bp, Homo sapien
gcctaaactgttggggattgtatga

SEQ ID NO: 4675297 - DNA, 25 bp, Homo sapien
gggattgtatgaaataatcataggg

SEQ ID NO: 4675298 - DNA, 25 bp, Homo sapien
atattcgcaaagttccccaagggca

SEQ ID NO: 4675299 - DNA, 25 bp, Homo sapien
tgtagaggactctggaaccccagca

SEQ ID NO: 4675300 - DNA, 25 bp, Homo sapien
gaggacgcactgcaatctttagatg

SEQ ID NO: 4675301 - DNA, 25 bp, Homo sapien
taatacacacctagataaagggtcc

SEQ ID NO: 4675302 - DNA, 25 bp, Homo sapien
tcccaggttggagtgcaatggcgtg

SEQ ID NO: 4675303 - DNA, 25 bp, Homo sapien
gagtttttggctgttgtctcccagg

SEQ ID NO: 4675304 - DNA, 25 bp, Homo sapien
actcttgacctcaggagatccacct

SEQ ID NO: 4675305 - DNA, 25 bp, Homo sapien
tcttgacctcaggagatccacctgc

SEQ ID NO: 4675306 - DNA, 25 bp, Homo sapien
tgtagtgtatcaataaagttctgaa

SEQ ID NO: 4675307 - DNA, 25 bp, Homo sapien
ccttttagtgtatgatgtagtgtat

SEQ ID NO: 4675308 - DNA, 25 bp, Homo sapien
gaactccttttagtgtatgatgtag

SEQ ID NO: 4675309 - DNA, 25 bp, Homo sapien
tgtatgatgtagtgtatcaataaag

SEQ ID NO: 4675310 - DNA, 25 bp, Homo sapien
taactctgagagtatgttggacgaa

SEQ ID NO: 4675311 - DNA, 25 bp, Homo sapien
gcttgttcctgcttgatacagttaa

SEQ ID NO: 4675312 - DNA, 25 bp, Homo sapien
tgtaactcttgggatttacgagctt

SEQ ID NO: 4675313 - DNA, 25 bp, Homo sapien
cttcatccagtatagagtataaact

SEQ ID NO: 4675314 - DNA, 25 bp, Homo sapien
tcactcatgccagggatggctaggg

SEQ ID NO: 4675315 - DNA, 25 bp, Homo sapien
gacatgacccatggccactttggtg

SEQ ID NO: 4675316 - DNA, 25 bp, Homo sapien
gcacactcaatatgcaaaagacttt

SEQ ID NO: 4675317 - DNA, 25 bp, Homo sapien
ggtggcaggtttaatatgcagtatg

SEQ ID NO: 4675318 - DNA, 25 bp, Homo sapien
tatatctaatgaccttgttgcaaat

SEQ ID NO: 4675319 - DNA, 25 bp, Homo sapien
ggcattattacattgactaatctga

SEQ ID NO: 4675320 - DNA, 25 bp, Homo sapien
aatagttcttcagagttctccaggg

SEQ ID NO: 4675321 - DNA, 25 bp, Homo sapien
attctaatagttcttcagagttctc

SEQ ID NO: 4675322 - DNA, 25 bp, Homo sapien
gttaagtgtattaatgcagtttttg

SEQ ID NO: 4675323 - DNA, 25 bp, Homo sapien
ccttgttaagtgtattaatgcagtt

SEQ ID NO: 4675324 - DNA, 25 bp, Homo sapien
cttcccttgttaagtgtattaatgc

SEQ ID NO: 4675325 - DNA, 25 bp, Homo sapien
atacaacttcccttgttaagtgtat

SEQ ID NO: 4675326 - DNA, 25 bp, Homo sapien
tcataatcgttgttccaagttttct

SEQ ID NO: 4675327 - DNA, 25 bp, Homo sapien
tacttcataatcgttgttccaagtt

SEQ ID NO: 4675328 - DNA, 25 bp, Homo sapien
ttcataatcgttgttccaagttttc

SEQ ID NO: 4675329 - DNA, 25 bp, Homo sapien
cactacttcataatcgttgttccaa

SEQ ID NO: 4675330 - DNA, 25 bp, Homo sapien
tcaaagaaaggcgaaaggctgaagc

SEQ ID NO: 4675331 - DNA, 25 bp, Homo sapien
gagaaatccaccattaaatgagtca

SEQ ID NO: 4675332 - DNA, 25 bp, Homo sapien
agaaatccaccattaaatgagtcat

SEQ ID NO: 4675333 - DNA, 25 bp, Homo sapien
caaaactttacatgtaatacatgta

SEQ ID NO: 4675334 - DNA, 25 bp, Homo sapien
tacaaaactttacatgtaatacatg

SEQ ID NO: 4675335 - DNA, 25 bp, Homo sapien
tatacaaaactttacatgtaataca

SEQ ID NO: 4675336 - DNA, 25 bp, Homo sapien
ctttacatgtaatacatgtatttac

SEQ ID NO: 4675337 - DNA, 25 bp, Homo sapien
aatacagcagaatgtctgagagtcc

SEQ ID NO: 4675338 - DNA, 25 bp, Homo sapien
ggagtgtccccacacatttgtgagt

SEQ ID NO: 4675339 - DNA, 25 bp, Homo sapien
taaggaatacagcagaatgtctgag

SEQ ID NO: 4675340 - DNA, 25 bp, Homo sapien
cagtcataggagtgtccccacacat

SEQ ID NO: 4675341 - DNA, 25 bp, Homo sapien
tacagagttatctgccaccaaacac

SEQ ID NO: 4675342 - DNA, 25 bp, Homo sapien
actgttacagagttatctgccacca

SEQ ID NO: 4675343 - DNA, 25 bp, Homo sapien
actctactggatctatctctggagc

SEQ ID NO: 4675344 - DNA, 25 bp, Homo sapien
gccaccaaacactctactggatcta

SEQ ID NO: 4675345 - DNA, 25 bp, Homo sapien
cgtggaagtccatcaaaattagtct

SEQ ID NO: 4675346 - DNA, 25 bp, Homo sapien
aaattagtcttcctatgttccagta

SEQ ID NO: 4675347 - DNA, 25 bp, Homo sapien
tcgctcatcctttacacgtggaagt

SEQ ID NO: 4675348 - DNA, 25 bp, Homo sapien
tgttccagtataaaatggtcaatct

SEQ ID NO: 4675349 - DNA, 25 bp, Homo sapien
ggatcagaatactctccagccacag

SEQ ID NO: 4675350 - DNA, 25 bp, Homo sapien
tacaagctcgcactctgaaattcat

SEQ ID NO: 4675351 - DNA, 25 bp, Homo sapien
tttggtctctagagtcactggatca

SEQ ID NO: 4675352 - DNA, 25 bp, Homo sapien
cacagccttgttacaagctcgcact

SEQ ID NO: 4675353 - DNA, 25 bp, Homo sapien
gagaagtagagaagtaattcaacat

SEQ ID NO: 4675354 - DNA, 25 bp, Homo sapien
aataacttcagatgttaagctttgt

SEQ ID NO: 4675355 - DNA, 25 bp, Homo sapien
acttcagatgttaagctttgtttta

SEQ ID NO: 4675356 - DNA, 25 bp, Homo sapien
gagaagtaattcaacatcacatgaa

SEQ ID NO: 4675357 - DNA, 25 bp, Homo sapien
tttctctccagttttttgtccatac

SEQ ID NO: 4675358 - DNA, 25 bp, Homo sapien
tcctttctctccagttttttgtcca

SEQ ID NO: 4675359 - DNA, 25 bp, Homo sapien
tcaatctccacctttcttcctttct

SEQ ID NO: 4675360 - DNA, 25 bp, Homo sapien
cacctttcttcctttctctccagtt

SEQ ID NO: 4675361 - DNA, 25 bp, Homo sapien
ttttcctccagtaggatcccactct

SEQ ID NO: 4675362 - DNA, 25 bp, Homo sapien
taggatcccactctacacatgtatc

SEQ ID NO: 4675363 - DNA, 25 bp, Homo sapien
tgtatcttcaactttcaggttcaaa

SEQ ID NO: 4675364 - DNA, 25 bp, Homo sapien
ggatgaggagttatccaaattgaag

SEQ ID NO: 4675365 - DNA, 25 bp, Homo sapien
tttcttcagtgaagtaacatggaca

SEQ ID NO: 4675366 - DNA, 25 bp, Homo sapien
caccttgtatgtttcttcagtgaag

SEQ ID NO: 4675367 - DNA, 25 bp, Homo sapien
atgtttcttcagtgaagtaacatgg

SEQ ID NO: 4675368 - DNA, 25 bp, Homo sapien
ccttgtatgtttcttcagtgaagta

SEQ ID NO: 4675369 - DNA, 25 bp, Homo sapien
aattcagcattttccaatttataat

SEQ ID NO: 4675370 - DNA, 25 bp, Homo sapien
tcatagactattaaattcagcattt

SEQ ID NO: 4675371 - DNA, 25 bp, Homo sapien
gactattaaattcagcattttccaa

SEQ ID NO: 4675372 - DNA, 25 bp, Homo sapien
tagactattaaattcagcattttcc

SEQ ID NO: 4675373 - DNA, 25 bp, Homo sapien
gtatctgaaccggagtgcaccgttc

SEQ ID NO: 4675374 - DNA, 25 bp, Homo sapien
cctcatctgcaggttgtaaagactg

SEQ ID NO: 4675375 - DNA, 25 bp, Homo sapien
tcctgggtgagacaacactctaccc

SEQ ID NO: 4675376 - DNA, 25 bp, Homo sapien
gagacaacactctaccctgcttcag

SEQ ID NO: 4675377 - DNA, 25 bp, Homo sapien
tggaggacaacaggcattctggctt

SEQ ID NO: 4675378 - DNA, 25 bp, Homo sapien
gacaacaggcattctggcttttgga

SEQ ID NO: 4675379 - DNA, 25 bp, Homo sapien
ggatgtgtctaccttctgtatttga

SEQ ID NO: 4675380 - DNA, 25 bp, Homo sapien
gggtctttgagtggatgtgctattc

SEQ ID NO: 4675381 - DNA, 25 bp, Homo sapien
taggtggatctgacaattaggtttc

SEQ ID NO: 4675382 - DNA, 25 bp, Homo sapien
aacctaggtggatctgacaattagg

SEQ ID NO: 4675383 - DNA, 25 bp, Homo sapien
cctaggtggatctgacaattaggtt

SEQ ID NO: 4675384 - DNA, 25 bp, Homo sapien
caacctaggtggatctgacaattag

SEQ ID NO: 4675385 - DNA, 25 bp, Homo sapien
tttcatgtcagtatgtcaattttag

SEQ ID NO: 4675386 - DNA, 25 bp, Homo sapien
attttcatgtcagtatgtcaatttt

SEQ ID NO: 4675387 - DNA, 25 bp, Homo sapien
tcatgtcagtatgtcaattttagat

SEQ ID NO: 4675388 - DNA, 25 bp, Homo sapien
ttcatgtcagtatgtcaattttaga

SEQ ID NO: 4675389 - DNA, 25 bp, Homo sapien
cagctccaatatggcggatccctct

SEQ ID NO: 4675390 - DNA, 25 bp, Homo sapien
cccagctccaatatggcggatccct

SEQ ID NO: 4675391 - DNA, 25 bp, Homo sapien
tccaaggcaccttcggccccagctc

SEQ ID NO: 4675392 - DNA, 25 bp, Homo sapien
tcgcgccgcggctccaaggcacctt

SEQ ID NO: 4675393 - DNA, 25 bp, Homo sapien
tgcttgaggcgagtcagtgcgtcct

SEQ ID NO: 4675394 - DNA, 25 bp, Homo sapien
gcgagtcagtgcgtccttcttggtg

SEQ ID NO: 4675395 - DNA, 25 bp, Homo sapien
gacttcttcacgtccccgtgcggct

SEQ ID NO: 4675396 - DNA, 25 bp, Homo sapien
gcgcaggtgcttgaggcgagtcagt

SEQ ID NO: 4675397 - DNA, 25 bp, Homo sapien
catctggatgaatgcatcttcttca

SEQ ID NO: 4675398 - DNA, 25 bp, Homo sapien
tctggatgaatgcatcttcttcagc

SEQ ID NO: 4675399 - DNA, 25 bp, Homo sapien
atctggatgaatgcatcttcttcag

SEQ ID NO: 4675400 - DNA, 25 bp, Homo sapien
ctatgtattttagaagtgcttcaag

SEQ ID NO: 4675401 - DNA, 25 bp, Homo sapien
gcttcaagaaaatagcttgtgagat

SEQ ID NO: 4675402 - DNA, 25 bp, Homo sapien
gcttgtgagatcttcttgcccttta

SEQ ID NO: 4675403 - DNA, 25 bp, Homo sapien
ttatctcctgattgtggggggacaa

SEQ ID NO: 4675404 - DNA, 25 bp, Homo sapien
ctgcgggatgtcaagtataggatga

SEQ ID NO: 4675405 - DNA, 25 bp, Homo sapien
tgcgggatgtcaagtataggatgat

SEQ ID NO: 4675406 - DNA, 25 bp, Homo sapien
tggaaaagtggtcctgcaagtcgac

SEQ ID NO: 4675407 - DNA, 25 bp, Homo sapien
tgaagagcaccttggtaggagccgt

SEQ ID NO: 4675408 - DNA, 25 bp, Homo sapien
gatgagctaggttctcgctccgtga

SEQ ID NO: 4675409 - DNA, 25 bp, Homo sapien
gaacatgatcagcagtattggtccc

SEQ ID NO: 4675410 - DNA, 25 bp, Homo sapien
gcatcatcaatatcgacagtttttt

SEQ ID NO: 4675411 - DNA, 25 bp, Homo sapien
agcatcatcaatatcgacagttttt

SEQ ID NO: 4675412 - DNA, 25 bp, Homo sapien
tcatcaatatcgacagttttttgcc

SEQ ID NO: 4675413 - DNA, 25 bp, Homo sapien
catcatcaatatcgacagttttttg

SEQ ID NO: 4675414 - DNA, 25 bp, Homo sapien
ggcaatggctgctcctcattcaaag

SEQ ID NO: 4675415 - DNA, 25 bp, Homo sapien
tcaaggcaatggctgctcctcattc

SEQ ID NO: 4675416 - DNA, 25 bp, Homo sapien
cctcattcaaagcaccaaaaacttc

SEQ ID NO: 4675417 - DNA, 25 bp, Homo sapien
gctgctcctcattcaaagcaccaaa

SEQ ID NO: 4675418 - DNA, 25 bp, Homo sapien
taaactcatccatcagatcaggaac

SEQ ID NO: 4675419 - DNA, 25 bp, Homo sapien
tctgctataaactcatccatcagat

SEQ ID NO: 4675420 - DNA, 25 bp, Homo sapien
ttcaacagtgaatggttccaagatg

SEQ ID NO: 4675421 - DNA, 25 bp, Homo sapien
caacagtgaatggttccaagatgtc

SEQ ID NO: 4675422 - DNA, 25 bp, Homo sapien
ttcttgtcatagtcgaggcattacc

SEQ ID NO: 4675423 - DNA, 25 bp, Homo sapien
tcttgtcatagtcgaggcattacca

SEQ ID NO: 4675424 - DNA, 25 bp, Homo sapien
acacctgggtcatcaatagggcgca

SEQ ID NO: 4675425 - DNA, 25 bp, Homo sapien
tattggaaagcgctgaaagaatccg

SEQ ID NO: 4675426 - DNA, 25 bp, Homo sapien
cagcatgccatccagtcagagtacc

SEQ ID NO: 4675427 - DNA, 25 bp, Homo sapien
gaagtccattctgagggcacacctg

SEQ ID NO: 4675428 - DNA, 25 bp, Homo sapien
ggcaccaggcaaaccaagtgaaaaa

SEQ ID NO: 4675429 - DNA, 25 bp, Homo sapien
ctgaagaagccactctaccagctgc

SEQ ID NO: 4675430 - DNA, 25 bp, Homo sapien
tccataataagcattgtggcaccag

SEQ ID NO: 4675431 - DNA, 25 bp, Homo sapien
ggtcaatatgaagtaatccacaatg

SEQ ID NO: 4675432 - DNA, 25 bp, Homo sapien
gcatgttacaagctacgtgggctac

SEQ ID NO: 4675433 - DNA, 25 bp, Homo sapien
tgtgtaataacagtgcgggctgcta

SEQ ID NO: 4675434 - DNA, 25 bp, Homo sapien
taatggcccaggtgatttaccagat

SEQ ID NO: 4675435 - DNA, 25 bp, Homo sapien
gacttgttagcatagcaggaccacc

SEQ ID NO: 4675436 - DNA, 25 bp, Homo sapien
gaactggatatttggactctcaaag

SEQ ID NO: 4675437 - DNA, 25 bp, Homo sapien
aatgattgtcgtgattttcacacac

SEQ ID NO: 4675438 - DNA, 25 bp, Homo sapien
tactttcactgtaatgattgtcgtg

SEQ ID NO: 4675439 - DNA, 25 bp, Homo sapien
caggagaaagttcagtactttcact

SEQ ID NO: 4675440 - DNA, 25 bp, Homo sapien
ggccatacagtatagcagaatccca

SEQ ID NO: 4675441 - DNA, 25 bp, Homo sapien
aattggctgatgcaaggccagcaga

SEQ ID NO: 4675442 - DNA, 25 bp, Homo sapien
gagatcacgtactatgattctgaca

SEQ ID NO: 4675443 - DNA, 25 bp, Homo sapien
gaatcccatgaatattttccagaga

SEQ ID NO: 4675444 - DNA, 25 bp, Homo sapien
cattagatgtcggaggctcttctgg

SEQ ID NO: 4675445 - DNA, 25 bp, Homo sapien
tgaaagcatgaaagatgtaggttct

SEQ ID NO: 4675446 - DNA, 25 bp, Homo sapien
aagcattcattagatgtcggaggct

SEQ ID NO: 4675447 - DNA, 25 bp, Homo sapien
aaagatgtaggttctgacaagccac

SEQ ID NO: 4675448 - DNA, 25 bp, Homo sapien
gtaagcattcaggactagtaacacc

SEQ ID NO: 4675449 - DNA, 25 bp, Homo sapien
ctagtaacacccaaatactgcaaga

SEQ ID NO: 4675450 - DNA, 25 bp, Homo sapien
catctcttattgtatcccaagttgg

SEQ ID NO: 4675451 - DNA, 25 bp, Homo sapien
tgtatcccaagttggtacagtttct

SEQ ID NO: 4675452 - DNA, 25 bp, Homo sapien
gcttaaggatagcattaataacatc

SEQ ID NO: 4675453 - DNA, 25 bp, Homo sapien
gaggtttttgaggtattggttcatc

SEQ ID NO: 4675454 - DNA, 25 bp, Homo sapien
tgtggagcaggaatattaagtgaga

SEQ ID NO: 4675455 - DNA, 25 bp, Homo sapien
gtttaagtcattaaagtgcttctca

SEQ ID NO: 4675456 - DNA, 25 bp, Homo sapien
tttacctccaaaccaagaccagcta

SEQ ID NO: 4675457 - DNA, 25 bp, Homo sapien
atttacctccaaaccaagaccagct

SEQ ID NO: 4675458 - DNA, 25 bp, Homo sapien
gatttacctccaaaccaagaccagc

SEQ ID NO: 4675459 - DNA, 25 bp, Homo sapien
tagctgttgctctaaccataatggg

SEQ ID NO: 4675460 - DNA, 25 bp, Homo sapien
tcagagcacggcttgcatttatagc

SEQ ID NO: 4675461 - DNA, 25 bp, Homo sapien
caattgtttgcaggtatcgtgctct

SEQ ID NO: 4675462 - DNA, 25 bp, Homo sapien
ggtagaacctttccattcacaatag

SEQ ID NO: 4675463 - DNA, 25 bp, Homo sapien
atgatcggcatcagatggtaaatgg

SEQ ID NO: 4675464 - DNA, 25 bp, Homo sapien
ttaatgatcggcatcagatggtaaa

SEQ ID NO: 4675465 - DNA, 25 bp, Homo sapien
cggcatcagatggtaaatggtggta

SEQ ID NO: 4675466 - DNA, 25 bp, Homo sapien
aatggtggtagggagctggagaaaa

SEQ ID NO: 4675467 - DNA, 25 bp, Homo sapien
cactgggtagaatctctgggtagga

SEQ ID NO: 4675468 - DNA, 25 bp, Homo sapien
gaacgacgcagcttcatggacatgc

SEQ ID NO: 4675469 - DNA, 25 bp, Homo sapien
ttgctagttcgaggagacattggag

SEQ ID NO: 4675470 - DNA, 25 bp, Homo sapien
gacatgcggcttttgctagttcgag

SEQ ID NO: 4675471 - DNA, 25 bp, Homo sapien
tagatactacgtgaatgatacataa

SEQ ID NO: 4675472 - DNA, 25 bp, Homo sapien
atagtgacccgataaacatatgtgt

SEQ ID NO: 4675473 - DNA, 25 bp, Homo sapien
tgaattggttccaaggctttctgtt

SEQ ID NO: 4675474 - DNA, 25 bp, Homo sapien
gtgaatagtgacccgataaacatat

SEQ ID NO: 4675475 - DNA, 25 bp, Homo sapien
atctgaattggttccaaggctttct

SEQ ID NO: 4675476 - DNA, 25 bp, Homo sapien
actaaatcagatactggagggtagg

SEQ ID NO: 4675477 - DNA, 25 bp, Homo sapien
tactggagggtaggcttgagaaaca

SEQ ID NO: 4675478 - DNA, 25 bp, Homo sapien
agaggagaggttaaagtaaatgtgt

SEQ ID NO: 4675479 - DNA, 25 bp, Homo sapien
gcaaattaccaggacttaccataaa

SEQ ID NO: 4675480 - DNA, 25 bp, Homo sapien
tggagcctacagatgttcgttttgg

SEQ ID NO: 4675481 - DNA, 25 bp, Homo sapien
ggagcctacagatgttcgttttggg

SEQ ID NO: 4675482 - DNA, 25 bp, Homo sapien
ctggagcctacagatgttcgttttg

SEQ ID NO: 4675483 - DNA, 25 bp, Homo sapien
gattctccagtaaaacgatctctac

SEQ ID NO: 4675484 - DNA, 25 bp, Homo sapien
cagtaaaacgatctctactgcctct

SEQ ID NO: 4675485 - DNA, 25 bp, Homo sapien
taaaacgatctctactgcctcttac

SEQ ID NO: 4675486 - DNA, 25 bp, Homo sapien
tctccagtaaaacgatctctactgc

SEQ ID NO: 4675487 - DNA, 25 bp, Homo sapien
atgtgttttgtagccagttgttgac

SEQ ID NO: 4675488 - DNA, 25 bp, Homo sapien
tcccacactgtaggatttacaatcc

SEQ ID NO: 4675489 - DNA, 25 bp, Homo sapien
tcaggaacagtaacatccaaagctt

SEQ ID NO: 4675490 - DNA, 25 bp, Homo sapien
tggatacaccaactagtgtttgtct

SEQ ID NO: 4675491 - DNA, 25 bp, Homo sapien
taaccctggggataacttcaccatc

SEQ ID NO: 4675492 - DNA, 25 bp, Homo sapien
tgtagccactttgtccatgctctct

SEQ ID NO: 4675493 - DNA, 25 bp, Homo sapien
tctctgatgaccattcccttggttt

SEQ ID NO: 4675494 - DNA, 25 bp, Homo sapien
cttggtttgtatcataaccctgggg

SEQ ID NO: 4675495 - DNA, 25 bp, Homo sapien
tatatctatcactgcttcaattttg

SEQ ID NO: 4675496 - DNA, 25 bp, Homo sapien
taaactggccaaccaaatggcctcc

SEQ ID NO: 4675497 - DNA, 25 bp, Homo sapien
ccttcaataggatcatgccctaaaa

SEQ ID NO: 4675498 - DNA, 25 bp, Homo sapien
aatcacctcacagtatatccttcaa

SEQ ID NO: 4675499 - DNA, 25 bp, Homo sapien
tgatgcgatactgatactccagtct

SEQ ID NO: 4675500 - DNA, 25 bp, Homo sapien
ctgatgcgatactgatactccagtc

SEQ ID NO: 4675501 - DNA, 25 bp, Homo sapien
ctattaaaccttgtcttctatctac

SEQ ID NO: 4675502 - DNA, 25 bp, Homo sapien
tgtaaaccaaggccatttcttcctc

SEQ ID NO: 4675503 - DNA, 25 bp, Homo sapien
tttttcctataaccagcctctctgc

SEQ ID NO: 4675504 - DNA, 25 bp, Homo sapien
gtttcattagcccagtgtaaaccaa

SEQ ID NO: 4675505 - DNA, 25 bp, Homo sapien
tgtcttaaaggaatatagcaactgt

SEQ ID NO: 4675506 - DNA, 25 bp, Homo sapien
ggtagtactggctgagtaaattttg

SEQ ID NO: 4675507 - DNA, 25 bp, Homo sapien
tttgtcttaaaggaatatagcaact

SEQ ID NO: 4675508 - DNA, 25 bp, Homo sapien
catgaaaccaggtagtactggctga

SEQ ID NO: 4675509 - DNA, 25 bp, Homo sapien
caatacagtgctaacactggagaag

SEQ ID NO: 4675510 - DNA, 25 bp, Homo sapien
tgttgagtcaaaaagatactgtatg

SEQ ID NO: 4675511 - DNA, 25 bp, Homo sapien
tgaactataaccacatagaatatgg

SEQ ID NO: 4675512 - DNA, 25 bp, Homo sapien
tatacgatatgatctagcaacccca

SEQ ID NO: 4675513 - DNA, 25 bp, Homo sapien
cccataagaaacacgaagacaacct

SEQ ID NO: 4675514 - DNA, 25 bp, Homo sapien
gaagagcctacaaattaacccataa

SEQ ID NO: 4675515 - DNA, 25 bp, Homo sapien
tattttgtacaaagatgacactgca

SEQ ID NO: 4675516 - DNA, 25 bp, Homo sapien
gcagtctatatctaaatgtacaagg

SEQ ID NO: 4675517 - DNA, 25 bp, Homo sapien
tattgagtaacaacattgttcaggc

SEQ ID NO: 4675518 - DNA, 25 bp, Homo sapien
tgcatcccagtactcaaagaaagtc

SEQ ID NO: 4675519 - DNA, 25 bp, Homo sapien
tgttcaggctgctagctgaaccagt

SEQ ID NO: 4675520 - DNA, 25 bp, Homo sapien
tctcacagcacttggaacctgcatc

SEQ ID NO: 4675521 - DNA, 25 bp, Homo sapien
gaacacagcaaacctgattttcact

SEQ ID NO: 4675522 - DNA, 25 bp, Homo sapien
gaaaaggccacctaatcaagacgga

SEQ ID NO: 4675523 - DNA, 25 bp, Homo sapien
gagggtaaacgtattctgagtagac

SEQ ID NO: 4675524 - DNA, 25 bp, Homo sapien
gattagtaactgcacagaaaaggcc

SEQ ID NO: 4675525 - DNA, 25 bp, Homo sapien
ccctctatagggaacagaacatctg

SEQ ID NO: 4675526 - DNA, 25 bp, Homo sapien
gagacctttaagaacgccagtaaga

SEQ ID NO: 4675527 - DNA, 25 bp, Homo sapien
caaatgtaggcagtaatggtcactc

SEQ ID NO: 4675528 - DNA, 25 bp, Homo sapien
gctgcttgaaaaagtcatgtgccaa

SEQ ID NO: 4675529 - DNA, 25 bp, Homo sapien
tctaaagtgcttaaggcagctcctt

SEQ ID NO: 4675530 - DNA, 25 bp, Homo sapien
gcagctccttcatttcgatatccag

SEQ ID NO: 4675531 - DNA, 25 bp, Homo sapien
taaagacataatgacatggtcagcc

SEQ ID NO: 4675532 - DNA, 25 bp, Homo sapien
tggtcagccatgagagtcaaaatga

SEQ ID NO: 4675533 - DNA, 25 bp, Homo sapien
caaagtctagccatacagcagcagt

SEQ ID NO: 4675534 - DNA, 25 bp, Homo sapien
tactgaacgtgaggtaatcttgcca

SEQ ID NO: 4675535 - DNA, 25 bp, Homo sapien
caatgaaacccatgtatagacaggc

SEQ ID NO: 4675536 - DNA, 25 bp, Homo sapien
cagcagcagttcacgatttgtcaag

SEQ ID NO: 4675537 - DNA, 25 bp, Homo sapien
ttatttaataattgagtcatctgaa

SEQ ID NO: 4675538 - DNA, 25 bp, Homo sapien
tatttaataattgagtcatctgaag

SEQ ID NO: 4675539 - DNA, 25 bp, Homo sapien
tttatccgtgacaacaagctgccca

SEQ ID NO: 4675540 - DNA, 25 bp, Homo sapien
cactctttgcatgtggcactgggca

SEQ ID NO: 4675541 - DNA, 25 bp, Homo sapien
tgaggcaggctgaacaacttacact

SEQ ID NO: 4675542 - DNA, 25 bp, Homo sapien
catggaccagcttacattgaatggg

SEQ ID NO: 4675543 - DNA, 25 bp, Homo sapien
ttcctgtgactcttgtcgcatcctc

SEQ ID NO: 4675544 - DNA, 25 bp, Homo sapien
cttgtcgcatcctcaccgccagaag

SEQ ID NO: 4675545 - DNA, 25 bp, Homo sapien
tgtgactcttgtcgcatcctcaccg

SEQ ID NO: 4675546 - DNA, 25 bp, Homo sapien
tgtcgcatcctcaccgccagaagtt

SEQ ID NO: 4675547 - DNA, 25 bp, Homo sapien
tggcttggttcctgctgggacgttc

SEQ ID NO: 4675548 - DNA, 25 bp, Homo sapien
cggaggctggcttggttcctgctgg

SEQ ID NO: 4675549 - DNA, 25 bp, Homo sapien
gctggcttggttcctgctgggacgt

SEQ ID NO: 4675550 - DNA, 25 bp, Homo sapien
cttggttcctgctgggacgttccca

SEQ ID NO: 4675551 - DNA, 25 bp, Homo sapien
accgccgcaaaagccgccgtcaagt

SEQ ID NO: 4675552 - DNA, 25 bp, Homo sapien
gctgcagccgctccgctttacggca

SEQ ID NO: 4675553 - DNA, 25 bp, Homo sapien
cagcaaccgccgcaaaagccgccgt

SEQ ID NO: 4675554 - DNA, 25 bp, Homo sapien
cgctttacggcactcacagcaaccg

SEQ ID NO: 4675555 - DNA, 25 bp, Homo sapien
tattctctgtcaactatcgtcctct

SEQ ID NO: 4675556 - DNA, 25 bp, Homo sapien
tagttttacaggctttagagaagag

SEQ ID NO: 4675557 - DNA, 25 bp, Homo sapien
gaaagtaactagctctccatcctca

SEQ ID NO: 4675558 - DNA, 25 bp, Homo sapien
tcctcacagtctctagttttacagg

SEQ ID NO: 4675559 - DNA, 25 bp, Homo sapien
taagggctttacatgcagggaggat

SEQ ID NO: 4675560 - DNA, 25 bp, Homo sapien
taacggccatatttgctaaacagga

SEQ ID NO: 4675561 - DNA, 25 bp, Homo sapien
cgttatatccctagaaccagcagtg

SEQ ID NO: 4675562 - DNA, 25 bp, Homo sapien
ccacttctgggtagacaattaggca

SEQ ID NO: 4675563 - DNA, 25 bp, Homo sapien
tgtgcagcgcacaggaagaatcctt

SEQ ID NO: 4675564 - DNA, 25 bp, Homo sapien
taataactcctttgcacagccagca

SEQ ID NO: 4675565 - DNA, 25 bp, Homo sapien
taaccaccaagtctttggcgagact

SEQ ID NO: 4675566 - DNA, 25 bp, Homo sapien
agatgatgtagcagattggcaggca

SEQ ID NO: 4675567 - DNA, 25 bp, Homo sapien
ctcaacttgtcgaagtcattctcca

SEQ ID NO: 4675568 - DNA, 25 bp, Homo sapien
gaggtgctctgatttttagaatttt

SEQ ID NO: 4675569 - DNA, 25 bp, Homo sapien
tttgaacttcctcctttagctcgga

SEQ ID NO: 4675570 - DNA, 25 bp, Homo sapien
ctttagctcggagaagtttgatcgt

SEQ ID NO: 4675571 - DNA, 25 bp, Homo sapien
tatatgtggtcaactttggagtaag

SEQ ID NO: 4675572 - DNA, 25 bp, Homo sapien
catccatggtctttagaatctggca

SEQ ID NO: 4675573 - DNA, 25 bp, Homo sapien
tgcagaggctggtatcggctgttcc

SEQ ID NO: 4675574 - DNA, 25 bp, Homo sapien
tctgcctagcatccatggtctttag

SEQ ID NO: 4675575 - DNA, 25 bp, Homo sapien
aaaactaggttatacaaggatgttg

SEQ ID NO: 4675576 - DNA, 25 bp, Homo sapien
tgttgatgaccgtatgttagttttt

SEQ ID NO: 4675577 - DNA, 25 bp, Homo sapien
ttatacaaggatgttgatgaccgta

SEQ ID NO: 4675578 - DNA, 25 bp, Homo sapien
tgaccgtatgttagtttttcctcat

SEQ ID NO: 4675579 - DNA, 25 bp, Homo sapien
caaatatactgacacctctcttatg

SEQ ID NO: 4675580 - DNA, 25 bp, Homo sapien
gcttgatatctaaggtttatatgtc

SEQ ID NO: 4675581 - DNA, 25 bp, Homo sapien
ttagttcttcaaatgcttacattta

SEQ ID NO: 4675582 - DNA, 25 bp, Homo sapien
tggttaaacacatttagttcttcaa

SEQ ID NO: 4675583 - DNA, 25 bp, Homo sapien
ttggttgtcttttgaaagtatctca

SEQ ID NO: 4675584 - DNA, 25 bp, Homo sapien
tcttttgaaagtatctcagtcgttt

SEQ ID NO: 4675585 - DNA, 25 bp, Homo sapien
ttgtcttttgaaagtatctcagtcg

SEQ ID NO: 4675586 - DNA, 25 bp, Homo sapien
tttgaaagtatctcagtcgttttca

SEQ ID NO: 4675587 - DNA, 25 bp, Homo sapien
gccaaaaccacgttcttattgattc

SEQ ID NO: 4675588 - DNA, 25 bp, Homo sapien
caaaaccacgttcttattgattcta

SEQ ID NO: 4675589 - DNA, 25 bp, Homo sapien
aaaccacgttcttattgattctact

SEQ ID NO: 4675590 - DNA, 25 bp, Homo sapien
ccaaaaccacgttcttattgattct

SEQ ID NO: 4675591 - DNA, 25 bp, Homo sapien
gttgataaatagtgcttgtagtagt

SEQ ID NO: 4675592 - DNA, 25 bp, Homo sapien
ctttgttgataaatagtgcttgtag

SEQ ID NO: 4675593 - DNA, 25 bp, Homo sapien
gataaatagtgcttgtagtagtaca

SEQ ID NO: 4675594 - DNA, 25 bp, Homo sapien
ttgttgataaatagtgcttgtagta

SEQ ID NO: 4675595 - DNA, 25 bp, Homo sapien
caagggagctcagctaatataatcc

SEQ ID NO: 4675596 - DNA, 25 bp, Homo sapien
gtttgcaatctccagccgtatccca

SEQ ID NO: 4675597 - DNA, 25 bp, Homo sapien
gtatcccattggctaaacccaacag

SEQ ID NO: 4675598 - DNA, 25 bp, Homo sapien
ggcaagggagctcagctaatataat

SEQ ID NO: 4675599 - DNA, 25 bp, Homo sapien
tgtgtgctatcaaatccaattcggc

SEQ ID NO: 4675600 - DNA, 25 bp, Homo sapien
gctatcaaatccaattcggcttcct

SEQ ID NO: 4675601 - DNA, 25 bp, Homo sapien
ccactgtgtgctatcaaatccaatt

SEQ ID NO: 4675602 - DNA, 25 bp, Homo sapien
tcctttggattttgacaaaccagct

SEQ ID NO: 4675603 - DNA, 25 bp, Homo sapien
tcaacaaatacttacggagtaaatg

SEQ ID NO: 4675604 - DNA, 25 bp, Homo sapien
acaaatacttacggagtaaatgaat

SEQ ID NO: 4675605 - DNA, 25 bp, Homo sapien
caacaaatacttacggagtaaatga

SEQ ID NO: 4675606 - DNA, 25 bp, Homo sapien
tagtgtagagtattatgcaaatgcc

SEQ ID NO: 4675607 - DNA, 25 bp, Homo sapien
tgtttgcctatcaaaaaggtgcttc

SEQ ID NO: 4675608 - DNA, 25 bp, Homo sapien
taagaacagcaaggataaacagaat

SEQ ID NO: 4675609 - DNA, 25 bp, Homo sapien
gaaaatggactaaatcacacttagg

SEQ ID NO: 4675610 - DNA, 25 bp, Homo sapien
ctcttggaacacagaaaaacttgca

SEQ ID NO: 4675611 - DNA, 25 bp, Homo sapien
gtgcaaatgcagtaaagtctcttgg

SEQ ID NO: 4675612 - DNA, 25 bp, Homo sapien
cattcttccataggtgatactgcag

SEQ ID NO: 4675613 - DNA, 25 bp, Homo sapien
gcattgtgaagtagagccatgagaa

SEQ ID NO: 4675614 - DNA, 25 bp, Homo sapien
ttcattatcaactgtaacattccct

SEQ ID NO: 4675615 - DNA, 25 bp, Homo sapien
tctttcttggtacaccttagaagta

SEQ ID NO: 4675616 - DNA, 25 bp, Homo sapien
gtttcattatcaactgtaacattcc

SEQ ID NO: 4675617 - DNA, 25 bp, Homo sapien
ttggtacaccttagaagtagaaagc

SEQ ID NO: 4675618 - DNA, 25 bp, Homo sapien
tagttgccactcctctcatgaaaga

SEQ ID NO: 4675619 - DNA, 25 bp, Homo sapien
taccaagtggatcgcatgagtggcc

SEQ ID NO: 4675620 - DNA, 25 bp, Homo sapien
tttaagtctcaagtggccgtgccag

SEQ ID NO: 4675621 - DNA, 25 bp, Homo sapien
gagtgagtctatcccgtctagccgg

SEQ ID NO: 4675622 - DNA, 25 bp, Homo sapien
gagaacttccagtccatcaacagta

SEQ ID NO: 4675623 - DNA, 25 bp, Homo sapien
cctagagtgtggtacttcttctaca

SEQ ID NO: 4675624 - DNA, 25 bp, Homo sapien
gaatgctcgagcttctttataccta

SEQ ID NO: 4675625 - DNA, 25 bp, Homo sapien
tcttctacaaagtgcattggatcct

SEQ ID NO: 4675626 - DNA, 25 bp, Homo sapien
gcccaagaagaatcgtggaatccaa

SEQ ID NO: 4675627 - DNA, 25 bp, Homo sapien
taagatgacagaaggtaccaactct

SEQ ID NO: 4675628 - DNA, 25 bp, Homo sapien
tagatattcctaggccaggtgtaca

SEQ ID NO: 4675629 - DNA, 25 bp, Homo sapien
ttcactgatattcaacagcctggag

SEQ ID NO: 4675630 - DNA, 25 bp, Homo sapien
tagactgtaaagatagttccctgag

SEQ ID NO: 4675631 - DNA, 25 bp, Homo sapien
tatctacaggtttagaatggtgcct

SEQ ID NO: 4675632 - DNA, 25 bp, Homo sapien
ttccctgagggcaagtactacatct

SEQ ID NO: 4675633 - DNA, 25 bp, Homo sapien
ttcatcactgtatctacaggtttag

SEQ ID NO: 4675634 - DNA, 25 bp, Homo sapien
gcactcttccgaaaggccacagctt

SEQ ID NO: 4675635 - DNA, 25 bp, Homo sapien
gacaagttccactgctcagccagaa

SEQ ID NO: 4675636 - DNA, 25 bp, Homo sapien
cttccacagtgttatcatcaaggta

SEQ ID NO: 4675637 - DNA, 25 bp, Homo sapien
gccagaatggtactcccaatttgtt

SEQ ID NO: 4675638 - DNA, 25 bp, Homo sapien
taaattggatggcaaccctatccct

SEQ ID NO: 4675639 - DNA, 25 bp, Homo sapien
ctccttggcaggaagaaccatgtaa

SEQ ID NO: 4675640 - DNA, 25 bp, Homo sapien
gatactaccaatgacctaggaaagg

SEQ ID NO: 4675641 - DNA, 25 bp, Homo sapien
tgatggaagaccttatgacactgtc

SEQ ID NO: 4675642 - DNA, 25 bp, Homo sapien
gctaaaataatatcagatttgtaat

SEQ ID NO: 4675643 - DNA, 25 bp, Homo sapien
ataaaaattcctaggtcaacatctt

SEQ ID NO: 4675644 - DNA, 25 bp, Homo sapien
atttgtgtttgagcggaagtcctgc

SEQ ID NO: 4675645 - DNA, 25 bp, Homo sapien
caacatctttgctataaggaataat

SEQ ID NO: 4675646 - DNA, 25 bp, Homo sapien
ttttcctgttttggcctgagtgcct

SEQ ID NO: 4675647 - DNA, 25 bp, Homo sapien
tttttcctgttttggcctgagtgcc

SEQ ID NO: 4675648 - DNA, 25 bp, Homo sapien
tttcctgttttggcctgagtgcctc

SEQ ID NO: 4675649 - DNA, 25 bp, Homo sapien
ttgtctcggaaaggatacataagaa

SEQ ID NO: 4675650 - DNA, 25 bp, Homo sapien
tatacgagcatatgtttgtctcgga

SEQ ID NO: 4675651 - DNA, 25 bp, Homo sapien
tacatagctatgtgaggaaaagaac

SEQ ID NO: 4675652 - DNA, 25 bp, Homo sapien
catccccaaggaatagtagtgttaa

SEQ ID NO: 4675653 - DNA, 25 bp, Homo sapien
caaaaagacctttggagaaggtgag

SEQ ID NO: 4675654 - DNA, 25 bp, Homo sapien
aatgtgctcccaattatatttggtg

SEQ ID NO: 4675655 - DNA, 25 bp, Homo sapien
gaaggtgagatgatacattatactg

SEQ ID NO: 4675656 - DNA, 25 bp, Homo sapien
cattctatagtcctgcagagtagtt

SEQ ID NO: 4675657 - DNA, 25 bp, Homo sapien
tactagtgacaagcttaaaatcttg

SEQ ID NO: 4675658 - DNA, 25 bp, Homo sapien
aggtagtacaagaggaatagcttca

SEQ ID NO: 4675659 - DNA, 25 bp, Homo sapien
catgcagtgatgtatgataatctag

SEQ ID NO: 4675660 - DNA, 25 bp, Homo sapien
caaaaggtagagtgtctaaatgcaa

SEQ ID NO: 4675661 - DNA, 25 bp, Homo sapien
ccagtgtgtgattgtgtgatgttcc

SEQ ID NO: 4675662 - DNA, 25 bp, Homo sapien
ccccagtgtgtgattgtgtgatgtt

SEQ ID NO: 4675663 - DNA, 25 bp, Homo sapien
cccagtgtgtgattgtgtgatgttc

SEQ ID NO: 4675664 - DNA, 25 bp, Homo sapien
tattcgagggtttcacagggtacat

SEQ ID NO: 4675665 - DNA, 25 bp, Homo sapien
catggaccttcatgtctacaaactc

SEQ ID NO: 4675666 - DNA, 25 bp, Homo sapien
tagttggcttcaatgtattcgaggg

SEQ ID NO: 4675667 - DNA, 25 bp, Homo sapien
gcacagtgtaaacttcggaaacagg

SEQ ID NO: 4675668 - DNA, 25 bp, Homo sapien
tataactggataacctcatcccact

SEQ ID NO: 4675669 - DNA, 25 bp, Homo sapien
tccattgggttgcacattgggagga

SEQ ID NO: 4675670 - DNA, 25 bp, Homo sapien
gcttccagtcccacgtctttacagg

SEQ ID NO: 4675671 - DNA, 25 bp, Homo sapien
tcagaaataggccagattccattgg

SEQ ID NO: 4675672 - DNA, 25 bp, Homo sapien
gaagtctgagttcttgccccatcga

SEQ ID NO: 4675673 - DNA, 25 bp, Homo sapien
taccagcttaaatgcccagaagagg

SEQ ID NO: 4675674 - DNA, 25 bp, Homo sapien
caaactctatgatctgaggtagggt

SEQ ID NO: 4675675 - DNA, 25 bp, Homo sapien
gtcaacaagtgccatcagaggtcag

SEQ ID NO: 4675676 - DNA, 25 bp, Homo sapien
gatactaagcggcagaaacaccctg

SEQ ID NO: 4675677 - DNA, 25 bp, Homo sapien
tagaacctgtgtcaattgggccaag

SEQ ID NO: 4675678 - DNA, 25 bp, Homo sapien
tagcctcaatgaagcactggatgcc

SEQ ID NO: 4675679 - DNA, 25 bp, Homo sapien
tggaaattgagactgaaagggcccc

SEQ ID NO: 4675680 - DNA, 25 bp, Homo sapien
tattgccattgaattagtctgtttc

SEQ ID NO: 4675681 - DNA, 25 bp, Homo sapien
taagcacaggacctatacaaaaggt

SEQ ID NO: 4675682 - DNA, 25 bp, Homo sapien
cctgctgattcttgcctagttgaga

SEQ ID NO: 4675683 - DNA, 25 bp, Homo sapien
ctgtaattaggatttcagtctgatg

SEQ ID NO: 4675684 - DNA, 25 bp, Homo sapien
taatgggtccctacaaaatctctgt

SEQ ID NO: 4675685 - DNA, 25 bp, Homo sapien
tgtacctgaagataaaaccacacag

SEQ ID NO: 4675686 - DNA, 25 bp, Homo sapien
tctttcaaccctactgtgagagctg

SEQ ID NO: 4675687 - DNA, 25 bp, Homo sapien
gggagggacacacaaatagctacat

SEQ ID NO: 4675688 - DNA, 25 bp, Homo sapien
acagatccggtgagtagtaaccagg

SEQ ID NO: 4675689 - DNA, 25 bp, Homo sapien
gatccggtgagtagtaaccaggcca

SEQ ID NO: 4675690 - DNA, 25 bp, Homo sapien
cagatccggtgagtagtaaccaggc

SEQ ID NO: 4675691 - DNA, 25 bp, Homo sapien
ccggtgagtagtaaccaggccagaa

SEQ ID NO: 4675692 - DNA, 25 bp, Homo sapien
cgtagccgtcgccctcgccggccgt

SEQ ID NO: 4675693 - DNA, 25 bp, Homo sapien
agcccgcgtcgtcgccgtagccgtc

SEQ ID NO: 4675694 - DNA, 25 bp, Homo sapien
cgccgtagccgtcgccctcgccggc

SEQ ID NO: 4675695 - DNA, 25 bp, Homo sapien
gccgtagccgtcgccctcgccggcc

SEQ ID NO: 4675696 - DNA, 25 bp, Homo sapien
atctgccaggtgtccgggagtcgct

SEQ ID NO: 4675697 - DNA, 25 bp, Homo sapien
gcatctagtggctgaagtttcgaat

SEQ ID NO: 4675698 - DNA, 25 bp, Homo sapien
agatgcgccgccgagagcggtacaa

SEQ ID NO: 4675699 - DNA, 25 bp, Homo sapien
agtccaggaaagcatctagtggctg

SEQ ID NO: 4675700 - DNA, 25 bp, Homo sapien
tcagctttttgtctggagggtgagt

SEQ ID NO: 4675701 - DNA, 25 bp, Homo sapien
aaaggcgctgttgacattctgctgc

SEQ ID NO: 4675702 - DNA, 25 bp, Homo sapien
cactcccgtttgttgcaggctttgc

SEQ ID NO: 4675703 - DNA, 25 bp, Homo sapien
tgatatacctcattgccaggcgaag

SEQ ID NO: 4675704 - DNA, 25 bp, Homo sapien
ctaaggaatgtggtggcttggacca

SEQ ID NO: 4675705 - DNA, 25 bp, Homo sapien
tgcttcacgagttatcatcaggtca

SEQ ID NO: 4675706 - DNA, 25 bp, Homo sapien
ggtggcggcccacaagtgacattcc

SEQ ID NO: 4675707 - DNA, 25 bp, Homo sapien
cacaggcagtgatttctgggcaagt

SEQ ID NO: 4675708 - DNA, 25 bp, Homo sapien
gagccacctcccaggaagctagaat

SEQ ID NO: 4675709 - DNA, 25 bp, Homo sapien
cacacttctacagagttgaaaggac

SEQ ID NO: 4675710 - DNA, 25 bp, Homo sapien
agatttttcccgcaagtctcccagg

SEQ ID NO: 4675711 - DNA, 25 bp, Homo sapien
aaatggctcagcacaagtagcacct

SEQ ID NO: 4675712 - DNA, 25 bp, Homo sapien
gaactgttccacatatctctgctgc

SEQ ID NO: 4675713 - DNA, 25 bp, Homo sapien
tgccaacacacctgacgtaacagtc

SEQ ID NO: 4675714 - DNA, 25 bp, Homo sapien
ggaaaggccctctttgtcgaagatc

SEQ ID NO: 4675715 - DNA, 25 bp, Homo sapien
tggtgtacaaaaatgcaagcaggca

SEQ ID NO: 4675716 - DNA, 25 bp, Homo sapien
tcaggagcactctgttacatttcag

SEQ ID NO: 4675717 - DNA, 25 bp, Homo sapien
gagggaccggcattagaccatcaaa

SEQ ID NO: 4675718 - DNA, 25 bp, Homo sapien
ctgaacagggccgtagaaaggctaa

SEQ ID NO: 4675719 - DNA, 25 bp, Homo sapien
ctaactgcgcatgtggcctctggac

SEQ ID NO: 4675720 - DNA, 25 bp, Homo sapien
gacagtcacttcaaatccctctaga

SEQ ID NO: 4675721 - DNA, 25 bp, Homo sapien
tagaaaatgacttttcaataaccat

SEQ ID NO: 4675722 - DNA, 25 bp, Homo sapien
agctttagaaaatgacttttcaata

SEQ ID NO: 4675723 - DNA, 25 bp, Homo sapien
aatagctttagaaaatgacttttca

SEQ ID NO: 4675724 - DNA, 25 bp, Homo sapien
ttagaaaatgacttttcaataacca

SEQ ID NO: 4675725 - DNA, 25 bp, Homo sapien
ccctggagcctagagccataaagcc

SEQ ID NO: 4675726 - DNA, 25 bp, Homo sapien
gatggggcatctttacccctggagc

SEQ ID NO: 4675727 - DNA, 25 bp, Homo sapien
gaaggagacactgcaaggttgtttt

SEQ ID NO: 4675728 - DNA, 25 bp, Homo sapien
ccttctcaacttccgtgatggggca

SEQ ID NO: 4675729 - DNA, 25 bp, Homo sapien
ctgtaataggcatgcaatgaatatg

SEQ ID NO: 4675730 - DNA, 25 bp, Homo sapien
taataggcatgcaatgaatatgaaa

SEQ ID NO: 4675731 - DNA, 25 bp, Homo sapien
gaatatgaaacacttccttgaagtg

SEQ ID NO: 4675732 - DNA, 25 bp, Homo sapien
cttgaagtgtttatattttgactct

SEQ ID NO: 4675733 - DNA, 25 bp, Homo sapien
tgggtcagccccataatctggtcta

SEQ ID NO: 4675734 - DNA, 25 bp, Homo sapien
tttgattcctactcagcatggagag

SEQ ID NO: 4675735 - DNA, 25 bp, Homo sapien
tttccttgcagggaataatgtccat

SEQ ID NO: 4675736 - DNA, 25 bp, Homo sapien
cagtactttctgaattggacttccg

SEQ ID NO: 4675737 - DNA, 25 bp, Homo sapien
cagagggaatgagtcctctggataa

SEQ ID NO: 4675738 - DNA, 25 bp, Homo sapien
tctggataagagaaaggcgcattcc

SEQ ID NO: 4675739 - DNA, 25 bp, Homo sapien
caggaactcagtgagagatccagag

SEQ ID NO: 4675740 - DNA, 25 bp, Homo sapien
ggataagagaaaggcgcattccact

SEQ ID NO: 4675741 - DNA, 25 bp, Homo sapien
tcttcagcgtaaggactgctaaaac

SEQ ID NO: 4675742 - DNA, 25 bp, Homo sapien
atcagcacttaagttcaccatattg

SEQ ID NO: 4675743 - DNA, 25 bp, Homo sapien
ctttcttcagcgtaaggactgctaa

SEQ ID NO: 4675744 - DNA, 25 bp, Homo sapien
ctaactttcttcagcgtaaggactg

SEQ ID NO: 4675745 - DNA, 25 bp, Homo sapien
cgcggtgaggagtaggagagggcac

SEQ ID NO: 4675746 - DNA, 25 bp, Homo sapien
caccgaccgcggcaaccgaagcagc

SEQ ID NO: 4675747 - DNA, 25 bp, Homo sapien
cgcgctcgcgcggtgaggagtagga

SEQ ID NO: 4675748 - DNA, 25 bp, Homo sapien
cgcggctactggttccccgcgctcg

SEQ ID NO: 4675749 - DNA, 25 bp, Homo sapien
ggctgacgtttcaccgccatcactg

SEQ ID NO: 4675750 - DNA, 25 bp, Homo sapien
gccatcactgacactagatagtgcg

SEQ ID NO: 4675751 - DNA, 25 bp, Homo sapien
aaacatggacgtgcgggagaaggcc

SEQ ID NO: 4675752 - DNA, 25 bp, Homo sapien
tagtgcgcgatgtcaaaaaagggaa

SEQ ID NO: 4675753 - DNA, 25 bp, Homo sapien
tgcttcaggtctatgttaacactct

SEQ ID NO: 4675754 - DNA, 25 bp, Homo sapien
cctgggtatctgtccagtcaggaga

SEQ ID NO: 4675755 - DNA, 25 bp, Homo sapien
tataaacacagaaaggtcgtgactg

SEQ ID NO: 4675756 - DNA, 25 bp, Homo sapien
cactgatgacattacactgaccggg

SEQ ID NO: 4675757 - DNA, 25 bp, Homo sapien
gaggctaaagtggaagaatcactga

SEQ ID NO: 4675758 - DNA, 25 bp, Homo sapien
gtgccaatgcactcagcctagacaa

SEQ ID NO: 4675759 - DNA, 25 bp, Homo sapien
gctaaagtggaagaatcactgagcc

SEQ ID NO: 4675760 - DNA, 25 bp, Homo sapien
ccatgatagtgccaatgcactcagc

SEQ ID NO: 4675761 - DNA, 25 bp, Homo sapien
aaccagcttgaaataggattcttcc

SEQ ID NO: 4675762 - DNA, 25 bp, Homo sapien
caagcagtagacaggataaaattcc

SEQ ID NO: 4675763 - DNA, 25 bp, Homo sapien
tggagcatagcagtaaaccagcttg

SEQ ID NO: 4675764 - DNA, 25 bp, Homo sapien
tatgttagtgtggtttgcaagaaac

SEQ ID NO: 4675765 - DNA, 25 bp, Homo sapien
cataggtcaccatactggcagctta

SEQ ID NO: 4675766 - DNA, 25 bp, Homo sapien
tgtcacataggtcaccatactggca

SEQ ID NO: 4675767 - DNA, 25 bp, Homo sapien
tcattttactaacaatttacaacac

SEQ ID NO: 4675768 - DNA, 25 bp, Homo sapien
tttcaagcacgtaaaatattgttca

SEQ ID NO: 4675769 - DNA, 25 bp, Homo sapien
ctaaatatacagaaaattagccaga

SEQ ID NO: 4675770 - DNA, 25 bp, Homo sapien
gtggcgcatgcctgtaatctcagcc

SEQ ID NO: 4675771 - DNA, 25 bp, Homo sapien
atatacagaaaattagccagacgtg

SEQ ID NO: 4675772 - DNA, 25 bp, Homo sapien
acttgggaggctgagacaggagaat

SEQ ID NO: 4675773 - DNA, 25 bp, Homo sapien
tggctggtggcacccttgaccaagc

SEQ ID NO: 4675774 - DNA, 25 bp, Homo sapien
tattttgggatctttgggatgtcac

SEQ ID NO: 4675775 - DNA, 25 bp, Homo sapien
gtatgaactgtatagctggtttcca

SEQ ID NO: 4675776 - DNA, 25 bp, Homo sapien
gggatgtcacttttctgggcagaaa

SEQ ID NO: 4675777 - DNA, 25 bp, Homo sapien
tagctattagcatgtgtgactccac

SEQ ID NO: 4675778 - DNA, 25 bp, Homo sapien
tcgggcccatccaatagctatcatg

SEQ ID NO: 4675779 - DNA, 25 bp, Homo sapien
cattcccgaagccagtagttgaaca

SEQ ID NO: 4675780 - DNA, 25 bp, Homo sapien
cctgggaaactaggtcatgcgggca

SEQ ID NO: 4675781 - DNA, 25 bp, Homo sapien
tctcaaaattcgttataatggtacc

SEQ ID NO: 4675782 - DNA, 25 bp, Homo sapien
tatgacatcttcagccattcatcac

SEQ ID NO: 4675783 - DNA, 25 bp, Homo sapien
ttcgttataatggtaccacctgcac

SEQ ID NO: 4675784 - DNA, 25 bp, Homo sapien
taccaacctctcaaaattcgttata

SEQ ID NO: 4675785 - DNA, 25 bp, Homo sapien
taaagatggtataaaggaacataag

SEQ ID NO: 4675786 - DNA, 25 bp, Homo sapien
tatgctttgatattgccagatgctg

SEQ ID NO: 4675787 - DNA, 25 bp, Homo sapien
ggtgtgctggaatgtgaagataact

SEQ ID NO: 4675788 - DNA, 25 bp, Homo sapien
ggaacataagattatgctttgatat

SEQ ID NO: 4675789 - DNA, 25 bp, Homo sapien
ttaatcatggtatgaacagtcagaa

SEQ ID NO: 4675790 - DNA, 25 bp, Homo sapien
gccacagatcatctccaattcagag

SEQ ID NO: 4675791 - DNA, 25 bp, Homo sapien
ttacagccacagatcatctccaatt

SEQ ID NO: 4675792 - DNA, 25 bp, Homo sapien
ccacagatcatctccaattcagaga

SEQ ID NO: 4675793 - DNA, 25 bp, Homo sapien
agccacagatcatctccaattcaga

SEQ ID NO: 4675794 - DNA, 25 bp, Homo sapien
cagactaacacagtatggaaaatat

SEQ ID NO: 4675795 - DNA, 25 bp, Homo sapien
caacatttgaggactggaagagact

SEQ ID NO: 4675796 - DNA, 25 bp, Homo sapien
aaatatacacggctcaacatttgag

SEQ ID NO: 4675797 - DNA, 25 bp, Homo sapien
taacacagtatggaaaatatatctc

SEQ ID NO: 4675798 - DNA, 25 bp, Homo sapien
ggtaatttcattccataagtagcag

SEQ ID NO: 4675799 - DNA, 25 bp, Homo sapien
gatgtggtaatttcattccataagt

SEQ ID NO: 4675800 - DNA, 25 bp, Homo sapien
tccataagtagcagaatccatgtaa

SEQ ID NO: 4675801 - DNA, 25 bp, Homo sapien
tagcagaatccatgtaagatcgcca

SEQ ID NO: 4675802 - DNA, 25 bp, Homo sapien
aatgtaatccatgctttttaggagt

SEQ ID NO: 4675803 - DNA, 25 bp, Homo sapien
taaatgtaatccatgctttttagga

SEQ ID NO: 4675804 - DNA, 25 bp, Homo sapien
gataaatgtaatccatgctttttag

SEQ ID NO: 4675805 - DNA, 25 bp, Homo sapien
ctgagataaatgtaatccatgcttt

SEQ ID NO: 4675806 - DNA, 25 bp, Homo sapien
taagttggattattcgtatcatcac

SEQ ID NO: 4675807 - DNA, 25 bp, Homo sapien
aatctgtgattgtgctgaatatatc

SEQ ID NO: 4675808 - DNA, 25 bp, Homo sapien
attattcgtatcatcacttcttggc

SEQ ID NO: 4675809 - DNA, 25 bp, Homo sapien
gtgctgaatatatcttgttcaaatc

SEQ ID NO: 4675810 - DNA, 25 bp, Homo sapien
attaaattatgacagcttcctccca

SEQ ID NO: 4675811 - DNA, 25 bp, Homo sapien
ttaaattatgacagcttcctcccat

SEQ ID NO: 4675812 - DNA, 25 bp, Homo sapien
ctattaaattatgacagcttcctcc

SEQ ID NO: 4675813 - DNA, 25 bp, Homo sapien
tattaaattatgacagcttcctccc

SEQ ID NO: 4675814 - DNA, 25 bp, Homo sapien
gcaacttggtttgctattagaggac

SEQ ID NO: 4675815 - DNA, 25 bp, Homo sapien
aacttggtttgctattagaggacag

SEQ ID NO: 4675816 - DNA, 25 bp, Homo sapien
acttggtttgctattagaggacaga

SEQ ID NO: 4675817 - DNA, 25 bp, Homo sapien
caacttggtttgctattagaggaca

SEQ ID NO: 4675818 - DNA, 25 bp, Homo sapien
tataagttctgtaactgcagcttga

SEQ ID NO: 4675819 - DNA, 25 bp, Homo sapien
tggtggcggaagtaacaaacgacac

SEQ ID NO: 4675820 - DNA, 25 bp, Homo sapien
catcggtgatttcatgcccattgca

SEQ ID NO: 4675821 - DNA, 25 bp, Homo sapien
caattgtagcgcatcgatggcaacc

SEQ ID NO: 4675822 - DNA, 25 bp, Homo sapien
attcagcacatctacgctctttaaa

SEQ ID NO: 4675823 - DNA, 25 bp, Homo sapien
ctgaagacacttctcatcagtattc

SEQ ID NO: 4675824 - DNA, 25 bp, Homo sapien
tacgctctttaaaactatctcctcc

SEQ ID NO: 4675825 - DNA, 25 bp, Homo sapien
gcacatctacgctctttaaaactat

SEQ ID NO: 4675826 - DNA, 25 bp, Homo sapien
aacgccattggaaggtgactttgct

SEQ ID NO: 4675827 - DNA, 25 bp, Homo sapien
cacatgatgaaaacggctgctgcca

SEQ ID NO: 4675828 - DNA, 25 bp, Homo sapien
cattatctgaggcaacatctaccgg

SEQ ID NO: 4675829 - DNA, 25 bp, Homo sapien
tgaggccaatgacccaacgccattg

SEQ ID NO: 4675830 - DNA, 25 bp, Homo sapien
tataccggtaaagcataatcacatg

SEQ ID NO: 4675831 - DNA, 25 bp, Homo sapien
taatcacatgatacactcgtaacac

SEQ ID NO: 4675832 - DNA, 25 bp, Homo sapien
cactctacaaatacaatccagaaag

SEQ ID NO: 4675833 - DNA, 25 bp, Homo sapien
tagcacaatataacaggtagataag

SEQ ID NO: 4675834 - DNA, 25 bp, Homo sapien
aaaaccatacgaaagcttgtcagag

SEQ ID NO: 4675835 - DNA, 25 bp, Homo sapien
taattctgctgaactaaagctcaaa

SEQ ID NO: 4675836 - DNA, 25 bp, Homo sapien
taggaattgttctccatacctagca

SEQ ID NO: 4675837 - DNA, 25 bp, Homo sapien
ttctagtagaaaatacctgctatgg

SEQ ID NO: 4675838 - DNA, 25 bp, Homo sapien
gaaggaaccagattttatatcatca

SEQ ID NO: 4675839 - DNA, 25 bp, Homo sapien
caaatgcctaaggacaattctcaga

SEQ ID NO: 4675840 - DNA, 25 bp, Homo sapien
tggttagctggttactaccaaatgc

SEQ ID NO: 4675841 - DNA, 25 bp, Homo sapien
tggactgccatatgaagttctggtt

SEQ ID NO: 4675842 - DNA, 25 bp, Homo sapien
acttgagtacttctaaaccatcgaa

SEQ ID NO: 4675843 - DNA, 25 bp, Homo sapien
aaccatcgaaaatacctgatacggg

SEQ ID NO: 4675844 - DNA, 25 bp, Homo sapien
caagtgtaaaacaagagtccttcca

SEQ ID NO: 4675845 - DNA, 25 bp, Homo sapien
acttctaacttgaatgtgatgtgac

SEQ ID NO: 4675846 - DNA, 25 bp, Homo sapien
caaaagagccttgaattgagggtta

SEQ ID NO: 4675847 - DNA, 25 bp, Homo sapien
ccaagtcaagactctacaggtgacc

SEQ ID NO: 4675848 - DNA, 25 bp, Homo sapien
tgggtaaggagtctaacaatctgct

SEQ ID NO: 4675849 - DNA, 25 bp, Homo sapien
aatagattcaggatgggtttcaggc

SEQ ID NO: 4675850 - DNA, 25 bp, Homo sapien
gacccacttgtcaggcatgatctgc

SEQ ID NO: 4675851 - DNA, 25 bp, Homo sapien
cttgggtatacggaccatgcagtcc

SEQ ID NO: 4675852 - DNA, 25 bp, Homo sapien
attggccagattgcccacccagaag

SEQ ID NO: 4675853 - DNA, 25 bp, Homo sapien
ttaagtgggaaagtagcgaatggca

SEQ ID NO: 4675854 - DNA, 25 bp, Homo sapien
agggagctgcctatgactgcagagt

SEQ ID NO: 4675855 - DNA, 25 bp, Homo sapien
cccagggagctgcctatgactgcag

SEQ ID NO: 4675856 - DNA, 25 bp, Homo sapien
gctgcctatgactgcagagtggaga

SEQ ID NO: 4675857 - DNA, 25 bp, Homo sapien
gagctgcctatgactgcagagtgga

SEQ ID NO: 4675858 - DNA, 25 bp, Homo sapien
ccataagggcctggcaggttcttca

SEQ ID NO: 4675859 - DNA, 25 bp, Homo sapien
tgtaactaccaagcctagatgtgac

SEQ ID NO: 4675860 - DNA, 25 bp, Homo sapien
ggaagcagccggtaatattgtagaa

SEQ ID NO: 4675861 - DNA, 25 bp, Homo sapien
aggttcttcatcctgggatcaggga

SEQ ID NO: 4675862 - DNA, 25 bp, Homo sapien
ttaatgtcagaaactattgaaatga

SEQ ID NO: 4675863 - DNA, 25 bp, Homo sapien
ttgagaatcccttaatgtcagaaac

SEQ ID NO: 4675864 - DNA, 25 bp, Homo sapien
gttgagaatcccttaatgtcagaaa

SEQ ID NO: 4675865 - DNA, 25 bp, Homo sapien
gccacctgctggcagtcaggggcat

SEQ ID NO: 4675866 - DNA, 25 bp, Homo sapien
cagtcaggggcatgtgtgactctgg

SEQ ID NO: 4675867 - DNA, 25 bp, Homo sapien
cacctgctggcagtcaggggcatgt

SEQ ID NO: 4675868 - DNA, 25 bp, Homo sapien
gggtggggctgcttaggcccaaggc

SEQ ID NO: 4675869 - DNA, 25 bp, Homo sapien
gtctttcccagctctatagcggttt

SEQ ID NO: 4675870 - DNA, 25 bp, Homo sapien
cagggtaaaaaccacaggattgcct

SEQ ID NO: 4675871 - DNA, 25 bp, Homo sapien
tctatagcggtttaatctgggcccc

SEQ ID NO: 4675872 - DNA, 25 bp, Homo sapien
tgcctgatggctcgggtctttccca

SEQ ID NO: 4675873 - DNA, 25 bp, Homo sapien
caaatccttccagatagttgggtgg

SEQ ID NO: 4675874 - DNA, 25 bp, Homo sapien
cattaaagaatactgctctatcacc

SEQ ID NO: 4675875 - DNA, 25 bp, Homo sapien
catcatgcaccatagacatttttga

SEQ ID NO: 4675876 - DNA, 25 bp, Homo sapien
gaaaagcacatcattaaagaatact

SEQ ID NO: 4675877 - DNA, 25 bp, Homo sapien
aaaaaggtcacttttcgaacagcat

SEQ ID NO: 4675878 - DNA, 25 bp, Homo sapien
aaaggtcacttttcgaacagcattt

SEQ ID NO: 4675879 - DNA, 25 bp, Homo sapien
acagcatttgctcccagactctcat

SEQ ID NO: 4675880 - DNA, 25 bp, Homo sapien
tcgaacagcatttgctcccagactc

SEQ ID NO: 4675881 - DNA, 25 bp, Homo sapien
caaatccttgctgaggagcaaaatc

SEQ ID NO: 4675882 - DNA, 25 bp, Homo sapien
tggagagtgagtcttcttttgcttg

SEQ ID NO: 4675883 - DNA, 25 bp, Homo sapien
tcctcctcacattgtaaacattagg

SEQ ID NO: 4675884 - DNA, 25 bp, Homo sapien
cttttgtacttgcaaatccttgctg

SEQ ID NO: 4675885 - DNA, 25 bp, Homo sapien
gagaaataataaagtgcaagccctg

SEQ ID NO: 4675886 - DNA, 25 bp, Homo sapien
tgctctcatcaatagctgccttcct

SEQ ID NO: 4675887 - DNA, 25 bp, Homo sapien
aagcttcatcagatactcctctgga

SEQ ID NO: 4675888 - DNA, 25 bp, Homo sapien
tgtaatgggataacaggcaagtcct

SEQ ID NO: 4675889 - DNA, 25 bp, Homo sapien
caaaggttacataggacacagagcc

SEQ ID NO: 4675890 - DNA, 25 bp, Homo sapien
ggactgggctaccaaaggttacata

SEQ ID NO: 4675891 - DNA, 25 bp, Homo sapien
aaggttacataggacacagagccct

SEQ ID NO: 4675892 - DNA, 25 bp, Homo sapien
ccaaaggttacataggacacagagc

SEQ ID NO: 4675893 - DNA, 25 bp, Homo sapien
catccccagacaatccttgtagaag

SEQ ID NO: 4675894 - DNA, 25 bp, Homo sapien
ctccatccccagacaatccttgtag

SEQ ID NO: 4675895 - DNA, 25 bp, Homo sapien
tccatccccagacaatccttgtaga

SEQ ID NO: 4675896 - DNA, 25 bp, Homo sapien
tccccagacaatccttgtagaagaa

SEQ ID NO: 4675897 - DNA, 25 bp, Homo sapien
ttgtcgatccccgacctccaccctc

SEQ ID NO: 4675898 - DNA, 25 bp, Homo sapien
gtcgatccccgacctccaccctcag

SEQ ID NO: 4675899 - DNA, 25 bp, Homo sapien
gatccccgacctccaccctcaggct

SEQ ID NO: 4675900 - DNA, 25 bp, Homo sapien
tccccgacctccaccctcaggctga

SEQ ID NO: 4675901 - DNA, 25 bp, Homo sapien
cacatctgattggccttttccaaaa

SEQ ID NO: 4675902 - DNA, 25 bp, Homo sapien
tgattggccttttccaaaagaccta

SEQ ID NO: 4675903 - DNA, 25 bp, Homo sapien
tggccttttccaaaagacctatcat

SEQ ID NO: 4675904 - DNA, 25 bp, Homo sapien
tctgattggccttttccaaaagacc

SEQ ID NO: 4675905 - DNA, 25 bp, Homo sapien
gagagcagtgaggaccgggggctgt

SEQ ID NO: 4675906 - DNA, 25 bp, Homo sapien
tgagagcagtgaggaccgggggctg

SEQ ID NO: 4675907 - DNA, 25 bp, Homo sapien
ctgagagcagtgaggaccgggggct

SEQ ID NO: 4675908 - DNA, 25 bp, Homo sapien
gagcagtgaggaccgggggctgttt

SEQ ID NO: 4675909 - DNA, 25 bp, Homo sapien
tgccagcattgctgatgagcgttgg

SEQ ID NO: 4675910 - DNA, 25 bp, Homo sapien
agccagaatgtgtcttgccagcatt

SEQ ID NO: 4675911 - DNA, 25 bp, Homo sapien
ccatttatcccagtgaccttacagc

SEQ ID NO: 4675912 - DNA, 25 bp, Homo sapien
tcccatttatcccagtgaccttaca

SEQ ID NO: 4675913 - DNA, 25 bp, Homo sapien
ccccttggctatcccagcaggtttt

SEQ ID NO: 4675914 - DNA, 25 bp, Homo sapien
cttggctatcccagcaggttttttc

SEQ ID NO: 4675915 - DNA, 25 bp, Homo sapien
gctatcccagcaggttttttctttc

SEQ ID NO: 4675916 - DNA, 25 bp, Homo sapien
actcattttcaggcaatcggccaac

SEQ ID NO: 4675917 - DNA, 25 bp, Homo sapien
ttagccgaacctgtagtctcaaaat

SEQ ID NO: 4675918 - DNA, 25 bp, Homo sapien
ttcaagaccgcaaagaacacagctt

SEQ ID NO: 4675919 - DNA, 25 bp, Homo sapien
ctaattttcaagaccgcaaagaaca

SEQ ID NO: 4675920 - DNA, 25 bp, Homo sapien
cttagccgaacctgtagtctcaaaa

SEQ ID NO: 4675921 - DNA, 25 bp, Homo sapien
cagacgcttccacactctgtgtaac

SEQ ID NO: 4675922 - DNA, 25 bp, Homo sapien
aacattccagataccaggcagaaac

SEQ ID NO: 4675923 - DNA, 25 bp, Homo sapien
acttctagaggatggtttctaagac

SEQ ID NO: 4675924 - DNA, 25 bp, Homo sapien
tcactattctcaaagcttggatttc

SEQ ID NO: 4675925 - DNA, 25 bp, Homo sapien
tattccatagagatacagtaatcaa

SEQ ID NO: 4675926 - DNA, 25 bp, Homo sapien
aaggtgaggaggtagcaactgccat

SEQ ID NO: 4675927 - DNA, 25 bp, Homo sapien
caaatgtaatatgttcctcgatgga

SEQ ID NO: 4675928 - DNA, 25 bp, Homo sapien
tagtaataactgaacattttggagg

SEQ ID NO: 4675929 - DNA, 25 bp, Homo sapien
ggatgtacatagtgagatctttgtc

SEQ ID NO: 4675930 - DNA, 25 bp, Homo sapien
gataaagattctgtgccagtaatct

SEQ ID NO: 4675931 - DNA, 25 bp, Homo sapien
aagctaagccagagggatgtacata

SEQ ID NO: 4675932 - DNA, 25 bp, Homo sapien
ctcatttcaggaaggatacaagata

SEQ ID NO: 4675933 - DNA, 25 bp, Homo sapien
cttgtaataaagatatggagcaata

SEQ ID NO: 4675934 - DNA, 25 bp, Homo sapien
atattaaaacgagcagttgtttcca

SEQ ID NO: 4675935 - DNA, 25 bp, Homo sapien
gatatggagcaatattaaaacgagc

SEQ ID NO: 4675936 - DNA, 25 bp, Homo sapien
ggagcaatattaaaacgagcagttg

SEQ ID NO: 4675937 - DNA, 25 bp, Homo sapien
ggatattaatggctgctgcaagctt

SEQ ID NO: 4675938 - DNA, 25 bp, Homo sapien
gagacctctaacaaatctgtccttg

SEQ ID NO: 4675939 - DNA, 25 bp, Homo sapien
aaaaggatattaatggctgctgcaa

SEQ ID NO: 4675940 - DNA, 25 bp, Homo sapien
atttccttgagagacctctaacaaa

SEQ ID NO: 4675941 - DNA, 25 bp, Homo sapien
cagaaagtgttctttcgtgcatcat

SEQ ID NO: 4675942 - DNA, 25 bp, Homo sapien
aatgttaaaggcagaaagtgttctt

SEQ ID NO: 4675943 - DNA, 25 bp, Homo sapien
cacaaatgttaaaggcagaaagtgt

SEQ ID NO: 4675944 - DNA, 25 bp, Homo sapien
aggcagaaagtgttctttcgtgcat

SEQ ID NO: 4675945 - DNA, 25 bp, Homo sapien
cctgaaaggtggatgataaaagggt

SEQ ID NO: 4675946 - DNA, 25 bp, Homo sapien
ttaagaggtagagatgtctgcagct

SEQ ID NO: 4675947 - DNA, 25 bp, Homo sapien
ctgaaaggtggatgataaaagggtg

SEQ ID NO: 4675948 - DNA, 25 bp, Homo sapien
cagaagctgaccatttgagagtaga

SEQ ID NO: 4675949 - DNA, 25 bp, Homo sapien
tacaggtcagacttaggcctggtgg

SEQ ID NO: 4675950 - DNA, 25 bp, Homo sapien
gtgaccaccggcaaaggcctgaact

SEQ ID NO: 4675951 - DNA, 25 bp, Homo sapien
gaggctggtctaggaaggcatcaca

SEQ ID NO: 4675952 - DNA, 25 bp, Homo sapien
agcggctaagtagaattgctcattc

SEQ ID NO: 4675953 - DNA, 25 bp, Homo sapien
tgcagcggctaagtagaattgctca

SEQ ID NO: 4675954 - DNA, 25 bp, Homo sapien
gcagcggctaagtagaattgctcat

SEQ ID NO: 4675955 - DNA, 25 bp, Homo sapien
ctgcagcggctaagtagaattgctc

SEQ ID NO: 4675956 - DNA, 25 bp, Homo sapien
gaaaggaagtgtccacaaatagaca

SEQ ID NO: 4675957 - DNA, 25 bp, Homo sapien
tgttgtcagaactgtgctgtctctc

SEQ ID NO: 4675958 - DNA, 25 bp, Homo sapien
tcttccactcttaagctccaaacat

SEQ ID NO: 4675959 - DNA, 25 bp, Homo sapien
caaacaccacaaaagatatgacaag

SEQ ID NO: 4675960 - DNA, 25 bp, Homo sapien
tgacaaggaaaccataatctggtgg

SEQ ID NO: 4675961 - DNA, 25 bp, Homo sapien
catttcctccgaaatggatgtcaaa

SEQ ID NO: 4675962 - DNA, 25 bp, Homo sapien
gacaaaatccccaggatccttgtga

SEQ ID NO: 4675963 - DNA, 25 bp, Homo sapien
ctccgaaatggatgtcaaagacaaa

SEQ ID NO: 4675964 - DNA, 25 bp, Homo sapien
ccaggattaagtatgctaaactgtt

SEQ ID NO: 4675965 - DNA, 25 bp, Homo sapien
tgttgttgaggacatagttcactac

SEQ ID NO: 4675966 - DNA, 25 bp, Homo sapien
gaaattaaatgtgtaccccatctct

SEQ ID NO: 4675967 - DNA, 25 bp, Homo sapien
tatcctgtctctggtaaaaagaaac

SEQ ID NO: 4675968 - DNA, 25 bp, Homo sapien
tctcgatggtattggtgaatctcac

SEQ ID NO: 4675969 - DNA, 25 bp, Homo sapien
cagatgtgcaaagtgaaagacccag

SEQ ID NO: 4675970 - DNA, 25 bp, Homo sapien
tgagagttacatgggttcacaacct

SEQ ID NO: 4675971 - DNA, 25 bp, Homo sapien
tagagatagtaaatcagcattggtc

SEQ ID NO: 4675972 - DNA, 25 bp, Homo sapien
caataccccaaggatcccgtgatag

SEQ ID NO: 4675973 - DNA, 25 bp, Homo sapien
gatcccgtgatagtacttggttatg

SEQ ID NO: 4675974 - DNA, 25 bp, Homo sapien
tggtgggcacgagcaatactcaggc

SEQ ID NO: 4675975 - DNA, 25 bp, Homo sapien
agccaagcacagtttgctgggctga

SEQ ID NO: 4675976 - DNA, 25 bp, Homo sapien
tagggaacaggcatggaacactctt

SEQ ID NO: 4675977 - DNA, 25 bp, Homo sapien
gagatattggaacaacctgcctgtg

SEQ ID NO: 4675978 - DNA, 25 bp, Homo sapien
tgtggattcaaccagactcaggcca

SEQ ID NO: 4675979 - DNA, 25 bp, Homo sapien
gacattgggataacctgcctgcgaa

SEQ ID NO: 4675980 - DNA, 25 bp, Homo sapien
tatttgtttgcatgggcgtatcctg

SEQ ID NO: 4675981 - DNA, 25 bp, Homo sapien
cgtatcctgaatgcgccaaagtaaa

SEQ ID NO: 4675982 - DNA, 25 bp, Homo sapien
tgcctccatgttgttgcgagcccaa

SEQ ID NO: 4675983 - DNA, 25 bp, Homo sapien
tgcacactcagtagccaccttggct

SEQ ID NO: 4675984 - DNA, 25 bp, Homo sapien
tgcagtgtgtagcagagggctagtc

SEQ ID NO: 4675985 - DNA, 25 bp, Homo sapien
gcagtgtgtagcagagggctagtca

SEQ ID NO: 4675986 - DNA, 25 bp, Homo sapien
cagtgtgtagcagagggctagtcat

SEQ ID NO: 4675987 - DNA, 25 bp, Homo sapien
gcggagacagtaagttctctgagag

SEQ ID NO: 4675988 - DNA, 25 bp, Homo sapien
ggtgttttctctttgcggagacagt

SEQ ID NO: 4675989 - DNA, 25 bp, Homo sapien
caggtgttttctctttgcggagaca

SEQ ID NO: 4675990 - DNA, 25 bp, Homo sapien
tttgcggagacagtaagttctctga

SEQ ID NO: 4675991 - DNA, 25 bp, Homo sapien
gggcaggagttgcaactctgtcttc

SEQ ID NO: 4675992 - DNA, 25 bp, Homo sapien
gaatgaaggtggagattggcaactc

SEQ ID NO: 4675993 - DNA, 25 bp, Homo sapien
ggagttgcaactctgtcttcaagaa

SEQ ID NO: 4675994 - DNA, 25 bp, Homo sapien
tctgaacctccaccccaactggagt

SEQ ID NO: 4675995 - DNA, 25 bp, Homo sapien
ttccagagcatgcttgctgggcaat

SEQ ID NO: 4675996 - DNA, 25 bp, Homo sapien
tgggtctgaaattccagagcatgct

SEQ ID NO: 4675997 - DNA, 25 bp, Homo sapien
ggtctgaaattccagagcatgcttg

SEQ ID NO: 4675998 - DNA, 25 bp, Homo sapien
agcatgcttgctgggcaattttatc

SEQ ID NO: 4675999 - DNA, 25 bp, Homo sapien
caaggtcttgcaagctctctgagac

SEQ ID NO: 4676000 - DNA, 25 bp, Homo sapien
aaggtcttgcaagctctctgagaca

SEQ ID NO: 4676001 - DNA, 25 bp, Homo sapien
ccaaaaccaaccacattgagtgatg

SEQ ID NO: 4676002 - DNA, 25 bp, Homo sapien
cattttggtaacgaggtgactggat

SEQ ID NO: 4676003 - DNA, 25 bp, Homo sapien
ctattccctctaggctacttgcaag

SEQ ID NO: 4676004 - DNA, 25 bp, Homo sapien
gtgaataccaggtttctcattttgg

SEQ ID NO: 4676005 - DNA, 25 bp, Homo sapien
agagaaataaaaggttgaggtatct

SEQ ID NO: 4676006 - DNA, 25 bp, Homo sapien
gagagaaataaaaggttgaggtatc

SEQ ID NO: 4676007 - DNA, 25 bp, Homo sapien
ctgagagaaataaaaggttgaggta

SEQ ID NO: 4676008 - DNA, 25 bp, Homo sapien
tgagagaaataaaaggttgaggtat

SEQ ID NO: 4676009 - DNA, 25 bp, Homo sapien
ccccagtagctctatttcaccaagt

SEQ ID NO: 4676010 - DNA, 25 bp, Homo sapien
ctcaaatagcaaagattttagctca

SEQ ID NO: 4676011 - DNA, 25 bp, Homo sapien
tagttatcaagttccaatagggcta

SEQ ID NO: 4676012 - DNA, 25 bp, Homo sapien
cttcatatcacaaatttggacctca

SEQ ID NO: 4676013 - DNA, 25 bp, Homo sapien
agcatctccagtaatcttccgtgat

SEQ ID NO: 4676014 - DNA, 25 bp, Homo sapien
cactattattttgcagcatctccag

SEQ ID NO: 4676015 - DNA, 25 bp, Homo sapien
catttataacagcatgtctgatgac

SEQ ID NO: 4676016 - DNA, 25 bp, Homo sapien
cgggaaagggtacttctgtgaagca

SEQ ID NO: 4676017 - DNA, 25 bp, Homo sapien
ctatccttggaaattacagatgcta

SEQ ID NO: 4676018 - DNA, 25 bp, Homo sapien
tatccttggaaattacagatgctac

SEQ ID NO: 4676019 - DNA, 25 bp, Homo sapien
tagactttaggccactcttggttaa

SEQ ID NO: 4676020 - DNA, 25 bp, Homo sapien
tcataatgactcaatggctgcagta

SEQ ID NO: 4676021 - DNA, 25 bp, Homo sapien
cataatgactcaatggctgcagtag

SEQ ID NO: 4676022 - DNA, 25 bp, Homo sapien
ggctgcagtagactttaggccactc

SEQ ID NO: 4676023 - DNA, 25 bp, Homo sapien
tctgtagattccctatgacctttct

SEQ ID NO: 4676024 - DNA, 25 bp, Homo sapien
tagctggtcaaaacgtgaattcaaa

SEQ ID NO: 4676025 - DNA, 25 bp, Homo sapien
cagcaacagaaatccctccaagggt

SEQ ID NO: 4676026 - DNA, 25 bp, Homo sapien
gagcattcattgtaaagttcaccta

SEQ ID NO: 4676027 - DNA, 25 bp, Homo sapien
taatgaagaaagtggagagtcagac

SEQ ID NO: 4676028 - DNA, 25 bp, Homo sapien
cagataaatatcagagtggaaagac

SEQ ID NO: 4676029 - DNA, 25 bp, Homo sapien
aaagacaccaggatctcactaaagc

SEQ ID NO: 4676030 - DNA, 25 bp, Homo sapien
tccatctgcagttactaatgaagaa

SEQ ID NO: 4676031 - DNA, 25 bp, Homo sapien
cacacaggtaacatgaacagggccg

SEQ ID NO: 4676032 - DNA, 25 bp, Homo sapien
acacacaggtaacatgaacagggcc

SEQ ID NO: 4676033 - DNA, 25 bp, Homo sapien
agggccggggccatctcaggatcat

SEQ ID NO: 4676034 - DNA, 25 bp, Homo sapien
cacaggtaacatgaacagggccggg

SEQ ID NO: 4676035 - DNA, 25 bp, Homo sapien
atttttggatgtccaaatggtttct

SEQ ID NO: 4676036 - DNA, 25 bp, Homo sapien
tttggatgtccaaatggtttcttcc

SEQ ID NO: 4676037 - DNA, 25 bp, Homo sapien
tatttttggatgtccaaatggtttc

SEQ ID NO: 4676038 - DNA, 25 bp, Homo sapien
ttttggatgtccaaatggtttcttc

SEQ ID NO: 4676039 - DNA, 25 bp, Homo sapien
gaatagattccgtgtcagagcaaaa

SEQ ID NO: 4676040 - DNA, 25 bp, Homo sapien
cagccaacctgtatatgaaatagga

SEQ ID NO: 4676041 - DNA, 25 bp, Homo sapien
caggaatacgaaatagcagttgagg

SEQ ID NO: 4676042 - DNA, 25 bp, Homo sapien
caaatgggagaatggttgtcagtac

SEQ ID NO: 4676043 - DNA, 25 bp, Homo sapien
caagtaaagccgtcattttggaaga

SEQ ID NO: 4676044 - DNA, 25 bp, Homo sapien
tgaacattacagaaacggcacttcc

SEQ ID NO: 4676045 - DNA, 25 bp, Homo sapien
cctccagtggaaggaacaaggtggt

SEQ ID NO: 4676046 - DNA, 25 bp, Homo sapien
ggtggttgggaatcagcattaccaa

SEQ ID NO: 4676047 - DNA, 25 bp, Homo sapien
tcttcaagtgttgtaaagcttttgg

SEQ ID NO: 4676048 - DNA, 25 bp, Homo sapien
agcttttggaagtcaagctattggc

SEQ ID NO: 4676049 - DNA, 25 bp, Homo sapien
gtcaagctattggctcggccacctg

SEQ ID NO: 4676050 - DNA, 25 bp, Homo sapien
gtaaagcttttggaagtcaagctat

SEQ ID NO: 4676051 - DNA, 25 bp, Homo sapien
tccatcgtaattgcctgagctgcca

SEQ ID NO: 4676052 - DNA, 25 bp, Homo sapien
ttgttccatcggatggaaagcaggc

SEQ ID NO: 4676053 - DNA, 25 bp, Homo sapien
tgagctgccagttgttccatcggat

SEQ ID NO: 4676054 - DNA, 25 bp, Homo sapien
ctgtgtatatttcgaagagggtgcc

SEQ ID NO: 4676055 - DNA, 25 bp, Homo sapien
acggatgtatctacgaatggtaacc

SEQ ID NO: 4676056 - DNA, 25 bp, Homo sapien
tacgaatggtaacctcagagagatg

SEQ ID NO: 4676057 - DNA, 25 bp, Homo sapien
cctcagagagatgcctagcaaagcc

SEQ ID NO: 4676058 - DNA, 25 bp, Homo sapien
aaaatttcaacggatgtatctacga

SEQ ID NO: 4676059 - DNA, 25 bp, Homo sapien
tccggcccattctgatggaggtgac

SEQ ID NO: 4676060 - DNA, 25 bp, Homo sapien
ctccggcccattctgatggaggtga

SEQ ID NO: 4676061 - DNA, 25 bp, Homo sapien
caccccaaagcttccttcgagcttc

SEQ ID NO: 4676062 - DNA, 25 bp, Homo sapien
agtaaattgtttagatgatactccc

SEQ ID NO: 4676063 - DNA, 25 bp, Homo sapien
ttgtttagatgatactccctctctt

SEQ ID NO: 4676064 - DNA, 25 bp, Homo sapien
ttcgagcttccttcggtgccagtgc

SEQ ID NO: 4676065 - DNA, 25 bp, Homo sapien
gaagtctcttcaacccagagacacg

SEQ ID NO: 4676066 - DNA, 25 bp, Homo sapien
tccaaaggcttgcaggactcctgaa

SEQ ID NO: 4676067 - DNA, 25 bp, Homo sapien
agagacacgttgagcctgagccgag

SEQ ID NO: 4676068 - DNA, 25 bp, Homo sapien
gagctgaaggctcacagatgtggct

SEQ ID NO: 4676069 - DNA, 25 bp, Homo sapien
actgacagatgtgatggtctaggtt

SEQ ID NO: 4676070 - DNA, 25 bp, Homo sapien
cacagatggctttaattatttgggc

SEQ ID NO: 4676071 - DNA, 25 bp, Homo sapien
tgtacactgattctgagaagtgttg

SEQ ID NO: 4676072 - DNA, 25 bp, Homo sapien
ctatggagctgtacactgattctga

SEQ ID NO: 4676073 - DNA, 25 bp, Homo sapien
gccattcaagtgtgcttcactccag

SEQ ID NO: 4676074 - DNA, 25 bp, Homo sapien
aggtcaagtagttgacaaggttcgg

SEQ ID NO: 4676075 - DNA, 25 bp, Homo sapien
gcctgagttcttaaccatgtgttgt

SEQ ID NO: 4676076 - DNA, 25 bp, Homo sapien
ggttcggactgccattcaagtgtgc

SEQ ID NO: 4676077 - DNA, 25 bp, Homo sapien
tggtcaaaagcattgatatgtttag

SEQ ID NO: 4676078 - DNA, 25 bp, Homo sapien
gtgcatgtaagactttttcccaggt

SEQ ID NO: 4676079 - DNA, 25 bp, Homo sapien
tgatatgtttagtgcatgtaagact

SEQ ID NO: 4676080 - DNA, 25 bp, Homo sapien
caaaagcattgatatgtttagtgca

SEQ ID NO: 4676081 - DNA, 25 bp, Homo sapien
gggctctgtcaatcaagtgactgat

SEQ ID NO: 4676082 - DNA, 25 bp, Homo sapien
tacaaaatgcaccaggtcattaggg

SEQ ID NO: 4676083 - DNA, 25 bp, Homo sapien
ggctggtgaataaagaaggcacttt

SEQ ID NO: 4676084 - DNA, 25 bp, Homo sapien
tgactgattcctccagatatggctg

SEQ ID NO: 4676085 - DNA, 25 bp, Homo sapien
tacacagacaggttaactctggttt

SEQ ID NO: 4676086 - DNA, 25 bp, Homo sapien
acacagacaggttaactctggtttt

SEQ ID NO: 4676087 - DNA, 25 bp, Homo sapien
tgtacacagacaggttaactctggt

SEQ ID NO: 4676088 - DNA, 25 bp, Homo sapien
atgtacacagacaggttaactctgg

SEQ ID NO: 4676089 - DNA, 25 bp, Homo sapien
catggccccaatagtttctgagagc

SEQ ID NO: 4676090 - DNA, 25 bp, Homo sapien
taattcaatcacctatgaccggtcc

SEQ ID NO: 4676091 - DNA, 25 bp, Homo sapien
cttcctggtatgataaagtgttgcc

SEQ ID NO: 4676092 - DNA, 25 bp, Homo sapien
gacctcttagtctttcatggcccca

SEQ ID NO: 4676093 - DNA, 25 bp, Homo sapien
gaaaaagatccactgggctttttca

SEQ ID NO: 4676094 - DNA, 25 bp, Homo sapien
gggatcgaagaaccctgattggaaa

SEQ ID NO: 4676095 - DNA, 25 bp, Homo sapien
aagaaccctgattggaaagttcgag

SEQ ID NO: 4676096 - DNA, 25 bp, Homo sapien
tcatgcagatgatgcacggagcaga

SEQ ID NO: 4676097 - DNA, 25 bp, Homo sapien
aaaatacagcccaggtgaccagcgt

SEQ ID NO: 4676098 - DNA, 25 bp, Homo sapien
ttctggctgacactgagcaggtgta

SEQ ID NO: 4676099 - DNA, 25 bp, Homo sapien
caggtgtatggcatccgggccaagc

SEQ ID NO: 4676100 - DNA, 25 bp, Homo sapien
cccgagacaaggcaatatgtgagct

SEQ ID NO: 4676101 - DNA, 25 bp, Homo sapien
cagaatctttacttatttgtcccca

SEQ ID NO: 4676102 - DNA, 25 bp, Homo sapien
tgcactgccagattttcgattctgg

SEQ ID NO: 4676103 - DNA, 25 bp, Homo sapien
tccattctcaattcaatggataggc

SEQ ID NO: 4676104 - DNA, 25 bp, Homo sapien
tctttacttatttgtccccatggca

SEQ ID NO: 4676105 - DNA, 25 bp, Homo sapien
tggtttagcgtcttcttgtccattt

SEQ ID NO: 4676106 - DNA, 25 bp, Homo sapien
ttagtggtttagcgtcttcttgtcc

SEQ ID NO: 4676107 - DNA, 25 bp, Homo sapien
agtggtttagcgtcttcttgtccat

SEQ ID NO: 4676108 - DNA, 25 bp, Homo sapien
tagtggtttagcgtcttcttgtcca

SEQ ID NO: 4676109 - DNA, 25 bp, Homo sapien
cagtgggaacaacttgtctctgctc

SEQ ID NO: 4676110 - DNA, 25 bp, Homo sapien
gctcagtgggaacaacttgtctctg

SEQ ID NO: 4676111 - DNA, 25 bp, Homo sapien
tgggaacaacttgtctctgctccag

SEQ ID NO: 4676112 - DNA, 25 bp, Homo sapien
ctgtaatctgaggagagctcagtgg

SEQ ID NO: 4676113 - DNA, 25 bp, Homo sapien
tcaatgccaagttccctttcatcat

SEQ ID NO: 4676114 - DNA, 25 bp, Homo sapien
aaaagcagcaaggtcaatgccaagt

SEQ ID NO: 4676115 - DNA, 25 bp, Homo sapien
tgaaaagcagcaaggtcaatgccaa

SEQ ID NO: 4676116 - DNA, 25 bp, Homo sapien
caatgccaagttccctttcatcatc

SEQ ID NO: 4676117 - DNA, 25 bp, Homo sapien
caatctcttcacaagctccaaaata

SEQ ID NO: 4676118 - DNA, 25 bp, Homo sapien
tacaaacgtcactttcactttattg

SEQ ID NO: 4676119 - DNA, 25 bp, Homo sapien
tctgctgtgctgttaaaaatacccc

SEQ ID NO: 4676120 - DNA, 25 bp, Homo sapien
taccccagcatgaaaatatagagca

SEQ ID NO: 4676121 - DNA, 25 bp, Homo sapien
ccttttaagcttcccatcaggaatc

SEQ ID NO: 4676122 - DNA, 25 bp, Homo sapien
atatgatcctctggatggttcccct

SEQ ID NO: 4676123 - DNA, 25 bp, Homo sapien
ttttaagcttcccatcaggaatcca

SEQ ID NO: 4676124 - DNA, 25 bp, Homo sapien
gccttttaagcttcccatcaggaat

SEQ ID NO: 4676125 - DNA, 25 bp, Homo sapien
ccatcaataaaaggccctgtgcttg

SEQ ID NO: 4676126 - DNA, 25 bp, Homo sapien
ggacaggcttctcctatctcggatg

SEQ ID NO: 4676127 - DNA, 25 bp, Homo sapien
actccacatgctctttgagtgtctt

SEQ ID NO: 4676128 - DNA, 25 bp, Homo sapien
tttcttcagactcaccaagggcagc

SEQ ID NO: 4676129 - DNA, 25 bp, Homo sapien
tgcacgcttcctagattgtactcac

SEQ ID NO: 4676130 - DNA, 25 bp, Homo sapien
attgtactcacccttttcactgagg

SEQ ID NO: 4676131 - DNA, 25 bp, Homo sapien
tctgctctatttgttcccgcagcct

SEQ ID NO: 4676132 - DNA, 25 bp, Homo sapien
tgtgtatccacctttgcagctgagt

SEQ ID NO: 4676133 - DNA, 25 bp, Homo sapien
acttctctaattcagaagtgaccaa

SEQ ID NO: 4676134 - DNA, 25 bp, Homo sapien
aacttctctaattcagaagtgacca

SEQ ID NO: 4676135 - DNA, 25 bp, Homo sapien
tattccctgtgagttcattagggac

SEQ ID NO: 4676136 - DNA, 25 bp, Homo sapien
tgtgagttcattagggactctgtac

SEQ ID NO: 4676137 - DNA, 25 bp, Homo sapien
ccctgtgagttcattagggactctg

SEQ ID NO: 4676138 - DNA, 25 bp, Homo sapien
tctattccctgtgagttcattaggg

SEQ ID NO: 4676139 - DNA, 25 bp, Homo sapien
acaggtatgacagtccacactttcc

SEQ ID NO: 4676140 - DNA, 25 bp, Homo sapien
ccacaggtatgacagtccacacttt

SEQ ID NO: 4676141 - DNA, 25 bp, Homo sapien
cacaggtatgacagtccacactttc

SEQ ID NO: 4676142 - DNA, 25 bp, Homo sapien
gaactgttgagtgccaagctccaag

SEQ ID NO: 4676143 - DNA, 25 bp, Homo sapien
gttgtgatgcttcgtcagaacttgc

SEQ ID NO: 4676144 - DNA, 25 bp, Homo sapien
tggctgctacagtctgaactgttga

SEQ ID NO: 4676145 - DNA, 25 bp, Homo sapien
catgcattgtgtgtagattccatca

SEQ ID NO: 4676146 - DNA, 25 bp, Homo sapien
ctcttatagctactttctgctttaa

SEQ ID NO: 4676147 - DNA, 25 bp, Homo sapien
catctgtgttggatgctcctgccat

SEQ ID NO: 4676148 - DNA, 25 bp, Homo sapien
cttcatctgtgttggatgctcctgc

SEQ ID NO: 4676149 - DNA, 25 bp, Homo sapien
ttcatctgtgttggatgctcctgcc

SEQ ID NO: 4676150 - DNA, 25 bp, Homo sapien
tcatctgtgttggatgctcctgcca

SEQ ID NO: 4676151 - DNA, 25 bp, Homo sapien
cactctccctggctgatgtgaggtg

SEQ ID NO: 4676152 - DNA, 25 bp, Homo sapien
tctccctggctgatgtgaggtggct

SEQ ID NO: 4676153 - DNA, 25 bp, Homo sapien
ctgagcatgcaggactgttgcccag

SEQ ID NO: 4676154 - DNA, 25 bp, Homo sapien
cctggctgatgtgaggtggcttcca

SEQ ID NO: 4676155 - DNA, 25 bp, Homo sapien
agaccccgagcgctagatggttttg

SEQ ID NO: 4676156 - DNA, 25 bp, Homo sapien
accccgagcgctagatggttttgcc

SEQ ID NO: 4676157 - DNA, 25 bp, Homo sapien
caaagaccccgagcgctagatggtt

SEQ ID NO: 4676158 - DNA, 25 bp, Homo sapien
tgcaaagaccccgagcgctagatgg

SEQ ID NO: 4676159 - DNA, 25 bp, Homo sapien
agccaagaggatgctgccagcatgg

SEQ ID NO: 4676160 - DNA, 25 bp, Homo sapien
gcgaccaggccaggttgctccatct

SEQ ID NO: 4676161 - DNA, 25 bp, Homo sapien
actcagccgctgagaggttctggca

SEQ ID NO: 4676162 - DNA, 25 bp, Homo sapien
gctgcagctgcgaccaggccaggtt

SEQ ID NO: 4676163 - DNA, 25 bp, Homo sapien
ctgactcagccgctgagaggttctg

SEQ ID NO: 4676164 - DNA, 25 bp, Homo sapien
tttgacctctacgtctgtttcccag

SEQ ID NO: 4676165 - DNA, 25 bp, Homo sapien
ctttgacctctacgtctgtttccca

SEQ ID NO: 4676166 - DNA, 25 bp, Homo sapien
atgaaagaggctgcaatgcctttga

SEQ ID NO: 4676167 - DNA, 25 bp, Homo sapien
tcagcaatcggcagtgatgaaagag

SEQ ID NO: 4676168 - DNA, 25 bp, Homo sapien
gcacatggttggcatcagcaatcgg

SEQ ID NO: 4676169 - DNA, 25 bp, Homo sapien
taaggtgacgtattaagcacttggc

SEQ ID NO: 4676170 - DNA, 25 bp, Homo sapien
atttgtctgttttgcgatgttgaat

SEQ ID NO: 4676171 - DNA, 25 bp, Homo sapien
tggttcttctactgcctctgctttt

SEQ ID NO: 4676172 - DNA, 25 bp, Homo sapien
tttgtctgttttgcgatgttgaatt

SEQ ID NO: 4676173 - DNA, 25 bp, Homo sapien
ttatggttcttctactgcctctgct

SEQ ID NO: 4676174 - DNA, 25 bp, Homo sapien
gatgttaatagagcattatcctctt

SEQ ID NO: 4676175 - DNA, 25 bp, Homo sapien
gttaatagagcattatcctcttctg

SEQ ID NO: 4676176 - DNA, 25 bp, Homo sapien
ctgaacaagatgttaatagagcatt

SEQ ID NO: 4676177 - DNA, 25 bp, Homo sapien
caagatgttaatagagcattatcct

SEQ ID NO: 4676178 - DNA, 25 bp, Homo sapien
tcctccagaccatgagcagactcag

SEQ ID NO: 4676179 - DNA, 25 bp, Homo sapien
gatcactagctactgccatgttctt

SEQ ID NO: 4676180 - DNA, 25 bp, Homo sapien
cctgcctgagatcactagctactgc

SEQ ID NO: 4676181 - DNA, 25 bp, Homo sapien
catccatgattccaacctgcctgag

SEQ ID NO: 4676182 - DNA, 25 bp, Homo sapien
ggatttccatttgacactagagctg

SEQ ID NO: 4676183 - DNA, 25 bp, Homo sapien
tttccatttgacactagagctgttt

SEQ ID NO: 4676184 - DNA, 25 bp, Homo sapien
gatttccatttgacactagagctgt

SEQ ID NO: 4676185 - DNA, 25 bp, Homo sapien
tggatttccatttgacactagagct

SEQ ID NO: 4676186 - DNA, 25 bp, Homo sapien
aggcattatgtcctgggccccctct

SEQ ID NO: 4676187 - DNA, 25 bp, Homo sapien
aggcacaggcattatgtcctgggcc

SEQ ID NO: 4676188 - DNA, 25 bp, Homo sapien
ccctctcccaagtcggcggcctgta

SEQ ID NO: 4676189 - DNA, 25 bp, Homo sapien
ctcccaagtcggcggcctgtacaaa

SEQ ID NO: 4676190 - DNA, 25 bp, Homo sapien
cagatccttgttgctggtaatttag

SEQ ID NO: 4676191 - DNA, 25 bp, Homo sapien
tgctggtaatttagcagcagttggg

SEQ ID NO: 4676192 - DNA, 25 bp, Homo sapien
tagtcgtcttgaaagtcagggcact

SEQ ID NO: 4676193 - DNA, 25 bp, Homo sapien
ggtgttttcatagtcgtcttgaaag

SEQ ID NO: 4676194 - DNA, 25 bp, Homo sapien
gggtgtcaagcaacaagctgatact

SEQ ID NO: 4676195 - DNA, 25 bp, Homo sapien
gataggcactgctcttgtcaggaaa

SEQ ID NO: 4676196 - DNA, 25 bp, Homo sapien
aagcaacaagctgatactggagaga

SEQ ID NO: 4676197 - DNA, 25 bp, Homo sapien
agtcaaggagaaatacgattgcctc

SEQ ID NO: 4676198 - DNA, 25 bp, Homo sapien
cagctgtacccatagaactctcttt

SEQ ID NO: 4676199 - DNA, 25 bp, Homo sapien
aaacgtaagccccactctcagtact

SEQ ID NO: 4676200 - DNA, 25 bp, Homo sapien
taagccccactctcagtactgtgct

SEQ ID NO: 4676201 - DNA, 25 bp, Homo sapien
tgagaaggcagctgtacccatagaa

SEQ ID NO: 4676202 - DNA, 25 bp, Homo sapien
tgactagattggatgggaatggcat

SEQ ID NO: 4676203 - DNA, 25 bp, Homo sapien
tcacactggtgtgggttgactagat

SEQ ID NO: 4676204 - DNA, 25 bp, Homo sapien
ttggatgggaatggcataatcactt

SEQ ID NO: 4676205 - DNA, 25 bp, Homo sapien
acactggtgtgggttgactagattg

SEQ ID NO: 4676206 - DNA, 25 bp, Homo sapien
cctggatagtgatgtaaccatgaag

SEQ ID NO: 4676207 - DNA, 25 bp, Homo sapien
agtgatgtaaccatgaagatggcag

SEQ ID NO: 4676208 - DNA, 25 bp, Homo sapien
ttcacagtcaccctggatagtgatg

SEQ ID NO: 4676209 - DNA, 25 bp, Homo sapien
tgcttcacagtcaccctggatagtg

SEQ ID NO: 4676210 - DNA, 25 bp, Homo sapien
ctatgtcctgagaaaagccaaccat

SEQ ID NO: 4676211 - DNA, 25 bp, Homo sapien
tctatgtcctgagaaaagccaacca

SEQ ID NO: 4676212 - DNA, 25 bp, Homo sapien
tgtatctatgtcctgagaaaagcca

SEQ ID NO: 4676213 - DNA, 25 bp, Homo sapien
tatctatgtcctgagaaaagccaac

SEQ ID NO: 4676214 - DNA, 25 bp, Homo sapien
tgtcagacacatttctcagtgcctg

SEQ ID NO: 4676215 - DNA, 25 bp, Homo sapien
gaaagaggttccactacatgacaca

SEQ ID NO: 4676216 - DNA, 25 bp, Homo sapien
ccactgtccttacttttgctagaga

SEQ ID NO: 4676217 - DNA, 25 bp, Homo sapien
cagtgcctgttcttgataccccttt

SEQ ID NO: 4676218 - DNA, 25 bp, Homo sapien
gagtcttattcttcaggttccgcct

SEQ ID NO: 4676219 - DNA, 25 bp, Homo sapien
cagccatcatattgtcagggtaagg

SEQ ID NO: 4676220 - DNA, 25 bp, Homo sapien
tgaaattgtcacctaacttgggcct

SEQ ID NO: 4676221 - DNA, 25 bp, Homo sapien
tgcttggaacatgcaagacactcca

SEQ ID NO: 4676222 - DNA, 25 bp, Homo sapien
cttccaatacgccacaaccataggc

SEQ ID NO: 4676223 - DNA, 25 bp, Homo sapien
tgccacagccagatgagcgttccat

SEQ ID NO: 4676224 - DNA, 25 bp, Homo sapien
taaaactgctactttgtgttctaaa

SEQ ID NO: 4676225 - DNA, 25 bp, Homo sapien
ttctctcattatttaaaactgctac

SEQ ID NO: 4676226 - DNA, 25 bp, Homo sapien
gccagcctcgtttgagagcttccag

SEQ ID NO: 4676227 - DNA, 25 bp, Homo sapien
gatgcagatgtttcatgcagaagaa

SEQ ID NO: 4676228 - DNA, 25 bp, Homo sapien
tcgtaatgaatagcttctagggcac

SEQ ID NO: 4676229 - DNA, 25 bp, Homo sapien
aattaggtcagagaccacttcaatt

SEQ ID NO: 4676230 - DNA, 25 bp, Homo sapien
tcaataaggaggcaacaccgagtcc

SEQ ID NO: 4676231 - DNA, 25 bp, Homo sapien
gagccaagtggaatacatcaaagag

SEQ ID NO: 4676232 - DNA, 25 bp, Homo sapien
gcaaaggctggaaatgtctttcaat

SEQ ID NO: 4676233 - DNA, 25 bp, Homo sapien
gagtccatgtgatacaatcccgtag

SEQ ID NO: 4676234 - DNA, 25 bp, Homo sapien
gagcacattgagtgattagcttggg

SEQ ID NO: 4676235 - DNA, 25 bp, Homo sapien
tgtttctattttaggagcacattga

SEQ ID NO: 4676236 - DNA, 25 bp, Homo sapien
gagtgattagcttgggtaacagtaa

SEQ ID NO: 4676237 - DNA, 25 bp, Homo sapien
ttgggtaacagtaacatcgcattac

SEQ ID NO: 4676238 - DNA, 25 bp, Homo sapien
aggcaaatgccacagatttcagttg

SEQ ID NO: 4676239 - DNA, 25 bp, Homo sapien
caaatgccacagatttcagttggaa

SEQ ID NO: 4676240 - DNA, 25 bp, Homo sapien
aatgccacagatttcagttggaaaa

SEQ ID NO: 4676241 - DNA, 25 bp, Homo sapien
gcaaatgccacagatttcagttgga

SEQ ID NO: 4676242 - DNA, 25 bp, Homo sapien
ccaatggcttgaaggaccaaataag

SEQ ID NO: 4676243 - DNA, 25 bp, Homo sapien
aatggcttgaaggaccaaataagat

SEQ ID NO: 4676244 - DNA, 25 bp, Homo sapien
caatggcttgaaggaccaaataaga

SEQ ID NO: 4676245 - DNA, 25 bp, Homo sapien
tggcttgaaggaccaaataagatga

SEQ ID NO: 4676246 - DNA, 25 bp, Homo sapien
ttaacgaagacggtgcagcaaacct

SEQ ID NO: 4676247 - DNA, 25 bp, Homo sapien
gaacagcagcacaccattaacgaag

SEQ ID NO: 4676248 - DNA, 25 bp, Homo sapien
tccacctaggttgggagagcttaag

SEQ ID NO: 4676249 - DNA, 25 bp, Homo sapien
tctcagtggagggtgtcaatcagaa

SEQ ID NO: 4676250 - DNA, 25 bp, Homo sapien
gacacaaaagacaccaccgttattc

SEQ ID NO: 4676251 - DNA, 25 bp, Homo sapien
agacaccaccgttattcacataatg

SEQ ID NO: 4676252 - DNA, 25 bp, Homo sapien
caaaagacaccaccgttattcacat

SEQ ID NO: 4676253 - DNA, 25 bp, Homo sapien
ttcagggggtgggacacaaaagaca

SEQ ID NO: 4676254 - DNA, 25 bp, Homo sapien
tcatctaaattcgtgggacagagga

SEQ ID NO: 4676255 - DNA, 25 bp, Homo sapien
tcaggcgaaaaggcttttcaaaggc

SEQ ID NO: 4676256 - DNA, 25 bp, Homo sapien
ctaaattcgtgggacagaggagtca

SEQ ID NO: 4676257 - DNA, 25 bp, Homo sapien
tcagtgagtgcgcatttctcaattc

SEQ ID NO: 4676258 - DNA, 25 bp, Homo sapien
tgggcaaaaggaggctgttgatcac

SEQ ID NO: 4676259 - DNA, 25 bp, Homo sapien
tctcctggcataacgagaactaggg

SEQ ID NO: 4676260 - DNA, 25 bp, Homo sapien
gaaccagatcaccactgacctcaga

SEQ ID NO: 4676261 - DNA, 25 bp, Homo sapien
tagtctcttcttgttggagaaccag

SEQ ID NO: 4676262 - DNA, 25 bp, Homo sapien
tgactgaaggcttgcattgtgcact

SEQ ID NO: 4676263 - DNA, 25 bp, Homo sapien
agggagagctaaccagaaaacagca

SEQ ID NO: 4676264 - DNA, 25 bp, Homo sapien
gctgtgctattgtccggcacacaaa

SEQ ID NO: 4676265 - DNA, 25 bp, Homo sapien
tgcactcacataaagggagagctaa

SEQ ID NO: 4676266 - DNA, 25 bp, Homo sapien
ccactgtggactgcggctttgggat

SEQ ID NO: 4676267 - DNA, 25 bp, Homo sapien
tatgtgaccatcactctctagtgcc

SEQ ID NO: 4676268 - DNA, 25 bp, Homo sapien
ggatcaagcctaacacaaggctcca

SEQ ID NO: 4676269 - DNA, 25 bp, Homo sapien
gccttcactgattccccattgttga

SEQ ID NO: 4676270 - DNA, 25 bp, Homo sapien
tagtctccagttgacagctatcaag

SEQ ID NO: 4676271 - DNA, 25 bp, Homo sapien
ccttttgttctcagatagtctccag

SEQ ID NO: 4676272 - DNA, 25 bp, Homo sapien
gacagctatcaaggttgttctaatt

SEQ ID NO: 4676273 - DNA, 25 bp, Homo sapien
ccagtgctggtttgcaataatgtcc

SEQ ID NO: 4676274 - DNA, 25 bp, Homo sapien
tgcactcttttttgtccagtgcctg

SEQ ID NO: 4676275 - DNA, 25 bp, Homo sapien
tccagtgcctgcaaatgatttcttc

SEQ ID NO: 4676276 - DNA, 25 bp, Homo sapien
gtgtgtgtcctgctctcaagattat

SEQ ID NO: 4676277 - DNA, 25 bp, Homo sapien
tctcaagattatagttttgcactct

SEQ ID NO: 4676278 - DNA, 25 bp, Homo sapien
gagagtatgcaaagaagccttgtca

SEQ ID NO: 4676279 - DNA, 25 bp, Homo sapien
ttgagagtatgcaaagaagccttgt

SEQ ID NO: 4676280 - DNA, 25 bp, Homo sapien
gagtatgcaaagaagccttgtcatc

SEQ ID NO: 4676281 - DNA, 25 bp, Homo sapien
tgagagtatgcaaagaagccttgtc

SEQ ID NO: 4676282 - DNA, 25 bp, Homo sapien
gggacatatgaccagaaccatggat

SEQ ID NO: 4676283 - DNA, 25 bp, Homo sapien
aaacagggacatatgaccagaacca

SEQ ID NO: 4676284 - DNA, 25 bp, Homo sapien
cagggacatatgaccagaaccatgg

SEQ ID NO: 4676285 - DNA, 25 bp, Homo sapien
gacatatgaccagaaccatggattc

SEQ ID NO: 4676286 - DNA, 25 bp, Homo sapien
tcaaatggtcctggctttggtgtct

SEQ ID NO: 4676287 - DNA, 25 bp, Homo sapien
catgacttaagatccatagtctttg

SEQ ID NO: 4676288 - DNA, 25 bp, Homo sapien
ggagtaatggtcaggaggaatgatg

SEQ ID NO: 4676289 - DNA, 25 bp, Homo sapien
ctccagtctcatgacttaagatcca

SEQ ID NO: 4676290 - DNA, 25 bp, Homo sapien
tatgacaacctccaggacctaatcc

SEQ ID NO: 4676291 - DNA, 25 bp, Homo sapien
gcatttatgacaacctccaggacct

SEQ ID NO: 4676292 - DNA, 25 bp, Homo sapien
gacaacctccaggacctaatccatt

SEQ ID NO: 4676293 - DNA, 25 bp, Homo sapien
tttatgacaacctccaggacctaat

SEQ ID NO: 4676294 - DNA, 25 bp, Homo sapien
tagtccttcttaaaagctgctatca

SEQ ID NO: 4676295 - DNA, 25 bp, Homo sapien
gggttaatgctaaatagccaatctg

SEQ ID NO: 4676296 - DNA, 25 bp, Homo sapien
gacttcaaaatctccaaactagctg

SEQ ID NO: 4676297 - DNA, 25 bp, Homo sapien
caaaggagattgttcgagttcatac

SEQ ID NO: 4676298 - DNA, 25 bp, Homo sapien
cctgttgctttaaaggtactgctaa

SEQ ID NO: 4676299 - DNA, 25 bp, Homo sapien
gtatttttccagtcagcttccaaga

SEQ ID NO: 4676300 - DNA, 25 bp, Homo sapien
caagacaccgtcaagatgctttcac

SEQ ID NO: 4676301 - DNA, 25 bp, Homo sapien
tgtatctagcaagatcaaccagcac

SEQ ID NO: 4676302 - DNA, 25 bp, Homo sapien
tcagaataacgtggctacagcacag

SEQ ID NO: 4676303 - DNA, 25 bp, Homo sapien
cattccatgtagtgggctagttcac

SEQ ID NO: 4676304 - DNA, 25 bp, Homo sapien
tgtgacccaagccagagtagtcctt

SEQ ID NO: 4676305 - DNA, 25 bp, Homo sapien
tctcaaagagccctactcaaggcgg

SEQ ID NO: 4676306 - DNA, 25 bp, Homo sapien
gagaagagggctcatcaactctatt

SEQ ID NO: 4676307 - DNA, 25 bp, Homo sapien
caactctattcttgttgtgttctgg

SEQ ID NO: 4676308 - DNA, 25 bp, Homo sapien
gagggctcatcaactctattcttgt

SEQ ID NO: 4676309 - DNA, 25 bp, Homo sapien
ctctattcttgttgtgttctgggct

SEQ ID NO: 4676310 - DNA, 25 bp, Homo sapien
gacattcttactgatctgcctgaaa

SEQ ID NO: 4676311 - DNA, 25 bp, Homo sapien
tattcttggaaacgttgctgcctct

SEQ ID NO: 4676312 - DNA, 25 bp, Homo sapien
caggattcatgaaggccattggttc

SEQ ID NO: 4676313 - DNA, 25 bp, Homo sapien
ggattctgggaaggacactccaaca

SEQ ID NO: 4676314 - DNA, 25 bp, Homo sapien
tgcaattcaactctctaaagactgg

SEQ ID NO: 4676315 - DNA, 25 bp, Homo sapien
gctatgttttgctatctttgcagcc

SEQ ID NO: 4676316 - DNA, 25 bp, Homo sapien
gatggaaaaacacttggtaagctac

SEQ ID NO: 4676317 - DNA, 25 bp, Homo sapien
ggttgtatcagactgaagatggaaa

SEQ ID NO: 4676318 - DNA, 25 bp, Homo sapien
ggtgttagccttctactttgttgtg

SEQ ID NO: 4676319 - DNA, 25 bp, Homo sapien
tatttttggccacctgttcccttgc

SEQ ID NO: 4676320 - DNA, 25 bp, Homo sapien
ggctcctgcgttgccattaagtttc

SEQ ID NO: 4676321 - DNA, 25 bp, Homo sapien
catcaagatggactttctcaaggct

SEQ ID NO: 4676322 - DNA, 25 bp, Homo sapien
tagactttgagagcttgtttagagg

SEQ ID NO: 4676323 - DNA, 25 bp, Homo sapien
gggacatctgcccagacagccagat

SEQ ID NO: 4676324 - DNA, 25 bp, Homo sapien
ttcactgaagactggccctcctcta

SEQ ID NO: 4676325 - DNA, 25 bp, Homo sapien
caaccctggtgatcagtgggtggca

SEQ ID NO: 4676326 - DNA, 25 bp, Homo sapien
caatttcaggttgcctccactttcc

SEQ ID NO: 4676327 - DNA, 25 bp, Homo sapien
cagtgtagggtggaccccattatcc

SEQ ID NO: 4676328 - DNA, 25 bp, Homo sapien
ttatccaatttcaggttgcctccac

SEQ ID NO: 4676329 - DNA, 25 bp, Homo sapien
ctcatgcccagtgtagggtggaccc

SEQ ID NO: 4676330 - DNA, 25 bp, Homo sapien
taggacttcagtcaacacctcagaa

SEQ ID NO: 4676331 - DNA, 25 bp, Homo sapien
cagtcaacacctcagaaagagccca

SEQ ID NO: 4676332 - DNA, 25 bp, Homo sapien
gagactctgcatcttaggacttcag

SEQ ID NO: 4676333 - DNA, 25 bp, Homo sapien
tgggaagaaaccagagactctgcat

SEQ ID NO: 4676334 - DNA, 25 bp, Homo sapien
actgtggcttggattccaggacctc

SEQ ID NO: 4676335 - DNA, 25 bp, Homo sapien
gtggcttggattccaggacctccac

SEQ ID NO: 4676336 - DNA, 25 bp, Homo sapien
tcactgtggcttggattccaggacc

SEQ ID NO: 4676337 - DNA, 25 bp, Homo sapien
aggacctccaccaagcccagggact

SEQ ID NO: 4676338 - DNA, 25 bp, Homo sapien
tccagattttttctctagtcctgtt

SEQ ID NO: 4676339 - DNA, 25 bp, Homo sapien
tatccagattttttctctagtcctg

SEQ ID NO: 4676340 - DNA, 25 bp, Homo sapien
cagattttttctctagtcctgttat

SEQ ID NO: 4676341 - DNA, 25 bp, Homo sapien
ttatccagattttttctctagtcct

SEQ ID NO: 4676342 - DNA, 25 bp, Homo sapien
tcctgaccgacttcaaggctttgag

SEQ ID NO: 4676343 - DNA, 25 bp, Homo sapien
attgtcctgaccgacttcaaggctt

SEQ ID NO: 4676344 - DNA, 25 bp, Homo sapien
tcaaaggaattgggggcatcgtaga

SEQ ID NO: 4676345 - DNA, 25 bp, Homo sapien
cagacattgtcctgaccgacttcaa

SEQ ID NO: 4676346 - DNA, 25 bp, Homo sapien
tgcagctgtgaattggcccattttt

SEQ ID NO: 4676347 - DNA, 25 bp, Homo sapien
cattgcagctgtgaattggcccatt

SEQ ID NO: 4676348 - DNA, 25 bp, Homo sapien
ttgcagctgtgaattggcccatttt

SEQ ID NO: 4676349 - DNA, 25 bp, Homo sapien
attgcagctgtgaattggcccattt

SEQ ID NO: 4676350 - DNA, 25 bp, Homo sapien
tgcagctttccactcttggcagttt

SEQ ID NO: 4676351 - DNA, 25 bp, Homo sapien
gcaccatgccaagggatatgcctcg

SEQ ID NO: 4676352 - DNA, 25 bp, Homo sapien
ttgtttgggccagtgacaacagagg

SEQ ID NO: 4676353 - DNA, 25 bp, Homo sapien
gagccgcccagaagctctccttgaa

SEQ ID NO: 4676354 - DNA, 25 bp, Homo sapien
gtttatgtcaaagccctagccacct

SEQ ID NO: 4676355 - DNA, 25 bp, Homo sapien
cagctgaaagtcttgagggcaaact

SEQ ID NO: 4676356 - DNA, 25 bp, Homo sapien
catagagtctggaaaaagccggcct

SEQ ID NO: 4676357 - DNA, 25 bp, Homo sapien
tcttgggcaatctatgaacagtcag

SEQ ID NO: 4676358 - DNA, 25 bp, Homo sapien
ccttgccactgtgagacattctttg

SEQ ID NO: 4676359 - DNA, 25 bp, Homo sapien
agataacgaatccttgccactgtga

SEQ ID NO: 4676360 - DNA, 25 bp, Homo sapien
ttgccactgtgagacattctttggg

SEQ ID NO: 4676361 - DNA, 25 bp, Homo sapien
tagtcgcatttcagataacgaatcc

SEQ ID NO: 4676362 - DNA, 25 bp, Homo sapien
tcatatggcggcaatagggagaggt

SEQ ID NO: 4676363 - DNA, 25 bp, Homo sapien
cctttttcatatggcggcaataggg

SEQ ID NO: 4676364 - DNA, 25 bp, Homo sapien
cggcaatagggagaggtgccgagca

SEQ ID NO: 4676365 - DNA, 25 bp, Homo sapien
aatagggagaggtgccgagcaaaga

SEQ ID NO: 4676366 - DNA, 25 bp, Homo sapien
tgctcggccaatacacattccattg

SEQ ID NO: 4676367 - DNA, 25 bp, Homo sapien
ctgggtcccggaagcaaaccaggtg

SEQ ID NO: 4676368 - DNA, 25 bp, Homo sapien
gtccatacaccaactgggtcccgga

SEQ ID NO: 4676369 - DNA, 25 bp, Homo sapien
cattccattgctcatcatgggaaaa

SEQ ID NO: 4676370 - DNA, 25 bp, Homo sapien
aaattagataaccacaccacccaga

SEQ ID NO: 4676371 - DNA, 25 bp, Homo sapien
cagtgatctgcatagtcgaaagcca

SEQ ID NO: 4676372 - DNA, 25 bp, Homo sapien
caaacgttgcgtaagagactgctgt

SEQ ID NO: 4676373 - DNA, 25 bp, Homo sapien
taagctgtctagattggtataccac

SEQ ID NO: 4676374 - DNA, 25 bp, Homo sapien
tagccaagctttagaggtgcctatc

SEQ ID NO: 4676375 - DNA, 25 bp, Homo sapien
tttctaggcattgcatgaggctgct

SEQ ID NO: 4676376 - DNA, 25 bp, Homo sapien
cctgttttataggatgccagcagca

SEQ ID NO: 4676377 - DNA, 25 bp, Homo sapien
gatttagccaaggtgtactcagcaa

SEQ ID NO: 4676378 - DNA, 25 bp, Homo sapien
catctaggtgaagtggtaccacttg

SEQ ID NO: 4676379 - DNA, 25 bp, Homo sapien
gtggtaccacttggggcttctccat

SEQ ID NO: 4676380 - DNA, 25 bp, Homo sapien
atctaggtgaagtggtaccacttgg

SEQ ID NO: 4676381 - DNA, 25 bp, Homo sapien
tgaagtggtaccacttggggcttct

SEQ ID NO: 4676382 - DNA, 25 bp, Homo sapien
aggcctttgggatgaccagcagggc

SEQ ID NO: 4676383 - DNA, 25 bp, Homo sapien
atcaaaggcctttgggatgaccagc

SEQ ID NO: 4676384 - DNA, 25 bp, Homo sapien
tcaaaggcctttgggatgaccagca

SEQ ID NO: 4676385 - DNA, 25 bp, Homo sapien
aaaggcctttgggatgaccagcagg

SEQ ID NO: 4676386 - DNA, 25 bp, Homo sapien
acttggtccaaaccccgaggctatg

SEQ ID NO: 4676387 - DNA, 25 bp, Homo sapien
cttggtccaaaccccgaggctatgg

SEQ ID NO: 4676388 - DNA, 25 bp, Homo sapien
tcccagcgctctgctgacatttcag

SEQ ID NO: 4676389 - DNA, 25 bp, Homo sapien
tctctttgactctgactggaaacac

SEQ ID NO: 4676390 - DNA, 25 bp, Homo sapien
ctctgactgctaacgggaccatttg

SEQ ID NO: 4676391 - DNA, 25 bp, Homo sapien
tttcagctggaaccaaagtcactct

SEQ ID NO: 4676392 - DNA, 25 bp, Homo sapien
gccacactcatgttgccggcctctt

SEQ ID NO: 4676393 - DNA, 25 bp, Homo sapien
cacactcatgttgccggcctcttgg

SEQ ID NO: 4676394 - DNA, 25 bp, Homo sapien
tcaggccacactcatgttgccggcc

SEQ ID NO: 4676395 - DNA, 25 bp, Homo sapien
ggccacactcatgttgccggcctct

SEQ ID NO: 4676396 - DNA, 25 bp, Homo sapien
cgtaacttctttcggatcaggtgat

SEQ ID NO: 4676397 - DNA, 25 bp, Homo sapien
tgtggatattcagagcagtcacctt

SEQ ID NO: 4676398 - DNA, 25 bp, Homo sapien
cattagcatagattcgtcgtctgtg

SEQ ID NO: 4676399 - DNA, 25 bp, Homo sapien
tctgagctattttcgtaacttcttt

SEQ ID NO: 4676400 - DNA, 25 bp, Homo sapien
tctcttctaggagcacatgccagca

SEQ ID NO: 4676401 - DNA, 25 bp, Homo sapien
gatgggcccataacagagatttttc

SEQ ID NO: 4676402 - DNA, 25 bp, Homo sapien
tggaaacccgctgcttcacagtagg

SEQ ID NO: 4676403 - DNA, 25 bp, Homo sapien
gagatttttccagccgtatttcaca

SEQ ID NO: 4676404 - DNA, 25 bp, Homo sapien
ctgaactttcttgactcttctgagt

SEQ ID NO: 4676405 - DNA, 25 bp, Homo sapien
tgagtctgaattaggtcccagttca

SEQ ID NO: 4676406 - DNA, 25 bp, Homo sapien
tctgagtctgaattaggtcccagtt

SEQ ID NO: 4676407 - DNA, 25 bp, Homo sapien
actttcttgactcttctgagtctga

SEQ ID NO: 4676408 - DNA, 25 bp, Homo sapien
ggttacggtggtgacaagcctctgt

SEQ ID NO: 4676409 - DNA, 25 bp, Homo sapien
tggtgacaagcctctgtaatacggg

SEQ ID NO: 4676410 - DNA, 25 bp, Homo sapien
ctcagcatggacatcgcagcaggcc

SEQ ID NO: 4676411 - DNA, 25 bp, Homo sapien
cagctaagtctgcattggttacggt

SEQ ID NO: 4676412 - DNA, 25 bp, Homo sapien
ctagttcagattcttgatatttgac

SEQ ID NO: 4676413 - DNA, 25 bp, Homo sapien
ctggcagtgccatcaaggttaaact

SEQ ID NO: 4676414 - DNA, 25 bp, Homo sapien
gctacactcaaggttcctggtgctt

SEQ ID NO: 4676415 - DNA, 25 bp, Homo sapien
gccaaggctacactcaaggttcctg

SEQ ID NO: 4676416 - DNA, 25 bp, Homo sapien
cagaggcttctgtaacttctaccat

SEQ ID NO: 4676417 - DNA, 25 bp, Homo sapien
tataaatttatcatcagtgaacctc

SEQ ID NO: 4676418 - DNA, 25 bp, Homo sapien
ttatcatcagtgaacctcttctcag

SEQ ID NO: 4676419 - DNA, 25 bp, Homo sapien
tcagaggcttctgtaacttctacca

SEQ ID NO: 4676420 - DNA, 25 bp, Homo sapien
ttacagtaggagctactaggcccat

SEQ ID NO: 4676421 - DNA, 25 bp, Homo sapien
ctttacagtaggagctactaggccc

SEQ ID NO: 4676422 - DNA, 25 bp, Homo sapien
tttacagtaggagctactaggccca

SEQ ID NO: 4676423 - DNA, 25 bp, Homo sapien
attgaggtaaaggtaggttctcttg

SEQ ID NO: 4676424 - DNA, 25 bp, Homo sapien
gataaatggcccaggatggcaaagt

SEQ ID NO: 4676425 - DNA, 25 bp, Homo sapien
ctggataaatggcccaggatggcaa

SEQ ID NO: 4676426 - DNA, 25 bp, Homo sapien
atggcaaagtccacagcttctcaca

SEQ ID NO: 4676427 - DNA, 25 bp, Homo sapien
tcatgcctggataaatggcccagga

SEQ ID NO: 4676428 - DNA, 25 bp, Homo sapien
ctccgagtgtgtaatcaggcccagc

SEQ ID NO: 4676429 - DNA, 25 bp, Homo sapien
tcccttgagctttcgtccgcttagc

SEQ ID NO: 4676430 - DNA, 25 bp, Homo sapien
agcagagccattcacagtcgtggag

SEQ ID NO: 4676431 - DNA, 25 bp, Homo sapien
cccgtcctcaggctccgagtgtgta

SEQ ID NO: 4676432 - DNA, 25 bp, Homo sapien
tgttctcttcgggctgctggcatct

SEQ ID NO: 4676433 - DNA, 25 bp, Homo sapien
tttctttttggacaccggtcatcag

SEQ ID NO: 4676434 - DNA, 25 bp, Homo sapien
tcatcagcagtgttctcttcgggct

SEQ ID NO: 4676435 - DNA, 25 bp, Homo sapien
gacaccggtcatcagcagtgttctc

SEQ ID NO: 4676436 - DNA, 25 bp, Homo sapien
cttttgttactttatcctgtggcat

SEQ ID NO: 4676437 - DNA, 25 bp, Homo sapien
ctttcaggcttctggtgtgggtgca

SEQ ID NO: 4676438 - DNA, 25 bp, Homo sapien
tccagagaccgacggggagatggtg

SEQ ID NO: 4676439 - DNA, 25 bp, Homo sapien
aggcagcgaggagatccagagaccg

SEQ ID NO: 4676440 - DNA, 25 bp, Homo sapien
ctagaagggacaaaggcagcgagga

SEQ ID NO: 4676441 - DNA, 25 bp, Homo sapien
cttcacagcgctccaatccttggaa

SEQ ID NO: 4676442 - DNA, 25 bp, Homo sapien
gagatggacttggaatggccccgcc

SEQ ID NO: 4676443 - DNA, 25 bp, Homo sapien
tcgagcgaccgagatagagaaagct

SEQ ID NO: 4676444 - DNA, 25 bp, Homo sapien
agatagagaaagctcccgaaccggc

SEQ ID NO: 4676445 - DNA, 25 bp, Homo sapien
cgctgcaattaaacgggctgccgcc

SEQ ID NO: 4676446 - DNA, 25 bp, Homo sapien
cgactgcggtgaactcaagaaatta

SEQ ID NO: 4676447 - DNA, 25 bp, Homo sapien
ctggcggaccgactgcggtgaactc

SEQ ID NO: 4676448 - DNA, 25 bp, Homo sapien
ctcaagaaattaacctgcgctgcaa

SEQ ID NO: 4676449 - DNA, 25 bp, Homo sapien
ccttttgcgagaacgtgagcgcgcc

SEQ ID NO: 4676450 - DNA, 25 bp, Homo sapien
gagcgacgaggtcagaggaaacctt

SEQ ID NO: 4676451 - DNA, 25 bp, Homo sapien
cagggacgtagggaaccaggcggtg

SEQ ID NO: 4676452 - DNA, 25 bp, Homo sapien
cccgcagtcggggaattgagccctg

SEQ ID NO: 4676453 - DNA, 25 bp, Homo sapien
catcgacgtgaaggtaccttctggg

SEQ ID NO: 4676454 - DNA, 25 bp, Homo sapien
aaatcttcatcgacgtgaaggtacc

SEQ ID NO: 4676455 - DNA, 25 bp, Homo sapien
tctgggttggcttgggtcgtaagtc

SEQ ID NO: 4676456 - DNA, 25 bp, Homo sapien
tgaaggtaccttctgggttggcttg

SEQ ID NO: 4676457 - DNA, 25 bp, Homo sapien
ctctgcaccgggaaaataacaatcg

SEQ ID NO: 4676458 - DNA, 25 bp, Homo sapien
agctcctattactgctgggttttgg

SEQ ID NO: 4676459 - DNA, 25 bp, Homo sapien
tcaagctctgcaccgggaaaataac

SEQ ID NO: 4676460 - DNA, 25 bp, Homo sapien
taacaatcgtatttcaggttgaaag

SEQ ID NO: 4676461 - DNA, 25 bp, Homo sapien
ccactgtcccggctgataatttacc

SEQ ID NO: 4676462 - DNA, 25 bp, Homo sapien
gccgccaccccataaattcctcgtg

SEQ ID NO: 4676463 - DNA, 25 bp, Homo sapien
taaattcctcgtggcaaccggagga

SEQ ID NO: 4676464 - DNA, 25 bp, Homo sapien
tcccggctgataatttacctctttg

SEQ ID NO: 4676465 - DNA, 25 bp, Homo sapien
taaagtttcttttgtccgcgtctga

SEQ ID NO: 4676466 - DNA, 25 bp, Homo sapien
gggatgttgctggattcctttgcat

SEQ ID NO: 4676467 - DNA, 25 bp, Homo sapien
ccgcgtctgaattggggatgttgct

SEQ ID NO: 4676468 - DNA, 25 bp, Homo sapien
tgttgctggattcctttgcattgag

SEQ ID NO: 4676469 - DNA, 25 bp, Homo sapien
tccgagcttcggaaccaccactttc

SEQ ID NO: 4676470 - DNA, 25 bp, Homo sapien
atcattccgagcttcggaaccacca

SEQ ID NO: 4676471 - DNA, 25 bp, Homo sapien
gcccatcattccgagcttcggaacc

SEQ ID NO: 4676472 - DNA, 25 bp, Homo sapien
ggaggaaaagagcccatcattccga

SEQ ID NO: 4676473 - DNA, 25 bp, Homo sapien
cattactggcacgtattttgaagtc

SEQ ID NO: 4676474 - DNA, 25 bp, Homo sapien
tataaacccagatcaaccacgtggg

SEQ ID NO: 4676475 - DNA, 25 bp, Homo sapien
ccagcttgcggtgtgagtatttcca

SEQ ID NO: 4676476 - DNA, 25 bp, Homo sapien
aaaggctcattgtgcgttttatttc

SEQ ID NO: 4676477 - DNA, 25 bp, Homo sapien
cttacttgcatccatctagaggcca

SEQ ID NO: 4676478 - DNA, 25 bp, Homo sapien
catctagaggccaacctttgcaaag

SEQ ID NO: 4676479 - DNA, 25 bp, Homo sapien
tcatagcgctcccaacgtcagccct

SEQ ID NO: 4676480 - DNA, 25 bp, Homo sapien
gagccccagagggtcccttacttgc

SEQ ID NO: 4676481 - DNA, 25 bp, Homo sapien
cctgctgaaccccagaaggaggcaa

SEQ ID NO: 4676482 - DNA, 25 bp, Homo sapien
ggaagaattatccaagagctcgaga

SEQ ID NO: 4676483 - DNA, 25 bp, Homo sapien
ggaggcaaggtggttgcaaagttaa

SEQ ID NO: 4676484 - DNA, 25 bp, Homo sapien
tatccaagagctcgagaagagcaga

SEQ ID NO: 4676485 - DNA, 25 bp, Homo sapien
tcatgtgcttctgccgggtctcagc

SEQ ID NO: 4676486 - DNA, 25 bp, Homo sapien
gatgacctgagatatccgtctctct

SEQ ID NO: 4676487 - DNA, 25 bp, Homo sapien
cagcaatggaggatcgccatcttcc

SEQ ID NO: 4676488 - DNA, 25 bp, Homo sapien
cctgctcgggttattgttgtggaag

SEQ ID NO: 4676489 - DNA, 25 bp, Homo sapien
ccctccttggccgaatgaatgagcg

SEQ ID NO: 4676490 - DNA, 25 bp, Homo sapien
atgagcgcgtttgtgcctccaccac

SEQ ID NO: 4676491 - DNA, 25 bp, Homo sapien
aaccctccttggccgaatgaatgag

SEQ ID NO: 4676492 - DNA, 25 bp, Homo sapien
atgaatgagcgcgtttgtgcctcca

SEQ ID NO: 4676493 - DNA, 25 bp, Homo sapien
gccaccactaccaccttctcctcct

SEQ ID NO: 4676494 - DNA, 25 bp, Homo sapien
ctgccaccactaccaccttctcctc

SEQ ID NO: 4676495 - DNA, 25 bp, Homo sapien
cctcttcctccctcgcttctcctcc

SEQ ID NO: 4676496 - DNA, 25 bp, Homo sapien
tccactgccaccactaccaccttct

SEQ ID NO: 4676497 - DNA, 25 bp, Homo sapien
gcttctcctctccagaaaccgttgt

SEQ ID NO: 4676498 - DNA, 25 bp, Homo sapien
gagccaagcgtgtgtaatggcttct

SEQ ID NO: 4676499 - DNA, 25 bp, Homo sapien
tccaccagacgcttctgaacctcca

SEQ ID NO: 4676500 - DNA, 25 bp, Homo sapien
tggcttctcctctccagaaaccgtt

SEQ ID NO: 4676501 - DNA, 25 bp, Homo sapien
tgaagagctcccatcaatgtgtgtg

SEQ ID NO: 4676502 - DNA, 25 bp, Homo sapien
gatggctacctcacctaatggaaaa

SEQ ID NO: 4676503 - DNA, 25 bp, Homo sapien
ggagttacaacatgacacggcttac

SEQ ID NO: 4676504 - DNA, 25 bp, Homo sapien
taatgaatagacagtgaggaaccac

SEQ ID NO: 4676505 - DNA, 25 bp, Homo sapien
taagacgccaacacatttggttgca

SEQ ID NO: 4676506 - DNA, 25 bp, Homo sapien
gaccatggacaattatcagctaaag

SEQ ID NO: 4676507 - DNA, 25 bp, Homo sapien
tgagcaaatgaaccaattgtcctgc

SEQ ID NO: 4676508 - DNA, 25 bp, Homo sapien
tgaaagcaaggtccaattagcctcc

SEQ ID NO: 4676509 - DNA, 25 bp, Homo sapien
tatgcaatgtgaggatccaacaaga

SEQ ID NO: 4676510 - DNA, 25 bp, Homo sapien
gtatctcctatttgtgactgcggca

SEQ ID NO: 4676511 - DNA, 25 bp, Homo sapien
ccttagggcccaacataacatctgc

SEQ ID NO: 4676512 - DNA, 25 bp, Homo sapien
tcttggcatatcacacaaggagagg

SEQ ID NO: 4676513 - DNA, 25 bp, Homo sapien
ttagtactggcatgcaaaccatgct

SEQ ID NO: 4676514 - DNA, 25 bp, Homo sapien
gaacattttattttcgacagtcaac

SEQ ID NO: 4676515 - DNA, 25 bp, Homo sapien
tattttcgacagtcaactcatttgg

SEQ ID NO: 4676516 - DNA, 25 bp, Homo sapien
agtcaactcatttggaggagtgcca

SEQ ID NO: 4676517 - DNA, 25 bp, Homo sapien
tattggaacctttgtgcagcaaaca

SEQ ID NO: 4676518 - DNA, 25 bp, Homo sapien
aagtatcccacattgtgccactgaa

SEQ ID NO: 4676519 - DNA, 25 bp, Homo sapien
taaggcacatttgcagtgttaacgg

SEQ ID NO: 4676520 - DNA, 25 bp, Homo sapien
taatctgcaggtaagtattggaacc

SEQ ID NO: 4676521 - DNA, 25 bp, Homo sapien
taaggatgccatttagtcttcaaga

SEQ ID NO: 4676522 - DNA, 25 bp, Homo sapien
tctccttgatttcctgtactagcca

SEQ ID NO: 4676523 - DNA, 25 bp, Homo sapien
tactagccatacgatttttccaaaa

SEQ ID NO: 4676524 - DNA, 25 bp, Homo sapien
ttactcaaccagaaaggtacaaaga

SEQ ID NO: 4676525 - DNA, 25 bp, Homo sapien
gctgtagttattaaaactctattaa

SEQ ID NO: 4676526 - DNA, 25 bp, Homo sapien
aaaactctattaaaccagctgctaa

SEQ ID NO: 4676527 - DNA, 25 bp, Homo sapien
tcaaatggtccattagttctaccaa

SEQ ID NO: 4676528 - DNA, 25 bp, Homo sapien
ccaccaattttagacctagtcttca

SEQ ID NO: 4676529 - DNA, 25 bp, Homo sapien
agctgtggaatccattaagggtgaa

SEQ ID NO: 4676530 - DNA, 25 bp, Homo sapien
aatccattaagggtgaaaggctctc

SEQ ID NO: 4676531 - DNA, 25 bp, Homo sapien
ccattaagggtgaaaggctctctgc

SEQ ID NO: 4676532 - DNA, 25 bp, Homo sapien
tggaatccattaagggtgaaaggct

SEQ ID NO: 4676533 - DNA, 25 bp, Homo sapien
gtaactggagatccagacctctgac

SEQ ID NO: 4676534 - DNA, 25 bp, Homo sapien
tcagtaactggagatccagacctct

SEQ ID NO: 4676535 - DNA, 25 bp, Homo sapien
caaagtcagtaactggagatccaga

SEQ ID NO: 4676536 - DNA, 25 bp, Homo sapien
ttccaaagtcagtaactggagatcc

SEQ ID NO: 4676537 - DNA, 25 bp, Homo sapien
cagacgtaaccggagcggggaggtg

SEQ ID NO: 4676538 - DNA, 25 bp, Homo sapien
agcggggaggtgttgacattgtaca

SEQ ID NO: 4676539 - DNA, 25 bp, Homo sapien
tgctcagacgtaaccggagcgggga

SEQ ID NO: 4676540 - DNA, 25 bp, Homo sapien
gagcggggaggtgttgacattgtac

SEQ ID NO: 4676541 - DNA, 25 bp, Homo sapien
ggatgtagcctactttgaaagccat

SEQ ID NO: 4676542 - DNA, 25 bp, Homo sapien
ctgcaccaagtactgaaaggaggat

SEQ ID NO: 4676543 - DNA, 25 bp, Homo sapien
ggtagagctgaatggccttcaattt

SEQ ID NO: 4676544 - DNA, 25 bp, Homo sapien
tagaagaggttaatctccaggccgc

SEQ ID NO: 4676545 - DNA, 25 bp, Homo sapien
gggtctagcctctcacattaggaac

SEQ ID NO: 4676546 - DNA, 25 bp, Homo sapien
tgggtctagcctctcacattaggaa

SEQ ID NO: 4676547 - DNA, 25 bp, Homo sapien
ctgggtctagcctctcacattagga

SEQ ID NO: 4676548 - DNA, 25 bp, Homo sapien
cacctctgtctgattactggcattc

SEQ ID NO: 4676549 - DNA, 25 bp, Homo sapien
ggacccacatcgtagctcattcaca

SEQ ID NO: 4676550 - DNA, 25 bp, Homo sapien
gcaatggcaaattcatcctttatag

SEQ ID NO: 4676551 - DNA, 25 bp, Homo sapien
gaaatgccgtgtggacatcctgaat

SEQ ID NO: 4676552 - DNA, 25 bp, Homo sapien
tattgggtatctcccggcttgcagc

SEQ ID NO: 4676553 - DNA, 25 bp, Homo sapien
tgtgacactgtttgtgagccccaag

SEQ ID NO: 4676554 - DNA, 25 bp, Homo sapien
tcctgcagtgatacgggcggaacca

SEQ ID NO: 4676555 - DNA, 25 bp, Homo sapien
gactctaagatgctgcgctccacaa

SEQ ID NO: 4676556 - DNA, 25 bp, Homo sapien
gcttgagctctcataagacaccaca

SEQ ID NO: 4676557 - DNA, 25 bp, Homo sapien
gatgcttgagctctcataagacacc

SEQ ID NO: 4676558 - DNA, 25 bp, Homo sapien
ttgatgcttgagctctcataagaca

SEQ ID NO: 4676559 - DNA, 25 bp, Homo sapien
cattgatgcttgagctctcataaga

SEQ ID NO: 4676560 - DNA, 25 bp, Homo sapien
gttgctgctgcaagggatccaacat

SEQ ID NO: 4676561 - DNA, 25 bp, Homo sapien
gctgctgcaagggatccaacatgac

SEQ ID NO: 4676562 - DNA, 25 bp, Homo sapien
ttgctgctgcaagggatccaacatg

SEQ ID NO: 4676563 - DNA, 25 bp, Homo sapien
tgttgctgctgcaagggatccaaca

SEQ ID NO: 4676564 - DNA, 25 bp, Homo sapien
cagctgtggtggctgtggctgctgc

SEQ ID NO: 4676565 - DNA, 25 bp, Homo sapien
gctgtggtggctgtggctgctgcag

SEQ ID NO: 4676566 - DNA, 25 bp, Homo sapien
gtggtggctgtggctgctgcagtgg

SEQ ID NO: 4676567 - DNA, 25 bp, Homo sapien
ctgatgtggtggctgcagctgtggt

SEQ ID NO: 4676568 - DNA, 25 bp, Homo sapien
cgttggtggtggctgtgtttgtggc

SEQ ID NO: 4676569 - DNA, 25 bp, Homo sapien
ctgcgttggtggtggctgtgtttgt

SEQ ID NO: 4676570 - DNA, 25 bp, Homo sapien
tgcgttggtggtggctgtgtttgtg

SEQ ID NO: 4676571 - DNA, 25 bp, Homo sapien
tggtggtggctgtgtttgtggctgg

SEQ ID NO: 4676572 - DNA, 25 bp, Homo sapien
ggtggagtaattacacatggtgcat

SEQ ID NO: 4676573 - DNA, 25 bp, Homo sapien
catttgtatgggtgcagaggtgcgg

SEQ ID NO: 4676574 - DNA, 25 bp, Homo sapien
ctttcagagttgtggtggagtaatt

SEQ ID NO: 4676575 - DNA, 25 bp, Homo sapien
tatgggtgcagaggtgcggcttgtg

SEQ ID NO: 4676576 - DNA, 25 bp, Homo sapien
tcatcttcagaaagggtgagctcaa

SEQ ID NO: 4676577 - DNA, 25 bp, Homo sapien
tgtatgaacaaaaccgacaccggta

SEQ ID NO: 4676578 - DNA, 25 bp, Homo sapien
tgttgaacgtagctggcaaaccacc

SEQ ID NO: 4676579 - DNA, 25 bp, Homo sapien
gcatcaggcttctaacattcgggct

SEQ ID NO: 4676580 - DNA, 25 bp, Homo sapien
ggacacagtttgcaccggtaggcgc

SEQ ID NO: 4676581 - DNA, 25 bp, Homo sapien
taatgaatgagtacccctttgaccg

SEQ ID NO: 4676582 - DNA, 25 bp, Homo sapien
taatgcaggagcaaaccgttgggct

SEQ ID NO: 4676583 - DNA, 25 bp, Homo sapien
cataatgagtgagaaggccgtgcaa

SEQ ID NO: 4676584 - DNA, 25 bp, Homo sapien
tgctcatctgcatagacggccgtga

SEQ ID NO: 4676585 - DNA, 25 bp, Homo sapien
ttcatgtaatgggacacgatgccct

SEQ ID NO: 4676586 - DNA, 25 bp, Homo sapien
cgttgcccagaatgatgaagtccct

SEQ ID NO: 4676587 - DNA, 25 bp, Homo sapien
tagtgggctgccagacctttgcgga

SEQ ID NO: 4676588 - DNA, 25 bp, Homo sapien
ggctggcaacgaagaagtgcatgtg

SEQ ID NO: 4676589 - DNA, 25 bp, Homo sapien
gtttggctggcaacgaagaagtgca

SEQ ID NO: 4676590 - DNA, 25 bp, Homo sapien
ttggctggcaacgaagaagtgcatg

SEQ ID NO: 4676591 - DNA, 25 bp, Homo sapien
cagtttggctggcaacgaagaagtg

SEQ ID NO: 4676592 - DNA, 25 bp, Homo sapien
tgccatactggacgtgctttcggag

SEQ ID NO: 4676593 - DNA, 25 bp, Homo sapien
gctcggagcgttgggtgcacttcca

SEQ ID NO: 4676594 - DNA, 25 bp, Homo sapien
tggcacctcttctaagtgaccaaaa

SEQ ID NO: 4676595 - DNA, 25 bp, Homo sapien
ctttcggaggtgattgcagatggct

SEQ ID NO: 4676596 - DNA, 25 bp, Homo sapien
gcagaatagaaggacgacccgaagc

SEQ ID NO: 4676597 - DNA, 25 bp, Homo sapien
ggaaggaaaccagatcgaaactcga

SEQ ID NO: 4676598 - DNA, 25 bp, Homo sapien
cgaagcctcctagaccgagaatcct

SEQ ID NO: 4676599 - DNA, 25 bp, Homo sapien
tggaagaacgaagagctaatggcac

SEQ ID NO: 4676600 - DNA, 25 bp, Homo sapien
cactggcgtctttggctgcttccaa

SEQ ID NO: 4676601 - DNA, 25 bp, Homo sapien
tcacattgactgcaatggtatcccc

SEQ ID NO: 4676602 - DNA, 25 bp, Homo sapien
caatccatccaggaacaagtgggca

SEQ ID NO: 4676603 - DNA, 25 bp, Homo sapien
cggccgggtttcatcctccaacatt

SEQ ID NO: 4676604 - DNA, 25 bp, Homo sapien
gctgtacttgtcctcgcgggtaaac

SEQ ID NO: 4676605 - DNA, 25 bp, Homo sapien
tcctcgcgggtaaacatggccaggg

SEQ ID NO: 4676606 - DNA, 25 bp, Homo sapien
gaaacaaacgagcaatactggcagc

SEQ ID NO: 4676607 - DNA, 25 bp, Homo sapien
tggctcctctcatgagaacgcagcc

SEQ ID NO: 4676608 - DNA, 25 bp, Homo sapien
atccgatcaatctcctgttctcagc

SEQ ID NO: 4676609 - DNA, 25 bp, Homo sapien
catccgatcaatctcctgttctcag

SEQ ID NO: 4676610 - DNA, 25 bp, Homo sapien
aacgccatccgatcaatctcctgtt

SEQ ID NO: 4676611 - DNA, 25 bp, Homo sapien
atctaacgccatccgatcaatctcc

SEQ ID NO: 4676612 - DNA, 25 bp, Homo sapien
gccataccttataggagagttttga

SEQ ID NO: 4676613 - DNA, 25 bp, Homo sapien
ccattacatataggctgtgtgtcct

SEQ ID NO: 4676614 - DNA, 25 bp, Homo sapien
gagcacacgctatggagtcagacta

SEQ ID NO: 4676615 - DNA, 25 bp, Homo sapien
cagactacctgggataaaatctcag

SEQ ID NO: 4676616 - DNA, 25 bp, Homo sapien
tgcatcggaatggtttatggtgtcc

SEQ ID NO: 4676617 - DNA, 25 bp, Homo sapien
ttatggtgtccgtggtgggtttgca

SEQ ID NO: 4676618 - DNA, 25 bp, Homo sapien
gaaggagcagagtttgcatcggaat

SEQ ID NO: 4676619 - DNA, 25 bp, Homo sapien
gtgggtttgcatatggcgatccaaa

SEQ ID NO: 4676620 - DNA, 25 bp, Homo sapien
cagcatgagctttgagtatatgtgt

SEQ ID NO: 4676621 - DNA, 25 bp, Homo sapien
atgagctttgagtatatgtgttttc

SEQ ID NO: 4676622 - DNA, 25 bp, Homo sapien
gcatgagctttgagtatatgtgttt

SEQ ID NO: 4676623 - DNA, 25 bp, Homo sapien
agcatgagctttgagtatatgtgtt

SEQ ID NO: 4676624 - DNA, 25 bp, Homo sapien
ggctaaggcctatgggcaaaactca

SEQ ID NO: 4676625 - DNA, 25 bp, Homo sapien
gccaaggttccaaggtatgtcaaga

SEQ ID NO: 4676626 - DNA, 25 bp, Homo sapien
tgagttgcacgacctgagagagaat

SEQ ID NO: 4676627 - DNA, 25 bp, Homo sapien
gatttgaaccctgaagccactcact

SEQ ID NO: 4676628 - DNA, 25 bp, Homo sapien
gcaccaagaacacttgtaggcatgc

SEQ ID NO: 4676629 - DNA, 25 bp, Homo sapien
ccaagaacacttgtaggcatgctca

SEQ ID NO: 4676630 - DNA, 25 bp, Homo sapien
atgagcaccaagaacacttgtaggc

SEQ ID NO: 4676631 - DNA, 25 bp, Homo sapien
caagaacacttgtaggcatgctcac

SEQ ID NO: 4676632 - DNA, 25 bp, Homo sapien
ttccgtggaccttgagggagtgttc

SEQ ID NO: 4676633 - DNA, 25 bp, Homo sapien
cgtggaccttgagggagtgttcctt

SEQ ID NO: 4676634 - DNA, 25 bp, Homo sapien
cttttccgtggaccttgagggagtg

SEQ ID NO: 4676635 - DNA, 25 bp, Homo sapien
agaggagactgacgatccgtggcct

SEQ ID NO: 4676636 - DNA, 25 bp, Homo sapien
ttaattccagcttggaagcccattt

SEQ ID NO: 4676637 - DNA, 25 bp, Homo sapien
ttccagcttggaagcccatttttac

SEQ ID NO: 4676638 - DNA, 25 bp, Homo sapien
taattccagcttggaagcccatttt

SEQ ID NO: 4676639 - DNA, 25 bp, Homo sapien
attccagcttggaagcccattttta

SEQ ID NO: 4676640 - DNA, 25 bp, Homo sapien
taaggtatcacgtggctcagtcaga

SEQ ID NO: 4676641 - DNA, 25 bp, Homo sapien
gagacagtcattccttgacctggga

SEQ ID NO: 4676642 - DNA, 25 bp, Homo sapien
cacattgctagcgaggagaccctct

SEQ ID NO: 4676643 - DNA, 25 bp, Homo sapien
tgatggtagctaactggctcccgca

SEQ ID NO: 4676644 - DNA, 25 bp, Homo sapien
aacactgacagctcagagcccaaga

SEQ ID NO: 4676645 - DNA, 25 bp, Homo sapien
ctggtgaaacatgtcaacactgaca

SEQ ID NO: 4676646 - DNA, 25 bp, Homo sapien
aaaaccaataccatagagccgttgc

SEQ ID NO: 4676647 - DNA, 25 bp, Homo sapien
tagaggattcgtgtgctggtgaaac

SEQ ID NO: 4676648 - DNA, 25 bp, Homo sapien
gaaagagtcacacttgatgccgcta

SEQ ID NO: 4676649 - DNA, 25 bp, Homo sapien
gatttaactatgacccagggcacac

SEQ ID NO: 4676650 - DNA, 25 bp, Homo sapien
ggatattagctaggtcccaagggct

SEQ ID NO: 4676651 - DNA, 25 bp, Homo sapien
catagggatcaaggtcatgctgcaa

SEQ ID NO: 4676652 - DNA, 25 bp, Homo sapien
ggttcttggcatccaattgataggc

SEQ ID NO: 4676653 - DNA, 25 bp, Homo sapien
ctgcagctttgagcaaggttcttgg

SEQ ID NO: 4676654 - DNA, 25 bp, Homo sapien
gagcaaggttcttggcatccaattg

SEQ ID NO: 4676655 - DNA, 25 bp, Homo sapien
gcatccaattgataggcttggcctc

SEQ ID NO: 4676656 - DNA, 25 bp, Homo sapien
ttcttctaagatcaattccagttca

SEQ ID NO: 4676657 - DNA, 25 bp, Homo sapien
gcccacttgctaagctacataaaat

SEQ ID NO: 4676658 - DNA, 25 bp, Homo sapien
aagacatgagtgtgtatcattccac

SEQ ID NO: 4676659 - DNA, 25 bp, Homo sapien
ttaaaaagcccacttgctaagctac

SEQ ID NO: 4676660 - DNA, 25 bp, Homo sapien
tcattccaccgatctttaaaaagcc

SEQ ID NO: 4676661 - DNA, 25 bp, Homo sapien
tggaatttgtgaataatgtaggatt

SEQ ID NO: 4676662 - DNA, 25 bp, Homo sapien
gtggaatttgtgaataatgtaggat

SEQ ID NO: 4676663 - DNA, 25 bp, Homo sapien
ggaatttgtgaataatgtaggattt

SEQ ID NO: 4676664 - DNA, 25 bp, Homo sapien
gaatttgtgaataatgtaggatttt

SEQ ID NO: 4676665 - DNA, 25 bp, Homo sapien
acattctcaatttcgctctcgctca

SEQ ID NO: 4676666 - DNA, 25 bp, Homo sapien
ccaacattctcaatttcgctctcgc

SEQ ID NO: 4676667 - DNA, 25 bp, Homo sapien
cctttctgctgccaacattctcaat

SEQ ID NO: 4676668 - DNA, 25 bp, Homo sapien
gctgccaacattctcaatttcgctc

SEQ ID NO: 4676669 - DNA, 25 bp, Homo sapien
gaagaaaggaatgacaactgaattc

SEQ ID NO: 4676670 - DNA, 25 bp, Homo sapien
tgtaaatggaagacaaaggaagaaa

SEQ ID NO: 4676671 - DNA, 25 bp, Homo sapien
agaaaggaatgacaactgaattcat

SEQ ID NO: 4676672 - DNA, 25 bp, Homo sapien
caggtgtaaatggaagacaaaggaa

SEQ ID NO: 4676673 - DNA, 25 bp, Homo sapien
tacacaggcgtctacacgagaaagg

SEQ ID NO: 4676674 - DNA, 25 bp, Homo sapien
gaatacccttccctgtaggtgagaa

SEQ ID NO: 4676675 - DNA, 25 bp, Homo sapien
gcaacaggttgccacagaataccct

SEQ ID NO: 4676676 - DNA, 25 bp, Homo sapien
tcttttaatctgactttgagggctc

SEQ ID NO: 4676677 - DNA, 25 bp, Homo sapien
cggtaatgacgcctgatgctctgga

SEQ ID NO: 4676678 - DNA, 25 bp, Homo sapien
gactgatagtggttcaactgctgct

SEQ ID NO: 4676679 - DNA, 25 bp, Homo sapien
cagaattcgcagtgaagcacggctt

SEQ ID NO: 4676680 - DNA, 25 bp, Homo sapien
taacacggctgttgttccttgccag

SEQ ID NO: 4676681 - DNA, 25 bp, Homo sapien
cagcctctcggtgtgaagcatgtat

SEQ ID NO: 4676682 - DNA, 25 bp, Homo sapien
gctactacgatgctggtgggaaaga

SEQ ID NO: 4676683 - DNA, 25 bp, Homo sapien
gaagtagtctaaggctcagatcctg

SEQ ID NO: 4676684 - DNA, 25 bp, Homo sapien
tcttgtgaacccgagtgttgctctc

SEQ ID NO: 4676685 - DNA, 25 bp, Homo sapien
ccagaaacttggtcactcaaccgaa

SEQ ID NO: 4676686 - DNA, 25 bp, Homo sapien
tcatcatgtttgttgaccacccaga

SEQ ID NO: 4676687 - DNA, 25 bp, Homo sapien
ggtgatgcgtgtaaccagggatcat

SEQ ID NO: 4676688 - DNA, 25 bp, Homo sapien
tatatgtccaagtgcggctctcctg

SEQ ID NO: 4676689 - DNA, 25 bp, Homo sapien
ggcagagaggacagcgaagatcttt

SEQ ID NO: 4676690 - DNA, 25 bp, Homo sapien
catgttgcgcttgtatttggtgtga

SEQ ID NO: 4676691 - DNA, 25 bp, Homo sapien
tcggtgcagcacgatgtggtcaatc

SEQ ID NO: 4676692 - DNA, 25 bp, Homo sapien
tgagtgcccagcttccacgtgcata

SEQ ID NO: 4676693 - DNA, 25 bp, Homo sapien
gcatccctagaaggccatctctgct

SEQ ID NO: 4676694 - DNA, 25 bp, Homo sapien
ctgccactctgagagagcatcccta

SEQ ID NO: 4676695 - DNA, 25 bp, Homo sapien
ctactgccactctgagagagcatcc

SEQ ID NO: 4676696 - DNA, 25 bp, Homo sapien
tgccccccgctgcatccaagaaaac

SEQ ID NO: 4676697 - DNA, 25 bp, Homo sapien
aagataaggtgaggaacaaggcaca

SEQ ID NO: 4676698 - DNA, 25 bp, Homo sapien
ctgaagataaggtgaggaacaaggc

SEQ ID NO: 4676699 - DNA, 25 bp, Homo sapien
ataaggtgaggaacaaggcacaggt

SEQ ID NO: 4676700 - DNA, 25 bp, Homo sapien
gaagataaggtgaggaacaaggcac

SEQ ID NO: 4676701 - DNA, 25 bp, Homo sapien
cccagcaggaaggtgtttttgccct

SEQ ID NO: 4676702 - DNA, 25 bp, Homo sapien
ttcactgcagaatccatcacctttg

SEQ ID NO: 4676703 - DNA, 25 bp, Homo sapien
gaagccctacggaaatgttcactgc

SEQ ID NO: 4676704 - DNA, 25 bp, Homo sapien
agaatgtacaaatcccccatgctgg

SEQ ID NO: 4676705 - DNA, 25 bp, Homo sapien
tttggtcttcttgaaagaatctctc

SEQ ID NO: 4676706 - DNA, 25 bp, Homo sapien
cttcttgaaagaatctctcacagcc

SEQ ID NO: 4676707 - DNA, 25 bp, Homo sapien
tccatgttctgctttggaaatcatt

SEQ ID NO: 4676708 - DNA, 25 bp, Homo sapien
agggaagttccatgttctgctttgg

SEQ ID NO: 4676709 - DNA, 25 bp, Homo sapien
ttaaacacagtgggctctaaaacca

SEQ ID NO: 4676710 - DNA, 25 bp, Homo sapien
aaccactggacactttacccattat

SEQ ID NO: 4676711 - DNA, 25 bp, Homo sapien
gagcagtcattatgcatccattatg

SEQ ID NO: 4676712 - DNA, 25 bp, Homo sapien
cattatctcataggtacaatcatct

SEQ ID NO: 4676713 - DNA, 25 bp, Homo sapien
cagaaagtgaagactcgccatgtct

SEQ ID NO: 4676714 - DNA, 25 bp, Homo sapien
tgctgatggccccttaccaagctgt

SEQ ID NO: 4676715 - DNA, 25 bp, Homo sapien
actcgccatgtctgctcggcagcag

SEQ ID NO: 4676716 - DNA, 25 bp, Homo sapien
ccttaccaagctgtgatagggcaca

SEQ ID NO: 4676717 - DNA, 25 bp, Homo sapien
tgaggaggcaaggtccttggtccaa

SEQ ID NO: 4676718 - DNA, 25 bp, Homo sapien
ctgaggaggcaaggtccttggtcca

SEQ ID NO: 4676719 - DNA, 25 bp, Homo sapien
gaggaggcaaggtccttggtccaaa

SEQ ID NO: 4676720 - DNA, 25 bp, Homo sapien
gccagatatccataactgggataaa

SEQ ID NO: 4676721 - DNA, 25 bp, Homo sapien
aaatctgtgctatttatgcaagaat

SEQ ID NO: 4676722 - DNA, 25 bp, Homo sapien
gcaagaatcaaatatagcatgtgtt

SEQ ID NO: 4676723 - DNA, 25 bp, Homo sapien
ccagatatccataactgggataaaa

SEQ ID NO: 4676724 - DNA, 25 bp, Homo sapien
tctggttccttgaactgacacacat

SEQ ID NO: 4676725 - DNA, 25 bp, Homo sapien
gatctggttccttgaactgacacac

SEQ ID NO: 4676726 - DNA, 25 bp, Homo sapien
ctcgtggatctggttccttgaactg

SEQ ID NO: 4676727 - DNA, 25 bp, Homo sapien
cgtggatctggttccttgaactgac

SEQ ID NO: 4676728 - DNA, 25 bp, Homo sapien
acaaattgaatggaaagatgggaat

SEQ ID NO: 4676729 - DNA, 25 bp, Homo sapien
attgaatggaaagatgggaattttt

SEQ ID NO: 4676730 - DNA, 25 bp, Homo sapien
caaattgaatggaaagatgggaatt

SEQ ID NO: 4676731 - DNA, 25 bp, Homo sapien
tgtggaaacaaattgaatggaaaga

SEQ ID NO: 4676732 - DNA, 25 bp, Homo sapien
aacttcaatggggacaacacgctct

SEQ ID NO: 4676733 - DNA, 25 bp, Homo sapien
tatttggacagtttggaccggcaaa

SEQ ID NO: 4676734 - DNA, 25 bp, Homo sapien
ctgcaagtatttggacagtttggac

SEQ ID NO: 4676735 - DNA, 25 bp, Homo sapien
agtttggaccggcaaacttcaatgg

SEQ ID NO: 4676736 - DNA, 25 bp, Homo sapien
actggagcaggtgaaggtacactta

SEQ ID NO: 4676737 - DNA, 25 bp, Homo sapien
tatgctcatcccgaaggtggctgtc

SEQ ID NO: 4676738 - DNA, 25 bp, Homo sapien
tacacttatcacagcggaaaactac

SEQ ID NO: 4676739 - DNA, 25 bp, Homo sapien
tcctccgtgtgcttggtctcatagt

SEQ ID NO: 4676740 - DNA, 25 bp, Homo sapien
ccagtccgtggatgatatagtctga

SEQ ID NO: 4676741 - DNA, 25 bp, Homo sapien
cttgctggtaccaggattctgtcca

SEQ ID NO: 4676742 - DNA, 25 bp, Homo sapien
acatctttacagatgttcctgaggt

SEQ ID NO: 4676743 - DNA, 25 bp, Homo sapien
ccgtggatgatatagtctgacatct

SEQ ID NO: 4676744 - DNA, 25 bp, Homo sapien
tagagaagccttcagcttgcagaaa

SEQ ID NO: 4676745 - DNA, 25 bp, Homo sapien
tacaacacacggaagagacagagct

SEQ ID NO: 4676746 - DNA, 25 bp, Homo sapien
taagagttcaactgcttaaggctcc

SEQ ID NO: 4676747 - DNA, 25 bp, Homo sapien
cgaaatggcatagtcttctagagaa

SEQ ID NO: 4676748 - DNA, 25 bp, Homo sapien
gctcatctaattctggtttctctgt

SEQ ID NO: 4676749 - DNA, 25 bp, Homo sapien
ctcttgctcatctaattctggtttc

SEQ ID NO: 4676750 - DNA, 25 bp, Homo sapien
tgctcatctaattctggtttctctg

SEQ ID NO: 4676751 - DNA, 25 bp, Homo sapien
catctaattctggtttctctgtctt

SEQ ID NO: 4676752 - DNA, 25 bp, Homo sapien
taggactcagatctccacatgacac

SEQ ID NO: 4676753 - DNA, 25 bp, Homo sapien
tctatatttgtagatgaagatcaca

SEQ ID NO: 4676754 - DNA, 25 bp, Homo sapien
gaagccaggattagttaggactcag

SEQ ID NO: 4676755 - DNA, 25 bp, Homo sapien
ccattgtgcagtaaatgtgttgcct

SEQ ID NO: 4676756 - DNA, 25 bp, Homo sapien
tcgttttgactcttttggagatgga

SEQ ID NO: 4676757 - DNA, 25 bp, Homo sapien
tcattttcaccggaacttttgtaca

SEQ ID NO: 4676758 - DNA, 25 bp, Homo sapien
caccggaccttcattaccaaacttg

SEQ ID NO: 4676759 - DNA, 25 bp, Homo sapien
tggttttgcaaccaggaccaaacaa

SEQ ID NO: 4676760 - DNA, 25 bp, Homo sapien
cagctgatccaagttaacccgtcca

SEQ ID NO: 4676761 - DNA, 25 bp, Homo sapien
ccgtccaaccagctcaaagttacgg

SEQ ID NO: 4676762 - DNA, 25 bp, Homo sapien
tgatccaagttaacccgtccaacca

SEQ ID NO: 4676763 - DNA, 25 bp, Homo sapien
caaccagctcaaagttacggcttac

SEQ ID NO: 4676764 - DNA, 25 bp, Homo sapien
tattcagtccggcacttgcatttag

SEQ ID NO: 4676765 - DNA, 25 bp, Homo sapien
cccctaaactgagggtgtctgataa

SEQ ID NO: 4676766 - DNA, 25 bp, Homo sapien
gatgtctagcagaaacacccgaggc

SEQ ID NO: 4676767 - DNA, 25 bp, Homo sapien
gacctgcagcgtgtccatattcagt

SEQ ID NO: 4676768 - DNA, 25 bp, Homo sapien
caccatctgctctgcgcattaattc

SEQ ID NO: 4676769 - DNA, 25 bp, Homo sapien
ttccttagcagggattatcttgggc

SEQ ID NO: 4676770 - DNA, 25 bp, Homo sapien
ttagcagggattatcttgggcaaga

SEQ ID NO: 4676771 - DNA, 25 bp, Homo sapien
ttaattccttagcagggattatctt

SEQ ID NO: 4676772 - DNA, 25 bp, Homo sapien
gacatttctggacggtctgttgtaa

SEQ ID NO: 4676773 - DNA, 25 bp, Homo sapien
aacatcaaatattgacttagttgtt

SEQ ID NO: 4676774 - DNA, 25 bp, Homo sapien
ccctcaattggtggtattcatgaat

SEQ ID NO: 4676775 - DNA, 25 bp, Homo sapien
gaatacggggatatgcagacatttc

SEQ ID NO: 4676776 - DNA, 25 bp, Homo sapien
tttcttgactgaagagccgcttgcc

SEQ ID NO: 4676777 - DNA, 25 bp, Homo sapien
gccatgtggtgaaagcaatttccag

SEQ ID NO: 4676778 - DNA, 25 bp, Homo sapien
tgttacctgtgtgctgtgggaatca

SEQ ID NO: 4676779 - DNA, 25 bp, Homo sapien
gccgcttgcccgagattccaaagga

SEQ ID NO: 4676780 - DNA, 25 bp, Homo sapien
gcagccccgtggtcagaaaatctca

SEQ ID NO: 4676781 - DNA, 25 bp, Homo sapien
aaacgcttctcagtgttaagagcag

SEQ ID NO: 4676782 - DNA, 25 bp, Homo sapien
actcagagccctgtgaaaacgcccg

SEQ ID NO: 4676783 - DNA, 25 bp, Homo sapien
aacgcccgtccacaaaattcacatg

SEQ ID NO: 4676784 - DNA, 25 bp, Homo sapien
ccatgatctcttttgggtggatttc

SEQ ID NO: 4676785 - DNA, 25 bp, Homo sapien
ctctatggagggcattttaacactg

SEQ ID NO: 4676786 - DNA, 25 bp, Homo sapien
ccaggagagatttgtcggcagttac

SEQ ID NO: 4676787 - DNA, 25 bp, Homo sapien
ggctactgtttcattctttagggaa

SEQ ID NO: 4676788 - DNA, 25 bp, Homo sapien
atactcactcacacaggtaccagtg

SEQ ID NO: 4676789 - DNA, 25 bp, Homo sapien
taaggtttgattaagaatttcacca

SEQ ID NO: 4676790 - DNA, 25 bp, Homo sapien
tgaaaatagattgttcagtcctaaa

SEQ ID NO: 4676791 - DNA, 25 bp, Homo sapien
tcatcactgttcaagtaaggtttga

SEQ ID NO: 4676792 - DNA, 25 bp, Homo sapien
gagaagtcttctaccgtcatggagc

SEQ ID NO: 4676793 - DNA, 25 bp, Homo sapien
ggaggtgcttccatattccgcaaca

SEQ ID NO: 4676794 - DNA, 25 bp, Homo sapien
tactgacaaatgcagagagttccct

SEQ ID NO: 4676795 - DNA, 25 bp, Homo sapien
tacatttaaccacaacgacgacagg

SEQ ID NO: 4676796 - DNA, 25 bp, Homo sapien
tgtaggatatgttatttcttgtcca

SEQ ID NO: 4676797 - DNA, 25 bp, Homo sapien
gaaagaaagtagttctccaggctcc

SEQ ID NO: 4676798 - DNA, 25 bp, Homo sapien
ctccaggctccttgtaggatatgtt

SEQ ID NO: 4676799 - DNA, 25 bp, Homo sapien
aaagaaagtagttctccaggctcct

SEQ ID NO: 4676800 - DNA, 25 bp, Homo sapien
cacacacgggcttctaaaacctagg

SEQ ID NO: 4676801 - DNA, 25 bp, Homo sapien
ttttatttgaagctgtgtgggacac

SEQ ID NO: 4676802 - DNA, 25 bp, Homo sapien
gggaaacactgattactggagtcaa

SEQ ID NO: 4676803 - DNA, 25 bp, Homo sapien
taatgcatccaaaatgtgcggccac

SEQ ID NO: 4676804 - DNA, 25 bp, Homo sapien
ttgctcagaaatcttggttaagtgc

SEQ ID NO: 4676805 - DNA, 25 bp, Homo sapien
tgctcagaaatcttggttaagtgca

SEQ ID NO: 4676806 - DNA, 25 bp, Homo sapien
gtcagaagacacatctcacgtctgt

SEQ ID NO: 4676807 - DNA, 25 bp, Homo sapien
cacatctcacgtctgtcctgtttct

SEQ ID NO: 4676808 - DNA, 25 bp, Homo sapien
tgttgaaactctttggcatggtatt

SEQ ID NO: 4676809 - DNA, 25 bp, Homo sapien
gaattctctgatcaacctttctagc

SEQ ID NO: 4676810 - DNA, 25 bp, Homo sapien
ggcatggtattgaacgccgtcatga

SEQ ID NO: 4676811 - DNA, 25 bp, Homo sapien
attgaacgccgtcatgaattctctg

SEQ ID NO: 4676812 - DNA, 25 bp, Homo sapien
catctctaaagccaattgttctcct

SEQ ID NO: 4676813 - DNA, 25 bp, Homo sapien
agtgcccctacaactgccatggctc

SEQ ID NO: 4676814 - DNA, 25 bp, Homo sapien
tcctgtgccctgtatcccagtaaga

SEQ ID NO: 4676815 - DNA, 25 bp, Homo sapien
ccctgtatcccagtaagagtttgct

SEQ ID NO: 4676816 - DNA, 25 bp, Homo sapien
cctcctgcattgtgatgtggttttt

SEQ ID NO: 4676817 - DNA, 25 bp, Homo sapien
gttgtagcgttgctagagactgcat

SEQ ID NO: 4676818 - DNA, 25 bp, Homo sapien
caatgtggttaagctgttgtagcgt

SEQ ID NO: 4676819 - DNA, 25 bp, Homo sapien
taagctgttgtagcgttgctagaga

SEQ ID NO: 4676820 - DNA, 25 bp, Homo sapien
catgagcctattccatctgatcgct

SEQ ID NO: 4676821 - DNA, 25 bp, Homo sapien
cctattccatctgatcgctcccttg

SEQ ID NO: 4676822 - DNA, 25 bp, Homo sapien
tgagcctattccatctgatcgctcc

SEQ ID NO: 4676823 - DNA, 25 bp, Homo sapien
tattccatctgatcgctcccttgtc

SEQ ID NO: 4676824 - DNA, 25 bp, Homo sapien
ccagcactggggaagtgttttttat

SEQ ID NO: 4676825 - DNA, 25 bp, Homo sapien
acctgcaggacaaccagtagcctca

SEQ ID NO: 4676826 - DNA, 25 bp, Homo sapien
tttcctccactgcgtccatcacttg

SEQ ID NO: 4676827 - DNA, 25 bp, Homo sapien
catttcctccactgcgtccatcact

SEQ ID NO: 4676828 - DNA, 25 bp, Homo sapien
tcactcctaagaagtgaatactgag

SEQ ID NO: 4676829 - DNA, 25 bp, Homo sapien
gaaactcactcctaagaagtgaata

SEQ ID NO: 4676830 - DNA, 25 bp, Homo sapien
agggccagaaactcactcctaagaa

SEQ ID NO: 4676831 - DNA, 25 bp, Homo sapien
gtgaatactgagaagttgattttgg

SEQ ID NO: 4676832 - DNA, 25 bp, Homo sapien
tggggtagtcaaagaagtggccact

SEQ ID NO: 4676833 - DNA, 25 bp, Homo sapien
agaagtggccactgaggatgagcag

SEQ ID NO: 4676834 - DNA, 25 bp, Homo sapien
gccactgaggatgagcagaatttcc

SEQ ID NO: 4676835 - DNA, 25 bp, Homo sapien
tggccactgaggatgagcagaattt

SEQ ID NO: 4676836 - DNA, 25 bp, Homo sapien
aggatggaagttaactttctttgca

SEQ ID NO: 4676837 - DNA, 25 bp, Homo sapien
tggaagttaactttctttgcactcg

SEQ ID NO: 4676838 - DNA, 25 bp, Homo sapien
tttctttgcactcggggagagcacg

SEQ ID NO: 4676839 - DNA, 25 bp, Homo sapien
aactttctttgcactcggggagagc

SEQ ID NO: 4676840 - DNA, 25 bp, Homo sapien
aaagaactagtcaaatgccctggat

SEQ ID NO: 4676841 - DNA, 25 bp, Homo sapien
gcaatacggaaagatttgcagctca

SEQ ID NO: 4676842 - DNA, 25 bp, Homo sapien
agggactcagagctactgtgcaata

SEQ ID NO: 4676843 - DNA, 25 bp, Homo sapien
ggctattgcatagccagggactcag

SEQ ID NO: 4676844 - DNA, 25 bp, Homo sapien
tctgtggtcctaaaaatttgctgtc

SEQ ID NO: 4676845 - DNA, 25 bp, Homo sapien
taggctttgcagaagcagtgatcaa

SEQ ID NO: 4676846 - DNA, 25 bp, Homo sapien
gacagggtcctctacatacccaaag

SEQ ID NO: 4676847 - DNA, 25 bp, Homo sapien
gactgcagggtaggctctggttcca

SEQ ID NO: 4676848 - DNA, 25 bp, Homo sapien
tgtccagaatactgtatgactcttt

SEQ ID NO: 4676849 - DNA, 25 bp, Homo sapien
aatactgtatgactctttccttatg

SEQ ID NO: 4676850 - DNA, 25 bp, Homo sapien
tccagaatactgtatgactctttcc

SEQ ID NO: 4676851 - DNA, 25 bp, Homo sapien
tactgtatgactctttccttatgca

SEQ ID NO: 4676852 - DNA, 25 bp, Homo sapien
agggcttaatgaattatctgttaca

SEQ ID NO: 4676853 - DNA, 25 bp, Homo sapien
tcctctcacaggtgactggttctgt

SEQ ID NO: 4676854 - DNA, 25 bp, Homo sapien
aattatctgttacagatgggctgtc

SEQ ID NO: 4676855 - DNA, 25 bp, Homo sapien
gatgagcactcagatctgagagggc

SEQ ID NO: 4676856 - DNA, 25 bp, Homo sapien
cctttagtaaggactctagaggtct

SEQ ID NO: 4676857 - DNA, 25 bp, Homo sapien
tgcctttagtaaggactctagaggt

SEQ ID NO: 4676858 - DNA, 25 bp, Homo sapien
tttagtaaggactctagaggtcttc

SEQ ID NO: 4676859 - DNA, 25 bp, Homo sapien
tagtaaggactctagaggtcttcat

SEQ ID NO: 4676860 - DNA, 25 bp, Homo sapien
tggcaaacaaggagtttgtcaacct

SEQ ID NO: 4676861 - DNA, 25 bp, Homo sapien
cacagctcctaataaactcttttga

SEQ ID NO: 4676862 - DNA, 25 bp, Homo sapien
aaacttgttgtatgcctcttggtgc

SEQ ID NO: 4676863 - DNA, 25 bp, Homo sapien
cagcagagcattccccaagcaaaat

SEQ ID NO: 4676864 - DNA, 25 bp, Homo sapien
cccgagcaccttattactctgttca

SEQ ID NO: 4676865 - DNA, 25 bp, Homo sapien
cttctgtcccgagcaccttattact

SEQ ID NO: 4676866 - DNA, 25 bp, Homo sapien
tgtcccgagcaccttattactctgt

SEQ ID NO: 4676867 - DNA, 25 bp, Homo sapien
gcaccttattactctgttcattaga

SEQ ID NO: 4676868 - DNA, 25 bp, Homo sapien
ttcttaaacccagtttgtctgagga

SEQ ID NO: 4676869 - DNA, 25 bp, Homo sapien
ttgtctgaggatctcagccgtcagg

SEQ ID NO: 4676870 - DNA, 25 bp, Homo sapien
cttaaacccagtttgtctgaggatc

SEQ ID NO: 4676871 - DNA, 25 bp, Homo sapien
tttgtctgaggatctcagccgtcag

SEQ ID NO: 4676872 - DNA, 25 bp, Homo sapien
gctcttaggcaggaggaaatcttca

SEQ ID NO: 4676873 - DNA, 25 bp, Homo sapien
agtggaaggaaccctggtactctgc

SEQ ID NO: 4676874 - DNA, 25 bp, Homo sapien
cttcacatacaggatgagccacagg

SEQ ID NO: 4676875 - DNA, 25 bp, Homo sapien
gctgctccccataatgtcacagtgg

SEQ ID NO: 4676876 - DNA, 25 bp, Homo sapien
gatatctcacatgtcttctcaaggt

SEQ ID NO: 4676877 - DNA, 25 bp, Homo sapien
gctctaagactagtagactaggcca

SEQ ID NO: 4676878 - DNA, 25 bp, Homo sapien
ccaagagtggacgaggcttacccat

SEQ ID NO: 4676879 - DNA, 25 bp, Homo sapien
caaggttgcaattatgtcacatggc

SEQ ID NO: 4676880 - DNA, 25 bp, Homo sapien
ctctgcacggctttgcgcgcggtgc

SEQ ID NO: 4676881 - DNA, 25 bp, Homo sapien
tccaatctctgcacggctttgcgcg

SEQ ID NO: 4676882 - DNA, 25 bp, Homo sapien
gggacccacacggcctccaatctct

SEQ ID NO: 4676883 - DNA, 25 bp, Homo sapien
cccagaccagggacccacacggcct

SEQ ID NO: 4676884 - DNA, 25 bp, Homo sapien
cgcatctcggggaacaacagtctcc

SEQ ID NO: 4676885 - DNA, 25 bp, Homo sapien
acaacagtctccctcccgggcgtca

SEQ ID NO: 4676886 - DNA, 25 bp, Homo sapien
cgctccgcatctcggggaacaacag

SEQ ID NO: 4676887 - DNA, 25 bp, Homo sapien
ctgcgctccgcatctcggggaacaa

SEQ ID NO: 4676888 - DNA, 25 bp, Homo sapien
tctgggatcaggtatcttggatgct

SEQ ID NO: 4676889 - DNA, 25 bp, Homo sapien
agttctgggatcaggtatcttggat

SEQ ID NO: 4676890 - DNA, 25 bp, Homo sapien
gatcaggtatcttggatgctccttg

SEQ ID NO: 4676891 - DNA, 25 bp, Homo sapien
ccttttgcactcctgaaggagcaat

SEQ ID NO: 4676892 - DNA, 25 bp, Homo sapien
tggcgaaggtccacttatgtccttt

SEQ ID NO: 4676893 - DNA, 25 bp, Homo sapien
atggcgaaggtccacttatgtcctt

SEQ ID NO: 4676894 - DNA, 25 bp, Homo sapien
gatggcgaaggtccacttatgtcct

SEQ ID NO: 4676895 - DNA, 25 bp, Homo sapien
aaactcccatcctcgaaagagaagg

SEQ ID NO: 4676896 - DNA, 25 bp, Homo sapien
aactcccatcctcgaaagagaaggg

SEQ ID NO: 4676897 - DNA, 25 bp, Homo sapien
ctcccatcctcgaaagagaagggtg

SEQ ID NO: 4676898 - DNA, 25 bp, Homo sapien
tcccatcctcgaaagagaagggtgg

SEQ ID NO: 4676899 - DNA, 25 bp, Homo sapien
ggagctgtgaaggatcaagtcctac

SEQ ID NO: 4676900 - DNA, 25 bp, Homo sapien
tactttcttcattgatacggcaata

SEQ ID NO: 4676901 - DNA, 25 bp, Homo sapien
tccaactgggagctgtgaaggatca

SEQ ID NO: 4676902 - DNA, 25 bp, Homo sapien
tcaaataaatagtcataacactcac

SEQ ID NO: 4676903 - DNA, 25 bp, Homo sapien
taagaggaattctctgagagtatat

SEQ ID NO: 4676904 - DNA, 25 bp, Homo sapien
tccaatgtcagaagagattcagggt

SEQ ID NO: 4676905 - DNA, 25 bp, Homo sapien
agcaaataacatccaatgtcagaag

SEQ ID NO: 4676906 - DNA, 25 bp, Homo sapien
gtatataattagactttcttttggc

SEQ ID NO: 4676907 - DNA, 25 bp, Homo sapien
aggcgctttgcagcacatgagattt

SEQ ID NO: 4676908 - DNA, 25 bp, Homo sapien
ggctctctatggaagatatctgtga

SEQ ID NO: 4676909 - DNA, 25 bp, Homo sapien
ctgtgagccacgtgagtgaaggagg

SEQ ID NO: 4676910 - DNA, 25 bp, Homo sapien
gttagcaagttgtgtgaagtggcct

SEQ ID NO: 4676911 - DNA, 25 bp, Homo sapien
aggatgagttctgtccatggtcttc

SEQ ID NO: 4676912 - DNA, 25 bp, Homo sapien
caggatgagttctgtccatggtctt

SEQ ID NO: 4676913 - DNA, 25 bp, Homo sapien
gtgtcacagacgctggggaattggg

SEQ ID NO: 4676914 - DNA, 25 bp, Homo sapien
tgctgtgaaggtgtcacagacgctg

SEQ ID NO: 4676915 - DNA, 25 bp, Homo sapien
ttaagaaagcttctatcctgcagct

SEQ ID NO: 4676916 - DNA, 25 bp, Homo sapien
gcagctccttcagacctgctgtgaa

SEQ ID NO: 4676917 - DNA, 25 bp, Homo sapien
ggctgcagattcaaaagacaagtgg

SEQ ID NO: 4676918 - DNA, 25 bp, Homo sapien
ttgttgcttccccatctggctgcag

SEQ ID NO: 4676919 - DNA, 25 bp, Homo sapien
gaagaggcaggtcctcccccacttc

SEQ ID NO: 4676920 - DNA, 25 bp, Homo sapien
tgtccagacagctctcctaaccaga

SEQ ID NO: 4676921 - DNA, 25 bp, Homo sapien
cttttctgtgaatctaaatgaggtg

SEQ ID NO: 4676922 - DNA, 25 bp, Homo sapien
gggccaagtgacctcatgcagggtc

SEQ ID NO: 4676923 - DNA, 25 bp, Homo sapien
gccctccaggtgtgagtcattattt

SEQ ID NO: 4676924 - DNA, 25 bp, Homo sapien
cctcatgcagggtcacagtcttctc

SEQ ID NO: 4676925 - DNA, 25 bp, Homo sapien
cacatgagtcttggtgccctttaaa

SEQ ID NO: 4676926 - DNA, 25 bp, Homo sapien
cactttatatgagggcagttctgcg

SEQ ID NO: 4676927 - DNA, 25 bp, Homo sapien
gactggcacagagacactgagcacg

SEQ ID NO: 4676928 - DNA, 25 bp, Homo sapien
taaactatggttagagccctctggc

SEQ ID NO: 4676929 - DNA, 25 bp, Homo sapien
tgccagtagcagtctccaatgtgta

SEQ ID NO: 4676930 - DNA, 25 bp, Homo sapien
atgatgtgcggtcaccagccagaga

SEQ ID NO: 4676931 - DNA, 25 bp, Homo sapien
accagcatagatcctgggcagtgat

SEQ ID NO: 4676932 - DNA, 25 bp, Homo sapien
tgtagatggcaaccagcatagatcc

SEQ ID NO: 4676933 - DNA, 25 bp, Homo sapien
ctgtaggtcaccaaattcattcccc

SEQ ID NO: 4676934 - DNA, 25 bp, Homo sapien
gtgtgcaggatgaacgagatctctt

SEQ ID NO: 4676935 - DNA, 25 bp, Homo sapien
gaagtggcaaaggtacaagtgtgca

SEQ ID NO: 4676936 - DNA, 25 bp, Homo sapien
tgtgctgatgtgctcaatgccagct

SEQ ID NO: 4676937 - DNA, 25 bp, Homo sapien
caagagtttcatggtccagaatttt

SEQ ID NO: 4676938 - DNA, 25 bp, Homo sapien
cagggaccaagagtttcatggtcca

SEQ ID NO: 4676939 - DNA, 25 bp, Homo sapien
gaccaagagtttcatggtccagaat

SEQ ID NO: 4676940 - DNA, 25 bp, Homo sapien
gggaccaagagtttcatggtccaga

SEQ ID NO: 4676941 - DNA, 25 bp, Homo sapien
gattgctgtcgcacaagtctgcctg

SEQ ID NO: 4676942 - DNA, 25 bp, Homo sapien
ggttatttccccaccatcgccatag

SEQ ID NO: 4676943 - DNA, 25 bp, Homo sapien
cagctttgattaatgcggtgtccca

SEQ ID NO: 4676944 - DNA, 25 bp, Homo sapien
taatgtcagccctaatcagaaacgc

SEQ ID NO: 4676945 - DNA, 25 bp, Homo sapien
tccttccttgtgtcaccgctgcttt

SEQ ID NO: 4676946 - DNA, 25 bp, Homo sapien
tatgggggctctgatagttccttca

SEQ ID NO: 4676947 - DNA, 25 bp, Homo sapien
gcaaaggcatattagatcccactga

SEQ ID NO: 4676948 - DNA, 25 bp, Homo sapien
aattcaagcaggtctttactatggg

SEQ ID NO: 4676949 - DNA, 25 bp, Homo sapien
gtacagcaaaggcatattagatccc

SEQ ID NO: 4676950 - DNA, 25 bp, Homo sapien
ctaagggatttcagtgtcagtggag

SEQ ID NO: 4676951 - DNA, 25 bp, Homo sapien
tcttgggggattgggtcttcctcca

SEQ ID NO: 4676952 - DNA, 25 bp, Homo sapien
tcagtggagggcatggctagctttt

SEQ ID NO: 4676953 - DNA, 25 bp, Homo sapien
tccaggtgggtcattacctgtgggt

SEQ ID NO: 4676954 - DNA, 25 bp, Homo sapien
tctgagatcatacgtgttctgggtg

SEQ ID NO: 4676955 - DNA, 25 bp, Homo sapien
cttctgagatcatacgtgttctggg

SEQ ID NO: 4676956 - DNA, 25 bp, Homo sapien
ctgagatcatacgtgttctgggtgg

SEQ ID NO: 4676957 - DNA, 25 bp, Homo sapien
gagatcatacgtgttctgggtggta

SEQ ID NO: 4676958 - DNA, 25 bp, Homo sapien
tatcattagagcagttgccatgcag

SEQ ID NO: 4676959 - DNA, 25 bp, Homo sapien
ttccagatatgttggcaggccacct

SEQ ID NO: 4676960 - DNA, 25 bp, Homo sapien
tataagccccatgggccacttgtcc

SEQ ID NO: 4676961 - DNA, 25 bp, Homo sapien
gacaggtggcaccttagtctgtgta

SEQ ID NO: 4676962 - DNA, 25 bp, Homo sapien
tcagaataataatgtgactctcatt

SEQ ID NO: 4676963 - DNA, 25 bp, Homo sapien
taataatgtgactctcatttacaga

SEQ ID NO: 4676964 - DNA, 25 bp, Homo sapien
acttcagaataataatgtgactctc

SEQ ID NO: 4676965 - DNA, 25 bp, Homo sapien
gaataataatgtgactctcatttac

SEQ ID NO: 4676966 - DNA, 25 bp, Homo sapien
tttttagatactgaccccagctccg

SEQ ID NO: 4676967 - DNA, 25 bp, Homo sapien
tatgggatcattacagcctcgggaa

SEQ ID NO: 4676968 - DNA, 25 bp, Homo sapien
cacacacggctttggacgaagcaca

SEQ ID NO: 4676969 - DNA, 25 bp, Homo sapien
gcctcatggtgctcagtggtaaacg

SEQ ID NO: 4676970 - DNA, 25 bp, Homo sapien
gtttatcaaccattcattccccaag

SEQ ID NO: 4676971 - DNA, 25 bp, Homo sapien
ttatcaaccattcattccccaagtt

SEQ ID NO: 4676972 - DNA, 25 bp, Homo sapien
tcattccccaagttatctgcttctc

SEQ ID NO: 4676973 - DNA, 25 bp, Homo sapien
ttccccaagttatctgcttctccag

SEQ ID NO: 4676974 - DNA, 25 bp, Homo sapien
tagccccttcctcaatggttattcc

SEQ ID NO: 4676975 - DNA, 25 bp, Homo sapien
tgcagatagccccttcctcaatggt

SEQ ID NO: 4676976 - DNA, 25 bp, Homo sapien
cttttccctttgtttgacttgtcag

SEQ ID NO: 4676977 - DNA, 25 bp, Homo sapien
cagatagccccttcctcaatggtta

SEQ ID NO: 4676978 - DNA, 25 bp, Homo sapien
gcagtgtacctagcctgtagaagca

SEQ ID NO: 4676979 - DNA, 25 bp, Homo sapien
tactcatgggttaactatgcctcct

SEQ ID NO: 4676980 - DNA, 25 bp, Homo sapien
gattaaatgggataaaacgtgcagt

SEQ ID NO: 4676981 - DNA, 25 bp, Homo sapien
gcctcctttacaaaatcgttgtgag

SEQ ID NO: 4676982 - DNA, 25 bp, Homo sapien
ttgtggaggagcgggcatctagcct

SEQ ID NO: 4676983 - DNA, 25 bp, Homo sapien
agttgtggaggagcgggcatctagc

SEQ ID NO: 4676984 - DNA, 25 bp, Homo sapien
tacatagttgtggaggagcgggcat

SEQ ID NO: 4676985 - DNA, 25 bp, Homo sapien
atagttgtggaggagcgggcatcta

SEQ ID NO: 4676986 - DNA, 25 bp, Homo sapien
tgcaggctccataaactgtggtgga

SEQ ID NO: 4676987 - DNA, 25 bp, Homo sapien
ttctgcaggctccataaactgtggt

SEQ ID NO: 4676988 - DNA, 25 bp, Homo sapien
ctccataaactgtggtggactttct

SEQ ID NO: 4676989 - DNA, 25 bp, Homo sapien
caggctccataaactgtggtggact

SEQ ID NO: 4676990 - DNA, 25 bp, Homo sapien
cctagggcataaacgctgttccata

SEQ ID NO: 4676991 - DNA, 25 bp, Homo sapien
tgggtggcctgcaccaatcaggtga

SEQ ID NO: 4676992 - DNA, 25 bp, Homo sapien
tagtcctacaaccacgcagaactga

SEQ ID NO: 4676993 - DNA, 25 bp, Homo sapien
cagtgctttgtgcaatgcctagggc

SEQ ID NO: 4676994 - DNA, 25 bp, Homo sapien
cacgtgtcctagtaaacacctatgt

SEQ ID NO: 4676995 - DNA, 25 bp, Homo sapien
tgatagttctttttgtgccctaacc

SEQ ID NO: 4676996 - DNA, 25 bp, Homo sapien
cctggccttttgatagttctttttg

SEQ ID NO: 4676997 - DNA, 25 bp, Homo sapien
tttgtgccctaacccacgtgtccta

SEQ ID NO: 4676998 - DNA, 25 bp, Homo sapien
cattctacgtccttgcttaaagggc

SEQ ID NO: 4676999 - DNA, 25 bp, Homo sapien
ttgcttaaagggctctgccatcact

SEQ ID NO: 4677000 - DNA, 25 bp, Homo sapien
ctctgccatcactagtttctttgag

SEQ ID NO: 4677001 - DNA, 25 bp, Homo sapien
ctttttgaacatccattctacgtcc

SEQ ID NO: 4677002 - DNA, 25 bp, Homo sapien
gtgtcacctccgcagttaaatccca

SEQ ID NO: 4677003 - DNA, 25 bp, Homo sapien
tacattgaatgtgtcacctccgcag

SEQ ID NO: 4677004 - DNA, 25 bp, Homo sapien
tgaatgtgtcacctccgcagttaaa

SEQ ID NO: 4677005 - DNA, 25 bp, Homo sapien
ttatacattgaatgtgtcacctccg

SEQ ID NO: 4677006 - DNA, 25 bp, Homo sapien
gaaatccatcaaatggttttaggga

SEQ ID NO: 4677007 - DNA, 25 bp, Homo sapien
cattgtaggataggcctggagcctc

SEQ ID NO: 4677008 - DNA, 25 bp, Homo sapien
tggagcctcgcttctagagctattg

SEQ ID NO: 4677009 - DNA, 25 bp, Homo sapien
gctattgggccaagattaaattcca

SEQ ID NO: 4677010 - DNA, 25 bp, Homo sapien
ccggattacgcaggcgcgttccgtg

SEQ ID NO: 4677011 - DNA, 25 bp, Homo sapien
ggcttcctcctagcgactattgctg

SEQ ID NO: 4677012 - DNA, 25 bp, Homo sapien
tacgcaatgtgtagcccgggaagcg

SEQ ID NO: 4677013 - DNA, 25 bp, Homo sapien
cgcccggctgccgaagttacgcaat

SEQ ID NO: 4677014 - DNA, 25 bp, Homo sapien
aaggcggtcctggaatgtcggcggc

SEQ ID NO: 4677015 - DNA, 25 bp, Homo sapien
gtcctggaatgtcggcggcctggac

SEQ ID NO: 4677016 - DNA, 25 bp, Homo sapien
gggcggaaggcggtcctggaatgtc

SEQ ID NO: 4677017 - DNA, 25 bp, Homo sapien
cggaaggcggtcctggaatgtcggc

SEQ ID NO: 4677018 - DNA, 25 bp, Homo sapien
gcggcgacgctttgcgccggcgcgg

SEQ ID NO: 4677019 - DNA, 25 bp, Homo sapien
cgctttgcgccggcgcggccgagga

SEQ ID NO: 4677020 - DNA, 25 bp, Homo sapien
gtggggtgcggcgacgctttgcgcc

SEQ ID NO: 4677021 - DNA, 25 bp, Homo sapien
ggcgggcgaagcgcgcaggcgtggg

SEQ ID NO: 4677022 - DNA, 25 bp, Homo sapien
ggtggccgccatcatcgtgactcgc

SEQ ID NO: 4677023 - DNA, 25 bp, Homo sapien
tggtggccgccatcatcgtgactcg

SEQ ID NO: 4677024 - DNA, 25 bp, Homo sapien
atcatcgtgactcgccgagacgtgc

SEQ ID NO: 4677025 - DNA, 25 bp, Homo sapien
gccatcatcgtgactcgccgagacg

SEQ ID NO: 4677026 - DNA, 25 bp, Homo sapien
gtcacattcgcccagcggagcggcc

SEQ ID NO: 4677027 - DNA, 25 bp, Homo sapien
cgctgcctccgcgactgcggccttc

SEQ ID NO: 4677028 - DNA, 25 bp, Homo sapien
tcggcgagacaagcagggaatccgc

SEQ ID NO: 4677029 - DNA, 25 bp, Homo sapien
tcgggccgccgtgcttcctcacgcg

SEQ ID NO: 4677030 - DNA, 25 bp, Homo sapien
ctggccgctgggcggggtctgtggc

SEQ ID NO: 4677031 - DNA, 25 bp, Homo sapien
ccgctgggcggggtctgtggcctgg

SEQ ID NO: 4677032 - DNA, 25 bp, Homo sapien
gcggggtctgtggcctggcggggcc

SEQ ID NO: 4677033 - DNA, 25 bp, Homo sapien
ggcggggtctgtggcctggcggggc

SEQ ID NO: 4677034 - DNA, 25 bp, Homo sapien
gccgcgcagctcggctgccgggcct

SEQ ID NO: 4677035 - DNA, 25 bp, Homo sapien
gcgcagctcggctgccgggcctgcg

SEQ ID NO: 4677036 - DNA, 25 bp, Homo sapien
ccgccgcgcagctcggctgccgggc

SEQ ID NO: 4677037 - DNA, 25 bp, Homo sapien
tgccgccgcgcagctcggctgccgg

SEQ ID NO: 4677038 - DNA, 25 bp, Homo sapien
tgtctatcttgaaggtctgctgctg

SEQ ID NO: 4677039 - DNA, 25 bp, Homo sapien
cgtctcctcggggtcaatgtctatc

SEQ ID NO: 4677040 - DNA, 25 bp, Homo sapien
ctatcttgaaggtctgctgctggag

SEQ ID NO: 4677041 - DNA, 25 bp, Homo sapien
caatgtctatcttgaaggtctgctg

SEQ ID NO: 4677042 - DNA, 25 bp, Homo sapien
ctgtacgccgccagggccggcacca

SEQ ID NO: 4677043 - DNA, 25 bp, Homo sapien
cggcaccaggacccagggccctcat

SEQ ID NO: 4677044 - DNA, 25 bp, Homo sapien
tgtacgccgccagggccggcaccag

SEQ ID NO: 4677045 - DNA, 25 bp, Homo sapien
cagggccggcaccaggacccagggc

SEQ ID NO: 4677046 - DNA, 25 bp, Homo sapien
ggccccgctagcacgagctcctagg

SEQ ID NO: 4677047 - DNA, 25 bp, Homo sapien
agaaagccaggctctacggctgaga

SEQ ID NO: 4677048 - DNA, 25 bp, Homo sapien
gcgggcgtgcgctccacgccatctg

SEQ ID NO: 4677049 - DNA, 25 bp, Homo sapien
ttctcctgccacaaagcccacggcc

SEQ ID NO: 4677050 - DNA, 25 bp, Homo sapien
gggtagtggcgacgcctacgtctcc

SEQ ID NO: 4677051 - DNA, 25 bp, Homo sapien
cggcggcaaacggaacctgatactt

SEQ ID NO: 4677052 - DNA, 25 bp, Homo sapien
taccaactctgggaactaagcggct

SEQ ID NO: 4677053 - DNA, 25 bp, Homo sapien
taaggctcatcttctcgggttacca

SEQ ID NO: 4677054 - DNA, 25 bp, Homo sapien
gagggtggctgcagcgttccaactc

SEQ ID NO: 4677055 - DNA, 25 bp, Homo sapien
gaaggcagcagaacgattcatttgc

SEQ ID NO: 4677056 - DNA, 25 bp, Homo sapien
caaagtgcaatctacgcaagggtgt

SEQ ID NO: 4677057 - DNA, 25 bp, Homo sapien
gctaaaaccatcaccaaagaggcct

SEQ ID NO: 4677058 - DNA, 25 bp, Homo sapien
cacaaatggaactcaggtctactta

SEQ ID NO: 4677059 - DNA, 25 bp, Homo sapien
ggtcatagcaaataagttacaaaac

SEQ ID NO: 4677060 - DNA, 25 bp, Homo sapien
acagagaatgaaactaaccgtaatt

SEQ ID NO: 4677061 - DNA, 25 bp, Homo sapien
gtctacttaacaccaaagcccctga

SEQ ID NO: 4677062 - DNA, 25 bp, Homo sapien
ttttaagaagttaatcacacagcat

SEQ ID NO: 4677063 - DNA, 25 bp, Homo sapien
tctccactcaaaggaatccattgtt

SEQ ID NO: 4677064 - DNA, 25 bp, Homo sapien
acagcatacacccacatataaatat

SEQ ID NO: 4677065 - DNA, 25 bp, Homo sapien
tgagataagtaaaacgtaacactgt

SEQ ID NO: 4677066 - DNA, 25 bp, Homo sapien
ggacacttagcgttgccctagaaaa

SEQ ID NO: 4677067 - DNA, 25 bp, Homo sapien
cacaagagttgctatactggctacg

SEQ ID NO: 4677068 - DNA, 25 bp, Homo sapien
tctgtgaccagaccaaaaacaggtc

SEQ ID NO: 4677069 - DNA, 25 bp, Homo sapien
gaaaatctcctagcaatggtctccc

SEQ ID NO: 4677070 - DNA, 25 bp, Homo sapien
acacccagcctaaacttcagaattt

SEQ ID NO: 4677071 - DNA, 25 bp, Homo sapien
cacccagcctaaacttcagaatttt

SEQ ID NO: 4677072 - DNA, 25 bp, Homo sapien
ccacacccagcctaaacttcagaat

SEQ ID NO: 4677073 - DNA, 25 bp, Homo sapien
cacacccagcctaaacttcagaatt

SEQ ID NO: 4677074 - DNA, 25 bp, Homo sapien
gacacagcaagtggtacagccaact

SEQ ID NO: 4677075 - DNA, 25 bp, Homo sapien
gagtggtaccacattgccaagcact

SEQ ID NO: 4677076 - DNA, 25 bp, Homo sapien
catcctgtggcagtggaagagtgac

SEQ ID NO: 4677077 - DNA, 25 bp, Homo sapien
tctggccactcaggtgcaagtacaa

SEQ ID NO: 4677078 - DNA, 25 bp, Homo sapien
cagatggtgtagtgtccttcgtacg

SEQ ID NO: 4677079 - DNA, 25 bp, Homo sapien
gctggtctacctcctcgaaataagt

SEQ ID NO: 4677080 - DNA, 25 bp, Homo sapien
tctaaacttacagggaacagatggt

SEQ ID NO: 4677081 - DNA, 25 bp, Homo sapien
tcctatacggcatctatcgcggcag

SEQ ID NO: 4677082 - DNA, 25 bp, Homo sapien
gaggcaggcactataacaaaggcaa

SEQ ID NO: 4677083 - DNA, 25 bp, Homo sapien
tacaggcaccagagtatttcctggg

SEQ ID NO: 4677084 - DNA, 25 bp, Homo sapien
aaatctcctcactggacccaaggaa

SEQ ID NO: 4677085 - DNA, 25 bp, Homo sapien
taattatgtgagaagaggcaggcac

SEQ ID NO: 4677086 - DNA, 25 bp, Homo sapien
ggtgctcatgtaactacttcaaaga

SEQ ID NO: 4677087 - DNA, 25 bp, Homo sapien
gcatctagaaatcaatgctagaggt

SEQ ID NO: 4677088 - DNA, 25 bp, Homo sapien
cggcgctcagcctgaccaggcattt

SEQ ID NO: 4677089 - DNA, 25 bp, Homo sapien
cacactttgaccaaataatttcgca

SEQ ID NO: 4677090 - DNA, 25 bp, Homo sapien
aatctgtactacatctctatgaggt

SEQ ID NO: 4677091 - DNA, 25 bp, Homo sapien
tgtagtagccaacacccaagatggc

SEQ ID NO: 4677092 - DNA, 25 bp, Homo sapien
ttttaatgggtagccctgaaatata

SEQ ID NO: 4677093 - DNA, 25 bp, Homo sapien
gccaggcagtgtactaagagcctca

SEQ ID NO: 4677094 - DNA, 25 bp, Homo sapien
tatgactcctttaactgcgctgagc

SEQ ID NO: 4677095 - DNA, 25 bp, Homo sapien
tgaacaccttcacgggatgtcctag

SEQ ID NO: 4677096 - DNA, 25 bp, Homo sapien
tcaaaggaagaggtatgaactcagc

SEQ ID NO: 4677097 - DNA, 25 bp, Homo sapien
tctcttggaaaggatatggcccacc

SEQ ID NO: 4677098 - DNA, 25 bp, Homo sapien
ctctgagagtgggaccttgacatca

SEQ ID NO: 4677099 - DNA, 25 bp, Homo sapien
ttatgtttcattacaatcaccaggg

SEQ ID NO: 4677100 - DNA, 25 bp, Homo sapien
tatttcccacggagcaagaaagtaa

SEQ ID NO: 4677101 - DNA, 25 bp, Homo sapien
tatactgttcatgggtttatttccc

SEQ ID NO: 4677102 - DNA, 25 bp, Homo sapien
tttgacctgctactggaaaggcatc

SEQ ID NO: 4677103 - DNA, 25 bp, Homo sapien
tggaaaggcatctttccccttttca

SEQ ID NO: 4677104 - DNA, 25 bp, Homo sapien
aattaatttttgacctgctactgga

SEQ ID NO: 4677105 - DNA, 25 bp, Homo sapien
atttttgacctgctactggaaaggc

SEQ ID NO: 4677106 - DNA, 25 bp, Homo sapien
tttcctggttattagtgaggctagt

SEQ ID NO: 4677107 - DNA, 25 bp, Homo sapien
tgaggctagtcaaatgtataattcc

SEQ ID NO: 4677108 - DNA, 25 bp, Homo sapien
gccagttacacgatgcttacaaaag

SEQ ID NO: 4677109 - DNA, 25 bp, Homo sapien
taaaagaatatcaagacatggcatg

SEQ ID NO: 4677110 - DNA, 25 bp, Homo sapien
gttcaaggatacagcgagtataatc

SEQ ID NO: 4677111 - DNA, 25 bp, Homo sapien
taagcatttgactaaaagatgtcaa

SEQ ID NO: 4677112 - DNA, 25 bp, Homo sapien
aaattcaatactccgattgcacagg

SEQ ID NO: 4677113 - DNA, 25 bp, Homo sapien
tatataaaagacttactgggcaagg

SEQ ID NO: 4677114 - DNA, 25 bp, Homo sapien
aaccaccacaaagtttttctcatca

SEQ ID NO: 4677115 - DNA, 25 bp, Homo sapien
gcagtatcatcattgaggattttgc

SEQ ID NO: 4677116 - DNA, 25 bp, Homo sapien
tctttgagagcagtatcatcattga

SEQ ID NO: 4677117 - DNA, 25 bp, Homo sapien
aattttatattctttgagagcagta

SEQ ID NO: 4677118 - DNA, 25 bp, Homo sapien
tgaggaatctgttaggactagtacg

SEQ ID NO: 4677119 - DNA, 25 bp, Homo sapien
caggtctatttaaggcaagcttaca

SEQ ID NO: 4677120 - DNA, 25 bp, Homo sapien
ctatggatgtgtataaactgtgtcc

SEQ ID NO: 4677121 - DNA, 25 bp, Homo sapien
tccattgtgtggacttgtgatcatc

SEQ ID NO: 4677122 - DNA, 25 bp, Homo sapien
gaaaatttagagtcttaagcaccaa

SEQ ID NO: 4677123 - DNA, 25 bp, Homo sapien
taatattgcaatgtaacttcccttc

SEQ ID NO: 4677124 - DNA, 25 bp, Homo sapien
gccaagaacagctacttatacttta

SEQ ID NO: 4677125 - DNA, 25 bp, Homo sapien
ttcaaggttcctactgccaagaaca

SEQ ID NO: 4677126 - DNA, 25 bp, Homo sapien
agctcagtggtgttcaagggtcaac

SEQ ID NO: 4677127 - DNA, 25 bp, Homo sapien
tgatttttagtcttctcctaaggcc

SEQ ID NO: 4677128 - DNA, 25 bp, Homo sapien
ggtatatgcagatttctgactgtag

SEQ ID NO: 4677129 - DNA, 25 bp, Homo sapien
tagtaggtaagttttgggcaagtca

SEQ ID NO: 4677130 - DNA, 25 bp, Homo sapien
ctgtcagttgctgttgggctagtag

SEQ ID NO: 4677131 - DNA, 25 bp, Homo sapien
agaagatgctgtcgctgatgctgga

SEQ ID NO: 4677132 - DNA, 25 bp, Homo sapien
tcagttgctgttgggctagtagcca

SEQ ID NO: 4677133 - DNA, 25 bp, Homo sapien
tcagaagatgctgtcgctgatgctg

SEQ ID NO: 4677134 - DNA, 25 bp, Homo sapien
tgaccgagaagaatcacccgatgta

SEQ ID NO: 4677135 - DNA, 25 bp, Homo sapien
aggtttgaccgagaagaatcacccg

SEQ ID NO: 4677136 - DNA, 25 bp, Homo sapien
tttgaccgagaagaatcacccgatg

SEQ ID NO: 4677137 - DNA, 25 bp, Homo sapien
ggtttgaccgagaagaatcacccga

SEQ ID NO: 4677138 - DNA, 25 bp, Homo sapien
gatataattcgagcacaaagcaact

SEQ ID NO: 4677139 - DNA, 25 bp, Homo sapien
tatcaatacaaacgaaattacgagc

SEQ ID NO: 4677140 - DNA, 25 bp, Homo sapien
tcagaactgcactattttaacatgg

SEQ ID NO: 4677141 - DNA, 25 bp, Homo sapien
tgttcagtaacctaattcccagata

SEQ ID NO: 4677142 - DNA, 25 bp, Homo sapien
tctttgaggaaccatctgctgtctt

SEQ ID NO: 4677143 - DNA, 25 bp, Homo sapien
taattcctctttgaggaaccatctg

SEQ ID NO: 4677144 - DNA, 25 bp, Homo sapien
tgacttcatcctaattcctctttga

SEQ ID NO: 4677145 - DNA, 25 bp, Homo sapien
cacctttgacttcatcctaattcct

SEQ ID NO: 4677146 - DNA, 25 bp, Homo sapien
aattacttgctctcgttcatagccc

SEQ ID NO: 4677147 - DNA, 25 bp, Homo sapien
tgctctcgttcatagcccattgaca

SEQ ID NO: 4677148 - DNA, 25 bp, Homo sapien
gggctgcaattacttgctctcgttc

SEQ ID NO: 4677149 - DNA, 25 bp, Homo sapien
tgcaattacttgctctcgttcatag

SEQ ID NO: 4677150 - DNA, 25 bp, Homo sapien
tgcacatgattgatagacttgtcat

SEQ ID NO: 4677151 - DNA, 25 bp, Homo sapien
cttttgggacacctattttgatgca

SEQ ID NO: 4677152 - DNA, 25 bp, Homo sapien
cacctattttgatgcacatgattga

SEQ ID NO: 4677153 - DNA, 25 bp, Homo sapien
aaattcataaaatcgatataaaaga

SEQ ID NO: 4677154 - DNA, 25 bp, Homo sapien
taataatgcaaagcagcactgtcca

SEQ ID NO: 4677155 - DNA, 25 bp, Homo sapien
atggatacagaccaggtacacagtg

SEQ ID NO: 4677156 - DNA, 25 bp, Homo sapien
tactgatccatggtactgagaaagt

SEQ ID NO: 4677157 - DNA, 25 bp, Homo sapien
gttcaataagacacctaccaggcac

SEQ ID NO: 4677158 - DNA, 25 bp, Homo sapien
ttgctgtcgtagttgctgcagctgc

SEQ ID NO: 4677159 - DNA, 25 bp, Homo sapien
gaggagccccagtactagctgcttg

SEQ ID NO: 4677160 - DNA, 25 bp, Homo sapien
atctgttgaaactgaggctgattcc

SEQ ID NO: 4677161 - DNA, 25 bp, Homo sapien
gtctcatctgttgaaactgaggctg

SEQ ID NO: 4677162 - DNA, 25 bp, Homo sapien
gattctctcgacctatctgctgtag

SEQ ID NO: 4677163 - DNA, 25 bp, Homo sapien
ttgaggattctctcgacctatctgc

SEQ ID NO: 4677164 - DNA, 25 bp, Homo sapien
gaggattctctcgacctatctgctg

SEQ ID NO: 4677165 - DNA, 25 bp, Homo sapien
tctcgacctatctgctgtagtaacg

SEQ ID NO: 4677166 - DNA, 25 bp, Homo sapien
aatgctcctggtgttggctaatttg

SEQ ID NO: 4677167 - DNA, 25 bp, Homo sapien
tcttgaactggttcatttaacatct

SEQ ID NO: 4677168 - DNA, 25 bp, Homo sapien
ccaccagcttcttgaactggttcat

SEQ ID NO: 4677169 - DNA, 25 bp, Homo sapien
ctgaataaaatgctcctggtgttgg

SEQ ID NO: 4677170 - DNA, 25 bp, Homo sapien
ttttcctgaggtgttacttgaatgt

SEQ ID NO: 4677171 - DNA, 25 bp, Homo sapien
tcctgaggtgttacttgaatgtagt

SEQ ID NO: 4677172 - DNA, 25 bp, Homo sapien
gaatgtagttcatatgaccacttcc

SEQ ID NO: 4677173 - DNA, 25 bp, Homo sapien
tctttttcctgaggtgttacttgaa

SEQ ID NO: 4677174 - DNA, 25 bp, Homo sapien
aaattggcagccaaattctcattct

SEQ ID NO: 4677175 - DNA, 25 bp, Homo sapien
tacacactgtgtggagttgcggcat

SEQ ID NO: 4677176 - DNA, 25 bp, Homo sapien
gaaataaagacctgcaaaagctgat

SEQ ID NO: 4677177 - DNA, 25 bp, Homo sapien
gactcacgacttgctgataaacacg

SEQ ID NO: 4677178 - DNA, 25 bp, Homo sapien
tgcatttctccattggccccaaaag

SEQ ID NO: 4677179 - DNA, 25 bp, Homo sapien
gcaataaaagatgctggattatagt

SEQ ID NO: 4677180 - DNA, 25 bp, Homo sapien
cacatctcccaacccatccaaaaga

SEQ ID NO: 4677181 - DNA, 25 bp, Homo sapien
catgagatatcttgattgtatattt

SEQ ID NO: 4677182 - DNA, 25 bp, Homo sapien
caataaaagatgctggattatagtt

SEQ ID NO: 4677183 - DNA, 25 bp, Homo sapien
aacatacaggtaatacaaagtccaa

SEQ ID NO: 4677184 - DNA, 25 bp, Homo sapien
aaactgaacaagtagacatctgccc

SEQ ID NO: 4677185 - DNA, 25 bp, Homo sapien
caccatactgtgctaaagatattga

SEQ ID NO: 4677186 - DNA, 25 bp, Homo sapien
ccaaaagcctgtcatgtttatggca

SEQ ID NO: 4677187 - DNA, 25 bp, Homo sapien
cattgctctgacttgaaagatgaac

SEQ ID NO: 4677188 - DNA, 25 bp, Homo sapien
gaaatgccacctcttttcccaactc

SEQ ID NO: 4677189 - DNA, 25 bp, Homo sapien
gagtattccattatccgatcagaaa

SEQ ID NO: 4677190 - DNA, 25 bp, Homo sapien
tgagtagacagagaatgtcataaaa

SEQ ID NO: 4677191 - DNA, 25 bp, Homo sapien
tttcccacagagcaactaaacgaga

SEQ ID NO: 4677192 - DNA, 25 bp, Homo sapien
tagaatcctagccatccagtacagg

SEQ ID NO: 4677193 - DNA, 25 bp, Homo sapien
gaaatgacagtatacctcgaatgca

SEQ ID NO: 4677194 - DNA, 25 bp, Homo sapien
ggaacgatcaaaacttggcctgagc

SEQ ID NO: 4677195 - DNA, 25 bp, Homo sapien
ggttggatgcagctgccaatcctgt

SEQ ID NO: 4677196 - DNA, 25 bp, Homo sapien
ctggaggttggatgcagctgccaat

SEQ ID NO: 4677197 - DNA, 25 bp, Homo sapien
ttggatgcagctgccaatcctgtgg

SEQ ID NO: 4677198 - DNA, 25 bp, Homo sapien
ggaggttggatgcagctgccaatcc

SEQ ID NO: 4677199 - DNA, 25 bp, Homo sapien
tcatggaggcttcaccctcatgact

SEQ ID NO: 4677200 - DNA, 25 bp, Homo sapien
tcatgactttatctaaacctaatta

SEQ ID NO: 4677201 - DNA, 25 bp, Homo sapien
ctcatgactttatctaaacctaatt

SEQ ID NO: 4677202 - DNA, 25 bp, Homo sapien
ggaggcttcaccctcatgactttat

SEQ ID NO: 4677203 - DNA, 25 bp, Homo sapien
tgcaaaccaggctatacccagacac

SEQ ID NO: 4677204 - DNA, 25 bp, Homo sapien
gtctccatggccgacagctgggaag

SEQ ID NO: 4677205 - DNA, 25 bp, Homo sapien
accgagacgcagcttccaaacaaac

SEQ ID NO: 4677206 - DNA, 25 bp, Homo sapien
caattacagcattatccatgcaggg

SEQ ID NO: 4677207 - DNA, 25 bp, Homo sapien
gctgcttgtgttcctgtacagcatc

SEQ ID NO: 4677208 - DNA, 25 bp, Homo sapien
tttgtatcattctcaggcatctggg

SEQ ID NO: 4677209 - DNA, 25 bp, Homo sapien
ggcatctgggcctcaaaggagtgct

SEQ ID NO: 4677210 - DNA, 25 bp, Homo sapien
ggcctcaaaggagtgctgctgcttg

SEQ ID NO: 4677211 - DNA, 25 bp, Homo sapien
gcgacggcaggcaggccggagatgg

SEQ ID NO: 4677212 - DNA, 25 bp, Homo sapien
ggcaaacgatgtcccctctttgtca

SEQ ID NO: 4677213 - DNA, 25 bp, Homo sapien
cagcagtcttagaagtatcccattc

SEQ ID NO: 4677214 - DNA, 25 bp, Homo sapien
cacctctgggattattggatttagc

SEQ ID NO: 4677215 - DNA, 25 bp, Homo sapien
tggcaatcggctatagcaccgggct

SEQ ID NO: 4677216 - DNA, 25 bp, Homo sapien
ttttactgagagcttcaagttggcc

SEQ ID NO: 4677217 - DNA, 25 bp, Homo sapien
gcaccgggctcgagttttactgaga

SEQ ID NO: 4677218 - DNA, 25 bp, Homo sapien
tgagagtagagcatcctgtgccgag

SEQ ID NO: 4677219 - DNA, 25 bp, Homo sapien
gatcctgatgcagtctggaagaata

SEQ ID NO: 4677220 - DNA, 25 bp, Homo sapien
gcccaccggaatgaacacctgcatt

SEQ ID NO: 4677221 - DNA, 25 bp, Homo sapien
ataaagcgagcccaccggaatgaac

SEQ ID NO: 4677222 - DNA, 25 bp, Homo sapien
tggaagaataaagcgagcccaccgg

SEQ ID NO: 4677223 - DNA, 25 bp, Homo sapien
tgcttcatcacgtgggcttgacgga

SEQ ID NO: 4677224 - DNA, 25 bp, Homo sapien
catgacacgttcactgacccagaag

SEQ ID NO: 4677225 - DNA, 25 bp, Homo sapien
catggacttcggtcgtgccaccttt

SEQ ID NO: 4677226 - DNA, 25 bp, Homo sapien
ggtttggtcttcctggcaatcagcc

SEQ ID NO: 4677227 - DNA, 25 bp, Homo sapien
cttgggctttccctggcagcatgag

SEQ ID NO: 4677228 - DNA, 25 bp, Homo sapien
ggctttccctggcagcatgaggcca

SEQ ID NO: 4677229 - DNA, 25 bp, Homo sapien
gctttccctggcagcatgaggccat

SEQ ID NO: 4677230 - DNA, 25 bp, Homo sapien
tgggctttccctggcagcatgaggc

SEQ ID NO: 4677231 - DNA, 25 bp, Homo sapien
tctctgaaaatgctgtccttgttgg

SEQ ID NO: 4677232 - DNA, 25 bp, Homo sapien
catttcaatcttgtatggggacccc

SEQ ID NO: 4677233 - DNA, 25 bp, Homo sapien
gaccccttgtaagggtacatctctg

SEQ ID NO: 4677234 - DNA, 25 bp, Homo sapien
taagggtacatctctgaaaatgctg

SEQ ID NO: 4677235 - DNA, 25 bp, Homo sapien
cataggagtgtatctttgtcagagc

SEQ ID NO: 4677236 - DNA, 25 bp, Homo sapien
caaatgcctggcgtatagtaggctc

SEQ ID NO: 4677237 - DNA, 25 bp, Homo sapien
tgttatttcatcttggtctggagca

SEQ ID NO: 4677238 - DNA, 25 bp, Homo sapien
tgttaccagatatctaccaaatgcc

SEQ ID NO: 4677239 - DNA, 25 bp, Homo sapien
cttctgcccgttgtcggaatcagtc

SEQ ID NO: 4677240 - DNA, 25 bp, Homo sapien
cagttgttagtggaaatgctcttct

SEQ ID NO: 4677241 - DNA, 25 bp, Homo sapien
gctcttctgcccgttgtcggaatca

SEQ ID NO: 4677242 - DNA, 25 bp, Homo sapien
gaaatgctcttctgcccgttgtcgg

SEQ ID NO: 4677243 - DNA, 25 bp, Homo sapien
gtgagttggccggtgggggaagagc

SEQ ID NO: 4677244 - DNA, 25 bp, Homo sapien
atggtgagttggccggtgggggaag

SEQ ID NO: 4677245 - DNA, 25 bp, Homo sapien
tggtgagttggccggtgggggaaga

SEQ ID NO: 4677246 - DNA, 25 bp, Homo sapien
caccgttgagacttagtgtagatgc

SEQ ID NO: 4677247 - DNA, 25 bp, Homo sapien
tagatgcacaatcgtttactagggc

SEQ ID NO: 4677248 - DNA, 25 bp, Homo sapien
ccgttgagacttagtgtagatgcac

SEQ ID NO: 4677249 - DNA, 25 bp, Homo sapien
tagggcctctgtagcatcaggctgt

SEQ ID NO: 4677250 - DNA, 25 bp, Homo sapien
gtgattggagctttcagagttggcc

SEQ ID NO: 4677251 - DNA, 25 bp, Homo sapien
gagacagtgacggttggtactccaa

SEQ ID NO: 4677252 - DNA, 25 bp, Homo sapien
ccacataagtaaggagctgaggctc

SEQ ID NO: 4677253 - DNA, 25 bp, Homo sapien
ccaaaacttctgaccgtagagtcct

SEQ ID NO: 4677254 - DNA, 25 bp, Homo sapien
ctgtgagacgtggaaataccccagc

SEQ ID NO: 4677255 - DNA, 25 bp, Homo sapien
gtgagacgtggaaataccccagcca

SEQ ID NO: 4677256 - DNA, 25 bp, Homo sapien
gagacgtggaaataccccagccagc

SEQ ID NO: 4677257 - DNA, 25 bp, Homo sapien
tgtgagacgtggaaataccccagcc

SEQ ID NO: 4677258 - DNA, 25 bp, Homo sapien
tctgtgattttgtgagtagtcctct

SEQ ID NO: 4677259 - DNA, 25 bp, Homo sapien
ctcagatgtcttagataggaggctc

SEQ ID NO: 4677260 - DNA, 25 bp, Homo sapien
gctccgagaccaaatcccagtcttg

SEQ ID NO: 4677261 - DNA, 25 bp, Homo sapien
tcaggttatgtctcatcagaaggtc

SEQ ID NO: 4677262 - DNA, 25 bp, Homo sapien
agcagagacctttgaggtgactctg

SEQ ID NO: 4677263 - DNA, 25 bp, Homo sapien
cagcagagacctttgaggtgactct

SEQ ID NO: 4677264 - DNA, 25 bp, Homo sapien
tgtggaatggcatataaccagctct

SEQ ID NO: 4677265 - DNA, 25 bp, Homo sapien
tatctaaggcttcgttcccacaatc

SEQ ID NO: 4677266 - DNA, 25 bp, Homo sapien
tgactccctctggattacgatggcc

SEQ ID NO: 4677267 - DNA, 25 bp, Homo sapien
ccaagctcaacccatcggaaggtgt

SEQ ID NO: 4677268 - DNA, 25 bp, Homo sapien
gaggaatgtagactgtttgcacccg

SEQ ID NO: 4677269 - DNA, 25 bp, Homo sapien
gttgatttcgccagctctgatgagg

SEQ ID NO: 4677270 - DNA, 25 bp, Homo sapien
gggccggcctgctggcatctagaat

SEQ ID NO: 4677271 - DNA, 25 bp, Homo sapien
tgctttcccacgtgcacaggcgttg

SEQ ID NO: 4677272 - DNA, 25 bp, Homo sapien
caccgtagtctccacctatccccat

SEQ ID NO: 4677273 - DNA, 25 bp, Homo sapien
tttggattcaccgtagtctccacct

SEQ ID NO: 4677274 - DNA, 25 bp, Homo sapien
tcaccgtagtctccacctatcccca

SEQ ID NO: 4677275 - DNA, 25 bp, Homo sapien
ggattcaccgtagtctccacctatc

SEQ ID NO: 4677276 - DNA, 25 bp, Homo sapien
gcacagaaatatggagagggcagag

SEQ ID NO: 4677277 - DNA, 25 bp, Homo sapien
ttgttgcctttatgacggtattgcg

SEQ ID NO: 4677278 - DNA, 25 bp, Homo sapien
cagaggcgaggcgtccattgttgtt

SEQ ID NO: 4677279 - DNA, 25 bp, Homo sapien
cagggtcctccagtagtgaagcgtt

SEQ ID NO: 4677280 - DNA, 25 bp, Homo sapien
ttactcctctagcaatcggccaact

SEQ ID NO: 4677281 - DNA, 25 bp, Homo sapien
gagcctcacggatttgctcatcgcc

SEQ ID NO: 4677282 - DNA, 25 bp, Homo sapien
acatgctggagcctcacggatttgc

SEQ ID NO: 4677283 - DNA, 25 bp, Homo sapien
ttggcacatgaaccctccatcatct

SEQ ID NO: 4677284 - DNA, 25 bp, Homo sapien
tgctggagcctcacggatttgctca

SEQ ID NO: 4677285 - DNA, 25 bp, Homo sapien
gtctttttgtattcttccctccaca

SEQ ID NO: 4677286 - DNA, 25 bp, Homo sapien
ttttgtattcttccctccacaagaa

SEQ ID NO: 4677287 - DNA, 25 bp, Homo sapien
tagtctttttgtattcttccctcca

SEQ ID NO: 4677288 - DNA, 25 bp, Homo sapien
ctttttgtattcttccctccacaag

SEQ ID NO: 4677289 - DNA, 25 bp, Homo sapien
ttgatgtgaacacctgatcccaagg

SEQ ID NO: 4677290 - DNA, 25 bp, Homo sapien
gctttgatgtgaacacctgatccca

SEQ ID NO: 4677291 - DNA, 25 bp, Homo sapien
cttctctgagctttgatgtgaacac

SEQ ID NO: 4677292 - DNA, 25 bp, Homo sapien
cttggtctggttcctgaacttctct

SEQ ID NO: 4677293 - DNA, 25 bp, Homo sapien
tattcagcgttatgtcagggaagcc

SEQ ID NO: 4677294 - DNA, 25 bp, Homo sapien
cctgatgtatcatgggaaaaactga

SEQ ID NO: 4677295 - DNA, 25 bp, Homo sapien
tcttcaactggcctgcgagtgtctg

SEQ ID NO: 4677296 - DNA, 25 bp, Homo sapien
gatgacattcttctttactgcctga

SEQ ID NO: 4677297 - DNA, 25 bp, Homo sapien
gagcaattggcatgcagatggagaa

SEQ ID NO: 4677298 - DNA, 25 bp, Homo sapien
gagggagcaattggcatgcagatgg

SEQ ID NO: 4677299 - DNA, 25 bp, Homo sapien
ggtagagtgagggagcaattggcat

SEQ ID NO: 4677300 - DNA, 25 bp, Homo sapien
agtgagggagcaattggcatgcaga

SEQ ID NO: 4677301 - DNA, 25 bp, Homo sapien
ctgtttgtccctggagtaaacagca

SEQ ID NO: 4677302 - DNA, 25 bp, Homo sapien
gggtgtttcaacccatggacaggtg

SEQ ID NO: 4677303 - DNA, 25 bp, Homo sapien
aacaggatttggcattcatccatgg

SEQ ID NO: 4677304 - DNA, 25 bp, Homo sapien
gtgcccttgcatcccatacccagca

SEQ ID NO: 4677305 - DNA, 25 bp, Homo sapien
cctgtgcccttgcatcccataccca

SEQ ID NO: 4677306 - DNA, 25 bp, Homo sapien
gagataaatccaaagttaaggacga

SEQ ID NO: 4677307 - DNA, 25 bp, Homo sapien
atccaaagttaaggacgaaccacag

SEQ ID NO: 4677308 - DNA, 25 bp, Homo sapien
ggtgatgagcatacttagaagccaa

SEQ ID NO: 4677309 - DNA, 25 bp, Homo sapien
caggtgatgagcatacttagaagcc

SEQ ID NO: 4677310 - DNA, 25 bp, Homo sapien
gtgatgagcatacttagaagccaaa

SEQ ID NO: 4677311 - DNA, 25 bp, Homo sapien
tatcaggtgatgagcatacttagaa

SEQ ID NO: 4677312 - DNA, 25 bp, Homo sapien
tctgaggcctccttaaatggagaac

SEQ ID NO: 4677313 - DNA, 25 bp, Homo sapien
cattcgagtattgtgcttagagccc

SEQ ID NO: 4677314 - DNA, 25 bp, Homo sapien
tagttgggccaattggaagtactcc

SEQ ID NO: 4677315 - DNA, 25 bp, Homo sapien
tttctgaagttcacacactctgagg

SEQ ID NO: 4677316 - DNA, 25 bp, Homo sapien
actgcttggtcgaatggttgtactg

SEQ ID NO: 4677317 - DNA, 25 bp, Homo sapien
tgggctccagcaaaaccgagccagt

SEQ ID NO: 4677318 - DNA, 25 bp, Homo sapien
ggtagaggtctgcacgtttcattga

SEQ ID NO: 4677319 - DNA, 25 bp, Homo sapien
tgaatggtggagtctacctgggctc

SEQ ID NO: 4677320 - DNA, 25 bp, Homo sapien
catggtcaagttcccaactgagtca

SEQ ID NO: 4677321 - DNA, 25 bp, Homo sapien
catcttgtgagtggataatcaggaa

SEQ ID NO: 4677322 - DNA, 25 bp, Homo sapien
gtatgccttaagcagaacaaatgtg

SEQ ID NO: 4677323 - DNA, 25 bp, Homo sapien
tattcctggacttacaaaatgccaa

SEQ ID NO: 4677324 - DNA, 25 bp, Homo sapien
catctttctccacgttcgcgtctgg

SEQ ID NO: 4677325 - DNA, 25 bp, Homo sapien
gaagaaggatctcggccaatttggg

SEQ ID NO: 4677326 - DNA, 25 bp, Homo sapien
tgacatggctgtcagcgacgcgctg

SEQ ID NO: 4677327 - DNA, 25 bp, Homo sapien
actgcgtcaagcaggtgccccgaat

SEQ ID NO: 4677328 - DNA, 25 bp, Homo sapien
cactcgaggcgaccgcgacagtggt

SEQ ID NO: 4677329 - DNA, 25 bp, Homo sapien
ttgcgccgccgaccagttcgcagct

SEQ ID NO: 4677330 - DNA, 25 bp, Homo sapien
agctccgcgccacggcagccagtct

SEQ ID NO: 4677331 - DNA, 25 bp, Homo sapien
acaactcaccggagtccgcgccttg

SEQ ID NO: 4677332 - DNA, 25 bp, Homo sapien
aaatctagcctctttaatggaagcc

SEQ ID NO: 4677333 - DNA, 25 bp, Homo sapien
ctccctaaacctggaatgatggcct

SEQ ID NO: 4677334 - DNA, 25 bp, Homo sapien
tttaagcccgtgtgcattcaagaga

SEQ ID NO: 4677335 - DNA, 25 bp, Homo sapien
tagaatgtctttctctcaaccccag

SEQ ID NO: 4677336 - DNA, 25 bp, Homo sapien
cccacctggtaacctctaggtcaca

SEQ ID NO: 4677337 - DNA, 25 bp, Homo sapien
tcttctagagggagaaaacctgggc

SEQ ID NO: 4677338 - DNA, 25 bp, Homo sapien
ccagggacagatcttctagagggag

SEQ ID NO: 4677339 - DNA, 25 bp, Homo sapien
ctaggtcacactctggcttcccagg

SEQ ID NO: 4677340 - DNA, 25 bp, Homo sapien
tgaggagccctggctaaagggtcat

SEQ ID NO: 4677341 - DNA, 25 bp, Homo sapien
agccctggctaaagggtcatggaag

SEQ ID NO: 4677342 - DNA, 25 bp, Homo sapien
ggagccctggctaaagggtcatgga

SEQ ID NO: 4677343 - DNA, 25 bp, Homo sapien
accagcactaggttgaggagccctg

SEQ ID NO: 4677344 - DNA, 25 bp, Homo sapien
ttggcaggattcacggtagcgaata

SEQ ID NO: 4677345 - DNA, 25 bp, Homo sapien
cacggtagcgaatatgggcactagg

SEQ ID NO: 4677346 - DNA, 25 bp, Homo sapien
cgaatatgggcactagggcctccaa

SEQ ID NO: 4677347 - DNA, 25 bp, Homo sapien
ggattcacggtagcgaatatgggca

SEQ ID NO: 4677348 - DNA, 25 bp, Homo sapien
tctttgacaaggtgaaggacagcat

SEQ ID NO: 4677349 - DNA, 25 bp, Homo sapien
caccaagactgagtggtcggatggc

SEQ ID NO: 4677350 - DNA, 25 bp, Homo sapien
tctgtatttcaggtgagtacccctc

SEQ ID NO: 4677351 - DNA, 25 bp, Homo sapien
caagaagatccccattgctggctaa

SEQ ID NO: 4677352 - DNA, 25 bp, Homo sapien
tccgtgtttgcaactcaggtctctg

SEQ ID NO: 4677353 - DNA, 25 bp, Homo sapien
cagctacttccgtgtttgcaactca

SEQ ID NO: 4677354 - DNA, 25 bp, Homo sapien
tacttccgtgtttgcaactcaggtc

SEQ ID NO: 4677355 - DNA, 25 bp, Homo sapien
ctgccagctacttccgtgtttgcaa

SEQ ID NO: 4677356 - DNA, 25 bp, Homo sapien
attctggtgtccagctctcctggcc

SEQ ID NO: 4677357 - DNA, 25 bp, Homo sapien
gaaaacagatctataaggtgcatta

SEQ ID NO: 4677358 - DNA, 25 bp, Homo sapien
gatgctcaaatggtgcctggaaaac

SEQ ID NO: 4677359 - DNA, 25 bp, Homo sapien
ctggaaaacagatctataaggtgca

SEQ ID NO: 4677360 - DNA, 25 bp, Homo sapien
catgaggaaagatcctcccatttgc

SEQ ID NO: 4677361 - DNA, 25 bp, Homo sapien
ttggaaatgtggtctttccgggctc

SEQ ID NO: 4677362 - DNA, 25 bp, Homo sapien
cctgaggtcccgcttgtgagctgag

SEQ ID NO: 4677363 - DNA, 25 bp, Homo sapien
cctgaaactgtttatagacctgagg

SEQ ID NO: 4677364 - DNA, 25 bp, Homo sapien
tccgggctccccaatgcttggcatt

SEQ ID NO: 4677365 - DNA, 25 bp, Homo sapien
ccttctacccaagcccaaagcaagt

SEQ ID NO: 4677366 - DNA, 25 bp, Homo sapien
gactgtgctcatgccttttccataa

SEQ ID NO: 4677367 - DNA, 25 bp, Homo sapien
ccataaaccaggaccatctctggga

SEQ ID NO: 4677368 - DNA, 25 bp, Homo sapien
acagtatccattcctggactgtgct

SEQ ID NO: 4677369 - DNA, 25 bp, Homo sapien
ctgatttggactcagccccttgctg

SEQ ID NO: 4677370 - DNA, 25 bp, Homo sapien
gttctatggtattcatctgatttgg

SEQ ID NO: 4677371 - DNA, 25 bp, Homo sapien
acttcccttcagattagcatgttct

SEQ ID NO: 4677372 - DNA, 25 bp, Homo sapien
cttcagattagcatgttctatggta

SEQ ID NO: 4677373 - DNA, 25 bp, Homo sapien
tagcaatgggaaaataccggcagtt

SEQ ID NO: 4677374 - DNA, 25 bp, Homo sapien
ccagggctgccaattgaacaagaaa

SEQ ID NO: 4677375 - DNA, 25 bp, Homo sapien
gaaagcagaggtcactagcaatggg

SEQ ID NO: 4677376 - DNA, 25 bp, Homo sapien
tgtaaggccctccacttcctaagcg

SEQ ID NO: 4677377 - DNA, 25 bp, Homo sapien
tctccgcgctgtgaagagtctacct

SEQ ID NO: 4677378 - DNA, 25 bp, Homo sapien
tatggcgacatcctcagaagcattg

SEQ ID NO: 4677379 - DNA, 25 bp, Homo sapien
tgtttttaggtgcacccaagcagct

SEQ ID NO: 4677380 - DNA, 25 bp, Homo sapien
cattagtgcccctgtgaagtcggtc

SEQ ID NO: 4677381 - DNA, 25 bp, Homo sapien
gggaccttccatcacagtccagtcc

SEQ ID NO: 4677382 - DNA, 25 bp, Homo sapien
tgcccctattcgaatttccactgtg

SEQ ID NO: 4677383 - DNA, 25 bp, Homo sapien
gacataccaccgctccaaaagagga

SEQ ID NO: 4677384 - DNA, 25 bp, Homo sapien
cagtcctttgttgggacaaaaactg

SEQ ID NO: 4677385 - DNA, 25 bp, Homo sapien
ttgcgctgaaattttccatgctggg

SEQ ID NO: 4677386 - DNA, 25 bp, Homo sapien
tatagttagagctgcacacagactc

SEQ ID NO: 4677387 - DNA, 25 bp, Homo sapien
gggctgcagtgaccactatagttag

SEQ ID NO: 4677388 - DNA, 25 bp, Homo sapien
caaagagtgatccttttgcgctgaa

SEQ ID NO: 4677389 - DNA, 25 bp, Homo sapien
aatttccctaagttccaacatgtag

SEQ ID NO: 4677390 - DNA, 25 bp, Homo sapien
tccctaagttccaacatgtaggcag

SEQ ID NO: 4677391 - DNA, 25 bp, Homo sapien
tccaacatgtaggcagaagatgacc

SEQ ID NO: 4677392 - DNA, 25 bp, Homo sapien
tgtaggcagaagatgaccctgatga

SEQ ID NO: 4677393 - DNA, 25 bp, Homo sapien
gatcctcctgggcttactgaacatc

SEQ ID NO: 4677394 - DNA, 25 bp, Homo sapien
tgatcctcctgggcttactgaacat

SEQ ID NO: 4677395 - DNA, 25 bp, Homo sapien
tgcagtaactgctgaaatgcaaagg

SEQ ID NO: 4677396 - DNA, 25 bp, Homo sapien
cagtaactgctgaaatgcaaaggct

SEQ ID NO: 4677397 - DNA, 25 bp, Homo sapien
gcaaaggctgccgatccccacacac

SEQ ID NO: 4677398 - DNA, 25 bp, Homo sapien
tgcaaaggctgccgatccccacaca

SEQ ID NO: 4677399 - DNA, 25 bp, Homo sapien
aacgggtgacagatggtgatgtgca

SEQ ID NO: 4677400 - DNA, 25 bp, Homo sapien
agacccaagggcaacgtgcgtggct

SEQ ID NO: 4677401 - DNA, 25 bp, Homo sapien
tacagagggccaacgggtgacagat

SEQ ID NO: 4677402 - DNA, 25 bp, Homo sapien
tgcgtggctctacagagggccaacg

SEQ ID NO: 4677403 - DNA, 25 bp, Homo sapien
tcgcctgaatgcagtgaggcctcct

SEQ ID NO: 4677404 - DNA, 25 bp, Homo sapien
tgagtctatctgttggactgttggg

SEQ ID NO: 4677405 - DNA, 25 bp, Homo sapien
tcaaagggcgctgtcaggaaaagcc

SEQ ID NO: 4677406 - DNA, 25 bp, Homo sapien
tgttgggcttccaacagtccctcct

SEQ ID NO: 4677407 - DNA, 25 bp, Homo sapien
tcgtggataacgacaaattcgtatg

SEQ ID NO: 4677408 - DNA, 25 bp, Homo sapien
aattcgtatgtgaacttaactctgc

SEQ ID NO: 4677409 - DNA, 25 bp, Homo sapien
tcgtatgtgaacttaactctgctta

SEQ ID NO: 4677410 - DNA, 25 bp, Homo sapien
ttgggcacaaataaacgttgtcgtg

SEQ ID NO: 4677411 - DNA, 25 bp, Homo sapien
tgaagtatcttgtttgttcctgtgt

SEQ ID NO: 4677412 - DNA, 25 bp, Homo sapien
tagtgtcgggtctgttgctccaagc

SEQ ID NO: 4677413 - DNA, 25 bp, Homo sapien
tgctccaagcagaaggctgtacatg

SEQ ID NO: 4677414 - DNA, 25 bp, Homo sapien
catgcttcctaactgaagtatcttg

SEQ ID NO: 4677415 - DNA, 25 bp, Homo sapien
gcaaatggagctgaccacaaggcaa

SEQ ID NO: 4677416 - DNA, 25 bp, Homo sapien
catctgcgacggctctgaatgggca

SEQ ID NO: 4677417 - DNA, 25 bp, Homo sapien
tgaatgggcagaaggcaaatggagc

SEQ ID NO: 4677418 - DNA, 25 bp, Homo sapien
ctgcgacggctctgaatgggcagaa

SEQ ID NO: 4677419 - DNA, 25 bp, Homo sapien
gagagctgtgccactgagcctacgt

SEQ ID NO: 4677420 - DNA, 25 bp, Homo sapien
gatagcttttatttggacagcagcc

SEQ ID NO: 4677421 - DNA, 25 bp, Homo sapien
gaagctccatggtacttgccaaaac

SEQ ID NO: 4677422 - DNA, 25 bp, Homo sapien
caaaacttgtaagtctccagttcag

SEQ ID NO: 4677423 - DNA, 25 bp, Homo sapien
ttgagtgttagccttaatcccatga

SEQ ID NO: 4677424 - DNA, 25 bp, Homo sapien
gctattgcttgagtgttagccttaa

SEQ ID NO: 4677425 - DNA, 25 bp, Homo sapien
tagccttaatcccatgaggctttgc

SEQ ID NO: 4677426 - DNA, 25 bp, Homo sapien
ctgctattgcttgagtgttagcctt

SEQ ID NO: 4677427 - DNA, 25 bp, Homo sapien
acaccacgcgctttctgtttgtcag

SEQ ID NO: 4677428 - DNA, 25 bp, Homo sapien
ttgactggaatcacaaagagacatg

SEQ ID NO: 4677429 - DNA, 25 bp, Homo sapien
tgtgtgttgactggaatcacaaaga

SEQ ID NO: 4677430 - DNA, 25 bp, Homo sapien
acatggggccagacaccacgcgctt

SEQ ID NO: 4677431 - DNA, 25 bp, Homo sapien
tgttcccggatactgaaagggtaca

SEQ ID NO: 4677432 - DNA, 25 bp, Homo sapien
ttaggccataggcaattttgtttgc

SEQ ID NO: 4677433 - DNA, 25 bp, Homo sapien
ggtacagaaggtaactgcatgtttg

SEQ ID NO: 4677434 - DNA, 25 bp, Homo sapien
gactcttttggcgttgatttaacat

SEQ ID NO: 4677435 - DNA, 25 bp, Homo sapien
ctgctactgacttaaacaactgatg

SEQ ID NO: 4677436 - DNA, 25 bp, Homo sapien
ttaaacaactgatgcctctcacact

SEQ ID NO: 4677437 - DNA, 25 bp, Homo sapien
tactgacttaaacaactgatgcctc

SEQ ID NO: 4677438 - DNA, 25 bp, Homo sapien
gacttaaacaactgatgcctctcac

SEQ ID NO: 4677439 - DNA, 25 bp, Homo sapien
tgtcataataacattggcaatgcta

SEQ ID NO: 4677440 - DNA, 25 bp, Homo sapien
gttctcagcttatgcttattaacaa

SEQ ID NO: 4677441 - DNA, 25 bp, Homo sapien
tttgcaatcccataaatattatatg

SEQ ID NO: 4677442 - DNA, 25 bp, Homo sapien
tcaaacatacagcattccacgaatg

SEQ ID NO: 4677443 - DNA, 25 bp, Homo sapien
tgcccaggaggacactttcattgct

SEQ ID NO: 4677444 - DNA, 25 bp, Homo sapien
gaggacactttcattgctgccaagg

SEQ ID NO: 4677445 - DNA, 25 bp, Homo sapien
ctgcccatgcccaggaggacacttt

SEQ ID NO: 4677446 - DNA, 25 bp, Homo sapien
tcattgctgccaaggaccttgccaa

SEQ ID NO: 4677447 - DNA, 25 bp, Homo sapien
cagcttgtcttatctgcccacactg

SEQ ID NO: 4677448 - DNA, 25 bp, Homo sapien
cttgtcttatctgcccacactgcgg

SEQ ID NO: 4677449 - DNA, 25 bp, Homo sapien
gtcttatctgcccacactgcggcag

SEQ ID NO: 4677450 - DNA, 25 bp, Homo sapien
gcttgtcttatctgcccacactgcg

SEQ ID NO: 4677451 - DNA, 25 bp, Homo sapien
actatggaactctcatcatttctta

SEQ ID NO: 4677452 - DNA, 25 bp, Homo sapien
tagtgatgctggtgaatttccattg

SEQ ID NO: 4677453 - DNA, 25 bp, Homo sapien
cctaaagactatggaactctcatca

SEQ ID NO: 4677454 - DNA, 25 bp, Homo sapien
catcatttcttagtgatgctggtga

SEQ ID NO: 4677455 - DNA, 25 bp, Homo sapien
cagcgccgggcccttaacatctcca

SEQ ID NO: 4677456 - DNA, 25 bp, Homo sapien
gggcccttaacatctccagcgccgg

SEQ ID NO: 4677457 - DNA, 25 bp, Homo sapien
gccctttcatctccagcgccgggcc

SEQ ID NO: 4677458 - DNA, 25 bp, Homo sapien
cagcgccgggcccttacatctccag

SEQ ID NO: 4677459 - DNA, 25 bp, Homo sapien
cctttcagacagtatattatgacct

SEQ ID NO: 4677460 - DNA, 25 bp, Homo sapien
tattatgacctttatgcactgggcc

SEQ ID NO: 4677461 - DNA, 25 bp, Homo sapien
ggttcttactacatcattatctcct

SEQ ID NO: 4677462 - DNA, 25 bp, Homo sapien
agtttggttcttactacatcattat

SEQ ID NO: 4677463 - DNA, 25 bp, Homo sapien
ggaacagcacggcgctggtgggcat

SEQ ID NO: 4677464 - DNA, 25 bp, Homo sapien
acccctttttgcgacttgagtggag

SEQ ID NO: 4677465 - DNA, 25 bp, Homo sapien
attacccctttttgcgacttgagtg

SEQ ID NO: 4677466 - DNA, 25 bp, Homo sapien
ctttttgcgacttgagtggagcagg

SEQ ID NO: 4677467 - DNA, 25 bp, Homo sapien
caattacccctttttgcgacttgag

SEQ ID NO: 4677468 - DNA, 25 bp, Homo sapien
atgttgctctgtgccattatgatgc

SEQ ID NO: 4677469 - DNA, 25 bp, Homo sapien
tggtgctctgtcagctttgggacac

SEQ ID NO: 4677470 - DNA, 25 bp, Homo sapien
gctcaactccaggtatcaggcctgg

SEQ ID NO: 4677471 - DNA, 25 bp, Homo sapien
gtctctggagcgtttccctctgcaa

SEQ ID NO: 4677472 - DNA, 25 bp, Homo sapien
gatattctaaatgggggttggcacc

SEQ ID NO: 4677473 - DNA, 25 bp, Homo sapien
ttggggttcccagatattctaaatg

SEQ ID NO: 4677474 - DNA, 25 bp, Homo sapien
ttggaactctgtactgtatcagaaa

SEQ ID NO: 4677475 - DNA, 25 bp, Homo sapien
tgtactgtatcagaaagaaccagtg

SEQ ID NO: 4677476 - DNA, 25 bp, Homo sapien
aaatggctgaaggaccccgagagtc

SEQ ID NO: 4677477 - DNA, 25 bp, Homo sapien
caatcttgtgcaaatggctgaagga

SEQ ID NO: 4677478 - DNA, 25 bp, Homo sapien
gtgtcctgtcaacggccactggctg

SEQ ID NO: 4677479 - DNA, 25 bp, Homo sapien
actggctggtgtgcttcaaggacaa

SEQ ID NO: 4677480 - DNA, 25 bp, Homo sapien
gaagtcacagttgccaactgaaaac

SEQ ID NO: 4677481 - DNA, 25 bp, Homo sapien
catctggcctcttctacgactgggt

SEQ ID NO: 4677482 - DNA, 25 bp, Homo sapien
acttctctcccggaagtcacagttg

SEQ ID NO: 4677483 - DNA, 25 bp, Homo sapien
ctcttctacgactgggtattttcca

SEQ ID NO: 4677484 - DNA, 25 bp, Homo sapien
tgcagattttctccggccctgctgg

SEQ ID NO: 4677485 - DNA, 25 bp, Homo sapien
tgctggggcgtccagagcactcagc

SEQ ID NO: 4677486 - DNA, 25 bp, Homo sapien
acatcttgactccaagtcaaagggc

SEQ ID NO: 4677487 - DNA, 25 bp, Homo sapien
ctcagcaccaaactgtacagcacat

SEQ ID NO: 4677488 - DNA, 25 bp, Homo sapien
agttggtctgcagagctctgcttgg

SEQ ID NO: 4677489 - DNA, 25 bp, Homo sapien
cctgttgttgactatcaggaaagcc

SEQ ID NO: 4677490 - DNA, 25 bp, Homo sapien
acccatctcgttcttcttcctgttg

SEQ ID NO: 4677491 - DNA, 25 bp, Homo sapien
gaaaattgtgaaacatgcgcagtga

SEQ ID NO: 4677492 - DNA, 25 bp, Homo sapien
aatagcaacgcctcagtgtgtggcc

SEQ ID NO: 4677493 - DNA, 25 bp, Homo sapien
tcccatccatttaggccccagggaa

SEQ ID NO: 4677494 - DNA, 25 bp, Homo sapien
tctctccttacaaatgagggtgatg

SEQ ID NO: 4677495 - DNA, 25 bp, Homo sapien
cagaataacctttggaacagacagg

SEQ ID NO: 4677496 - DNA, 25 bp, Homo sapien
cttgggttacataggtgtgaaggtc

SEQ ID NO: 4677497 - DNA, 25 bp, Homo sapien
catggcccctcagcatttctgtgac

SEQ ID NO: 4677498 - DNA, 25 bp, Homo sapien
catttggacaggtcccatctctgtg

SEQ ID NO: 4677499 - DNA, 25 bp, Homo sapien
ggatagcatccacaatgacgctgaa

SEQ ID NO: 4677500 - DNA, 25 bp, Homo sapien
ccacaatgacgctgaaaggggaact

SEQ ID NO: 4677501 - DNA, 25 bp, Homo sapien
caatgacgctgaaaggggaacttcc

SEQ ID NO: 4677502 - DNA, 25 bp, Homo sapien
aaaggggaacttccaatggatgctc

SEQ ID NO: 4677503 - DNA, 25 bp, Homo sapien
tcttccccaaagtctgcttccatat

SEQ ID NO: 4677504 - DNA, 25 bp, Homo sapien
tctttgaatgttgcagccaaaccac

SEQ ID NO: 4677505 - DNA, 25 bp, Homo sapien
gtctttgaatgttgcagccaaacca

SEQ ID NO: 4677506 - DNA, 25 bp, Homo sapien
ggtctttgaatgttgcagccaaacc

SEQ ID NO: 4677507 - DNA, 25 bp, Homo sapien
gagtgcagtagtttcatcactgctc

SEQ ID NO: 4677508 - DNA, 25 bp, Homo sapien
gtgcagtagtttcatcactgctcac

SEQ ID NO: 4677509 - DNA, 25 bp, Homo sapien
agcaagtgttagatccaagagactc

SEQ ID NO: 4677510 - DNA, 25 bp, Homo sapien
gagcaagtgttagatccaagagact

SEQ ID NO: 4677511 - DNA, 25 bp, Homo sapien
tcatatgagcaggatgtgtgagcag

SEQ ID NO: 4677512 - DNA, 25 bp, Homo sapien
attcatatgagcaggatgtgtgagc

SEQ ID NO: 4677513 - DNA, 25 bp, Homo sapien
ttcatatgagcaggatgtgtgagca

SEQ ID NO: 4677514 - DNA, 25 bp, Homo sapien
caaaagtggattaaactgatctgcc

SEQ ID NO: 4677515 - DNA, 25 bp, Homo sapien
gcctgtagtgtttgcatccttcccc

SEQ ID NO: 4677516 - DNA, 25 bp, Homo sapien
tgagggactacttcccagagggctg

SEQ ID NO: 4677517 - DNA, 25 bp, Homo sapien
tacagaggtgacaattgaggcagaa

SEQ ID NO: 4677518 - DNA, 25 bp, Homo sapien
cgtttgagccaggttgagttggacc

SEQ ID NO: 4677519 - DNA, 25 bp, Homo sapien
caggttgagttggaccaggccaaac

SEQ ID NO: 4677520 - DNA, 25 bp, Homo sapien
catgcagccgtttgagccaggttga

SEQ ID NO: 4677521 - DNA, 25 bp, Homo sapien
gagcaatggcatgcagccgtttgag

SEQ ID NO: 4677522 - DNA, 25 bp, Homo sapien
gtggtcattcccagaacaatggcag

SEQ ID NO: 4677523 - DNA, 25 bp, Homo sapien
ggtcattcccagaacaatggcagga

SEQ ID NO: 4677524 - DNA, 25 bp, Homo sapien
tcccagaacaatggcaggatacagg

SEQ ID NO: 4677525 - DNA, 25 bp, Homo sapien
tcattcccagaacaatggcaggata

SEQ ID NO: 4677526 - DNA, 25 bp, Homo sapien
ctgcagacgaagggactggggctcc

SEQ ID NO: 4677527 - DNA, 25 bp, Homo sapien
gcctcttcctgcagacgaagggact

SEQ ID NO: 4677528 - DNA, 25 bp, Homo sapien
tgcagacgaagggactggggctcct

SEQ ID NO: 4677529 - DNA, 25 bp, Homo sapien
tcttcctgcagacgaagggactggg

SEQ ID NO: 4677530 - DNA, 25 bp, Homo sapien
tcagttgaagactcttcagctttgg

SEQ ID NO: 4677531 - DNA, 25 bp, Homo sapien
ctgattgtcattctggccaggagcc

SEQ ID NO: 4677532 - DNA, 25 bp, Homo sapien
cctttgggcagggaattagttctgt

SEQ ID NO: 4677533 - DNA, 25 bp, Homo sapien
catctatgcctctgatcagttgaag

SEQ ID NO: 4677534 - DNA, 25 bp, Homo sapien
acttcctggttcagatgtgggagaa

SEQ ID NO: 4677535 - DNA, 25 bp, Homo sapien
ggttgtgcagtcaccaatcgcacct

SEQ ID NO: 4677536 - DNA, 25 bp, Homo sapien
ttggttggttgtgcagtcaccaatc

SEQ ID NO: 4677537 - DNA, 25 bp, Homo sapien
gatgtgggagaaagcccgcccccca

SEQ ID NO: 4677538 - DNA, 25 bp, Homo sapien
aggaacaggattcgtccctcactct

SEQ ID NO: 4677539 - DNA, 25 bp, Homo sapien
tgttcagaagcaggtgcgagcaccc

SEQ ID NO: 4677540 - DNA, 25 bp, Homo sapien
gaccagaagggcatttcgtcacgag

SEQ ID NO: 4677541 - DNA, 25 bp, Homo sapien
atcgaagcttctccctgaccagggc

SEQ ID NO: 4677542 - DNA, 25 bp, Homo sapien
caactgttttcattatttccagtgg

SEQ ID NO: 4677543 - DNA, 25 bp, Homo sapien
actgttttcattatttccagtggtc

SEQ ID NO: 4677544 - DNA, 25 bp, Homo sapien
tgttttcattatttccagtggtcat

SEQ ID NO: 4677545 - DNA, 25 bp, Homo sapien
ctgtttgatccaactgttttcatta

SEQ ID NO: 4677546 - DNA, 25 bp, Homo sapien
ctttcaaggctgatgttggtacagc

SEQ ID NO: 4677547 - DNA, 25 bp, Homo sapien
tttcaaggctgatgttggtacagcc

SEQ ID NO: 4677548 - DNA, 25 bp, Homo sapien
aaagcctgatgttcacaactacgat

SEQ ID NO: 4677549 - DNA, 25 bp, Homo sapien
tgatgttcacaactacgatttccat

SEQ ID NO: 4677550 - DNA, 25 bp, Homo sapien
aggttccaagtgggacaggatctgc

SEQ ID NO: 4677551 - DNA, 25 bp, Homo sapien
ccaggttccaagtgggacaggatct

SEQ ID NO: 4677552 - DNA, 25 bp, Homo sapien
caggttccaagtgggacaggatctg

SEQ ID NO: 4677553 - DNA, 25 bp, Homo sapien
ttttctactcacaataaggaaggta

SEQ ID NO: 4677554 - DNA, 25 bp, Homo sapien
gggatccctgacttatagacggtca

SEQ ID NO: 4677555 - DNA, 25 bp, Homo sapien
tacctccaggtaggtaacatcagaa

SEQ ID NO: 4677556 - DNA, 25 bp, Homo sapien
attgaattggattggagggtaccca

SEQ ID NO: 4677557 - DNA, 25 bp, Homo sapien
aagctcacatagtgcttgacatcca

SEQ ID NO: 4677558 - DNA, 25 bp, Homo sapien
tcttccttgaagctcacatagtgct

SEQ ID NO: 4677559 - DNA, 25 bp, Homo sapien
tccttgaagctcacatagtgcttga

SEQ ID NO: 4677560 - DNA, 25 bp, Homo sapien
ttgaagctcacatagtgcttgacat

SEQ ID NO: 4677561 - DNA, 25 bp, Homo sapien
ttatagcaacagtggtggaactagc

SEQ ID NO: 4677562 - DNA, 25 bp, Homo sapien
tccatggtatttcaacaaagcgagc

SEQ ID NO: 4677563 - DNA, 25 bp, Homo sapien
ctgcctgaattgacctccatggtat

SEQ ID NO: 4677564 - DNA, 25 bp, Homo sapien
caaagcgagcagtagattcattgag

SEQ ID NO: 4677565 - DNA, 25 bp, Homo sapien
gcaccgatggcattccctttgccct

SEQ ID NO: 4677566 - DNA, 25 bp, Homo sapien
accgatggcattccctttgccctga

SEQ ID NO: 4677567 - DNA, 25 bp, Homo sapien
cagcaccgatggcattccctttgcc

SEQ ID NO: 4677568 - DNA, 25 bp, Homo sapien
ccagcaccgatggcattccctttgc

SEQ ID NO: 4677569 - DNA, 25 bp, Homo sapien
ggtgaagaggctgcatcaccctcct

SEQ ID NO: 4677570 - DNA, 25 bp, Homo sapien
agagctgtgaaacagtcttgggcag

SEQ ID NO: 4677571 - DNA, 25 bp, Homo sapien
tgctggtgatgactctcttaggcac

SEQ ID NO: 4677572 - DNA, 25 bp, Homo sapien
tctgcatgagctgttgtaatctggg

SEQ ID NO: 4677573 - DNA, 25 bp, Homo sapien
cccagcagacactggtgaccctctt

SEQ ID NO: 4677574 - DNA, 25 bp, Homo sapien
cttggaggagcggtcccagcagaca

SEQ ID NO: 4677575 - DNA, 25 bp, Homo sapien
ccagcagacactggtgaccctcttc

SEQ ID NO: 4677576 - DNA, 25 bp, Homo sapien
taggagaaggacacgctaccagata

SEQ ID NO: 4677577 - DNA, 25 bp, Homo sapien
tggcaccaacacctctcagatctct

SEQ ID NO: 4677578 - DNA, 25 bp, Homo sapien
ccatctgctcttttgtaggagaagg

SEQ ID NO: 4677579 - DNA, 25 bp, Homo sapien
tagctccatctgaaccaaatctcct

SEQ ID NO: 4677580 - DNA, 25 bp, Homo sapien
tagcttgacattccctaaatggatc

SEQ ID NO: 4677581 - DNA, 25 bp, Homo sapien
tgggcactagcttgacattccctaa

SEQ ID NO: 4677582 - DNA, 25 bp, Homo sapien
taaatggatctcatgacttagcacg

SEQ ID NO: 4677583 - DNA, 25 bp, Homo sapien
cacgtccacggctttgtacatgctc

SEQ ID NO: 4677584 - DNA, 25 bp, Homo sapien
caaatgtcagggatactttagatgc

SEQ ID NO: 4677585 - DNA, 25 bp, Homo sapien
tgtgcatgcgcatttgctctccatt

SEQ ID NO: 4677586 - DNA, 25 bp, Homo sapien
tatggcgtatgagtcctacattgtg

SEQ ID NO: 4677587 - DNA, 25 bp, Homo sapien
gctggctgacgcacccagagctgtt

SEQ ID NO: 4677588 - DNA, 25 bp, Homo sapien
tggatgcaccgatgtttaaatcatt

SEQ ID NO: 4677589 - DNA, 25 bp, Homo sapien
tagctataatggtgtttacattgga

SEQ ID NO: 4677590 - DNA, 25 bp, Homo sapien
tacattggatgcaccgatgtttaaa

SEQ ID NO: 4677591 - DNA, 25 bp, Homo sapien
taatggtgtttacattggatgcacc

SEQ ID NO: 4677592 - DNA, 25 bp, Homo sapien
tgtggaggccatgtactgaatgcag

SEQ ID NO: 4677593 - DNA, 25 bp, Homo sapien
ccgtgtggaggccatgtactgaatg

SEQ ID NO: 4677594 - DNA, 25 bp, Homo sapien
aggcctctgaatgcaataccgaatc

SEQ ID NO: 4677595 - DNA, 25 bp, Homo sapien
gaatgcaataccgaatcaacactga

SEQ ID NO: 4677596 - DNA, 25 bp, Homo sapien
cagctgtgaaaaggtcagtcttcag

SEQ ID NO: 4677597 - DNA, 25 bp, Homo sapien
gctttggtgagcactccagctgtga

SEQ ID NO: 4677598 - DNA, 25 bp, Homo sapien
acagctttggtgagcactccagctg

SEQ ID NO: 4677599 - DNA, 25 bp, Homo sapien
tgtgaaaaggtcagtcttcagcttc

SEQ ID NO: 4677600 - DNA, 25 bp, Homo sapien
ccttggtctctctgatttgtattaa

SEQ ID NO: 4677601 - DNA, 25 bp, Homo sapien
ttctctgtcaccatagcagaagatg

SEQ ID NO: 4677602 - DNA, 25 bp, Homo sapien
cgcaaggatgctcgcccaccacctt

SEQ ID NO: 4677603 - DNA, 25 bp, Homo sapien
tatgccttccaagccgcaaggatgc

SEQ ID NO: 4677604 - DNA, 25 bp, Homo sapien
tcaggcctgcttctgcagaggacac

SEQ ID NO: 4677605 - DNA, 25 bp, Homo sapien
agttcaggcctgcttctgcagagga

SEQ ID NO: 4677606 - DNA, 25 bp, Homo sapien
tgaagttcaggcctgcttctgcaga

SEQ ID NO: 4677607 - DNA, 25 bp, Homo sapien
ctgaagttcaggcctgcttctgcag

SEQ ID NO: 4677608 - DNA, 25 bp, Homo sapien
cagcagggggacaaagagagggaga

SEQ ID NO: 4677609 - DNA, 25 bp, Homo sapien
aagaagccaagatgtaagaattatt

SEQ ID NO: 4677610 - DNA, 25 bp, Homo sapien
agaaagaagccaagatgtaagaatt

SEQ ID NO: 4677611 - DNA, 25 bp, Homo sapien
gaagccaagatgtaagaattatttt

SEQ ID NO: 4677612 - DNA, 25 bp, Homo sapien
ctatttcgatggcaagtgtcaaaca

SEQ ID NO: 4677613 - DNA, 25 bp, Homo sapien
ttcaccagctttcctaaatgacctg

SEQ ID NO: 4677614 - DNA, 25 bp, Homo sapien
tgccagatgagtggcaaggcagacc

SEQ ID NO: 4677615 - DNA, 25 bp, Homo sapien
gaattgagcactgaagcaatggttc

SEQ ID NO: 4677616 - DNA, 25 bp, Homo sapien
tgacagaatcaatggagagaatctg

SEQ ID NO: 4677617 - DNA, 25 bp, Homo sapien
caatggagagaatctgctcaatgct

SEQ ID NO: 4677618 - DNA, 25 bp, Homo sapien
gctgcagctgaatcactgacatcat

SEQ ID NO: 4677619 - DNA, 25 bp, Homo sapien
gctacattgttctatgatcttttct

SEQ ID NO: 4677620 - DNA, 25 bp, Homo sapien
tgaaaacgtgaatgggaatgcccag

SEQ ID NO: 4677621 - DNA, 25 bp, Homo sapien
ttttacaagccacgcagggtcaggc

SEQ ID NO: 4677622 - DNA, 25 bp, Homo sapien
gagtggcacttccacgtgcctgcag

SEQ ID NO: 4677623 - DNA, 25 bp, Homo sapien
acaataaaggcagcaggcggttttc

SEQ ID NO: 4677624 - DNA, 25 bp, Homo sapien
tatgcgtgtagatgggatattgttt

SEQ ID NO: 4677625 - DNA, 25 bp, Homo sapien
atgcgtgtagatgggatattgtttg

SEQ ID NO: 4677626 - DNA, 25 bp, Homo sapien
tgtgtatgcgtgtagatgggatatt

SEQ ID NO: 4677627 - DNA, 25 bp, Homo sapien
tgtatgcgtgtagatgggatattgt

SEQ ID NO: 4677628 - DNA, 25 bp, Homo sapien
tcattaagtccagggagagatcctc

SEQ ID NO: 4677629 - DNA, 25 bp, Homo sapien
atcattaagtccagggagagatcct

SEQ ID NO: 4677630 - DNA, 25 bp, Homo sapien
cagccagcgagacaaattgactgac

SEQ ID NO: 4677631 - DNA, 25 bp, Homo sapien
ccaggcgcagaacagacagccagcc

SEQ ID NO: 4677632 - DNA, 25 bp, Homo sapien
gcaaaatgctgacaaagccgtgaat

SEQ ID NO: 4677633 - DNA, 25 bp, Homo sapien
tctggacgagggcaaaatgctgaca

SEQ ID NO: 4677634 - DNA, 25 bp, Homo sapien
aagccgtgaatgaattctcttctcc

SEQ ID NO: 4677635 - DNA, 25 bp, Homo sapien
ccacccttctctggacgagggcaaa

SEQ ID NO: 4677636 - DNA, 25 bp, Homo sapien
ttaaagctgaacactgagtgctttg

SEQ ID NO: 4677637 - DNA, 25 bp, Homo sapien
taaagctgaacactgagtgctttgg

SEQ ID NO: 4677638 - DNA, 25 bp, Homo sapien
tgcagaatcataaacattgcaatgg

SEQ ID NO: 4677639 - DNA, 25 bp, Homo sapien
taaacattgcaatggaatttgggaa

SEQ ID NO: 4677640 - DNA, 25 bp, Homo sapien
tacttcatagagatcttctccccgc

SEQ ID NO: 4677641 - DNA, 25 bp, Homo sapien
ccagaactttaggaataatagaatc

SEQ ID NO: 4677642 - DNA, 25 bp, Homo sapien
ccgcaactcccacggcagattctcc

SEQ ID NO: 4677643 - DNA, 25 bp, Homo sapien
taagtgaaaacagtccagaacttta

SEQ ID NO: 4677644 - DNA, 25 bp, Homo sapien
gcattcgtacacttctaccaggttt

SEQ ID NO: 4677645 - DNA, 25 bp, Homo sapien
ttttgggcattcgtacacttctacc

SEQ ID NO: 4677646 - DNA, 25 bp, Homo sapien
tgggcattcgtacacttctaccagg

SEQ ID NO: 4677647 - DNA, 25 bp, Homo sapien
tctcttttgggcattcgtacacttc

SEQ ID NO: 4677648 - DNA, 25 bp, Homo sapien
caatgaccctttaagtttcagtcca

SEQ ID NO: 4677649 - DNA, 25 bp, Homo sapien
atgaccctttaagtttcagtccagt

SEQ ID NO: 4677650 - DNA, 25 bp, Homo sapien
aatgaccctttaagtttcagtccag

SEQ ID NO: 4677651 - DNA, 25 bp, Homo sapien
ttttgccactaaatctcctgttatc

SEQ ID NO: 4677652 - DNA, 25 bp, Homo sapien
actaaatctcctgttatccctttct

SEQ ID NO: 4677653 - DNA, 25 bp, Homo sapien
tgccactaaatctcctgttatccct

SEQ ID NO: 4677654 - DNA, 25 bp, Homo sapien
gccactaaatctcctgttatccctt

SEQ ID NO: 4677655 - DNA, 25 bp, Homo sapien
taaactctctaatgtgatcaaccga

SEQ ID NO: 4677656 - DNA, 25 bp, Homo sapien
cctgagcagtaaggatgctgaggcc

SEQ ID NO: 4677657 - DNA, 25 bp, Homo sapien
aaaggagtatctttgcctgcccaag

SEQ ID NO: 4677658 - DNA, 25 bp, Homo sapien
tatctaagtggaaggtcttgccctc

SEQ ID NO: 4677659 - DNA, 25 bp, Homo sapien
ccagtttctcgctgggtccctctca

SEQ ID NO: 4677660 - DNA, 25 bp, Homo sapien
tagtaaggccagtttctcgctgggt

SEQ ID NO: 4677661 - DNA, 25 bp, Homo sapien
gtaaggccagtttctcgctgggtcc

SEQ ID NO: 4677662 - DNA, 25 bp, Homo sapien
aaggccagtttctcgctgggtccct

SEQ ID NO: 4677663 - DNA, 25 bp, Homo sapien
catagtactaacaatctcagctggg

SEQ ID NO: 4677664 - DNA, 25 bp, Homo sapien
ctctcagggaggtaatacaagtgtg

SEQ ID NO: 4677665 - DNA, 25 bp, Homo sapien
tctttttcctgggatgtaatatata

SEQ ID NO: 4677666 - DNA, 25 bp, Homo sapien
gggtgaattgtaaacctctcaggga

SEQ ID NO: 4677667 - DNA, 25 bp, Homo sapien
gctgtggtctgcatctcaaccaggt

SEQ ID NO: 4677668 - DNA, 25 bp, Homo sapien
tattcttccattgctgtggtctgca

SEQ ID NO: 4677669 - DNA, 25 bp, Homo sapien
attgctgtggtctgcatctcaacca

SEQ ID NO: 4677670 - DNA, 25 bp, Homo sapien
tggtctgcatctcaaccaggtccat

SEQ ID NO: 4677671 - DNA, 25 bp, Homo sapien
cacttttcatctcctggacccaatt

SEQ ID NO: 4677672 - DNA, 25 bp, Homo sapien
cttttcatctcctggacccaatttg

SEQ ID NO: 4677673 - DNA, 25 bp, Homo sapien
tcacttttcatctcctggacccaat

SEQ ID NO: 4677674 - DNA, 25 bp, Homo sapien
ttttcatctcctggacccaatttgc

SEQ ID NO: 4677675 - DNA, 25 bp, Homo sapien
gaaacctagatcattggtaaggaag

SEQ ID NO: 4677676 - DNA, 25 bp, Homo sapien
aaaatgccatggtatggcaaacagc

SEQ ID NO: 4677677 - DNA, 25 bp, Homo sapien
ctacgcaaaattcagaaagatctcg

SEQ ID NO: 4677678 - DNA, 25 bp, Homo sapien
tgaacttacaactgactacgcaaaa

SEQ ID NO: 4677679 - DNA, 25 bp, Homo sapien
gcaagttttgtcatcactacacatt

SEQ ID NO: 4677680 - DNA, 25 bp, Homo sapien
gattaaggggcaagttttgtcatca

SEQ ID NO: 4677681 - DNA, 25 bp, Homo sapien
aaggggcaagttttgtcatcactac

SEQ ID NO: 4677682 - DNA, 25 bp, Homo sapien
tgaggaacagattaaggggcaagtt

SEQ ID NO: 4677683 - DNA, 25 bp, Homo sapien
tgctgttgatatgctctcctcctca

SEQ ID NO: 4677684 - DNA, 25 bp, Homo sapien
tgagaatggcgatcagttctgctgt

SEQ ID NO: 4677685 - DNA, 25 bp, Homo sapien
gagttttcctgagaatggcgatcag

SEQ ID NO: 4677686 - DNA, 25 bp, Homo sapien
ttttcctgagaatggcgatcagttc

SEQ ID NO: 4677687 - DNA, 25 bp, Homo sapien
tggtcacagattcctggatgccagg

SEQ ID NO: 4677688 - DNA, 25 bp, Homo sapien
tcttatggggctgggtccatcttgg

SEQ ID NO: 4677689 - DNA, 25 bp, Homo sapien
tcttggtcacagattcctggatgcc

SEQ ID NO: 4677690 - DNA, 25 bp, Homo sapien
atcttggtcacagattcctggatgc

SEQ ID NO: 4677691 - DNA, 25 bp, Homo sapien
tcactggggccactggctaatggag

SEQ ID NO: 4677692 - DNA, 25 bp, Homo sapien
gccactggctaatggagccagcagg

SEQ ID NO: 4677693 - DNA, 25 bp, Homo sapien
actggggccactggctaatggagcc

SEQ ID NO: 4677694 - DNA, 25 bp, Homo sapien
ggccactggctaatggagccagcag

SEQ ID NO: 4677695 - DNA, 25 bp, Homo sapien
gctgtataatgttgacttcacaaag

SEQ ID NO: 4677696 - DNA, 25 bp, Homo sapien
ctggctgctgtataatgttgacttc

SEQ ID NO: 4677697 - DNA, 25 bp, Homo sapien
taatgttgacttcacaaagtcccca

SEQ ID NO: 4677698 - DNA, 25 bp, Homo sapien
gttgacttcacaaagtccccaagca

SEQ ID NO: 4677699 - DNA, 25 bp, Homo sapien
aaaagacaggttcttgaaggtgtct

SEQ ID NO: 4677700 - DNA, 25 bp, Homo sapien
gaaaagacaggttcttgaaggtgtc

SEQ ID NO: 4677701 - DNA, 25 bp, Homo sapien
ctgttgggcctggatagtttttgct

SEQ ID NO: 4677702 - DNA, 25 bp, Homo sapien
cctgttgggcctggatagtttttgc

SEQ ID NO: 4677703 - DNA, 25 bp, Homo sapien
gttgggcctggatagtttttgcttg

SEQ ID NO: 4677704 - DNA, 25 bp, Homo sapien
tgggcctggatagtttttgcttgtc

SEQ ID NO: 4677705 - DNA, 25 bp, Homo sapien
caaactggtgtcaatgaaggtaaca

SEQ ID NO: 4677706 - DNA, 25 bp, Homo sapien
tgaaggtaacattttgtggtaatgg

SEQ ID NO: 4677707 - DNA, 25 bp, Homo sapien
tcacttgcaaactggtgtcaatgaa

SEQ ID NO: 4677708 - DNA, 25 bp, Homo sapien
cttgcaaactggtgtcaatgaaggt

SEQ ID NO: 4677709 - DNA, 25 bp, Homo sapien
gcccaagttggaaagtgagatcttt

SEQ ID NO: 4677710 - DNA, 25 bp, Homo sapien
gcctgggcacatacttggttgatgc

SEQ ID NO: 4677711 - DNA, 25 bp, Homo sapien
aatattgtgtacttctatagggcag

SEQ ID NO: 4677712 - DNA, 25 bp, Homo sapien
tactagctagagagcgaacattgct

SEQ ID NO: 4677713 - DNA, 25 bp, Homo sapien
caactgcacatagatactgtatggg

SEQ ID NO: 4677714 - DNA, 25 bp, Homo sapien
tctgttgaacctagtatcaatgcac

SEQ ID NO: 4677715 - DNA, 25 bp, Homo sapien
ttcttgagagcggtagcaggtacat

SEQ ID NO: 4677716 - DNA, 25 bp, Homo sapien
gatgttggtgtattctccggtcact

SEQ ID NO: 4677717 - DNA, 25 bp, Homo sapien
ttccatgaaactgttgattattctc

SEQ ID NO: 4677718 - DNA, 25 bp, Homo sapien
gttagctttgagcatcccagatccc

SEQ ID NO: 4677719 - DNA, 25 bp, Homo sapien
cttctgtcgatagttagctttgagc

SEQ ID NO: 4677720 - DNA, 25 bp, Homo sapien
ggtttacagctaagaggtttccatg

SEQ ID NO: 4677721 - DNA, 25 bp, Homo sapien
ggaaacggaggatcgatcattattt

SEQ ID NO: 4677722 - DNA, 25 bp, Homo sapien
gtgttggaaacggaggatcgatcat

SEQ ID NO: 4677723 - DNA, 25 bp, Homo sapien
ggcactcattatggcattgactgga

SEQ ID NO: 4677724 - DNA, 25 bp, Homo sapien
cagtaggcactcattatggcattga

SEQ ID NO: 4677725 - DNA, 25 bp, Homo sapien
tttaagtttttcttagcagctgatt

SEQ ID NO: 4677726 - DNA, 25 bp, Homo sapien
cactctctaaaggaaatctgttgga

SEQ ID NO: 4677727 - DNA, 25 bp, Homo sapien
ttcttagcagctgatttagacagag

SEQ ID NO: 4677728 - DNA, 25 bp, Homo sapien
ctaaaggaaatctgttggaattgtt

SEQ ID NO: 4677729 - DNA, 25 bp, Homo sapien
tgcccgtgtagttagtggcggtcct

SEQ ID NO: 4677730 - DNA, 25 bp, Homo sapien
attggtgacaaatgagtcacatgat

SEQ ID NO: 4677731 - DNA, 25 bp, Homo sapien
ttaatgacgtgaacaggtggatggc

SEQ ID NO: 4677732 - DNA, 25 bp, Homo sapien
atcagccctccttttgtacccagtt

SEQ ID NO: 4677733 - DNA, 25 bp, Homo sapien
aagcagattcggcaaggactctcat

SEQ ID NO: 4677734 - DNA, 25 bp, Homo sapien
cccggaagcagattcggcaaggact

SEQ ID NO: 4677735 - DNA, 25 bp, Homo sapien
acagcaaccccggaagcagattcgg

SEQ ID NO: 4677736 - DNA, 25 bp, Homo sapien
tgcctgtgtaatccacacagcaacc

SEQ ID NO: 4677737 - DNA, 25 bp, Homo sapien
tttggcaacagttgtaagattcatg

SEQ ID NO: 4677738 - DNA, 25 bp, Homo sapien
tggcaacagttgtaagattcatgta

SEQ ID NO: 4677739 - DNA, 25 bp, Homo sapien
ggcaacagttgtaagattcatgtac

SEQ ID NO: 4677740 - DNA, 25 bp, Homo sapien
ttggcaacagttgtaagattcatgt

SEQ ID NO: 4677741 - DNA, 25 bp, Homo sapien
tgtgggtcctgcagcaattaggatg

SEQ ID NO: 4677742 - DNA, 25 bp, Homo sapien
tcctgcagcaattaggatgaacgta

SEQ ID NO: 4677743 - DNA, 25 bp, Homo sapien
ggtcctgcagcaattaggatgaacg

SEQ ID NO: 4677744 - DNA, 25 bp, Homo sapien
ccccaggagggcgataggaagcttt

SEQ ID NO: 4677745 - DNA, 25 bp, Homo sapien
tgtgaaatggaggtgtagaatctcc

SEQ ID NO: 4677746 - DNA, 25 bp, Homo sapien
tagtgtgaaatggaggtgtagaatc

SEQ ID NO: 4677747 - DNA, 25 bp, Homo sapien
caatgatagtgtgaaatggaggtgt

SEQ ID NO: 4677748 - DNA, 25 bp, Homo sapien
agtcccacaatgatagtgtgaaatg

SEQ ID NO: 4677749 - DNA, 25 bp, Homo sapien
tagccctggttatcccaggccagga

SEQ ID NO: 4677750 - DNA, 25 bp, Homo sapien
gcctgtagccctggttatcccaggc

SEQ ID NO: 4677751 - DNA, 25 bp, Homo sapien
atgtcacccaacagtctttgtgcct

SEQ ID NO: 4677752 - DNA, 25 bp, Homo sapien
ccctggttatcccaggccaggacaa

SEQ ID NO: 4677753 - DNA, 25 bp, Homo sapien
tctgtcggtcattgaagcccctcct

SEQ ID NO: 4677754 - DNA, 25 bp, Homo sapien
tgctctgtcggtcattgaagcccct

SEQ ID NO: 4677755 - DNA, 25 bp, Homo sapien
tgtcggtcattgaagcccctcctgc

SEQ ID NO: 4677756 - DNA, 25 bp, Homo sapien
gctctgtcggtcattgaagcccctc

SEQ ID NO: 4677757 - DNA, 25 bp, Homo sapien
ggaggccaggaaaaacgcaactatc

SEQ ID NO: 4677758 - DNA, 25 bp, Homo sapien
tgggaggccaggaaaaacgcaacta

SEQ ID NO: 4677759 - DNA, 25 bp, Homo sapien
cacaaggactatgagaaaagcaggt

SEQ ID NO: 4677760 - DNA, 25 bp, Homo sapien
tctccaacttttctggcgtgaaggg

SEQ ID NO: 4677761 - DNA, 25 bp, Homo sapien
tgcggtgtgcgtctctctctgggtc

SEQ ID NO: 4677762 - DNA, 25 bp, Homo sapien
tgcagttgctaagcagttccctgcg

SEQ ID NO: 4677763 - DNA, 25 bp, Homo sapien
gttagtgcgttttgtgatggaacaa

SEQ ID NO: 4677764 - DNA, 25 bp, Homo sapien
ctgcagaaccggttagtgcgttttg

SEQ ID NO: 4677765 - DNA, 25 bp, Homo sapien
cagaaccggttagtgcgttttgtga

SEQ ID NO: 4677766 - DNA, 25 bp, Homo sapien
ccggttagtgcgttttgtgatggaa

SEQ ID NO: 4677767 - DNA, 25 bp, Homo sapien
accccaggaatcagggcggcagtgt

SEQ ID NO: 4677768 - DNA, 25 bp, Homo sapien
cctggccaggtctttagggaatcac

SEQ ID NO: 4677769 - DNA, 25 bp, Homo sapien
tcacttggggcctttgcctgaaacc

SEQ ID NO: 4677770 - DNA, 25 bp, Homo sapien
tccccagtgcagttgagatcccagg

SEQ ID NO: 4677771 - DNA, 25 bp, Homo sapien
tgtcaatcgatcttctttggcgctc

SEQ ID NO: 4677772 - DNA, 25 bp, Homo sapien
gccctttgggccagactcaggcatt

SEQ ID NO: 4677773 - DNA, 25 bp, Homo sapien
gagcactgccagagaaatctggcac

SEQ ID NO: 4677774 - DNA, 25 bp, Homo sapien
ttctgccgcggcacgtgggcccttt

SEQ ID NO: 4677775 - DNA, 25 bp, Homo sapien
tgcagttcctcataatacaatgagg

SEQ ID NO: 4677776 - DNA, 25 bp, Homo sapien
tgatgcagttcctcataatacaatg

SEQ ID NO: 4677777 - DNA, 25 bp, Homo sapien
tcagaggggtcatgatgcagttcct

SEQ ID NO: 4677778 - DNA, 25 bp, Homo sapien
gggtcatgatgcagttcctcataat

SEQ ID NO: 4677779 - DNA, 25 bp, Homo sapien
gtgcctggaagaaagccgtccctcc

SEQ ID NO: 4677780 - DNA, 25 bp, Homo sapien
tggactttgctgatttgaataccgg

SEQ ID NO: 4677781 - DNA, 25 bp, Homo sapien
gaataccggttcagaacactggaga

SEQ ID NO: 4677782 - DNA, 25 bp, Homo sapien
cagccaacggggctgggttctactc

SEQ ID NO: 4677783 - DNA, 25 bp, Homo sapien
agccaacatcaagacaaggaccagg

SEQ ID NO: 4677784 - DNA, 25 bp, Homo sapien
tgtgaggtcatatctggcatgcggc

SEQ ID NO: 4677785 - DNA, 25 bp, Homo sapien
tgcggcagacgctgtagattcccaa

SEQ ID NO: 4677786 - DNA, 25 bp, Homo sapien
tgtggccaggataatgacagaaact

SEQ ID NO: 4677787 - DNA, 25 bp, Homo sapien
tcaatgcctttgaatcactcagtac

SEQ ID NO: 4677788 - DNA, 25 bp, Homo sapien
caacttgtagcccatctgaccataa

SEQ ID NO: 4677789 - DNA, 25 bp, Homo sapien
tctctccgtaagacccaacttgtag

SEQ ID NO: 4677790 - DNA, 25 bp, Homo sapien
tcagtactatcaagcatcctccttc

SEQ ID NO: 4677791 - DNA, 25 bp, Homo sapien
ctagccagtgcttgaccagagaagg

SEQ ID NO: 4677792 - DNA, 25 bp, Homo sapien
gcacatacctggatgagctctgaga

SEQ ID NO: 4677793 - DNA, 25 bp, Homo sapien
taagtgtcatactccataggtctgt

SEQ ID NO: 4677794 - DNA, 25 bp, Homo sapien
tgtagcaggtcaaagtccctggaat

SEQ ID NO: 4677795 - DNA, 25 bp, Homo sapien
tattactggaaatctgcaggctgaa

SEQ ID NO: 4677796 - DNA, 25 bp, Homo sapien
ccttggtgtgtggtatacagagact

SEQ ID NO: 4677797 - DNA, 25 bp, Homo sapien
tacaggccaattccttatgggtaga

SEQ ID NO: 4677798 - DNA, 25 bp, Homo sapien
tagcttagaaatcattactctgtgg

SEQ ID NO: 4677799 - DNA, 25 bp, Homo sapien
ggttactgttgttagactttgccca

SEQ ID NO: 4677800 - DNA, 25 bp, Homo sapien
gagttctttggagggaactattcca

SEQ ID NO: 4677801 - DNA, 25 bp, Homo sapien
gggacttcagtaggaccattgcgga

SEQ ID NO: 4677802 - DNA, 25 bp, Homo sapien
cagtctgctttctccggttgttgga

SEQ ID NO: 4677803 - DNA, 25 bp, Homo sapien
tagaaattggtgtcccgcattttcc

SEQ ID NO: 4677804 - DNA, 25 bp, Homo sapien
tcttcttctgtaccggccctcacca

SEQ ID NO: 4677805 - DNA, 25 bp, Homo sapien
gccctcaccatgtacctcaccccag

SEQ ID NO: 4677806 - DNA, 25 bp, Homo sapien
agcctcttcttctgtaccggccctc

SEQ ID NO: 4677807 - DNA, 25 bp, Homo sapien
ctggcctgcacctacttccccagcc

SEQ ID NO: 4677808 - DNA, 25 bp, Homo sapien
tgaaagttccatgttgaccctccat

SEQ ID NO: 4677809 - DNA, 25 bp, Homo sapien
gttttcagatgtaaagtgaatttga

SEQ ID NO: 4677810 - DNA, 25 bp, Homo sapien
catggacaggcccactgccagtaat

SEQ ID NO: 4677811 - DNA, 25 bp, Homo sapien
gtctctgctaatgtatcatgagtca

SEQ ID NO: 4677812 - DNA, 25 bp, Homo sapien
gacaggcccactgccagtaataggc

SEQ ID NO: 4677813 - DNA, 25 bp, Homo sapien
gctaatgtatcatgagtcaggccat

SEQ ID NO: 4677814 - DNA, 25 bp, Homo sapien
tgaactgtggttctgaatgatgttg

SEQ ID NO: 4677815 - DNA, 25 bp, Homo sapien
actgtggttctgaatgatgttgggt

SEQ ID NO: 4677816 - DNA, 25 bp, Homo sapien
tggttctgaatgatgttgggtttct

SEQ ID NO: 4677817 - DNA, 25 bp, Homo sapien
gtttccctccatgaactgtggttct

SEQ ID NO: 4677818 - DNA, 25 bp, Homo sapien
tcacaacacaagatggagagttccc

SEQ ID NO: 4677819 - DNA, 25 bp, Homo sapien
ggcttttgggtgcacgctgctgctt

SEQ ID NO: 4677820 - DNA, 25 bp, Homo sapien
tgcacttgacattctcatcacaaca

SEQ ID NO: 4677821 - DNA, 25 bp, Homo sapien
tcagtcccatgtgtcagcccctgtg

SEQ ID NO: 4677822 - DNA, 25 bp, Homo sapien
taagtacgtgaaggcagggtgacat

SEQ ID NO: 4677823 - DNA, 25 bp, Homo sapien
tcagtaaattctcaactggcgtcaa

SEQ ID NO: 4677824 - DNA, 25 bp, Homo sapien
gttctttgtggatacctggcggata

SEQ ID NO: 4677825 - DNA, 25 bp, Homo sapien
atttggttcctgtttaaactgattg

SEQ ID NO: 4677826 - DNA, 25 bp, Homo sapien
tctgggccaaaagacctaggtcagc

SEQ ID NO: 4677827 - DNA, 25 bp, Homo sapien
tctgctccaggttttgggaaaagct

SEQ ID NO: 4677828 - DNA, 25 bp, Homo sapien
gaatctcttgttgttgtgccctatg

SEQ ID NO: 4677829 - DNA, 25 bp, Homo sapien
tctttggcacttgtatggagcagct

SEQ ID NO: 4677830 - DNA, 25 bp, Homo sapien
tcttgccaaagtattcaggttcagg

SEQ ID NO: 4677831 - DNA, 25 bp, Homo sapien
gtcattaaattcagccaggtcccac

SEQ ID NO: 4677832 - DNA, 25 bp, Homo sapien
gataggctcaaccaatcatgggctg

SEQ ID NO: 4677833 - DNA, 25 bp, Homo sapien
ctttgaagcaaagataggctcaacc

SEQ ID NO: 4677834 - DNA, 25 bp, Homo sapien
gctgccaaagagtttcctgctcggg

SEQ ID NO: 4677835 - DNA, 25 bp, Homo sapien
tcttgtcagcaggcaaagcacgcag

SEQ ID NO: 4677836 - DNA, 25 bp, Homo sapien
tataagggcaataaccaaggccagg

SEQ ID NO: 4677837 - DNA, 25 bp, Homo sapien
ttgtcagcaggcaaagcacgcagtg

SEQ ID NO: 4677838 - DNA, 25 bp, Homo sapien
catctcctgggtgtgctccagagtc

SEQ ID NO: 4677839 - DNA, 25 bp, Homo sapien
tgcgaacccctgcaagtcttgggag

SEQ ID NO: 4677840 - DNA, 25 bp, Homo sapien
gagttcccagaagacttggccacag

SEQ ID NO: 4677841 - DNA, 25 bp, Homo sapien
agttagaatacaaaggcctggctcc

SEQ ID NO: 4677842 - DNA, 25 bp, Homo sapien
tccactgctgttagacattgctttg

SEQ ID NO: 4677843 - DNA, 25 bp, Homo sapien
ggcactgacattggacaccatggct

SEQ ID NO: 4677844 - DNA, 25 bp, Homo sapien
agacattgctttggactgtccatca

SEQ ID NO: 4677845 - DNA, 25 bp, Homo sapien
ccactacggggcactgacattggac

SEQ ID NO: 4677846 - DNA, 25 bp, Homo sapien
caaccccttgtgactgagattgggc

SEQ ID NO: 4677847 - DNA, 25 bp, Homo sapien
ccccttgtgactgagattgggcatt

SEQ ID NO: 4677848 - DNA, 25 bp, Homo sapien
tgtgactgagattgggcattttgcc

SEQ ID NO: 4677849 - DNA, 25 bp, Homo sapien
gggacaaccccttgtgactgagatt

SEQ ID NO: 4677850 - DNA, 25 bp, Homo sapien
agcctgtaatgctatgctgtgcttc

SEQ ID NO: 4677851 - DNA, 25 bp, Homo sapien
tccagcctgtaatgctatgctgtgc

SEQ ID NO: 4677852 - DNA, 25 bp, Homo sapien
gcttctgtgaaggctgcccttgggc

SEQ ID NO: 4677853 - DNA, 25 bp, Homo sapien
tggtcccacacagtgcctgctgaga

SEQ ID NO: 4677854 - DNA, 25 bp, Homo sapien
aaggactccagtgccgtttctggtc

SEQ ID NO: 4677855 - DNA, 25 bp, Homo sapien
ggtccagaagagttcagtgtctcag

SEQ ID NO: 4677856 - DNA, 25 bp, Homo sapien
tcctcgtccagatcatattggtggt

SEQ ID NO: 4677857 - DNA, 25 bp, Homo sapien
gctggctgatttcccaccaagactg

SEQ ID NO: 4677858 - DNA, 25 bp, Homo sapien
tatgactgtcagaatcctgatgtag

SEQ ID NO: 4677859 - DNA, 25 bp, Homo sapien
ctgatgtagcagctttcactcccaa

SEQ ID NO: 4677860 - DNA, 25 bp, Homo sapien
tccttgtcccctatgactgtcagaa

SEQ ID NO: 4677861 - DNA, 25 bp, Homo sapien
agccttgtccttgtcccctatgact

SEQ ID NO: 4677862 - DNA, 25 bp, Homo sapien
ctgaaactgctttcctaaaagtaat

SEQ ID NO: 4677863 - DNA, 25 bp, Homo sapien
gccagtagattgtgctgagtcaccc

SEQ ID NO: 4677864 - DNA, 25 bp, Homo sapien
cagagatgccagtagattgtgctga

SEQ ID NO: 4677865 - DNA, 25 bp, Homo sapien
tcacccatatttgctctgaaactgc

SEQ ID NO: 4677866 - DNA, 25 bp, Homo sapien
ttcttggatggatcagcttctccct

SEQ ID NO: 4677867 - DNA, 25 bp, Homo sapien
agaataaatcttcttggatggatca

SEQ ID NO: 4677868 - DNA, 25 bp, Homo sapien
taaatcttcttggatggatcagctt

SEQ ID NO: 4677869 - DNA, 25 bp, Homo sapien
tcttcttggatggatcagcttctcc

SEQ ID NO: 4677870 - DNA, 25 bp, Homo sapien
ttgcaccgataacaaggagcttgtg

SEQ ID NO: 4677871 - DNA, 25 bp, Homo sapien
tgaacttgcaccgataacaaggagc

SEQ ID NO: 4677872 - DNA, 25 bp, Homo sapien
tttaaggggctctgaacttgcaccg

SEQ ID NO: 4677873 - DNA, 25 bp, Homo sapien
gggctctgaacttgcaccgataaca

SEQ ID NO: 4677874 - DNA, 25 bp, Homo sapien
gggcactaacctaaaggagcaggca

SEQ ID NO: 4677875 - DNA, 25 bp, Homo sapien
cagcaccatccataaattacatatt

SEQ ID NO: 4677876 - DNA, 25 bp, Homo sapien
ggagcaggcacatgttgaattttga

SEQ ID NO: 4677877 - DNA, 25 bp, Homo sapien
caatcggtaacattttacagacagc

SEQ ID NO: 4677878 - DNA, 25 bp, Homo sapien
agtacatctagttgcaccctccaag

SEQ ID NO: 4677879 - DNA, 25 bp, Homo sapien
catcacgggaaaccttgaagttgag

SEQ ID NO: 4677880 - DNA, 25 bp, Homo sapien
tagggagaccaaggaagcatcacgg

SEQ ID NO: 4677881 - DNA, 25 bp, Homo sapien
gaagttgagctcagtggcaagccca

SEQ ID NO: 4677882 - DNA, 25 bp, Homo sapien
tgtgctcatgggcaagggtttccca

SEQ ID NO: 4677883 - DNA, 25 bp, Homo sapien
acataggcctttgtgctcatgggca

SEQ ID NO: 4677884 - DNA, 25 bp, Homo sapien
gtttcccacagactatgaatggcca

SEQ ID NO: 4677885 - DNA, 25 bp, Homo sapien
catgggcaagggtttcccacagact

SEQ ID NO: 4677886 - DNA, 25 bp, Homo sapien
atgcatgtggaaccctgagcctcca

SEQ ID NO: 4677887 - DNA, 25 bp, Homo sapien
tgagcctccaatattcacatcagag

SEQ ID NO: 4677888 - DNA, 25 bp, Homo sapien
gcatacatcttttgatagcaggaga

SEQ ID NO: 4677889 - DNA, 25 bp, Homo sapien
agcagtgtgggacagaatgagtcac

SEQ ID NO: 4677890 - DNA, 25 bp, Homo sapien
ggcgaggaccttgtttccactgtgt

SEQ ID NO: 4677891 - DNA, 25 bp, Homo sapien
cagaattgtggtgcatggatgggct

SEQ ID NO: 4677892 - DNA, 25 bp, Homo sapien
catttggtatgcactctatatgctc

SEQ ID NO: 4677893 - DNA, 25 bp, Homo sapien
ggctgcacacggctcttagctgtct

SEQ ID NO: 4677894 - DNA, 25 bp, Homo sapien
tgtatatagccgacattattaagac

SEQ ID NO: 4677895 - DNA, 25 bp, Homo sapien
tcctgtttcaaccagcaggccagcc

SEQ ID NO: 4677896 - DNA, 25 bp, Homo sapien
tatagccgacattattaagacattc

SEQ ID NO: 4677897 - DNA, 25 bp, Homo sapien
cattgtatatagccgacattattaa

SEQ ID NO: 4677898 - DNA, 25 bp, Homo sapien
ctgcagcaggtccctgaaatgccat

SEQ ID NO: 4677899 - DNA, 25 bp, Homo sapien
ctgtaatagagagaacatggcatga

SEQ ID NO: 4677900 - DNA, 25 bp, Homo sapien
tgctgtaatagagagaacatggcat

SEQ ID NO: 4677901 - DNA, 25 bp, Homo sapien
agtgctgtaatagagagaacatggc

SEQ ID NO: 4677902 - DNA, 25 bp, Homo sapien
ctaagtgctgtaatagagagaacat

SEQ ID NO: 4677903 - DNA, 25 bp, Homo sapien
taaatccaggagttgataagctgac

SEQ ID NO: 4677904 - DNA, 25 bp, Homo sapien
gatacaaatccccatctggaccata

SEQ ID NO: 4677905 - DNA, 25 bp, Homo sapien
tgcttcaagtgtagataaatccagg

SEQ ID NO: 4677906 - DNA, 25 bp, Homo sapien
gctctagtttggagctcgattccag

SEQ ID NO: 4677907 - DNA, 25 bp, Homo sapien
tctcgagttctttgatggcaagacc

SEQ ID NO: 4677908 - DNA, 25 bp, Homo sapien
tgtttactggtcttcacttgaacaa

SEQ ID NO: 4677909 - DNA, 25 bp, Homo sapien
gtcttcacttgaacaaacttctcga

SEQ ID NO: 4677910 - DNA, 25 bp, Homo sapien
ctctggccatccttgcagcaaagtg

SEQ ID NO: 4677911 - DNA, 25 bp, Homo sapien
aaagggcagaaaatccagcaataac

SEQ ID NO: 4677912 - DNA, 25 bp, Homo sapien
caatttattgaaaagggcagaaaat

SEQ ID NO: 4677913 - DNA, 25 bp, Homo sapien
ttgaaaagggcagaaaatccagcaa

SEQ ID NO: 4677914 - DNA, 25 bp, Homo sapien
gaaaagggcagaaaatccagcaata

SEQ ID NO: 4677915 - DNA, 25 bp, Homo sapien
aggggccaccatgctccttcccatt

SEQ ID NO: 4677916 - DNA, 25 bp, Homo sapien
cctcaaggggccaccatgctccttc

SEQ ID NO: 4677917 - DNA, 25 bp, Homo sapien
aaggggccaccatgctccttcccat

SEQ ID NO: 4677918 - DNA, 25 bp, Homo sapien
ctcctcaaggggccaccatgctcct

SEQ ID NO: 4677919 - DNA, 25 bp, Homo sapien
aggtgtgggtcccaagatctagaat

SEQ ID NO: 4677920 - DNA, 25 bp, Homo sapien
gtagaagttcatgtaggtctccaat

SEQ ID NO: 4677921 - DNA, 25 bp, Homo sapien
tgggtcccaagatctagaatttagg

SEQ ID NO: 4677922 - DNA, 25 bp, Homo sapien
tgtaggtctccaatgtcacttttcc

SEQ ID NO: 4677923 - DNA, 25 bp, Homo sapien
cactattaggcagaagcacctgttc

SEQ ID NO: 4677924 - DNA, 25 bp, Homo sapien
gaagaccccacgcttattctggtgc

SEQ ID NO: 4677925 - DNA, 25 bp, Homo sapien
tgttctgccacaggaggtgctgtct

SEQ ID NO: 4677926 - DNA, 25 bp, Homo sapien
gatttccagacccataggcaggctt

SEQ ID NO: 4677927 - DNA, 25 bp, Homo sapien
cctgttgttgatactaataccatca

SEQ ID NO: 4677928 - DNA, 25 bp, Homo sapien
gttcctgttgttgatactaatacca

SEQ ID NO: 4677929 - DNA, 25 bp, Homo sapien
gttgttgatactaataccatcacat

SEQ ID NO: 4677930 - DNA, 25 bp, Homo sapien
tcctgttgttgatactaataccatc

SEQ ID NO: 4677931 - DNA, 25 bp, Homo sapien
gaccatggagttgtgctacagataa

SEQ ID NO: 4677932 - DNA, 25 bp, Homo sapien
caccttttgacatcggaaggcagaa

SEQ ID NO: 4677933 - DNA, 25 bp, Homo sapien
cttctgatcagaggctatgcttccc

SEQ ID NO: 4677934 - DNA, 25 bp, Homo sapien
ccctcgaataatgctaatgctgctg

SEQ ID NO: 4677935 - DNA, 25 bp, Homo sapien
acacgactgattgacaaaagagggc

SEQ ID NO: 4677936 - DNA, 25 bp, Homo sapien
ccaatgtttagaacccatctgaggg

SEQ ID NO: 4677937 - DNA, 25 bp, Homo sapien
tgagggcatccaacaccctgatatc

SEQ ID NO: 4677938 - DNA, 25 bp, Homo sapien
caattacaattgacatgaatgaaga

SEQ ID NO: 4677939 - DNA, 25 bp, Homo sapien
gctggctgaagcactctgacctcaa

SEQ ID NO: 4677940 - DNA, 25 bp, Homo sapien
cagagtggcatctcatgcgaagaga

SEQ ID NO: 4677941 - DNA, 25 bp, Homo sapien
gcttctgcacactgaaacagagtgg

SEQ ID NO: 4677942 - DNA, 25 bp, Homo sapien
ctgtctagacgtttgatgtgaggct

SEQ ID NO: 4677943 - DNA, 25 bp, Homo sapien
gagccacgtatcttgagctcaatct

SEQ ID NO: 4677944 - DNA, 25 bp, Homo sapien
cacgggatagtggaaataggagcca

SEQ ID NO: 4677945 - DNA, 25 bp, Homo sapien
cctttggaggagtcacgggatagtg

SEQ ID NO: 4677946 - DNA, 25 bp, Homo sapien
ttccagaaagtcacggtctcctttg

SEQ ID NO: 4677947 - DNA, 25 bp, Homo sapien
cattctccctagattgccagtcaga

SEQ ID NO: 4677948 - DNA, 25 bp, Homo sapien
ttgcattgccaatggagaatcttct

SEQ ID NO: 4677949 - DNA, 25 bp, Homo sapien
tctgataactgaagagcctctgtgg

SEQ ID NO: 4677950 - DNA, 25 bp, Homo sapien
agcggccctgccctagttgcttttc

SEQ ID NO: 4677951 - DNA, 25 bp, Homo sapien
tggccatgcggaagtttctcccgct

SEQ ID NO: 4677952 - DNA, 25 bp, Homo sapien
ttcccatcagcactcattgtcgcag

SEQ ID NO: 4677953 - DNA, 25 bp, Homo sapien
tcgcagatgcccaaatgcagttcct

SEQ ID NO: 4677954 - DNA, 25 bp, Homo sapien
gaaacatcatctcacacggggggct

SEQ ID NO: 4677955 - DNA, 25 bp, Homo sapien
atgttagggcagaccctctgggcag

SEQ ID NO: 4677956 - DNA, 25 bp, Homo sapien
gctgtgacagagtctaggaagactt

SEQ ID NO: 4677957 - DNA, 25 bp, Homo sapien
ccttgtcatcggaacccatgcaggg

SEQ ID NO: 4677958 - DNA, 25 bp, Homo sapien
gacagagtctaggaagacttcagag

SEQ ID NO: 4677959 - DNA, 25 bp, Homo sapien
gatctctgacaattacttaagccct

SEQ ID NO: 4677960 - DNA, 25 bp, Homo sapien
ttggggacccgctgcaaatagatct

SEQ ID NO: 4677961 - DNA, 25 bp, Homo sapien
gaaatctttaccagatctgggacaa

SEQ ID NO: 4677962 - DNA, 25 bp, Homo sapien
gattcctgtctggtacaaatcctgc

SEQ ID NO: 4677963 - DNA, 25 bp, Homo sapien
aaattctgcctcccattatttggaa

SEQ ID NO: 4677964 - DNA, 25 bp, Homo sapien
agtctgcaagtgaccataaaataaa

SEQ ID NO: 4677965 - DNA, 25 bp, Homo sapien
atgtgggcttgagacaaagaccaag

SEQ ID NO: 4677966 - DNA, 25 bp, Homo sapien
aatgtgggcttgagacaaagaccaa

SEQ ID NO: 4677967 - DNA, 25 bp, Homo sapien
tgagtctgcaagtgaccataaaata

SEQ ID NO: 4677968 - DNA, 25 bp, Homo sapien
ctattccttccatcttcaagggttg

SEQ ID NO: 4677969 - DNA, 25 bp, Homo sapien
cagatgagtggtcgttggcattatc

SEQ ID NO: 4677970 - DNA, 25 bp, Homo sapien
ggtcgttggcattatctattccttc

SEQ ID NO: 4677971 - DNA, 25 bp, Homo sapien
ttgtcagatgagtggtcgttggcat

SEQ ID NO: 4677972 - DNA, 25 bp, Homo sapien
gtgacaggacactcacaggacctct

SEQ ID NO: 4677973 - DNA, 25 bp, Homo sapien
ggagatctgaagcttccatagcaag

SEQ ID NO: 4677974 - DNA, 25 bp, Homo sapien
gctctcatgggcactgttgatgttc

SEQ ID NO: 4677975 - DNA, 25 bp, Homo sapien
aatcgttgctttgcctaggagctcc

SEQ ID NO: 4677976 - DNA, 25 bp, Homo sapien
actttatgccacacagttaatttga

SEQ ID NO: 4677977 - DNA, 25 bp, Homo sapien
tgcaaactttatgccacacagttaa

SEQ ID NO: 4677978 - DNA, 25 bp, Homo sapien
gtgcaaactttatgccacacagtta

SEQ ID NO: 4677979 - DNA, 25 bp, Homo sapien
atgccacacagttaatttgaaacag

SEQ ID NO: 4677980 - DNA, 25 bp, Homo sapien
cgttttggaatatcaccattgtgct

SEQ ID NO: 4677981 - DNA, 25 bp, Homo sapien
gttgcccacactcattggagagcag

SEQ ID NO: 4677982 - DNA, 25 bp, Homo sapien
tgcaggcctcaggtatagagattct

SEQ ID NO: 4677983 - DNA, 25 bp, Homo sapien
caatgataatgatgtgacgacgttt

SEQ ID NO: 4677984 - DNA, 25 bp, Homo sapien
aaggcaaacctgcggaattatctaa

SEQ ID NO: 4677985 - DNA, 25 bp, Homo sapien
ggcaaacctgcggaattatctaata

SEQ ID NO: 4677986 - DNA, 25 bp, Homo sapien
aaaggcaaacctgcggaattatcta

SEQ ID NO: 4677987 - DNA, 25 bp, Homo sapien
gcaaacctgcggaattatctaataa

SEQ ID NO: 4677988 - DNA, 25 bp, Homo sapien
gcagaaagaaggtttgtggagctgc

SEQ ID NO: 4677989 - DNA, 25 bp, Homo sapien
gcttctacctcggacagccctggta

SEQ ID NO: 4677990 - DNA, 25 bp, Homo sapien
tggtacaaaacactctggcagaaag

SEQ ID NO: 4677991 - DNA, 25 bp, Homo sapien
tgccaaaaggcaggataagaattcc

SEQ ID NO: 4677992 - DNA, 25 bp, Homo sapien
tacacaccccactcataacaagaag

SEQ ID NO: 4677993 - DNA, 25 bp, Homo sapien
gacaactgaggctcatacacacccc

SEQ ID NO: 4677994 - DNA, 25 bp, Homo sapien
aagtgtgaagttgactgggatctgc

SEQ ID NO: 4677995 - DNA, 25 bp, Homo sapien
tgctggtcagcattcttcatttgcc

SEQ ID NO: 4677996 - DNA, 25 bp, Homo sapien
tgagtggcgagcatatgcttgacac

SEQ ID NO: 4677997 - DNA, 25 bp, Homo sapien
ccagctcctgggtgtagggcccgtt

SEQ ID NO: 4677998 - DNA, 25 bp, Homo sapien
gggtcatgattagacagttgcttct

SEQ ID NO: 4677999 - DNA, 25 bp, Homo sapien
ttaactctgaagaagtattttgctg

SEQ ID NO: 4678000 - DNA, 25 bp, Homo sapien
ttcagggtcccgttgatagccgcag

SEQ ID NO: 4678001 - DNA, 25 bp, Homo sapien
caaaatgggcttcgtgataatgact

SEQ ID NO: 4678002 - DNA, 25 bp, Homo sapien
tctggaaagtaagcccattagcctg

SEQ ID NO: 4678003 - DNA, 25 bp, Homo sapien
tgagaacgggctcttgggcctcctt

SEQ ID NO: 4678004 - DNA, 25 bp, Homo sapien
tgcatcaatcacaaatgctccatgc

SEQ ID NO: 4678005 - DNA, 25 bp, Homo sapien
tcaatcacaaatgctccatgcatga

SEQ ID NO: 4678006 - DNA, 25 bp, Homo sapien
atttcatccttattggtgcatcaat

SEQ ID NO: 4678007 - DNA, 25 bp, Homo sapien
tccttattggtgcatcaatcacaaa

SEQ ID NO: 4678008 - DNA, 25 bp, Homo sapien
cacaatatctctcatttggcacaca

SEQ ID NO: 4678009 - DNA, 25 bp, Homo sapien
cagggaatgtcacaatatctctcat

SEQ ID NO: 4678010 - DNA, 25 bp, Homo sapien
gctctagctatactgcacatcttgc

SEQ ID NO: 4678011 - DNA, 25 bp, Homo sapien
cacttagagtggtaagagacccctt

SEQ ID NO: 4678012 - DNA, 25 bp, Homo sapien
ttgggagcagggaacattttgaata

SEQ ID NO: 4678013 - DNA, 25 bp, Homo sapien
ttccatttcctagtccagggtctgc

SEQ ID NO: 4678014 - DNA, 25 bp, Homo sapien
caagttgggagcagggaacattttg

SEQ ID NO: 4678015 - DNA, 25 bp, Homo sapien
gtctgcactgagtaggtggcagcat

SEQ ID NO: 4678016 - DNA, 25 bp, Homo sapien
cttggggcttccaacaatgactggc

SEQ ID NO: 4678017 - DNA, 25 bp, Homo sapien
ccttggggcttccaacaatgactgg

SEQ ID NO: 4678018 - DNA, 25 bp, Homo sapien
accttggggcttccaacaatgactg

SEQ ID NO: 4678019 - DNA, 25 bp, Homo sapien
ttggggcttccaacaatgactggct

SEQ ID NO: 4678020 - DNA, 25 bp, Homo sapien
taattttcagaataacggagttcca

SEQ ID NO: 4678021 - DNA, 25 bp, Homo sapien
tgagctaaatggcacatgagaactg

SEQ ID NO: 4678022 - DNA, 25 bp, Homo sapien
ttccaaaaggatgtctgccaaggag

SEQ ID NO: 4678023 - DNA, 25 bp, Homo sapien
aactgcatgtttggccacttcagtt

SEQ ID NO: 4678024 - DNA, 25 bp, Homo sapien
ggttccccagcatggacattaggca

SEQ ID NO: 4678025 - DNA, 25 bp, Homo sapien
ttagcacggtggaatctgaatgagg

SEQ ID NO: 4678026 - DNA, 25 bp, Homo sapien
cattcccttagggtgtacagcacag

SEQ ID NO: 4678027 - DNA, 25 bp, Homo sapien
cacaggatatgtaccttagcacggt

SEQ ID NO: 4678028 - DNA, 25 bp, Homo sapien
tggatgcttcatcctgaaggatctg

SEQ ID NO: 4678029 - DNA, 25 bp, Homo sapien
gtaactggatgcttcatcctgaagg

SEQ ID NO: 4678030 - DNA, 25 bp, Homo sapien
tgcttcatcctgaaggatctgggcc

SEQ ID NO: 4678031 - DNA, 25 bp, Homo sapien
cttcatcctgaaggatctgggccat

SEQ ID NO: 4678032 - DNA, 25 bp, Homo sapien
ttccttactccgacatttctctccc

SEQ ID NO: 4678033 - DNA, 25 bp, Homo sapien
ttctctccccgtaatgccaaaccat

SEQ ID NO: 4678034 - DNA, 25 bp, Homo sapien
gacatttctctccccgtaatgccaa

SEQ ID NO: 4678035 - DNA, 25 bp, Homo sapien
tactccgacatttctctccccgtaa

SEQ ID NO: 4678036 - DNA, 25 bp, Homo sapien
ggaagggaccaaggtgtccagaata

SEQ ID NO: 4678037 - DNA, 25 bp, Homo sapien
tgtacagctttaaccctttaggagc

SEQ ID NO: 4678038 - DNA, 25 bp, Homo sapien
ccaaggtgtccagaatagcagaaag

SEQ ID NO: 4678039 - DNA, 25 bp, Homo sapien
taggagcttgactatgggaagttct

SEQ ID NO: 4678040 - DNA, 25 bp, Homo sapien
taaatatctgctttggcgtggccac

SEQ ID NO: 4678041 - DNA, 25 bp, Homo sapien
aatatctgctttggcgtggccactg

SEQ ID NO: 4678042 - DNA, 25 bp, Homo sapien
atatctgctttggcgtggccactga

SEQ ID NO: 4678043 - DNA, 25 bp, Homo sapien
aaatatctgctttggcgtggccact

SEQ ID NO: 4678044 - DNA, 25 bp, Homo sapien
ctttcatcttatccctgtagtgtgc

SEQ ID NO: 4678045 - DNA, 25 bp, Homo sapien
tctttcatcttatccctgtagtgtg

SEQ ID NO: 4678046 - DNA, 25 bp, Homo sapien
ctttttgcaaagcggctgttctttc

SEQ ID NO: 4678047 - DNA, 25 bp, Homo sapien
catctttttgcaaagcggctgttct

SEQ ID NO: 4678048 - DNA, 25 bp, Homo sapien
aaaacacatgtgactggaaattcaa

SEQ ID NO: 4678049 - DNA, 25 bp, Homo sapien
tatcctgacagctaatgcatcaaca

SEQ ID NO: 4678050 - DNA, 25 bp, Homo sapien
cagctaatgcatcaacagtgtttac

SEQ ID NO: 4678051 - DNA, 25 bp, Homo sapien
tacactatcctgacagctaatgcat

SEQ ID NO: 4678052 - DNA, 25 bp, Homo sapien
ggcattgtggaccagtcctctggac

SEQ ID NO: 4678053 - DNA, 25 bp, Homo sapien
tgagtggtgagattgagtggcacca

SEQ ID NO: 4678054 - DNA, 25 bp, Homo sapien
ggatgtcagcctctatccacagcga

SEQ ID NO: 4678055 - DNA, 25 bp, Homo sapien
acttgacagccccggtgagtggtga

SEQ ID NO: 4678056 - DNA, 25 bp, Homo sapien
tgtagctcattggtaccaaggcaaa

SEQ ID NO: 4678057 - DNA, 25 bp, Homo sapien
actttgaactaggtctggttctcca

SEQ ID NO: 4678058 - DNA, 25 bp, Homo sapien
ggtaccaaggcaaactgagtatcga

SEQ ID NO: 4678059 - DNA, 25 bp, Homo sapien
actgagtatcgagcattcgactttg

SEQ ID NO: 4678060 - DNA, 25 bp, Homo sapien
ttgcctttgatcttacagtgtttac

SEQ ID NO: 4678061 - DNA, 25 bp, Homo sapien
ctttgcctttgatcttacagtgttt

SEQ ID NO: 4678062 - DNA, 25 bp, Homo sapien
tttgcctttgatcttacagtgttta

SEQ ID NO: 4678063 - DNA, 25 bp, Homo sapien
tgctgatgggccaaaccagttcaca

SEQ ID NO: 4678064 - DNA, 25 bp, Homo sapien
gactcattcttccatgaagggccag

SEQ ID NO: 4678065 - DNA, 25 bp, Homo sapien
gcctgcatgcacagaggactcattc

SEQ ID NO: 4678066 - DNA, 25 bp, Homo sapien
tcagcagcaagttcgggctttcaaa

SEQ ID NO: 4678067 - DNA, 25 bp, Homo sapien
gatatggcagaggataataaagagt

SEQ ID NO: 4678068 - DNA, 25 bp, Homo sapien
aggatatggcagaggataataaaga

SEQ ID NO: 4678069 - DNA, 25 bp, Homo sapien
ggatatggcagaggataataaagag

SEQ ID NO: 4678070 - DNA, 25 bp, Homo sapien
cactgtcctttgtagccaagaatgg

SEQ ID NO: 4678071 - DNA, 25 bp, Homo sapien
tattatgccataagaggtcctcaac

SEQ ID NO: 4678072 - DNA, 25 bp, Homo sapien
tgatatcttctcagagcgaaactct

SEQ ID NO: 4678073 - DNA, 25 bp, Homo sapien
tgggagcccaactgtgaatcctcaa

SEQ ID NO: 4678074 - DNA, 25 bp, Homo sapien
taattctaacccaatctagtttcca

SEQ ID NO: 4678075 - DNA, 25 bp, Homo sapien
aatctagtttccattgccgtggaag

SEQ ID NO: 4678076 - DNA, 25 bp, Homo sapien
attgccgtggaaggcaaaccacagc

SEQ ID NO: 4678077 - DNA, 25 bp, Homo sapien
cacagccgtgttgagtttgttaata

SEQ ID NO: 4678078 - DNA, 25 bp, Homo sapien
ggaacccagtccaagaatcatggta

SEQ ID NO: 4678079 - DNA, 25 bp, Homo sapien
cagatgtggttaagggcagagttcc

SEQ ID NO: 4678080 - DNA, 25 bp, Homo sapien
cagagttccctcttggtttgtccta

SEQ ID NO: 4678081 - DNA, 25 bp, Homo sapien
aacagctctataacacttcctatgg

SEQ ID NO: 4678082 - DNA, 25 bp, Homo sapien
gtttccacatctggcgatatgtgaa

SEQ ID NO: 4678083 - DNA, 25 bp, Homo sapien
tttccacatctggcgatatgtgaat

SEQ ID NO: 4678084 - DNA, 25 bp, Homo sapien
aatggcagggctttgtattgaccgc

SEQ ID NO: 4678085 - DNA, 25 bp, Homo sapien
tccagaaataggaactgtccagagc

SEQ ID NO: 4678086 - DNA, 25 bp, Homo sapien
tagtaacccactcaggaatccagaa

SEQ ID NO: 4678087 - DNA, 25 bp, Homo sapien
tttgtcttgttgaatgtggatggtc

SEQ ID NO: 4678088 - DNA, 25 bp, Homo sapien
tactagtgtgagtcagtgctctggg

SEQ ID NO: 4678089 - DNA, 25 bp, Homo sapien
tgtctctgtgcgcattactagtgtg

SEQ ID NO: 4678090 - DNA, 25 bp, Homo sapien
gctctgggcccagtcaaatctgtag

SEQ ID NO: 4678091 - DNA, 25 bp, Homo sapien
gagtttcctcattgcgaacgagcag

SEQ ID NO: 4678092 - DNA, 25 bp, Homo sapien
tcctgaagtacctgtgagtcccttg

SEQ ID NO: 4678093 - DNA, 25 bp, Homo sapien
aagccctgattcacccgatttctcc

SEQ ID NO: 4678094 - DNA, 25 bp, Homo sapien
caagccctgattcacccgatttctc

SEQ ID NO: 4678095 - DNA, 25 bp, Homo sapien
tttcctgaagtacctgtgagtccct

SEQ ID NO: 4678096 - DNA, 25 bp, Homo sapien
gctgtcctcttcggtttctctctat

SEQ ID NO: 4678097 - DNA, 25 bp, Homo sapien
tgtcctcttcggtttctctctatct

SEQ ID NO: 4678098 - DNA, 25 bp, Homo sapien
ctgtcctcttcggtttctctctatc

SEQ ID NO: 4678099 - DNA, 25 bp, Homo sapien
tgctgtcctcttcggtttctctcta

SEQ ID NO: 4678100 - DNA, 25 bp, Homo sapien
gcattttggctcaggacactcaaaa

SEQ ID NO: 4678101 - DNA, 25 bp, Homo sapien
ttttggctcaggacactcaaaattc

SEQ ID NO: 4678102 - DNA, 25 bp, Homo sapien
ttcctgtgcattttggctcaggaca

SEQ ID NO: 4678103 - DNA, 25 bp, Homo sapien
tttggctcaggacactcaaaattcc

SEQ ID NO: 4678104 - DNA, 25 bp, Homo sapien
tgaaatctctcagaacaggtaatcc

SEQ ID NO: 4678105 - DNA, 25 bp, Homo sapien
aaatctctcagaacaggtaatccga

SEQ ID NO: 4678106 - DNA, 25 bp, Homo sapien
ggtaatccgattcccccagcagaag

SEQ ID NO: 4678107 - DNA, 25 bp, Homo sapien
tctcagaacaggtaatccgattccc

SEQ ID NO: 4678108 - DNA, 25 bp, Homo sapien
ttagtccaccaaatttttccatggc

SEQ ID NO: 4678109 - DNA, 25 bp, Homo sapien
gtccaccaaatttttccatggctta

SEQ ID NO: 4678110 - DNA, 25 bp, Homo sapien
tccaccaaatttttccatggcttac

SEQ ID NO: 4678111 - DNA, 25 bp, Homo sapien
tagtccaccaaatttttccatggct

SEQ ID NO: 4678112 - DNA, 25 bp, Homo sapien
ttgaaggcacccactttctatgaaa

SEQ ID NO: 4678113 - DNA, 25 bp, Homo sapien
tgaacctccccagtttttgaggaca

SEQ ID NO: 4678114 - DNA, 25 bp, Homo sapien
tctgaacctccccagtttttgagga

SEQ ID NO: 4678115 - DNA, 25 bp, Homo sapien
gaggacattgcttgaaggcacccac

SEQ ID NO: 4678116 - DNA, 25 bp, Homo sapien
tccagaacatcagaagatagtagtt

SEQ ID NO: 4678117 - DNA, 25 bp, Homo sapien
cattcttcttcgtgggtgtgagctg

SEQ ID NO: 4678118 - DNA, 25 bp, Homo sapien
gatagtagtttctccaagatcattc

SEQ ID NO: 4678119 - DNA, 25 bp, Homo sapien
aaatgccaagtgaaaggatagatcc

SEQ ID NO: 4678120 - DNA, 25 bp, Homo sapien
ttcaggacaaccttcatagattcct

SEQ ID NO: 4678121 - DNA, 25 bp, Homo sapien
caagggattcaggacaaccttcata

SEQ ID NO: 4678122 - DNA, 25 bp, Homo sapien
gattcaggacaaccttcatagattc

SEQ ID NO: 4678123 - DNA, 25 bp, Homo sapien
gggattcaggacaaccttcatagat

SEQ ID NO: 4678124 - DNA, 25 bp, Homo sapien
tggctcatctgacactctggctggc

SEQ ID NO: 4678125 - DNA, 25 bp, Homo sapien
gctcatctgacactctggctggcca

SEQ ID NO: 4678126 - DNA, 25 bp, Homo sapien
caagtggctcatctgacactctggc

SEQ ID NO: 4678127 - DNA, 25 bp, Homo sapien
agtggctcatctgacactctggctg

SEQ ID NO: 4678128 - DNA, 25 bp, Homo sapien
tataaaggactttcgggtccatcat

SEQ ID NO: 4678129 - DNA, 25 bp, Homo sapien
caacagtaacaatccttcacaaagc

SEQ ID NO: 4678130 - DNA, 25 bp, Homo sapien
aacagtaacaatccttcacaaagca

SEQ ID NO: 4678131 - DNA, 25 bp, Homo sapien
catataaaggactttcgggtccatc

SEQ ID NO: 4678132 - DNA, 25 bp, Homo sapien
cacaccctcggtgtgtgcaacttca

SEQ ID NO: 4678133 - DNA, 25 bp, Homo sapien
tgcaccagcacaccctcggtgtgtg

SEQ ID NO: 4678134 - DNA, 25 bp, Homo sapien
ctggtctctggtatccttcagtgtg

SEQ ID NO: 4678135 - DNA, 25 bp, Homo sapien
tccttcagtgtgagggcaggctccc

SEQ ID NO: 4678136 - DNA, 25 bp, Homo sapien
aattgtcacatgctgaaggacggca

SEQ ID NO: 4678137 - DNA, 25 bp, Homo sapien
tgagctttcagagccatatgatcct

SEQ ID NO: 4678138 - DNA, 25 bp, Homo sapien
cagagccatatgatccttgcaaatc

SEQ ID NO: 4678139 - DNA, 25 bp, Homo sapien
ctgtgagctttcagagccatatgat

SEQ ID NO: 4678140 - DNA, 25 bp, Homo sapien
gcaggagtctccaggtgttcaggta

SEQ ID NO: 4678141 - DNA, 25 bp, Homo sapien
gcaaaagctcttaactgctccactt

SEQ ID NO: 4678142 - DNA, 25 bp, Homo sapien
tacatggagacagggctggagcaaa

SEQ ID NO: 4678143 - DNA, 25 bp, Homo sapien
tgttcaggtattgcactacatggag

SEQ ID NO: 4678144 - DNA, 25 bp, Homo sapien
tctgcttctgggcggtgcgcccttg

SEQ ID NO: 4678145 - DNA, 25 bp, Homo sapien
ggcggtgcgcccttggattccaatc

SEQ ID NO: 4678146 - DNA, 25 bp, Homo sapien
caaattggagggggttcattctgct

SEQ ID NO: 4678147 - DNA, 25 bp, Homo sapien
cttctgggcggtgcgcccttggatt

SEQ ID NO: 4678148 - DNA, 25 bp, Homo sapien
gagcacagctaactgtttccctggg

SEQ ID NO: 4678149 - DNA, 25 bp, Homo sapien
agcccctgtgccgagaagctgatgg

SEQ ID NO: 4678150 - DNA, 25 bp, Homo sapien
gatggcctcgcagaagaatataaac

SEQ ID NO: 4678151 - DNA, 25 bp, Homo sapien
tcctagtggaattagctctgagagc

SEQ ID NO: 4678152 - DNA, 25 bp, Homo sapien
gagggtgctctctgttttaccagtt

SEQ ID NO: 4678153 - DNA, 25 bp, Homo sapien
taccagttctatacatggaaatctg

SEQ ID NO: 4678154 - DNA, 25 bp, Homo sapien
ttattaacagggtgatcccagtgag

SEQ ID NO: 4678155 - DNA, 25 bp, Homo sapien
tcgcgattgtaaaatttccacttga

SEQ ID NO: 4678156 - DNA, 25 bp, Homo sapien
cctggattgcttgtcggccagttgg

SEQ ID NO: 4678157 - DNA, 25 bp, Homo sapien
cctaggagaaaagggctcttccact

SEQ ID NO: 4678158 - DNA, 25 bp, Homo sapien
tgctggatctgtggtccctaggaga

SEQ ID NO: 4678159 - DNA, 25 bp, Homo sapien
gccagttggcaaatataagtcatta

SEQ ID NO: 4678160 - DNA, 25 bp, Homo sapien
cctctgacctgctgcgttatgtctt

SEQ ID NO: 4678161 - DNA, 25 bp, Homo sapien
tgcgttatgtcttttgatcctgacc

SEQ ID NO: 4678162 - DNA, 25 bp, Homo sapien
gatcctgacctccacctactgtctg

SEQ ID NO: 4678163 - DNA, 25 bp, Homo sapien
cacctactgtctgatgccaagactg

SEQ ID NO: 4678164 - DNA, 25 bp, Homo sapien
gttcagtctttagccatgagtcccc

SEQ ID NO: 4678165 - DNA, 25 bp, Homo sapien
gggccctggaaactaccacagcatt

SEQ ID NO: 4678166 - DNA, 25 bp, Homo sapien
aagagcatgtgtaaaggccccgatg

SEQ ID NO: 4678167 - DNA, 25 bp, Homo sapien
tgtgacatctaacaccccatgcttg

SEQ ID NO: 4678168 - DNA, 25 bp, Homo sapien
tctaagtctcagaggtgccatgttc

SEQ ID NO: 4678169 - DNA, 25 bp, Homo sapien
cctatactgtggttgtgtgctcaaa

SEQ ID NO: 4678170 - DNA, 25 bp, Homo sapien
gttagatcctggagggtatgagccc

SEQ ID NO: 4678171 - DNA, 25 bp, Homo sapien
gctcatctccaaagactcaggtcaa

SEQ ID NO: 4678172 - DNA, 25 bp, Homo sapien
gcaaactctgctcttcagtgctcag

SEQ ID NO: 4678173 - DNA, 25 bp, Homo sapien
ctagagcagctcattttctgtggcc

SEQ ID NO: 4678174 - DNA, 25 bp, Homo sapien
ttttctgtggcccttggcaaactct

SEQ ID NO: 4678175 - DNA, 25 bp, Homo sapien
ctgtggcccttggcaaactctgctc

SEQ ID NO: 4678176 - DNA, 25 bp, Homo sapien
agctgggagtgaaaatcgcctactt

SEQ ID NO: 4678177 - DNA, 25 bp, Homo sapien
tggattttgcaacttaactgtttca

SEQ ID NO: 4678178 - DNA, 25 bp, Homo sapien
aagctgggagtgaaaatcgcctact

SEQ ID NO: 4678179 - DNA, 25 bp, Homo sapien
tgtttcatatccacccacaggtagg

SEQ ID NO: 4678180 - DNA, 25 bp, Homo sapien
tgacaaataacaatgatgctccttg

SEQ ID NO: 4678181 - DNA, 25 bp, Homo sapien
tgggtttgccaagagagcccgacat

SEQ ID NO: 4678182 - DNA, 25 bp, Homo sapien
ggtcattgcaatttgttgacaaata

SEQ ID NO: 4678183 - DNA, 25 bp, Homo sapien
caaataacaatgatgctccttgtct

SEQ ID NO: 4678184 - DNA, 25 bp, Homo sapien
cttcctgtaacatttcccttgctca

SEQ ID NO: 4678185 - DNA, 25 bp, Homo sapien
ggtcatcagtccttcatataaggtg

SEQ ID NO: 4678186 - DNA, 25 bp, Homo sapien
ggtgattggatggatgtctttcttc

SEQ ID NO: 4678187 - DNA, 25 bp, Homo sapien
cacagtaggtcaaggtcatcagtcc

SEQ ID NO: 4678188 - DNA, 25 bp, Homo sapien
ggcatacattcagatgggtcatcac

SEQ ID NO: 4678189 - DNA, 25 bp, Homo sapien
gggaccaagtagtagaaggctcctc

SEQ ID NO: 4678190 - DNA, 25 bp, Homo sapien
ggaccaagtagtagaaggctcctca

SEQ ID NO: 4678191 - DNA, 25 bp, Homo sapien
gaccaagtagtagaaggctcctcag

SEQ ID NO: 4678192 - DNA, 25 bp, Homo sapien
gctgccaggattcttcacatcaagt

SEQ ID NO: 4678193 - DNA, 25 bp, Homo sapien
caatcatttgctcaaaagtataagc

SEQ ID NO: 4678194 - DNA, 25 bp, Homo sapien
caattgatgaagaatcaatcatttg

SEQ ID NO: 4678195 - DNA, 25 bp, Homo sapien
tcacatcaagttggagggaagtgac

SEQ ID NO: 4678196 - DNA, 25 bp, Homo sapien
ggttgctgctctccagaggcggccg

SEQ ID NO: 4678197 - DNA, 25 bp, Homo sapien
ccagaggcggccgtggcggaagggc

SEQ ID NO: 4678198 - DNA, 25 bp, Homo sapien
tctccagaggcggccgtggcggaag

SEQ ID NO: 4678199 - DNA, 25 bp, Homo sapien
gttgctgctctccagaggcggccgt

SEQ ID NO: 4678200 - DNA, 25 bp, Homo sapien
cagtagctccatggcacgccgcttg

SEQ ID NO: 4678201 - DNA, 25 bp, Homo sapien
tagctccatggcacgccgcttgtac

SEQ ID NO: 4678202 - DNA, 25 bp, Homo sapien
tcagtagctccatggcacgccgctt

SEQ ID NO: 4678203 - DNA, 25 bp, Homo sapien
gtagctccatggcacgccgcttgta

SEQ ID NO: 4678204 - DNA, 25 bp, Homo sapien
attctttatttcagggagagggcag

SEQ ID NO: 4678205 - DNA, 25 bp, Homo sapien
tgtcaagctattctttatttcaggg

SEQ ID NO: 4678206 - DNA, 25 bp, Homo sapien
gctattctttatttcagggagaggg

SEQ ID NO: 4678207 - DNA, 25 bp, Homo sapien
ctgtcaagctattctttatttcagg

SEQ ID NO: 4678208 - DNA, 25 bp, Homo sapien
gcccacactgcggaatgctagcaaa

SEQ ID NO: 4678209 - DNA, 25 bp, Homo sapien
tgattgaggatgtggtttgctacca

SEQ ID NO: 4678210 - DNA, 25 bp, Homo sapien
tgctaccatttgtgaggacccaggg

SEQ ID NO: 4678211 - DNA, 25 bp, Homo sapien
ttggagaattgctccacggatctga

SEQ ID NO: 4678212 - DNA, 25 bp, Homo sapien
tcctcttcccctgcaatctgaatgc

SEQ ID NO: 4678213 - DNA, 25 bp, Homo sapien
ctctgcctgggcttttccgtttcta

SEQ ID NO: 4678214 - DNA, 25 bp, Homo sapien
gggcttttccgtttctatcctgcat

SEQ ID NO: 4678215 - DNA, 25 bp, Homo sapien
ttcccctgcaatctgaatgcaccct

SEQ ID NO: 4678216 - DNA, 25 bp, Homo sapien
cttggagacaggaacactttgcgaa

SEQ ID NO: 4678217 - DNA, 25 bp, Homo sapien
gaaacatgcaggttatagaccccat

SEQ ID NO: 4678218 - DNA, 25 bp, Homo sapien
tacactgcagctatagaacttggag

SEQ ID NO: 4678219 - DNA, 25 bp, Homo sapien
catactcagcgatgtgggatttaac

SEQ ID NO: 4678220 - DNA, 25 bp, Homo sapien
gagctgtgagaccatggttttacca

SEQ ID NO: 4678221 - DNA, 25 bp, Homo sapien
tggagctaacttcttctactgccag

SEQ ID NO: 4678222 - DNA, 25 bp, Homo sapien
ggttttaccatcgactcaccaggtg

SEQ ID NO: 4678223 - DNA, 25 bp, Homo sapien
cactttggttggagagctgtgagac

SEQ ID NO: 4678224 - DNA, 25 bp, Homo sapien
gacagatggcctgtcatccggagta

SEQ ID NO: 4678225 - DNA, 25 bp, Homo sapien
ggtgcttgccaccatcaatgaggcg

SEQ ID NO: 4678226 - DNA, 25 bp, Homo sapien
gaatgctgtcatggttttggccctt

SEQ ID NO: 4678227 - DNA, 25 bp, Homo sapien
gagaaacatgacagatggcctgtca

SEQ ID NO: 4678228 - DNA, 25 bp, Homo sapien
gaaataagcagtgtgctgaagtgga

SEQ ID NO: 4678229 - DNA, 25 bp, Homo sapien
ctcatttgggtgtcctctgctccag

SEQ ID NO: 4678230 - DNA, 25 bp, Homo sapien
agtctttcaggacctcatttgggtg

SEQ ID NO: 4678231 - DNA, 25 bp, Homo sapien
gcagatctcatgtattggggcagtt

SEQ ID NO: 4678232 - DNA, 25 bp, Homo sapien
ttctcatcaaataatggccaccaac

SEQ ID NO: 4678233 - DNA, 25 bp, Homo sapien
tgttagaaataggagtaactccctc

SEQ ID NO: 4678234 - DNA, 25 bp, Homo sapien
tatgatgtggtatgactcaacttgt

SEQ ID NO: 4678235 - DNA, 25 bp, Homo sapien
ggtatgactcaacttgtgtatctgt

SEQ ID NO: 4678236 - DNA, 25 bp, Homo sapien
tgcacagaggtgtagtgacacgcag

SEQ ID NO: 4678237 - DNA, 25 bp, Homo sapien
gcattttatccccaaagaccagaga

SEQ ID NO: 4678238 - DNA, 25 bp, Homo sapien
tgtcttctactctacaacgtttgtg

SEQ ID NO: 4678239 - DNA, 25 bp, Homo sapien
ttcctcgtggctgcccctgtcttct

SEQ ID NO: 4678240 - DNA, 25 bp, Homo sapien
ccccagtgccagtagaaggcacgtg

SEQ ID NO: 4678241 - DNA, 25 bp, Homo sapien
ccagtgccagtagaaggcacgtgtg

SEQ ID NO: 4678242 - DNA, 25 bp, Homo sapien
agtgccagtagaaggcacgtgtggg

SEQ ID NO: 4678243 - DNA, 25 bp, Homo sapien
gccagtagaaggcacgtgtggggga

SEQ ID NO: 4678244 - DNA, 25 bp, Homo sapien
gaatgtgcccaacctgggtgtttct

SEQ ID NO: 4678245 - DNA, 25 bp, Homo sapien
gggactctctaggtttggagcctgt

SEQ ID NO: 4678246 - DNA, 25 bp, Homo sapien
gaagaggaatgtgcccaacctgggt

SEQ ID NO: 4678247 - DNA, 25 bp, Homo sapien
gcaggttgttcagtgtccaggacag

SEQ ID NO: 4678248 - DNA, 25 bp, Homo sapien
tctgttgagttatgaatcacatccc

SEQ ID NO: 4678249 - DNA, 25 bp, Homo sapien
tccacgctctccgtcctctgttggg

SEQ ID NO: 4678250 - DNA, 25 bp, Homo sapien
tcacatccctgttgcacctccacgc

SEQ ID NO: 4678251 - DNA, 25 bp, Homo sapien
tctgttgggtctggcattttcctca

SEQ ID NO: 4678252 - DNA, 25 bp, Homo sapien
tctagtgagatttctgtggtttcct

SEQ ID NO: 4678253 - DNA, 25 bp, Homo sapien
gctagatctagtgagatttctgtgg

SEQ ID NO: 4678254 - DNA, 25 bp, Homo sapien
ttgtggctagatctagtgagatttc

SEQ ID NO: 4678255 - DNA, 25 bp, Homo sapien
tgggatttgtggctagatctagtga

SEQ ID NO: 4678256 - DNA, 25 bp, Homo sapien
caaccgaggtaactgtttgcagcct

SEQ ID NO: 4678257 - DNA, 25 bp, Homo sapien
gggtgaaggaaaccctcctcagtga

SEQ ID NO: 4678258 - DNA, 25 bp, Homo sapien
tagggatgtgtaatgcaaccgaggt

SEQ ID NO: 4678259 - DNA, 25 bp, Homo sapien
agtgacgtcgccaacagctgtttca

SEQ ID NO: 4678260 - DNA, 25 bp, Homo sapien
tctttataggcctggctggattcat

SEQ ID NO: 4678261 - DNA, 25 bp, Homo sapien
tgccacctgatcttctagccagcat

SEQ ID NO: 4678262 - DNA, 25 bp, Homo sapien
tcttccataatctttataggcctgg

SEQ ID NO: 4678263 - DNA, 25 bp, Homo sapien
gccagcatcagacgcaacttggtca

SEQ ID NO: 4678264 - DNA, 25 bp, Homo sapien
tctgtggacacaatgctttgcctgt

SEQ ID NO: 4678265 - DNA, 25 bp, Homo sapien
gtctgtggacacaatgctttgcctg

SEQ ID NO: 4678266 - DNA, 25 bp, Homo sapien
tctgaactcgagtatgcagccccag

SEQ ID NO: 4678267 - DNA, 25 bp, Homo sapien
agtagcaggttatgtttccagtcgc

SEQ ID NO: 4678268 - DNA, 25 bp, Homo sapien
acatgcctgggcgtactcagggaaa

SEQ ID NO: 4678269 - DNA, 25 bp, Homo sapien
tccagtcgctcacatcagggttttg

SEQ ID NO: 4678270 - DNA, 25 bp, Homo sapien
gtgacagacaatgccgtaagtaata

SEQ ID NO: 4678271 - DNA, 25 bp, Homo sapien
cagacaatgccgtaagtaatagttg

SEQ ID NO: 4678272 - DNA, 25 bp, Homo sapien
atgccgtaagtaatagttgttgaac

SEQ ID NO: 4678273 - DNA, 25 bp, Homo sapien
tcagtggtctgctggtctggtgaca

SEQ ID NO: 4678274 - DNA, 25 bp, Homo sapien
tggtggcagtgggcctagaacccag

SEQ ID NO: 4678275 - DNA, 25 bp, Homo sapien
gtggcagtgggcctagaacccagga

SEQ ID NO: 4678276 - DNA, 25 bp, Homo sapien
gggtggtggcagtgggcctagaacc

SEQ ID NO: 4678277 - DNA, 25 bp, Homo sapien
ggtggtggcagtgggcctagaaccc

SEQ ID NO: 4678278 - DNA, 25 bp, Homo sapien
cagaccaatggttggattgctttgc

SEQ ID NO: 4678279 - DNA, 25 bp, Homo sapien
ctgagcagaccaatggttggattgc

SEQ ID NO: 4678280 - DNA, 25 bp, Homo sapien
ccaatggttggattgctttgcgata

SEQ ID NO: 4678281 - DNA, 25 bp, Homo sapien
tggttggattgctttgcgatatcat

SEQ ID NO: 4678282 - DNA, 25 bp, Homo sapien
cacagtgatcctgctctgatttaga

SEQ ID NO: 4678283 - DNA, 25 bp, Homo sapien
ctggtaacctcggtcatgggtttct

SEQ ID NO: 4678284 - DNA, 25 bp, Homo sapien
gctgctaaaggaaggtgcctggtaa

SEQ ID NO: 4678285 - DNA, 25 bp, Homo sapien
aatcacttggtgtttagggtgccac

SEQ ID NO: 4678286 - DNA, 25 bp, Homo sapien
tgatcttgtggtcttgtgctaatcc

SEQ ID NO: 4678287 - DNA, 25 bp, Homo sapien
gcatagcgggcaaggctttttgtga

SEQ ID NO: 4678288 - DNA, 25 bp, Homo sapien
gaagcaaccccataattctccatgc

SEQ ID NO: 4678289 - DNA, 25 bp, Homo sapien
caaatcatagactgccagaactgga

SEQ ID NO: 4678290 - DNA, 25 bp, Homo sapien
cctgctcggggactgatggaataat

SEQ ID NO: 4678291 - DNA, 25 bp, Homo sapien
gctcggggactgatggaataatttt

SEQ ID NO: 4678292 - DNA, 25 bp, Homo sapien
ctcctgctcggggactgatggaata

SEQ ID NO: 4678293 - DNA, 25 bp, Homo sapien
ctgctcggggactgatggaataatt

SEQ ID NO: 4678294 - DNA, 25 bp, Homo sapien
agaaagtttcttaactgacacgttg

SEQ ID NO: 4678295 - DNA, 25 bp, Homo sapien
taactgacacgttggcttcctctgg

SEQ ID NO: 4678296 - DNA, 25 bp, Homo sapien
tcttaactgacacgttggcttcctc

SEQ ID NO: 4678297 - DNA, 25 bp, Homo sapien
aagtttcttaactgacacgttggct

SEQ ID NO: 4678298 - DNA, 25 bp, Homo sapien
tgtttcagttctaatgctgcatggc

SEQ ID NO: 4678299 - DNA, 25 bp, Homo sapien
ggaaccatgtggattcttttcaggt

SEQ ID NO: 4678300 - DNA, 25 bp, Homo sapien
ccattgaaaatcgaggctgctgctt

SEQ ID NO: 4678301 - DNA, 25 bp, Homo sapien
caccttctttgtacgggctttctct

SEQ ID NO: 4678302 - DNA, 25 bp, Homo sapien
ctctgttaattaggaaaattgttgc

SEQ ID NO: 4678303 - DNA, 25 bp, Homo sapien
ggtctgagtcaagtcttttgggctt

SEQ ID NO: 4678304 - DNA, 25 bp, Homo sapien
cactttctgggcacaggcttatcct

SEQ ID NO: 4678305 - DNA, 25 bp, Homo sapien
acttggccaggataggtgttgcttg

SEQ ID NO: 4678306 - DNA, 25 bp, Homo sapien
ccagcattgtgagtttggagtcttt

SEQ ID NO: 4678307 - DNA, 25 bp, Homo sapien
gcattgtgagtttggagtcttttaa

SEQ ID NO: 4678308 - DNA, 25 bp, Homo sapien
agccagcattgtgagtttggagtct

SEQ ID NO: 4678309 - DNA, 25 bp, Homo sapien
tgtgagtttggagtcttttaaactg

SEQ ID NO: 4678310 - DNA, 25 bp, Homo sapien
ccccccatgccctactccaagtgtt

SEQ ID NO: 4678311 - DNA, 25 bp, Homo sapien
ccccatgccctactccaagtgttct

SEQ ID NO: 4678312 - DNA, 25 bp, Homo sapien
tcccccccatgccctactccaagtg

SEQ ID NO: 4678313 - DNA, 25 bp, Homo sapien
ctggcttggcttgggcccccagttc

SEQ ID NO: 4678314 - DNA, 25 bp, Homo sapien
gaatggcaaagctccttcttggccc

SEQ ID NO: 4678315 - DNA, 25 bp, Homo sapien
acccactctgatcttgaatggcaaa

SEQ ID NO: 4678316 - DNA, 25 bp, Homo sapien
catcatccctctcttcaaccagaca

SEQ ID NO: 4678317 - DNA, 25 bp, Homo sapien
cacaaatgtgcaatgaaataccacc

SEQ ID NO: 4678318 - DNA, 25 bp, Homo sapien
cccagtgcgggattttcctgaagct

SEQ ID NO: 4678319 - DNA, 25 bp, Homo sapien
agagcccagtgcgggattttcctga

SEQ ID NO: 4678320 - DNA, 25 bp, Homo sapien
agcccagtgcgggattttcctgaag

SEQ ID NO: 4678321 - DNA, 25 bp, Homo sapien
tcagagcccagtgcgggattttcct

SEQ ID NO: 4678322 - DNA, 25 bp, Homo sapien
tatgcaaacattggctgagcacctg

SEQ ID NO: 4678323 - DNA, 25 bp, Homo sapien
tctattaccaatttgcccagagtat

SEQ ID NO: 4678324 - DNA, 25 bp, Homo sapien
ttctgctgcattgggttatgcaaac

SEQ ID NO: 4678325 - DNA, 25 bp, Homo sapien
agagtatctattctctttctgagcc

SEQ ID NO: 4678326 - DNA, 25 bp, Homo sapien
gaaaaattggctttgtcaaaactca

SEQ ID NO: 4678327 - DNA, 25 bp, Homo sapien
agttgccaactatgcataaatggag

SEQ ID NO: 4678328 - DNA, 25 bp, Homo sapien
gagaatttgtgttcactccaggaaa

SEQ ID NO: 4678329 - DNA, 25 bp, Homo sapien
tcattcttcgtttctagttgccaac

SEQ ID NO: 4678330 - DNA, 25 bp, Homo sapien
tgataggattggaagttcctggagc

SEQ ID NO: 4678331 - DNA, 25 bp, Homo sapien
caacttgataggattggaagttcct

SEQ ID NO: 4678332 - DNA, 25 bp, Homo sapien
ccaacttgataggattggaagttcc

SEQ ID NO: 4678333 - DNA, 25 bp, Homo sapien
cttgataggattggaagttcctgga

SEQ ID NO: 4678334 - DNA, 25 bp, Homo sapien
aggcttggggccttaggaagatctg

SEQ ID NO: 4678335 - DNA, 25 bp, Homo sapien
ggagcttgtgcttcaggctcagtca

SEQ ID NO: 4678336 - DNA, 25 bp, Homo sapien
cagagtctccttggaccatgggagc

SEQ ID NO: 4678337 - DNA, 25 bp, Homo sapien
gagatggctcttctggcttcagagt

SEQ ID NO: 4678338 - DNA, 25 bp, Homo sapien
cgtggctcaaccagccttccaggtc

SEQ ID NO: 4678339 - DNA, 25 bp, Homo sapien
agacgtggctcaaccagccttccag

SEQ ID NO: 4678340 - DNA, 25 bp, Homo sapien
tggctcaaccagccttccaggtcat

SEQ ID NO: 4678341 - DNA, 25 bp, Homo sapien
tcagacgtggctcaaccagccttcc

SEQ ID NO: 4678342 - DNA, 25 bp, Homo sapien
taagatgggcaaggtaaaagtgagg

SEQ ID NO: 4678343 - DNA, 25 bp, Homo sapien
agatgggcaaggtaaaagtgaggca

SEQ ID NO: 4678344 - DNA, 25 bp, Homo sapien
aagatgggcaaggtaaaagtgaggc

SEQ ID NO: 4678345 - DNA, 25 bp, Homo sapien
ctaagatgggcaaggtaaaagtgag

SEQ ID NO: 4678346 - DNA, 25 bp, Homo sapien
gcaggcaccatgatttttctcgtca

SEQ ID NO: 4678347 - DNA, 25 bp, Homo sapien
tccagggatgcaacctgagtgcaag

SEQ ID NO: 4678348 - DNA, 25 bp, Homo sapien
caggtattgtgaagaagcacggctc

SEQ ID NO: 4678349 - DNA, 25 bp, Homo sapien
tttgcagtcgggtaaaaactctggc

SEQ ID NO: 4678350 - DNA, 25 bp, Homo sapien
cagctgtgcagcgtagtggcggtgg

SEQ ID NO: 4678351 - DNA, 25 bp, Homo sapien
taggcagtttgtggaaacagcttcc

SEQ ID NO: 4678352 - DNA, 25 bp, Homo sapien
ggacaagatccttgccataggcagt

SEQ ID NO: 4678353 - DNA, 25 bp, Homo sapien
ttcctcaggattccccagctgtgca

SEQ ID NO: 4678354 - DNA, 25 bp, Homo sapien
agatagaacatcagatgacccatga

SEQ ID NO: 4678355 - DNA, 25 bp, Homo sapien
tcccctgggatggagtacacattct

SEQ ID NO: 4678356 - DNA, 25 bp, Homo sapien
cacattctcccgcagttctgggaat

SEQ ID NO: 4678357 - DNA, 25 bp, Homo sapien
agtacacattctcccgcagttctgg

SEQ ID NO: 4678358 - DNA, 25 bp, Homo sapien
gatggagtacacattctcccgcagt

SEQ ID NO: 4678359 - DNA, 25 bp, Homo sapien
atgctccagcaatgccactaggggt

SEQ ID NO: 4678360 - DNA, 25 bp, Homo sapien
cagcaatgccactaggggtgaaatc

SEQ ID NO: 4678361 - DNA, 25 bp, Homo sapien
ctaggggtgaaatcttgcatcagta

SEQ ID NO: 4678362 - DNA, 25 bp, Homo sapien
ggtgaaatcttgcatcagtatccag

SEQ ID NO: 4678363 - DNA, 25 bp, Homo sapien
taagctgccagtaccgtggaacccc

SEQ ID NO: 4678364 - DNA, 25 bp, Homo sapien
gccagtaccgtggaaccccctgaga

SEQ ID NO: 4678365 - DNA, 25 bp, Homo sapien
cagtaccgtggaaccccctgagaca

SEQ ID NO: 4678366 - DNA, 25 bp, Homo sapien
atgtaagctgccagtaccgtggaac

SEQ ID NO: 4678367 - DNA, 25 bp, Homo sapien
gctcccagtactgcaagtgcggcta

SEQ ID NO: 4678368 - DNA, 25 bp, Homo sapien
ggacatctgggagtacatcttccgc

SEQ ID NO: 4678369 - DNA, 25 bp, Homo sapien
gaagtacgcggagctcatgtttgag

SEQ ID NO: 4678370 - DNA, 25 bp, Homo sapien
ggcgacacccgcaagtggactttag

SEQ ID NO: 4678371 - DNA, 25 bp, Homo sapien
tggattcaaggcctgaaaggcctac

SEQ ID NO: 4678372 - DNA, 25 bp, Homo sapien
tcaatcccactggattcaaggcctg

SEQ ID NO: 4678373 - DNA, 25 bp, Homo sapien
cgcaccactcttagaaagttctcaa

SEQ ID NO: 4678374 - DNA, 25 bp, Homo sapien
caagagccgcaccactcttagaaag

SEQ ID NO: 4678375 - DNA, 25 bp, Homo sapien
acatttacagtagccagtgcccagg

SEQ ID NO: 4678376 - DNA, 25 bp, Homo sapien
gatgttccccatgaggtcccgtttg

SEQ ID NO: 4678377 - DNA, 25 bp, Homo sapien
ccatgtcgcagagggttaaccagct

SEQ ID NO: 4678378 - DNA, 25 bp, Homo sapien
tctgcagacggttagggaagccact

SEQ ID NO: 4678379 - DNA, 25 bp, Homo sapien
tgtgtgtaggagtgcgctcaccctg

SEQ ID NO: 4678380 - DNA, 25 bp, Homo sapien
tgtttaatgctacaggaataagcgc

SEQ ID NO: 4678381 - DNA, 25 bp, Homo sapien
gctcaccctgtcgagggtaggcact

SEQ ID NO: 4678382 - DNA, 25 bp, Homo sapien
gctacaggaataagcgccggctcca

SEQ ID NO: 4678383 - DNA, 25 bp, Homo sapien
tgtaacatcttaccaggtcatgtgc

SEQ ID NO: 4678384 - DNA, 25 bp, Homo sapien
tatagggactgttttactgcctgtg

SEQ ID NO: 4678385 - DNA, 25 bp, Homo sapien
gggctgagcctcctataattacaat

SEQ ID NO: 4678386 - DNA, 25 bp, Homo sapien
tgttggcggagaagattacaatggc

SEQ ID NO: 4678387 - DNA, 25 bp, Homo sapien
gaaatgcagtccctcctctcagggc

SEQ ID NO: 4678388 - DNA, 25 bp, Homo sapien
taaatgtatacagccatgtgactgc

SEQ ID NO: 4678389 - DNA, 25 bp, Homo sapien
cataaagtagttcctgtccattaac

SEQ ID NO: 4678390 - DNA, 25 bp, Homo sapien
tcactgggtgagcatgcctgaggtt

SEQ ID NO: 4678391 - DNA, 25 bp, Homo sapien
ggattaatacccagatagccttgaa

SEQ ID NO: 4678392 - DNA, 25 bp, Homo sapien
tagccttgaacataagtgcttgcaa

SEQ ID NO: 4678393 - DNA, 25 bp, Homo sapien
tcttctttggacagctgaatcagga

SEQ ID NO: 4678394 - DNA, 25 bp, Homo sapien
tgagaaaacccactaaaagaatgct

SEQ ID NO: 4678395 - DNA, 25 bp, Homo sapien
tgagaaccaccgattaaccagtgtg

SEQ ID NO: 4678396 - DNA, 25 bp, Homo sapien
aacatctgtgctcacagaacatcag

SEQ ID NO: 4678397 - DNA, 25 bp, Homo sapien
taaccagtgtgtcaagggatggcac

SEQ ID NO: 4678398 - DNA, 25 bp, Homo sapien
tggcactgtgatatgctgagcataa

SEQ ID NO: 4678399 - DNA, 25 bp, Homo sapien
gggaaggcccagtttgcaaggctct

SEQ ID NO: 4678400 - DNA, 25 bp, Homo sapien
gttccaaggccgcatatattttgca

SEQ ID NO: 4678401 - DNA, 25 bp, Homo sapien
aaaattcctacagcagaggatctgc

SEQ ID NO: 4678402 - DNA, 25 bp, Homo sapien
aatttgcctgtcatatgtggctgcc

SEQ ID NO: 4678403 - DNA, 25 bp, Homo sapien
caaaagtttgggcagatgggcaaga

SEQ ID NO: 4678404 - DNA, 25 bp, Homo sapien
gggacgcggccaatgtagctcctct

SEQ ID NO: 4678405 - DNA, 25 bp, Homo sapien
gctgctctcaggtccgcaggttcca

SEQ ID NO: 4678406 - DNA, 25 bp, Homo sapien
tctacggtgccaggcctacaaagaa

SEQ ID NO: 4678407 - DNA, 25 bp, Homo sapien
aggcaccaccggctccgcggcttcg

SEQ ID NO: 4678408 - DNA, 25 bp, Homo sapien
gtatcgatccacgagcgaaggcacc

SEQ ID NO: 4678409 - DNA, 25 bp, Homo sapien
tccgcggcttcgggctcggtagcca

SEQ ID NO: 4678410 - DNA, 25 bp, Homo sapien
gagtgaagtatcgatccacgagcga

SEQ ID NO: 4678411 - DNA, 25 bp, Homo sapien
gctagacggaacacagaagtccagt

SEQ ID NO: 4678412 - DNA, 25 bp, Homo sapien
ccagaatgcgccctgaagtatttca

SEQ ID NO: 4678413 - DNA, 25 bp, Homo sapien
tcttactgcgagcaacaccctagag

SEQ ID NO: 4678414 - DNA, 25 bp, Homo sapien
gaagtccagtgccttctgacgtggg

SEQ ID NO: 4678415 - DNA, 25 bp, Homo sapien
tatacagtggtcctcacaaaatttt

SEQ ID NO: 4678416 - DNA, 25 bp, Homo sapien
cggttagagtgctgtagtatacagt

SEQ ID NO: 4678417 - DNA, 25 bp, Homo sapien
agtatacagtggtcctcacaaaatt

SEQ ID NO: 4678418 - DNA, 25 bp, Homo sapien
agagtgctgtagtatacagtggtcc

SEQ ID NO: 4678419 - DNA, 25 bp, Homo sapien
tgaacagttcagtagttgggcacag

SEQ ID NO: 4678420 - DNA, 25 bp, Homo sapien
gaccataccaggctacaataccagg

SEQ ID NO: 4678421 - DNA, 25 bp, Homo sapien
aatttatatgttcagagtggccagg

SEQ ID NO: 4678422 - DNA, 25 bp, Homo sapien
gactggccacttcaagtagcagctg

SEQ ID NO: 4678423 - DNA, 25 bp, Homo sapien
cctgtgtgattgcttggaataattt

SEQ ID NO: 4678424 - DNA, 25 bp, Homo sapien
ttgatcctgtgtgattgcttggaat

SEQ ID NO: 4678425 - DNA, 25 bp, Homo sapien
aaaaagttgatcctgtgtgattgct

SEQ ID NO: 4678426 - DNA, 25 bp, Homo sapien
ctacaaggagaaaaagttgatcctg

SEQ ID NO: 4678427 - DNA, 25 bp, Homo sapien
tacagttggtactgatctgatagga

SEQ ID NO: 4678428 - DNA, 25 bp, Homo sapien
cattatagggatagtagcacagaac

SEQ ID NO: 4678429 - DNA, 25 bp, Homo sapien
cacctcctgagatacctaatttggg

SEQ ID NO: 4678430 - DNA, 25 bp, Homo sapien
tattagagttctcctttcaaaggcc

SEQ ID NO: 4678431 - DNA, 25 bp, Homo sapien
cctcaaactgctagagaagtatgct

SEQ ID NO: 4678432 - DNA, 25 bp, Homo sapien
gcaactgtacctgccttaagtgtta

SEQ ID NO: 4678433 - DNA, 25 bp, Homo sapien
tattttggacagagatttatcattg

SEQ ID NO: 4678434 - DNA, 25 bp, Homo sapien
cattgaaacttcagaagtcttaagt

SEQ ID NO: 4678435 - DNA, 25 bp, Homo sapien
ggcatgagcaactgtacctgcctta

SEQ ID NO: 4678436 - DNA, 25 bp, Homo sapien
gcagtaaatcttacagagaggtgca

SEQ ID NO: 4678437 - DNA, 25 bp, Homo sapien
agtaaatcttacagagaggtgcaag

SEQ ID NO: 4678438 - DNA, 25 bp, Homo sapien
gagcagtaaatcttacagagaggtg

SEQ ID NO: 4678439 - DNA, 25 bp, Homo sapien
tctgagcagtaaatcttacagagag

SEQ ID NO: 4678440 - DNA, 25 bp, Homo sapien
agatggcttatggaggatgttttca

SEQ ID NO: 4678441 - DNA, 25 bp, Homo sapien
gcttatggaggatgttttcattcac

SEQ ID NO: 4678442 - DNA, 25 bp, Homo sapien
aagaatagatggcttatggaggatg

SEQ ID NO: 4678443 - DNA, 25 bp, Homo sapien
ttcattcacttccatcaaacgtcct

SEQ ID NO: 4678444 - DNA, 25 bp, Homo sapien
ttgtgtcagtaacccttctgttatg

SEQ ID NO: 4678445 - DNA, 25 bp, Homo sapien
ttaggccaggtaacaagaatcccac

SEQ ID NO: 4678446 - DNA, 25 bp, Homo sapien
taggcctcccctgcatatggctggc

SEQ ID NO: 4678447 - DNA, 25 bp, Homo sapien
taggactaggctttttggtaggcac

SEQ ID NO: 4678448 - DNA, 25 bp, Homo sapien
ggtaggcacattatagaagactggg

SEQ ID NO: 4678449 - DNA, 25 bp, Homo sapien
gacatgtatgttatagcccttacag

SEQ ID NO: 4678450 - DNA, 25 bp, Homo sapien
acagtgatattgacatgtatgttat

SEQ ID NO: 4678451 - DNA, 25 bp, Homo sapien
catgtatgttatagcccttacagaa

SEQ ID NO: 4678452 - DNA, 25 bp, Homo sapien
aaacagtgatattgacatgtatgtt

SEQ ID NO: 4678453 - DNA, 25 bp, Homo sapien
gggtaacttatgacttcaacagcat

SEQ ID NO: 4678454 - DNA, 25 bp, Homo sapien
ccttcgggagaaaatgtgatgcact

SEQ ID NO: 4678455 - DNA, 25 bp, Homo sapien
catagttttatgacgccttcaagag

SEQ ID NO: 4678456 - DNA, 25 bp, Homo sapien
aattttcactgtagtccttcgggag

SEQ ID NO: 4678457 - DNA, 25 bp, Homo sapien
cttcctatgtgagcttagtcattaa

SEQ ID NO: 4678458 - DNA, 25 bp, Homo sapien
ttcctatgtgagcttagtcattaaa

SEQ ID NO: 4678459 - DNA, 25 bp, Homo sapien
tcattggagaccattcctttggtgg

SEQ ID NO: 4678460 - DNA, 25 bp, Homo sapien
tgtgattgagtcttcccaacatgaa

SEQ ID NO: 4678461 - DNA, 25 bp, Homo sapien
caaaaatctcagcttttggctggaa

SEQ ID NO: 4678462 - DNA, 25 bp, Homo sapien
ttagcaagcttatcctgtgattgag

SEQ ID NO: 4678463 - DNA, 25 bp, Homo sapien
cagacagaagtgagggatcctgtgc

SEQ ID NO: 4678464 - DNA, 25 bp, Homo sapien
gatcctgtgctcgtgaagattcctt

SEQ ID NO: 4678465 - DNA, 25 bp, Homo sapien
gaagatgcagtcccaagcttagagg

SEQ ID NO: 4678466 - DNA, 25 bp, Homo sapien
aagattccttcctatagaaggagga

SEQ ID NO: 4678467 - DNA, 25 bp, Homo sapien
tggaaaggttatccaccgtgggaca

SEQ ID NO: 4678468 - DNA, 25 bp, Homo sapien
tagtgaaggatctctacaactgtgt

SEQ ID NO: 4678469 - DNA, 25 bp, Homo sapien
gatttgggactcaataaatagcacc

SEQ ID NO: 4678470 - DNA, 25 bp, Homo sapien
gcaggttgcttcagtattctagaga

SEQ ID NO: 4678471 - DNA, 25 bp, Homo sapien
tgtggcttacactctgaatatttgt

SEQ ID NO: 4678472 - DNA, 25 bp, Homo sapien
ctgggtagcaatctagttgtggctt

SEQ ID NO: 4678473 - DNA, 25 bp, Homo sapien
gtatggctacctttcacttccaaag

SEQ ID NO: 4678474 - DNA, 25 bp, Homo sapien
cacaaataattgacatgacagaaaa

SEQ ID NO: 4678475 - DNA, 25 bp, Homo sapien
tgaagaatattgtagccttgtatta

SEQ ID NO: 4678476 - DNA, 25 bp, Homo sapien
cagtatggaggtttgaagaatattg

SEQ ID NO: 4678477 - DNA, 25 bp, Homo sapien
ttagtagataattaccattacagaa

SEQ ID NO: 4678478 - DNA, 25 bp, Homo sapien
aatagaatggtttatgctgggcatc

SEQ ID NO: 4678479 - DNA, 25 bp, Homo sapien
cacctatcgagaggacgggaagctt

SEQ ID NO: 4678480 - DNA, 25 bp, Homo sapien
ccagaagtctttgcgggaattcaga

SEQ ID NO: 4678481 - DNA, 25 bp, Homo sapien
ttgtctgtccaagtaagaggaggcc

SEQ ID NO: 4678482 - DNA, 25 bp, Homo sapien
cagagctgatttaggacgagtcacc

SEQ ID NO: 4678483 - DNA, 25 bp, Homo sapien
cattgtagccatcccaaagaaaacc

SEQ ID NO: 4678484 - DNA, 25 bp, Homo sapien
gaaaatgtatcatccctgggttctc

SEQ ID NO: 4678485 - DNA, 25 bp, Homo sapien
ttctcaggtgaaggaggcaattcaa

SEQ ID NO: 4678486 - DNA, 25 bp, Homo sapien
gcagagacccagcagatgtaactct

SEQ ID NO: 4678487 - DNA, 25 bp, Homo sapien
tgaacccattgtgacctatctggat

SEQ ID NO: 4678488 - DNA, 25 bp, Homo sapien
gaatgtgtcactactggtcaagcaa

SEQ ID NO: 4678489 - DNA, 25 bp, Homo sapien
gctaaatggcttgcagatgagatct

SEQ ID NO: 4678490 - DNA, 25 bp, Homo sapien
gtaatttaggtgagctatccagagc

SEQ ID NO: 4678491 - DNA, 25 bp, Homo sapien
taagaagtgtttagctggcagagct

SEQ ID NO: 4678492 - DNA, 25 bp, Homo sapien
agtttcttcaggaacagaccgtacg

SEQ ID NO: 4678493 - DNA, 25 bp, Homo sapien
tctgagtctagtgtgggttggccca

SEQ ID NO: 4678494 - DNA, 25 bp, Homo sapien
cagggcaacagagatcaagtggtat

SEQ ID NO: 4678495 - DNA, 25 bp, Homo sapien
taaggactaggaaggtccactagct

SEQ ID NO: 4678496 - DNA, 25 bp, Homo sapien
ggaggtcttggaaccctccgagcca

SEQ ID NO: 4678497 - DNA, 25 bp, Homo sapien
cattgctacagcaacggcataagga

SEQ ID NO: 4678498 - DNA, 25 bp, Homo sapien
ccctccgagccagaaagaagcattc

SEQ ID NO: 4678499 - DNA, 25 bp, Homo sapien
taaaacttggctgaccacgttgaag

SEQ ID NO: 4678500 - DNA, 25 bp, Homo sapien
gactccgttgtgtgcagattctgct

SEQ ID NO: 4678501 - DNA, 25 bp, Homo sapien
taaccctgggagatacaaagactga

SEQ ID NO: 4678502 - DNA, 25 bp, Homo sapien
gtcctatagtacatgacagggctga

SEQ ID NO: 4678503 - DNA, 25 bp, Homo sapien
gagaacttgctgcgggctgctttgt

SEQ ID NO: 4678504 - DNA, 25 bp, Homo sapien
agagaacttgctgcgggctgctttg

SEQ ID NO: 4678505 - DNA, 25 bp, Homo sapien
ggccttacatacagaatgcctggac

SEQ ID NO: 4678506 - DNA, 25 bp, Homo sapien
agaacttgctgcgggctgctttgta

SEQ ID NO: 4678507 - DNA, 25 bp, Homo sapien
ggaagttcaaatttgacagcgagtt

SEQ ID NO: 4678508 - DNA, 25 bp, Homo sapien
taggactttccgtgacatttctgaa

SEQ ID NO: 4678509 - DNA, 25 bp, Homo sapien
ctctgcagtgatttttctaggaagt

SEQ ID NO: 4678510 - DNA, 25 bp, Homo sapien
tgacagcgagttcagctcagctgtg

SEQ ID NO: 4678511 - DNA, 25 bp, Homo sapien
ttgactttgaccctcatggactggg

SEQ ID NO: 4678512 - DNA, 25 bp, Homo sapien
gatgggcacttgctaagacctttaa

SEQ ID NO: 4678513 - DNA, 25 bp, Homo sapien
cttcaactttatcttgtagctttac

SEQ ID NO: 4678514 - DNA, 25 bp, Homo sapien
ctgtttgaagacatataagatcttt

SEQ ID NO: 4678515 - DNA, 25 bp, Homo sapien
ggagcatactacctaggcctggaag

SEQ ID NO: 4678516 - DNA, 25 bp, Homo sapien
gcctggaaggagcaatcatcggtcc

SEQ ID NO: 4678517 - DNA, 25 bp, Homo sapien
tagtgccatgctagtgagtcccacg

SEQ ID NO: 4678518 - DNA, 25 bp, Homo sapien
gagtcccacgaattcagttcccacg

SEQ ID NO: 4678519 - DNA, 25 bp, Homo sapien
tagcagcaatccttggagcagtgcc

SEQ ID NO: 4678520 - DNA, 25 bp, Homo sapien
gggttaggatgcaaggccattttac

SEQ ID NO: 4678521 - DNA, 25 bp, Homo sapien
cctgtggctgacacaagggttagga

SEQ ID NO: 4678522 - DNA, 25 bp, Homo sapien
cagtacctgcagttcttgacctgtg

SEQ ID NO: 4678523 - DNA, 25 bp, Homo sapien
aatggctggcttctatggattgtat

SEQ ID NO: 4678524 - DNA, 25 bp, Homo sapien
ttctatggattgtatacctggctga

SEQ ID NO: 4678525 - DNA, 25 bp, Homo sapien
tatgtttggcatcaatattgtcttc

SEQ ID NO: 4678526 - DNA, 25 bp, Homo sapien
ggctgactcatactatgtttggcat

SEQ ID NO: 4678527 - DNA, 25 bp, Homo sapien
caccccatagagtccaggtttttat

SEQ ID NO: 4678528 - DNA, 25 bp, Homo sapien
tctgtagtgaccatatgaaggtgct

SEQ ID NO: 4678529 - DNA, 25 bp, Homo sapien
ctttttcaactacagcttttcttct

SEQ ID NO: 4678530 - DNA, 25 bp, Homo sapien
catatgaaggtgctttccctgcacc

SEQ ID NO: 4678531 - DNA, 25 bp, Homo sapien
tcttgttgcagagtcatatggctcc

SEQ ID NO: 4678532 - DNA, 25 bp, Homo sapien
taagacgttctctagtgaaagccat

SEQ ID NO: 4678533 - DNA, 25 bp, Homo sapien
cctaacagtatacctcttgggatgc

SEQ ID NO: 4678534 - DNA, 25 bp, Homo sapien
gaaagccattggtccggatgacaaa

SEQ ID NO: 4678535 - DNA, 25 bp, Homo sapien
caaattgtgcgcatactaaaaacca

SEQ ID NO: 4678536 - DNA, 25 bp, Homo sapien
gtccaagtgtggtcgtatttacaac

SEQ ID NO: 4678537 - DNA, 25 bp, Homo sapien
ggaggatgccacactactagtctga

SEQ ID NO: 4678538 - DNA, 25 bp, Homo sapien
tgatggaatttatgttatatgagct

SEQ ID NO: 4678539 - DNA, 25 bp, Homo sapien
tagggaggacccttttgcagagcag

SEQ ID NO: 4678540 - DNA, 25 bp, Homo sapien
taggctctgtatgcactggaggttc

SEQ ID NO: 4678541 - DNA, 25 bp, Homo sapien
cctctgcaaggagtaggttggatac

SEQ ID NO: 4678542 - DNA, 25 bp, Homo sapien
tccagaaggagagtaggtggacttc

SEQ ID NO: 4678543 - DNA, 25 bp, Homo sapien
tccagtgatgagtactacaagccag

SEQ ID NO: 4678544 - DNA, 25 bp, Homo sapien
tttcctgaccacactattttatcta

SEQ ID NO: 4678545 - DNA, 25 bp, Homo sapien
gaagtgggtgataagcctgactcca

SEQ ID NO: 4678546 - DNA, 25 bp, Homo sapien
aatattattggccagtctgtggaag

SEQ ID NO: 4678547 - DNA, 25 bp, Homo sapien
ttcaccactgtcactacactcttga

SEQ ID NO: 4678548 - DNA, 25 bp, Homo sapien
gaccatcctcttctacagcgggaca

SEQ ID NO: 4678549 - DNA, 25 bp, Homo sapien
aatgtgagcctgctgttcaccactg

SEQ ID NO: 4678550 - DNA, 25 bp, Homo sapien
gagtctctgtggatcgttatgagcc

SEQ ID NO: 4678551 - DNA, 25 bp, Homo sapien
tcttttggcttcctaatgtggaaga

SEQ ID NO: 4678552 - DNA, 25 bp, Homo sapien
tttggcttcctaatgtggaagatga

SEQ ID NO: 4678553 - DNA, 25 bp, Homo sapien
cttttggcttcctaatgtggaagat

SEQ ID NO: 4678554 - DNA, 25 bp, Homo sapien
tggcttcctaatgtggaagatgaag

SEQ ID NO: 4678555 - DNA, 25 bp, Homo sapien
ttctggactggcaggatattgtttc

SEQ ID NO: 4678556 - DNA, 25 bp, Homo sapien
tgtcagtcgtcagaatagctggctg

SEQ ID NO: 4678557 - DNA, 25 bp, Homo sapien
ctggaaggcacaaaggacagaagtt

SEQ ID NO: 4678558 - DNA, 25 bp, Homo sapien
ctttgttcacgagaacattgagaca

SEQ ID NO: 4678559 - DNA, 25 bp, Homo sapien
gacagactgtatcactcttggtttg

SEQ ID NO: 4678560 - DNA, 25 bp, Homo sapien
taaaattctaggagataaggtgaac

SEQ ID NO: 4678561 - DNA, 25 bp, Homo sapien
taattgaaaagcaagtactagaact

SEQ ID NO: 4678562 - DNA, 25 bp, Homo sapien
gataaggtgaacaatactgctgtaa

SEQ ID NO: 4678563 - DNA, 25 bp, Homo sapien
tgaattctgcggctaacaacgtgta

SEQ ID NO: 4678564 - DNA, 25 bp, Homo sapien
caacgtgtatcagtatggacgagaa

SEQ ID NO: 4678565 - DNA, 25 bp, Homo sapien
gtatggacgagaatggataactcac

SEQ ID NO: 4678566 - DNA, 25 bp, Homo sapien
gaggctcaggtagtccaaagagccc

SEQ ID NO: 4678567 - DNA, 25 bp, Homo sapien
aactctagcaaatcaccctgagtgg

SEQ ID NO: 4678568 - DNA, 25 bp, Homo sapien
gaagtcacaagtaatttgattaatg

SEQ ID NO: 4678569 - DNA, 25 bp, Homo sapien
aagagagtgtacacatgattgaagt

SEQ ID NO: 4678570 - DNA, 25 bp, Homo sapien
tgaaactctagcaaatcaccctgag

SEQ ID NO: 4678571 - DNA, 25 bp, Homo sapien
gataggaactcttcttttagcccta

SEQ ID NO: 4678572 - DNA, 25 bp, Homo sapien
tatttttgttagtgataggaactct

SEQ ID NO: 4678573 - DNA, 25 bp, Homo sapien
tcttttagccctactcctgactgca

SEQ ID NO: 4678574 - DNA, 25 bp, Homo sapien
tttagccctactcctgactgcaaag

SEQ ID NO: 4678575 - DNA, 25 bp, Homo sapien
gagctctcgcgccttggcccattgt

SEQ ID NO: 4678576 - DNA, 25 bp, Homo sapien
cccattgtcgggcttggaaaattct

SEQ ID NO: 4678577 - DNA, 25 bp, Homo sapien
tagagaaacgctaccatgtgtggtg

SEQ ID NO: 4678578 - DNA, 25 bp, Homo sapien
tctggatactcaaaaagcttgtcat

SEQ ID NO: 4678579 - DNA, 25 bp, Homo sapien
tgtggattttgccttctgagtacct

SEQ ID NO: 4678580 - DNA, 25 bp, Homo sapien
tcagggagcatgcaatataaatggt

SEQ ID NO: 4678581 - DNA, 25 bp, Homo sapien
accagagcatggtatagtagtgcct

SEQ ID NO: 4678582 - DNA, 25 bp, Homo sapien
tacaggtgcgtccactggctattgt

SEQ ID NO: 4678583 - DNA, 25 bp, Homo sapien
aacctgtggattgtgcagttgctgc

SEQ ID NO: 4678584 - DNA, 25 bp, Homo sapien
tcgtcatgcagatctggttgaacct

SEQ ID NO: 4678585 - DNA, 25 bp, Homo sapien
tagtttgggccattgtcgtcatgca

SEQ ID NO: 4678586 - DNA, 25 bp, Homo sapien
gagaatccgctccaacgttgtccac

SEQ ID NO: 4678587 - DNA, 25 bp, Homo sapien
ggcaggttatctccatggcagcttc

SEQ ID NO: 4678588 - DNA, 25 bp, Homo sapien
aggttatctccatggcagcttctac

SEQ ID NO: 4678589 - DNA, 25 bp, Homo sapien
cacagggtatgaatcaagcagtgaa

SEQ ID NO: 4678590 - DNA, 25 bp, Homo sapien
tatgaatcaagcagtgaagaccagc

SEQ ID NO: 4678591 - DNA, 25 bp, Homo sapien
ttgtggctgtagaccacactggcat

SEQ ID NO: 4678592 - DNA, 25 bp, Homo sapien
tgttgtggctgtagaccacactggc

SEQ ID NO: 4678593 - DNA, 25 bp, Homo sapien
ccctgttgtggctgtagaccacact

SEQ ID NO: 4678594 - DNA, 25 bp, Homo sapien
gtctctttaacacagccgcttttcc

SEQ ID NO: 4678595 - DNA, 25 bp, Homo sapien
tatgcggtgcctgcttccaataagc

SEQ ID NO: 4678596 - DNA, 25 bp, Homo sapien
tggatgtatttctggtaactgctgc

SEQ ID NO: 4678597 - DNA, 25 bp, Homo sapien
gacgtgatactagaagccattgaga

SEQ ID NO: 4678598 - DNA, 25 bp, Homo sapien
tctccaggcccttgtgacgtgatac

SEQ ID NO: 4678599 - DNA, 25 bp, Homo sapien
tccagtattcctggttattgttttc

SEQ ID NO: 4678600 - DNA, 25 bp, Homo sapien
ggctcatggagaattccagtattcc

SEQ ID NO: 4678601 - DNA, 25 bp, Homo sapien
gctggctcatggagaattccagtat

SEQ ID NO: 4678602 - DNA, 25 bp, Homo sapien
ctcatggagaattccagtattcctg

SEQ ID NO: 4678603 - DNA, 25 bp, Homo sapien
attttttgtagtgtcatatgttgca

SEQ ID NO: 4678604 - DNA, 25 bp, Homo sapien
ctttagaaaatgttatgctttaatc

SEQ ID NO: 4678605 - DNA, 25 bp, Homo sapien
tgtagtgtcatatgttgcatttaac

SEQ ID NO: 4678606 - DNA, 25 bp, Homo sapien
gcatttaacattcttaatctttaga

SEQ ID NO: 4678607 - DNA, 25 bp, Homo sapien
caattcctgtctggattatattgct

SEQ ID NO: 4678608 - DNA, 25 bp, Homo sapien
tttcattcaagtggaatgcaagcac

SEQ ID NO: 4678609 - DNA, 25 bp, Homo sapien
ggttggctatgtgttgactgtttca

SEQ ID NO: 4678610 - DNA, 25 bp, Homo sapien
tgcaagcactgaacgctacttgaga

SEQ ID NO: 4678611 - DNA, 25 bp, Homo sapien
ctttaagcgaatccctgttttgatg

SEQ ID NO: 4678612 - DNA, 25 bp, Homo sapien
ttaagcgaatccctgttttgatgac

SEQ ID NO: 4678613 - DNA, 25 bp, Homo sapien
taagcgaatccctgttttgatgact

SEQ ID NO: 4678614 - DNA, 25 bp, Homo sapien
aagcgaatccctgttttgatgactt

SEQ ID NO: 4678615 - DNA, 25 bp, Homo sapien
ctttttactgaagataaaccctcat

SEQ ID NO: 4678616 - DNA, 25 bp, Homo sapien
tctttttactgaagataaaccctca

SEQ ID NO: 4678617 - DNA, 25 bp, Homo sapien
tttgagtatctttttactgaagata

SEQ ID NO: 4678618 - DNA, 25 bp, Homo sapien
gagtatctttttactgaagataaac

SEQ ID NO: 4678619 - DNA, 25 bp, Homo sapien
gagcttactcttacaaaaccaggga

SEQ ID NO: 4678620 - DNA, 25 bp, Homo sapien
gaaaggtgacctcttaccaggctag

SEQ ID NO: 4678621 - DNA, 25 bp, Homo sapien
gagtaaagcagctgaccgcgtgaag

SEQ ID NO: 4678622 - DNA, 25 bp, Homo sapien
gcagggactggtgtaccacagcaca

SEQ ID NO: 4678623 - DNA, 25 bp, Homo sapien
tgttcctcccggtgcaggggcgacg

SEQ ID NO: 4678624 - DNA, 25 bp, Homo sapien
ctgtgggtgagtgagcggcagtccg

SEQ ID NO: 4678625 - DNA, 25 bp, Homo sapien
caggggcgacgaggggccacacctg

SEQ ID NO: 4678626 - DNA, 25 bp, Homo sapien
tgagtgagcggcagtccgcccccgt

SEQ ID NO: 4678627 - DNA, 25 bp, Homo sapien
atctgccgcgggctggactacttca

SEQ ID NO: 4678628 - DNA, 25 bp, Homo sapien
ttcaagagctcgctgacgcgcctgg

SEQ ID NO: 4678629 - DNA, 25 bp, Homo sapien
gcctcggcagctacttgggcgtgca

SEQ ID NO: 4678630 - DNA, 25 bp, Homo sapien
tgcttcgtcgactacggcgtcgagg

SEQ ID NO: 4678631 - DNA, 25 bp, Homo sapien
tggcgctgcgcttcgacaagcccat

SEQ ID NO: 4678632 - DNA, 25 bp, Homo sapien
ttaagcaggccttctacaacaccgg

SEQ ID NO: 4678633 - DNA, 25 bp, Homo sapien
gcgccgcggtgctggtctacttcat

SEQ ID NO: 4678634 - DNA, 25 bp, Homo sapien
gccgtgctgttcgtgtgcctgtgct

SEQ ID NO: 4678635 - DNA, 25 bp, Homo sapien
gcaaagtcccgcttgcaatgcccat

SEQ ID NO: 4678636 - DNA, 25 bp, Homo sapien
cataattgttcgtcgcaaagtcccg

SEQ ID NO: 4678637 - DNA, 25 bp, Homo sapien
gggaattctgactttcggtgcataa

SEQ ID NO: 4678638 - DNA, 25 bp, Homo sapien
tcagccactttctagagagggaatt

SEQ ID NO: 4678639 - DNA, 25 bp, Homo sapien
aagagtgaatgcagcttctccggat

SEQ ID NO: 4678640 - DNA, 25 bp, Homo sapien
gaagagtgaatgcagcttctccgga

SEQ ID NO: 4678641 - DNA, 25 bp, Homo sapien
ggaagagtgaatgcagcttctccgg

SEQ ID NO: 4678642 - DNA, 25 bp, Homo sapien
ttcttcagttggtggccaggacaca

SEQ ID NO: 4678643 - DNA, 25 bp, Homo sapien
tatgttcttcagttggtggccagga

SEQ ID NO: 4678644 - DNA, 25 bp, Homo sapien
tgttcttcagttggtggccaggaca

SEQ ID NO: 4678645 - DNA, 25 bp, Homo sapien
tcttcagttggtggccaggacacat

SEQ ID NO: 4678646 - DNA, 25 bp, Homo sapien
cgtgggagccccaggatgttctttt

SEQ ID NO: 4678647 - DNA, 25 bp, Homo sapien
gctggaccatcccttaaggcgctca

SEQ ID NO: 4678648 - DNA, 25 bp, Homo sapien
taacaacagtctggagcgtgggagc

SEQ ID NO: 4678649 - DNA, 25 bp, Homo sapien
cagaaaggcttgtgcggtggatcaa

SEQ ID NO: 4678650 - DNA, 25 bp, Homo sapien
ccttctgggccatgacatgttagtc

SEQ ID NO: 4678651 - DNA, 25 bp, Homo sapien
agcagagccaattaacacccagatc

SEQ ID NO: 4678652 - DNA, 25 bp, Homo sapien
agagccaattaacacccagatccct

SEQ ID NO: 4678653 - DNA, 25 bp, Homo sapien
catgttagtcaaaagttcatgtgtc

SEQ ID NO: 4678654 - DNA, 25 bp, Homo sapien
tctttaggatgtgaatgtgagcagg

SEQ ID NO: 4678655 - DNA, 25 bp, Homo sapien
cattgatgcattagtgatgttcacc

SEQ ID NO: 4678656 - DNA, 25 bp, Homo sapien
tgcttgggggcattggcgttgactg

SEQ ID NO: 4678657 - DNA, 25 bp, Homo sapien
ggagggtacattgatgcattagtga

SEQ ID NO: 4678658 - DNA, 25 bp, Homo sapien
tccatttccgattctgtatcagagt

SEQ ID NO: 4678659 - DNA, 25 bp, Homo sapien
gcagcttcacgtctttccatttccg

SEQ ID NO: 4678660 - DNA, 25 bp, Homo sapien
cccaactcttttattaggtagctca

SEQ ID NO: 4678661 - DNA, 25 bp, Homo sapien
ggtagctcaatttagcaatcttaag

SEQ ID NO: 4678662 - DNA, 25 bp, Homo sapien
tcgcattggaaagcatcggccagtg

SEQ ID NO: 4678663 - DNA, 25 bp, Homo sapien
tttcaggatgacaggtcgcattgga

SEQ ID NO: 4678664 - DNA, 25 bp, Homo sapien
taaccattcgctctgcaaacaaaac

SEQ ID NO: 4678665 - DNA, 25 bp, Homo sapien
gatgacagccattttgattatgtcc

SEQ ID NO: 4678666 - DNA, 25 bp, Homo sapien
cagacggacttgacccatgagacac

SEQ ID NO: 4678667 - DNA, 25 bp, Homo sapien
ccctttgagaaatgatgacttgacc

SEQ ID NO: 4678668 - DNA, 25 bp, Homo sapien
caaagataccccatgaaaacagagt

SEQ ID NO: 4678669 - DNA, 25 bp, Homo sapien
ggaaagccgtaaacagtgcctctct

SEQ ID NO: 4678670 - DNA, 25 bp, Homo sapien
tcccttgggaagatgaatacagctt

SEQ ID NO: 4678671 - DNA, 25 bp, Homo sapien
aatacagcttgtctctggtactccg

SEQ ID NO: 4678672 - DNA, 25 bp, Homo sapien
caaggccggtgttgtcaccttctaa

SEQ ID NO: 4678673 - DNA, 25 bp, Homo sapien
tctggagagggcaagaaccggcact

SEQ ID NO: 4678674 - DNA, 25 bp, Homo sapien
gcttcacttagcatccctgtccagt

SEQ ID NO: 4678675 - DNA, 25 bp, Homo sapien
acggccctgctgcttcacttagcat

SEQ ID NO: 4678676 - DNA, 25 bp, Homo sapien
tgtaactgttccacatggtcattgt

SEQ ID NO: 4678677 - DNA, 25 bp, Homo sapien
ttgtctgtgtgcagatgtaactgtt

SEQ ID NO: 4678678 - DNA, 25 bp, Homo sapien
gtagtggtgaactcattaacacgaa

SEQ ID NO: 4678679 - DNA, 25 bp, Homo sapien
gctaggcccattgcctgcaggaagg

SEQ ID NO: 4678680 - DNA, 25 bp, Homo sapien
tgctgtttctcaggacggccaacca

SEQ ID NO: 4678681 - DNA, 25 bp, Homo sapien
cacaggtacgtttctatggctggcg

SEQ ID NO: 4678682 - DNA, 25 bp, Homo sapien
aagtccagccagaggtgatctggtt

SEQ ID NO: 4678683 - DNA, 25 bp, Homo sapien
tccagccagaggtgatctggttcag

SEQ ID NO: 4678684 - DNA, 25 bp, Homo sapien
cagaggtgatctggttcagagccta

SEQ ID NO: 4678685 - DNA, 25 bp, Homo sapien
ggtgatctggttcagagcctagctc

SEQ ID NO: 4678686 - DNA, 25 bp, Homo sapien
gctctctaaggtagtgattgttttg

SEQ ID NO: 4678687 - DNA, 25 bp, Homo sapien
ctttactttgctctctaaggtagtg

SEQ ID NO: 4678688 - DNA, 25 bp, Homo sapien
gcttgtaagttacagccccaatttc

SEQ ID NO: 4678689 - DNA, 25 bp, Homo sapien
tgtcggggtgtcttgcttttaattc

SEQ ID NO: 4678690 - DNA, 25 bp, Homo sapien
ggctcaggggtcctgttgaactgct

SEQ ID NO: 4678691 - DNA, 25 bp, Homo sapien
aaatcctactttcagcgtcattctg

SEQ ID NO: 4678692 - DNA, 25 bp, Homo sapien
actttcagcgtcattctgccttttg

SEQ ID NO: 4678693 - DNA, 25 bp, Homo sapien
ctcgcatctctgattccaaatccta

SEQ ID NO: 4678694 - DNA, 25 bp, Homo sapien
gagtaactgaagctcttttgacccc

SEQ ID NO: 4678695 - DNA, 25 bp, Homo sapien
cgaatagagtagtggatttgagtcc

SEQ ID NO: 4678696 - DNA, 25 bp, Homo sapien
cacggatcacgtcttctgaaggagg

SEQ ID NO: 4678697 - DNA, 25 bp, Homo sapien
catccccacgtttcttaaggtgagt

SEQ ID NO: 4678698 - DNA, 25 bp, Homo sapien
caatagatccgactttatcaggctg

SEQ ID NO: 4678699 - DNA, 25 bp, Homo sapien
tcgcttcagattcaggtagggagcc

SEQ ID NO: 4678700 - DNA, 25 bp, Homo sapien
agttgagcaccacgcattcttccga

SEQ ID NO: 4678701 - DNA, 25 bp, Homo sapien
ctgcggacgccaggaaacagcaaat

SEQ ID NO: 4678702 - DNA, 25 bp, Homo sapien
tcctctttaagggacgtgagcaaga

SEQ ID NO: 4678703 - DNA, 25 bp, Homo sapien
tcccccttgctgtgaaaatcctgtg

SEQ ID NO: 4678704 - DNA, 25 bp, Homo sapien
gcaagagcacacgtttgtgttccgg

SEQ ID NO: 4678705 - DNA, 25 bp, Homo sapien
tgttccggttagacagtgccaggac

SEQ ID NO: 4678706 - DNA, 25 bp, Homo sapien
tcttctctccttgtgtcagtcctgt

SEQ ID NO: 4678707 - DNA, 25 bp, Homo sapien
tctctccttgtgtcagtcctgtttt

SEQ ID NO: 4678708 - DNA, 25 bp, Homo sapien
tgttctgttgatggccataaaactg

SEQ ID NO: 4678709 - DNA, 25 bp, Homo sapien
cataaaactgcagcgccaactcttc

SEQ ID NO: 4678710 - DNA, 25 bp, Homo sapien
cattaatccactggaaaggtttcct

SEQ ID NO: 4678711 - DNA, 25 bp, Homo sapien
ggcacaatattgcaagcttgtacgt

SEQ ID NO: 4678712 - DNA, 25 bp, Homo sapien
aatgagacaaaagagacggaaggcc

SEQ ID NO: 4678713 - DNA, 25 bp, Homo sapien
cagtagatgtcagggtgtcacgaat

SEQ ID NO: 4678714 - DNA, 25 bp, Homo sapien
cttcctagcgtggttctgggatgcc

SEQ ID NO: 4678715 - DNA, 25 bp, Homo sapien
cctagcgtggttctgggatgccttc

SEQ ID NO: 4678716 - DNA, 25 bp, Homo sapien
tggagacccaagaggagatgcttcc

SEQ ID NO: 4678717 - DNA, 25 bp, Homo sapien
tggactccttttttacaatgcaaaa

SEQ ID NO: 4678718 - DNA, 25 bp, Homo sapien
gtttcaagatcatcagaacctcttc

SEQ ID NO: 4678719 - DNA, 25 bp, Homo sapien
gtaaaacctgaaattgcttgagatt

SEQ ID NO: 4678720 - DNA, 25 bp, Homo sapien
tcttggactagcctgtaaaacctga

SEQ ID NO: 4678721 - DNA, 25 bp, Homo sapien
tgcttgagattttgcagagcccaaa

SEQ ID NO: 4678722 - DNA, 25 bp, Homo sapien
gagcccaaacagcaatttcgagaag

SEQ ID NO: 4678723 - DNA, 25 bp, Homo sapien
tgaatgcacaccagccacaggtgtt

SEQ ID NO: 4678724 - DNA, 25 bp, Homo sapien
agccacaggtgtttggccatttcac

SEQ ID NO: 4678725 - DNA, 25 bp, Homo sapien
ctgtgaatgcacaccagccacaggt

SEQ ID NO: 4678726 - DNA, 25 bp, Homo sapien
cagccacaggtgtttggccatttca

SEQ ID NO: 4678727 - DNA, 25 bp, Homo sapien
ccacaatggctgaaggggtgccttt

SEQ ID NO: 4678728 - DNA, 25 bp, Homo sapien
gagcccagcccacaatggctgaagg

SEQ ID NO: 4678729 - DNA, 25 bp, Homo sapien
agccccagacttttcataggcatct

SEQ ID NO: 4678730 - DNA, 25 bp, Homo sapien
aaagcagtcagccacccggtaccag

SEQ ID NO: 4678731 - DNA, 25 bp, Homo sapien
caaggagcttttaaaatgaggaagc

SEQ ID NO: 4678732 - DNA, 25 bp, Homo sapien
tttaaaatgaggaagccgtttctga

SEQ ID NO: 4678733 - DNA, 25 bp, Homo sapien
gaagccgtttctgattccattctcg

SEQ ID NO: 4678734 - DNA, 25 bp, Homo sapien
tttctgattccattctcggcttcac

SEQ ID NO: 4678735 - DNA, 25 bp, Homo sapien
gccgagcgtaggatacagtttacta

SEQ ID NO: 4678736 - DNA, 25 bp, Homo sapien
cacaggcggcatggctatatttagc

SEQ ID NO: 4678737 - DNA, 25 bp, Homo sapien
tgaatacagtcctcaaagccgagcg

SEQ ID NO: 4678738 - DNA, 25 bp, Homo sapien
caggtgaacatctgagacaggtccc

SEQ ID NO: 4678739 - DNA, 25 bp, Homo sapien
tgtccataatacagtcgcctgaaca

SEQ ID NO: 4678740 - DNA, 25 bp, Homo sapien
tttcctgttcagataatgtccataa

SEQ ID NO: 4678741 - DNA, 25 bp, Homo sapien
tcagtagcagaaatgcgagccttgc

SEQ ID NO: 4678742 - DNA, 25 bp, Homo sapien
tagcagaaatgcgagccttgccttt

SEQ ID NO: 4678743 - DNA, 25 bp, Homo sapien
tgtgggtggcaaatgtgtaacccca

SEQ ID NO: 4678744 - DNA, 25 bp, Homo sapien
acttcgctcgttagaatgtcccctg

SEQ ID NO: 4678745 - DNA, 25 bp, Homo sapien
tcataacccacttcgctcgttagaa

SEQ ID NO: 4678746 - DNA, 25 bp, Homo sapien
ccctgtctttacagcatccagcagg

SEQ ID NO: 4678747 - DNA, 25 bp, Homo sapien
caggaactggcatctgtaacatggg

SEQ ID NO: 4678748 - DNA, 25 bp, Homo sapien
gctctggcatagttgttttgctgca

SEQ ID NO: 4678749 - DNA, 25 bp, Homo sapien
gaaagttgactcttggtggccagag

SEQ ID NO: 4678750 - DNA, 25 bp, Homo sapien
tgctgcactttaggtgcaggaactg

SEQ ID NO: 4678751 - DNA, 25 bp, Homo sapien
ctttgaagtccagaggtatttagct

SEQ ID NO: 4678752 - DNA, 25 bp, Homo sapien
tcagtattctagagctatgggattt

SEQ ID NO: 4678753 - DNA, 25 bp, Homo sapien
tgaagttcctcttaattaaagacgc

SEQ ID NO: 4678754 - DNA, 25 bp, Homo sapien
gctttattctaaaagcgatgaagtt

SEQ ID NO: 4678755 - DNA, 25 bp, Homo sapien
caatctgtattgagtggcatcagca

SEQ ID NO: 4678756 - DNA, 25 bp, Homo sapien
cactgctttgatggtagcaagaatg

SEQ ID NO: 4678757 - DNA, 25 bp, Homo sapien
gttagttattaacctgcagcgcact

SEQ ID NO: 4678758 - DNA, 25 bp, Homo sapien
tctgctcagtcggttacaatctgta

SEQ ID NO: 4678759 - DNA, 25 bp, Homo sapien
tctcctgcccatgtgatggatgtgg

SEQ ID NO: 4678760 - DNA, 25 bp, Homo sapien
agctctcctgcccatgtgatggatg

SEQ ID NO: 4678761 - DNA, 25 bp, Homo sapien
tccagctctcctgcccatgtgatgg

SEQ ID NO: 4678762 - DNA, 25 bp, Homo sapien
tcctgcccatgtgatggatgtgggc

SEQ ID NO: 4678763 - DNA, 25 bp, Homo sapien
ttatgagcgacatccagcgagcctc

SEQ ID NO: 4678764 - DNA, 25 bp, Homo sapien
cgtggcaaatgagcagtaacaaggg

SEQ ID NO: 4678765 - DNA, 25 bp, Homo sapien
agcgagcctctttgcccctctgaga

SEQ ID NO: 4678766 - DNA, 25 bp, Homo sapien
aagtgtagcttcctgcacgtagccc

SEQ ID NO: 4678767 - DNA, 25 bp, Homo sapien
attcttggattctgacacctcttcc

SEQ ID NO: 4678768 - DNA, 25 bp, Homo sapien
ctcgtggtgttattcttggattctg

SEQ ID NO: 4678769 - DNA, 25 bp, Homo sapien
cttggattctgacacctcttccctg

SEQ ID NO: 4678770 - DNA, 25 bp, Homo sapien
ggattctgacacctcttccctggga

SEQ ID NO: 4678771 - DNA, 25 bp, Homo sapien
gatgcctgtgactctgctaccagcc

SEQ ID NO: 4678772 - DNA, 25 bp, Homo sapien
acaattactttctcttgctggcagg

SEQ ID NO: 4678773 - DNA, 25 bp, Homo sapien
tgctatggggcagtctcgactctcg

SEQ ID NO: 4678774 - DNA, 25 bp, Homo sapien
agagtccccttgcatctgaaagcag

SEQ ID NO: 4678775 - DNA, 25 bp, Homo sapien
gagcccccagtgcttgttagccatc

SEQ ID NO: 4678776 - DNA, 25 bp, Homo sapien
tagccatctgcgctgtgtgctgcct

SEQ ID NO: 4678777 - DNA, 25 bp, Homo sapien
agcttgtatctctttagggtgaggc

SEQ ID NO: 4678778 - DNA, 25 bp, Homo sapien
tgaataaggatggtcgacttggagc

SEQ ID NO: 4678779 - DNA, 25 bp, Homo sapien
ggaatgaggccttggatatctagtg

SEQ ID NO: 4678780 - DNA, 25 bp, Homo sapien
taaaggtggccttccactacttgcc

SEQ ID NO: 4678781 - DNA, 25 bp, Homo sapien
taggtattggctaaaggtggccttc

SEQ ID NO: 4678782 - DNA, 25 bp, Homo sapien
tctagtgggtcatgagtttgtgtta

SEQ ID NO: 4678783 - DNA, 25 bp, Homo sapien
aggttgaagacagcttctcatttct

SEQ ID NO: 4678784 - DNA, 25 bp, Homo sapien
tcactcttggttgggaagaattaag

SEQ ID NO: 4678785 - DNA, 25 bp, Homo sapien
caggaggttgaagacagcttctcat

SEQ ID NO: 4678786 - DNA, 25 bp, Homo sapien
taagggacccgcaggaggttgaaga

SEQ ID NO: 4678787 - DNA, 25 bp, Homo sapien
cgtcttcctgctcgacgggaccgaa

SEQ ID NO: 4678788 - DNA, 25 bp, Homo sapien
cctgctcgacgggaccgaagtgagc

SEQ ID NO: 4678789 - DNA, 25 bp, Homo sapien
ggcgcggccgtgcacatctccgccg

SEQ ID NO: 4678790 - DNA, 25 bp, Homo sapien
tctactgccgcgtcttcctgctcga

SEQ ID NO: 4678791 - DNA, 25 bp, Homo sapien
agacccggcttgcaattacccggcg

SEQ ID NO: 4678792 - DNA, 25 bp, Homo sapien
cagcacagacccggcttgcaattac

SEQ ID NO: 4678793 - DNA, 25 bp, Homo sapien
acagacccggcttgcaattacccgg

SEQ ID NO: 4678794 - DNA, 25 bp, Homo sapien
ccggcgcagccccgagggaggaggg

SEQ ID NO: 4678795 - DNA, 25 bp, Homo sapien
gtgtgtgctcacctacgtgtacaca

SEQ ID NO: 4678796 - DNA, 25 bp, Homo sapien
cacctacgtgtacacacgtgagcac

SEQ ID NO: 4678797 - DNA, 25 bp, Homo sapien
gctcacctacgtgtacacacgtgag

SEQ ID NO: 4678798 - DNA, 25 bp, Homo sapien
tgtgctcacctacgtgtacacacgt

SEQ ID NO: 4678799 - DNA, 25 bp, Homo sapien
tccggggcaacgcttcccagagggc

SEQ ID NO: 4678800 - DNA, 25 bp, Homo sapien
tcccagagggcacgcggccttgttt

SEQ ID NO: 4678801 - DNA, 25 bp, Homo sapien
cttgttttcctatcggtgcaaaggg

SEQ ID NO: 4678802 - DNA, 25 bp, Homo sapien
tattctgcctggtctccggggcaac

SEQ ID NO: 4678803 - DNA, 25 bp, Homo sapien
agaaagagtcgaacaggaatttgat

SEQ ID NO: 4678804 - DNA, 25 bp, Homo sapien
ggagaaagagtcgaacaggaatttg

SEQ ID NO: 4678805 - DNA, 25 bp, Homo sapien
gagaaagagtcgaacaggaatttga

SEQ ID NO: 4678806 - DNA, 25 bp, Homo sapien
catcttccatatggatattaggatt

SEQ ID NO: 4678807 - DNA, 25 bp, Homo sapien
tttcccaaaccaggatgcacatcct

SEQ ID NO: 4678808 - DNA, 25 bp, Homo sapien
ttattttatcagagccacatgtgtt

SEQ ID NO: 4678809 - DNA, 25 bp, Homo sapien
gtgtttcccaaaccaggatgcacat

SEQ ID NO: 4678810 - DNA, 25 bp, Homo sapien
gcatgggaaagttaatgtcagcagt

SEQ ID NO: 4678811 - DNA, 25 bp, Homo sapien
ggattggaggtgtcatagcttgtga

SEQ ID NO: 4678812 - DNA, 25 bp, Homo sapien
tggaggtgtcatagcttgtgaattg

SEQ ID NO: 4678813 - DNA, 25 bp, Homo sapien
gaggtgtcatagcttgtgaattggc

SEQ ID NO: 4678814 - DNA, 25 bp, Homo sapien
tgaagcatgctgaagaaatggtgtc

SEQ ID NO: 4678815 - DNA, 25 bp, Homo sapien
gaaatggtgtcgtgaagaaggtact

SEQ ID NO: 4678816 - DNA, 25 bp, Homo sapien
ggcattacggtcaccagcacactaa

SEQ ID NO: 4678817 - DNA, 25 bp, Homo sapien
tactttgagaattcctgctgcggca

SEQ ID NO: 4678818 - DNA, 25 bp, Homo sapien
gcctgggttcctcttttatcttgca

SEQ ID NO: 4678819 - DNA, 25 bp, Homo sapien
ctgcctgggttcctcttttatcttg

SEQ ID NO: 4678820 - DNA, 25 bp, Homo sapien
tgcctgggttcctcttttatcttgc

SEQ ID NO: 4678821 - DNA, 25 bp, Homo sapien
cctgggttcctcttttatcttgcaa

SEQ ID NO: 4678822 - DNA, 25 bp, Homo sapien
ttgagatgctcagggaaagagggca

SEQ ID NO: 4678823 - DNA, 25 bp, Homo sapien
tgagatgctcagggaaagagggcat

SEQ ID NO: 4678824 - DNA, 25 bp, Homo sapien
cttgagatgctcagggaaagagggc

SEQ ID NO: 4678825 - DNA, 25 bp, Homo sapien
aaagagatttctgggtgtgggaagc

SEQ ID NO: 4678826 - DNA, 25 bp, Homo sapien
ctgagagctgtctgcagaagtgcat

SEQ ID NO: 4678827 - DNA, 25 bp, Homo sapien
gaaagagatttctgggtgtgggaag

SEQ ID NO: 4678828 - DNA, 25 bp, Homo sapien
gggctctgagagctgtctgcagaag

SEQ ID NO: 4678829 - DNA, 25 bp, Homo sapien
cccgagcagcccatagtagctggat

SEQ ID NO: 4678830 - DNA, 25 bp, Homo sapien
cagcccatagtagctggataaatgc

SEQ ID NO: 4678831 - DNA, 25 bp, Homo sapien
tcttactgtagaagactctgacaca

SEQ ID NO: 4678832 - DNA, 25 bp, Homo sapien
cacaccttttgagagggttcttact

SEQ ID NO: 4678833 - DNA, 25 bp, Homo sapien
gttcagcaggccagaccttgctgca

SEQ ID NO: 4678834 - DNA, 25 bp, Homo sapien
ctgggcaagttctaagcagctgctt

SEQ ID NO: 4678835 - DNA, 25 bp, Homo sapien
gggtgagttcagcaggccagacctt

SEQ ID NO: 4678836 - DNA, 25 bp, Homo sapien
tcgctgggcaagttctaagcagctg

SEQ ID NO: 4678837 - DNA, 25 bp, Homo sapien
agagggtgaccgcaaaggccacatt

SEQ ID NO: 4678838 - DNA, 25 bp, Homo sapien
tctgtggatgaccaagagggtgacc

SEQ ID NO: 4678839 - DNA, 25 bp, Homo sapien
gaaagtcgatctgagaggcttctga

SEQ ID NO: 4678840 - DNA, 25 bp, Homo sapien
gcttctgaaaaaaggctccgctcca

SEQ ID NO: 4678841 - DNA, 25 bp, Homo sapien
tgtggtcggttctgatctctctgct

SEQ ID NO: 4678842 - DNA, 25 bp, Homo sapien
ctctccactgtggtcggttctgatc

SEQ ID NO: 4678843 - DNA, 25 bp, Homo sapien
ctggctgcggactggctctcgcctc

SEQ ID NO: 4678844 - DNA, 25 bp, Homo sapien
tggctgcggactggctctcgcctct

SEQ ID NO: 4678845 - DNA, 25 bp, Homo sapien
tgagaaactgagatttcactgaggt

SEQ ID NO: 4678846 - DNA, 25 bp, Homo sapien
gaaactgagatttcactgaggtcag

SEQ ID NO: 4678847 - DNA, 25 bp, Homo sapien
aactgagatttcactgaggtcaggg

SEQ ID NO: 4678848 - DNA, 25 bp, Homo sapien
gtgctgtctggactctgtccagagt

SEQ ID NO: 4678849 - DNA, 25 bp, Homo sapien
ccagctggaactccatccccttccc

SEQ ID NO: 4678850 - DNA, 25 bp, Homo sapien
ctggagctccgcaggtatcgcatca

SEQ ID NO: 4678851 - DNA, 25 bp, Homo sapien
tatcgcatcacaactgatggctttc

SEQ ID NO: 4678852 - DNA, 25 bp, Homo sapien
gctccgcaggtatcgcatcacaact

SEQ ID NO: 4678853 - DNA, 25 bp, Homo sapien
ctgaaaaacaatttaatcaatataa

SEQ ID NO: 4678854 - DNA, 25 bp, Homo sapien
tctgacctgttctgtcagtgattct

SEQ ID NO: 4678855 - DNA, 25 bp, Homo sapien
ctgacctgttctgtcagtgattcta

SEQ ID NO: 4678856 - DNA, 25 bp, Homo sapien
gaaaaggaccttaactgagcagtaa

SEQ ID NO: 4678857 - DNA, 25 bp, Homo sapien
tggagcaaccaaaggatttgtgtga

SEQ ID NO: 4678858 - DNA, 25 bp, Homo sapien
tttggaaaaggaccttaactgagca

SEQ ID NO: 4678859 - DNA, 25 bp, Homo sapien
ggagcaaccaaaggatttgtgtgaa

SEQ ID NO: 4678860 - DNA, 25 bp, Homo sapien
agctgagagcagtctcggtaaaggt

SEQ ID NO: 4678861 - DNA, 25 bp, Homo sapien
cagtctcggtaaaggtggcaaagat

SEQ ID NO: 4678862 - DNA, 25 bp, Homo sapien
ggtggcaaagattctgtgacctcag

SEQ ID NO: 4678863 - DNA, 25 bp, Homo sapien
cagaccggggaccaaatgcttggga

SEQ ID NO: 4678864 - DNA, 25 bp, Homo sapien
cgctgttgaatgcaaagacaaggat

SEQ ID NO: 4678865 - DNA, 25 bp, Homo sapien
tccctcagactttggcgctgttgaa

SEQ ID NO: 4678866 - DNA, 25 bp, Homo sapien
gctttatggctgctacagagacatg

SEQ ID NO: 4678867 - DNA, 25 bp, Homo sapien
tgtcaccaagagtttgtccctcaga

SEQ ID NO: 4678868 - DNA, 25 bp, Homo sapien
tgaggtcaagatttgccattctggg

SEQ ID NO: 4678869 - DNA, 25 bp, Homo sapien
cagggcttgggtctagacctggact

SEQ ID NO: 4678870 - DNA, 25 bp, Homo sapien
tagacctggacttaggcaagatatg

SEQ ID NO: 4678871 - DNA, 25 bp, Homo sapien
gcaagatatgttgccctcaaccctg

SEQ ID NO: 4678872 - DNA, 25 bp, Homo sapien
catcctggagcaattgagaccggac

SEQ ID NO: 4678873 - DNA, 25 bp, Homo sapien
ccctgatgctaaggaaaccctgacg

SEQ ID NO: 4678874 - DNA, 25 bp, Homo sapien
gaacaattcagattcacccgccctg

SEQ ID NO: 4678875 - DNA, 25 bp, Homo sapien
gatatcgtgtacataggaactggtg

SEQ ID NO: 4678876 - DNA, 25 bp, Homo sapien
agcaggcgtatggcttgtcttccac

SEQ ID NO: 4678877 - DNA, 25 bp, Homo sapien
ttcctctggtccagaaagacacatc

SEQ ID NO: 4678878 - DNA, 25 bp, Homo sapien
accgattcgagagcaccttgaggac

SEQ ID NO: 4678879 - DNA, 25 bp, Homo sapien
tgccacatcgtgtctcattcatctc

SEQ ID NO: 4678880 - DNA, 25 bp, Homo sapien
gaggacagtgccacatcgtgtctca

SEQ ID NO: 4678881 - DNA, 25 bp, Homo sapien
ccaacaccgattcgagagcaccttg

SEQ ID NO: 4678882 - DNA, 25 bp, Homo sapien
gaagtctggaaatcagtgtccacca

SEQ ID NO: 4678883 - DNA, 25 bp, Homo sapien
tccaccattggagcatcagcccatg

SEQ ID NO: 4678884 - DNA, 25 bp, Homo sapien
gctgctcaggtgaagtctggaaatc

SEQ ID NO: 4678885 - DNA, 25 bp, Homo sapien
ggaaatcagtgtccaccattggagc

SEQ ID NO: 4678886 - DNA, 25 bp, Homo sapien
agttagtcagcatccattgtcccga

SEQ ID NO: 4678887 - DNA, 25 bp, Homo sapien
tgtcccgaccagattgtttaagatg

SEQ ID NO: 4678888 - DNA, 25 bp, Homo sapien
aacatcaggctcattcttaccaagg

SEQ ID NO: 4678889 - DNA, 25 bp, Homo sapien
tgtagtacaggaaacagggcagtta

SEQ ID NO: 4678890 - DNA, 25 bp, Homo sapien
catgttcctggttgggttgtggctt

SEQ ID NO: 4678891 - DNA, 25 bp, Homo sapien
aactcatgcaaagaacaagcttggc

SEQ ID NO: 4678892 - DNA, 25 bp, Homo sapien
taatcatttgtgtcagagaggccag

SEQ ID NO: 4678893 - DNA, 25 bp, Homo sapien
caagcttggcttccatattataaaa

SEQ ID NO: 4678894 - DNA, 25 bp, Homo sapien
tgtatccacaatagagcttcgtttg

SEQ ID NO: 4678895 - DNA, 25 bp, Homo sapien
cacaatagagcttcgtttgctattg

SEQ ID NO: 4678896 - DNA, 25 bp, Homo sapien
aaactgtatccacaatagagcttcg

SEQ ID NO: 4678897 - DNA, 25 bp, Homo sapien
aaaaaactgtatccacaatagagct

SEQ ID NO: 4678898 - DNA, 25 bp, Homo sapien
tctttcccgaaactgcccgcggctc

SEQ ID NO: 4678899 - DNA, 25 bp, Homo sapien
ctctttcccgaaactgcccgcggct

SEQ ID NO: 4678900 - DNA, 25 bp, Homo sapien
catccacatgggtaccgagaagcaa

SEQ ID NO: 4678901 - DNA, 25 bp, Homo sapien
gcaacccagggaaagttgagacctg

SEQ ID NO: 4678902 - DNA, 25 bp, Homo sapien
tctgggttcaccaaggtggcgcgca

SEQ ID NO: 4678903 - DNA, 25 bp, Homo sapien
cactgttcagtgactacctgggcaa

SEQ ID NO: 4678904 - DNA, 25 bp, Homo sapien
ccagagccctccttgtgttcctcca

SEQ ID NO: 4678905 - DNA, 25 bp, Homo sapien
agaacttgatactgcccactccctg

SEQ ID NO: 4678906 - DNA, 25 bp, Homo sapien
tcctctcccctagaacttgatactg

SEQ ID NO: 4678907 - DNA, 25 bp, Homo sapien
cagagccctccttgtgttcctccag

SEQ ID NO: 4678908 - DNA, 25 bp, Homo sapien
ggcttcagactccttggcgggaaca

SEQ ID NO: 4678909 - DNA, 25 bp, Homo sapien
cttggcgggaacagaggctggcagg

SEQ ID NO: 4678910 - DNA, 25 bp, Homo sapien
ggctggcaggatggtccggttgtga

SEQ ID NO: 4678911 - DNA, 25 bp, Homo sapien
caggatggtccggttgtgagattcc

SEQ ID NO: 4678912 - DNA, 25 bp, Homo sapien
cccaatcttgtaaaatggttaacag

SEQ ID NO: 4678913 - DNA, 25 bp, Homo sapien
ctgtgcgtggttctgagtcgagtct

SEQ ID NO: 4678914 - DNA, 25 bp, Homo sapien
gtctcccaatcttgtaaaatggtta

SEQ ID NO: 4678915 - DNA, 25 bp, Homo sapien
cctgtgcgtggttctgagtcgagtc

SEQ ID NO: 4678916 - DNA, 25 bp, Homo sapien
cagggttcagacaccgtgaggctgt

SEQ ID NO: 4678917 - DNA, 25 bp, Homo sapien
agccagtgcatgtgccccgaaaggt

SEQ ID NO: 4678918 - DNA, 25 bp, Homo sapien
cccgaaaggtgagtgagcaagagtc

SEQ ID NO: 4678919 - DNA, 25 bp, Homo sapien
gactgtcctcatgagatccttggct

SEQ ID NO: 4678920 - DNA, 25 bp, Homo sapien
cacgtggtggaatatcgtagagtca

SEQ ID NO: 4678921 - DNA, 25 bp, Homo sapien
cttggcattggtgcctgtccttggt

SEQ ID NO: 4678922 - DNA, 25 bp, Homo sapien
cagccacagttatgtacacccacgt

SEQ ID NO: 4678923 - DNA, 25 bp, Homo sapien
acatctgagctctgctagtgagaag

SEQ ID NO: 4678924 - DNA, 25 bp, Homo sapien
gggtgcaccccagagaatccaggtt

SEQ ID NO: 4678925 - DNA, 25 bp, Homo sapien
cacttccgtgcaggaaagggcaggc

SEQ ID NO: 4678926 - DNA, 25 bp, Homo sapien
cctggtcaggccagacaggtggtgg

SEQ ID NO: 4678927 - DNA, 25 bp, Homo sapien
tctgtatggcagatgtagtgctgag

SEQ ID NO: 4678928 - DNA, 25 bp, Homo sapien
tagtgccaagggacgagcactggac

SEQ ID NO: 4678929 - DNA, 25 bp, Homo sapien
tggactggaagtcagcgggacctca

SEQ ID NO: 4678930 - DNA, 25 bp, Homo sapien
agcgggacctcagctcaaccgcgca

SEQ ID NO: 4678931 - DNA, 25 bp, Homo sapien
cgcacccgtcgtgcaagactcctca

SEQ ID NO: 4678932 - DNA, 25 bp, Homo sapien
tgtttgagcgcctagtgtgtgccag

SEQ ID NO: 4678933 - DNA, 25 bp, Homo sapien
aaaagccaaagtgaccaacctcatc

SEQ ID NO: 4678934 - DNA, 25 bp, Homo sapien
gactccgggacaaggaccgaaatga

SEQ ID NO: 4678935 - DNA, 25 bp, Homo sapien
tatcccgggacgtgcgactccggga

SEQ ID NO: 4678936 - DNA, 25 bp, Homo sapien
gatggaagcatcctcaatgatctga

SEQ ID NO: 4678937 - DNA, 25 bp, Homo sapien
tgttttcccatgtggtagcaaatcc

SEQ ID NO: 4678938 - DNA, 25 bp, Homo sapien
ttccagagaaggatcttaaagtccc

SEQ ID NO: 4678939 - DNA, 25 bp, Homo sapien
gcttctgttgatggaagcatcctca

SEQ ID NO: 4678940 - DNA, 25 bp, Homo sapien
tttgtaagatgacaccacccctttc

SEQ ID NO: 4678941 - DNA, 25 bp, Homo sapien
ggctgtggttgagagacttctgaca

SEQ ID NO: 4678942 - DNA, 25 bp, Homo sapien
gattgtttcggtcagctgcagttca

SEQ ID NO: 4678943 - DNA, 25 bp, Homo sapien
cctttcagggaaggcgattgtttcg

SEQ ID NO: 4678944 - DNA, 25 bp, Homo sapien
tcaggacccaactgagagacaccca

SEQ ID NO: 4678945 - DNA, 25 bp, Homo sapien
gtttctgagatggaccttaaccagg

SEQ ID NO: 4678946 - DNA, 25 bp, Homo sapien
tctggtgcagggattagagagctca

SEQ ID NO: 4678947 - DNA, 25 bp, Homo sapien
tttcgggaggttgatataggtgacc

SEQ ID NO: 4678948 - DNA, 25 bp, Homo sapien
tagaagcagatatcaatgacgctat

SEQ ID NO: 4678949 - DNA, 25 bp, Homo sapien
tccatacaataagctccacaaagtc

SEQ ID NO: 4678950 - DNA, 25 bp, Homo sapien
gttacctggtcatcttagaagcaga

SEQ ID NO: 4678951 - DNA, 25 bp, Homo sapien
tcatttttcaggatggagctctagt

SEQ ID NO: 4678952 - DNA, 25 bp, Homo sapien
aagcccattactccaacaagtgttc

SEQ ID NO: 4678953 - DNA, 25 bp, Homo sapien
agttgtaacctcagggccctcaagc

SEQ ID NO: 4678954 - DNA, 25 bp, Homo sapien
cttcagttgtaacctcagggccctc

SEQ ID NO: 4678955 - DNA, 25 bp, Homo sapien
agcccattactccaacaagtgttcc

SEQ ID NO: 4678956 - DNA, 25 bp, Homo sapien
ggcgcaaagagactgtgtgcttgac

SEQ ID NO: 4678957 - DNA, 25 bp, Homo sapien
caaaccaggccacggacagtgctat

SEQ ID NO: 4678958 - DNA, 25 bp, Homo sapien
tgtgcttgacacaaactgtcccaca

SEQ ID NO: 4678959 - DNA, 25 bp, Homo sapien
taactgaacagtagagggcgcaaag

SEQ ID NO: 4678960 - DNA, 25 bp, Homo sapien
ttggtctatagcctgcacttaatgc

SEQ ID NO: 4678961 - DNA, 25 bp, Homo sapien
ttcttttccacttgaccagatggct

SEQ ID NO: 4678962 - DNA, 25 bp, Homo sapien
tttggcctttggtctatagcctgca

SEQ ID NO: 4678963 - DNA, 25 bp, Homo sapien
taatgccacaagacattggctagga

SEQ ID NO: 4678964 - DNA, 25 bp, Homo sapien
aggccctggacttcgaaactgtctg

SEQ ID NO: 4678965 - DNA, 25 bp, Homo sapien
caggccctggacttcgaaactgtct

SEQ ID NO: 4678966 - DNA, 25 bp, Homo sapien
ggccctggacttcgaaactgtctga

SEQ ID NO: 4678967 - DNA, 25 bp, Homo sapien
gccctggacttcgaaactgtctgaa

SEQ ID NO: 4678968 - DNA, 25 bp, Homo sapien
accacgccggccctacagcaggtga

SEQ ID NO: 4678969 - DNA, 25 bp, Homo sapien
tgtggcagagtatatatcagggata

SEQ ID NO: 4678970 - DNA, 25 bp, Homo sapien
aaacaaggtagatcagtgtggcaga

SEQ ID NO: 4678971 - DNA, 25 bp, Homo sapien
gaaagaacgagggatgggagcgtgc

SEQ ID NO: 4678972 - DNA, 25 bp, Homo sapien
cttatagatgctatccacgtcgtag

SEQ ID NO: 4678973 - DNA, 25 bp, Homo sapien
gggtgcagaggcagcacatgttata

SEQ ID NO: 4678974 - DNA, 25 bp, Homo sapien
acccttatagatgctatccacgtcg

SEQ ID NO: 4678975 - DNA, 25 bp, Homo sapien
gaggcagcacatgttataggtcctg

SEQ ID NO: 4678976 - DNA, 25 bp, Homo sapien
ggtggcccgggaggcttcacatcag

SEQ ID NO: 4678977 - DNA, 25 bp, Homo sapien
ccctcagcgccggtgacaccacgcc

SEQ ID NO: 4678978 - DNA, 25 bp, Homo sapien
ggcccgggaggcttcacatcagcag

SEQ ID NO: 4678979 - DNA, 25 bp, Homo sapien
ctcagcgccggtgacaccacgcccg

SEQ ID NO: 4678980 - DNA, 25 bp, Homo sapien
gcacacccggtgagatatgccagct

SEQ ID NO: 4678981 - DNA, 25 bp, Homo sapien
acccggtgagatatgccagctgcag

SEQ ID NO: 4678982 - DNA, 25 bp, Homo sapien
ccggtgagatatgccagctgcagcc

SEQ ID NO: 4678983 - DNA, 25 bp, Homo sapien
caggcacacccggtgagatatgcca

SEQ ID NO: 4678984 - DNA, 25 bp, Homo sapien
ctcagacaggttttcagtggacaca

SEQ ID NO: 4678985 - DNA, 25 bp, Homo sapien
taggtttgcctcttccgtatcagac

SEQ ID NO: 4678986 - DNA, 25 bp, Homo sapien
gccagtcaagggatcctgatagtta

SEQ ID NO: 4678987 - DNA, 25 bp, Homo sapien
ccagcgttgagcaggcaattccagg

SEQ ID NO: 4678988 - DNA, 25 bp, Homo sapien
cagctgaacctggtagtacactgct

SEQ ID NO: 4678989 - DNA, 25 bp, Homo sapien
gtatactaacgcaggcaatgactcc

SEQ ID NO: 4678990 - DNA, 25 bp, Homo sapien
caatgactccgattttgccaggtgt

SEQ ID NO: 4678991 - DNA, 25 bp, Homo sapien
tcctgatggcatcggctggattcaa

SEQ ID NO: 4678992 - DNA, 25 bp, Homo sapien
atgaggctgattttcccaggtccca

SEQ ID NO: 4678993 - DNA, 25 bp, Homo sapien
ccgccagagcacaggcaagcaggag

SEQ ID NO: 4678994 - DNA, 25 bp, Homo sapien
ggagccactagagcagtaattgcta

SEQ ID NO: 4678995 - DNA, 25 bp, Homo sapien
ccagagtgttctttccgccagagca

SEQ ID NO: 4678996 - DNA, 25 bp, Homo sapien
gcttcatgacaatggttctttcaca

SEQ ID NO: 4678997 - DNA, 25 bp, Homo sapien
gcacttgatggccacttgtagtcat

SEQ ID NO: 4678998 - DNA, 25 bp, Homo sapien
tggataactctacccagtcacagag

SEQ ID NO: 4678999 - DNA, 25 bp, Homo sapien
cccattttccagcacttgatggcca

SEQ ID NO: 4679000 - DNA, 25 bp, Homo sapien
atttccaacaattctcagagaagcc

SEQ ID NO: 4679001 - DNA, 25 bp, Homo sapien
gccagacctgcctggctacatggac

SEQ ID NO: 4679002 - DNA, 25 bp, Homo sapien
agacctgcctggctacatggacaag

SEQ ID NO: 4679003 - DNA, 25 bp, Homo sapien
gacaaggggaccatgtctccagcca

SEQ ID NO: 4679004 - DNA, 25 bp, Homo sapien
ccacttccactcctgaggatggaaa

SEQ ID NO: 4679005 - DNA, 25 bp, Homo sapien
agctcttctttaccaagtgaacttg

SEQ ID NO: 4679006 - DNA, 25 bp, Homo sapien
gccaatcaagaatgacagccagctc

SEQ ID NO: 4679007 - DNA, 25 bp, Homo sapien
agtgaacttgttgccctatcaccca

SEQ ID NO: 4679008 - DNA, 25 bp, Homo sapien
ggtgtactaacacccctgagggagc

SEQ ID NO: 4679009 - DNA, 25 bp, Homo sapien
gcagggcttccagtaccccatgaag

SEQ ID NO: 4679010 - DNA, 25 bp, Homo sapien
tccactcatgagttttggcagggct

SEQ ID NO: 4679011 - DNA, 25 bp, Homo sapien
gagactagtagtgcagactgcccag

SEQ ID NO: 4679012 - DNA, 25 bp, Homo sapien
tggggtcactgcttcttgctcagca

SEQ ID NO: 4679013 - DNA, 25 bp, Homo sapien
ttgctcagcagtgcccagaagcaga

SEQ ID NO: 4679014 - DNA, 25 bp, Homo sapien
gcagaagcacatggttctccatccc

SEQ ID NO: 4679015 - DNA, 25 bp, Homo sapien
gttttagttgctttggggtcactgc

SEQ ID NO: 4679016 - DNA, 25 bp, Homo sapien
attgcagataagaattgggatcttg

SEQ ID NO: 4679017 - DNA, 25 bp, Homo sapien
cattgcagataagaattgggatctt

SEQ ID NO: 4679018 - DNA, 25 bp, Homo sapien
acattgcagataagaattgggatct

SEQ ID NO: 4679019 - DNA, 25 bp, Homo sapien
tatagagttacattctcccataagc

SEQ ID NO: 4679020 - DNA, 25 bp, Homo sapien
acattctcccataagccagcgtcat

SEQ ID NO: 4679021 - DNA, 25 bp, Homo sapien
gttacattctcccataagccagcgt

SEQ ID NO: 4679022 - DNA, 25 bp, Homo sapien
gagttacattctcccataagccagc

SEQ ID NO: 4679023 - DNA, 25 bp, Homo sapien
aaatgcaaagatgtagctgcaaaga

SEQ ID NO: 4679024 - DNA, 25 bp, Homo sapien
gagcaaatgcaaagatgtagctgca

SEQ ID NO: 4679025 - DNA, 25 bp, Homo sapien
catgataagatgaagttggcagaga

SEQ ID NO: 4679026 - DNA, 25 bp, Homo sapien
gcaaatgcaaagatgtagctgcaaa

SEQ ID NO: 4679027 - DNA, 25 bp, Homo sapien
tgcagtgggcagccaatgactattc

SEQ ID NO: 4679028 - DNA, 25 bp, Homo sapien
gcaaggaccagtaagagcagtaact

SEQ ID NO: 4679029 - DNA, 25 bp, Homo sapien
taagaagaaataccatgaggatggg

SEQ ID NO: 4679030 - DNA, 25 bp, Homo sapien
ctttgttcgcactaagaagaaatac

SEQ ID NO: 4679031 - DNA, 25 bp, Homo sapien
tttgtctagctgtgaaaggctgctg

SEQ ID NO: 4679032 - DNA, 25 bp, Homo sapien
cattcataaagtataggtgactacg

SEQ ID NO: 4679033 - DNA, 25 bp, Homo sapien
ccaaagctggcattatttgtctagc

SEQ ID NO: 4679034 - DNA, 25 bp, Homo sapien
ctttcattcataaagtataggtgac

SEQ ID NO: 4679035 - DNA, 25 bp, Homo sapien
gaaagggacagtgcagtaccactcc

SEQ ID NO: 4679036 - DNA, 25 bp, Homo sapien
caacaggtttcatgttcgcatgcca

SEQ ID NO: 4679037 - DNA, 25 bp, Homo sapien
tactcctgggttgaggatcaaatcc

SEQ ID NO: 4679038 - DNA, 25 bp, Homo sapien
gcctgatgtgttagctatccctggg

SEQ ID NO: 4679039 - DNA, 25 bp, Homo sapien
taggcaaacggttgagtcattggca

SEQ ID NO: 4679040 - DNA, 25 bp, Homo sapien
gtcattggcaaggtggcagctctcg

SEQ ID NO: 4679041 - DNA, 25 bp, Homo sapien
gctgggcatgggttcagaaacgcca

SEQ ID NO: 4679042 - DNA, 25 bp, Homo sapien
tagaagttgcaagaagcgtctggcc

SEQ ID NO: 4679043 - DNA, 25 bp, Homo sapien
ctcaccggcgctgctcgcctctccc

SEQ ID NO: 4679044 - DNA, 25 bp, Homo sapien
ctgcggggctcaccggcgctgctcg

SEQ ID NO: 4679045 - DNA, 25 bp, Homo sapien
gggctcaccggcgctgctcgcctct

SEQ ID NO: 4679046 - DNA, 25 bp, Homo sapien
tgcggggctcaccggcgctgctcgc

SEQ ID NO: 4679047 - DNA, 25 bp, Homo sapien
tgccaaacgttgtaattccactccg

SEQ ID NO: 4679048 - DNA, 25 bp, Homo sapien
tcacggtgccaaacgttgtaattcc

SEQ ID NO: 4679049 - DNA, 25 bp, Homo sapien
tatttctccaataccccaggaacaa

SEQ ID NO: 4679050 - DNA, 25 bp, Homo sapien
ccgggctgccgccaatatgtttgtc

SEQ ID NO: 4679051 - DNA, 25 bp, Homo sapien
tccagtaggtcttctctgttctaca

SEQ ID NO: 4679052 - DNA, 25 bp, Homo sapien
ttccagtaggtcttctctgttctac

SEQ ID NO: 4679053 - DNA, 25 bp, Homo sapien
catttgcaccttgtggcttactagg

SEQ ID NO: 4679054 - DNA, 25 bp, Homo sapien
gcaccttgtggcttactagggctct

SEQ ID NO: 4679055 - DNA, 25 bp, Homo sapien
tcactgtcttctgaacatttgcacc

SEQ ID NO: 4679056 - DNA, 25 bp, Homo sapien
ttctgaacatttgcaccttgtggct

SEQ ID NO: 4679057 - DNA, 25 bp, Homo sapien
gggagccttctgctgactcccaagg

SEQ ID NO: 4679058 - DNA, 25 bp, Homo sapien
cataaagcatggagtcagcccacca

SEQ ID NO: 4679059 - DNA, 25 bp, Homo sapien
catttagaaccaagagcaacggcat

SEQ ID NO: 4679060 - DNA, 25 bp, Homo sapien
ggcttctgctaacaagggtgccaga

SEQ ID NO: 4679061 - DNA, 25 bp, Homo sapien
caaatcaaaatttgtggcatgcatc

SEQ ID NO: 4679062 - DNA, 25 bp, Homo sapien
tactttggaatagttaataaatctc

SEQ ID NO: 4679063 - DNA, 25 bp, Homo sapien
ttcaagctaaatgacagctaaaata

SEQ ID NO: 4679064 - DNA, 25 bp, Homo sapien
cctgaaaaatgcgacttattgaaag

SEQ ID NO: 4679065 - DNA, 25 bp, Homo sapien
tccggcctgaagaagggcatcttct

SEQ ID NO: 4679066 - DNA, 25 bp, Homo sapien
cctgctttttctgctctatactcca

SEQ ID NO: 4679067 - DNA, 25 bp, Homo sapien
ctgagtacctgctttttctgctcta

SEQ ID NO: 4679068 - DNA, 25 bp, Homo sapien
taaatatccggcctgaagaagggca

SEQ ID NO: 4679069 - DNA, 25 bp, Homo sapien
ttgactctcagcatgtgggactggg

SEQ ID NO: 4679070 - DNA, 25 bp, Homo sapien
gttccatctgatgcccacacctacg

SEQ ID NO: 4679071 - DNA, 25 bp, Homo sapien
acacctacgttctcacacatgttct

SEQ ID NO: 4679072 - DNA, 25 bp, Homo sapien
tgtagttaggaaatgcaaccaaggt

SEQ ID NO: 4679073 - DNA, 25 bp, Homo sapien
tcctgtttcaatcagtcttgcctct

SEQ ID NO: 4679074 - DNA, 25 bp, Homo sapien
gaagaagaccttctatggcgtctag

SEQ ID NO: 4679075 - DNA, 25 bp, Homo sapien
tatgatgactcatctgcctctttgg

SEQ ID NO: 4679076 - DNA, 25 bp, Homo sapien
tactccttcatgtggtgtctggtac

SEQ ID NO: 4679077 - DNA, 25 bp, Homo sapien
gaactagaacctggcaacttggctt

SEQ ID NO: 4679078 - DNA, 25 bp, Homo sapien
cctagcggagatgggcctttaagca

SEQ ID NO: 4679079 - DNA, 25 bp, Homo sapien
tctaagatcaaggatgttgccctaa

SEQ ID NO: 4679080 - DNA, 25 bp, Homo sapien
taacaaattttacatgcccagggaa

SEQ ID NO: 4679081 - DNA, 25 bp, Homo sapien
agccaatgtcatctcatacataagc

SEQ ID NO: 4679082 - DNA, 25 bp, Homo sapien
gccaatgtcatctcatacataagca

SEQ ID NO: 4679083 - DNA, 25 bp, Homo sapien
ccaatgtcatctcatacataagcat

SEQ ID NO: 4679084 - DNA, 25 bp, Homo sapien
tgaaggcacgaaagtacccagcttc

SEQ ID NO: 4679085 - DNA, 25 bp, Homo sapien
tgccaaagtggctcctgctgaaggc

SEQ ID NO: 4679086 - DNA, 25 bp, Homo sapien
ttctcaaatcgcagacctggctgaa

SEQ ID NO: 4679087 - DNA, 25 bp, Homo sapien
gccaggacgttatttgtggcaccat

SEQ ID NO: 4679088 - DNA, 25 bp, Homo sapien
gatccagagcactcatccctagctt

SEQ ID NO: 4679089 - DNA, 25 bp, Homo sapien
tgtaagttggtcatgctgaccactg

SEQ ID NO: 4679090 - DNA, 25 bp, Homo sapien
tctggaagccactgtaatcatagcg

SEQ ID NO: 4679091 - DNA, 25 bp, Homo sapien
tccctttggtgccttatgatccaga

SEQ ID NO: 4679092 - DNA, 25 bp, Homo sapien
tgatctatacacctatataccaagg

SEQ ID NO: 4679093 - DNA, 25 bp, Homo sapien
tccctcaactaggaaagagcaggtt

SEQ ID NO: 4679094 - DNA, 25 bp, Homo sapien
ctttggatgagtaaagccttcagtc

SEQ ID NO: 4679095 - DNA, 25 bp, Homo sapien
tcaactaggagacctctaagatccc

SEQ ID NO: 4679096 - DNA, 25 bp, Homo sapien
tgccatggatcatattctctctccc

SEQ ID NO: 4679097 - DNA, 25 bp, Homo sapien
ccaattcaccaagtccagatggaaa

SEQ ID NO: 4679098 - DNA, 25 bp, Homo sapien
gagtatagggggtatttgcatttgc

SEQ ID NO: 4679099 - DNA, 25 bp, Homo sapien
ctcaactgcagaagggcagcccaat

SEQ ID NO: 4679100 - DNA, 25 bp, Homo sapien
tctccccatattccctcaggccaat

SEQ ID NO: 4679101 - DNA, 25 bp, Homo sapien
attccctcaggccaatacctgcagg

SEQ ID NO: 4679102 - DNA, 25 bp, Homo sapien
gggaatagctattctccccatattc

SEQ ID NO: 4679103 - DNA, 25 bp, Homo sapien
aaagggtatccttgggaatagctat

SEQ ID NO: 4679104 - DNA, 25 bp, Homo sapien
tctttcagtactagggaacagcttg

SEQ ID NO: 4679105 - DNA, 25 bp, Homo sapien
tcaacgtggcttgcttgcatgcaga

SEQ ID NO: 4679106 - DNA, 25 bp, Homo sapien
gcccaagggcgcagaaaagcctgtt

SEQ ID NO: 4679107 - DNA, 25 bp, Homo sapien
gaacagcttgacaggtttccaatgg

SEQ ID NO: 4679108 - DNA, 25 bp, Homo sapien
atttggtgtctagtaccctccactc

SEQ ID NO: 4679109 - DNA, 25 bp, Homo sapien
tccccagagaacttgacaccttctt

SEQ ID NO: 4679110 - DNA, 25 bp, Homo sapien
tggtgtctagtaccctccactcctc

SEQ ID NO: 4679111 - DNA, 25 bp, Homo sapien
cctccccagagaacttgacaccttc

SEQ ID NO: 4679112 - DNA, 25 bp, Homo sapien
tgtgctccgtcagcttggaatccct

SEQ ID NO: 4679113 - DNA, 25 bp, Homo sapien
gcacaatgaccacgatgtgctccgt

SEQ ID NO: 4679114 - DNA, 25 bp, Homo sapien
ttttggtagcgtggccatcaacact

SEQ ID NO: 4679115 - DNA, 25 bp, Homo sapien
cttggaatcccttttggtagcgtgg

SEQ ID NO: 4679116 - DNA, 25 bp, Homo sapien
gatgtccagtctcattgggttgtca

SEQ ID NO: 4679117 - DNA, 25 bp, Homo sapien
cattgggttgtcatatctgataagt

SEQ ID NO: 4679118 - DNA, 25 bp, Homo sapien
cagtctcattgggttgtcatatctg

SEQ ID NO: 4679119 - DNA, 25 bp, Homo sapien
aaaatatgtgatgtccagtctcatt

SEQ ID NO: 4679120 - DNA, 25 bp, Homo sapien
cgggagaacgcccagggacggctgg

SEQ ID NO: 4679121 - DNA, 25 bp, Homo sapien
aaaaaacacacgctgtagtcaccca

SEQ ID NO: 4679122 - DNA, 25 bp, Homo sapien
tagtcacccaaggaaactgatgggc

SEQ ID NO: 4679123 - DNA, 25 bp, Homo sapien
agagctgtgcgcacggcgggctcgc

SEQ ID NO: 4679124 - DNA, 25 bp, Homo sapien
tccttgtgcaattccgcctctgcca

SEQ ID NO: 4679125 - DNA, 25 bp, Homo sapien
tcataatattcctggagtcgtcccc

SEQ ID NO: 4679126 - DNA, 25 bp, Homo sapien
gacccagttgtatgaagtccccaga

SEQ ID NO: 4679127 - DNA, 25 bp, Homo sapien
tcagatactccacaccataagaagg

SEQ ID NO: 4679128 - DNA, 25 bp, Homo sapien
tatgaagccaacgtatgcctgagca

SEQ ID NO: 4679129 - DNA, 25 bp, Homo sapien
tggagccttcatcgcaaatacagcc

SEQ ID NO: 4679130 - DNA, 25 bp, Homo sapien
ctttagataaaaggctcctggagcc

SEQ ID NO: 4679131 - DNA, 25 bp, Homo sapien
aaacctctcatcatggtaagcccag

SEQ ID NO: 4679132 - DNA, 25 bp, Homo sapien
tgttctggactgtaagcaatgaggc

SEQ ID NO: 4679133 - DNA, 25 bp, Homo sapien
tagtctttcactaagtgtgcttaaa

SEQ ID NO: 4679134 - DNA, 25 bp, Homo sapien
ctttagtctttcactaagtgtgctt

SEQ ID NO: 4679135 - DNA, 25 bp, Homo sapien
agtctttcactaagtgtgcttaaag

SEQ ID NO: 4679136 - DNA, 25 bp, Homo sapien
tttcactaagtgtgcttaaagttcc

SEQ ID NO: 4679137 - DNA, 25 bp, Homo sapien
gggttgcatggtccgcacaacagtg

SEQ ID NO: 4679138 - DNA, 25 bp, Homo sapien
gggatccgtgagtctttgagactcg

SEQ ID NO: 4679139 - DNA, 25 bp, Homo sapien
agtctttgagactcgggttgcatgg

SEQ ID NO: 4679140 - DNA, 25 bp, Homo sapien
gcacagcaaggggatccgtgagtct

SEQ ID NO: 4679141 - DNA, 25 bp, Homo sapien
tacaaaggctctatagtggagggtg

SEQ ID NO: 4679142 - DNA, 25 bp, Homo sapien
taagcacctactctacagactgaga

SEQ ID NO: 4679143 - DNA, 25 bp, Homo sapien
gaagttgggaatggaacccatgcct

SEQ ID NO: 4679144 - DNA, 25 bp, Homo sapien
tagaccccagtagctcagttacaaa

SEQ ID NO: 4679145 - DNA, 25 bp, Homo sapien
gaaccccagactcctaactaataca

SEQ ID NO: 4679146 - DNA, 25 bp, Homo sapien
tcaaatctgattagctgcatgggca

SEQ ID NO: 4679147 - DNA, 25 bp, Homo sapien
tgaataagagaagggcatccaggtc

SEQ ID NO: 4679148 - DNA, 25 bp, Homo sapien
tgctgtctctatgccttagaacccc

SEQ ID NO: 4679149 - DNA, 25 bp, Homo sapien
gtccactgtcaaaaaacttctacac

SEQ ID NO: 4679150 - DNA, 25 bp, Homo sapien
tctacaccccaacatcacatcatcg

SEQ ID NO: 4679151 - DNA, 25 bp, Homo sapien
ttggcaaggccctttcaagatccat

SEQ ID NO: 4679152 - DNA, 25 bp, Homo sapien
tcacatcatcgccttttggcaaggc

SEQ ID NO: 4679153 - DNA, 25 bp, Homo sapien
acatcagtgaaagaaataaaagtat

SEQ ID NO: 4679154 - DNA, 25 bp, Homo sapien
catcagtgaaagaaataaaagtatt

SEQ ID NO: 4679155 - DNA, 25 bp, Homo sapien
cggcacatcagtgaaagaaataaaa

SEQ ID NO: 4679156 - DNA, 25 bp, Homo sapien
tacaaatgtctggaactcggtgtga

SEQ ID NO: 4679157 - DNA, 25 bp, Homo sapien
aaatgtctggaactcggtgtgaaca

SEQ ID NO: 4679158 - DNA, 25 bp, Homo sapien
ctacaaatgtctggaactcggtgtg

SEQ ID NO: 4679159 - DNA, 25 bp, Homo sapien
caaatgtctggaactcggtgtgaac

SEQ ID NO: 4679160 - DNA, 25 bp, Homo sapien
gaagaaggccactgataggcagcca

SEQ ID NO: 4679161 - DNA, 25 bp, Homo sapien
taaatcttggcgtctccttcttggc

SEQ ID NO: 4679162 - DNA, 25 bp, Homo sapien
cggttggatgtgagccgtgacaact

SEQ ID NO: 4679163 - DNA, 25 bp, Homo sapien
gacaactgtgtagtgctgacagaag

SEQ ID NO: 4679164 - DNA, 25 bp, Homo sapien
aggaccaaccaaagaatcgggtgtg

SEQ ID NO: 4679165 - DNA, 25 bp, Homo sapien
gaatcgggtgtggttgcggaggtca

SEQ ID NO: 4679166 - DNA, 25 bp, Homo sapien
ctaggaccaaccaaagaatcgggtg

SEQ ID NO: 4679167 - DNA, 25 bp, Homo sapien
gttgcggaggtcaggaactgcagat

SEQ ID NO: 4679168 - DNA, 25 bp, Homo sapien
tgtcctatcaaagttaacactataa

SEQ ID NO: 4679169 - DNA, 25 bp, Homo sapien
gtcaatcctgttaatctttatcctc

SEQ ID NO: 4679170 - DNA, 25 bp, Homo sapien
tcctctcctctatgtggagtcaatc

SEQ ID NO: 4679171 - DNA, 25 bp, Homo sapien
taatctttatcctctagtgcaggag

SEQ ID NO: 4679172 - DNA, 25 bp, Homo sapien
cactaggacttgtttgtgagccagg

SEQ ID NO: 4679173 - DNA, 25 bp, Homo sapien
gatccaagggatagctaagtgaact

SEQ ID NO: 4679174 - DNA, 25 bp, Homo sapien
gccaggttaggccaatcatgctacc

SEQ ID NO: 4679175 - DNA, 25 bp, Homo sapien
gagacatttctagggacagacacac

SEQ ID NO: 4679176 - DNA, 25 bp, Homo sapien
ggacatggagactattccatattag

SEQ ID NO: 4679177 - DNA, 25 bp, Homo sapien
ttccccactataaccttgagtattg

SEQ ID NO: 4679178 - DNA, 25 bp, Homo sapien
catggagactattccatattagcat

SEQ ID NO: 4679179 - DNA, 25 bp, Homo sapien
tgagtattgccttaaccctccttcc

SEQ ID NO: 4679180 - DNA, 25 bp, Homo sapien
gttgattctgctggccagtttccac

SEQ ID NO: 4679181 - DNA, 25 bp, Homo sapien
ttgattctgctggccagtttccaca

SEQ ID NO: 4679182 - DNA, 25 bp, Homo sapien
tgattctgctggccagtttccacat

SEQ ID NO: 4679183 - DNA, 25 bp, Homo sapien
cagcccatagtgatggtcttaaagt

SEQ ID NO: 4679184 - DNA, 25 bp, Homo sapien
cccatagtgatggtcttaaagtcac

SEQ ID NO: 4679185 - DNA, 25 bp, Homo sapien
gtgttagcctccgaacccagcccat

SEQ ID NO: 4679186 - DNA, 25 bp, Homo sapien
agcctccgaacccagcccatagtga

SEQ ID NO: 4679187 - DNA, 25 bp, Homo sapien
gacctttacatgctcaagcagcagg

SEQ ID NO: 4679188 - DNA, 25 bp, Homo sapien
ctttacatgctcaagcagcaggctc

SEQ ID NO: 4679189 - DNA, 25 bp, Homo sapien
tatgggcagtggacctttacatgct

SEQ ID NO: 4679190 - DNA, 25 bp, Homo sapien
ggcagtatgggcagtggacctttac

SEQ ID NO: 4679191 - DNA, 25 bp, Homo sapien
gtatagacacttccagagacaccgg

SEQ ID NO: 4679192 - DNA, 25 bp, Homo sapien
gagacaccgggcacacacgcagtgt

SEQ ID NO: 4679193 - DNA, 25 bp, Homo sapien
gtctctgggtgtgttgcaagcagca

SEQ ID NO: 4679194 - DNA, 25 bp, Homo sapien
gcagcagcattctcctaacatgtct

SEQ ID NO: 4679195 - DNA, 25 bp, Homo sapien
tatctgctcgtcaagctgttgtcgc

SEQ ID NO: 4679196 - DNA, 25 bp, Homo sapien
tcgtcaagctgttgtcgcttgcctt

SEQ ID NO: 4679197 - DNA, 25 bp, Homo sapien
ctgcagcagaagtatctgctcgtca

SEQ ID NO: 4679198 - DNA, 25 bp, Homo sapien
gcttgccttctatttcagtctgcct

SEQ ID NO: 4679199 - DNA, 25 bp, Homo sapien
atgttctgcagccacaacttcttgc

SEQ ID NO: 4679200 - DNA, 25 bp, Homo sapien
gccatggacagtcctggctgtctcc

SEQ ID NO: 4679201 - DNA, 25 bp, Homo sapien
aagccttggcgttggtgtggaccct

SEQ ID NO: 4679202 - DNA, 25 bp, Homo sapien
tctgggggatagacatcctggaagc

SEQ ID NO: 4679203 - DNA, 25 bp, Homo sapien
gatgtccaaaccacagatagtaaaa

SEQ ID NO: 4679204 - DNA, 25 bp, Homo sapien
tgtccaaaccacagatagtaaaaac

SEQ ID NO: 4679205 - DNA, 25 bp, Homo sapien
tgctaaagatgtccaaaccacagat

SEQ ID NO: 4679206 - DNA, 25 bp, Homo sapien
taaagatgtccaaaccacagatagt

SEQ ID NO: 4679207 - DNA, 25 bp, Homo sapien
gcagccatttctcccgaagcacttt

SEQ ID NO: 4679208 - DNA, 25 bp, Homo sapien
tcggcagttccagcgggtatgccct

SEQ ID NO: 4679209 - DNA, 25 bp, Homo sapien
ctcttcggcagttccagcgggtatg

SEQ ID NO: 4679210 - DNA, 25 bp, Homo sapien
ttccagcgggtatgccctgcagcag

SEQ ID NO: 4679211 - DNA, 25 bp, Homo sapien
tcagactgccgcctcctggcttcct

SEQ ID NO: 4679212 - DNA, 25 bp, Homo sapien
cttcagactgccgcctcctggcttc

SEQ ID NO: 4679213 - DNA, 25 bp, Homo sapien
cagactgccgcctcctggcttcctc

SEQ ID NO: 4679214 - DNA, 25 bp, Homo sapien
ctcttcagactgccgcctcctggct

SEQ ID NO: 4679215 - DNA, 25 bp, Homo sapien
ctctgaatgttatcttcaagttgct

SEQ ID NO: 4679216 - DNA, 25 bp, Homo sapien
tctgaatgttatcttcaagttgctt

SEQ ID NO: 4679217 - DNA, 25 bp, Homo sapien
tacagcagcaataacagctaacaac

SEQ ID NO: 4679218 - DNA, 25 bp, Homo sapien
tcccagattgaagtgatcagatcct

SEQ ID NO: 4679219 - DNA, 25 bp, Homo sapien
cccagattgaagtgatcagatcctg

SEQ ID NO: 4679220 - DNA, 25 bp, Homo sapien
ggtcgcttatctcccagattgaagt

SEQ ID NO: 4679221 - DNA, 25 bp, Homo sapien
agacaggtcgcttatctcccagatt

SEQ ID NO: 4679222 - DNA, 25 bp, Homo sapien
cttggttttgggcttgctcattgac

SEQ ID NO: 4679223 - DNA, 25 bp, Homo sapien
ttccactaaaagttggctggctgtc

SEQ ID NO: 4679224 - DNA, 25 bp, Homo sapien
agtctgagcctaggccttgtttctg

SEQ ID NO: 4679225 - DNA, 25 bp, Homo sapien
atggcttgtgggcagtctgagccta

SEQ ID NO: 4679226 - DNA, 25 bp, Homo sapien
aaagcacacagttttcctgacctgg

SEQ ID NO: 4679227 - DNA, 25 bp, Homo sapien
gagagacttcagctctaagccagag

SEQ ID NO: 4679228 - DNA, 25 bp, Homo sapien
tcatctttagcctggtaaaccaagg

SEQ ID NO: 4679229 - DNA, 25 bp, Homo sapien
tccactgtggcagccgggttttcct

SEQ ID NO: 4679230 - DNA, 25 bp, Homo sapien
tgaccacccacaataggctgaagac

SEQ ID NO: 4679231 - DNA, 25 bp, Homo sapien
tgatgaccacccacaataggctgaa

SEQ ID NO: 4679232 - DNA, 25 bp, Homo sapien
gctgaagaccggcacctccagagtc

SEQ ID NO: 4679233 - DNA, 25 bp, Homo sapien
ccacccacaataggctgaagaccgg

SEQ ID NO: 4679234 - DNA, 25 bp, Homo sapien
caggctagaaagtgcaatcaggaac

SEQ ID NO: 4679235 - DNA, 25 bp, Homo sapien
cactgtttcccgcagaggtttagac

SEQ ID NO: 4679236 - DNA, 25 bp, Homo sapien
tccccaatgtacaggcgaggacact

SEQ ID NO: 4679237 - DNA, 25 bp, Homo sapien
caagtttggtcaagctctgaggtcc

SEQ ID NO: 4679238 - DNA, 25 bp, Homo sapien
gctgtcctggagggctccacgccta

SEQ ID NO: 4679239 - DNA, 25 bp, Homo sapien
cgttcgctgtcctggagggctccac

SEQ ID NO: 4679240 - DNA, 25 bp, Homo sapien
ccgttcgctgtcctggagggctcca

SEQ ID NO: 4679241 - DNA, 25 bp, Homo sapien
gtcctggagggctccacgcctagac

SEQ ID NO: 4679242 - DNA, 25 bp, Homo sapien
ccatagaccctttcataacatccat

SEQ ID NO: 4679243 - DNA, 25 bp, Homo sapien
ctggactgagtagtaatgaccactc

SEQ ID NO: 4679244 - DNA, 25 bp, Homo sapien
ctttcatatgcacccatagaccctt

SEQ ID NO: 4679245 - DNA, 25 bp, Homo sapien
gtaatgaccactccctttcatatgc

SEQ ID NO: 4679246 - DNA, 25 bp, Homo sapien
gctgataggcccagcagtcctggaa

SEQ ID NO: 4679247 - DNA, 25 bp, Homo sapien
cttctgcctttggatttgttctttt

SEQ ID NO: 4679248 - DNA, 25 bp, Homo sapien
gcccagcagtcctggaattcctgct

SEQ ID NO: 4679249 - DNA, 25 bp, Homo sapien
ttcatcctctacttcagctgatagg

SEQ ID NO: 4679250 - DNA, 25 bp, Homo sapien
taaacatttagggaggcttggcaca

SEQ ID NO: 4679251 - DNA, 25 bp, Homo sapien
taggcctagtagaaagactccaagt

SEQ ID NO: 4679252 - DNA, 25 bp, Homo sapien
gaacactgggttttgtgccaggaaa

SEQ ID NO: 4679253 - DNA, 25 bp, Homo sapien
actccactgcatggaaggcctgagc

SEQ ID NO: 4679254 - DNA, 25 bp, Homo sapien
taggatgtcccgagagagagcaaat

SEQ ID NO: 4679255 - DNA, 25 bp, Homo sapien
ctttcccagatcaaacaaatctctc

SEQ ID NO: 4679256 - DNA, 25 bp, Homo sapien
tcttctagcctgacaaaaattctta

SEQ ID NO: 4679257 - DNA, 25 bp, Homo sapien
cagatcaaacaaatctctccaggct

SEQ ID NO: 4679258 - DNA, 25 bp, Homo sapien
ttagcactgtgagaacagacttaaa

SEQ ID NO: 4679259 - DNA, 25 bp, Homo sapien
cttatgctcagcgcttctccttgct

SEQ ID NO: 4679260 - DNA, 25 bp, Homo sapien
agattttccccccttatgctcagcg

SEQ ID NO: 4679261 - DNA, 25 bp, Homo sapien
tgtcatggcatatgacagcactgac

SEQ ID NO: 4679262 - DNA, 25 bp, Homo sapien
gctcagtaaattgagggatggctga

SEQ ID NO: 4679263 - DNA, 25 bp, Homo sapien
taaattgagggatggctgaattgac

SEQ ID NO: 4679264 - DNA, 25 bp, Homo sapien
aattgacgtcataatgaaagaatgc

SEQ ID NO: 4679265 - DNA, 25 bp, Homo sapien
gatggctgaattgacgtcataatga

SEQ ID NO: 4679266 - DNA, 25 bp, Homo sapien
ctgggccaggagtgatatctggctc

SEQ ID NO: 4679267 - DNA, 25 bp, Homo sapien
tgggccaggagtgatatctggctca

SEQ ID NO: 4679268 - DNA, 25 bp, Homo sapien
cagctctttcacccgtgcatctggt

SEQ ID NO: 4679269 - DNA, 25 bp, Homo sapien
gctctttcacccgtgcatctggtaa

SEQ ID NO: 4679270 - DNA, 25 bp, Homo sapien
tctttcacccgtgcatctggtaacc

SEQ ID NO: 4679271 - DNA, 25 bp, Homo sapien
ctttcacccgtgcatctggtaaccc

SEQ ID NO: 4679272 - DNA, 25 bp, Homo sapien
acagcaacttccctggaaccctcag

SEQ ID NO: 4679273 - DNA, 25 bp, Homo sapien
ctgaaagcacacagcaacttccctg

SEQ ID NO: 4679274 - DNA, 25 bp, Homo sapien
cacagcaacttccctggaaccctca

SEQ ID NO: 4679275 - DNA, 25 bp, Homo sapien
ctgctgaaagcacacagcaacttcc

SEQ ID NO: 4679276 - DNA, 25 bp, Homo sapien
cttagataaaatagagacattttgc

SEQ ID NO: 4679277 - DNA, 25 bp, Homo sapien
actgaaggatggtcatggagtttga

SEQ ID NO: 4679278 - DNA, 25 bp, Homo sapien
gtttctcacgggcacagtcgttgca

SEQ ID NO: 4679279 - DNA, 25 bp, Homo sapien
gaaactgagtcagcatctaacgctg

SEQ ID NO: 4679280 - DNA, 25 bp, Homo sapien
tagatcgccaccctgcactgttggt

SEQ ID NO: 4679281 - DNA, 25 bp, Homo sapien
cctgctgcgtctgctcctagtcaag

SEQ ID NO: 4679282 - DNA, 25 bp, Homo sapien
cagcggaccctctttggtgtggatc

SEQ ID NO: 4679283 - DNA, 25 bp, Homo sapien
tcaagtccatgactgccacgtccag

SEQ ID NO: 4679284 - DNA, 25 bp, Homo sapien
gatctgtttgacttcttcgttttta

SEQ ID NO: 4679285 - DNA, 25 bp, Homo sapien
acaaagagaagggaagacagagcat

SEQ ID NO: 4679286 - DNA, 25 bp, Homo sapien
caaacaaagagaagggaagacagag

SEQ ID NO: 4679287 - DNA, 25 bp, Homo sapien
ctgcaaggcccaaacaaagagaagg

SEQ ID NO: 4679288 - DNA, 25 bp, Homo sapien
tgcaaggcccaaacaaagagaaggg

SEQ ID NO: 4679289 - DNA, 25 bp, Homo sapien
cacttgcctggctctcaaatacctg

SEQ ID NO: 4679290 - DNA, 25 bp, Homo sapien
cttctgcttcacttgcctggctctc

SEQ ID NO: 4679291 - DNA, 25 bp, Homo sapien
aaatacctggccttcaaggctctgc

SEQ ID NO: 4679292 - DNA, 25 bp, Homo sapien
gcttcacttgcctggctctcaaata

SEQ ID NO: 4679293 - DNA, 25 bp, Homo sapien
gagtacatgcttccccaagccactg

SEQ ID NO: 4679294 - DNA, 25 bp, Homo sapien
tgggaagagtacatgcttccccaag

SEQ ID NO: 4679295 - DNA, 25 bp, Homo sapien
atgcttccccaagccactgatgtca

SEQ ID NO: 4679296 - DNA, 25 bp, Homo sapien
gaagagtacatgcttccccaagcca

SEQ ID NO: 4679297 - DNA, 25 bp, Homo sapien
cctctgtggtctggattctactgcc

SEQ ID NO: 4679298 - DNA, 25 bp, Homo sapien
ccctctgtggtctggattctactgc

SEQ ID NO: 4679299 - DNA, 25 bp, Homo sapien
tccctctgtggtctggattctactg

SEQ ID NO: 4679300 - DNA, 25 bp, Homo sapien
tttggcagatatctgggactcttca

SEQ ID NO: 4679301 - DNA, 25 bp, Homo sapien
ttctagcgtttgtatttcttgctcc

SEQ ID NO: 4679302 - DNA, 25 bp, Homo sapien
gactcttcactttctagcgtttgta

SEQ ID NO: 4679303 - DNA, 25 bp, Homo sapien
ctgggactcttcactttctagcgtt

SEQ ID NO: 4679304 - DNA, 25 bp, Homo sapien
ttccccatggaaataactttgagaa

SEQ ID NO: 4679305 - DNA, 25 bp, Homo sapien
tccccatggaaataactttgagaaa

SEQ ID NO: 4679306 - DNA, 25 bp, Homo sapien
ctggggagacaaaatccaggtctct

SEQ ID NO: 4679307 - DNA, 25 bp, Homo sapien
tggggagacaaaatccaggtctctt

SEQ ID NO: 4679308 - DNA, 25 bp, Homo sapien
ggggagacaaaatccaggtctcttg

SEQ ID NO: 4679309 - DNA, 25 bp, Homo sapien
tgcatccccactcgtactgcttcca

SEQ ID NO: 4679310 - DNA, 25 bp, Homo sapien
cctctgcatccccactcgtactgct

SEQ ID NO: 4679311 - DNA, 25 bp, Homo sapien
catccccactcgtactgcttccatt

SEQ ID NO: 4679312 - DNA, 25 bp, Homo sapien
tctgcatccccactcgtactgcttc

SEQ ID NO: 4679313 - DNA, 25 bp, Homo sapien
ctgggaggaaatgtaatttactgca

SEQ ID NO: 4679314 - DNA, 25 bp, Homo sapien
caggtgatggttctgctgttcgtga

SEQ ID NO: 4679315 - DNA, 25 bp, Homo sapien
ctggtcccgtcctgcccaggtgatg

SEQ ID NO: 4679316 - DNA, 25 bp, Homo sapien
ttcgtgaacagaggattggcaggtc

SEQ ID NO: 4679317 - DNA, 25 bp, Homo sapien
ggattgaccagataccacttacagt

SEQ ID NO: 4679318 - DNA, 25 bp, Homo sapien
gcataactgcaggttgcaggttcct

SEQ ID NO: 4679319 - DNA, 25 bp, Homo sapien
cagaagtgtaccctggagtacttaa

SEQ ID NO: 4679320 - DNA, 25 bp, Homo sapien
gccagtgagtcctttgaagcataac

SEQ ID NO: 4679321 - DNA, 25 bp, Homo sapien
gcagagtgaaagcaactgcaagggc

SEQ ID NO: 4679322 - DNA, 25 bp, Homo sapien
ctttggcagagtgaaagcaactgca

SEQ ID NO: 4679323 - DNA, 25 bp, Homo sapien
aaagcaactgcaagggctgtaggga

SEQ ID NO: 4679324 - DNA, 25 bp, Homo sapien
gtgaaagcaactgcaagggctgtag

SEQ ID NO: 4679325 - DNA, 25 bp, Homo sapien
aggtgtggagcggagtgtgaggcct

SEQ ID NO: 4679326 - DNA, 25 bp, Homo sapien
aaaacacccaggtgtggagcggagt

SEQ ID NO: 4679327 - DNA, 25 bp, Homo sapien
gtggagcggagtgtgaggcctctgg

SEQ ID NO: 4679328 - DNA, 25 bp, Homo sapien
gtgtggagcggagtgtgaggcctct

SEQ ID NO: 4679329 - DNA, 25 bp, Homo sapien
agagacattaagttgaggttgagaa

SEQ ID NO: 4679330 - DNA, 25 bp, Homo sapien
tagagacattaagttgaggttgaga

SEQ ID NO: 4679331 - DNA, 25 bp, Homo sapien
attctttcatcaatagggaaacgcc

SEQ ID NO: 4679332 - DNA, 25 bp, Homo sapien
ttttcttggttcttgctccctaata

SEQ ID NO: 4679333 - DNA, 25 bp, Homo sapien
tttcttggttcttgctccctaataa

SEQ ID NO: 4679334 - DNA, 25 bp, Homo sapien
aattctttcatcaatagggaaacgc

SEQ ID NO: 4679335 - DNA, 25 bp, Homo sapien
caaagggatacagatgaatgactgc

SEQ ID NO: 4679336 - DNA, 25 bp, Homo sapien
aagggatacagatgaatgactgcat

SEQ ID NO: 4679337 - DNA, 25 bp, Homo sapien
aaagggatacagatgaatgactgca

SEQ ID NO: 4679338 - DNA, 25 bp, Homo sapien
agggatacagatgaatgactgcatg

SEQ ID NO: 4679339 - DNA, 25 bp, Homo sapien
aatgaaaacaagagaaaggaagtgc

SEQ ID NO: 4679340 - DNA, 25 bp, Homo sapien
cttgaatgaaaacaagagaaaggaa

SEQ ID NO: 4679341 - DNA, 25 bp, Homo sapien
tgaatgaaaacaagagaaaggaagt

SEQ ID NO: 4679342 - DNA, 25 bp, Homo sapien
atgaaaacaagagaaaggaagtgca

SEQ ID NO: 4679343 - DNA, 25 bp, Homo sapien
tttctactacggtgcctcctgagcg

SEQ ID NO: 4679344 - DNA, 25 bp, Homo sapien
cataaaaatcatggtgacgggctga

SEQ ID NO: 4679345 - DNA, 25 bp, Homo sapien
gagcgcacctcatacactactttgg

SEQ ID NO: 4679346 - DNA, 25 bp, Homo sapien
tcccgtcaatagtggacacgtccgt

SEQ ID NO: 4679347 - DNA, 25 bp, Homo sapien
caacacagcattgacagcgcttttt

SEQ ID NO: 4679348 - DNA, 25 bp, Homo sapien
cagcattgacagcgctttttctttt

SEQ ID NO: 4679349 - DNA, 25 bp, Homo sapien
cacagcattgacagcgctttttctt

SEQ ID NO: 4679350 - DNA, 25 bp, Homo sapien
aacacagcattgacagcgctttttc

SEQ ID NO: 4679351 - DNA, 25 bp, Homo sapien
aaagagagacaaccgctgatgggca

SEQ ID NO: 4679352 - DNA, 25 bp, Homo sapien
tatcactggctgatacgaagagtcc

SEQ ID NO: 4679353 - DNA, 25 bp, Homo sapien
tccagtcaagtgagttaaggctacc

SEQ ID NO: 4679354 - DNA, 25 bp, Homo sapien
gaagagtccattccaatcgagcagg

SEQ ID NO: 4679355 - DNA, 25 bp, Homo sapien
tcagaaggctcaaggaaactgtgtt

SEQ ID NO: 4679356 - DNA, 25 bp, Homo sapien
ccccaggtgattatgaagaggcaat

SEQ ID NO: 4679357 - DNA, 25 bp, Homo sapien
ggcaatatgaggagaagacgaccct

SEQ ID NO: 4679358 - DNA, 25 bp, Homo sapien
caagttcttttgtgcgacagttccg

SEQ ID NO: 4679359 - DNA, 25 bp, Homo sapien
taacctcaaatgtggcaattactcc

SEQ ID NO: 4679360 - DNA, 25 bp, Homo sapien
gcaccatagtaagtggtcccttaac

SEQ ID NO: 4679361 - DNA, 25 bp, Homo sapien
agtagagactaaacaacatggtctc

SEQ ID NO: 4679362 - DNA, 25 bp, Homo sapien
gggctctgactcaccgtttcatata

SEQ ID NO: 4679363 - DNA, 25 bp, Homo sapien
tcaccccgagtgagatgctaaagct

SEQ ID NO: 4679364 - DNA, 25 bp, Homo sapien
ttcagagtaagcacgacaggctccc

SEQ ID NO: 4679365 - DNA, 25 bp, Homo sapien
aggttacaaagtacagcagctagcc

SEQ ID NO: 4679366 - DNA, 25 bp, Homo sapien
gctagcccagtaagctaattcagag

SEQ ID NO: 4679367 - DNA, 25 bp, Homo sapien
tattgtctattaatactgtacagag

SEQ ID NO: 4679368 - DNA, 25 bp, Homo sapien
tacagcatcagctgtcgctggtagt

SEQ ID NO: 4679369 - DNA, 25 bp, Homo sapien
aaggcagtttattgtctattaatac

SEQ ID NO: 4679370 - DNA, 25 bp, Homo sapien
cagctgtcgctggtagtgtcttttc

SEQ ID NO: 4679371 - DNA, 25 bp, Homo sapien
tatttaggtggtaggcaggcaagcc

SEQ ID NO: 4679372 - DNA, 25 bp, Homo sapien
taacacccaagggaagctccatggc

SEQ ID NO: 4679373 - DNA, 25 bp, Homo sapien
tagccagacagtttgcttccaggag

SEQ ID NO: 4679374 - DNA, 25 bp, Homo sapien
tcccagctgaggtatagtaagagct

SEQ ID NO: 4679375 - DNA, 25 bp, Homo sapien
cattggtactggcttcgattcaggc

SEQ ID NO: 4679376 - DNA, 25 bp, Homo sapien
caaggctggctatataccattggta

SEQ ID NO: 4679377 - DNA, 25 bp, Homo sapien
tattactggctacatcttgggcaag

SEQ ID NO: 4679378 - DNA, 25 bp, Homo sapien
tcaggcagctgtgcttattactggc

SEQ ID NO: 4679379 - DNA, 25 bp, Homo sapien
ctgagtctggttgcatgctctctcc

SEQ ID NO: 4679380 - DNA, 25 bp, Homo sapien
cattctgtgcagtcatcagagacat

SEQ ID NO: 4679381 - DNA, 25 bp, Homo sapien
gctcttacattctgtgcagtcatca

SEQ ID NO: 4679382 - DNA, 25 bp, Homo sapien
gacaacagccatgtgacccagtcct

SEQ ID NO: 4679383 - DNA, 25 bp, Homo sapien
aggcagggccttgacaacagccatg

SEQ ID NO: 4679384 - DNA, 25 bp, Homo sapien
ctgaatcagaaactgcccttggcac

SEQ ID NO: 4679385 - DNA, 25 bp, Homo sapien
gccacacagccactggtttgtccag

SEQ ID NO: 4679386 - DNA, 25 bp, Homo sapien
agtcccgttagcaacaggctgggca

SEQ ID NO: 4679387 - DNA, 25 bp, Homo sapien
gcccatcggcattgaactcttgtga

SEQ ID NO: 4679388 - DNA, 25 bp, Homo sapien
tgggcatatgcccatcggcattgaa

SEQ ID NO: 4679389 - DNA, 25 bp, Homo sapien
tgcttgcaaagacaggcctagtgct

SEQ ID NO: 4679390 - DNA, 25 bp, Homo sapien
gcaaagacaggcctagtgctgggcc

SEQ ID NO: 4679391 - DNA, 25 bp, Homo sapien
tattgcggtacactttgtaaaccat

SEQ ID NO: 4679392 - DNA, 25 bp, Homo sapien
gtatttcttactattgcggtacact

SEQ ID NO: 4679393 - DNA, 25 bp, Homo sapien
gaccattggacctggattgggactt

SEQ ID NO: 4679394 - DNA, 25 bp, Homo sapien
gggatgtccgtcttctggtgcccct

SEQ ID NO: 4679395 - DNA, 25 bp, Homo sapien
ggaggaagggtgaactttctctctc

SEQ ID NO: 4679396 - DNA, 25 bp, Homo sapien
tttctctctccgcttaacctgggat

SEQ ID NO: 4679397 - DNA, 25 bp, Homo sapien
aaaatggccaaggtcctggtccagg

SEQ ID NO: 4679398 - DNA, 25 bp, Homo sapien
aagctaggccaccaagagccctttc

SEQ ID NO: 4679399 - DNA, 25 bp, Homo sapien
ggatggacaactatctaagctaggc

SEQ ID NO: 4679400 - DNA, 25 bp, Homo sapien
cagattgggtatgggtagacatcca

SEQ ID NO: 4679401 - DNA, 25 bp, Homo sapien
gggctttgcaatgattgttccattt

SEQ ID NO: 4679402 - DNA, 25 bp, Homo sapien
tagtgacactattgaatggctgagg

SEQ ID NO: 4679403 - DNA, 25 bp, Homo sapien
ggagtcaagcgtgtctctagtgaca

SEQ ID NO: 4679404 - DNA, 25 bp, Homo sapien
caacatctgccagctcagtcagaga

SEQ ID NO: 4679405 - DNA, 25 bp, Homo sapien
gcaaagctcctggaacttgagaacc

SEQ ID NO: 4679406 - DNA, 25 bp, Homo sapien
aacttgagaaccaagaagagtgatg

SEQ ID NO: 4679407 - DNA, 25 bp, Homo sapien
ttatactagggaagcatctgttgtt

SEQ ID NO: 4679408 - DNA, 25 bp, Homo sapien
gggaagcatctgttgtttgcaaagc

SEQ ID NO: 4679409 - DNA, 25 bp, Homo sapien
gattctgggctcatgtttatctcac

SEQ ID NO: 4679410 - DNA, 25 bp, Homo sapien
ttatctcacaaggaacaaaaggcaa

SEQ ID NO: 4679411 - DNA, 25 bp, Homo sapien
tgcctattgcagtaaagcgaagctg

SEQ ID NO: 4679412 - DNA, 25 bp, Homo sapien
ctttgttcaacctagccagatggct

SEQ ID NO: 4679413 - DNA, 25 bp, Homo sapien
tgttaaataccagatgatgttgctg

SEQ ID NO: 4679414 - DNA, 25 bp, Homo sapien
gttaaataccagatgatgttgctgg

SEQ ID NO: 4679415 - DNA, 25 bp, Homo sapien
ctcatgttaaataccagatgatgtt

SEQ ID NO: 4679416 - DNA, 25 bp, Homo sapien
catgttaaataccagatgatgttgc

SEQ ID NO: 4679417 - DNA, 25 bp, Homo sapien
cccggagaatgtggagtcgaaggag

SEQ ID NO: 4679418 - DNA, 25 bp, Homo sapien
agaatgtggagtcgaaggaggacac

SEQ ID NO: 4679419 - DNA, 25 bp, Homo sapien
tcgaaggaggacacaatgctaagaa

SEQ ID NO: 4679420 - DNA, 25 bp, Homo sapien
gctcccggagaatgtggagtcgaag

SEQ ID NO: 4679421 - DNA, 25 bp, Homo sapien
acaccagtatcttgtgctagagttg

SEQ ID NO: 4679422 - DNA, 25 bp, Homo sapien
tacaccagtatcttgtgctagagtt

SEQ ID NO: 4679423 - DNA, 25 bp, Homo sapien
tggtggagatctgttctacaccagt

SEQ ID NO: 4679424 - DNA, 25 bp, Homo sapien
tctacaccagtatcttgtgctagag

SEQ ID NO: 4679425 - DNA, 25 bp, Homo sapien
tcttatagagagctattcctagccc

SEQ ID NO: 4679426 - DNA, 25 bp, Homo sapien
tttcagaagtgtagtcctggagcac

SEQ ID NO: 4679427 - DNA, 25 bp, Homo sapien
tgatgatgacctatagctctatacc

SEQ ID NO: 4679428 - DNA, 25 bp, Homo sapien
ctatacctatcttgcagttactggg

SEQ ID NO: 4679429 - DNA, 25 bp, Homo sapien
tgtttctgtggcgttcgaggctgac

SEQ ID NO: 4679430 - DNA, 25 bp, Homo sapien
tgtggcgttcgaggctgactcacct

SEQ ID NO: 4679431 - DNA, 25 bp, Homo sapien
tttctgtggcgttcgaggctgactc

SEQ ID NO: 4679432 - DNA, 25 bp, Homo sapien
ggccggatgtttctgtggcgttcga

SEQ ID NO: 4679433 - DNA, 25 bp, Homo sapien
tctgacctttcctcacaatgcacag

SEQ ID NO: 4679434 - DNA, 25 bp, Homo sapien
tactttatgcctctctgacctttcc

SEQ ID NO: 4679435 - DNA, 25 bp, Homo sapien
acctttcctcacaatgcacagtggg

SEQ ID NO: 4679436 - DNA, 25 bp, Homo sapien
ctactttatgcctctctgacctttc

SEQ ID NO: 4679437 - DNA, 25 bp, Homo sapien
aatgactgctccgtaattgggaatc

SEQ ID NO: 4679438 - DNA, 25 bp, Homo sapien
caatgactgctccgtaattgggaat

SEQ ID NO: 4679439 - DNA, 25 bp, Homo sapien
tcaatgactgctccgtaattgggaa

SEQ ID NO: 4679440 - DNA, 25 bp, Homo sapien
ggagatatcctagtacccacctcat

SEQ ID NO: 4679441 - DNA, 25 bp, Homo sapien
tagaataccctaaacacccagagca

SEQ ID NO: 4679442 - DNA, 25 bp, Homo sapien
gagcactacctgacacatgggaagt

SEQ ID NO: 4679443 - DNA, 25 bp, Homo sapien
gatcaaaactcacactctggtgggg

SEQ ID NO: 4679444 - DNA, 25 bp, Homo sapien
taaagacaggtcatccttttagccc

SEQ ID NO: 4679445 - DNA, 25 bp, Homo sapien
ctctccacgggatgcctagaaggca

SEQ ID NO: 4679446 - DNA, 25 bp, Homo sapien
tgatctcatccagtcaatggctgtg

SEQ ID NO: 4679447 - DNA, 25 bp, Homo sapien
ggcttgatcccttctatccctcagg

SEQ ID NO: 4679448 - DNA, 25 bp, Homo sapien
tggttcttagcctagtttgtggttc

SEQ ID NO: 4679449 - DNA, 25 bp, Homo sapien
ctgcatcctcgcacttggcctctcc

SEQ ID NO: 4679450 - DNA, 25 bp, Homo sapien
gcctagtttgtggttcctgcttttc

SEQ ID NO: 4679451 - DNA, 25 bp, Homo sapien
tcctgtgcccaagtaagtttctttc

SEQ ID NO: 4679452 - DNA, 25 bp, Homo sapien
ctctggattaagcatcattggcttt

SEQ ID NO: 4679453 - DNA, 25 bp, Homo sapien
ctggattaagcatcattggcttttc

SEQ ID NO: 4679454 - DNA, 25 bp, Homo sapien
tctctggattaagcatcattggctt

SEQ ID NO: 4679455 - DNA, 25 bp, Homo sapien
catctctggattaagcatcattggc

SEQ ID NO: 4679456 - DNA, 25 bp, Homo sapien
ctgtattaggcgggtggccagccat

SEQ ID NO: 4679457 - DNA, 25 bp, Homo sapien
gggctgtattaggcgggtggccagc

SEQ ID NO: 4679458 - DNA, 25 bp, Homo sapien
tggggctgtattaggcgggtggcca

SEQ ID NO: 4679459 - DNA, 25 bp, Homo sapien
gactggggctgtattaggcgggtgg

SEQ ID NO: 4679460 - DNA, 25 bp, Homo sapien
cctccgtgtagtggcagccggtggc

SEQ ID NO: 4679461 - DNA, 25 bp, Homo sapien
cgtgtagtggcagccggtggcccgg

SEQ ID NO: 4679462 - DNA, 25 bp, Homo sapien
gtggcccggtgtcagagcgcgtgtg

SEQ ID NO: 4679463 - DNA, 25 bp, Homo sapien
gccggtggcccggtgtcagagcgcg

SEQ ID NO: 4679464 - DNA, 25 bp, Homo sapien
tgaggtgtggacagagatgcttcca

SEQ ID NO: 4679465 - DNA, 25 bp, Homo sapien
aggtgtggacagagatgcttccagc

SEQ ID NO: 4679466 - DNA, 25 bp, Homo sapien
gtgtggacagagatgcttccagctc

SEQ ID NO: 4679467 - DNA, 25 bp, Homo sapien
ctgaggtgtggacagagatgcttcc

SEQ ID NO: 4679468 - DNA, 25 bp, Homo sapien
gtcagagcgactcccggaactggtt

SEQ ID NO: 4679469 - DNA, 25 bp, Homo sapien
tagcaccacgactgtcctcagggtc

SEQ ID NO: 4679470 - DNA, 25 bp, Homo sapien
tgtctccgcgtgtttgaggactccc

SEQ ID NO: 4679471 - DNA, 25 bp, Homo sapien
gcgaagtgcgtctttgtggcagtaa

SEQ ID NO: 4679472 - DNA, 25 bp, Homo sapien
gaatcgatgcacaaacgaagaaatg

SEQ ID NO: 4679473 - DNA, 25 bp, Homo sapien
tggcttcggcggaatcgatgcacaa

SEQ ID NO: 4679474 - DNA, 25 bp, Homo sapien
ttcggcggaatcgatgcacaaacga

SEQ ID NO: 4679475 - DNA, 25 bp, Homo sapien
cctctcagtggcttcggcggaatcg

SEQ ID NO: 4679476 - DNA, 25 bp, Homo sapien
ggagccccgcccgcctgctcctggg

SEQ ID NO: 4679477 - DNA, 25 bp, Homo sapien
gggagccccgcccgcctgctcctgg

SEQ ID NO: 4679478 - DNA, 25 bp, Homo sapien
ccgcccgcctgctcctggggcccgc

SEQ ID NO: 4679479 - DNA, 25 bp, Homo sapien
gcctgctcctggggcccgccccttc

SEQ ID NO: 4679480 - DNA, 25 bp, Homo sapien
cagggagtggtagcctccgggcgcg

SEQ ID NO: 4679481 - DNA, 25 bp, Homo sapien
ctgcagggagtggtagcctccgggc

SEQ ID NO: 4679482 - DNA, 25 bp, Homo sapien
gcagggagtggtagcctccgggcgc

SEQ ID NO: 4679483 - DNA, 25 bp, Homo sapien
tgcagggagtggtagcctccgggcg

SEQ ID NO: 4679484 - DNA, 25 bp, Homo sapien
tccgggggaaggcgagcggcagccc

SEQ ID NO: 4679485 - DNA, 25 bp, Homo sapien
tccgctcgacaaggaccacaaaaag

SEQ ID NO: 4679486 - DNA, 25 bp, Homo sapien
aagcccgcggtgcttccgaggactc

SEQ ID NO: 4679487 - DNA, 25 bp, Homo sapien
ttcctcacactcgaggacactccag

SEQ ID NO: 4679488 - DNA, 25 bp, Homo sapien
gcttccgaggactcccagatttcca

SEQ ID NO: 4679489 - DNA, 25 bp, Homo sapien
acttgcgaaaatgcccccggctctg

SEQ ID NO: 4679490 - DNA, 25 bp, Homo sapien
agttcaggacttgcgaaaatgcccc

SEQ ID NO: 4679491 - DNA, 25 bp, Homo sapien
aaagttcaggacttgcgaaaatgcc

SEQ ID NO: 4679492 - DNA, 25 bp, Homo sapien
aggacttgcgaaaatgcccccggct

SEQ ID NO: 4679493 - DNA, 25 bp, Homo sapien
ctggttcttgcaggcgcgtcgcctc

SEQ ID NO: 4679494 - DNA, 25 bp, Homo sapien
gacattacaggtacggcttgcccag

SEQ ID NO: 4679495 - DNA, 25 bp, Homo sapien
agataccacattctaactgctgagg

SEQ ID NO: 4679496 - DNA, 25 bp, Homo sapien
cacagagacgcaaactccggcttta

SEQ ID NO: 4679497 - DNA, 25 bp, Homo sapien
gctggatactcctcatttctagaca

SEQ ID NO: 4679498 - DNA, 25 bp, Homo sapien
aaacagagtaaaactccttgctgga

SEQ ID NO: 4679499 - DNA, 25 bp, Homo sapien
cagcggagcattgcttaaaacactc

SEQ ID NO: 4679500 - DNA, 25 bp, Homo sapien
aaagacaaggaagcaaattccctgg

SEQ ID NO: 4679501 - DNA, 25 bp, Homo sapien
taaaaagctagcctccagagtctgc

SEQ ID NO: 4679502 - DNA, 25 bp, Homo sapien
ggtagccctggtcctcctagatggg

SEQ ID NO: 4679503 - DNA, 25 bp, Homo sapien
cgagggcagcctgagtatgttctca

SEQ ID NO: 4679504 - DNA, 25 bp, Homo sapien
tgtccccacaaggactggtagccct

SEQ ID NO: 4679505 - DNA, 25 bp, Homo sapien
ataacagagtatctgtgcttatgga

SEQ ID NO: 4679506 - DNA, 25 bp, Homo sapien
ggtgcgcaatgccagaagacaagtc

SEQ ID NO: 4679507 - DNA, 25 bp, Homo sapien
gagggccctgatatctggtgcgcaa

SEQ ID NO: 4679508 - DNA, 25 bp, Homo sapien
gccgtggcagtaagaagcagttcaa

SEQ ID NO: 4679509 - DNA, 25 bp, Homo sapien
tcctgcgatgacagaggtgggacaa

SEQ ID NO: 4679510 - DNA, 25 bp, Homo sapien
gcaacccaagtatcgaatgaatgaa

SEQ ID NO: 4679511 - DNA, 25 bp, Homo sapien
tcatagatggattaacctctcaaaa

SEQ ID NO: 4679512 - DNA, 25 bp, Homo sapien
gctagggatagtgaacttctccaaa

SEQ ID NO: 4679513 - DNA, 25 bp, Homo sapien
ggaactcttttgatgcctggaggac

SEQ ID NO: 4679514 - DNA, 25 bp, Homo sapien
tacttcagcagattaagcaattgcc

SEQ ID NO: 4679515 - DNA, 25 bp, Homo sapien
gaggaaattcctctgttcacaccca

SEQ ID NO: 4679516 - DNA, 25 bp, Homo sapien
taagtaatgcaccaaccagacgatg

SEQ ID NO: 4679517 - DNA, 25 bp, Homo sapien
tatccgaaagaaagttgagaccttg

SEQ ID NO: 4679518 - DNA, 25 bp, Homo sapien
catgatattagcatgctgtgttacc

SEQ ID NO: 4679519 - DNA, 25 bp, Homo sapien
ttttcatgctattcagttgcctcct

SEQ ID NO: 4679520 - DNA, 25 bp, Homo sapien
tttgccctcagtagagaaaacctca

SEQ ID NO: 4679521 - DNA, 25 bp, Homo sapien
cactagagcagagattcctatatca

SEQ ID NO: 4679522 - DNA, 25 bp, Homo sapien
tccaagtgaccaagcatagacaggg

SEQ ID NO: 4679523 - DNA, 25 bp, Homo sapien
catttgggacctcgctaaagcaacc

SEQ ID NO: 4679524 - DNA, 25 bp, Homo sapien
gagccatgagtagaggtggccctca

SEQ ID NO: 4679525 - DNA, 25 bp, Homo sapien
gaggacatgtatccatccaagtgac

SEQ ID NO: 4679526 - DNA, 25 bp, Homo sapien
tcacagatagccaagtgtttgactt

SEQ ID NO: 4679527 - DNA, 25 bp, Homo sapien
atcacagatagccaagtgtttgact

SEQ ID NO: 4679528 - DNA, 25 bp, Homo sapien
aaatcacagatagccaagtgtttga

SEQ ID NO: 4679529 - DNA, 25 bp, Homo sapien
gaaaatcacagatagccaagtgttt

SEQ ID NO: 4679530 - DNA, 25 bp, Homo sapien
gtttccctaacactcactgtctgaa

SEQ ID NO: 4679531 - DNA, 25 bp, Homo sapien
gaaagatccaagcttagtagcaggc

SEQ ID NO: 4679532 - DNA, 25 bp, Homo sapien
cagagatgctagagggcacagataa

SEQ ID NO: 4679533 - DNA, 25 bp, Homo sapien
tatggccgagtcctgtggaaagtga

SEQ ID NO: 4679534 - DNA, 25 bp, Homo sapien
cagcttgagtttgggttatggccga

SEQ ID NO: 4679535 - DNA, 25 bp, Homo sapien
tacatgtaaaccatagacctcatgc

SEQ ID NO: 4679536 - DNA, 25 bp, Homo sapien
gaactattggagtctttttgcagac

SEQ ID NO: 4679537 - DNA, 25 bp, Homo sapien
tgatccaatctaggctcccatgtct

SEQ ID NO: 4679538 - DNA, 25 bp, Homo sapien
tcttggtcccaatgatgttcttact

SEQ ID NO: 4679539 - DNA, 25 bp, Homo sapien
tacagcagcaataccaaattggtaa

SEQ ID NO: 4679540 - DNA, 25 bp, Homo sapien
atttgaagataaggcatctaaaccc

SEQ ID NO: 4679541 - DNA, 25 bp, Homo sapien
gcatctaaaccctagataaaatcct

SEQ ID NO: 4679542 - DNA, 25 bp, Homo sapien
tttatgtactagcttgatagtggaa

SEQ ID NO: 4679543 - DNA, 25 bp, Homo sapien
attttctcagtaggcaacaagtaca

SEQ ID NO: 4679544 - DNA, 25 bp, Homo sapien
tatacctctgccctggtcattggct

SEQ ID NO: 4679545 - DNA, 25 bp, Homo sapien
taggcaacaagtacagaaagacaga

SEQ ID NO: 4679546 - DNA, 25 bp, Homo sapien
gaatcatgctccatttatacctctg

SEQ ID NO: 4679547 - DNA, 25 bp, Homo sapien
acagcatccaggtggcaatcatgac

SEQ ID NO: 4679548 - DNA, 25 bp, Homo sapien
aacagcatccaggtggcaatcatga

SEQ ID NO: 4679549 - DNA, 25 bp, Homo sapien
agaacagcatccaggtggcaatcat

SEQ ID NO: 4679550 - DNA, 25 bp, Homo sapien
gaacagcatccaggtggcaatcatg

SEQ ID NO: 4679551 - DNA, 25 bp, Homo sapien
aaaatgctatataagttgaaggtac

SEQ ID NO: 4679552 - DNA, 25 bp, Homo sapien
gagaacatttctactgatgctttgc

SEQ ID NO: 4679553 - DNA, 25 bp, Homo sapien
ttccacagtgcatctaacattatta

SEQ ID NO: 4679554 - DNA, 25 bp, Homo sapien
gatgctttgcctccttgaaaaatgc

SEQ ID NO: 4679555 - DNA, 25 bp, Homo sapien
tgcaaagtgccaagtgcccgactag

SEQ ID NO: 4679556 - DNA, 25 bp, Homo sapien
tagctttacccatgccgacctatgt

SEQ ID NO: 4679557 - DNA, 25 bp, Homo sapien
gaaaagcaacgaggatcacacacat

SEQ ID NO: 4679558 - DNA, 25 bp, Homo sapien
tctttgtggacttgaaaaacctcac

SEQ ID NO: 4679559 - DNA, 25 bp, Homo sapien
atcttagccgagtcccgcagtcact

SEQ ID NO: 4679560 - DNA, 25 bp, Homo sapien
taaacagttgtcatctcataagcca

SEQ ID NO: 4679561 - DNA, 25 bp, Homo sapien
agacacaggaccagttctcctcatg

SEQ ID NO: 4679562 - DNA, 25 bp, Homo sapien
cattgatcccttgacagacacagga

SEQ ID NO: 4679563 - DNA, 25 bp, Homo sapien
tccctaacctctacttgtctttcag

SEQ ID NO: 4679564 - DNA, 25 bp, Homo sapien
aagcgtgtgactacctttgtctgcc

SEQ ID NO: 4679565 - DNA, 25 bp, Homo sapien
gcccctgaaagcgtgtgactacctt

SEQ ID NO: 4679566 - DNA, 25 bp, Homo sapien
acttgtctttcagcccctgaaagcg

SEQ ID NO: 4679567 - DNA, 25 bp, Homo sapien
gatggtttcaggctggcccacagaa

SEQ ID NO: 4679568 - DNA, 25 bp, Homo sapien
tctgccttggcctgggttatccatg

SEQ ID NO: 4679569 - DNA, 25 bp, Homo sapien
tgtttgcacctgaaagcacgtggct

SEQ ID NO: 4679570 - DNA, 25 bp, Homo sapien
tgatgtccagtgaaaaaaggcggcc

SEQ ID NO: 4679571 - DNA, 25 bp, Homo sapien
cttggcttaatctttcaaaatccag

SEQ ID NO: 4679572 - DNA, 25 bp, Homo sapien
ttttgaatgtctcatctttttttct

SEQ ID NO: 4679573 - DNA, 25 bp, Homo sapien
catctttttttcttggcttaatctt

SEQ ID NO: 4679574 - DNA, 25 bp, Homo sapien
tttcttggcttaatctttcaaaatc

SEQ ID NO: 4679575 - DNA, 25 bp, Homo sapien
gtggctgacactcaaacctgaaatg

SEQ ID NO: 4679576 - DNA, 25 bp, Homo sapien
actggtcctaaagaagatgtggctg

SEQ ID NO: 4679577 - DNA, 25 bp, Homo sapien
gttcctggaggcaaacccttgactg

SEQ ID NO: 4679578 - DNA, 25 bp, Homo sapien
cagggatcacagcataggccagaag

SEQ ID NO: 4679579 - DNA, 25 bp, Homo sapien
caagttcactctgcatgctcttttc

SEQ ID NO: 4679580 - DNA, 25 bp, Homo sapien
cacaagttcactctgcatgctcttt

SEQ ID NO: 4679581 - DNA, 25 bp, Homo sapien
gtcacaagttcactctgcatgctct

SEQ ID NO: 4679582 - DNA, 25 bp, Homo sapien
tcacaagttcactctgcatgctctt

SEQ ID NO: 4679583 - DNA, 25 bp, Homo sapien
acaagggattctgagcatggtacca

SEQ ID NO: 4679584 - DNA, 25 bp, Homo sapien
tctcatgcagcaaacggatgccact

SEQ ID NO: 4679585 - DNA, 25 bp, Homo sapien
gatgagaaataggacacggcaggca

SEQ ID NO: 4679586 - DNA, 25 bp, Homo sapien
ttgacactgacgacctgaccctggt

SEQ ID NO: 4679587 - DNA, 25 bp, Homo sapien
agggttaagtggtaattctggatca

SEQ ID NO: 4679588 - DNA, 25 bp, Homo sapien
gtcctgctccactagggttaagtgg

SEQ ID NO: 4679589 - DNA, 25 bp, Homo sapien
aagtggtaattctggatcaggacag

SEQ ID NO: 4679590 - DNA, 25 bp, Homo sapien
gaaaagagaactcgaggaaagtcca

SEQ ID NO: 4679591 - DNA, 25 bp, Homo sapien
ctgagaagtctagcaggccaataaa

SEQ ID NO: 4679592 - DNA, 25 bp, Homo sapien
ttagactcaaaagatgactctgctg

SEQ ID NO: 4679593 - DNA, 25 bp, Homo sapien
tgcctcaggcatggtatctcatctc

SEQ ID NO: 4679594 - DNA, 25 bp, Homo sapien
attccagaaccaggtgaagctactg

SEQ ID NO: 4679595 - DNA, 25 bp, Homo sapien
gcccagagcgcgcgcctcaaacctc

SEQ ID NO: 4679596 - DNA, 25 bp, Homo sapien
ctcaaacctcctcagtgagaactgc

SEQ ID NO: 4679597 - DNA, 25 bp, Homo sapien
tgagaactgcctttttccagacaga

SEQ ID NO: 4679598 - DNA, 25 bp, Homo sapien
gtgagaactgcctttttccagacag

SEQ ID NO: 4679599 - DNA, 25 bp, Homo sapien
ggagtgagtaccagttcccataaga

SEQ ID NO: 4679600 - DNA, 25 bp, Homo sapien
tcttcaacggcgcaaactgtgccgg

SEQ ID NO: 4679601 - DNA, 25 bp, Homo sapien
tccataagcatatcctgggaccctg

SEQ ID NO: 4679602 - DNA, 25 bp, Homo sapien
aaaagaattgaagaaagcgcggtgc

SEQ ID NO: 4679603 - DNA, 25 bp, Homo sapien
cgagggaacccgaagcataaggaag

SEQ ID NO: 4679604 - DNA, 25 bp, Homo sapien
catcagctttggacaaaccaggcaa

SEQ ID NO: 4679605 - DNA, 25 bp, Homo sapien
gcacctggctggtggatgatgccca

SEQ ID NO: 4679606 - DNA, 25 bp, Homo sapien
tcacgttttcagtgcgcaggacgca

SEQ ID NO: 4679607 - DNA, 25 bp, Homo sapien
caaccccagatccttacatgtgaat

SEQ ID NO: 4679608 - DNA, 25 bp, Homo sapien
tgtaaactgtaaaacggttaatgca

SEQ ID NO: 4679609 - DNA, 25 bp, Homo sapien
ggtttaaatgacaggtattatattc

SEQ ID NO: 4679610 - DNA, 25 bp, Homo sapien
tatggcagctctaatctccctaatc

SEQ ID NO: 4679611 - DNA, 25 bp, Homo sapien
ttcaatttcaagtaaacctaggcca

SEQ ID NO: 4679612 - DNA, 25 bp, Homo sapien
cctaggccaaaattagcccactcca

SEQ ID NO: 4679613 - DNA, 25 bp, Homo sapien
tcaatttcaagtaaacctaggccaa

SEQ ID NO: 4679614 - DNA, 25 bp, Homo sapien
caaaagtcagggttaaatactgcat

SEQ ID NO: 4679615 - DNA, 25 bp, Homo sapien
tggaataaagagtaaacaaaagtca

SEQ ID NO: 4679616 - DNA, 25 bp, Homo sapien
acaaaagtcagggttaaatactgca

SEQ ID NO: 4679617 - DNA, 25 bp, Homo sapien
tttttagccagatatcatcctcaga

SEQ ID NO: 4679618 - DNA, 25 bp, Homo sapien
agttgtctccctcgctttttagcca

SEQ ID NO: 4679619 - DNA, 25 bp, Homo sapien
ctccaggagggtggcactatagttg

SEQ ID NO: 4679620 - DNA, 25 bp, Homo sapien
cagatatcatcctcagaaagctggg

SEQ ID NO: 4679621 - DNA, 25 bp, Homo sapien
tcgtggtgatcagtaaggaggccat

SEQ ID NO: 4679622 - DNA, 25 bp, Homo sapien
cattgtacgttccatccacagcaga

SEQ ID NO: 4679623 - DNA, 25 bp, Homo sapien
agagtgaactctccatctcgggaag

SEQ ID NO: 4679624 - DNA, 25 bp, Homo sapien
tctcgggaagaacaccgtgagctgg

SEQ ID NO: 4679625 - DNA, 25 bp, Homo sapien
ctcctcgatggttttttcctgcggg

SEQ ID NO: 4679626 - DNA, 25 bp, Homo sapien
gactccagatgttcctcgtccagct

SEQ ID NO: 4679627 - DNA, 25 bp, Homo sapien
tttttgtgcgactccagatgttcct

SEQ ID NO: 4679628 - DNA, 25 bp, Homo sapien
gattcttcttgacggcctggctgcg

SEQ ID NO: 4679629 - DNA, 25 bp, Homo sapien
cccttctctctttgcgctccttgta

SEQ ID NO: 4679630 - DNA, 25 bp, Homo sapien
gcccttctctctttgcgctccttgt

SEQ ID NO: 4679631 - DNA, 25 bp, Homo sapien
ccttctctctttgcgctccttgtac

SEQ ID NO: 4679632 - DNA, 25 bp, Homo sapien
tgcgcgttcatgagaagaggcaggg

SEQ ID NO: 4679633 - DNA, 25 bp, Homo sapien
cttgcgcgttcatgagaagaggcag

SEQ ID NO: 4679634 - DNA, 25 bp, Homo sapien
ttgcgcgttcatgagaagaggcagg

SEQ ID NO: 4679635 - DNA, 25 bp, Homo sapien
cgcgttcatgagaagaggcaggggc

SEQ ID NO: 4679636 - DNA, 25 bp, Homo sapien
ggatgccccgctgtcactgatgttg

SEQ ID NO: 4679637 - DNA, 25 bp, Homo sapien
ttttctgagccgaaagccgcagctt

SEQ ID NO: 4679638 - DNA, 25 bp, Homo sapien
tgaaatagcttccttcgggcctggt

SEQ ID NO: 4679639 - DNA, 25 bp, Homo sapien
cacagtttagataagggcccacgtt

SEQ ID NO: 4679640 - DNA, 25 bp, Homo sapien
tgctgtagtgttggagcccagggag

SEQ ID NO: 4679641 - DNA, 25 bp, Homo sapien
ctgctgtagtgttggagcccaggga

SEQ ID NO: 4679642 - DNA, 25 bp, Homo sapien
gacttgcacggatgaattaccatcc

SEQ ID NO: 4679643 - DNA, 25 bp, Homo sapien
attaccatccccttgtagggaccag

SEQ ID NO: 4679644 - DNA, 25 bp, Homo sapien
caatacgacatcaagattggaacag

SEQ ID NO: 4679645 - DNA, 25 bp, Homo sapien
caagattggaacagacttgcacgga

SEQ ID NO: 4679646 - DNA, 25 bp, Homo sapien
aacaataataactcttactgggagc

SEQ ID NO: 4679647 - DNA, 25 bp, Homo sapien
gcagtagggattgtagctcactaca

SEQ ID NO: 4679648 - DNA, 25 bp, Homo sapien
ggtctcaagcgatcagcctctaagc

SEQ ID NO: 4679649 - DNA, 25 bp, Homo sapien
gcttgagatatgaatccagagaagt

SEQ ID NO: 4679650 - DNA, 25 bp, Homo sapien
ggttgcaaacatctgaagcgaccca

SEQ ID NO: 4679651 - DNA, 25 bp, Homo sapien
aagcgacccacaagtcaccagaaag

SEQ ID NO: 4679652 - DNA, 25 bp, Homo sapien
tttcgtttcctctcagtacaaggga

SEQ ID NO: 4679653 - DNA, 25 bp, Homo sapien
agaggacatgcctaagccagggcct

SEQ ID NO: 4679654 - DNA, 25 bp, Homo sapien
cccttgaagtcccttggccaagagg

SEQ ID NO: 4679655 - DNA, 25 bp, Homo sapien
gccccttgaagtcccttggccaaga

SEQ ID NO: 4679656 - DNA, 25 bp, Homo sapien
cataaggccccttgaagtcccttgg

SEQ ID NO: 4679657 - DNA, 25 bp, Homo sapien
ccataaggccccttgaagtcccttg

SEQ ID NO: 4679658 - DNA, 25 bp, Homo sapien
ggtgacagcactccggatgctcttc

SEQ ID NO: 4679659 - DNA, 25 bp, Homo sapien
gaggtcctctccattaggacggtga

SEQ ID NO: 4679660 - DNA, 25 bp, Homo sapien
gacagcaccactgtttgggtcttga

SEQ ID NO: 4679661 - DNA, 25 bp, Homo sapien
ttcccccaatagtggacactgcaga

SEQ ID NO: 4679662 - DNA, 25 bp, Homo sapien
gaaagaatgttgtaaagagggtgaa

SEQ ID NO: 4679663 - DNA, 25 bp, Homo sapien
cagtgacagtcacagtctggagccc

SEQ ID NO: 4679664 - DNA, 25 bp, Homo sapien
gacagtcacagtctggagcccaaac

SEQ ID NO: 4679665 - DNA, 25 bp, Homo sapien
aaatgatgggatgtatgcagaaaga

SEQ ID NO: 4679666 - DNA, 25 bp, Homo sapien
ggtttattgacacagagccccaaat

SEQ ID NO: 4679667 - DNA, 25 bp, Homo sapien
aattatgccctttgtggttgatgcg

SEQ ID NO: 4679668 - DNA, 25 bp, Homo sapien
gccccaaatgcacttctgagaagta

SEQ ID NO: 4679669 - DNA, 25 bp, Homo sapien
cctttgtggttgatgcggctaaaac

SEQ ID NO: 4679670 - DNA, 25 bp, Homo sapien
gcagcctcttcaggggctaagtcag

SEQ ID NO: 4679671 - DNA, 25 bp, Homo sapien
gcatcagattcttgggccgctgggt

SEQ ID NO: 4679672 - DNA, 25 bp, Homo sapien
ctctcgcgccttttagatttgtgtg

SEQ ID NO: 4679673 - DNA, 25 bp, Homo sapien
tatcatccattctctcgcgcctttt

SEQ ID NO: 4679674 - DNA, 25 bp, Homo sapien
ctttaagagaattaactttatgctt

SEQ ID NO: 4679675 - DNA, 25 bp, Homo sapien
tcagctttgacgtagcccaggaaaa

SEQ ID NO: 4679676 - DNA, 25 bp, Homo sapien
caggaaaaccgacgaggtcttctct

SEQ ID NO: 4679677 - DNA, 25 bp, Homo sapien
gcatgtcctggtctggaagggtaat

SEQ ID NO: 4679678 - DNA, 25 bp, Homo sapien
tatggccacaactctcaatgcatgt

SEQ ID NO: 4679679 - DNA, 25 bp, Homo sapien
tttggatttgctagagtctgtagcc

SEQ ID NO: 4679680 - DNA, 25 bp, Homo sapien
cagcaaggtcgttgggggccatttt

SEQ ID NO: 4679681 - DNA, 25 bp, Homo sapien
cccaaagccgtcttgtaacctgttg

SEQ ID NO: 4679682 - DNA, 25 bp, Homo sapien
ggatttgctagagtctgtagccaaa

SEQ ID NO: 4679683 - DNA, 25 bp, Homo sapien
gtttctgtactttgaattaacaaga

SEQ ID NO: 4679684 - DNA, 25 bp, Homo sapien
agtttctgtactttgaattaacaag

SEQ ID NO: 4679685 - DNA, 25 bp, Homo sapien
tcagtttctgtactttgaattaaca

SEQ ID NO: 4679686 - DNA, 25 bp, Homo sapien
cagtttctgtactttgaattaacaa

SEQ ID NO: 4679687 - DNA, 25 bp, Homo sapien
gaagtcaccttgcaagacagtaact

SEQ ID NO: 4679688 - DNA, 25 bp, Homo sapien
ctcggaagtcaccttgcaagacagt

SEQ ID NO: 4679689 - DNA, 25 bp, Homo sapien
tgcaagacagtaacttagaagtgta

SEQ ID NO: 4679690 - DNA, 25 bp, Homo sapien
caccttgcaagacagtaacttagaa

SEQ ID NO: 4679691 - DNA, 25 bp, Homo sapien
ttccaaccaggccaagtatacttgc

SEQ ID NO: 4679692 - DNA, 25 bp, Homo sapien
tagcccatcacttgtgtcctctggt

SEQ ID NO: 4679693 - DNA, 25 bp, Homo sapien
ttcgtgagcaggcaaggtcttcccc

SEQ ID NO: 4679694 - DNA, 25 bp, Homo sapien
gtcctctggtccaaacgtcttcaag

SEQ ID NO: 4679695 - DNA, 25 bp, Homo sapien
cagagtgggcccaactctatcttcc

SEQ ID NO: 4679696 - DNA, 25 bp, Homo sapien
gacgggcttagtcctaattctcaaa

SEQ ID NO: 4679697 - DNA, 25 bp, Homo sapien
gataatcagcaggtcagctctatat

SEQ ID NO: 4679698 - DNA, 25 bp, Homo sapien
gatgagaaccacaattagacgttaa

SEQ ID NO: 4679699 - DNA, 25 bp, Homo sapien
cctggttggcatagatccctgcttc

SEQ ID NO: 4679700 - DNA, 25 bp, Homo sapien
cgattaacccgtgtggcctcgagga

SEQ ID NO: 4679701 - DNA, 25 bp, Homo sapien
ttcctcctggttggcatagatccct

SEQ ID NO: 4679702 - DNA, 25 bp, Homo sapien
ccagcgcaaagccagtgcgctcttt

SEQ ID NO: 4679703 - DNA, 25 bp, Homo sapien
gaaatatcctgtgccatgtaggctg

SEQ ID NO: 4679704 - DNA, 25 bp, Homo sapien
gaggaattacctgtacacccaagtg

SEQ ID NO: 4679705 - DNA, 25 bp, Homo sapien
cattgtccttcatcgcccagagagg

SEQ ID NO: 4679706 - DNA, 25 bp, Homo sapien
tacaaatactgcatcagctcggtgc

SEQ ID NO: 4679707 - DNA, 25 bp, Homo sapien
tgctatgtacaaagcggtggcccaa

SEQ ID NO: 4679708 - DNA, 25 bp, Homo sapien
cattccgcgaatagtgtggcctctt

SEQ ID NO: 4679709 - DNA, 25 bp, Homo sapien
gatagacagcagtaatccggaaggc

SEQ ID NO: 4679710 - DNA, 25 bp, Homo sapien
ggacctctggctagaaatcctcagg

SEQ ID NO: 4679711 - DNA, 25 bp, Homo sapien
cacagtagcggccaagtaggacgct

SEQ ID NO: 4679712 - DNA, 25 bp, Homo sapien
tgaggaaccagaagctgtcacacag

SEQ ID NO: 4679713 - DNA, 25 bp, Homo sapien
cctttgttgcaaacatgaggaacca

SEQ ID NO: 4679714 - DNA, 25 bp, Homo sapien
gtccttaagaggcacttgcagcttc

SEQ ID NO: 4679715 - DNA, 25 bp, Homo sapien
aaatgtatcatagtcatggagagcc

SEQ ID NO: 4679716 - DNA, 25 bp, Homo sapien
gttgaaagatatcacccctgacagg

SEQ ID NO: 4679717 - DNA, 25 bp, Homo sapien
atgcattgaaaaactaacctcccgg

SEQ ID NO: 4679718 - DNA, 25 bp, Homo sapien
ttcagaactctcaccacttagaggt

SEQ ID NO: 4679719 - DNA, 25 bp, Homo sapien
gaacacaggctttggctccgactgc

SEQ ID NO: 4679720 - DNA, 25 bp, Homo sapien
aaggtaggcgccactggtctgagaa

SEQ ID NO: 4679721 - DNA, 25 bp, Homo sapien
ctgagaaaaagcagacctggcgcag

SEQ ID NO: 4679722 - DNA, 25 bp, Homo sapien
ggcgcaggaccaagactaggagttt

SEQ ID NO: 4679723 - DNA, 25 bp, Homo sapien
aaactataaatcttctccagtggca

SEQ ID NO: 4679724 - DNA, 25 bp, Homo sapien
ccagcttgtgagtagggtgccccat

SEQ ID NO: 4679725 - DNA, 25 bp, Homo sapien
aaaaagtctaacaaggtgatatcac

SEQ ID NO: 4679726 - DNA, 25 bp, Homo sapien
ttaaaaatccctgcgccccagcttg

SEQ ID NO: 4679727 - DNA, 25 bp, Homo sapien
ggagctagagtcaaattccctcgga

SEQ ID NO: 4679728 - DNA, 25 bp, Homo sapien
gacttcattagtacctgtgtgtgca

SEQ ID NO: 4679729 - DNA, 25 bp, Homo sapien
gaaaatattgcaacttgcctgtggc

SEQ ID NO: 4679730 - DNA, 25 bp, Homo sapien
tggagggagattaaccacagcggcc

SEQ ID NO: 4679731 - DNA, 25 bp, Homo sapien
tgcaatcttttgatccgaagtcaga

SEQ ID NO: 4679732 - DNA, 25 bp, Homo sapien
aactcaaacctgcaatcttttgatc

SEQ ID NO: 4679733 - DNA, 25 bp, Homo sapien
gaccgtggcagaactcaaacctgca

SEQ ID NO: 4679734 - DNA, 25 bp, Homo sapien
cgaccgtggcagaactcaaacctgc

SEQ ID NO: 4679735 - DNA, 25 bp, Homo sapien
ctttgaccattcaaaagaataccca

SEQ ID NO: 4679736 - DNA, 25 bp, Homo sapien
ttcctacaggcccaaattgcttatc

SEQ ID NO: 4679737 - DNA, 25 bp, Homo sapien
agttataaagatgtcgggagtgttc

SEQ ID NO: 4679738 - DNA, 25 bp, Homo sapien
tctagttggttatctgtcttccatg

SEQ ID NO: 4679739 - DNA, 25 bp, Homo sapien
cctttatcattggtagcttttctgt

SEQ ID NO: 4679740 - DNA, 25 bp, Homo sapien
tcttctagaagatgtattgtctttt

SEQ ID NO: 4679741 - DNA, 25 bp, Homo sapien
tattctaggtacaaatccattgact

SEQ ID NO: 4679742 - DNA, 25 bp, Homo sapien
gactttttatatctactcagtgcct

SEQ ID NO: 4679743 - DNA, 25 bp, Homo sapien
cctggacacccgggcaacattctcc

SEQ ID NO: 4679744 - DNA, 25 bp, Homo sapien
tggacacccgggcaacattctcctt

SEQ ID NO: 4679745 - DNA, 25 bp, Homo sapien
ttcctggacacccgggcaacattct

SEQ ID NO: 4679746 - DNA, 25 bp, Homo sapien
agcttcctggacacccgggcaacat

SEQ ID NO: 4679747 - DNA, 25 bp, Homo sapien
gagcaccagatgaagctgcaacgga

SEQ ID NO: 4679748 - DNA, 25 bp, Homo sapien
cggaaggttggagccttgaacgcct

SEQ ID NO: 4679749 - DNA, 25 bp, Homo sapien
gaacgccttggaaataatgtggtct

SEQ ID NO: 4679750 - DNA, 25 bp, Homo sapien
ctagaatttgaagcagagcaccaga

SEQ ID NO: 4679751 - DNA, 25 bp, Homo sapien
gagaaagtctagttgtataggccag

SEQ ID NO: 4679752 - DNA, 25 bp, Homo sapien
gatcggatcttgattctcctcgaag

SEQ ID NO: 4679753 - DNA, 25 bp, Homo sapien
tgtccactcatgaaggacttgttcg

SEQ ID NO: 4679754 - DNA, 25 bp, Homo sapien
tttgttttgccacgaggatcggatc

SEQ ID NO: 4679755 - DNA, 25 bp, Homo sapien
tgtcaaagctcagtactcgcagtct

SEQ ID NO: 4679756 - DNA, 25 bp, Homo sapien
gttaatgtgcccgtcaaaggaagta

SEQ ID NO: 4679757 - DNA, 25 bp, Homo sapien
aaatgtcctcatgcggaaatgtggg

SEQ ID NO: 4679758 - DNA, 25 bp, Homo sapien
tcattgagaatataaccggtttggc

SEQ ID NO: 4679759 - DNA, 25 bp, Homo sapien
ccatgcctggctaattttgtatttt

SEQ ID NO: 4679760 - DNA, 25 bp, Homo sapien
ccgggtttaagcaatcctctgtctc

SEQ ID NO: 4679761 - DNA, 25 bp, Homo sapien
tctcagcctcctgggtagctgggat

SEQ ID NO: 4679762 - DNA, 25 bp, Homo sapien
tacaggcatgcaccaccatgcctgg

SEQ ID NO: 4679763 - DNA, 25 bp, Homo sapien
gaggacctccagaatgtgctttgtg

SEQ ID NO: 4679764 - DNA, 25 bp, Homo sapien
tgctttgtgtcattgtgtcgagtct

SEQ ID NO: 4679765 - DNA, 25 bp, Homo sapien
tagtagttgacttctcagccacgtg

SEQ ID NO: 4679766 - DNA, 25 bp, Homo sapien
cagccacgtggtgtgggccttgcaa

SEQ ID NO: 4679767 - DNA, 25 bp, Homo sapien
tcttcaaattcgagttgagacccaa

SEQ ID NO: 4679768 - DNA, 25 bp, Homo sapien
tgttacatgtttccgcccttctggg

SEQ ID NO: 4679769 - DNA, 25 bp, Homo sapien
aatatcatttttgctggtccggcag

SEQ ID NO: 4679770 - DNA, 25 bp, Homo sapien
tgaagcaggcccatcacccttgtta

SEQ ID NO: 4679771 - DNA, 25 bp, Homo sapien
aacaagccatatgtcagaatccaag

SEQ ID NO: 4679772 - DNA, 25 bp, Homo sapien
caagccatatgtcagaatccaagag

SEQ ID NO: 4679773 - DNA, 25 bp, Homo sapien
taaaacaagccatatgtcagaatcc

SEQ ID NO: 4679774 - DNA, 25 bp, Homo sapien
aagccatatgtcagaatccaagaga

SEQ ID NO: 4679775 - DNA, 25 bp, Homo sapien
tccctcctttgcaggacgaggtggg

SEQ ID NO: 4679776 - DNA, 25 bp, Homo sapien
tgctgctggtttcccggacagtgcg

SEQ ID NO: 4679777 - DNA, 25 bp, Homo sapien
ctacgaccgaccgaccgggcacctg

SEQ ID NO: 4679778 - DNA, 25 bp, Homo sapien
agcaggcagtggatggttcttccgc

SEQ ID NO: 4679779 - DNA, 25 bp, Homo sapien
aaaggtactggtggccaattaggag

SEQ ID NO: 4679780 - DNA, 25 bp, Homo sapien
gtactggtggccaattaggagagat

SEQ ID NO: 4679781 - DNA, 25 bp, Homo sapien
gccaattaggagagatgtatttcct

SEQ ID NO: 4679782 - DNA, 25 bp, Homo sapien
tggtggccaattaggagagatgtat

SEQ ID NO: 4679783 - DNA, 25 bp, Homo sapien
tgaagacacctgagcactcttaggc

SEQ ID NO: 4679784 - DNA, 25 bp, Homo sapien
gggaaactgaaacaaacagacatgc

SEQ ID NO: 4679785 - DNA, 25 bp, Homo sapien
ggcagtagtgttctcaaggctccca

SEQ ID NO: 4679786 - DNA, 25 bp, Homo sapien
gattctcggtgtcttcagcaagggc

SEQ ID NO: 4679787 - DNA, 25 bp, Homo sapien
actatttcagaggagtaatgcttga

SEQ ID NO: 4679788 - DNA, 25 bp, Homo sapien
tctggtactatttcagaggagtaat

SEQ ID NO: 4679789 - DNA, 25 bp, Homo sapien
actgtggaccaacttctggtactat

SEQ ID NO: 4679790 - DNA, 25 bp, Homo sapien
caacttctggtactatttcagagga

SEQ ID NO: 4679791 - DNA, 25 bp, Homo sapien
tacctgcaacgtgatgcagatggct

SEQ ID NO: 4679792 - DNA, 25 bp, Homo sapien
aatacctgcaacgtgatgcagatgg

SEQ ID NO: 4679793 - DNA, 25 bp, Homo sapien
ttgcaaagcctgtcttgagtcttgt

SEQ ID NO: 4679794 - DNA, 25 bp, Homo sapien
cttgcagttgcaaagcctgtcttga

SEQ ID NO: 4679795 - DNA, 25 bp, Homo sapien
tgagcagagcatccccaaaaggaga

SEQ ID NO: 4679796 - DNA, 25 bp, Homo sapien
tatgatggccttccagatctatctg

SEQ ID NO: 4679797 - DNA, 25 bp, Homo sapien
tatctgggcaggtttagggcccact

SEQ ID NO: 4679798 - DNA, 25 bp, Homo sapien
tcccatgtgttgtgcagaaagacag

SEQ ID NO: 4679799 - DNA, 25 bp, Homo sapien
gccacttcctcttcccctagaccca

SEQ ID NO: 4679800 - DNA, 25 bp, Homo sapien
tcccctagacccactaccagcacca

SEQ ID NO: 4679801 - DNA, 25 bp, Homo sapien
tttacaggccactgttgtcactgct

SEQ ID NO: 4679802 - DNA, 25 bp, Homo sapien
atttacaggccactgttgtcactgc

SEQ ID NO: 4679803 - DNA, 25 bp, Homo sapien
tgtacatcctactagctgcgaatgg

SEQ ID NO: 4679804 - DNA, 25 bp, Homo sapien
tcttggctgtccacaaatgaactag

SEQ ID NO: 4679805 - DNA, 25 bp, Homo sapien
gaaataggatccaaagtctgccaaa

SEQ ID NO: 4679806 - DNA, 25 bp, Homo sapien
caacaaagactgtatgaggcccata

SEQ ID NO: 4679807 - DNA, 25 bp, Homo sapien
gagaatggaaatggtaggtgtcttc

SEQ ID NO: 4679808 - DNA, 25 bp, Homo sapien
agttcaagaagagctaattccacaa

SEQ ID NO: 4679809 - DNA, 25 bp, Homo sapien
tcaagaagagctaattccacaagaa

SEQ ID NO: 4679810 - DNA, 25 bp, Homo sapien
agaagttcaagaagagctaattcca

SEQ ID NO: 4679811 - DNA, 25 bp, Homo sapien
tacaagccctagcactgaaaggtag

SEQ ID NO: 4679812 - DNA, 25 bp, Homo sapien
tgaaaggtagacgtactggcccagc

SEQ ID NO: 4679813 - DNA, 25 bp, Homo sapien
ccagggacatgaccagggtttgttg

SEQ ID NO: 4679814 - DNA, 25 bp, Homo sapien
ttccatgaaaaagtctacaagccct

SEQ ID NO: 4679815 - DNA, 25 bp, Homo sapien
gcacatgctgggtcagctctatcat

SEQ ID NO: 4679816 - DNA, 25 bp, Homo sapien
tgggcacatgctgggtcagctctat

SEQ ID NO: 4679817 - DNA, 25 bp, Homo sapien
ctgggcacatgctgggtcagctcta

SEQ ID NO: 4679818 - DNA, 25 bp, Homo sapien
ggcacatgctgggtcagctctatca

SEQ ID NO: 4679819 - DNA, 25 bp, Homo sapien
aatctgtctcagcgaattctgcaaa

SEQ ID NO: 4679820 - DNA, 25 bp, Homo sapien
ctaatatgtaacaatggctgaataa

SEQ ID NO: 4679821 - DNA, 25 bp, Homo sapien
taatatgtaacaatggctgaataaa

SEQ ID NO: 4679822 - DNA, 25 bp, Homo sapien
ctgtctcagcgaattctgcaaagct

SEQ ID NO: 4679823 - DNA, 25 bp, Homo sapien
gtcagaaagatggtcgctggttccc

SEQ ID NO: 4679824 - DNA, 25 bp, Homo sapien
gaatctcctgcagtcctaaaaaatg

SEQ ID NO: 4679825 - DNA, 25 bp, Homo sapien
tgccatccgcctgacatattgattg

SEQ ID NO: 4679826 - DNA, 25 bp, Homo sapien
tctggaaggttatacgatggataca

SEQ ID NO: 4679827 - DNA, 25 bp, Homo sapien
gcacacacactggcctgcgcccacc

SEQ ID NO: 4679828 - DNA, 25 bp, Homo sapien
gcgcacggtgcgcacacacactggc

SEQ ID NO: 4679829 - DNA, 25 bp, Homo sapien
acacacactggcctgcgcccaccgt

SEQ ID NO: 4679830 - DNA, 25 bp, Homo sapien
acacactggcctgcgcccaccgtct

SEQ ID NO: 4679831 - DNA, 25 bp, Homo sapien
agtacctttaagtgagcgttcgtgt

SEQ ID NO: 4679832 - DNA, 25 bp, Homo sapien
taacaaattacgaagggctttcaga

SEQ ID NO: 4679833 - DNA, 25 bp, Homo sapien
gggtggctaaatctcaggtcatctg

SEQ ID NO: 4679834 - DNA, 25 bp, Homo sapien
tcagtttagggtctcaatgcaacca

SEQ ID NO: 4679835 - DNA, 25 bp, Homo sapien
atcagggtagcagtatggttggttc

SEQ ID NO: 4679836 - DNA, 25 bp, Homo sapien
aggcatttgtcccatcacgtgggcc

SEQ ID NO: 4679837 - DNA, 25 bp, Homo sapien
gacacagttcagtgcatagcagtga

SEQ ID NO: 4679838 - DNA, 25 bp, Homo sapien
catctctaaatatcaccatggtggg

SEQ ID NO: 4679839 - DNA, 25 bp, Homo sapien
acttgagctcaggatttcaagacca

SEQ ID NO: 4679840 - DNA, 25 bp, Homo sapien
aggtggattacttgagctcaggatt

SEQ ID NO: 4679841 - DNA, 25 bp, Homo sapien
cttgagctcaggatttcaagaccac

SEQ ID NO: 4679842 - DNA, 25 bp, Homo sapien
tggattacttgagctcaggatttca

SEQ ID NO: 4679843 - DNA, 25 bp, Homo sapien
tcacagcactgcactctagccccag

SEQ ID NO: 4679844 - DNA, 25 bp, Homo sapien
cacagcactgcactctagccccagc

SEQ ID NO: 4679845 - DNA, 25 bp, Homo sapien
gatcacagcactgcactctagcccc

SEQ ID NO: 4679846 - DNA, 25 bp, Homo sapien
atcacagcactgcactctagcccca

SEQ ID NO: 4679847 - DNA, 25 bp, Homo sapien
aaaggtactgacacaatgaatggac

SEQ ID NO: 4679848 - DNA, 25 bp, Homo sapien
gatctaaagatatatccctgagctg

SEQ ID NO: 4679849 - DNA, 25 bp, Homo sapien
gaacagaatggaggagatgcaccag

SEQ ID NO: 4679850 - DNA, 25 bp, Homo sapien
gaaatagactcttttcacgtgagga

SEQ ID NO: 4679851 - DNA, 25 bp, Homo sapien
aatgttgacagcctgacagacgcgg

SEQ ID NO: 4679852 - DNA, 25 bp, Homo sapien
tatgccaggtaccacttaaagccag

SEQ ID NO: 4679853 - DNA, 25 bp, Homo sapien
taagggcttaatctgcacgctcaca

SEQ ID NO: 4679854 - DNA, 25 bp, Homo sapien
tctggtgtcatggaatctccgagcc

SEQ ID NO: 4679855 - DNA, 25 bp, Homo sapien
ccctaggaaggaggctgaatccagg

SEQ ID NO: 4679856 - DNA, 25 bp, Homo sapien
aggctgaatccagggagccaagcag

SEQ ID NO: 4679857 - DNA, 25 bp, Homo sapien
ggaaggaggctgaatccagggagcc

SEQ ID NO: 4679858 - DNA, 25 bp, Homo sapien
ggaggctgaatccagggagccaagc

SEQ ID NO: 4679859 - DNA, 25 bp, Homo sapien
cgaatatagcgcaattcaaaagcat

SEQ ID NO: 4679860 - DNA, 25 bp, Homo sapien
gatggcggtgaatacaagtttcacg

SEQ ID NO: 4679861 - DNA, 25 bp, Homo sapien
aagaggatggcggtgaatacaagtt

SEQ ID NO: 4679862 - DNA, 25 bp, Homo sapien
gaatacaagtttcacgaatatagcg

SEQ ID NO: 4679863 - DNA, 25 bp, Homo sapien
aagaacagcagaatgtaaaacagca

SEQ ID NO: 4679864 - DNA, 25 bp, Homo sapien
ctggtgaggtgcaaggaagaacagc

SEQ ID NO: 4679865 - DNA, 25 bp, Homo sapien
tgtaaaacagcagctgaggcacagg

SEQ ID NO: 4679866 - DNA, 25 bp, Homo sapien
agctgaggcacaggaagccttctct

SEQ ID NO: 4679867 - DNA, 25 bp, Homo sapien
cacagctcctgggtttctcagattg

SEQ ID NO: 4679868 - DNA, 25 bp, Homo sapien
ctcttgtctccacttcaactaactg

SEQ ID NO: 4679869 - DNA, 25 bp, Homo sapien
tcttgtctccacttcaactaactgt

SEQ ID NO: 4679870 - DNA, 25 bp, Homo sapien
tctcttgtctccacttcaactaact

SEQ ID NO: 4679871 - DNA, 25 bp, Homo sapien
attctcttgtctccacttcaactaa

SEQ ID NO: 4679872 - DNA, 25 bp, Homo sapien
aaaaaagcacggaagtctctgtgag

SEQ ID NO: 4679873 - DNA, 25 bp, Homo sapien
tgggaaaaaagcacggaagtctctg

SEQ ID NO: 4679874 - DNA, 25 bp, Homo sapien
gaaaaaagcacggaagtctctgtga

SEQ ID NO: 4679875 - DNA, 25 bp, Homo sapien
ggaaaaaagcacggaagtctctgtg

SEQ ID NO: 4679876 - DNA, 25 bp, Homo sapien
cagcagggacctgtactgtggtatg

SEQ ID NO: 4679877 - DNA, 25 bp, Homo sapien
ctgtgttttcagcagggacctgtac

SEQ ID NO: 4679878 - DNA, 25 bp, Homo sapien
gacctgtactgtggtatgtccatgt

SEQ ID NO: 4679879 - DNA, 25 bp, Homo sapien
tgtggtatgtccatgtgccttggat

SEQ ID NO: 4679880 - DNA, 25 bp, Homo sapien
aaagtgcagtacagcgctctggtgg

SEQ ID NO: 4679881 - DNA, 25 bp, Homo sapien
aaaaagtgcagtacagcgctctggt

SEQ ID NO: 4679882 - DNA, 25 bp, Homo sapien
aaaagtgcagtacagcgctctggtg

SEQ ID NO: 4679883 - DNA, 25 bp, Homo sapien
gaaaaagtgcagtacagcgctctgg

SEQ ID NO: 4679884 - DNA, 25 bp, Homo sapien
aattaagcctctgtcttggtgcagg

SEQ ID NO: 4679885 - DNA, 25 bp, Homo sapien
taaaagctcgacaggtgatggattc

SEQ ID NO: 4679886 - DNA, 25 bp, Homo sapien
ggcaggtaaccagcattgaggatga

SEQ ID NO: 4679887 - DNA, 25 bp, Homo sapien
ttctgggatattggcacaggttgtc

SEQ ID NO: 4679888 - DNA, 25 bp, Homo sapien
gattgtctaacaaatagaagcataa

SEQ ID NO: 4679889 - DNA, 25 bp, Homo sapien
ttgtctaacaaatagaagcataaac

SEQ ID NO: 4679890 - DNA, 25 bp, Homo sapien
tatttggatttagagataactctag

SEQ ID NO: 4679891 - DNA, 25 bp, Homo sapien
gagataactctagatacatcaatca

SEQ ID NO: 4679892 - DNA, 25 bp, Homo sapien
tagttccaaccttttccatcaccat

SEQ ID NO: 4679893 - DNA, 25 bp, Homo sapien
ctagttccaaccttttccatcacca

SEQ ID NO: 4679894 - DNA, 25 bp, Homo sapien
caccagatttcagtgctgtagctgc

SEQ ID NO: 4679895 - DNA, 25 bp, Homo sapien
tctcgttctttgagggcctttggca

SEQ ID NO: 4679896 - DNA, 25 bp, Homo sapien
gataagtaatggaccacccaatcag

SEQ ID NO: 4679897 - DNA, 25 bp, Homo sapien
gacttggataagtaatggaccaccc

SEQ ID NO: 4679898 - DNA, 25 bp, Homo sapien
ggaaaatggctccacagtttacatt

SEQ ID NO: 4679899 - DNA, 25 bp, Homo sapien
caggctcacgcaggacgaagttcct

SEQ ID NO: 4679900 - DNA, 25 bp, Homo sapien
caaaagggttgtctgctaatgactg

SEQ ID NO: 4679901 - DNA, 25 bp, Homo sapien
cgaagttccttctggacaacgcaag

SEQ ID NO: 4679902 - DNA, 25 bp, Homo sapien
gcaaccagagtaagaatatgtacca

SEQ ID NO: 4679903 - DNA, 25 bp, Homo sapien
agtttctcagttccgctgaaggcaa

SEQ ID NO: 4679904 - DNA, 25 bp, Homo sapien
tcagttccgctgaaggcaaccagag

SEQ ID NO: 4679905 - DNA, 25 bp, Homo sapien
cagtggaatgttgacgagctctctc

SEQ ID NO: 4679906 - DNA, 25 bp, Homo sapien
tccactgtttcaagaggagtggtga

SEQ ID NO: 4679907 - DNA, 25 bp, Homo sapien
aaggcatccactgtttcaagaggag

SEQ ID NO: 4679908 - DNA, 25 bp, Homo sapien
ggcatccactgtttcaagaggagtg

SEQ ID NO: 4679909 - DNA, 25 bp, Homo sapien
ggctgggggtaggattccactgcac

SEQ ID NO: 4679910 - DNA, 25 bp, Homo sapien
ccggatgctgtaccgggtgtcaaag

SEQ ID NO: 4679911 - DNA, 25 bp, Homo sapien
tgtcttccacactcaggatggtgag

SEQ ID NO: 4679912 - DNA, 25 bp, Homo sapien
agggctccacaactctccacagctc

SEQ ID NO: 4679913 - DNA, 25 bp, Homo sapien
tcccacaccattgttggccgtgcag

SEQ ID NO: 4679914 - DNA, 25 bp, Homo sapien
ctttcaaatcaatagacgaatctgt

SEQ ID NO: 4679915 - DNA, 25 bp, Homo sapien
caactttcaaatcaatagacgaatc

SEQ ID NO: 4679916 - DNA, 25 bp, Homo sapien
caaatcaatagacgaatctgtttcc

SEQ ID NO: 4679917 - DNA, 25 bp, Homo sapien
aatagacgaatctgtttcccactca

SEQ ID NO: 4679918 - DNA, 25 bp, Homo sapien
tttcacatttatgggaggacgagtt

SEQ ID NO: 4679919 - DNA, 25 bp, Homo sapien
attttcacatttatgggaggacgag

SEQ ID NO: 4679920 - DNA, 25 bp, Homo sapien
tcacatttatgggaggacgagttat

SEQ ID NO: 4679921 - DNA, 25 bp, Homo sapien
catttatgggaggacgagttatttt

SEQ ID NO: 4679922 - DNA, 25 bp, Homo sapien
ctgtctccctttatccaagacactg

SEQ ID NO: 4679923 - DNA, 25 bp, Homo sapien
ggctgtctccctttatccaagacac

SEQ ID NO: 4679924 - DNA, 25 bp, Homo sapien
gctgtctccctttatccaagacact

SEQ ID NO: 4679925 - DNA, 25 bp, Homo sapien
tgtctccctttatccaagacactga

SEQ ID NO: 4679926 - DNA, 25 bp, Homo sapien
tcaagaactgcaattcgggaatttt

SEQ ID NO: 4679927 - DNA, 25 bp, Homo sapien
tccttttgtacgttatgaatcctca

SEQ ID NO: 4679928 - DNA, 25 bp, Homo sapien
gctgtcccgaggctgttttttgcca

SEQ ID NO: 4679929 - DNA, 25 bp, Homo sapien
cagcttcaccactttggaatatgct

SEQ ID NO: 4679930 - DNA, 25 bp, Homo sapien
tcaggggaagaaatgcagctcctta

SEQ ID NO: 4679931 - DNA, 25 bp, Homo sapien
caggggaagaaatgcagctccttac

SEQ ID NO: 4679932 - DNA, 25 bp, Homo sapien
taggtcaagaaggacccgactaaca

SEQ ID NO: 4679933 - DNA, 25 bp, Homo sapien
caagcaaatagaacacctagaccta

SEQ ID NO: 4679934 - DNA, 25 bp, Homo sapien
acacctagacctatttggattctga

SEQ ID NO: 4679935 - DNA, 25 bp, Homo sapien
gtgaagacctttcacaccaagttat

SEQ ID NO: 4679936 - DNA, 25 bp, Homo sapien
gctcgtctgccccaactgacgatgg

SEQ ID NO: 4679937 - DNA, 25 bp, Homo sapien
atatgctcgtctgccccaactgacg

SEQ ID NO: 4679938 - DNA, 25 bp, Homo sapien
cccaactgacgatggccctgcctca

SEQ ID NO: 4679939 - DNA, 25 bp, Homo sapien
gtctgccccaactgacgatggccct

SEQ ID NO: 4679940 - DNA, 25 bp, Homo sapien
attctcatatttggggacagctaag

SEQ ID NO: 4679941 - DNA, 25 bp, Homo sapien
gcagaagccacaaactgggtgtgaa

SEQ ID NO: 4679942 - DNA, 25 bp, Homo sapien
aaggaacgatcttagctggagggca

SEQ ID NO: 4679943 - DNA, 25 bp, Homo sapien
aagccacaaactgggtgtgaatgcc

SEQ ID NO: 4679944 - DNA, 25 bp, Homo sapien
cagggcaatgcctgaagaggtttac

SEQ ID NO: 4679945 - DNA, 25 bp, Homo sapien
cctgaagaggtttacccactgtggc

SEQ ID NO: 4679946 - DNA, 25 bp, Homo sapien
gctaaagcaaagaaacccgatcctg

SEQ ID NO: 4679947 - DNA, 25 bp, Homo sapien
gccactgtttacgtttctgtctgct

SEQ ID NO: 4679948 - DNA, 25 bp, Homo sapien
caccaacagagatctgcaactctgc

SEQ ID NO: 4679949 - DNA, 25 bp, Homo sapien
tagtatcttgttcgggttcactttc

SEQ ID NO: 4679950 - DNA, 25 bp, Homo sapien
agtatcttgttcgggttcactttct

SEQ ID NO: 4679951 - DNA, 25 bp, Homo sapien
ctttagtatcttgttcgggttcact

SEQ ID NO: 4679952 - DNA, 25 bp, Homo sapien
cagtgcagggtcacaaaggagccaa

SEQ ID NO: 4679953 - DNA, 25 bp, Homo sapien
gcatttccgttttcaatccaggtga

SEQ ID NO: 4679954 - DNA, 25 bp, Homo sapien
gacattgtgggattcaggagcccgc

SEQ ID NO: 4679955 - DNA, 25 bp, Homo sapien
ggagcccgcaggatcctggcaaaaa

SEQ ID NO: 4679956 - DNA, 25 bp, Homo sapien
gatttgcgtcaatgtggacagtcat

SEQ ID NO: 4679957 - DNA, 25 bp, Homo sapien
ccagctctgcgttcgtctttgttca

SEQ ID NO: 4679958 - DNA, 25 bp, Homo sapien
ttctgtgccaaatatctcccagctc

SEQ ID NO: 4679959 - DNA, 25 bp, Homo sapien
taactcgtagtgagtgaagagccac

SEQ ID NO: 4679960 - DNA, 25 bp, Homo sapien
gaacttctccccatgcttattggta

SEQ ID NO: 4679961 - DNA, 25 bp, Homo sapien
gtcaatcactcggtctttcacactc

SEQ ID NO: 4679962 - DNA, 25 bp, Homo sapien
tgcagtcttgagtcaatcactcggt

SEQ ID NO: 4679963 - DNA, 25 bp, Homo sapien
ggtagctatgcatgtgtagagtcct

SEQ ID NO: 4679964 - DNA, 25 bp, Homo sapien
cacttgggtaggtattgaggattta

SEQ ID NO: 4679965 - DNA, 25 bp, Homo sapien
tgaggatttagttttccaggcagca

SEQ ID NO: 4679966 - DNA, 25 bp, Homo sapien
aggtcacctccggagtatccccatg

SEQ ID NO: 4679967 - DNA, 25 bp, Homo sapien
atccatatctaggtcacctccggag

SEQ ID NO: 4679968 - DNA, 25 bp, Homo sapien
ttttgtgtatgcttctgcaatagaa

SEQ ID NO: 4679969 - DNA, 25 bp, Homo sapien
tcttctgctccaatgatacctcttt

SEQ ID NO: 4679970 - DNA, 25 bp, Homo sapien
tacagccagtgccataatatacgtg

SEQ ID NO: 4679971 - DNA, 25 bp, Homo sapien
tcttttccaaggattccctgacatc

SEQ ID NO: 4679972 - DNA, 25 bp, Homo sapien
gctgcagacttcactagagatccgg

SEQ ID NO: 4679973 - DNA, 25 bp, Homo sapien
agacaccactgcctaaatacaaatc

SEQ ID NO: 4679974 - DNA, 25 bp, Homo sapien
gagatccgggggttagcagtggtgt

SEQ ID NO: 4679975 - DNA, 25 bp, Homo sapien
accactgcctaaatacaaatcctct

SEQ ID NO: 4679976 - DNA, 25 bp, Homo sapien
gcagaactgagttagcaagcccaaa

SEQ ID NO: 4679977 - DNA, 25 bp, Homo sapien
aaatggtagcatgacaaggttgggc

SEQ ID NO: 4679978 - DNA, 25 bp, Homo sapien
caaacaggctaagccagccagggag

SEQ ID NO: 4679979 - DNA, 25 bp, Homo sapien
tgctataagtaaaacaccccacagg

SEQ ID NO: 4679980 - DNA, 25 bp, Homo sapien
gctgctgcagcagattgcaagttgc

SEQ ID NO: 4679981 - DNA, 25 bp, Homo sapien
tgctgcagcagattgcaagttgctc

SEQ ID NO: 4679982 - DNA, 25 bp, Homo sapien
tgctgctgcagcagattgcaagttg

SEQ ID NO: 4679983 - DNA, 25 bp, Homo sapien
gctgcagcagattgcaagttgctct

SEQ ID NO: 4679984 - DNA, 25 bp, Homo sapien
ggagcataaggccatgcttctttca

SEQ ID NO: 4679985 - DNA, 25 bp, Homo sapien
gggagcataaggccatgcttctttc

SEQ ID NO: 4679986 - DNA, 25 bp, Homo sapien
gagcataaggccatgcttctttcaa

SEQ ID NO: 4679987 - DNA, 25 bp, Homo sapien
ctcagttgacttctctttcagaaaa

SEQ ID NO: 4679988 - DNA, 25 bp, Homo sapien
tcttgtagaggcaataatggatatt

SEQ ID NO: 4679989 - DNA, 25 bp, Homo sapien
cagaaaagttccctttcttgtagag

SEQ ID NO: 4679990 - DNA, 25 bp, Homo sapien
gatatttgatctcggatctcctttt

SEQ ID NO: 4679991 - DNA, 25 bp, Homo sapien
taatttttgacaacatatacatctt

SEQ ID NO: 4679992 - DNA, 25 bp, Homo sapien
actttcagttcattccaggccgtgt

SEQ ID NO: 4679993 - DNA, 25 bp, Homo sapien
caagagcatcttttgccaggactgc

SEQ ID NO: 4679994 - DNA, 25 bp, Homo sapien
caggccgtgtggaccagtagctctt

SEQ ID NO: 4679995 - DNA, 25 bp, Homo sapien
tggttacacaacaaagcctcagcag

SEQ ID NO: 4679996 - DNA, 25 bp, Homo sapien
gaagcttgctgcattctggcacgga

SEQ ID NO: 4679997 - DNA, 25 bp, Homo sapien
tctgtagagtcctctgtgggtcttc

SEQ ID NO: 4679998 - DNA, 25 bp, Homo sapien
tctggcacggacagcaaatgcatct

SEQ ID NO: 4679999 - DNA, 25 bp, Homo sapien
cattcttttgcgcagaagagctcct

SEQ ID NO: 4680000 - DNA, 25 bp, Homo sapien
ctccaaagtcttgggagaactctgt

SEQ ID NO: 4680001 - DNA, 25 bp, Homo sapien
ccaaagtcttgggagaactctgtgt

SEQ ID NO: 4680002 - DNA, 25 bp, Homo sapien
aaagtcttgggagaactctgtgtta

SEQ ID NO: 4680003 - DNA, 25 bp, Homo sapien
aagtcttgggagaactctgtgttac

SEQ ID NO: 4680004 - DNA, 25 bp, Homo sapien
cagtcatggagtatgtaggtgagac

SEQ ID NO: 4680005 - DNA, 25 bp, Homo sapien
tccacacttggctttgaggacgtca

SEQ ID NO: 4680006 - DNA, 25 bp, Homo sapien
ggaaggcagatttggaatgtccaca

SEQ ID NO: 4680007 - DNA, 25 bp, Homo sapien
ctttgaggacgtcattggtgggaat

SEQ ID NO: 4680008 - DNA, 25 bp, Homo sapien
tttcttcttcggcagcaatagagag

SEQ ID NO: 4680009 - DNA, 25 bp, Homo sapien
tcggcagcaatagagagtagttatg

SEQ ID NO: 4680010 - DNA, 25 bp, Homo sapien
gagagtagttatggtaagaagcaca

SEQ ID NO: 4680011 - DNA, 25 bp, Homo sapien
tatggtaagaagcacaaatattgca

SEQ ID NO: 4680012 - DNA, 25 bp, Homo sapien
agaaggagcggcatcctctggtaca

SEQ ID NO: 4680013 - DNA, 25 bp, Homo sapien
gggttgggatgaagtctatctagta

SEQ ID NO: 4680014 - DNA, 25 bp, Homo sapien
ttccttggatactccaggctgagca

SEQ ID NO: 4680015 - DNA, 25 bp, Homo sapien
gaagtctatctagtaagagctcaga

SEQ ID NO: 4680016 - DNA, 25 bp, Homo sapien
ttcatagggaagtaagcctggtgcc

SEQ ID NO: 4680017 - DNA, 25 bp, Homo sapien
gaaagtccgcttgcatatctgccga

SEQ ID NO: 4680018 - DNA, 25 bp, Homo sapien
ttactgccaccatagtgaaaggttc

SEQ ID NO: 4680019 - DNA, 25 bp, Homo sapien
tagggttgtcaaattctgccatgag

SEQ ID NO: 4680020 - DNA, 25 bp, Homo sapien
gacagagacaaattgaagtgatgaa

SEQ ID NO: 4680021 - DNA, 25 bp, Homo sapien
ccatgaatgtcctatagggttggga

SEQ ID NO: 4680022 - DNA, 25 bp, Homo sapien
tgaaacgtctcactgatcaaggaga

SEQ ID NO: 4680023 - DNA, 25 bp, Homo sapien
tgatgaaatacatatcctcacttgt

SEQ ID NO: 4680024 - DNA, 25 bp, Homo sapien
tcttaagccggtctgaaaagcgcaa

SEQ ID NO: 4680025 - DNA, 25 bp, Homo sapien
cttaagccggtctgaaaagcgcaat

SEQ ID NO: 4680026 - DNA, 25 bp, Homo sapien
acacacactggcctgcgcccactgt

SEQ ID NO: 4680027 - DNA, 25 bp, Homo sapien
cgcgcacggtgcgcacacacactgg

SEQ ID NO: 4680028 - DNA, 25 bp, Homo sapien
agaccatccctgttagtctcagttt

SEQ ID NO: 4680029 - DNA, 25 bp, Homo sapien
ctgcggaggaactcattgaggtcac

SEQ ID NO: 4680030 - DNA, 25 bp, Homo sapien
gaggtcaccataggccatgtattca

SEQ ID NO: 4680031 - DNA, 25 bp, Homo sapien
ggcacattggcttcccgacagcaca

SEQ ID NO: 4680032 - DNA, 25 bp, Homo sapien
catgtattcaaagagcaggcacatt

SEQ ID NO: 4680033 - DNA, 25 bp, Homo sapien
catagacgcatgagattgtacagct

SEQ ID NO: 4680034 - DNA, 25 bp, Homo sapien
cctggtggctaaatctcggtgaaca

SEQ ID NO: 4680035 - DNA, 25 bp, Homo sapien
tctgagaggtaagccatgccagctg

SEQ ID NO: 4680036 - DNA, 25 bp, Homo sapien
gatgttgccatctcgcacgtagtaa

SEQ ID NO: 4680037 - DNA, 25 bp, Homo sapien
cactggctttcaatgggtccgtcta

SEQ ID NO: 4680038 - DNA, 25 bp, Homo sapien
tttcctatgtgggtcttgttgggcc

SEQ ID NO: 4680039 - DNA, 25 bp, Homo sapien
ggtccgtctaccacatgggttttgc

SEQ ID NO: 4680040 - DNA, 25 bp, Homo sapien
tactctgtgaccagctactttggaa

SEQ ID NO: 4680041 - DNA, 25 bp, Homo sapien
gcttctatcatgtacagaggctcta

SEQ ID NO: 4680042 - DNA, 25 bp, Homo sapien
tttatcagcggagaaagcccgaagc

SEQ ID NO: 4680043 - DNA, 25 bp, Homo sapien
cagtatagtggttgagaattcggcc

SEQ ID NO: 4680044 - DNA, 25 bp, Homo sapien
ttaaaggcctcagaatacacatggt

SEQ ID NO: 4680045 - DNA, 25 bp, Homo sapien
tgaaataaatgggctgtcttatctg

SEQ ID NO: 4680046 - DNA, 25 bp, Homo sapien
actgaaataaatgggctgtcttatc

SEQ ID NO: 4680047 - DNA, 25 bp, Homo sapien
agactgaaataaatgggctgtctta

SEQ ID NO: 4680048 - DNA, 25 bp, Homo sapien
gaaataaatgggctgtcttatctga

SEQ ID NO: 4680049 - DNA, 25 bp, Homo sapien
gttagaattgcactggtaatcacca

SEQ ID NO: 4680050 - DNA, 25 bp, Homo sapien
ggttagcacttaggctgggactaga

SEQ ID NO: 4680051 - DNA, 25 bp, Homo sapien
gaacatatagttgacagcgtagaaa

SEQ ID NO: 4680052 - DNA, 25 bp, Homo sapien
cagaagaactaacactataaatggg

SEQ ID NO: 4680053 - DNA, 25 bp, Homo sapien
gattacattgcttagtgccaagcct

SEQ ID NO: 4680054 - DNA, 25 bp, Homo sapien
aagcctggaattgtctttgctgagc

SEQ ID NO: 4680055 - DNA, 25 bp, Homo sapien
tggtgccagttgatagattacattg

SEQ ID NO: 4680056 - DNA, 25 bp, Homo sapien
agcctggaattgtctttgctgagca

SEQ ID NO: 4680057 - DNA, 25 bp, Homo sapien
tatcctcaattgtccaaggacccca

SEQ ID NO: 4680058 - DNA, 25 bp, Homo sapien
tgtgcttcaacatcccagaggagac

SEQ ID NO: 4680059 - DNA, 25 bp, Homo sapien
tccttctgtatcctcaattgtccaa

SEQ ID NO: 4680060 - DNA, 25 bp, Homo sapien
caggcaaaaaagactagctgtgctt

SEQ ID NO: 4680061 - DNA, 25 bp, Homo sapien
cactgcatgtaatcttgggtcctct

SEQ ID NO: 4680062 - DNA, 25 bp, Homo sapien
gggtcctctttgttgctctcataag

SEQ ID NO: 4680063 - DNA, 25 bp, Homo sapien
ctctcataaggtgaggtaatcattt

SEQ ID NO: 4680064 - DNA, 25 bp, Homo sapien
tagtttgtgaccagtagcctctgcc

SEQ ID NO: 4680065 - DNA, 25 bp, Homo sapien
gaggccacaggtattgagacaaaca

SEQ ID NO: 4680066 - DNA, 25 bp, Homo sapien
tgaagaatggcttctactgcctcgt

SEQ ID NO: 4680067 - DNA, 25 bp, Homo sapien
tgttttcaatctgtagtctactgag

SEQ ID NO: 4680068 - DNA, 25 bp, Homo sapien
tgctctgttatctgtcagcctgacc

SEQ ID NO: 4680069 - DNA, 25 bp, Homo sapien
tctgagggtcagctgattagagaag

SEQ ID NO: 4680070 - DNA, 25 bp, Homo sapien
ttctcatgatcattctgagacaggc

SEQ ID NO: 4680071 - DNA, 25 bp, Homo sapien
gtcagctgattagagaagttctcca

SEQ ID NO: 4680072 - DNA, 25 bp, Homo sapien
cagtaaggatttatctgacacgtct

SEQ ID NO: 4680073 - DNA, 25 bp, Homo sapien
ccaatgaggagatatgcacaggtat

SEQ ID NO: 4680074 - DNA, 25 bp, Homo sapien
tatttgtaccaatacagagtgttcc

SEQ ID NO: 4680075 - DNA, 25 bp, Homo sapien
tcagctttacagtacaggcaatgct

SEQ ID NO: 4680076 - DNA, 25 bp, Homo sapien
gcacaggtatccagaaaaaaactcc

SEQ ID NO: 4680077 - DNA, 25 bp, Homo sapien
gctgatccctaacccgagtccagaa

SEQ ID NO: 4680078 - DNA, 25 bp, Homo sapien
ctcgctgctgatccctaacccgagt

SEQ ID NO: 4680079 - DNA, 25 bp, Homo sapien
tccaagcctcagtgcatgaacctct

SEQ ID NO: 4680080 - DNA, 25 bp, Homo sapien
tgcctctttttgaatggactctcca

SEQ ID NO: 4680081 - DNA, 25 bp, Homo sapien
gccctctgaggaacagttctctctg

SEQ ID NO: 4680082 - DNA, 25 bp, Homo sapien
cagctcctggacacagaaaaaggca

SEQ ID NO: 4680083 - DNA, 25 bp, Homo sapien
ctgaggaacagttctctctgcccca

SEQ ID NO: 4680084 - DNA, 25 bp, Homo sapien
ccactgccctctgaggaacagttct

SEQ ID NO: 4680085 - DNA, 25 bp, Homo sapien
gaagctgttaaaccagatggaacaa

SEQ ID NO: 4680086 - DNA, 25 bp, Homo sapien
cagaagctgttaaaccagatggaac

SEQ ID NO: 4680087 - DNA, 25 bp, Homo sapien
cataatagccatgagcttcccttgt

SEQ ID NO: 4680088 - DNA, 25 bp, Homo sapien
gagcctccttgttccaacaccataa

SEQ ID NO: 4680089 - DNA, 25 bp, Homo sapien
agcagtttggcaggttctacactca

SEQ ID NO: 4680090 - DNA, 25 bp, Homo sapien
tgtggactctgtaaagaggtctgta

SEQ ID NO: 4680091 - DNA, 25 bp, Homo sapien
gggctgggtgtggactctgtaaaga

SEQ ID NO: 4680092 - DNA, 25 bp, Homo sapien
gaggtctgtatagagcagtttggca

SEQ ID NO: 4680093 - DNA, 25 bp, Homo sapien
agattactctataggacatagaggc

SEQ ID NO: 4680094 - DNA, 25 bp, Homo sapien
ttagctctgagccgcactggaagat

SEQ ID NO: 4680095 - DNA, 25 bp, Homo sapien
tctgagccgcactggaagatatcca

SEQ ID NO: 4680096 - DNA, 25 bp, Homo sapien
gaagatatccagattactctatagg

SEQ ID NO: 4680097 - DNA, 25 bp, Homo sapien
tcttgttcgagagtcttccagcttg

SEQ ID NO: 4680098 - DNA, 25 bp, Homo sapien
tctctgtaacaagggctgcttaacc

SEQ ID NO: 4680099 - DNA, 25 bp, Homo sapien
tcaatcagcgtttggtaatgtgtgg

SEQ ID NO: 4680100 - DNA, 25 bp, Homo sapien
gcttgcattgcgtgggtgtttttcc

SEQ ID NO: 4680101 - DNA, 25 bp, Homo sapien
gaacaccccccagtcagtgctgttg

SEQ ID NO: 4680102 - DNA, 25 bp, Homo sapien
tgctgttgtctgataagtctccaac

SEQ ID NO: 4680103 - DNA, 25 bp, Homo sapien
gtcagtgctgttgtctgataagtct

SEQ ID NO: 4680104 - DNA, 25 bp, Homo sapien
taagtctccaacagaccctcctgaa

SEQ ID NO: 4680105 - DNA, 25 bp, Homo sapien
tcctaatcgcctcttgtcaacttca

SEQ ID NO: 4680106 - DNA, 25 bp, Homo sapien
caaatactctatctttaggccacga

SEQ ID NO: 4680107 - DNA, 25 bp, Homo sapien
tttgctactcttgtcgtagtgggaa

SEQ ID NO: 4680108 - DNA, 25 bp, Homo sapien
agtgggaacgtgagtcaacaaatac

SEQ ID NO: 4680109 - DNA, 25 bp, Homo sapien
cgtggaggaagagttaaagcctcac

SEQ ID NO: 4680110 - DNA, 25 bp, Homo sapien
acgtggaggaagagttaaagcctca

SEQ ID NO: 4680111 - DNA, 25 bp, Homo sapien
tgcgtcacgactttgcatgtcaccc

SEQ ID NO: 4680112 - DNA, 25 bp, Homo sapien
aatgcgtcacgactttgcatgtcac

SEQ ID NO: 4680113 - DNA, 25 bp, Homo sapien
aatcttatctatgctgttccaatgt

SEQ ID NO: 4680114 - DNA, 25 bp, Homo sapien
taatcttatctatgctgttccaatg

SEQ ID NO: 4680115 - DNA, 25 bp, Homo sapien
gacatctgaatcataagggataaca

SEQ ID NO: 4680116 - DNA, 25 bp, Homo sapien
tctgaatcataagggataacacggg

SEQ ID NO: 4680117 - DNA, 25 bp, Homo sapien
cataagggataacacgggatggatg

SEQ ID NO: 4680118 - DNA, 25 bp, Homo sapien
gaaagacatctgaatcataagggat

SEQ ID NO: 4680119 - DNA, 25 bp, Homo sapien
tagtcacctcgatgatggagagggt

SEQ ID NO: 4680120 - DNA, 25 bp, Homo sapien
gtgaagtacttctagtcacctcgat

SEQ ID NO: 4680121 - DNA, 25 bp, Homo sapien
gtacttctagtcacctcgatgatgg

SEQ ID NO: 4680122 - DNA, 25 bp, Homo sapien
ttctagtcacctcgatgatggagag

SEQ ID NO: 4680123 - DNA, 25 bp, Homo sapien
tgttccttcacttccccttccttca

SEQ ID NO: 4680124 - DNA, 25 bp, Homo sapien
gtggtgtcatgtgatggttctccag

SEQ ID NO: 4680125 - DNA, 25 bp, Homo sapien
gcattttggatatggtgacagctgc

SEQ ID NO: 4680126 - DNA, 25 bp, Homo sapien
gctttagtttaagtatctggaacat

SEQ ID NO: 4680127 - DNA, 25 bp, Homo sapien
atttcctggtttattggaggcagat

SEQ ID NO: 4680128 - DNA, 25 bp, Homo sapien
cgaatatccatgagagcctcgattg

SEQ ID NO: 4680129 - DNA, 25 bp, Homo sapien
tccatgagagcctcgattgtttggc

SEQ ID NO: 4680130 - DNA, 25 bp, Homo sapien
cagccattaggctgcttggcaccat

SEQ ID NO: 4680131 - DNA, 25 bp, Homo sapien
gattgtttggccagccattaggctg

SEQ ID NO: 4680132 - DNA, 25 bp, Homo sapien
tactctgaaggggaactaaagctac

SEQ ID NO: 4680133 - DNA, 25 bp, Homo sapien
ggtgaccggctacacattctgttac

SEQ ID NO: 4680134 - DNA, 25 bp, Homo sapien
gaactaaagctaccccatgtctcct

SEQ ID NO: 4680135 - DNA, 25 bp, Homo sapien
aggtcccagtggcatccctgtaaag

SEQ ID NO: 4680136 - DNA, 25 bp, Homo sapien
ttagttgtacacgtccctgcactca

SEQ ID NO: 4680137 - DNA, 25 bp, Homo sapien
agttgtacacgtccctgcactcaga

SEQ ID NO: 4680138 - DNA, 25 bp, Homo sapien
aattagttgtacacgtccctgcact

SEQ ID NO: 4680139 - DNA, 25 bp, Homo sapien
tcaattagttgtacacgtccctgca

SEQ ID NO: 4680140 - DNA, 25 bp, Homo sapien
gaagagggagacactgtttttctag

SEQ ID NO: 4680141 - DNA, 25 bp, Homo sapien
aagaagagggagacactgtttttct

SEQ ID NO: 4680142 - DNA, 25 bp, Homo sapien
aagagggagacactgtttttctagt

SEQ ID NO: 4680143 - DNA, 25 bp, Homo sapien
agagggagacactgtttttctagtt

SEQ ID NO: 4680144 - DNA, 25 bp, Homo sapien
gaattccttctgagtcgtttccact

SEQ ID NO: 4680145 - DNA, 25 bp, Homo sapien
ggcttgaagtctccctacttgacat

SEQ ID NO: 4680146 - DNA, 25 bp, Homo sapien
cagagtggccgtcaagatgttcttc

SEQ ID NO: 4680147 - DNA, 25 bp, Homo sapien
tgttcttccttatttgaccatggca

SEQ ID NO: 4680148 - DNA, 25 bp, Homo sapien
gattccagtaaggcaagagtcttct

SEQ ID NO: 4680149 - DNA, 25 bp, Homo sapien
tgattccagtaaggcaagagtcttc

SEQ ID NO: 4680150 - DNA, 25 bp, Homo sapien
ctgtgattccagtaaggcaagagtc

SEQ ID NO: 4680151 - DNA, 25 bp, Homo sapien
tgtgattccagtaaggcaagagtct

SEQ ID NO: 4680152 - DNA, 25 bp, Homo sapien
ttttgggaatagtggcagcctctga

SEQ ID NO: 4680153 - DNA, 25 bp, Homo sapien
ttaggtcatagagatagatagcttc

SEQ ID NO: 4680154 - DNA, 25 bp, Homo sapien
taagcccacggggaaggagtcagct

SEQ ID NO: 4680155 - DNA, 25 bp, Homo sapien
tcagctatacactgggacattaggt

SEQ ID NO: 4680156 - DNA, 25 bp, Homo sapien
tgaggtcaccatttcaaagtccact

SEQ ID NO: 4680157 - DNA, 25 bp, Homo sapien
gaggtcaccatttcaaagtccactg

SEQ ID NO: 4680158 - DNA, 25 bp, Homo sapien
ctgaggtcaccatttcaaagtccac

SEQ ID NO: 4680159 - DNA, 25 bp, Homo sapien
cctaccggctttctgtttgcattaa

SEQ ID NO: 4680160 - DNA, 25 bp, Homo sapien
cacttgatgtctagggattcttacc

SEQ ID NO: 4680161 - DNA, 25 bp, Homo sapien
taagagtatttggacagatagcaca

SEQ ID NO: 4680162 - DNA, 25 bp, Homo sapien
cacagaagtcgtggcttttagacct

SEQ ID NO: 4680163 - DNA, 25 bp, Homo sapien
tttctgtggtagtcatcatggccac

SEQ ID NO: 4680164 - DNA, 25 bp, Homo sapien
caaggtcattgtcacttggcatggc

SEQ ID NO: 4680165 - DNA, 25 bp, Homo sapien
cagtaattagcaaggtcattgtcac

SEQ ID NO: 4680166 - DNA, 25 bp, Homo sapien
acttggcatggctgcccttgccagg

SEQ ID NO: 4680167 - DNA, 25 bp, Homo sapien
aaagtttagcatggccatgtctctg

SEQ ID NO: 4680168 - DNA, 25 bp, Homo sapien
aatgaacccatagcctccttcatcc

SEQ ID NO: 4680169 - DNA, 25 bp, Homo sapien
tctgcatgtgaagcaaatgaaccca

SEQ ID NO: 4680170 - DNA, 25 bp, Homo sapien
agtggtagggataagtaacccagat

SEQ ID NO: 4680171 - DNA, 25 bp, Homo sapien
ttgcctcaagagagctagaatacat

SEQ ID NO: 4680172 - DNA, 25 bp, Homo sapien
tattcagctctcaaacagcaatgaa

SEQ ID NO: 4680173 - DNA, 25 bp, Homo sapien
tgtgtgattaactttggcaccccat

SEQ ID NO: 4680174 - DNA, 25 bp, Homo sapien
gttcccacattgagccatacttctg

SEQ ID NO: 4680175 - DNA, 25 bp, Homo sapien
gcccagagggctgactatggtattt

SEQ ID NO: 4680176 - DNA, 25 bp, Homo sapien
aggctgggcattgtgagaattgacc

SEQ ID NO: 4680177 - DNA, 25 bp, Homo sapien
tgtcaaagggcagattggcagaaag

SEQ ID NO: 4680178 - DNA, 25 bp, Homo sapien
caggcagtttggagtttaatcatga

SEQ ID NO: 4680179 - DNA, 25 bp, Homo sapien
attatatggaaaccagccaggactc

SEQ ID NO: 4680180 - DNA, 25 bp, Homo sapien
ttcttaagctgattattatatggaa

SEQ ID NO: 4680181 - DNA, 25 bp, Homo sapien
tatatggaaaccagccaggactcca

SEQ ID NO: 4680182 - DNA, 25 bp, Homo sapien
tcttcttaagctgattattatatgg

SEQ ID NO: 4680183 - DNA, 25 bp, Homo sapien
ctatgtagttagtggaaataatgcc

SEQ ID NO: 4680184 - DNA, 25 bp, Homo sapien
actatgtagttagtggaaataatgc

SEQ ID NO: 4680185 - DNA, 25 bp, Homo sapien
tgaaattgacggtttgtggcaggaa

SEQ ID NO: 4680186 - DNA, 25 bp, Homo sapien
ggaggtagaagggtactggagacta

SEQ ID NO: 4680187 - DNA, 25 bp, Homo sapien
gggaccaatctcgaagcttgtggag

SEQ ID NO: 4680188 - DNA, 25 bp, Homo sapien
gaggagtgcctgaaattgacggttt

SEQ ID NO: 4680189 - DNA, 25 bp, Homo sapien
ctggccatgggtgggatttccagct

SEQ ID NO: 4680190 - DNA, 25 bp, Homo sapien
ttccagctgttggttgaaggaaatt

SEQ ID NO: 4680191 - DNA, 25 bp, Homo sapien
tgttggttgaaggaaattttgttca

SEQ ID NO: 4680192 - DNA, 25 bp, Homo sapien
gtgggatttccagctgttggttgaa

SEQ ID NO: 4680193 - DNA, 25 bp, Homo sapien
cgcttcccactgacgactcggttgt

SEQ ID NO: 4680194 - DNA, 25 bp, Homo sapien
ctgaggacttttaactaagtttctg

SEQ ID NO: 4680195 - DNA, 25 bp, Homo sapien
aaaacctcgtcccgctggacttgca

SEQ ID NO: 4680196 - DNA, 25 bp, Homo sapien
taagtttctgtccagccgcctaaca

SEQ ID NO: 4680197 - DNA, 25 bp, Homo sapien
gggcgcgcgtgcgagtgccagtgag

SEQ ID NO: 4680198 - DNA, 25 bp, Homo sapien
cggcgcgggtgggtggccgtgcgtt

SEQ ID NO: 4680199 - DNA, 25 bp, Homo sapien
tgcgttcttgcgagccggcctgcag

SEQ ID NO: 4680200 - DNA, 25 bp, Homo sapien
gagtgccagtgagagtgtgggtgcg

SEQ ID NO: 4680201 - DNA, 25 bp, Homo sapien
gggagaaactttgcgccttctggaa

SEQ ID NO: 4680202 - DNA, 25 bp, Homo sapien
gagcgacaacgtgaaaatgccccgt

SEQ ID NO: 4680203 - DNA, 25 bp, Homo sapien
gaaagtgagccacgaaagagaggcc

SEQ ID NO: 4680204 - DNA, 25 bp, Homo sapien
tccagagcttttcgagtgggaagag

SEQ ID NO: 4680205 - DNA, 25 bp, Homo sapien
gagaactaggggagcagacacactt

SEQ ID NO: 4680206 - DNA, 25 bp, Homo sapien
ttataatcgtggatatggagaacta

SEQ ID NO: 4680207 - DNA, 25 bp, Homo sapien
tcgtttacagatccagtgaagtgaa

SEQ ID NO: 4680208 - DNA, 25 bp, Homo sapien
gacacacttgctttcgtttacagat

SEQ ID NO: 4680209 - DNA, 25 bp, Homo sapien
cattgcagcctagtccttgcaggag

SEQ ID NO: 4680210 - DNA, 25 bp, Homo sapien
gttacccagagtattcatgcagatg

SEQ ID NO: 4680211 - DNA, 25 bp, Homo sapien
gaaaggatctgctagccttgaccta

SEQ ID NO: 4680212 - DNA, 25 bp, Homo sapien
ggctgctgcatgcaaacccaaattc

SEQ ID NO: 4680213 - DNA, 25 bp, Homo sapien
tcacatgaccataactggttgcaaa

SEQ ID NO: 4680214 - DNA, 25 bp, Homo sapien
aatcacatgaccataactggttgca

SEQ ID NO: 4680215 - DNA, 25 bp, Homo sapien
ggaagtggaggctaaaactgaatat

SEQ ID NO: 4680216 - DNA, 25 bp, Homo sapien
agctaaaattccactactagggaag

SEQ ID NO: 4680217 - DNA, 25 bp, Homo sapien
tctagtagtgagtagtccaggttgg

SEQ ID NO: 4680218 - DNA, 25 bp, Homo sapien
tttaactggctgaaattagatcaag

SEQ ID NO: 4680219 - DNA, 25 bp, Homo sapien
taatataccgatttatttctctgtc

SEQ ID NO: 4680220 - DNA, 25 bp, Homo sapien
tcagttagtcatttgaggacattgt

SEQ ID NO: 4680221 - DNA, 25 bp, Homo sapien
ggatatgacatgcaagtttcctgac

SEQ ID NO: 4680222 - DNA, 25 bp, Homo sapien
ccttgcctgtctaaatcctctgggt

SEQ ID NO: 4680223 - DNA, 25 bp, Homo sapien
catgatttttatgcctcctgtagga

SEQ ID NO: 4680224 - DNA, 25 bp, Homo sapien
tttcttgtgataaaggtctcagcac

SEQ ID NO: 4680225 - DNA, 25 bp, Homo sapien
gatcagagttagatgaggaacaata

SEQ ID NO: 4680226 - DNA, 25 bp, Homo sapien
tcataaaggaaacatgggggcaagg

SEQ ID NO: 4680227 - DNA, 25 bp, Homo sapien
gtcaggatcagagttagatgaggaa

SEQ ID NO: 4680228 - DNA, 25 bp, Homo sapien
atgaggaacaatagggcacctgtcc

SEQ ID NO: 4680229 - DNA, 25 bp, Homo sapien
cagatgcaagcctgtgagccagcac

SEQ ID NO: 4680230 - DNA, 25 bp, Homo sapien
gctaggccacgtgctggcctcacag

SEQ ID NO: 4680231 - DNA, 25 bp, Homo sapien
gaacgttgctgttcgctaggccacg

SEQ ID NO: 4680232 - DNA, 25 bp, Homo sapien
tgtgagccagcacggatttcccagg

SEQ ID NO: 4680233 - DNA, 25 bp, Homo sapien
cagttgctcagtattagggcactgc

SEQ ID NO: 4680234 - DNA, 25 bp, Homo sapien
gcagttgctcagtattagggcactg

SEQ ID NO: 4680235 - DNA, 25 bp, Homo sapien
agttgctcagtattagggcactgcc

SEQ ID NO: 4680236 - DNA, 25 bp, Homo sapien
gttgctcagtattagggcactgccc

SEQ ID NO: 4680237 - DNA, 25 bp, Homo sapien
ccatttgctacagaaggcttaactg

SEQ ID NO: 4680238 - DNA, 25 bp, Homo sapien
tccatttgctacagaaggcttaact

SEQ ID NO: 4680239 - DNA, 25 bp, Homo sapien
catccatttgctacagaaggcttaa

SEQ ID NO: 4680240 - DNA, 25 bp, Homo sapien
tcatccatttgctacagaaggctta

SEQ ID NO: 4680241 - DNA, 25 bp, Homo sapien
caattaagttctccttgggaccatc

SEQ ID NO: 4680242 - DNA, 25 bp, Homo sapien
tcaattaagttctccttgggaccat

SEQ ID NO: 4680243 - DNA, 25 bp, Homo sapien
ctcaattaagttctccttgggacca

SEQ ID NO: 4680244 - DNA, 25 bp, Homo sapien
tttccatttgtctacacccagaagc

SEQ ID NO: 4680245 - DNA, 25 bp, Homo sapien
gaaaaccgcttggtgtgctgctgtc

SEQ ID NO: 4680246 - DNA, 25 bp, Homo sapien
cttgcagttttgcatgcagttccca

SEQ ID NO: 4680247 - DNA, 25 bp, Homo sapien
ttaatgcattgttggctgccatttc

SEQ ID NO: 4680248 - DNA, 25 bp, Homo sapien
ccaagaggaagtctcatactcccca

SEQ ID NO: 4680249 - DNA, 25 bp, Homo sapien
tcatactccccagtttccaaatcgt

SEQ ID NO: 4680250 - DNA, 25 bp, Homo sapien
gaggaagtctcatactccccagttt

SEQ ID NO: 4680251 - DNA, 25 bp, Homo sapien
gaagtctcatactccccagtttcca

SEQ ID NO: 4680252 - DNA, 25 bp, Homo sapien
aggtccctgccagaaactggacaga

SEQ ID NO: 4680253 - DNA, 25 bp, Homo sapien
tacagccgaacttgtgtaattccat

SEQ ID NO: 4680254 - DNA, 25 bp, Homo sapien
tagagggtggtttcatacagccgaa

SEQ ID NO: 4680255 - DNA, 25 bp, Homo sapien
tcctggagtttaacgaaggcattag

SEQ ID NO: 4680256 - DNA, 25 bp, Homo sapien
gcacctggtatctaccatgacaaca

SEQ ID NO: 4680257 - DNA, 25 bp, Homo sapien
atcagtgcacctggtatctaccatg

SEQ ID NO: 4680258 - DNA, 25 bp, Homo sapien
gattttccaaatccgcagaccctca

SEQ ID NO: 4680259 - DNA, 25 bp, Homo sapien
gatgacaatgctaaaagattttcca

SEQ ID NO: 4680260 - DNA, 25 bp, Homo sapien
ggctgatttggagatctagtttcaa

SEQ ID NO: 4680261 - DNA, 25 bp, Homo sapien
caaatgcttctgcaagacactgagc

SEQ ID NO: 4680262 - DNA, 25 bp, Homo sapien
tccttcttgtagactttggctctct

SEQ ID NO: 4680263 - DNA, 25 bp, Homo sapien
caaaagtctatgagaattggtggca

SEQ ID NO: 4680264 - DNA, 25 bp, Homo sapien
cacattctgctggaatgaggtatgc

SEQ ID NO: 4680265 - DNA, 25 bp, Homo sapien
tgaagagcatgtgcaacatcacagc

SEQ ID NO: 4680266 - DNA, 25 bp, Homo sapien
tatgttcttatcaaggctcctccta

SEQ ID NO: 4680267 - DNA, 25 bp, Homo sapien
cagcctgcattgtatgttcttatca

SEQ ID NO: 4680268 - DNA, 25 bp, Homo sapien
caacaggggcatggggggagtagga

SEQ ID NO: 4680269 - DNA, 25 bp, Homo sapien
ggagtaggatttttcctaacagatg

SEQ ID NO: 4680270 - DNA, 25 bp, Homo sapien
atgtgtagacttttcacatcttgct

SEQ ID NO: 4680271 - DNA, 25 bp, Homo sapien
ttttcctaacagatgtgtagacttt

SEQ ID NO: 4680272 - DNA, 25 bp, Homo sapien
tttggagggtatctgatgtttttag

SEQ ID NO: 4680273 - DNA, 25 bp, Homo sapien
ctttggagggtatctgatgttttta

SEQ ID NO: 4680274 - DNA, 25 bp, Homo sapien
tactgcattggagccttacacagaa

SEQ ID NO: 4680275 - DNA, 25 bp, Homo sapien
ctcttgttgacgagatacacctggg

SEQ ID NO: 4680276 - DNA, 25 bp, Homo sapien
gacttggatcatgcaattcattgtt

SEQ ID NO: 4680277 - DNA, 25 bp, Homo sapien
tgtaatgtggttttcttatgccgac

SEQ ID NO: 4680278 - DNA, 25 bp, Homo sapien
gaataatgcaccccatttctgggat

SEQ ID NO: 4680279 - DNA, 25 bp, Homo sapien
gaaagaataatgcaccccatttctg

SEQ ID NO: 4680280 - DNA, 25 bp, Homo sapien
aagaataatgcaccccatttctggg

SEQ ID NO: 4680281 - DNA, 25 bp, Homo sapien
gagaaagaataatgcaccccatttc

SEQ ID NO: 4680282 - DNA, 25 bp, Homo sapien
aggataacagctgaattggttgaat

SEQ ID NO: 4680283 - DNA, 25 bp, Homo sapien
acagtgaagaaggacgaagtttgga

SEQ ID NO: 4680284 - DNA, 25 bp, Homo sapien
cctggtggaatgttgatttgttggc

SEQ ID NO: 4680285 - DNA, 25 bp, Homo sapien
tatccagcacaaaattcctggtgga

SEQ ID NO: 4680286 - DNA, 25 bp, Homo sapien
gtgccaatattctccagtgtactca

SEQ ID NO: 4680287 - DNA, 25 bp, Homo sapien
cctgttcgtggagaattgtgccaat

SEQ ID NO: 4680288 - DNA, 25 bp, Homo sapien
gaattgtgccaatattctccagtgt

SEQ ID NO: 4680289 - DNA, 25 bp, Homo sapien
ttatcctgttcgtggagaattgtgc

SEQ ID NO: 4680290 - DNA, 25 bp, Homo sapien
gctctgactgctccttggcattttg

SEQ ID NO: 4680291 - DNA, 25 bp, Homo sapien
ttttgcatctcaatggccacagcag

SEQ ID NO: 4680292 - DNA, 25 bp, Homo sapien
ggcattttggaccactccagaacat

SEQ ID NO: 4680293 - DNA, 25 bp, Homo sapien
tttggaccactccagaacattaagt

SEQ ID NO: 4680294 - DNA, 25 bp, Homo sapien
tctgtagtctgagaaaccttccaaa

SEQ ID NO: 4680295 - DNA, 25 bp, Homo sapien
tgtagtctgagaaaccttccaaagt

SEQ ID NO: 4680296 - DNA, 25 bp, Homo sapien
tctctgtagtctgagaaaccttcca

SEQ ID NO: 4680297 - DNA, 25 bp, Homo sapien
agtctgagaaaccttccaaagtttg

SEQ ID NO: 4680298 - DNA, 25 bp, Homo sapien
ctgctatcttcatgcacagtgatag

SEQ ID NO: 4680299 - DNA, 25 bp, Homo sapien
gaggtcttccagcacactatggtgt

SEQ ID NO: 4680300 - DNA, 25 bp, Homo sapien
atgtgcgcgctgctatccgacggat

SEQ ID NO: 4680301 - DNA, 25 bp, Homo sapien
tatgacacagtcaggaatgtgcgcg

SEQ ID NO: 4680302 - DNA, 25 bp, Homo sapien
tctcctttgaaagttgatcgggcag

SEQ ID NO: 4680303 - DNA, 25 bp, Homo sapien
taaagttagtttcactccacatagc

SEQ ID NO: 4680304 - DNA, 25 bp, Homo sapien
gtaaagttagtttcactccacatag

SEQ ID NO: 4680305 - DNA, 25 bp, Homo sapien
ttcccaccatttgcctgaagctcct

SEQ ID NO: 4680306 - DNA, 25 bp, Homo sapien
tccgtaaagttagtttcactccaca

SEQ ID NO: 4680307 - DNA, 25 bp, Homo sapien
ccacattggcatagacgaaacagta

SEQ ID NO: 4680308 - DNA, 25 bp, Homo sapien
ttcagagggatctgctcagcaggac

SEQ ID NO: 4680309 - DNA, 25 bp, Homo sapien
tacacccttcagcaagccacattgg

SEQ ID NO: 4680310 - DNA, 25 bp, Homo sapien
tatcactgtccttgatacggcacca

SEQ ID NO: 4680311 - DNA, 25 bp, Homo sapien
gcaaaggcaatccaagggcactgat

SEQ ID NO: 4680312 - DNA, 25 bp, Homo sapien
gctccaggatttgatagtttctgca

SEQ ID NO: 4680313 - DNA, 25 bp, Homo sapien
caactgttccaatgaatgctccagg

SEQ ID NO: 4680314 - DNA, 25 bp, Homo sapien
tcccttgtgacagcatctaaaatac

SEQ ID NO: 4680315 - DNA, 25 bp, Homo sapien
ttggccagttttccatgagactgtg

SEQ ID NO: 4680316 - DNA, 25 bp, Homo sapien
gcatcacaggtgagcttcgtcttct

SEQ ID NO: 4680317 - DNA, 25 bp, Homo sapien
tgagactgtgcatcacaggtgagct

SEQ ID NO: 4680318 - DNA, 25 bp, Homo sapien
ttttccatgagactgtgcatcacag

SEQ ID NO: 4680319 - DNA, 25 bp, Homo sapien
tgaagtctcttgaaactcagctccc

SEQ ID NO: 4680320 - DNA, 25 bp, Homo sapien
tacttggtgtagtgggaataccgtc

SEQ ID NO: 4680321 - DNA, 25 bp, Homo sapien
ccgtcataatgaactgaggtgccaa

SEQ ID NO: 4680322 - DNA, 25 bp, Homo sapien
tttgcagagctaagccaattggctg

SEQ ID NO: 4680323 - DNA, 25 bp, Homo sapien
ctgtgaacaattccagggcagcaat

SEQ ID NO: 4680324 - DNA, 25 bp, Homo sapien
atggtatcttatttaacctgtgaac

SEQ ID NO: 4680325 - DNA, 25 bp, Homo sapien
tcttatttaacctgtgaacaattcc

SEQ ID NO: 4680326 - DNA, 25 bp, Homo sapien
ggcagcaatgcctcttgtttctaac

SEQ ID NO: 4680327 - DNA, 25 bp, Homo sapien
tacagccagatagtggatataaaac

SEQ ID NO: 4680328 - DNA, 25 bp, Homo sapien
tatacagccagatagtggatataaa

SEQ ID NO: 4680329 - DNA, 25 bp, Homo sapien
atacagccagatagtggatataaaa

SEQ ID NO: 4680330 - DNA, 25 bp, Homo sapien
ctatacagccagatagtggatataa

SEQ ID NO: 4680331 - DNA, 25 bp, Homo sapien
tggagaaccaattcctacatgaagg

SEQ ID NO: 4680332 - DNA, 25 bp, Homo sapien
cataacatggctgcgcacaactata

SEQ ID NO: 4680333 - DNA, 25 bp, Homo sapien
gaagttataactacctctgatggag

SEQ ID NO: 4680334 - DNA, 25 bp, Homo sapien
gaacctgggtgagtatctccttgca

SEQ ID NO: 4680335 - DNA, 25 bp, Homo sapien
tagtagagaatggaattatgccccg

SEQ ID NO: 4680336 - DNA, 25 bp, Homo sapien
tacctcagtcttcccgatgcaatgg

SEQ ID NO: 4680337 - DNA, 25 bp, Homo sapien
tcaaagagggaactatgagagacct

SEQ ID NO: 4680338 - DNA, 25 bp, Homo sapien
gaccttggagacacagactgaacac

SEQ ID NO: 4680339 - DNA, 25 bp, Homo sapien
ggccagtccaggggtttgcagtaga

SEQ ID NO: 4680340 - DNA, 25 bp, Homo sapien
ccagtccaggggtttgcagtagatc

SEQ ID NO: 4680341 - DNA, 25 bp, Homo sapien
gccagtccaggggtttgcagtagat

SEQ ID NO: 4680342 - DNA, 25 bp, Homo sapien
cctgctgctgccacaatatattcat

SEQ ID NO: 4680343 - DNA, 25 bp, Homo sapien
acctgctgctgccacaatatattca

SEQ ID NO: 4680344 - DNA, 25 bp, Homo sapien
ttctacctgctgctgccacaatata

SEQ ID NO: 4680345 - DNA, 25 bp, Homo sapien
ctacctgctgctgccacaatatatt

SEQ ID NO: 4680346 - DNA, 25 bp, Homo sapien
aagaaaaaagatgtgcccttgttgg

SEQ ID NO: 4680347 - DNA, 25 bp, Homo sapien
gcccttgttggtcttcgctctggta

SEQ ID NO: 4680348 - DNA, 25 bp, Homo sapien
tactgcgtacttactaacaagacag

SEQ ID NO: 4680349 - DNA, 25 bp, Homo sapien
agcaactgcactgcgcgcacactgt

SEQ ID NO: 4680350 - DNA, 25 bp, Homo sapien
agactggtttacattcagtactcat

SEQ ID NO: 4680351 - DNA, 25 bp, Homo sapien
agcagaagactggtttacattcagt

SEQ ID NO: 4680352 - DNA, 25 bp, Homo sapien
cagaagactggtttacattcagtac

SEQ ID NO: 4680353 - DNA, 25 bp, Homo sapien
gaagactggtttacattcagtactc

SEQ ID NO: 4680354 - DNA, 25 bp, Homo sapien
agtctccttcggataattccaatcg

SEQ ID NO: 4680355 - DNA, 25 bp, Homo sapien
ccttcggataattccaatcgtcttc

SEQ ID NO: 4680356 - DNA, 25 bp, Homo sapien
agaggacagagtcagtctccttcgg

SEQ ID NO: 4680357 - DNA, 25 bp, Homo sapien
gagtcagtctccttcggataattcc

SEQ ID NO: 4680358 - DNA, 25 bp, Homo sapien
aaagccagaagctaaacattgtctt

SEQ ID NO: 4680359 - DNA, 25 bp, Homo sapien
gtcttgtcatgtgtttaggtggttg

SEQ ID NO: 4680360 - DNA, 25 bp, Homo sapien
tggttgatttggagaaaatgattgt

SEQ ID NO: 4680361 - DNA, 25 bp, Homo sapien
taggtggttgatttggagaaaatga

SEQ ID NO: 4680362 - DNA, 25 bp, Homo sapien
agtctttgtgccagaactaaactga

SEQ ID NO: 4680363 - DNA, 25 bp, Homo sapien
tgaggtacgtttagggtggcacaca

SEQ ID NO: 4680364 - DNA, 25 bp, Homo sapien
tgtgccagaactaaactgaccctta

SEQ ID NO: 4680365 - DNA, 25 bp, Homo sapien
aacttccaagatgaggtacgtttag

SEQ ID NO: 4680366 - DNA, 25 bp, Homo sapien
catgaacacttaccagttcccaaaa

SEQ ID NO: 4680367 - DNA, 25 bp, Homo sapien
tttgtaagacacatctggtggtagt

SEQ ID NO: 4680368 - DNA, 25 bp, Homo sapien
tgtaagacacatctggtggtagtga

SEQ ID NO: 4680369 - DNA, 25 bp, Homo sapien
taagacacatctggtggtagtgaat

SEQ ID NO: 4680370 - DNA, 25 bp, Homo sapien
tgtcttcctttgtggataaatgatt

SEQ ID NO: 4680371 - DNA, 25 bp, Homo sapien
taatcagataagttagtccatcaac

SEQ ID NO: 4680372 - DNA, 25 bp, Homo sapien
agataagttagtccatcaacagtca

SEQ ID NO: 4680373 - DNA, 25 bp, Homo sapien
taggtaaagacttaactactgccag

SEQ ID NO: 4680374 - DNA, 25 bp, Homo sapien
gagcattagggagttatttcttgca

SEQ ID NO: 4680375 - DNA, 25 bp, Homo sapien
tctaggacggtgttacataaagtgt

SEQ ID NO: 4680376 - DNA, 25 bp, Homo sapien
tgctgactggtgataaacagtttgt

SEQ ID NO: 4680377 - DNA, 25 bp, Homo sapien
gttgtctgagcattagggagttatt

SEQ ID NO: 4680378 - DNA, 25 bp, Homo sapien
gactgttgtttatcattgctgttgg

SEQ ID NO: 4680379 - DNA, 25 bp, Homo sapien
caaagcccaccaaaggaattacaat

SEQ ID NO: 4680380 - DNA, 25 bp, Homo sapien
ccaaccatttgactgttgtttatca

SEQ ID NO: 4680381 - DNA, 25 bp, Homo sapien
tgctgttgggtacaaaagagacacc

SEQ ID NO: 4680382 - DNA, 25 bp, Homo sapien
gtcgccggtcgaaccgcaggagaaa

SEQ ID NO: 4680383 - DNA, 25 bp, Homo sapien
atcgtacgcggtgcagccttcccgg

SEQ ID NO: 4680384 - DNA, 25 bp, Homo sapien
aataggcggtgaccctcagatggag

SEQ ID NO: 4680385 - DNA, 25 bp, Homo sapien
tcagaaaggagagttagtgccccct

SEQ ID NO: 4680386 - DNA, 25 bp, Homo sapien
tgtaggcctcaggtttgcaccgtca

SEQ ID NO: 4680387 - DNA, 25 bp, Homo sapien
cacgttgcgaaattgaaaccggagc

SEQ ID NO: 4680388 - DNA, 25 bp, Homo sapien
ccgacggctggttgagttatagaaa

SEQ ID NO: 4680389 - DNA, 25 bp, Homo sapien
gacactctagtaatcagccgaaagg

SEQ ID NO: 4680390 - DNA, 25 bp, Homo sapien
gcggcgccgagcgcagcgtccgcgg

SEQ ID NO: 4680391 - DNA, 25 bp, Homo sapien
gcgccgagcgcagcgtccgcggcat

SEQ ID NO: 4680392 - DNA, 25 bp, Homo sapien
ggcgccgagcgcagcgtccgcggca

SEQ ID NO: 4680393 - DNA, 25 bp, Homo sapien
ctcgcggcgccgagcgcagcgtccg

SEQ ID NO: 4680394 - DNA, 25 bp, Homo sapien
ccgagaagttcggcgggaggcgcag

SEQ ID NO: 4680395 - DNA, 25 bp, Homo sapien
gccgagaagttcggcgggaggcgca

SEQ ID NO: 4680396 - DNA, 25 bp, Homo sapien
ggccgagaagttcggcgggaggcgc

SEQ ID NO: 4680397 - DNA, 25 bp, Homo sapien
ccacccgcctaagcctccgaaagag

SEQ ID NO: 4680398 - DNA, 25 bp, Homo sapien
tccacccgcctaagcctccgaaaga

SEQ ID NO: 4680399 - DNA, 25 bp, Homo sapien
acccgcctaagcctccgaaagagct

SEQ ID NO: 4680400 - DNA, 25 bp, Homo sapien
cacccgcctaagcctccgaaagagc

SEQ ID NO: 4680401 - DNA, 25 bp, Homo sapien
ttgtcggcctgggctagagcacaat

SEQ ID NO: 4680402 - DNA, 25 bp, Homo sapien
tgtcggcctgggctagagcacaatg

SEQ ID NO: 4680403 - DNA, 25 bp, Homo sapien
tcctcattgttgggtcctgatctgc

SEQ ID NO: 4680404 - DNA, 25 bp, Homo sapien
gtcctcattgttgggtcctgatctg

SEQ ID NO: 4680405 - DNA, 25 bp, Homo sapien
gagcttccagaagcttgtcccgcag

SEQ ID NO: 4680406 - DNA, 25 bp, Homo sapien
atcagcatccgcaaacagcaccaac

SEQ ID NO: 4680407 - DNA, 25 bp, Homo sapien
gagtgcgcgcgcaagcctgcgggaa

SEQ ID NO: 4680408 - DNA, 25 bp, Homo sapien
agcaccaacgccaccgcaaagagct

SEQ ID NO: 4680409 - DNA, 25 bp, Homo sapien
tagttgctcaactcagaagcccaat

SEQ ID NO: 4680410 - DNA, 25 bp, Homo sapien
tgttatcagaaaaggttcacaaggg

SEQ ID NO: 4680411 - DNA, 25 bp, Homo sapien
aagggcacacatttctcactagttg

SEQ ID NO: 4680412 - DNA, 25 bp, Homo sapien
gaaaagccctgctcaattaaaagga

SEQ ID NO: 4680413 - DNA, 25 bp, Homo sapien
cagccaggaatatcaaaggttccag

SEQ ID NO: 4680414 - DNA, 25 bp, Homo sapien
caacaggcactatacacagccagga

SEQ ID NO: 4680415 - DNA, 25 bp, Homo sapien
gagtatcagtacagtccaccaacag

SEQ ID NO: 4680416 - DNA, 25 bp, Homo sapien
aaggttccaggaatccagtttacag

SEQ ID NO: 4680417 - DNA, 25 bp, Homo sapien
ttgttcaagggcactacagcttgca

SEQ ID NO: 4680418 - DNA, 25 bp, Homo sapien
tgttcaagggcactacagcttgcat

SEQ ID NO: 4680419 - DNA, 25 bp, Homo sapien
cttgttcaagggcactacagcttgc

SEQ ID NO: 4680420 - DNA, 25 bp, Homo sapien
ggccagagtttgaggttctggtgag

SEQ ID NO: 4680421 - DNA, 25 bp, Homo sapien
cttgggacctcattttgttcagtcg

SEQ ID NO: 4680422 - DNA, 25 bp, Homo sapien
cctcattttgttcagtcgaggccag

SEQ ID NO: 4680423 - DNA, 25 bp, Homo sapien
tttgttcagtcgaggccagagtttg

SEQ ID NO: 4680424 - DNA, 25 bp, Homo sapien
gactcagagctttcctgggtccagc

SEQ ID NO: 4680425 - DNA, 25 bp, Homo sapien
gggtccagctacttctgagtaacaa

SEQ ID NO: 4680426 - DNA, 25 bp, Homo sapien
tgtgactttacccaaatcctgatct

SEQ ID NO: 4680427 - DNA, 25 bp, Homo sapien
ttcgtgtgaatgtctggtctcagcc

SEQ ID NO: 4680428 - DNA, 25 bp, Homo sapien
gggtcaaatcttctattagggtcac

SEQ ID NO: 4680429 - DNA, 25 bp, Homo sapien
tgggtcaaatcttctattagggtca

SEQ ID NO: 4680430 - DNA, 25 bp, Homo sapien
tttcggactttgaggcaatgtctcc

SEQ ID NO: 4680431 - DNA, 25 bp, Homo sapien
tgagagtttacacagcttgcccaaa

SEQ ID NO: 4680432 - DNA, 25 bp, Homo sapien
ttatatcctatcttgtctcaccttt

SEQ ID NO: 4680433 - DNA, 25 bp, Homo sapien
tatttcttgagcatccaccatatat

SEQ ID NO: 4680434 - DNA, 25 bp, Homo sapien
gactcctctttagcagtaaattgcc

SEQ ID NO: 4680435 - DNA, 25 bp, Homo sapien
aaaatagttactagtcgcatgtggc

SEQ ID NO: 4680436 - DNA, 25 bp, Homo sapien
gcaacgtgctagtccacacaatgga

SEQ ID NO: 4680437 - DNA, 25 bp, Homo sapien
cacaatggaactaggcattagggcc

SEQ ID NO: 4680438 - DNA, 25 bp, Homo sapien
gccctaaggctgtggaactgcacta

SEQ ID NO: 4680439 - DNA, 25 bp, Homo sapien
gtattgggacaaacagtgaccattt

SEQ ID NO: 4680440 - DNA, 25 bp, Homo sapien
cttgggaaacagtagaatcttgaga

SEQ ID NO: 4680441 - DNA, 25 bp, Homo sapien
acaggactcagtattgggacaaaca

SEQ ID NO: 4680442 - DNA, 25 bp, Homo sapien
aacagtagaatcttgagagactgga

SEQ ID NO: 4680443 - DNA, 25 bp, Homo sapien
cagaaattctaggttcctgaggttt

SEQ ID NO: 4680444 - DNA, 25 bp, Homo sapien
cagctacatccttcaatgttataga

SEQ ID NO: 4680445 - DNA, 25 bp, Homo sapien
cagtagcacttccttatatagctcc

SEQ ID NO: 4680446 - DNA, 25 bp, Homo sapien
cttatatagctccttttgaaaaggc

SEQ ID NO: 4680447 - DNA, 25 bp, Homo sapien
cactttagctgggaaatcaactcta

SEQ ID NO: 4680448 - DNA, 25 bp, Homo sapien
acccactttagctgggaaatcaact

SEQ ID NO: 4680449 - DNA, 25 bp, Homo sapien
catggcaattcaacccactttagct

SEQ ID NO: 4680450 - DNA, 25 bp, Homo sapien
gcaattcaacccactttagctggga

SEQ ID NO: 4680451 - DNA, 25 bp, Homo sapien
gtacactgcattgttagccagtgag

SEQ ID NO: 4680452 - DNA, 25 bp, Homo sapien
tacatgtacactgcattgttagcca

SEQ ID NO: 4680453 - DNA, 25 bp, Homo sapien
tgcaaatttaatgcgtaataaatag

SEQ ID NO: 4680454 - DNA, 25 bp, Homo sapien
agaagcccctgagtactatctctgg

SEQ ID NO: 4680455 - DNA, 25 bp, Homo sapien
cagcctcattctcttattgaacctt

SEQ ID NO: 4680456 - DNA, 25 bp, Homo sapien
tgattaccgtgatcctcctctgagc

SEQ ID NO: 4680457 - DNA, 25 bp, Homo sapien
gatgaactgtcactaaagggtctcc

SEQ ID NO: 4680458 - DNA, 25 bp, Homo sapien
tgagtgaggcgctatagccaaaggc

SEQ ID NO: 4680459 - DNA, 25 bp, Homo sapien
tctgagctgccacaatattgctggg

SEQ ID NO: 4680460 - DNA, 25 bp, Homo sapien
gataaatcacagacgtaaaatggct

SEQ ID NO: 4680461 - DNA, 25 bp, Homo sapien
tggctaaaagtcattccgcaatcat

SEQ ID NO: 4680462 - DNA, 25 bp, Homo sapien
tctctgatgacgacttagcagtgaa

SEQ ID NO: 4680463 - DNA, 25 bp, Homo sapien
tgttctacaaggattgagcttcgac

SEQ ID NO: 4680464 - DNA, 25 bp, Homo sapien
gatggctcaggtgcaagctctctgg

SEQ ID NO: 4680465 - DNA, 25 bp, Homo sapien
tgtttaccagtcgttgccatccttg

SEQ ID NO: 4680466 - DNA, 25 bp, Homo sapien
gaagtccagcatcctaggaaccagg

SEQ ID NO: 4680467 - DNA, 25 bp, Homo sapien
gcagagtgaaatccccgatgtctaa

SEQ ID NO: 4680468 - DNA, 25 bp, Homo sapien
catttcaaacgctaggatgggcata

SEQ ID NO: 4680469 - DNA, 25 bp, Homo sapien
agatacatgaatggctgaagagcac

SEQ ID NO: 4680470 - DNA, 25 bp, Homo sapien
tgggctgctctctgtagctagtaca

SEQ ID NO: 4680471 - DNA, 25 bp, Homo sapien
tatgtgctacaacacggccgaacct

SEQ ID NO: 4680472 - DNA, 25 bp, Homo sapien
gggatactgaaacccttgtacatag

SEQ ID NO: 4680473 - DNA, 25 bp, Homo sapien
tagtgtagttgcacttcctcaagaa

SEQ ID NO: 4680474 - DNA, 25 bp, Homo sapien
caaaactagaataagatgccacttc

SEQ ID NO: 4680475 - DNA, 25 bp, Homo sapien
tctacaactaaacaacaacgccaac

SEQ ID NO: 4680476 - DNA, 25 bp, Homo sapien
tacaaaacattactggagtaatcaa

SEQ ID NO: 4680477 - DNA, 25 bp, Homo sapien
ttactggagtaatcaaaatagcatg

SEQ ID NO: 4680478 - DNA, 25 bp, Homo sapien
gatggaccctttaccatacataaaa

SEQ ID NO: 4680479 - DNA, 25 bp, Homo sapien
tactacaggaaacgtagtgtaatcc

SEQ ID NO: 4680480 - DNA, 25 bp, Homo sapien
tgattgctcatcaaaaaccttggaa

SEQ ID NO: 4680481 - DNA, 25 bp, Homo sapien
tctgaactatggcaacaagcactgc

SEQ ID NO: 4680482 - DNA, 25 bp, Homo sapien
ccagaaggctgtggcgttgttatac

SEQ ID NO: 4680483 - DNA, 25 bp, Homo sapien
gaacctccagtgactcagtgactct

SEQ ID NO: 4680484 - DNA, 25 bp, Homo sapien
cagccagggtggacaataatagcca

SEQ ID NO: 4680485 - DNA, 25 bp, Homo sapien
gtggagacacaaccccacatttctg

SEQ ID NO: 4680486 - DNA, 25 bp, Homo sapien
cagggttctgattgcagatatctac

SEQ ID NO: 4680487 - DNA, 25 bp, Homo sapien
gccttcagtgaagtagcagctaccc

SEQ ID NO: 4680488 - DNA, 25 bp, Homo sapien
tcaaagacatggatagagtggccca

SEQ ID NO: 4680489 - DNA, 25 bp, Homo sapien
taattacatcggcagaaagttccta

SEQ ID NO: 4680490 - DNA, 25 bp, Homo sapien
catctgaacacttgtagcttctagg

SEQ ID NO: 4680491 - DNA, 25 bp, Homo sapien
gggagcacatgagtccatctgaaca

SEQ ID NO: 4680492 - DNA, 25 bp, Homo sapien
tctatcacaaggatggaactccagc

SEQ ID NO: 4680493 - DNA, 25 bp, Homo sapien
ggaaaaacttgtgacctggctagac

SEQ ID NO: 4680494 - DNA, 25 bp, Homo sapien
tacagaagctggtactacaactggc

SEQ ID NO: 4680495 - DNA, 25 bp, Homo sapien
ttataatgcttgtacaggaacgtgc

SEQ ID NO: 4680496 - DNA, 25 bp, Homo sapien
tgataggctattaacttgggtaccc

SEQ ID NO: 4680497 - DNA, 25 bp, Homo sapien
tagaccctgagcagattagactttg

SEQ ID NO: 4680498 - DNA, 25 bp, Homo sapien
tgctcgccagtaatggtagccaggc

SEQ ID NO: 4680499 - DNA, 25 bp, Homo sapien
tatcccaccatgtggcgtgcctctg

SEQ ID NO: 4680500 - DNA, 25 bp, Homo sapien
attgtgccattgcactccagcctgg

SEQ ID NO: 4680501 - DNA, 25 bp, Homo sapien
agacgttgcagtgagccgatattgt

SEQ ID NO: 4680502 - DNA, 25 bp, Homo sapien
tggctgtgtttttcccaaccccgca

SEQ ID NO: 4680503 - DNA, 25 bp, Homo sapien
aaccccgcaggcagttagaccttat

SEQ ID NO: 4680504 - DNA, 25 bp, Homo sapien
agattaaagtaagacaggcgtaaga

SEQ ID NO: 4680505 - DNA, 25 bp, Homo sapien
gcaatatcttccctacttgcacatc

SEQ ID NO: 4680506 - DNA, 25 bp, Homo sapien
tgtgctaaatcagcttatattagat

SEQ ID NO: 4680507 - DNA, 25 bp, Homo sapien
tttgtgctaaatcagcttatattag

SEQ ID NO: 4680508 - DNA, 25 bp, Homo sapien
gaaacagcaagatctacaaatataa

SEQ ID NO: 4680509 - DNA, 25 bp, Homo sapien
gctaaatcagcttatattagatttt

SEQ ID NO: 4680510 - DNA, 25 bp, Homo sapien
gatcagagaacctcaatatataata

SEQ ID NO: 4680511 - DNA, 25 bp, Homo sapien
tgatcagagaacctcaatatataat

SEQ ID NO: 4680512 - DNA, 25 bp, Homo sapien
tgtataagttataaaaggtatggtc

SEQ ID NO: 4680513 - DNA, 25 bp, Homo sapien
aaggtatggtcttagaatcaaatga

SEQ ID NO: 4680514 - DNA, 25 bp, Homo sapien
taagtaacttgcctatggccactcc

SEQ ID NO: 4680515 - DNA, 25 bp, Homo sapien
cagagttgggattcatactccatcc

SEQ ID NO: 4680516 - DNA, 25 bp, Homo sapien
aaagacaaaaggaggttcagaagtg

SEQ ID NO: 4680517 - DNA, 25 bp, Homo sapien
ccgaaccagagcctcttgaactgca

SEQ ID NO: 4680518 - DNA, 25 bp, Homo sapien
ggatctttcaacgtatgtatttgcc

SEQ ID NO: 4680519 - DNA, 25 bp, Homo sapien
tgttctataaggtcaccaccaaggc

SEQ ID NO: 4680520 - DNA, 25 bp, Homo sapien
cagcctgatgggtattagcttatac

SEQ ID NO: 4680521 - DNA, 25 bp, Homo sapien
tgtttgcacatatctcacatagact

SEQ ID NO: 4680522 - DNA, 25 bp, Homo sapien
atcattcatgtaccatgtaattcac

SEQ ID NO: 4680523 - DNA, 25 bp, Homo sapien
cactcatttaacgtgtagaagtcaa

SEQ ID NO: 4680524 - DNA, 25 bp, Homo sapien
caaaaaacgctactcattagcagtc

SEQ ID NO: 4680525 - DNA, 25 bp, Homo sapien
taaaagtggtctcttatgactggca

SEQ ID NO: 4680526 - DNA, 25 bp, Homo sapien
cagttactaggagggctgtctgtga

SEQ ID NO: 4680527 - DNA, 25 bp, Homo sapien
aaaatataaggccagatgtagtggt

SEQ ID NO: 4680528 - DNA, 25 bp, Homo sapien
aaggccagatgtagtggtatgcacc

SEQ ID NO: 4680529 - DNA, 25 bp, Homo sapien
ggatcacgagcttaagaggtcaagg

SEQ ID NO: 4680530 - DNA, 25 bp, Homo sapien
aggaagaaaaccagatgattggaca

SEQ ID NO: 4680531 - DNA, 25 bp, Homo sapien
ccagagtcggattttaaggctgttt

SEQ ID NO: 4680532 - DNA, 25 bp, Homo sapien
gacatggatcataagacaaaggaaa

SEQ ID NO: 4680533 - DNA, 25 bp, Homo sapien
cgcctggcccagagtcggattttaa

SEQ ID NO: 4680534 - DNA, 25 bp, Homo sapien
atatgtataatacatccgggcgcgg

SEQ ID NO: 4680535 - DNA, 25 bp, Homo sapien
ccaacgtaatgttgacagataaatt

SEQ ID NO: 4680536 - DNA, 25 bp, Homo sapien
tgtataatacatccgggcgcggtgt

SEQ ID NO: 4680537 - DNA, 25 bp, Homo sapien
tatcctaataatgggggtgtaatta

SEQ ID NO: 4680538 - DNA, 25 bp, Homo sapien
ttgaaattctagtcccaagataatg

SEQ ID NO: 4680539 - DNA, 25 bp, Homo sapien
gataatggtgttagtaggtggggcc

SEQ ID NO: 4680540 - DNA, 25 bp, Homo sapien
gtgaagtctttaggggatctgagtc

SEQ ID NO: 4680541 - DNA, 25 bp, Homo sapien
tatgttgaaattctagtcccaagat

SEQ ID NO: 4680542 - DNA, 25 bp, Homo sapien
acaaagagaatcttggggagccaac

SEQ ID NO: 4680543 - DNA, 25 bp, Homo sapien
caaagagaatcttggggagccaaca

SEQ ID NO: 4680544 - DNA, 25 bp, Homo sapien
cccatacaaagagaatcttggggag

SEQ ID NO: 4680545 - DNA, 25 bp, Homo sapien
atacaaagagaatcttggggagcca

SEQ ID NO: 4680546 - DNA, 25 bp, Homo sapien
ttcctgactcccgttttcctgccaa

SEQ ID NO: 4680547 - DNA, 25 bp, Homo sapien
ggcaggtagtactctggcagggaaa

SEQ ID NO: 4680548 - DNA, 25 bp, Homo sapien
gatcaaagactacagaccactcact

SEQ ID NO: 4680549 - DNA, 25 bp, Homo sapien
ctgggcaggtagtactctggcaggg

SEQ ID NO: 4680550 - DNA, 25 bp, Homo sapien
tactacaagtactgatgctactgca

SEQ ID NO: 4680551 - DNA, 25 bp, Homo sapien
acccctattaggatcactgttgctg

SEQ ID NO: 4680552 - DNA, 25 bp, Homo sapien
cactaggttgtcttgggtacccagc

SEQ ID NO: 4680553 - DNA, 25 bp, Homo sapien
taaccaagaaacttagtgatgccac

SEQ ID NO: 4680554 - DNA, 25 bp, Homo sapien
gagagattttggagaggattcaccc

SEQ ID NO: 4680555 - DNA, 25 bp, Homo sapien
tggttccagtgcacccatcagagac

SEQ ID NO: 4680556 - DNA, 25 bp, Homo sapien
gaggatgctacccacttctgcacag

SEQ ID NO: 4680557 - DNA, 25 bp, Homo sapien
tcatcagggatacaaagcagccgtt

SEQ ID NO: 4680558 - DNA, 25 bp, Homo sapien
ccagcctcgctggcggctctgccac

SEQ ID NO: 4680559 - DNA, 25 bp, Homo sapien
agcctcgctggcggctctgccaccc

SEQ ID NO: 4680560 - DNA, 25 bp, Homo sapien
cagcctcgctggcggctctgccacc

SEQ ID NO: 4680561 - DNA, 25 bp, Homo sapien
cccagcctcgctggcggctctgcca

SEQ ID NO: 4680562 - DNA, 25 bp, Homo sapien
agccgggagagagcagcggcgcccc

SEQ ID NO: 4680563 - DNA, 25 bp, Homo sapien
ccgggagagagcagcggcgccccca

SEQ ID NO: 4680564 - DNA, 25 bp, Homo sapien
cgggagagagcagcggcgcccccat

SEQ ID NO: 4680565 - DNA, 25 bp, Homo sapien
gccgggagagagcagcggcgccccc

SEQ ID NO: 4680566 - DNA, 25 bp, Homo sapien
gtagcagtcccgcgtgccgcagtag

SEQ ID NO: 4680567 - DNA, 25 bp, Homo sapien
tcgtagcagtcccgcgtgccgcagt

SEQ ID NO: 4680568 - DNA, 25 bp, Homo sapien
ctcgtagcagtcccgcgtgccgcag

SEQ ID NO: 4680569 - DNA, 25 bp, Homo sapien
agcagtcccgcgtgccgcagtagag

SEQ ID NO: 4680570 - DNA, 25 bp, Homo sapien
cttgagtgtctcgtaggcggttgcc

SEQ ID NO: 4680571 - DNA, 25 bp, Homo sapien
gtaggcccgcgcgatctccgccttg

SEQ ID NO: 4680572 - DNA, 25 bp, Homo sapien
gccgggccagctggcggtaggcccg

SEQ ID NO: 4680573 - DNA, 25 bp, Homo sapien
gccggtagcggtcagggtggtagcg

SEQ ID NO: 4680574 - DNA, 25 bp, Homo sapien
tatcttaaaggtcgcggtggtggct

SEQ ID NO: 4680575 - DNA, 25 bp, Homo sapien
tggctgtgctcagtttcggggtcac

SEQ ID NO: 4680576 - DNA, 25 bp, Homo sapien
gggccgactcggctctttcacaggg

SEQ ID NO: 4680577 - DNA, 25 bp, Homo sapien
tgggcttcccgcggccagtcttcga

SEQ ID NO: 4680578 - DNA, 25 bp, Homo sapien
tattcgagactttccctgttgtggg

SEQ ID NO: 4680579 - DNA, 25 bp, Homo sapien
cacagttgtcacttgatattcgaga

SEQ ID NO: 4680580 - DNA, 25 bp, Homo sapien
tcacgaaatcgtaagatggccaaag

SEQ ID NO: 4680581 - DNA, 25 bp, Homo sapien
tcatatcaaactgatgcgatcacag

SEQ ID NO: 4680582 - DNA, 25 bp, Homo sapien
tcattttatgactccaaattatcca

SEQ ID NO: 4680583 - DNA, 25 bp, Homo sapien
ccaaactgctctggaaggcatcaat

SEQ ID NO: 4680584 - DNA, 25 bp, Homo sapien
ccgcccctccaccactcattttatg

SEQ ID NO: 4680585 - DNA, 25 bp, Homo sapien
tgttagctccttgactattttcagc

SEQ ID NO: 4680586 - DNA, 25 bp, Homo sapien
tcctagatgtgatggcggctgggaa

SEQ ID NO: 4680587 - DNA, 25 bp, Homo sapien
atgggatggcggccgggcggagacg

SEQ ID NO: 4680588 - DNA, 25 bp, Homo sapien
gcggctgggaggtgtaggttgtagt

SEQ ID NO: 4680589 - DNA, 25 bp, Homo sapien
cttcctagatgtgatggcggctggg

SEQ ID NO: 4680590 - DNA, 25 bp, Homo sapien
tcccagatggggtggctgctgggcg

SEQ ID NO: 4680591 - DNA, 25 bp, Homo sapien
ttcccagatggggtggctgctgggc

SEQ ID NO: 4680592 - DNA, 25 bp, Homo sapien
agccgccattgtcatcctggcccgt

SEQ ID NO: 4680593 - DNA, 25 bp, Homo sapien
aagccgccattgtcatcctggcccg

SEQ ID NO: 4680594 - DNA, 25 bp, Homo sapien
agaggaaacccacaagcaaagaaag

SEQ ID NO: 4680595 - DNA, 25 bp, Homo sapien
gacaagcagggcaataagctccttg

SEQ ID NO: 4680596 - DNA, 25 bp, Homo sapien
ttctaatctctacaggaataactgt

SEQ ID NO: 4680597 - DNA, 25 bp, Homo sapien
ttgacaagcagggcaataagctcct

SEQ ID NO: 4680598 - DNA, 25 bp, Homo sapien
taatctctacaggaataactgtggt

SEQ ID NO: 4680599 - DNA, 25 bp, Homo sapien
aattttgtggatcttaaggtcccag

SEQ ID NO: 4680600 - DNA, 25 bp, Homo sapien
cattactgccccagacagttggatc

SEQ ID NO: 4680601 - DNA, 25 bp, Homo sapien
ctaatttgaacctcatgagtcctat

SEQ ID NO: 4680602 - DNA, 25 bp, Homo sapien
tcttttacccatagcaaacattcag

SEQ ID NO: 4680603 - DNA, 25 bp, Homo sapien
ggccttcacaactggtccaaactta

SEQ ID NO: 4680604 - DNA, 25 bp, Homo sapien
acttcataggacagtccattaaatg

SEQ ID NO: 4680605 - DNA, 25 bp, Homo sapien
ttcataggacagtccattaaatggc

SEQ ID NO: 4680606 - DNA, 25 bp, Homo sapien
gacaagatatccaacttcataggac

SEQ ID NO: 4680607 - DNA, 25 bp, Homo sapien
ctgtaaaatgacaagatatccaact

SEQ ID NO: 4680608 - DNA, 25 bp, Homo sapien
tgaaacaccgaaatagcacacacgc

SEQ ID NO: 4680609 - DNA, 25 bp, Homo sapien
taatggctgtagtactcttctggat

SEQ ID NO: 4680610 - DNA, 25 bp, Homo sapien
gcacacacgctgaccaaaatcacta

SEQ ID NO: 4680611 - DNA, 25 bp, Homo sapien
agcgcctgctatagtagtggtagta

SEQ ID NO: 4680612 - DNA, 25 bp, Homo sapien
tttggcttttttgagcagtccctgc

SEQ ID NO: 4680613 - DNA, 25 bp, Homo sapien
cactgtggctaggtagctgattgcc

SEQ ID NO: 4680614 - DNA, 25 bp, Homo sapien
ttggatacggtacttgggcactgtg

SEQ ID NO: 4680615 - DNA, 25 bp, Homo sapien
gattgccttattgtagctattccac

SEQ ID NO: 4680616 - DNA, 25 bp, Homo sapien
tgatagcccccctttatatctattt

SEQ ID NO: 4680617 - DNA, 25 bp, Homo sapien
ggtgaaaaggagctaagataatttg

SEQ ID NO: 4680618 - DNA, 25 bp, Homo sapien
ctatatatgagcataggtgaaaagg

SEQ ID NO: 4680619 - DNA, 25 bp, Homo sapien
gcataggtgaaaaggagctaagata

SEQ ID NO: 4680620 - DNA, 25 bp, Homo sapien
gatgatcttctagactatcaaattg

SEQ ID NO: 4680621 - DNA, 25 bp, Homo sapien
tccagagctctcgtttaagaaaagt

SEQ ID NO: 4680622 - DNA, 25 bp, Homo sapien
aattctccttgatccagagctctcg

SEQ ID NO: 4680623 - DNA, 25 bp, Homo sapien
gttaaaattatagatccaccgacaa

SEQ ID NO: 4680624 - DNA, 25 bp, Homo sapien
gtcaggtggatgacacttaaatcac

SEQ ID NO: 4680625 - DNA, 25 bp, Homo sapien
aagtcatctcaacaaaatttccacg

SEQ ID NO: 4680626 - DNA, 25 bp, Homo sapien
gttgtaacacccttgcaaacatgca

SEQ ID NO: 4680627 - DNA, 25 bp, Homo sapien
tgtgagcacacttctgtgatccctc

SEQ ID NO: 4680628 - DNA, 25 bp, Homo sapien
gaggcattacagtaattcgatttaa

SEQ ID NO: 4680629 - DNA, 25 bp, Homo sapien
gatcacctcgaagtaatttttgtag

SEQ ID NO: 4680630 - DNA, 25 bp, Homo sapien
aggtagcggatcacctcgaagtaat

SEQ ID NO: 4680631 - DNA, 25 bp, Homo sapien
gcctgaaagtttagaggcattacag

SEQ ID NO: 4680632 - DNA, 25 bp, Homo sapien
ttccagtgaatgtattgataaccat

SEQ ID NO: 4680633 - DNA, 25 bp, Homo sapien
ccattagctttatggcatatttaca

SEQ ID NO: 4680634 - DNA, 25 bp, Homo sapien
ctgtaagtataaataactagatgac

SEQ ID NO: 4680635 - DNA, 25 bp, Homo sapien
actagatgacttcacaatccaaaga

SEQ ID NO: 4680636 - DNA, 25 bp, Homo sapien
atccacaaatgttaaccgcccaggc

SEQ ID NO: 4680637 - DNA, 25 bp, Homo sapien
atgttaaccgcccaggcccttcatt

SEQ ID NO: 4680638 - DNA, 25 bp, Homo sapien
tcagtcatccacaaatgttaaccgc

SEQ ID NO: 4680639 - DNA, 25 bp, Homo sapien
tcatccacaaatgttaaccgcccag

SEQ ID NO: 4680640 - DNA, 25 bp, Homo sapien
taatcaagatcatcctacaaggacg

SEQ ID NO: 4680641 - DNA, 25 bp, Homo sapien
tagcagaagactttcctagagaggt

SEQ ID NO: 4680642 - DNA, 25 bp, Homo sapien
gaagagcacacagccatgtacctcg

SEQ ID NO: 4680643 - DNA, 25 bp, Homo sapien
tacaaggacgtgagggtagactcac

SEQ ID NO: 4680644 - DNA, 25 bp, Homo sapien
gcgctgggctcctaggggctgctgg

SEQ ID NO: 4680645 - DNA, 25 bp, Homo sapien
gctcctaggggctgctgggcccggc

SEQ ID NO: 4680646 - DNA, 25 bp, Homo sapien
ggctcctaggggctgctgggcccgg

SEQ ID NO: 4680647 - DNA, 25 bp, Homo sapien
cggcggcgctgggctcctaggggct

SEQ ID NO: 4680648 - DNA, 25 bp, Homo sapien
acttgagctgctctaccaagcgctg

SEQ ID NO: 4680649 - DNA, 25 bp, Homo sapien
tctaccaagcgctgcagggcgctcg

SEQ ID NO: 4680650 - DNA, 25 bp, Homo sapien
ctgctctaccaagcgctgcagggcg

SEQ ID NO: 4680651 - DNA, 25 bp, Homo sapien
tccaacttgagctgctctaccaagc

SEQ ID NO: 4680652 - DNA, 25 bp, Homo sapien
ttcctctcaaccctaaaacatggct

SEQ ID NO: 4680653 - DNA, 25 bp, Homo sapien
cctctcaaccctaaaacatggcttt

SEQ ID NO: 4680654 - DNA, 25 bp, Homo sapien
tcctctcaaccctaaaacatggctt

SEQ ID NO: 4680655 - DNA, 25 bp, Homo sapien
ctgtctcctctaccagcaattggct

SEQ ID NO: 4680656 - DNA, 25 bp, Homo sapien
tctaccagcaattggcttccatttg

SEQ ID NO: 4680657 - DNA, 25 bp, Homo sapien
agctgtgccaccaatcccccacccc

SEQ ID NO: 4680658 - DNA, 25 bp, Homo sapien
ttcctgtctcagaagctgtgccacc

SEQ ID NO: 4680659 - DNA, 25 bp, Homo sapien
aaaagtgtcaccatacaagtttagc

SEQ ID NO: 4680660 - DNA, 25 bp, Homo sapien
tctgccttagaagaaaacctggcct

SEQ ID NO: 4680661 - DNA, 25 bp, Homo sapien
tcccctttcctctgccttagaagaa

SEQ ID NO: 4680662 - DNA, 25 bp, Homo sapien
caagtttagcccatatctagaaact

SEQ ID NO: 4680663 - DNA, 25 bp, Homo sapien
ggcatacctcccctgctaacttact

SEQ ID NO: 4680664 - DNA, 25 bp, Homo sapien
cctccacctttctggcatacctccc

SEQ ID NO: 4680665 - DNA, 25 bp, Homo sapien
tttcaactaccgttcaccttcagca

SEQ ID NO: 4680666 - DNA, 25 bp, Homo sapien
ttctggccagaccttcacacgcctt

SEQ ID NO: 4680667 - DNA, 25 bp, Homo sapien
aaatacttgcaagctgtcccctgcc

SEQ ID NO: 4680668 - DNA, 25 bp, Homo sapien
aaaatggttccaattgctgttcagg

SEQ ID NO: 4680669 - DNA, 25 bp, Homo sapien
gcatctctctaacactagcaaggga

SEQ ID NO: 4680670 - DNA, 25 bp, Homo sapien
gcaggtaaactccacacatggtagg

SEQ ID NO: 4680671 - DNA, 25 bp, Homo sapien
taaagcacaggatctaggctcccgg

SEQ ID NO: 4680672 - DNA, 25 bp, Homo sapien
aagcacaggatctaggctcccggaa

SEQ ID NO: 4680673 - DNA, 25 bp, Homo sapien
gcacaggatctaggctcccggaagg

SEQ ID NO: 4680674 - DNA, 25 bp, Homo sapien
aaagcacaggatctaggctcccgga

SEQ ID NO: 4680675 - DNA, 25 bp, Homo sapien
tcaaagagctcaagtacagaaggat

SEQ ID NO: 4680676 - DNA, 25 bp, Homo sapien
tctcatgacttagtgccagagagac

SEQ ID NO: 4680677 - DNA, 25 bp, Homo sapien
tctacaggcaaggtaaatatacact

SEQ ID NO: 4680678 - DNA, 25 bp, Homo sapien
tgtgataatgctatgggcccaagac

SEQ ID NO: 4680679 - DNA, 25 bp, Homo sapien
gctatgccaacataagactattatc

SEQ ID NO: 4680680 - DNA, 25 bp, Homo sapien
aacaggtgaatacaaaagacatcta

SEQ ID NO: 4680681 - DNA, 25 bp, Homo sapien
aacataagactattatcttaacacc

SEQ ID NO: 4680682 - DNA, 25 bp, Homo sapien
actgaatgagcagcacccatgaaag

SEQ ID NO: 4680683 - DNA, 25 bp, Homo sapien
tcttgagacttgaaggcagtcattc

SEQ ID NO: 4680684 - DNA, 25 bp, Homo sapien
gaatctgctcccataattagtgtta

SEQ ID NO: 4680685 - DNA, 25 bp, Homo sapien
cactttgtgcttgaaggcattcctc

SEQ ID NO: 4680686 - DNA, 25 bp, Homo sapien
catttacaatgttctgtgggtcaca

SEQ ID NO: 4680687 - DNA, 25 bp, Homo sapien
tcgtcgaagtaaaacacttgtgaag

SEQ ID NO: 4680688 - DNA, 25 bp, Homo sapien
gttgcaaacacgaataatgtatcct

SEQ ID NO: 4680689 - DNA, 25 bp, Homo sapien
agctcttcaaagaccgttgcaaaca

SEQ ID NO: 4680690 - DNA, 25 bp, Homo sapien
taaatcaaaggcacatcgtcgaagt

SEQ ID NO: 4680691 - DNA, 25 bp, Homo sapien
agcactcaatctcacaggcaaacag

SEQ ID NO: 4680692 - DNA, 25 bp, Homo sapien
gaaatccttgagtccttaatacaaa

SEQ ID NO: 4680693 - DNA, 25 bp, Homo sapien
tctcacaggcaaacagaaatccttg

SEQ ID NO: 4680694 - DNA, 25 bp, Homo sapien
cacaaaatattgctgtcatagaaaa

SEQ ID NO: 4680695 - DNA, 25 bp, Homo sapien
ctgggctcatgcgattttcctgtct

SEQ ID NO: 4680696 - DNA, 25 bp, Homo sapien
catgcgattttcctgtctcagtccc

SEQ ID NO: 4680697 - DNA, 25 bp, Homo sapien
cagttgcgtgaatacagctcactgc

SEQ ID NO: 4680698 - DNA, 25 bp, Homo sapien
gctcatgcgattttcctgtctcagt

SEQ ID NO: 4680699 - DNA, 25 bp, Homo sapien
taatctatctagcagggtgcccaga

SEQ ID NO: 4680700 - DNA, 25 bp, Homo sapien
gaactaccaggtccactcacaggtg

SEQ ID NO: 4680701 - DNA, 25 bp, Homo sapien
caaaacatacttatagggagggcca

SEQ ID NO: 4680702 - DNA, 25 bp, Homo sapien
taaggcctggagcacacgatgttca

SEQ ID NO: 4680703 - DNA, 25 bp, Homo sapien
catgcccagccaaaatttaaataaa

SEQ ID NO: 4680704 - DNA, 25 bp, Homo sapien
caccatgcccagccaaaatttaaat

SEQ ID NO: 4680705 - DNA, 25 bp, Homo sapien
cagccaaaatttaaataaactctca

SEQ ID NO: 4680706 - DNA, 25 bp, Homo sapien
caattcttgtgtcacagcctcccga

SEQ ID NO: 4680707 - DNA, 25 bp, Homo sapien
cctggtagagttgatgggcagactc

SEQ ID NO: 4680708 - DNA, 25 bp, Homo sapien
gcatatgaaaaagtccctggtagag

SEQ ID NO: 4680709 - DNA, 25 bp, Homo sapien
tcaaaaaacgacgtctagcatatga

SEQ ID NO: 4680710 - DNA, 25 bp, Homo sapien
aaaaacgacgtctagcatatgaaaa

SEQ ID NO: 4680711 - DNA, 25 bp, Homo sapien
ggtaccctaactcttggcaattatg

SEQ ID NO: 4680712 - DNA, 25 bp, Homo sapien
acattacagctgtgggtcaaggatc

SEQ ID NO: 4680713 - DNA, 25 bp, Homo sapien
gcctctgtaagtatccaaatctagg

SEQ ID NO: 4680714 - DNA, 25 bp, Homo sapien
gaaaatggcatgttaaagactctag

SEQ ID NO: 4680715 - DNA, 25 bp, Homo sapien
gctcccaaattgtataagctacagg

SEQ ID NO: 4680716 - DNA, 25 bp, Homo sapien
gctacaggacttgtaatgcttggat

SEQ ID NO: 4680717 - DNA, 25 bp, Homo sapien
cagtgtcatttcttactgcattggc

SEQ ID NO: 4680718 - DNA, 25 bp, Homo sapien
cctcactttaatgggaagtattctg

SEQ ID NO: 4680719 - DNA, 25 bp, Homo sapien
gttgtctgaacatttaagcatatca

SEQ ID NO: 4680720 - DNA, 25 bp, Homo sapien
aaaagagcctaattaggtgccagtc

SEQ ID NO: 4680721 - DNA, 25 bp, Homo sapien
ttaaataggcagtattattagctcc

SEQ ID NO: 4680722 - DNA, 25 bp, Homo sapien
ttttgagttgtctgaacatttaagc

SEQ ID NO: 4680723 - DNA, 25 bp, Homo sapien
tggactaagcattcaacttaagaag

SEQ ID NO: 4680724 - DNA, 25 bp, Homo sapien
tattataaccttaagtggactaagc

SEQ ID NO: 4680725 - DNA, 25 bp, Homo sapien
tctaataactgttgggtaaaagaga

SEQ ID NO: 4680726 - DNA, 25 bp, Homo sapien
aaagcagtgcaactctaagtaaagc

SEQ ID NO: 4680727 - DNA, 25 bp, Homo sapien
tcagaagagagtgtcagttgtcccc

SEQ ID NO: 4680728 - DNA, 25 bp, Homo sapien
tatcagatgagtctgaaggcctcac

SEQ ID NO: 4680729 - DNA, 25 bp, Homo sapien
ggagagaattaccatctgtccccag

SEQ ID NO: 4680730 - DNA, 25 bp, Homo sapien
taatatagaatcaaggagaccggct

SEQ ID NO: 4680731 - DNA, 25 bp, Homo sapien
cccgagcagctaggactgcagttgt

SEQ ID NO: 4680732 - DNA, 25 bp, Homo sapien
cgagcagctaggactgcagttgtgc

SEQ ID NO: 4680733 - DNA, 25 bp, Homo sapien
agcagctaggactgcagttgtgcac

SEQ ID NO: 4680734 - DNA, 25 bp, Homo sapien
tcccgagcagctaggactgcagttg

SEQ ID NO: 4680735 - DNA, 25 bp, Homo sapien
gggattataagtatacatcaccatg

SEQ ID NO: 4680736 - DNA, 25 bp, Homo sapien
attataagtatacatcaccatgcct

SEQ ID NO: 4680737 - DNA, 25 bp, Homo sapien
gattataagtatacatcaccatgcc

SEQ ID NO: 4680738 - DNA, 25 bp, Homo sapien
ctgggattataagtatacatcacca

SEQ ID NO: 4680739 - DNA, 25 bp, Homo sapien
tactagtgatattcaaattgctgat

SEQ ID NO: 4680740 - DNA, 25 bp, Homo sapien
taaggaatgaaaattggttatcctc

SEQ ID NO: 4680741 - DNA, 25 bp, Homo sapien
tgtcctggacatagataaaccaata

SEQ ID NO: 4680742 - DNA, 25 bp, Homo sapien
aaaaatacaaggatatcacatttaa

SEQ ID NO: 4680743 - DNA, 25 bp, Homo sapien
gattctcttaccactagctgtcaga

SEQ ID NO: 4680744 - DNA, 25 bp, Homo sapien
caatgtggcccttagtgattccttc

SEQ ID NO: 4680745 - DNA, 25 bp, Homo sapien
gattcaaactcctccacaatgtggc

SEQ ID NO: 4680746 - DNA, 25 bp, Homo sapien
gactgtccatagcttcccacttaag

SEQ ID NO: 4680747 - DNA, 25 bp, Homo sapien
ggaacttggaagtgttctggataaa

SEQ ID NO: 4680748 - DNA, 25 bp, Homo sapien
aataacttctaccaagtgatttagc

SEQ ID NO: 4680749 - DNA, 25 bp, Homo sapien
gtgttctggataaataacttatttg

SEQ ID NO: 4680750 - DNA, 25 bp, Homo sapien
tgttttagattactgtctacctatg

SEQ ID NO: 4680751 - DNA, 25 bp, Homo sapien
gagtataaaatgcactcagtgtgag

SEQ ID NO: 4680752 - DNA, 25 bp, Homo sapien
cacctcaaatatgagtgggaagtct

SEQ ID NO: 4680753 - DNA, 25 bp, Homo sapien
tacctcgtagtcctcatttgtaaag

SEQ ID NO: 4680754 - DNA, 25 bp, Homo sapien
gacattagaagccttgagttcaacc

SEQ ID NO: 4680755 - DNA, 25 bp, Homo sapien
gtgggacctcagatattctagattc

SEQ ID NO: 4680756 - DNA, 25 bp, Homo sapien
aaatttcctctgatctaagacccag

SEQ ID NO: 4680757 - DNA, 25 bp, Homo sapien
tcctagaacctatttcaaacataaa

SEQ ID NO: 4680758 - DNA, 25 bp, Homo sapien
cataaatgtactccctctaaagcag

SEQ ID NO: 4680759 - DNA, 25 bp, Homo sapien
tatgttgagaactgacctaggccaa

SEQ ID NO: 4680760 - DNA, 25 bp, Homo sapien
cagtacaatgcaaggctctaactcc

SEQ ID NO: 4680761 - DNA, 25 bp, Homo sapien
tagaccctgcccatacaaaaaagtg

SEQ ID NO: 4680762 - DNA, 25 bp, Homo sapien
gtctgtcgagacacaacggtactaa

SEQ ID NO: 4680763 - DNA, 25 bp, Homo sapien
cagatggataaggatgtcaaacacc

SEQ ID NO: 4680764 - DNA, 25 bp, Homo sapien
caaaattgtacatacttcaggtgta

SEQ ID NO: 4680765 - DNA, 25 bp, Homo sapien
tgccttctttgggattacttgaatt

SEQ ID NO: 4680766 - DNA, 25 bp, Homo sapien
aaacaccttttcacatactgttggc

SEQ ID NO: 4680767 - DNA, 25 bp, Homo sapien
catggcttttaatgactgcagtttt

SEQ ID NO: 4680768 - DNA, 25 bp, Homo sapien
agccaccgtgctagacaaaagcatg

SEQ ID NO: 4680769 - DNA, 25 bp, Homo sapien
cgtgctagacaaaagcatggctttt

SEQ ID NO: 4680770 - DNA, 25 bp, Homo sapien
tcttatgtacatatcacacatttcc

SEQ ID NO: 4680771 - DNA, 25 bp, Homo sapien
gaactgcaatacagggacaatcgtt

SEQ ID NO: 4680772 - DNA, 25 bp, Homo sapien
cacaacaccgtgcaatttaaggcat

SEQ ID NO: 4680773 - DNA, 25 bp, Homo sapien
tacatagaacttgatcctgaaactc

SEQ ID NO: 4680774 - DNA, 25 bp, Homo sapien
caatcgttctgataactgagacagc

SEQ ID NO: 4680775 - DNA, 25 bp, Homo sapien
ttctgcctgacaacaaccacatgga

SEQ ID NO: 4680776 - DNA, 25 bp, Homo sapien
tatgaggatgagacagatcctaggg

SEQ ID NO: 4680777 - DNA, 25 bp, Homo sapien
catatgcatatagtttagagagtca

SEQ ID NO: 4680778 - DNA, 25 bp, Homo sapien
caagcagacggtaggagaatccaac

SEQ ID NO: 4680779 - DNA, 25 bp, Homo sapien
aagatcccatgatatagcaatccag

SEQ ID NO: 4680780 - DNA, 25 bp, Homo sapien
aacatactgctataatgacattggc

SEQ ID NO: 4680781 - DNA, 25 bp, Homo sapien
caaggttcaaagtggagatggaata

SEQ ID NO: 4680782 - DNA, 25 bp, Homo sapien
catcttactagaggatgttgaattc

SEQ ID NO: 4680783 - DNA, 25 bp, Homo sapien
taagaactacaggagtagggctgtc

SEQ ID NO: 4680784 - DNA, 25 bp, Homo sapien
ctaaggttgaaggaacaaggtgcct

SEQ ID NO: 4680785 - DNA, 25 bp, Homo sapien
agttcatagaggttagcttcccagg

SEQ ID NO: 4680786 - DNA, 25 bp, Homo sapien
taacttttggtggaagagtgcagcc

SEQ ID NO: 4680787 - DNA, 25 bp, Homo sapien
atatacttatttgtctatcttcctt

SEQ ID NO: 4680788 - DNA, 25 bp, Homo sapien
tatacttatttgtctatcttccttt

SEQ ID NO: 4680789 - DNA, 25 bp, Homo sapien
tatatacttatttgtctatcttcct

SEQ ID NO: 4680790 - DNA, 25 bp, Homo sapien
catgtttttcaatgaggcacaggct

SEQ ID NO: 4680791 - DNA, 25 bp, Homo sapien
aatttgggagataagctatgtacac

SEQ ID NO: 4680792 - DNA, 25 bp, Homo sapien
cactggtggtaggtggaatactcag

SEQ ID NO: 4680793 - DNA, 25 bp, Homo sapien
tattctgacagtagtatatgacatg

SEQ ID NO: 4680794 - DNA, 25 bp, Homo sapien
aataattacccgagtctttagtgag

SEQ ID NO: 4680795 - DNA, 25 bp, Homo sapien
gagattgcagtaattcaaccacaac

SEQ ID NO: 4680796 - DNA, 25 bp, Homo sapien
gttatgtacttcctccacttaagtc

SEQ ID NO: 4680797 - DNA, 25 bp, Homo sapien
tcctctgatgatcacgaatgttctt

SEQ ID NO: 4680798 - DNA, 25 bp, Homo sapien
tattcctcatcaggcgagtctggcg

SEQ ID NO: 4680799 - DNA, 25 bp, Homo sapien
taaggtatagaatccacatgtgcca

SEQ ID NO: 4680800 - DNA, 25 bp, Homo sapien
tgccaagccgtttcatggaaaagac

SEQ ID NO: 4680801 - DNA, 25 bp, Homo sapien
tctgggaaggagtttaatgccaagc

SEQ ID NO: 4680802 - DNA, 25 bp, Homo sapien
gctaggcctgattttaactaatgca

SEQ ID NO: 4680803 - DNA, 25 bp, Homo sapien
ggtattcaggagaatgatgacccct

SEQ ID NO: 4680804 - DNA, 25 bp, Homo sapien
gccagcaagccaaaacaaatctatg

SEQ ID NO: 4680805 - DNA, 25 bp, Homo sapien
ggcagagctgccatatcagtcctta

SEQ ID NO: 4680806 - DNA, 25 bp, Homo sapien
gccaggttgtccttgaacttctgac

SEQ ID NO: 4680807 - DNA, 25 bp, Homo sapien
atcacgttggccaggttgtccttga

SEQ ID NO: 4680808 - DNA, 25 bp, Homo sapien
ctcactgtaacttctgcccccgggt

SEQ ID NO: 4680809 - DNA, 25 bp, Homo sapien
ctctgccccccagagttcaagtgat

SEQ ID NO: 4680810 - DNA, 25 bp, Homo sapien
ggtaaccactgattctcactaacag

SEQ ID NO: 4680811 - DNA, 25 bp, Homo sapien
aaacatgaaaagtgcccaaagtggg

SEQ ID NO: 4680812 - DNA, 25 bp, Homo sapien
ttactctggataaggcattgtgcta

SEQ ID NO: 4680813 - DNA, 25 bp, Homo sapien
gacatggtccatggcccacaatctc

SEQ ID NO: 4680814 - DNA, 25 bp, Homo sapien
gttacacctataaattagcagccag

SEQ ID NO: 4680815 - DNA, 25 bp, Homo sapien
aaacagtcccttaatggcgatcaaa

SEQ ID NO: 4680816 - DNA, 25 bp, Homo sapien
gctctcagtctattggtgcaaaaca

SEQ ID NO: 4680817 - DNA, 25 bp, Homo sapien
taggtttcccttctatacttgcaaa

SEQ ID NO: 4680818 - DNA, 25 bp, Homo sapien
tggatgcaactctgcttgccccaag

SEQ ID NO: 4680819 - DNA, 25 bp, Homo sapien
gctactcagttttcaataatcctgg

SEQ ID NO: 4680820 - DNA, 25 bp, Homo sapien
ccaaggttgctactcagttttcaat

SEQ ID NO: 4680821 - DNA, 25 bp, Homo sapien
tgaagacccttactcaggggaggac

SEQ ID NO: 4680822 - DNA, 25 bp, Homo sapien
caaggcttaggcatccagcggagga

SEQ ID NO: 4680823 - DNA, 25 bp, Homo sapien
tatatacaagctctggggatgaggg

SEQ ID NO: 4680824 - DNA, 25 bp, Homo sapien
cttaggcatccagcggaggacatct

SEQ ID NO: 4680825 - DNA, 25 bp, Homo sapien
gcccggcgggaaggctcttctcaag

SEQ ID NO: 4680826 - DNA, 25 bp, Homo sapien
tgatgacattttaaacccctcaaac

SEQ ID NO: 4680827 - DNA, 25 bp, Homo sapien
ttgatgacattttaaacccctcaaa

SEQ ID NO: 4680828 - DNA, 25 bp, Homo sapien
ggctagttcagcctacagctaggaa

SEQ ID NO: 4680829 - DNA, 25 bp, Homo sapien
gattgccagtctaggtggtatcagc

SEQ ID NO: 4680830 - DNA, 25 bp, Homo sapien
aatttgacaggtagtggctcaggaa

SEQ ID NO: 4680831 - DNA, 25 bp, Homo sapien
gaggttcccactcttatagccagag

SEQ ID NO: 4680832 - DNA, 25 bp, Homo sapien
gacatcttattcaaagagtgagtct

SEQ ID NO: 4680833 - DNA, 25 bp, Homo sapien
cttattcaaagagtgagtctgctgc

SEQ ID NO: 4680834 - DNA, 25 bp, Homo sapien
catcttattcaaagagtgagtctgc

SEQ ID NO: 4680835 - DNA, 25 bp, Homo sapien
tcttattcaaagagtgagtctgctg

SEQ ID NO: 4680836 - DNA, 25 bp, Homo sapien
tggagacacattgaagacaacttca

SEQ ID NO: 4680837 - DNA, 25 bp, Homo sapien
ctggagacacattgaagacaacttc

SEQ ID NO: 4680838 - DNA, 25 bp, Homo sapien
ttgaagacaacttcattaacagacc

SEQ ID NO: 4680839 - DNA, 25 bp, Homo sapien
acattgaagacaacttcattaacag

SEQ ID NO: 4680840 - DNA, 25 bp, Homo sapien
gatgattctcatgtgcctgagacac

SEQ ID NO: 4680841 - DNA, 25 bp, Homo sapien
ccctctttcttctgacgatgattct

SEQ ID NO: 4680842 - DNA, 25 bp, Homo sapien
ctttcttctgacgatgattctcatg

SEQ ID NO: 4680843 - DNA, 25 bp, Homo sapien
tctgacgatgattctcatgtgcctg

SEQ ID NO: 4680844 - DNA, 25 bp, Homo sapien
ctacggtcccaagcagcagttagga

SEQ ID NO: 4680845 - DNA, 25 bp, Homo sapien
gcagggcagatctagtcataaacat

SEQ ID NO: 4680846 - DNA, 25 bp, Homo sapien
tattgcttctattccacagtccggg

SEQ ID NO: 4680847 - DNA, 25 bp, Homo sapien
tcttcataacattgagggtgcccca

SEQ ID NO: 4680848 - DNA, 25 bp, Homo sapien
taaaggctgtgatgcagaagttcca

SEQ ID NO: 4680849 - DNA, 25 bp, Homo sapien
catgaagcaacagaataggccgggc

SEQ ID NO: 4680850 - DNA, 25 bp, Homo sapien
tggcagagccaagttatcacggata

SEQ ID NO: 4680851 - DNA, 25 bp, Homo sapien
tctgagcattcaggcctttggcaac

SEQ ID NO: 4680852 - DNA, 25 bp, Homo sapien
tttagtgtatatgctgccaaagtga

SEQ ID NO: 4680853 - DNA, 25 bp, Homo sapien
tttgtgtgtcatgcttgctcaggga

SEQ ID NO: 4680854 - DNA, 25 bp, Homo sapien
gctcagggacaatgctaatcttctc

SEQ ID NO: 4680855 - DNA, 25 bp, Homo sapien
ttgtgtgtcatgcttgctcagggac

SEQ ID NO: 4680856 - DNA, 25 bp, Homo sapien
tacacaaatggccgcccatacacat

SEQ ID NO: 4680857 - DNA, 25 bp, Homo sapien
aatctgcacatgaaactcagcccct

SEQ ID NO: 4680858 - DNA, 25 bp, Homo sapien
acaaatggccgcccatacacatagt

SEQ ID NO: 4680859 - DNA, 25 bp, Homo sapien
tcagcccctccgctggcttctacac

SEQ ID NO: 4680860 - DNA, 25 bp, Homo sapien
agagcctcttctgcgttctgagctt

SEQ ID NO: 4680861 - DNA, 25 bp, Homo sapien
agcctcttctgcgttctgagcttct

SEQ ID NO: 4680862 - DNA, 25 bp, Homo sapien
ctcagagcctcttctgcgttctgag

SEQ ID NO: 4680863 - DNA, 25 bp, Homo sapien
cagagcctcttctgcgttctgagct

SEQ ID NO: 4680864 - DNA, 25 bp, Homo sapien
tcaaccctcctaattccatggctgg

SEQ ID NO: 4680865 - DNA, 25 bp, Homo sapien
cactgttaggcttccggacggtccg

SEQ ID NO: 4680866 - DNA, 25 bp, Homo sapien
cagagcccactgttaggcttccgga

SEQ ID NO: 4680867 - DNA, 25 bp, Homo sapien
agataaaatggcctcaaccctccta

SEQ ID NO: 4680868 - DNA, 25 bp, Homo sapien
gctgcatgcaagatcttgaagatcc

SEQ ID NO: 4680869 - DNA, 25 bp, Homo sapien
cagtggctcagccagaatctaatga

SEQ ID NO: 4680870 - DNA, 25 bp, Homo sapien
aatgagagttgtaggtagcagagtc

SEQ ID NO: 4680871 - DNA, 25 bp, Homo sapien
gaatctaatgagagttgtaggtagc

SEQ ID NO: 4680872 - DNA, 25 bp, Homo sapien
tttggcctgaactctgggatgtgga

SEQ ID NO: 4680873 - DNA, 25 bp, Homo sapien
gctgagggccagtttggcctgaact

SEQ ID NO: 4680874 - DNA, 25 bp, Homo sapien
ggatgtggaggtaccagccatgatt

SEQ ID NO: 4680875 - DNA, 25 bp, Homo sapien
ccagagagagggtttgaactgacct

SEQ ID NO: 4680876 - DNA, 25 bp, Homo sapien
taaatccaaacatacggtcaattga

SEQ ID NO: 4680877 - DNA, 25 bp, Homo sapien
gaagggtaacaagaggacataatgg

SEQ ID NO: 4680878 - DNA, 25 bp, Homo sapien
gtgaaggcaggtctccctaagagcc

SEQ ID NO: 4680879 - DNA, 25 bp, Homo sapien
aacaaagttgtaggcatcacaattc

SEQ ID NO: 4680880 - DNA, 25 bp, Homo sapien
agctccgcgcactaatcaaaaccgg

SEQ ID NO: 4680881 - DNA, 25 bp, Homo sapien
gcgctctcgcctgcgcgctgtcttc

SEQ ID NO: 4680882 - DNA, 25 bp, Homo sapien
acaacgctcccgcaggaggaggaca

SEQ ID NO: 4680883 - DNA, 25 bp, Homo sapien
cactaatcaaaaccggcggctcgcg

SEQ ID NO: 4680884 - DNA, 25 bp, Homo sapien
ccctccaaggccaggtccagcagcg

SEQ ID NO: 4680885 - DNA, 25 bp, Homo sapien
tccctccaaggccaggtccagcagc

SEQ ID NO: 4680886 - DNA, 25 bp, Homo sapien
ccaaggccaggtccagcagcgccat

SEQ ID NO: 4680887 - DNA, 25 bp, Homo sapien
ctccaaggccaggtccagcagcgcc

SEQ ID NO: 4680888 - DNA, 25 bp, Homo sapien
caagaagaggacgaacccgaagacg

SEQ ID NO: 4680889 - DNA, 25 bp, Homo sapien
caccaagaagaggacgaacccgaag

SEQ ID NO: 4680890 - DNA, 25 bp, Homo sapien
gtgtagatgatagccatgaaatgca

SEQ ID NO: 4680891 - DNA, 25 bp, Homo sapien
gatagccatgaaatgcatcagccac

SEQ ID NO: 4680892 - DNA, 25 bp, Homo sapien
cacacagattggaaggatagtcaca

SEQ ID NO: 4680893 - DNA, 25 bp, Homo sapien
aggatagtcacaaaaggttaacaag

SEQ ID NO: 4680894 - DNA, 25 bp, Homo sapien
cagaacaataatcataatatagtcc

SEQ ID NO: 4680895 - DNA, 25 bp, Homo sapien
gcacaaaacggcttttcaataaaca

SEQ ID NO: 4680896 - DNA, 25 bp, Homo sapien
gctctggagaatcgttccacaggtg

SEQ ID NO: 4680897 - DNA, 25 bp, Homo sapien
tggagaatcgttccacaggtggaaa

SEQ ID NO: 4680898 - DNA, 25 bp, Homo sapien
tctggagaatcgttccacaggtgga

SEQ ID NO: 4680899 - DNA, 25 bp, Homo sapien
tgctctggagaatcgttccacaggt

SEQ ID NO: 4680900 - DNA, 25 bp, Homo sapien
ctgaaaggcaagcagaaaaatcctg

SEQ ID NO: 4680901 - DNA, 25 bp, Homo sapien
gaaaggcaagcagaaaaatcctggt

SEQ ID NO: 4680902 - DNA, 25 bp, Homo sapien
aaggcaagcagaaaaatcctggtcc

SEQ ID NO: 4680903 - DNA, 25 bp, Homo sapien
ggcaagcagaaaaatcctggtccat

SEQ ID NO: 4680904 - DNA, 25 bp, Homo sapien
ttctgagagccttgggtaaatctgg

SEQ ID NO: 4680905 - DNA, 25 bp, Homo sapien
gataagaatgacaggacaactgttc

SEQ ID NO: 4680906 - DNA, 25 bp, Homo sapien
agagccttgggtaaatctggactcc

SEQ ID NO: 4680907 - DNA, 25 bp, Homo sapien
ggagagaagcctgagataagaatga

SEQ ID NO: 4680908 - DNA, 25 bp, Homo sapien
ctttcagtggtttcagaagagagac

SEQ ID NO: 4680909 - DNA, 25 bp, Homo sapien
agttaggatctacccctttcagtgg

SEQ ID NO: 4680910 - DNA, 25 bp, Homo sapien
ccaggttgttgattaagttaggatc

SEQ ID NO: 4680911 - DNA, 25 bp, Homo sapien
cctgggagcttgctataaggctgtt

SEQ ID NO: 4680912 - DNA, 25 bp, Homo sapien
tcctcaacctatttctgttctgtga

SEQ ID NO: 4680913 - DNA, 25 bp, Homo sapien
ctgtgatgactactactaaaggtta

SEQ ID NO: 4680914 - DNA, 25 bp, Homo sapien
tctctacttcacacggacatatagg

SEQ ID NO: 4680915 - DNA, 25 bp, Homo sapien
acggacatataggtggttagaaagg

SEQ ID NO: 4680916 - DNA, 25 bp, Homo sapien
tagtgcgcatatcatcttccttctg

SEQ ID NO: 4680917 - DNA, 25 bp, Homo sapien
gaaataagagcatgaaaaccagtca

SEQ ID NO: 4680918 - DNA, 25 bp, Homo sapien
cttccttctgattatttgagctacc

SEQ ID NO: 4680919 - DNA, 25 bp, Homo sapien
aaccagtcaccataagaagtgtagt

SEQ ID NO: 4680920 - DNA, 25 bp, Homo sapien
tcttttcattggtgctaccgagaaa

SEQ ID NO: 4680921 - DNA, 25 bp, Homo sapien
aataagtgctgcattaaggctatca

SEQ ID NO: 4680922 - DNA, 25 bp, Homo sapien
taaggctatcacatctgtgtcttct

SEQ ID NO: 4680923 - DNA, 25 bp, Homo sapien
attggtgctaccgagaaaaataaag

SEQ ID NO: 4680924 - DNA, 25 bp, Homo sapien
ggtaaaacgatgttcacaccaggca

SEQ ID NO: 4680925 - DNA, 25 bp, Homo sapien
tgcaaatatgaaagggcactgcgcc

SEQ ID NO: 4680926 - DNA, 25 bp, Homo sapien
caaatcccttctacgctggtgacaa

SEQ ID NO: 4680927 - DNA, 25 bp, Homo sapien
tgcgcctggcagtcacgtaaatgtt

SEQ ID NO: 4680928 - DNA, 25 bp, Homo sapien
aaaagcattgtatgtaaattaaatt

SEQ ID NO: 4680929 - DNA, 25 bp, Homo sapien
ctagtcaaaaagcattgtatgtaaa

SEQ ID NO: 4680930 - DNA, 25 bp, Homo sapien
agtcaaaaagcattgtatgtaaatt

SEQ ID NO: 4680931 - DNA, 25 bp, Homo sapien
caaaaagcattgtatgtaaattaaa

SEQ ID NO: 4680932 - DNA, 25 bp, Homo sapien
cttgtacacaaaggagcacttcata

SEQ ID NO: 4680933 - DNA, 25 bp, Homo sapien
tccaagaagcttcttacatacatca

SEQ ID NO: 4680934 - DNA, 25 bp, Homo sapien
ctataaacaatctagcatcaacatt

SEQ ID NO: 4680935 - DNA, 25 bp, Homo sapien
aacaatctagcatcaacatttggat

SEQ ID NO: 4680936 - DNA, 25 bp, Homo sapien
ataaacaatctagcatcaacatttg

SEQ ID NO: 4680937 - DNA, 25 bp, Homo sapien
taaacaatctagcatcaacatttgg

SEQ ID NO: 4680938 - DNA, 25 bp, Homo sapien
taatggtcctgattaattcgtaggc

SEQ ID NO: 4680939 - DNA, 25 bp, Homo sapien
gagagaccacatcagctctatgtta

SEQ ID NO: 4680940 - DNA, 25 bp, Homo sapien
gaccctcatgtctgattaatgggaa

SEQ ID NO: 4680941 - DNA, 25 bp, Homo sapien
tcaaaaggacgtaaacacctctcag

SEQ ID NO: 4680942 - DNA, 25 bp, Homo sapien
gaaaaagctacaggcgttattttga

SEQ ID NO: 4680943 - DNA, 25 bp, Homo sapien
aaaagctacaggcgttattttgaag

SEQ ID NO: 4680944 - DNA, 25 bp, Homo sapien
aaagctacaggcgttattttgaagc

SEQ ID NO: 4680945 - DNA, 25 bp, Homo sapien
tataagatcatactttgcaacttca

SEQ ID NO: 4680946 - DNA, 25 bp, Homo sapien
ctcttattccactatcacaaatcca

SEQ ID NO: 4680947 - DNA, 25 bp, Homo sapien
tattccactatcacaaatccatata

SEQ ID NO: 4680948 - DNA, 25 bp, Homo sapien
tcatatcctggcattaaattattaa

SEQ ID NO: 4680949 - DNA, 25 bp, Homo sapien
tgaaccaagcctactttttctgtca

SEQ ID NO: 4680950 - DNA, 25 bp, Homo sapien
ccctgtctgtctgctacgtaaggca

SEQ ID NO: 4680951 - DNA, 25 bp, Homo sapien
gtcatttgattcaccatgtcagtaa

SEQ ID NO: 4680952 - DNA, 25 bp, Homo sapien
caccatgtcagtaagcgtatctgga

SEQ ID NO: 4680953 - DNA, 25 bp, Homo sapien
gattaactcaagcataggacacaca

SEQ ID NO: 4680954 - DNA, 25 bp, Homo sapien
catacgatggcctatgatacagcca

SEQ ID NO: 4680955 - DNA, 25 bp, Homo sapien
gaaagagctcatggttcaaactgcc

SEQ ID NO: 4680956 - DNA, 25 bp, Homo sapien
gccaaaggccagatgcaagttccca

SEQ ID NO: 4680957 - DNA, 25 bp, Homo sapien
tttgtgggactgaactgaacctgac

SEQ ID NO: 4680958 - DNA, 25 bp, Homo sapien
taaacctacactaaggcaatgggtg

SEQ ID NO: 4680959 - DNA, 25 bp, Homo sapien
gcagagtgacttccagagattaaac

SEQ ID NO: 4680960 - DNA, 25 bp, Homo sapien
cagactccagtgaagccctagtgtt

SEQ ID NO: 4680961 - DNA, 25 bp, Homo sapien
cgtagactacctgaataaaaagtgg

SEQ ID NO: 4680962 - DNA, 25 bp, Homo sapien
cagttagtaagctaaaaatgcatcc

SEQ ID NO: 4680963 - DNA, 25 bp, Homo sapien
taaaagcatggtgttcacgaactgt

SEQ ID NO: 4680964 - DNA, 25 bp, Homo sapien
ggtatatcaaccttcgggacaatcc

SEQ ID NO: 4680965 - DNA, 25 bp, Homo sapien
cattggcagagatatagtatcttgg

SEQ ID NO: 4680966 - DNA, 25 bp, Homo sapien
tgagcaaaagctataagtcctcctg

SEQ ID NO: 4680967 - DNA, 25 bp, Homo sapien
taatcttcggcaatgtactgagcaa

SEQ ID NO: 4680968 - DNA, 25 bp, Homo sapien
ggtcagctatcgctttggccataaa

SEQ ID NO: 4680969 - DNA, 25 bp, Homo sapien
ctataaaattattgatctgctgggt

SEQ ID NO: 4680970 - DNA, 25 bp, Homo sapien
cacctactagtttatgactgcactg

SEQ ID NO: 4680971 - DNA, 25 bp, Homo sapien
gcaaagtatcatataattcactgac

SEQ ID NO: 4680972 - DNA, 25 bp, Homo sapien
gctaagtcagtcatatgaatctttc

SEQ ID NO: 4680973 - DNA, 25 bp, Homo sapien
aactgccggtattcagggtgagccc

SEQ ID NO: 4680974 - DNA, 25 bp, Homo sapien
ttataaagaccaggcaactgccggt

SEQ ID NO: 4680975 - DNA, 25 bp, Homo sapien
tagcaattatgctggcccgtgacag

SEQ ID NO: 4680976 - DNA, 25 bp, Homo sapien
gatgaacacatgcaagcgtaactgg

SEQ ID NO: 4680977 - DNA, 25 bp, Homo sapien
ttttgcattgcaacttgagtggaca

SEQ ID NO: 4680978 - DNA, 25 bp, Homo sapien
ttgaatatgagccagagttttgcat

SEQ ID NO: 4680979 - DNA, 25 bp, Homo sapien
cattgcaacttgagtggacattgca

SEQ ID NO: 4680980 - DNA, 25 bp, Homo sapien
tgagccagagttttgcattgcaact

SEQ ID NO: 4680981 - DNA, 25 bp, Homo sapien
ttcaacctttaggtacattcattta

SEQ ID NO: 4680982 - DNA, 25 bp, Homo sapien
tcttcaacctttaggtacattcatt

SEQ ID NO: 4680983 - DNA, 25 bp, Homo sapien
cttcaacctttaggtacattcattt

SEQ ID NO: 4680984 - DNA, 25 bp, Homo sapien
aatcttcaacctttaggtacattca

SEQ ID NO: 4680985 - DNA, 25 bp, Homo sapien
ggcctacgctctgatgaatacagat

SEQ ID NO: 4680986 - DNA, 25 bp, Homo sapien
catttgtatggcctacgctctgatg

SEQ ID NO: 4680987 - DNA, 25 bp, Homo sapien
taaattcatttgtatggcctacgct

SEQ ID NO: 4680988 - DNA, 25 bp, Homo sapien
tctatttttgtctaggatgtcaaag

SEQ ID NO: 4680989 - DNA, 25 bp, Homo sapien
taccctgtgatagaaagaccattct

SEQ ID NO: 4680990 - DNA, 25 bp, Homo sapien
tcctggctacaagacaaatcctttt

SEQ ID NO: 4680991 - DNA, 25 bp, Homo sapien
ttttaccctgtgatagaaagaccat

SEQ ID NO: 4680992 - DNA, 25 bp, Homo sapien
tttaaaacaatatcctggctacaag

SEQ ID NO: 4680993 - DNA, 25 bp, Homo sapien
catctgaacacatggtgggctgccc

SEQ ID NO: 4680994 - DNA, 25 bp, Homo sapien
agcatgttaattcgtagtttggtcc

SEQ ID NO: 4680995 - DNA, 25 bp, Homo sapien
cacaaattattgtagcaggaagcat

SEQ ID NO: 4680996 - DNA, 25 bp, Homo sapien
agtcaaatataaaccatgccaggca

SEQ ID NO: 4680997 - DNA, 25 bp, Homo sapien
aaatcaagtctgcttccttatgtaa

SEQ ID NO: 4680998 - DNA, 25 bp, Homo sapien
gtatactatgtaaaatcaagtctgc

SEQ ID NO: 4680999 - DNA, 25 bp, Homo sapien
taatttaactgccatgttataccgt

SEQ ID NO: 4681000 - DNA, 25 bp, Homo sapien
catgttataccgttcaagaaaatgc

SEQ ID NO: 4681001 - DNA, 25 bp, Homo sapien
taatctgtagcgaccagttctccag

SEQ ID NO: 4681002 - DNA, 25 bp, Homo sapien
ttctccagcttatagttgggtccca

SEQ ID NO: 4681003 - DNA, 25 bp, Homo sapien
catggattcgcggatgaaccaggcg

SEQ ID NO: 4681004 - DNA, 25 bp, Homo sapien
gttttgaaaaacacagtgtgccacc

SEQ ID NO: 4681005 - DNA, 25 bp, Homo sapien
caagattacgcttcggcagtgcaaa

SEQ ID NO: 4681006 - DNA, 25 bp, Homo sapien
tagccctgcagtaggcattcctgtg

SEQ ID NO: 4681007 - DNA, 25 bp, Homo sapien
tgtagtgggtcacaaccagactggt

SEQ ID NO: 4681008 - DNA, 25 bp, Homo sapien
caagttaagcacaacctggcgagca

SEQ ID NO: 4681009 - DNA, 25 bp, Homo sapien
tgaacaaaaatttaagacaatgatt

SEQ ID NO: 4681010 - DNA, 25 bp, Homo sapien
tttgaacaaaaatttaagacaatga

SEQ ID NO: 4681011 - DNA, 25 bp, Homo sapien
aaaacatggtatatattctagacac

SEQ ID NO: 4681012 - DNA, 25 bp, Homo sapien
aataataaaacatggtatatattct

SEQ ID NO: 4681013 - DNA, 25 bp, Homo sapien
tctgatgtgaatggtggaacatgct

SEQ ID NO: 4681014 - DNA, 25 bp, Homo sapien
ggtgattttaacaggcaaccaatgt

SEQ ID NO: 4681015 - DNA, 25 bp, Homo sapien
gatttcaaaaggaatacttgacaga

SEQ ID NO: 4681016 - DNA, 25 bp, Homo sapien
tagaaaagccatacttaagtcacag

SEQ ID NO: 4681017 - DNA, 25 bp, Homo sapien
catcagagtcatatgggtgctctca

SEQ ID NO: 4681018 - DNA, 25 bp, Homo sapien
cctgggagctgcctttcttaaactg

SEQ ID NO: 4681019 - DNA, 25 bp, Homo sapien
tatctgtgcccatcgctttcatgtc

SEQ ID NO: 4681020 - DNA, 25 bp, Homo sapien
ttcacacgcagccaaacctaaagca

SEQ ID NO: 4681021 - DNA, 25 bp, Homo sapien
gaggaaacaccttcctaaatgcaaa

SEQ ID NO: 4681022 - DNA, 25 bp, Homo sapien
aggaaacaccttcctaaatgcaaag

SEQ ID NO: 4681023 - DNA, 25 bp, Homo sapien
tgaggaaacaccttcctaaatgcaa

SEQ ID NO: 4681024 - DNA, 25 bp, Homo sapien
cttgaggaaacaccttcctaaatgc

SEQ ID NO: 4681025 - DNA, 25 bp, Homo sapien
gtctaattgtttgtgggcagcccat

SEQ ID NO: 4681026 - DNA, 25 bp, Homo sapien
ggtctaattgtttgtgggcagccca

SEQ ID NO: 4681027 - DNA, 25 bp, Homo sapien
ggcaggttgggtctaattgtttgtg

SEQ ID NO: 4681028 - DNA, 25 bp, Homo sapien
ttgggtctaattgtttgtgggcagc

SEQ ID NO: 4681029 - DNA, 25 bp, Homo sapien
taatgtgtggcacaaacaatggtaa

SEQ ID NO: 4681030 - DNA, 25 bp, Homo sapien
aatgtgtggcacaaacaatggtaag

SEQ ID NO: 4681031 - DNA, 25 bp, Homo sapien
tgtgtggcacaaacaatggtaagaa

SEQ ID NO: 4681032 - DNA, 25 bp, Homo sapien
atgtgtggcacaaacaatggtaaga

SEQ ID NO: 4681033 - DNA, 25 bp, Homo sapien
tacactgaaactccggtcttgacag

SEQ ID NO: 4681034 - DNA, 25 bp, Homo sapien
cggtcttgacagtgactctgtggct

SEQ ID NO: 4681035 - DNA, 25 bp, Homo sapien
tcagccccaggattgcttgcttgca

SEQ ID NO: 4681036 - DNA, 25 bp, Homo sapien
tgactctgtggctcacaatcagccc

SEQ ID NO: 4681037 - DNA, 25 bp, Homo sapien
aaagcactttcttccatagtcaagg

SEQ ID NO: 4681038 - DNA, 25 bp, Homo sapien
tgtggactcggaaagcacagacctg

SEQ ID NO: 4681039 - DNA, 25 bp, Homo sapien
gacctgctgacacagcaagcattag

SEQ ID NO: 4681040 - DNA, 25 bp, Homo sapien
ggatctccagcacaccatatgttgg

SEQ ID NO: 4681041 - DNA, 25 bp, Homo sapien
agccttcagggcaccccaagtttgc

SEQ ID NO: 4681042 - DNA, 25 bp, Homo sapien
cccgaggaggttgatagaggttggt

SEQ ID NO: 4681043 - DNA, 25 bp, Homo sapien
ccagaaaaagcatagcgaagtcaac

SEQ ID NO: 4681044 - DNA, 25 bp, Homo sapien
catagcgaagtcaacccgaggaggt

SEQ ID NO: 4681045 - DNA, 25 bp, Homo sapien
tttgaggatccagtgaagagtgttt

SEQ ID NO: 4681046 - DNA, 25 bp, Homo sapien
tctcacattcgtttggtactggtgg

SEQ ID NO: 4681047 - DNA, 25 bp, Homo sapien
cagctgtggcctgaaaataagctac

SEQ ID NO: 4681048 - DNA, 25 bp, Homo sapien
tctttttctcacattcgtttggtac

SEQ ID NO: 4681049 - DNA, 25 bp, Homo sapien
gctactgtgggttttgtgtggacca

SEQ ID NO: 4681050 - DNA, 25 bp, Homo sapien
gagcaggcagaacatgtcccctttg

SEQ ID NO: 4681051 - DNA, 25 bp, Homo sapien
ccagaaaataggcagccacgggact

SEQ ID NO: 4681052 - DNA, 25 bp, Homo sapien
cacgggactctatgcactgattcca

SEQ ID NO: 4681053 - DNA, 25 bp, Homo sapien
gactttctcatgacccgaaccagaa

SEQ ID NO: 4681054 - DNA, 25 bp, Homo sapien
tggtgagaactccagggccgagtaa

SEQ ID NO: 4681055 - DNA, 25 bp, Homo sapien
tagctctgtgctttagtccctggga

SEQ ID NO: 4681056 - DNA, 25 bp, Homo sapien
taatggagagtacaaaggtccttct

SEQ ID NO: 4681057 - DNA, 25 bp, Homo sapien
gagaacctagtgtgtggacctgaag

SEQ ID NO: 4681058 - DNA, 25 bp, Homo sapien
cacttgagcggcacagagatttggg

SEQ ID NO: 4681059 - DNA, 25 bp, Homo sapien
cgtgggcttgtgtcccatcccctag

SEQ ID NO: 4681060 - DNA, 25 bp, Homo sapien
tctttgggtccgtgggcttgtgtcc

SEQ ID NO: 4681061 - DNA, 25 bp, Homo sapien
accagatgcattcacttgagcggca

SEQ ID NO: 4681062 - DNA, 25 bp, Homo sapien
tatccttggaatcagatacgaggcc

SEQ ID NO: 4681063 - DNA, 25 bp, Homo sapien
cctctgactggtggaaatggagctt

SEQ ID NO: 4681064 - DNA, 25 bp, Homo sapien
tgttttgcctgccactagtctggca

SEQ ID NO: 4681065 - DNA, 25 bp, Homo sapien
gatacgaggccctgtgtcttctgtt

SEQ ID NO: 4681066 - DNA, 25 bp, Homo sapien
ttttgcttgttgattggccagttgt

SEQ ID NO: 4681067 - DNA, 25 bp, Homo sapien
tgtctttttctcagtacttggccta

SEQ ID NO: 4681068 - DNA, 25 bp, Homo sapien
tcttgattaatctggtatgtgaaga

SEQ ID NO: 4681069 - DNA, 25 bp, Homo sapien
gttaattctgtctttgtgagttgtc

SEQ ID NO: 4681070 - DNA, 25 bp, Homo sapien
gtactgccctccgacgacaacttag

SEQ ID NO: 4681071 - DNA, 25 bp, Homo sapien
tccgacgacaacttaggatcagcat

SEQ ID NO: 4681072 - DNA, 25 bp, Homo sapien
tctgctctcgtcttaggtaaattat

SEQ ID NO: 4681073 - DNA, 25 bp, Homo sapien
tggcccctgccagtgttaggaatga

SEQ ID NO: 4681074 - DNA, 25 bp, Homo sapien
tagagagaggcgagtaatatcctga

SEQ ID NO: 4681075 - DNA, 25 bp, Homo sapien
ttagagagaggcgagtaatatcctg

SEQ ID NO: 4681076 - DNA, 25 bp, Homo sapien
agagagaggcgagtaatatcctgac

SEQ ID NO: 4681077 - DNA, 25 bp, Homo sapien
cattgactgcaagagaatctctgca

SEQ ID NO: 4681078 - DNA, 25 bp, Homo sapien
cagtgacgtaggcaaatgtttcaag

SEQ ID NO: 4681079 - DNA, 25 bp, Homo sapien
tggccatgccaataagtttcctgct

SEQ ID NO: 4681080 - DNA, 25 bp, Homo sapien
tctgagtgatgcctgagggtcagct

SEQ ID NO: 4681081 - DNA, 25 bp, Homo sapien
ccacctggtcttagagcctgggttt

SEQ ID NO: 4681082 - DNA, 25 bp, Homo sapien
actggctccctggtggccacgttca

SEQ ID NO: 4681083 - DNA, 25 bp, Homo sapien
cttccacctggtcttagagcctggg

SEQ ID NO: 4681084 - DNA, 25 bp, Homo sapien
tggctccctggtggccacgttcact

SEQ ID NO: 4681085 - DNA, 25 bp, Homo sapien
gcttagtctccaaaggacacccatt

SEQ ID NO: 4681086 - DNA, 25 bp, Homo sapien
tgccttgtaggatcttgcatttccc

SEQ ID NO: 4681087 - DNA, 25 bp, Homo sapien
gataagactgggcatgaatcatgta

SEQ ID NO: 4681088 - DNA, 25 bp, Homo sapien
gccgttttcttaccactacctgaca

SEQ ID NO: 4681089 - DNA, 25 bp, Homo sapien
tattaatgtataggactccccctcc

SEQ ID NO: 4681090 - DNA, 25 bp, Homo sapien
ccccaaatgcttgaggatacttatt

SEQ ID NO: 4681091 - DNA, 25 bp, Homo sapien
catatccccaaatgcttgaggatac

SEQ ID NO: 4681092 - DNA, 25 bp, Homo sapien
cttcatatccccaaatgcttgagga

SEQ ID NO: 4681093 - DNA, 25 bp, Homo sapien
gagatacccagagtgctccttgtac

SEQ ID NO: 4681094 - DNA, 25 bp, Homo sapien
tacctcttggagaccggagataccc

SEQ ID NO: 4681095 - DNA, 25 bp, Homo sapien
gaaagggcggtgacagacactgggt

SEQ ID NO: 4681096 - DNA, 25 bp, Homo sapien
cagtctcaggccgaaaagcagagga

SEQ ID NO: 4681097 - DNA, 25 bp, Homo sapien
ccaagacttaaatggtcggtgcttc

SEQ ID NO: 4681098 - DNA, 25 bp, Homo sapien
tctgcctgtgagtcctacttcctgg

SEQ ID NO: 4681099 - DNA, 25 bp, Homo sapien
aactttcactggtctgatgaggtcc

SEQ ID NO: 4681100 - DNA, 25 bp, Homo sapien
gatggaaactgaaacacttcttgct

SEQ ID NO: 4681101 - DNA, 25 bp, Homo sapien
atgcttaatgcatttgcatgtcata

SEQ ID NO: 4681102 - DNA, 25 bp, Homo sapien
catacttgcacagggatcatgctag

SEQ ID NO: 4681103 - DNA, 25 bp, Homo sapien
gcacagggatcatgctagtctctgt

SEQ ID NO: 4681104 - DNA, 25 bp, Homo sapien
tgcttaatgcatttgcatgtcatac

SEQ ID NO: 4681105 - DNA, 25 bp, Homo sapien
tagaatgagaagtttgatctgtaac

SEQ ID NO: 4681106 - DNA, 25 bp, Homo sapien
aaagagtagaatgagaagtttgatc

SEQ ID NO: 4681107 - DNA, 25 bp, Homo sapien
ggaaagagtagaatgagaagtttga

SEQ ID NO: 4681108 - DNA, 25 bp, Homo sapien
agtagaatgagaagtttgatctgta

SEQ ID NO: 4681109 - DNA, 25 bp, Homo sapien
tttttcacgttgttagagagccgga

SEQ ID NO: 4681110 - DNA, 25 bp, Homo sapien
gagccggatgctaaatatggtgaga

SEQ ID NO: 4681111 - DNA, 25 bp, Homo sapien
aagacgcgtaaggaagagtacagga

SEQ ID NO: 4681112 - DNA, 25 bp, Homo sapien
aaatatggtgagaaagacgcgtaag

SEQ ID NO: 4681113 - DNA, 25 bp, Homo sapien
cgccgggagggaccggcggcggcat

SEQ ID NO: 4681114 - DNA, 25 bp, Homo sapien
gaggaggcgcgggcgcgccgggagg

SEQ ID NO: 4681115 - DNA, 25 bp, Homo sapien
cccgggaggaggcgcgggcgcgccg

SEQ ID NO: 4681116 - DNA, 25 bp, Homo sapien
gcgccgggagggaccggcggcggca

SEQ ID NO: 4681117 - DNA, 25 bp, Homo sapien
cggaacgggcgtgtcctaagcccag

SEQ ID NO: 4681118 - DNA, 25 bp, Homo sapien
cccgcggcgcctgtagccttatctc

SEQ ID NO: 4681119 - DNA, 25 bp, Homo sapien
gcccaggccccgacaagaggaagga

SEQ ID NO: 4681120 - DNA, 25 bp, Homo sapien
gcagcaagtgcggagccagagacgg

SEQ ID NO: 4681121 - DNA, 25 bp, Homo sapien
cagctccctttcacgtcctggaaga

SEQ ID NO: 4681122 - DNA, 25 bp, Homo sapien
cattatccgatgagtgtctgtcccc

SEQ ID NO: 4681123 - DNA, 25 bp, Homo sapien
tcatctgggccttgcgctgtggtca

SEQ ID NO: 4681124 - DNA, 25 bp, Homo sapien
gagtggcttgaatcctccgcaacat

SEQ ID NO: 4681125 - DNA, 25 bp, Homo sapien
ggtcaagtgtgtcgcccctgggtgg

SEQ ID NO: 4681126 - DNA, 25 bp, Homo sapien
agtgtgtcgcccctgggtggcctgg

SEQ ID NO: 4681127 - DNA, 25 bp, Homo sapien
ctggtcaagtgtgtcgcccctgggt

SEQ ID NO: 4681128 - DNA, 25 bp, Homo sapien
tcaagtgtgtcgcccctgggtggcc

SEQ ID NO: 4681129 - DNA, 25 bp, Homo sapien
ctacaacaaactcccgcttagattc

SEQ ID NO: 4681130 - DNA, 25 bp, Homo sapien
catttctacaacaaactcccgctta

SEQ ID NO: 4681131 - DNA, 25 bp, Homo sapien
tcatccttgggtcttggtttactcc

SEQ ID NO: 4681132 - DNA, 25 bp, Homo sapien
tagattcctccccaacgtccttctc

SEQ ID NO: 4681133 - DNA, 25 bp, Homo sapien
aaactgtagcatagataaggaccat

SEQ ID NO: 4681134 - DNA, 25 bp, Homo sapien
aaaactgtagcatagataaggacca

SEQ ID NO: 4681135 - DNA, 25 bp, Homo sapien
catcctctgttagtaaaattttagg

SEQ ID NO: 4681136 - DNA, 25 bp, Homo sapien
ccatcctctgttagtaaaattttag

SEQ ID NO: 4681137 - DNA, 25 bp, Homo sapien
taaacaagcagtgacgtagcgttcg

SEQ ID NO: 4681138 - DNA, 25 bp, Homo sapien
cctttagcaagcctccgtagacctt

SEQ ID NO: 4681139 - DNA, 25 bp, Homo sapien
aagactcgtttggagccgtccctgg

SEQ ID NO: 4681140 - DNA, 25 bp, Homo sapien
gtagcgttcgtccaggtcctttcca

SEQ ID NO: 4681141 - DNA, 25 bp, Homo sapien
gagatgaaggcagcgaatgcagtgg

SEQ ID NO: 4681142 - DNA, 25 bp, Homo sapien
agaaaggatgccatgttcctttggt

SEQ ID NO: 4681143 - DNA, 25 bp, Homo sapien
agagatgaaggcagcgaatgcagtg

SEQ ID NO: 4681144 - DNA, 25 bp, Homo sapien
gaaaggatgccatgttcctttggtc

SEQ ID NO: 4681145 - DNA, 25 bp, Homo sapien
taagaagacccagaagctcgaaatt

SEQ ID NO: 4681146 - DNA, 25 bp, Homo sapien
gaagacccagaagctcgaaattttc

SEQ ID NO: 4681147 - DNA, 25 bp, Homo sapien
agacccagaagctcgaaattttcct

SEQ ID NO: 4681148 - DNA, 25 bp, Homo sapien
acccagaagctcgaaattttccttg

SEQ ID NO: 4681149 - DNA, 25 bp, Homo sapien
attcagtttggatggcttttccatc

SEQ ID NO: 4681150 - DNA, 25 bp, Homo sapien
ttattcagtttggatggcttttcca

SEQ ID NO: 4681151 - DNA, 25 bp, Homo sapien
tattcagtttggatggcttttccat

SEQ ID NO: 4681152 - DNA, 25 bp, Homo sapien
ctttagtgtgggctgatttgacaga

SEQ ID NO: 4681153 - DNA, 25 bp, Homo sapien
catgcctcttattgctgtgctttag

SEQ ID NO: 4681154 - DNA, 25 bp, Homo sapien
taggattgtcctgatcgctccctca

SEQ ID NO: 4681155 - DNA, 25 bp, Homo sapien
gacagatatatgcattgccagagga

SEQ ID NO: 4681156 - DNA, 25 bp, Homo sapien
gcccagcctgtatatccatattact

SEQ ID NO: 4681157 - DNA, 25 bp, Homo sapien
tgttttgatcctccgcaatgtttgt

SEQ ID NO: 4681158 - DNA, 25 bp, Homo sapien
cccagcctgtatatccatattactg

SEQ ID NO: 4681159 - DNA, 25 bp, Homo sapien
atgtgttttgatcctccgcaatgtt

SEQ ID NO: 4681160 - DNA, 25 bp, Homo sapien
gttcgtctaacagaagaaaatgctg

SEQ ID NO: 4681161 - DNA, 25 bp, Homo sapien
gaatgttcgtctaacagaagaaaat

SEQ ID NO: 4681162 - DNA, 25 bp, Homo sapien
taagaatgttcgtctaacagaagaa

SEQ ID NO: 4681163 - DNA, 25 bp, Homo sapien
ttttaagaatgttcgtctaacagaa

SEQ ID NO: 4681164 - DNA, 25 bp, Homo sapien
gtaacctgaggcatatgttccagag

SEQ ID NO: 4681165 - DNA, 25 bp, Homo sapien
gttttgcatcaaagtgtcacctcat

SEQ ID NO: 4681166 - DNA, 25 bp, Homo sapien
tgctctgaccaaagactgactgttg

SEQ ID NO: 4681167 - DNA, 25 bp, Homo sapien
gaaccagtgcagagcggcctttact

SEQ ID NO: 4681168 - DNA, 25 bp, Homo sapien
ggctccacctagtatgataatcatg

SEQ ID NO: 4681169 - DNA, 25 bp, Homo sapien
tcccttatgacagtgaggccttctt

SEQ ID NO: 4681170 - DNA, 25 bp, Homo sapien
caaggtgtcttgacttctacacaaa

SEQ ID NO: 4681171 - DNA, 25 bp, Homo sapien
gaagtggctcctatgaatgcctctg

SEQ ID NO: 4681172 - DNA, 25 bp, Homo sapien
ggtttttctcagtcctcaagcgaga

SEQ ID NO: 4681173 - DNA, 25 bp, Homo sapien
tagctgtagcacatggatgttgtcc

SEQ ID NO: 4681174 - DNA, 25 bp, Homo sapien
tcaccactgagcaacacttagttgg

SEQ ID NO: 4681175 - DNA, 25 bp, Homo sapien
tactgagtacccacgtatttggagt

SEQ ID NO: 4681176 - DNA, 25 bp, Homo sapien
gatcagatgagatcaggtgcattca

SEQ ID NO: 4681177 - DNA, 25 bp, Homo sapien
attcagggtggtatggctgtagacc

SEQ ID NO: 4681178 - DNA, 25 bp, Homo sapien
cattcagggtggtatggctgtagac

SEQ ID NO: 4681179 - DNA, 25 bp, Homo sapien
tgagatcagatgagatcaggtgcat

SEQ ID NO: 4681180 - DNA, 25 bp, Homo sapien
tgagcctctggtaaaatggagctaa

SEQ ID NO: 4681181 - DNA, 25 bp, Homo sapien
cctcccagattttggacctgagcct

SEQ ID NO: 4681182 - DNA, 25 bp, Homo sapien
gggctatagttacgggccacctaca

SEQ ID NO: 4681183 - DNA, 25 bp, Homo sapien
gagtaatcaagaatgcctcccagat

SEQ ID NO: 4681184 - DNA, 25 bp, Homo sapien
gcctggctagcaaatctgtttcaga

SEQ ID NO: 4681185 - DNA, 25 bp, Homo sapien
tataaaaagtcaaccttcatataac

SEQ ID NO: 4681186 - DNA, 25 bp, Homo sapien
tccagttggctctgtataggtgaag

SEQ ID NO: 4681187 - DNA, 25 bp, Homo sapien
ctagggggggccaaaatccatgcat

SEQ ID NO: 4681188 - DNA, 25 bp, Homo sapien
gttatctttatctgatagcttacca

SEQ ID NO: 4681189 - DNA, 25 bp, Homo sapien
tgttgtaaattactatgggtaagac

SEQ ID NO: 4681190 - DNA, 25 bp, Homo sapien
gagtaagattatgtaagtgcaagta

SEQ ID NO: 4681191 - DNA, 25 bp, Homo sapien
gcttaccatagtgtgtacataccac

SEQ ID NO: 4681192 - DNA, 25 bp, Homo sapien
cctaaggcgtgaattcctggtggct

SEQ ID NO: 4681193 - DNA, 25 bp, Homo sapien
tactgcacatatgttaagtgatgga

SEQ ID NO: 4681194 - DNA, 25 bp, Homo sapien
tcactgtgggcgtatttaggcaagc

SEQ ID NO: 4681195 - DNA, 25 bp, Homo sapien
gcattttgccgtctcttgactctta

SEQ ID NO: 4681196 - DNA, 25 bp, Homo sapien
cgcggggcgggcgtcctcctgccgg

SEQ ID NO: 4681197 - DNA, 25 bp, Homo sapien
ggcgcgcggggcgggcgtcctcctg

SEQ ID NO: 4681198 - DNA, 25 bp, Homo sapien
gcgcgcggggcgggcgtcctcctgc

SEQ ID NO: 4681199 - DNA, 25 bp, Homo sapien
tcagaaaatggtgcgcggcgctggg

SEQ ID NO: 4681200 - DNA, 25 bp, Homo sapien
agccaaagctcgcttgtccccggaa

SEQ ID NO: 4681201 - DNA, 25 bp, Homo sapien
tctgctcgcggttagcccgtcagtc

SEQ ID NO: 4681202 - DNA, 25 bp, Homo sapien
ctctccgcgggacgcgtaagggctg

SEQ ID NO: 4681203 - DNA, 25 bp, Homo sapien
tggatgggtaagtactaggcggcgc

SEQ ID NO: 4681204 - DNA, 25 bp, Homo sapien
gtcttacagcgaccgcgggaagagg

SEQ ID NO: 4681205 - DNA, 25 bp, Homo sapien
ggcccggtctgcgaagccggaaggc

SEQ ID NO: 4681206 - DNA, 25 bp, Homo sapien
catagcttttcctgccggcagaggg

SEQ ID NO: 4681207 - DNA, 25 bp, Homo sapien
tcccgcgaacgcaggagggaggctg

SEQ ID NO: 4681208 - DNA, 25 bp, Homo sapien
aattcaatactagacggttaggtcg

SEQ ID NO: 4681209 - DNA, 25 bp, Homo sapien
ggtcgaaatgcactcagatacttaa

SEQ ID NO: 4681210 - DNA, 25 bp, Homo sapien
tggacgtgtcatctacagcctcgcg

SEQ ID NO: 4681211 - DNA, 25 bp, Homo sapien
tgtatacaaattccagtccgggcag

SEQ ID NO: 4681212 - DNA, 25 bp, Homo sapien
cagtgacggctggaacctgattttc

SEQ ID NO: 4681213 - DNA, 25 bp, Homo sapien
gcttttcaaatgacgaagccacggg

SEQ ID NO: 4681214 - DNA, 25 bp, Homo sapien
tcttgtgtattcatgcagtgcccgg

SEQ ID NO: 4681215 - DNA, 25 bp, Homo sapien
gcccggcacatagtaggttaatact

SEQ ID NO: 4681216 - DNA, 25 bp, Homo sapien
ggctttatataaaggattgttgaat

SEQ ID NO: 4681217 - DNA, 25 bp, Homo sapien
gaaatttggaatagcaaagataggg

SEQ ID NO: 4681218 - DNA, 25 bp, Homo sapien
tataaaggatattaaggcttatgtc

SEQ ID NO: 4681219 - DNA, 25 bp, Homo sapien
ctagggatctattcctcagatgtaa

SEQ ID NO: 4681220 - DNA, 25 bp, Homo sapien
tcatgaggggtctgatggtggccat

SEQ ID NO: 4681221 - DNA, 25 bp, Homo sapien
aacgcagttgtctctgggtttccac

SEQ ID NO: 4681222 - DNA, 25 bp, Homo sapien
cccttgaatcttctatgaacgcagt

SEQ ID NO: 4681223 - DNA, 25 bp, Homo sapien
ttgcttctctataaccaatgttggg

SEQ ID NO: 4681224 - DNA, 25 bp, Homo sapien
tgttttcattgcttctctataacca

SEQ ID NO: 4681225 - DNA, 25 bp, Homo sapien
cttccaagtccttgacaatgcgtac

SEQ ID NO: 4681226 - DNA, 25 bp, Homo sapien
ccttccaagtccttgacaatgcgta

SEQ ID NO: 4681227 - DNA, 25 bp, Homo sapien
agcagcccttccaagtccttgacaa

SEQ ID NO: 4681228 - DNA, 25 bp, Homo sapien
agcccttccaagtccttgacaatgc

SEQ ID NO: 4681229 - DNA, 25 bp, Homo sapien
tatctcaggacagtaagattttctg

SEQ ID NO: 4681230 - DNA, 25 bp, Homo sapien
agttccagaggacacattgtgagct

SEQ ID NO: 4681231 - DNA, 25 bp, Homo sapien
gctgcctggcattgcgactggtgac

SEQ ID NO: 4681232 - DNA, 25 bp, Homo sapien
tgtgctgcctggcattgcgactggt

SEQ ID NO: 4681233 - DNA, 25 bp, Homo sapien
tatgaattcaaggaagtacgtatat

SEQ ID NO: 4681234 - DNA, 25 bp, Homo sapien
tcaaggaagtacgtatatgttcacg

SEQ ID NO: 4681235 - DNA, 25 bp, Homo sapien
gaattcaaggaagtacgtatatgtt

SEQ ID NO: 4681236 - DNA, 25 bp, Homo sapien
aagtacgtatatgttcacggcagca

SEQ ID NO: 4681237 - DNA, 25 bp, Homo sapien
tatactttgcgatggctttcacaga

SEQ ID NO: 4681238 - DNA, 25 bp, Homo sapien
ctatttttatactttgcgatggctt

SEQ ID NO: 4681239 - DNA, 25 bp, Homo sapien
tatattcctaaattattagaggtag

SEQ ID NO: 4681240 - DNA, 25 bp, Homo sapien
cacagaaggcaaatatattcctaaa

SEQ ID NO: 4681241 - DNA, 25 bp, Homo sapien
tgttatgggccctaaatgactctat

SEQ ID NO: 4681242 - DNA, 25 bp, Homo sapien
cctatgggaggtatgagtagccagt

SEQ ID NO: 4681243 - DNA, 25 bp, Homo sapien
gatacggtctttagaggctccagag

SEQ ID NO: 4681244 - DNA, 25 bp, Homo sapien
gattacctgagatacagcagctcaa

SEQ ID NO: 4681245 - DNA, 25 bp, Homo sapien
tggcgcggatctcggctcattgtaa

SEQ ID NO: 4681246 - DNA, 25 bp, Homo sapien
gcgcggatctcggctcattgtaacc

SEQ ID NO: 4681247 - DNA, 25 bp, Homo sapien
ggcgcggatctcggctcattgtaac

SEQ ID NO: 4681248 - DNA, 25 bp, Homo sapien
ctgacattcagtttcgcttttggga

SEQ ID NO: 4681249 - DNA, 25 bp, Homo sapien
tgggattatgccttggactaactca

SEQ ID NO: 4681250 - DNA, 25 bp, Homo sapien
ttgggattatgccttggactaactc

SEQ ID NO: 4681251 - DNA, 25 bp, Homo sapien
tcagtttcgcttttgggattatgcc

SEQ ID NO: 4681252 - DNA, 25 bp, Homo sapien
tggaatgagtgttgaaatgagatca

SEQ ID NO: 4681253 - DNA, 25 bp, Homo sapien
ggaatgagtgttgaaatgagatcaa

SEQ ID NO: 4681254 - DNA, 25 bp, Homo sapien
ctggaatgagtgttgaaatgagatc

SEQ ID NO: 4681255 - DNA, 25 bp, Homo sapien
tagatagcttgtgttaaggcgccag

SEQ ID NO: 4681256 - DNA, 25 bp, Homo sapien
gcaaaagtcgcgctgaagaattcat

SEQ ID NO: 4681257 - DNA, 25 bp, Homo sapien
ttaggaacgctagccctgggcagaa

SEQ ID NO: 4681258 - DNA, 25 bp, Homo sapien
cagccttcccttgtgcatcggtaga

SEQ ID NO: 4681259 - DNA, 25 bp, Homo sapien
tggtcgtacggtgacaatcaggctc

SEQ ID NO: 4681260 - DNA, 25 bp, Homo sapien
tcctgtcggcgcctagcgtctgggc

SEQ ID NO: 4681261 - DNA, 25 bp, Homo sapien
tgggcagcgtcagccgctacgtcca

SEQ ID NO: 4681262 - DNA, 25 bp, Homo sapien
gggtttctcctcgcgccgctgtgtt

SEQ ID NO: 4681263 - DNA, 25 bp, Homo sapien
gcgttcctcttcgtcgcctcccaag

SEQ ID NO: 4681264 - DNA, 25 bp, Homo sapien
tgcgtatgcagtgggcctcctgcgc

SEQ ID NO: 4681265 - DNA, 25 bp, Homo sapien
ctgcgcccagcgttcctcttcgtcg

SEQ ID NO: 4681266 - DNA, 25 bp, Homo sapien
aaaagccgggatcgccgagtgcgcc

SEQ ID NO: 4681267 - DNA, 25 bp, Homo sapien
aagctggaccgtccctccgcattta

SEQ ID NO: 4681268 - DNA, 25 bp, Homo sapien
agcagagagctaaagctggaccgtc

SEQ ID NO: 4681269 - DNA, 25 bp, Homo sapien
actttcgtagatcagaggaggtggc

SEQ ID NO: 4681270 - DNA, 25 bp, Homo sapien
gagagctaaagctggaccgtccctc

SEQ ID NO: 4681271 - DNA, 25 bp, Homo sapien
ttgaactgttttaagtctttggcta

SEQ ID NO: 4681272 - DNA, 25 bp, Homo sapien
atactctttgaactgttttaagtct

SEQ ID NO: 4681273 - DNA, 25 bp, Homo sapien
ctgttttaagtctttggctatatgc

SEQ ID NO: 4681274 - DNA, 25 bp, Homo sapien
ctctttgaactgttttaagtctttg

SEQ ID NO: 4681275 - DNA, 25 bp, Homo sapien
tataggtgaccagcttcattaattt

SEQ ID NO: 4681276 - DNA, 25 bp, Homo sapien
ggtgaccagcttcattaatttctgg

SEQ ID NO: 4681277 - DNA, 25 bp, Homo sapien
gcttcattaatttctggcctatcat

SEQ ID NO: 4681278 - DNA, 25 bp, Homo sapien
ccagcttcattaatttctggcctat

SEQ ID NO: 4681279 - DNA, 25 bp, Homo sapien
caatcacagctcactgcagccttga

SEQ ID NO: 4681280 - DNA, 25 bp, Homo sapien
tttttctgagacaggctcttgccct

SEQ ID NO: 4681281 - DNA, 25 bp, Homo sapien
gtgcaatcacagctcactgcagcct

SEQ ID NO: 4681282 - DNA, 25 bp, Homo sapien
gtcacccaggctgaagtacagtggt

SEQ ID NO: 4681283 - DNA, 25 bp, Homo sapien
aaccagcctgtatattcctctccaa

SEQ ID NO: 4681284 - DNA, 25 bp, Homo sapien
atattaccaataccccagaaaccag

SEQ ID NO: 4681285 - DNA, 25 bp, Homo sapien
aacataaaactcttgcacgacccag

SEQ ID NO: 4681286 - DNA, 25 bp, Homo sapien
gacccagaggattacactccagaag

SEQ ID NO: 4681287 - DNA, 25 bp, Homo sapien
ttaaactttctgcttactcagtggc

SEQ ID NO: 4681288 - DNA, 25 bp, Homo sapien
cagcaagggaaacccgctttcttat

SEQ ID NO: 4681289 - DNA, 25 bp, Homo sapien
ctcagtggctaagtgaaacggagac

SEQ ID NO: 4681290 - DNA, 25 bp, Homo sapien
aagataacagcaagggaaacccgct

SEQ ID NO: 4681291 - DNA, 25 bp, Homo sapien
aaaaactgtacatcctgccagcctc

SEQ ID NO: 4681292 - DNA, 25 bp, Homo sapien
tcttcagcagcagtatagattgtgc

SEQ ID NO: 4681293 - DNA, 25 bp, Homo sapien
gctgggcggtctttgcagcaataac

SEQ ID NO: 4681294 - DNA, 25 bp, Homo sapien
gctgctttcaatgcaatagctttgc

SEQ ID NO: 4681295 - DNA, 25 bp, Homo sapien
tagctttgccaatgccacggcttgc

SEQ ID NO: 4681296 - DNA, 25 bp, Homo sapien
cagtgactctaccatatagcaggac

SEQ ID NO: 4681297 - DNA, 25 bp, Homo sapien
tatgtattgaaaccactagaaagac

SEQ ID NO: 4681298 - DNA, 25 bp, Homo sapien
agaaaaacggtcagaagcactgccc

SEQ ID NO: 4681299 - DNA, 25 bp, Homo sapien
tatcaaatggcactgtcacactcac

SEQ ID NO: 4681300 - DNA, 25 bp, Homo sapien
cactgcagcactgatctgctgttca

SEQ ID NO: 4681301 - DNA, 25 bp, Homo sapien
tctcacatcaacaatacatggcaag

SEQ ID NO: 4681302 - DNA, 25 bp, Homo sapien
caatacatggcaaggcctttcctcc

SEQ ID NO: 4681303 - DNA, 25 bp, Homo sapien
tgatctgctgttcatctctcacatc

SEQ ID NO: 4681304 - DNA, 25 bp, Homo sapien
tcagatccaatctcttggtaggtgt

SEQ ID NO: 4681305 - DNA, 25 bp, Homo sapien
caaggtaggtgcctctggtgttcac

SEQ ID NO: 4681306 - DNA, 25 bp, Homo sapien
atggcactggcattatttaccagaa

SEQ ID NO: 4681307 - DNA, 25 bp, Homo sapien
ggtaggtgtgtccaatgtattggtc

SEQ ID NO: 4681308 - DNA, 25 bp, Homo sapien
acagcgtcttgccatcttgtgcatc

SEQ ID NO: 4681309 - DNA, 25 bp, Homo sapien
ctggcctccaataatactcccctca

SEQ ID NO: 4681310 - DNA, 25 bp, Homo sapien
ggcctccaataatactcccctcacc

SEQ ID NO: 4681311 - DNA, 25 bp, Homo sapien
agacagcgtcttgccatcttgtgca

SEQ ID NO: 4681312 - DNA, 25 bp, Homo sapien
gcaagttctaacctgatgtatcctg

SEQ ID NO: 4681313 - DNA, 25 bp, Homo sapien
taacgccaggtctttttcagaggaa

SEQ ID NO: 4681314 - DNA, 25 bp, Homo sapien
ggccaagttttgcagacccaacaaa

SEQ ID NO: 4681315 - DNA, 25 bp, Homo sapien
cattcgatagtctacatttccccgg

SEQ ID NO: 4681316 - DNA, 25 bp, Homo sapien
tcctgacgccatatacctaggtgtg

SEQ ID NO: 4681317 - DNA, 25 bp, Homo sapien
ttgcttgaacatacggccctcttgg

SEQ ID NO: 4681318 - DNA, 25 bp, Homo sapien
tcttttgagcgtcgagtcagcactc

SEQ ID NO: 4681319 - DNA, 25 bp, Homo sapien
ccggaatagtccagtaacaggtgca

SEQ ID NO: 4681320 - DNA, 25 bp, Homo sapien
aatttcgcacttgttgctctcgttg

SEQ ID NO: 4681321 - DNA, 25 bp, Homo sapien
tgttgctctcgttgcactcttggag

SEQ ID NO: 4681322 - DNA, 25 bp, Homo sapien
gagggaatttcgcacttgttgctct

SEQ ID NO: 4681323 - DNA, 25 bp, Homo sapien
gctctcgttgcactcttggagtgca

SEQ ID NO: 4681324 - DNA, 25 bp, Homo sapien
gaaactgcaactcgaagcatcaaga

SEQ ID NO: 4681325 - DNA, 25 bp, Homo sapien
cctttgatctatgggacaagacctt

SEQ ID NO: 4681326 - DNA, 25 bp, Homo sapien
catcaggtgcatctgtcacagtagc

SEQ ID NO: 4681327 - DNA, 25 bp, Homo sapien
tcaacattgctaatcctacatcagg

SEQ ID NO: 4681328 - DNA, 25 bp, Homo sapien
aaaatacaagccaaatttaatagct

SEQ ID NO: 4681329 - DNA, 25 bp, Homo sapien
gtgcatgactcgatcacagttcact

SEQ ID NO: 4681330 - DNA, 25 bp, Homo sapien
agtgcatgactcgatcacagttcac

SEQ ID NO: 4681331 - DNA, 25 bp, Homo sapien
gagtgcatgactcgatcacagttca

SEQ ID NO: 4681332 - DNA, 25 bp, Homo sapien
cagtgctgtttgaaccaaactggat

SEQ ID NO: 4681333 - DNA, 25 bp, Homo sapien
acagtgctgtttgaaccaaactgga

SEQ ID NO: 4681334 - DNA, 25 bp, Homo sapien
aaccaaactggatttaggttcagtg

SEQ ID NO: 4681335 - DNA, 25 bp, Homo sapien
tggatttaggttcagtggtggactg

SEQ ID NO: 4681336 - DNA, 25 bp, Homo sapien
tgtgggttcccattccaagtgcctt

SEQ ID NO: 4681337 - DNA, 25 bp, Homo sapien
tccaaatgttagtgaactgtgctga

SEQ ID NO: 4681338 - DNA, 25 bp, Homo sapien
cacacagtaaaacacactcattggg

SEQ ID NO: 4681339 - DNA, 25 bp, Homo sapien
actgaaccattaagagctgtgcatt

SEQ ID NO: 4681340 - DNA, 25 bp, Homo sapien
catacatagacataccatacttagc

SEQ ID NO: 4681341 - DNA, 25 bp, Homo sapien
ccaagcacatacatagacataccat

SEQ ID NO: 4681342 - DNA, 25 bp, Homo sapien
ataccatacttagcaatggtataag

SEQ ID NO: 4681343 - DNA, 25 bp, Homo sapien
tacatagacataccatacttagcaa

SEQ ID NO: 4681344 - DNA, 25 bp, Homo sapien
ctgttttaggccataatgcattgac

SEQ ID NO: 4681345 - DNA, 25 bp, Homo sapien
gttttaggccataatgcattgactg

SEQ ID NO: 4681346 - DNA, 25 bp, Homo sapien
ggccataatgcattgactgcaattt

SEQ ID NO: 4681347 - DNA, 25 bp, Homo sapien
aatgcattgactgcaatttcacctt

SEQ ID NO: 4681348 - DNA, 25 bp, Homo sapien
attcctaaggtggttcctcgtagag

SEQ ID NO: 4681349 - DNA, 25 bp, Homo sapien
ccagtattgattcctaaggtggttc

SEQ ID NO: 4681350 - DNA, 25 bp, Homo sapien
cctaggagcagaaacaccagtattg

SEQ ID NO: 4681351 - DNA, 25 bp, Homo sapien
ctaggagcagaaacaccagtattga

SEQ ID NO: 4681352 - DNA, 25 bp, Homo sapien
gggaactccctttatccagtacata

SEQ ID NO: 4681353 - DNA, 25 bp, Homo sapien
tgtttcccatcgtctacaccacagg

SEQ ID NO: 4681354 - DNA, 25 bp, Homo sapien
atccagtacatagcagataggaagc

SEQ ID NO: 4681355 - DNA, 25 bp, Homo sapien
acagaatcttcagtactgcttggag

SEQ ID NO: 4681356 - DNA, 25 bp, Homo sapien
caaagaaggctttttctgactttgt

SEQ ID NO: 4681357 - DNA, 25 bp, Homo sapien
tcaaagaaggctttttctgactttg

SEQ ID NO: 4681358 - DNA, 25 bp, Homo sapien
cagcttggcataaaataagtgtccg

SEQ ID NO: 4681359 - DNA, 25 bp, Homo sapien
ggctccagcgatcggcctgctttga

SEQ ID NO: 4681360 - DNA, 25 bp, Homo sapien
catgttgtctattgtatctctccca

SEQ ID NO: 4681361 - DNA, 25 bp, Homo sapien
gactataagttccataaggacagcg

SEQ ID NO: 4681362 - DNA, 25 bp, Homo sapien
tcccagcatatccatagcagcagtg

SEQ ID NO: 4681363 - DNA, 25 bp, Homo sapien
tggctttcgataccaggtcctccca

SEQ ID NO: 4681364 - DNA, 25 bp, Homo sapien
aatgacaaagttgccagtaaaactt

SEQ ID NO: 4681365 - DNA, 25 bp, Homo sapien
ggaaaatggaatatgctgcatctgc

SEQ ID NO: 4681366 - DNA, 25 bp, Homo sapien
ttaatccccaaaagatcacctgttc

SEQ ID NO: 4681367 - DNA, 25 bp, Homo sapien
gtcgaatgacctgatcttcattaaa

SEQ ID NO: 4681368 - DNA, 25 bp, Homo sapien
ctctgtgagaactgtcgaatgacct

SEQ ID NO: 4681369 - DNA, 25 bp, Homo sapien
ttctggtgcaaaagaaaaggcctct

SEQ ID NO: 4681370 - DNA, 25 bp, Homo sapien
aagaagaaatctggttgcaaaggat

SEQ ID NO: 4681371 - DNA, 25 bp, Homo sapien
tggtattaaacaggacaatgcatgt

SEQ ID NO: 4681372 - DNA, 25 bp, Homo sapien
tgttgcccagactaagaatatgcta

SEQ ID NO: 4681373 - DNA, 25 bp, Homo sapien
aaatcttggttctgccacctgctgg

SEQ ID NO: 4681374 - DNA, 25 bp, Homo sapien
taagtattcaagtgttaggaaagcc

SEQ ID NO: 4681375 - DNA, 25 bp, Homo sapien
gcagaggctgctaaagcaagggcag

SEQ ID NO: 4681376 - DNA, 25 bp, Homo sapien
cagaggctgctaaagcaagggcagc

SEQ ID NO: 4681377 - DNA, 25 bp, Homo sapien
ggctgctaaagcaagggcagcaatg

SEQ ID NO: 4681378 - DNA, 25 bp, Homo sapien
gaggctgctaaagcaagggcagcaa

SEQ ID NO: 4681379 - DNA, 25 bp, Homo sapien
cggagagttcaaacagatagattgc

SEQ ID NO: 4681380 - DNA, 25 bp, Homo sapien
cagaacgtggttttggttgcagctg

SEQ ID NO: 4681381 - DNA, 25 bp, Homo sapien
ttcttccacagctccagaacgtggt

SEQ ID NO: 4681382 - DNA, 25 bp, Homo sapien
cagatagattgcttgagtggcttta

SEQ ID NO: 4681383 - DNA, 25 bp, Homo sapien
ctttacatgtgtccgtacgcactga

SEQ ID NO: 4681384 - DNA, 25 bp, Homo sapien
tcagattaccagatgcagtccttac

SEQ ID NO: 4681385 - DNA, 25 bp, Homo sapien
gtaagggtcttgaatgcagccaact

SEQ ID NO: 4681386 - DNA, 25 bp, Homo sapien
tgtctacattcaagagtaagggtct

SEQ ID NO: 4681387 - DNA, 25 bp, Homo sapien
gagagaagactactgaagaacagca

SEQ ID NO: 4681388 - DNA, 25 bp, Homo sapien
gaacagcagattgcttgatttttaa

SEQ ID NO: 4681389 - DNA, 25 bp, Homo sapien
taagtgagagaagactactgaagaa

SEQ ID NO: 4681390 - DNA, 25 bp, Homo sapien
gggcttaagctgtcttcccatctca

SEQ ID NO: 4681391 - DNA, 25 bp, Homo sapien
gccagaatcaagagtgcagcacgtg

SEQ ID NO: 4681392 - DNA, 25 bp, Homo sapien
gagcacagccagtcatgtaaaggat

SEQ ID NO: 4681393 - DNA, 25 bp, Homo sapien
tacgtatggccctacctgcagtgta

SEQ ID NO: 4681394 - DNA, 25 bp, Homo sapien
tgagagagaatgtcaaggcagaacc

SEQ ID NO: 4681395 - DNA, 25 bp, Homo sapien
gaaggctctccatatccgacattcc

SEQ ID NO: 4681396 - DNA, 25 bp, Homo sapien
tacaaagtcatcagtagtcatactc

SEQ ID NO: 4681397 - DNA, 25 bp, Homo sapien
caccacatctgcctgatcagaaggc

SEQ ID NO: 4681398 - DNA, 25 bp, Homo sapien
tttcagatcaagaaaccacgtgcca

SEQ ID NO: 4681399 - DNA, 25 bp, Homo sapien
gagggcacagaatacaccatgttcc

SEQ ID NO: 4681400 - DNA, 25 bp, Homo sapien
gaatgcaggcaattagcatcctgaa

SEQ ID NO: 4681401 - DNA, 25 bp, Homo sapien
gctgatcattagtacaccgtataca

SEQ ID NO: 4681402 - DNA, 25 bp, Homo sapien
tacagattgactcagatggaatgca

SEQ ID NO: 4681403 - DNA, 25 bp, Homo sapien
taagattccgattcaccaaacattc

SEQ ID NO: 4681404 - DNA, 25 bp, Homo sapien
ttaaatgtgtccaaagcactgtgtt

SEQ ID NO: 4681405 - DNA, 25 bp, Homo sapien
cactgtgtttaagctctatggagaa

SEQ ID NO: 4681406 - DNA, 25 bp, Homo sapien
aacattcattgagcgtttattaaat

SEQ ID NO: 4681407 - DNA, 25 bp, Homo sapien
tgtatccactacataaattaggcat

SEQ ID NO: 4681408 - DNA, 25 bp, Homo sapien
catcaaagagaattcttaggatata

SEQ ID NO: 4681409 - DNA, 25 bp, Homo sapien
agaaatggctatggtctcatcaaag

SEQ ID NO: 4681410 - DNA, 25 bp, Homo sapien
ggatataaagtctaaattgtgccca

SEQ ID NO: 4681411 - DNA, 25 bp, Homo sapien
gcttcctaaccttgatttggcaaag

SEQ ID NO: 4681412 - DNA, 25 bp, Homo sapien
taacacaggaaagaacagtctattc

SEQ ID NO: 4681413 - DNA, 25 bp, Homo sapien
caaaggattcttatatatgacactg

SEQ ID NO: 4681414 - DNA, 25 bp, Homo sapien
tgaagttggactctcctaccatcta

SEQ ID NO: 4681415 - DNA, 25 bp, Homo sapien
tcttcaatttccctgacatgaatgc

SEQ ID NO: 4681416 - DNA, 25 bp, Homo sapien
tcattagcttctccaatttgattgc

SEQ ID NO: 4681417 - DNA, 25 bp, Homo sapien
gggccatgttacctttaatcttcaa

SEQ ID NO: 4681418 - DNA, 25 bp, Homo sapien
tccaatttgattgctagggccatgt

SEQ ID NO: 4681419 - DNA, 25 bp, Homo sapien
tactttttgagcatagcagtcgact

SEQ ID NO: 4681420 - DNA, 25 bp, Homo sapien
ttttccagaacaaacgtgcatatcc

SEQ ID NO: 4681421 - DNA, 25 bp, Homo sapien
gattagcttgccattttaattacaa

SEQ ID NO: 4681422 - DNA, 25 bp, Homo sapien
cattagattttaactgttgagcttt

SEQ ID NO: 4681423 - DNA, 25 bp, Homo sapien
tactgcttgatctgactgtccgccc

SEQ ID NO: 4681424 - DNA, 25 bp, Homo sapien
cctatggctaagtccacctggaaag

SEQ ID NO: 4681425 - DNA, 25 bp, Homo sapien
gccaaatgcatactcctagggagaa

SEQ ID NO: 4681426 - DNA, 25 bp, Homo sapien
cacagtggacggcttaacaacagaa

SEQ ID NO: 4681427 - DNA, 25 bp, Homo sapien
gactccctttgatcagttgctgtga

SEQ ID NO: 4681428 - DNA, 25 bp, Homo sapien
gcatttgtaaagcagcactagcagg

SEQ ID NO: 4681429 - DNA, 25 bp, Homo sapien
tcacgcttgctcacgttgactggac

SEQ ID NO: 4681430 - DNA, 25 bp, Homo sapien
gcatagtagacacagcagattggtt

SEQ ID NO: 4681431 - DNA, 25 bp, Homo sapien
tttattagcgattcatgaactgggt

SEQ ID NO: 4681432 - DNA, 25 bp, Homo sapien
gcttttattagcgattcatgaactg

SEQ ID NO: 4681433 - DNA, 25 bp, Homo sapien
ttagcgattcatgaactgggtagca

SEQ ID NO: 4681434 - DNA, 25 bp, Homo sapien
tattagcgattcatgaactgggtag

SEQ ID NO: 4681435 - DNA, 25 bp, Homo sapien
aaaatgagggcttctgaatcaggcc

SEQ ID NO: 4681436 - DNA, 25 bp, Homo sapien
tcaagcaggtcagtccagaaaaggg

SEQ ID NO: 4681437 - DNA, 25 bp, Homo sapien
gaagctaagttgaaaagaccgccta

SEQ ID NO: 4681438 - DNA, 25 bp, Homo sapien
taggcccttgggtgaagcagatttg

SEQ ID NO: 4681439 - DNA, 25 bp, Homo sapien
tagctggattaaaggccacactgcc

SEQ ID NO: 4681440 - DNA, 25 bp, Homo sapien
tagatagatagcaaacacagtgacc

SEQ ID NO: 4681441 - DNA, 25 bp, Homo sapien
gaaagctaagaccttgagcccagga

SEQ ID NO: 4681442 - DNA, 25 bp, Homo sapien
acagttctgccttgcggaagtgaaa

SEQ ID NO: 4681443 - DNA, 25 bp, Homo sapien
aaaagctgctaaaactaataaggag

SEQ ID NO: 4681444 - DNA, 25 bp, Homo sapien
atttaacagtattgcaggacacaaa

SEQ ID NO: 4681445 - DNA, 25 bp, Homo sapien
acagtattgcaggacacaaagcatt

SEQ ID NO: 4681446 - DNA, 25 bp, Homo sapien
ttaacagtattgcaggacacaaagc

SEQ ID NO: 4681447 - DNA, 25 bp, Homo sapien
tactggcctggagatacaaaatttg

SEQ ID NO: 4681448 - DNA, 25 bp, Homo sapien
catccaaggcttgagagtccacgag

SEQ ID NO: 4681449 - DNA, 25 bp, Homo sapien
taaaacaattggagagcaaccctgt

SEQ ID NO: 4681450 - DNA, 25 bp, Homo sapien
gaagcaccctagagcttaccggcag

SEQ ID NO: 4681451 - DNA, 25 bp, Homo sapien
ggaccgagaggttggagcaatccat

SEQ ID NO: 4681452 - DNA, 25 bp, Homo sapien
ggtgtagatcgagcctcctgccgca

SEQ ID NO: 4681453 - DNA, 25 bp, Homo sapien
ccccgaggaggtgtagatcgagcct

SEQ ID NO: 4681454 - DNA, 25 bp, Homo sapien
tcgcagtcgttgctgccccgaggag

SEQ ID NO: 4681455 - DNA, 25 bp, Homo sapien
agccggcaccggaaacgcgccgtgg

SEQ ID NO: 4681456 - DNA, 25 bp, Homo sapien
acaggaagtgtgtaacgacacctcc

SEQ ID NO: 4681457 - DNA, 25 bp, Homo sapien
ccgtggtcggcgagacccacaggaa

SEQ ID NO: 4681458 - DNA, 25 bp, Homo sapien
tgtgtaacgacacctcctacggcac

SEQ ID NO: 4681459 - DNA, 25 bp, Homo sapien
agagcggccagagggccgggcacca

SEQ ID NO: 4681460 - DNA, 25 bp, Homo sapien
gcgccgctccgtgcgccccgagctc

SEQ ID NO: 4681461 - DNA, 25 bp, Homo sapien
gccagcctggctcggccgaccgccg

SEQ ID NO: 4681462 - DNA, 25 bp, Homo sapien
ggcgccagcctggctcggccgaccg

SEQ ID NO: 4681463 - DNA, 25 bp, Homo sapien
tctgtccataggaacgcggtcggcg

SEQ ID NO: 4681464 - DNA, 25 bp, Homo sapien
tgcgtctgtccataggaacgcggtc

SEQ ID NO: 4681465 - DNA, 25 bp, Homo sapien
gggcctgcgagagccgggcagcccg

SEQ ID NO: 4681466 - DNA, 25 bp, Homo sapien
ctgtgcgtctgtccataggaacgcg

SEQ ID NO: 4681467 - DNA, 25 bp, Homo sapien
cattagggtttcgaatcttggctct

SEQ ID NO: 4681468 - DNA, 25 bp, Homo sapien
gacttgattgaaagaggccttcctt

SEQ ID NO: 4681469 - DNA, 25 bp, Homo sapien
gaaatgcttggctaccagctctgca

SEQ ID NO: 4681470 - DNA, 25 bp, Homo sapien
catgctggacccactaatgaacagt

SEQ ID NO: 4681471 - DNA, 25 bp, Homo sapien
tgagatattccttggcaaccctaat

SEQ ID NO: 4681472 - DNA, 25 bp, Homo sapien
taaaatgtcaagaccttaccctgaa

SEQ ID NO: 4681473 - DNA, 25 bp, Homo sapien
tccttcttagcacttatcccttaca

SEQ ID NO: 4681474 - DNA, 25 bp, Homo sapien
tgaccctttgtgcttgccgttccct

SEQ ID NO: 4681475 - DNA, 25 bp, Homo sapien
tacttactacactgacttgcacctc

SEQ ID NO: 4681476 - DNA, 25 bp, Homo sapien
tgctcctgacttaacctgcaggcct

SEQ ID NO: 4681477 - DNA, 25 bp, Homo sapien
aagccttcattcaccaaaaacacag

SEQ ID NO: 4681478 - DNA, 25 bp, Homo sapien
aaatggtgataaatgtatggcttcc

SEQ ID NO: 4681479 - DNA, 25 bp, Homo sapien
aactgatcttacaaggtctccaact

SEQ ID NO: 4681480 - DNA, 25 bp, Homo sapien
tataactgatcttacaaggtctcca

SEQ ID NO: 4681481 - DNA, 25 bp, Homo sapien
acttataactgatcttacaaggtct

SEQ ID NO: 4681482 - DNA, 25 bp, Homo sapien
taactgatcttacaaggtctccaac

SEQ ID NO: 4681483 - DNA, 25 bp, Homo sapien
cacattctcagatgatactggtgct

SEQ ID NO: 4681484 - DNA, 25 bp, Homo sapien
taaaatacagactgtccgccctcac

SEQ ID NO: 4681485 - DNA, 25 bp, Homo sapien
taagctcggatggatccttagtgca

SEQ ID NO: 4681486 - DNA, 25 bp, Homo sapien
tcaaatttaagaccactaagctcgg

SEQ ID NO: 4681487 - DNA, 25 bp, Homo sapien
cctaattttcgatcagtctggctag

SEQ ID NO: 4681488 - DNA, 25 bp, Homo sapien
tgcttgcctggttatggtgcctata

SEQ ID NO: 4681489 - DNA, 25 bp, Homo sapien
tctataacagatacaggactgctca

SEQ ID NO: 4681490 - DNA, 25 bp, Homo sapien
ccatagcaaagccatctgtgtctgc

SEQ ID NO: 4681491 - DNA, 25 bp, Homo sapien
gacatcgaacatcttatcgtgtgct

SEQ ID NO: 4681492 - DNA, 25 bp, Homo sapien
tgtagttacttaatatcctagccaa

SEQ ID NO: 4681493 - DNA, 25 bp, Homo sapien
gccaacacctggtcagactttttaa

SEQ ID NO: 4681494 - DNA, 25 bp, Homo sapien
taagagttctgtgtaaagtctagat

SEQ ID NO: 4681495 - DNA, 25 bp, Homo sapien
gaactgttatatgtccaaacttggc

SEQ ID NO: 4681496 - DNA, 25 bp, Homo sapien
cactcttaaggcaaacactcatctg

SEQ ID NO: 4681497 - DNA, 25 bp, Homo sapien
tcaccatgattagaaaaaacgaaca

SEQ ID NO: 4681498 - DNA, 25 bp, Homo sapien
ccagcatctgcttagtgaactgtta

SEQ ID NO: 4681499 - DNA, 25 bp, Homo sapien
agagtatcatgtagatgatggtaaa

SEQ ID NO: 4681500 - DNA, 25 bp, Homo sapien
tggagtaatatagagtatcatgtag

SEQ ID NO: 4681501 - DNA, 25 bp, Homo sapien
ttggagtaatatagagtatcatgta

SEQ ID NO: 4681502 - DNA, 25 bp, Homo sapien
gatttctcagtttcaacaccctgtt

SEQ ID NO: 4681503 - DNA, 25 bp, Homo sapien
ttcattgatttctcagtttcaacac

SEQ ID NO: 4681504 - DNA, 25 bp, Homo sapien
tcacttccttttcaatcagtgcttc

SEQ ID NO: 4681505 - DNA, 25 bp, Homo sapien
tcagtttcaacaccctgttcatttc

SEQ ID NO: 4681506 - DNA, 25 bp, Homo sapien
catcctattcccagtttaaaaccat

SEQ ID NO: 4681507 - DNA, 25 bp, Homo sapien
cttcaaacaattccccccagcacag

SEQ ID NO: 4681508 - DNA, 25 bp, Homo sapien
tccattttaccgcttgaccccttca

SEQ ID NO: 4681509 - DNA, 25 bp, Homo sapien
acataatcatcctattcccagttta

SEQ ID NO: 4681510 - DNA, 25 bp, Homo sapien
tctaatatgatttgcgaagtaaaag

SEQ ID NO: 4681511 - DNA, 25 bp, Homo sapien
tcagctactggcaaccataaatgtc

SEQ ID NO: 4681512 - DNA, 25 bp, Homo sapien
aacacttccagcataatgatatccg

SEQ ID NO: 4681513 - DNA, 25 bp, Homo sapien
gactaagcaatcttaccactcagaa

SEQ ID NO: 4681514 - DNA, 25 bp, Homo sapien
tccagttgatcagacattaatgaag

SEQ ID NO: 4681515 - DNA, 25 bp, Homo sapien
gaatgtgaagcggtccctcaaattg

SEQ ID NO: 4681516 - DNA, 25 bp, Homo sapien
tctgctccagttgatcagacattaa

SEQ ID NO: 4681517 - DNA, 25 bp, Homo sapien
cctcaaattgaggtctgacagcaac

SEQ ID NO: 4681518 - DNA, 25 bp, Homo sapien
ttgaacccgggaggcggaggttgca

SEQ ID NO: 4681519 - DNA, 25 bp, Homo sapien
caagagggtgaggcaggagaatcgc

SEQ ID NO: 4681520 - DNA, 25 bp, Homo sapien
ggtggatgccataatcccagttact

SEQ ID NO: 4681521 - DNA, 25 bp, Homo sapien
gggcatggtggtggatgccataatc

SEQ ID NO: 4681522 - DNA, 25 bp, Homo sapien
tttaatttatcctttctacaatgca

SEQ ID NO: 4681523 - DNA, 25 bp, Homo sapien
tgaaaactgccgagagattttaagt

SEQ ID NO: 4681524 - DNA, 25 bp, Homo sapien
tgtgtaaggtaatagagatgttact

SEQ ID NO: 4681525 - DNA, 25 bp, Homo sapien
tgtcactatagtttatatcgtacac

SEQ ID NO: 4681526 - DNA, 25 bp, Homo sapien
cagaactgactaaaacaatgttgac

SEQ ID NO: 4681527 - DNA, 25 bp, Homo sapien
gaagggagccacattccattatgtt

SEQ ID NO: 4681528 - DNA, 25 bp, Homo sapien
aacccagaggtcaattaacagagcg

SEQ ID NO: 4681529 - DNA, 25 bp, Homo sapien
taacagagcggagatgagaatggaa

SEQ ID NO: 4681530 - DNA, 25 bp, Homo sapien
tgtgttgggctagtcaaactgccat

SEQ ID NO: 4681531 - DNA, 25 bp, Homo sapien
gtgagccacccgtgcaacctgacat

SEQ ID NO: 4681532 - DNA, 25 bp, Homo sapien
cttccctctatttgtgttgggctag

SEQ ID NO: 4681533 - DNA, 25 bp, Homo sapien
tttaatggcaaaattcagtctgctc

SEQ ID NO: 4681534 - DNA, 25 bp, Homo sapien
ctgggtgagcactattcaagctgct

SEQ ID NO: 4681535 - DNA, 25 bp, Homo sapien
tctgctcaagatagatccaggtcat

SEQ ID NO: 4681536 - DNA, 25 bp, Homo sapien
tgaagaatgcttgatttatgagatc

SEQ ID NO: 4681537 - DNA, 25 bp, Homo sapien
tagcaaactgtctaaagcctcagaa

SEQ ID NO: 4681538 - DNA, 25 bp, Homo sapien
tctacgtagaagaacctgcagggct

SEQ ID NO: 4681539 - DNA, 25 bp, Homo sapien
gaatgagatctgaagctacggtgta

SEQ ID NO: 4681540 - DNA, 25 bp, Homo sapien
tatcttcactagctcttaggaaggg

SEQ ID NO: 4681541 - DNA, 25 bp, Homo sapien
tctttgtgcagagtgggtgaacctt

SEQ ID NO: 4681542 - DNA, 25 bp, Homo sapien
catatctgacatgggcaatgattgg

SEQ ID NO: 4681543 - DNA, 25 bp, Homo sapien
aatatatttcaacctggcaaccatg

SEQ ID NO: 4681544 - DNA, 25 bp, Homo sapien
caggtggcacttccccatatctgac

SEQ ID NO: 4681545 - DNA, 25 bp, Homo sapien
ccatcgccaatctcatggagaggct

SEQ ID NO: 4681546 - DNA, 25 bp, Homo sapien
acagaagagactacgaaatgttccc

SEQ ID NO: 4681547 - DNA, 25 bp, Homo sapien
tacagatttggtactggcaaagcca

SEQ ID NO: 4681548 - DNA, 25 bp, Homo sapien
tcccagggtttccagctagcagaca

SEQ ID NO: 4681549 - DNA, 25 bp, Homo sapien
tggatttggactgaaccactatacc

SEQ ID NO: 4681550 - DNA, 25 bp, Homo sapien
aatatttaattggtgtggcagagac

SEQ ID NO: 4681551 - DNA, 25 bp, Homo sapien
cagagactgctattttgcctaccca

SEQ ID NO: 4681552 - DNA, 25 bp, Homo sapien
cagagagtccaaatttgttaaggca

SEQ ID NO: 4681553 - DNA, 25 bp, Homo sapien
tacccagtgtccattctctcttact

SEQ ID NO: 4681554 - DNA, 25 bp, Homo sapien
aacagtttcatccagttcagagggc

SEQ ID NO: 4681555 - DNA, 25 bp, Homo sapien
taccccaggtcttttgcgagcaatg

SEQ ID NO: 4681556 - DNA, 25 bp, Homo sapien
tatgggcccagctgaccaatttgga

SEQ ID NO: 4681557 - DNA, 25 bp, Homo sapien
cacaagagtctctggtccggttaca

SEQ ID NO: 4681558 - DNA, 25 bp, Homo sapien
gaatttcctgtatagtatcacctgg

SEQ ID NO: 4681559 - DNA, 25 bp, Homo sapien
ttttagaagtgctgacggcgcagaa

SEQ ID NO: 4681560 - DNA, 25 bp, Homo sapien
gaagccaaagcatgagatccaaccc

SEQ ID NO: 4681561 - DNA, 25 bp, Homo sapien
taaggtacgtcaactagatatggcc

SEQ ID NO: 4681562 - DNA, 25 bp, Homo sapien
tacacgacgtttttgagaagggctg

SEQ ID NO: 4681563 - DNA, 25 bp, Homo sapien
tgtaaagcaacttaatccaaggacg

SEQ ID NO: 4681564 - DNA, 25 bp, Homo sapien
tactagtgaggctgtacaatgatgg

SEQ ID NO: 4681565 - DNA, 25 bp, Homo sapien
tgacaatgtggagcagtaagaacct

SEQ ID NO: 4681566 - DNA, 25 bp, Homo sapien
tagtaacatgaggttctaccccaaa

SEQ ID NO: 4681567 - DNA, 25 bp, Homo sapien
gcacaaccatcttgggtccacgcag

SEQ ID NO: 4681568 - DNA, 25 bp, Homo sapien
tgtctgagcctgagtgaaagctggt

SEQ ID NO: 4681569 - DNA, 25 bp, Homo sapien
gacacaggttctgtctactgctaga

SEQ ID NO: 4681570 - DNA, 25 bp, Homo sapien
gatggcgagtaagacctgaaagtgt

SEQ ID NO: 4681571 - DNA, 25 bp, Homo sapien
gagatgtctatgtttccctgagctg

SEQ ID NO: 4681572 - DNA, 25 bp, Homo sapien
tctagatcccacgtgtggatggcga

SEQ ID NO: 4681573 - DNA, 25 bp, Homo sapien
catagcttaggtcttcagagatgtc

SEQ ID NO: 4681574 - DNA, 25 bp, Homo sapien
agaagttgcactgtagacccctgta

SEQ ID NO: 4681575 - DNA, 25 bp, Homo sapien
cacatagataggaagagtgctcaac

SEQ ID NO: 4681576 - DNA, 25 bp, Homo sapien
ccttcataggaagcatgggaactca

SEQ ID NO: 4681577 - DNA, 25 bp, Homo sapien
tgctcaacattactgggtggccaga

SEQ ID NO: 4681578 - DNA, 25 bp, Homo sapien
gagtgcccaccactcagatttaata

SEQ ID NO: 4681579 - DNA, 25 bp, Homo sapien
tagatacagtttaagcttcccatgt

SEQ ID NO: 4681580 - DNA, 25 bp, Homo sapien
tccagtccatgtttaattaagtgtg

SEQ ID NO: 4681581 - DNA, 25 bp, Homo sapien
tcctcgaagaaaaccactactgtgt

SEQ ID NO: 4681582 - DNA, 25 bp, Homo sapien
tatgtttaccatgaaccagagggct

SEQ ID NO: 4681583 - DNA, 25 bp, Homo sapien
tcataaggagaaaacccatagtgtt

SEQ ID NO: 4681584 - DNA, 25 bp, Homo sapien
aaagtatacggaataccagctagag

SEQ ID NO: 4681585 - DNA, 25 bp, Homo sapien
gacagcatcccatcacaatcataag

SEQ ID NO: 4681586 - DNA, 25 bp, Homo sapien
gatcaacgcagggaaaacctcaggg

SEQ ID NO: 4681587 - DNA, 25 bp, Homo sapien
ttgatggattccaccaaaacaaggg

SEQ ID NO: 4681588 - DNA, 25 bp, Homo sapien
actgtagcaggaaaccagcttggga

SEQ ID NO: 4681589 - DNA, 25 bp, Homo sapien
tgtcaagaaaggctaccaaaagctt

SEQ ID NO: 4681590 - DNA, 25 bp, Homo sapien
tactgcccgaaatgttctgaggtct

SEQ ID NO: 4681591 - DNA, 25 bp, Homo sapien
ccctcagtaactactgcccgaaatg

SEQ ID NO: 4681592 - DNA, 25 bp, Homo sapien
cccgaaatgttctgaggtctgccat

SEQ ID NO: 4681593 - DNA, 25 bp, Homo sapien
taactactgcccgaaatgttctgag

SEQ ID NO: 4681594 - DNA, 25 bp, Homo sapien
aatcaactttagaatgtagctgcat

SEQ ID NO: 4681595 - DNA, 25 bp, Homo sapien
gtagctgcatttgccggcttagcag

SEQ ID NO: 4681596 - DNA, 25 bp, Homo sapien
atgaaacccacaggactgtaattaa

SEQ ID NO: 4681597 - DNA, 25 bp, Homo sapien
taaatcaactttagaatgtagctgc

SEQ ID NO: 4681598 - DNA, 25 bp, Homo sapien
gatgtagtcaaaggtaagtccctga

SEQ ID NO: 4681599 - DNA, 25 bp, Homo sapien
gaaatgatgtctgaattctctttac

SEQ ID NO: 4681600 - DNA, 25 bp, Homo sapien
ggcgagcagatttatatttatgaag

SEQ ID NO: 4681601 - DNA, 25 bp, Homo sapien
ccagtgactgataagtccatgagct

SEQ ID NO: 4681602 - DNA, 25 bp, Homo sapien
ctgttatagcctgctgggctactat

SEQ ID NO: 4681603 - DNA, 25 bp, Homo sapien
gctactattttagcagtccttgctg

SEQ ID NO: 4681604 - DNA, 25 bp, Homo sapien
tgctgtcactgcatcactagtttgg

SEQ ID NO: 4681605 - DNA, 25 bp, Homo sapien
gctgtcactgcatcactagtttggt

SEQ ID NO: 4681606 - DNA, 25 bp, Homo sapien
ttgtcctacatagttacctgtgtcc

SEQ ID NO: 4681607 - DNA, 25 bp, Homo sapien
attgtcctacatagttacctgtgtc

SEQ ID NO: 4681608 - DNA, 25 bp, Homo sapien
acagtcccgagtgaagctctcctac

SEQ ID NO: 4681609 - DNA, 25 bp, Homo sapien
tgccacagtcccgagtgaagctctc

SEQ ID NO: 4681610 - DNA, 25 bp, Homo sapien
gaagctctcctacttctgtatctcc

SEQ ID NO: 4681611 - DNA, 25 bp, Homo sapien
cccgagtgaagctctcctacttctg

SEQ ID NO: 4681612 - DNA, 25 bp, Homo sapien
agccaacttcagtttcacaaaagat

SEQ ID NO: 4681613 - DNA, 25 bp, Homo sapien
ctgtcacattataatagccaacttc

SEQ ID NO: 4681614 - DNA, 25 bp, Homo sapien
gtcacattataatagccaacttcag

SEQ ID NO: 4681615 - DNA, 25 bp, Homo sapien
cacattataatagccaacttcagtt

SEQ ID NO: 4681616 - DNA, 25 bp, Homo sapien
ccttttccgcaggatgagctcgtca

SEQ ID NO: 4681617 - DNA, 25 bp, Homo sapien
tcagggcctcttgggaacgcttgaa

SEQ ID NO: 4681618 - DNA, 25 bp, Homo sapien
caagctgttgggttcgtattcggac

SEQ ID NO: 4681619 - DNA, 25 bp, Homo sapien
tattcggacccatccttctgcctgg

SEQ ID NO: 4681620 - DNA, 25 bp, Homo sapien
gtctccagtgtcctgacccatccac

SEQ ID NO: 4681621 - DNA, 25 bp, Homo sapien
tctcttggttttggcattcaagtct

SEQ ID NO: 4681622 - DNA, 25 bp, Homo sapien
aagtactcgagacccgtctctgtta

SEQ ID NO: 4681623 - DNA, 25 bp, Homo sapien
ggtggcatacacacgggagtctgtc

SEQ ID NO: 4681624 - DNA, 25 bp, Homo sapien
caagggcctggcagttgtaccaatg

SEQ ID NO: 4681625 - DNA, 25 bp, Homo sapien
cacgactggcttgatggataagtag

SEQ ID NO: 4681626 - DNA, 25 bp, Homo sapien
tactccttatagtcctggacagggc

SEQ ID NO: 4681627 - DNA, 25 bp, Homo sapien
cagagccgccaggttcacgactggc

SEQ ID NO: 4681628 - DNA, 25 bp, Homo sapien
cacactgaagttggttttcctgcca

SEQ ID NO: 4681629 - DNA, 25 bp, Homo sapien
tcaagcggtgtctgaggaagagtca

SEQ ID NO: 4681630 - DNA, 25 bp, Homo sapien
gcggagacgatgaaattgccattgt

SEQ ID NO: 4681631 - DNA, 25 bp, Homo sapien
gattgttacagatcagcacgagctg

SEQ ID NO: 4681632 - DNA, 25 bp, Homo sapien
tcacagcttagaggaacgggtcttt

SEQ ID NO: 4681633 - DNA, 25 bp, Homo sapien
tgaggttaactccacgacacaaagt

SEQ ID NO: 4681634 - DNA, 25 bp, Homo sapien
tcacgggtccaacaaaacaatcaag

SEQ ID NO: 4681635 - DNA, 25 bp, Homo sapien
taatcacagtttctccggacacagt

SEQ ID NO: 4681636 - DNA, 25 bp, Homo sapien
cagtcagtctagtgagtctcaaagg

SEQ ID NO: 4681637 - DNA, 25 bp, Homo sapien
caattttattttccagctagcacac

SEQ ID NO: 4681638 - DNA, 25 bp, Homo sapien
caggatggtatgaaccgggagtccc

SEQ ID NO: 4681639 - DNA, 25 bp, Homo sapien
gcacacctgaaggatgcattccaga

SEQ ID NO: 4681640 - DNA, 25 bp, Homo sapien
actgaatattacacaatgcatagaa

SEQ ID NO: 4681641 - DNA, 25 bp, Homo sapien
cacaatgcatagaaatcgtaatgat

SEQ ID NO: 4681642 - DNA, 25 bp, Homo sapien
tattacacaatgcatagaaatcgta

SEQ ID NO: 4681643 - DNA, 25 bp, Homo sapien
tgtaacaatctaatgggttatagat

SEQ ID NO: 4681644 - DNA, 25 bp, Homo sapien
tgttgaagaaaagctgacctggcct

SEQ ID NO: 4681645 - DNA, 25 bp, Homo sapien
ttgctgaggcaagatggaaacacca

SEQ ID NO: 4681646 - DNA, 25 bp, Homo sapien
ttaatcagttagaagccaagtggcc

SEQ ID NO: 4681647 - DNA, 25 bp, Homo sapien
caggtaccaaactagacaggtgggc

SEQ ID NO: 4681648 - DNA, 25 bp, Homo sapien
ttttaggctgtaccaacaaacatca

SEQ ID NO: 4681649 - DNA, 25 bp, Homo sapien
cattagctgactttattggattgct

SEQ ID NO: 4681650 - DNA, 25 bp, Homo sapien
tacatcagaggcaaacattatacac

SEQ ID NO: 4681651 - DNA, 25 bp, Homo sapien
cacaatggaataaactagacataaa

SEQ ID NO: 4681652 - DNA, 25 bp, Homo sapien
agggatatttgctgtggaagccacc

SEQ ID NO: 4681653 - DNA, 25 bp, Homo sapien
tacggctgcgtgaagtgagggatat

SEQ ID NO: 4681654 - DNA, 25 bp, Homo sapien
ctgcgtgaagtgagggatatttgct

SEQ ID NO: 4681655 - DNA, 25 bp, Homo sapien
aagtgctggcaagtacggctgcgtg

SEQ ID NO: 4681656 - DNA, 25 bp, Homo sapien
tgattaaatgacatatatggttcgt

SEQ ID NO: 4681657 - DNA, 25 bp, Homo sapien
gattaaatgacatatatggttcgtt

SEQ ID NO: 4681658 - DNA, 25 bp, Homo sapien
taaatgacatatatggttcgttcat

SEQ ID NO: 4681659 - DNA, 25 bp, Homo sapien
aatgattaaatgacatatatggttc

SEQ ID NO: 4681660 - DNA, 25 bp, Homo sapien
tatttgggcttactgcactggtaca

SEQ ID NO: 4681661 - DNA, 25 bp, Homo sapien
ggtacacagatcattcaagtcatca

SEQ ID NO: 4681662 - DNA, 25 bp, Homo sapien
tctttgagcccgttggtcatgcacc

SEQ ID NO: 4681663 - DNA, 25 bp, Homo sapien
cacattcaaggcgtaccgcgtggct

SEQ ID NO: 4681664 - DNA, 25 bp, Homo sapien
gtcccacatgtcagtaatgttctga

SEQ ID NO: 4681665 - DNA, 25 bp, Homo sapien
taaaattctcaggtggggtatggtg

SEQ ID NO: 4681666 - DNA, 25 bp, Homo sapien
cattaggctccttgaaattgtccca

SEQ ID NO: 4681667 - DNA, 25 bp, Homo sapien
tccaattacatgtacattaggctcc

SEQ ID NO: 4681668 - DNA, 25 bp, Homo sapien
gaatctgggctagccacgtgactta

SEQ ID NO: 4681669 - DNA, 25 bp, Homo sapien
tggattacaagagaggaacggttcc

SEQ ID NO: 4681670 - DNA, 25 bp, Homo sapien
tatgagaagacagctacgattcccc

SEQ ID NO: 4681671 - DNA, 25 bp, Homo sapien
ggagccgtagatgaccagtacacac

SEQ ID NO: 4681672 - DNA, 25 bp, Homo sapien
gatatcagaacgagcggactccaag

SEQ ID NO: 4681673 - DNA, 25 bp, Homo sapien
tagtagtcgagactcctttggttcc

SEQ ID NO: 4681674 - DNA, 25 bp, Homo sapien
caaaccaaacttgaagctgaggcag

SEQ ID NO: 4681675 - DNA, 25 bp, Homo sapien
tgcaggtggtaagctctctttatag

SEQ ID NO: 4681676 - DNA, 25 bp, Homo sapien
gagattacctcaaggccgtttgtca

SEQ ID NO: 4681677 - DNA, 25 bp, Homo sapien
gaccacgactcaagatagccactga

SEQ ID NO: 4681678 - DNA, 25 bp, Homo sapien
ccactgctagctctggaagaaagtc

SEQ ID NO: 4681679 - DNA, 25 bp, Homo sapien
ccagctattactgagatgaggccac

SEQ ID NO: 4681680 - DNA, 25 bp, Homo sapien
aatgagacaaacacggaggttacac

SEQ ID NO: 4681681 - DNA, 25 bp, Homo sapien
caaacacggaggttacacacttgac

SEQ ID NO: 4681682 - DNA, 25 bp, Homo sapien
gagacaaacacggaggttacacact

SEQ ID NO: 4681683 - DNA, 25 bp, Homo sapien
tcaaatgagacaaacacggaggtta

SEQ ID NO: 4681684 - DNA, 25 bp, Homo sapien
gatcttcccgtgacacactctggtg

SEQ ID NO: 4681685 - DNA, 25 bp, Homo sapien
gatggaaaagccgacacctgcattc

SEQ ID NO: 4681686 - DNA, 25 bp, Homo sapien
gacataaaagttctcgagcagctcg

SEQ ID NO: 4681687 - DNA, 25 bp, Homo sapien
agacgatgttgcgagaacgcgcgcc

SEQ ID NO: 4681688 - DNA, 25 bp, Homo sapien
taatgggatgacacgaagaacagac

SEQ ID NO: 4681689 - DNA, 25 bp, Homo sapien
caaaggagctctcacatggtgctga

SEQ ID NO: 4681690 - DNA, 25 bp, Homo sapien
aagtgtcgcttgaggatactccccg

SEQ ID NO: 4681691 - DNA, 25 bp, Homo sapien
gttctaaagctactgcgctactggg

SEQ ID NO: 4681692 - DNA, 25 bp, Homo sapien
tacctagtacaatgggtggcacacg

SEQ ID NO: 4681693 - DNA, 25 bp, Homo sapien
taccaggcttaaccacatattgtgc

SEQ ID NO: 4681694 - DNA, 25 bp, Homo sapien
catcaactaggtgacaggcaacaca

SEQ ID NO: 4681695 - DNA, 25 bp, Homo sapien
caaatgcaaagtcaaggtccctaga

SEQ ID NO: 4681696 - DNA, 25 bp, Homo sapien
gccaacgaggactgctactctggcc

SEQ ID NO: 4681697 - DNA, 25 bp, Homo sapien
tcctttctcttgcattaggccaaga

SEQ ID NO: 4681698 - DNA, 25 bp, Homo sapien
acaactgccttagaacgccaacgag

SEQ ID NO: 4681699 - DNA, 25 bp, Homo sapien
cagaaggtaaggtttagagctgact

SEQ ID NO: 4681700 - DNA, 25 bp, Homo sapien
taaactttgcctgaagcgtggacag

SEQ ID NO: 4681701 - DNA, 25 bp, Homo sapien
tattgaccaccaagtatctaggagc

SEQ ID NO: 4681702 - DNA, 25 bp, Homo sapien
gccagagtaagcttccaacagggag

SEQ ID NO: 4681703 - DNA, 25 bp, Homo sapien
tacacatatcagacggaggaacttc

SEQ ID NO: 4681704 - DNA, 25 bp, Homo sapien
tatgacagtgctatagcctacagat

SEQ ID NO: 4681705 - DNA, 25 bp, Homo sapien
tctatgacagtgctatagcctacag

SEQ ID NO: 4681706 - DNA, 25 bp, Homo sapien
ttttctatgacagtgctatagccta

SEQ ID NO: 4681707 - DNA, 25 bp, Homo sapien
cagtgctatagcctacagattataa

SEQ ID NO: 4681708 - DNA, 25 bp, Homo sapien
tctgactccgagtaaggtgacaggc

SEQ ID NO: 4681709 - DNA, 25 bp, Homo sapien
ttctgggaaggtacaagaagctcac

SEQ ID NO: 4681710 - DNA, 25 bp, Homo sapien
tgagctacttggaaacttttgcccc

SEQ ID NO: 4681711 - DNA, 25 bp, Homo sapien
tctgtgagccggatgtcattttgcc

SEQ ID NO: 4681712 - DNA, 25 bp, Homo sapien
caagcctcgtaggttgctgtacaac

SEQ ID NO: 4681713 - DNA, 25 bp, Homo sapien
ctatagagcagaagtctgaagccag

SEQ ID NO: 4681714 - DNA, 25 bp, Homo sapien
attacatagctcatatatttcctgg

SEQ ID NO: 4681715 - DNA, 25 bp, Homo sapien
cctggatggttatcataactaaaaa

SEQ ID NO: 4681716 - DNA, 25 bp, Homo sapien
tacagctaaggaaagcatctcactg

SEQ ID NO: 4681717 - DNA, 25 bp, Homo sapien
tgacgatactctacactcctgtgtg

SEQ ID NO: 4681718 - DNA, 25 bp, Homo sapien
ggccttccagtgcaagcaaatgaaa

SEQ ID NO: 4681719 - DNA, 25 bp, Homo sapien
taacactgacattgtagactccaga

SEQ ID NO: 4681720 - DNA, 25 bp, Homo sapien
taggacagaaaataggagtgacacc

SEQ ID NO: 4681721 - DNA, 25 bp, Homo sapien
gctggagacggtacaataacatcat

SEQ ID NO: 4681722 - DNA, 25 bp, Homo sapien
tgtatgcacaggtgcgaccatctgg

SEQ ID NO: 4681723 - DNA, 25 bp, Homo sapien
tactggactatcaactagagggccg

SEQ ID NO: 4681724 - DNA, 25 bp, Homo sapien
cacagatctgcttactgtctgcatt

SEQ ID NO: 4681725 - DNA, 25 bp, Homo sapien
tctgggcgtcgtaactgtggttctc

SEQ ID NO: 4681726 - DNA, 25 bp, Homo sapien
accccaagatttccacagatctgct

SEQ ID NO: 4681727 - DNA, 25 bp, Homo sapien
gttctcttaggcctgctgggatcaa

SEQ ID NO: 4681728 - DNA, 25 bp, Homo sapien
gagtctattcgttggaacaaacaaa

SEQ ID NO: 4681729 - DNA, 25 bp, Homo sapien
gagtaataggcaacatctttacaat

SEQ ID NO: 4681730 - DNA, 25 bp, Homo sapien
gaatattatgagatgagtctattcg

SEQ ID NO: 4681731 - DNA, 25 bp, Homo sapien
aagagtaataggcaacatctttaca

SEQ ID NO: 4681732 - DNA, 25 bp, Homo sapien
ttgcatgggcataaagataggagtc

SEQ ID NO: 4681733 - DNA, 25 bp, Homo sapien
tatggcatatcccataagggtgggt

SEQ ID NO: 4681734 - DNA, 25 bp, Homo sapien
catgatatggcagggtatctcaccc

SEQ ID NO: 4681735 - DNA, 25 bp, Homo sapien
ggtgagatatcaccctcccagcata

SEQ ID NO: 4681736 - DNA, 25 bp, Homo sapien
tgaaagccgcttctaaataatgcag

SEQ ID NO: 4681737 - DNA, 25 bp, Homo sapien
tatgtaaagtcttagagagcaagaa

SEQ ID NO: 4681738 - DNA, 25 bp, Homo sapien
tcgttcactactgtattccacataa

SEQ ID NO: 4681739 - DNA, 25 bp, Homo sapien
tattgtctgttccactagtatgtaa

SEQ ID NO: 4681740 - DNA, 25 bp, Homo sapien
ggctgcagtgggccatgattgcaca

SEQ ID NO: 4681741 - DNA, 25 bp, Homo sapien
gctgcagtgggccatgattgcacaa

SEQ ID NO: 4681742 - DNA, 25 bp, Homo sapien
gaaaacttatgcaagtcgagctcct

SEQ ID NO: 4681743 - DNA, 25 bp, Homo sapien
tatttaagtatgcagtcccactacc

SEQ ID NO: 4681744 - DNA, 25 bp, Homo sapien
catgacccatctttagcagtatctg

SEQ ID NO: 4681745 - DNA, 25 bp, Homo sapien
tgtagatccctgaaacttagaggtc

SEQ ID NO: 4681746 - DNA, 25 bp, Homo sapien
tgagctgagacggtgtcactgcact

SEQ ID NO: 4681747 - DNA, 25 bp, Homo sapien
ttgcagtgagctgagacggtgtcac

SEQ ID NO: 4681748 - DNA, 25 bp, Homo sapien
gcagtgagctgagacggtgtcactg

SEQ ID NO: 4681749 - DNA, 25 bp, Homo sapien
ggttgcagtgagctgagacggtgtc

SEQ ID NO: 4681750 - DNA, 25 bp, Homo sapien
gattgctatcagtataccttttgcg

SEQ ID NO: 4681751 - DNA, 25 bp, Homo sapien
ggatggtcacgaagtcattccccaa

SEQ ID NO: 4681752 - DNA, 25 bp, Homo sapien
ccaactcctagcaagtttgactgaa

SEQ ID NO: 4681753 - DNA, 25 bp, Homo sapien
catcctcttatttagtgttaccaca

SEQ ID NO: 4681754 - DNA, 25 bp, Homo sapien
gaattcatggcttatcacagactta

SEQ ID NO: 4681755 - DNA, 25 bp, Homo sapien
cacctaagtattaacaccaacctag

SEQ ID NO: 4681756 - DNA, 25 bp, Homo sapien
cattggataccctattattttcacc

SEQ ID NO: 4681757 - DNA, 25 bp, Homo sapien
tctaatgttcaaattgtgacagcct

SEQ ID NO: 4681758 - DNA, 25 bp, Homo sapien
gaaccactgcattcagctgatatat

SEQ ID NO: 4681759 - DNA, 25 bp, Homo sapien
cactgcattcagctgatatatttgc

SEQ ID NO: 4681760 - DNA, 25 bp, Homo sapien
tgcattcagctgatatatttgcatt

SEQ ID NO: 4681761 - DNA, 25 bp, Homo sapien
accactgcattcagctgatatattt

SEQ ID NO: 4681762 - DNA, 25 bp, Homo sapien
tgggtatgtgttttagacgaatgca

SEQ ID NO: 4681763 - DNA, 25 bp, Homo sapien
ttttagacgaatgcagagacaccat

SEQ ID NO: 4681764 - DNA, 25 bp, Homo sapien
tttgggtatgtgttttagacgaatg

SEQ ID NO: 4681765 - DNA, 25 bp, Homo sapien
gtatgtgttttagacgaatgcagag

SEQ ID NO: 4681766 - DNA, 25 bp, Homo sapien
gaggcaccgggcaatagaaaagtgt

SEQ ID NO: 4681767 - DNA, 25 bp, Homo sapien
cctgtcgccgccgtctttgttgcta

SEQ ID NO: 4681768 - DNA, 25 bp, Homo sapien
tttgttgctacaggcagcgacctcc

SEQ ID NO: 4681769 - DNA, 25 bp, Homo sapien
agaaaagtgtggctccggtgctaac

SEQ ID NO: 4681770 - DNA, 25 bp, Homo sapien
attgtaaggagaggcggtcccggtg

SEQ ID NO: 4681771 - DNA, 25 bp, Homo sapien
ttaagagcagcgattgtaaggagag

SEQ ID NO: 4681772 - DNA, 25 bp, Homo sapien
cagcgattgtaaggagaggcggtcc

SEQ ID NO: 4681773 - DNA, 25 bp, Homo sapien
ctcgggtcccaggtaagtacgacag

SEQ ID NO: 4681774 - DNA, 25 bp, Homo sapien
tggtctctgccggcgctcagacgct

SEQ ID NO: 4681775 - DNA, 25 bp, Homo sapien
cccgccgcgggtccgctggcagcac

SEQ ID NO: 4681776 - DNA, 25 bp, Homo sapien
cgaggccttgcaccggccgtgctgg

SEQ ID NO: 4681777 - DNA, 25 bp, Homo sapien
gctcggccgccgcttaacccgaggc

SEQ ID NO: 4681778 - DNA, 25 bp, Homo sapien
cttgtcaccgaagctgcgggccatc

SEQ ID NO: 4681779 - DNA, 25 bp, Homo sapien
gggtgcggcatgtcgcgcagggagt

SEQ ID NO: 4681780 - DNA, 25 bp, Homo sapien
ccggccagcgggtgcggcatgtcgc

SEQ ID NO: 4681781 - DNA, 25 bp, Homo sapien
tccgggctgggcgtgctgtcaccac

SEQ ID NO: 4681782 - DNA, 25 bp, Homo sapien
caagctgggtataaaaagaagagag

SEQ ID NO: 4681783 - DNA, 25 bp, Homo sapien
gaaccctggttgtagatgaaagaca

SEQ ID NO: 4681784 - DNA, 25 bp, Homo sapien
tagaggcaggagcaaccacggagat

SEQ ID NO: 4681785 - DNA, 25 bp, Homo sapien
caaatggaatgatccaagctgggta

SEQ ID NO: 4681786 - DNA, 25 bp, Homo sapien
ctccagcggccacaggtctttcctg

SEQ ID NO: 4681787 - DNA, 25 bp, Homo sapien
cagcggccacaggtctttcctgtct

SEQ ID NO: 4681788 - DNA, 25 bp, Homo sapien
ttttcccaccccacatctgaaagcc

SEQ ID NO: 4681789 - DNA, 25 bp, Homo sapien
tctgcccttcaccttggggcttttc

SEQ ID NO: 4681790 - DNA, 25 bp, Homo sapien
gactcagaccgaatgtgggtgattt

SEQ ID NO: 4681791 - DNA, 25 bp, Homo sapien
acatgactcagaccgaatgtgggtg

SEQ ID NO: 4681792 - DNA, 25 bp, Homo sapien
tcccactgacatgactcagaccgaa

SEQ ID NO: 4681793 - DNA, 25 bp, Homo sapien
cccagatcgaattcccacattccca

SEQ ID NO: 4681794 - DNA, 25 bp, Homo sapien
tgggggctgtccttaaatcctcaat

SEQ ID NO: 4681795 - DNA, 25 bp, Homo sapien
gctgtccttaaatcctcaatccaaa

SEQ ID NO: 4681796 - DNA, 25 bp, Homo sapien
gctgggggctgtccttaaatcctca

SEQ ID NO: 4681797 - DNA, 25 bp, Homo sapien
gggctgtccttaaatcctcaatcca

SEQ ID NO: 4681798 - DNA, 25 bp, Homo sapien
catttaatgatttgtgacacccata

SEQ ID NO: 4681799 - DNA, 25 bp, Homo sapien
ttcaaactgccctctagtatagtac

SEQ ID NO: 4681800 - DNA, 25 bp, Homo sapien
gccctctagtatagtacttccacat

SEQ ID NO: 4681801 - DNA, 25 bp, Homo sapien
caaattcaaactgccctctagtata

SEQ ID NO: 4681802 - DNA, 25 bp, Homo sapien
tctttgggagcttagatgttacatc

SEQ ID NO: 4681803 - DNA, 25 bp, Homo sapien
tctaagcttcttaggagagaaccta

SEQ ID NO: 4681804 - DNA, 25 bp, Homo sapien
gcaccaacatttgcatgtgcacatg

SEQ ID NO: 4681805 - DNA, 25 bp, Homo sapien
tctctgaaacccataggcaccttgg

SEQ ID NO: 4681806 - DNA, 25 bp, Homo sapien
cattttgagttttcagaacaaaggc

SEQ ID NO: 4681807 - DNA, 25 bp, Homo sapien
aacggcattttgagttttcagaaca

SEQ ID NO: 4681808 - DNA, 25 bp, Homo sapien
agaaaacggcattttgagttttcag

SEQ ID NO: 4681809 - DNA, 25 bp, Homo sapien
aagtccaagaaaacggcattttgag

SEQ ID NO: 4681810 - DNA, 25 bp, Homo sapien
ccttccacatccgagggaccagttc

SEQ ID NO: 4681811 - DNA, 25 bp, Homo sapien
tcaggaaccacccagcagtttcatg

SEQ ID NO: 4681812 - DNA, 25 bp, Homo sapien
cctggtagaattactcacacccttc

SEQ ID NO: 4681813 - DNA, 25 bp, Homo sapien
tttccttgacccactccctggtaga

SEQ ID NO: 4681814 - DNA, 25 bp, Homo sapien
tataaatggactaaattctgcaatt

SEQ ID NO: 4681815 - DNA, 25 bp, Homo sapien
taaatataaatggactaaattctgc

SEQ ID NO: 4681816 - DNA, 25 bp, Homo sapien
ttaaatataaatggactaaattctg

SEQ ID NO: 4681817 - DNA, 25 bp, Homo sapien
aatataaatggactaaattctgcaa

SEQ ID NO: 4681818 - DNA, 25 bp, Homo sapien
gagtaccaccgttgggcaaaatgag

SEQ ID NO: 4681819 - DNA, 25 bp, Homo sapien
tggagtaccaccgttgggcaaaatg

SEQ ID NO: 4681820 - DNA, 25 bp, Homo sapien
acctgctggagtaccaccgttgggc

SEQ ID NO: 4681821 - DNA, 25 bp, Homo sapien
tgctggagtaccaccgttgggcaaa

SEQ ID NO: 4681822 - DNA, 25 bp, Homo sapien
cttcttgggatcatcaactataacg

SEQ ID NO: 4681823 - DNA, 25 bp, Homo sapien
gagatctctagtctcaccatcaata

SEQ ID NO: 4681824 - DNA, 25 bp, Homo sapien
tttggtggtgatcctataggtgatg

SEQ ID NO: 4681825 - DNA, 25 bp, Homo sapien
tgtaagtctccattgtacacacatg

SEQ ID NO: 4681826 - DNA, 25 bp, Homo sapien
caattgcaatcaaggtgaacagagt

SEQ ID NO: 4681827 - DNA, 25 bp, Homo sapien
aaaggcaaaattcactgaggtagac

SEQ ID NO: 4681828 - DNA, 25 bp, Homo sapien
tcaagaagccacactcacaattgca

SEQ ID NO: 4681829 - DNA, 25 bp, Homo sapien
ggtgaacagagttgtacaataaggg

SEQ ID NO: 4681830 - DNA, 25 bp, Homo sapien
tcactgactacagggtaaaaaataa

SEQ ID NO: 4681831 - DNA, 25 bp, Homo sapien
cactgactacagggtaaaaaataag

SEQ ID NO: 4681832 - DNA, 25 bp, Homo sapien
ttcactgactacagggtaaaaaata

SEQ ID NO: 4681833 - DNA, 25 bp, Homo sapien
aaattctgaaacctggctctccctg

SEQ ID NO: 4681834 - DNA, 25 bp, Homo sapien
gaggctcgtgccatccagtgacata

SEQ ID NO: 4681835 - DNA, 25 bp, Homo sapien
tctggaagacccacgccatagttaa

SEQ ID NO: 4681836 - DNA, 25 bp, Homo sapien
tgagctgctcgcattccacaagcct

SEQ ID NO: 4681837 - DNA, 25 bp, Homo sapien
ctgaaactgggccagagacactact

SEQ ID NO: 4681838 - DNA, 25 bp, Homo sapien
aactgggccagagacactacttgga

SEQ ID NO: 4681839 - DNA, 25 bp, Homo sapien
gggccagagacactacttggaattt

SEQ ID NO: 4681840 - DNA, 25 bp, Homo sapien
cagctgaaactgggccagagacact

SEQ ID NO: 4681841 - DNA, 25 bp, Homo sapien
aatggatgcttgcacactctctgac

SEQ ID NO: 4681842 - DNA, 25 bp, Homo sapien
aaatggatgcttgcacactctctga

SEQ ID NO: 4681843 - DNA, 25 bp, Homo sapien
taaatggatgcttgcacactctctg

SEQ ID NO: 4681844 - DNA, 25 bp, Homo sapien
atggatgcttgcacactctctgacc

SEQ ID NO: 4681845 - DNA, 25 bp, Homo sapien
cagtcaaaatcctggtatcttcgac

SEQ ID NO: 4681846 - DNA, 25 bp, Homo sapien
gaatattctggcaggtcaaactcca

SEQ ID NO: 4681847 - DNA, 25 bp, Homo sapien
tcttcgacgaacagaatattctggc

SEQ ID NO: 4681848 - DNA, 25 bp, Homo sapien
tggcaggtcaaactccacccgagta

SEQ ID NO: 4681849 - DNA, 25 bp, Homo sapien
tgagaaacaagctgtagtgacttac

SEQ ID NO: 4681850 - DNA, 25 bp, Homo sapien
tgagtgaaccccttcaggaaagaca

SEQ ID NO: 4681851 - DNA, 25 bp, Homo sapien
ttaagggatgagagttgagtgaacc

SEQ ID NO: 4681852 - DNA, 25 bp, Homo sapien
gacaagtgagaaacaagctgtagtg

SEQ ID NO: 4681853 - DNA, 25 bp, Homo sapien
gcttccagtatcaacctcacaggca

SEQ ID NO: 4681854 - DNA, 25 bp, Homo sapien
tgcgcttccagtatcaacctcacag

SEQ ID NO: 4681855 - DNA, 25 bp, Homo sapien
ctttgcgcttccagtatcaacctca

SEQ ID NO: 4681856 - DNA, 25 bp, Homo sapien
agtatcaacctcacaggcaccagct

SEQ ID NO: 4681857 - DNA, 25 bp, Homo sapien
atccactttgggcattccggaaatt

SEQ ID NO: 4681858 - DNA, 25 bp, Homo sapien
aagatattctggatccactttgggc

SEQ ID NO: 4681859 - DNA, 25 bp, Homo sapien
gcattccggaaattcttccattctc

SEQ ID NO: 4681860 - DNA, 25 bp, Homo sapien
agatattctggatccactttgggca

SEQ ID NO: 4681861 - DNA, 25 bp, Homo sapien
ctaccaactgcttctatccagacca

SEQ ID NO: 4681862 - DNA, 25 bp, Homo sapien
tctatccagaccatcagaaaccaca

SEQ ID NO: 4681863 - DNA, 25 bp, Homo sapien
ttctatccagaccatcagaaaccac

SEQ ID NO: 4681864 - DNA, 25 bp, Homo sapien
aacgggactcatcgtactgaatctc

SEQ ID NO: 4681865 - DNA, 25 bp, Homo sapien
tcaacgggactcatcgtactgaatc

SEQ ID NO: 4681866 - DNA, 25 bp, Homo sapien
cgggactcatcgtactgaatctctt

SEQ ID NO: 4681867 - DNA, 25 bp, Homo sapien
gactcatcgtactgaatctcttcaa

SEQ ID NO: 4681868 - DNA, 25 bp, Homo sapien
aagttccctgtcaacggatccctga

SEQ ID NO: 4681869 - DNA, 25 bp, Homo sapien
ggatccctgatcagatctccgctta

SEQ ID NO: 4681870 - DNA, 25 bp, Homo sapien
cactcaacttgacagagagaacact

SEQ ID NO: 4681871 - DNA, 25 bp, Homo sapien
tagtaccagcacttattaatctacc

SEQ ID NO: 4681872 - DNA, 25 bp, Homo sapien
cagcacaggatggtccgtaattctt

SEQ ID NO: 4681873 - DNA, 25 bp, Homo sapien
actcttctgaaaaacgatccacaac

SEQ ID NO: 4681874 - DNA, 25 bp, Homo sapien
gacagcacaggatggtccgtaattc

SEQ ID NO: 4681875 - DNA, 25 bp, Homo sapien
tctgaaaaacgatccacaacacctt

SEQ ID NO: 4681876 - DNA, 25 bp, Homo sapien
aaaccaaacagatgggactagaggg

SEQ ID NO: 4681877 - DNA, 25 bp, Homo sapien
caaacagatgggactagagggaagc

SEQ ID NO: 4681878 - DNA, 25 bp, Homo sapien
ccaaacagatgggactagagggaag

SEQ ID NO: 4681879 - DNA, 25 bp, Homo sapien
aacagatgggactagagggaagcta

SEQ ID NO: 4681880 - DNA, 25 bp, Homo sapien
gagtcctcagcttgtagccgccagt

SEQ ID NO: 4681881 - DNA, 25 bp, Homo sapien
tgcttgactgactcgcccattctgg

SEQ ID NO: 4681882 - DNA, 25 bp, Homo sapien
tatggcagcaaactcaagcggccga

SEQ ID NO: 4681883 - DNA, 25 bp, Homo sapien
tatctaagtagtcacctatggcagc

SEQ ID NO: 4681884 - DNA, 25 bp, Homo sapien
tgaacagggaacagaaactaattaa

SEQ ID NO: 4681885 - DNA, 25 bp, Homo sapien
aactaattaaaatctggctgggtag

SEQ ID NO: 4681886 - DNA, 25 bp, Homo sapien
taaaatctggctgggtagcagttgc

SEQ ID NO: 4681887 - DNA, 25 bp, Homo sapien
ctgaacagggaacagaaactaatta

SEQ ID NO: 4681888 - DNA, 25 bp, Homo sapien
tccaaggcgctccatgtggagtaca

SEQ ID NO: 4681889 - DNA, 25 bp, Homo sapien
gtacacaggcccgtattctctcagc

SEQ ID NO: 4681890 - DNA, 25 bp, Homo sapien
cttcatggagtcagagtataaaata

SEQ ID NO: 4681891 - DNA, 25 bp, Homo sapien
taaggctgtagagcagttcccaatg

SEQ ID NO: 4681892 - DNA, 25 bp, Homo sapien
tggctgtgatatcttctcttttgga

SEQ ID NO: 4681893 - DNA, 25 bp, Homo sapien
ccccatcagtgtttcattcaatagg

SEQ ID NO: 4681894 - DNA, 25 bp, Homo sapien
caaatcttcccttacatatctggtg

SEQ ID NO: 4681895 - DNA, 25 bp, Homo sapien
tgtctgtccactcatccaagaggga

SEQ ID NO: 4681896 - DNA, 25 bp, Homo sapien
caagtttttcagcttcaaagctttg

SEQ ID NO: 4681897 - DNA, 25 bp, Homo sapien
tcagcttcaaagctttgtggaagag

SEQ ID NO: 4681898 - DNA, 25 bp, Homo sapien
tgtggaagaggggagctaggatgca

SEQ ID NO: 4681899 - DNA, 25 bp, Homo sapien
ttttcagcttcaaagctttgtggaa

SEQ ID NO: 4681900 - DNA, 25 bp, Homo sapien
gggcggtcttccttccgcagagcca

SEQ ID NO: 4681901 - DNA, 25 bp, Homo sapien
ttggggcggtcttccttccgcagag

SEQ ID NO: 4681902 - DNA, 25 bp, Homo sapien
gcggtcttccttccgcagagccaca

SEQ ID NO: 4681903 - DNA, 25 bp, Homo sapien
cttggtccctcttcttcaatacact

SEQ ID NO: 4681904 - DNA, 25 bp, Homo sapien
aacatcatcaacgtagcccagccgg

SEQ ID NO: 4681905 - DNA, 25 bp, Homo sapien
aaaggacaacatcatcaacgtagcc

SEQ ID NO: 4681906 - DNA, 25 bp, Homo sapien
gtgaaaaaggacaacatcatcaacg

SEQ ID NO: 4681907 - DNA, 25 bp, Homo sapien
cactgaccactcttagtcatacaga

SEQ ID NO: 4681908 - DNA, 25 bp, Homo sapien
cacccagacccgcaggaatgtgagg

SEQ ID NO: 4681909 - DNA, 25 bp, Homo sapien
tcaggacggactagtcattttcacg
